United States Patent Application Publication US 2015/0141320 A1 - sequence listing, part 52

SEQ ID NO: 2068762 - DNA, 15 bp, Homo sapiens
aaggtgtccgcagat

SEQ ID NO: 2068763 - DNA, 15 bp, Homo sapiens
aggtgtccgcagatt

SEQ ID NO: 2068764 - DNA, 15 bp, Homo sapiens
ggtgtccgcagattg

SEQ ID NO: 2068765 - DNA, 15 bp, Homo sapiens
gtgtccgcagattgt

SEQ ID NO: 2068766 - DNA, 15 bp, Homo sapiens
tgtccgcagattgta

SEQ ID NO: 2068767 - DNA, 15 bp, Homo sapiens
gtccgcagattgtac

SEQ ID NO: 2068768 - DNA, 15 bp, Homo sapiens
tccgcagattgtact

SEQ ID NO: 2068769 - DNA, 15 bp, Homo sapiens
ccgcagattgtactc

SEQ ID NO: 2068770 - DNA, 15 bp, Homo sapiens
cgcagattgtactct

SEQ ID NO: 2068771 - DNA, 15 bp, Homo sapiens
gcagattgtactctc

SEQ ID NO: 2068772 - DNA, 15 bp, Homo sapiens
cagattgtactctct

SEQ ID NO: 2068773 - DNA, 15 bp, Homo sapiens
agattgtactctctc

SEQ ID NO: 2068774 - DNA, 15 bp, Homo sapiens
gattgtactctctcc

SEQ ID NO: 2068775 - DNA, 15 bp, Homo sapiens
attgtactctctcca

SEQ ID NO: 2068776 - DNA, 15 bp, Homo sapiens
ttgtactctctccag

SEQ ID NO: 2068777 - DNA, 15 bp, Homo sapiens
tgtactctctccaga

SEQ ID NO: 2068778 - DNA, 15 bp, Homo sapiens
gtactctctccagag

SEQ ID NO: 2068779 - DNA, 15 bp, Homo sapiens
tactctctccagagg

SEQ ID NO: 2068780 - DNA, 15 bp, Homo sapiens
actctctccagaggc

SEQ ID NO: 2068781 - DNA, 15 bp, Homo sapiens
ctctctccagaggct

SEQ ID NO: 2068782 - DNA, 15 bp, Homo sapiens
tctctccagaggctc

SEQ ID NO: 2068783 - DNA, 15 bp, Homo sapiens
ctctccagaggctct

SEQ ID NO: 2068784 - DNA, 15 bp, Homo sapiens
tctccagaggctctg

SEQ ID NO: 2068785 - DNA, 15 bp, Homo sapiens
ctccagaggctctgg

SEQ ID NO: 2068786 - DNA, 15 bp, Homo sapiens
tccagaggctctggg

SEQ ID NO: 2068787 - DNA, 15 bp, Homo sapiens
ccagaggctctgggg

SEQ ID NO: 2068788 - DNA, 15 bp, Homo sapiens
cagaggctctgggga

SEQ ID NO: 2068789 - DNA, 15 bp, Homo sapiens
agaggctctggggag

SEQ ID NO: 2068790 - DNA, 15 bp, Homo sapiens
gaggctctggggaga

SEQ ID NO: 2068791 - DNA, 15 bp, Homo sapiens
aggctctggggagat

SEQ ID NO: 2068792 - DNA, 15 bp, Homo sapiens
ggctctggggagatt

SEQ ID NO: 2068793 - DNA, 15 bp, Homo sapiens
gctctggggagattc

SEQ ID NO: 2068794 - DNA, 15 bp, Homo sapiens
ctctggggagattct

SEQ ID NO: 2068795 - DNA, 15 bp, Homo sapiens
tctggggagattctg

SEQ ID NO: 2068796 - DNA, 15 bp, Homo sapiens
ctggggagattctgt

SEQ ID NO: 2068797 - DNA, 15 bp, Homo sapiens
tggggagattctgtt

SEQ ID NO: 2068798 - DNA, 15 bp, Homo sapiens
ggggagattctgttc

SEQ ID NO: 2068799 - DNA, 15 bp, Homo sapiens
gggagattctgttcc

SEQ ID NO: 2068800 - DNA, 15 bp, Homo sapiens
ggagattctgttcct

SEQ ID NO: 2068801 - DNA, 15 bp, Homo sapiens
gagattctgttcctt

SEQ ID NO: 2068802 - DNA, 15 bp, Homo sapiens
agattctgttccttg

SEQ ID NO: 2068803 - DNA, 15 bp, Homo sapiens
gattctgttccttgc

SEQ ID NO: 2068804 - DNA, 15 bp, Homo sapiens
attctgttccttgct

SEQ ID NO: 2068805 - DNA, 15 bp, Homo sapiens
ttctgttccttgctt

SEQ ID NO: 2068806 - DNA, 15 bp, Homo sapiens
tctgttccttgcttc

SEQ ID NO: 2068807 - DNA, 15 bp, Homo sapiens
ctgttccttgcttct

SEQ ID NO: 2068808 - DNA, 15 bp, Homo sapiens
tgttccttgcttctt

SEQ ID NO: 2068809 - DNA, 15 bp, Homo sapiens
gttccttgcttcttc

SEQ ID NO: 2068810 - DNA, 15 bp, Homo sapiens
ttccttgcttcttcc

SEQ ID NO: 2068811 - DNA, 15 bp, Homo sapiens
tccttgcttcttcca

SEQ ID NO: 2068812 - DNA, 15 bp, Homo sapiens
ccttgcttcttccag

SEQ ID NO: 2068813 - DNA, 15 bp, Homo sapiens
cttgcttcttccagc

SEQ ID NO: 2068814 - DNA, 15 bp, Homo sapiens
ttgcttcttccagct

SEQ ID NO: 2068815 - DNA, 15 bp, Homo sapiens
tgcttcttccagctt

SEQ ID NO: 2068816 - DNA, 15 bp, Homo sapiens
gcttcttccagcttc

SEQ ID NO: 2068817 - DNA, 15 bp, Homo sapiens
cttcttccagcttct

SEQ ID NO: 2068818 - DNA, 15 bp, Homo sapiens
ttcttccagcttctg

SEQ ID NO: 2068819 - DNA, 15 bp, Homo sapiens
tcttccagcttctgg

SEQ ID NO: 2068820 - DNA, 15 bp, Homo sapiens
cttccagcttctgga

SEQ ID NO: 2068821 - DNA, 15 bp, Homo sapiens
ttccagcttctggag

SEQ ID NO: 2068822 - DNA, 15 bp, Homo sapiens
tccagcttctggagg

SEQ ID NO: 2068823 - DNA, 15 bp, Homo sapiens
ccagcttctggaggc

SEQ ID NO: 2068824 - DNA, 15 bp, Homo sapiens
cagcttctggaggct

SEQ ID NO: 2068825 - DNA, 15 bp, Homo sapiens
agcttctggaggctt

SEQ ID NO: 2068826 - DNA, 15 bp, Homo sapiens
gcttctggaggcttt

SEQ ID NO: 2068827 - DNA, 15 bp, Homo sapiens
cttctggaggctttt

SEQ ID NO: 2068828 - DNA, 15 bp, Homo sapiens
ttctggaggcttttg

SEQ ID NO: 2068829 - DNA, 15 bp, Homo sapiens
tctggaggcttttgg

SEQ ID NO: 2068830 - DNA, 15 bp, Homo sapiens
ctggaggcttttggc

SEQ ID NO: 2068831 - DNA, 15 bp, Homo sapiens
tggaggcttttggca

SEQ ID NO: 2068832 - DNA, 15 bp, Homo sapiens
ggaggcttttggcat

SEQ ID NO: 2068833 - DNA, 15 bp, Homo sapiens
gaggcttttggcatt

SEQ ID NO: 2068834 - DNA, 15 bp, Homo sapiens
aggcttttggcattc

SEQ ID NO: 2068835 - DNA, 15 bp, Homo sapiens
ggcttttggcattca

SEQ ID NO: 2068836 - DNA, 15 bp, Homo sapiens
gcttttggcattcat

SEQ ID NO: 2068837 - DNA, 15 bp, Homo sapiens
cttttggcattcatt

SEQ ID NO: 2068838 - DNA, 15 bp, Homo sapiens
ttttggcattcattg

SEQ ID NO: 2068839 - DNA, 15 bp, Homo sapiens
tttggcattcattgg

SEQ ID NO: 2068840 - DNA, 15 bp, Homo sapiens
ttggcattcattggc

SEQ ID NO: 2068841 - DNA, 15 bp, Homo sapiens
tggcattcattggct

SEQ ID NO: 2068842 - DNA, 15 bp, Homo sapiens
ggcattcattggctt

SEQ ID NO: 2068843 - DNA, 15 bp, Homo sapiens
gcattcattggcttg

SEQ ID NO: 2068844 - DNA, 15 bp, Homo sapiens
cattcattggcttgt

SEQ ID NO: 2068845 - DNA, 15 bp, Homo sapiens
attcattggcttgtg

SEQ ID NO: 2068846 - DNA, 15 bp, Homo sapiens
ttcattggcttgtga

SEQ ID NO: 2068847 - DNA, 15 bp, Homo sapiens
tcattggcttgtgac

SEQ ID NO: 2068848 - DNA, 15 bp, Homo sapiens
cattggcttgtgaca

SEQ ID NO: 2068849 - DNA, 15 bp, Homo sapiens
attggcttgtgacac

SEQ ID NO: 2068850 - DNA, 15 bp, Homo sapiens
ttggcttgtgacaca

SEQ ID NO: 2068851 - DNA, 15 bp, Homo sapiens
tggcttgtgacacat

SEQ ID NO: 2068852 - DNA, 15 bp, Homo sapiens
ggcttgtgacacatt

SEQ ID NO: 2068853 - DNA, 15 bp, Homo sapiens
gcttgtgacacattt

SEQ ID NO: 2068854 - DNA, 15 bp, Homo sapiens
cttgtgacacatttc

SEQ ID NO: 2068855 - DNA, 15 bp, Homo sapiens
ttgtgacacatttct

SEQ ID NO: 2068856 - DNA, 15 bp, Homo sapiens
tgtgacacatttctc

SEQ ID NO: 2068857 - DNA, 15 bp, Homo sapiens
gtgacacatttctcc

SEQ ID NO: 2068858 - DNA, 15 bp, Homo sapiens
tgacacatttctcca

SEQ ID NO: 2068859 - DNA, 15 bp, Homo sapiens
gacacatttctccaa

SEQ ID NO: 2068860 - DNA, 15 bp, Homo sapiens
acacatttctccaat

SEQ ID NO: 2068861 - DNA, 15 bp, Homo sapiens
cacatttctccaatc

SEQ ID NO: 2068862 - DNA, 15 bp, Homo sapiens
acatttctccaatct

SEQ ID NO: 2068863 - DNA, 15 bp, Homo sapiens
catttctccaatctg

SEQ ID NO: 2068864 - DNA, 15 bp, Homo sapiens
atttctccaatctgt

SEQ ID NO: 2068865 - DNA, 15 bp, Homo sapiens
tttctccaatctgtc

SEQ ID NO: 2068866 - DNA, 15 bp, Homo sapiens
ttctccaatctgtct

SEQ ID NO: 2068867 - DNA, 15 bp, Homo sapiens
tctccaatctgtctc

SEQ ID NO: 2068868 - DNA, 15 bp, Homo sapiens
ctccaatctgtctcc

SEQ ID NO: 2068869 - DNA, 15 bp, Homo sapiens
tccaatctgtctcca

SEQ ID NO: 2068870 - DNA, 15 bp, Homo sapiens
ccaatctgtctccat

SEQ ID NO: 2068871 - DNA, 15 bp, Homo sapiens
caatctgtctccatt

SEQ ID NO: 2068872 - DNA, 15 bp, Homo sapiens
aatctgtctccattt

SEQ ID NO: 2068873 - DNA, 15 bp, Homo sapiens
atctgtctccatttc

SEQ ID NO: 2068874 - DNA, 15 bp, Homo sapiens
tctgtctccatttcc

SEQ ID NO: 2068875 - DNA, 15 bp, Homo sapiens
ctgtctccatttcca

SEQ ID NO: 2068876 - DNA, 15 bp, Homo sapiens
tgtctccatttccac

SEQ ID NO: 2068877 - DNA, 15 bp, Homo sapiens
gtctccatttccaca

SEQ ID NO: 2068878 - DNA, 15 bp, Homo sapiens
tctccatttccacat

SEQ ID NO: 2068879 - DNA, 15 bp, Homo sapiens
ctccatttccacatg

SEQ ID NO: 2068880 - DNA, 15 bp, Homo sapiens
tccatttccacatgg

SEQ ID NO: 2068881 - DNA, 15 bp, Homo sapiens
ccatttccacatggc

SEQ ID NO: 2068882 - DNA, 15 bp, Homo sapiens
catttccacatggcc

SEQ ID NO: 2068883 - DNA, 15 bp, Homo sapiens
atttccacatggcct

SEQ ID NO: 2068884 - DNA, 15 bp, Homo sapiens
tttccacatggcctt

SEQ ID NO: 2068885 - DNA, 15 bp, Homo sapiens
ttccacatggccttc

SEQ ID NO: 2068886 - DNA, 15 bp, Homo sapiens
tccacatggccttct

SEQ ID NO: 2068887 - DNA, 15 bp, Homo sapiens
ccacatggccttctt

SEQ ID NO: 2068888 - DNA, 15 bp, Homo sapiens
cacatggccttcttt

SEQ ID NO: 2068889 - DNA, 15 bp, Homo sapiens
acatggccttctttg

SEQ ID NO: 2068890 - DNA, 15 bp, Homo sapiens
catggccttctttgt

SEQ ID NO: 2068891 - DNA, 15 bp, Homo sapiens
atggccttctttgta

SEQ ID NO: 2068892 - DNA, 15 bp, Homo sapiens
tggccttctttgtat

SEQ ID NO: 2068893 - DNA, 15 bp, Homo sapiens
ggccttctttgtatg

SEQ ID NO: 2068894 - DNA, 15 bp, Homo sapiens
gccttctttgtatgt

SEQ ID NO: 2068895 - DNA, 15 bp, Homo sapiens
ccttctttgtatgtg

SEQ ID NO: 2068896 - DNA, 15 bp, Homo sapiens
cttctttgtatgtgt

SEQ ID NO: 2068897 - DNA, 15 bp, Homo sapiens
ttctttgtatgtgtt

SEQ ID NO: 2068898 - DNA, 15 bp, Homo sapiens
tctttgtatgtgttt

SEQ ID NO: 2068899 - DNA, 15 bp, Homo sapiens
ctttgtatgtgtttc

SEQ ID NO: 2068900 - DNA, 15 bp, Homo sapiens
tttgtatgtgtttct

SEQ ID NO: 2068901 - DNA, 15 bp, Homo sapiens
ttgtatgtgtttctc

SEQ ID NO: 2068902 - DNA, 15 bp, Homo sapiens
tgtatgtgtttctct

SEQ ID NO: 2068903 - DNA, 15 bp, Homo sapiens
gtatgtgtttctctt

SEQ ID NO: 2068904 - DNA, 15 bp, Homo sapiens
tatgtgtttctcttt

SEQ ID NO: 2068905 - DNA, 15 bp, Homo sapiens
atgtgtttctctttg

SEQ ID NO: 2068906 - DNA, 15 bp, Homo sapiens
tgtgtttctctttgt

SEQ ID NO: 2068907 - DNA, 15 bp, Homo sapiens
gtgtttctctttgtc

SEQ ID NO: 2068908 - DNA, 15 bp, Homo sapiens
tgtttctctttgtct

SEQ ID NO: 2068909 - DNA, 15 bp, Homo sapiens
gtttctctttgtctc

SEQ ID NO: 2068910 - DNA, 15 bp, Homo sapiens
tttctctttgtctct

SEQ ID NO: 2068911 - DNA, 15 bp, Homo sapiens
ttctctttgtctctt

SEQ ID NO: 2068912 - DNA, 15 bp, Homo sapiens
tctctttgtctctta

SEQ ID NO: 2068913 - DNA, 15 bp, Homo sapiens
ctctttgtctcttat

SEQ ID NO: 2068914 - DNA, 15 bp, Homo sapiens
tctttgtctcttata

SEQ ID NO: 2068915 - DNA, 15 bp, Homo sapiens
ctttgtctcttataa

SEQ ID NO: 2068916 - DNA, 15 bp, Homo sapiens
tttgtctcttataaa

SEQ ID NO: 2068917 - DNA, 15 bp, Homo sapiens
ttgtctcttataaag

SEQ ID NO: 2068918 - DNA, 15 bp, Homo sapiens
tgtctcttataaaga

SEQ ID NO: 2068919 - DNA, 15 bp, Homo sapiens
gtctcttataaagat

SEQ ID NO: 2068920 - DNA, 15 bp, Homo sapiens
tctcttataaagatg

SEQ ID NO: 2068921 - DNA, 15 bp, Homo sapiens
ctcttataaagatgc

SEQ ID NO: 2068922 - DNA, 15 bp, Homo sapiens
tcttataaagatgct

SEQ ID NO: 2068923 - DNA, 15 bp, Homo sapiens
cttataaagatgctg

SEQ ID NO: 2068924 - DNA, 15 bp, Homo sapiens
ttataaagatgctgt

SEQ ID NO: 2068925 - DNA, 15 bp, Homo sapiens
tataaagatgctgtg

SEQ ID NO: 2068926 - DNA, 15 bp, Homo sapiens
ataaagatgctgtga

SEQ ID NO: 2068927 - DNA, 15 bp, Homo sapiens
taaagatgctgtgat

SEQ ID NO: 2068928 - DNA, 15 bp, Homo sapiens
aaagatgctgtgatg

SEQ ID NO: 2068929 - DNA, 15 bp, Homo sapiens
aagatgctgtgatga

SEQ ID NO: 2068930 - DNA, 15 bp, Homo sapiens
agatgctgtgatgac

SEQ ID NO: 2068931 - DNA, 15 bp, Homo sapiens
gatgctgtgatgaca

SEQ ID NO: 2068932 - DNA, 15 bp, Homo sapiens
atgctgtgatgacac

SEQ ID NO: 2068933 - DNA, 15 bp, Homo sapiens
tgctgtgatgacact

SEQ ID NO: 2068934 - DNA, 15 bp, Homo sapiens
gctgtgatgacactg

SEQ ID NO: 2068935 - DNA, 15 bp, Homo sapiens
ctgtgatgacactga

SEQ ID NO: 2068936 - DNA, 15 bp, Homo sapiens
tgtgatgacactgaa

SEQ ID NO: 2068937 - DNA, 15 bp, Homo sapiens
gtgatgacactgaag

SEQ ID NO: 2068938 - DNA, 15 bp, Homo sapiens
tgatgacactgaagt

SEQ ID NO: 2068939 - DNA, 15 bp, Homo sapiens
gatgacactgaagtt

SEQ ID NO: 2068940 - DNA, 15 bp, Homo sapiens
atgacactgaagttc

SEQ ID NO: 2068941 - DNA, 15 bp, Homo sapiens
tgacactgaagttcc

SEQ ID NO: 2068942 - DNA, 15 bp, Homo sapiens
gacactgaagttcca

SEQ ID NO: 2068943 - DNA, 15 bp, Homo sapiens
acactgaagttccac

SEQ ID NO: 2068944 - DNA, 15 bp, Homo sapiens
cactgaagttccact

SEQ ID NO: 2068945 - DNA, 15 bp, Homo sapiens
actgaagttccactc

SEQ ID NO: 2068946 - DNA, 15 bp, Homo sapiens
ctgaagttccactca

SEQ ID NO: 2068947 - DNA, 15 bp, Homo sapiens
tgaagttccactcag

SEQ ID NO: 2068948 - DNA, 15 bp, Homo sapiens
gaagttccactcaga

SEQ ID NO: 2068949 - DNA, 15 bp, Homo sapiens
aagttccactcagat

SEQ ID NO: 2068950 - DNA, 15 bp, Homo sapiens
agttccactcagata

SEQ ID NO: 2068951 - DNA, 15 bp, Homo sapiens
gttccactcagataa

SEQ ID NO: 2068952 - DNA, 15 bp, Homo sapiens
ttccactcagataat

SEQ ID NO: 2068953 - DNA, 15 bp, Homo sapiens
tccactcagataatc

SEQ ID NO: 2068954 - DNA, 15 bp, Homo sapiens
ccactcagataatcc

SEQ ID NO: 2068955 - DNA, 15 bp, Homo sapiens
cactcagataatcca

SEQ ID NO: 2068956 - DNA, 15 bp, Homo sapiens
actcagataatccag

SEQ ID NO: 2068957 - DNA, 15 bp, Homo sapiens
ctcagataatccagg

SEQ ID NO: 2068958 - DNA, 15 bp, Homo sapiens
tcagataatccaggg

SEQ ID NO: 2068959 - DNA, 15 bp, Homo sapiens
cagataatccagggt

SEQ ID NO: 2068960 - DNA, 15 bp, Homo sapiens
agataatccagggtg

SEQ ID NO: 2068961 - DNA, 15 bp, Homo sapiens
gataatccagggtga

SEQ ID NO: 2068962 - DNA, 15 bp, Homo sapiens
ataatccagggtgat

SEQ ID NO: 2068963 - DNA, 15 bp, Homo sapiens
taatccagggtgatc

SEQ ID NO: 2068964 - DNA, 15 bp, Homo sapiens
aatccagggtgatct

SEQ ID NO: 2068965 - DNA, 15 bp, Homo sapiens
atccagggtgatctc

SEQ ID NO: 2068966 - DNA, 15 bp, Homo sapiens
tccagggtgatctca

SEQ ID NO: 2068967 - DNA, 15 bp, Homo sapiens
ccagggtgatctcat

SEQ ID NO: 2068968 - DNA, 15 bp, Homo sapiens
cagggtgatctcatc

SEQ ID NO: 2068969 - DNA, 15 bp, Homo sapiens
agggtgatctcatct

SEQ ID NO: 2068970 - DNA, 15 bp, Homo sapiens
gggtgatctcatctc

SEQ ID NO: 2068971 - DNA, 15 bp, Homo sapiens
ggtgatctcatctca

SEQ ID NO: 2068972 - DNA, 15 bp, Homo sapiens
gtgatctcatctcaa

SEQ ID NO: 2068973 - DNA, 15 bp, Homo sapiens
tgatctcatctcaag

SEQ ID NO: 2068974 - DNA, 15 bp, Homo sapiens
gatctcatctcaaga

SEQ ID NO: 2068975 - DNA, 15 bp, Homo sapiens
atctcatctcaagat

SEQ ID NO: 2068976 - DNA, 15 bp, Homo sapiens
tctcatctcaagatt

SEQ ID NO: 2068977 - DNA, 15 bp, Homo sapiens
ctcatctcaagattc

SEQ ID NO: 2068978 - DNA, 15 bp, Homo sapiens
tcatctcaagattct

SEQ ID NO: 2068979 - DNA, 15 bp, Homo sapiens
catctcaagattctc

SEQ ID NO: 2068980 - DNA, 15 bp, Homo sapiens
atctcaagattctca

SEQ ID NO: 2068981 - DNA, 15 bp, Homo sapiens
tctcaagattctcaa

SEQ ID NO: 2068982 - DNA, 15 bp, Homo sapiens
ctcaagattctcaat

SEQ ID NO: 2068983 - DNA, 15 bp, Homo sapiens
tcaagattctcaatt

SEQ ID NO: 2068984 - DNA, 15 bp, Homo sapiens
caagattctcaatta

SEQ ID NO: 2068985 - DNA, 15 bp, Homo sapiens
aagattctcaattat

SEQ ID NO: 2068986 - DNA, 15 bp, Homo sapiens
agattctcaattata

SEQ ID NO: 2068987 - DNA, 15 bp, Homo sapiens
gattctcaattatat

SEQ ID NO: 2068988 - DNA, 15 bp, Homo sapiens
attctcaattatatc

SEQ ID NO: 2068989 - DNA, 15 bp, Homo sapiens
ttctcaattatatct

SEQ ID NO: 2068990 - DNA, 15 bp, Homo sapiens
tctcaattatatctg

SEQ ID NO: 2068991 - DNA, 15 bp, Homo sapiens
ctcaattatatctgc

SEQ ID NO: 2068992 - DNA, 15 bp, Homo sapiens
tcaattatatctgca

SEQ ID NO: 2068993 - DNA, 15 bp, Homo sapiens
caattatatctgcaa

SEQ ID NO: 2068994 - DNA, 15 bp, Homo sapiens
aattatatctgcaaa

SEQ ID NO: 2068995 - DNA, 15 bp, Homo sapiens
attatatctgcaaag

SEQ ID NO: 2068996 - DNA, 15 bp, Homo sapiens
ttatatctgcaaaga

SEQ ID NO: 2068997 - DNA, 15 bp, Homo sapiens
tatatctgcaaagac

SEQ ID NO: 2068998 - DNA, 15 bp, Homo sapiens
atatctgcaaagact

SEQ ID NO: 2068999 - DNA, 15 bp, Homo sapiens
tatctgcaaagactc

SEQ ID NO: 2069000 - DNA, 15 bp, Homo sapiens
atctgcaaagactct

SEQ ID NO: 2069001 - DNA, 15 bp, Homo sapiens
tctgcaaagactctt

SEQ ID NO: 2069002 - DNA, 15 bp, Homo sapiens
ctgcaaagactcttt

SEQ ID NO: 2069003 - DNA, 15 bp, Homo sapiens
tgcaaagactctttt

SEQ ID NO: 2069004 - DNA, 15 bp, Homo sapiens
gcaaagactcttttt

SEQ ID NO: 2069005 - DNA, 15 bp, Homo sapiens
caaagactctttttc

SEQ ID NO: 2069006 - DNA, 15 bp, Homo sapiens
aaagactctttttcc

SEQ ID NO: 2069007 - DNA, 15 bp, Homo sapiens
aagactctttttcca

SEQ ID NO: 2069008 - DNA, 15 bp, Homo sapiens
agactctttttccaa

SEQ ID NO: 2069009 - DNA, 15 bp, Homo sapiens
gactctttttccaaa

SEQ ID NO: 2069010 - DNA, 15 bp, Homo sapiens
actctttttccaaat

SEQ ID NO: 2069011 - DNA, 15 bp, Homo sapiens
ctctttttccaaata

SEQ ID NO: 2069012 - DNA, 15 bp, Homo sapiens
tctttttccaaataa

SEQ ID NO: 2069013 - DNA, 15 bp, Homo sapiens
ctttttccaaataag

SEQ ID NO: 2069014 - DNA, 15 bp, Homo sapiens
tttttccaaataagg

SEQ ID NO: 2069015 - DNA, 15 bp, Homo sapiens
ttttccaaataaggt

SEQ ID NO: 2069016 - DNA, 15 bp, Homo sapiens
tttccaaataaggta

SEQ ID NO: 2069017 - DNA, 15 bp, Homo sapiens
ttccaaataaggtaa

SEQ ID NO: 2069018 - DNA, 15 bp, Homo sapiens
tccaaataaggtaac

SEQ ID NO: 2069019 - DNA, 15 bp, Homo sapiens
ccaaataaggtaaca

SEQ ID NO: 2069020 - DNA, 15 bp, Homo sapiens
caaataaggtaacat

SEQ ID NO: 2069021 - DNA, 15 bp, Homo sapiens
aaataaggtaacatt

SEQ ID NO: 2069022 - DNA, 15 bp, Homo sapiens
aataaggtaacattc

SEQ ID NO: 2069023 - DNA, 15 bp, Homo sapiens
ataaggtaacattca

SEQ ID NO: 2069024 - DNA, 15 bp, Homo sapiens
taaggtaacattcaa

SEQ ID NO: 2069025 - DNA, 15 bp, Homo sapiens
aaggtaacattcaaa

SEQ ID NO: 2069026 - DNA, 15 bp, Homo sapiens
aggtaacattcaaag

SEQ ID NO: 2069027 - DNA, 15 bp, Homo sapiens
ggtaacattcaaagg

SEQ ID NO: 2069028 - DNA, 15 bp, Homo sapiens
gtaacattcaaaggt

SEQ ID NO: 2069029 - DNA, 15 bp, Homo sapiens
taacattcaaaggtt

SEQ ID NO: 2069030 - DNA, 15 bp, Homo sapiens
aacattcaaaggttc

SEQ ID NO: 2069031 - DNA, 15 bp, Homo sapiens
acattcaaaggttct

SEQ ID NO: 2069032 - DNA, 15 bp, Homo sapiens
cattcaaaggttcta

SEQ ID NO: 2069033 - DNA, 15 bp, Homo sapiens
attcaaaggttctag

SEQ ID NO: 2069034 - DNA, 15 bp, Homo sapiens
ttcaaaggttctagt

SEQ ID NO: 2069035 - DNA, 15 bp, Homo sapiens
tcaaaggttctagtg

SEQ ID NO: 2069036 - DNA, 15 bp, Homo sapiens
caaaggttctagtga

SEQ ID NO: 2069037 - DNA, 15 bp, Homo sapiens
aaaggttctagtgat

SEQ ID NO: 2069038 - DNA, 15 bp, Homo sapiens
aaggttctagtgatt

SEQ ID NO: 2069039 - DNA, 15 bp, Homo sapiens
aggttctagtgatta

SEQ ID NO: 2069040 - DNA, 15 bp, Homo sapiens
ggttctagtgattag

SEQ ID NO: 2069041 - DNA, 15 bp, Homo sapiens
gttctagtgattagg

SEQ ID NO: 2069042 - DNA, 15 bp, Homo sapiens
ttctagtgattagga

SEQ ID NO: 2069043 - DNA, 15 bp, Homo sapiens
tctagtgattaggat

SEQ ID NO: 2069044 - DNA, 15 bp, Homo sapiens
ctagtgattaggatg

SEQ ID NO: 2069045 - DNA, 15 bp, Homo sapiens
tagtgattaggatgt

SEQ ID NO: 2069046 - DNA, 15 bp, Homo sapiens
agtgattaggatgtg

SEQ ID NO: 2069047 - DNA, 15 bp, Homo sapiens
gtgattaggatgtgg

SEQ ID NO: 2069048 - DNA, 15 bp, Homo sapiens
tgattaggatgtgga

SEQ ID NO: 2069049 - DNA, 15 bp, Homo sapiens
gattaggatgtggac

SEQ ID NO: 2069050 - DNA, 15 bp, Homo sapiens
attaggatgtggact

SEQ ID NO: 2069051 - DNA, 15 bp, Homo sapiens
ttaggatgtggactt

SEQ ID NO: 2069052 - DNA, 15 bp, Homo sapiens
taggatgtggactta

SEQ ID NO: 2069053 - DNA, 15 bp, Homo sapiens
aggatgtggacttat

SEQ ID NO: 2069054 - DNA, 15 bp, Homo sapiens
ggatgtggacttatc

SEQ ID NO: 2069055 - DNA, 15 bp, Homo sapiens
gatgtggacttatct

SEQ ID NO: 2069056 - DNA, 15 bp, Homo sapiens
atgtggacttatctt

SEQ ID NO: 2069057 - DNA, 15 bp, Homo sapiens
tgtggacttatcttt

SEQ ID NO: 2069058 - DNA, 15 bp, Homo sapiens
gtggacttatctttc

SEQ ID NO: 2069059 - DNA, 15 bp, Homo sapiens
tggacttatctttcc

SEQ ID NO: 2069060 - DNA, 15 bp, Homo sapiens
ggacttatctttcca

SEQ ID NO: 2069061 - DNA, 15 bp, Homo sapiens
gacttatctttccag

SEQ ID NO: 2069062 - DNA, 15 bp, Homo sapiens
cttatctttccagaa

SEQ ID NO: 2069063 - DNA, 15 bp, Homo sapiens
ttatctttccagaag

SEQ ID NO: 2069064 - DNA, 15 bp, Homo sapiens
tatctttccagaagc

SEQ ID NO: 2069065 - DNA, 15 bp, Homo sapiens
atctttccagaagcc

SEQ ID NO: 2069066 - DNA, 15 bp, Homo sapiens
tctttccagaagcca

SEQ ID NO: 2069067 - DNA, 15 bp, Homo sapiens
ctttccagaagccac

SEQ ID NO: 2069068 - DNA, 15 bp, Homo sapiens
tttccagaagccaca

SEQ ID NO: 2069069 - DNA, 15 bp, Homo sapiens
ttccagaagccacaa

SEQ ID NO: 2069070 - DNA, 15 bp, Homo sapiens
tccagaagccacaat

SEQ ID NO: 2069071 - DNA, 15 bp, Homo sapiens
ccagaagccacaatt

SEQ ID NO: 2069072 - DNA, 15 bp, Homo sapiens
cagaagccacaattc

SEQ ID NO: 2069073 - DNA, 15 bp, Homo sapiens
agaagccacaattca

SEQ ID NO: 2069074 - DNA, 15 bp, Homo sapiens
gaagccacaattcag

SEQ ID NO: 2069075 - DNA, 15 bp, Homo sapiens
aagccacaattcagt

SEQ ID NO: 2069076 - DNA, 15 bp, Homo sapiens
agccacaattcagtc

SEQ ID NO: 2069077 - DNA, 15 bp, Homo sapiens
gccacaattcagtcc

SEQ ID NO: 2069078 - DNA, 15 bp, Homo sapiens
ccacaattcagtcca

SEQ ID NO: 2069079 - DNA, 15 bp, Homo sapiens
cacaattcagtccac

SEQ ID NO: 2069080 - DNA, 15 bp, Homo sapiens
acaattcagtccaca

SEQ ID NO: 2069081 - DNA, 15 bp, Homo sapiens
caattcagtccacac

SEQ ID NO: 2069082 - DNA, 15 bp, Homo sapiens
aattcagtccacaca

SEQ ID NO: 2069083 - DNA, 15 bp, Homo sapiens
attcagtccacacag

SEQ ID NO: 2069084 - DNA, 15 bp, Homo sapiens
ttcagtccacacaga

SEQ ID NO: 2069085 - DNA, 15 bp, Homo sapiens
tcagtccacacagag

SEQ ID NO: 2069086 - DNA, 15 bp, Homo sapiens
cagtccacacagaga

SEQ ID NO: 2069087 - DNA, 15 bp, Homo sapiens
agtccacacagagac

SEQ ID NO: 2069088 - DNA, 15 bp, Homo sapiens
gtccacacagagacc

SEQ ID NO: 2069089 - DNA, 15 bp, Homo sapiens
tccacacagagacct

SEQ ID NO: 2069090 - DNA, 15 bp, Homo sapiens
ccacacagagacctt

SEQ ID NO: 2069091 - DNA, 15 bp, Homo sapiens
cacacagagaccttt

SEQ ID NO: 2069092 - DNA, 15 bp, Homo sapiens
acacagagacctttc

SEQ ID NO: 2069093 - DNA, 15 bp, Homo sapiens
cacagagacctttct

SEQ ID NO: 2069094 - DNA, 15 bp, Homo sapiens
acagagacctttctt

SEQ ID NO: 2069095 - DNA, 15 bp, Homo sapiens
cagagacctttcttc

SEQ ID NO: 2069096 - DNA, 15 bp, Homo sapiens
agagacctttcttct

SEQ ID NO: 2069097 - DNA, 15 bp, Homo sapiens
gagacctttcttctt

SEQ ID NO: 2069098 - DNA, 15 bp, Homo sapiens
agacctttcttcttt

SEQ ID NO: 2069099 - DNA, 15 bp, Homo sapiens
gacctttcttctttt

SEQ ID NO: 2069100 - DNA, 15 bp, Homo sapiens
acctttcttcttttc

SEQ ID NO: 2069101 - DNA, 15 bp, Homo sapiens
cctttcttcttttct

SEQ ID NO: 2069102 - DNA, 15 bp, Homo sapiens
ctttcttcttttcta

SEQ ID NO: 2069103 - DNA, 15 bp, Homo sapiens
tttcttcttttctaa

SEQ ID NO: 2069104 - DNA, 15 bp, Homo sapiens
ttcttcttttctaaa

SEQ ID NO: 2069105 - DNA, 15 bp, Homo sapiens
tcttcttttctaaac

SEQ ID NO: 2069106 - DNA, 15 bp, Homo sapiens
cttcttttctaaaca

SEQ ID NO: 2069107 - DNA, 15 bp, Homo sapiens
ttcttttctaaacag

SEQ ID NO: 2069108 - DNA, 15 bp, Homo sapiens
tcttttctaaacagg

SEQ ID NO: 2069109 - DNA, 15 bp, Homo sapiens
cttttctaaacaggc

SEQ ID NO: 2069110 - DNA, 15 bp, Homo sapiens
ttttctaaacaggca

SEQ ID NO: 2069111 - DNA, 15 bp, Homo sapiens
tttctaaacaggcat

SEQ ID NO: 2069112 - DNA, 15 bp, Homo sapiens
ttctaaacaggcatt

SEQ ID NO: 2069113 - DNA, 15 bp, Homo sapiens
tctaaacaggcattt

SEQ ID NO: 2069114 - DNA, 15 bp, Homo sapiens
ctaaacaggcattta

SEQ ID NO: 2069115 - DNA, 15 bp, Homo sapiens
taaacaggcatttac

SEQ ID NO: 2069116 - DNA, 15 bp, Homo sapiens
aaacaggcatttact

SEQ ID NO: 2069117 - DNA, 15 bp, Homo sapiens
aacaggcatttacta

SEQ ID NO: 2069118 - DNA, 15 bp, Homo sapiens
acaggcatttactac

SEQ ID NO: 2069119 - DNA, 15 bp, Homo sapiens
caggcatttactact

SEQ ID NO: 2069120 - DNA, 15 bp, Homo sapiens
aggcatttactactc

SEQ ID NO: 2069121 - DNA, 15 bp, Homo sapiens
ggcatttactactca

SEQ ID NO: 2069122 - DNA, 15 bp, Homo sapiens
gcatttactactcag

SEQ ID NO: 2069123 - DNA, 15 bp, Homo sapiens
catttactactcaga

SEQ ID NO: 2069124 - DNA, 15 bp, Homo sapiens
atttactactcagaa

SEQ ID NO: 2069125 - DNA, 15 bp, Homo sapiens
tttactactcagaat

SEQ ID NO: 2069126 - DNA, 15 bp, Homo sapiens
ttactactcagaatt

SEQ ID NO: 2069127 - DNA, 15 bp, Homo sapiens
tactactcagaattt

SEQ ID NO: 2069128 - DNA, 15 bp, Homo sapiens
actactcagaatttc

SEQ ID NO: 2069129 - DNA, 15 bp, Homo sapiens
ctactcagaatttcc

SEQ ID NO: 2069130 - DNA, 15 bp, Homo sapiens
tactcagaatttccc

SEQ ID NO: 2069131 - DNA, 15 bp, Homo sapiens
actcagaatttccct

SEQ ID NO: 2069132 - DNA, 15 bp, Homo sapiens
ctcagaatttccctc

SEQ ID NO: 2069133 - DNA, 15 bp, Homo sapiens
tcagaatttccctct

SEQ ID NO: 2069134 - DNA, 15 bp, Homo sapiens
cagaatttccctcta

SEQ ID NO: 2069135 - DNA, 15 bp, Homo sapiens
agaatttccctctaa

SEQ ID NO: 2069136 - DNA, 15 bp, Homo sapiens
gaatttccctctaag

SEQ ID NO: 2069137 - DNA, 15 bp, Homo sapiens
aatttccctctaagc

SEQ ID NO: 2069138 - DNA, 15 bp, Homo sapiens
atttccctctaagca

SEQ ID NO: 2069139 - DNA, 15 bp, Homo sapiens
tttccctctaagcac

SEQ ID NO: 2069140 - DNA, 15 bp, Homo sapiens
ttccctctaagcact

SEQ ID NO: 2069141 - DNA, 15 bp, Homo sapiens
tccctctaagcacta

SEQ ID NO: 2069142 - DNA, 15 bp, Homo sapiens
ccctctaagcactac

SEQ ID NO: 2069143 - DNA, 15 bp, Homo sapiens
cctctaagcactact

SEQ ID NO: 2069144 - DNA, 15 bp, Homo sapiens
ctctaagcactactt

SEQ ID NO: 2069145 - DNA, 15 bp, Homo sapiens
tctaagcactacttt

SEQ ID NO: 2069146 - DNA, 15 bp, Homo sapiens
ctaagcactacttta

SEQ ID NO: 2069147 - DNA, 15 bp, Homo sapiens
taagcactactttag

SEQ ID NO: 2069148 - DNA, 15 bp, Homo sapiens
aagcactactttagc

SEQ ID NO: 2069149 - DNA, 15 bp, Homo sapiens
agcactactttagct

SEQ ID NO: 2069150 - DNA, 15 bp, Homo sapiens
gcactactttagctg

SEQ ID NO: 2069151 - DNA, 15 bp, Homo sapiens
cactactttagctgc

SEQ ID NO: 2069152 - DNA, 15 bp, Homo sapiens
actactttagctgca

SEQ ID NO: 2069153 - DNA, 15 bp, Homo sapiens
ctactttagctgcat

SEQ ID NO: 2069154 - DNA, 15 bp, Homo sapiens
tactttagctgcatc

SEQ ID NO: 2069155 - DNA, 15 bp, Homo sapiens
actttagctgcatcc

SEQ ID NO: 2069156 - DNA, 15 bp, Homo sapiens
ctttagctgcatccc

SEQ ID NO: 2069157 - DNA, 15 bp, Homo sapiens
tttagctgcatccca

SEQ ID NO: 2069158 - DNA, 15 bp, Homo sapiens
ttagctgcatcccac

SEQ ID NO: 2069159 - DNA, 15 bp, Homo sapiens
tagctgcatcccaca

SEQ ID NO: 2069160 - DNA, 15 bp, Homo sapiens
agctgcatcccacac

SEQ ID NO: 2069161 - DNA, 15 bp, Homo sapiens
gctgcatcccacaca

SEQ ID NO: 2069162 - DNA, 15 bp, Homo sapiens
ctgcatcccacacat

SEQ ID NO: 2069163 - DNA, 15 bp, Homo sapiens
tgcatcccacacatt

SEQ ID NO: 2069164 - DNA, 15 bp, Homo sapiens
gcatcccacacattt

SEQ ID NO: 2069165 - DNA, 15 bp, Homo sapiens
catcccacacatttt

SEQ ID NO: 2069166 - DNA, 15 bp, Homo sapiens
atcccacacattttt

SEQ ID NO: 2069167 - DNA, 15 bp, Homo sapiens
tcccacacattttta

SEQ ID NO: 2069168 - DNA, 15 bp, Homo sapiens
cccacacatttttat

SEQ ID NO: 2069169 - DNA, 15 bp, Homo sapiens
ccacacatttttata

SEQ ID NO: 2069170 - DNA, 15 bp, Homo sapiens
cacacatttttatag

SEQ ID NO: 2069171 - DNA, 15 bp, Homo sapiens
acacatttttatagg

SEQ ID NO: 2069172 - DNA, 15 bp, Homo sapiens
cacatttttataggt

SEQ ID NO: 2069173 - DNA, 15 bp, Homo sapiens
acatttttataggtt

SEQ ID NO: 2069174 - DNA, 15 bp, Homo sapiens
catttttataggtta

SEQ ID NO: 2069175 - DNA, 15 bp, Homo sapiens
atttttataggttat

SEQ ID NO: 2069176 - DNA, 15 bp, Homo sapiens
tttttataggttatg

SEQ ID NO: 2069177 - DNA, 15 bp, Homo sapiens
ttttataggttatgt

SEQ ID NO: 2069178 - DNA, 15 bp, Homo sapiens
tttataggttatgtt

SEQ ID NO: 2069179 - DNA, 15 bp, Homo sapiens
ttataggttatgttt

SEQ ID NO: 2069180 - DNA, 15 bp, Homo sapiens
tataggttatgtttt

SEQ ID NO: 2069181 - DNA, 15 bp, Homo sapiens
ataggttatgttttc

SEQ ID NO: 2069182 - DNA, 15 bp, Homo sapiens
taggttatgttttca

SEQ ID NO: 2069183 - DNA, 15 bp, Homo sapiens
aggttatgttttcag

SEQ ID NO: 2069184 - DNA, 15 bp, Homo sapiens
ggttatgttttcagt

SEQ ID NO: 2069185 - DNA, 15 bp, Homo sapiens
gttatgttttcagtt

SEQ ID NO: 2069186 - DNA, 15 bp, Homo sapiens
ttatgttttcagttt

SEQ ID NO: 2069187 - DNA, 15 bp, Homo sapiens
tatgttttcagtttc

SEQ ID NO: 2069188 - DNA, 15 bp, Homo sapiens
atgttttcagtttca

SEQ ID NO: 2069189 - DNA, 15 bp, Homo sapiens
tgttttcagtttcat

SEQ ID NO: 2069190 - DNA, 15 bp, Homo sapiens
gttttcagtttcatt

SEQ ID NO: 2069191 - DNA, 15 bp, Homo sapiens
ttttcagtttcattt

SEQ ID NO: 2069192 - DNA, 15 bp, Homo sapiens
tttcagtttcatttt

SEQ ID NO: 2069193 - DNA, 15 bp, Homo sapiens
ttcagtttcattttc

SEQ ID NO: 2069194 - DNA, 15 bp, Homo sapiens
tcagtttcattttca

SEQ ID NO: 2069195 - DNA, 15 bp, Homo sapiens
cagtttcattttcaa

SEQ ID NO: 2069196 - DNA, 15 bp, Homo sapiens
agtttcattttcaag

SEQ ID NO: 2069197 - DNA, 15 bp, Homo sapiens
gtttcattttcaagt

SEQ ID NO: 2069198 - DNA, 15 bp, Homo sapiens
tttcattttcaagtc

SEQ ID NO: 2069199 - DNA, 15 bp, Homo sapiens
ttcattttcaagtca

SEQ ID NO: 2069200 - DNA, 15 bp, Homo sapiens
tcattttcaagtcag

SEQ ID NO: 2069201 - DNA, 15 bp, Homo sapiens
cattttcaagtcagt

SEQ ID NO: 2069202 - DNA, 15 bp, Homo sapiens
attttcaagtcagtg

SEQ ID NO: 2069203 - DNA, 15 bp, Homo sapiens
ttttcaagtcagtga

SEQ ID NO: 2069204 - DNA, 15 bp, Homo sapiens
tttcaagtcagtgaa

SEQ ID NO: 2069205 - DNA, 15 bp, Homo sapiens
ttcaagtcagtgaaa

SEQ ID NO: 2069206 - DNA, 15 bp, Homo sapiens
tcaagtcagtgaaaa

SEQ ID NO: 2069207 - DNA, 15 bp, Homo sapiens
caagtcagtgaaaac

SEQ ID NO: 2069208 - DNA, 15 bp, Homo sapiens
aagtcagtgaaaaca

SEQ ID NO: 2069209 - DNA, 15 bp, Homo sapiens
agtcagtgaaaacat

SEQ ID NO: 2069210 - DNA, 15 bp, Homo sapiens
gtcagtgaaaacatg

SEQ ID NO: 2069211 - DNA, 15 bp, Homo sapiens
tcagtgaaaacatgt

SEQ ID NO: 2069212 - DNA, 15 bp, Homo sapiens
cagtgaaaacatgtt

SEQ ID NO: 2069213 - DNA, 15 bp, Homo sapiens
agtgaaaacatgttc

SEQ ID NO: 2069214 - DNA, 15 bp, Homo sapiens
gtgaaaacatgttca

SEQ ID NO: 2069215 - DNA, 15 bp, Homo sapiens
tgaaaacatgttcaa

SEQ ID NO: 2069216 - DNA, 15 bp, Homo sapiens
gaaaacatgttcaaa

SEQ ID NO: 2069217 - DNA, 15 bp, Homo sapiens
aaaacatgttcaaat

SEQ ID NO: 2069218 - DNA, 15 bp, Homo sapiens
aaacatgttcaaatt

SEQ ID NO: 2069219 - DNA, 15 bp, Homo sapiens
aacatgttcaaattc

SEQ ID NO: 2069220 - DNA, 15 bp, Homo sapiens
acatgttcaaattcc

SEQ ID NO: 2069221 - DNA, 15 bp, Homo sapiens
catgttcaaattccc

SEQ ID NO: 2069222 - DNA, 15 bp, Homo sapiens
atgttcaaattcccc

SEQ ID NO: 2069223 - DNA, 15 bp, Homo sapiens
tgttcaaattcccct

SEQ ID NO: 2069224 - DNA, 15 bp, Homo sapiens
gttcaaattcccctt

SEQ ID NO: 2069225 - DNA, 15 bp, Homo sapiens
ttcaaattccccttt

SEQ ID NO: 2069226 - DNA, 15 bp, Homo sapiens
tcaaattcccctttt

SEQ ID NO: 2069227 - DNA, 15 bp, Homo sapiens
caaattccccttttg

SEQ ID NO: 2069228 - DNA, 15 bp, Homo sapiens
aaattccccttttga

SEQ ID NO: 2069229 - DNA, 15 bp, Homo sapiens
aattccccttttgat

SEQ ID NO: 2069230 - DNA, 15 bp, Homo sapiens
attccccttttgatg

SEQ ID NO: 2069231 - DNA, 15 bp, Homo sapiens
ttccccttttgatgc

SEQ ID NO: 2069232 - DNA, 15 bp, Homo sapiens
tccccttttgatgcc

SEQ ID NO: 2069233 - DNA, 15 bp, Homo sapiens
ccccttttgatgcct

SEQ ID NO: 2069234 - DNA, 15 bp, Homo sapiens
cccttttgatgcctt

SEQ ID NO: 2069235 - DNA, 15 bp, Homo sapiens
ccttttgatgccttc

SEQ ID NO: 2069236 - DNA, 15 bp, Homo sapiens
cttttgatgccttct

SEQ ID NO: 2069237 - DNA, 15 bp, Homo sapiens
ttttgatgccttctt

SEQ ID NO: 2069238 - DNA, 15 bp, Homo sapiens
tttgatgccttcttt

SEQ ID NO: 2069239 - DNA, 15 bp, Homo sapiens
ttgatgccttctttg

SEQ ID NO: 2069240 - DNA, 15 bp, Homo sapiens
tgatgccttctttga

SEQ ID NO: 2069241 - DNA, 15 bp, Homo sapiens
gatgccttctttgac

SEQ ID NO: 2069242 - DNA, 15 bp, Homo sapiens
atgccttctttgact

SEQ ID NO: 2069243 - DNA, 15 bp, Homo sapiens
tgccttctttgactc

SEQ ID NO: 2069244 - DNA, 15 bp, Homo sapiens
gccttctttgactct

SEQ ID NO: 2069245 - DNA, 15 bp, Homo sapiens
ccttctttgactctt

SEQ ID NO: 2069246 - DNA, 15 bp, Homo sapiens
cttctttgactcttg

SEQ ID NO: 2069247 - DNA, 15 bp, Homo sapiens
ttctttgactcttga

SEQ ID NO: 2069248 - DNA, 15 bp, Homo sapiens
tctttgactcttgag

SEQ ID NO: 2069249 - DNA, 15 bp, Homo sapiens
ctttgactcttgagt

SEQ ID NO: 2069250 - DNA, 15 bp, Homo sapiens
tttgactcttgagtt

SEQ ID NO: 2069251 - DNA, 15 bp, Homo sapiens
ttgactcttgagtta

SEQ ID NO: 2069252 - DNA, 15 bp, Homo sapiens
tgactcttgagttat

SEQ ID NO: 2069253 - DNA, 15 bp, Homo sapiens
gactcttgagttata

SEQ ID NO: 2069254 - DNA, 15 bp, Homo sapiens
actcttgagttatag

SEQ ID NO: 2069255 - DNA, 15 bp, Homo sapiens
ctcttgagttataga

SEQ ID NO: 2069256 - DNA, 15 bp, Homo sapiens
tcttgagttatagag

SEQ ID NO: 2069257 - DNA, 15 bp, Homo sapiens
cttgagttatagaga

SEQ ID NO: 2069258 - DNA, 15 bp, Homo sapiens
ttgagttatagagac

SEQ ID NO: 2069259 - DNA, 15 bp, Homo sapiens
tgagttatagagact

SEQ ID NO: 2069260 - DNA, 15 bp, Homo sapiens
gagttatagagactt

SEQ ID NO: 2069261 - DNA, 15 bp, Homo sapiens
agttatagagactta

SEQ ID NO: 2069262 - DNA, 15 bp, Homo sapiens
gttatagagacttat

SEQ ID NO: 2069263 - DNA, 15 bp, Homo sapiens
ttatagagacttatg

SEQ ID NO: 2069264 - DNA, 15 bp, Homo sapiens
tatagagacttatgt

SEQ ID NO: 2069265 - DNA, 15 bp, Homo sapiens
atagagacttatgtt

SEQ ID NO: 2069266 - DNA, 15 bp, Homo sapiens
tagagacttatgttc

SEQ ID NO: 2069267 - DNA, 15 bp, Homo sapiens
agagacttatgttct

SEQ ID NO: 2069268 - DNA, 15 bp, Homo sapiens
gagacttatgttctt

SEQ ID NO: 2069269 - DNA, 15 bp, Homo sapiens
agacttatgttcttt

SEQ ID NO: 2069270 - DNA, 15 bp, Homo sapiens
gacttatgttcttta

SEQ ID NO: 2069271 - DNA, 15 bp, Homo sapiens
acttatgttctttaa

SEQ ID NO: 2069272 - DNA, 15 bp, Homo sapiens
cttatgttctttaat

SEQ ID NO: 2069273 - DNA, 15 bp, Homo sapiens
ttatgttctttaatt

SEQ ID NO: 2069274 - DNA, 15 bp, Homo sapiens
tatgttctttaattt

SEQ ID NO: 2069275 - DNA, 15 bp, Homo sapiens
atgttctttaatttc

SEQ ID NO: 2069276 - DNA, 15 bp, Homo sapiens
tgttctttaatttct

SEQ ID NO: 2069277 - DNA, 15 bp, Homo sapiens
gttctttaatttcta

SEQ ID NO: 2069278 - DNA, 15 bp, Homo sapiens
ttctttaatttctaa

SEQ ID NO: 2069279 - DNA, 15 bp, Homo sapiens
tctttaatttctaaa

SEQ ID NO: 2069280 - DNA, 15 bp, Homo sapiens
ctttaatttctaaat

SEQ ID NO: 2069281 - DNA, 15 bp, Homo sapiens
tttaatttctaaatg

SEQ ID NO: 2069282 - DNA, 15 bp, Homo sapiens
ttaatttctaaatgg

SEQ ID NO: 2069283 - DNA, 15 bp, Homo sapiens
taatttctaaatggt

SEQ ID NO: 2069284 - DNA, 15 bp, Homo sapiens
aatttctaaatggtg

SEQ ID NO: 2069285 - DNA, 15 bp, Homo sapiens
atttctaaatggtgg

SEQ ID NO: 2069286 - DNA, 15 bp, Homo sapiens
tttctaaatggtggt

SEQ ID NO: 2069287 - DNA, 15 bp, Homo sapiens
ttctaaatggtggtt

SEQ ID NO: 2069288 - DNA, 15 bp, Homo sapiens
tctaaatggtggttt

SEQ ID NO: 2069289 - DNA, 15 bp, Homo sapiens
ctaaatggtggtttt

SEQ ID NO: 2069290 - DNA, 15 bp, Homo sapiens
taaatggtggttttc

SEQ ID NO: 2069291 - DNA, 15 bp, Homo sapiens
aaatggtggttttct

SEQ ID NO: 2069292 - DNA, 15 bp, Homo sapiens
aatggtggttttcta

SEQ ID NO: 2069293 - DNA, 15 bp, Homo sapiens
atggtggttttctag

SEQ ID NO: 2069294 - DNA, 15 bp, Homo sapiens
tggtggttttctaga

SEQ ID NO: 2069295 - DNA, 15 bp, Homo sapiens
ggtggttttctagag

SEQ ID NO: 2069296 - DNA, 15 bp, Homo sapiens
gtggttttctagaga

SEQ ID NO: 2069297 - DNA, 15 bp, Homo sapiens
tggttttctagagat

SEQ ID NO: 2069298 - DNA, 15 bp, Homo sapiens
ggttttctagagatc

SEQ ID NO: 2069299 - DNA, 15 bp, Homo sapiens
gttttctagagatct

SEQ ID NO: 2069300 - DNA, 15 bp, Homo sapiens
ttttctagagatctt

SEQ ID NO: 2069301 - DNA, 15 bp, Homo sapiens
tttctagagatcttg

SEQ ID NO: 2069302 - DNA, 15 bp, Homo sapiens
ttctagagatcttgc

SEQ ID NO: 2069303 - DNA, 15 bp, Homo sapiens
tctagagatcttgct

SEQ ID NO: 2069304 - DNA, 15 bp, Homo sapiens
ctagagatcttgctg

SEQ ID NO: 2069305 - DNA, 15 bp, Homo sapiens
tagagatcttgctgc

SEQ ID NO: 2069306 - DNA, 15 bp, Homo sapiens
agagatcttgctgct

SEQ ID NO: 2069307 - DNA, 15 bp, Homo sapiens
gagatcttgctgcta

SEQ ID NO: 2069308 - DNA, 15 bp, Homo sapiens
agatcttgctgctat

SEQ ID NO: 2069309 - DNA, 15 bp, Homo sapiens
gatcttgctgctatt

SEQ ID NO: 2069310 - DNA, 15 bp, Homo sapiens
atcttgctgctattg

SEQ ID NO: 2069311 - DNA, 15 bp, Homo sapiens
tcttgctgctattgg

SEQ ID NO: 2069312 - DNA, 15 bp, Homo sapiens
cttgctgctattggt

SEQ ID NO: 2069313 - DNA, 15 bp, Homo sapiens
ttgctgctattggtt

SEQ ID NO: 2069314 - DNA, 15 bp, Homo sapiens
tgctgctattggttg

SEQ ID NO: 2069315 - DNA, 15 bp, Homo sapiens
gctgctattggttgc

SEQ ID NO: 2069316 - DNA, 15 bp, Homo sapiens
ctgctattggttgct

SEQ ID NO: 2069317 - DNA, 15 bp, Homo sapiens
tgctattggttgcta

SEQ ID NO: 2069318 - DNA, 15 bp, Homo sapiens
gctattggttgctaa

SEQ ID NO: 2069319 - DNA, 15 bp, Homo sapiens
ctattggttgctaat

SEQ ID NO: 2069320 - DNA, 15 bp, Homo sapiens
tattggttgctaatt

SEQ ID NO: 2069321 - DNA, 15 bp, Homo sapiens
attggttgctaattt

SEQ ID NO: 2069322 - DNA, 15 bp, Homo sapiens
ttggttgctaatttg

SEQ ID NO: 2069323 - DNA, 15 bp, Homo sapiens
tggttgctaatttga

SEQ ID NO: 2069324 - DNA, 15 bp, Homo sapiens
ggttgctaatttgat

SEQ ID NO: 2069325 - DNA, 15 bp, Homo sapiens
gttgctaatttgatt

SEQ ID NO: 2069326 - DNA, 15 bp, Homo sapiens
ttgctaatttgattc

SEQ ID NO: 2069327 - DNA, 15 bp, Homo sapiens
tgctaatttgattct

SEQ ID NO: 2069328 - DNA, 15 bp, Homo sapiens
gctaatttgattctg

SEQ ID NO: 2069329 - DNA, 15 bp, Homo sapiens
ctaatttgattctgt

SEQ ID NO: 2069330 - DNA, 15 bp, Homo sapiens
taatttgattctgtt

SEQ ID NO: 2069331 - DNA, 15 bp, Homo sapiens
aatttgattctgttg

SEQ ID NO: 2069332 - DNA, 15 bp, Homo sapiens
atttgattctgttgt

SEQ ID NO: 2069333 - DNA, 15 bp, Homo sapiens
tttgattctgttgtg

SEQ ID NO: 2069334 - DNA, 15 bp, Homo sapiens
ttgattctgttgtga

SEQ ID NO: 2069335 - DNA, 15 bp, Homo sapiens
tgattctgttgtgat

SEQ ID NO: 2069336 - DNA, 15 bp, Homo sapiens
gattctgttgtgatc

SEQ ID NO: 2069337 - DNA, 15 bp, Homo sapiens
attctgttgtgatca

SEQ ID NO: 2069338 - DNA, 15 bp, Homo sapiens
ttctgttgtgatcaa

SEQ ID NO: 2069339 - DNA, 15 bp, Homo sapiens
tctgttgtgatcaag

SEQ ID NO: 2069340 - DNA, 15 bp, Homo sapiens
ctgttgtgatcaagg

SEQ ID NO: 2069341 - DNA, 15 bp, Homo sapiens
tgttgtgatcaaggt

SEQ ID NO: 2069342 - DNA, 15 bp, Homo sapiens
gttgtgatcaaggta

SEQ ID NO: 2069343 - DNA, 15 bp, Homo sapiens
ttgtgatcaaggtac

SEQ ID NO: 2069344 - DNA, 15 bp, Homo sapiens
tgtgatcaaggtact

SEQ ID NO: 2069345 - DNA, 15 bp, Homo sapiens
gtgatcaaggtactt

SEQ ID NO: 2069346 - DNA, 15 bp, Homo sapiens
tgatcaaggtacttg

SEQ ID NO: 2069347 - DNA, 15 bp, Homo sapiens
gatcaaggtacttgg

SEQ ID NO: 2069348 - DNA, 15 bp, Homo sapiens
atcaaggtacttggt

SEQ ID NO: 2069349 - DNA, 15 bp, Homo sapiens
tcaaggtacttggta

SEQ ID NO: 2069350 - DNA, 15 bp, Homo sapiens
caaggtacttggtat

SEQ ID NO: 2069351 - DNA, 15 bp, Homo sapiens
aaggtacttggtatg

SEQ ID NO: 2069352 - DNA, 15 bp, Homo sapiens
aggtacttggtatga

SEQ ID NO: 2069353 - DNA, 15 bp, Homo sapiens
ggtacttggtatgac

SEQ ID NO: 2069354 - DNA, 15 bp, Homo sapiens
gtacttggtatgaca

SEQ ID NO: 2069355 - DNA, 15 bp, Homo sapiens
tacttggtatgacag

SEQ ID NO: 2069356 - DNA, 15 bp, Homo sapiens
acttggtatgacagg

SEQ ID NO: 2069357 - DNA, 15 bp, Homo sapiens
cttggtatgacagga

SEQ ID NO: 2069358 - DNA, 15 bp, Homo sapiens
ttggtatgacaggaa

SEQ ID NO: 2069359 - DNA, 15 bp, Homo sapiens
tggtatgacaggaat

SEQ ID NO: 2069360 - DNA, 15 bp, Homo sapiens
ggtatgacaggaatc

SEQ ID NO: 2069361 - DNA, 15 bp, Homo sapiens
gtatgacaggaatcc

SEQ ID NO: 2069362 - DNA, 15 bp, Homo sapiens
tatgacaggaatcct

SEQ ID NO: 2069363 - DNA, 15 bp, Homo sapiens
atgacaggaatcctt

SEQ ID NO: 2069364 - DNA, 15 bp, Homo sapiens
tgacaggaatccttt

SEQ ID NO: 2069365 - DNA, 15 bp, Homo sapiens
gacaggaatcctttc

SEQ ID NO: 2069366 - DNA, 15 bp, Homo sapiens
acaggaatcctttca

SEQ ID NO: 2069367 - DNA, 15 bp, Homo sapiens
caggaatcctttcaa

SEQ ID NO: 2069368 - DNA, 15 bp, Homo sapiens
aggaatcctttcaaa

SEQ ID NO: 2069369 - DNA, 15 bp, Homo sapiens
ggaatcctttcaaat

SEQ ID NO: 2069370 - DNA, 15 bp, Homo sapiens
gaatcctttcaaatt

SEQ ID NO: 2069371 - DNA, 15 bp, Homo sapiens
aatcctttcaaattt

SEQ ID NO: 2069372 - DNA, 15 bp, Homo sapiens
atcctttcaaattta

SEQ ID NO: 2069373 - DNA, 15 bp, Homo sapiens
tcctttcaaatttat

SEQ ID NO: 2069374 - DNA, 15 bp, Homo sapiens
cctttcaaatttatt

SEQ ID NO: 2069375 - DNA, 15 bp, Homo sapiens
ctttcaaatttattg

SEQ ID NO: 2069376 - DNA, 15 bp, Homo sapiens
tttcaaatttattga

SEQ ID NO: 2069377 - DNA, 15 bp, Homo sapiens
ttcaaatttattgag

SEQ ID NO: 2069378 - DNA, 15 bp, Homo sapiens
tcaaatttattgagg

SEQ ID NO: 2069379 - DNA, 15 bp, Homo sapiens
caaatttattgaggc

SEQ ID NO: 2069380 - DNA, 15 bp, Homo sapiens
aaatttattgaggct

SEQ ID NO: 2069381 - DNA, 15 bp, Homo sapiens
aatttattgaggctt

SEQ ID NO: 2069382 - DNA, 15 bp, Homo sapiens
atttattgaggcttg

SEQ ID NO: 2069383 - DNA, 15 bp, Homo sapiens
tttattgaggcttgt

SEQ ID NO: 2069384 - DNA, 15 bp, Homo sapiens
ttattgaggcttgtt

SEQ ID NO: 2069385 - DNA, 15 bp, Homo sapiens
tattgaggcttgttt

SEQ ID NO: 2069386 - DNA, 15 bp, Homo sapiens
attgaggcttgttta

SEQ ID NO: 2069387 - DNA, 15 bp, Homo sapiens
ttgaggcttgtttaa

SEQ ID NO: 2069388 - DNA, 15 bp, Homo sapiens
tgaggcttgtttaat

SEQ ID NO: 2069389 - DNA, 15 bp, Homo sapiens
gaggcttgtttaatg

SEQ ID NO: 2069390 - DNA, 15 bp, Homo sapiens
aggcttgtttaatgg

SEQ ID NO: 2069391 - DNA, 15 bp, Homo sapiens
ggcttgtttaatggc

SEQ ID NO: 2069392 - DNA, 15 bp, Homo sapiens
gcttgtttaatggcc

SEQ ID NO: 2069393 - DNA, 15 bp, Homo sapiens
cttgtttaatggccc

SEQ ID NO: 2069394 - DNA, 15 bp, Homo sapiens
ttgtttaatggccca

SEQ ID NO: 2069395 - DNA, 15 bp, Homo sapiens
tgtttaatggcccag

SEQ ID NO: 2069396 - DNA, 15 bp, Homo sapiens
gtttaatggcccaga

SEQ ID NO: 2069397 - DNA, 15 bp, Homo sapiens
tttaatggcccagaa

SEQ ID NO: 2069398 - DNA, 15 bp, Homo sapiens
ttaatggcccagaaa

SEQ ID NO: 2069399 - DNA, 15 bp, Homo sapiens
taatggcccagaaaa

SEQ ID NO: 2069400 - DNA, 15 bp, Homo sapiens
aatggcccagaaaat

SEQ ID NO: 2069401 - DNA, 15 bp, Homo sapiens
atggcccagaaaatg

SEQ ID NO: 2069402 - DNA, 15 bp, Homo sapiens
tggcccagaaaatga

SEQ ID NO: 2069403 - DNA, 15 bp, Homo sapiens
ggcccagaaaatgat

SEQ ID NO: 2069404 - DNA, 15 bp, Homo sapiens
gcccagaaaatgatc

SEQ ID NO: 2069405 - DNA, 15 bp, Homo sapiens
cccagaaaatgatct

SEQ ID NO: 2069406 - DNA, 15 bp, Homo sapiens
ccagaaaatgatctg

SEQ ID NO: 2069407 - DNA, 15 bp, Homo sapiens
cagaaaatgatctgt

SEQ ID NO: 2069408 - DNA, 15 bp, Homo sapiens
agaaaatgatctgtc

SEQ ID NO: 2069409 - DNA, 15 bp, Homo sapiens
gaaaatgatctgtct

SEQ ID NO: 2069410 - DNA, 15 bp, Homo sapiens
aaaatgatctgtctt

SEQ ID NO: 2069411 - DNA, 15 bp, Homo sapiens
aaatgatctgtcttg

SEQ ID NO: 2069412 - DNA, 15 bp, Homo sapiens
aatgatctgtcttgg

SEQ ID NO: 2069413 - DNA, 15 bp, Homo sapiens
atgatctgtcttggt

SEQ ID NO: 2069414 - DNA, 15 bp, Homo sapiens
tgatctgtcttggtg

SEQ ID NO: 2069415 - DNA, 15 bp, Homo sapiens
gatctgtcttggtgg

SEQ ID NO: 2069416 - DNA, 15 bp, Homo sapiens
atctgtcttggtgga

SEQ ID NO: 2069417 - DNA, 15 bp, Homo sapiens
tctgtcttggtggat

SEQ ID NO: 2069418 - DNA, 15 bp, Homo sapiens
ctgtcttggtggatg

SEQ ID NO: 2069419 - DNA, 15 bp, Homo sapiens
tgtcttggtggatgt

SEQ ID NO: 2069420 - DNA, 15 bp, Homo sapiens
gtcttggtggatgta

SEQ ID NO: 2069421 - DNA, 15 bp, Homo sapiens
tcttggtggatgtat

SEQ ID NO: 2069422 - DNA, 15 bp, Homo sapiens
cttggtggatgtata

SEQ ID NO: 2069423 - DNA, 15 bp, Homo sapiens
ttggtggatgtatat

SEQ ID NO: 2069424 - DNA, 15 bp, Homo sapiens
tggtggatgtatatg

SEQ ID NO: 2069425 - DNA, 15 bp, Homo sapiens
ggtggatgtatatgc

SEQ ID NO: 2069426 - DNA, 15 bp, Homo sapiens
gtggatgtatatgca

SEQ ID NO: 2069427 - DNA, 15 bp, Homo sapiens
tggatgtatatgcac

SEQ ID NO: 2069428 - DNA, 15 bp, Homo sapiens
ggatgtatatgcaca

SEQ ID NO: 2069429 - DNA, 15 bp, Homo sapiens
gatgtatatgcacat

SEQ ID NO: 2069430 - DNA, 15 bp, Homo sapiens
atgtatatgcacatt

SEQ ID NO: 2069431 - DNA, 15 bp, Homo sapiens
tgtatatgcacattt

SEQ ID NO: 2069432 - DNA, 15 bp, Homo sapiens
gtatatgcacatttg

SEQ ID NO: 2069433 - DNA, 15 bp, Homo sapiens
tatatgcacatttga

SEQ ID NO: 2069434 - DNA, 15 bp, Homo sapiens
atatgcacatttgaa

SEQ ID NO: 2069435 - DNA, 15 bp, Homo sapiens
tatgcacatttgaaa

SEQ ID NO: 2069436 - DNA, 15 bp, Homo sapiens
atgcacatttgaaag

SEQ ID NO: 2069437 - DNA, 15 bp, Homo sapiens
tgcacatttgaaagg

SEQ ID NO: 2069438 - DNA, 15 bp, Homo sapiens
gcacatttgaaagga

SEQ ID NO: 2069439 - DNA, 15 bp, Homo sapiens
cacatttgaaaggaa

SEQ ID NO: 2069440 - DNA, 15 bp, Homo sapiens
acatttgaaaggaat

SEQ ID NO: 2069441 - DNA, 15 bp, Homo sapiens
catttgaaaggaatg

SEQ ID NO: 2069442 - DNA, 15 bp, Homo sapiens
atttgaaaggaatgc

SEQ ID NO: 2069443 - DNA, 15 bp, Homo sapiens
tttgaaaggaatgct

SEQ ID NO: 2069444 - DNA, 15 bp, Homo sapiens
ttgaaaggaatgctt

SEQ ID NO: 2069445 - DNA, 15 bp, Homo sapiens
tgaaaggaatgcttg

SEQ ID NO: 2069446 - DNA, 15 bp, Homo sapiens
gaaaggaatgcttgc

SEQ ID NO: 2069447 - DNA, 15 bp, Homo sapiens
aaaggaatgcttgct

SEQ ID NO: 2069448 - DNA, 15 bp, Homo sapiens
aaggaatgcttgctc

SEQ ID NO: 2069449 - DNA, 15 bp, Homo sapiens
aggaatgcttgctct

SEQ ID NO: 2069450 - DNA, 15 bp, Homo sapiens
ggaatgcttgctctg

SEQ ID NO: 2069451 - DNA, 15 bp, Homo sapiens
gaatgcttgctctgc

SEQ ID NO: 2069452 - DNA, 15 bp, Homo sapiens
aatgcttgctctgct

SEQ ID NO: 2069453 - DNA, 15 bp, Homo sapiens
atgcttgctctgctg

SEQ ID NO: 2069454 - DNA, 15 bp, Homo sapiens
tgcttgctctgctgt

SEQ ID NO: 2069455 - DNA, 15 bp, Homo sapiens
gcttgctctgctgtt

SEQ ID NO: 2069456 - DNA, 15 bp, Homo sapiens
cttgctctgctgttg

SEQ ID NO: 2069457 - DNA, 15 bp, Homo sapiens
ttgctctgctgttgt

SEQ ID NO: 2069458 - DNA, 15 bp, Homo sapiens
tgctctgctgttgtt

SEQ ID NO: 2069459 - DNA, 15 bp, Homo sapiens
gctctgctgttgttg

SEQ ID NO: 2069460 - DNA, 15 bp, Homo sapiens
ctctgctgttgttga

SEQ ID NO: 2069461 - DNA, 15 bp, Homo sapiens
tctgctgttgttgag

SEQ ID NO: 2069462 - DNA, 15 bp, Homo sapiens
ctgctgttgttgagt

SEQ ID NO: 2069463 - DNA, 15 bp, Homo sapiens
tgctgttgttgagtg

SEQ ID NO: 2069464 - DNA, 15 bp, Homo sapiens
gctgttgttgagtgg

SEQ ID NO: 2069465 - DNA, 15 bp, Homo sapiens
ctgttgttgagtgga

SEQ ID NO: 2069466 - DNA, 15 bp, Homo sapiens
tgttgttgagtggag

SEQ ID NO: 2069467 - DNA, 15 bp, Homo sapiens
gttgttgagtggagt

SEQ ID NO: 2069468 - DNA, 15 bp, Homo sapiens
ttgttgagtggagtg

SEQ ID NO: 2069469 - DNA, 15 bp, Homo sapiens
tgttgagtggagtgt

SEQ ID NO: 2069470 - DNA, 15 bp, Homo sapiens
gttgagtggagtgtg

SEQ ID NO: 2069471 - DNA, 15 bp, Homo sapiens
ttgagtggagtgtgt

SEQ ID NO: 2069472 - DNA, 15 bp, Homo sapiens
tgagtggagtgtgta

SEQ ID NO: 2069473 - DNA, 15 bp, Homo sapiens
gagtggagtgtgtat

SEQ ID NO: 2069474 - DNA, 15 bp, Homo sapiens
agtggagtgtgtata

SEQ ID NO: 2069475 - DNA, 15 bp, Homo sapiens
gtggagtgtgtataa

SEQ ID NO: 2069476 - DNA, 15 bp, Homo sapiens
tggagtgtgtataaa

SEQ ID NO: 2069477 - DNA, 15 bp, Homo sapiens
ggagtgtgtataaat

SEQ ID NO: 2069478 - DNA, 15 bp, Homo sapiens
gagtgtgtataaatg

SEQ ID NO: 2069479 - DNA, 15 bp, Homo sapiens
agtgtgtataaatgt

SEQ ID NO: 2069480 - DNA, 15 bp, Homo sapiens
gtgtgtataaatgtc

SEQ ID NO: 2069481 - DNA, 15 bp, Homo sapiens
tgtgtataaatgtca

SEQ ID NO: 2069482 - DNA, 15 bp, Homo sapiens
gtgtataaatgtcaa

SEQ ID NO: 2069483 - DNA, 15 bp, Homo sapiens
tgtataaatgtcaat

SEQ ID NO: 2069484 - DNA, 15 bp, Homo sapiens
gtataaatgtcaatt

SEQ ID NO: 2069485 - DNA, 15 bp, Homo sapiens
tataaatgtcaattc

SEQ ID NO: 2069486 - DNA, 15 bp, Homo sapiens
ataaatgtcaattcg

SEQ ID NO: 2069487 - DNA, 15 bp, Homo sapiens
taaatgtcaattcgg

SEQ ID NO: 2069488 - DNA, 15 bp, Homo sapiens
aaatgtcaattcggt

SEQ ID NO: 2069489 - DNA, 15 bp, Homo sapiens
aatgtcaattcggtc

SEQ ID NO: 2069490 - DNA, 15 bp, Homo sapiens
atgtcaattcggtca

SEQ ID NO: 2069491 - DNA, 15 bp, Homo sapiens
tgtcaattcggtcaa

SEQ ID NO: 2069492 - DNA, 15 bp, Homo sapiens
gtcaattcggtcaac

SEQ ID NO: 2069493 - DNA, 15 bp, Homo sapiens
tcaattcggtcaact

SEQ ID NO: 2069494 - DNA, 15 bp, Homo sapiens
caattcggtcaactt

SEQ ID NO: 2069495 - DNA, 15 bp, Homo sapiens
aattcggtcaacttg

SEQ ID NO: 2069496 - DNA, 15 bp, Homo sapiens
attcggtcaacttgt

SEQ ID NO: 2069497 - DNA, 15 bp, Homo sapiens
ttcggtcaacttgtt

SEQ ID NO: 2069498 - DNA, 15 bp, Homo sapiens
tcggtcaacttgttc

SEQ ID NO: 2069499 - DNA, 15 bp, Homo sapiens
cggtcaacttgttcc

SEQ ID NO: 2069500 - DNA, 15 bp, Homo sapiens
ggtcaacttgttcca

SEQ ID NO: 2069501 - DNA, 15 bp, Homo sapiens
gtcaacttgttccat

SEQ ID NO: 2069502 - DNA, 15 bp, Homo sapiens
tcaacttgttccata

SEQ ID NO: 2069503 - DNA, 15 bp, Homo sapiens
caacttgttccatag

SEQ ID NO: 2069504 - DNA, 15 bp, Homo sapiens
aacttgttccatagt

SEQ ID NO: 2069505 - DNA, 15 bp, Homo sapiens
acttgttccatagtg

SEQ ID NO: 2069506 - DNA, 15 bp, Homo sapiens
cttgttccatagtgt

SEQ ID NO: 2069507 - DNA, 15 bp, Homo sapiens
ttgttccatagtgtt

SEQ ID NO: 2069508 - DNA, 15 bp, Homo sapiens
tgttccatagtgtta

SEQ ID NO: 2069509 - DNA, 15 bp, Homo sapiens
gttccatagtgttat

SEQ ID NO: 2069510 - DNA, 15 bp, Homo sapiens
ttccatagtgttatt

SEQ ID NO: 2069511 - DNA, 15 bp, Homo sapiens
tccatagtgttattc

SEQ ID NO: 2069512 - DNA, 15 bp, Homo sapiens
ccatagtgttattca

SEQ ID NO: 2069513 - DNA, 15 bp, Homo sapiens
catagtgttattcaa

SEQ ID NO: 2069514 - DNA, 15 bp, Homo sapiens
atagtgttattcaag

SEQ ID NO: 2069515 - DNA, 15 bp, Homo sapiens
tagtgttattcaagt

SEQ ID NO: 2069516 - DNA, 15 bp, Homo sapiens
agtgttattcaagtc

SEQ ID NO: 2069517 - DNA, 15 bp, Homo sapiens
gtgttattcaagtct

SEQ ID NO: 2069518 - DNA, 15 bp, Homo sapiens
tgttattcaagtctt

SEQ ID NO: 2069519 - DNA, 15 bp, Homo sapiens
gttattcaagtcttc

SEQ ID NO: 2069520 - DNA, 15 bp, Homo sapiens
ttattcaagtcttcc

SEQ ID NO: 2069521 - DNA, 15 bp, Homo sapiens
tattcaagtcttcca

SEQ ID NO: 2069522 - DNA, 15 bp, Homo sapiens
attcaagtcttccat

SEQ ID NO: 2069523 - DNA, 15 bp, Homo sapiens
ttcaagtcttccatg

SEQ ID NO: 2069524 - DNA, 15 bp, Homo sapiens
tcaagtcttccatgc

SEQ ID NO: 2069525 - DNA, 15 bp, Homo sapiens
caagtcttccatgcc

SEQ ID NO: 2069526 - DNA, 15 bp, Homo sapiens
aagtcttccatgccc

SEQ ID NO: 2069527 - DNA, 15 bp, Homo sapiens
agtcttccatgccct

SEQ ID NO: 2069528 - DNA, 15 bp, Homo sapiens
gtcttccatgccctt

SEQ ID NO: 2069529 - DNA, 15 bp, Homo sapiens
tcttccatgcccttc

SEQ ID NO: 2069530 - DNA, 15 bp, Homo sapiens
cttccatgcccttct

SEQ ID NO: 2069531 - DNA, 15 bp, Homo sapiens
ttccatgcccttctt

SEQ ID NO: 2069532 - DNA, 15 bp, Homo sapiens
tccatgcccttcttg

SEQ ID NO: 2069533 - DNA, 15 bp, Homo sapiens
ccatgcccttcttgt

SEQ ID NO: 2069534 - DNA, 15 bp, Homo sapiens
catgcccttcttgtt

SEQ ID NO: 2069535 - DNA, 15 bp, Homo sapiens
atgcccttcttgtta

SEQ ID NO: 2069536 - DNA, 15 bp, Homo sapiens
tgcccttcttgttat

SEQ ID NO: 2069537 - DNA, 15 bp, Homo sapiens
gcccttcttgttatt

SEQ ID NO: 2069538 - DNA, 15 bp, Homo sapiens
cccttcttgttattc

SEQ ID NO: 2069539 - DNA, 15 bp, Homo sapiens
ccttcttgttattct

SEQ ID NO: 2069540 - DNA, 15 bp, Homo sapiens
cttcttgttattctg

SEQ ID NO: 2069541 - DNA, 15 bp, Homo sapiens
ttcttgttattctgt

SEQ ID NO: 2069542 - DNA, 15 bp, Homo sapiens
tcttgttattctgtc

SEQ ID NO: 2069543 - DNA, 15 bp, Homo sapiens
cttgttattctgtct

SEQ ID NO: 2069544 - DNA, 15 bp, Homo sapiens
ttgttattctgtcta

SEQ ID NO: 2069545 - DNA, 15 bp, Homo sapiens
tgttattctgtctac

SEQ ID NO: 2069546 - DNA, 15 bp, Homo sapiens
gttattctgtctact

SEQ ID NO: 2069547 - DNA, 15 bp, Homo sapiens
ttattctgtctactt

SEQ ID NO: 2069548 - DNA, 15 bp, Homo sapiens
tattctgtctactta

SEQ ID NO: 2069549 - DNA, 15 bp, Homo sapiens
attctgtctacttat

SEQ ID NO: 2069550 - DNA, 15 bp, Homo sapiens
ttctgtctacttatt

SEQ ID NO: 2069551 - DNA, 15 bp, Homo sapiens
tctgtctacttattg

SEQ ID NO: 2069552 - DNA, 15 bp, Homo sapiens
ctgtctacttattga

SEQ ID NO: 2069553 - DNA, 15 bp, Homo sapiens
tgtctacttattgag

SEQ ID NO: 2069554 - DNA, 15 bp, Homo sapiens
gtctacttattgaga

SEQ ID NO: 2069555 - DNA, 15 bp, Homo sapiens
tctacttattgagag

SEQ ID NO: 2069556 - DNA, 15 bp, Homo sapiens
ctacttattgagaga

SEQ ID NO: 2069557 - DNA, 15 bp, Homo sapiens
tacttattgagagag

SEQ ID NO: 2069558 - DNA, 15 bp, Homo sapiens
acttattgagagaga

SEQ ID NO: 2069559 - DNA, 15 bp, Homo sapiens
cttattgagagagac

SEQ ID NO: 2069560 - DNA, 15 bp, Homo sapiens
ttattgagagagaca

SEQ ID NO: 2069561 - DNA, 15 bp, Homo sapiens
tattgagagagacat

SEQ ID NO: 2069562 - DNA, 15 bp, Homo sapiens
attgagagagacatg

SEQ ID NO: 2069563 - DNA, 15 bp, Homo sapiens
ttgagagagacatgt

SEQ ID NO: 2069564 - DNA, 15 bp, Homo sapiens
tgagagagacatgtt

SEQ ID NO: 2069565 - DNA, 15 bp, Homo sapiens
gagagagacatgttg

SEQ ID NO: 2069566 - DNA, 15 bp, Homo sapiens
agagagacatgttga

SEQ ID NO: 2069567 - DNA, 15 bp, Homo sapiens
gagagacatgttgaa

SEQ ID NO: 2069568 - DNA, 15 bp, Homo sapiens
agagacatgttgaaa

SEQ ID NO: 2069569 - DNA, 15 bp, Homo sapiens
gagacatgttgaaat

SEQ ID NO: 2069570 - DNA, 15 bp, Homo sapiens
agacatgttgaaatc

SEQ ID NO: 2069571 - DNA, 15 bp, Homo sapiens
gacatgttgaaatct

SEQ ID NO: 2069572 - DNA, 15 bp, Homo sapiens
acatgttgaaatctt

SEQ ID NO: 2069573 - DNA, 15 bp, Homo sapiens
catgttgaaatcttc

SEQ ID NO: 2069574 - DNA, 15 bp, Homo sapiens
atgttgaaatcttca

SEQ ID NO: 2069575 - DNA, 15 bp, Homo sapiens
tgttgaaatcttcat

SEQ ID NO: 2069576 - DNA, 15 bp, Homo sapiens
gttgaaatcttcatc

SEQ ID NO: 2069577 - DNA, 15 bp, Homo sapiens
ttgaaatcttcatct

SEQ ID NO: 2069578 - DNA, 15 bp, Homo sapiens
tgaaatcttcatcta

SEQ ID NO: 2069579 - DNA, 15 bp, Homo sapiens
gaaatcttcatctat

SEQ ID NO: 2069580 - DNA, 15 bp, Homo sapiens
aaatcttcatctata

SEQ ID NO: 2069581 - DNA, 15 bp, Homo sapiens
aatcttcatctataa

SEQ ID NO: 2069582 - DNA, 15 bp, Homo sapiens
atcttcatctataat

SEQ ID NO: 2069583 - DNA, 15 bp, Homo sapiens
tcttcatctataatt

SEQ ID NO: 2069584 - DNA, 15 bp, Homo sapiens
cttcatctataattg

SEQ ID NO: 2069585 - DNA, 15 bp, Homo sapiens
ttcatctataattgt

SEQ ID NO: 2069586 - DNA, 15 bp, Homo sapiens
tcatctataattgtg

SEQ ID NO: 2069587 - DNA, 15 bp, Homo sapiens
catctataattgtga

SEQ ID NO: 2069588 - DNA, 15 bp, Homo sapiens
atctataattgtgag

SEQ ID NO: 2069589 - DNA, 15 bp, Homo sapiens
tctataattgtgagt

SEQ ID NO: 2069590 - DNA, 15 bp, Homo sapiens
ctataattgtgagtt

SEQ ID NO: 2069591 - DNA, 15 bp, Homo sapiens
tataattgtgagttt

SEQ ID NO: 2069592 - DNA, 15 bp, Homo sapiens
ataattgtgagtttc

SEQ ID NO: 2069593 - DNA, 15 bp, Homo sapiens
taattgtgagtttca

SEQ ID NO: 2069594 - DNA, 15 bp, Homo sapiens
aattgtgagtttcac

SEQ ID NO: 2069595 - DNA, 15 bp, Homo sapiens
attgtgagtttcact

SEQ ID NO: 2069596 - DNA, 15 bp, Homo sapiens
ttgtgagtttcacta

SEQ ID NO: 2069597 - DNA, 15 bp, Homo sapiens
tgtgagtttcactat

SEQ ID NO: 2069598 - DNA, 15 bp, Homo sapiens
gtgagtttcactatt

SEQ ID NO: 2069599 - DNA, 15 bp, Homo sapiens
tgagtttcactattc

SEQ ID NO: 2069600 - DNA, 15 bp, Homo sapiens
gagtttcactattct

SEQ ID NO: 2069601 - DNA, 15 bp, Homo sapiens
agtttcactattctc

SEQ ID NO: 2069602 - DNA, 15 bp, Homo sapiens
gtttcactattctcc

SEQ ID NO: 2069603 - DNA, 15 bp, Homo sapiens
tttcactattctcct

SEQ ID NO: 2069604 - DNA, 15 bp, Homo sapiens
ttcactattctcctt

SEQ ID NO: 2069605 - DNA, 15 bp, Homo sapiens
tcactattctcctta

SEQ ID NO: 2069606 - DNA, 15 bp, Homo sapiens
cactattctccttat

SEQ ID NO: 2069607 - DNA, 15 bp, Homo sapiens
actattctccttata

SEQ ID NO: 2069608 - DNA, 15 bp, Homo sapiens
ctattctccttatag

SEQ ID NO: 2069609 - DNA, 15 bp, Homo sapiens
tattctccttatagt

SEQ ID NO: 2069610 - DNA, 15 bp, Homo sapiens
attctccttatagtt

SEQ ID NO: 2069611 - DNA, 15 bp, Homo sapiens
ttctccttatagttc

SEQ ID NO: 2069612 - DNA, 15 bp, Homo sapiens
tctccttatagttct

SEQ ID NO: 2069613 - DNA, 15 bp, Homo sapiens
ctccttatagttcta

SEQ ID NO: 2069614 - DNA, 15 bp, Homo sapiens
tccttatagttctat

SEQ ID NO: 2069615 - DNA, 15 bp, Homo sapiens
ccttatagttctatc

SEQ ID NO: 2069616 - DNA, 15 bp, Homo sapiens
cttatagttctatca

SEQ ID NO: 2069617 - DNA, 15 bp, Homo sapiens
ttatagttctatcag

SEQ ID NO: 2069618 - DNA, 15 bp, Homo sapiens
tatagttctatcagc

SEQ ID NO: 2069619 - DNA, 15 bp, Homo sapiens
atagttctatcagct

SEQ ID NO: 2069620 - DNA, 15 bp, Homo sapiens
tagttctatcagctt

SEQ ID NO: 2069621 - DNA, 15 bp, Homo sapiens
agttctatcagcttt

SEQ ID NO: 2069622 - DNA, 15 bp, Homo sapiens
gttctatcagctttt

SEQ ID NO: 2069623 - DNA, 15 bp, Homo sapiens
ttctatcagcttttg

SEQ ID NO: 2069624 - DNA, 15 bp, Homo sapiens
tctatcagcttttgc

SEQ ID NO: 2069625 - DNA, 15 bp, Homo sapiens
ctatcagcttttgct

SEQ ID NO: 2069626 - DNA, 15 bp, Homo sapiens
tatcagcttttgctt

SEQ ID NO: 2069627 - DNA, 15 bp, Homo sapiens
atcagcttttgcttc

SEQ ID NO: 2069628 - DNA, 15 bp, Homo sapiens
tcagcttttgcttca

SEQ ID NO: 2069629 - DNA, 15 bp, Homo sapiens
cagcttttgcttcat

SEQ ID NO: 2069630 - DNA, 15 bp, Homo sapiens
agcttttgcttcatg

SEQ ID NO: 2069631 - DNA, 15 bp, Homo sapiens
gcttttgcttcatgt

SEQ ID NO: 2069632 - DNA, 15 bp, Homo sapiens
cttttgcttcatgta

SEQ ID NO: 2069633 - DNA, 15 bp, Homo sapiens
ttttgcttcatgtat

SEQ ID NO: 2069634 - DNA, 15 bp, Homo sapiens
tttgcttcatgtatt

SEQ ID NO: 2069635 - DNA, 15 bp, Homo sapiens
ttgcttcatgtattt

SEQ ID NO: 2069636 - DNA, 15 bp, Homo sapiens
tgcttcatgtatttt

SEQ ID NO: 2069637 - DNA, 15 bp, Homo sapiens
gcttcatgtattttg

SEQ ID NO: 2069638 - DNA, 15 bp, Homo sapiens
cttcatgtattttga

SEQ ID NO: 2069639 - DNA, 15 bp, Homo sapiens
ttcatgtattttgaa

SEQ ID NO: 2069640 - DNA, 15 bp, Homo sapiens
tcatgtattttgaag

SEQ ID NO: 2069641 - DNA, 15 bp, Homo sapiens
catgtattttgaaga

SEQ ID NO: 2069642 - DNA, 15 bp, Homo sapiens
atgtattttgaagat

SEQ ID NO: 2069643 - DNA, 15 bp, Homo sapiens
tgtattttgaagatc

SEQ ID NO: 2069644 - DNA, 15 bp, Homo sapiens
gtattttgaagatct

SEQ ID NO: 2069645 - DNA, 15 bp, Homo sapiens
tattttgaagatctg

SEQ ID NO: 2069646 - DNA, 15 bp, Homo sapiens
attttgaagatctgt

SEQ ID NO: 2069647 - DNA, 15 bp, Homo sapiens
ttttgaagatctgtt

SEQ ID NO: 2069648 - DNA, 15 bp, Homo sapiens
tttgaagatctgtta

SEQ ID NO: 2069649 - DNA, 15 bp, Homo sapiens
ttgaagatctgttac

SEQ ID NO: 2069650 - DNA, 15 bp, Homo sapiens
tgaagatctgttact

SEQ ID NO: 2069651 - DNA, 15 bp, Homo sapiens
gaagatctgttacta

SEQ ID NO: 2069652 - DNA, 15 bp, Homo sapiens
aagatctgttactag

SEQ ID NO: 2069653 - DNA, 15 bp, Homo sapiens
agatctgttactagg

SEQ ID NO: 2069654 - DNA, 15 bp, Homo sapiens
gatctgttactaggt

SEQ ID NO: 2069655 - DNA, 15 bp, Homo sapiens
atctgttactaggtt

SEQ ID NO: 2069656 - DNA, 15 bp, Homo sapiens
tctgttactaggttc

SEQ ID NO: 2069657 - DNA, 15 bp, Homo sapiens
ctgttactaggttca

SEQ ID NO: 2069658 - DNA, 15 bp, Homo sapiens
tgttactaggttcat

SEQ ID NO: 2069659 - DNA, 15 bp, Homo sapiens
gttactaggttcata

SEQ ID NO: 2069660 - DNA, 15 bp, Homo sapiens
ttactaggttcataa

SEQ ID NO: 2069661 - DNA, 15 bp, Homo sapiens
tactaggttcataaa

SEQ ID NO: 2069662 - DNA, 15 bp, Homo sapiens
actaggttcataaac

SEQ ID NO: 2069663 - DNA, 15 bp, Homo sapiens
ctaggttcataaaca

SEQ ID NO: 2069664 - DNA, 15 bp, Homo sapiens
taggttcataaacac

SEQ ID NO: 2069665 - DNA, 15 bp, Homo sapiens
aggttcataaacact

SEQ ID NO: 2069666 - DNA, 15 bp, Homo sapiens
ggttcataaacactt

SEQ ID NO: 2069667 - DNA, 15 bp, Homo sapiens
gttcataaacactta

SEQ ID NO: 2069668 - DNA, 15 bp, Homo sapiens
ttcataaacacttag

SEQ ID NO: 2069669 - DNA, 15 bp, Homo sapiens
tcataaacacttagg

SEQ ID NO: 2069670 - DNA, 15 bp, Homo sapiens
cataaacacttagga

SEQ ID NO: 2069671 - DNA, 15 bp, Homo sapiens
ataaacacttaggat

SEQ ID NO: 2069672 - DNA, 15 bp, Homo sapiens
taaacacttaggatt

SEQ ID NO: 2069673 - DNA, 15 bp, Homo sapiens
aaacacttaggattg

SEQ ID NO: 2069674 - DNA, 15 bp, Homo sapiens
aacacttaggattgt

SEQ ID NO: 2069675 - DNA, 15 bp, Homo sapiens
acacttaggattgtt

SEQ ID NO: 2069676 - DNA, 15 bp, Homo sapiens
cacttaggattgtta

SEQ ID NO: 2069677 - DNA, 15 bp, Homo sapiens
acttaggattgttat

SEQ ID NO: 2069678 - DNA, 15 bp, Homo sapiens
cttaggattgttatg

SEQ ID NO: 2069679 - DNA, 15 bp, Homo sapiens
ttaggattgttatgt

SEQ ID NO: 2069680 - DNA, 15 bp, Homo sapiens
taggattgttatgtc

SEQ ID NO: 2069681 - DNA, 15 bp, Homo sapiens
aggattgttatgtcc

SEQ ID NO: 2069682 - DNA, 15 bp, Homo sapiens
ggattgttatgtcct

SEQ ID NO: 2069683 - DNA, 15 bp, Homo sapiens
gattgttatgtcctc

SEQ ID NO: 2069684 - DNA, 15 bp, Homo sapiens
attgttatgtcctct

SEQ ID NO: 2069685 - DNA, 15 bp, Homo sapiens
ttgttatgtcctctt

SEQ ID NO: 2069686 - DNA, 15 bp, Homo sapiens
tgttatgtcctcttg

SEQ ID NO: 2069687 - DNA, 15 bp, Homo sapiens
gttatgtcctcttga

SEQ ID NO: 2069688 - DNA, 15 bp, Homo sapiens
ttatgtcctcttgaa

SEQ ID NO: 2069689 - DNA, 15 bp, Homo sapiens
tatgtcctcttgaat

SEQ ID NO: 2069690 - DNA, 15 bp, Homo sapiens
atgtcctcttgaatt

SEQ ID NO: 2069691 - DNA, 15 bp, Homo sapiens
tgtcctcttgaattc

SEQ ID NO: 2069692 - DNA, 15 bp, Homo sapiens
gtcctcttgaattca

SEQ ID NO: 2069693 - DNA, 15 bp, Homo sapiens
tcctcttgaattcaa

SEQ ID NO: 2069694 - DNA, 15 bp, Homo sapiens
cctcttgaattcaat

SEQ ID NO: 2069695 - DNA, 15 bp, Homo sapiens
ctcttgaattcaata

SEQ ID NO: 2069696 - DNA, 15 bp, Homo sapiens
tcttgaattcaatat

SEQ ID NO: 2069697 - DNA, 15 bp, Homo sapiens
cttgaattcaatatt

SEQ ID NO: 2069698 - DNA, 15 bp, Homo sapiens
ttgaattcaatattt

SEQ ID NO: 2069699 - DNA, 15 bp, Homo sapiens
tgaattcaatatttt

SEQ ID NO: 2069700 - DNA, 15 bp, Homo sapiens
gaattcaatatttta

SEQ ID NO: 2069701 - DNA, 15 bp, Homo sapiens
aattcaatattttat

SEQ ID NO: 2069702 - DNA, 15 bp, Homo sapiens
attcaatattttatc

SEQ ID NO: 2069703 - DNA, 15 bp, Homo sapiens
ttcaatattttatca

SEQ ID NO: 2069704 - DNA, 15 bp, Homo sapiens
tcaatattttatcat

SEQ ID NO: 2069705 - DNA, 15 bp, Homo sapiens
caatattttatcatt

SEQ ID NO: 2069706 - DNA, 15 bp, Homo sapiens
aatattttatcatta

SEQ ID NO: 2069707 - DNA, 15 bp, Homo sapiens
atattttatcattat

SEQ ID NO: 2069708 - DNA, 15 bp, Homo sapiens
tattttatcattatg

SEQ ID NO: 2069709 - DNA, 15 bp, Homo sapiens
attttatcattatga

SEQ ID NO: 2069710 - DNA, 15 bp, Homo sapiens
ttttatcattatgaa

SEQ ID NO: 2069711 - DNA, 15 bp, Homo sapiens
tttatcattatgaaa

SEQ ID NO: 2069712 - DNA, 15 bp, Homo sapiens
ttatcattatgaaat

SEQ ID NO: 2069713 - DNA, 15 bp, Homo sapiens
tatcattatgaaatg

SEQ ID NO: 2069714 - DNA, 15 bp, Homo sapiens
atcattatgaaatga

SEQ ID NO: 2069715 - DNA, 15 bp, Homo sapiens
tcattatgaaatgat

SEQ ID NO: 2069716 - DNA, 15 bp, Homo sapiens
cattatgaaatgatc

SEQ ID NO: 2069717 - DNA, 15 bp, Homo sapiens
attatgaaatgatct

SEQ ID NO: 2069718 - DNA, 15 bp, Homo sapiens
ttatgaaatgatctc

SEQ ID NO: 2069719 - DNA, 15 bp, Homo sapiens
tatgaaatgatctct

SEQ ID NO: 2069720 - DNA, 15 bp, Homo sapiens
atgaaatgatctctt

SEQ ID NO: 2069721 - DNA, 15 bp, Homo sapiens
tgaaatgatctcttt

SEQ ID NO: 2069722 - DNA, 15 bp, Homo sapiens
gaaatgatctctttt

SEQ ID NO: 2069723 - DNA, 15 bp, Homo sapiens
aaatgatctcttttt

SEQ ID NO: 2069724 - DNA, 15 bp, Homo sapiens
aatgatctctttttt

SEQ ID NO: 2069725 - DNA, 15 bp, Homo sapiens
atgatctctttttta

SEQ ID NO: 2069726 - DNA, 15 bp, Homo sapiens
tgatctcttttttat

SEQ ID NO: 2069727 - DNA, 15 bp, Homo sapiens
gatctcttttttatc

SEQ ID NO: 2069728 - DNA, 15 bp, Homo sapiens
atctcttttttatct

SEQ ID NO: 2069729 - DNA, 15 bp, Homo sapiens
tctcttttttatctc

SEQ ID NO: 2069730 - DNA, 15 bp, Homo sapiens
ctcttttttatctct

SEQ ID NO: 2069731 - DNA, 15 bp, Homo sapiens
tcttttttatctctg

SEQ ID NO: 2069732 - DNA, 15 bp, Homo sapiens
cttttttatctctgc

SEQ ID NO: 2069733 - DNA, 15 bp, Homo sapiens
ttttttatctctgct

SEQ ID NO: 2069734 - DNA, 15 bp, Homo sapiens
tttttatctctgcta

SEQ ID NO: 2069735 - DNA, 15 bp, Homo sapiens
ttttatctctgctaa

SEQ ID NO: 2069736 - DNA, 15 bp, Homo sapiens
tttatctctgctaat

SEQ ID NO: 2069737 - DNA, 15 bp, Homo sapiens
ttatctctgctaata

SEQ ID NO: 2069738 - DNA, 15 bp, Homo sapiens
tatctctgctaatat

SEQ ID NO: 2069739 - DNA, 15 bp, Homo sapiens
atctctgctaatatt

SEQ ID NO: 2069740 - DNA, 15 bp, Homo sapiens
tctctgctaatattc

SEQ ID NO: 2069741 - DNA, 15 bp, Homo sapiens
ctctgctaatattcc

SEQ ID NO: 2069742 - DNA, 15 bp, Homo sapiens
tctgctaatattcca

SEQ ID NO: 2069743 - DNA, 15 bp, Homo sapiens
ctgctaatattccat

SEQ ID NO: 2069744 - DNA, 15 bp, Homo sapiens
tgctaatattccatg

SEQ ID NO: 2069745 - DNA, 15 bp, Homo sapiens
gctaatattccatgt

SEQ ID NO: 2069746 - DNA, 15 bp, Homo sapiens
ctaatattccatgtt

SEQ ID NO: 2069747 - DNA, 15 bp, Homo sapiens
taatattccatgttc

SEQ ID NO: 2069748 - DNA, 15 bp, Homo sapiens
aatattccatgttct

SEQ ID NO: 2069749 - DNA, 15 bp, Homo sapiens
atattccatgttctg

SEQ ID NO: 2069750 - DNA, 15 bp, Homo sapiens
tattccatgttctga

SEQ ID NO: 2069751 - DNA, 15 bp, Homo sapiens
attccatgttctgaa

SEQ ID NO: 2069752 - DNA, 15 bp, Homo sapiens
ttccatgttctgaag

SEQ ID NO: 2069753 - DNA, 15 bp, Homo sapiens
tccatgttctgaagt

SEQ ID NO: 2069754 - DNA, 15 bp, Homo sapiens
ccatgttctgaagtc

SEQ ID NO: 2069755 - DNA, 15 bp, Homo sapiens
catgttctgaagtct

SEQ ID NO: 2069756 - DNA, 15 bp, Homo sapiens
atgttctgaagtctt

SEQ ID NO: 2069757 - DNA, 15 bp, Homo sapiens
tgttctgaagtcttt

SEQ ID NO: 2069758 - DNA, 15 bp, Homo sapiens
gttctgaagtctttt

SEQ ID NO: 2069759 - DNA, 15 bp, Homo sapiens
ttctgaagtcttttt

SEQ ID NO: 2069760 - DNA, 15 bp, Homo sapiens
tctgaagtctttttc

SEQ ID NO: 2069761 - DNA, 15 bp, Homo sapiens
ctgaagtctttttct

SEQ ID NO: 2069762 - DNA, 15 bp, Homo sapiens
tgaagtctttttctg

SEQ ID NO: 2069763 - DNA, 15 bp, Homo sapiens
gaagtctttttctga

SEQ ID NO: 2069764 - DNA, 15 bp, Homo sapiens
aagtctttttctgat

SEQ ID NO: 2069765 - DNA, 15 bp, Homo sapiens
agtctttttctgatt

SEQ ID NO: 2069766 - DNA, 15 bp, Homo sapiens
gtctttttctgatta

SEQ ID NO: 2069767 - DNA, 15 bp, Homo sapiens
tctttttctgattat

SEQ ID NO: 2069768 - DNA, 15 bp, Homo sapiens
ctttttctgattatt

SEQ ID NO: 2069769 - DNA, 15 bp, Homo sapiens
tttttctgattattt

SEQ ID NO: 2069770 - DNA, 15 bp, Homo sapiens
ttttctgattattta

SEQ ID NO: 2069771 - DNA, 15 bp, Homo sapiens
tttctgattatttag

SEQ ID NO: 2069772 - DNA, 15 bp, Homo sapiens
ttctgattatttaga

SEQ ID NO: 2069773 - DNA, 15 bp, Homo sapiens
tctgattatttagac

SEQ ID NO: 2069774 - DNA, 15 bp, Homo sapiens
ctgattatttagacc

SEQ ID NO: 2069775 - DNA, 15 bp, Homo sapiens
tgattatttagacca

SEQ ID NO: 2069776 - DNA, 15 bp, Homo sapiens
gattatttagaccag

SEQ ID NO: 2069777 - DNA, 15 bp, Homo sapiens
attatttagaccagt

SEQ ID NO: 2069778 - DNA, 15 bp, Homo sapiens
ttatttagaccagtt

SEQ ID NO: 2069779 - DNA, 15 bp, Homo sapiens
tatttagaccagttt

SEQ ID NO: 2069780 - DNA, 15 bp, Homo sapiens
atttagaccagtttc

SEQ ID NO: 2069781 - DNA, 15 bp, Homo sapiens
tttagaccagtttca

SEQ ID NO: 2069782 - DNA, 15 bp, Homo sapiens
ttagaccagtttcat

SEQ ID NO: 2069783 - DNA, 15 bp, Homo sapiens
tagaccagtttcatt

SEQ ID NO: 2069784 - DNA, 15 bp, Homo sapiens
agaccagtttcattt

SEQ ID NO: 2069785 - DNA, 15 bp, Homo sapiens
gaccagtttcattta

SEQ ID NO: 2069786 - DNA, 15 bp, Homo sapiens
accagtttcatttaa

SEQ ID NO: 2069787 - DNA, 15 bp, Homo sapiens
ccagtttcatttaat

SEQ ID NO: 2069788 - DNA, 15 bp, Homo sapiens
cagtttcatttaata

SEQ ID NO: 2069789 - DNA, 15 bp, Homo sapiens
agtttcatttaatat

SEQ ID NO: 2069790 - DNA, 15 bp, Homo sapiens
gtttcatttaatatg

SEQ ID NO: 2069791 - DNA, 15 bp, Homo sapiens
tttcatttaatatgg

SEQ ID NO: 2069792 - DNA, 15 bp, Homo sapiens
ttcatttaatatggt

SEQ ID NO: 2069793 - DNA, 15 bp, Homo sapiens
tcatttaatatggtt

SEQ ID NO: 2069794 - DNA, 15 bp, Homo sapiens
catttaatatggtta

SEQ ID NO: 2069795 - DNA, 15 bp, Homo sapiens
atttaatatggttat

SEQ ID NO: 2069796 - DNA, 15 bp, Homo sapiens
tttaatatggttatt

SEQ ID NO: 2069797 - DNA, 15 bp, Homo sapiens
ttaatatggttattg

SEQ ID NO: 2069798 - DNA, 15 bp, Homo sapiens
taatatggttattga

SEQ ID NO: 2069799 - DNA, 15 bp, Homo sapiens
aatatggttattgat

SEQ ID NO: 2069800 - DNA, 15 bp, Homo sapiens
atatggttattgata

SEQ ID NO: 2069801 - DNA, 15 bp, Homo sapiens
tatggttattgatat

SEQ ID NO: 2069802 - DNA, 15 bp, Homo sapiens
atggttattgatatg

SEQ ID NO: 2069803 - DNA, 15 bp, Homo sapiens
tggttattgatatgt

SEQ ID NO: 2069804 - DNA, 15 bp, Homo sapiens
ggttattgatatgtt

SEQ ID NO: 2069805 - DNA, 15 bp, Homo sapiens
gttattgatatgttg

SEQ ID NO: 2069806 - DNA, 15 bp, Homo sapiens
ttattgatatgttga

SEQ ID NO: 2069807 - DNA, 15 bp, Homo sapiens
tattgatatgttgag

SEQ ID NO: 2069808 - DNA, 15 bp, Homo sapiens
attgatatgttgagt

SEQ ID NO: 2069809 - DNA, 15 bp, Homo sapiens
ttgatatgttgagtt

SEQ ID NO: 2069810 - DNA, 15 bp, Homo sapiens
tgatatgttgagttt

SEQ ID NO: 2069811 - DNA, 15 bp, Homo sapiens
gatatgttgagttta

SEQ ID NO: 2069812 - DNA, 15 bp, Homo sapiens
atatgttgagtttaa

SEQ ID NO: 2069813 - DNA, 15 bp, Homo sapiens
tatgttgagtttaaa

SEQ ID NO: 2069814 - DNA, 15 bp, Homo sapiens
atgttgagtttaaat

SEQ ID NO: 2069815 - DNA, 15 bp, Homo sapiens
tgttgagtttaaata

SEQ ID NO: 2069816 - DNA, 15 bp, Homo sapiens
gttgagtttaaatat

SEQ ID NO: 2069817 - DNA, 15 bp, Homo sapiens
ttgagtttaaatata

SEQ ID NO: 2069818 - DNA, 15 bp, Homo sapiens
tgagtttaaatatac

SEQ ID NO: 2069819 - DNA, 15 bp, Homo sapiens
gagtttaaatatact

SEQ ID NO: 2069820 - DNA, 15 bp, Homo sapiens
agtttaaatatacta

SEQ ID NO: 2069821 - DNA, 15 bp, Homo sapiens
gtttaaatatactat

SEQ ID NO: 2069822 - DNA, 15 bp, Homo sapiens
tttaaatatactatc

SEQ ID NO: 2069823 - DNA, 15 bp, Homo sapiens
ttaaatatactatct

SEQ ID NO: 2069824 - DNA, 15 bp, Homo sapiens
taaatatactatctt

SEQ ID NO: 2069825 - DNA, 15 bp, Homo sapiens
aaatatactatcttg

SEQ ID NO: 2069826 - DNA, 15 bp, Homo sapiens
aatatactatcttgc

SEQ ID NO: 2069827 - DNA, 15 bp, Homo sapiens
atatactatcttgct

SEQ ID NO: 2069828 - DNA, 15 bp, Homo sapiens
tatactatcttgctg

SEQ ID NO: 2069829 - DNA, 15 bp, Homo sapiens
atactatcttgctgt

SEQ ID NO: 2069830 - DNA, 15 bp, Homo sapiens
tactatcttgctgtt

SEQ ID NO: 2069831 - DNA, 15 bp, Homo sapiens
actatcttgctgttt

SEQ ID NO: 2069832 - DNA, 15 bp, Homo sapiens
ctatcttgctgtttg

SEQ ID NO: 2069833 - DNA, 15 bp, Homo sapiens
tatcttgctgtttgt

SEQ ID NO: 2069834 - DNA, 15 bp, Homo sapiens
atcttgctgtttgtg

SEQ ID NO: 2069835 - DNA, 15 bp, Homo sapiens
tcttgctgtttgtgt

SEQ ID NO: 2069836 - DNA, 15 bp, Homo sapiens
cttgctgtttgtgtt

SEQ ID NO: 2069837 - DNA, 15 bp, Homo sapiens
ttgctgtttgtgttc

SEQ ID NO: 2069838 - DNA, 15 bp, Homo sapiens
tgctgtttgtgttct

SEQ ID NO: 2069839 - DNA, 15 bp, Homo sapiens
gctgtttgtgttcta

SEQ ID NO: 2069840 - DNA, 15 bp, Homo sapiens
ctgtttgtgttctat

SEQ ID NO: 2069841 - DNA, 15 bp, Homo sapiens
tgtttgtgttctatt

SEQ ID NO: 2069842 - DNA, 15 bp, Homo sapiens
gtttgtgttctattt

SEQ ID NO: 2069843 - DNA, 15 bp, Homo sapiens
tttgtgttctatttg

SEQ ID NO: 2069844 - DNA, 15 bp, Homo sapiens
ttgtgttctatttga

SEQ ID NO: 2069845 - DNA, 15 bp, Homo sapiens
tgtgttctatttgag

SEQ ID NO: 2069846 - DNA, 15 bp, Homo sapiens
gtgttctatttgaga

SEQ ID NO: 2069847 - DNA, 15 bp, Homo sapiens
tgttctatttgagac

SEQ ID NO: 2069848 - DNA, 15 bp, Homo sapiens
gttctatttgagact

SEQ ID NO: 2069849 - DNA, 15 bp, Homo sapiens
ttctatttgagactt

SEQ ID NO: 2069850 - DNA, 15 bp, Homo sapiens
tctatttgagacttc

SEQ ID NO: 2069851 - DNA, 15 bp, Homo sapiens
ctatttgagacttca

SEQ ID NO: 2069852 - DNA, 15 bp, Homo sapiens
tatttgagacttcaa

SEQ ID NO: 2069853 - DNA, 15 bp, Homo sapiens
atttgagacttcaac

SEQ ID NO: 2069854 - DNA, 15 bp, Homo sapiens
tttgagacttcaact

SEQ ID NO: 2069855 - DNA, 15 bp, Homo sapiens
ttgagacttcaacta

SEQ ID NO: 2069856 - DNA, 15 bp, Homo sapiens
tgagacttcaactat

SEQ ID NO: 2069857 - DNA, 15 bp, Homo sapiens
gagacttcaactatg

SEQ ID NO: 2069858 - DNA, 15 bp, Homo sapiens
agacttcaactatgt

SEQ ID NO: 2069859 - DNA, 15 bp, Homo sapiens
gacttcaactatgtc

SEQ ID NO: 2069860 - DNA, 15 bp, Homo sapiens
acttcaactatgtct

SEQ ID NO: 2069861 - DNA, 15 bp, Homo sapiens
cttcaactatgtctt

SEQ ID NO: 2069862 - DNA, 15 bp, Homo sapiens
ttcaactatgtcttc

SEQ ID NO: 2069863 - DNA, 15 bp, Homo sapiens
tcaactatgtcttcc

SEQ ID NO: 2069864 - DNA, 15 bp, Homo sapiens
caactatgtcttcct

SEQ ID NO: 2069865 - DNA, 15 bp, Homo sapiens
aactatgtcttcctt

SEQ ID NO: 2069866 - DNA, 15 bp, Homo sapiens
actatgtcttccttt

SEQ ID NO: 2069867 - DNA, 15 bp, Homo sapiens
ctatgtcttcctttt

SEQ ID NO: 2069868 - DNA, 15 bp, Homo sapiens
tatgtcttccttttc

SEQ ID NO: 2069869 - DNA, 15 bp, Homo sapiens
atgtcttccttttcc

SEQ ID NO: 2069870 - DNA, 15 bp, Homo sapiens
tgtcttccttttcct

SEQ ID NO: 2069871 - DNA, 15 bp, Homo sapiens
gtcttccttttcctc

SEQ ID NO: 2069872 - DNA, 15 bp, Homo sapiens
tcttccttttcctct

SEQ ID NO: 2069873 - DNA, 15 bp, Homo sapiens
cttccttttcctctt

SEQ ID NO: 2069874 - DNA, 15 bp, Homo sapiens
ttccttttcctcttt

SEQ ID NO: 2069875 - DNA, 15 bp, Homo sapiens
tccttttcctctttt

SEQ ID NO: 2069876 - DNA, 15 bp, Homo sapiens
ccttttcctcttttt

SEQ ID NO: 2069877 - DNA, 15 bp, Homo sapiens
cttttcctcttttta

SEQ ID NO: 2069878 - DNA, 15 bp, Homo sapiens
ttttcctctttttat

SEQ ID NO: 2069879 - DNA, 15 bp, Homo sapiens
tttcctctttttatg

SEQ ID NO: 2069880 - DNA, 15 bp, Homo sapiens
ttcctctttttatgc

SEQ ID NO: 2069881 - DNA, 15 bp, Homo sapiens
tcctctttttatgcc

SEQ ID NO: 2069882 - DNA, 15 bp, Homo sapiens
cctctttttatgcct

SEQ ID NO: 2069883 - DNA, 15 bp, Homo sapiens
ctctttttatgcctt

SEQ ID NO: 2069884 - DNA, 15 bp, Homo sapiens
tctttttatgccttt

SEQ ID NO: 2069885 - DNA, 15 bp, Homo sapiens
ctttttatgcctttt

SEQ ID NO: 2069886 - DNA, 15 bp, Homo sapiens
tttttatgccttttt

SEQ ID NO: 2069887 - DNA, 15 bp, Homo sapiens
ttttatgcctttttt

SEQ ID NO: 2069888 - DNA, 15 bp, Homo sapiens
tttatgccttttttt

SEQ ID NO: 2069889 - DNA, 15 bp, Homo sapiens
ttatgcctttttttg

SEQ ID NO: 2069890 - DNA, 15 bp, Homo sapiens
tatgcctttttttgg

SEQ ID NO: 2069891 - DNA, 15 bp, Homo sapiens
atgcctttttttggg

SEQ ID NO: 2069892 - DNA, 15 bp, Homo sapiens
tgcctttttttgggg

SEQ ID NO: 2069893 - DNA, 15 bp, Homo sapiens
gcctttttttggggt

SEQ ID NO: 2069894 - DNA, 15 bp, Homo sapiens
cctttttttggggta

SEQ ID NO: 2069895 - DNA, 15 bp, Homo sapiens
ctttttttggggtat

SEQ ID NO: 2069896 - DNA, 15 bp, Homo sapiens
tttttttggggtatt

SEQ ID NO: 2069897 - DNA, 15 bp, Homo sapiens
ttttttggggtattg

SEQ ID NO: 2069898 - DNA, 15 bp, Homo sapiens
tttttggggtattga

SEQ ID NO: 2069899 - DNA, 15 bp, Homo sapiens
ttttggggtattgag

SEQ ID NO: 2069900 - DNA, 15 bp, Homo sapiens
tttggggtattgagt

SEQ ID NO: 2069901 - DNA, 15 bp, Homo sapiens
ttggggtattgagtg

SEQ ID NO: 2069902 - DNA, 15 bp, Homo sapiens
tggggtattgagtgt

SEQ ID NO: 2069903 - DNA, 15 bp, Homo sapiens
ggggtattgagtgtt

SEQ ID NO: 2069904 - DNA, 15 bp, Homo sapiens
gggtattgagtgttt

SEQ ID NO: 2069905 - DNA, 15 bp, Homo sapiens
ggtattgagtgtttt

SEQ ID NO: 2069906 - DNA, 15 bp, Homo sapiens
gtattgagtgttttc

SEQ ID NO: 2069907 - DNA, 15 bp, Homo sapiens
tattgagtgttttct

SEQ ID NO: 2069908 - DNA, 15 bp, Homo sapiens
attgagtgttttcta

SEQ ID NO: 2069909 - DNA, 15 bp, Homo sapiens
ttgagtgttttctac

SEQ ID NO: 2069910 - DNA, 15 bp, Homo sapiens
tgagtgttttctaca

SEQ ID NO: 2069911 - DNA, 15 bp, Homo sapiens
gagtgttttctacaa

SEQ ID NO: 2069912 - DNA, 15 bp, Homo sapiens
agtgttttctacaat

SEQ ID NO: 2069913 - DNA, 15 bp, Homo sapiens
gtgttttctacaatt

SEQ ID NO: 2069914 - DNA, 15 bp, Homo sapiens
tgttttctacaattt

SEQ ID NO: 2069915 - DNA, 15 bp, Homo sapiens
gttttctacaatttc

SEQ ID NO: 2069916 - DNA, 15 bp, Homo sapiens
ttttctacaatttca

SEQ ID NO: 2069917 - DNA, 15 bp, Homo sapiens
tttctacaatttcat

SEQ ID NO: 2069918 - DNA, 15 bp, Homo sapiens
ttctacaatttcatt

SEQ ID NO: 2069919 - DNA, 15 bp, Homo sapiens
tctacaatttcatta

SEQ ID NO: 2069920 - DNA, 15 bp, Homo sapiens
ctacaatttcattat

SEQ ID NO: 2069921 - DNA, 15 bp, Homo sapiens
tacaatttcattata

SEQ ID NO: 2069922 - DNA, 15 bp, Homo sapiens
acaatttcattatat

SEQ ID NO: 2069923 - DNA, 15 bp, Homo sapiens
caatttcattatatc

SEQ ID NO: 2069924 - DNA, 15 bp, Homo sapiens
aatttcattatatct

SEQ ID NO: 2069925 - DNA, 15 bp, Homo sapiens
atttcattatatctc

SEQ ID NO: 2069926 - DNA, 15 bp, Homo sapiens
tttcattatatctcc

SEQ ID NO: 2069927 - DNA, 15 bp, Homo sapiens
ttcattatatctcct

SEQ ID NO: 2069928 - DNA, 15 bp, Homo sapiens
tcattatatctcctt

SEQ ID NO: 2069929 - DNA, 15 bp, Homo sapiens
cattatatctccttt

SEQ ID NO: 2069930 - DNA, 15 bp, Homo sapiens
attatatctcctttt

SEQ ID NO: 2069931 - DNA, 15 bp, Homo sapiens
ttatatctccttttt

SEQ ID NO: 2069932 - DNA, 15 bp, Homo sapiens
tatatctcctttttt

SEQ ID NO: 2069933 - DNA, 15 bp, Homo sapiens
atatctccttttttg

SEQ ID NO: 2069934 - DNA, 15 bp, Homo sapiens
tatctccttttttgc

SEQ ID NO: 2069935 - DNA, 15 bp, Homo sapiens
atctccttttttgca

SEQ ID NO: 2069936 - DNA, 15 bp, Homo sapiens
tctccttttttgcat

SEQ ID NO: 2069937 - DNA, 15 bp, Homo sapiens
ctccttttttgcata

SEQ ID NO: 2069938 - DNA, 15 bp, Homo sapiens
tccttttttgcatat

SEQ ID NO: 2069939 - DNA, 15 bp, Homo sapiens
ccttttttgcatatt

SEQ ID NO: 2069940 - DNA, 15 bp, Homo sapiens
cttttttgcatatta

SEQ ID NO: 2069941 - DNA, 15 bp, Homo sapiens
ttttttgcatattag

SEQ ID NO: 2069942 - DNA, 15 bp, Homo sapiens
tttttgcatattagc

SEQ ID NO: 2069943 - DNA, 15 bp, Homo sapiens
ttttgcatattagca

SEQ ID NO: 2069944 - DNA, 15 bp, Homo sapiens
tttgcatattagcaa

SEQ ID NO: 2069945 - DNA, 15 bp, Homo sapiens
ttgcatattagcaaa

SEQ ID NO: 2069946 - DNA, 15 bp, Homo sapiens
tgcatattagcaaaa

SEQ ID NO: 2069947 - DNA, 15 bp, Homo sapiens
gcatattagcaaaac

SEQ ID NO: 2069948 - DNA, 15 bp, Homo sapiens
catattagcaaaaca

SEQ ID NO: 2069949 - DNA, 15 bp, Homo sapiens
atattagcaaaacat

SEQ ID NO: 2069950 - DNA, 15 bp, Homo sapiens
tattagcaaaacatt

SEQ ID NO: 2069951 - DNA, 15 bp, Homo sapiens
attagcaaaacattt

SEQ ID NO: 2069952 - DNA, 15 bp, Homo sapiens
ttagcaaaacatttt

SEQ ID NO: 2069953 - DNA, 15 bp, Homo sapiens
tagcaaaacattttc

SEQ ID NO: 2069954 - DNA, 15 bp, Homo sapiens
agcaaaacattttca

SEQ ID NO: 2069955 - DNA, 15 bp, Homo sapiens
gcaaaacattttcat

SEQ ID NO: 2069956 - DNA, 15 bp, Homo sapiens
caaaacattttcatg

SEQ ID NO: 2069957 - DNA, 15 bp, Homo sapiens
aaaacattttcatgt

SEQ ID NO: 2069958 - DNA, 15 bp, Homo sapiens
aaacattttcatgtg

SEQ ID NO: 2069959 - DNA, 15 bp, Homo sapiens
aacattttcatgtgt

SEQ ID NO: 2069960 - DNA, 15 bp, Homo sapiens
acattttcatgtgtt

SEQ ID NO: 2069961 - DNA, 15 bp, Homo sapiens
cattttcatgtgttg

SEQ ID NO: 2069962 - DNA, 15 bp, Homo sapiens
attttcatgtgttgt

SEQ ID NO: 2069963 - DNA, 15 bp, Homo sapiens
ttttcatgtgttgtt

SEQ ID NO: 2069964 - DNA, 15 bp, Homo sapiens
tttcatgtgttgttt

SEQ ID NO: 2069965 - DNA, 15 bp, Homo sapiens
ttcatgtgttgtttt

SEQ ID NO: 2069966 - DNA, 15 bp, Homo sapiens
tcatgtgttgtttta

SEQ ID NO: 2069967 - DNA, 15 bp, Homo sapiens
catgtgttgttttag

SEQ ID NO: 2069968 - DNA, 15 bp, Homo sapiens
atgtgttgttttagt

SEQ ID NO: 2069969 - DNA, 15 bp, Homo sapiens
tgtgttgttttagtg

SEQ ID NO: 2069970 - DNA, 15 bp, Homo sapiens
gtgttgttttagtgg

SEQ ID NO: 2069971 - DNA, 15 bp, Homo sapiens
tgttgttttagtggt

SEQ ID NO: 2069972 - DNA, 15 bp, Homo sapiens
gttgttttagtggtt

SEQ ID NO: 2069973 - DNA, 15 bp, Homo sapiens
ttgttttagtggttg

SEQ ID NO: 2069974 - DNA, 15 bp, Homo sapiens
tgttttagtggttgc

SEQ ID NO: 2069975 - DNA, 15 bp, Homo sapiens
gttttagtggttgct

SEQ ID NO: 2069976 - DNA, 15 bp, Homo sapiens
ttttagtggttgctt

SEQ ID NO: 2069977 - DNA, 15 bp, Homo sapiens
tttagtggttgcttt

SEQ ID NO: 2069978 - DNA, 15 bp, Homo sapiens
ttagtggttgctttg

SEQ ID NO: 2069979 - DNA, 15 bp, Homo sapiens
tagtggttgctttga

SEQ ID NO: 2069980 - DNA, 15 bp, Homo sapiens
agtggttgctttgag

SEQ ID NO: 2069981 - DNA, 15 bp, Homo sapiens
gtggttgctttgaga

SEQ ID NO: 2069982 - DNA, 15 bp, Homo sapiens
tggttgctttgagat

SEQ ID NO: 2069983 - DNA, 15 bp, Homo sapiens
ggttgctttgagatt

SEQ ID NO: 2069984 - DNA, 15 bp, Homo sapiens
gttgctttgagattt

SEQ ID NO: 2069985 - DNA, 15 bp, Homo sapiens
ttgctttgagattta

SEQ ID NO: 2069986 - DNA, 15 bp, Homo sapiens
tgctttgagatttaa

SEQ ID NO: 2069987 - DNA, 15 bp, Homo sapiens
gctttgagatttaat

SEQ ID NO: 2069988 - DNA, 15 bp, Homo sapiens
ctttgagatttaatt

SEQ ID NO: 2069989 - DNA, 15 bp, Homo sapiens
tttgagatttaattt

SEQ ID NO: 2069990 - DNA, 15 bp, Homo sapiens
ttgagatttaattta

SEQ ID NO: 2069991 - DNA, 15 bp, Homo sapiens
tgagatttaatttag

SEQ ID NO: 2069992 - DNA, 15 bp, Homo sapiens
gagatttaatttagc

SEQ ID NO: 2069993 - DNA, 15 bp, Homo sapiens
agatttaatttagca

SEQ ID NO: 2069994 - DNA, 15 bp, Homo sapiens
gatttaatttagcat

SEQ ID NO: 2069995 - DNA, 15 bp, Homo sapiens
atttaatttagcatc

SEQ ID NO: 2069996 - DNA, 15 bp, Homo sapiens
tttaatttagcatca

SEQ ID NO: 2069997 - DNA, 15 bp, Homo sapiens
ttaatttagcatcac

SEQ ID NO: 2069998 - DNA, 15 bp, Homo sapiens
taatttagcatcaca

SEQ ID NO: 2069999 - DNA, 15 bp, Homo sapiens
aatttagcatcacag

SEQ ID NO: 2070000 - DNA, 15 bp, Homo sapiens
atttagcatcacagt

SEQ ID NO: 2070001 - DNA, 15 bp, Homo sapiens
tttagcatcacagtc

SEQ ID NO: 2070002 - DNA, 15 bp, Homo sapiens
ttagcatcacagtct

SEQ ID NO: 2070003 - DNA, 15 bp, Homo sapiens
tagcatcacagtcta

SEQ ID NO: 2070004 - DNA, 15 bp, Homo sapiens
agcatcacagtctac

SEQ ID NO: 2070005 - DNA, 15 bp, Homo sapiens
gcatcacagtctact

SEQ ID NO: 2070006 - DNA, 15 bp, Homo sapiens
catcacagtctactt

SEQ ID NO: 2070007 - DNA, 15 bp, Homo sapiens
atcacagtctacttt

SEQ ID NO: 2070008 - DNA, 15 bp, Homo sapiens
tcacagtctactttc

SEQ ID NO: 2070009 - DNA, 15 bp, Homo sapiens
cacagtctactttca

SEQ ID NO: 2070010 - DNA, 15 bp, Homo sapiens
acagtctactttcaa

SEQ ID NO: 2070011 - DNA, 15 bp, Homo sapiens
cagtctactttcaaa

SEQ ID NO: 2070012 - DNA, 15 bp, Homo sapiens
agtctactttcaaat

SEQ ID NO: 2070013 - DNA, 15 bp, Homo sapiens
gtctactttcaaatt

SEQ ID NO: 2070014 - DNA, 15 bp, Homo sapiens
tctactttcaaatta

SEQ ID NO: 2070015 - DNA, 15 bp, Homo sapiens
ctactttcaaattat

SEQ ID NO: 2070016 - DNA, 15 bp, Homo sapiens
tactttcaaattata

SEQ ID NO: 2070017 - DNA, 15 bp, Homo sapiens
actttcaaattatac

SEQ ID NO: 2070018 - DNA, 15 bp, Homo sapiens
ctttcaaattatact

SEQ ID NO: 2070019 - DNA, 15 bp, Homo sapiens
tttcaaattatacta

SEQ ID NO: 2070020 - DNA, 15 bp, Homo sapiens
ttcaaattatactat

SEQ ID NO: 2070021 - DNA, 15 bp, Homo sapiens
tcaaattatactata

SEQ ID NO: 2070022 - DNA, 15 bp, Homo sapiens
caaattatactatac

SEQ ID NO: 2070023 - DNA, 15 bp, Homo sapiens
aaattatactatacc

SEQ ID NO: 2070024 - DNA, 15 bp, Homo sapiens
aattatactatacca

SEQ ID NO: 2070025 - DNA, 15 bp, Homo sapiens
attatactataccac

SEQ ID NO: 2070026 - DNA, 15 bp, Homo sapiens
ttatactataccacc

SEQ ID NO: 2070027 - DNA, 15 bp, Homo sapiens
tatactataccacct

SEQ ID NO: 2070028 - DNA, 15 bp, Homo sapiens
atactataccacctc

SEQ ID NO: 2070029 - DNA, 15 bp, Homo sapiens
tactataccacctca

SEQ ID NO: 2070030 - DNA, 15 bp, Homo sapiens
actataccacctcat

SEQ ID NO: 2070031 - DNA, 15 bp, Homo sapiens
ctataccacctcatg

SEQ ID NO: 2070032 - DNA, 15 bp, Homo sapiens
tataccacctcatgt

SEQ ID NO: 2070033 - DNA, 15 bp, Homo sapiens
ataccacctcatgta

SEQ ID NO: 2070034 - DNA, 15 bp, Homo sapiens
taccacctcatgtat

SEQ ID NO: 2070035 - DNA, 15 bp, Homo sapiens
accacctcatgtata

SEQ ID NO: 2070036 - DNA, 15 bp, Homo sapiens
ccacctcatgtataa

SEQ ID NO: 2070037 - DNA, 15 bp, Homo sapiens
cacctcatgtataat

SEQ ID NO: 2070038 - DNA, 15 bp, Homo sapiens
acctcatgtataata

SEQ ID NO: 2070039 - DNA, 15 bp, Homo sapiens
cctcatgtataatag

SEQ ID NO: 2070040 - DNA, 15 bp, Homo sapiens
ctcatgtataataga

SEQ ID NO: 2070041 - DNA, 15 bp, Homo sapiens
tcatgtataatagaa

SEQ ID NO: 2070042 - DNA, 15 bp, Homo sapiens
catgtataatagaag

SEQ ID NO: 2070043 - DNA, 15 bp, Homo sapiens
atgtataatagaaga

SEQ ID NO: 2070044 - DNA, 15 bp, Homo sapiens
tgtataatagaagat

SEQ ID NO: 2070045 - DNA, 15 bp, Homo sapiens
gtataatagaagatc

SEQ ID NO: 2070046 - DNA, 15 bp, Homo sapiens
tataatagaagatcc

SEQ ID NO: 2070047 - DNA, 15 bp, Homo sapiens
ataatagaagatcct

SEQ ID NO: 2070048 - DNA, 15 bp, Homo sapiens
taatagaagatcctt

SEQ ID NO: 2070049 - DNA, 15 bp, Homo sapiens
aatagaagatcctta

SEQ ID NO: 2070050 - DNA, 15 bp, Homo sapiens
atagaagatccttac

SEQ ID NO: 2070051 - DNA, 15 bp, Homo sapiens
tagaagatccttaca

SEQ ID NO: 2070052 - DNA, 15 bp, Homo sapiens
agaagatccttacaa

SEQ ID NO: 2070053 - DNA, 15 bp, Homo sapiens
gaagatccttacaac

SEQ ID NO: 2070054 - DNA, 15 bp, Homo sapiens
aagatccttacaact

SEQ ID NO: 2070055 - DNA, 15 bp, Homo sapiens
agatccttacaactg

SEQ ID NO: 2070056 - DNA, 15 bp, Homo sapiens
gatccttacaactgc

SEQ ID NO: 2070057 - DNA, 15 bp, Homo sapiens
atccttacaactgca

SEQ ID NO: 2070058 - DNA, 15 bp, Homo sapiens
tccttacaactgcac

SEQ ID NO: 2070059 - DNA, 15 bp, Homo sapiens
ccttacaactgcaca

SEQ ID NO: 2070060 - DNA, 15 bp, Homo sapiens
cttacaactgcacac

SEQ ID NO: 2070061 - DNA, 15 bp, Homo sapiens
ttacaactgcacact

SEQ ID NO: 2070062 - DNA, 15 bp, Homo sapiens
tacaactgcacactt

SEQ ID NO: 2070063 - DNA, 15 bp, Homo sapiens
acaactgcacacttt

SEQ ID NO: 2070064 - DNA, 15 bp, Homo sapiens
caactgcacactttt

SEQ ID NO: 2070065 - DNA, 15 bp, Homo sapiens
aactgcacactttta

SEQ ID NO: 2070066 - DNA, 15 bp, Homo sapiens
actgcacacttttat

SEQ ID NO: 2070067 - DNA, 15 bp, Homo sapiens
ctgcacacttttatt

SEQ ID NO: 2070068 - DNA, 15 bp, Homo sapiens
tgcacacttttatta

SEQ ID NO: 2070069 - DNA, 15 bp, Homo sapiens
gcacacttttattat

SEQ ID NO: 2070070 - DNA, 15 bp, Homo sapiens
cacacttttattatt

SEQ ID NO: 2070071 - DNA, 15 bp, Homo sapiens
acacttttattattt

SEQ ID NO: 2070072 - DNA, 15 bp, Homo sapiens
cacttttattatttt

SEQ ID NO: 2070073 - DNA, 15 bp, Homo sapiens
acttttattattttc

SEQ ID NO: 2070074 - DNA, 15 bp, Homo sapiens
cttttattattttct

SEQ ID NO: 2070075 - DNA, 15 bp, Homo sapiens
ttattattttctctt

SEQ ID NO: 2070076 - DNA, 15 bp, Homo sapiens
tattattttctcttc

SEQ ID NO: 2070077 - DNA, 15 bp, Homo sapiens
attattttctcttct

SEQ ID NO: 2070078 - DNA, 15 bp, Homo sapiens
ttattttctcttctg

SEQ ID NO: 2070079 - DNA, 15 bp, Homo sapiens
tattttctcttctgg

SEQ ID NO: 2070080 - DNA, 15 bp, Homo sapiens
attttctcttctggt

SEQ ID NO: 2070081 - DNA, 15 bp, Homo sapiens
ttttctcttctggtt

SEQ ID NO: 2070082 - DNA, 15 bp, Homo sapiens
tttctcttctggttt

SEQ ID NO: 2070083 - DNA, 15 bp, Homo sapiens
ttctcttctggtttt

SEQ ID NO: 2070084 - DNA, 15 bp, Homo sapiens
tctcttctggttttt

SEQ ID NO: 2070085 - DNA, 15 bp, Homo sapiens
ctcttctggtttttg

SEQ ID NO: 2070086 - DNA, 15 bp, Homo sapiens
tcttctggtttttgt

SEQ ID NO: 2070087 - DNA, 15 bp, Homo sapiens
cttctggtttttgtg

SEQ ID NO: 2070088 - DNA, 15 bp, Homo sapiens
ttctggtttttgtgc

SEQ ID NO: 2070089 - DNA, 15 bp, Homo sapiens
tctggtttttgtgct

SEQ ID NO: 2070090 - DNA, 15 bp, Homo sapiens
ctggtttttgtgcta

SEQ ID NO: 2070091 - DNA, 15 bp, Homo sapiens
tggtttttgtgctat

SEQ ID NO: 2070092 - DNA, 15 bp, Homo sapiens
ggtttttgtgctatt

SEQ ID NO: 2070093 - DNA, 15 bp, Homo sapiens
gtttttgtgctattg

SEQ ID NO: 2070094 - DNA, 15 bp, Homo sapiens
tttttgtgctattgt

SEQ ID NO: 2070095 - DNA, 15 bp, Homo sapiens
ttttgtgctattgtc

SEQ ID NO: 2070096 - DNA, 15 bp, Homo sapiens
tttgtgctattgtct

SEQ ID NO: 2070097 - DNA, 15 bp, Homo sapiens
ttgtgctattgtctt

SEQ ID NO: 2070098 - DNA, 15 bp, Homo sapiens
tgtgctattgtctta

SEQ ID NO: 2070099 - DNA, 15 bp, Homo sapiens
gtgctattgtcttat

SEQ ID NO: 2070100 - DNA, 15 bp, Homo sapiens
tgctattgtcttata

SEQ ID NO: 2070101 - DNA, 15 bp, Homo sapiens
gctattgtcttatat

SEQ ID NO: 2070102 - DNA, 15 bp, Homo sapiens
ctattgtcttatatt

SEQ ID NO: 2070103 - DNA, 15 bp, Homo sapiens
tattgtcttatattt

SEQ ID NO: 2070104 - DNA, 15 bp, Homo sapiens
attgtcttatatttt

SEQ ID NO: 2070105 - DNA, 15 bp, Homo sapiens
ttgtcttatatttta

SEQ ID NO: 2070106 - DNA, 15 bp, Homo sapiens
tgtcttatattttac

SEQ ID NO: 2070107 - DNA, 15 bp, Homo sapiens
gtcttatattttact

SEQ ID NO: 2070108 - DNA, 15 bp, Homo sapiens
tcttatattttactt

SEQ ID NO: 2070109 - DNA, 15 bp, Homo sapiens
cttatattttacttc

SEQ ID NO: 2070110 - DNA, 15 bp, Homo sapiens
ttatattttacttct

SEQ ID NO: 2070111 - DNA, 15 bp, Homo sapiens
tatattttacttcta

SEQ ID NO: 2070112 - DNA, 15 bp, Homo sapiens
atattttacttctaa

SEQ ID NO: 2070113 - DNA, 15 bp, Homo sapiens
tattttacttctaaa

SEQ ID NO: 2070114 - DNA, 15 bp, Homo sapiens
attttacttctaaat

SEQ ID NO: 2070115 - DNA, 15 bp, Homo sapiens
ttttacttctaaata

SEQ ID NO: 2070116 - DNA, 15 bp, Homo sapiens
tttacttctaaatat

SEQ ID NO: 2070117 - DNA, 15 bp, Homo sapiens
ttacttctaaatata

SEQ ID NO: 2070118 - DNA, 15 bp, Homo sapiens
tacttctaaatatat

SEQ ID NO: 2070119 - DNA, 15 bp, Homo sapiens
acttctaaatatatc

SEQ ID NO: 2070120 - DNA, 15 bp, Homo sapiens
cttctaaatatatcc

SEQ ID NO: 2070121 - DNA, 15 bp, Homo sapiens
ttctaaatatatcca

SEQ ID NO: 2070122 - DNA, 15 bp, Homo sapiens
tctaaatatatccac

SEQ ID NO: 2070123 - DNA, 15 bp, Homo sapiens
ctaaatatatccaca

SEQ ID NO: 2070124 - DNA, 15 bp, Homo sapiens
taaatatatccacaa

SEQ ID NO: 2070125 - DNA, 15 bp, Homo sapiens
aaatatatccacaat

SEQ ID NO: 2070126 - DNA, 15 bp, Homo sapiens
aatatatccacaata

SEQ ID NO: 2070127 - DNA, 15 bp, Homo sapiens
atatatccacaataa

SEQ ID NO: 2070128 - DNA, 15 bp, Homo sapiens
tatatccacaataaa

SEQ ID NO: 2070129 - DNA, 15 bp, Homo sapiens
atatccacaataaat

SEQ ID NO: 2070130 - DNA, 15 bp, Homo sapiens
tatccacaataaatg

SEQ ID NO: 2070131 - DNA, 15 bp, Homo sapiens
atccacaataaatgt

SEQ ID NO: 2070132 - DNA, 15 bp, Homo sapiens
tccacaataaatgtt

SEQ ID NO: 2070133 - DNA, 15 bp, Homo sapiens
ccacaataaatgttt

SEQ ID NO: 2070134 - DNA, 15 bp, Homo sapiens
cacaataaatgttta

SEQ ID NO: 2070135 - DNA, 15 bp, Homo sapiens
acaataaatgtttat

SEQ ID NO: 2070136 - DNA, 15 bp, Homo sapiens
caataaatgtttatt

SEQ ID NO: 2070137 - DNA, 15 bp, Homo sapiens
aataaatgtttatta

SEQ ID NO: 2070138 - DNA, 15 bp, Homo sapiens
ataaatgtttattat

SEQ ID NO: 2070139 - DNA, 15 bp, Homo sapiens
taaatgtttattatt

SEQ ID NO: 2070140 - DNA, 15 bp, Homo sapiens
aaatgtttattattt

SEQ ID NO: 2070141 - DNA, 15 bp, Homo sapiens
aatgtttattatttt

SEQ ID NO: 2070142 - DNA, 15 bp, Homo sapiens
atgtttattattttt

SEQ ID NO: 2070143 - DNA, 15 bp, Homo sapiens
tgtttattatttttg

SEQ ID NO: 2070144 - DNA, 15 bp, Homo sapiens
gtttattatttttgt

SEQ ID NO: 2070145 - DNA, 15 bp, Homo sapiens
tttattatttttgtc

SEQ ID NO: 2070146 - DNA, 15 bp, Homo sapiens
ttattatttttgtct

SEQ ID NO: 2070147 - DNA, 15 bp, Homo sapiens
tattatttttgtctt

SEQ ID NO: 2070148 - DNA, 15 bp, Homo sapiens
attatttttgtctta

SEQ ID NO: 2070149 - DNA, 15 bp, Homo sapiens
ttatttttgtcttac

SEQ ID NO: 2070150 - DNA, 15 bp, Homo sapiens
tatttttgtcttaca

SEQ ID NO: 2070151 - DNA, 15 bp, Homo sapiens
atttttgtcttacac

SEQ ID NO: 2070152 - DNA, 15 bp, Homo sapiens
tttttgtcttacaca

SEQ ID NO: 2070153 - DNA, 15 bp, Homo sapiens
ttttgtcttacacag

SEQ ID NO: 2070154 - DNA, 15 bp, Homo sapiens
tttgtcttacacagt

SEQ ID NO: 2070155 - DNA, 15 bp, Homo sapiens
ttgtcttacacagtc

SEQ ID NO: 2070156 - DNA, 15 bp, Homo sapiens
tgtcttacacagtca

SEQ ID NO: 2070157 - DNA, 15 bp, Homo sapiens
gtcttacacagtcag

SEQ ID NO: 2070158 - DNA, 15 bp, Homo sapiens
tcttacacagtcagt

SEQ ID NO: 2070159 - DNA, 15 bp, Homo sapiens
cttacacagtcagta

SEQ ID NO: 2070160 - DNA, 15 bp, Homo sapiens
ttacacagtcagtaa

SEQ ID NO: 2070161 - DNA, 15 bp, Homo sapiens
tacacagtcagtaat

SEQ ID NO: 2070162 - DNA, 15 bp, Homo sapiens
acacagtcagtaatc

SEQ ID NO: 2070163 - DNA, 15 bp, Homo sapiens
cacagtcagtaatct

SEQ ID NO: 2070164 - DNA, 15 bp, Homo sapiens
acagtcagtaatctt

SEQ ID NO: 2070165 - DNA, 15 bp, Homo sapiens
cagtcagtaatcttt

SEQ ID NO: 2070166 - DNA, 15 bp, Homo sapiens
agtcagtaatctttt

SEQ ID NO: 2070167 - DNA, 15 bp, Homo sapiens
gtcagtaatctttta

SEQ ID NO: 2070168 - DNA, 15 bp, Homo sapiens
tcagtaatcttttaa

SEQ ID NO: 2070169 - DNA, 15 bp, Homo sapiens
cagtaatcttttaaa

SEQ ID NO: 2070170 - DNA, 15 bp, Homo sapiens
agtaatcttttaaag

SEQ ID NO: 2070171 - DNA, 15 bp, Homo sapiens
gtaatcttttaaaga

SEQ ID NO: 2070172 - DNA, 15 bp, Homo sapiens
taatcttttaaagag

SEQ ID NO: 2070173 - DNA, 15 bp, Homo sapiens
aatcttttaaagaga

SEQ ID NO: 2070174 - DNA, 15 bp, Homo sapiens
atcttttaaagagat

SEQ ID NO: 2070175 - DNA, 15 bp, Homo sapiens
tcttttaaagagatg

SEQ ID NO: 2070176 - DNA, 15 bp, Homo sapiens
cttttaaagagatgt

SEQ ID NO: 2070177 - DNA, 15 bp, Homo sapiens
ttttaaagagatgta

SEQ ID NO: 2070178 - DNA, 15 bp, Homo sapiens
tttaaagagatgtaa

SEQ ID NO: 2070179 - DNA, 15 bp, Homo sapiens
ttaaagagatgtaaa

SEQ ID NO: 2070180 - DNA, 15 bp, Homo sapiens
taaagagatgtaaat

SEQ ID NO: 2070181 - DNA, 15 bp, Homo sapiens
aaagagatgtaaata

SEQ ID NO: 2070182 - DNA, 15 bp, Homo sapiens
aagagatgtaaatag

SEQ ID NO: 2070183 - DNA, 15 bp, Homo sapiens
agagatgtaaatagt

SEQ ID NO: 2070184 - DNA, 15 bp, Homo sapiens
gagatgtaaatagta

SEQ ID NO: 2070185 - DNA, 15 bp, Homo sapiens
agatgtaaatagtaa

SEQ ID NO: 2070186 - DNA, 15 bp, Homo sapiens
gatgtaaatagtaaa

SEQ ID NO: 2070187 - DNA, 15 bp, Homo sapiens
atgtaaatagtaaaa

SEQ ID NO: 2070188 - DNA, 15 bp, Homo sapiens
tgtaaatagtaaaaa

SEQ ID NO: 2070189 - DNA, 15 bp, Homo sapiens
gtaaatagtaaaaaa

SEQ ID NO: 2070190 - DNA, 15 bp, Homo sapiens
taaatagtaaaaaaa

SEQ ID NO: 2070191 - DNA, 15 bp, Homo sapiens
aaatagtaaaaaaaa

SEQ ID NO: 2070192 - DNA, 15 bp, Homo sapiens
aatagtaaaaaaaat

SEQ ID NO: 2070193 - DNA, 15 bp, Homo sapiens
atagtaaaaaaaatt

SEQ ID NO: 2070194 - DNA, 15 bp, Homo sapiens
tagtaaaaaaaattc

SEQ ID NO: 2070195 - DNA, 15 bp, Homo sapiens
agtaaaaaaaattct

SEQ ID NO: 2070196 - DNA, 15 bp, Homo sapiens
gtaaaaaaaattctt

SEQ ID NO: 2070197 - DNA, 15 bp, Homo sapiens
taaaaaaaattcttt

SEQ ID NO: 2070198 - DNA, 15 bp, Homo sapiens
aaaaaaaattctttt

SEQ ID NO: 2070199 - DNA, 15 bp, Homo sapiens
aaaaaaattctttta

SEQ ID NO: 2070200 - DNA, 15 bp, Homo sapiens
aaaaaattcttttat

SEQ ID NO: 2070201 - DNA, 15 bp, Homo sapiens
aaaaattcttttata

SEQ ID NO: 2070202 - DNA, 15 bp, Homo sapiens
aaaattcttttatat

SEQ ID NO: 2070203 - DNA, 15 bp, Homo sapiens
aaattcttttatatt

SEQ ID NO: 2070204 - DNA, 15 bp, Homo sapiens
aattcttttatattt

SEQ ID NO: 2070205 - DNA, 15 bp, Homo sapiens
attcttttatatttc

SEQ ID NO: 2070206 - DNA, 15 bp, Homo sapiens
ttcttttatatttca

SEQ ID NO: 2070207 - DNA, 15 bp, Homo sapiens
tcttttatatttcac

SEQ ID NO: 2070208 - DNA, 15 bp, Homo sapiens
cttttatatttcaca

SEQ ID NO: 2070209 - DNA, 15 bp, Homo sapiens
ttttatatttcacac

SEQ ID NO: 2070210 - DNA, 15 bp, Homo sapiens
tttatatttcacaca

SEQ ID NO: 2070211 - DNA, 15 bp, Homo sapiens
ttatatttcacacat

SEQ ID NO: 2070212 - DNA, 15 bp, Homo sapiens
tatatttcacacata

SEQ ID NO: 2070213 - DNA, 15 bp, Homo sapiens
atatttcacacatag

SEQ ID NO: 2070214 - DNA, 15 bp, Homo sapiens
tatttcacacatagt

SEQ ID NO: 2070215 - DNA, 15 bp, Homo sapiens
atttcacacatagtt

SEQ ID NO: 2070216 - DNA, 15 bp, Homo sapiens
tttcacacatagtta

SEQ ID NO: 2070217 - DNA, 15 bp, Homo sapiens
ttcacacatagttac

SEQ ID NO: 2070218 - DNA, 15 bp, Homo sapiens
tcacacatagttact

SEQ ID NO: 2070219 - DNA, 15 bp, Homo sapiens
cacacatagttacta

SEQ ID NO: 2070220 - DNA, 15 bp, Homo sapiens
acacatagttactat

SEQ ID NO: 2070221 - DNA, 15 bp, Homo sapiens
cacatagttactatt

SEQ ID NO: 2070222 - DNA, 15 bp, Homo sapiens
acatagttactattt

SEQ ID NO: 2070223 - DNA, 15 bp, Homo sapiens
catagttactatttc

SEQ ID NO: 2070224 - DNA, 15 bp, Homo sapiens
atagttactatttct

SEQ ID NO: 2070225 - DNA, 15 bp, Homo sapiens
tagttactatttctg

SEQ ID NO: 2070226 - DNA, 15 bp, Homo sapiens
agttactatttctgg

SEQ ID NO: 2070227 - DNA, 15 bp, Homo sapiens
gttactatttctggt

SEQ ID NO: 2070228 - DNA, 15 bp, Homo sapiens
ttactatttctggtg

SEQ ID NO: 2070229 - DNA, 15 bp, Homo sapiens
tactatttctggtgc

SEQ ID NO: 2070230 - DNA, 15 bp, Homo sapiens
actatttctggtgct

SEQ ID NO: 2070231 - DNA, 15 bp, Homo sapiens
ctatttctggtgctc

SEQ ID NO: 2070232 - DNA, 15 bp, Homo sapiens
tatttctggtgctct

SEQ ID NO: 2070233 - DNA, 15 bp, Homo sapiens
atttctggtgctctt

SEQ ID NO: 2070234 - DNA, 15 bp, Homo sapiens
tttctggtgctcttc

SEQ ID NO: 2070235 - DNA, 15 bp, Homo sapiens
ttctggtgctcttca

SEQ ID NO: 2070236 - DNA, 15 bp, Homo sapiens
tctggtgctcttcac

SEQ ID NO: 2070237 - DNA, 15 bp, Homo sapiens
ctggtgctcttcact

SEQ ID NO: 2070238 - DNA, 15 bp, Homo sapiens
tggtgctcttcactc

SEQ ID NO: 2070239 - DNA, 15 bp, Homo sapiens
ggtgctcttcactcc

SEQ ID NO: 2070240 - DNA, 15 bp, Homo sapiens
gtgctcttcactcct

SEQ ID NO: 2070241 - DNA, 15 bp, Homo sapiens
tgctcttcactcctt

SEQ ID NO: 2070242 - DNA, 15 bp, Homo sapiens
gctcttcactccttt

SEQ ID NO: 2070243 - DNA, 15 bp, Homo sapiens
ctcttcactcctttg

SEQ ID NO: 2070244 - DNA, 15 bp, Homo sapiens
tcttcactcctttgt

SEQ ID NO: 2070245 - DNA, 15 bp, Homo sapiens
cttcactcctttgtg

SEQ ID NO: 2070246 - DNA, 15 bp, Homo sapiens
ttcactcctttgtgt

SEQ ID NO: 2070247 - DNA, 15 bp, Homo sapiens
tcactcctttgtgta

SEQ ID NO: 2070248 - DNA, 15 bp, Homo sapiens
cactcctttgtgtag

SEQ ID NO: 2070249 - DNA, 15 bp, Homo sapiens
actcctttgtgtagg

SEQ ID NO: 2070250 - DNA, 15 bp, Homo sapiens
ctcctttgtgtaggt

SEQ ID NO: 2070251 - DNA, 15 bp, Homo sapiens
tcctttgtgtaggtt

SEQ ID NO: 2070252 - DNA, 15 bp, Homo sapiens
cctttgtgtaggttc

SEQ ID NO: 2070253 - DNA, 15 bp, Homo sapiens
ctttgtgtaggttca

SEQ ID NO: 2070254 - DNA, 15 bp, Homo sapiens
tttgtgtaggttcat

SEQ ID NO: 2070255 - DNA, 15 bp, Homo sapiens
ttgtgtaggttcata

SEQ ID NO: 2070256 - DNA, 15 bp, Homo sapiens
tgtgtaggttcatat

SEQ ID NO: 2070257 - DNA, 15 bp, Homo sapiens
gtgtaggttcatatt

SEQ ID NO: 2070258 - DNA, 15 bp, Homo sapiens
tgtaggttcatattt

SEQ ID NO: 2070259 - DNA, 15 bp, Homo sapiens
gtaggttcatatttc

SEQ ID NO: 2070260 - DNA, 15 bp, Homo sapiens
taggttcatatttcc

SEQ ID NO: 2070261 - DNA, 15 bp, Homo sapiens
aggttcatatttcca

SEQ ID NO: 2070262 - DNA, 15 bp, Homo sapiens
ggttcatatttccat

SEQ ID NO: 2070263 - DNA, 15 bp, Homo sapiens
gttcatatttccatc

SEQ ID NO: 2070264 - DNA, 15 bp, Homo sapiens
ttcatatttccatct

SEQ ID NO: 2070265 - DNA, 15 bp, Homo sapiens
tcatatttccatcta

SEQ ID NO: 2070266 - DNA, 15 bp, Homo sapiens
catatttccatctag

SEQ ID NO: 2070267 - DNA, 15 bp, Homo sapiens
atatttccatctagt

SEQ ID NO: 2070268 - DNA, 15 bp, Homo sapiens
tatttccatctagta

SEQ ID NO: 2070269 - DNA, 15 bp, Homo sapiens
atttccatctagtat

SEQ ID NO: 2070270 - DNA, 15 bp, Homo sapiens
tttccatctagtatt

SEQ ID NO: 2070271 - DNA, 15 bp, Homo sapiens
ttccatctagtatta

SEQ ID NO: 2070272 - DNA, 15 bp, Homo sapiens
tccatctagtattat

SEQ ID NO: 2070273 - DNA, 15 bp, Homo sapiens
ccatctagtattatt

SEQ ID NO: 2070274 - DNA, 15 bp, Homo sapiens
catctagtattattt

SEQ ID NO: 2070275 - DNA, 15 bp, Homo sapiens
atctagtattatttt

SEQ ID NO: 2070276 - DNA, 15 bp, Homo sapiens
tctagtattattttc

SEQ ID NO: 2070277 - DNA, 15 bp, Homo sapiens
ctagtattattttct

SEQ ID NO: 2070278 - DNA, 15 bp, Homo sapiens
tagtattattttctt

SEQ ID NO: 2070279 - DNA, 15 bp, Homo sapiens
agtattattttctta

SEQ ID NO: 2070280 - DNA, 15 bp, Homo sapiens
gtattattttcttac

SEQ ID NO: 2070281 - DNA, 15 bp, Homo sapiens
tattattttcttaca

SEQ ID NO: 2070282 - DNA, 15 bp, Homo sapiens
attattttcttacaa

SEQ ID NO: 2070283 - DNA, 15 bp, Homo sapiens
ttattttcttacaaa

SEQ ID NO: 2070284 - DNA, 15 bp, Homo sapiens
tattttcttacaaag

SEQ ID NO: 2070285 - DNA, 15 bp, Homo sapiens
attttcttacaaaga

SEQ ID NO: 2070286 - DNA, 15 bp, Homo sapiens
ttttcttacaaagaa

SEQ ID NO: 2070287 - DNA, 15 bp, Homo sapiens
tttcttacaaagaat

SEQ ID NO: 2070288 - DNA, 15 bp, Homo sapiens
ttcttacaaagaatt

SEQ ID NO: 2070289 - DNA, 15 bp, Homo sapiens
tcttacaaagaattt

SEQ ID NO: 2070290 - DNA, 15 bp, Homo sapiens
cttacaaagaatttc

SEQ ID NO: 2070291 - DNA, 15 bp, Homo sapiens
ttacaaagaatttct

SEQ ID NO: 2070292 - DNA, 15 bp, Homo sapiens
tacaaagaatttctt

SEQ ID NO: 2070293 - DNA, 15 bp, Homo sapiens
acaaagaatttcttt

SEQ ID NO: 2070294 - DNA, 15 bp, Homo sapiens
caaagaatttctttt

SEQ ID NO: 2070295 - DNA, 15 bp, Homo sapiens
aaagaatttcttttc

SEQ ID NO: 2070296 - DNA, 15 bp, Homo sapiens
aagaatttcttttca

SEQ ID NO: 2070297 - DNA, 15 bp, Homo sapiens
agaatttcttttcaa

SEQ ID NO: 2070298 - DNA, 15 bp, Homo sapiens
gaatttcttttcaac

SEQ ID NO: 2070299 - DNA, 15 bp, Homo sapiens
aatttcttttcaaca

SEQ ID NO: 2070300 - DNA, 15 bp, Homo sapiens
atttcttttcaacat

SEQ ID NO: 2070301 - DNA, 15 bp, Homo sapiens
tttcttttcaacatt

SEQ ID NO: 2070302 - DNA, 15 bp, Homo sapiens
ttcttttcaacattt

SEQ ID NO: 2070303 - DNA, 15 bp, Homo sapiens
tcttttcaacatttc

SEQ ID NO: 2070304 - DNA, 15 bp, Homo sapiens
cttttcaacatttct

SEQ ID NO: 2070305 - DNA, 15 bp, Homo sapiens
ttttcaacatttctt

SEQ ID NO: 2070306 - DNA, 15 bp, Homo sapiens
tttcaacatttctta

SEQ ID NO: 2070307 - DNA, 15 bp, Homo sapiens
ttcaacatttcttat

SEQ ID NO: 2070308 - DNA, 15 bp, Homo sapiens
tcaacatttcttata

SEQ ID NO: 2070309 - DNA, 15 bp, Homo sapiens
caacatttcttatag

SEQ ID NO: 2070310 - DNA, 15 bp, Homo sapiens
aacatttcttatagt

SEQ ID NO: 2070311 - DNA, 15 bp, Homo sapiens
acatttcttatagta

SEQ ID NO: 2070312 - DNA, 15 bp, Homo sapiens
catttcttatagtac

SEQ ID NO: 2070313 - DNA, 15 bp, Homo sapiens
atttcttatagtact

SEQ ID NO: 2070314 - DNA, 15 bp, Homo sapiens
tttcttatagtactg

SEQ ID NO: 2070315 - DNA, 15 bp, Homo sapiens
ttcttatagtactgg

SEQ ID NO: 2070316 - DNA, 15 bp, Homo sapiens
tcttatagtactggt

SEQ ID NO: 2070317 - DNA, 15 bp, Homo sapiens
cttatagtactggtg

SEQ ID NO: 2070318 - DNA, 15 bp, Homo sapiens
ttatagtactggtgt

SEQ ID NO: 2070319 - DNA, 15 bp, Homo sapiens
tatagtactggtgtg

SEQ ID NO: 2070320 - DNA, 15 bp, Homo sapiens
atagtactggtgtga

SEQ ID NO: 2070321 - DNA, 15 bp, Homo sapiens
tagtactggtgtgat

SEQ ID NO: 2070322 - DNA, 15 bp, Homo sapiens
agtactggtgtgatg

SEQ ID NO: 2070323 - DNA, 15 bp, Homo sapiens
gtactggtgtgatgt

SEQ ID NO: 2070324 - DNA, 15 bp, Homo sapiens
tactggtgtgatgtt

SEQ ID NO: 2070325 - DNA, 15 bp, Homo sapiens
actggtgtgatgttg

SEQ ID NO: 2070326 - DNA, 15 bp, Homo sapiens
ctggtgtgatgttga

SEQ ID NO: 2070327 - DNA, 15 bp, Homo sapiens
tggtgtgatgttgat

SEQ ID NO: 2070328 - DNA, 15 bp, Homo sapiens
ggtgtgatgttgatt

SEQ ID NO: 2070329 - DNA, 15 bp, Homo sapiens
gtgtgatgttgatta

SEQ ID NO: 2070330 - DNA, 15 bp, Homo sapiens
tgtgatgttgattaa

SEQ ID NO: 2070331 - DNA, 15 bp, Homo sapiens
gtgatgttgattaat

SEQ ID NO: 2070332 - DNA, 15 bp, Homo sapiens
tgatgttgattaatt

SEQ ID NO: 2070333 - DNA, 15 bp, Homo sapiens
gatgttgattaattc

SEQ ID NO: 2070334 - DNA, 15 bp, Homo sapiens
atgttgattaattct

SEQ ID NO: 2070335 - DNA, 15 bp, Homo sapiens
tgttgattaattctt

SEQ ID NO: 2070336 - DNA, 15 bp, Homo sapiens
gttgattaattcttt

SEQ ID NO: 2070337 - DNA, 15 bp, Homo sapiens
ttgattaattctttc

SEQ ID NO: 2070338 - DNA, 15 bp, Homo sapiens
tgattaattctttca

SEQ ID NO: 2070339 - DNA, 15 bp, Homo sapiens
gattaattctttcag

SEQ ID NO: 2070340 - DNA, 15 bp, Homo sapiens
attaattctttcagc

SEQ ID NO: 2070341 - DNA, 15 bp, Homo sapiens
ttaattctttcagct

SEQ ID NO: 2070342 - DNA, 15 bp, Homo sapiens
taattctttcagctt

SEQ ID NO: 2070343 - DNA, 15 bp, Homo sapiens
aattctttcagcttt

SEQ ID NO: 2070344 - DNA, 15 bp, Homo sapiens
attctttcagctttg

SEQ ID NO: 2070345 - DNA, 15 bp, Homo sapiens
ttctttcagctttgc

SEQ ID NO: 2070346 - DNA, 15 bp, Homo sapiens
tctttcagctttgcc

SEQ ID NO: 2070347 - DNA, 15 bp, Homo sapiens
ctttcagctttgcct

SEQ ID NO: 2070348 - DNA, 15 bp, Homo sapiens
tttcagctttgcctg

SEQ ID NO: 2070349 - DNA, 15 bp, Homo sapiens
ttcagctttgcctgt

SEQ ID NO: 2070350 - DNA, 15 bp, Homo sapiens
tcagctttgcctgtc

SEQ ID NO: 2070351 - DNA, 15 bp, Homo sapiens
cagctttgcctgtct

SEQ ID NO: 2070352 - DNA, 15 bp, Homo sapiens
agctttgcctgtctt

SEQ ID NO: 2070353 - DNA, 15 bp, Homo sapiens
gctttgcctgtcttt

SEQ ID NO: 2070354 - DNA, 15 bp, Homo sapiens
ctttgcctgtcttta

SEQ ID NO: 2070355 - DNA, 15 bp, Homo sapiens
tttgcctgtctttat

SEQ ID NO: 2070356 - DNA, 15 bp, Homo sapiens
ttgcctgtctttatt

SEQ ID NO: 2070357 - DNA, 15 bp, Homo sapiens
tgcctgtctttattt

SEQ ID NO: 2070358 - DNA, 15 bp, Homo sapiens
gcctgtctttatttc

SEQ ID NO: 2070359 - DNA, 15 bp, Homo sapiens
cctgtctttatttca

SEQ ID NO: 2070360 - DNA, 15 bp, Homo sapiens
ctgtctttatttcat

SEQ ID NO: 2070361 - DNA, 15 bp, Homo sapiens
tgtctttatttcatc

SEQ ID NO: 2070362 - DNA, 15 bp, Homo sapiens
gtctttatttcatcc

SEQ ID NO: 2070363 - DNA, 15 bp, Homo sapiens
tctttatttcatcct

SEQ ID NO: 2070364 - DNA, 15 bp, Homo sapiens
ctttatttcatcctc

SEQ ID NO: 2070365 - DNA, 15 bp, Homo sapiens
tttatttcatcctca

SEQ ID NO: 2070366 - DNA, 15 bp, Homo sapiens
ttatttcatcctcat

SEQ ID NO: 2070367 - DNA, 15 bp, Homo sapiens
tatttcatcctcatt

SEQ ID NO: 2070368 - DNA, 15 bp, Homo sapiens
atttcatcctcattt

SEQ ID NO: 2070369 - DNA, 15 bp, Homo sapiens
tttcatcctcatttt

SEQ ID NO: 2070370 - DNA, 15 bp, Homo sapiens
ttcatcctcattttg

SEQ ID NO: 2070371 - DNA, 15 bp, Homo sapiens
tcatcctcattttgc

SEQ ID NO: 2070372 - DNA, 15 bp, Homo sapiens
catcctcattttgca

SEQ ID NO: 2070373 - DNA, 15 bp, Homo sapiens
atcctcattttgcaa

SEQ ID NO: 2070374 - DNA, 15 bp, Homo sapiens
tcctcattttgcaaa

SEQ ID NO: 2070375 - DNA, 15 bp, Homo sapiens
cctcattttgcaaag

SEQ ID NO: 2070376 - DNA, 15 bp, Homo sapiens
ctcattttgcaaaga

SEQ ID NO: 2070377 - DNA, 15 bp, Homo sapiens
tcattttgcaaagat

SEQ ID NO: 2070378 - DNA, 15 bp, Homo sapiens
cattttgcaaagata

SEQ ID NO: 2070379 - DNA, 15 bp, Homo sapiens
attttgcaaagatat

SEQ ID NO: 2070380 - DNA, 15 bp, Homo sapiens
ttttgcaaagatatt

SEQ ID NO: 2070381 - DNA, 15 bp, Homo sapiens
tttgcaaagatattt

SEQ ID NO: 2070382 - DNA, 15 bp, Homo sapiens
ttgcaaagatatttt

SEQ ID NO: 2070383 - DNA, 15 bp, Homo sapiens
tgcaaagatattttc

SEQ ID NO: 2070384 - DNA, 15 bp, Homo sapiens
gcaaagatattttca

SEQ ID NO: 2070385 - DNA, 15 bp, Homo sapiens
caaagatattttcat

SEQ ID NO: 2070386 - DNA, 15 bp, Homo sapiens
aaagatattttcatt

SEQ ID NO: 2070387 - DNA, 15 bp, Homo sapiens
aagatattttcatta

SEQ ID NO: 2070388 - DNA, 15 bp, Homo sapiens
agatattttcattag

SEQ ID NO: 2070389 - DNA, 15 bp, Homo sapiens
gatattttcattagg

SEQ ID NO: 2070390 - DNA, 15 bp, Homo sapiens
atattttcattaggt

SEQ ID NO: 2070391 - DNA, 15 bp, Homo sapiens
tattttcattaggta

SEQ ID NO: 2070392 - DNA, 15 bp, Homo sapiens
attttcattaggtat

SEQ ID NO: 2070393 - DNA, 15 bp, Homo sapiens
ttttcattaggtata

SEQ ID NO: 2070394 - DNA, 15 bp, Homo sapiens
tttcattaggtatag

SEQ ID NO: 2070395 - DNA, 15 bp, Homo sapiens
ttcattaggtataga

SEQ ID NO: 2070396 - DNA, 15 bp, Homo sapiens
tcattaggtatagaa

SEQ ID NO: 2070397 - DNA, 15 bp, Homo sapiens
cattaggtatagaat

SEQ ID NO: 2070398 - DNA, 15 bp, Homo sapiens
attaggtatagaatt

SEQ ID NO: 2070399 - DNA, 15 bp, Homo sapiens
ttaggtatagaatta

SEQ ID NO: 2070400 - DNA, 15 bp, Homo sapiens
taggtatagaattat

SEQ ID NO: 2070401 - DNA, 15 bp, Homo sapiens
aggtatagaattata

SEQ ID NO: 2070402 - DNA, 15 bp, Homo sapiens
ggtatagaattatag

SEQ ID NO: 2070403 - DNA, 15 bp, Homo sapiens
gtatagaattatagg

SEQ ID NO: 2070404 - DNA, 15 bp, Homo sapiens
tatagaattataggt

SEQ ID NO: 2070405 - DNA, 15 bp, Homo sapiens
atagaattataggtt

SEQ ID NO: 2070406 - DNA, 15 bp, Homo sapiens
tagaattataggttc

SEQ ID NO: 2070407 - DNA, 15 bp, Homo sapiens
agaattataggttca

SEQ ID NO: 2070408 - DNA, 15 bp, Homo sapiens
gaattataggttcac

SEQ ID NO: 2070409 - DNA, 15 bp, Homo sapiens
aattataggttcaca

SEQ ID NO: 2070410 - DNA, 15 bp, Homo sapiens
attataggttcacaa

SEQ ID NO: 2070411 - DNA, 15 bp, Homo sapiens
ttataggttcacaat

SEQ ID NO: 2070412 - DNA, 15 bp, Homo sapiens
tataggttcacaatg

SEQ ID NO: 2070413 - DNA, 15 bp, Homo sapiens
ataggttcacaatgt

SEQ ID NO: 2070414 - DNA, 15 bp, Homo sapiens
taggttcacaatgtt

SEQ ID NO: 2070415 - DNA, 15 bp, Homo sapiens
aggttcacaatgttt

SEQ ID NO: 2070416 - DNA, 15 bp, Homo sapiens
ggttcacaatgtttc

SEQ ID NO: 2070417 - DNA, 15 bp, Homo sapiens
gttcacaatgtttct

SEQ ID NO: 2070418 - DNA, 15 bp, Homo sapiens
ttcacaatgtttctg

SEQ ID NO: 2070419 - DNA, 15 bp, Homo sapiens
tcacaatgtttctgg

SEQ ID NO: 2070420 - DNA, 15 bp, Homo sapiens
cacaatgtttctggg

SEQ ID NO: 2070421 - DNA, 15 bp, Homo sapiens
acaatgtttctgggt

SEQ ID NO: 2070422 - DNA, 15 bp, Homo sapiens
caatgtttctgggtt

SEQ ID NO: 2070423 - DNA, 15 bp, Homo sapiens
aatgtttctgggttt

SEQ ID NO: 2070424 - DNA, 15 bp, Homo sapiens
atgtttctgggtttt

SEQ ID NO: 2070425 - DNA, 15 bp, Homo sapiens
tgtttctgggttttc

SEQ ID NO: 2070426 - DNA, 15 bp, Homo sapiens
gtttctgggttttct

SEQ ID NO: 2070427 - DNA, 15 bp, Homo sapiens
tttctgggttttcta

SEQ ID NO: 2070428 - DNA, 15 bp, Homo sapiens
ttctgggttttctac

SEQ ID NO: 2070429 - DNA, 15 bp, Homo sapiens
tctgggttttctacc

SEQ ID NO: 2070430 - DNA, 15 bp, Homo sapiens
ctgggttttctaccc

SEQ ID NO: 2070431 - DNA, 15 bp, Homo sapiens
tgggttttctacccc

SEQ ID NO: 2070432 - DNA, 15 bp, Homo sapiens
gggttttctaccccc

SEQ ID NO: 2070433 - DNA, 15 bp, Homo sapiens
ggttttctaccccca

SEQ ID NO: 2070434 - DNA, 15 bp, Homo sapiens
gttttctacccccag

SEQ ID NO: 2070435 - DNA, 15 bp, Homo sapiens
ttttctacccccagc

SEQ ID NO: 2070436 - DNA, 15 bp, Homo sapiens
tttctacccccagca

SEQ ID NO: 2070437 - DNA, 15 bp, Homo sapiens
ttctacccccagcac

SEQ ID NO: 2070438 - DNA, 15 bp, Homo sapiens
tctacccccagcact

SEQ ID NO: 2070439 - DNA, 15 bp, Homo sapiens
ctacccccagcactt

SEQ ID NO: 2070440 - DNA, 15 bp, Homo sapiens
tacccccagcacttt

SEQ ID NO: 2070441 - DNA, 15 bp, Homo sapiens
acccccagcactttg

SEQ ID NO: 2070442 - DNA, 15 bp, Homo sapiens
cccccagcactttga

SEQ ID NO: 2070443 - DNA, 15 bp, Homo sapiens
ccccagcactttgaa

SEQ ID NO: 2070444 - DNA, 15 bp, Homo sapiens
cccagcactttgaag

SEQ ID NO: 2070445 - DNA, 15 bp, Homo sapiens
ccagcactttgaaga

SEQ ID NO: 2070446 - DNA, 15 bp, Homo sapiens
cagcactttgaagat

SEQ ID NO: 2070447 - DNA, 15 bp, Homo sapiens
agcactttgaagatg

SEQ ID NO: 2070448 - DNA, 15 bp, Homo sapiens
gcactttgaagatgt

SEQ ID NO: 2070449 - DNA, 15 bp, Homo sapiens
cactttgaagatgtt

SEQ ID NO: 2070450 - DNA, 15 bp, Homo sapiens
actttgaagatgttg

SEQ ID NO: 2070451 - DNA, 15 bp, Homo sapiens
ctttgaagatgttgt

SEQ ID NO: 2070452 - DNA, 15 bp, Homo sapiens
tttgaagatgttgtc

SEQ ID NO: 2070453 - DNA, 15 bp, Homo sapiens
ttgaagatgttgtcc

SEQ ID NO: 2070454 - DNA, 15 bp, Homo sapiens
tgaagatgttgtccc

SEQ ID NO: 2070455 - DNA, 15 bp, Homo sapiens
gaagatgttgtccca

SEQ ID NO: 2070456 - DNA, 15 bp, Homo sapiens
aagatgttgtcccag

SEQ ID NO: 2070457 - DNA, 15 bp, Homo sapiens
agatgttgtcccagt

SEQ ID NO: 2070458 - DNA, 15 bp, Homo sapiens
gatgttgtcccagtg

SEQ ID NO: 2070459 - DNA, 15 bp, Homo sapiens
atgttgtcccagtgt

SEQ ID NO: 2070460 - DNA, 15 bp, Homo sapiens
tgttgtcccagtgtt

SEQ ID NO: 2070461 - DNA, 15 bp, Homo sapiens
gttgtcccagtgttt

SEQ ID NO: 2070462 - DNA, 15 bp, Homo sapiens
ttgtcccagtgtttt

SEQ ID NO: 2070463 - DNA, 15 bp, Homo sapiens
tgtcccagtgttttc

SEQ ID NO: 2070464 - DNA, 15 bp, Homo sapiens
gtcccagtgttttct

SEQ ID NO: 2070465 - DNA, 15 bp, Homo sapiens
tcccagtgttttctg

SEQ ID NO: 2070466 - DNA, 15 bp, Homo sapiens
cccagtgttttctgg

SEQ ID NO: 2070467 - DNA, 15 bp, Homo sapiens
ccagtgttttctggc

SEQ ID NO: 2070468 - DNA, 15 bp, Homo sapiens
cagtgttttctggct

SEQ ID NO: 2070469 - DNA, 15 bp, Homo sapiens
agtgttttctggctg

SEQ ID NO: 2070470 - DNA, 15 bp, Homo sapiens
gtgttttctggctga

SEQ ID NO: 2070471 - DNA, 15 bp, Homo sapiens
tgttttctggctgaa

SEQ ID NO: 2070472 - DNA, 15 bp, Homo sapiens
gttttctggctgaaa

SEQ ID NO: 2070473 - DNA, 15 bp, Homo sapiens
ttttctggctgaaat

SEQ ID NO: 2070474 - DNA, 15 bp, Homo sapiens
tttctggctgaaatt

SEQ ID NO: 2070475 - DNA, 15 bp, Homo sapiens
ttctggctgaaattg

SEQ ID NO: 2070476 - DNA, 15 bp, Homo sapiens
tctggctgaaattgt

SEQ ID NO: 2070477 - DNA, 15 bp, Homo sapiens
ctggctgaaattgtt

SEQ ID NO: 2070478 - DNA, 15 bp, Homo sapiens
tggctgaaattgttt

SEQ ID NO: 2070479 - DNA, 15 bp, Homo sapiens
ggctgaaattgtttc

SEQ ID NO: 2070480 - DNA, 15 bp, Homo sapiens
gctgaaattgtttcc

SEQ ID NO: 2070481 - DNA, 15 bp, Homo sapiens
ctgaaattgtttcca

SEQ ID NO: 2070482 - DNA, 15 bp, Homo sapiens
tgaaattgtttccag

SEQ ID NO: 2070483 - DNA, 15 bp, Homo sapiens
gaaattgtttccagg

SEQ ID NO: 2070484 - DNA, 15 bp, Homo sapiens
aaattgtttccaggg

SEQ ID NO: 2070485 - DNA, 15 bp, Homo sapiens
aattgtttccaggga

SEQ ID NO: 2070486 - DNA, 15 bp, Homo sapiens
attgtttccagggac

SEQ ID NO: 2070487 - DNA, 15 bp, Homo sapiens
ttgtttccagggaca

SEQ ID NO: 2070488 - DNA, 15 bp, Homo sapiens
tgtttccagggacag

SEQ ID NO: 2070489 - DNA, 15 bp, Homo sapiens
gtttccagggacagc

SEQ ID NO: 2070490 - DNA, 15 bp, Homo sapiens
tttccagggacagca

SEQ ID NO: 2070491 - DNA, 15 bp, Homo sapiens
ttccagggacagcac

SEQ ID NO: 2070492 - DNA, 15 bp, Homo sapiens
tccagggacagcaca

SEQ ID NO: 2070493 - DNA, 15 bp, Homo sapiens
ccagggacagcacaa

SEQ ID NO: 2070494 - DNA, 15 bp, Homo sapiens
cagggacagcacaaa

SEQ ID NO: 2070495 - DNA, 15 bp, Homo sapiens
agggacagcacaaaa

SEQ ID NO: 2070496 - DNA, 15 bp, Homo sapiens
gggacagcacaaaag

SEQ ID NO: 2070497 - DNA, 15 bp, Homo sapiens
ggacagcacaaaagt

SEQ ID NO: 2070498 - DNA, 15 bp, Homo sapiens
gacagcacaaaagtg

SEQ ID NO: 2070499 - DNA, 15 bp, Homo sapiens
acagcacaaaagtgt

SEQ ID NO: 2070500 - DNA, 15 bp, Homo sapiens
cagcacaaaagtgtg

SEQ ID NO: 2070501 - DNA, 15 bp, Homo sapiens
agcacaaaagtgtgg

SEQ ID NO: 2070502 - DNA, 15 bp, Homo sapiens
gcacaaaagtgtgga

SEQ ID NO: 2070503 - DNA, 15 bp, Homo sapiens
cacaaaagtgtggag

SEQ ID NO: 2070504 - DNA, 15 bp, Homo sapiens
acaaaagtgtggagc

SEQ ID NO: 2070505 - DNA, 15 bp, Homo sapiens
caaaagtgtggagca

SEQ ID NO: 2070506 - DNA, 15 bp, Homo sapiens
aaaagtgtggagcac

SEQ ID NO: 2070507 - DNA, 15 bp, Homo sapiens
aaagtgtggagcact

SEQ ID NO: 2070508 - DNA, 15 bp, Homo sapiens
aagtgtggagcactg

SEQ ID NO: 2070509 - DNA, 15 bp, Homo sapiens
agtgtggagcactgg

SEQ ID NO: 2070510 - DNA, 15 bp, Homo sapiens
gtgtggagcactggg

SEQ ID NO: 2070511 - DNA, 15 bp, Homo sapiens
tgtggagcactggga

SEQ ID NO: 2070512 - DNA, 15 bp, Homo sapiens
gtggagcactgggag

SEQ ID NO: 2070513 - DNA, 15 bp, Homo sapiens
tggagcactgggagg

SEQ ID NO: 2070514 - DNA, 15 bp, Homo sapiens
ggagcactgggaggg

SEQ ID NO: 2070515 - DNA, 15 bp, Homo sapiens
gagcactgggagggc

SEQ ID NO: 2070516 - DNA, 15 bp, Homo sapiens
agcactgggagggct

SEQ ID NO: 2070517 - DNA, 15 bp, Homo sapiens
gcactgggagggctt

SEQ ID NO: 2070518 - DNA, 15 bp, Homo sapiens
cactgggagggcttc

SEQ ID NO: 2070519 - DNA, 15 bp, Homo sapiens
actgggagggcttca

SEQ ID NO: 2070520 - DNA, 15 bp, Homo sapiens
ctgggagggcttcac

SEQ ID NO: 2070521 - DNA, 15 bp, Homo sapiens
tgggagggcttcacc

SEQ ID NO: 2070522 - DNA, 15 bp, Homo sapiens
gggagggcttcacct

SEQ ID NO: 2070523 - DNA, 15 bp, Homo sapiens
ggagggcttcacctc

SEQ ID NO: 2070524 - DNA, 15 bp, Homo sapiens
gagggcttcacctct

SEQ ID NO: 2070525 - DNA, 15 bp, Homo sapiens
agggcttcacctcta

SEQ ID NO: 2070526 - DNA, 15 bp, Homo sapiens
gggcttcacctctac

SEQ ID NO: 2070527 - DNA, 15 bp, Homo sapiens
ggcttcacctctacc

SEQ ID NO: 2070528 - DNA, 15 bp, Homo sapiens
gcttcacctctacct

SEQ ID NO: 2070529 - DNA, 15 bp, Homo sapiens
cttcacctctacctc

SEQ ID NO: 2070530 - DNA, 15 bp, Homo sapiens
ttcacctctacctca

SEQ ID NO: 2070531 - DNA, 15 bp, Homo sapiens
tcacctctacctcaa

SEQ ID NO: 2070532 - DNA, 15 bp, Homo sapiens
cacctctacctcaac

SEQ ID NO: 2070533 - DNA, 15 bp, Homo sapiens
acctctacctcaaca

SEQ ID NO: 2070534 - DNA, 15 bp, Homo sapiens
cctctacctcaacag

SEQ ID NO: 2070535 - DNA, 15 bp, Homo sapiens
ctctacctcaacagt

SEQ ID NO: 2070536 - DNA, 15 bp, Homo sapiens
tctacctcaacagtc

SEQ ID NO: 2070537 - DNA, 15 bp, Homo sapiens
ctacctcaacagtct

SEQ ID NO: 2070538 - DNA, 15 bp, Homo sapiens
tacctcaacagtctt

SEQ ID NO: 2070539 - DNA, 15 bp, Homo sapiens
acctcaacagtcttc

SEQ ID NO: 2070540 - DNA, 15 bp, Homo sapiens
cctcaacagtcttca

SEQ ID NO: 2070541 - DNA, 15 bp, Homo sapiens
ctcaacagtcttcac

SEQ ID NO: 2070542 - DNA, 15 bp, Homo sapiens
tcaacagtcttcaca

SEQ ID NO: 2070543 - DNA, 15 bp, Homo sapiens
caacagtcttcacaa

SEQ ID NO: 2070544 - DNA, 15 bp, Homo sapiens
aacagtcttcacaaa

SEQ ID NO: 2070545 - DNA, 15 bp, Homo sapiens
acagtcttcacaaac

SEQ ID NO: 2070546 - DNA, 15 bp, Homo sapiens
cagtcttcacaaact

SEQ ID NO: 2070547 - DNA, 15 bp, Homo sapiens
agtcttcacaaactc

SEQ ID NO: 2070548 - DNA, 15 bp, Homo sapiens
gtcttcacaaactct

SEQ ID NO: 2070549 - DNA, 15 bp, Homo sapiens
tcttcacaaactctc

SEQ ID NO: 2070550 - DNA, 15 bp, Homo sapiens
cttcacaaactctct

SEQ ID NO: 2070551 - DNA, 15 bp, Homo sapiens
ttcacaaactctctc

SEQ ID NO: 2070552 - DNA, 15 bp, Homo sapiens
tcacaaactctctct

SEQ ID NO: 2070553 - DNA, 15 bp, Homo sapiens
cacaaactctctcta

SEQ ID NO: 2070554 - DNA, 15 bp, Homo sapiens
acaaactctctctaa

SEQ ID NO: 2070555 - DNA, 15 bp, Homo sapiens
caaactctctctaat

SEQ ID NO: 2070556 - DNA, 15 bp, Homo sapiens
aaactctctctaatc

SEQ ID NO: 2070557 - DNA, 15 bp, Homo sapiens
aactctctctaatct

SEQ ID NO: 2070558 - DNA, 15 bp, Homo sapiens
actctctctaatctc

SEQ ID NO: 2070559 - DNA, 15 bp, Homo sapiens
ctctctctaatctct

SEQ ID NO: 2070560 - DNA, 15 bp, Homo sapiens
tctctctaatctctg

SEQ ID NO: 2070561 - DNA, 15 bp, Homo sapiens
ctctctaatctctga

SEQ ID NO: 2070562 - DNA, 15 bp, Homo sapiens
tctctaatctctgat

SEQ ID NO: 2070563 - DNA, 15 bp, Homo sapiens
ctctaatctctgata

SEQ ID NO: 2070564 - DNA, 15 bp, Homo sapiens
tctaatctctgatat

SEQ ID NO: 2070565 - DNA, 15 bp, Homo sapiens
ctaatctctgatatg

SEQ ID NO: 2070566 - DNA, 15 bp, Homo sapiens
taatctctgatatgg

SEQ ID NO: 2070567 - DNA, 15 bp, Homo sapiens
aatctctgatatgga

SEQ ID NO: 2070568 - DNA, 15 bp, Homo sapiens
atctctgatatggaa

SEQ ID NO: 2070569 - DNA, 15 bp, Homo sapiens
tctctgatatggaaa

SEQ ID NO: 2070570 - DNA, 15 bp, Homo sapiens
ctctgatatggaaaa

SEQ ID NO: 2070571 - DNA, 15 bp, Homo sapiens
tctgatatggaaaat

SEQ ID NO: 2070572 - DNA, 15 bp, Homo sapiens
ctgatatggaaaatt

SEQ ID NO: 2070573 - DNA, 15 bp, Homo sapiens
tgatatggaaaatta

SEQ ID NO: 2070574 - DNA, 15 bp, Homo sapiens
gatatggaaaattaa

SEQ ID NO: 2070575 - DNA, 15 bp, Homo sapiens
atatggaaaattaat

SEQ ID NO: 2070576 - DNA, 15 bp, Homo sapiens
tatggaaaattaatt

SEQ ID NO: 2070577 - DNA, 15 bp, Homo sapiens
atggaaaattaattt

SEQ ID NO: 2070578 - DNA, 15 bp, Homo sapiens
tggaaaattaatttt

SEQ ID NO: 2070579 - DNA, 15 bp, Homo sapiens
ggaaaattaattttt

SEQ ID NO: 2070580 - DNA, 15 bp, Homo sapiens
gaaaattaattttta

SEQ ID NO: 2070581 - DNA, 15 bp, Homo sapiens
aaaattaatttttag

SEQ ID NO: 2070582 - DNA, 15 bp, Homo sapiens
aaattaatttttagt

SEQ ID NO: 2070583 - DNA, 15 bp, Homo sapiens
aattaatttttagta

SEQ ID NO: 2070584 - DNA, 15 bp, Homo sapiens
attaatttttagtag

SEQ ID NO: 2070585 - DNA, 15 bp, Homo sapiens
ttaatttttagtagg

SEQ ID NO: 2070586 - DNA, 15 bp, Homo sapiens
taatttttagtaggt

SEQ ID NO: 2070587 - DNA, 15 bp, Homo sapiens
aatttttagtaggtt

SEQ ID NO: 2070588 - DNA, 15 bp, Homo sapiens
atttttagtaggttg

SEQ ID NO: 2070589 - DNA, 15 bp, Homo sapiens
tttttagtaggttgt

SEQ ID NO: 2070590 - DNA, 15 bp, Homo sapiens
ttttagtaggttgtg

SEQ ID NO: 2070591 - DNA, 15 bp, Homo sapiens
tttagtaggttgtgt

SEQ ID NO: 2070592 - DNA, 15 bp, Homo sapiens
ttagtaggttgtgta

SEQ ID NO: 2070593 - DNA, 15 bp, Homo sapiens
tagtaggttgtgtaa

SEQ ID NO: 2070594 - DNA, 15 bp, Homo sapiens
agtaggttgtgtaag

SEQ ID NO: 2070595 - DNA, 15 bp, Homo sapiens
gtaggttgtgtaagt

SEQ ID NO: 2070596 - DNA, 15 bp, Homo sapiens
taggttgtgtaagtg

SEQ ID NO: 2070597 - DNA, 15 bp, Homo sapiens
aggttgtgtaagtga

SEQ ID NO: 2070598 - DNA, 15 bp, Homo sapiens
ggttgtgtaagtgaa

SEQ ID NO: 2070599 - DNA, 15 bp, Homo sapiens
gttgtgtaagtgaag

SEQ ID NO: 2070600 - DNA, 15 bp, Homo sapiens
ttgtgtaagtgaagt

SEQ ID NO: 2070601 - DNA, 15 bp, Homo sapiens
tgtgtaagtgaagtt

SEQ ID NO: 2070602 - DNA, 15 bp, Homo sapiens
gtgtaagtgaagttt

SEQ ID NO: 2070603 - DNA, 15 bp, Homo sapiens
tgtaagtgaagtttt

SEQ ID NO: 2070604 - DNA, 15 bp, Homo sapiens
gtaagtgaagtttta

SEQ ID NO: 2070605 - DNA, 15 bp, Homo sapiens
taagtgaagttttat

SEQ ID NO: 2070606 - DNA, 15 bp, Homo sapiens
aagtgaagttttata

SEQ ID NO: 2070607 - DNA, 15 bp, Homo sapiens
agtgaagttttatag

SEQ ID NO: 2070608 - DNA, 15 bp, Homo sapiens
gtgaagttttatagc

SEQ ID NO: 2070609 - DNA, 15 bp, Homo sapiens
tgaagttttatagcc

SEQ ID NO: 2070610 - DNA, 15 bp, Homo sapiens
gaagttttatagccc

SEQ ID NO: 2070611 - DNA, 15 bp, Homo sapiens
aagttttatagccct

SEQ ID NO: 2070612 - DNA, 15 bp, Homo sapiens
agttttatagccctg

SEQ ID NO: 2070613 - DNA, 15 bp, Homo sapiens
gttttatagccctgc

SEQ ID NO: 2070614 - DNA, 15 bp, Homo sapiens
ttttatagccctgct

SEQ ID NO: 2070615 - DNA, 15 bp, Homo sapiens
tttatagccctgctt

SEQ ID NO: 2070616 - DNA, 15 bp, Homo sapiens
ttatagccctgcttc

SEQ ID NO: 2070617 - DNA, 15 bp, Homo sapiens
tatagccctgcttcc

SEQ ID NO: 2070618 - DNA, 15 bp, Homo sapiens
atagccctgcttccc

SEQ ID NO: 2070619 - DNA, 15 bp, Homo sapiens
tagccctgcttccca

SEQ ID NO: 2070620 - DNA, 15 bp, Homo sapiens
agccctgcttcccat

SEQ ID NO: 2070621 - DNA, 15 bp, Homo sapiens
gccctgcttcccatc

SEQ ID NO: 2070622 - DNA, 15 bp, Homo sapiens
ccctgcttcccatct

SEQ ID NO: 2070623 - DNA, 15 bp, Homo sapiens
cctgcttcccatctg

SEQ ID NO: 2070624 - DNA, 15 bp, Homo sapiens
ctgcttcccatctgc

SEQ ID NO: 2070625 - DNA, 15 bp, Homo sapiens
tgcttcccatctgcc

SEQ ID NO: 2070626 - DNA, 15 bp, Homo sapiens
gcttcccatctgcct

SEQ ID NO: 2070627 - DNA, 15 bp, Homo sapiens
cttcccatctgccta

SEQ ID NO: 2070628 - DNA, 15 bp, Homo sapiens
ttcccatctgcctaa

SEQ ID NO: 2070629 - DNA, 15 bp, Homo sapiens
tcccatctgcctaaa

SEQ ID NO: 2070630 - DNA, 15 bp, Homo sapiens
cccatctgcctaaat

SEQ ID NO: 2070631 - DNA, 15 bp, Homo sapiens
ccatctgcctaaatg

SEQ ID NO: 2070632 - DNA, 15 bp, Homo sapiens
catctgcctaaatgg

SEQ ID NO: 2070633 - DNA, 15 bp, Homo sapiens
atctgcctaaatggc

SEQ ID NO: 2070634 - DNA, 15 bp, Homo sapiens
tctgcctaaatggca

SEQ ID NO: 2070635 - DNA, 15 bp, Homo sapiens
ctgcctaaatggcac

SEQ ID NO: 2070636 - DNA, 15 bp, Homo sapiens
tgcctaaatggcaca

SEQ ID NO: 2070637 - DNA, 15 bp, Homo sapiens
gcctaaatggcacac

SEQ ID NO: 2070638 - DNA, 15 bp, Homo sapiens
cctaaatggcacaca

SEQ ID NO: 2070639 - DNA, 15 bp, Homo sapiens
ctaaatggcacacaa

SEQ ID NO: 2070640 - DNA, 15 bp, Homo sapiens
taaatggcacacaag

SEQ ID NO: 2070641 - DNA, 15 bp, Homo sapiens
aaatggcacacaaga

SEQ ID NO: 2070642 - DNA, 15 bp, Homo sapiens
aatggcacacaagat

SEQ ID NO: 2070643 - DNA, 15 bp, Homo sapiens
atggcacacaagatt

SEQ ID NO: 2070644 - DNA, 15 bp, Homo sapiens
tggcacacaagattg

SEQ ID NO: 2070645 - DNA, 15 bp, Homo sapiens
ggcacacaagattgt

SEQ ID NO: 2070646 - DNA, 15 bp, Homo sapiens
gcacacaagattgtt

SEQ ID NO: 2070647 - DNA, 15 bp, Homo sapiens
cacacaagattgttt

SEQ ID NO: 2070648 - DNA, 15 bp, Homo sapiens
acacaagattgtttt

SEQ ID NO: 2070649 - DNA, 15 bp, Homo sapiens
cacaagattgttttc

SEQ ID NO: 2070650 - DNA, 15 bp, Homo sapiens
acaagattgttttcc

SEQ ID NO: 2070651 - DNA, 15 bp, Homo sapiens
caagattgttttcca

SEQ ID NO: 2070652 - DNA, 15 bp, Homo sapiens
aagattgttttccat

SEQ ID NO: 2070653 - DNA, 15 bp, Homo sapiens
agattgttttccatc

SEQ ID NO: 2070654 - DNA, 15 bp, Homo sapiens
gattgttttccatcg

SEQ ID NO: 2070655 - DNA, 15 bp, Homo sapiens
attgttttccatcgc

SEQ ID NO: 2070656 - DNA, 15 bp, Homo sapiens
ttgttttccatcgcc

SEQ ID NO: 2070657 - DNA, 15 bp, Homo sapiens
tgttttccatcgcca

SEQ ID NO: 2070658 - DNA, 15 bp, Homo sapiens
gttttccatcgccat

SEQ ID NO: 2070659 - DNA, 15 bp, Homo sapiens
ttttccatcgccata

SEQ ID NO: 2070660 - DNA, 15 bp, Homo sapiens
tttccatcgccatat

SEQ ID NO: 2070661 - DNA, 15 bp, Homo sapiens
ttccatcgccatatc

SEQ ID NO: 2070662 - DNA, 15 bp, Homo sapiens
tccatcgccatatcc

SEQ ID NO: 2070663 - DNA, 15 bp, Homo sapiens
ccatcgccatatcct

SEQ ID NO: 2070664 - DNA, 15 bp, Homo sapiens
catcgccatatcctc

SEQ ID NO: 2070665 - DNA, 15 bp, Homo sapiens
atcgccatatcctca

SEQ ID NO: 2070666 - DNA, 15 bp, Homo sapiens
tcgccatatcctcac

SEQ ID NO: 2070667 - DNA, 15 bp, Homo sapiens
cgccatatcctcact

SEQ ID NO: 2070668 - DNA, 15 bp, Homo sapiens
gccatatcctcactg

SEQ ID NO: 2070669 - DNA, 15 bp, Homo sapiens
ccatatcctcactgt

SEQ ID NO: 2070670 - DNA, 15 bp, Homo sapiens
catatcctcactgta

SEQ ID NO: 2070671 - DNA, 15 bp, Homo sapiens
atatcctcactgtac

SEQ ID NO: 2070672 - DNA, 15 bp, Homo sapiens
tatcctcactgtaca

SEQ ID NO: 2070673 - DNA, 15 bp, Homo sapiens
atcctcactgtacat

SEQ ID NO: 2070674 - DNA, 15 bp, Homo sapiens
tcctcactgtacatg

SEQ ID NO: 2070675 - DNA, 15 bp, Homo sapiens
cctcactgtacatgg

SEQ ID NO: 2070676 - DNA, 15 bp, Homo sapiens
ctcactgtacatgga

SEQ ID NO: 2070677 - DNA, 15 bp, Homo sapiens
tcactgtacatggaa

SEQ ID NO: 2070678 - DNA, 15 bp, Homo sapiens
cactgtacatggaaa

SEQ ID NO: 2070679 - DNA, 15 bp, Homo sapiens
actgtacatggaaat

SEQ ID NO: 2070680 - DNA, 15 bp, Homo sapiens
ctgtacatggaaatt

SEQ ID NO: 2070681 - DNA, 15 bp, Homo sapiens
tgtacatggaaattc

SEQ ID NO: 2070682 - DNA, 15 bp, Homo sapiens
gtacatggaaattct

SEQ ID NO: 2070683 - DNA, 15 bp, Homo sapiens
tacatggaaattctg

SEQ ID NO: 2070684 - DNA, 15 bp, Homo sapiens
acatggaaattctgg

SEQ ID NO: 2070685 - DNA, 15 bp, Homo sapiens
catggaaattctgga

SEQ ID NO: 2070686 - DNA, 15 bp, Homo sapiens
atggaaattctggaa

SEQ ID NO: 2070687 - DNA, 15 bp, Homo sapiens
tggaaattctggaac

SEQ ID NO: 2070688 - DNA, 15 bp, Homo sapiens
ggaaattctggaact

SEQ ID NO: 2070689 - DNA, 15 bp, Homo sapiens
gaaattctggaactc

SEQ ID NO: 2070690 - DNA, 15 bp, Homo sapiens
aaattctggaactcc

SEQ ID NO: 2070691 - DNA, 15 bp, Homo sapiens
aattctggaactccc

SEQ ID NO: 2070692 - DNA, 15 bp, Homo sapiens
attctggaactccca

SEQ ID NO: 2070693 - DNA, 15 bp, Homo sapiens
ttctggaactcccac

SEQ ID NO: 2070694 - DNA, 15 bp, Homo sapiens
tctggaactcccacc

SEQ ID NO: 2070695 - DNA, 15 bp, Homo sapiens
ctggaactcccacca

SEQ ID NO: 2070696 - DNA, 15 bp, Homo sapiens
tggaactcccaccaa

SEQ ID NO: 2070697 - DNA, 15 bp, Homo sapiens
ggaactcccaccaat

SEQ ID NO: 2070698 - DNA, 15 bp, Homo sapiens
gaactcccaccaatt

SEQ ID NO: 2070699 - DNA, 15 bp, Homo sapiens
aactcccaccaattg

SEQ ID NO: 2070700 - DNA, 15 bp, Homo sapiens
actcccaccaattgc

SEQ ID NO: 2070701 - DNA, 15 bp, Homo sapiens
ctcccaccaattgct

SEQ ID NO: 2070702 - DNA, 15 bp, Homo sapiens
tcccaccaattgctt

SEQ ID NO: 2070703 - DNA, 15 bp, Homo sapiens
cccaccaattgcttc

SEQ ID NO: 2070704 - DNA, 15 bp, Homo sapiens
ccaccaattgcttcc

SEQ ID NO: 2070705 - DNA, 15 bp, Homo sapiens
caccaattgcttcca

SEQ ID NO: 2070706 - DNA, 15 bp, Homo sapiens
accaattgcttccag

SEQ ID NO: 2070707 - DNA, 15 bp, Homo sapiens
ccaattgcttccaga

SEQ ID NO: 2070708 - DNA, 15 bp, Homo sapiens
caattgcttccagag

SEQ ID NO: 2070709 - DNA, 15 bp, Homo sapiens
aattgcttccagagc

SEQ ID NO: 2070710 - DNA, 15 bp, Homo sapiens
attgcttccagagca

SEQ ID NO: 2070711 - DNA, 15 bp, Homo sapiens
ttgcttccagagcag

SEQ ID NO: 2070712 - DNA, 15 bp, Homo sapiens
tgcttccagagcagc

SEQ ID NO: 2070713 - DNA, 15 bp, Homo sapiens
gcttccagagcagcg

SEQ ID NO: 2070714 - DNA, 15 bp, Homo sapiens
cttccagagcagcgg

SEQ ID NO: 2070715 - DNA, 15 bp, Homo sapiens
ttccagagcagcggc

SEQ ID NO: 2070716 - DNA, 15 bp, Homo sapiens
tccagagcagcggca

SEQ ID NO: 2070717 - DNA, 15 bp, Homo sapiens
ccagagcagcggcac

SEQ ID NO: 2070718 - DNA, 15 bp, Homo sapiens
cagagcagcggcaca

SEQ ID NO: 2070719 - DNA, 15 bp, Homo sapiens
agagcagcggcacat

SEQ ID NO: 2070720 - DNA, 15 bp, Homo sapiens
gagcagcggcacatg

SEQ ID NO: 2070721 - DNA, 15 bp, Homo sapiens
agcagcggcacatgt

SEQ ID NO: 2070722 - DNA, 15 bp, Homo sapiens
gcagcggcacatgtc

SEQ ID NO: 2070723 - DNA, 15 bp, Homo sapiens
cagcggcacatgtca

SEQ ID NO: 2070724 - DNA, 15 bp, Homo sapiens
agcggcacatgtcag

SEQ ID NO: 2070725 - DNA, 15 bp, Homo sapiens
gcggcacatgtcaga

SEQ ID NO: 2070726 - DNA, 15 bp, Homo sapiens
cggcacatgtcagag

SEQ ID NO: 2070727 - DNA, 15 bp, Homo sapiens
ggcacatgtcagagt

SEQ ID NO: 2070728 - DNA, 15 bp, Homo sapiens
gcacatgtcagagtt

SEQ ID NO: 2070729 - DNA, 15 bp, Homo sapiens
cacatgtcagagtta

SEQ ID NO: 2070730 - DNA, 15 bp, Homo sapiens
acatgtcagagttag

SEQ ID NO: 2070731 - DNA, 15 bp, Homo sapiens
catgtcagagttaga

SEQ ID NO: 2070732 - DNA, 15 bp, Homo sapiens
atgtcagagttagac

SEQ ID NO: 2070733 - DNA, 15 bp, Homo sapiens
tgtcagagttagaca

SEQ ID NO: 2070734 - DNA, 15 bp, Homo sapiens
gtcagagttagacat

SEQ ID NO: 2070735 - DNA, 15 bp, Homo sapiens
tcagagttagacatt

SEQ ID NO: 2070736 - DNA, 15 bp, Homo sapiens
cagagttagacattc

SEQ ID NO: 2070737 - DNA, 15 bp, Homo sapiens
agagttagacattct

SEQ ID NO: 2070738 - DNA, 15 bp, Homo sapiens
gagttagacattcta

SEQ ID NO: 2070739 - DNA, 15 bp, Homo sapiens
agttagacattctat

SEQ ID NO: 2070740 - DNA, 15 bp, Homo sapiens
gttagacattctatc

SEQ ID NO: 2070741 - DNA, 15 bp, Homo sapiens
ttagacattctatca

SEQ ID NO: 2070742 - DNA, 15 bp, Homo sapiens
tagacattctatcat

SEQ ID NO: 2070743 - DNA, 15 bp, Homo sapiens
agacattctatcatc

SEQ ID NO: 2070744 - DNA, 15 bp, Homo sapiens
gacattctatcatcc

SEQ ID NO: 2070745 - DNA, 15 bp, Homo sapiens
acattctatcatccc

SEQ ID NO: 2070746 - DNA, 15 bp, Homo sapiens
cattctatcatccca

SEQ ID NO: 2070747 - DNA, 15 bp, Homo sapiens
attctatcatcccaa

SEQ ID NO: 2070748 - DNA, 15 bp, Homo sapiens
ttctatcatcccaat

SEQ ID NO: 2070749 - DNA, 15 bp, Homo sapiens
tctatcatcccaatt

SEQ ID NO: 2070750 - DNA, 15 bp, Homo sapiens
ctatcatcccaattt

SEQ ID NO: 2070751 - DNA, 15 bp, Homo sapiens
tatcatcccaatttt

SEQ ID NO: 2070752 - DNA, 15 bp, Homo sapiens
atcatcccaattttg

SEQ ID NO: 2070753 - DNA, 15 bp, Homo sapiens
tcatcccaattttga

SEQ ID NO: 2070754 - DNA, 15 bp, Homo sapiens
catcccaattttgag

SEQ ID NO: 2070755 - DNA, 15 bp, Homo sapiens
atcccaattttgagc

SEQ ID NO: 2070756 - DNA, 15 bp, Homo sapiens
tcccaattttgagcc

SEQ ID NO: 2070757 - DNA, 15 bp, Homo sapiens
cccaattttgagccc

SEQ ID NO: 2070758 - DNA, 15 bp, Homo sapiens
ccaattttgagccct

SEQ ID NO: 2070759 - DNA, 15 bp, Homo sapiens
caattttgagccctt

SEQ ID NO: 2070760 - DNA, 15 bp, Homo sapiens
aattttgagcccttt

SEQ ID NO: 2070761 - DNA, 15 bp, Homo sapiens
attttgagccctttc

SEQ ID NO: 2070762 - DNA, 15 bp, Homo sapiens
ttttgagccctttcc

SEQ ID NO: 2070763 - DNA, 15 bp, Homo sapiens
tttgagccctttcca

SEQ ID NO: 2070764 - DNA, 15 bp, Homo sapiens
ttgagccctttccag

SEQ ID NO: 2070765 - DNA, 15 bp, Homo sapiens
tgagccctttccagg

SEQ ID NO: 2070766 - DNA, 15 bp, Homo sapiens
gagccctttccagga

SEQ ID NO: 2070767 - DNA, 15 bp, Homo sapiens
agccctttccaggat

SEQ ID NO: 2070768 - DNA, 15 bp, Homo sapiens
gccctttccaggata

SEQ ID NO: 2070769 - DNA, 15 bp, Homo sapiens
ccctttccaggatat

SEQ ID NO: 2070770 - DNA, 15 bp, Homo sapiens
cctttccaggatata

SEQ ID NO: 2070771 - DNA, 15 bp, Homo sapiens
ctttccaggatataa

SEQ ID NO: 2070772 - DNA, 15 bp, Homo sapiens
tttccaggatataac

SEQ ID NO: 2070773 - DNA, 15 bp, Homo sapiens
ttccaggatataact

SEQ ID NO: 2070774 - DNA, 15 bp, Homo sapiens
tccaggatataactg

SEQ ID NO: 2070775 - DNA, 15 bp, Homo sapiens
ccaggatataactgc

SEQ ID NO: 2070776 - DNA, 15 bp, Homo sapiens
caggatataactgcc

SEQ ID NO: 2070777 - DNA, 15 bp, Homo sapiens
aggatataactgcca

SEQ ID NO: 2070778 - DNA, 15 bp, Homo sapiens
ggatataactgccat

SEQ ID NO: 2070779 - DNA, 15 bp, Homo sapiens
gatataactgccatt

SEQ ID NO: 2070780 - DNA, 15 bp, Homo sapiens
atataactgccatta

SEQ ID NO: 2070781 - DNA, 15 bp, Homo sapiens
tataactgccattat

SEQ ID NO: 2070782 - DNA, 15 bp, Homo sapiens
ataactgccattatt

SEQ ID NO: 2070783 - DNA, 15 bp, Homo sapiens
taactgccattatta

SEQ ID NO: 2070784 - DNA, 15 bp, Homo sapiens
aactgccattattaa

SEQ ID NO: 2070785 - DNA, 15 bp, Homo sapiens
actgccattattaaa

SEQ ID NO: 2070786 - DNA, 15 bp, Homo sapiens
ctgccattattaaat

SEQ ID NO: 2070787 - DNA, 15 bp, Homo sapiens
tgccattattaaatg

SEQ ID NO: 2070788 - DNA, 15 bp, Homo sapiens
gccattattaaatgg

SEQ ID NO: 2070789 - DNA, 15 bp, Homo sapiens
ccattattaaatggt

SEQ ID NO: 2070790 - DNA, 15 bp, Homo sapiens
cattattaaatggtt

SEQ ID NO: 2070791 - DNA, 15 bp, Homo sapiens
attattaaatggtta

SEQ ID NO: 2070792 - DNA, 15 bp, Homo sapiens
ttattaaatggttat

SEQ ID NO: 2070793 - DNA, 15 bp, Homo sapiens
tattaaatggttatt

SEQ ID NO: 2070794 - DNA, 15 bp, Homo sapiens
attaaatggttattt

SEQ ID NO: 2070795 - DNA, 15 bp, Homo sapiens
ttaaatggttatttt

SEQ ID NO: 2070796 - DNA, 15 bp, Homo sapiens
aatggttattttttc

SEQ ID NO: 2070797 - DNA, 15 bp, Homo sapiens
atggttattttttct

SEQ ID NO: 2070798 - DNA, 15 bp, Homo sapiens
tggttattttttctt

SEQ ID NO: 2070799 - DNA, 15 bp, Homo sapiens
ggttattttttctta

SEQ ID NO: 2070800 - DNA, 15 bp, Homo sapiens
gttattttttcttac

SEQ ID NO: 2070801 - DNA, 15 bp, Homo sapiens
ttattttttcttacc

SEQ ID NO: 2070802 - DNA, 15 bp, Homo sapiens
tattttttcttacct

SEQ ID NO: 2070803 - DNA, 15 bp, Homo sapiens
attttttcttaccta

SEQ ID NO: 2070804 - DNA, 15 bp, Homo sapiens
ttttttcttacctaa

SEQ ID NO: 2070805 - DNA, 15 bp, Homo sapiens
tttttcttacctaag

SEQ ID NO: 2070806 - DNA, 15 bp, Homo sapiens
ttttcttacctaaga

SEQ ID NO: 2070807 - DNA, 15 bp, Homo sapiens
tttcttacctaagac

SEQ ID NO: 2070808 - DNA, 15 bp, Homo sapiens
ttcttacctaagact

SEQ ID NO: 2070809 - DNA, 15 bp, Homo sapiens
tcttacctaagactt

SEQ ID NO: 2070810 - DNA, 15 bp, Homo sapiens
cttacctaagacttt

SEQ ID NO: 2070811 - DNA, 15 bp, Homo sapiens
ttacctaagactttt

SEQ ID NO: 2070812 - DNA, 15 bp, Homo sapiens
tacctaagacttttt

SEQ ID NO: 2070813 - DNA, 15 bp, Homo sapiens
acctaagacttttta

SEQ ID NO: 2070814 - DNA, 15 bp, Homo sapiens
cctaagactttttaa

SEQ ID NO: 2070815 - DNA, 15 bp, Homo sapiens
ctaagactttttaaa

SEQ ID NO: 2070816 - DNA, 15 bp, Homo sapiens
taagactttttaaaa

SEQ ID NO: 2070817 - DNA, 15 bp, Homo sapiens
aagactttttaaaat

SEQ ID NO: 2070818 - DNA, 15 bp, Homo sapiens
agactttttaaaatg

SEQ ID NO: 2070819 - DNA, 15 bp, Homo sapiens
gactttttaaaatga

SEQ ID NO: 2070820 - DNA, 15 bp, Homo sapiens
actttttaaaatgat

SEQ ID NO: 2070821 - DNA, 15 bp, Homo sapiens
ctttttaaaatgatc

SEQ ID NO: 2070822 - DNA, 15 bp, Homo sapiens
tttttaaaatgatcc

SEQ ID NO: 2070823 - DNA, 15 bp, Homo sapiens
ttttaaaatgatcca

SEQ ID NO: 2070824 - DNA, 15 bp, Homo sapiens
tttaaaatgatccat

SEQ ID NO: 2070825 - DNA, 15 bp, Homo sapiens
ttaaaatgatccatg

SEQ ID NO: 2070826 - DNA, 15 bp, Homo sapiens
taaaatgatccatga

SEQ ID NO: 2070827 - DNA, 15 bp, Homo sapiens
aaaatgatccatgaa

SEQ ID NO: 2070828 - DNA, 15 bp, Homo sapiens
aaatgatccatgaag

SEQ ID NO: 2070829 - DNA, 15 bp, Homo sapiens
aatgatccatgaaga

SEQ ID NO: 2070830 - DNA, 15 bp, Homo sapiens
atgatccatgaagat

SEQ ID NO: 2070831 - DNA, 15 bp, Homo sapiens
tgatccatgaagatg

SEQ ID NO: 2070832 - DNA, 15 bp, Homo sapiens
gatccatgaagatgt

SEQ ID NO: 2070833 - DNA, 15 bp, Homo sapiens
atccatgaagatgta

SEQ ID NO: 2070834 - DNA, 15 bp, Homo sapiens
tccatgaagatgtac

SEQ ID NO: 2070835 - DNA, 15 bp, Homo sapiens
ccatgaagatgtact

SEQ ID NO: 2070836 - DNA, 15 bp, Homo sapiens
catgaagatgtactc

SEQ ID NO: 2070837 - DNA, 15 bp, Homo sapiens
atgaagatgtactct

SEQ ID NO: 2070838 - DNA, 15 bp, Homo sapiens
tgaagatgtactctt

SEQ ID NO: 2070839 - DNA, 15 bp, Homo sapiens
gaagatgtactcttt

SEQ ID NO: 2070840 - DNA, 15 bp, Homo sapiens
aagatgtactctttt

SEQ ID NO: 2070841 - DNA, 15 bp, Homo sapiens
agatgtactcttttg

SEQ ID NO: 2070842 - DNA, 15 bp, Homo sapiens
gatgtactcttttga

SEQ ID NO: 2070843 - DNA, 15 bp, Homo sapiens
atgtactcttttgag

SEQ ID NO: 2070844 - DNA, 15 bp, Homo sapiens
tgtactcttttgagg

SEQ ID NO: 2070845 - DNA, 15 bp, Homo sapiens
gtactcttttgagga

SEQ ID NO: 2070846 - DNA, 15 bp, Homo sapiens
tactcttttgaggat

SEQ ID NO: 2070847 - DNA, 15 bp, Homo sapiens
actcttttgaggatg

SEQ ID NO: 2070848 - DNA, 15 bp, Homo sapiens
ctcttttgaggatgc

SEQ ID NO: 2070849 - DNA, 15 bp, Homo sapiens
tcttttgaggatgca

SEQ ID NO: 2070850 - DNA, 15 bp, Homo sapiens
cttttgaggatgcaa

SEQ ID NO: 2070851 - DNA, 15 bp, Homo sapiens
ttttgaggatgcaag

SEQ ID NO: 2070852 - DNA, 15 bp, Homo sapiens
tttgaggatgcaagg

SEQ ID NO: 2070853 - DNA, 15 bp, Homo sapiens
ttgaggatgcaagga

SEQ ID NO: 2070854 - DNA, 15 bp, Homo sapiens
tgaggatgcaaggag

SEQ ID NO: 2070855 - DNA, 15 bp, Homo sapiens
gaggatgcaaggaga

SEQ ID NO: 2070856 - DNA, 15 bp, Homo sapiens
aggatgcaaggagag

SEQ ID NO: 2070857 - DNA, 15 bp, Homo sapiens
ggatgcaaggagaga

SEQ ID NO: 2070858 - DNA, 15 bp, Homo sapiens
gatgcaaggagagaa

SEQ ID NO: 2070859 - DNA, 15 bp, Homo sapiens
atgcaaggagagaat

SEQ ID NO: 2070860 - DNA, 15 bp, Homo sapiens
tgcaaggagagaatt

SEQ ID NO: 2070861 - DNA, 15 bp, Homo sapiens
gcaaggagagaatta

SEQ ID NO: 2070862 - DNA, 15 bp, Homo sapiens
caaggagagaattac

SEQ ID NO: 2070863 - DNA, 15 bp, Homo sapiens
aaggagagaattaca

SEQ ID NO: 2070864 - DNA, 15 bp, Homo sapiens
aggagagaattacag

SEQ ID NO: 2070865 - DNA, 15 bp, Homo sapiens
ggagagaattacagc

SEQ ID NO: 2070866 - DNA, 15 bp, Homo sapiens
gagagaattacagca

SEQ ID NO: 2070867 - DNA, 15 bp, Homo sapiens
agagaattacagcat

SEQ ID NO: 2070868 - DNA, 15 bp, Homo sapiens
gagaattacagcata

SEQ ID NO: 2070869 - DNA, 15 bp, Homo sapiens
agaattacagcatat

SEQ ID NO: 2070870 - DNA, 15 bp, Homo sapiens
gaattacagcatatg

SEQ ID NO: 2070871 - DNA, 15 bp, Homo sapiens
aattacagcatatgt

SEQ ID NO: 2070872 - DNA, 15 bp, Homo sapiens
attacagcatatgtt

SEQ ID NO: 2070873 - DNA, 15 bp, Homo sapiens
ttacagcatatgttt

SEQ ID NO: 2070874 - DNA, 15 bp, Homo sapiens
tacagcatatgtttt

SEQ ID NO: 2070875 - DNA, 15 bp, Homo sapiens
acagcatatgttttt

SEQ ID NO: 2070876 - DNA, 15 bp, Homo sapiens
cagcatatgttttta

SEQ ID NO: 2070877 - DNA, 15 bp, Homo sapiens
agcatatgtttttaa

SEQ ID NO: 2070878 - DNA, 15 bp, Homo sapiens
gcatatgtttttaag

SEQ ID NO: 2070879 - DNA, 15 bp, Homo sapiens
catatgtttttaaga

SEQ ID NO: 2070880 - DNA, 15 bp, Homo sapiens
atatgtttttaagag

SEQ ID NO: 2070881 - DNA, 15 bp, Homo sapiens
tatgtttttaagagg

SEQ ID NO: 2070882 - DNA, 15 bp, Homo sapiens
atgtttttaagaggt

SEQ ID NO: 2070883 - DNA, 15 bp, Homo sapiens
tgtttttaagaggtt

SEQ ID NO: 2070884 - DNA, 15 bp, Homo sapiens
gtttttaagaggtta

SEQ ID NO: 2070885 - DNA, 15 bp, Homo sapiens
tttttaagaggttac

SEQ ID NO: 2070886 - DNA, 15 bp, Homo sapiens
ttttaagaggttacc

SEQ ID NO: 2070887 - DNA, 15 bp, Homo sapiens
tttaagaggttacct

SEQ ID NO: 2070888 - DNA, 15 bp, Homo sapiens
ttaagaggttacctt

SEQ ID NO: 2070889 - DNA, 15 bp, Homo sapiens
taagaggttaccttg

SEQ ID NO: 2070890 - DNA, 15 bp, Homo sapiens
aagaggttaccttgt

SEQ ID NO: 2070891 - DNA, 15 bp, Homo sapiens
agaggttaccttgtg

SEQ ID NO: 2070892 - DNA, 15 bp, Homo sapiens
gaggttaccttgtgc

SEQ ID NO: 2070893 - DNA, 15 bp, Homo sapiens
aggttaccttgtgct

SEQ ID NO: 2070894 - DNA, 15 bp, Homo sapiens
ggttaccttgtgctt

SEQ ID NO: 2070895 - DNA, 15 bp, Homo sapiens
gttaccttgtgctta

SEQ ID NO: 2070896 - DNA, 15 bp, Homo sapiens
ttaccttgtgcttaa

SEQ ID NO: 2070897 - DNA, 15 bp, Homo sapiens
taccttgtgcttaat

SEQ ID NO: 2070898 - DNA, 15 bp, Homo sapiens
accttgtgcttaatt

SEQ ID NO: 2070899 - DNA, 15 bp, Homo sapiens
ccttgtgcttaattg

SEQ ID NO: 2070900 - DNA, 15 bp, Homo sapiens
cttgtgcttaattga

SEQ ID NO: 2070901 - DNA, 15 bp, Homo sapiens
ttgtgcttaattgaa

SEQ ID NO: 2070902 - DNA, 15 bp, Homo sapiens
tgtgcttaattgaag

SEQ ID NO: 2070903 - DNA, 15 bp, Homo sapiens
gtgcttaattgaagt

SEQ ID NO: 2070904 - DNA, 15 bp, Homo sapiens
tgcttaattgaagtt

SEQ ID NO: 2070905 - DNA, 15 bp, Homo sapiens
gcttaattgaagtta

SEQ ID NO: 2070906 - DNA, 15 bp, Homo sapiens
cttaattgaagttat

SEQ ID NO: 2070907 - DNA, 15 bp, Homo sapiens
ttaattgaagttatt

SEQ ID NO: 2070908 - DNA, 15 bp, Homo sapiens
taattgaagttattc

SEQ ID NO: 2070909 - DNA, 15 bp, Homo sapiens
aattgaagttattca

SEQ ID NO: 2070910 - DNA, 15 bp, Homo sapiens
ttgaagttattcatt

SEQ ID NO: 2070911 - DNA, 15 bp, Homo sapiens
tgaagttattcatta

SEQ ID NO: 2070912 - DNA, 15 bp, Homo sapiens
gaagttattcattaa

SEQ ID NO: 2070913 - DNA, 15 bp, Homo sapiens
aagttattcattaaa

SEQ ID NO: 2070914 - DNA, 15 bp, Homo sapiens
agttattcattaaag

SEQ ID NO: 2070915 - DNA, 15 bp, Homo sapiens
gttattcattaaagt

SEQ ID NO: 2070916 - DNA, 15 bp, Homo sapiens
ttattcattaaagtc

SEQ ID NO: 2070917 - DNA, 15 bp, Homo sapiens
tattcattaaagtct

SEQ ID NO: 2070918 - DNA, 15 bp, Homo sapiens
attcattaaagtctt

SEQ ID NO: 2070919 - DNA, 15 bp, Homo sapiens
ttcattaaagtctta

SEQ ID NO: 2070920 - DNA, 15 bp, Homo sapiens
tcattaaagtcttac

SEQ ID NO: 2070921 - DNA, 15 bp, Homo sapiens
cattaaagtcttaca

SEQ ID NO: 2070922 - DNA, 15 bp, Homo sapiens
attaaagtcttacaa

SEQ ID NO: 2070923 - DNA, 15 bp, Homo sapiens
ttaaagtcttacaaa

SEQ ID NO: 2070924 - DNA, 15 bp, Homo sapiens
taaagtcttacaaac

SEQ ID NO: 2070925 - DNA, 15 bp, Homo sapiens
aaagtcttacaaact

SEQ ID NO: 2070926 - DNA, 15 bp, Homo sapiens
aagtcttacaaacta

SEQ ID NO: 2070927 - DNA, 15 bp, Homo sapiens
agtcttacaaactat

SEQ ID NO: 2070928 - DNA, 15 bp, Homo sapiens
gtcttacaaactatg

SEQ ID NO: 2070929 - DNA, 15 bp, Homo sapiens
tcttacaaactatgt

SEQ ID NO: 2070930 - DNA, 15 bp, Homo sapiens
cttacaaactatgtc

SEQ ID NO: 2070931 - DNA, 15 bp, Homo sapiens
ttacaaactatgtct

SEQ ID NO: 2070932 - DNA, 15 bp, Homo sapiens
tacaaactatgtctt

SEQ ID NO: 2070933 - DNA, 15 bp, Homo sapiens
acaaactatgtctta

SEQ ID NO: 2070934 - DNA, 15 bp, Homo sapiens
caaactatgtcttag

SEQ ID NO: 2070935 - DNA, 15 bp, Homo sapiens
aaactatgtcttagg

SEQ ID NO: 2070936 - DNA, 15 bp, Homo sapiens
aactatgtcttagga

SEQ ID NO: 2070937 - DNA, 15 bp, Homo sapiens
actatgtcttaggag

SEQ ID NO: 2070938 - DNA, 15 bp, Homo sapiens
ctatgtcttaggaga

SEQ ID NO: 2070939 - DNA, 15 bp, Homo sapiens
tatgtcttaggagaa

SEQ ID NO: 2070940 - DNA, 15 bp, Homo sapiens
atgtcttaggagaac

SEQ ID NO: 2070941 - DNA, 15 bp, Homo sapiens
tgtcttaggagaaca

SEQ ID NO: 2070942 - DNA, 15 bp, Homo sapiens
gtcttaggagaacat

SEQ ID NO: 2070943 - DNA, 15 bp, Homo sapiens
tcttaggagaacata

SEQ ID NO: 2070944 - DNA, 15 bp, Homo sapiens
cttaggagaacatag

SEQ ID NO: 2070945 - DNA, 15 bp, Homo sapiens
ttaggagaacataga

SEQ ID NO: 2070946 - DNA, 15 bp, Homo sapiens
taggagaacatagaa

SEQ ID NO: 2070947 - DNA, 15 bp, Homo sapiens
aggagaacatagaat

SEQ ID NO: 2070948 - DNA, 15 bp, Homo sapiens
ggagaacatagaatt

SEQ ID NO: 2070949 - DNA, 15 bp, Homo sapiens
gagaacatagaattt

SEQ ID NO: 2070950 - DNA, 15 bp, Homo sapiens
agaacatagaatttc

SEQ ID NO: 2070951 - DNA, 15 bp, Homo sapiens
gaacatagaatttca

SEQ ID NO: 2070952 - DNA, 15 bp, Homo sapiens
aacatagaatttcag

SEQ ID NO: 2070953 - DNA, 15 bp, Homo sapiens
acatagaatttcaga

SEQ ID NO: 2070954 - DNA, 15 bp, Homo sapiens
catagaatttcagac

SEQ ID NO: 2070955 - DNA, 15 bp, Homo sapiens
atagaatttcagacc

SEQ ID NO: 2070956 - DNA, 15 bp, Homo sapiens
tagaatttcagacca

SEQ ID NO: 2070957 - DNA, 15 bp, Homo sapiens
agaatttcagaccaa

SEQ ID NO: 2070958 - DNA, 15 bp, Homo sapiens
gaatttcagaccaat

SEQ ID NO: 2070959 - DNA, 15 bp, Homo sapiens
aatttcagaccaata

SEQ ID NO: 2070960 - DNA, 15 bp, Homo sapiens
atttcagaccaatag

SEQ ID NO: 2070961 - DNA, 15 bp, Homo sapiens
tttcagaccaatagt

SEQ ID NO: 2070962 - DNA, 15 bp, Homo sapiens
ttcagaccaatagta

SEQ ID NO: 2070963 - DNA, 15 bp, Homo sapiens
tcagaccaatagtaa

SEQ ID NO: 2070964 - DNA, 15 bp, Homo sapiens
cagaccaatagtaag

SEQ ID NO: 2070965 - DNA, 15 bp, Homo sapiens
agaccaatagtaaga

SEQ ID NO: 2070966 - DNA, 15 bp, Homo sapiens
gaccaatagtaagaa

SEQ ID NO: 2070967 - DNA, 15 bp, Homo sapiens
accaatagtaagaaa

SEQ ID NO: 2070968 - DNA, 15 bp, Homo sapiens
ccaatagtaagaaat

SEQ ID NO: 2070969 - DNA, 15 bp, Homo sapiens
caatagtaagaaatg

SEQ ID NO: 2070970 - DNA, 15 bp, Homo sapiens
aatagtaagaaatgc

SEQ ID NO: 2070971 - DNA, 15 bp, Homo sapiens
atagtaagaaatgca

SEQ ID NO: 2070972 - DNA, 15 bp, Homo sapiens
tagtaagaaatgcat

SEQ ID NO: 2070973 - DNA, 15 bp, Homo sapiens
agtaagaaatgcatt

SEQ ID NO: 2070974 - DNA, 15 bp, Homo sapiens
gtaagaaatgcatta

SEQ ID NO: 2070975 - DNA, 15 bp, Homo sapiens
taagaaatgcattag

SEQ ID NO: 2070976 - DNA, 15 bp, Homo sapiens
aagaaatgcattagc

SEQ ID NO: 2070977 - DNA, 15 bp, Homo sapiens
agaaatgcattagcc

SEQ ID NO: 2070978 - DNA, 15 bp, Homo sapiens
gaaatgcattagcct

SEQ ID NO: 2070979 - DNA, 15 bp, Homo sapiens
aaatgcattagcctg

SEQ ID NO: 2070980 - DNA, 15 bp, Homo sapiens
aatgcattagcctgg

SEQ ID NO: 2070981 - DNA, 15 bp, Homo sapiens
atgcattagcctggg

SEQ ID NO: 2070982 - DNA, 15 bp, Homo sapiens
tgcattagcctgggc

SEQ ID NO: 2070983 - DNA, 15 bp, Homo sapiens
gcattagcctgggcc

SEQ ID NO: 2070984 - DNA, 15 bp, Homo sapiens
cattagcctgggcct

SEQ ID NO: 2070985 - DNA, 15 bp, Homo sapiens
attagcctgggcctt

SEQ ID NO: 2070986 - DNA, 15 bp, Homo sapiens
ttagcctgggccttt

SEQ ID NO: 2070987 - DNA, 15 bp, Homo sapiens
tagcctgggcctttt

SEQ ID NO: 2070988 - DNA, 15 bp, Homo sapiens
agcctgggccttttg

SEQ ID NO: 2070989 - DNA, 15 bp, Homo sapiens
gcctgggccttttga

SEQ ID NO: 2070990 - DNA, 15 bp, Homo sapiens
cctgggccttttgag

SEQ ID NO: 2070991 - DNA, 15 bp, Homo sapiens
ctgggccttttgaga

SEQ ID NO: 2070992 - DNA, 15 bp, Homo sapiens
tgggccttttgagac

SEQ ID NO: 2070993 - DNA, 15 bp, Homo sapiens
gggccttttgagacc

SEQ ID NO: 2070994 - DNA, 15 bp, Homo sapiens
ggccttttgagacca

SEQ ID NO: 2070995 - DNA, 15 bp, Homo sapiens
gccttttgagaccaa

SEQ ID NO: 2070996 - DNA, 15 bp, Homo sapiens
ccttttgagaccaaa

SEQ ID NO: 2070997 - DNA, 15 bp, Homo sapiens
cttttgagaccaaag

SEQ ID NO: 2070998 - DNA, 15 bp, Homo sapiens
ttttgagaccaaagc

SEQ ID NO: 2070999 - DNA, 15 bp, Homo sapiens
tttgagaccaaagct

SEQ ID NO: 2071000 - DNA, 15 bp, Homo sapiens
ttgagaccaaagctt

SEQ ID NO: 2071001 - DNA, 15 bp, Homo sapiens
tgagaccaaagcttg

SEQ ID NO: 2071002 - DNA, 15 bp, Homo sapiens
gagaccaaagcttgg

SEQ ID NO: 2071003 - DNA, 15 bp, Homo sapiens
agaccaaagcttggg

SEQ ID NO: 2071004 - DNA, 15 bp, Homo sapiens
gaccaaagcttgggg

SEQ ID NO: 2071005 - DNA, 15 bp, Homo sapiens
accaaagcttgggga

SEQ ID NO: 2071006 - DNA, 15 bp, Homo sapiens
ccaaagcttggggaa

SEQ ID NO: 2071007 - DNA, 15 bp, Homo sapiens
caaagcttggggaac

SEQ ID NO: 2071008 - DNA, 15 bp, Homo sapiens
aaagcttggggaaca

SEQ ID NO: 2071009 - DNA, 15 bp, Homo sapiens
aagcttggggaacac

SEQ ID NO: 2071010 - DNA, 15 bp, Homo sapiens
agcttggggaacact

SEQ ID NO: 2071011 - DNA, 15 bp, Homo sapiens
gcttggggaacactc

SEQ ID NO: 2071012 - DNA, 15 bp, Homo sapiens
cttggggaacactct

SEQ ID NO: 2071013 - DNA, 15 bp, Homo sapiens
ttggggaacactctt

SEQ ID NO: 2071014 - DNA, 15 bp, Homo sapiens
tggggaacactctta

SEQ ID NO: 2071015 - DNA, 15 bp, Homo sapiens
ggggaacactcttag

SEQ ID NO: 2071016 - DNA, 15 bp, Homo sapiens
gggaacactcttaga

SEQ ID NO: 2071017 - DNA, 15 bp, Homo sapiens
ggaacactcttagat

SEQ ID NO: 2071018 - DNA, 15 bp, Homo sapiens
gaacactcttagata

SEQ ID NO: 2071019 - DNA, 15 bp, Homo sapiens
aacactcttagataa

SEQ ID NO: 2071020 - DNA, 15 bp, Homo sapiens
acactcttagataaa

SEQ ID NO: 2071021 - DNA, 15 bp, Homo sapiens
cactcttagataaag

SEQ ID NO: 2071022 - DNA, 15 bp, Homo sapiens
actcttagataaagg

SEQ ID NO: 2071023 - DNA, 15 bp, Homo sapiens
ctcttagataaagga

SEQ ID NO: 2071024 - DNA, 15 bp, Homo sapiens
tcttagataaaggaa

SEQ ID NO: 2071025 - DNA, 15 bp, Homo sapiens
cttagataaaggaat

SEQ ID NO: 2071026 - DNA, 15 bp, Homo sapiens
ttagataaaggaata

SEQ ID NO: 2071027 - DNA, 15 bp, Homo sapiens
tagataaaggaatag

SEQ ID NO: 2071028 - DNA, 15 bp, Homo sapiens
agataaaggaatagt

SEQ ID NO: 2071029 - DNA, 15 bp, Homo sapiens
gataaaggaatagtc

SEQ ID NO: 2071030 - DNA, 15 bp, Homo sapiens
ataaaggaatagtct

SEQ ID NO: 2071031 - DNA, 15 bp, Homo sapiens
taaaggaatagtctt

SEQ ID NO: 2071032 - DNA, 15 bp, Homo sapiens
aaaggaatagtcttg

SEQ ID NO: 2071033 - DNA, 15 bp, Homo sapiens
aaggaatagtcttgg

SEQ ID NO: 2071034 - DNA, 15 bp, Homo sapiens
aggaatagtcttggc

SEQ ID NO: 2071035 - DNA, 15 bp, Homo sapiens
ggaatagtcttggct

SEQ ID NO: 2071036 - DNA, 15 bp, Homo sapiens
gaatagtcttggctg

SEQ ID NO: 2071037 - DNA, 15 bp, Homo sapiens
aatagtcttggctgg

SEQ ID NO: 2071038 - DNA, 15 bp, Homo sapiens
atagtcttggctgga

SEQ ID NO: 2071039 - DNA, 15 bp, Homo sapiens
tagtcttggctggac

SEQ ID NO: 2071040 - DNA, 15 bp, Homo sapiens
agtcttggctggacc

SEQ ID NO: 2071041 - DNA, 15 bp, Homo sapiens
gtcttggctggaccc

SEQ ID NO: 2071042 - DNA, 15 bp, Homo sapiens
tcttggctggaccct

SEQ ID NO: 2071043 - DNA, 15 bp, Homo sapiens
cttggctggaccctt

SEQ ID NO: 2071044 - DNA, 15 bp, Homo sapiens
ttggctggacccttc

SEQ ID NO: 2071045 - DNA, 15 bp, Homo sapiens
tggctggacccttcc

SEQ ID NO: 2071046 - DNA, 15 bp, Homo sapiens
ggctggacccttcct

SEQ ID NO: 2071047 - DNA, 15 bp, Homo sapiens
gctggacccttcctt

SEQ ID NO: 2071048 - DNA, 15 bp, Homo sapiens
ctggacccttccttc

SEQ ID NO: 2071049 - DNA, 15 bp, Homo sapiens
tggacccttccttct

SEQ ID NO: 2071050 - DNA, 15 bp, Homo sapiens
ggacccttccttctg

SEQ ID NO: 2071051 - DNA, 15 bp, Homo sapiens
gacccttccttctgg

SEQ ID NO: 2071052 - DNA, 15 bp, Homo sapiens
acccttccttctggc

SEQ ID NO: 2071053 - DNA, 15 bp, Homo sapiens
cccttccttctggca

SEQ ID NO: 2071054 - DNA, 15 bp, Homo sapiens
ccttccttctggcaa

SEQ ID NO: 2071055 - DNA, 15 bp, Homo sapiens
cttccttctggcaag

SEQ ID NO: 2071056 - DNA, 15 bp, Homo sapiens
ttccttctggcaaga

SEQ ID NO: 2071057 - DNA, 15 bp, Homo sapiens
tccttctggcaagat

SEQ ID NO: 2071058 - DNA, 15 bp, Homo sapiens
ccttctggcaagata

SEQ ID NO: 2071059 - DNA, 15 bp, Homo sapiens
cttctggcaagatac

SEQ ID NO: 2071060 - DNA, 15 bp, Homo sapiens
ttctggcaagataca

SEQ ID NO: 2071061 - DNA, 15 bp, Homo sapiens
tctggcaagatacat

SEQ ID NO: 2071062 - DNA, 15 bp, Homo sapiens
ctggcaagatacatt

SEQ ID NO: 2071063 - DNA, 15 bp, Homo sapiens
tggcaagatacattc

SEQ ID NO: 2071064 - DNA, 15 bp, Homo sapiens
ggcaagatacattcc

SEQ ID NO: 2071065 - DNA, 15 bp, Homo sapiens
gcaagatacattcca

SEQ ID NO: 2071066 - DNA, 15 bp, Homo sapiens
caagatacattccag

SEQ ID NO: 2071067 - DNA, 15 bp, Homo sapiens
aagatacattccagg

SEQ ID NO: 2071068 - DNA, 15 bp, Homo sapiens
agatacattccaggc

SEQ ID NO: 2071069 - DNA, 15 bp, Homo sapiens
gatacattccaggca

SEQ ID NO: 2071070 - DNA, 15 bp, Homo sapiens
atacattccaggcat

SEQ ID NO: 2071071 - DNA, 15 bp, Homo sapiens
tacattccaggcatt

SEQ ID NO: 2071072 - DNA, 15 bp, Homo sapiens
acattccaggcattt

SEQ ID NO: 2071073 - DNA, 15 bp, Homo sapiens
cattccaggcatttt

SEQ ID NO: 2071074 - DNA, 15 bp, Homo sapiens
attccaggcattttg

SEQ ID NO: 2071075 - DNA, 15 bp, Homo sapiens
ttccaggcattttgg

SEQ ID NO: 2071076 - DNA, 15 bp, Homo sapiens
tccaggcattttggc

SEQ ID NO: 2071077 - DNA, 15 bp, Homo sapiens
ccaggcattttggca

SEQ ID NO: 2071078 - DNA, 15 bp, Homo sapiens
caggcattttggcat

SEQ ID NO: 2071079 - DNA, 15 bp, Homo sapiens
aggcattttggcatt

SEQ ID NO: 2071080 - DNA, 15 bp, Homo sapiens
ggcattttggcattc

SEQ ID NO: 2071081 - DNA, 15 bp, Homo sapiens
gcattttggcattca

SEQ ID NO: 2071082 - DNA, 15 bp, Homo sapiens
cattttggcattcat

SEQ ID NO: 2071083 - DNA, 15 bp, Homo sapiens
attttggcattcata

SEQ ID NO: 2071084 - DNA, 15 bp, Homo sapiens
ttttggcattcatat

SEQ ID NO: 2071085 - DNA, 15 bp, Homo sapiens
tttggcattcatatt

SEQ ID NO: 2071086 - DNA, 15 bp, Homo sapiens
ttggcattcatatta

SEQ ID NO: 2071087 - DNA, 15 bp, Homo sapiens
tggcattcatattac

SEQ ID NO: 2071088 - DNA, 15 bp, Homo sapiens
ggcattcatattaca

SEQ ID NO: 2071089 - DNA, 15 bp, Homo sapiens
gcattcatattacaa

SEQ ID NO: 2071090 - DNA, 15 bp, Homo sapiens
cattcatattacaag

SEQ ID NO: 2071091 - DNA, 15 bp, Homo sapiens
attcatattacaaga

SEQ ID NO: 2071092 - DNA, 15 bp, Homo sapiens
ttcatattacaagag

SEQ ID NO: 2071093 - DNA, 15 bp, Homo sapiens
tcatattacaagaga

SEQ ID NO: 2071094 - DNA, 15 bp, Homo sapiens
catattacaagagaa

SEQ ID NO: 2071095 - DNA, 15 bp, Homo sapiens
atattacaagagaaa

SEQ ID NO: 2071096 - DNA, 15 bp, Homo sapiens
tattacaagagaaag

SEQ ID NO: 2071097 - DNA, 15 bp, Homo sapiens
attacaagagaaagg

SEQ ID NO: 2071098 - DNA, 15 bp, Homo sapiens
ttacaagagaaaggt

SEQ ID NO: 2071099 - DNA, 15 bp, Homo sapiens
tacaagagaaaggta

SEQ ID NO: 2071100 - DNA, 15 bp, Homo sapiens
acaagagaaaggtaa

SEQ ID NO: 2071101 - DNA, 15 bp, Homo sapiens
caagagaaaggtaat

SEQ ID NO: 2071102 - DNA, 15 bp, Homo sapiens
aagagaaaggtaata

SEQ ID NO: 2071103 - DNA, 15 bp, Homo sapiens
agagaaaggtaatat

SEQ ID NO: 2071104 - DNA, 15 bp, Homo sapiens
gagaaaggtaatata

SEQ ID NO: 2071105 - DNA, 15 bp, Homo sapiens
agaaaggtaatatat

SEQ ID NO: 2071106 - DNA, 15 bp, Homo sapiens
gaaaggtaatatatt

SEQ ID NO: 2071107 - DNA, 15 bp, Homo sapiens
aaaggtaatatattc

SEQ ID NO: 2071108 - DNA, 15 bp, Homo sapiens
aaggtaatatattcc

SEQ ID NO: 2071109 - DNA, 15 bp, Homo sapiens
aggtaatatattccc

SEQ ID NO: 2071110 - DNA, 15 bp, Homo sapiens
ggtaatatattccct

SEQ ID NO: 2071111 - DNA, 15 bp, Homo sapiens
gtaatatattcccta

SEQ ID NO: 2071112 - DNA, 15 bp, Homo sapiens
taatatattccctat

SEQ ID NO: 2071113 - DNA, 15 bp, Homo sapiens
aatatattccctatt

SEQ ID NO: 2071114 - DNA, 15 bp, Homo sapiens
atatattccctattt

SEQ ID NO: 2071115 - DNA, 15 bp, Homo sapiens
tatattccctatttt

SEQ ID NO: 2071116 - DNA, 15 bp, Homo sapiens
atattccctattttt

SEQ ID NO: 2071117 - DNA, 15 bp, Homo sapiens
tattccctattttta

SEQ ID NO: 2071118 - DNA, 15 bp, Homo sapiens
attccctatttttat

SEQ ID NO: 2071119 - DNA, 15 bp, Homo sapiens
ttccctatttttata

SEQ ID NO: 2071120 - DNA, 15 bp, Homo sapiens
tccctatttttatag

SEQ ID NO: 2071121 - DNA, 15 bp, Homo sapiens
ccctatttttataga

SEQ ID NO: 2071122 - DNA, 15 bp, Homo sapiens
cctatttttatagat

SEQ ID NO: 2071123 - DNA, 15 bp, Homo sapiens
ctatttttatagatg

SEQ ID NO: 2071124 - DNA, 15 bp, Homo sapiens
tatttttatagatga

SEQ ID NO: 2071125 - DNA, 15 bp, Homo sapiens
atttttatagatgag

SEQ ID NO: 2071126 - DNA, 15 bp, Homo sapiens
tttttatagatgagg

SEQ ID NO: 2071127 - DNA, 15 bp, Homo sapiens
ttttatagatgagga

SEQ ID NO: 2071128 - DNA, 15 bp, Homo sapiens
tttatagatgaggaa

SEQ ID NO: 2071129 - DNA, 15 bp, Homo sapiens
ttatagatgaggaaa

SEQ ID NO: 2071130 - DNA, 15 bp, Homo sapiens
tatagatgaggaaac

SEQ ID NO: 2071131 - DNA, 15 bp, Homo sapiens
atagatgaggaaacc

SEQ ID NO: 2071132 - DNA, 15 bp, Homo sapiens
tagatgaggaaaccg

SEQ ID NO: 2071133 - DNA, 15 bp, Homo sapiens
agatgaggaaaccga

SEQ ID NO: 2071134 - DNA, 15 bp, Homo sapiens
gatgaggaaaccgaa

SEQ ID NO: 2071135 - DNA, 15 bp, Homo sapiens
atgaggaaaccgaag

SEQ ID NO: 2071136 - DNA, 15 bp, Homo sapiens
tgaggaaaccgaagc

SEQ ID NO: 2071137 - DNA, 15 bp, Homo sapiens
gaggaaaccgaagcc

SEQ ID NO: 2071138 - DNA, 15 bp, Homo sapiens
aggaaaccgaagccc

SEQ ID NO: 2071139 - DNA, 15 bp, Homo sapiens
ggaaaccgaagccca

SEQ ID NO: 2071140 - DNA, 15 bp, Homo sapiens
gaaaccgaagcccag

SEQ ID NO: 2071141 - DNA, 15 bp, Homo sapiens
aaaccgaagcccaga

SEQ ID NO: 2071142 - DNA, 15 bp, Homo sapiens
aaccgaagcccagaa

SEQ ID NO: 2071143 - DNA, 15 bp, Homo sapiens
accgaagcccagaaa

SEQ ID NO: 2071144 - DNA, 15 bp, Homo sapiens
ccgaagcccagaaag

SEQ ID NO: 2071145 - DNA, 15 bp, Homo sapiens
cgaagcccagaaagg

SEQ ID NO: 2071146 - DNA, 15 bp, Homo sapiens
gaagcccagaaaggt

SEQ ID NO: 2071147 - DNA, 15 bp, Homo sapiens
aagcccagaaaggtt

SEQ ID NO: 2071148 - DNA, 15 bp, Homo sapiens
agcccagaaaggtta

SEQ ID NO: 2071149 - DNA, 15 bp, Homo sapiens
gcccagaaaggttaa

SEQ ID NO: 2071150 - DNA, 15 bp, Homo sapiens
cccagaaaggttaag

SEQ ID NO: 2071151 - DNA, 15 bp, Homo sapiens
ccagaaaggttaagt

SEQ ID NO: 2071152 - DNA, 15 bp, Homo sapiens
cagaaaggttaagta

SEQ ID NO: 2071153 - DNA, 15 bp, Homo sapiens
agaaaggttaagtaa

SEQ ID NO: 2071154 - DNA, 15 bp, Homo sapiens
gaaaggttaagtaaa

SEQ ID NO: 2071155 - DNA, 15 bp, Homo sapiens
aaaggttaagtaaat

SEQ ID NO: 2071156 - DNA, 15 bp, Homo sapiens
ggttaagtaaattgc

SEQ ID NO: 2071157 - DNA, 15 bp, Homo sapiens
gttaagtaaattgct

SEQ ID NO: 2071158 - DNA, 15 bp, Homo sapiens
ttaagtaaattgctg

SEQ ID NO: 2071159 - DNA, 15 bp, Homo sapiens
taagtaaattgctga

SEQ ID NO: 2071160 - DNA, 15 bp, Homo sapiens
aagtaaattgctgaa

SEQ ID NO: 2071161 - DNA, 15 bp, Homo sapiens
agtaaattgctgaag

SEQ ID NO: 2071162 - DNA, 15 bp, Homo sapiens
gtaaattgctgaaga

SEQ ID NO: 2071163 - DNA, 15 bp, Homo sapiens
taaattgctgaagat

SEQ ID NO: 2071164 - DNA, 15 bp, Homo sapiens
aaattgctgaagatc

SEQ ID NO: 2071165 - DNA, 15 bp, Homo sapiens
aattgctgaagatca

SEQ ID NO: 2071166 - DNA, 15 bp, Homo sapiens
attgctgaagatcac

SEQ ID NO: 2071167 - DNA, 15 bp, Homo sapiens
ttgctgaagatcaca

SEQ ID NO: 2071168 - DNA, 15 bp, Homo sapiens
tgctgaagatcacat

SEQ ID NO: 2071169 - DNA, 15 bp, Homo sapiens
gctgaagatcacatg

SEQ ID NO: 2071170 - DNA, 15 bp, Homo sapiens
ctgaagatcacatgg

SEQ ID NO: 2071171 - DNA, 15 bp, Homo sapiens
tgaagatcacatggc

SEQ ID NO: 2071172 - DNA, 15 bp, Homo sapiens
gaagatcacatggct

SEQ ID NO: 2071173 - DNA, 15 bp, Homo sapiens
aagatcacatggcta

SEQ ID NO: 2071174 - DNA, 15 bp, Homo sapiens
agatcacatggctag

SEQ ID NO: 2071175 - DNA, 15 bp, Homo sapiens
gatcacatggctagt

SEQ ID NO: 2071176 - DNA, 15 bp, Homo sapiens
atcacatggctagta

SEQ ID NO: 2071177 - DNA, 15 bp, Homo sapiens
tcacatggctagtaa

SEQ ID NO: 2071178 - DNA, 15 bp, Homo sapiens
cacatggctagtaag

SEQ ID NO: 2071179 - DNA, 15 bp, Homo sapiens
acatggctagtaagt

SEQ ID NO: 2071180 - DNA, 15 bp, Homo sapiens
catggctagtaagta

SEQ ID NO: 2071181 - DNA, 15 bp, Homo sapiens
atggctagtaagtag

SEQ ID NO: 2071182 - DNA, 15 bp, Homo sapiens
tggctagtaagtagt

SEQ ID NO: 2071183 - DNA, 15 bp, Homo sapiens
ggctagtaagtagta

SEQ ID NO: 2071184 - DNA, 15 bp, Homo sapiens
gctagtaagtagtag

SEQ ID NO: 2071185 - DNA, 15 bp, Homo sapiens
ctagtaagtagtaga

SEQ ID NO: 2071186 - DNA, 15 bp, Homo sapiens
tagtaagtagtagaa

SEQ ID NO: 2071187 - DNA, 15 bp, Homo sapiens
agtaagtagtagaac

SEQ ID NO: 2071188 - DNA, 15 bp, Homo sapiens
gtaagtagtagaact

SEQ ID NO: 2071189 - DNA, 15 bp, Homo sapiens
taagtagtagaacta

SEQ ID NO: 2071190 - DNA, 15 bp, Homo sapiens
aagtagtagaactaa

SEQ ID NO: 2071191 - DNA, 15 bp, Homo sapiens
agtagtagaactaag

SEQ ID NO: 2071192 - DNA, 15 bp, Homo sapiens
gtagtagaactaagt

SEQ ID NO: 2071193 - DNA, 15 bp, Homo sapiens
tagtagaactaagtt

SEQ ID NO: 2071194 - DNA, 15 bp, Homo sapiens
agtagaactaagttt

SEQ ID NO: 2071195 - DNA, 15 bp, Homo sapiens
gtagaactaagtttt

SEQ ID NO: 2071196 - DNA, 15 bp, Homo sapiens
tagaactaagttttg

SEQ ID NO: 2071197 - DNA, 15 bp, Homo sapiens
agaactaagttttga

SEQ ID NO: 2071198 - DNA, 15 bp, Homo sapiens
gaactaagttttgat

SEQ ID NO: 2071199 - DNA, 15 bp, Homo sapiens
aactaagttttgatt

SEQ ID NO: 2071200 - DNA, 15 bp, Homo sapiens
actaagttttgattg

SEQ ID NO: 2071201 - DNA, 15 bp, Homo sapiens
ctaagttttgattgt

SEQ ID NO: 2071202 - DNA, 15 bp, Homo sapiens
taagttttgattgtc

SEQ ID NO: 2071203 - DNA, 15 bp, Homo sapiens
aagttttgattgtca

SEQ ID NO: 2071204 - DNA, 15 bp, Homo sapiens
agttttgattgtcaa

SEQ ID NO: 2071205 - DNA, 15 bp, Homo sapiens
gttttgattgtcaac

SEQ ID NO: 2071206 - DNA, 15 bp, Homo sapiens
ttttgattgtcaaca

SEQ ID NO: 2071207 - DNA, 15 bp, Homo sapiens
tttgattgtcaacat

SEQ ID NO: 2071208 - DNA, 15 bp, Homo sapiens
ttgattgtcaacatg

SEQ ID NO: 2071209 - DNA, 15 bp, Homo sapiens
tgattgtcaacatgt

SEQ ID NO: 2071210 - DNA, 15 bp, Homo sapiens
gattgtcaacatgtc

SEQ ID NO: 2071211 - DNA, 15 bp, Homo sapiens
attgtcaacatgtca

SEQ ID NO: 2071212 - DNA, 15 bp, Homo sapiens
ttgtcaacatgtcat

SEQ ID NO: 2071213 - DNA, 15 bp, Homo sapiens
tgtcaacatgtcata

SEQ ID NO: 2071214 - DNA, 15 bp, Homo sapiens
gtcaacatgtcatat

SEQ ID NO: 2071215 - DNA, 15 bp, Homo sapiens
tcaacatgtcatatt

SEQ ID NO: 2071216 - DNA, 15 bp, Homo sapiens
caacatgtcatattc

SEQ ID NO: 2071217 - DNA, 15 bp, Homo sapiens
aacatgtcatattcc

SEQ ID NO: 2071218 - DNA, 15 bp, Homo sapiens
acatgtcatattcca

SEQ ID NO: 2071219 - DNA, 15 bp, Homo sapiens
catgtcatattccaa

SEQ ID NO: 2071220 - DNA, 15 bp, Homo sapiens
atgtcatattccaaa

SEQ ID NO: 2071221 - DNA, 15 bp, Homo sapiens
tgtcatattccaaac

SEQ ID NO: 2071222 - DNA, 15 bp, Homo sapiens
gtcatattccaaacc

SEQ ID NO: 2071223 - DNA, 15 bp, Homo sapiens
tcatattccaaacca

SEQ ID NO: 2071224 - DNA, 15 bp, Homo sapiens
catattccaaaccac

SEQ ID NO: 2071225 - DNA, 15 bp, Homo sapiens
atattccaaaccaca

SEQ ID NO: 2071226 - DNA, 15 bp, Homo sapiens
tattccaaaccacaa

SEQ ID NO: 2071227 - DNA, 15 bp, Homo sapiens
attccaaaccacaag

SEQ ID NO: 2071228 - DNA, 15 bp, Homo sapiens
ttccaaaccacaaga

SEQ ID NO: 2071229 - DNA, 15 bp, Homo sapiens
tccaaaccacaagag

SEQ ID NO: 2071230 - DNA, 15 bp, Homo sapiens
ccaaaccacaagagg

SEQ ID NO: 2071231 - DNA, 15 bp, Homo sapiens
caaaccacaagagga

SEQ ID NO: 2071232 - DNA, 15 bp, Homo sapiens
aaaccacaagaggag

SEQ ID NO: 2071233 - DNA, 15 bp, Homo sapiens
aaccacaagaggagt

SEQ ID NO: 2071234 - DNA, 15 bp, Homo sapiens
accacaagaggagtc

SEQ ID NO: 2071235 - DNA, 15 bp, Homo sapiens
ccacaagaggagtca

SEQ ID NO: 2071236 - DNA, 15 bp, Homo sapiens
cacaagaggagtcat

SEQ ID NO: 2071237 - DNA, 15 bp, Homo sapiens
acaagaggagtcatt

SEQ ID NO: 2071238 - DNA, 15 bp, Homo sapiens
caagaggagtcattg

SEQ ID NO: 2071239 - DNA, 15 bp, Homo sapiens
aagaggagtcattgc

SEQ ID NO: 2071240 - DNA, 15 bp, Homo sapiens
agaggagtcattgcc

SEQ ID NO: 2071241 - DNA, 15 bp, Homo sapiens
gaggagtcattgcct

SEQ ID NO: 2071242 - DNA, 15 bp, Homo sapiens
aggagtcattgccta

SEQ ID NO: 2071243 - DNA, 15 bp, Homo sapiens
ggagtcattgcctaa

SEQ ID NO: 2071244 - DNA, 15 bp, Homo sapiens
gagtcattgcctaaa

SEQ ID NO: 2071245 - DNA, 15 bp, Homo sapiens
agtcattgcctaaat

SEQ ID NO: 2071246 - DNA, 15 bp, Homo sapiens
gtcattgcctaaata

SEQ ID NO: 2071247 - DNA, 15 bp, Homo sapiens
tcattgcctaaataa

SEQ ID NO: 2071248 - DNA, 15 bp, Homo sapiens
cattgcctaaataat

SEQ ID NO: 2071249 - DNA, 15 bp, Homo sapiens
attgcctaaataatc

SEQ ID NO: 2071250 - DNA, 15 bp, Homo sapiens
ttgcctaaataatca

SEQ ID NO: 2071251 - DNA, 15 bp, Homo sapiens
tgcctaaataatcag

SEQ ID NO: 2071252 - DNA, 15 bp, Homo sapiens
gcctaaataatcaga

SEQ ID NO: 2071253 - DNA, 15 bp, Homo sapiens
cctaaataatcagac

SEQ ID NO: 2071254 - DNA, 15 bp, Homo sapiens
ctaaataatcagacc

SEQ ID NO: 2071255 - DNA, 15 bp, Homo sapiens
taaataatcagacct

SEQ ID NO: 2071256 - DNA, 15 bp, Homo sapiens
aaataatcagacctt

SEQ ID NO: 2071257 - DNA, 15 bp, Homo sapiens
aataatcagaccttt

SEQ ID NO: 2071258 - DNA, 15 bp, Homo sapiens
ataatcagaccttta

SEQ ID NO: 2071259 - DNA, 15 bp, Homo sapiens
taatcagacctttaa

SEQ ID NO: 2071260 - DNA, 15 bp, Homo sapiens
aatcagacctttaaa

SEQ ID NO: 2071261 - DNA, 15 bp, Homo sapiens
atcagacctttaaag

SEQ ID NO: 2071262 - DNA, 15 bp, Homo sapiens
tcagacctttaaaga

SEQ ID NO: 2071263 - DNA, 15 bp, Homo sapiens
cagacctttaaagaa

SEQ ID NO: 2071264 - DNA, 15 bp, Homo sapiens
agacctttaaagaat

SEQ ID NO: 2071265 - DNA, 15 bp, Homo sapiens
gacctttaaagaatt

SEQ ID NO: 2071266 - DNA, 15 bp, Homo sapiens
acctttaaagaattg

SEQ ID NO: 2071267 - DNA, 15 bp, Homo sapiens
cctttaaagaattgt

SEQ ID NO: 2071268 - DNA, 15 bp, Homo sapiens
ctttaaagaattgtc

SEQ ID NO: 2071269 - DNA, 15 bp, Homo sapiens
tttaaagaattgtct

SEQ ID NO: 2071270 - DNA, 15 bp, Homo sapiens
ttaaagaattgtcta

SEQ ID NO: 2071271 - DNA, 15 bp, Homo sapiens
taaagaattgtctac

SEQ ID NO: 2071272 - DNA, 15 bp, Homo sapiens
aaagaattgtctacc

SEQ ID NO: 2071273 - DNA, 15 bp, Homo sapiens
aagaattgtctacct

SEQ ID NO: 2071274 - DNA, 15 bp, Homo sapiens
agaattgtctaccta

SEQ ID NO: 2071275 - DNA, 15 bp, Homo sapiens
gaattgtctacctat

SEQ ID NO: 2071276 - DNA, 15 bp, Homo sapiens
aattgtctacctatc

SEQ ID NO: 2071277 - DNA, 15 bp, Homo sapiens
attgtctacctatcc

SEQ ID NO: 2071278 - DNA, 15 bp, Homo sapiens
ttgtctacctatccc

SEQ ID NO: 2071279 - DNA, 15 bp, Homo sapiens
tgtctacctatcccc

SEQ ID NO: 2071280 - DNA, 15 bp, Homo sapiens
gtctacctatccccc

SEQ ID NO: 2071281 - DNA, 15 bp, Homo sapiens
tctacctatccccca

SEQ ID NO: 2071282 - DNA, 15 bp, Homo sapiens
ctacctatcccccat

SEQ ID NO: 2071283 - DNA, 15 bp, Homo sapiens
tacctatcccccatt

SEQ ID NO: 2071284 - DNA, 15 bp, Homo sapiens
acctatcccccattc

SEQ ID NO: 2071285 - DNA, 15 bp, Homo sapiens
cctatcccccattca

SEQ ID NO: 2071286 - DNA, 15 bp, Homo sapiens
ctatcccccattcaa

SEQ ID NO: 2071287 - DNA, 15 bp, Homo sapiens
tatcccccattcaac

SEQ ID NO: 2071288 - DNA, 15 bp, Homo sapiens
atcccccattcaaca

SEQ ID NO: 2071289 - DNA, 15 bp, Homo sapiens
tcccccattcaacat

SEQ ID NO: 2071290 - DNA, 15 bp, Homo sapiens
cccccattcaacatc

SEQ ID NO: 2071291 - DNA, 15 bp, Homo sapiens
ccccattcaacatct

SEQ ID NO: 2071292 - DNA, 15 bp, Homo sapiens
cccattcaacatctt

SEQ ID NO: 2071293 - DNA, 15 bp, Homo sapiens
ccattcaacatcttg

SEQ ID NO: 2071294 - DNA, 15 bp, Homo sapiens
cattcaacatcttga

SEQ ID NO: 2071295 - DNA, 15 bp, Homo sapiens
attcaacatcttgaa

SEQ ID NO: 2071296 - DNA, 15 bp, Homo sapiens
ttcaacatcttgaaa

SEQ ID NO: 2071297 - DNA, 15 bp, Homo sapiens
tcaacatcttgaaat

SEQ ID NO: 2071298 - DNA, 15 bp, Homo sapiens
caacatcttgaaatt

SEQ ID NO: 2071299 - DNA, 15 bp, Homo sapiens
aacatcttgaaattt

SEQ ID NO: 2071300 - DNA, 15 bp, Homo sapiens
acatcttgaaatttt

SEQ ID NO: 2071301 - DNA, 15 bp, Homo sapiens
catcttgaaatttta

SEQ ID NO: 2071302 - DNA, 15 bp, Homo sapiens
atcttgaaattttat

SEQ ID NO: 2071303 - DNA, 15 bp, Homo sapiens
tcttgaaattttata

SEQ ID NO: 2071304 - DNA, 15 bp, Homo sapiens
cttgaaattttatag

SEQ ID NO: 2071305 - DNA, 15 bp, Homo sapiens
ttgaaattttatagt

SEQ ID NO: 2071306 - DNA, 15 bp, Homo sapiens
tgaaattttatagtt

SEQ ID NO: 2071307 - DNA, 15 bp, Homo sapiens
gaaattttatagtta

SEQ ID NO: 2071308 - DNA, 15 bp, Homo sapiens
aaattttatagttat

SEQ ID NO: 2071309 - DNA, 15 bp, Homo sapiens
aattttatagttatt

SEQ ID NO: 2071310 - DNA, 15 bp, Homo sapiens
attttatagttattt

SEQ ID NO: 2071311 - DNA, 15 bp, Homo sapiens
ttttatagttatttt

SEQ ID NO: 2071312 - DNA, 15 bp, Homo sapiens
tttatagttattttg

SEQ ID NO: 2071313 - DNA, 15 bp, Homo sapiens
ttatagttattttga

SEQ ID NO: 2071314 - DNA, 15 bp, Homo sapiens
tatagttattttgac

SEQ ID NO: 2071315 - DNA, 15 bp, Homo sapiens
atagttattttgaca

SEQ ID NO: 2071316 - DNA, 15 bp, Homo sapiens
tagttattttgacag

SEQ ID NO: 2071317 - DNA, 15 bp, Homo sapiens
agttattttgacagc

SEQ ID NO: 2071318 - DNA, 15 bp, Homo sapiens
gttattttgacagca

SEQ ID NO: 2071319 - DNA, 15 bp, Homo sapiens
ttattttgacagcaa

SEQ ID NO: 2071320 - DNA, 15 bp, Homo sapiens
tattttgacagcaag

SEQ ID NO: 2071321 - DNA, 15 bp, Homo sapiens
attttgacagcaaga

SEQ ID NO: 2071322 - DNA, 15 bp, Homo sapiens
ttttgacagcaagat

SEQ ID NO: 2071323 - DNA, 15 bp, Homo sapiens
tttgacagcaagata

SEQ ID NO: 2071324 - DNA, 15 bp, Homo sapiens
ttgacagcaagatag

SEQ ID NO: 2071325 - DNA, 15 bp, Homo sapiens
tgacagcaagatagt

SEQ ID NO: 2071326 - DNA, 15 bp, Homo sapiens
gacagcaagatagtt

SEQ ID NO: 2071327 - DNA, 15 bp, Homo sapiens
acagcaagatagttc

SEQ ID NO: 2071328 - DNA, 15 bp, Homo sapiens
cagcaagatagttca

SEQ ID NO: 2071329 - DNA, 15 bp, Homo sapiens
agcaagatagttcaa

SEQ ID NO: 2071330 - DNA, 15 bp, Homo sapiens
gcaagatagttcaaa

SEQ ID NO: 2071331 - DNA, 15 bp, Homo sapiens
caagatagttcaaat

SEQ ID NO: 2071332 - DNA, 15 bp, Homo sapiens
aagatagttcaaata

SEQ ID NO: 2071333 - DNA, 15 bp, Homo sapiens
agatagttcaaatat

SEQ ID NO: 2071334 - DNA, 15 bp, Homo sapiens
gatagttcaaatatc

SEQ ID NO: 2071335 - DNA, 15 bp, Homo sapiens
atagttcaaatatct

SEQ ID NO: 2071336 - DNA, 15 bp, Homo sapiens
tagttcaaatatcta

SEQ ID NO: 2071337 - DNA, 15 bp, Homo sapiens
agttcaaatatctac

SEQ ID NO: 2071338 - DNA, 15 bp, Homo sapiens
gttcaaatatctact

SEQ ID NO: 2071339 - DNA, 15 bp, Homo sapiens
ttcaaatatctactc

SEQ ID NO: 2071340 - DNA, 15 bp, Homo sapiens
tcaaatatctactca

SEQ ID NO: 2071341 - DNA, 15 bp, Homo sapiens
caaatatctactcat

SEQ ID NO: 2071342 - DNA, 15 bp, Homo sapiens
aaatatctactcatc

SEQ ID NO: 2071343 - DNA, 15 bp, Homo sapiens
aatatctactcatct

SEQ ID NO: 2071344 - DNA, 15 bp, Homo sapiens
atatctactcatctg

SEQ ID NO: 2071345 - DNA, 15 bp, Homo sapiens
tatctactcatctgc

SEQ ID NO: 2071346 - DNA, 15 bp, Homo sapiens
atctactcatctgct

SEQ ID NO: 2071347 - DNA, 15 bp, Homo sapiens
tctactcatctgctt

SEQ ID NO: 2071348 - DNA, 15 bp, Homo sapiens
ctactcatctgcttg

SEQ ID NO: 2071349 - DNA, 15 bp, Homo sapiens
tactcatctgcttgg

SEQ ID NO: 2071350 - DNA, 15 bp, Homo sapiens
actcatctgcttggg

SEQ ID NO: 2071351 - DNA, 15 bp, Homo sapiens
ctcatctgcttgggg

SEQ ID NO: 2071352 - DNA, 15 bp, Homo sapiens
tcatctgcttgggga

SEQ ID NO: 2071353 - DNA, 15 bp, Homo sapiens
catctgcttggggag

SEQ ID NO: 2071354 - DNA, 15 bp, Homo sapiens
atctgcttggggagt

SEQ ID NO: 2071355 - DNA, 15 bp, Homo sapiens
tctgcttggggagtt

SEQ ID NO: 2071356 - DNA, 15 bp, Homo sapiens
ctgcttggggagttt

SEQ ID NO: 2071357 - DNA, 15 bp, Homo sapiens
tgcttggggagtttc

SEQ ID NO: 2071358 - DNA, 15 bp, Homo sapiens
gcttggggagtttct

SEQ ID NO: 2071359 - DNA, 15 bp, Homo sapiens
cttggggagtttctt

SEQ ID NO: 2071360 - DNA, 15 bp, Homo sapiens
ttggggagtttcttt

SEQ ID NO: 2071361 - DNA, 15 bp, Homo sapiens
tggggagtttctttg

SEQ ID NO: 2071362 - DNA, 15 bp, Homo sapiens
ggggagtttctttgt

SEQ ID NO: 2071363 - DNA, 15 bp, Homo sapiens
gggagtttctttgta

SEQ ID NO: 2071364 - DNA, 15 bp, Homo sapiens
ggagtttctttgtat

SEQ ID NO: 2071365 - DNA, 15 bp, Homo sapiens
gagtttctttgtatt

SEQ ID NO: 2071366 - DNA, 15 bp, Homo sapiens
agtttctttgtatta

SEQ ID NO: 2071367 - DNA, 15 bp, Homo sapiens
gtttctttgtattac

SEQ ID NO: 2071368 - DNA, 15 bp, Homo sapiens
tttctttgtattact

SEQ ID NO: 2071369 - DNA, 15 bp, Homo sapiens
ttctttgtattactc

SEQ ID NO: 2071370 - DNA, 15 bp, Homo sapiens
tctttgtattactcc

SEQ ID NO: 2071371 - DNA, 15 bp, Homo sapiens
ctttgtattactccc

SEQ ID NO: 2071372 - DNA, 15 bp, Homo sapiens
tttgtattactccct

SEQ ID NO: 2071373 - DNA, 15 bp, Homo sapiens
ttgtattactccctt

SEQ ID NO: 2071374 - DNA, 15 bp, Homo sapiens
tgtattactcccttg

SEQ ID NO: 2071375 - DNA, 15 bp, Homo sapiens
gtattactcccttgt

SEQ ID NO: 2071376 - DNA, 15 bp, Homo sapiens
tattactcccttgtc

SEQ ID NO: 2071377 - DNA, 15 bp, Homo sapiens
attactcccttgtct

SEQ ID NO: 2071378 - DNA, 15 bp, Homo sapiens
ttactcccttgtcta

SEQ ID NO: 2071379 - DNA, 15 bp, Homo sapiens
tactcccttgtctag

SEQ ID NO: 2071380 - DNA, 15 bp, Homo sapiens
actcccttgtctagc

SEQ ID NO: 2071381 - DNA, 15 bp, Homo sapiens
ctcccttgtctagct

SEQ ID NO: 2071382 - DNA, 15 bp, Homo sapiens
tcccttgtctagctc

SEQ ID NO: 2071383 - DNA, 15 bp, Homo sapiens
cccttgtctagctcc

SEQ ID NO: 2071384 - DNA, 15 bp, Homo sapiens
ccttgtctagctccg

SEQ ID NO: 2071385 - DNA, 15 bp, Homo sapiens
cttgtctagctccgt

SEQ ID NO: 2071386 - DNA, 15 bp, Homo sapiens
ttgtctagctccgta

SEQ ID NO: 2071387 - DNA, 15 bp, Homo sapiens
tgtctagctccgtag

SEQ ID NO: 2071388 - DNA, 15 bp, Homo sapiens
gtctagctccgtaga

SEQ ID NO: 2071389 - DNA, 15 bp, Homo sapiens
tctagctccgtagat

SEQ ID NO: 2071390 - DNA, 15 bp, Homo sapiens
ctagctccgtagatg

SEQ ID NO: 2071391 - DNA, 15 bp, Homo sapiens
tagctccgtagatgt

SEQ ID NO: 2071392 - DNA, 15 bp, Homo sapiens
agctccgtagatgtc

SEQ ID NO: 2071393 - DNA, 15 bp, Homo sapiens
gctccgtagatgtca

SEQ ID NO: 2071394 - DNA, 15 bp, Homo sapiens
ctccgtagatgtcaa

SEQ ID NO: 2071395 - DNA, 15 bp, Homo sapiens
tccgtagatgtcaaa

SEQ ID NO: 2071396 - DNA, 15 bp, Homo sapiens
ccgtagatgtcaaac

SEQ ID NO: 2071397 - DNA, 15 bp, Homo sapiens
cgtagatgtcaaact

SEQ ID NO: 2071398 - DNA, 15 bp, Homo sapiens
gtagatgtcaaactt

SEQ ID NO: 2071399 - DNA, 15 bp, Homo sapiens
tagatgtcaaacttt

SEQ ID NO: 2071400 - DNA, 15 bp, Homo sapiens
agatgtcaaacttta

SEQ ID NO: 2071401 - DNA, 15 bp, Homo sapiens
gatgtcaaactttaa

SEQ ID NO: 2071402 - DNA, 15 bp, Homo sapiens
atgtcaaactttaat

SEQ ID NO: 2071403 - DNA, 15 bp, Homo sapiens
tgtcaaactttaatg

SEQ ID NO: 2071404 - DNA, 15 bp, Homo sapiens
gtcaaactttaatgt

SEQ ID NO: 2071405 - DNA, 15 bp, Homo sapiens
tcaaactttaatgtg

SEQ ID NO: 2071406 - DNA, 15 bp, Homo sapiens
caaactttaatgtgg

SEQ ID NO: 2071407 - DNA, 15 bp, Homo sapiens
aaactttaatgtgga

SEQ ID NO: 2071408 - DNA, 15 bp, Homo sapiens
aactttaatgtggac

SEQ ID NO: 2071409 - DNA, 15 bp, Homo sapiens
actttaatgtggaca

SEQ ID NO: 2071410 - DNA, 15 bp, Homo sapiens
ctttaatgtggacaa

SEQ ID NO: 2071411 - DNA, 15 bp, Homo sapiens
tttaatgtggacaaa

SEQ ID NO: 2071412 - DNA, 15 bp, Homo sapiens
ttaatgtggacaaaa

SEQ ID NO: 2071413 - DNA, 15 bp, Homo sapiens
taatgtggacaaaaa

SEQ ID NO: 2071414 - DNA, 15 bp, Homo sapiens
aatgtggacaaaaat

SEQ ID NO: 2071415 - DNA, 15 bp, Homo sapiens
atgtggacaaaaatt

SEQ ID NO: 2071416 - DNA, 15 bp, Homo sapiens
tgtggacaaaaatta

SEQ ID NO: 2071417 - DNA, 15 bp, Homo sapiens
gtggacaaaaattat

SEQ ID NO: 2071418 - DNA, 15 bp, Homo sapiens
tggacaaaaattatt

SEQ ID NO: 2071419 - DNA, 15 bp, Homo sapiens
ggacaaaaattattc

SEQ ID NO: 2071420 - DNA, 15 bp, Homo sapiens
gacaaaaattattct

SEQ ID NO: 2071421 - DNA, 15 bp, Homo sapiens
acaaaaattattcta

SEQ ID NO: 2071422 - DNA, 15 bp, Homo sapiens
caaaaattattctat

SEQ ID NO: 2071423 - DNA, 15 bp, Homo sapiens
aaaaattattctatc

SEQ ID NO: 2071424 - DNA, 15 bp, Homo sapiens
aaaattattctatca

SEQ ID NO: 2071425 - DNA, 15 bp, Homo sapiens
aaattattctatcaa

SEQ ID NO: 2071426 - DNA, 15 bp, Homo sapiens
aattattctatcaaa

SEQ ID NO: 2071427 - DNA, 15 bp, Homo sapiens
attattctatcaaag

SEQ ID NO: 2071428 - DNA, 15 bp, Homo sapiens
ttattctatcaaagt

SEQ ID NO: 2071429 - DNA, 15 bp, Homo sapiens
tattctatcaaagta

SEQ ID NO: 2071430 - DNA, 15 bp, Homo sapiens
attctatcaaagtat

SEQ ID NO: 2071431 - DNA, 15 bp, Homo sapiens
ttctatcaaagtata

SEQ ID NO: 2071432 - DNA, 15 bp, Homo sapiens
tctatcaaagtataa

SEQ ID NO: 2071433 - DNA, 15 bp, Homo sapiens
ctatcaaagtataat

SEQ ID NO: 2071434 - DNA, 15 bp, Homo sapiens
tatcaaagtataatc

SEQ ID NO: 2071435 - DNA, 15 bp, Homo sapiens
atcaaagtataatct

SEQ ID NO: 2071436 - DNA, 15 bp, Homo sapiens
tcaaagtataatctc

SEQ ID NO: 2071437 - DNA, 15 bp, Homo sapiens
caaagtataatctca

SEQ ID NO: 2071438 - DNA, 15 bp, Homo sapiens
aaagtataatctcaa

SEQ ID NO: 2071439 - DNA, 15 bp, Homo sapiens
aagtataatctcaaa

SEQ ID NO: 2071440 - DNA, 15 bp, Homo sapiens
agtataatctcaaat

SEQ ID NO: 2071441 - DNA, 15 bp, Homo sapiens
gtataatctcaaatt

SEQ ID NO: 2071442 - DNA, 15 bp, Homo sapiens
tataatctcaaattt

SEQ ID NO: 2071443 - DNA, 15 bp, Homo sapiens
ataatctcaaatttt

SEQ ID NO: 2071444 - DNA, 15 bp, Homo sapiens
taatctcaaattttg

SEQ ID NO: 2071445 - DNA, 15 bp, Homo sapiens
aatctcaaattttgt

SEQ ID NO: 2071446 - DNA, 15 bp, Homo sapiens
atctcaaattttgtt

SEQ ID NO: 2071447 - DNA, 15 bp, Homo sapiens
tctcaaattttgtta

SEQ ID NO: 2071448 - DNA, 15 bp, Homo sapiens
ctcaaattttgttac

SEQ ID NO: 2071449 - DNA, 15 bp, Homo sapiens
tcaaattttgttacc

SEQ ID NO: 2071450 - DNA, 15 bp, Homo sapiens
caaattttgttacca

SEQ ID NO: 2071451 - DNA, 15 bp, Homo sapiens
aaattttgttaccat

SEQ ID NO: 2071452 - DNA, 15 bp, Homo sapiens
aattttgttaccatt

SEQ ID NO: 2071453 - DNA, 15 bp, Homo sapiens
attttgttaccattt

SEQ ID NO: 2071454 - DNA, 15 bp, Homo sapiens
ttttgttaccatttc

SEQ ID NO: 2071455 - DNA, 15 bp, Homo sapiens
tttgttaccatttca

SEQ ID NO: 2071456 - DNA, 15 bp, Homo sapiens
ttgttaccatttcat

SEQ ID NO: 2071457 - DNA, 15 bp, Homo sapiens
tgttaccatttcatc

SEQ ID NO: 2071458 - DNA, 15 bp, Homo sapiens
gttaccatttcatca

SEQ ID NO: 2071459 - DNA, 15 bp, Homo sapiens
ttaccatttcatcag

SEQ ID NO: 2071460 - DNA, 15 bp, Homo sapiens
taccatttcatcagt

SEQ ID NO: 2071461 - DNA, 15 bp, Homo sapiens
accatttcatcagtt

SEQ ID NO: 2071462 - DNA, 15 bp, Homo sapiens
ccatttcatcagttt

SEQ ID NO: 2071463 - DNA, 15 bp, Homo sapiens
catttcatcagtttt

SEQ ID NO: 2071464 - DNA, 15 bp, Homo sapiens
atttcatcagttttc

SEQ ID NO: 2071465 - DNA, 15 bp, Homo sapiens
tttcatcagttttct

SEQ ID NO: 2071466 - DNA, 15 bp, Homo sapiens
ttcatcagttttcta

SEQ ID NO: 2071467 - DNA, 15 bp, Homo sapiens
tcatcagttttctag

SEQ ID NO: 2071468 - DNA, 15 bp, Homo sapiens
catcagttttctagg

SEQ ID NO: 2071469 - DNA, 15 bp, Homo sapiens
atcagttttctaggg

SEQ ID NO: 2071470 - DNA, 15 bp, Homo sapiens
tcagttttctagggt

SEQ ID NO: 2071471 - DNA, 15 bp, Homo sapiens
cagttttctagggta

SEQ ID NO: 2071472 - DNA, 15 bp, Homo sapiens
agttttctagggtac

SEQ ID NO: 2071473 - DNA, 15 bp, Homo sapiens
gttttctagggtact

SEQ ID NO: 2071474 - DNA, 15 bp, Homo sapiens
ttttctagggtactt

SEQ ID NO: 2071475 - DNA, 15 bp, Homo sapiens
tttctagggtacttt

SEQ ID NO: 2071476 - DNA, 15 bp, Homo sapiens
ttctagggtactttt

SEQ ID NO: 2071477 - DNA, 15 bp, Homo sapiens
tctagggtacttttg

SEQ ID NO: 2071478 - DNA, 15 bp, Homo sapiens
ctagggtacttttgg

SEQ ID NO: 2071479 - DNA, 15 bp, Homo sapiens
tagggtacttttggt

SEQ ID NO: 2071480 - DNA, 15 bp, Homo sapiens
agggtacttttggta

SEQ ID NO: 2071481 - DNA, 15 bp, Homo sapiens
gggtacttttggtat

SEQ ID NO: 2071482 - DNA, 15 bp, Homo sapiens
ggtacttttggtatt

SEQ ID NO: 2071483 - DNA, 15 bp, Homo sapiens
gtacttttggtatta

SEQ ID NO: 2071484 - DNA, 15 bp, Homo sapiens
tacttttggtattat

SEQ ID NO: 2071485 - DNA, 15 bp, Homo sapiens
acttttggtattatt

SEQ ID NO: 2071486 - DNA, 15 bp, Homo sapiens
cttttggtattatta

SEQ ID NO: 2071487 - DNA, 15 bp, Homo sapiens
ttttggtattattaa

SEQ ID NO: 2071488 - DNA, 15 bp, Homo sapiens
tttggtattattaaa

SEQ ID NO: 2071489 - DNA, 15 bp, Homo sapiens
ttggtattattaaat

SEQ ID NO: 2071490 - DNA, 15 bp, Homo sapiens
tggtattattaaatt

SEQ ID NO: 2071491 - DNA, 15 bp, Homo sapiens
ggtattattaaattt

SEQ ID NO: 2071492 - DNA, 15 bp, Homo sapiens
gtattattaaatttt

SEQ ID NO: 2071493 - DNA, 15 bp, Homo sapiens
tattattaaatttta

SEQ ID NO: 2071494 - DNA, 15 bp, Homo sapiens
attattaaattttac

SEQ ID NO: 2071495 - DNA, 15 bp, Homo sapiens
ttattaaattttacc

SEQ ID NO: 2071496 - DNA, 15 bp, Homo sapiens
tattaaattttacct

SEQ ID NO: 2071497 - DNA, 15 bp, Homo sapiens
attaaattttacctt

SEQ ID NO: 2071498 - DNA, 15 bp, Homo sapiens
ttaaattttacctta

SEQ ID NO: 2071499 - DNA, 15 bp, Homo sapiens
taaattttaccttaa

SEQ ID NO: 2071500 - DNA, 15 bp, Homo sapiens
aaattttaccttaag

SEQ ID NO: 2071501 - DNA, 15 bp, Homo sapiens
aattttaccttaagg

SEQ ID NO: 2071502 - DNA, 15 bp, Homo sapiens
attttaccttaagga

SEQ ID NO: 2071503 - DNA, 15 bp, Homo sapiens
ttttaccttaaggag

SEQ ID NO: 2071504 - DNA, 15 bp, Homo sapiens
tttaccttaaggagt

SEQ ID NO: 2071505 - DNA, 15 bp, Homo sapiens
ttaccttaaggagtg

SEQ ID NO: 2071506 - DNA, 15 bp, Homo sapiens
taccttaaggagtgt

SEQ ID NO: 2071507 - DNA, 15 bp, Homo sapiens
accttaaggagtgtc

SEQ ID NO: 2071508 - DNA, 15 bp, Homo sapiens
ccttaaggagtgtca

SEQ ID NO: 2071509 - DNA, 15 bp, Homo sapiens
cttaaggagtgtcat

SEQ ID NO: 2071510 - DNA, 15 bp, Homo sapiens
ttaaggagtgtcata

SEQ ID NO: 2071511 - DNA, 15 bp, Homo sapiens
taaggagtgtcatat

SEQ ID NO: 2071512 - DNA, 15 bp, Homo sapiens
aaggagtgtcatatt

SEQ ID NO: 2071513 - DNA, 15 bp, Homo sapiens
aggagtgtcatattt

SEQ ID NO: 2071514 - DNA, 15 bp, Homo sapiens
ggagtgtcatatttt

SEQ ID NO: 2071515 - DNA, 15 bp, Homo sapiens
gagtgtcatatttta

SEQ ID NO: 2071516 - DNA, 15 bp, Homo sapiens
agtgtcatattttaa

SEQ ID NO: 2071517 - DNA, 15 bp, Homo sapiens
gtgtcatattttaaa

SEQ ID NO: 2071518 - DNA, 15 bp, Homo sapiens
tgtcatattttaaac

SEQ ID NO: 2071519 - DNA, 15 bp, Homo sapiens
gtcatattttaaacg

SEQ ID NO: 2071520 - DNA, 15 bp, Homo sapiens
tcatattttaaacgt

SEQ ID NO: 2071521 - DNA, 15 bp, Homo sapiens
catattttaaacgta

SEQ ID NO: 2071522 - DNA, 15 bp, Homo sapiens
atattttaaacgtaa

SEQ ID NO: 2071523 - DNA, 15 bp, Homo sapiens
tattttaaacgtaac

SEQ ID NO: 2071524 - DNA, 15 bp, Homo sapiens
attttaaacgtaaca

SEQ ID NO: 2071525 - DNA, 15 bp, Homo sapiens
ttttaaacgtaacaa

SEQ ID NO: 2071526 - DNA, 15 bp, Homo sapiens
tttaaacgtaacaac

SEQ ID NO: 2071527 - DNA, 15 bp, Homo sapiens
ttaaacgtaacaact

SEQ ID NO: 2071528 - DNA, 15 bp, Homo sapiens
taaacgtaacaacta

SEQ ID NO: 2071529 - DNA, 15 bp, Homo sapiens
aaacgtaacaactaa

SEQ ID NO: 2071530 - DNA, 15 bp, Homo sapiens
aacgtaacaactaat

SEQ ID NO: 2071531 - DNA, 15 bp, Homo sapiens
acgtaacaactaatt

SEQ ID NO: 2071532 - DNA, 15 bp, Homo sapiens
cgtaacaactaattg

SEQ ID NO: 2071533 - DNA, 15 bp, Homo sapiens
gtaacaactaattgt

SEQ ID NO: 2071534 - DNA, 15 bp, Homo sapiens
taacaactaattgtt

SEQ ID NO: 2071535 - DNA, 15 bp, Homo sapiens
aacaactaattgtta

SEQ ID NO: 2071536 - DNA, 15 bp, Homo sapiens
acaactaattgttat

SEQ ID NO: 2071537 - DNA, 15 bp, Homo sapiens
caactaattgttatg

SEQ ID NO: 2071538 - DNA, 15 bp, Homo sapiens
aactaattgttatgg

SEQ ID NO: 2071539 - DNA, 15 bp, Homo sapiens
actaattgttatgga

SEQ ID NO: 2071540 - DNA, 15 bp, Homo sapiens
ctaattgttatggaa

SEQ ID NO: 2071541 - DNA, 15 bp, Homo sapiens
taattgttatggaac

SEQ ID NO: 2071542 - DNA, 15 bp, Homo sapiens
aattgttatggaacc

SEQ ID NO: 2071543 - DNA, 15 bp, Homo sapiens
attgttatggaacca

SEQ ID NO: 2071544 - DNA, 15 bp, Homo sapiens
ttgttatggaaccac

SEQ ID NO: 2071545 - DNA, 15 bp, Homo sapiens
tgttatggaaccaca

SEQ ID NO: 2071546 - DNA, 15 bp, Homo sapiens
gttatggaaccacac

SEQ ID NO: 2071547 - DNA, 15 bp, Homo sapiens
ttatggaaccacact

SEQ ID NO: 2071548 - DNA, 15 bp, Homo sapiens
tatggaaccacactg

SEQ ID NO: 2071549 - DNA, 15 bp, Homo sapiens
atggaaccacactgt

SEQ ID NO: 2071550 - DNA, 15 bp, Homo sapiens
tggaaccacactgta

SEQ ID NO: 2071551 - DNA, 15 bp, Homo sapiens
ggaaccacactgtat

SEQ ID NO: 2071552 - DNA, 15 bp, Homo sapiens
gaaccacactgtatt

SEQ ID NO: 2071553 - DNA, 15 bp, Homo sapiens
aaccacactgtatta

SEQ ID NO: 2071554 - DNA, 15 bp, Homo sapiens
accacactgtattat

SEQ ID NO: 2071555 - DNA, 15 bp, Homo sapiens
ccacactgtattatt

SEQ ID NO: 2071556 - DNA, 15 bp, Homo sapiens
cacactgtattattt

SEQ ID NO: 2071557 - DNA, 15 bp, Homo sapiens
acactgtattatttc

SEQ ID NO: 2071558 - DNA, 15 bp, Homo sapiens
cactgtattatttcc

SEQ ID NO: 2071559 - DNA, 15 bp, Homo sapiens
actgtattatttcca

SEQ ID NO: 2071560 - DNA, 15 bp, Homo sapiens
ctgtattatttccac

SEQ ID NO: 2071561 - DNA, 15 bp, Homo sapiens
tgtattatttccact

SEQ ID NO: 2071562 - DNA, 15 bp, Homo sapiens
gtattatttccacta

SEQ ID NO: 2071563 - DNA, 15 bp, Homo sapiens
tattatttccactat

SEQ ID NO: 2071564 - DNA, 15 bp, Homo sapiens
attatttccactata

SEQ ID NO: 2071565 - DNA, 15 bp, Homo sapiens
ttatttccactatat

SEQ ID NO: 2071566 - DNA, 15 bp, Homo sapiens
tatttccactatatt

SEQ ID NO: 2071567 - DNA, 15 bp, Homo sapiens
atttccactatattc

SEQ ID NO: 2071568 - DNA, 15 bp, Homo sapiens
tttccactatattca

SEQ ID NO: 2071569 - DNA, 15 bp, Homo sapiens
ttccactatattcaa

SEQ ID NO: 2071570 - DNA, 15 bp, Homo sapiens
tccactatattcaat

SEQ ID NO: 2071571 - DNA, 15 bp, Homo sapiens
ccactatattcaatg

SEQ ID NO: 2071572 - DNA, 15 bp, Homo sapiens
cactatattcaatgc

SEQ ID NO: 2071573 - DNA, 15 bp, Homo sapiens
actatattcaatgct

SEQ ID NO: 2071574 - DNA, 15 bp, Homo sapiens
ctatattcaatgctt

SEQ ID NO: 2071575 - DNA, 15 bp, Homo sapiens
tatattcaatgcttc

SEQ ID NO: 2071576 - DNA, 15 bp, Homo sapiens
atattcaatgcttct

SEQ ID NO: 2071577 - DNA, 15 bp, Homo sapiens
tattcaatgcttctc

SEQ ID NO: 2071578 - DNA, 15 bp, Homo sapiens
attcaatgcttctct

SEQ ID NO: 2071579 - DNA, 15 bp, Homo sapiens
ttcaatgcttctcta

SEQ ID NO: 2071580 - DNA, 15 bp, Homo sapiens
tcaatgcttctctaa

SEQ ID NO: 2071581 - DNA, 15 bp, Homo sapiens
caatgcttctctaat

SEQ ID NO: 2071582 - DNA, 15 bp, Homo sapiens
aatgcttctctaatt

SEQ ID NO: 2071583 - DNA, 15 bp, Homo sapiens
atgcttctctaattt

SEQ ID NO: 2071584 - DNA, 15 bp, Homo sapiens
tgcttctctaatttt

SEQ ID NO: 2071585 - DNA, 15 bp, Homo sapiens
gcttctctaattttc

SEQ ID NO: 2071586 - DNA, 15 bp, Homo sapiens
cttctctaattttca

SEQ ID NO: 2071587 - DNA, 15 bp, Homo sapiens
ttctctaattttcaa

SEQ ID NO: 2071588 - DNA, 15 bp, Homo sapiens
tctctaattttcaac

SEQ ID NO: 2071589 - DNA, 15 bp, Homo sapiens
ctctaattttcaaca

SEQ ID NO: 2071590 - DNA, 15 bp, Homo sapiens
tctaattttcaacaa

SEQ ID NO: 2071591 - DNA, 15 bp, Homo sapiens
ctaattttcaacaaa

SEQ ID NO: 2071592 - DNA, 15 bp, Homo sapiens
taattttcaacaaat

SEQ ID NO: 2071593 - DNA, 15 bp, Homo sapiens
aattttcaacaaata

SEQ ID NO: 2071594 - DNA, 15 bp, Homo sapiens
attttcaacaaatag

SEQ ID NO: 2071595 - DNA, 15 bp, Homo sapiens
ttttcaacaaatagt

SEQ ID NO: 2071596 - DNA, 15 bp, Homo sapiens
tttcaacaaatagtt

SEQ ID NO: 2071597 - DNA, 15 bp, Homo sapiens
ttcaacaaatagttt

SEQ ID NO: 2071598 - DNA, 15 bp, Homo sapiens
tcaacaaatagtttc

SEQ ID NO: 2071599 - DNA, 15 bp, Homo sapiens
caacaaatagtttcc

SEQ ID NO: 2071600 - DNA, 15 bp, Homo sapiens
aacaaatagtttcca

SEQ ID NO: 2071601 - DNA, 15 bp, Homo sapiens
acaaatagtttccag

SEQ ID NO: 2071602 - DNA, 15 bp, Homo sapiens
caaatagtttccagt

SEQ ID NO: 2071603 - DNA, 15 bp, Homo sapiens
aaatagtttccagtc

SEQ ID NO: 2071604 - DNA, 15 bp, Homo sapiens
aatagtttccagtcc

SEQ ID NO: 2071605 - DNA, 15 bp, Homo sapiens
atagtttccagtcct

SEQ ID NO: 2071606 - DNA, 15 bp, Homo sapiens
tagtttccagtcctt

SEQ ID NO: 2071607 - DNA, 15 bp, Homo sapiens
agtttccagtccttt

SEQ ID NO: 2071608 - DNA, 15 bp, Homo sapiens
gtttccagtcctttt

SEQ ID NO: 2071609 - DNA, 15 bp, Homo sapiens
tttccagtccttttg

SEQ ID NO: 2071610 - DNA, 15 bp, Homo sapiens
ttccagtccttttgg

SEQ ID NO: 2071611 - DNA, 15 bp, Homo sapiens
tccagtccttttgga

SEQ ID NO: 2071612 - DNA, 15 bp, Homo sapiens
ccagtccttttggaa

SEQ ID NO: 2071613 - DNA, 15 bp, Homo sapiens
cagtccttttggaaa

SEQ ID NO: 2071614 - DNA, 15 bp, Homo sapiens
agtccttttggaaaa

SEQ ID NO: 2071615 - DNA, 15 bp, Homo sapiens
gtccttttggaaaaa

SEQ ID NO: 2071616 - DNA, 15 bp, Homo sapiens
tccttttggaaaaat

SEQ ID NO: 2071617 - DNA, 15 bp, Homo sapiens
ccttttggaaaaatg

SEQ ID NO: 2071618 - DNA, 15 bp, Homo sapiens
cttttggaaaaatgt

SEQ ID NO: 2071619 - DNA, 15 bp, Homo sapiens
ttttggaaaaatgta

SEQ ID NO: 2071620 - DNA, 15 bp, Homo sapiens
tttggaaaaatgtag

SEQ ID NO: 2071621 - DNA, 15 bp, Homo sapiens
ttggaaaaatgtagt

SEQ ID NO: 2071622 - DNA, 15 bp, Homo sapiens
tggaaaaatgtagta

SEQ ID NO: 2071623 - DNA, 15 bp, Homo sapiens
gaaaaatgtagtaat

SEQ ID NO: 2071624 - DNA, 15 bp, Homo sapiens
aaaaatgtagtaata

SEQ ID NO: 2071625 - DNA, 15 bp, Homo sapiens
aaaatgtagtaataa

SEQ ID NO: 2071626 - DNA, 15 bp, Homo sapiens
aaatgtagtaataag

SEQ ID NO: 2071627 - DNA, 15 bp, Homo sapiens
aatgtagtaataagg

SEQ ID NO: 2071628 - DNA, 15 bp, Homo sapiens
atgtagtaataagga

SEQ ID NO: 2071629 - DNA, 15 bp, Homo sapiens
tgtagtaataaggaa

SEQ ID NO: 2071630 - DNA, 15 bp, Homo sapiens
gtagtaataaggaaa

SEQ ID NO: 2071631 - DNA, 15 bp, Homo sapiens
tagtaataaggaaaa

SEQ ID NO: 2071632 - DNA, 15 bp, Homo sapiens
agtaataaggaaaac

SEQ ID NO: 2071633 - DNA, 15 bp, Homo sapiens
gtaataaggaaaaca

SEQ ID NO: 2071634 - DNA, 15 bp, Homo sapiens
taataaggaaaacac

SEQ ID NO: 2071635 - DNA, 15 bp, Homo sapiens
aataaggaaaacact

SEQ ID NO: 2071636 - DNA, 15 bp, Homo sapiens
ataaggaaaacactg

SEQ ID NO: 2071637 - DNA, 15 bp, Homo sapiens
taaggaaaacactgt

SEQ ID NO: 2071638 - DNA, 15 bp, Homo sapiens
aaggaaaacactgtg

SEQ ID NO: 2071639 - DNA, 15 bp, Homo sapiens
aggaaaacactgtgg

SEQ ID NO: 2071640 - DNA, 15 bp, Homo sapiens
ggaaaacactgtggg

SEQ ID NO: 2071641 - DNA, 15 bp, Homo sapiens
gaaaacactgtgggt

SEQ ID NO: 2071642 - DNA, 15 bp, Homo sapiens
aaaacactgtgggta

SEQ ID NO: 2071643 - DNA, 15 bp, Homo sapiens
aaacactgtgggtaa

SEQ ID NO: 2071644 - DNA, 15 bp, Homo sapiens
aacactgtgggtaag

SEQ ID NO: 2071645 - DNA, 15 bp, Homo sapiens
acactgtgggtaaga

SEQ ID NO: 2071646 - DNA, 15 bp, Homo sapiens
cactgtgggtaagag

SEQ ID NO: 2071647 - DNA, 15 bp, Homo sapiens
actgtgggtaagagt

SEQ ID NO: 2071648 - DNA, 15 bp, Homo sapiens
ctgtgggtaagagta

SEQ ID NO: 2071649 - DNA, 15 bp, Homo sapiens
tgtgggtaagagtat

SEQ ID NO: 2071650 - DNA, 15 bp, Homo sapiens
gtgggtaagagtata

SEQ ID NO: 2071651 - DNA, 15 bp, Homo sapiens
tgggtaagagtatat

SEQ ID NO: 2071652 - DNA, 15 bp, Homo sapiens
gggtaagagtatatt

SEQ ID NO: 2071653 - DNA, 15 bp, Homo sapiens
ggtaagagtatattt

SEQ ID NO: 2071654 - DNA, 15 bp, Homo sapiens
gtaagagtatattta

SEQ ID NO: 2071655 - DNA, 15 bp, Homo sapiens
taagagtatatttac

SEQ ID NO: 2071656 - DNA, 15 bp, Homo sapiens
aagagtatatttacc

SEQ ID NO: 2071657 - DNA, 15 bp, Homo sapiens
agagtatatttacca

SEQ ID NO: 2071658 - DNA, 15 bp, Homo sapiens
gagtatatttaccaa

SEQ ID NO: 2071659 - DNA, 15 bp, Homo sapiens
agtatatttaccaag

SEQ ID NO: 2071660 - DNA, 15 bp, Homo sapiens
gtatatttaccaagt

SEQ ID NO: 2071661 - DNA, 15 bp, Homo sapiens
tatatttaccaagtt

SEQ ID NO: 2071662 - DNA, 15 bp, Homo sapiens
atatttaccaagttt

SEQ ID NO: 2071663 - DNA, 15 bp, Homo sapiens
tatttaccaagttta

SEQ ID NO: 2071664 - DNA, 15 bp, Homo sapiens
atttaccaagtttat

SEQ ID NO: 2071665 - DNA, 15 bp, Homo sapiens
tttaccaagtttata

SEQ ID NO: 2071666 - DNA, 15 bp, Homo sapiens
ttaccaagtttatat

SEQ ID NO: 2071667 - DNA, 15 bp, Homo sapiens
taccaagtttatatg

SEQ ID NO: 2071668 - DNA, 15 bp, Homo sapiens
accaagtttatatga

SEQ ID NO: 2071669 - DNA, 15 bp, Homo sapiens
ccaagtttatatgac

SEQ ID NO: 2071670 - DNA, 15 bp, Homo sapiens
caagtttatatgact

SEQ ID NO: 2071671 - DNA, 15 bp, Homo sapiens
aagtttatatgactt

SEQ ID NO: 2071672 - DNA, 15 bp, Homo sapiens
agtttatatgacttt

SEQ ID NO: 2071673 - DNA, 15 bp, Homo sapiens
gtttatatgacttta

SEQ ID NO: 2071674 - DNA, 15 bp, Homo sapiens
tttatatgactttat

SEQ ID NO: 2071675 - DNA, 15 bp, Homo sapiens
ttatatgactttatt

SEQ ID NO: 2071676 - DNA, 15 bp, Homo sapiens
tatatgactttattt

SEQ ID NO: 2071677 - DNA, 15 bp, Homo sapiens
atatgactttatttt

SEQ ID NO: 2071678 - DNA, 15 bp, Homo sapiens
tatgactttatttta

SEQ ID NO: 2071679 - DNA, 15 bp, Homo sapiens
atgactttattttag

SEQ ID NO: 2071680 - DNA, 15 bp, Homo sapiens
tgactttattttaga

SEQ ID NO: 2071681 - DNA, 15 bp, Homo sapiens
gactttattttagat

SEQ ID NO: 2071682 - DNA, 15 bp, Homo sapiens
actttattttagatt

SEQ ID NO: 2071683 - DNA, 15 bp, Homo sapiens
ctttattttagattt

SEQ ID NO: 2071684 - DNA, 15 bp, Homo sapiens
tttattttagatttc

SEQ ID NO: 2071685 - DNA, 15 bp, Homo sapiens
ttattttagatttca

SEQ ID NO: 2071686 - DNA, 15 bp, Homo sapiens
tattttagatttcag

SEQ ID NO: 2071687 - DNA, 15 bp, Homo sapiens
attttagatttcagg

SEQ ID NO: 2071688 - DNA, 15 bp, Homo sapiens
ttttagatttcaggg

SEQ ID NO: 2071689 - DNA, 15 bp, Homo sapiens
tttagatttcaggga

SEQ ID NO: 2071690 - DNA, 15 bp, Homo sapiens
ttagatttcagggag

SEQ ID NO: 2071691 - DNA, 15 bp, Homo sapiens
tagatttcagggagt

SEQ ID NO: 2071692 - DNA, 15 bp, Homo sapiens
agatttcagggagtg

SEQ ID NO: 2071693 - DNA, 15 bp, Homo sapiens
gatttcagggagtgt

SEQ ID NO: 2071694 - DNA, 15 bp, Homo sapiens
atttcagggagtgtg

SEQ ID NO: 2071695 - DNA, 15 bp, Homo sapiens
tttcagggagtgtga

SEQ ID NO: 2071696 - DNA, 15 bp, Homo sapiens
ttcagggagtgtgat

SEQ ID NO: 2071697 - DNA, 15 bp, Homo sapiens
tcagggagtgtgatt

SEQ ID NO: 2071698 - DNA, 15 bp, Homo sapiens
cagggagtgtgatta

SEQ ID NO: 2071699 - DNA, 15 bp, Homo sapiens
agggagtgtgattaa

SEQ ID NO: 2071700 - DNA, 15 bp, Homo sapiens
gggagtgtgattaat

SEQ ID NO: 2071701 - DNA, 15 bp, Homo sapiens
ggagtgtgattaatg

SEQ ID NO: 2071702 - DNA, 15 bp, Homo sapiens
gagtgtgattaatga

SEQ ID NO: 2071703 - DNA, 15 bp, Homo sapiens
agtgtgattaatgaa

SEQ ID NO: 2071704 - DNA, 15 bp, Homo sapiens
gtgtgattaatgaac

SEQ ID NO: 2071705 - DNA, 15 bp, Homo sapiens
tgtgattaatgaacc

SEQ ID NO: 2071706 - DNA, 15 bp, Homo sapiens
gtgattaatgaacct

SEQ ID NO: 2071707 - DNA, 15 bp, Homo sapiens
tgattaatgaacctg

SEQ ID NO: 2071708 - DNA, 15 bp, Homo sapiens
gattaatgaacctga

SEQ ID NO: 2071709 - DNA, 15 bp, Homo sapiens
attaatgaacctgaa

SEQ ID NO: 2071710 - DNA, 15 bp, Homo sapiens
ttaatgaacctgaag

SEQ ID NO: 2071711 - DNA, 15 bp, Homo sapiens
taatgaacctgaaga

SEQ ID NO: 2071712 - DNA, 15 bp, Homo sapiens
aatgaacctgaagag

SEQ ID NO: 2071713 - DNA, 15 bp, Homo sapiens
atgaacctgaagagt

SEQ ID NO: 2071714 - DNA, 15 bp, Homo sapiens
tgaacctgaagagtt

SEQ ID NO: 2071715 - DNA, 15 bp, Homo sapiens
gaacctgaagagttt

SEQ ID NO: 2071716 - DNA, 15 bp, Homo sapiens
aacctgaagagttta

SEQ ID NO: 2071717 - DNA, 15 bp, Homo sapiens
acctgaagagtttaa

SEQ ID NO: 2071718 - DNA, 15 bp, Homo sapiens
cctgaagagtttaaa

SEQ ID NO: 2071719 - DNA, 15 bp, Homo sapiens
ctgaagagtttaaat

SEQ ID NO: 2071720 - DNA, 15 bp, Homo sapiens
tgaagagtttaaatt

SEQ ID NO: 2071721 - DNA, 15 bp, Homo sapiens
gaagagtttaaattc

SEQ ID NO: 2071722 - DNA, 15 bp, Homo sapiens
aagagtttaaattct

SEQ ID NO: 2071723 - DNA, 15 bp, Homo sapiens
agagtttaaattctt

SEQ ID NO: 2071724 - DNA, 15 bp, Homo sapiens
gagtttaaattcttg

SEQ ID NO: 2071725 - DNA, 15 bp, Homo sapiens
agtttaaattcttgt

SEQ ID NO: 2071726 - DNA, 15 bp, Homo sapiens
gtttaaattcttgtt

SEQ ID NO: 2071727 - DNA, 15 bp, Homo sapiens
tttaaattcttgttc

SEQ ID NO: 2071728 - DNA, 15 bp, Homo sapiens
ttaaattcttgttcg

SEQ ID NO: 2071729 - DNA, 15 bp, Homo sapiens
taaattcttgttcgt

SEQ ID NO: 2071730 - DNA, 15 bp, Homo sapiens
aaattcttgttcgta

SEQ ID NO: 2071731 - DNA, 15 bp, Homo sapiens
aattcttgttcgtag

SEQ ID NO: 2071732 - DNA, 15 bp, Homo sapiens
attcttgttcgtagt

SEQ ID NO: 2071733 - DNA, 15 bp, Homo sapiens
ttcttgttcgtagtg

SEQ ID NO: 2071734 - DNA, 15 bp, Homo sapiens
tcttgttcgtagtga

SEQ ID NO: 2071735 - DNA, 15 bp, Homo sapiens
cttgttcgtagtgag

SEQ ID NO: 2071736 - DNA, 15 bp, Homo sapiens
ttgttcgtagtgagg

SEQ ID NO: 2071737 - DNA, 15 bp, Homo sapiens
tgttcgtagtgagga

SEQ ID NO: 2071738 - DNA, 15 bp, Homo sapiens
gttcgtagtgaggaa

SEQ ID NO: 2071739 - DNA, 15 bp, Homo sapiens
ttcgtagtgaggaag

SEQ ID NO: 2071740 - DNA, 15 bp, Homo sapiens
tcgtagtgaggaaga

SEQ ID NO: 2071741 - DNA, 15 bp, Homo sapiens
cgtagtgaggaagat

SEQ ID NO: 2071742 - DNA, 15 bp, Homo sapiens
gtagtgaggaagatg

SEQ ID NO: 2071743 - DNA, 15 bp, Homo sapiens
tagtgaggaagatga

SEQ ID NO: 2071744 - DNA, 15 bp, Homo sapiens
agtgaggaagatgac

SEQ ID NO: 2071745 - DNA, 15 bp, Homo sapiens
gtgaggaagatgact

SEQ ID NO: 2071746 - DNA, 15 bp, Homo sapiens
tgaggaagatgactt

SEQ ID NO: 2071747 - DNA, 15 bp, Homo sapiens
gaggaagatgacttc

SEQ ID NO: 2071748 - DNA, 15 bp, Homo sapiens
aggaagatgacttct

SEQ ID NO: 2071749 - DNA, 15 bp, Homo sapiens
ggaagatgacttctc

SEQ ID NO: 2071750 - DNA, 15 bp, Homo sapiens
gaagatgacttctca

SEQ ID NO: 2071751 - DNA, 15 bp, Homo sapiens
aagatgacttctcaa

SEQ ID NO: 2071752 - DNA, 15 bp, Homo sapiens
agatgacttctcaaa

SEQ ID NO: 2071753 - DNA, 15 bp, Homo sapiens
gatgacttctcaaaa

SEQ ID NO: 2071754 - DNA, 15 bp, Homo sapiens
atgacttctcaaaag

SEQ ID NO: 2071755 - DNA, 15 bp, Homo sapiens
tgacttctcaaaaga

SEQ ID NO: 2071756 - DNA, 15 bp, Homo sapiens
gacttctcaaaagac

SEQ ID NO: 2071757 - DNA, 15 bp, Homo sapiens
acttctcaaaagaca

SEQ ID NO: 2071758 - DNA, 15 bp, Homo sapiens
cttctcaaaagacaa

SEQ ID NO: 2071759 - DNA, 15 bp, Homo sapiens
ttctcaaaagacaaa

SEQ ID NO: 2071760 - DNA, 15 bp, Homo sapiens
tctcaaaagacaaag

SEQ ID NO: 2071761 - DNA, 15 bp, Homo sapiens
ctcaaaagacaaagt

SEQ ID NO: 2071762 - DNA, 15 bp, Homo sapiens
tcaaaagacaaagtt

SEQ ID NO: 2071763 - DNA, 15 bp, Homo sapiens
caaaagacaaagtta

SEQ ID NO: 2071764 - DNA, 15 bp, Homo sapiens
aaaagacaaagttaa

SEQ ID NO: 2071765 - DNA, 15 bp, Homo sapiens
aaagacaaagttaag

SEQ ID NO: 2071766 - DNA, 15 bp, Homo sapiens
aagacaaagttaagc

SEQ ID NO: 2071767 - DNA, 15 bp, Homo sapiens
agacaaagttaagca

SEQ ID NO: 2071768 - DNA, 15 bp, Homo sapiens
gacaaagttaagcat

SEQ ID NO: 2071769 - DNA, 15 bp, Homo sapiens
acaaagttaagcatg

SEQ ID NO: 2071770 - DNA, 15 bp, Homo sapiens
caaagttaagcatgg

SEQ ID NO: 2071771 - DNA, 15 bp, Homo sapiens
aaagttaagcatgga

SEQ ID NO: 2071772 - DNA, 15 bp, Homo sapiens
aagttaagcatggaa

SEQ ID NO: 2071773 - DNA, 15 bp, Homo sapiens
agttaagcatggaag

SEQ ID NO: 2071774 - DNA, 15 bp, Homo sapiens
gttaagcatggaagt

SEQ ID NO: 2071775 - DNA, 15 bp, Homo sapiens
ttaagcatggaagtt

SEQ ID NO: 2071776 - DNA, 15 bp, Homo sapiens
taagcatggaagttt

SEQ ID NO: 2071777 - DNA, 15 bp, Homo sapiens
aagcatggaagttta

SEQ ID NO: 2071778 - DNA, 15 bp, Homo sapiens
agcatggaagtttaa

SEQ ID NO: 2071779 - DNA, 15 bp, Homo sapiens
gcatggaagtttaat

SEQ ID NO: 2071780 - DNA, 15 bp, Homo sapiens
catggaagtttaatc

SEQ ID NO: 2071781 - DNA, 15 bp, Homo sapiens
atggaagtttaatct

SEQ ID NO: 2071782 - DNA, 15 bp, Homo sapiens
tggaagtttaatcta

SEQ ID NO: 2071783 - DNA, 15 bp, Homo sapiens
ggaagtttaatctaa

SEQ ID NO: 2071784 - DNA, 15 bp, Homo sapiens
gaagtttaatctaag

SEQ ID NO: 2071785 - DNA, 15 bp, Homo sapiens
aagtttaatctaaga

SEQ ID NO: 2071786 - DNA, 15 bp, Homo sapiens
agtttaatctaagac

SEQ ID NO: 2071787 - DNA, 15 bp, Homo sapiens
gtttaatctaagaca

SEQ ID NO: 2071788 - DNA, 15 bp, Homo sapiens
tttaatctaagacag

SEQ ID NO: 2071789 - DNA, 15 bp, Homo sapiens
ttaatctaagacagc

SEQ ID NO: 2071790 - DNA, 15 bp, Homo sapiens
taatctaagacagca

SEQ ID NO: 2071791 - DNA, 15 bp, Homo sapiens
aatctaagacagcac

SEQ ID NO: 2071792 - DNA, 15 bp, Homo sapiens
atctaagacagcacc

SEQ ID NO: 2071793 - DNA, 15 bp, Homo sapiens
tctaagacagcacct

SEQ ID NO: 2071794 - DNA, 15 bp, Homo sapiens
ctaagacagcacctg

SEQ ID NO: 2071795 - DNA, 15 bp, Homo sapiens
taagacagcacctgt

SEQ ID NO: 2071796 - DNA, 15 bp, Homo sapiens
aagacagcacctgtc

SEQ ID NO: 2071797 - DNA, 15 bp, Homo sapiens
agacagcacctgtca

SEQ ID NO: 2071798 - DNA, 15 bp, Homo sapiens
gacagcacctgtcaa

SEQ ID NO: 2071799 - DNA, 15 bp, Homo sapiens
acagcacctgtcaaa

SEQ ID NO: 2071800 - DNA, 15 bp, Homo sapiens
cagcacctgtcaaac

SEQ ID NO: 2071801 - DNA, 15 bp, Homo sapiens
agcacctgtcaaact

SEQ ID NO: 2071802 - DNA, 15 bp, Homo sapiens
gcacctgtcaaactt

SEQ ID NO: 2071803 - DNA, 15 bp, Homo sapiens
cacctgtcaaacttt

SEQ ID NO: 2071804 - DNA, 15 bp, Homo sapiens
acctgtcaaactttg

SEQ ID NO: 2071805 - DNA, 15 bp, Homo sapiens
cctgtcaaactttgg

SEQ ID NO: 2071806 - DNA, 15 bp, Homo sapiens
ctgtcaaactttgga

SEQ ID NO: 2071807 - DNA, 15 bp, Homo sapiens
tgtcaaactttggag

SEQ ID NO: 2071808 - DNA, 15 bp, Homo sapiens
gtcaaactttggagt

SEQ ID NO: 2071809 - DNA, 15 bp, Homo sapiens
tcaaactttggagtg

SEQ ID NO: 2071810 - DNA, 15 bp, Homo sapiens
caaactttggagtgc

SEQ ID NO: 2071811 - DNA, 15 bp, Homo sapiens
aaactttggagtgca

SEQ ID NO: 2071812 - DNA, 15 bp, Homo sapiens
aactttggagtgcat

SEQ ID NO: 2071813 - DNA, 15 bp, Homo sapiens
actttggagtgcata

SEQ ID NO: 2071814 - DNA, 15 bp, Homo sapiens
ctttggagtgcataa

SEQ ID NO: 2071815 - DNA, 15 bp, Homo sapiens
tttggagtgcataag

SEQ ID NO: 2071816 - DNA, 15 bp, Homo sapiens
ttggagtgcataagt

SEQ ID NO: 2071817 - DNA, 15 bp, Homo sapiens
tggagtgcataagta

SEQ ID NO: 2071818 - DNA, 15 bp, Homo sapiens
ggagtgcataagtat

SEQ ID NO: 2071819 - DNA, 15 bp, Homo sapiens
gagtgcataagtata

SEQ ID NO: 2071820 - DNA, 15 bp, Homo sapiens
agtgcataagtataa

SEQ ID NO: 2071821 - DNA, 15 bp, Homo sapiens
gtgcataagtataac

SEQ ID NO: 2071822 - DNA, 15 bp, Homo sapiens
tgcataagtataacc

SEQ ID NO: 2071823 - DNA, 15 bp, Homo sapiens
gcataagtataaccc

SEQ ID NO: 2071824 - DNA, 15 bp, Homo sapiens
cataagtataaccca

SEQ ID NO: 2071825 - DNA, 15 bp, Homo sapiens
ataagtataacccaa

SEQ ID NO: 2071826 - DNA, 15 bp, Homo sapiens
taagtataacccaaa

SEQ ID NO: 2071827 - DNA, 15 bp, Homo sapiens
aagtataacccaaaa

SEQ ID NO: 2071828 - DNA, 15 bp, Homo sapiens
agtataacccaaaaa

SEQ ID NO: 2071829 - DNA, 15 bp, Homo sapiens
gtataacccaaaaag

SEQ ID NO: 2071830 - DNA, 15 bp, Homo sapiens
tataacccaaaaagc

SEQ ID NO: 2071831 - DNA, 15 bp, Homo sapiens
ataacccaaaaagct

SEQ ID NO: 2071832 - DNA, 15 bp, Homo sapiens
taacccaaaaagctt

SEQ ID NO: 2071833 - DNA, 15 bp, Homo sapiens
aacccaaaaagcttg

SEQ ID NO: 2071834 - DNA, 15 bp, Homo sapiens
acccaaaaagcttgt

SEQ ID NO: 2071835 - DNA, 15 bp, Homo sapiens
cccaaaaagcttgtt

SEQ ID NO: 2071836 - DNA, 15 bp, Homo sapiens
ccaaaaagcttgttt

SEQ ID NO: 2071837 - DNA, 15 bp, Homo sapiens
caaaaagcttgtttt

SEQ ID NO: 2071838 - DNA, 15 bp, Homo sapiens
aaaaagcttgtttta

SEQ ID NO: 2071839 - DNA, 15 bp, Homo sapiens
aaaagcttgttttaa

SEQ ID NO: 2071840 - DNA, 15 bp, Homo sapiens
aaagcttgttttaag

SEQ ID NO: 2071841 - DNA, 15 bp, Homo sapiens
aagcttgttttaagt

SEQ ID NO: 2071842 - DNA, 15 bp, Homo sapiens
agcttgttttaagtg

SEQ ID NO: 2071843 - DNA, 15 bp, Homo sapiens
gcttgttttaagtgt

SEQ ID NO: 2071844 - DNA, 15 bp, Homo sapiens
cttgttttaagtgta

SEQ ID NO: 2071845 - DNA, 15 bp, Homo sapiens
ttgttttaagtgtat

SEQ ID NO: 2071846 - DNA, 15 bp, Homo sapiens
tgttttaagtgtata

SEQ ID NO: 2071847 - DNA, 15 bp, Homo sapiens
gttttaagtgtatat

SEQ ID NO: 2071848 - DNA, 15 bp, Homo sapiens
ttttaagtgtatatt

SEQ ID NO: 2071849 - DNA, 15 bp, Homo sapiens
tttaagtgtatattc

SEQ ID NO: 2071850 - DNA, 15 bp, Homo sapiens
ttaagtgtatattct

SEQ ID NO: 2071851 - DNA, 15 bp, Homo sapiens
taagtgtatattctt

SEQ ID NO: 2071852 - DNA, 15 bp, Homo sapiens
aagtgtatattcttg

SEQ ID NO: 2071853 - DNA, 15 bp, Homo sapiens
agtgtatattcttga

SEQ ID NO: 2071854 - DNA, 15 bp, Homo sapiens
gtgtatattcttgaa

SEQ ID NO: 2071855 - DNA, 15 bp, Homo sapiens
tgtatattcttgaat

SEQ ID NO: 2071856 - DNA, 15 bp, Homo sapiens
gtatattcttgaatg

SEQ ID NO: 2071857 - DNA, 15 bp, Homo sapiens
tatattcttgaatgg

SEQ ID NO: 2071858 - DNA, 15 bp, Homo sapiens
atattcttgaatggg

SEQ ID NO: 2071859 - DNA, 15 bp, Homo sapiens
tattcttgaatgggt

SEQ ID NO: 2071860 - DNA, 15 bp, Homo sapiens
attcttgaatgggtg

SEQ ID NO: 2071861 - DNA, 15 bp, Homo sapiens
ttcttgaatgggtgt

SEQ ID NO: 2071862 - DNA, 15 bp, Homo sapiens
tcttgaatgggtgtt

SEQ ID NO: 2071863 - DNA, 15 bp, Homo sapiens
cttgaatgggtgttc

SEQ ID NO: 2071864 - DNA, 15 bp, Homo sapiens
ttgaatgggtgttct

SEQ ID NO: 2071865 - DNA, 15 bp, Homo sapiens
tgaatgggtgttctg

SEQ ID NO: 2071866 - DNA, 15 bp, Homo sapiens
gaatgggtgttctga

SEQ ID NO: 2071867 - DNA, 15 bp, Homo sapiens
aatgggtgttctgag

SEQ ID NO: 2071868 - DNA, 15 bp, Homo sapiens
atgggtgttctgagt

SEQ ID NO: 2071869 - DNA, 15 bp, Homo sapiens
tgggtgttctgagtc

SEQ ID NO: 2071870 - DNA, 15 bp, Homo sapiens
gggtgttctgagtcc

SEQ ID NO: 2071871 - DNA, 15 bp, Homo sapiens
ggtgttctgagtcca

SEQ ID NO: 2071872 - DNA, 15 bp, Homo sapiens
gtgttctgagtccag

SEQ ID NO: 2071873 - DNA, 15 bp, Homo sapiens
tgttctgagtccagt

SEQ ID NO: 2071874 - DNA, 15 bp, Homo sapiens
gttctgagtccagta

SEQ ID NO: 2071875 - DNA, 15 bp, Homo sapiens
ttctgagtccagtaa

SEQ ID NO: 2071876 - DNA, 15 bp, Homo sapiens
tctgagtccagtaat

SEQ ID NO: 2071877 - DNA, 15 bp, Homo sapiens
ctgagtccagtaata

SEQ ID NO: 2071878 - DNA, 15 bp, Homo sapiens
tgagtccagtaataa

SEQ ID NO: 2071879 - DNA, 15 bp, Homo sapiens
gagtccagtaataaa

SEQ ID NO: 2071880 - DNA, 15 bp, Homo sapiens
agtccagtaataaaa

SEQ ID NO: 2071881 - DNA, 15 bp, Homo sapiens
gtccagtaataaaaa

SEQ ID NO: 2071882 - DNA, 15 bp, Homo sapiens
tccagtaataaaaag

SEQ ID NO: 2071883 - DNA, 15 bp, Homo sapiens
ccagtaataaaaagt

SEQ ID NO: 2071884 - DNA, 15 bp, Homo sapiens
cagtaataaaaagta

SEQ ID NO: 2071885 - DNA, 15 bp, Homo sapiens
agtaataaaaagtac

SEQ ID NO: 2071886 - DNA, 15 bp, Homo sapiens
gtaataaaaagtaca

SEQ ID NO: 2071887 - DNA, 15 bp, Homo sapiens
taataaaaagtacat

SEQ ID NO: 2071888 - DNA, 15 bp, Homo sapiens
aataaaaagtacatt

SEQ ID NO: 2071889 - DNA, 15 bp, Homo sapiens
ataaaaagtacatta

SEQ ID NO: 2071890 - DNA, 15 bp, Homo sapiens
taaaaagtacattat

SEQ ID NO: 2071891 - DNA, 15 bp, Homo sapiens
aaaaagtacattatc

SEQ ID NO: 2071892 - DNA, 15 bp, Homo sapiens
aaaagtacattatct

SEQ ID NO: 2071893 - DNA, 15 bp, Homo sapiens
aaagtacattatctg

SEQ ID NO: 2071894 - DNA, 15 bp, Homo sapiens
aagtacattatctga

SEQ ID NO: 2071895 - DNA, 15 bp, Homo sapiens
agtacattatctgac

SEQ ID NO: 2071896 - DNA, 15 bp, Homo sapiens
gtacattatctgact

SEQ ID NO: 2071897 - DNA, 15 bp, Homo sapiens
tacattatctgacta

SEQ ID NO: 2071898 - DNA, 15 bp, Homo sapiens
acattatctgactat

SEQ ID NO: 2071899 - DNA, 15 bp, Homo sapiens
cattatctgactatg

SEQ ID NO: 2071900 - DNA, 15 bp, Homo sapiens
attatctgactatgc

SEQ ID NO: 2071901 - DNA, 15 bp, Homo sapiens
ttatctgactatgcc

SEQ ID NO: 2071902 - DNA, 15 bp, Homo sapiens
tatctgactatgcct

SEQ ID NO: 2071903 - DNA, 15 bp, Homo sapiens
atctgactatgcctt

SEQ ID NO: 2071904 - DNA, 15 bp, Homo sapiens
tctgactatgccttt

SEQ ID NO: 2071905 - DNA, 15 bp, Homo sapiens
ctgactatgcctttt

SEQ ID NO: 2071906 - DNA, 15 bp, Homo sapiens
tgactatgccttttt

SEQ ID NO: 2071907 - DNA, 15 bp, Homo sapiens
gactatgcctttttc

SEQ ID NO: 2071908 - DNA, 15 bp, Homo sapiens
actatgcctttttca

SEQ ID NO: 2071909 - DNA, 15 bp, Homo sapiens
ctatgcctttttcag

SEQ ID NO: 2071910 - DNA, 15 bp, Homo sapiens
tatgcctttttcaga

SEQ ID NO: 2071911 - DNA, 15 bp, Homo sapiens
atgcctttttcagat

SEQ ID NO: 2071912 - DNA, 15 bp, Homo sapiens
tgcctttttcagata

SEQ ID NO: 2071913 - DNA, 15 bp, Homo sapiens
gcctttttcagataa

SEQ ID NO: 2071914 - DNA, 15 bp, Homo sapiens
cctttttcagataat

SEQ ID NO: 2071915 - DNA, 15 bp, Homo sapiens
ctttttcagataata

SEQ ID NO: 2071916 - DNA, 15 bp, Homo sapiens
tttttcagataataa

SEQ ID NO: 2071917 - DNA, 15 bp, Homo sapiens
ttttcagataataat

SEQ ID NO: 2071918 - DNA, 15 bp, Homo sapiens
tttcagataataatg

SEQ ID NO: 2071919 - DNA, 15 bp, Homo sapiens
ttcagataataatga

SEQ ID NO: 2071920 - DNA, 15 bp, Homo sapiens
tcagataataatgat

SEQ ID NO: 2071921 - DNA, 15 bp, Homo sapiens
cagataataatgata

SEQ ID NO: 2071922 - DNA, 15 bp, Homo sapiens
agataataatgataa

SEQ ID NO: 2071923 - DNA, 15 bp, Homo sapiens
gataataatgataaa

SEQ ID NO: 2071924 - DNA, 15 bp, Homo sapiens
ataataatgataaac

SEQ ID NO: 2071925 - DNA, 15 bp, Homo sapiens
taataatgataaact

SEQ ID NO: 2071926 - DNA, 15 bp, Homo sapiens
aataatgataaactc

SEQ ID NO: 2071927 - DNA, 15 bp, Homo sapiens
ataatgataaactct

SEQ ID NO: 2071928 - DNA, 15 bp, Homo sapiens
taatgataaactctg

SEQ ID NO: 2071929 - DNA, 15 bp, Homo sapiens
aatgataaactctgg

SEQ ID NO: 2071930 - DNA, 15 bp, Homo sapiens
atgataaactctgga

SEQ ID NO: 2071931 - DNA, 15 bp, Homo sapiens
tgataaactctggac

SEQ ID NO: 2071932 - DNA, 15 bp, Homo sapiens
gataaactctggaca

SEQ ID NO: 2071933 - DNA, 15 bp, Homo sapiens
ataaactctggacaa

SEQ ID NO: 2071934 - DNA, 15 bp, Homo sapiens
taaactctggacaat

SEQ ID NO: 2071935 - DNA, 15 bp, Homo sapiens
aaactctggacaata

SEQ ID NO: 2071936 - DNA, 15 bp, Homo sapiens
aactctggacaatac

SEQ ID NO: 2071937 - DNA, 15 bp, Homo sapiens
actctggacaataca

SEQ ID NO: 2071938 - DNA, 15 bp, Homo sapiens
ctctggacaatacac

SEQ ID NO: 2071939 - DNA, 15 bp, Homo sapiens
tctggacaatacaca

SEQ ID NO: 2071940 - DNA, 15 bp, Homo sapiens
ctggacaatacacac

SEQ ID NO: 2071941 - DNA, 15 bp, Homo sapiens
tggacaatacacaca

SEQ ID NO: 2071942 - DNA, 15 bp, Homo sapiens
ggacaatacacacac

SEQ ID NO: 2071943 - DNA, 15 bp, Homo sapiens
gacaatacacacaca

SEQ ID NO: 2071944 - DNA, 15 bp, Homo sapiens
caaacacacacacaa

SEQ ID NO: 2071945 - DNA, 15 bp, Homo sapiens
aaacacacacacaat

SEQ ID NO: 2071946 - DNA, 15 bp, Homo sapiens
aacacacacacaatt

SEQ ID NO: 2071947 - DNA, 15 bp, Homo sapiens
acacacacacaatta

SEQ ID NO: 2071948 - DNA, 15 bp, Homo sapiens
cacacacacaattat

SEQ ID NO: 2071949 - DNA, 15 bp, Homo sapiens
acacacacaattatt

SEQ ID NO: 2071950 - DNA, 15 bp, Homo sapiens
cacacacaattattt

SEQ ID NO: 2071951 - DNA, 15 bp, Homo sapiens
acacacaattatttg

SEQ ID NO: 2071952 - DNA, 15 bp, Homo sapiens
cacacaattatttga

SEQ ID NO: 2071953 - DNA, 15 bp, Homo sapiens
acacaattatttgaa

SEQ ID NO: 2071954 - DNA, 15 bp, Homo sapiens
cacaattatttgaag

SEQ ID NO: 2071955 - DNA, 15 bp, Homo sapiens
acaattatttgaagg

SEQ ID NO: 2071956 - DNA, 15 bp, Homo sapiens
caattatttgaaggc

SEQ ID NO: 2071957 - DNA, 15 bp, Homo sapiens
aattatttgaaggca

SEQ ID NO: 2071958 - DNA, 15 bp, Homo sapiens
attatttgaaggcac

SEQ ID NO: 2071959 - DNA, 15 bp, Homo sapiens
ttatttgaaggcacc

SEQ ID NO: 2071960 - DNA, 15 bp, Homo sapiens
tatttgaaggcacca

SEQ ID NO: 2071961 - DNA, 15 bp, Homo sapiens
atttgaaggcaccag

SEQ ID NO: 2071962 - DNA, 15 bp, Homo sapiens
tttgaaggcaccaga

SEQ ID NO: 2071963 - DNA, 15 bp, Homo sapiens
ttgaaggcaccagaa

SEQ ID NO: 2071964 - DNA, 15 bp, Homo sapiens
tgaaggcaccagaaa

SEQ ID NO: 2071965 - DNA, 15 bp, Homo sapiens
gaaggcaccagaaag

SEQ ID NO: 2071966 - DNA, 15 bp, Homo sapiens
aaggcaccagaaagt

SEQ ID NO: 2071967 - DNA, 15 bp, Homo sapiens
aggcaccagaaagtg

SEQ ID NO: 2071968 - DNA, 15 bp, Homo sapiens
ggcaccagaaagtgg

SEQ ID NO: 2071969 - DNA, 15 bp, Homo sapiens
gcaccagaaagtggt

SEQ ID NO: 2071970 - DNA, 15 bp, Homo sapiens
caccagaaagtggtc

SEQ ID NO: 2071971 - DNA, 15 bp, Homo sapiens
accagaaagtggtca

SEQ ID NO: 2071972 - DNA, 15 bp, Homo sapiens
ccagaaagtggtcaa

SEQ ID NO: 2071973 - DNA, 15 bp, Homo sapiens
cagaaagtggtcaaa

SEQ ID NO: 2071974 - DNA, 15 bp, Homo sapiens
agaaagtggtcaaaa

SEQ ID NO: 2071975 - DNA, 15 bp, Homo sapiens
gaaagtggtcaaaag

SEQ ID NO: 2071976 - DNA, 15 bp, Homo sapiens
aaagtggtcaaaaga

SEQ ID NO: 2071977 - DNA, 15 bp, Homo sapiens
aagtggtcaaaagaa

SEQ ID NO: 2071978 - DNA, 15 bp, Homo sapiens
agtggtcaaaagaag

SEQ ID NO: 2071979 - DNA, 15 bp, Homo sapiens
gtggtcaaaagaaga

SEQ ID NO: 2071980 - DNA, 15 bp, Homo sapiens
tggtcaaaagaagaa

SEQ ID NO: 2071981 - DNA, 15 bp, Homo sapiens
ggtcaaaagaagaaa

SEQ ID NO: 2071982 - DNA, 15 bp, Homo sapiens
gtcaaaagaagaaag

SEQ ID NO: 2071983 - DNA, 15 bp, Homo sapiens
tcaaaagaagaaaga

SEQ ID NO: 2071984 - DNA, 15 bp, Homo sapiens
caaaagaagaaagaa

SEQ ID NO: 2071985 - DNA, 15 bp, Homo sapiens
aaagaagaaagaaac

SEQ ID NO: 2071986 - DNA, 15 bp, Homo sapiens
aagaagaaagaaact

SEQ ID NO: 2071987 - DNA, 15 bp, Homo sapiens
agaagaaagaaactg

SEQ ID NO: 2071988 - DNA, 15 bp, Homo sapiens
gaagaaagaaactga

SEQ ID NO: 2071989 - DNA, 15 bp, Homo sapiens
aagaaagaaactgaa

SEQ ID NO: 2071990 - DNA, 15 bp, Homo sapiens
agaaagaaactgaag

SEQ ID NO: 2071991 - DNA, 15 bp, Homo sapiens
gaaagaaactgaaga

SEQ ID NO: 2071992 - DNA, 15 bp, Homo sapiens
aaagaaactgaagaa

SEQ ID NO: 2071993 - DNA, 15 bp, Homo sapiens
aagaaactgaagaag

SEQ ID NO: 2071994 - DNA, 15 bp, Homo sapiens
agaaactgaagaagt

SEQ ID NO: 2071995 - DNA, 15 bp, Homo sapiens
gaaactgaagaagtt

SEQ ID NO: 2071996 - DNA, 15 bp, Homo sapiens
aaactgaagaagttt

SEQ ID NO: 2071997 - DNA, 15 bp, Homo sapiens
aactgaagaagtttc

SEQ ID NO: 2071998 - DNA, 15 bp, Homo sapiens
actgaagaagtttct

SEQ ID NO: 2071999 - DNA, 15 bp, Homo sapiens
ctgaagaagtttcta

SEQ ID NO: 2072000 - DNA, 15 bp, Homo sapiens
tgaagaagtttctag

SEQ ID NO: 2072001 - DNA, 15 bp, Homo sapiens
gaagaagtttctagt

SEQ ID NO: 2072002 - DNA, 15 bp, Homo sapiens
aagaagtttctagtc

SEQ ID NO: 2072003 - DNA, 15 bp, Homo sapiens
agaagtttctagtca

SEQ ID NO: 2072004 - DNA, 15 bp, Homo sapiens
gaagtttctagtcat

SEQ ID NO: 2072005 - DNA, 15 bp, Homo sapiens
aagtttctagtcata

SEQ ID NO: 2072006 - DNA, 15 bp, Homo sapiens
agtttctagtcataa

SEQ ID NO: 2072007 - DNA, 15 bp, Homo sapiens
gtttctagtcataaa

SEQ ID NO: 2072008 - DNA, 15 bp, Homo sapiens
tttctagtcataaat

SEQ ID NO: 2072009 - DNA, 15 bp, Homo sapiens
ttctagtcataaatg

SEQ ID NO: 2072010 - DNA, 15 bp, Homo sapiens
tctagtcataaatgg

SEQ ID NO: 2072011 - DNA, 15 bp, Homo sapiens
ctagtcataaatgga

SEQ ID NO: 2072012 - DNA, 15 bp, Homo sapiens
tagtcataaatggaa

SEQ ID NO: 2072013 - DNA, 15 bp, Homo sapiens
agtcataaatggaac

SEQ ID NO: 2072014 - DNA, 15 bp, Homo sapiens
gtcataaatggaact

SEQ ID NO: 2072015 - DNA, 15 bp, Homo sapiens
tcataaatggaacta

SEQ ID NO: 2072016 - DNA, 15 bp, Homo sapiens
cataaatggaactac

SEQ ID NO: 2072017 - DNA, 15 bp, Homo sapiens
ataaatggaactact

SEQ ID NO: 2072018 - DNA, 15 bp, Homo sapiens
taaatggaactactc

SEQ ID NO: 2072019 - DNA, 15 bp, Homo sapiens
aaatggaactactca

SEQ ID NO: 2072020 - DNA, 15 bp, Homo sapiens
aatggaactactcac

SEQ ID NO: 2072021 - DNA, 15 bp, Homo sapiens
atggaactactcact

SEQ ID NO: 2072022 - DNA, 15 bp, Homo sapiens
tggaactactcactg

SEQ ID NO: 2072023 - DNA, 15 bp, Homo sapiens
ggaactactcactgg

SEQ ID NO: 2072024 - DNA, 15 bp, Homo sapiens
gaactactcactggg

SEQ ID NO: 2072025 - DNA, 15 bp, Homo sapiens
aactactcactgggt

SEQ ID NO: 2072026 - DNA, 15 bp, Homo sapiens
actactcactgggta

SEQ ID NO: 2072027 - DNA, 15 bp, Homo sapiens
ctactcactgggtaa

SEQ ID NO: 2072028 - DNA, 15 bp, Homo sapiens
tactcactgggtaag

SEQ ID NO: 2072029 - DNA, 15 bp, Homo sapiens
actcactgggtaaga

SEQ ID NO: 2072030 - DNA, 15 bp, Homo sapiens
ctcactgggtaagaa

SEQ ID NO: 2072031 - DNA, 15 bp, Homo sapiens
tcactgggtaagaat

SEQ ID NO: 2072032 - DNA, 15 bp, Homo sapiens
cactgggtaagaatt

SEQ ID NO: 2072033 - DNA, 15 bp, Homo sapiens
actgggtaagaatta

SEQ ID NO: 2072034 - DNA, 15 bp, Homo sapiens
ctgggtaagaattaa

SEQ ID NO: 2072035 - DNA, 15 bp, Homo sapiens
tgggtaagaattaaa

SEQ ID NO: 2072036 - DNA, 15 bp, Homo sapiens
gggtaagaattaaac

SEQ ID NO: 2072037 - DNA, 15 bp, Homo sapiens
ggtaagaattaaact

SEQ ID NO: 2072038 - DNA, 15 bp, Homo sapiens
gtaagaattaaactt

SEQ ID NO: 2072039 - DNA, 15 bp, Homo sapiens
taagaattaaactta

SEQ ID NO: 2072040 - DNA, 15 bp, Homo sapiens
aagaattaaacttac

SEQ ID NO: 2072041 - DNA, 15 bp, Homo sapiens
agaattaaacttaca

SEQ ID NO: 2072042 - DNA, 15 bp, Homo sapiens
gaattaaacttacaa

SEQ ID NO: 2072043 - DNA, 15 bp, Homo sapiens
aattaaacttacaag

SEQ ID NO: 2072044 - DNA, 15 bp, Homo sapiens
attaaacttacaagg

SEQ ID NO: 2072045 - DNA, 15 bp, Homo sapiens
ttaaacttacaagga

SEQ ID NO: 2072046 - DNA, 15 bp, Homo sapiens
taaacttacaaggat

SEQ ID NO: 2072047 - DNA, 15 bp, Homo sapiens
aaacttacaaggata

SEQ ID NO: 2072048 - DNA, 15 bp, Homo sapiens
aacttacaaggatat

SEQ ID NO: 2072049 - DNA, 15 bp, Homo sapiens
acttacaaggatatt

SEQ ID NO: 2072050 - DNA, 15 bp, Homo sapiens
cttacaaggatattc

SEQ ID NO: 2072051 - DNA, 15 bp, Homo sapiens
ttacaaggatattct

SEQ ID NO: 2072052 - DNA, 15 bp, Homo sapiens
tacaaggatattcta

SEQ ID NO: 2072053 - DNA, 15 bp, Homo sapiens
acaaggatattctac

SEQ ID NO: 2072054 - DNA, 15 bp, Homo sapiens
caaggatattctact

SEQ ID NO: 2072055 - DNA, 15 bp, Homo sapiens
aaggatattctactg

SEQ ID NO: 2072056 - DNA, 15 bp, Homo sapiens
aggatattctactga

SEQ ID NO: 2072057 - DNA, 15 bp, Homo sapiens
ggatattctactgag

SEQ ID NO: 2072058 - DNA, 15 bp, Homo sapiens
gatattctactgagg

SEQ ID NO: 2072059 - DNA, 15 bp, Homo sapiens
atattctactgagga

SEQ ID NO: 2072060 - DNA, 15 bp, Homo sapiens
tattctactgaggac

SEQ ID NO: 2072061 - DNA, 15 bp, Homo sapiens
attctactgaggaca

SEQ ID NO: 2072062 - DNA, 15 bp, Homo sapiens
ttctactgaggacaa

SEQ ID NO: 2072063 - DNA, 15 bp, Homo sapiens
tctactgaggacaat

SEQ ID NO: 2072064 - DNA, 15 bp, Homo sapiens
ctactgaggacaata

SEQ ID NO: 2072065 - DNA, 15 bp, Homo sapiens
tactgaggacaatac

SEQ ID NO: 2072066 - DNA, 15 bp, Homo sapiens
actgaggacaatact

SEQ ID NO: 2072067 - DNA, 15 bp, Homo sapiens
ctgaggacaatactc

SEQ ID NO: 2072068 - DNA, 15 bp, Homo sapiens
tgaggacaatactca

SEQ ID NO: 2072069 - DNA, 15 bp, Homo sapiens
gaggacaatactcat

SEQ ID NO: 2072070 - DNA, 15 bp, Homo sapiens
aggacaatactcata

SEQ ID NO: 2072071 - DNA, 15 bp, Homo sapiens
ggacaatactcatac

SEQ ID NO: 2072072 - DNA, 15 bp, Homo sapiens
gacaatactcatacc

SEQ ID NO: 2072073 - DNA, 15 bp, Homo sapiens
acaatactcatacca

SEQ ID NO: 2072074 - DNA, 15 bp, Homo sapiens
caatactcataccac

SEQ ID NO: 2072075 - DNA, 15 bp, Homo sapiens
aatactcataccaca

SEQ ID NO: 2072076 - DNA, 15 bp, Homo sapiens
atactcataccacag

SEQ ID NO: 2072077 - DNA, 15 bp, Homo sapiens
tactcataccacaga

SEQ ID NO: 2072078 - DNA, 15 bp, Homo sapiens
actcataccacagag

SEQ ID NO: 2072079 - DNA, 15 bp, Homo sapiens
ctcataccacagagc

SEQ ID NO: 2072080 - DNA, 15 bp, Homo sapiens
tcataccacagagca

SEQ ID NO: 2072081 - DNA, 15 bp, Homo sapiens
cataccacagagcac

SEQ ID NO: 2072082 - DNA, 15 bp, Homo sapiens
ataccacagagcaca

SEQ ID NO: 2072083 - DNA, 15 bp, Homo sapiens
taccacagagcacag

SEQ ID NO: 2072084 - DNA, 15 bp, Homo sapiens
accacagagcacagg

SEQ ID NO: 2072085 - DNA, 15 bp, Homo sapiens
ccacagagcacaggg

SEQ ID NO: 2072086 - DNA, 15 bp, Homo sapiens
cacagagcacagggc

SEQ ID NO: 2072087 - DNA, 15 bp, Homo sapiens
acagagcacagggca

SEQ ID NO: 2072088 - DNA, 15 bp, Homo sapiens
cagagcacagggcaa

SEQ ID NO: 2072089 - DNA, 15 bp, Homo sapiens
agagcacagggcaaa

SEQ ID NO: 2072090 - DNA, 15 bp, Homo sapiens
gagcacagggcaaat

SEQ ID NO: 2072091 - DNA, 15 bp, Homo sapiens
agcacagggcaaata

SEQ ID NO: 2072092 - DNA, 15 bp, Homo sapiens
gcacagggcaaatag

SEQ ID NO: 2072093 - DNA, 15 bp, Homo sapiens
cacagggcaaataga

SEQ ID NO: 2072094 - DNA, 15 bp, Homo sapiens
acagggcaaatagaa

SEQ ID NO: 2072095 - DNA, 15 bp, Homo sapiens
cagggcaaatagaag

SEQ ID NO: 2072096 - DNA, 15 bp, Homo sapiens
agggcaaatagaagg

SEQ ID NO: 2072097 - DNA, 15 bp, Homo sapiens
gggcaaatagaaggt

SEQ ID NO: 2072098 - DNA, 15 bp, Homo sapiens
ggcaaatagaaggtg

SEQ ID NO: 2072099 - DNA, 15 bp, Homo sapiens
gcaaatagaaggtga

SEQ ID NO: 2072100 - DNA, 15 bp, Homo sapiens
caaatagaaggtgag

SEQ ID NO: 2072101 - DNA, 15 bp, Homo sapiens
aaatagaaggtgagc

SEQ ID NO: 2072102 - DNA, 15 bp, Homo sapiens
aatagaaggtgagcg

SEQ ID NO: 2072103 - DNA, 15 bp, Homo sapiens
atagaaggtgagcga

SEQ ID NO: 2072104 - DNA, 15 bp, Homo sapiens
tagaaggtgagcgaa

SEQ ID NO: 2072105 - DNA, 15 bp, Homo sapiens
agaaggtgagcgaaa

SEQ ID NO: 2072106 - DNA, 15 bp, Homo sapiens
gaaggtgagcgaaaa

SEQ ID NO: 2072107 - DNA, 15 bp, Homo sapiens
aaggtgagcgaaaaa

SEQ ID NO: 2072108 - DNA, 15 bp, Homo sapiens
aggtgagcgaaaaaa

SEQ ID NO: 2072109 - DNA, 15 bp, Homo sapiens
ggtgagcgaaaaaat

SEQ ID NO: 2072110 - DNA, 15 bp, Homo sapiens
gtgagcgaaaaaatc

SEQ ID NO: 2072111 - DNA, 15 bp, Homo sapiens
tgagcgaaaaaatcc

SEQ ID NO: 2072112 - DNA, 15 bp, Homo sapiens
gagcgaaaaaatcca

SEQ ID NO: 2072113 - DNA, 15 bp, Homo sapiens
agcgaaaaaatccag

SEQ ID NO: 2072114 - DNA, 15 bp, Homo sapiens
gcgaaaaaatccagt

SEQ ID NO: 2072115 - DNA, 15 bp, Homo sapiens
cgaaaaaatccagtg

SEQ ID NO: 2072116 - DNA, 15 bp, Homo sapiens
gaaaaaatccagtgt

SEQ ID NO: 2072117 - DNA, 15 bp, Homo sapiens
aaaaaatccagtgtt

SEQ ID NO: 2072118 - DNA, 15 bp, Homo sapiens
aaaaatccagtgttt

SEQ ID NO: 2072119 - DNA, 15 bp, Homo sapiens
aaaatccagtgtttt

SEQ ID NO: 2072120 - DNA, 15 bp, Homo sapiens
aaatccagtgttttt

SEQ ID NO: 2072121 - DNA, 15 bp, Homo sapiens
aatccagtgtttttt

SEQ ID NO: 2072122 - DNA, 15 bp, Homo sapiens
atccagtgtttttta

SEQ ID NO: 2072123 - DNA, 15 bp, Homo sapiens
tccagtgttttttat

SEQ ID NO: 2072124 - DNA, 15 bp, Homo sapiens
ccagtgttttttatt

SEQ ID NO: 2072125 - DNA, 15 bp, Homo sapiens
cagtgttttttattt

SEQ ID NO: 2072126 - DNA, 15 bp, Homo sapiens
agtgttttttatttg

SEQ ID NO: 2072127 - DNA, 15 bp, Homo sapiens
gtgttttttatttga

SEQ ID NO: 2072128 - DNA, 15 bp, Homo sapiens
tgttttttatttgaa

SEQ ID NO: 2072129 - DNA, 15 bp, Homo sapiens
gttttttatttgaag

SEQ ID NO: 2072130 - DNA, 15 bp, Homo sapiens
ttttttatttgaagt

SEQ ID NO: 2072131 - DNA, 15 bp, Homo sapiens
tttttatttgaagtg

SEQ ID NO: 2072132 - DNA, 15 bp, Homo sapiens
ttttatttgaagtgt

SEQ ID NO: 2072133 - DNA, 15 bp, Homo sapiens
tttatttgaagtgtg

SEQ ID NO: 2072134 - DNA, 15 bp, Homo sapiens
ttatttgaagtgtga

SEQ ID NO: 2072135 - DNA, 15 bp, Homo sapiens
tatttgaagtgtgag

SEQ ID NO: 2072136 - DNA, 15 bp, Homo sapiens
atttgaagtgtgaga

SEQ ID NO: 2072137 - DNA, 15 bp, Homo sapiens
tttgaagtgtgagag

SEQ ID NO: 2072138 - DNA, 15 bp, Homo sapiens
ttgaagtgtgagagg

SEQ ID NO: 2072139 - DNA, 15 bp, Homo sapiens
tgaagtgtgagagga

SEQ ID NO: 2072140 - DNA, 15 bp, Homo sapiens
gaagtgtgagaggat

SEQ ID NO: 2072141 - DNA, 15 bp, Homo sapiens
aagtgtgagaggatg

SEQ ID NO: 2072142 - DNA, 15 bp, Homo sapiens
agtgtgagaggatgg

SEQ ID NO: 2072143 - DNA, 15 bp, Homo sapiens
gtgtgagaggatgga

SEQ ID NO: 2072144 - DNA, 15 bp, Homo sapiens
tgtgagaggatggag

SEQ ID NO: 2072145 - DNA, 15 bp, Homo sapiens
gtgagaggatggagt

SEQ ID NO: 2072146 - DNA, 15 bp, Homo sapiens
tgagaggatggagtc

SEQ ID NO: 2072147 - DNA, 15 bp, Homo sapiens
gagaggatggagtca

SEQ ID NO: 2072148 - DNA, 15 bp, Homo sapiens
agaggatggagtcag

SEQ ID NO: 2072149 - DNA, 15 bp, Homo sapiens
gaggatggagtcagg

SEQ ID NO: 2072150 - DNA, 15 bp, Homo sapiens
aggatggagtcaggg

SEQ ID NO: 2072151 - DNA, 15 bp, Homo sapiens
ggatggagtcagggg

SEQ ID NO: 2072152 - DNA, 15 bp, Homo sapiens
gatggagtcaggggc

SEQ ID NO: 2072153 - DNA, 15 bp, Homo sapiens
atggagtcaggggct

SEQ ID NO: 2072154 - DNA, 15 bp, Homo sapiens
tggagtcaggggctg

SEQ ID NO: 2072155 - DNA, 15 bp, Homo sapiens
ggagtcaggggctga

SEQ ID NO: 2072156 - DNA, 15 bp, Homo sapiens
gagtcaggggctgaa

SEQ ID NO: 2072157 - DNA, 15 bp, Homo sapiens
agtcaggggctgaaa

SEQ ID NO: 2072158 - DNA, 15 bp, Homo sapiens
gtcaggggctgaaag

SEQ ID NO: 2072159 - DNA, 15 bp, Homo sapiens
tcaggggctgaaaga

SEQ ID NO: 2072160 - DNA, 15 bp, Homo sapiens
caggggctgaaagaa

SEQ ID NO: 2072161 - DNA, 15 bp, Homo sapiens
aggggctgaaagaat

SEQ ID NO: 2072162 - DNA, 15 bp, Homo sapiens
ggggctgaaagaata

SEQ ID NO: 2072163 - DNA, 15 bp, Homo sapiens
gggctgaaagaatat

SEQ ID NO: 2072164 - DNA, 15 bp, Homo sapiens
ggctgaaagaatatc

SEQ ID NO: 2072165 - DNA, 15 bp, Homo sapiens
gctgaaagaatatct

SEQ ID NO: 2072166 - DNA, 15 bp, Homo sapiens
ctgaaagaatatctg

SEQ ID NO: 2072167 - DNA, 15 bp, Homo sapiens
tgaaagaatatctga

SEQ ID NO: 2072168 - DNA, 15 bp, Homo sapiens
gaaagaatatctgaa

SEQ ID NO: 2072169 - DNA, 15 bp, Homo sapiens
aaagaatatctgaaa

SEQ ID NO: 2072170 - DNA, 15 bp, Homo sapiens
aagaatatctgaaag

SEQ ID NO: 2072171 - DNA, 15 bp, Homo sapiens
agaatatctgaaaga

SEQ ID NO: 2072172 - DNA, 15 bp, Homo sapiens
gaatatctgaaagat

SEQ ID NO: 2072173 - DNA, 15 bp, Homo sapiens
aatatctgaaagatt

SEQ ID NO: 2072174 - DNA, 15 bp, Homo sapiens
atatctgaaagatta

SEQ ID NO: 2072175 - DNA, 15 bp, Homo sapiens
tatctgaaagattaa

SEQ ID NO: 2072176 - DNA, 15 bp, Homo sapiens
atctgaaagattaag

SEQ ID NO: 2072177 - DNA, 15 bp, Homo sapiens
tctgaaagattaagg

SEQ ID NO: 2072178 - DNA, 15 bp, Homo sapiens
ctgaaagattaaggt

SEQ ID NO: 2072179 - DNA, 15 bp, Homo sapiens
tgaaagattaaggta

SEQ ID NO: 2072180 - DNA, 15 bp, Homo sapiens
gaaagattaaggtag

SEQ ID NO: 2072181 - DNA, 15 bp, Homo sapiens
aaagattaaggtagg

SEQ ID NO: 2072182 - DNA, 15 bp, Homo sapiens
aagattaaggtaggg

SEQ ID NO: 2072183 - DNA, 15 bp, Homo sapiens
agattaaggtaggga

SEQ ID NO: 2072184 - DNA, 15 bp, Homo sapiens
gattaaggtagggaa

SEQ ID NO: 2072185 - DNA, 15 bp, Homo sapiens
attaaggtagggaac

SEQ ID NO: 2072186 - DNA, 15 bp, Homo sapiens
ttaaggtagggaact

SEQ ID NO: 2072187 - DNA, 15 bp, Homo sapiens
taaggtagggaactc

SEQ ID NO: 2072188 - DNA, 15 bp, Homo sapiens
aaggtagggaactcc

SEQ ID NO: 2072189 - DNA, 15 bp, Homo sapiens
aggtagggaactcct

SEQ ID NO: 2072190 - DNA, 15 bp, Homo sapiens
ggtagggaactccta

SEQ ID NO: 2072191 - DNA, 15 bp, Homo sapiens
gtagggaactcctag

SEQ ID NO: 2072192 - DNA, 15 bp, Homo sapiens
tagggaactcctaga

SEQ ID NO: 2072193 - DNA, 15 bp, Homo sapiens
agggaactcctagaa

SEQ ID NO: 2072194 - DNA, 15 bp, Homo sapiens
gggaactcctagaac

SEQ ID NO: 2072195 - DNA, 15 bp, Homo sapiens
ggaactcctagaaca

SEQ ID NO: 2072196 - DNA, 15 bp, Homo sapiens
gaactcctagaacag

SEQ ID NO: 2072197 - DNA, 15 bp, Homo sapiens
aactcctagaacaga

SEQ ID NO: 2072198 - DNA, 15 bp, Homo sapiens
actcctagaacagag

SEQ ID NO: 2072199 - DNA, 15 bp, Homo sapiens
ctcctagaacagagg

SEQ ID NO: 2072200 - DNA, 15 bp, Homo sapiens
tcctagaacagagga

SEQ ID NO: 2072201 - DNA, 15 bp, Homo sapiens
cctagaacagaggaa

SEQ ID NO: 2072202 - DNA, 15 bp, Homo sapiens
ctagaacagaggaat

SEQ ID NO: 2072203 - DNA, 15 bp, Homo sapiens
tagaacagaggaatc

SEQ ID NO: 2072204 - DNA, 15 bp, Homo sapiens
agaacagaggaatct

SEQ ID NO: 2072205 - DNA, 15 bp, Homo sapiens
gaacagaggaatcta

SEQ ID NO: 2072206 - DNA, 15 bp, Homo sapiens
aacagaggaatctag

SEQ ID NO: 2072207 - DNA, 15 bp, Homo sapiens
acagaggaatctaga

SEQ ID NO: 2072208 - DNA, 15 bp, Homo sapiens
cagaggaatctagag

SEQ ID NO: 2072209 - DNA, 15 bp, Homo sapiens
agaggaatctagaga

SEQ ID NO: 2072210 - DNA, 15 bp, Homo sapiens
gaggaatctagagac

SEQ ID NO: 2072211 - DNA, 15 bp, Homo sapiens
aggaatctagagact

SEQ ID NO: 2072212 - DNA, 15 bp, Homo sapiens
ggaatctagagactc

SEQ ID NO: 2072213 - DNA, 15 bp, Homo sapiens
gaatctagagactct

SEQ ID NO: 2072214 - DNA, 15 bp, Homo sapiens
aatctagagactcta

SEQ ID NO: 2072215 - DNA, 15 bp, Homo sapiens
atctagagactctaa

SEQ ID NO: 2072216 - DNA, 15 bp, Homo sapiens
tctagagactctaaa

SEQ ID NO: 2072217 - DNA, 15 bp, Homo sapiens
ctagagactctaaaa

SEQ ID NO: 2072218 - DNA, 15 bp, Homo sapiens
tagagactctaaaat

SEQ ID NO: 2072219 - DNA, 15 bp, Homo sapiens
agagactctaaaatg

SEQ ID NO: 2072220 - DNA, 15 bp, Homo sapiens
gagactctaaaatgt

SEQ ID NO: 2072221 - DNA, 15 bp, Homo sapiens
agactctaaaatgta

SEQ ID NO: 2072222 - DNA, 15 bp, Homo sapiens
gactctaaaatgtat

SEQ ID NO: 2072223 - DNA, 15 bp, Homo sapiens
actctaaaatgtatt

SEQ ID NO: 2072224 - DNA, 15 bp, Homo sapiens
ctctaaaatgtattt

SEQ ID NO: 2072225 - DNA, 15 bp, Homo sapiens
tctaaaatgtatttt

SEQ ID NO: 2072226 - DNA, 15 bp, Homo sapiens
ctaaaatgtattttt

SEQ ID NO: 2072227 - DNA, 15 bp, Homo sapiens
taaaatgtatttttc

SEQ ID NO: 2072228 - DNA, 15 bp, Homo sapiens
aaaatgtatttttca

SEQ ID NO: 2072229 - DNA, 15 bp, Homo sapiens
aaatgtatttttcac

SEQ ID NO: 2072230 - DNA, 15 bp, Homo sapiens
aatgtatttttcaca

SEQ ID NO: 2072231 - DNA, 15 bp, Homo sapiens
atgtatttttcacaa

SEQ ID NO: 2072232 - DNA, 15 bp, Homo sapiens
tgtatttttcacaat

SEQ ID NO: 2072233 - DNA, 15 bp, Homo sapiens
gtatttttcacaatg

SEQ ID NO: 2072234 - DNA, 15 bp, Homo sapiens
tatttttcacaatgg

SEQ ID NO: 2072235 - DNA, 15 bp, Homo sapiens
atttttcacaatggc

SEQ ID NO: 2072236 - DNA, 15 bp, Homo sapiens
tttttcacaatggca

SEQ ID NO: 2072237 - DNA, 15 bp, Homo sapiens
ttttcacaatggcag

SEQ ID NO: 2072238 - DNA, 15 bp, Homo sapiens
tttcacaatggcaga

SEQ ID NO: 2072239 - DNA, 15 bp, Homo sapiens
ttcacaatggcagat

SEQ ID NO: 2072240 - DNA, 15 bp, Homo sapiens
tcacaatggcagatt

SEQ ID NO: 2072241 - DNA, 15 bp, Homo sapiens
cacaatggcagatta

SEQ ID NO: 2072242 - DNA, 15 bp, Homo sapiens
acaatggcagattaa

SEQ ID NO: 2072243 - DNA, 15 bp, Homo sapiens
caatggcagattaaa

SEQ ID NO: 2072244 - DNA, 15 bp, Homo sapiens
aatggcagattaaaa

SEQ ID NO: 2072245 - DNA, 15 bp, Homo sapiens
atggcagattaaaat

SEQ ID NO: 2072246 - DNA, 15 bp, Homo sapiens
tggcagattaaaata

SEQ ID NO: 2072247 - DNA, 15 bp, Homo sapiens
ggcagattaaaataa

SEQ ID NO: 2072248 - DNA, 15 bp, Homo sapiens
gcagattaaaataaa

SEQ ID NO: 2072249 - DNA, 15 bp, Homo sapiens
cagattaaaataaaa

SEQ ID NO: 2072250 - DNA, 15 bp, Homo sapiens
agattaaaataaaaa

SEQ ID NO: 2072251 - DNA, 15 bp, Homo sapiens
gattaaaataaaaaa

SEQ ID NO: 2072252 - DNA, 15 bp, Homo sapiens
attaaaataaaaaat

SEQ ID NO: 2072253 - DNA, 15 bp, Homo sapiens
ttaaaataaaaaatt

SEQ ID NO: 2072254 - DNA, 15 bp, Homo sapiens
taaaataaaaaatta

SEQ ID NO: 2072255 - DNA, 15 bp, Homo sapiens
aaaataaaaaattac

SEQ ID NO: 2072256 - DNA, 15 bp, Homo sapiens
aaataaaaaattact

SEQ ID NO: 2072257 - DNA, 15 bp, Homo sapiens
aataaaaaattacta

SEQ ID NO: 2072258 - DNA, 15 bp, Homo sapiens
ataaaaaattactag

SEQ ID NO: 2072259 - DNA, 15 bp, Homo sapiens
taaaaaattactagg

SEQ ID NO: 2072260 - DNA, 15 bp, Homo sapiens
aaaaaattactaggc

SEQ ID NO: 2072261 - DNA, 15 bp, Homo sapiens
aaaaattactaggca

SEQ ID NO: 2072262 - DNA, 15 bp, Homo sapiens
aaaattactaggcat

SEQ ID NO: 2072263 - DNA, 15 bp, Homo sapiens
aaattactaggcatg

SEQ ID NO: 2072264 - DNA, 15 bp, Homo sapiens
aattactaggcatgt

SEQ ID NO: 2072265 - DNA, 15 bp, Homo sapiens
attactaggcatgtg

SEQ ID NO: 2072266 - DNA, 15 bp, Homo sapiens
ttactaggcatgtga

SEQ ID NO: 2072267 - DNA, 15 bp, Homo sapiens
tactaggcatgtgaa

SEQ ID NO: 2072268 - DNA, 15 bp, Homo sapiens
actaggcatgtgaag

SEQ ID NO: 2072269 - DNA, 15 bp, Homo sapiens
ctaggcatgtgaaga

SEQ ID NO: 2072270 - DNA, 15 bp, Homo sapiens
taggcatgtgaagac

SEQ ID NO: 2072271 - DNA, 15 bp, Homo sapiens
aggcatgtgaagaca

SEQ ID NO: 2072272 - DNA, 15 bp, Homo sapiens
ggcatgtgaagacat

SEQ ID NO: 2072273 - DNA, 15 bp, Homo sapiens
gcatgtgaagacata

SEQ ID NO: 2072274 - DNA, 15 bp, Homo sapiens
catgtgaagacatag

SEQ ID NO: 2072275 - DNA, 15 bp, Homo sapiens
atgtgaagacataga

SEQ ID NO: 2072276 - DNA, 15 bp, Homo sapiens
tgtgaagacatagaa

SEQ ID NO: 2072277 - DNA, 15 bp, Homo sapiens
gtgaagacatagaag

SEQ ID NO: 2072278 - DNA, 15 bp, Homo sapiens
tgaagacatagaaga

SEQ ID NO: 2072279 - DNA, 15 bp, Homo sapiens
gaagacatagaagat

SEQ ID NO: 2072280 - DNA, 15 bp, Homo sapiens
aagacatagaagata

SEQ ID NO: 2072281 - DNA, 15 bp, Homo sapiens
agacatagaagataa

SEQ ID NO: 2072282 - DNA, 15 bp, Homo sapiens
gacatagaagataat

SEQ ID NO: 2072283 - DNA, 15 bp, Homo sapiens
acatagaagataatt

SEQ ID NO: 2072284 - DNA, 15 bp, Homo sapiens
catagaagataattt

SEQ ID NO: 2072285 - DNA, 15 bp, Homo sapiens
atagaagataatttc

SEQ ID NO: 2072286 - DNA, 15 bp, Homo sapiens
tagaagataatttcc

SEQ ID NO: 2072287 - DNA, 15 bp, Homo sapiens
agaagataatttcca

SEQ ID NO: 2072288 - DNA, 15 bp, Homo sapiens
gaagataatttccaa

SEQ ID NO: 2072289 - DNA, 15 bp, Homo sapiens
aagataatttccaaa

SEQ ID NO: 2072290 - DNA, 15 bp, Homo sapiens
agataatttccaaaa

SEQ ID NO: 2072291 - DNA, 15 bp, Homo sapiens
gataatttccaaaat

SEQ ID NO: 2072292 - DNA, 15 bp, Homo sapiens
ataatttccaaaatc

SEQ ID NO: 2072293 - DNA, 15 bp, Homo sapiens
taatttccaaaatca

SEQ ID NO: 2072294 - DNA, 15 bp, Homo sapiens
aatttccaaaatcag

SEQ ID NO: 2072295 - DNA, 15 bp, Homo sapiens
atttccaaaatcaga

SEQ ID NO: 2072296 - DNA, 15 bp, Homo sapiens
tttccaaaatcagaa

SEQ ID NO: 2072297 - DNA, 15 bp, Homo sapiens
ttccaaaatcagaag

SEQ ID NO: 2072298 - DNA, 15 bp, Homo sapiens
tccaaaatcagaaga

SEQ ID NO: 2072299 - DNA, 15 bp, Homo sapiens
ccaaaatcagaagag

SEQ ID NO: 2072300 - DNA, 15 bp, Homo sapiens
caaaatcagaagaga

SEQ ID NO: 2072301 - DNA, 15 bp, Homo sapiens
aaaatcagaagagaa

SEQ ID NO: 2072302 - DNA, 15 bp, Homo sapiens
aaatcagaagagaat

SEQ ID NO: 2072303 - DNA, 15 bp, Homo sapiens
aatcagaagagaatg

SEQ ID NO: 2072304 - DNA, 15 bp, Homo sapiens
atcagaagagaatgc

SEQ ID NO: 2072305 - DNA, 15 bp, Homo sapiens
tcagaagagaatgca

SEQ ID NO: 2072306 - DNA, 15 bp, Homo sapiens
cagaagagaatgcag

SEQ ID NO: 2072307 - DNA, 15 bp, Homo sapiens
agaagagaatgcagt

SEQ ID NO: 2072308 - DNA, 15 bp, Homo sapiens
gaagagaatgcagtc

SEQ ID NO: 2072309 - DNA, 15 bp, Homo sapiens
aagagaatgcagtca

SEQ ID NO: 2072310 - DNA, 15 bp, Homo sapiens
agagaatgcagtcaa

SEQ ID NO: 2072311 - DNA, 15 bp, Homo sapiens
gagaatgcagtcaat

SEQ ID NO: 2072312 - DNA, 15 bp, Homo sapiens
agaatgcagtcaata

SEQ ID NO: 2072313 - DNA, 15 bp, Homo sapiens
gaatgcagtcaatag

SEQ ID NO: 2072314 - DNA, 15 bp, Homo sapiens
aatgcagtcaataga

SEQ ID NO: 2072315 - DNA, 15 bp, Homo sapiens
atgcagtcaatagaa

SEQ ID NO: 2072316 - DNA, 15 bp, Homo sapiens
tgcagtcaatagaag

SEQ ID NO: 2072317 - DNA, 15 bp, Homo sapiens
gcagtcaatagaagc

SEQ ID NO: 2072318 - DNA, 15 bp, Homo sapiens
cagtcaatagaagca

SEQ ID NO: 2072319 - DNA, 15 bp, Homo sapiens
agtcaatagaagcaa

SEQ ID NO: 2072320 - DNA, 15 bp, Homo sapiens
gtcaatagaagcaaa

SEQ ID NO: 2072321 - DNA, 15 bp, Homo sapiens
tcaatagaagcaaat

SEQ ID NO: 2072322 - DNA, 15 bp, Homo sapiens
caatagaagcaaatc

SEQ ID NO: 2072323 - DNA, 15 bp, Homo sapiens
aatagaagcaaatct

SEQ ID NO: 2072324 - DNA, 15 bp, Homo sapiens
atagaagcaaatctc

SEQ ID NO: 2072325 - DNA, 15 bp, Homo sapiens
tagaagcaaatctcc

SEQ ID NO: 2072326 - DNA, 15 bp, Homo sapiens
agaagcaaatctcca

SEQ ID NO: 2072327 - DNA, 15 bp, Homo sapiens
gaagcaaatctccag

SEQ ID NO: 2072328 - DNA, 15 bp, Homo sapiens
aagcaaatctccagg

SEQ ID NO: 2072329 - DNA, 15 bp, Homo sapiens
agcaaatctccaggt

SEQ ID NO: 2072330 - DNA, 15 bp, Homo sapiens
gcaaatctccaggtt

SEQ ID NO: 2072331 - DNA, 15 bp, Homo sapiens
caaatctccaggttt

SEQ ID NO: 2072332 - DNA, 15 bp, Homo sapiens
aaatctccaggtttg

SEQ ID NO: 2072333 - DNA, 15 bp, Homo sapiens
aatctccaggtttgg

SEQ ID NO: 2072334 - DNA, 15 bp, Homo sapiens
atctccaggtttgga

SEQ ID NO: 2072335 - DNA, 15 bp, Homo sapiens
tctccaggtttggaa

SEQ ID NO: 2072336 - DNA, 15 bp, Homo sapiens
ctccaggtttggaat

SEQ ID NO: 2072337 - DNA, 15 bp, Homo sapiens
tccaggtttggaatt

SEQ ID NO: 2072338 - DNA, 15 bp, Homo sapiens
ccaggtttggaatta

SEQ ID NO: 2072339 - DNA, 15 bp, Homo sapiens
caggtttggaattag

SEQ ID NO: 2072340 - DNA, 15 bp, Homo sapiens
aggtttggaattagc

SEQ ID NO: 2072341 - DNA, 15 bp, Homo sapiens
ggtttggaattagca

SEQ ID NO: 2072342 - DNA, 15 bp, Homo sapiens
gtttggaattagcag

SEQ ID NO: 2072343 - DNA, 15 bp, Homo sapiens
tttggaattagcaga

SEQ ID NO: 2072344 - DNA, 15 bp, Homo sapiens
ttggaattagcagaa

SEQ ID NO: 2072345 - DNA, 15 bp, Homo sapiens
tggaattagcagaaa

SEQ ID NO: 2072346 - DNA, 15 bp, Homo sapiens
ggaattagcagaaaa

SEQ ID NO: 2072347 - DNA, 15 bp, Homo sapiens
gaattagcagaaaag

SEQ ID NO: 2072348 - DNA, 15 bp, Homo sapiens
aattagcagaaaagt

SEQ ID NO: 2072349 - DNA, 15 bp, Homo sapiens
attagcagaaaagta

SEQ ID NO: 2072350 - DNA, 15 bp, Homo sapiens
ttagcagaaaagtac

SEQ ID NO: 2072351 - DNA, 15 bp, Homo sapiens
tagcagaaaagtaca

SEQ ID NO: 2072352 - DNA, 15 bp, Homo sapiens
agcagaaaagtacat

SEQ ID NO: 2072353 - DNA, 15 bp, Homo sapiens
gcagaaaagtacatt

SEQ ID NO: 2072354 - DNA, 15 bp, Homo sapiens
cagaaaagtacattt

SEQ ID NO: 2072355 - DNA, 15 bp, Homo sapiens
agaaaagtacattta

SEQ ID NO: 2072356 - DNA, 15 bp, Homo sapiens
gaaaagtacatttaa

SEQ ID NO: 2072357 - DNA, 15 bp, Homo sapiens
aaaagtacatttaaa

SEQ ID NO: 2072358 - DNA, 15 bp, Homo sapiens
aaagtacatttaaag

SEQ ID NO: 2072359 - DNA, 15 bp, Homo sapiens
aagtacatttaaaga

SEQ ID NO: 2072360 - DNA, 15 bp, Homo sapiens
agtacatttaaagag

SEQ ID NO: 2072361 - DNA, 15 bp, Homo sapiens
gtacatttaaagagg

SEQ ID NO: 2072362 - DNA, 15 bp, Homo sapiens
tacatttaaagaggt

SEQ ID NO: 2072363 - DNA, 15 bp, Homo sapiens
acatttaaagaggta

SEQ ID NO: 2072364 - DNA, 15 bp, Homo sapiens
catttaaagaggtat

SEQ ID NO: 2072365 - DNA, 15 bp, Homo sapiens
atttaaagaggtata

SEQ ID NO: 2072366 - DNA, 15 bp, Homo sapiens
tttaaagaggtatat

SEQ ID NO: 2072367 - DNA, 15 bp, Homo sapiens
ttaaagaggtatata

SEQ ID NO: 2072368 - DNA, 15 bp, Homo sapiens
taaagaggtatatat

SEQ ID NO: 2072369 - DNA, 15 bp, Homo sapiens
aaagaggtatatata

SEQ ID NO: 2072370 - DNA, 15 bp, Homo sapiens
aagaggtatatatat

SEQ ID NO: 2072371 - DNA, 15 bp, Homo sapiens
agaggtatatatata

SEQ ID NO: 2072372 - DNA, 15 bp, Homo sapiens
gaggtatatatatat

SEQ ID NO: 2072373 - DNA, 15 bp, Homo sapiens
aggtatatatatata

SEQ ID NO: 2072374 - DNA, 15 bp, Homo sapiens
ggtatatatatatat

SEQ ID NO: 2072375 - DNA, 15 bp, Homo sapiens
gtatatatatatata

SEQ ID NO: 2072376 - DNA, 15 bp, Homo sapiens
atatatatatattcg

SEQ ID NO: 2072377 - DNA, 15 bp, Homo sapiens
tatatatatattcga

SEQ ID NO: 2072378 - DNA, 15 bp, Homo sapiens
atatatatattcgaa

SEQ ID NO: 2072379 - DNA, 15 bp, Homo sapiens
tatatatattcgaag

SEQ ID NO: 2072380 - DNA, 15 bp, Homo sapiens
atatatattcgaaga

SEQ ID NO: 2072381 - DNA, 15 bp, Homo sapiens
tatatattcgaagac

SEQ ID NO: 2072382 - DNA, 15 bp, Homo sapiens
atatattcgaagaca

SEQ ID NO: 2072383 - DNA, 15 bp, Homo sapiens
tatattcgaagacaa

SEQ ID NO: 2072384 - DNA, 15 bp, Homo sapiens
atattcgaagacaaa

SEQ ID NO: 2072385 - DNA, 15 bp, Homo sapiens
tattcgaagacaaat

SEQ ID NO: 2072386 - DNA, 15 bp, Homo sapiens
attcgaagacaaatt

SEQ ID NO: 2072387 - DNA, 15 bp, Homo sapiens
ttcgaagacaaatta

SEQ ID NO: 2072388 - DNA, 15 bp, Homo sapiens
tcgaagacaaattaa

SEQ ID NO: 2072389 - DNA, 15 bp, Homo sapiens
cgaagacaaattaaa

SEQ ID NO: 2072390 - DNA, 15 bp, Homo sapiens
gaagacaaattaaaa

SEQ ID NO: 2072391 - DNA, 15 bp, Homo sapiens
aagacaaattaaaat

SEQ ID NO: 2072392 - DNA, 15 bp, Homo sapiens
agacaaattaaaata

SEQ ID NO: 2072393 - DNA, 15 bp, Homo sapiens
gacaaattaaaatat

SEQ ID NO: 2072394 - DNA, 15 bp, Homo sapiens
acaaattaaaatatg

SEQ ID NO: 2072395 - DNA, 15 bp, Homo sapiens
caaattaaaatatgt

SEQ ID NO: 2072396 - DNA, 15 bp, Homo sapiens
aaattaaaatatgtc

SEQ ID NO: 2072397 - DNA, 15 bp, Homo sapiens
aattaaaatatgtca

SEQ ID NO: 2072398 - DNA, 15 bp, Homo sapiens
attaaaatatgtcaa

SEQ ID NO: 2072399 - DNA, 15 bp, Homo sapiens
ttaaaatatgtcaat

SEQ ID NO: 2072400 - DNA, 15 bp, Homo sapiens
taaaatatgtcaata

SEQ ID NO: 2072401 - DNA, 15 bp, Homo sapiens
aaaatatgtcaataa

SEQ ID NO: 2072402 - DNA, 15 bp, Homo sapiens
aaatatgtcaataac

SEQ ID NO: 2072403 - DNA, 15 bp, Homo sapiens
aatatgtcaataact

SEQ ID NO: 2072404 - DNA, 15 bp, Homo sapiens
atatgtcaataactg

SEQ ID NO: 2072405 - DNA, 15 bp, Homo sapiens
tatgtcaataactga

SEQ ID NO: 2072406 - DNA, 15 bp, Homo sapiens
atgtcaataactgaa

SEQ ID NO: 2072407 - DNA, 15 bp, Homo sapiens
tgtcaataactgaac

SEQ ID NO: 2072408 - DNA, 15 bp, Homo sapiens
gtcaataactgaaca

SEQ ID NO: 2072409 - DNA, 15 bp, Homo sapiens
tcaataactgaacaa

SEQ ID NO: 2072410 - DNA, 15 bp, Homo sapiens
caataactgaacaaa

SEQ ID NO: 2072411 - DNA, 15 bp, Homo sapiens
aataactgaacaaat

SEQ ID NO: 2072412 - DNA, 15 bp, Homo sapiens
ataactgaacaaatt

SEQ ID NO: 2072413 - DNA, 15 bp, Homo sapiens
taactgaacaaattg

SEQ ID NO: 2072414 - DNA, 15 bp, Homo sapiens
aactgaacaaattgg

SEQ ID NO: 2072415 - DNA, 15 bp, Homo sapiens
actgaacaaattggg

SEQ ID NO: 2072416 - DNA, 15 bp, Homo sapiens
ctgaacaaattgggg

SEQ ID NO: 2072417 - DNA, 15 bp, Homo sapiens
tgaacaaattgggga

SEQ ID NO: 2072418 - DNA, 15 bp, Homo sapiens
gaacaaattggggaa

SEQ ID NO: 2072419 - DNA, 15 bp, Homo sapiens
aacaaattggggaac

SEQ ID NO: 2072420 - DNA, 15 bp, Homo sapiens
acaaattggggaact

SEQ ID NO: 2072421 - DNA, 15 bp, Homo sapiens
caaattggggaactc

SEQ ID NO: 2072422 - DNA, 15 bp, Homo sapiens
aaattggggaactct

SEQ ID NO: 2072423 - DNA, 15 bp, Homo sapiens
aattggggaactcta

SEQ ID NO: 2072424 - DNA, 15 bp, Homo sapiens
attggggaactctat

SEQ ID NO: 2072425 - DNA, 15 bp, Homo sapiens
ttggggaactctatc

SEQ ID NO: 2072426 - DNA, 15 bp, Homo sapiens
tggggaactctatca

SEQ ID NO: 2072427 - DNA, 15 bp, Homo sapiens
ggggaactctatcag

SEQ ID NO: 2072428 - DNA, 15 bp, Homo sapiens
gggaactctatcaga

SEQ ID NO: 2072429 - DNA, 15 bp, Homo sapiens
ggaactctatcagag

SEQ ID NO: 2072430 - DNA, 15 bp, Homo sapiens
gaactctatcagaga

SEQ ID NO: 2072431 - DNA, 15 bp, Homo sapiens
aactctatcagagaa

SEQ ID NO: 2072432 - DNA, 15 bp, Homo sapiens
actctatcagagaaa

SEQ ID NO: 2072433 - DNA, 15 bp, Homo sapiens
ctctatcagagaaat

SEQ ID NO: 2072434 - DNA, 15 bp, Homo sapiens
tctatcagagaaatg

SEQ ID NO: 2072435 - DNA, 15 bp, Homo sapiens
ctatcagagaaatgg

SEQ ID NO: 2072436 - DNA, 15 bp, Homo sapiens
tatcagagaaatgga

SEQ ID NO: 2072437 - DNA, 15 bp, Homo sapiens
atcagagaaatggaa

SEQ ID NO: 2072438 - DNA, 15 bp, Homo sapiens
tcagagaaatggaag

SEQ ID NO: 2072439 - DNA, 15 bp, Homo sapiens
cagagaaatggaagc

SEQ ID NO: 2072440 - DNA, 15 bp, Homo sapiens
agagaaatggaagct

SEQ ID NO: 2072441 - DNA, 15 bp, Homo sapiens
gagaaatggaagcta

SEQ ID NO: 2072442 - DNA, 15 bp, Homo sapiens
agaaatggaagctat

SEQ ID NO: 2072443 - DNA, 15 bp, Homo sapiens
gaaatggaagctatt

SEQ ID NO: 2072444 - DNA, 15 bp, Homo sapiens
aaatggaagctattt

SEQ ID NO: 2072445 - DNA, 15 bp, Homo sapiens
aatggaagctatttt

SEQ ID NO: 2072446 - DNA, 15 bp, Homo sapiens
atggaagctatttta

SEQ ID NO: 2072447 - DNA, 15 bp, Homo sapiens
tggaagctattttaa

SEQ ID NO: 2072448 - DNA, 15 bp, Homo sapiens
ggaagctattttaaa

SEQ ID NO: 2072449 - DNA, 15 bp, Homo sapiens
gaagctattttaaaa

SEQ ID NO: 2072450 - DNA, 15 bp, Homo sapiens
aagctattttaaaaa

SEQ ID NO: 2072451 - DNA, 15 bp, Homo sapiens
agctattttaaaaat

SEQ ID NO: 2072452 - DNA, 15 bp, Homo sapiens
gctattttaaaaatg

SEQ ID NO: 2072453 - DNA, 15 bp, Homo sapiens
ctattttaaaaatga

SEQ ID NO: 2072454 - DNA, 15 bp, Homo sapiens
tattttaaaaatgaa

SEQ ID NO: 2072455 - DNA, 15 bp, Homo sapiens
attttaaaaatgaat

SEQ ID NO: 2072456 - DNA, 15 bp, Homo sapiens
ttttaaaaatgaatt

SEQ ID NO: 2072457 - DNA, 15 bp, Homo sapiens
tttaaaaatgaattg

SEQ ID NO: 2072458 - DNA, 15 bp, Homo sapiens
ttaaaaatgaattga

SEQ ID NO: 2072459 - DNA, 15 bp, Homo sapiens
taaaaatgaattgaa

SEQ ID NO: 2072460 - DNA, 15 bp, Homo sapiens
aaaaatgaattgaaa

SEQ ID NO: 2072461 - DNA, 15 bp, Homo sapiens
aaaatgaattgaaaa

SEQ ID NO: 2072462 - DNA, 15 bp, Homo sapiens
aaatgaattgaaaat

SEQ ID NO: 2072463 - DNA, 15 bp, Homo sapiens
aatgaattgaaaatt

SEQ ID NO: 2072464 - DNA, 15 bp, Homo sapiens
atgaattgaaaattc

SEQ ID NO: 2072465 - DNA, 15 bp, Homo sapiens
tgaattgaaaattct

SEQ ID NO: 2072466 - DNA, 15 bp, Homo sapiens
gaattgaaaattctc

SEQ ID NO: 2072467 - DNA, 15 bp, Homo sapiens
aattgaaaattctct

SEQ ID NO: 2072468 - DNA, 15 bp, Homo sapiens
attgaaaattctcta

SEQ ID NO: 2072469 - DNA, 15 bp, Homo sapiens
ttgaaaattctctaa

SEQ ID NO: 2072470 - DNA, 15 bp, Homo sapiens
tgaaaattctctaaa

SEQ ID NO: 2072471 - DNA, 15 bp, Homo sapiens
gaaaattctctaaag

SEQ ID NO: 2072472 - DNA, 15 bp, Homo sapiens
aaaattctctaaaga

SEQ ID NO: 2072473 - DNA, 15 bp, Homo sapiens
aaattctctaaagag

SEQ ID NO: 2072474 - DNA, 15 bp, Homo sapiens
aattctctaaagagc

SEQ ID NO: 2072475 - DNA, 15 bp, Homo sapiens
attctctaaagagct

SEQ ID NO: 2072476 - DNA, 15 bp, Homo sapiens
ttctctaaagagcta

SEQ ID NO: 2072477 - DNA, 15 bp, Homo sapiens
tctctaaagagctat

SEQ ID NO: 2072478 - DNA, 15 bp, Homo sapiens
ctctaaagagctata

SEQ ID NO: 2072479 - DNA, 15 bp, Homo sapiens
tctaaagagctatag

SEQ ID NO: 2072480 - DNA, 15 bp, Homo sapiens
ctaaagagctatagc

SEQ ID NO: 2072481 - DNA, 15 bp, Homo sapiens
taaagagctatagcg

SEQ ID NO: 2072482 - DNA, 15 bp, Homo sapiens
aaagagctatagcgt

SEQ ID NO: 2072483 - DNA, 15 bp, Homo sapiens
aagagctatagcgtc

SEQ ID NO: 2072484 - DNA, 15 bp, Homo sapiens
agagctatagcgtct

SEQ ID NO: 2072485 - DNA, 15 bp, Homo sapiens
gagctatagcgtctg

SEQ ID NO: 2072486 - DNA, 15 bp, Homo sapiens
agctatagcgtctga

SEQ ID NO: 2072487 - DNA, 15 bp, Homo sapiens
gctatagcgtctgaa

SEQ ID NO: 2072488 - DNA, 15 bp, Homo sapiens
ctatagcgtctgaaa

SEQ ID NO: 2072489 - DNA, 15 bp, Homo sapiens
tatagcgtctgaaat

SEQ ID NO: 2072490 - DNA, 15 bp, Homo sapiens
atagcgtctgaaatg

SEQ ID NO: 2072491 - DNA, 15 bp, Homo sapiens
tagcgtctgaaatgg

SEQ ID NO: 2072492 - DNA, 15 bp, Homo sapiens
agcgtctgaaatgga

SEQ ID NO: 2072493 - DNA, 15 bp, Homo sapiens
gcgtctgaaatggaa

SEQ ID NO: 2072494 - DNA, 15 bp, Homo sapiens
cgtctgaaatggaaa

SEQ ID NO: 2072495 - DNA, 15 bp, Homo sapiens
gtctgaaatggaaaa

SEQ ID NO: 2072496 - DNA, 15 bp, Homo sapiens
tctgaaatggaaaag

SEQ ID NO: 2072497 - DNA, 15 bp, Homo sapiens
ctgaaatggaaaaga

SEQ ID NO: 2072498 - DNA, 15 bp, Homo sapiens
tgaaatggaaaagaa

SEQ ID NO: 2072499 - DNA, 15 bp, Homo sapiens
gaaatggaaaagaaa

SEQ ID NO: 2072500 - DNA, 15 bp, Homo sapiens
aaatggaaaagaaaa

SEQ ID NO: 2072501 - DNA, 15 bp, Homo sapiens
aatggaaaagaaaaa

SEQ ID NO: 2072502 - DNA, 15 bp, Homo sapiens
atggaaaagaaaaat

SEQ ID NO: 2072503 - DNA, 15 bp, Homo sapiens
tggaaaagaaaaatc

SEQ ID NO: 2072504 - DNA, 15 bp, Homo sapiens
ggaaaagaaaaatct

SEQ ID NO: 2072505 - DNA, 15 bp, Homo sapiens
gaaaagaaaaatctc

SEQ ID NO: 2072506 - DNA, 15 bp, Homo sapiens
aaaagaaaaatctct

SEQ ID NO: 2072507 - DNA, 15 bp, Homo sapiens
aaagaaaaatctctg

SEQ ID NO: 2072508 - DNA, 15 bp, Homo sapiens
aagaaaaatctctgg

SEQ ID NO: 2072509 - DNA, 15 bp, Homo sapiens
agaaaaatctctggg

SEQ ID NO: 2072510 - DNA, 15 bp, Homo sapiens
gaaaaatctctggga

SEQ ID NO: 2072511 - DNA, 15 bp, Homo sapiens
aaaaatctctgggat

SEQ ID NO: 2072512 - DNA, 15 bp, Homo sapiens
aaaatctctgggatg

SEQ ID NO: 2072513 - DNA, 15 bp, Homo sapiens
aaatctctgggatga

SEQ ID NO: 2072514 - DNA, 15 bp, Homo sapiens
aatctctgggatgag

SEQ ID NO: 2072515 - DNA, 15 bp, Homo sapiens
atctctgggatgagc

SEQ ID NO: 2072516 - DNA, 15 bp, Homo sapiens
tctctgggatgagct

SEQ ID NO: 2072517 - DNA, 15 bp, Homo sapiens
ctctgggatgagctg

SEQ ID NO: 2072518 - DNA, 15 bp, Homo sapiens
tctgggatgagctga

SEQ ID NO: 2072519 - DNA, 15 bp, Homo sapiens
ctgggatgagctgaa

SEQ ID NO: 2072520 - DNA, 15 bp, Homo sapiens
tgggatgagctgaaa

SEQ ID NO: 2072521 - DNA, 15 bp, Homo sapiens
gggatgagctgaaag

SEQ ID NO: 2072522 - DNA, 15 bp, Homo sapiens
ggatgagctgaaaga

SEQ ID NO: 2072523 - DNA, 15 bp, Homo sapiens
gatgagctgaaagaa

SEQ ID NO: 2072524 - DNA, 15 bp, Homo sapiens
atgagctgaaagaag

SEQ ID NO: 2072525 - DNA, 15 bp, Homo sapiens
tgagctgaaagaaga

SEQ ID NO: 2072526 - DNA, 15 bp, Homo sapiens
gagctgaaagaagat

SEQ ID NO: 2072527 - DNA, 15 bp, Homo sapiens
agctgaaagaagatt

SEQ ID NO: 2072528 - DNA, 15 bp, Homo sapiens
gctgaaagaagattg

SEQ ID NO: 2072529 - DNA, 15 bp, Homo sapiens
ctgaaagaagattgg

SEQ ID NO: 2072530 - DNA, 15 bp, Homo sapiens
tgaaagaagattggc

SEQ ID NO: 2072531 - DNA, 15 bp, Homo sapiens
gaaagaagattggcg

SEQ ID NO: 2072532 - DNA, 15 bp, Homo sapiens
aaagaagattggcga

SEQ ID NO: 2072533 - DNA, 15 bp, Homo sapiens
aagaagattggcgac

SEQ ID NO: 2072534 - DNA, 15 bp, Homo sapiens
agaagattggcgaca

SEQ ID NO: 2072535 - DNA, 15 bp, Homo sapiens
gaagattggcgacag

SEQ ID NO: 2072536 - DNA, 15 bp, Homo sapiens
aagattggcgacagc

SEQ ID NO: 2072537 - DNA, 15 bp, Homo sapiens
agattggcgacagca

SEQ ID NO: 2072538 - DNA, 15 bp, Homo sapiens
gattggcgacagcag

SEQ ID NO: 2072539 - DNA, 15 bp, Homo sapiens
attggcgacagcaga

SEQ ID NO: 2072540 - DNA, 15 bp, Homo sapiens
ttggcgacagcagaa

SEQ ID NO: 2072541 - DNA, 15 bp, Homo sapiens
tggcgacagcagaag

SEQ ID NO: 2072542 - DNA, 15 bp, Homo sapiens
ggcgacagcagaaga

SEQ ID NO: 2072543 - DNA, 15 bp, Homo sapiens
gcgacagcagaagag

SEQ ID NO: 2072544 - DNA, 15 bp, Homo sapiens
cgacagcagaagagc

SEQ ID NO: 2072545 - DNA, 15 bp, Homo sapiens
gacagcagaagagcc

SEQ ID NO: 2072546 - DNA, 15 bp, Homo sapiens
acagcagaagagcca

SEQ ID NO: 2072547 - DNA, 15 bp, Homo sapiens
cagcagaagagccaa

SEQ ID NO: 2072548 - DNA, 15 bp, Homo sapiens
agcagaagagccaac

SEQ ID NO: 2072549 - DNA, 15 bp, Homo sapiens
gcagaagagccaact

SEQ ID NO: 2072550 - DNA, 15 bp, Homo sapiens
cagaagagccaactt

SEQ ID NO: 2072551 - DNA, 15 bp, Homo sapiens
agaagagccaacttg

SEQ ID NO: 2072552 - DNA, 15 bp, Homo sapiens
gaagagccaacttga

SEQ ID NO: 2072553 - DNA, 15 bp, Homo sapiens
aagagccaacttgaa

SEQ ID NO: 2072554 - DNA, 15 bp, Homo sapiens
agagccaacttgaat

SEQ ID NO: 2072555 - DNA, 15 bp, Homo sapiens
gagccaacttgaata

SEQ ID NO: 2072556 - DNA, 15 bp, Homo sapiens
agccaacttgaatat

SEQ ID NO: 2072557 - DNA, 15 bp, Homo sapiens
gccaacttgaatata

SEQ ID NO: 2072558 - DNA, 15 bp, Homo sapiens
ccaacttgaatatag

SEQ ID NO: 2072559 - DNA, 15 bp, Homo sapiens
caacttgaatataga

SEQ ID NO: 2072560 - DNA, 15 bp, Homo sapiens
aacttgaatatagaa

SEQ ID NO: 2072561 - DNA, 15 bp, Homo sapiens
acttgaatatagaat

SEQ ID NO: 2072562 - DNA, 15 bp, Homo sapiens
cttgaatatagaatt

SEQ ID NO: 2072563 - DNA, 15 bp, Homo sapiens
ttgaatatagaattt

SEQ ID NO: 2072564 - DNA, 15 bp, Homo sapiens
tgaatatagaattta

SEQ ID NO: 2072565 - DNA, 15 bp, Homo sapiens
gaatatagaatttat

SEQ ID NO: 2072566 - DNA, 15 bp, Homo sapiens
aatatagaatttatc

SEQ ID NO: 2072567 - DNA, 15 bp, Homo sapiens
atatagaatttatcc

SEQ ID NO: 2072568 - DNA, 15 bp, Homo sapiens
tatagaatttatcca

SEQ ID NO: 2072569 - DNA, 15 bp, Homo sapiens
atagaatttatccag

SEQ ID NO: 2072570 - DNA, 15 bp, Homo sapiens
tagaatttatccagt

SEQ ID NO: 2072571 - DNA, 15 bp, Homo sapiens
agaatttatccagtc

SEQ ID NO: 2072572 - DNA, 15 bp, Homo sapiens
gaatttatccagtct

SEQ ID NO: 2072573 - DNA, 15 bp, Homo sapiens
aatttatccagtctg

SEQ ID NO: 2072574 - DNA, 15 bp, Homo sapiens
atttatccagtctga

SEQ ID NO: 2072575 - DNA, 15 bp, Homo sapiens
tttatccagtctgag

SEQ ID NO: 2072576 - DNA, 15 bp, Homo sapiens
ttatccagtctgaga

SEQ ID NO: 2072577 - DNA, 15 bp, Homo sapiens
tatccagtctgagaa

SEQ ID NO: 2072578 - DNA, 15 bp, Homo sapiens
atccagtctgagaag

SEQ ID NO: 2072579 - DNA, 15 bp, Homo sapiens
tccagtctgagaagc

SEQ ID NO: 2072580 - DNA, 15 bp, Homo sapiens
ccagtctgagaagca

SEQ ID NO: 2072581 - DNA, 15 bp, Homo sapiens
cagtctgagaagcag

SEQ ID NO: 2072582 - DNA, 15 bp, Homo sapiens
agtctgagaagcaga

SEQ ID NO: 2072583 - DNA, 15 bp, Homo sapiens
gtctgagaagcagaa

SEQ ID NO: 2072584 - DNA, 15 bp, Homo sapiens
tctgagaagcagaag

SEQ ID NO: 2072585 - DNA, 15 bp, Homo sapiens
ctgagaagcagaagg

SEQ ID NO: 2072586 - DNA, 15 bp, Homo sapiens
tgagaagcagaagga

SEQ ID NO: 2072587 - DNA, 15 bp, Homo sapiens
gagaagcagaaggaa

SEQ ID NO: 2072588 - DNA, 15 bp, Homo sapiens
agaagcagaaggaat

SEQ ID NO: 2072589 - DNA, 15 bp, Homo sapiens
gaagcagaaggaata

SEQ ID NO: 2072590 - DNA, 15 bp, Homo sapiens
aagcagaaggaataa

SEQ ID NO: 2072591 - DNA, 15 bp, Homo sapiens
agcagaaggaataaa

SEQ ID NO: 2072592 - DNA, 15 bp, Homo sapiens
gcagaaggaataaaa

SEQ ID NO: 2072593 - DNA, 15 bp, Homo sapiens
cagaaggaataaaaa

SEQ ID NO: 2072594 - DNA, 15 bp, Homo sapiens
agaaggaataaaaat

SEQ ID NO: 2072595 - DNA, 15 bp, Homo sapiens
gaaggaataaaaatt

SEQ ID NO: 2072596 - DNA, 15 bp, Homo sapiens
aaggaataaaaatta

SEQ ID NO: 2072597 - DNA, 15 bp, Homo sapiens
aggaataaaaattaa

SEQ ID NO: 2072598 - DNA, 15 bp, Homo sapiens
ggaataaaaattaaa

SEQ ID NO: 2072599 - DNA, 15 bp, Homo sapiens
gaataaaaattaaaa

SEQ ID NO: 2072600 - DNA, 15 bp, Homo sapiens
aaattaaaaacaaaa

SEQ ID NO: 2072601 - DNA, 15 bp, Homo sapiens
aattaaaaacaaaaa

SEQ ID NO: 2072602 - DNA, 15 bp, Homo sapiens
taaaaacaaaaacag

SEQ ID NO: 2072603 - DNA, 15 bp, Homo sapiens
aaaaacaaaaacagc

SEQ ID NO: 2072604 - DNA, 15 bp, Homo sapiens
aaaacaaaaacagcc

SEQ ID NO: 2072605 - DNA, 15 bp, Homo sapiens
aaacaaaaacagccc

SEQ ID NO: 2072606 - DNA, 15 bp, Homo sapiens
aacaaaaacagcccc

SEQ ID NO: 2072607 - DNA, 15 bp, Homo sapiens
acaaaaacagcccca

SEQ ID NO: 2072608 - DNA, 15 bp, Homo sapiens
caaaaacagccccag

SEQ ID NO: 2072609 - DNA, 15 bp, Homo sapiens
aaaaacagccccagt

SEQ ID NO: 2072610 - DNA, 15 bp, Homo sapiens
aaaacagccccagtg

SEQ ID NO: 2072611 - DNA, 15 bp, Homo sapiens
aaacagccccagtga

SEQ ID NO: 2072612 - DNA, 15 bp, Homo sapiens
aacagccccagtgat

SEQ ID NO: 2072613 - DNA, 15 bp, Homo sapiens
acagccccagtgatc

SEQ ID NO: 2072614 - DNA, 15 bp, Homo sapiens
cagccccagtgatct

SEQ ID NO: 2072615 - DNA, 15 bp, Homo sapiens
agccccagtgatctg

SEQ ID NO: 2072616 - DNA, 15 bp, Homo sapiens
gccccagtgatctgt

SEQ ID NO: 2072617 - DNA, 15 bp, Homo sapiens
ccccagtgatctgtg

SEQ ID NO: 2072618 - DNA, 15 bp, Homo sapiens
cccagtgatctgtgg

SEQ ID NO: 2072619 - DNA, 15 bp, Homo sapiens
ccagtgatctgtggg

SEQ ID NO: 2072620 - DNA, 15 bp, Homo sapiens
cagtgatctgtggga

SEQ ID NO: 2072621 - DNA, 15 bp, Homo sapiens
agtgatctgtgggac

SEQ ID NO: 2072622 - DNA, 15 bp, Homo sapiens
gtgatctgtgggaca

SEQ ID NO: 2072623 - DNA, 15 bp, Homo sapiens
tgatctgtgggacaa

SEQ ID NO: 2072624 - DNA, 15 bp, Homo sapiens
gatctgtgggacaat

SEQ ID NO: 2072625 - DNA, 15 bp, Homo sapiens
atctgtgggacaata

SEQ ID NO: 2072626 - DNA, 15 bp, Homo sapiens
tctgtgggacaatat

SEQ ID NO: 2072627 - DNA, 15 bp, Homo sapiens
ctgtgggacaatatc

SEQ ID NO: 2072628 - DNA, 15 bp, Homo sapiens
tgtgggacaatatca

SEQ ID NO: 2072629 - DNA, 15 bp, Homo sapiens
gtgggacaatatcaa

SEQ ID NO: 2072630 - DNA, 15 bp, Homo sapiens
tgggacaatatcaaa

SEQ ID NO: 2072631 - DNA, 15 bp, Homo sapiens
gggacaatatcaaat

SEQ ID NO: 2072632 - DNA, 15 bp, Homo sapiens
ggacaatatcaaatg

SEQ ID NO: 2072633 - DNA, 15 bp, Homo sapiens
gacaatatcaaatga

SEQ ID NO: 2072634 - DNA, 15 bp, Homo sapiens
acaatatcaaatgat

SEQ ID NO: 2072635 - DNA, 15 bp, Homo sapiens
caatatcaaatgatc

SEQ ID NO: 2072636 - DNA, 15 bp, Homo sapiens
aatatcaaatgatca

SEQ ID NO: 2072637 - DNA, 15 bp, Homo sapiens
atatcaaatgatcag

SEQ ID NO: 2072638 - DNA, 15 bp, Homo sapiens
tatcaaatgatcaga

SEQ ID NO: 2072639 - DNA, 15 bp, Homo sapiens
atcaaatgatcagaa

SEQ ID NO: 2072640 - DNA, 15 bp, Homo sapiens
tcaaatgatcagaaa

SEQ ID NO: 2072641 - DNA, 15 bp, Homo sapiens
caaatgatcagaaac

SEQ ID NO: 2072642 - DNA, 15 bp, Homo sapiens
aaatgatcagaaaca

SEQ ID NO: 2072643 - DNA, 15 bp, Homo sapiens
aatgatcagaaacat

SEQ ID NO: 2072644 - DNA, 15 bp, Homo sapiens
atgatcagaaacata

SEQ ID NO: 2072645 - DNA, 15 bp, Homo sapiens
tgatcagaaacataa

SEQ ID NO: 2072646 - DNA, 15 bp, Homo sapiens
gatcagaaacataaa

SEQ ID NO: 2072647 - DNA, 15 bp, Homo sapiens
atcagaaacataaag

SEQ ID NO: 2072648 - DNA, 15 bp, Homo sapiens
tcagaaacataaagc

SEQ ID NO: 2072649 - DNA, 15 bp, Homo sapiens
cagaaacataaagca

SEQ ID NO: 2072650 - DNA, 15 bp, Homo sapiens
agaaacataaagcaa

SEQ ID NO: 2072651 - DNA, 15 bp, Homo sapiens
gaaacataaagcaaa

SEQ ID NO: 2072652 - DNA, 15 bp, Homo sapiens
aaacataaagcaaat

SEQ ID NO: 2072653 - DNA, 15 bp, Homo sapiens
aacataaagcaaatt

SEQ ID NO: 2072654 - DNA, 15 bp, Homo sapiens
acataaagcaaattt

SEQ ID NO: 2072655 - DNA, 15 bp, Homo sapiens
cataaagcaaattta

SEQ ID NO: 2072656 - DNA, 15 bp, Homo sapiens
ataaagcaaatttat

SEQ ID NO: 2072657 - DNA, 15 bp, Homo sapiens
taaagcaaatttatt

SEQ ID NO: 2072658 - DNA, 15 bp, Homo sapiens
aaagcaaatttattt

SEQ ID NO: 2072659 - DNA, 15 bp, Homo sapiens
aagcaaatttatttt

SEQ ID NO: 2072660 - DNA, 15 bp, Homo sapiens
agcaaatttatttta

SEQ ID NO: 2072661 - DNA, 15 bp, Homo sapiens
gcaaatttattttat

SEQ ID NO: 2072662 - DNA, 15 bp, Homo sapiens
caaatttattttatg

SEQ ID NO: 2072663 - DNA, 15 bp, Homo sapiens
aaatttattttatgc

SEQ ID NO: 2072664 - DNA, 15 bp, Homo sapiens
aatttattttatgcc

SEQ ID NO: 2072665 - DNA, 15 bp, Homo sapiens
atttattttatgccc

SEQ ID NO: 2072666 - DNA, 15 bp, Homo sapiens
tttattttatgccct

SEQ ID NO: 2072667 - DNA, 15 bp, Homo sapiens
ttattttatgcccta

SEQ ID NO: 2072668 - DNA, 15 bp, Homo sapiens
tattttatgccctat

SEQ ID NO: 2072669 - DNA, 15 bp, Homo sapiens
attttatgccctatt

SEQ ID NO: 2072670 - DNA, 15 bp, Homo sapiens
ttttatgccctatta

SEQ ID NO: 2072671 - DNA, 15 bp, Homo sapiens
tttatgccctattag

SEQ ID NO: 2072672 - DNA, 15 bp, Homo sapiens
ttatgccctattaga

SEQ ID NO: 2072673 - DNA, 15 bp, Homo sapiens
tatgccctattagat

SEQ ID NO: 2072674 - DNA, 15 bp, Homo sapiens
atgccctattagatc

SEQ ID NO: 2072675 - DNA, 15 bp, Homo sapiens
tgccctattagatca

SEQ ID NO: 2072676 - DNA, 15 bp, Homo sapiens
gccctattagatcat

SEQ ID NO: 2072677 - DNA, 15 bp, Homo sapiens
ccctattagatcatt

SEQ ID NO: 2072678 - DNA, 15 bp, Homo sapiens
cctattagatcatta

SEQ ID NO: 2072679 - DNA, 15 bp, Homo sapiens
ctattagatcattaa

SEQ ID NO: 2072680 - DNA, 15 bp, Homo sapiens
tattagatcattaaa

SEQ ID NO: 2072681 - DNA, 15 bp, Homo sapiens
attagatcattaaac

SEQ ID NO: 2072682 - DNA, 15 bp, Homo sapiens
ttagatcattaaaca

SEQ ID NO: 2072683 - DNA, 15 bp, Homo sapiens
tagatcattaaacac

SEQ ID NO: 2072684 - DNA, 15 bp, Homo sapiens
agatcattaaacacg

SEQ ID NO: 2072685 - DNA, 15 bp, Homo sapiens
gatcattaaacacgc

SEQ ID NO: 2072686 - DNA, 15 bp, Homo sapiens
atcattaaacacgca

SEQ ID NO: 2072687 - DNA, 15 bp, Homo sapiens
tcattaaacacgcag

SEQ ID NO: 2072688 - DNA, 15 bp, Homo sapiens
cattaaacacgcaga

SEQ ID NO: 2072689 - DNA, 15 bp, Homo sapiens
attaaacacgcagag

SEQ ID NO: 2072690 - DNA, 15 bp, Homo sapiens
ttaaacacgcagaga

SEQ ID NO: 2072691 - DNA, 15 bp, Homo sapiens
taaacacgcagagat

SEQ ID NO: 2072692 - DNA, 15 bp, Homo sapiens
aaacacgcagagatc

SEQ ID NO: 2072693 - DNA, 15 bp, Homo sapiens
aacacgcagagatcg

SEQ ID NO: 2072694 - DNA, 15 bp, Homo sapiens
acacgcagagatcgg

SEQ ID NO: 2072695 - DNA, 15 bp, Homo sapiens
cacgcagagatcggt

SEQ ID NO: 2072696 - DNA, 15 bp, Homo sapiens
acgcagagatcggtc

SEQ ID NO: 2072697 - DNA, 15 bp, Homo sapiens
cgcagagatcggtcg

SEQ ID NO: 2072698 - DNA, 15 bp, Homo sapiens
gcagagatcggtcgg

SEQ ID NO: 2072699 - DNA, 15 bp, Homo sapiens
cagagatcggtcggg

SEQ ID NO: 2072700 - DNA, 15 bp, Homo sapiens
agagatcggtcgggc

SEQ ID NO: 2072701 - DNA, 15 bp, Homo sapiens
gagatcggtcgggcg

SEQ ID NO: 2072702 - DNA, 15 bp, Homo sapiens
agatcggtcgggcgc

SEQ ID NO: 2072703 - DNA, 15 bp, Homo sapiens
gatcggtcgggcgcg

SEQ ID NO: 2072704 - DNA, 15 bp, Homo sapiens
atcggtcgggcgcgg

SEQ ID NO: 2072705 - DNA, 15 bp, Homo sapiens
tcggtcgggcgcggt

SEQ ID NO: 2072706 - DNA, 15 bp, Homo sapiens
cggtcgggcgcggtg

SEQ ID NO: 2072707 - DNA, 15 bp, Homo sapiens
ggtcgggcgcggtgg

SEQ ID NO: 2072708 - DNA, 15 bp, Homo sapiens
gtcgggcgcggtggc

SEQ ID NO: 2072709 - DNA, 15 bp, Homo sapiens
tcgggcgcggtggct

SEQ ID NO: 2072710 - DNA, 15 bp, Homo sapiens
ctcctgtaatcccaa

SEQ ID NO: 2072711 - DNA, 15 bp, Homo sapiens
ggcgggcggatcacc

SEQ ID NO: 2072712 - DNA, 15 bp, Homo sapiens
gcgggcggatcacct

SEQ ID NO: 2072713 - DNA, 15 bp, Homo sapiens
cgggcggatcacctg

SEQ ID NO: 2072714 - DNA, 15 bp, Homo sapiens
cacctgaggtcaggc

SEQ ID NO: 2072715 - DNA, 15 bp, Homo sapiens
acctgaggtcaggcg

SEQ ID NO: 2072716 - DNA, 15 bp, Homo sapiens
cctgaggtcaggcgt

SEQ ID NO: 2072717 - DNA, 15 bp, Homo sapiens
ctgaggtcaggcgtt

SEQ ID NO: 2072718 - DNA, 15 bp, Homo sapiens
tgaggtcaggcgttc

SEQ ID NO: 2072719 - DNA, 15 bp, Homo sapiens
gaggtcaggcgttcc

SEQ ID NO: 2072720 - DNA, 15 bp, Homo sapiens
aggtcaggcgttcca

SEQ ID NO: 2072721 - DNA, 15 bp, Homo sapiens
ggtcaggcgttccag

SEQ ID NO: 2072722 - DNA, 15 bp, Homo sapiens
gtcaggcgttccaga

SEQ ID NO: 2072723 - DNA, 15 bp, Homo sapiens
tcaggcgttccagac

SEQ ID NO: 2072724 - DNA, 15 bp, Homo sapiens
caggcgttccagacc

SEQ ID NO: 2072725 - DNA, 15 bp, Homo sapiens
aggcgttccagacca

SEQ ID NO: 2072726 - DNA, 15 bp, Homo sapiens
ggcgttccagaccag

SEQ ID NO: 2072727 - DNA, 15 bp, Homo sapiens
gcgttccagaccagc

SEQ ID NO: 2072728 - DNA, 15 bp, Homo sapiens
cgttccagaccagcc

SEQ ID NO: 2072729 - DNA, 15 bp, Homo sapiens
acatggcgaaaccct

SEQ ID NO: 2072730 - DNA, 15 bp, Homo sapiens
catggcgaaaccctg

SEQ ID NO: 2072731 - DNA, 15 bp, Homo sapiens
atggcgaaaccctgt

SEQ ID NO: 2072732 - DNA, 15 bp, Homo sapiens
tggcgaaaccctgtc

SEQ ID NO: 2072733 - DNA, 15 bp, Homo sapiens
ggcgaaaccctgtct

SEQ ID NO: 2072734 - DNA, 15 bp, Homo sapiens
gcgaaaccctgtctc

SEQ ID NO: 2072735 - DNA, 15 bp, Homo sapiens
cgaaaccctgtctct

SEQ ID NO: 2072736 - DNA, 15 bp, Homo sapiens
attagccgggcatga

SEQ ID NO: 2072737 - DNA, 15 bp, Homo sapiens
ttagccgggcatgat

SEQ ID NO: 2072738 - DNA, 15 bp, Homo sapiens
tagccgggcatgatg

SEQ ID NO: 2072739 - DNA, 15 bp, Homo sapiens
agccgggcatgatgg

SEQ ID NO: 2072740 - DNA, 15 bp, Homo sapiens
gccgggcatgatggt

SEQ ID NO: 2072741 - DNA, 15 bp, Homo sapiens
ccgggcatgatggtg

SEQ ID NO: 2072742 - DNA, 15 bp, Homo sapiens
cgggcatgatggtgc

SEQ ID NO: 2072743 - DNA, 15 bp, Homo sapiens
gggcatgatggtgca

SEQ ID NO: 2072744 - DNA, 15 bp, Homo sapiens
ggcatgatggtgcat

SEQ ID NO: 2072745 - DNA, 15 bp, Homo sapiens
gcatgatggtgcatg

SEQ ID NO: 2072746 - DNA, 15 bp, Homo sapiens
catgatggtgcatgt

SEQ ID NO: 2072747 - DNA, 15 bp, Homo sapiens
atgatggtgcatgtc

SEQ ID NO: 2072748 - DNA, 15 bp, Homo sapiens
tgatggtgcatgtct

SEQ ID NO: 2072749 - DNA, 15 bp, Homo sapiens
gatggtgcatgtctg

SEQ ID NO: 2072750 - DNA, 15 bp, Homo sapiens
atggtgcatgtctgt

SEQ ID NO: 2072751 - DNA, 15 bp, Homo sapiens
tggtgcatgtctgta

SEQ ID NO: 2072752 - DNA, 15 bp, Homo sapiens
ggtgcatgtctgtaa

SEQ ID NO: 2072753 - DNA, 15 bp, Homo sapiens
gtgcatgtctgtaat

SEQ ID NO: 2072754 - DNA, 15 bp, Homo sapiens
tgcatgtctgtaatc

SEQ ID NO: 2072755 - DNA, 15 bp, Homo sapiens
gcatgtctgtaatcc

SEQ ID NO: 2072756 - DNA, 15 bp, Homo sapiens
catgtctgtaatccc

SEQ ID NO: 2072757 - DNA, 15 bp, Homo sapiens
atgtctgtaatccca

SEQ ID NO: 2072758 - DNA, 15 bp, Homo sapiens
tgtctgtaatcccag

SEQ ID NO: 2072759 - DNA, 15 bp, Homo sapiens
gtctgtaatcccagc

SEQ ID NO: 2072760 - DNA, 15 bp, Homo sapiens
tctgtaatcccagct

SEQ ID NO: 2072761 - DNA, 15 bp, Homo sapiens
aatcgcttgaactca

SEQ ID NO: 2072762 - DNA, 15 bp, Homo sapiens
atcgcttgaactcag

SEQ ID NO: 2072763 - DNA, 15 bp, Homo sapiens
ttgaactcaggaggc

SEQ ID NO: 2072764 - DNA, 15 bp, Homo sapiens
tgaactcaggaggcg

SEQ ID NO: 2072765 - DNA, 15 bp, Homo sapiens
gaactcaggaggcgg

SEQ ID NO: 2072766 - DNA, 15 bp, Homo sapiens
aactcaggaggcgga

SEQ ID NO: 2072767 - DNA, 15 bp, Homo sapiens
actcaggaggcggag

SEQ ID NO: 2072768 - DNA, 15 bp, Homo sapiens
ctcaggaggcggagg

SEQ ID NO: 2072769 - DNA, 15 bp, Homo sapiens
tcaggaggcggaggt

SEQ ID NO: 2072770 - DNA, 15 bp, Homo sapiens
cagtgagcagagatg

SEQ ID NO: 2072771 - DNA, 15 bp, Homo sapiens
agtgagcagagatgg

SEQ ID NO: 2072772 - DNA, 15 bp, Homo sapiens
gtgagcagagatggc

SEQ ID NO: 2072773 - DNA, 15 bp, Homo sapiens
tgagcagagatggcg

SEQ ID NO: 2072774 - DNA, 15 bp, Homo sapiens
gagcagagatggcgc

SEQ ID NO: 2072775 - DNA, 15 bp, Homo sapiens
agcagagatggcgcc

SEQ ID NO: 2072776 - DNA, 15 bp, Homo sapiens
gcagagatggcgcca

SEQ ID NO: 2072777 - DNA, 15 bp, Homo sapiens
cagagatggcgccat

SEQ ID NO: 2072778 - DNA, 15 bp, Homo sapiens
agagatggcgccatt

SEQ ID NO: 2072779 - DNA, 15 bp, Homo sapiens
gagatggcgccattg

SEQ ID NO: 2072780 - DNA, 15 bp, Homo sapiens
agatggcgccattgc

SEQ ID NO: 2072781 - DNA, 15 bp, Homo sapiens
gatggcgccattgca

SEQ ID NO: 2072782 - DNA, 15 bp, Homo sapiens
atggcgccattgcac

SEQ ID NO: 2072783 - DNA, 15 bp, Homo sapiens
tggcgccattgcact

SEQ ID NO: 2072784 - DNA, 15 bp, Homo sapiens
ggcgccattgcactc

SEQ ID NO: 2072785 - DNA, 15 bp, Homo sapiens
gcgccattgcactct

SEQ ID NO: 2072786 - DNA, 15 bp, Homo sapiens
cgccattgcactcta

SEQ ID NO: 2072787 - DNA, 15 bp, Homo sapiens
tgcactctagcctga

SEQ ID NO: 2072788 - DNA, 15 bp, Homo sapiens
gcactctagcctgaa

SEQ ID NO: 2072789 - DNA, 15 bp, Homo sapiens
cactctagcctgaat

SEQ ID NO: 2072790 - DNA, 15 bp, Homo sapiens
actctagcctgaatg

SEQ ID NO: 2072791 - DNA, 15 bp, Homo sapiens
ctctagcctgaatga

SEQ ID NO: 2072792 - DNA, 15 bp, Homo sapiens
tctagcctgaatgac

SEQ ID NO: 2072793 - DNA, 15 bp, Homo sapiens
ctagcctgaatgaca

SEQ ID NO: 2072794 - DNA, 15 bp, Homo sapiens
tagcctgaatgacaa

SEQ ID NO: 2072795 - DNA, 15 bp, Homo sapiens
agcctgaatgacaag

SEQ ID NO: 2072796 - DNA, 15 bp, Homo sapiens
gcctgaatgacaaga

SEQ ID NO: 2072797 - DNA, 15 bp, Homo sapiens
cctgaatgacaagag

SEQ ID NO: 2072798 - DNA, 15 bp, Homo sapiens
ctgaatgacaagagt

SEQ ID NO: 2072799 - DNA, 15 bp, Homo sapiens
tgaatgacaagagtg

SEQ ID NO: 2072800 - DNA, 15 bp, Homo sapiens
gaatgacaagagtga

SEQ ID NO: 2072801 - DNA, 15 bp, Homo sapiens
aatgacaagagtgaa

SEQ ID NO: 2072802 - DNA, 15 bp, Homo sapiens
atgacaagagtgaaa

SEQ ID NO: 2072803 - DNA, 15 bp, Homo sapiens
tgacaagagtgaaac

SEQ ID NO: 2072804 - DNA, 15 bp, Homo sapiens
caagagtgaaactct

SEQ ID NO: 2072805 - DNA, 15 bp, Homo sapiens
aagagtgaaactctg

SEQ ID NO: 2072806 - DNA, 15 bp, Homo sapiens
agagtgaaactctgt

SEQ ID NO: 2072807 - DNA, 15 bp, Homo sapiens
gagtgaaactctgtc

SEQ ID NO: 2072808 - DNA, 15 bp, Homo sapiens
agtgaaactctgtcc

SEQ ID NO: 2072809 - DNA, 15 bp, Homo sapiens
gtgaaactctgtccc

SEQ ID NO: 2072810 - DNA, 15 bp, Homo sapiens
tgaaactctgtccca

SEQ ID NO: 2072811 - DNA, 15 bp, Homo sapiens
gaaactctgtcccaa

SEQ ID NO: 2072812 - DNA, 15 bp, Homo sapiens
aaactctgtcccaaa

SEQ ID NO: 2072813 - DNA, 15 bp, Homo sapiens
aactctgtcccaaaa

SEQ ID NO: 2072814 - DNA, 15 bp, Homo sapiens
actctgtcccaaaaa

SEQ ID NO: 2072815 - DNA, 15 bp, Homo sapiens
ctctgtcccaaaaaa

SEQ ID NO: 2072816 - DNA, 15 bp, Homo sapiens
tctgtcccaaaaaaa

SEQ ID NO: 2072817 - DNA, 15 bp, Homo sapiens
ctgtcccaaaaaaag

SEQ ID NO: 2072818 - DNA, 15 bp, Homo sapiens
tgtcccaaaaaaaga

SEQ ID NO: 2072819 - DNA, 15 bp, Homo sapiens
gtcccaaaaaaagaa

SEQ ID NO: 2072820 - DNA, 15 bp, Homo sapiens
tcccaaaaaaagaaa

SEQ ID NO: 2072821 - DNA, 15 bp, Homo sapiens
cccaaaaaaagaaaa

SEQ ID NO: 2072822 - DNA, 15 bp, Homo sapiens
ccaaaaaaagaaaaa

SEQ ID NO: 2072823 - DNA, 15 bp, Homo sapiens
aaaaagaaaaaaaac

SEQ ID NO: 2072824 - DNA, 15 bp, Homo sapiens
aaagaaaaaaaacat

SEQ ID NO: 2072825 - DNA, 15 bp, Homo sapiens
aagaaaaaaaacatg

SEQ ID NO: 2072826 - DNA, 15 bp, Homo sapiens
agaaaaaaaacatgc

SEQ ID NO: 2072827 - DNA, 15 bp, Homo sapiens
gaaaaaaaacatgca

SEQ ID NO: 2072828 - DNA, 15 bp, Homo sapiens
aaaaaaaacatgcag

SEQ ID NO: 2072829 - DNA, 15 bp, Homo sapiens
aaaaaaacatgcaga

SEQ ID NO: 2072830 - DNA, 15 bp, Homo sapiens
aaaaaacatgcagag

SEQ ID NO: 2072831 - DNA, 15 bp, Homo sapiens
aaaaacatgcagaga

SEQ ID NO: 2072832 - DNA, 15 bp, Homo sapiens
aaaacatgcagagat

SEQ ID NO: 2072833 - DNA, 15 bp, Homo sapiens
aaacatgcagagatg

SEQ ID NO: 2072834 - DNA, 15 bp, Homo sapiens
aacatgcagagatga

SEQ ID NO: 2072835 - DNA, 15 bp, Homo sapiens
acatgcagagatgaa

SEQ ID NO: 2072836 - DNA, 15 bp, Homo sapiens
catgcagagatgaat

SEQ ID NO: 2072837 - DNA, 15 bp, Homo sapiens
atgcagagatgaatt

SEQ ID NO: 2072838 - DNA, 15 bp, Homo sapiens
tgcagagatgaattt

SEQ ID NO: 2072839 - DNA, 15 bp, Homo sapiens
gcagagatgaatttt

SEQ ID NO: 2072840 - DNA, 15 bp, Homo sapiens
cagagatgaatttta

SEQ ID NO: 2072841 - DNA, 15 bp, Homo sapiens
agagatgaattttac

SEQ ID NO: 2072842 - DNA, 15 bp, Homo sapiens
gagatgaattttaca

SEQ ID NO: 2072843 - DNA, 15 bp, Homo sapiens
agatgaattttacat

SEQ ID NO: 2072844 - DNA, 15 bp, Homo sapiens
gatgaattttacatt

SEQ ID NO: 2072845 - DNA, 15 bp, Homo sapiens
atgaattttacattt

SEQ ID NO: 2072846 - DNA, 15 bp, Homo sapiens
tgaattttacattta

SEQ ID NO: 2072847 - DNA, 15 bp, Homo sapiens
gaattttacatttat

SEQ ID NO: 2072848 - DNA, 15 bp, Homo sapiens
aattttacatttata

SEQ ID NO: 2072849 - DNA, 15 bp, Homo sapiens
attttacatttataa

SEQ ID NO: 2072850 - DNA, 15 bp, Homo sapiens
ttttacatttataaa

SEQ ID NO: 2072851 - DNA, 15 bp, Homo sapiens
tttacatttataaat

SEQ ID NO: 2072852 - DNA, 15 bp, Homo sapiens
ttacatttataaatt

SEQ ID NO: 2072853 - DNA, 15 bp, Homo sapiens
tacatttataaatta

SEQ ID NO: 2072854 - DNA, 15 bp, Homo sapiens
acatttataaattat

SEQ ID NO: 2072855 - DNA, 15 bp, Homo sapiens
catttataaattatt

SEQ ID NO: 2072856 - DNA, 15 bp, Homo sapiens
atttataaattattt

SEQ ID NO: 2072857 - DNA, 15 bp, Homo sapiens
tttataaattatttg

SEQ ID NO: 2072858 - DNA, 15 bp, Homo sapiens
ttataaattatttgt

SEQ ID NO: 2072859 - DNA, 15 bp, Homo sapiens
tataaattatttgta

SEQ ID NO: 2072860 - DNA, 15 bp, Homo sapiens
ataaattatttgtat

SEQ ID NO: 2072861 - DNA, 15 bp, Homo sapiens
taaattatttgtatc

SEQ ID NO: 2072862 - DNA, 15 bp, Homo sapiens
aaattatttgtatct

SEQ ID NO: 2072863 - DNA, 15 bp, Homo sapiens
aattatttgtatctt

SEQ ID NO: 2072864 - DNA, 15 bp, Homo sapiens
attatttgtatcttt

SEQ ID NO: 2072865 - DNA, 15 bp, Homo sapiens
ttatttgtatctttc

SEQ ID NO: 2072866 - DNA, 15 bp, Homo sapiens
tatttgtatctttca

SEQ ID NO: 2072867 - DNA, 15 bp, Homo sapiens
atttgtatctttcag

SEQ ID NO: 2072868 - DNA, 15 bp, Homo sapiens
tttgtatctttcagt

SEQ ID NO: 2072869 - DNA, 15 bp, Homo sapiens
ttgtatctttcagtg

SEQ ID NO: 2072870 - DNA, 15 bp, Homo sapiens
tgtatctttcagtga

SEQ ID NO: 2072871 - DNA, 15 bp, Homo sapiens
gtatctttcagtgaa

SEQ ID NO: 2072872 - DNA, 15 bp, Homo sapiens
tatctttcagtgaat

SEQ ID NO: 2072873 - DNA, 15 bp, Homo sapiens
atctttcagtgaata

SEQ ID NO: 2072874 - DNA, 15 bp, Homo sapiens
tctttcagtgaatat

SEQ ID NO: 2072875 - DNA, 15 bp, Homo sapiens
ctttcagtgaatatt

SEQ ID NO: 2072876 - DNA, 15 bp, Homo sapiens
tttcagtgaatatta

SEQ ID NO: 2072877 - DNA, 15 bp, Homo sapiens
ttcagtgaatattat

SEQ ID NO: 2072878 - DNA, 15 bp, Homo sapiens
tcagtgaatattatt

SEQ ID NO: 2072879 - DNA, 15 bp, Homo sapiens
cagtgaatattatta

SEQ ID NO: 2072880 - DNA, 15 bp, Homo sapiens
agtgaatattattat

SEQ ID NO: 2072881 - DNA, 15 bp, Homo sapiens
gtgaatattattatt

SEQ ID NO: 2072882 - DNA, 15 bp, Homo sapiens
tgaatattattattg

SEQ ID NO: 2072883 - DNA, 15 bp, Homo sapiens
gaatattattattgt

SEQ ID NO: 2072884 - DNA, 15 bp, Homo sapiens
aatattattattgtt

SEQ ID NO: 2072885 - DNA, 15 bp, Homo sapiens
atattattattgttg

SEQ ID NO: 2072886 - DNA, 15 bp, Homo sapiens
tattattattgttgt

SEQ ID NO: 2072887 - DNA, 15 bp, Homo sapiens
attattattgttgtt

SEQ ID NO: 2072888 - DNA, 15 bp, Homo sapiens
ttattattgttgttc

SEQ ID NO: 2072889 - DNA, 15 bp, Homo sapiens
tattattgttgttcg

SEQ ID NO: 2072890 - DNA, 15 bp, Homo sapiens
attattgttgttcgc

SEQ ID NO: 2072891 - DNA, 15 bp, Homo sapiens
ttattgttgttcgca

SEQ ID NO: 2072892 - DNA, 15 bp, Homo sapiens
tattgttgttcgcat

SEQ ID NO: 2072893 - DNA, 15 bp, Homo sapiens
attgttgttcgcatg

SEQ ID NO: 2072894 - DNA, 15 bp, Homo sapiens
ttgttgttcgcatgg

SEQ ID NO: 2072895 - DNA, 15 bp, Homo sapiens
tgttgttcgcatggc

SEQ ID NO: 2072896 - DNA, 15 bp, Homo sapiens
gttgttcgcatggcc

SEQ ID NO: 2072897 - DNA, 15 bp, Homo sapiens
ttgttcgcatggcca

SEQ ID NO: 2072898 - DNA, 15 bp, Homo sapiens
tgttcgcatggccat

SEQ ID NO: 2072899 - DNA, 15 bp, Homo sapiens
gttcgcatggccatc

SEQ ID NO: 2072900 - DNA, 15 bp, Homo sapiens
ttcgcatggccatca

SEQ ID NO: 2072901 - DNA, 15 bp, Homo sapiens
tcgcatggccatcaa

SEQ ID NO: 2072902 - DNA, 15 bp, Homo sapiens
cgcatggccatcaaa

SEQ ID NO: 2072903 - DNA, 15 bp, Homo sapiens
gcatggccatcaaaa

SEQ ID NO: 2072904 - DNA, 15 bp, Homo sapiens
catggccatcaaaat

SEQ ID NO: 2072905 - DNA, 15 bp, Homo sapiens
atggccatcaaaatt

SEQ ID NO: 2072906 - DNA, 15 bp, Homo sapiens
tggccatcaaaattt

SEQ ID NO: 2072907 - DNA, 15 bp, Homo sapiens
ggccatcaaaatttt

SEQ ID NO: 2072908 - DNA, 15 bp, Homo sapiens
gccatcaaaattttt

SEQ ID NO: 2072909 - DNA, 15 bp, Homo sapiens
ccatcaaaattttta

SEQ ID NO: 2072910 - DNA, 15 bp, Homo sapiens
catcaaaatttttac

SEQ ID NO: 2072911 - DNA, 15 bp, Homo sapiens
atcaaaatttttacc

SEQ ID NO: 2072912 - DNA, 15 bp, Homo sapiens
tcaaaatttttacct

SEQ ID NO: 2072913 - DNA, 15 bp, Homo sapiens
caaaatttttacctc

SEQ ID NO: 2072914 - DNA, 15 bp, Homo sapiens
aaaatttttacctct

SEQ ID NO: 2072915 - DNA, 15 bp, Homo sapiens
aaatttttacctctg

SEQ ID NO: 2072916 - DNA, 15 bp, Homo sapiens
aatttttacctctga

SEQ ID NO: 2072917 - DNA, 15 bp, Homo sapiens
atttttacctctgaa

SEQ ID NO: 2072918 - DNA, 15 bp, Homo sapiens
tttttacctctgaat

SEQ ID NO: 2072919 - DNA, 15 bp, Homo sapiens
ttttacctctgaata

SEQ ID NO: 2072920 - DNA, 15 bp, Homo sapiens
tttacctctgaataa

SEQ ID NO: 2072921 - DNA, 15 bp, Homo sapiens
ttacctctgaataaa

SEQ ID NO: 2072922 - DNA, 15 bp, Homo sapiens
tacctctgaataaag

SEQ ID NO: 2072923 - DNA, 15 bp, Homo sapiens
acctctgaataaagg

SEQ ID NO: 2072924 - DNA, 15 bp, Homo sapiens
cctctgaataaaggc

SEQ ID NO: 2072925 - DNA, 15 bp, Homo sapiens
ctctgaataaaggca

SEQ ID NO: 2072926 - DNA, 15 bp, Homo sapiens
tctgaataaaggcat

SEQ ID NO: 2072927 - DNA, 15 bp, Homo sapiens
ctgaataaaggcatt

SEQ ID NO: 2072928 - DNA, 15 bp, Homo sapiens
tgaataaaggcattt

SEQ ID NO: 2072929 - DNA, 15 bp, Homo sapiens
gaataaaggcatttc

SEQ ID NO: 2072930 - DNA, 15 bp, Homo sapiens
aataaaggcatttct

SEQ ID NO: 2072931 - DNA, 15 bp, Homo sapiens
ataaaggcatttctt

SEQ ID NO: 2072932 - DNA, 15 bp, Homo sapiens
taaaggcatttctta

SEQ ID NO: 2072933 - DNA, 15 bp, Homo sapiens
aaaggcatttcttaa

SEQ ID NO: 2072934 - DNA, 15 bp, Homo sapiens
aaggcatttcttaac

SEQ ID NO: 2072935 - DNA, 15 bp, Homo sapiens
aggcatttcttaaca

SEQ ID NO: 2072936 - DNA, 15 bp, Homo sapiens
ggcatttcttaacat

SEQ ID NO: 2072937 - DNA, 15 bp, Homo sapiens
gcatttcttaacatt

SEQ ID NO: 2072938 - DNA, 15 bp, Homo sapiens
catttcttaacattg

SEQ ID NO: 2072939 - DNA, 15 bp, Homo sapiens
atttcttaacattgg

SEQ ID NO: 2072940 - DNA, 15 bp, Homo sapiens
tttcttaacattgga

SEQ ID NO: 2072941 - DNA, 15 bp, Homo sapiens
ttcttaacattggat

SEQ ID NO: 2072942 - DNA, 15 bp, Homo sapiens
tcttaacattggatt

SEQ ID NO: 2072943 - DNA, 15 bp, Homo sapiens
cttaacattggattg

SEQ ID NO: 2072944 - DNA, 15 bp, Homo sapiens
ttaacattggattgg

SEQ ID NO: 2072945 - DNA, 15 bp, Homo sapiens
taacattggattggt

SEQ ID NO: 2072946 - DNA, 15 bp, Homo sapiens
aacattggattggtt

SEQ ID NO: 2072947 - DNA, 15 bp, Homo sapiens
acattggattggtta

SEQ ID NO: 2072948 - DNA, 15 bp, Homo sapiens
cattggattggttat

SEQ ID NO: 2072949 - DNA, 15 bp, Homo sapiens
attggattggttata

SEQ ID NO: 2072950 - DNA, 15 bp, Homo sapiens
ttggattggttatag

SEQ ID NO: 2072951 - DNA, 15 bp, Homo sapiens
tggattggttatagc

SEQ ID NO: 2072952 - DNA, 15 bp, Homo sapiens
ggattggttatagcg

SEQ ID NO: 2072953 - DNA, 15 bp, Homo sapiens
gattggttatagcgt

SEQ ID NO: 2072954 - DNA, 15 bp, Homo sapiens
attggttatagcgtg

SEQ ID NO: 2072955 - DNA, 15 bp, Homo sapiens
ttggttatagcgtgg

SEQ ID NO: 2072956 - DNA, 15 bp, Homo sapiens
tggttatagcgtgga

SEQ ID NO: 2072957 - DNA, 15 bp, Homo sapiens
ggttatagcgtggaa

SEQ ID NO: 2072958 - DNA, 15 bp, Homo sapiens
gttatagcgtggaag

SEQ ID NO: 2072959 - DNA, 15 bp, Homo sapiens
ttatagcgtggaaga

SEQ ID NO: 2072960 - DNA, 15 bp, Homo sapiens
tatagcgtggaagaa

SEQ ID NO: 2072961 - DNA, 15 bp, Homo sapiens
atagcgtggaagaaa

SEQ ID NO: 2072962 - DNA, 15 bp, Homo sapiens
tagcgtggaagaaat

SEQ ID NO: 2072963 - DNA, 15 bp, Homo sapiens
agcgtggaagaaatt

SEQ ID NO: 2072964 - DNA, 15 bp, Homo sapiens
gcgtggaagaaattc

SEQ ID NO: 2072965 - DNA, 15 bp, Homo sapiens
cgtggaagaaattca

SEQ ID NO: 2072966 - DNA, 15 bp, Homo sapiens
gtggaagaaattcaa

SEQ ID NO: 2072967 - DNA, 15 bp, Homo sapiens
tggaagaaattcaat

SEQ ID NO: 2072968 - DNA, 15 bp, Homo sapiens
ggaagaaattcaatc

SEQ ID NO: 2072969 - DNA, 15 bp, Homo sapiens
gaagaaattcaatca

SEQ ID NO: 2072970 - DNA, 15 bp, Homo sapiens
aagaaattcaatcac

SEQ ID NO: 2072971 - DNA, 15 bp, Homo sapiens
agaaattcaatcact

SEQ ID NO: 2072972 - DNA, 15 bp, Homo sapiens
gaaattcaatcactc

SEQ ID NO: 2072973 - DNA, 15 bp, Homo sapiens
aaattcaatcactcc

SEQ ID NO: 2072974 - DNA, 15 bp, Homo sapiens
aattcaatcactcca

SEQ ID NO: 2072975 - DNA, 15 bp, Homo sapiens
attcaatcactccac

SEQ ID NO: 2072976 - DNA, 15 bp, Homo sapiens
ttcaatcactccacc

SEQ ID NO: 2072977 - DNA, 15 bp, Homo sapiens
tcaatcactccacca

SEQ ID NO: 2072978 - DNA, 15 bp, Homo sapiens
caatcactccaccaa

SEQ ID NO: 2072979 - DNA, 15 bp, Homo sapiens
aatcactccaccaat

SEQ ID NO: 2072980 - DNA, 15 bp, Homo sapiens
atcactccaccaatg

SEQ ID NO: 2072981 - DNA, 15 bp, Homo sapiens
tcactccaccaatgt

SEQ ID NO: 2072982 - DNA, 15 bp, Homo sapiens
cactccaccaatgtt

SEQ ID NO: 2072983 - DNA, 15 bp, Homo sapiens
actccaccaatgttg

SEQ ID NO: 2072984 - DNA, 15 bp, Homo sapiens
ctccaccaatgttgt

SEQ ID NO: 2072985 - DNA, 15 bp, Homo sapiens
tccaccaatgttgtg

SEQ ID NO: 2072986 - DNA, 15 bp, Homo sapiens
ccaccaatgttgtgg

SEQ ID NO: 2072987 - DNA, 15 bp, Homo sapiens
caccaatgttgtggc

SEQ ID NO: 2072988 - DNA, 15 bp, Homo sapiens
accaatgttgtggca

SEQ ID NO: 2072989 - DNA, 15 bp, Homo sapiens
ccaatgttgtggcaa

SEQ ID NO: 2072990 - DNA, 15 bp, Homo sapiens
caatgttgtggcaaa

SEQ ID NO: 2072991 - DNA, 15 bp, Homo sapiens
aatgttgtggcaaat

SEQ ID NO: 2072992 - DNA, 15 bp, Homo sapiens
atgttgtggcaaata

SEQ ID NO: 2072993 - DNA, 15 bp, Homo sapiens
tgttgtggcaaatac

SEQ ID NO: 2072994 - DNA, 15 bp, Homo sapiens
gttgtggcaaatacc

SEQ ID NO: 2072995 - DNA, 15 bp, Homo sapiens
ttgtggcaaatacct

SEQ ID NO: 2072996 - DNA, 15 bp, Homo sapiens
tgtggcaaatacctc

SEQ ID NO: 2072997 - DNA, 15 bp, Homo sapiens
gtggcaaatacctca

SEQ ID NO: 2072998 - DNA, 15 bp, Homo sapiens
tggcaaatacctcaa

SEQ ID NO: 2072999 - DNA, 15 bp, Homo sapiens
ggcaaatacctcaaa

SEQ ID NO: 2073000 - DNA, 15 bp, Homo sapiens
gcaaatacctcaaaa

SEQ ID NO: 2073001 - DNA, 15 bp, Homo sapiens
caaatacctcaaaag

SEQ ID NO: 2073002 - DNA, 15 bp, Homo sapiens
aaatacctcaaaagc

SEQ ID NO: 2073003 - DNA, 15 bp, Homo sapiens
aatacctcaaaagca

SEQ ID NO: 2073004 - DNA, 15 bp, Homo sapiens
atacctcaaaagcac

SEQ ID NO: 2073005 - DNA, 15 bp, Homo sapiens
tacctcaaaagcacg

SEQ ID NO: 2073006 - DNA, 15 bp, Homo sapiens
acctcaaaagcacga

SEQ ID NO: 2073007 - DNA, 15 bp, Homo sapiens
cctcaaaagcacgat

SEQ ID NO: 2073008 - DNA, 15 bp, Homo sapiens
ctcaaaagcacgatc

SEQ ID NO: 2073009 - DNA, 15 bp, Homo sapiens
tcaaaagcacgatca

SEQ ID NO: 2073010 - DNA, 15 bp, Homo sapiens
caaaagcacgatcag

SEQ ID NO: 2073011 - DNA, 15 bp, Homo sapiens
aaaagcacgatcagt

SEQ ID NO: 2073012 - DNA, 15 bp, Homo sapiens
aaagcacgatcagtc

SEQ ID NO: 2073013 - DNA, 15 bp, Homo sapiens
aagcacgatcagtcc

SEQ ID NO: 2073014 - DNA, 15 bp, Homo sapiens
agcacgatcagtcct

SEQ ID NO: 2073015 - DNA, 15 bp, Homo sapiens
gcacgatcagtccta

SEQ ID NO: 2073016 - DNA, 15 bp, Homo sapiens
cacgatcagtcctat

SEQ ID NO: 2073017 - DNA, 15 bp, Homo sapiens
acgatcagtcctatc

SEQ ID NO: 2073018 - DNA, 15 bp, Homo sapiens
cgatcagtcctatca

SEQ ID NO: 2073019 - DNA, 15 bp, Homo sapiens
gatcagtcctatcat

SEQ ID NO: 2073020 - DNA, 15 bp, Homo sapiens
atcagtcctatcatt

SEQ ID NO: 2073021 - DNA, 15 bp, Homo sapiens
tcagtcctatcattt

SEQ ID NO: 2073022 - DNA, 15 bp, Homo sapiens
cagtcctatcattta

SEQ ID NO: 2073023 - DNA, 15 bp, Homo sapiens
agtcctatcatttat

SEQ ID NO: 2073024 - DNA, 15 bp, Homo sapiens
gtcctatcatttatg

SEQ ID NO: 2073025 - DNA, 15 bp, Homo sapiens
tcctatcatttatgg

SEQ ID NO: 2073026 - DNA, 15 bp, Homo sapiens
cctatcatttatggc

SEQ ID NO: 2073027 - DNA, 15 bp, Homo sapiens
ctatcatttatggct

SEQ ID NO: 2073028 - DNA, 15 bp, Homo sapiens
tatcatttatggctg

SEQ ID NO: 2073029 - DNA, 15 bp, Homo sapiens
atcatttatggctgc

SEQ ID NO: 2073030 - DNA, 15 bp, Homo sapiens
tcatttatggctgcc

SEQ ID NO: 2073031 - DNA, 15 bp, Homo sapiens
catttatggctgcct

SEQ ID NO: 2073032 - DNA, 15 bp, Homo sapiens
atttatggctgcctt

SEQ ID NO: 2073033 - DNA, 15 bp, Homo sapiens
tttatggctgccttg

SEQ ID NO: 2073034 - DNA, 15 bp, Homo sapiens
ttatggctgccttgg

SEQ ID NO: 2073035 - DNA, 15 bp, Homo sapiens
tatggctgccttggt

SEQ ID NO: 2073036 - DNA, 15 bp, Homo sapiens
atggctgccttggtt

SEQ ID NO: 2073037 - DNA, 15 bp, Homo sapiens
tggctgccttggtta

SEQ ID NO: 2073038 - DNA, 15 bp, Homo sapiens
ggctgccttggttaa

SEQ ID NO: 2073039 - DNA, 15 bp, Homo sapiens
gctgccttggttaag

SEQ ID NO: 2073040 - DNA, 15 bp, Homo sapiens
ctgccttggttaagc

SEQ ID NO: 2073041 - DNA, 15 bp, Homo sapiens
tgccttggttaagct

SEQ ID NO: 2073042 - DNA, 15 bp, Homo sapiens
gccttggttaagctt

SEQ ID NO: 2073043 - DNA, 15 bp, Homo sapiens
ccttggttaagcttc

SEQ ID NO: 2073044 - DNA, 15 bp, Homo sapiens
cttggttaagcttca

SEQ ID NO: 2073045 - DNA, 15 bp, Homo sapiens
ttggttaagcttcaa

SEQ ID NO: 2073046 - DNA, 15 bp, Homo sapiens
tggttaagcttcaag

SEQ ID NO: 2073047 - DNA, 15 bp, Homo sapiens
ggttaagcttcaaga

SEQ ID NO: 2073048 - DNA, 15 bp, Homo sapiens
gttaagcttcaagaa

SEQ ID NO: 2073049 - DNA, 15 bp, Homo sapiens
ttaagcttcaagaat

SEQ ID NO: 2073050 - DNA, 15 bp, Homo sapiens
taagcttcaagaata

SEQ ID NO: 2073051 - DNA, 15 bp, Homo sapiens
aagcttcaagaataa

SEQ ID NO: 2073052 - DNA, 15 bp, Homo sapiens
agcttcaagaataaa

SEQ ID NO: 2073053 - DNA, 15 bp, Homo sapiens
gcttcaagaataaaa

SEQ ID NO: 2073054 - DNA, 15 bp, Homo sapiens
cttcaagaataaaac

SEQ ID NO: 2073055 - DNA, 15 bp, Homo sapiens
ttcaagaataaaact

SEQ ID NO: 2073056 - DNA, 15 bp, Homo sapiens
tcaagaataaaactt

SEQ ID NO: 2073057 - DNA, 15 bp, Homo sapiens
caagaataaaactta

SEQ ID NO: 2073058 - DNA, 15 bp, Homo sapiens
aagaataaaacttaa

SEQ ID NO: 2073059 - DNA, 15 bp, Homo sapiens
agaataaaacttaac

SEQ ID NO: 2073060 - DNA, 15 bp, Homo sapiens
gaataaaacttaaca

SEQ ID NO: 2073061 - DNA, 15 bp, Homo sapiens
aataaaacttaacac

SEQ ID NO: 2073062 - DNA, 15 bp, Homo sapiens
ataaaacttaacaca

SEQ ID NO: 2073063 - DNA, 15 bp, Homo sapiens
taaaacttaacacac

SEQ ID NO: 2073064 - DNA, 15 bp, Homo sapiens
aaaacttaacacact

SEQ ID NO: 2073065 - DNA, 15 bp, Homo sapiens
aaacttaacacactt

SEQ ID NO: 2073066 - DNA, 15 bp, Homo sapiens
aacttaacacacttc

SEQ ID NO: 2073067 - DNA, 15 bp, Homo sapiens
acttaacacacttct

SEQ ID NO: 2073068 - DNA, 15 bp, Homo sapiens
cttaacacacttcta

SEQ ID NO: 2073069 - DNA, 15 bp, Homo sapiens
ttaacacacttctag

SEQ ID NO: 2073070 - DNA, 15 bp, Homo sapiens
taacacacttctaga

SEQ ID NO: 2073071 - DNA, 15 bp, Homo sapiens
aacacacttctagac

SEQ ID NO: 2073072 - DNA, 15 bp, Homo sapiens
acacacttctagaca

SEQ ID NO: 2073073 - DNA, 15 bp, Homo sapiens
cacacttctagacaa

SEQ ID NO: 2073074 - DNA, 15 bp, Homo sapiens
acacttctagacaat

SEQ ID NO: 2073075 - DNA, 15 bp, Homo sapiens
cacttctagacaata

SEQ ID NO: 2073076 - DNA, 15 bp, Homo sapiens
acttctagacaatat

SEQ ID NO: 2073077 - DNA, 15 bp, Homo sapiens
cttctagacaatata

SEQ ID NO: 2073078 - DNA, 15 bp, Homo sapiens
ttctagacaatatac

SEQ ID NO: 2073079 - DNA, 15 bp, Homo sapiens
tctagacaatatacc

SEQ ID NO: 2073080 - DNA, 15 bp, Homo sapiens
ctagacaatatacct

SEQ ID NO: 2073081 - DNA, 15 bp, Homo sapiens
tagacaatatacctc

SEQ ID NO: 2073082 - DNA, 15 bp, Homo sapiens
agacaatatacctca

SEQ ID NO: 2073083 - DNA, 15 bp, Homo sapiens
gacaatatacctcaa

SEQ ID NO: 2073084 - DNA, 15 bp, Homo sapiens
acaatatacctcaaa

SEQ ID NO: 2073085 - DNA, 15 bp, Homo sapiens
caatatacctcaaaa

SEQ ID NO: 2073086 - DNA, 15 bp, Homo sapiens
aatatacctcaaaag

SEQ ID NO: 2073087 - DNA, 15 bp, Homo sapiens
atatacctcaaaaga

SEQ ID NO: 2073088 - DNA, 15 bp, Homo sapiens
tatacctcaaaagag

SEQ ID NO: 2073089 - DNA, 15 bp, Homo sapiens
atacctcaaaagaga

SEQ ID NO: 2073090 - DNA, 15 bp, Homo sapiens
tacctcaaaagagat

SEQ ID NO: 2073091 - DNA, 15 bp, Homo sapiens
acctcaaaagagatt

SEQ ID NO: 2073092 - DNA, 15 bp, Homo sapiens
cctcaaaagagattc

SEQ ID NO: 2073093 - DNA, 15 bp, Homo sapiens
ctcaaaagagattct

SEQ ID NO: 2073094 - DNA, 15 bp, Homo sapiens
tcaaaagagattctt

SEQ ID NO: 2073095 - DNA, 15 bp, Homo sapiens
caaaagagattcttc

SEQ ID NO: 2073096 - DNA, 15 bp, Homo sapiens
aaaagagattcttct

SEQ ID NO: 2073097 - DNA, 15 bp, Homo sapiens
aaagagattcttcta

SEQ ID NO: 2073098 - DNA, 15 bp, Homo sapiens
aagagattcttctac

SEQ ID NO: 2073099 - DNA, 15 bp, Homo sapiens
agagattcttctact

SEQ ID NO: 2073100 - DNA, 15 bp, Homo sapiens
gagattcttctactt

SEQ ID NO: 2073101 - DNA, 15 bp, Homo sapiens
agattcttctacttg

SEQ ID NO: 2073102 - DNA, 15 bp, Homo sapiens
gattcttctacttgc

SEQ ID NO: 2073103 - DNA, 15 bp, Homo sapiens
attcttctacttgct

SEQ ID NO: 2073104 - DNA, 15 bp, Homo sapiens
ttcttctacttgctt

SEQ ID NO: 2073105 - DNA, 15 bp, Homo sapiens
tcttctacttgcttc

SEQ ID NO: 2073106 - DNA, 15 bp, Homo sapiens
cttctacttgcttca

SEQ ID NO: 2073107 - DNA, 15 bp, Homo sapiens
ttctacttgcttcac

SEQ ID NO: 2073108 - DNA, 15 bp, Homo sapiens
tctacttgcttcact

SEQ ID NO: 2073109 - DNA, 15 bp, Homo sapiens
ctacttgcttcacta

SEQ ID NO: 2073110 - DNA, 15 bp, Homo sapiens
tacttgcttcactag

SEQ ID NO: 2073111 - DNA, 15 bp, Homo sapiens
acttgcttcactagc

SEQ ID NO: 2073112 - DNA, 15 bp, Homo sapiens
cttgcttcactagct

SEQ ID NO: 2073113 - DNA, 15 bp, Homo sapiens
ttgcttcactagcta

SEQ ID NO: 2073114 - DNA, 15 bp, Homo sapiens
tgcttcactagctaa

SEQ ID NO: 2073115 - DNA, 15 bp, Homo sapiens
gcttcactagctaac

SEQ ID NO: 2073116 - DNA, 15 bp, Homo sapiens
cttcactagctaacc

SEQ ID NO: 2073117 - DNA, 15 bp, Homo sapiens
ttcactagctaacca

SEQ ID NO: 2073118 - DNA, 15 bp, Homo sapiens
tcactagctaaccaa

SEQ ID NO: 2073119 - DNA, 15 bp, Homo sapiens
cactagctaaccaaa

SEQ ID NO: 2073120 - DNA, 15 bp, Homo sapiens
actagctaaccaaac

SEQ ID NO: 2073121 - DNA, 15 bp, Homo sapiens
ctagctaaccaaaca

SEQ ID NO: 2073122 - DNA, 15 bp, Homo sapiens
tagctaaccaaacag

SEQ ID NO: 2073123 - DNA, 15 bp, Homo sapiens
agctaaccaaacaga

SEQ ID NO: 2073124 - DNA, 15 bp, Homo sapiens
gctaaccaaacagaa

SEQ ID NO: 2073125 - DNA, 15 bp, Homo sapiens
ctaaccaaacagaaa

SEQ ID NO: 2073126 - DNA, 15 bp, Homo sapiens
taaccaaacagaaat

SEQ ID NO: 2073127 - DNA, 15 bp, Homo sapiens
aaccaaacagaaatc

SEQ ID NO: 2073128 - DNA, 15 bp, Homo sapiens
accaaacagaaatca

SEQ ID NO: 2073129 - DNA, 15 bp, Homo sapiens
ccaaacagaaatcat

SEQ ID NO: 2073130 - DNA, 15 bp, Homo sapiens
caaacagaaatcatt

SEQ ID NO: 2073131 - DNA, 15 bp, Homo sapiens
aaacagaaatcatta

SEQ ID NO: 2073132 - DNA, 15 bp, Homo sapiens
aacagaaatcattat

SEQ ID NO: 2073133 - DNA, 15 bp, Homo sapiens
acagaaatcattatt

SEQ ID NO: 2073134 - DNA, 15 bp, Homo sapiens
cagaaatcattattg

SEQ ID NO: 2073135 - DNA, 15 bp, Homo sapiens
agaaatcattattgc

SEQ ID NO: 2073136 - DNA, 15 bp, Homo sapiens
gaaatcattattgct

SEQ ID NO: 2073137 - DNA, 15 bp, Homo sapiens
aaatcattattgctt

SEQ ID NO: 2073138 - DNA, 15 bp, Homo sapiens
aatcattattgcttg

SEQ ID NO: 2073139 - DNA, 15 bp, Homo sapiens
atcattattgcttgg

SEQ ID NO: 2073140 - DNA, 15 bp, Homo sapiens
tcattattgcttggc

SEQ ID NO: 2073141 - DNA, 15 bp, Homo sapiens
cattattgcttggct

SEQ ID NO: 2073142 - DNA, 15 bp, Homo sapiens
attattgcttggctt

SEQ ID NO: 2073143 - DNA, 15 bp, Homo sapiens
ttattgcttggcttg

SEQ ID NO: 2073144 - DNA, 15 bp, Homo sapiens
tattgcttggcttgg

SEQ ID NO: 2073145 - DNA, 15 bp, Homo sapiens
attgcttggcttggc

SEQ ID NO: 2073146 - DNA, 15 bp, Homo sapiens
ttgcttggcttggct

SEQ ID NO: 2073147 - DNA, 15 bp, Homo sapiens
tgcttggcttggctt

SEQ ID NO: 2073148 - DNA, 15 bp, Homo sapiens
gcttggcttggcttc

SEQ ID NO: 2073149 - DNA, 15 bp, Homo sapiens
cttggcttggcttct

SEQ ID NO: 2073150 - DNA, 15 bp, Homo sapiens
ttggcttggcttctc

SEQ ID NO: 2073151 - DNA, 15 bp, Homo sapiens
tggcttggcttctcc

SEQ ID NO: 2073152 - DNA, 15 bp, Homo sapiens
ggcttggcttctcct

SEQ ID NO: 2073153 - DNA, 15 bp, Homo sapiens
gcttggcttctcctt

SEQ ID NO: 2073154 - DNA, 15 bp, Homo sapiens
cttggcttctccttc

SEQ ID NO: 2073155 - DNA, 15 bp, Homo sapiens
ttggcttctccttcc

SEQ ID NO: 2073156 - DNA, 15 bp, Homo sapiens
tggcttctccttcca

SEQ ID NO: 2073157 - DNA, 15 bp, Homo sapiens
ggcttctccttccag

SEQ ID NO: 2073158 - DNA, 15 bp, Homo sapiens
gcttctccttccagc

SEQ ID NO: 2073159 - DNA, 15 bp, Homo sapiens
cttctccttccagca

SEQ ID NO: 2073160 - DNA, 15 bp, Homo sapiens
ttctccttccagcag

SEQ ID NO: 2073161 - DNA, 15 bp, Homo sapiens
tctccttccagcaga

SEQ ID NO: 2073162 - DNA, 15 bp, Homo sapiens
ctccttccagcagaa

SEQ ID NO: 2073163 - DNA, 15 bp, Homo sapiens
tccttccagcagaaa

SEQ ID NO: 2073164 - DNA, 15 bp, Homo sapiens
ccttccagcagaaaa

SEQ ID NO: 2073165 - DNA, 15 bp, Homo sapiens
cttccagcagaaaat

SEQ ID NO: 2073166 - DNA, 15 bp, Homo sapiens
ttccagcagaaaatt

SEQ ID NO: 2073167 - DNA, 15 bp, Homo sapiens
tccagcagaaaatta

SEQ ID NO: 2073168 - DNA, 15 bp, Homo sapiens
ccagcagaaaattaa

SEQ ID NO: 2073169 - DNA, 15 bp, Homo sapiens
cagcagaaaattaat

SEQ ID NO: 2073170 - DNA, 15 bp, Homo sapiens
agcagaaaattaatc

SEQ ID NO: 2073171 - DNA, 15 bp, Homo sapiens
gcagaaaattaatca

SEQ ID NO: 2073172 - DNA, 15 bp, Homo sapiens
cagaaaattaatcaa

SEQ ID NO: 2073173 - DNA, 15 bp, Homo sapiens
agaaaattaatcaac

SEQ ID NO: 2073174 - DNA, 15 bp, Homo sapiens
gaaaattaatcaaca

SEQ ID NO: 2073175 - DNA, 15 bp, Homo sapiens
aaaattaatcaacac

SEQ ID NO: 2073176 - DNA, 15 bp, Homo sapiens
aaattaatcaacacc

SEQ ID NO: 2073177 - DNA, 15 bp, Homo sapiens
aattaatcaacacct

SEQ ID NO: 2073178 - DNA, 15 bp, Homo sapiens
attaatcaacacctt

SEQ ID NO: 2073179 - DNA, 15 bp, Homo sapiens
ttaatcaacaccttt

SEQ ID NO: 2073180 - DNA, 15 bp, Homo sapiens
taatcaacacctttg

SEQ ID NO: 2073181 - DNA, 15 bp, Homo sapiens
aatcaacacctttgt

SEQ ID NO: 2073182 - DNA, 15 bp, Homo sapiens
atcaacacctttgtt

SEQ ID NO: 2073183 - DNA, 15 bp, Homo sapiens
tcaacacctttgtta

SEQ ID NO: 2073184 - DNA, 15 bp, Homo sapiens
caacacctttgttaa

SEQ ID NO: 2073185 - DNA, 15 bp, Homo sapiens
aacacctttgttaaa

SEQ ID NO: 2073186 - DNA, 15 bp, Homo sapiens
acacctttgttaaat

SEQ ID NO: 2073187 - DNA, 15 bp, Homo sapiens
cacctttgttaaata

SEQ ID NO: 2073188 - DNA, 15 bp, Homo sapiens
acctttgttaaatat

SEQ ID NO: 2073189 - DNA, 15 bp, Homo sapiens
cctttgttaaatatg

SEQ ID NO: 2073190 - DNA, 15 bp, Homo sapiens
ctttgttaaatatgc

SEQ ID NO: 2073191 - DNA, 15 bp, Homo sapiens
tttgttaaatatgct

SEQ ID NO: 2073192 - DNA, 15 bp, Homo sapiens
ttgttaaatatgctg

SEQ ID NO: 2073193 - DNA, 15 bp, Homo sapiens
tgttaaatatgctgt

SEQ ID NO: 2073194 - DNA, 15 bp, Homo sapiens
gttaaatatgctgta

SEQ ID NO: 2073195 - DNA, 15 bp, Homo sapiens
ttaaatatgctgtat

SEQ ID NO: 2073196 - DNA, 15 bp, Homo sapiens
taaatatgctgtata

SEQ ID NO: 2073197 - DNA, 15 bp, Homo sapiens
aaatatgctgtatag

SEQ ID NO: 2073198 - DNA, 15 bp, Homo sapiens
aatatgctgtataga

SEQ ID NO: 2073199 - DNA, 15 bp, Homo sapiens
atatgctgtatagat

SEQ ID NO: 2073200 - DNA, 15 bp, Homo sapiens
tatgctgtatagatt

SEQ ID NO: 2073201 - DNA, 15 bp, Homo sapiens
atgctgtatagattt

SEQ ID NO: 2073202 - DNA, 15 bp, Homo sapiens
tgctgtatagatttc

SEQ ID NO: 2073203 - DNA, 15 bp, Homo sapiens
gctgtatagatttct

SEQ ID NO: 2073204 - DNA, 15 bp, Homo sapiens
ctgtatagatttctc

SEQ ID NO: 2073205 - DNA, 15 bp, Homo sapiens
tgtatagatttctct

SEQ ID NO: 2073206 - DNA, 15 bp, Homo sapiens
gtatagatttctctt

SEQ ID NO: 2073207 - DNA, 15 bp, Homo sapiens
tatagatttctcttt

SEQ ID NO: 2073208 - DNA, 15 bp, Homo sapiens
atagatttctctttt

SEQ ID NO: 2073209 - DNA, 15 bp, Homo sapiens
tagatttctcttttt

SEQ ID NO: 2073210 - DNA, 15 bp, Homo sapiens
agatttctctttttt

SEQ ID NO: 2073211 - DNA, 15 bp, Homo sapiens
gatttctcttttttc

SEQ ID NO: 2073212 - DNA, 15 bp, Homo sapiens
atttctcttttttct

SEQ ID NO: 2073213 - DNA, 15 bp, Homo sapiens
tttctcttttttctg

SEQ ID NO: 2073214 - DNA, 15 bp, Homo sapiens
ttctcttttttctgg

SEQ ID NO: 2073215 - DNA, 15 bp, Homo sapiens
tctcttttttctggg

SEQ ID NO: 2073216 - DNA, 15 bp, Homo sapiens
ctcttttttctgggg

SEQ ID NO: 2073217 - DNA, 15 bp, Homo sapiens
tcttttttctggggg

SEQ ID NO: 2073218 - DNA, 15 bp, Homo sapiens
cttttttctggggga

SEQ ID NO: 2073219 - DNA, 15 bp, Homo sapiens
ttttttctgggggag

SEQ ID NO: 2073220 - DNA, 15 bp, Homo sapiens
tttttctgggggagt

SEQ ID NO: 2073221 - DNA, 15 bp, Homo sapiens
ttttctgggggagtg

SEQ ID NO: 2073222 - DNA, 15 bp, Homo sapiens
tttctgggggagtgg

SEQ ID NO: 2073223 - DNA, 15 bp, Homo sapiens
ttctgggggagtggg

SEQ ID NO: 2073224 - DNA, 15 bp, Homo sapiens
tctgggggagtgggg

SEQ ID NO: 2073225 - DNA, 15 bp, Homo sapiens
ctgggggagtgggga

SEQ ID NO: 2073226 - DNA, 15 bp, Homo sapiens
tgggggagtggggac

SEQ ID NO: 2073227 - DNA, 15 bp, Homo sapiens
gggggagtggggaca

SEQ ID NO: 2073228 - DNA, 15 bp, Homo sapiens
ggggagtggggacac

SEQ ID NO: 2073229 - DNA, 15 bp, Homo sapiens
gggagtggggacact

SEQ ID NO: 2073230 - DNA, 15 bp, Homo sapiens
ggagtggggacactg

SEQ ID NO: 2073231 - DNA, 15 bp, Homo sapiens
gagtggggacactgt

SEQ ID NO: 2073232 - DNA, 15 bp, Homo sapiens
agtggggacactgtt

SEQ ID NO: 2073233 - DNA, 15 bp, Homo sapiens
gtggggacactgttg

SEQ ID NO: 2073234 - DNA, 15 bp, Homo sapiens
tggggacactgttgt

SEQ ID NO: 2073235 - DNA, 15 bp, Homo sapiens
ggggacactgttgtt

SEQ ID NO: 2073236 - DNA, 15 bp, Homo sapiens
gggacactgttgtta

SEQ ID NO: 2073237 - DNA, 15 bp, Homo sapiens
ggacactgttgttaa

SEQ ID NO: 2073238 - DNA, 15 bp, Homo sapiens
gacactgttgttaaa

SEQ ID NO: 2073239 - DNA, 15 bp, Homo sapiens
acactgttgttaaag

SEQ ID NO: 2073240 - DNA, 15 bp, Homo sapiens
cactgttgttaaagt

SEQ ID NO: 2073241 - DNA, 15 bp, Homo sapiens
actgttgttaaagta

SEQ ID NO: 2073242 - DNA, 15 bp, Homo sapiens
ctgttgttaaagtaa

SEQ ID NO: 2073243 - DNA, 15 bp, Homo sapiens
tgttgttaaagtaag

SEQ ID NO: 2073244 - DNA, 15 bp, Homo sapiens
gttgttaaagtaagt

SEQ ID NO: 2073245 - DNA, 15 bp, Homo sapiens
ttgttaaagtaagtc

SEQ ID NO: 2073246 - DNA, 15 bp, Homo sapiens
tgttaaagtaagtca

SEQ ID NO: 2073247 - DNA, 15 bp, Homo sapiens
gttaaagtaagtcat

SEQ ID NO: 2073248 - DNA, 15 bp, Homo sapiens
ttaaagtaagtcatc

SEQ ID NO: 2073249 - DNA, 15 bp, Homo sapiens
taaagtaagtcatct

SEQ ID NO: 2073250 - DNA, 15 bp, Homo sapiens
aaagtaagtcatctc

SEQ ID NO: 2073251 - DNA, 15 bp, Homo sapiens
aagtaagtcatctca

SEQ ID NO: 2073252 - DNA, 15 bp, Homo sapiens
agtaagtcatctcac

SEQ ID NO: 2073253 - DNA, 15 bp, Homo sapiens
gtaagtcatctcacc

SEQ ID NO: 2073254 - DNA, 15 bp, Homo sapiens
taagtcatctcacct

SEQ ID NO: 2073255 - DNA, 15 bp, Homo sapiens
aagtcatctcacctt

SEQ ID NO: 2073256 - DNA, 15 bp, Homo sapiens
agtcatctcaccttg

SEQ ID NO: 2073257 - DNA, 15 bp, Homo sapiens
gtcatctcaccttgt

SEQ ID NO: 2073258 - DNA, 15 bp, Homo sapiens
tcatctcaccttgtt

SEQ ID NO: 2073259 - DNA, 15 bp, Homo sapiens
catctcaccttgttt

SEQ ID NO: 2073260 - DNA, 15 bp, Homo sapiens
atctcaccttgtttt

SEQ ID NO: 2073261 - DNA, 15 bp, Homo sapiens
tctcaccttgttttt

SEQ ID NO: 2073262 - DNA, 15 bp, Homo sapiens
ctcaccttgtttttc

SEQ ID NO: 2073263 - DNA, 15 bp, Homo sapiens
tcaccttgtttttca

SEQ ID NO: 2073264 - DNA, 15 bp, Homo sapiens
caccttgtttttcag

SEQ ID NO: 2073265 - DNA, 15 bp, Homo sapiens
accttgtttttcagc

SEQ ID NO: 2073266 - DNA, 15 bp, Homo sapiens
ccttgtttttcagct

SEQ ID NO: 2073267 - DNA, 15 bp, Homo sapiens
cttgtttttcagctt

SEQ ID NO: 2073268 - DNA, 15 bp, Homo sapiens
ttgtttttcagcttc

SEQ ID NO: 2073269 - DNA, 15 bp, Homo sapiens
tgtttttcagcttcc

SEQ ID NO: 2073270 - DNA, 15 bp, Homo sapiens
gtttttcagcttcct

SEQ ID NO: 2073271 - DNA, 15 bp, Homo sapiens
tttttcagcttcctt

SEQ ID NO: 2073272 - DNA, 15 bp, Homo sapiens
ttttcagcttccttt

SEQ ID NO: 2073273 - DNA, 15 bp, Homo sapiens
tttcagcttccttta

SEQ ID NO: 2073274 - DNA, 15 bp, Homo sapiens
ttcagcttcctttag

SEQ ID NO: 2073275 - DNA, 15 bp, Homo sapiens
tcagcttcctttagt

SEQ ID NO: 2073276 - DNA, 15 bp, Homo sapiens
cagcttcctttagtt

SEQ ID NO: 2073277 - DNA, 15 bp, Homo sapiens
agcttcctttagttg

SEQ ID NO: 2073278 - DNA, 15 bp, Homo sapiens
gcttcctttagttga

SEQ ID NO: 2073279 - DNA, 15 bp, Homo sapiens
cttcctttagttgaa

SEQ ID NO: 2073280 - DNA, 15 bp, Homo sapiens
ttcctttagttgaat

SEQ ID NO: 2073281 - DNA, 15 bp, Homo sapiens
tcctttagttgaatc

SEQ ID NO: 2073282 - DNA, 15 bp, Homo sapiens
cctttagttgaatct

SEQ ID NO: 2073283 - DNA, 15 bp, Homo sapiens
ctttagttgaatctc

SEQ ID NO: 2073284 - DNA, 15 bp, Homo sapiens
tttagttgaatctca

SEQ ID NO: 2073285 - DNA, 15 bp, Homo sapiens
ttagttgaatctcat

SEQ ID NO: 2073286 - DNA, 15 bp, Homo sapiens
tagttgaatctcata

SEQ ID NO: 2073287 - DNA, 15 bp, Homo sapiens
agttgaatctcatat

SEQ ID NO: 2073288 - DNA, 15 bp, Homo sapiens
gttgaatctcatatt

SEQ ID NO: 2073289 - DNA, 15 bp, Homo sapiens
ttgaatctcatattt

SEQ ID NO: 2073290 - DNA, 15 bp, Homo sapiens
tgaatctcatatttt

SEQ ID NO: 2073291 - DNA, 15 bp, Homo sapiens
gaatctcatattttt

SEQ ID NO: 2073292 - DNA, 15 bp, Homo sapiens
aatctcatatttttg

SEQ ID NO: 2073293 - DNA, 15 bp, Homo sapiens
atctcatatttttga

SEQ ID NO: 2073294 - DNA, 15 bp, Homo sapiens
tctcatatttttgaa

SEQ ID NO: 2073295 - DNA, 15 bp, Homo sapiens
ctcatatttttgaaa

SEQ ID NO: 2073296 - DNA, 15 bp, Homo sapiens
tcatatttttgaaat

SEQ ID NO: 2073297 - DNA, 15 bp, Homo sapiens
catatttttgaaatt

SEQ ID NO: 2073298 - DNA, 15 bp, Homo sapiens
atatttttgaaattc

SEQ ID NO: 2073299 - DNA, 15 bp, Homo sapiens
tatttttgaaattca

SEQ ID NO: 2073300 - DNA, 15 bp, Homo sapiens
atttttgaaattcat

SEQ ID NO: 2073301 - DNA, 15 bp, Homo sapiens
tttttgaaattcatg

SEQ ID NO: 2073302 - DNA, 15 bp, Homo sapiens
ttttgaaattcatga

SEQ ID NO: 2073303 - DNA, 15 bp, Homo sapiens
tttgaaattcatgaa

SEQ ID NO: 2073304 - DNA, 15 bp, Homo sapiens
ttgaaattcatgaaa

SEQ ID NO: 2073305 - DNA, 15 bp, Homo sapiens
tgaaattcatgaaat

SEQ ID NO: 2073306 - DNA, 15 bp, Homo sapiens
gaaattcatgaaatg

SEQ ID NO: 2073307 - DNA, 15 bp, Homo sapiens
aaattcatgaaatgc

SEQ ID NO: 2073308 - DNA, 15 bp, Homo sapiens
aattcatgaaatgct

SEQ ID NO: 2073309 - DNA, 15 bp, Homo sapiens
attcatgaaatgctt

SEQ ID NO: 2073310 - DNA, 15 bp, Homo sapiens
ttcatgaaatgcttc

SEQ ID NO: 2073311 - DNA, 15 bp, Homo sapiens
tcatgaaatgcttct

SEQ ID NO: 2073312 - DNA, 15 bp, Homo sapiens
catgaaatgcttctt

SEQ ID NO: 2073313 - DNA, 15 bp, Homo sapiens
atgaaatgcttcttt

SEQ ID NO: 2073314 - DNA, 15 bp, Homo sapiens
tgaaatgcttctttc

SEQ ID NO: 2073315 - DNA, 15 bp, Homo sapiens
gaaatgcttctttca

SEQ ID NO: 2073316 - DNA, 15 bp, Homo sapiens
aaatgcttctttcat

SEQ ID NO: 2073317 - DNA, 15 bp, Homo sapiens
aatgcttctttcatc

SEQ ID NO: 2073318 - DNA, 15 bp, Homo sapiens
atgcttctttcatca

SEQ ID NO: 2073319 - DNA, 15 bp, Homo sapiens
tgcttctttcatcag

SEQ ID NO: 2073320 - DNA, 15 bp, Homo sapiens
gcttctttcatcagt

SEQ ID NO: 2073321 - DNA, 15 bp, Homo sapiens
cttctttcatcagtt

SEQ ID NO: 2073322 - DNA, 15 bp, Homo sapiens
ttctttcatcagttt

SEQ ID NO: 2073323 - DNA, 15 bp, Homo sapiens
tctttcatcagtttg

SEQ ID NO: 2073324 - DNA, 15 bp, Homo sapiens
ctttcatcagtttgt

SEQ ID NO: 2073325 - DNA, 15 bp, Homo sapiens
tttcatcagtttgtc

SEQ ID NO: 2073326 - DNA, 15 bp, Homo sapiens
ttcatcagtttgtct

SEQ ID NO: 2073327 - DNA, 15 bp, Homo sapiens
tcatcagtttgtcta

SEQ ID NO: 2073328 - DNA, 15 bp, Homo sapiens
catcagtttgtctag

SEQ ID NO: 2073329 - DNA, 15 bp, Homo sapiens
atcagtttgtctaga

SEQ ID NO: 2073330 - DNA, 15 bp, Homo sapiens
tcagtttgtctagat

SEQ ID NO: 2073331 - DNA, 15 bp, Homo sapiens
cagtttgtctagatc

SEQ ID NO: 2073332 - DNA, 15 bp, Homo sapiens
agtttgtctagatct

SEQ ID NO: 2073333 - DNA, 15 bp, Homo sapiens
gtttgtctagatcta

SEQ ID NO: 2073334 - DNA, 15 bp, Homo sapiens
tttgtctagatctac

SEQ ID NO: 2073335 - DNA, 15 bp, Homo sapiens
ttgtctagatctact

SEQ ID NO: 2073336 - DNA, 15 bp, Homo sapiens
tgtctagatctactt

SEQ ID NO: 2073337 - DNA, 15 bp, Homo sapiens
gtctagatctacttt

SEQ ID NO: 2073338 - DNA, 15 bp, Homo sapiens
tctagatctactttt

SEQ ID NO: 2073339 - DNA, 15 bp, Homo sapiens
ctagatctacttttt

SEQ ID NO: 2073340 - DNA, 15 bp, Homo sapiens
tagatctactttttg

SEQ ID NO: 2073341 - DNA, 15 bp, Homo sapiens
agatctactttttgt

SEQ ID NO: 2073342 - DNA, 15 bp, Homo sapiens
gatctactttttgtc

SEQ ID NO: 2073343 - DNA, 15 bp, Homo sapiens
atctactttttgtct

SEQ ID NO: 2073344 - DNA, 15 bp, Homo sapiens
tctactttttgtctt

SEQ ID NO: 2073345 - DNA, 15 bp, Homo sapiens
ctactttttgtcttg

SEQ ID NO: 2073346 - DNA, 15 bp, Homo sapiens
tactttttgtcttga

SEQ ID NO: 2073347 - DNA, 15 bp, Homo sapiens
actttttgtcttgaa

SEQ ID NO: 2073348 - DNA, 15 bp, Homo sapiens
ctttttgtcttgaaa

SEQ ID NO: 2073349 - DNA, 15 bp, Homo sapiens
tttttgtcttgaaag

SEQ ID NO: 2073350 - DNA, 15 bp, Homo sapiens
ttttgtcttgaaagt

SEQ ID NO: 2073351 - DNA, 15 bp, Homo sapiens
tttgtcttgaaagtc

SEQ ID NO: 2073352 - DNA, 15 bp, Homo sapiens
ttgtcttgaaagtcc

SEQ ID NO: 2073353 - DNA, 15 bp, Homo sapiens
tgtcttgaaagtcca

SEQ ID NO: 2073354 - DNA, 15 bp, Homo sapiens
gtcttgaaagtccaa

SEQ ID NO: 2073355 - DNA, 15 bp, Homo sapiens
tcttgaaagtccaac

SEQ ID NO: 2073356 - DNA, 15 bp, Homo sapiens
cttgaaagtccaact

SEQ ID NO: 2073357 - DNA, 15 bp, Homo sapiens
ttgaaagtccaacta

SEQ ID NO: 2073358 - DNA, 15 bp, Homo sapiens
tgaaagtccaactaa

SEQ ID NO: 2073359 - DNA, 15 bp, Homo sapiens
gaaagtccaactaag

SEQ ID NO: 2073360 - DNA, 15 bp, Homo sapiens
aaagtccaactaaga

SEQ ID NO: 2073361 - DNA, 15 bp, Homo sapiens
aagtccaactaagaa

SEQ ID NO: 2073362 - DNA, 15 bp, Homo sapiens
agtccaactaagaat

SEQ ID NO: 2073363 - DNA, 15 bp, Homo sapiens
gtccaactaagaatt

SEQ ID NO: 2073364 - DNA, 15 bp, Homo sapiens
tccaactaagaattt

SEQ ID NO: 2073365 - DNA, 15 bp, Homo sapiens
ccaactaagaatttt

SEQ ID NO: 2073366 - DNA, 15 bp, Homo sapiens
caactaagaattttg

SEQ ID NO: 2073367 - DNA, 15 bp, Homo sapiens
aactaagaattttgt

SEQ ID NO: 2073368 - DNA, 15 bp, Homo sapiens
actaagaattttgtt

SEQ ID NO: 2073369 - DNA, 15 bp, Homo sapiens
ctaagaattttgttt

SEQ ID NO: 2073370 - DNA, 15 bp, Homo sapiens
taagaattttgtttt

SEQ ID NO: 2073371 - DNA, 15 bp, Homo sapiens
aagaattttgttttc

SEQ ID NO: 2073372 - DNA, 15 bp, Homo sapiens
agaattttgttttca

SEQ ID NO: 2073373 - DNA, 15 bp, Homo sapiens
gaattttgttttcag

SEQ ID NO: 2073374 - DNA, 15 bp, Homo sapiens
aattttgttttcagt

SEQ ID NO: 2073375 - DNA, 15 bp, Homo sapiens
attttgttttcagta

SEQ ID NO: 2073376 - DNA, 15 bp, Homo sapiens
ttttgttttcagtat

SEQ ID NO: 2073377 - DNA, 15 bp, Homo sapiens
tttgttttcagtata

SEQ ID NO: 2073378 - DNA, 15 bp, Homo sapiens
ttgttttcagtataa

SEQ ID NO: 2073379 - DNA, 15 bp, Homo sapiens
tgttttcagtataac

SEQ ID NO: 2073380 - DNA, 15 bp, Homo sapiens
gttttcagtataacg

SEQ ID NO: 2073381 - DNA, 15 bp, Homo sapiens
ttttcagtataacgg

SEQ ID NO: 2073382 - DNA, 15 bp, Homo sapiens
tttcagtataacgga

SEQ ID NO: 2073383 - DNA, 15 bp, Homo sapiens
ttcagtataacggat

SEQ ID NO: 2073384 - DNA, 15 bp, Homo sapiens
tcagtataacggata

SEQ ID NO: 2073385 - DNA, 15 bp, Homo sapiens
cagtataacggatat

SEQ ID NO: 2073386 - DNA, 15 bp, Homo sapiens
agtataacggatata

SEQ ID NO: 2073387 - DNA, 15 bp, Homo sapiens
gtataacggatataa

SEQ ID NO: 2073388 - DNA, 15 bp, Homo sapiens
tataacggatataac

SEQ ID NO: 2073389 - DNA, 15 bp, Homo sapiens
ataacggatataacc

SEQ ID NO: 2073390 - DNA, 15 bp, Homo sapiens
taacggatataacca

SEQ ID NO: 2073391 - DNA, 15 bp, Homo sapiens
aacggatataaccat

SEQ ID NO: 2073392 - DNA, 15 bp, Homo sapiens
acggatataaccatt

SEQ ID NO: 2073393 - DNA, 15 bp, Homo sapiens
cggatataaccatta

SEQ ID NO: 2073394 - DNA, 15 bp, Homo sapiens
ggatataaccattag

SEQ ID NO: 2073395 - DNA, 15 bp, Homo sapiens
gatataaccattagt

SEQ ID NO: 2073396 - DNA, 15 bp, Homo sapiens
atataaccattagta

SEQ ID NO: 2073397 - DNA, 15 bp, Homo sapiens
tataaccattagtaa

SEQ ID NO: 2073398 - DNA, 15 bp, Homo sapiens
ataaccattagtaac

SEQ ID NO: 2073399 - DNA, 15 bp, Homo sapiens
taaccattagtaact

SEQ ID NO: 2073400 - DNA, 15 bp, Homo sapiens
aaccattagtaactc

SEQ ID NO: 2073401 - DNA, 15 bp, Homo sapiens
accattagtaactcc

SEQ ID NO: 2073402 - DNA, 15 bp, Homo sapiens
ccattagtaactcca

SEQ ID NO: 2073403 - DNA, 15 bp, Homo sapiens
cattagtaactccac

SEQ ID NO: 2073404 - DNA, 15 bp, Homo sapiens
attagtaactccaca

SEQ ID NO: 2073405 - DNA, 15 bp, Homo sapiens
ttagtaactccacag

SEQ ID NO: 2073406 - DNA, 15 bp, Homo sapiens
tagtaactccacagc

SEQ ID NO: 2073407 - DNA, 15 bp, Homo sapiens
agtaactccacagcg

SEQ ID NO: 2073408 - DNA, 15 bp, Homo sapiens
gtaactccacagcga

SEQ ID NO: 2073409 - DNA, 15 bp, Homo sapiens
taactccacagcgat

SEQ ID NO: 2073410 - DNA, 15 bp, Homo sapiens
aactccacagcgatc

SEQ ID NO: 2073411 - DNA, 15 bp, Homo sapiens
actccacagcgatct

SEQ ID NO: 2073412 - DNA, 15 bp, Homo sapiens
ctccacagcgatctg

SEQ ID NO: 2073413 - DNA, 15 bp, Homo sapiens
tccacagcgatctgt

SEQ ID NO: 2073414 - DNA, 15 bp, Homo sapiens
ccacagcgatctgtc

SEQ ID NO: 2073415 - DNA, 15 bp, Homo sapiens
cacagcgatctgtct

SEQ ID NO: 2073416 - DNA, 15 bp, Homo sapiens
acagcgatctgtctg

SEQ ID NO: 2073417 - DNA, 15 bp, Homo sapiens
cagcgatctgtctgt

SEQ ID NO: 2073418 - DNA, 15 bp, Homo sapiens
agcgatctgtctgta

SEQ ID NO: 2073419 - DNA, 15 bp, Homo sapiens
gcgatctgtctgtat

SEQ ID NO: 2073420 - DNA, 15 bp, Homo sapiens
cgatctgtctgtatc

SEQ ID NO: 2073421 - DNA, 15 bp, Homo sapiens
gatctgtctgtatct

SEQ ID NO: 2073422 - DNA, 15 bp, Homo sapiens
atctgtctgtatcta

SEQ ID NO: 2073423 - DNA, 15 bp, Homo sapiens
tctgtctgtatctat

SEQ ID NO: 2073424 - DNA, 15 bp, Homo sapiens
ctgtctgtatctata

SEQ ID NO: 2073425 - DNA, 15 bp, Homo sapiens
tgtctgtatctatat

SEQ ID NO: 2073426 - DNA, 15 bp, Homo sapiens
gtctgtatctatata

SEQ ID NO: 2073427 - DNA, 15 bp, Homo sapiens
tctgtatctatatat

SEQ ID NO: 2073428 - DNA, 15 bp, Homo sapiens
ctgtatctatatatt

SEQ ID NO: 2073429 - DNA, 15 bp, Homo sapiens
tgtatctatatatta

SEQ ID NO: 2073430 - DNA, 15 bp, Homo sapiens
gtatctatatattac

SEQ ID NO: 2073431 - DNA, 15 bp, Homo sapiens
tatctatatattact

SEQ ID NO: 2073432 - DNA, 15 bp, Homo sapiens
atctatatattacta

SEQ ID NO: 2073433 - DNA, 15 bp, Homo sapiens
tctatatattactag

SEQ ID NO: 2073434 - DNA, 15 bp, Homo sapiens
ctatatattactagc

SEQ ID NO: 2073435 - DNA, 15 bp, Homo sapiens
tatatattactagct

SEQ ID NO: 2073436 - DNA, 15 bp, Homo sapiens
atatattactagcta

SEQ ID NO: 2073437 - DNA, 15 bp, Homo sapiens
tatattactagctag

SEQ ID NO: 2073438 - DNA, 15 bp, Homo sapiens
atattactagctagt

SEQ ID NO: 2073439 - DNA, 15 bp, Homo sapiens
tattactagctagtt

SEQ ID NO: 2073440 - DNA, 15 bp, Homo sapiens
attactagctagtta

SEQ ID NO: 2073441 - DNA, 15 bp, Homo sapiens
ttactagctagttaa

SEQ ID NO: 2073442 - DNA, 15 bp, Homo sapiens
tactagctagttaat

SEQ ID NO: 2073443 - DNA, 15 bp, Homo sapiens
actagctagttaata

SEQ ID NO: 2073444 - DNA, 15 bp, Homo sapiens
ctagctagttaatat

SEQ ID NO: 2073445 - DNA, 15 bp, Homo sapiens
tagctagttaatatt

SEQ ID NO: 2073446 - DNA, 15 bp, Homo sapiens
agctagttaatattt

SEQ ID NO: 2073447 - DNA, 15 bp, Homo sapiens
gctagttaatatttc

SEQ ID NO: 2073448 - DNA, 15 bp, Homo sapiens
ctagttaatatttcc

SEQ ID NO: 2073449 - DNA, 15 bp, Homo sapiens
tagttaatatttccc

SEQ ID NO: 2073450 - DNA, 15 bp, Homo sapiens
agttaatatttccca

SEQ ID NO: 2073451 - DNA, 15 bp, Homo sapiens
gttaatatttcccaa

SEQ ID NO: 2073452 - DNA, 15 bp, Homo sapiens
ttaatatttcccaac

SEQ ID NO: 2073453 - DNA, 15 bp, Homo sapiens
taatatttcccaaca

SEQ ID NO: 2073454 - DNA, 15 bp, Homo sapiens
aatatttcccaacat

SEQ ID NO: 2073455 - DNA, 15 bp, Homo sapiens
atatttcccaacata

SEQ ID NO: 2073456 - DNA, 15 bp, Homo sapiens
tatttcccaacatat

SEQ ID NO: 2073457 - DNA, 15 bp, Homo sapiens
atttcccaacatatc

SEQ ID NO: 2073458 - DNA, 15 bp, Homo sapiens
tttcccaacatatct

SEQ ID NO: 2073459 - DNA, 15 bp, Homo sapiens
ttcccaacatatctt

SEQ ID NO: 2073460 - DNA, 15 bp, Homo sapiens
tcccaacatatctta

SEQ ID NO: 2073461 - DNA, 15 bp, Homo sapiens
cccaacatatcttaa

SEQ ID NO: 2073462 - DNA, 15 bp, Homo sapiens
ccaacatatcttaaa

SEQ ID NO: 2073463 - DNA, 15 bp, Homo sapiens
caacatatcttaaac

SEQ ID NO: 2073464 - DNA, 15 bp, Homo sapiens
aacatatcttaaaca

SEQ ID NO: 2073465 - DNA, 15 bp, Homo sapiens
acatatcttaaacaa

SEQ ID NO: 2073466 - DNA, 15 bp, Homo sapiens
catatcttaaacaag

SEQ ID NO: 2073467 - DNA, 15 bp, Homo sapiens
atatcttaaacaaga

SEQ ID NO: 2073468 - DNA, 15 bp, Homo sapiens
tatcttaaacaagag

SEQ ID NO: 2073469 - DNA, 15 bp, Homo sapiens
atcttaaacaagaga

SEQ ID NO: 2073470 - DNA, 15 bp, Homo sapiens
tcttaaacaagagaa

SEQ ID NO: 2073471 - DNA, 15 bp, Homo sapiens
cttaaacaagagaaa

SEQ ID NO: 2073472 - DNA, 15 bp, Homo sapiens
ttaaacaagagaaag

SEQ ID NO: 2073473 - DNA, 15 bp, Homo sapiens
taaacaagagaaaga

SEQ ID NO: 2073474 - DNA, 15 bp, Homo sapiens
aaacaagagaaagaa

SEQ ID NO: 2073475 - DNA, 15 bp, Homo sapiens
aacaagagaaagaaa

SEQ ID NO: 2073476 - DNA, 15 bp, Homo sapiens
acaagagaaagaaat

SEQ ID NO: 2073477 - DNA, 15 bp, Homo sapiens
caagagaaagaaatt

SEQ ID NO: 2073478 - DNA, 15 bp, Homo sapiens
aagagaaagaaattc

SEQ ID NO: 2073479 - DNA, 15 bp, Homo sapiens
agagaaagaaattca

SEQ ID NO: 2073480 - DNA, 15 bp, Homo sapiens
gagaaagaaattcat

SEQ ID NO: 2073481 - DNA, 15 bp, Homo sapiens
agaaagaaattcata

SEQ ID NO: 2073482 - DNA, 15 bp, Homo sapiens
gaaagaaattcatag

SEQ ID NO: 2073483 - DNA, 15 bp, Homo sapiens
aaagaaattcataga

SEQ ID NO: 2073484 - DNA, 15 bp, Homo sapiens
aagaaattcatagaa

SEQ ID NO: 2073485 - DNA, 15 bp, Homo sapiens
agaaattcatagaag

SEQ ID NO: 2073486 - DNA, 15 bp, Homo sapiens
gaaattcatagaagc

SEQ ID NO: 2073487 - DNA, 15 bp, Homo sapiens
aaattcatagaagcc

SEQ ID NO: 2073488 - DNA, 15 bp, Homo sapiens
aattcatagaagcca

SEQ ID NO: 2073489 - DNA, 15 bp, Homo sapiens
attcatagaagccag

SEQ ID NO: 2073490 - DNA, 15 bp, Homo sapiens
ttcatagaagccaga

SEQ ID NO: 2073491 - DNA, 15 bp, Homo sapiens
tcatagaagccagac

SEQ ID NO: 2073492 - DNA, 15 bp, Homo sapiens
catagaagccagaca

SEQ ID NO: 2073493 - DNA, 15 bp, Homo sapiens
atagaagccagacac

SEQ ID NO: 2073494 - DNA, 15 bp, Homo sapiens
tagaagccagacact

SEQ ID NO: 2073495 - DNA, 15 bp, Homo sapiens
agaagccagacactc

SEQ ID NO: 2073496 - DNA, 15 bp, Homo sapiens
gaagccagacactcc

SEQ ID NO: 2073497 - DNA, 15 bp, Homo sapiens
aagccagacactcct

SEQ ID NO: 2073498 - DNA, 15 bp, Homo sapiens
agccagacactcctc

SEQ ID NO: 2073499 - DNA, 15 bp, Homo sapiens
gccagacactcctcc

SEQ ID NO: 2073500 - DNA, 15 bp, Homo sapiens
ccagacactcctcca

SEQ ID NO: 2073501 - DNA, 15 bp, Homo sapiens
cagacactcctccaa

SEQ ID NO: 2073502 - DNA, 15 bp, Homo sapiens
agacactcctccaat

SEQ ID NO: 2073503 - DNA, 15 bp, Homo sapiens
gacactcctccaatt

SEQ ID NO: 2073504 - DNA, 15 bp, Homo sapiens
acactcctccaatta

SEQ ID NO: 2073505 - DNA, 15 bp, Homo sapiens
cactcctccaattat

SEQ ID NO: 2073506 - DNA, 15 bp, Homo sapiens
actcctccaattata

SEQ ID NO: 2073507 - DNA, 15 bp, Homo sapiens
ctcctccaattatat

SEQ ID NO: 2073508 - DNA, 15 bp, Homo sapiens
tcctccaattatatt

SEQ ID NO: 2073509 - DNA, 15 bp, Homo sapiens
cctccaattatattc

SEQ ID NO: 2073510 - DNA, 15 bp, Homo sapiens
ctccaattatattct

SEQ ID NO: 2073511 - DNA, 15 bp, Homo sapiens
tccaattatattctc

SEQ ID NO: 2073512 - DNA, 15 bp, Homo sapiens
ccaattatattctct

SEQ ID NO: 2073513 - DNA, 15 bp, Homo sapiens
caattatattctctt

SEQ ID NO: 2073514 - DNA, 15 bp, Homo sapiens
aattatattctcttc

SEQ ID NO: 2073515 - DNA, 15 bp, Homo sapiens
attatattctcttca

SEQ ID NO: 2073516 - DNA, 15 bp, Homo sapiens
ttatattctcttcat

SEQ ID NO: 2073517 - DNA, 15 bp, Homo sapiens
tatattctcttcata

SEQ ID NO: 2073518 - DNA, 15 bp, Homo sapiens
atattctcttcatat

SEQ ID NO: 2073519 - DNA, 15 bp, Homo sapiens
tattctcttcatata

SEQ ID NO: 2073520 - DNA, 15 bp, Homo sapiens
attctcttcatatat

SEQ ID NO: 2073521 - DNA, 15 bp, Homo sapiens
ttctcttcatatatg

SEQ ID NO: 2073522 - DNA, 15 bp, Homo sapiens
tctcttcatatatga

SEQ ID NO: 2073523 - DNA, 15 bp, Homo sapiens
ctcttcatatatgat

SEQ ID NO: 2073524 - DNA, 15 bp, Homo sapiens
tcttcatatatgatt

SEQ ID NO: 2073525 - DNA, 15 bp, Homo sapiens
cttcatatatgattg

SEQ ID NO: 2073526 - DNA, 15 bp, Homo sapiens
ttcatatatgattgt

SEQ ID NO: 2073527 - DNA, 15 bp, Homo sapiens
tcatatatgattgta

SEQ ID NO: 2073528 - DNA, 15 bp, Homo sapiens
catatatgattgtat

SEQ ID NO: 2073529 - DNA, 15 bp, Homo sapiens
atatatgattgtatc

SEQ ID NO: 2073530 - DNA, 15 bp, Homo sapiens
tatatgattgtatct

SEQ ID NO: 2073531 - DNA, 15 bp, Homo sapiens
atatgattgtatctc

SEQ ID NO: 2073532 - DNA, 15 bp, Homo sapiens
tatgattgtatctca

SEQ ID NO: 2073533 - DNA, 15 bp, Homo sapiens
atgattgtatctcac

SEQ ID NO: 2073534 - DNA, 15 bp, Homo sapiens
tgattgtatctcaca

SEQ ID NO: 2073535 - DNA, 15 bp, Homo sapiens
gattgtatctcacag

SEQ ID NO: 2073536 - DNA, 15 bp, Homo sapiens
attgtatctcacagg

SEQ ID NO: 2073537 - DNA, 15 bp, Homo sapiens
ttgtatctcacaggt

SEQ ID NO: 2073538 - DNA, 15 bp, Homo sapiens
tgtatctcacaggtt

SEQ ID NO: 2073539 - DNA, 15 bp, Homo sapiens
gtatctcacaggttg

SEQ ID NO: 2073540 - DNA, 15 bp, Homo sapiens
tatctcacaggttgg

SEQ ID NO: 2073541 - DNA, 15 bp, Homo sapiens
atctcacaggttggt

SEQ ID NO: 2073542 - DNA, 15 bp, Homo sapiens
tctcacaggttggtt

SEQ ID NO: 2073543 - DNA, 15 bp, Homo sapiens
ctcacaggttggttg

SEQ ID NO: 2073544 - DNA, 15 bp, Homo sapiens
tcacaggttggttgc

SEQ ID NO: 2073545 - DNA, 15 bp, Homo sapiens
cacaggttggttgct

SEQ ID NO: 2073546 - DNA, 15 bp, Homo sapiens
acaggttggttgcta

SEQ ID NO: 2073547 - DNA, 15 bp, Homo sapiens
caggttggttgctat

SEQ ID NO: 2073548 - DNA, 15 bp, Homo sapiens
aggttggttgctatg

SEQ ID NO: 2073549 - DNA, 15 bp, Homo sapiens
ggttggttgctatgg

SEQ ID NO: 2073550 - DNA, 15 bp, Homo sapiens
gttggttgctatggt

SEQ ID NO: 2073551 - DNA, 15 bp, Homo sapiens
ttggttgctatggta

SEQ ID NO: 2073552 - DNA, 15 bp, Homo sapiens
tggttgctatggtat

SEQ ID NO: 2073553 - DNA, 15 bp, Homo sapiens
ggttgctatggtatt

SEQ ID NO: 2073554 - DNA, 15 bp, Homo sapiens
gttgctatggtattt

SEQ ID NO: 2073555 - DNA, 15 bp, Homo sapiens
ttgctatggtatttg

SEQ ID NO: 2073556 - DNA, 15 bp, Homo sapiens
tgctatggtatttga

SEQ ID NO: 2073557 - DNA, 15 bp, Homo sapiens
gctatggtatttgat

SEQ ID NO: 2073558 - DNA, 15 bp, Homo sapiens
ctatggtatttgatt

SEQ ID NO: 2073559 - DNA, 15 bp, Homo sapiens
tatggtatttgattc

SEQ ID NO: 2073560 - DNA, 15 bp, Homo sapiens
atggtatttgattcc

SEQ ID NO: 2073561 - DNA, 15 bp, Homo sapiens
tggtatttgattcct

SEQ ID NO: 2073562 - DNA, 15 bp, Homo sapiens
ggtatttgattccta

SEQ ID NO: 2073563 - DNA, 15 bp, Homo sapiens
gtatttgattcctag

SEQ ID NO: 2073564 - DNA, 15 bp, Homo sapiens
tatttgattcctagt

SEQ ID NO: 2073565 - DNA, 15 bp, Homo sapiens
atttgattcctagtt

SEQ ID NO: 2073566 - DNA, 15 bp, Homo sapiens
tttgattcctagtta

SEQ ID NO: 2073567 - DNA, 15 bp, Homo sapiens
ttgattcctagttac

SEQ ID NO: 2073568 - DNA, 15 bp, Homo sapiens
tgattcctagttacc

SEQ ID NO: 2073569 - DNA, 15 bp, Homo sapiens
gattcctagttacca

SEQ ID NO: 2073570 - DNA, 15 bp, Homo sapiens
attcctagttaccat

SEQ ID NO: 2073571 - DNA, 15 bp, Homo sapiens
ttcctagttaccatg

SEQ ID NO: 2073572 - DNA, 15 bp, Homo sapiens
tcctagttaccatga

SEQ ID NO: 2073573 - DNA, 15 bp, Homo sapiens
cctagttaccatgat

SEQ ID NO: 2073574 - DNA, 15 bp, Homo sapiens
ctagttaccatgata

SEQ ID NO: 2073575 - DNA, 15 bp, Homo sapiens
tagttaccatgatac

SEQ ID NO: 2073576 - DNA, 15 bp, Homo sapiens
agttaccatgatact

SEQ ID NO: 2073577 - DNA, 15 bp, Homo sapiens
gttaccatgatacta

SEQ ID NO: 2073578 - DNA, 15 bp, Homo sapiens
ttaccatgatactat

SEQ ID NO: 2073579 - DNA, 15 bp, Homo sapiens
taccatgatactatt

SEQ ID NO: 2073580 - DNA, 15 bp, Homo sapiens
accatgatactatta

SEQ ID NO: 2073581 - DNA, 15 bp, Homo sapiens
ccatgatactattaa

SEQ ID NO: 2073582 - DNA, 15 bp, Homo sapiens
catgatactattaag

SEQ ID NO: 2073583 - DNA, 15 bp, Homo sapiens
atgatactattaagt

SEQ ID NO: 2073584 - DNA, 15 bp, Homo sapiens
tgatactattaagtg

SEQ ID NO: 2073585 - DNA, 15 bp, Homo sapiens
gatactattaagtgt

SEQ ID NO: 2073586 - DNA, 15 bp, Homo sapiens
atactattaagtgtt

SEQ ID NO: 2073587 - DNA, 15 bp, Homo sapiens
tactattaagtgttt

SEQ ID NO: 2073588 - DNA, 15 bp, Homo sapiens
actattaagtgtttg

SEQ ID NO: 2073589 - DNA, 15 bp, Homo sapiens
ctattaagtgtttgc

SEQ ID NO: 2073590 - DNA, 15 bp, Homo sapiens
tattaagtgtttgct

SEQ ID NO: 2073591 - DNA, 15 bp, Homo sapiens
attaagtgtttgctg

SEQ ID NO: 2073592 - DNA, 15 bp, Homo sapiens
ttaagtgtttgctgc

SEQ ID NO: 2073593 - DNA, 15 bp, Homo sapiens
taagtgtttgctgca

SEQ ID NO: 2073594 - DNA, 15 bp, Homo sapiens
aagtgtttgctgcag

SEQ ID NO: 2073595 - DNA, 15 bp, Homo sapiens
agtgtttgctgcaga

SEQ ID NO: 2073596 - DNA, 15 bp, Homo sapiens
gtgtttgctgcagaa

SEQ ID NO: 2073597 - DNA, 15 bp, Homo sapiens
tgtttgctgcagaat

SEQ ID NO: 2073598 - DNA, 15 bp, Homo sapiens
gtttgctgcagaatc

SEQ ID NO: 2073599 - DNA, 15 bp, Homo sapiens
tttgctgcagaatct

SEQ ID NO: 2073600 - DNA, 15 bp, Homo sapiens
ttgctgcagaatctg

SEQ ID NO: 2073601 - DNA, 15 bp, Homo sapiens
tgctgcagaatctgc

SEQ ID NO: 2073602 - DNA, 15 bp, Homo sapiens
gctgcagaatctgcc

SEQ ID NO: 2073603 - DNA, 15 bp, Homo sapiens
ctgcagaatctgcca

SEQ ID NO: 2073604 - DNA, 15 bp, Homo sapiens
tgcagaatctgccat

SEQ ID NO: 2073605 - DNA, 15 bp, Homo sapiens
gcagaatctgccatg

SEQ ID NO: 2073606 - DNA, 15 bp, Homo sapiens
cagaatctgccatgc

SEQ ID NO: 2073607 - DNA, 15 bp, Homo sapiens
agaatctgccatgct

SEQ ID NO: 2073608 - DNA, 15 bp, Homo sapiens
gaatctgccatgctt

SEQ ID NO: 2073609 - DNA, 15 bp, Homo sapiens
aatctgccatgcttg

SEQ ID NO: 2073610 - DNA, 15 bp, Homo sapiens
atctgccatgcttgg

SEQ ID NO: 2073611 - DNA, 15 bp, Homo sapiens
tctgccatgcttggt

SEQ ID NO: 2073612 - DNA, 15 bp, Homo sapiens
ctgccatgcttggtc

SEQ ID NO: 2073613 - DNA, 15 bp, Homo sapiens
tgccatgcttggtca

SEQ ID NO: 2073614 - DNA, 15 bp, Homo sapiens
gccatgcttggtcac

SEQ ID NO: 2073615 - DNA, 15 bp, Homo sapiens
ccatgcttggtcaca

SEQ ID NO: 2073616 - DNA, 15 bp, Homo sapiens
catgcttggtcacag

SEQ ID NO: 2073617 - DNA, 15 bp, Homo sapiens
atgcttggtcacaga

SEQ ID NO: 2073618 - DNA, 15 bp, Homo sapiens
tgcttggtcacagaa

SEQ ID NO: 2073619 - DNA, 15 bp, Homo sapiens
gcttggtcacagaac

SEQ ID NO: 2073620 - DNA, 15 bp, Homo sapiens
cttggtcacagaact

SEQ ID NO: 2073621 - DNA, 15 bp, Homo sapiens
ttggtcacagaactc

SEQ ID NO: 2073622 - DNA, 15 bp, Homo sapiens
tggtcacagaactca

SEQ ID NO: 2073623 - DNA, 15 bp, Homo sapiens
ggtcacagaactcag

SEQ ID NO: 2073624 - DNA, 15 bp, Homo sapiens
gtcacagaactcagt

SEQ ID NO: 2073625 - DNA, 15 bp, Homo sapiens
tcacagaactcagtg

SEQ ID NO: 2073626 - DNA, 15 bp, Homo sapiens
cacagaactcagtga

SEQ ID NO: 2073627 - DNA, 15 bp, Homo sapiens
acagaactcagtgaa

SEQ ID NO: 2073628 - DNA, 15 bp, Homo sapiens
cagaactcagtgaaa

SEQ ID NO: 2073629 - DNA, 15 bp, Homo sapiens
agaactcagtgaaag

SEQ ID NO: 2073630 - DNA, 15 bp, Homo sapiens
gaactcagtgaaagt

SEQ ID NO: 2073631 - DNA, 15 bp, Homo sapiens
aactcagtgaaagtt

SEQ ID NO: 2073632 - DNA, 15 bp, Homo sapiens
actcagtgaaagttc

SEQ ID NO: 2073633 - DNA, 15 bp, Homo sapiens
ctcagtgaaagttct

SEQ ID NO: 2073634 - DNA, 15 bp, Homo sapiens
tcagtgaaagttcta

SEQ ID NO: 2073635 - DNA, 15 bp, Homo sapiens
cagtgaaagttctat

SEQ ID NO: 2073636 - DNA, 15 bp, Homo sapiens
agtgaaagttctatt

SEQ ID NO: 2073637 - DNA, 15 bp, Homo sapiens
gtgaaagttctatta

SEQ ID NO: 2073638 - DNA, 15 bp, Homo sapiens
tgaaagttctattaa

SEQ ID NO: 2073639 - DNA, 15 bp, Homo sapiens
gaaagttctattaaa

SEQ ID NO: 2073640 - DNA, 15 bp, Homo sapiens
aaagttctattaaaa

SEQ ID NO: 2073641 - DNA, 15 bp, Homo sapiens
aagttctattaaaag

SEQ ID NO: 2073642 - DNA, 15 bp, Homo sapiens
agttctattaaaaga

SEQ ID NO: 2073643 - DNA, 15 bp, Homo sapiens
gttctattaaaagac

SEQ ID NO: 2073644 - DNA, 15 bp, Homo sapiens
ttctattaaaagact

SEQ ID NO: 2073645 - DNA, 15 bp, Homo sapiens
tctattaaaagactt

SEQ ID NO: 2073646 - DNA, 15 bp, Homo sapiens
ctattaaaagactta

SEQ ID NO: 2073647 - DNA, 15 bp, Homo sapiens
tattaaaagacttat

SEQ ID NO: 2073648 - DNA, 15 bp, Homo sapiens
attaaaagacttatc

SEQ ID NO: 2073649 - DNA, 15 bp, Homo sapiens
ttaaaagacttatca

SEQ ID NO: 2073650 - DNA, 15 bp, Homo sapiens
taaaagacttatcaa

SEQ ID NO: 2073651 - DNA, 15 bp, Homo sapiens
aaaagacttatcaat

SEQ ID NO: 2073652 - DNA, 15 bp, Homo sapiens
aaagacttatcaatt

SEQ ID NO: 2073653 - DNA, 15 bp, Homo sapiens
aagacttatcaattt

SEQ ID NO: 2073654 - DNA, 15 bp, Homo sapiens
agacttatcaatttg

SEQ ID NO: 2073655 - DNA, 15 bp, Homo sapiens
gacttatcaatttga

SEQ ID NO: 2073656 - DNA, 15 bp, Homo sapiens
acttatcaatttgat

SEQ ID NO: 2073657 - DNA, 15 bp, Homo sapiens
cttatcaatttgatg

SEQ ID NO: 2073658 - DNA, 15 bp, Homo sapiens
ttatcaatttgatgc

SEQ ID NO: 2073659 - DNA, 15 bp, Homo sapiens
tatcaatttgatgcc

SEQ ID NO: 2073660 - DNA, 15 bp, Homo sapiens
atcaatttgatgcct

SEQ ID NO: 2073661 - DNA, 15 bp, Homo sapiens
tcaatttgatgcctg

SEQ ID NO: 2073662 - DNA, 15 bp, Homo sapiens
caatttgatgcctgt

SEQ ID NO: 2073663 - DNA, 15 bp, Homo sapiens
aatttgatgcctgtt

SEQ ID NO: 2073664 - DNA, 15 bp, Homo sapiens
atttgatgcctgttc

SEQ ID NO: 2073665 - DNA, 15 bp, Homo sapiens
tttgatgcctgttca

SEQ ID NO: 2073666 - DNA, 15 bp, Homo sapiens
ttgatgcctgttcag

SEQ ID NO: 2073667 - DNA, 15 bp, Homo sapiens
tgatgcctgttcagt

SEQ ID NO: 2073668 - DNA, 15 bp, Homo sapiens
gatgcctgttcagtc

SEQ ID NO: 2073669 - DNA, 15 bp, Homo sapiens
atgcctgttcagtca

SEQ ID NO: 2073670 - DNA, 15 bp, Homo sapiens
tgcctgttcagtcaa

SEQ ID NO: 2073671 - DNA, 15 bp, Homo sapiens
gcctgttcagtcaac

SEQ ID NO: 2073672 - DNA, 15 bp, Homo sapiens
cctgttcagtcaacg

SEQ ID NO: 2073673 - DNA, 15 bp, Homo sapiens
ctgttcagtcaacgt

SEQ ID NO: 2073674 - DNA, 15 bp, Homo sapiens
tgttcagtcaacgtc

SEQ ID NO: 2073675 - DNA, 15 bp, Homo sapiens
gttcagtcaacgtct

SEQ ID NO: 2073676 - DNA, 15 bp, Homo sapiens
ttcagtcaacgtctt

SEQ ID NO: 2073677 - DNA, 15 bp, Homo sapiens
tcagtcaacgtcttc

SEQ ID NO: 2073678 - DNA, 15 bp, Homo sapiens
cagtcaacgtcttcc

SEQ ID NO: 2073679 - DNA, 15 bp, Homo sapiens
agtcaacgtcttcca

SEQ ID NO: 2073680 - DNA, 15 bp, Homo sapiens
gtcaacgtcttccat

SEQ ID NO: 2073681 - DNA, 15 bp, Homo sapiens
tcaacgtcttccatt

SEQ ID NO: 2073682 - DNA, 15 bp, Homo sapiens
caacgtcttccattt

SEQ ID NO: 2073683 - DNA, 15 bp, Homo sapiens
aacgtcttccatttt

SEQ ID NO: 2073684 - DNA, 15 bp, Homo sapiens
acgtcttccattttg

SEQ ID NO: 2073685 - DNA, 15 bp, Homo sapiens
cgtcttccattttgt

SEQ ID NO: 2073686 - DNA, 15 bp, Homo sapiens
gtcttccattttgtt

SEQ ID NO: 2073687 - DNA, 15 bp, Homo sapiens
tcttccattttgttg

SEQ ID NO: 2073688 - DNA, 15 bp, Homo sapiens
cttccattttgttga

SEQ ID NO: 2073689 - DNA, 15 bp, Homo sapiens
ttccattttgttgag

SEQ ID NO: 2073690 - DNA, 15 bp, Homo sapiens
tccattttgttgagg

SEQ ID NO: 2073691 - DNA, 15 bp, Homo sapiens
ccattttgttgaggc

SEQ ID NO: 2073692 - DNA, 15 bp, Homo sapiens
cattttgttgaggct

SEQ ID NO: 2073693 - DNA, 15 bp, Homo sapiens
attttgttgaggctg

SEQ ID NO: 2073694 - DNA, 15 bp, Homo sapiens
ttttgttgaggctgg

SEQ ID NO: 2073695 - DNA, 15 bp, Homo sapiens
tttgttgaggctgga

SEQ ID NO: 2073696 - DNA, 15 bp, Homo sapiens
ttgttgaggctggag

SEQ ID NO: 2073697 - DNA, 15 bp, Homo sapiens
tgttgaggctggaga

SEQ ID NO: 2073698 - DNA, 15 bp, Homo sapiens
gttgaggctggagaa

SEQ ID NO: 2073699 - DNA, 15 bp, Homo sapiens
ttgaggctggagaac

SEQ ID NO: 2073700 - DNA, 15 bp, Homo sapiens
tgaggctggagaacc

SEQ ID NO: 2073701 - DNA, 15 bp, Homo sapiens
gaggctggagaacct

SEQ ID NO: 2073702 - DNA, 15 bp, Homo sapiens
aggctggagaacctc

SEQ ID NO: 2073703 - DNA, 15 bp, Homo sapiens
ggctggagaacctcc

SEQ ID NO: 2073704 - DNA, 15 bp, Homo sapiens
gctggagaacctcca

SEQ ID NO: 2073705 - DNA, 15 bp, Homo sapiens
ctggagaacctccaa

SEQ ID NO: 2073706 - DNA, 15 bp, Homo sapiens
tggagaacctccaac

SEQ ID NO: 2073707 - DNA, 15 bp, Homo sapiens
ggagaacctccaaca

SEQ ID NO: 2073708 - DNA, 15 bp, Homo sapiens
gagaacctccaacag

SEQ ID NO: 2073709 - DNA, 15 bp, Homo sapiens
agaacctccaacaga

SEQ ID NO: 2073710 - DNA, 15 bp, Homo sapiens
gaacctccaacagaa

SEQ ID NO: 2073711 - DNA, 15 bp, Homo sapiens
aacctccaacagaag

SEQ ID NO: 2073712 - DNA, 15 bp, Homo sapiens
acctccaacagaagt

SEQ ID NO: 2073713 - DNA, 15 bp, Homo sapiens
cctccaacagaagtt

SEQ ID NO: 2073714 - DNA, 15 bp, Homo sapiens
ctccaacagaagtta

SEQ ID NO: 2073715 - DNA, 15 bp, Homo sapiens
tccaacagaagttaa

SEQ ID NO: 2073716 - DNA, 15 bp, Homo sapiens
ccaacagaagttaag

SEQ ID NO: 2073717 - DNA, 15 bp, Homo sapiens
caacagaagttaagc

SEQ ID NO: 2073718 - DNA, 15 bp, Homo sapiens
aacagaagttaagca

SEQ ID NO: 2073719 - DNA, 15 bp, Homo sapiens
acagaagttaagcaa

SEQ ID NO: 2073720 - DNA, 15 bp, Homo sapiens
cagaagttaagcaaa

SEQ ID NO: 2073721 - DNA, 15 bp, Homo sapiens
agaagttaagcaaag

SEQ ID NO: 2073722 - DNA, 15 bp, Homo sapiens
gaagttaagcaaagt

SEQ ID NO: 2073723 - DNA, 15 bp, Homo sapiens
aagttaagcaaagtt

SEQ ID NO: 2073724 - DNA, 15 bp, Homo sapiens
agttaagcaaagttc

SEQ ID NO: 2073725 - DNA, 15 bp, Homo sapiens
gttaagcaaagttca

SEQ ID NO: 2073726 - DNA, 15 bp, Homo sapiens
ttaagcaaagttcag

SEQ ID NO: 2073727 - DNA, 15 bp, Homo sapiens
taagcaaagttcagt

SEQ ID NO: 2073728 - DNA, 15 bp, Homo sapiens
aagcaaagttcagta

SEQ ID NO: 2073729 - DNA, 15 bp, Homo sapiens
agcaaagttcagtag

SEQ ID NO: 2073730 - DNA, 15 bp, Homo sapiens
gcaaagttcagtagg

SEQ ID NO: 2073731 - DNA, 15 bp, Homo sapiens
caaagttcagtaggt

SEQ ID NO: 2073732 - DNA, 15 bp, Homo sapiens
aaagttcagtaggta

SEQ ID NO: 2073733 - DNA, 15 bp, Homo sapiens
aagttcagtaggtat

SEQ ID NO: 2073734 - DNA, 15 bp, Homo sapiens
agttcagtaggtatt

SEQ ID NO: 2073735 - DNA, 15 bp, Homo sapiens
gttcagtaggtatta

SEQ ID NO: 2073736 - DNA, 15 bp, Homo sapiens
ttcagtaggtattaa

SEQ ID NO: 2073737 - DNA, 15 bp, Homo sapiens
tcagtaggtattaag

SEQ ID NO: 2073738 - DNA, 15 bp, Homo sapiens
cagtaggtattaagc

SEQ ID NO: 2073739 - DNA, 15 bp, Homo sapiens
agtaggtattaagct

SEQ ID NO: 2073740 - DNA, 15 bp, Homo sapiens
gtaggtattaagctg

SEQ ID NO: 2073741 - DNA, 15 bp, Homo sapiens
taggtattaagctgg

SEQ ID NO: 2073742 - DNA, 15 bp, Homo sapiens
aggtattaagctggg

SEQ ID NO: 2073743 - DNA, 15 bp, Homo sapiens
ggtattaagctgggt

SEQ ID NO: 2073744 - DNA, 15 bp, Homo sapiens
gtattaagctgggtc

SEQ ID NO: 2073745 - DNA, 15 bp, Homo sapiens
tattaagctgggtcc

SEQ ID NO: 2073746 - DNA, 15 bp, Homo sapiens
attaagctgggtcct

SEQ ID NO: 2073747 - DNA, 15 bp, Homo sapiens
ttaagctgggtcctg

SEQ ID NO: 2073748 - DNA, 15 bp, Homo sapiens
taagctgggtcctgc

SEQ ID NO: 2073749 - DNA, 15 bp, Homo sapiens
aagctgggtcctgct

SEQ ID NO: 2073750 - DNA, 15 bp, Homo sapiens
agctgggtcctgctt

SEQ ID NO: 2073751 - DNA, 15 bp, Homo sapiens
gctgggtcctgctta

SEQ ID NO: 2073752 - DNA, 15 bp, Homo sapiens
ctgggtcctgcttaa

SEQ ID NO: 2073753 - DNA, 15 bp, Homo sapiens
tgggtcctgcttaaa

SEQ ID NO: 2073754 - DNA, 15 bp, Homo sapiens
gggtcctgcttaaac

SEQ ID NO: 2073755 - DNA, 15 bp, Homo sapiens
ggtcctgcttaaact

SEQ ID NO: 2073756 - DNA, 15 bp, Homo sapiens
gtcctgcttaaactg

SEQ ID NO: 2073757 - DNA, 15 bp, Homo sapiens
tcctgcttaaactgg

SEQ ID NO: 2073758 - DNA, 15 bp, Homo sapiens
cctgcttaaactggt

SEQ ID NO: 2073759 - DNA, 15 bp, Homo sapiens
ctgcttaaactggtg

SEQ ID NO: 2073760 - DNA, 15 bp, Homo sapiens
tgcttaaactggtgg

SEQ ID NO: 2073761 - DNA, 15 bp, Homo sapiens
gcttaaactggtgga

SEQ ID NO: 2073762 - DNA, 15 bp, Homo sapiens
cttaaactggtggac

SEQ ID NO: 2073763 - DNA, 15 bp, Homo sapiens
ttaaactggtggact

SEQ ID NO: 2073764 - DNA, 15 bp, Homo sapiens
taaactggtggactt

SEQ ID NO: 2073765 - DNA, 15 bp, Homo sapiens
aaactggtggacttt

SEQ ID NO: 2073766 - DNA, 15 bp, Homo sapiens
aactggtggacttta

SEQ ID NO: 2073767 - DNA, 15 bp, Homo sapiens
actggtggactttat

SEQ ID NO: 2073768 - DNA, 15 bp, Homo sapiens
ctggtggactttatc

SEQ ID NO: 2073769 - DNA, 15 bp, Homo sapiens
tggtggactttatca

SEQ ID NO: 2073770 - DNA, 15 bp, Homo sapiens
ggtggactttatcaa

SEQ ID NO: 2073771 - DNA, 15 bp, Homo sapiens
gtggactttatcaac

SEQ ID NO: 2073772 - DNA, 15 bp, Homo sapiens
tggactttatcaacc

SEQ ID NO: 2073773 - DNA, 15 bp, Homo sapiens
ggactttatcaacct

SEQ ID NO: 2073774 - DNA, 15 bp, Homo sapiens
gactttatcaacctg

SEQ ID NO: 2073775 - DNA, 15 bp, Homo sapiens
actttatcaacctga

SEQ ID NO: 2073776 - DNA, 15 bp, Homo sapiens
ctttatcaacctgat

SEQ ID NO: 2073777 - DNA, 15 bp, Homo sapiens
tttatcaacctgatg

SEQ ID NO: 2073778 - DNA, 15 bp, Homo sapiens
ttatcaacctgatgc

SEQ ID NO: 2073779 - DNA, 15 bp, Homo sapiens
tatcaacctgatgca

SEQ ID NO: 2073780 - DNA, 15 bp, Homo sapiens
atcaacctgatgcat

SEQ ID NO: 2073781 - DNA, 15 bp, Homo sapiens
tcaacctgatgcatg

SEQ ID NO: 2073782 - DNA, 15 bp, Homo sapiens
caacctgatgcatgc

SEQ ID NO: 2073783 - DNA, 15 bp, Homo sapiens
aacctgatgcatgca

SEQ ID NO: 2073784 - DNA, 15 bp, Homo sapiens
acctgatgcatgcaa

SEQ ID NO: 2073785 - DNA, 15 bp, Homo sapiens
cctgatgcatgcaac

SEQ ID NO: 2073786 - DNA, 15 bp, Homo sapiens
ctgatgcatgcaaca

SEQ ID NO: 2073787 - DNA, 15 bp, Homo sapiens
tgatgcatgcaacag

SEQ ID NO: 2073788 - DNA, 15 bp, Homo sapiens
gatgcatgcaacaga

SEQ ID NO: 2073789 - DNA, 15 bp, Homo sapiens
atgcatgcaacagaa

SEQ ID NO: 2073790 - DNA, 15 bp, Homo sapiens
tgcatgcaacagaaa

SEQ ID NO: 2073791 - DNA, 15 bp, Homo sapiens
gcatgcaacagaaag

SEQ ID NO: 2073792 - DNA, 15 bp, Homo sapiens
catgcaacagaaagg

SEQ ID NO: 2073793 - DNA, 15 bp, Homo sapiens
atgcaacagaaagga

SEQ ID NO: 2073794 - DNA, 15 bp, Homo sapiens
tgcaacagaaaggaa

SEQ ID NO: 2073795 - DNA, 15 bp, Homo sapiens
gcaacagaaaggaac

SEQ ID NO: 2073796 - DNA, 15 bp, Homo sapiens
caacagaaaggaaca

SEQ ID NO: 2073797 - DNA, 15 bp, Homo sapiens
aacagaaaggaacaa

SEQ ID NO: 2073798 - DNA, 15 bp, Homo sapiens
acagaaaggaacaac

SEQ ID NO: 2073799 - DNA, 15 bp, Homo sapiens
cagaaaggaacaact

SEQ ID NO: 2073800 - DNA, 15 bp, Homo sapiens
agaaaggaacaactc

SEQ ID NO: 2073801 - DNA, 15 bp, Homo sapiens
gaaaggaacaactct

SEQ ID NO: 2073802 - DNA, 15 bp, Homo sapiens
aaaggaacaactctc

SEQ ID NO: 2073803 - DNA, 15 bp, Homo sapiens
aaggaacaactctca

SEQ ID NO: 2073804 - DNA, 15 bp, Homo sapiens
aggaacaactctcat

SEQ ID NO: 2073805 - DNA, 15 bp, Homo sapiens
ggaacaactctcata

SEQ ID NO: 2073806 - DNA, 15 bp, Homo sapiens
gaacaactctcatac

SEQ ID NO: 2073807 - DNA, 15 bp, Homo sapiens
aacaactctcataca

SEQ ID NO: 2073808 - DNA, 15 bp, Homo sapiens
acaactctcatacat

SEQ ID NO: 2073809 - DNA, 15 bp, Homo sapiens
caactctcatacatt

SEQ ID NO: 2073810 - DNA, 15 bp, Homo sapiens
aactctcatacattt

SEQ ID NO: 2073811 - DNA, 15 bp, Homo sapiens
actctcatacatttt

SEQ ID NO: 2073812 - DNA, 15 bp, Homo sapiens
ctctcatacatttta

SEQ ID NO: 2073813 - DNA, 15 bp, Homo sapiens
tctcatacattttaa

SEQ ID NO: 2073814 - DNA, 15 bp, Homo sapiens
ctcatacattttaaa

SEQ ID NO: 2073815 - DNA, 15 bp, Homo sapiens
tcatacattttaaag

SEQ ID NO: 2073816 - DNA, 15 bp, Homo sapiens
catacattttaaagc

SEQ ID NO: 2073817 - DNA, 15 bp, Homo sapiens
atacattttaaagct

SEQ ID NO: 2073818 - DNA, 15 bp, Homo sapiens
tacattttaaagctg

SEQ ID NO: 2073819 - DNA, 15 bp, Homo sapiens
acattttaaagctgg

SEQ ID NO: 2073820 - DNA, 15 bp, Homo sapiens
cattttaaagctggg

SEQ ID NO: 2073821 - DNA, 15 bp, Homo sapiens
attttaaagctgggc

SEQ ID NO: 2073822 - DNA, 15 bp, Homo sapiens
ttttaaagctgggct

SEQ ID NO: 2073823 - DNA, 15 bp, Homo sapiens
tttaaagctgggctc

SEQ ID NO: 2073824 - DNA, 15 bp, Homo sapiens
ttaaagctgggctca

SEQ ID NO: 2073825 - DNA, 15 bp, Homo sapiens
taaagctgggctcat

SEQ ID NO: 2073826 - DNA, 15 bp, Homo sapiens
aaagctgggctcatg

SEQ ID NO: 2073827 - DNA, 15 bp, Homo sapiens
aagctgggctcatgg

SEQ ID NO: 2073828 - DNA, 15 bp, Homo sapiens
agctgggctcatggg

SEQ ID NO: 2073829 - DNA, 15 bp, Homo sapiens
gctgggctcatgggt

SEQ ID NO: 2073830 - DNA, 15 bp, Homo sapiens
ctgggctcatgggtc

SEQ ID NO: 2073831 - DNA, 15 bp, Homo sapiens
tgggctcatgggtcc

SEQ ID NO: 2073832 - DNA, 15 bp, Homo sapiens
gggctcatgggtcct

SEQ ID NO: 2073833 - DNA, 15 bp, Homo sapiens
ggctcatgggtcctt

SEQ ID NO: 2073834 - DNA, 15 bp, Homo sapiens
gctcatgggtccttc

SEQ ID NO: 2073835 - DNA, 15 bp, Homo sapiens
ctcatgggtccttcc

SEQ ID NO: 2073836 - DNA, 15 bp, Homo sapiens
tcatgggtccttcct

SEQ ID NO: 2073837 - DNA, 15 bp, Homo sapiens
catgggtccttcctg

SEQ ID NO: 2073838 - DNA, 15 bp, Homo sapiens
atgggtccttcctgg

SEQ ID NO: 2073839 - DNA, 15 bp, Homo sapiens
tgggtccttcctggt

SEQ ID NO: 2073840 - DNA, 15 bp, Homo sapiens
gggtccttcctggtc

SEQ ID NO: 2073841 - DNA, 15 bp, Homo sapiens
ggtccttcctggtca

SEQ ID NO: 2073842 - DNA, 15 bp, Homo sapiens
gtccttcctggtcat

SEQ ID NO: 2073843 - DNA, 15 bp, Homo sapiens
tccttcctggtcatc

SEQ ID NO: 2073844 - DNA, 15 bp, Homo sapiens
ccttcctggtcatca

SEQ ID NO: 2073845 - DNA, 15 bp, Homo sapiens
cttcctggtcatcat

SEQ ID NO: 2073846 - DNA, 15 bp, Homo sapiens
ttcctggtcatcatt

SEQ ID NO: 2073847 - DNA, 15 bp, Homo sapiens
tcctggtcatcatta

SEQ ID NO: 2073848 - DNA, 15 bp, Homo sapiens
cctggtcatcattaa

SEQ ID NO: 2073849 - DNA, 15 bp, Homo sapiens
ctggtcatcattaat

SEQ ID NO: 2073850 - DNA, 15 bp, Homo sapiens
tggtcatcattaatg

SEQ ID NO: 2073851 - DNA, 15 bp, Homo sapiens
ggtcatcattaatga

SEQ ID NO: 2073852 - DNA, 15 bp, Homo sapiens
gtcatcattaatgag

SEQ ID NO: 2073853 - DNA, 15 bp, Homo sapiens
tcatcattaatgagc

SEQ ID NO: 2073854 - DNA, 15 bp, Homo sapiens
catcattaatgagcc

SEQ ID NO: 2073855 - DNA, 15 bp, Homo sapiens
atcattaatgagcct

SEQ ID NO: 2073856 - DNA, 15 bp, Homo sapiens
tcattaatgagcctt

SEQ ID NO: 2073857 - DNA, 15 bp, Homo sapiens
cattaatgagccttt

SEQ ID NO: 2073858 - DNA, 15 bp, Homo sapiens
attaatgagccttta

SEQ ID NO: 2073859 - DNA, 15 bp, Homo sapiens
ttaatgagcctttat

SEQ ID NO: 2073860 - DNA, 15 bp, Homo sapiens
taatgagcctttatg

SEQ ID NO: 2073861 - DNA, 15 bp, Homo sapiens
aatgagcctttatgt

SEQ ID NO: 2073862 - DNA, 15 bp, Homo sapiens
atgagcctttatgtg

SEQ ID NO: 2073863 - DNA, 15 bp, Homo sapiens
tgagcctttatgtga

SEQ ID NO: 2073864 - DNA, 15 bp, Homo sapiens
gagcctttatgtgaa

SEQ ID NO: 2073865 - DNA, 15 bp, Homo sapiens
agcctttatgtgaaa

SEQ ID NO: 2073866 - DNA, 15 bp, Homo sapiens
gcctttatgtgaaag

SEQ ID NO: 2073867 - DNA, 15 bp, Homo sapiens
cctttatgtgaaagt

SEQ ID NO: 2073868 - DNA, 15 bp, Homo sapiens
ctttatgtgaaagtt

SEQ ID NO: 2073869 - DNA, 15 bp, Homo sapiens
tttatgtgaaagtta

SEQ ID NO: 2073870 - DNA, 15 bp, Homo sapiens
ttatgtgaaagttaa

SEQ ID NO: 2073871 - DNA, 15 bp, Homo sapiens
tatgtgaaagttaaa

SEQ ID NO: 2073872 - DNA, 15 bp, Homo sapiens
atgtgaaagttaaag

SEQ ID NO: 2073873 - DNA, 15 bp, Homo sapiens
tgtgaaagttaaagc

SEQ ID NO: 2073874 - DNA, 15 bp, Homo sapiens
gtgaaagttaaagcc

SEQ ID NO: 2073875 - DNA, 15 bp, Homo sapiens
tgaaagttaaagccc

SEQ ID NO: 2073876 - DNA, 15 bp, Homo sapiens
gaaagttaaagccca

SEQ ID NO: 2073877 - DNA, 15 bp, Homo sapiens
aaagttaaagcccaa

SEQ ID NO: 2073878 - DNA, 15 bp, Homo sapiens
aagttaaagcccaag

SEQ ID NO: 2073879 - DNA, 15 bp, Homo sapiens
agttaaagcccaagc

SEQ ID NO: 2073880 - DNA, 15 bp, Homo sapiens
gttaaagcccaagcc

SEQ ID NO: 2073881 - DNA, 15 bp, Homo sapiens
ttaaagcccaagccc

SEQ ID NO: 2073882 - DNA, 15 bp, Homo sapiens
taaagcccaagccct

SEQ ID NO: 2073883 - DNA, 15 bp, Homo sapiens
aaagcccaagcccta

SEQ ID NO: 2073884 - DNA, 15 bp, Homo sapiens
aagcccaagccctag

SEQ ID NO: 2073885 - DNA, 15 bp, Homo sapiens
agcccaagccctaga

SEQ ID NO: 2073886 - DNA, 15 bp, Homo sapiens
gcccaagccctagaa

SEQ ID NO: 2073887 - DNA, 15 bp, Homo sapiens
cccaagccctagaag

SEQ ID NO: 2073888 - DNA, 15 bp, Homo sapiens
ccaagccctagaagc

SEQ ID NO: 2073889 - DNA, 15 bp, Homo sapiens
caagccctagaagca

SEQ ID NO: 2073890 - DNA, 15 bp, Homo sapiens
aagccctagaagcac

SEQ ID NO: 2073891 - DNA, 15 bp, Homo sapiens
agccctagaagcaca

SEQ ID NO: 2073892 - DNA, 15 bp, Homo sapiens
gccctagaagcacag

SEQ ID NO: 2073893 - DNA, 15 bp, Homo sapiens
ccctagaagcacagt

SEQ ID NO: 2073894 - DNA, 15 bp, Homo sapiens
cctagaagcacagta

SEQ ID NO: 2073895 - DNA, 15 bp, Homo sapiens
ctagaagcacagtat

SEQ ID NO: 2073896 - DNA, 15 bp, Homo sapiens
tagaagcacagtata

SEQ ID NO: 2073897 - DNA, 15 bp, Homo sapiens
agaagcacagtatag

SEQ ID NO: 2073898 - DNA, 15 bp, Homo sapiens
gaagcacagtatagg

SEQ ID NO: 2073899 - DNA, 15 bp, Homo sapiens
aagcacagtataggt

SEQ ID NO: 2073900 - DNA, 15 bp, Homo sapiens
agcacagtataggtt

SEQ ID NO: 2073901 - DNA, 15 bp, Homo sapiens
gcacagtataggttg

SEQ ID NO: 2073902 - DNA, 15 bp, Homo sapiens
cacagtataggttgt

SEQ ID NO: 2073903 - DNA, 15 bp, Homo sapiens
acagtataggttgta

SEQ ID NO: 2073904 - DNA, 15 bp, Homo sapiens
cagtataggttgtac

SEQ ID NO: 2073905 - DNA, 15 bp, Homo sapiens
agtataggttgtact

SEQ ID NO: 2073906 - DNA, 15 bp, Homo sapiens
gtataggttgtactt

SEQ ID NO: 2073907 - DNA, 15 bp, Homo sapiens
tataggttgtacttt

SEQ ID NO: 2073908 - DNA, 15 bp, Homo sapiens
ataggttgtacttta

SEQ ID NO: 2073909 - DNA, 15 bp, Homo sapiens
taggttgtactttat

SEQ ID NO: 2073910 - DNA, 15 bp, Homo sapiens
aggttgtactttatc

SEQ ID NO: 2073911 - DNA, 15 bp, Homo sapiens
ggttgtactttatct

SEQ ID NO: 2073912 - DNA, 15 bp, Homo sapiens
gttgtactttatctt

SEQ ID NO: 2073913 - DNA, 15 bp, Homo sapiens
ttgtactttatcttg

SEQ ID NO: 2073914 - DNA, 15 bp, Homo sapiens
tgtactttatcttga

SEQ ID NO: 2073915 - DNA, 15 bp, Homo sapiens
gtactttatcttgat

SEQ ID NO: 2073916 - DNA, 15 bp, Homo sapiens
tactttatcttgata

SEQ ID NO: 2073917 - DNA, 15 bp, Homo sapiens
actttatcttgatat

SEQ ID NO: 2073918 - DNA, 15 bp, Homo sapiens
ctttatcttgatatt

SEQ ID NO: 2073919 - DNA, 15 bp, Homo sapiens
tttatcttgatattc

SEQ ID NO: 2073920 - DNA, 15 bp, Homo sapiens
ttatcttgatattct

SEQ ID NO: 2073921 - DNA, 15 bp, Homo sapiens
tatcttgatattctg

SEQ ID NO: 2073922 - DNA, 15 bp, Homo sapiens
atcttgatattctgg

SEQ ID NO: 2073923 - DNA, 15 bp, Homo sapiens
tcttgatattctggt

SEQ ID NO: 2073924 - DNA, 15 bp, Homo sapiens
cttgatattctggtc

SEQ ID NO: 2073925 - DNA, 15 bp, Homo sapiens
tgatattctggtcag

SEQ ID NO: 2073926 - DNA, 15 bp, Homo sapiens
gatattctggtcagc

SEQ ID NO: 2073927 - DNA, 15 bp, Homo sapiens
atattctggtcagca

SEQ ID NO: 2073928 - DNA, 15 bp, Homo sapiens
tattctggtcagcat

SEQ ID NO: 2073929 - DNA, 15 bp, Homo sapiens
attctggtcagcatc

SEQ ID NO: 2073930 - DNA, 15 bp, Homo sapiens
ttctggtcagcatca

SEQ ID NO: 2073931 - DNA, 15 bp, Homo sapiens
tctggtcagcatcac

SEQ ID NO: 2073932 - DNA, 15 bp, Homo sapiens
ctggtcagcatcaca

SEQ ID NO: 2073933 - DNA, 15 bp, Homo sapiens
tggtcagcatcacat

SEQ ID NO: 2073934 - DNA, 15 bp, Homo sapiens
ggtcagcatcacatg

SEQ ID NO: 2073935 - DNA, 15 bp, Homo sapiens
gtcagcatcacatga

SEQ ID NO: 2073936 - DNA, 15 bp, Homo sapiens
tcagcatcacatgat

SEQ ID NO: 2073937 - DNA, 15 bp, Homo sapiens
cagcatcacatgatt

SEQ ID NO: 2073938 - DNA, 15 bp, Homo sapiens
agcatcacatgattt

SEQ ID NO: 2073939 - DNA, 15 bp, Homo sapiens
gcatcacatgattta

SEQ ID NO: 2073940 - DNA, 15 bp, Homo sapiens
catcacatgatttaa

SEQ ID NO: 2073941 - DNA, 15 bp, Homo sapiens
atcacatgatttaat

SEQ ID NO: 2073942 - DNA, 15 bp, Homo sapiens
tcacatgatttaatg

SEQ ID NO: 2073943 - DNA, 15 bp, Homo sapiens
cacatgatttaatgg

SEQ ID NO: 2073944 - DNA, 15 bp, Homo sapiens
acatgatttaatggg

SEQ ID NO: 2073945 - DNA, 15 bp, Homo sapiens
catgatttaatggga

SEQ ID NO: 2073946 - DNA, 15 bp, Homo sapiens
atgatttaatgggaa

SEQ ID NO: 2073947 - DNA, 15 bp, Homo sapiens
tgatttaatgggaaa

SEQ ID NO: 2073948 - DNA, 15 bp, Homo sapiens
gatttaatgggaaaa

SEQ ID NO: 2073949 - DNA, 15 bp, Homo sapiens
atttaatgggaaaaa

SEQ ID NO: 2073950 - DNA, 15 bp, Homo sapiens
tttaatgggaaaaag

SEQ ID NO: 2073951 - DNA, 15 bp, Homo sapiens
ttaatgggaaaaaga

SEQ ID NO: 2073952 - DNA, 15 bp, Homo sapiens
taatgggaaaaagac

SEQ ID NO: 2073953 - DNA, 15 bp, Homo sapiens
aatgggaaaaagacc

SEQ ID NO: 2073954 - DNA, 15 bp, Homo sapiens
atgggaaaaagacct

SEQ ID NO: 2073955 - DNA, 15 bp, Homo sapiens
tgggaaaaagacctg

SEQ ID NO: 2073956 - DNA, 15 bp, Homo sapiens
gggaaaaagacctgt

SEQ ID NO: 2073957 - DNA, 15 bp, Homo sapiens
ggaaaaagacctgtg

SEQ ID NO: 2073958 - DNA, 15 bp, Homo sapiens
gaaaaagacctgtgg

SEQ ID NO: 2073959 - DNA, 15 bp, Homo sapiens
aaaaagacctgtggt

SEQ ID NO: 2073960 - DNA, 15 bp, Homo sapiens
aaaagacctgtggtt

SEQ ID NO: 2073961 - DNA, 15 bp, Homo sapiens
aaagacctgtggttg

SEQ ID NO: 2073962 - DNA, 15 bp, Homo sapiens
aagacctgtggttgg

SEQ ID NO: 2073963 - DNA, 15 bp, Homo sapiens
agacctgtggttgga

SEQ ID NO: 2073964 - DNA, 15 bp, Homo sapiens
gacctgtggttggac

SEQ ID NO: 2073965 - DNA, 15 bp, Homo sapiens
acctgtggttggact

SEQ ID NO: 2073966 - DNA, 15 bp, Homo sapiens
cctgtggttggactt

SEQ ID NO: 2073967 - DNA, 15 bp, Homo sapiens
ctgtggttggacttt

SEQ ID NO: 2073968 - DNA, 15 bp, Homo sapiens
tgtggttggactttg

SEQ ID NO: 2073969 - DNA, 15 bp, Homo sapiens
gtggttggactttga

SEQ ID NO: 2073970 - DNA, 15 bp, Homo sapiens
tggttggactttgaa

SEQ ID NO: 2073971 - DNA, 15 bp, Homo sapiens
ggttggactttgaaa

SEQ ID NO: 2073972 - DNA, 15 bp, Homo sapiens
gttggactttgaaac

SEQ ID NO: 2073973 - DNA, 15 bp, Homo sapiens
ttggactttgaaact

SEQ ID NO: 2073974 - DNA, 15 bp, Homo sapiens
tggactttgaaactg

SEQ ID NO: 2073975 - DNA, 15 bp, Homo sapiens
ggactttgaaactgc

SEQ ID NO: 2073976 - DNA, 15 bp, Homo sapiens
gactttgaaactgca

SEQ ID NO: 2073977 - DNA, 15 bp, Homo sapiens
actttgaaactgcag

SEQ ID NO: 2073978 - DNA, 15 bp, Homo sapiens
ctttgaaactgcagc

SEQ ID NO: 2073979 - DNA, 15 bp, Homo sapiens
tttgaaactgcagca

SEQ ID NO: 2073980 - DNA, 15 bp, Homo sapiens
ttgaaactgcagcaa

SEQ ID NO: 2073981 - DNA, 15 bp, Homo sapiens
tgaaactgcagcaat

SEQ ID NO: 2073982 - DNA, 15 bp, Homo sapiens
gaaactgcagcaatg

SEQ ID NO: 2073983 - DNA, 15 bp, Homo sapiens
aaactgcagcaatgt

SEQ ID NO: 2073984 - DNA, 15 bp, Homo sapiens
aactgcagcaatgtt

SEQ ID NO: 2073985 - DNA, 15 bp, Homo sapiens
actgcagcaatgttg

SEQ ID NO: 2073986 - DNA, 15 bp, Homo sapiens
ctgcagcaatgttga

SEQ ID NO: 2073987 - DNA, 15 bp, Homo sapiens
tgcagcaatgttgag

SEQ ID NO: 2073988 - DNA, 15 bp, Homo sapiens
gcagcaatgttgagt

SEQ ID NO: 2073989 - DNA, 15 bp, Homo sapiens
cagcaatgttgagtt

SEQ ID NO: 2073990 - DNA, 15 bp, Homo sapiens
agcaatgttgagttg

SEQ ID NO: 2073991 - DNA, 15 bp, Homo sapiens
gcaatgttgagttga

SEQ ID NO: 2073992 - DNA, 15 bp, Homo sapiens
caatgttgagttgac

SEQ ID NO: 2073993 - DNA, 15 bp, Homo sapiens
aatgttgagttgaca

SEQ ID NO: 2073994 - DNA, 15 bp, Homo sapiens
atgttgagttgacag

SEQ ID NO: 2073995 - DNA, 15 bp, Homo sapiens
tgttgagttgacagt

SEQ ID NO: 2073996 - DNA, 15 bp, Homo sapiens
gttgagttgacagtt

SEQ ID NO: 2073997 - DNA, 15 bp, Homo sapiens
ttgagttgacagtta

SEQ ID NO: 2073998 - DNA, 15 bp, Homo sapiens
tgagttgacagttat

SEQ ID NO: 2073999 - DNA, 15 bp, Homo sapiens
gagttgacagttatt

SEQ ID NO: 2074000 - DNA, 15 bp, Homo sapiens
agttgacagttattt

SEQ ID NO: 2074001 - DNA, 15 bp, Homo sapiens
gttgacagttatttc

SEQ ID NO: 2074002 - DNA, 15 bp, Homo sapiens
ttgacagttatttca

SEQ ID NO: 2074003 - DNA, 15 bp, Homo sapiens
tgacagttatttcaa

SEQ ID NO: 2074004 - DNA, 15 bp, Homo sapiens
gacagttatttcaaa

SEQ ID NO: 2074005 - DNA, 15 bp, Homo sapiens
acagttatttcaaaa

SEQ ID NO: 2074006 - DNA, 15 bp, Homo sapiens
cagttatttcaaaat

SEQ ID NO: 2074007 - DNA, 15 bp, Homo sapiens
agttatttcaaaatg

SEQ ID NO: 2074008 - DNA, 15 bp, Homo sapiens
gttatttcaaaatga

SEQ ID NO: 2074009 - DNA, 15 bp, Homo sapiens
ttatttcaaaatgat

SEQ ID NO: 2074010 - DNA, 15 bp, Homo sapiens
tatttcaaaatgatc

SEQ ID NO: 2074011 - DNA, 15 bp, Homo sapiens
atttcaaaatgatcc

SEQ ID NO: 2074012 - DNA, 15 bp, Homo sapiens
tttcaaaatgatcca

SEQ ID NO: 2074013 - DNA, 15 bp, Homo sapiens
ttcaaaatgatccag

SEQ ID NO: 2074014 - DNA, 15 bp, Homo sapiens
tcaaaatgatccagt

SEQ ID NO: 2074015 - DNA, 15 bp, Homo sapiens
caaaatgatccagtt

SEQ ID NO: 2074016 - DNA, 15 bp, Homo sapiens
aaaatgatccagttt

SEQ ID NO: 2074017 - DNA, 15 bp, Homo sapiens
aaatgatccagttta

SEQ ID NO: 2074018 - DNA, 15 bp, Homo sapiens
aatgatccagtttat

SEQ ID NO: 2074019 - DNA, 15 bp, Homo sapiens
atgatccagtttatt

SEQ ID NO: 2074020 - DNA, 15 bp, Homo sapiens
tgatccagtttattc

SEQ ID NO: 2074021 - DNA, 15 bp, Homo sapiens
gatccagtttattcc

SEQ ID NO: 2074022 - DNA, 15 bp, Homo sapiens
atccagtttattcca

SEQ ID NO: 2074023 - DNA, 15 bp, Homo sapiens
tccagtttattccac

SEQ ID NO: 2074024 - DNA, 15 bp, Homo sapiens
ccagtttattccaca

SEQ ID NO: 2074025 - DNA, 15 bp, Homo sapiens
cagtttattccacac

SEQ ID NO: 2074026 - DNA, 15 bp, Homo sapiens
agtttattccacaca

SEQ ID NO: 2074027 - DNA, 15 bp, Homo sapiens
gtttattccacacag

SEQ ID NO: 2074028 - DNA, 15 bp, Homo sapiens
tttattccacacagt

SEQ ID NO: 2074029 - DNA, 15 bp, Homo sapiens
ttattccacacagtg

SEQ ID NO: 2074030 - DNA, 15 bp, Homo sapiens
tattccacacagtgt

SEQ ID NO: 2074031 - DNA, 15 bp, Homo sapiens
attccacacagtgtt

SEQ ID NO: 2074032 - DNA, 15 bp, Homo sapiens
ttccacacagtgttt

SEQ ID NO: 2074033 - DNA, 15 bp, Homo sapiens
tccacacagtgttta

SEQ ID NO: 2074034 - DNA, 15 bp, Homo sapiens
ccacacagtgtttaa

SEQ ID NO: 2074035 - DNA, 15 bp, Homo sapiens
cacacagtgtttaat

SEQ ID NO: 2074036 - DNA, 15 bp, Homo sapiens
acacagtgtttaatt

SEQ ID NO: 2074037 - DNA, 15 bp, Homo sapiens
cacagtgtttaatta

SEQ ID NO: 2074038 - DNA, 15 bp, Homo sapiens
acagtgtttaattat

SEQ ID NO: 2074039 - DNA, 15 bp, Homo sapiens
cagtgtttaattatc

SEQ ID NO: 2074040 - DNA, 15 bp, Homo sapiens
agtgtttaattatca

SEQ ID NO: 2074041 - DNA, 15 bp, Homo sapiens
gtgtttaattatcag

SEQ ID NO: 2074042 - DNA, 15 bp, Homo sapiens
tgtttaattatcaga

SEQ ID NO: 2074043 - DNA, 15 bp, Homo sapiens
gtttaattatcagat

SEQ ID NO: 2074044 - DNA, 15 bp, Homo sapiens
tttaattatcagatc

SEQ ID NO: 2074045 - DNA, 15 bp, Homo sapiens
ttaattatcagatct

SEQ ID NO: 2074046 - DNA, 15 bp, Homo sapiens
taattatcagatctt

SEQ ID NO: 2074047 - DNA, 15 bp, Homo sapiens
aattatcagatcttg

SEQ ID NO: 2074048 - DNA, 15 bp, Homo sapiens
attatcagatcttgg

SEQ ID NO: 2074049 - DNA, 15 bp, Homo sapiens
ttatcagatcttgga

SEQ ID NO: 2074050 - DNA, 15 bp, Homo sapiens
tatcagatcttggaa

SEQ ID NO: 2074051 - DNA, 15 bp, Homo sapiens
atcagatcttggaag

SEQ ID NO: 2074052 - DNA, 15 bp, Homo sapiens
tcagatcttggaaga

SEQ ID NO: 2074053 - DNA, 15 bp, Homo sapiens
cagatcttggaagat

SEQ ID NO: 2074054 - DNA, 15 bp, Homo sapiens
agatcttggaagatt

SEQ ID NO: 2074055 - DNA, 15 bp, Homo sapiens
gatcttggaagatta

SEQ ID NO: 2074056 - DNA, 15 bp, Homo sapiens
atcttggaagattaa

SEQ ID NO: 2074057 - DNA, 15 bp, Homo sapiens
tcttggaagattaat

SEQ ID NO: 2074058 - DNA, 15 bp, Homo sapiens
cttggaagattaatt

SEQ ID NO: 2074059 - DNA, 15 bp, Homo sapiens
ttggaagattaatta

SEQ ID NO: 2074060 - DNA, 15 bp, Homo sapiens
tggaagattaattat

SEQ ID NO: 2074061 - DNA, 15 bp, Homo sapiens
ggaagattaattatt

SEQ ID NO: 2074062 - DNA, 15 bp, Homo sapiens
gaagattaattattt

SEQ ID NO: 2074063 - DNA, 15 bp, Homo sapiens
aagattaattatttt

SEQ ID NO: 2074064 - DNA, 15 bp, Homo sapiens
agattaattatttta

SEQ ID NO: 2074065 - DNA, 15 bp, Homo sapiens
gattaattattttaa

SEQ ID NO: 2074066 - DNA, 15 bp, Homo sapiens
attaattattttaag

SEQ ID NO: 2074067 - DNA, 15 bp, Homo sapiens
ttaattattttaaga

SEQ ID NO: 2074068 - DNA, 15 bp, Homo sapiens
taattattttaagag

SEQ ID NO: 2074069 - DNA, 15 bp, Homo sapiens
aattattttaagaga

SEQ ID NO: 2074070 - DNA, 15 bp, Homo sapiens
ttattttaagagact

SEQ ID NO: 2074071 - DNA, 15 bp, Homo sapiens
tattttaagagactc

SEQ ID NO: 2074072 - DNA, 15 bp, Homo sapiens
attttaagagactcg

SEQ ID NO: 2074073 - DNA, 15 bp, Homo sapiens
ttttaagagactcgt

SEQ ID NO: 2074074 - DNA, 15 bp, Homo sapiens
tttaagagactcgta

SEQ ID NO: 2074075 - DNA, 15 bp, Homo sapiens
ttaagagactcgtaa

SEQ ID NO: 2074076 - DNA, 15 bp, Homo sapiens
taagagactcgtaaa

SEQ ID NO: 2074077 - DNA, 15 bp, Homo sapiens
aagagactcgtaaac

SEQ ID NO: 2074078 - DNA, 15 bp, Homo sapiens
agagactcgtaaact

SEQ ID NO: 2074079 - DNA, 15 bp, Homo sapiens
gagactcgtaaactg

SEQ ID NO: 2074080 - DNA, 15 bp, Homo sapiens
agactcgtaaactga

SEQ ID NO: 2074081 - DNA, 15 bp, Homo sapiens
gactcgtaaactgag

SEQ ID NO: 2074082 - DNA, 15 bp, Homo sapiens
actcgtaaactgaga

SEQ ID NO: 2074083 - DNA, 15 bp, Homo sapiens
ctcgtaaactgagat

SEQ ID NO: 2074084 - DNA, 15 bp, Homo sapiens
tcgtaaactgagata

SEQ ID NO: 2074085 - DNA, 15 bp, Homo sapiens
cgtaaactgagatag

SEQ ID NO: 2074086 - DNA, 15 bp, Homo sapiens
gtaaactgagataga

SEQ ID NO: 2074087 - DNA, 15 bp, Homo sapiens
taaactgagatagac

SEQ ID NO: 2074088 - DNA, 15 bp, Homo sapiens
aaactgagatagacc

SEQ ID NO: 2074089 - DNA, 15 bp, Homo sapiens
aactgagatagacct

SEQ ID NO: 2074090 - DNA, 15 bp, Homo sapiens
actgagatagacctt

SEQ ID NO: 2074091 - DNA, 15 bp, Homo sapiens
ctgagatagacctta

SEQ ID NO: 2074092 - DNA, 15 bp, Homo sapiens
tgagatagaccttaa

SEQ ID NO: 2074093 - DNA, 15 bp, Homo sapiens
gagatagaccttaag

SEQ ID NO: 2074094 - DNA, 15 bp, Homo sapiens
agatagaccttaaga

SEQ ID NO: 2074095 - DNA, 15 bp, Homo sapiens
gatagaccttaagaa

SEQ ID NO: 2074096 - DNA, 15 bp, Homo sapiens
atagaccttaagaaa

SEQ ID NO: 2074097 - DNA, 15 bp, Homo sapiens
tagaccttaagaaat

SEQ ID NO: 2074098 - DNA, 15 bp, Homo sapiens
agaccttaagaaatt

SEQ ID NO: 2074099 - DNA, 15 bp, Homo sapiens
gaccttaagaaatta

SEQ ID NO: 2074100 - DNA, 15 bp, Homo sapiens
accttaagaaattag

SEQ ID NO: 2074101 - DNA, 15 bp, Homo sapiens
ccttaagaaattaga

SEQ ID NO: 2074102 - DNA, 15 bp, Homo sapiens
cttaagaaattagat

SEQ ID NO: 2074103 - DNA, 15 bp, Homo sapiens
ttaagaaattagata

SEQ ID NO: 2074104 - DNA, 15 bp, Homo sapiens
taagaaattagataa

SEQ ID NO: 2074105 - DNA, 15 bp, Homo sapiens
aagaaattagataaa

SEQ ID NO: 2074106 - DNA, 15 bp, Homo sapiens
agaaattagataaag

SEQ ID NO: 2074107 - DNA, 15 bp, Homo sapiens
gaaattagataaaga

SEQ ID NO: 2074108 - DNA, 15 bp, Homo sapiens
aaattagataaagag

SEQ ID NO: 2074109 - DNA, 15 bp, Homo sapiens
aattagataaagagg

SEQ ID NO: 2074110 - DNA, 15 bp, Homo sapiens
attagataaagagga

SEQ ID NO: 2074111 - DNA, 15 bp, Homo sapiens
ttagataaagaggat

SEQ ID NO: 2074112 - DNA, 15 bp, Homo sapiens
tagataaagaggata

SEQ ID NO: 2074113 - DNA, 15 bp, Homo sapiens
agataaagaggatat

SEQ ID NO: 2074114 - DNA, 15 bp, Homo sapiens
gataaagaggatata

SEQ ID NO: 2074115 - DNA, 15 bp, Homo sapiens
ataaagaggatataa

SEQ ID NO: 2074116 - DNA, 15 bp, Homo sapiens
taaagaggatataac

SEQ ID NO: 2074117 - DNA, 15 bp, Homo sapiens
aaagaggatataact

SEQ ID NO: 2074118 - DNA, 15 bp, Homo sapiens
aagaggatataactc

SEQ ID NO: 2074119 - DNA, 15 bp, Homo sapiens
agaggatataactcc

SEQ ID NO: 2074120 - DNA, 15 bp, Homo sapiens
gaggatataactcca

SEQ ID NO: 2074121 - DNA, 15 bp, Homo sapiens
aggatataactccat

SEQ ID NO: 2074122 - DNA, 15 bp, Homo sapiens
ggatataactccatc

SEQ ID NO: 2074123 - DNA, 15 bp, Homo sapiens
gatataactccatca

SEQ ID NO: 2074124 - DNA, 15 bp, Homo sapiens
atataactccatcaa

SEQ ID NO: 2074125 - DNA, 15 bp, Homo sapiens
tataactccatcaag

SEQ ID NO: 2074126 - DNA, 15 bp, Homo sapiens
ataactccatcaagt

SEQ ID NO: 2074127 - DNA, 15 bp, Homo sapiens
taactccatcaagtg

SEQ ID NO: 2074128 - DNA, 15 bp, Homo sapiens
aactccatcaagtga

SEQ ID NO: 2074129 - DNA, 15 bp, Homo sapiens
actccatcaagtgag

SEQ ID NO: 2074130 - DNA, 15 bp, Homo sapiens
ctccatcaagtgagc

SEQ ID NO: 2074131 - DNA, 15 bp, Homo sapiens
tccatcaagtgagct

SEQ ID NO: 2074132 - DNA, 15 bp, Homo sapiens
ccatcaagtgagctg

SEQ ID NO: 2074133 - DNA, 15 bp, Homo sapiens
catcaagtgagctgg

SEQ ID NO: 2074134 - DNA, 15 bp, Homo sapiens
atcaagtgagctggc

SEQ ID NO: 2074135 - DNA, 15 bp, Homo sapiens
tcaagtgagctggca

SEQ ID NO: 2074136 - DNA, 15 bp, Homo sapiens
caagtgagctggcaa

SEQ ID NO: 2074137 - DNA, 15 bp, Homo sapiens
aagtgagctggcaat

SEQ ID NO: 2074138 - DNA, 15 bp, Homo sapiens
agtgagctggcaatg

SEQ ID NO: 2074139 - DNA, 15 bp, Homo sapiens
gtgagctggcaatgc

SEQ ID NO: 2074140 - DNA, 15 bp, Homo sapiens
tgagctggcaatgcc

SEQ ID NO: 2074141 - DNA, 15 bp, Homo sapiens
gagctggcaatgcca

SEQ ID NO: 2074142 - DNA, 15 bp, Homo sapiens
agctggcaatgccaa

SEQ ID NO: 2074143 - DNA, 15 bp, Homo sapiens
gctggcaatgccaaa

SEQ ID NO: 2074144 - DNA, 15 bp, Homo sapiens
ctggcaatgccaaat

SEQ ID NO: 2074145 - DNA, 15 bp, Homo sapiens
tggcaatgccaaatt

SEQ ID NO: 2074146 - DNA, 15 bp, Homo sapiens
ggcaatgccaaatta

SEQ ID NO: 2074147 - DNA, 15 bp, Homo sapiens
gcaatgccaaattag

SEQ ID NO: 2074148 - DNA, 15 bp, Homo sapiens
caatgccaaattagt

SEQ ID NO: 2074149 - DNA, 15 bp, Homo sapiens
aatgccaaattagtg

SEQ ID NO: 2074150 - DNA, 15 bp, Homo sapiens
atgccaaattagtga

SEQ ID NO: 2074151 - DNA, 15 bp, Homo sapiens
tgccaaattagtgaa

SEQ ID NO: 2074152 - DNA, 15 bp, Homo sapiens
gccaaattagtgaat

SEQ ID NO: 2074153 - DNA, 15 bp, Homo sapiens
ccaaattagtgaatc

SEQ ID NO: 2074154 - DNA, 15 bp, Homo sapiens
caaattagtgaatct

SEQ ID NO: 2074155 - DNA, 15 bp, Homo sapiens
aaattagtgaatcta

SEQ ID NO: 2074156 - DNA, 15 bp, Homo sapiens
aattagtgaatctaa

SEQ ID NO: 2074157 - DNA, 15 bp, Homo sapiens
attagtgaatctaat

SEQ ID NO: 2074158 - DNA, 15 bp, Homo sapiens
ttagtgaatctaatc

SEQ ID NO: 2074159 - DNA, 15 bp, Homo sapiens
tagtgaatctaatca

SEQ ID NO: 2074160 - DNA, 15 bp, Homo sapiens
agtgaatctaatcat

SEQ ID NO: 2074161 - DNA, 15 bp, Homo sapiens
gtgaatctaatcata

SEQ ID NO: 2074162 - DNA, 15 bp, Homo sapiens
tgaatctaatcataa

SEQ ID NO: 2074163 - DNA, 15 bp, Homo sapiens
gaatctaatcataag

SEQ ID NO: 2074164 - DNA, 15 bp, Homo sapiens
aatctaatcataagc

SEQ ID NO: 2074165 - DNA, 15 bp, Homo sapiens
atctaatcataagca

SEQ ID NO: 2074166 - DNA, 15 bp, Homo sapiens
tctaatcataagcat

SEQ ID NO: 2074167 - DNA, 15 bp, Homo sapiens
ctaatcataagcatc

SEQ ID NO: 2074168 - DNA, 15 bp, Homo sapiens
taatcataagcatca

SEQ ID NO: 2074169 - DNA, 15 bp, Homo sapiens
aatcataagcatcac

SEQ ID NO: 2074170 - DNA, 15 bp, Homo sapiens
atcataagcatcaca

SEQ ID NO: 2074171 - DNA, 15 bp, Homo sapiens
tcataagcatcacaa

SEQ ID NO: 2074172 - DNA, 15 bp, Homo sapiens
cataagcatcacaag

SEQ ID NO: 2074173 - DNA, 15 bp, Homo sapiens
ataagcatcacaagc

SEQ ID NO: 2074174 - DNA, 15 bp, Homo sapiens
taagcatcacaagct

SEQ ID NO: 2074175 - DNA, 15 bp, Homo sapiens
aagcatcacaagcta

SEQ ID NO: 2074176 - DNA, 15 bp, Homo sapiens
agcatcacaagctaa

SEQ ID NO: 2074177 - DNA, 15 bp, Homo sapiens
gcatcacaagctaaa

SEQ ID NO: 2074178 - DNA, 15 bp, Homo sapiens
catcacaagctaaac

SEQ ID NO: 2074179 - DNA, 15 bp, Homo sapiens
atcacaagctaaact

SEQ ID NO: 2074180 - DNA, 15 bp, Homo sapiens
tcacaagctaaactt

SEQ ID NO: 2074181 - DNA, 15 bp, Homo sapiens
cacaagctaaactta

SEQ ID NO: 2074182 - DNA, 15 bp, Homo sapiens
acaagctaaacttaa

SEQ ID NO: 2074183 - DNA, 15 bp, Homo sapiens
caagctaaacttaat

SEQ ID NO: 2074184 - DNA, 15 bp, Homo sapiens
aagctaaacttaatg

SEQ ID NO: 2074185 - DNA, 15 bp, Homo sapiens
agctaaacttaatgg

SEQ ID NO: 2074186 - DNA, 15 bp, Homo sapiens
gctaaacttaatggt

SEQ ID NO: 2074187 - DNA, 15 bp, Homo sapiens
ctaaacttaatggtt

SEQ ID NO: 2074188 - DNA, 15 bp, Homo sapiens
taaacttaatggttg

SEQ ID NO: 2074189 - DNA, 15 bp, Homo sapiens
aaacttaatggttgg

SEQ ID NO: 2074190 - DNA, 15 bp, Homo sapiens
aacttaatggttggc

SEQ ID NO: 2074191 - DNA, 15 bp, Homo sapiens
acttaatggttggcc

SEQ ID NO: 2074192 - DNA, 15 bp, Homo sapiens
cttaatggttggcct

SEQ ID NO: 2074193 - DNA, 15 bp, Homo sapiens
ttaatggttggcctg

SEQ ID NO: 2074194 - DNA, 15 bp, Homo sapiens
taatggttggcctgg

SEQ ID NO: 2074195 - DNA, 15 bp, Homo sapiens
aatggttggcctgga

SEQ ID NO: 2074196 - DNA, 15 bp, Homo sapiens
atggttggcctggaa

SEQ ID NO: 2074197 - DNA, 15 bp, Homo sapiens
tggttggcctggaaa

SEQ ID NO: 2074198 - DNA, 15 bp, Homo sapiens
ggttggcctggaaag

SEQ ID NO: 2074199 - DNA, 15 bp, Homo sapiens
gttggcctggaaagt

SEQ ID NO: 2074200 - DNA, 15 bp, Homo sapiens
ttggcctggaaagtc

SEQ ID NO: 2074201 - DNA, 15 bp, Homo sapiens
tggcctggaaagtct

SEQ ID NO: 2074202 - DNA, 15 bp, Homo sapiens
ggcctggaaagtctc

SEQ ID NO: 2074203 - DNA, 15 bp, Homo sapiens
gcctggaaagtctct

SEQ ID NO: 2074204 - DNA, 15 bp, Homo sapiens
cctggaaagtctctg

SEQ ID NO: 2074205 - DNA, 15 bp, Homo sapiens
ctggaaagtctctgt

SEQ ID NO: 2074206 - DNA, 15 bp, Homo sapiens
tggaaagtctctgtt

SEQ ID NO: 2074207 - DNA, 15 bp, Homo sapiens
ggaaagtctctgttc

SEQ ID NO: 2074208 - DNA, 15 bp, Homo sapiens
gaaagtctctgttcc

SEQ ID NO: 2074209 - DNA, 15 bp, Homo sapiens
aaagtctctgttcca

SEQ ID NO: 2074210 - DNA, 15 bp, Homo sapiens
aagtctctgttccag

SEQ ID NO: 2074211 - DNA, 15 bp, Homo sapiens
agtctctgttccaga

SEQ ID NO: 2074212 - DNA, 15 bp, Homo sapiens
gtctctgttccagaa

SEQ ID NO: 2074213 - DNA, 15 bp, Homo sapiens
tctctgttccagaaa

SEQ ID NO: 2074214 - DNA, 15 bp, Homo sapiens
ctctgttccagaaac

SEQ ID NO: 2074215 - DNA, 15 bp, Homo sapiens
tctgttccagaaacc

SEQ ID NO: 2074216 - DNA, 15 bp, Homo sapiens
ctgttccagaaacct

SEQ ID NO: 2074217 - DNA, 15 bp, Homo sapiens
tgttccagaaacctc

SEQ ID NO: 2074218 - DNA, 15 bp, Homo sapiens
gttccagaaacctcc

SEQ ID NO: 2074219 - DNA, 15 bp, Homo sapiens
ttccagaaacctcca

SEQ ID NO: 2074220 - DNA, 15 bp, Homo sapiens
tccagaaacctccaa

SEQ ID NO: 2074221 - DNA, 15 bp, Homo sapiens
ccagaaacctccaag

SEQ ID NO: 2074222 - DNA, 15 bp, Homo sapiens
cagaaacctccaagg

SEQ ID NO: 2074223 - DNA, 15 bp, Homo sapiens
agaaacctccaaggt

SEQ ID NO: 2074224 - DNA, 15 bp, Homo sapiens
gaaacctccaaggtc

SEQ ID NO: 2074225 - DNA, 15 bp, Homo sapiens
aaacctccaaggtca

SEQ ID NO: 2074226 - DNA, 15 bp, Homo sapiens
aacctccaaggtcac

SEQ ID NO: 2074227 - DNA, 15 bp, Homo sapiens
acctccaaggtcact

SEQ ID NO: 2074228 - DNA, 15 bp, Homo sapiens
cctccaaggtcactt

SEQ ID NO: 2074229 - DNA, 15 bp, Homo sapiens
ctccaaggtcacttt

SEQ ID NO: 2074230 - DNA, 15 bp, Homo sapiens
tccaaggtcactttg

SEQ ID NO: 2074231 - DNA, 15 bp, Homo sapiens
ccaaggtcactttgg

SEQ ID NO: 2074232 - DNA, 15 bp, Homo sapiens
caaggtcactttgga

SEQ ID NO: 2074233 - DNA, 15 bp, Homo sapiens
aaggtcactttggac

SEQ ID NO: 2074234 - DNA, 15 bp, Homo sapiens
aggtcactttggacg

SEQ ID NO: 2074235 - DNA, 15 bp, Homo sapiens
ggtcactttggacgt

SEQ ID NO: 2074236 - DNA, 15 bp, Homo sapiens
gtcactttggacgtg

SEQ ID NO: 2074237 - DNA, 15 bp, Homo sapiens
tcactttggacgtga

SEQ ID NO: 2074238 - DNA, 15 bp, Homo sapiens
cactttggacgtgaa

SEQ ID NO: 2074239 - DNA, 15 bp, Homo sapiens
actttggacgtgaat

SEQ ID NO: 2074240 - DNA, 15 bp, Homo sapiens
ctttggacgtgaata

SEQ ID NO: 2074241 - DNA, 15 bp, Homo sapiens
tttggacgtgaatac

SEQ ID NO: 2074242 - DNA, 15 bp, Homo sapiens
ttggacgtgaatacc

SEQ ID NO: 2074243 - DNA, 15 bp, Homo sapiens
tggacgtgaatacca

SEQ ID NO: 2074244 - DNA, 15 bp, Homo sapiens
ggacgtgaataccac

SEQ ID NO: 2074245 - DNA, 15 bp, Homo sapiens
gacgtgaataccaca

SEQ ID NO: 2074246 - DNA, 15 bp, Homo sapiens
acgtgaataccacac

SEQ ID NO: 2074247 - DNA, 15 bp, Homo sapiens
cgtgaataccacact

SEQ ID NO: 2074248 - DNA, 15 bp, Homo sapiens
gtgaataccacactc

SEQ ID NO: 2074249 - DNA, 15 bp, Homo sapiens
tgaataccacactcc

SEQ ID NO: 2074250 - DNA, 15 bp, Homo sapiens
gaataccacactcct

SEQ ID NO: 2074251 - DNA, 15 bp, Homo sapiens
aataccacactccta

SEQ ID NO: 2074252 - DNA, 15 bp, Homo sapiens
ataccacactcctac

SEQ ID NO: 2074253 - DNA, 15 bp, Homo sapiens
taccacactcctacc

SEQ ID NO: 2074254 - DNA, 15 bp, Homo sapiens
accacactcctacca

SEQ ID NO: 2074255 - DNA, 15 bp, Homo sapiens
ccacactcctaccat

SEQ ID NO: 2074256 - DNA, 15 bp, Homo sapiens
cacactcctaccatt

SEQ ID NO: 2074257 - DNA, 15 bp, Homo sapiens
acactcctaccattg

SEQ ID NO: 2074258 - DNA, 15 bp, Homo sapiens
cactcctaccattgt

SEQ ID NO: 2074259 - DNA, 15 bp, Homo sapiens
actcctaccattgta

SEQ ID NO: 2074260 - DNA, 15 bp, Homo sapiens
ctcctaccattgtac

SEQ ID NO: 2074261 - DNA, 15 bp, Homo sapiens
tcctaccattgtact

SEQ ID NO: 2074262 - DNA, 15 bp, Homo sapiens
cctaccattgtactc

SEQ ID NO: 2074263 - DNA, 15 bp, Homo sapiens
ctaccattgtactca

SEQ ID NO: 2074264 - DNA, 15 bp, Homo sapiens
taccattgtactcag

SEQ ID NO: 2074265 - DNA, 15 bp, Homo sapiens
accattgtactcagt

SEQ ID NO: 2074266 - DNA, 15 bp, Homo sapiens
ccattgtactcagtt

SEQ ID NO: 2074267 - DNA, 15 bp, Homo sapiens
cattgtactcagttt

SEQ ID NO: 2074268 - DNA, 15 bp, Homo sapiens
attgtactcagttta

SEQ ID NO: 2074269 - DNA, 15 bp, Homo sapiens
ttgtactcagtttac

SEQ ID NO: 2074270 - DNA, 15 bp, Homo sapiens
tgtactcagtttact

SEQ ID NO: 2074271 - DNA, 15 bp, Homo sapiens
gtactcagtttactg

SEQ ID NO: 2074272 - DNA, 15 bp, Homo sapiens
tactcagtttactgc

SEQ ID NO: 2074273 - DNA, 15 bp, Homo sapiens
actcagtttactgcc

SEQ ID NO: 2074274 - DNA, 15 bp, Homo sapiens
ctcagtttactgcct

SEQ ID NO: 2074275 - DNA, 15 bp, Homo sapiens
tcagtttactgcctt

SEQ ID NO: 2074276 - DNA, 15 bp, Homo sapiens
cagtttactgccttg

SEQ ID NO: 2074277 - DNA, 15 bp, Homo sapiens
agtttactgccttga

SEQ ID NO: 2074278 - DNA, 15 bp, Homo sapiens
gtttactgccttgac

SEQ ID NO: 2074279 - DNA, 15 bp, Homo sapiens
tttactgccttgaca

SEQ ID NO: 2074280 - DNA, 15 bp, Homo sapiens
ttactgccttgacat

SEQ ID NO: 2074281 - DNA, 15 bp, Homo sapiens
tactgccttgacatt

SEQ ID NO: 2074282 - DNA, 15 bp, Homo sapiens
actgccttgacattt

SEQ ID NO: 2074283 - DNA, 15 bp, Homo sapiens
ctgccttgacatttg

SEQ ID NO: 2074284 - DNA, 15 bp, Homo sapiens
tgccttgacatttga

SEQ ID NO: 2074285 - DNA, 15 bp, Homo sapiens
gccttgacatttgat

SEQ ID NO: 2074286 - DNA, 15 bp, Homo sapiens
ccttgacatttgatt

SEQ ID NO: 2074287 - DNA, 15 bp, Homo sapiens
cttgacatttgattc

SEQ ID NO: 2074288 - DNA, 15 bp, Homo sapiens
ttgacatttgattct

SEQ ID NO: 2074289 - DNA, 15 bp, Homo sapiens
tgacatttgattctt

SEQ ID NO: 2074290 - DNA, 15 bp, Homo sapiens
gacatttgattctta

SEQ ID NO: 2074291 - DNA, 15 bp, Homo sapiens
acatttgattcttat

SEQ ID NO: 2074292 - DNA, 15 bp, Homo sapiens
catttgattcttatt

SEQ ID NO: 2074293 - DNA, 15 bp, Homo sapiens
atttgattcttattt

SEQ ID NO: 2074294 - DNA, 15 bp, Homo sapiens
tttgattcttattta

SEQ ID NO: 2074295 - DNA, 15 bp, Homo sapiens
ttgattcttatttaa

SEQ ID NO: 2074296 - DNA, 15 bp, Homo sapiens
tgattcttatttaat

SEQ ID NO: 2074297 - DNA, 15 bp, Homo sapiens
gattcttatttaatt

SEQ ID NO: 2074298 - DNA, 15 bp, Homo sapiens
attcttatttaattt

SEQ ID NO: 2074299 - DNA, 15 bp, Homo sapiens
ttcttatttaatttt

SEQ ID NO: 2074300 - DNA, 15 bp, Homo sapiens
tcttatttaattttt

SEQ ID NO: 2074301 - DNA, 15 bp, Homo sapiens
cttatttaatttttt

SEQ ID NO: 2074302 - DNA, 15 bp, Homo sapiens
ttatttaattttttt

SEQ ID NO: 2074303 - DNA, 15 bp, Homo sapiens
tatttaatttttttt

SEQ ID NO: 2074304 - DNA, 15 bp, Homo sapiens
atttaattttttttt

SEQ ID NO: 2074305 - DNA, 15 bp, Homo sapiens
tttaatttttttttt

SEQ ID NO: 2074306 - DNA, 15 bp, Homo sapiens
ttttttttttttata

SEQ ID NO: 2074307 - DNA, 15 bp, Homo sapiens
tttttttttttatag

SEQ ID NO: 2074308 - DNA, 15 bp, Homo sapiens
ttttttttttataga

SEQ ID NO: 2074309 - DNA, 15 bp, Homo sapiens
tttttttttatagat

SEQ ID NO: 2074310 - DNA, 15 bp, Homo sapiens
ttttttttatagatg

SEQ ID NO: 2074311 - DNA, 15 bp, Homo sapiens
tttttttatagatgg

SEQ ID NO: 2074312 - DNA, 15 bp, Homo sapiens
ttttttatagatgga

SEQ ID NO: 2074313 - DNA, 15 bp, Homo sapiens
tttttatagatggaa

SEQ ID NO: 2074314 - DNA, 15 bp, Homo sapiens
ttttatagatggaat

SEQ ID NO: 2074315 - DNA, 15 bp, Homo sapiens
tttatagatggaatc

SEQ ID NO: 2074316 - DNA, 15 bp, Homo sapiens
ttatagatggaatct

SEQ ID NO: 2074317 - DNA, 15 bp, Homo sapiens
tatagatggaatctc

SEQ ID NO: 2074318 - DNA, 15 bp, Homo sapiens
atagatggaatctca

SEQ ID NO: 2074319 - DNA, 15 bp, Homo sapiens
tagatggaatctcac

SEQ ID NO: 2074320 - DNA, 15 bp, Homo sapiens
agatggaatctcacc

SEQ ID NO: 2074321 - DNA, 15 bp, Homo sapiens
gatggaatctcacca

SEQ ID NO: 2074322 - DNA, 15 bp, Homo sapiens
atggaatctcaccat

SEQ ID NO: 2074323 - DNA, 15 bp, Homo sapiens
tggaatctcaccatg

SEQ ID NO: 2074324 - DNA, 15 bp, Homo sapiens
ggaatctcaccatgt

SEQ ID NO: 2074325 - DNA, 15 bp, Homo sapiens
gaatctcaccatgtt

SEQ ID NO: 2074326 - DNA, 15 bp, Homo sapiens
aatctcaccatgttg

SEQ ID NO: 2074327 - DNA, 15 bp, Homo sapiens
atctcaccatgttgc

SEQ ID NO: 2074328 - DNA, 15 bp, Homo sapiens
ctcaccatgttgcca

SEQ ID NO: 2074329 - DNA, 15 bp, Homo sapiens
tcaccatgttgccaa

SEQ ID NO: 2074330 - DNA, 15 bp, Homo sapiens
caccatgttgccaag

SEQ ID NO: 2074331 - DNA, 15 bp, Homo sapiens
accatgttgccaagg

SEQ ID NO: 2074332 - DNA, 15 bp, Homo sapiens
ccatgttgccaaggc

SEQ ID NO: 2074333 - DNA, 15 bp, Homo sapiens
catgttgccaaggct

SEQ ID NO: 2074334 - DNA, 15 bp, Homo sapiens
atgttgccaaggctg

SEQ ID NO: 2074335 - DNA, 15 bp, Homo sapiens
gttgccaaggctggt

SEQ ID NO: 2074336 - DNA, 15 bp, Homo sapiens
ttgccaaggctggtc

SEQ ID NO: 2074337 - DNA, 15 bp, Homo sapiens
tgccaaggctggtct

SEQ ID NO: 2074338 - DNA, 15 bp, Homo sapiens
gccaaggctggtctt

SEQ ID NO: 2074339 - DNA, 15 bp, Homo sapiens
ccaaggctggtcttg

SEQ ID NO: 2074340 - DNA, 15 bp, Homo sapiens
caaggctggtcttga

SEQ ID NO: 2074341 - DNA, 15 bp, Homo sapiens
aaggctggtcttgaa

SEQ ID NO: 2074342 - DNA, 15 bp, Homo sapiens
gtcttgaactcctgt

SEQ ID NO: 2074343 - DNA, 15 bp, Homo sapiens
tcttgaactcctgtt

SEQ ID NO: 2074344 - DNA, 15 bp, Homo sapiens
cttgaactcctgttg

SEQ ID NO: 2074345 - DNA, 15 bp, Homo sapiens
ttgaactcctgttgt

SEQ ID NO: 2074346 - DNA, 15 bp, Homo sapiens
tgaactcctgttgtt

SEQ ID NO: 2074347 - DNA, 15 bp, Homo sapiens
gaactcctgttgttt

SEQ ID NO: 2074348 - DNA, 15 bp, Homo sapiens
aactcctgttgtttt

SEQ ID NO: 2074349 - DNA, 15 bp, Homo sapiens
actcctgttgttttt

SEQ ID NO: 2074350 - DNA, 15 bp, Homo sapiens
ctcctgttgtttttc

SEQ ID NO: 2074351 - DNA, 15 bp, Homo sapiens
tcctgttgtttttca

SEQ ID NO: 2074352 - DNA, 15 bp, Homo sapiens
cctgttgtttttcaa

SEQ ID NO: 2074353 - DNA, 15 bp, Homo sapiens
ctgttgtttttcaac

SEQ ID NO: 2074354 - DNA, 15 bp, Homo sapiens
tgttgtttttcaact

SEQ ID NO: 2074355 - DNA, 15 bp, Homo sapiens
gttgtttttcaactt

SEQ ID NO: 2074356 - DNA, 15 bp, Homo sapiens
ttgtttttcaacttc

SEQ ID NO: 2074357 - DNA, 15 bp, Homo sapiens
tgtttttcaacttcc

SEQ ID NO: 2074358 - DNA, 15 bp, Homo sapiens
gtttttcaacttcct

SEQ ID NO: 2074359 - DNA, 15 bp, Homo sapiens
tttttcaacttcctt

SEQ ID NO: 2074360 - DNA, 15 bp, Homo sapiens
ttttcaacttccttt

SEQ ID NO: 2074361 - DNA, 15 bp, Homo sapiens
tttcaacttccttta

SEQ ID NO: 2074362 - DNA, 15 bp, Homo sapiens
ttcaacttcctttag

SEQ ID NO: 2074363 - DNA, 15 bp, Homo sapiens
tcaacttcctttagt

SEQ ID NO: 2074364 - DNA, 15 bp, Homo sapiens
caacttcctttagtt

SEQ ID NO: 2074365 - DNA, 15 bp, Homo sapiens
aacttcctttagttg

SEQ ID NO: 2074366 - DNA, 15 bp, Homo sapiens
acttcctttagttga

SEQ ID NO: 2074367 - DNA, 15 bp, Homo sapiens
tgaaattcatgaaaa

SEQ ID NO: 2074368 - DNA, 15 bp, Homo sapiens
gaaattcatgaaaaa

SEQ ID NO: 2074369 - DNA, 15 bp, Homo sapiens
aaattcatgaaaaat

SEQ ID NO: 2074370 - DNA, 15 bp, Homo sapiens
aattcatgaaaaatg

SEQ ID NO: 2074371 - DNA, 15 bp, Homo sapiens
ttcatgaaaaatgaa

SEQ ID NO: 2074372 - DNA, 15 bp, Homo sapiens
tcatgaaaaatgaat

SEQ ID NO: 2074373 - DNA, 15 bp, Homo sapiens
catgaaaaatgaatt

SEQ ID NO: 2074374 - DNA, 15 bp, Homo sapiens
atgaaaaatgaattt

SEQ ID NO: 2074375 - DNA, 15 bp, Homo sapiens
tgaaaaatgaatttc

SEQ ID NO: 2074376 - DNA, 15 bp, Homo sapiens
gaaaaatgaatttca

SEQ ID NO: 2074377 - DNA, 15 bp, Homo sapiens
aaaaatgaatttcat

SEQ ID NO: 2074378 - DNA, 15 bp, Homo sapiens
aaaatgaatttcatg

SEQ ID NO: 2074379 - DNA, 15 bp, Homo sapiens
aaatgaatttcatga

SEQ ID NO: 2074380 - DNA, 15 bp, Homo sapiens
aatgaatttcatgaa

SEQ ID NO: 2074381 - DNA, 15 bp, Homo sapiens
atgaatttcatgaat

SEQ ID NO: 2074382 - DNA, 15 bp, Homo sapiens
tgaatttcatgaatt

SEQ ID NO: 2074383 - DNA, 15 bp, Homo sapiens
gaatttcatgaattc

SEQ ID NO: 2074384 - DNA, 15 bp, Homo sapiens
aatttcatgaattca

SEQ ID NO: 2074385 - DNA, 15 bp, Homo sapiens
atttcatgaattcat

SEQ ID NO: 2074386 - DNA, 15 bp, Homo sapiens
tttcatgaattcatg

SEQ ID NO: 2074387 - DNA, 15 bp, Homo sapiens
ttcatgaattcatgt

SEQ ID NO: 2074388 - DNA, 15 bp, Homo sapiens
tcatgaattcatgtt

SEQ ID NO: 2074389 - DNA, 15 bp, Homo sapiens
catgaattcatgttt

SEQ ID NO: 2074390 - DNA, 15 bp, Homo sapiens
atgaattcatgtttt

SEQ ID NO: 2074391 - DNA, 15 bp, Homo sapiens
tgaattcatgtttta

SEQ ID NO: 2074392 - DNA, 15 bp, Homo sapiens
gaattcatgttttaa

SEQ ID NO: 2074393 - DNA, 15 bp, Homo sapiens
aattcatgttttaat

SEQ ID NO: 2074394 - DNA, 15 bp, Homo sapiens
attcatgttttaatt

SEQ ID NO: 2074395 - DNA, 15 bp, Homo sapiens
ttcatgttttaattc

SEQ ID NO: 2074396 - DNA, 15 bp, Homo sapiens
tcatgttttaattca

SEQ ID NO: 2074397 - DNA, 15 bp, Homo sapiens
catgttttaattcat

SEQ ID NO: 2074398 - DNA, 15 bp, Homo sapiens
atgttttaattcatt

SEQ ID NO: 2074399 - DNA, 15 bp, Homo sapiens
tgttttaattcattt

SEQ ID NO: 2074400 - DNA, 15 bp, Homo sapiens
gttttaattcatttc

SEQ ID NO: 2074401 - DNA, 15 bp, Homo sapiens
ttttaattcatttca

SEQ ID NO: 2074402 - DNA, 15 bp, Homo sapiens
tttaattcatttcac

SEQ ID NO: 2074403 - DNA, 15 bp, Homo sapiens
ttaattcatttcact

SEQ ID NO: 2074404 - DNA, 15 bp, Homo sapiens
taattcatttcactc

SEQ ID NO: 2074405 - DNA, 15 bp, Homo sapiens
aattcatttcactca

SEQ ID NO: 2074406 - DNA, 15 bp, Homo sapiens
attcatttcactcaa

SEQ ID NO: 2074407 - DNA, 15 bp, Homo sapiens
ttcatttcactcaag

SEQ ID NO: 2074408 - DNA, 15 bp, Homo sapiens
tcatttcactcaagt

SEQ ID NO: 2074409 - DNA, 15 bp, Homo sapiens
catttcactcaagtg

SEQ ID NO: 2074410 - DNA, 15 bp, Homo sapiens
atttcactcaagtga

SEQ ID NO: 2074411 - DNA, 15 bp, Homo sapiens
tttcactcaagtgat

SEQ ID NO: 2074412 - DNA, 15 bp, Homo sapiens
ttcactcaagtgatc

SEQ ID NO: 2074413 - DNA, 15 bp, Homo sapiens
tcactcaagtgatcc

SEQ ID NO: 2074414 - DNA, 15 bp, Homo sapiens
cactcaagtgatcct

SEQ ID NO: 2074415 - DNA, 15 bp, Homo sapiens
actcaagtgatcctc

SEQ ID NO: 2074416 - DNA, 15 bp, Homo sapiens
ctcctgcctcagctt

SEQ ID NO: 2074417 - DNA, 15 bp, Homo sapiens
ctgcctcagcttcct

SEQ ID NO: 2074418 - DNA, 15 bp, Homo sapiens
tgcctcagcttcctg

SEQ ID NO: 2074419 - DNA, 15 bp, Homo sapiens
gcctcagcttcctga

SEQ ID NO: 2074420 - DNA, 15 bp, Homo sapiens
cctcagcttcctgag

SEQ ID NO: 2074421 - DNA, 15 bp, Homo sapiens
ctcagcttcctgagt

SEQ ID NO: 2074422 - DNA, 15 bp, Homo sapiens
tcagcttcctgagta

SEQ ID NO: 2074423 - DNA, 15 bp, Homo sapiens
cagcttcctgagtaa

SEQ ID NO: 2074424 - DNA, 15 bp, Homo sapiens
agcttcctgagtaac

SEQ ID NO: 2074425 - DNA, 15 bp, Homo sapiens
gcttcctgagtaact

SEQ ID NO: 2074426 - DNA, 15 bp, Homo sapiens
cttcctgagtaactg

SEQ ID NO: 2074427 - DNA, 15 bp, Homo sapiens
ttcctgagtaactga

SEQ ID NO: 2074428 - DNA, 15 bp, Homo sapiens
tcctgagtaactgag

SEQ ID NO: 2074429 - DNA, 15 bp, Homo sapiens
cctgagtaactgaga

SEQ ID NO: 2074430 - DNA, 15 bp, Homo sapiens
ctgagtaactgagac

SEQ ID NO: 2074431 - DNA, 15 bp, Homo sapiens
tgagtaactgagact

SEQ ID NO: 2074432 - DNA, 15 bp, Homo sapiens
gagtaactgagacta

SEQ ID NO: 2074433 - DNA, 15 bp, Homo sapiens
agtaactgagactac

SEQ ID NO: 2074434 - DNA, 15 bp, Homo sapiens
gtaactgagactaca

SEQ ID NO: 2074435 - DNA, 15 bp, Homo sapiens
taactgagactacag

SEQ ID NO: 2074436 - DNA, 15 bp, Homo sapiens
aactgagactacagg

SEQ ID NO: 2074437 - DNA, 15 bp, Homo sapiens
actgagactacaggc

SEQ ID NO: 2074438 - DNA, 15 bp, Homo sapiens
ctgagactacaggca

SEQ ID NO: 2074439 - DNA, 15 bp, Homo sapiens
tgagactacaggcat

SEQ ID NO: 2074440 - DNA, 15 bp, Homo sapiens
gagactacaggcatg

SEQ ID NO: 2074441 - DNA, 15 bp, Homo sapiens
agactacaggcatgt

SEQ ID NO: 2074442 - DNA, 15 bp, Homo sapiens
actacaggcatgtgt

SEQ ID NO: 2074443 - DNA, 15 bp, Homo sapiens
ctacaggcatgtgtc

SEQ ID NO: 2074444 - DNA, 15 bp, Homo sapiens
tacaggcatgtgtca

SEQ ID NO: 2074445 - DNA, 15 bp, Homo sapiens
acaggcatgtgtcac

SEQ ID NO: 2074446 - DNA, 15 bp, Homo sapiens
caggcatgtgtcacc

SEQ ID NO: 2074447 - DNA, 15 bp, Homo sapiens
aggcatgtgtcacca

SEQ ID NO: 2074448 - DNA, 15 bp, Homo sapiens
ggcatgtgtcaccat

SEQ ID NO: 2074449 - DNA, 15 bp, Homo sapiens
gcatgtgtcaccatt

SEQ ID NO: 2074450 - DNA, 15 bp, Homo sapiens
catgtgtcaccattc

SEQ ID NO: 2074451 - DNA, 15 bp, Homo sapiens
atgtgtcaccattcc

SEQ ID NO: 2074452 - DNA, 15 bp, Homo sapiens
tgtgtcaccattcca

SEQ ID NO: 2074453 - DNA, 15 bp, Homo sapiens
gtgtcaccattccag

SEQ ID NO: 2074454 - DNA, 15 bp, Homo sapiens
tgtcaccattccagg

SEQ ID NO: 2074455 - DNA, 15 bp, Homo sapiens
gtcaccattccaggc

SEQ ID NO: 2074456 - DNA, 15 bp, Homo sapiens
tcaccattccaggcc

SEQ ID NO: 2074457 - DNA, 15 bp, Homo sapiens
caccattccaggcca

SEQ ID NO: 2074458 - DNA, 15 bp, Homo sapiens
accattccaggccac

SEQ ID NO: 2074459 - DNA, 15 bp, Homo sapiens
ccattccaggccact

SEQ ID NO: 2074460 - DNA, 15 bp, Homo sapiens
cattccaggccactt

SEQ ID NO: 2074461 - DNA, 15 bp, Homo sapiens
attccaggccacttg

SEQ ID NO: 2074462 - DNA, 15 bp, Homo sapiens
ttccaggccacttgg

SEQ ID NO: 2074463 - DNA, 15 bp, Homo sapiens
tccaggccacttggt

SEQ ID NO: 2074464 - DNA, 15 bp, Homo sapiens
ccaggccacttggtt

SEQ ID NO: 2074465 - DNA, 15 bp, Homo sapiens
caggccacttggttc

SEQ ID NO: 2074466 - DNA, 15 bp, Homo sapiens
aggccacttggttcc

SEQ ID NO: 2074467 - DNA, 15 bp, Homo sapiens
ggccacttggttcct

SEQ ID NO: 2074468 - DNA, 15 bp, Homo sapiens
gccacttggttcctt

SEQ ID NO: 2074469 - DNA, 15 bp, Homo sapiens
ccacttggttccttt

SEQ ID NO: 2074470 - DNA, 15 bp, Homo sapiens
cacttggttcctttt

SEQ ID NO: 2074471 - DNA, 15 bp, Homo sapiens
acttggttcctttta

SEQ ID NO: 2074472 - DNA, 15 bp, Homo sapiens
cttggttccttttat

SEQ ID NO: 2074473 - DNA, 15 bp, Homo sapiens
ttggttccttttata

SEQ ID NO: 2074474 - DNA, 15 bp, Homo sapiens
tggttccttttatag

SEQ ID NO: 2074475 - DNA, 15 bp, Homo sapiens
ggttccttttatagt

SEQ ID NO: 2074476 - DNA, 15 bp, Homo sapiens
gttccttttatagtt

SEQ ID NO: 2074477 - DNA, 15 bp, Homo sapiens
ttccttttatagttt

SEQ ID NO: 2074478 - DNA, 15 bp, Homo sapiens
tccttttatagtttc

SEQ ID NO: 2074479 - DNA, 15 bp, Homo sapiens
ccttttatagtttct

SEQ ID NO: 2074480 - DNA, 15 bp, Homo sapiens
cttttatagtttcta

SEQ ID NO: 2074481 - DNA, 15 bp, Homo sapiens
ttttatagtttctat

SEQ ID NO: 2074482 - DNA, 15 bp, Homo sapiens
tttatagtttctatt

SEQ ID NO: 2074483 - DNA, 15 bp, Homo sapiens
ttatagtttctattt

SEQ ID NO: 2074484 - DNA, 15 bp, Homo sapiens
tatagtttctatttc

SEQ ID NO: 2074485 - DNA, 15 bp, Homo sapiens
atagtttctatttct

SEQ ID NO: 2074486 - DNA, 15 bp, Homo sapiens
tagtttctatttctt

SEQ ID NO: 2074487 - DNA, 15 bp, Homo sapiens
agtttctatttcttc

SEQ ID NO: 2074488 - DNA, 15 bp, Homo sapiens
gtttctatttcttca

SEQ ID NO: 2074489 - DNA, 15 bp, Homo sapiens
tttctatttcttcat

SEQ ID NO: 2074490 - DNA, 15 bp, Homo sapiens
ttctatttcttcatt

SEQ ID NO: 2074491 - DNA, 15 bp, Homo sapiens
tctatttcttcattt

SEQ ID NO: 2074492 - DNA, 15 bp, Homo sapiens
ctatttcttcattta

SEQ ID NO: 2074493 - DNA, 15 bp, Homo sapiens
tatttcttcatttat

SEQ ID NO: 2074494 - DNA, 15 bp, Homo sapiens
ttcttcatttattac

SEQ ID NO: 2074495 - DNA, 15 bp, Homo sapiens
tcttcatttattaca

SEQ ID NO: 2074496 - DNA, 15 bp, Homo sapiens
cttcatttattacaa

SEQ ID NO: 2074497 - DNA, 15 bp, Homo sapiens
ttcatttattacaag

SEQ ID NO: 2074498 - DNA, 15 bp, Homo sapiens
tcatttattacaagc

SEQ ID NO: 2074499 - DNA, 15 bp, Homo sapiens
catttattacaagca

SEQ ID NO: 2074500 - DNA, 15 bp, Homo sapiens
atttattacaagcat

SEQ ID NO: 2074501 - DNA, 15 bp, Homo sapiens
tttattacaagcata

SEQ ID NO: 2074502 - DNA, 15 bp, Homo sapiens
ttattacaagcatat

SEQ ID NO: 2074503 - DNA, 15 bp, Homo sapiens
tattacaagcatatt

SEQ ID NO: 2074504 - DNA, 15 bp, Homo sapiens
attacaagcatattt

SEQ ID NO: 2074505 - DNA, 15 bp, Homo sapiens
ttacaagcatatttt

SEQ ID NO: 2074506 - DNA, 15 bp, Homo sapiens
tacaagcatattttc

SEQ ID NO: 2074507 - DNA, 15 bp, Homo sapiens
acaagcatattttcc

SEQ ID NO: 2074508 - DNA, 15 bp, Homo sapiens
caagcatattttcct

SEQ ID NO: 2074509 - DNA, 15 bp, Homo sapiens
aagcatattttcctt

SEQ ID NO: 2074510 - DNA, 15 bp, Homo sapiens
agcatattttccttt

SEQ ID NO: 2074511 - DNA, 15 bp, Homo sapiens
gcatattttccttta

SEQ ID NO: 2074512 - DNA, 15 bp, Homo sapiens
catattttcctttat

SEQ ID NO: 2074513 - DNA, 15 bp, Homo sapiens
atattttcctttatg

SEQ ID NO: 2074514 - DNA, 15 bp, Homo sapiens
tattttcctttatgt

SEQ ID NO: 2074515 - DNA, 15 bp, Homo sapiens
attttcctttatgtc

SEQ ID NO: 2074516 - DNA, 15 bp, Homo sapiens
ttttcctttatgtcc

SEQ ID NO: 2074517 - DNA, 15 bp, Homo sapiens
tttcctttatgtcct

SEQ ID NO: 2074518 - DNA, 15 bp, Homo sapiens
ttcctttatgtcctt

SEQ ID NO: 2074519 - DNA, 15 bp, Homo sapiens
tcctttatgtccttt

SEQ ID NO: 2074520 - DNA, 15 bp, Homo sapiens
cctttatgtcctttg

SEQ ID NO: 2074521 - DNA, 15 bp, Homo sapiens
ctttatgtcctttga

SEQ ID NO: 2074522 - DNA, 15 bp, Homo sapiens
tttatgtcctttgag

SEQ ID NO: 2074523 - DNA, 15 bp, Homo sapiens
ttatgtcctttgagc

SEQ ID NO: 2074524 - DNA, 15 bp, Homo sapiens
tatgtcctttgagca

SEQ ID NO: 2074525 - DNA, 15 bp, Homo sapiens
atgtcctttgagcat

SEQ ID NO: 2074526 - DNA, 15 bp, Homo sapiens
tgtcctttgagcata

SEQ ID NO: 2074527 - DNA, 15 bp, Homo sapiens
gtcctttgagcatag

SEQ ID NO: 2074528 - DNA, 15 bp, Homo sapiens
tcctttgagcatagt

SEQ ID NO: 2074529 - DNA, 15 bp, Homo sapiens
cctttgagcatagtt

SEQ ID NO: 2074530 - DNA, 15 bp, Homo sapiens
ctttgagcatagtta

SEQ ID NO: 2074531 - DNA, 15 bp, Homo sapiens
tttgagcatagttat

SEQ ID NO: 2074532 - DNA, 15 bp, Homo sapiens
ttgagcatagttata

SEQ ID NO: 2074533 - DNA, 15 bp, Homo sapiens
tgagcatagttataa

SEQ ID NO: 2074534 - DNA, 15 bp, Homo sapiens
gagcatagttataat

SEQ ID NO: 2074535 - DNA, 15 bp, Homo sapiens
agcatagttataatg

SEQ ID NO: 2074536 - DNA, 15 bp, Homo sapiens
gcatagttataatgc

SEQ ID NO: 2074537 - DNA, 15 bp, Homo sapiens
catagttataatgca

SEQ ID NO: 2074538 - DNA, 15 bp, Homo sapiens
atagttataatgcag

SEQ ID NO: 2074539 - DNA, 15 bp, Homo sapiens
tagttataatgcagc

SEQ ID NO: 2074540 - DNA, 15 bp, Homo sapiens
agttataatgcagct

SEQ ID NO: 2074541 - DNA, 15 bp, Homo sapiens
gttataatgcagctt

SEQ ID NO: 2074542 - DNA, 15 bp, Homo sapiens
ttataatgcagcttt

SEQ ID NO: 2074543 - DNA, 15 bp, Homo sapiens
tataatgcagcttta

SEQ ID NO: 2074544 - DNA, 15 bp, Homo sapiens
ataatgcagctttaa

SEQ ID NO: 2074545 - DNA, 15 bp, Homo sapiens
taatgcagctttaaa

SEQ ID NO: 2074546 - DNA, 15 bp, Homo sapiens
aatgcagctttaaaa

SEQ ID NO: 2074547 - DNA, 15 bp, Homo sapiens
atgcagctttaaaat

SEQ ID NO: 2074548 - DNA, 15 bp, Homo sapiens
tgcagctttaaaatt

SEQ ID NO: 2074549 - DNA, 15 bp, Homo sapiens
gcagctttaaaattc

SEQ ID NO: 2074550 - DNA, 15 bp, Homo sapiens
cagctttaaaattct

SEQ ID NO: 2074551 - DNA, 15 bp, Homo sapiens
agctttaaaattctt

SEQ ID NO: 2074552 - DNA, 15 bp, Homo sapiens
gctttaaaattcttg

SEQ ID NO: 2074553 - DNA, 15 bp, Homo sapiens
ctttaaaattcttgt

SEQ ID NO: 2074554 - DNA, 15 bp, Homo sapiens
tttaaaattcttgtt

SEQ ID NO: 2074555 - DNA, 15 bp, Homo sapiens
ttaaaattcttgttt

SEQ ID NO: 2074556 - DNA, 15 bp, Homo sapiens
taaaattcttgtttg

SEQ ID NO: 2074557 - DNA, 15 bp, Homo sapiens
aaaattcttgtttgc

SEQ ID NO: 2074558 - DNA, 15 bp, Homo sapiens
aaattcttgtttgct

SEQ ID NO: 2074559 - DNA, 15 bp, Homo sapiens
aattcttgtttgcta

SEQ ID NO: 2074560 - DNA, 15 bp, Homo sapiens
tccttattagtgaaa

SEQ ID NO: 2074561 - DNA, 15 bp, Homo sapiens
ccttattagtgaaac

SEQ ID NO: 2074562 - DNA, 15 bp, Homo sapiens
cttattagtgaaact

SEQ ID NO: 2074563 - DNA, 15 bp, Homo sapiens
ttattagtgaaacta

SEQ ID NO: 2074564 - DNA, 15 bp, Homo sapiens
tattagtgaaactaa

SEQ ID NO: 2074565 - DNA, 15 bp, Homo sapiens
attagtgaaactaat

SEQ ID NO: 2074566 - DNA, 15 bp, Homo sapiens
ttagtgaaactaata

SEQ ID NO: 2074567 - DNA, 15 bp, Homo sapiens
tagtgaaactaataa

SEQ ID NO: 2074568 - DNA, 15 bp, Homo sapiens
agtgaaactaataat

SEQ ID NO: 2074569 - DNA, 15 bp, Homo sapiens
gtgaaactaataatt

SEQ ID NO: 2074570 - DNA, 15 bp, Homo sapiens
tgaaactaataatta

SEQ ID NO: 2074571 - DNA, 15 bp, Homo sapiens
gaaactaataattac

SEQ ID NO: 2074572 - DNA, 15 bp, Homo sapiens
aaactaataattact

SEQ ID NO: 2074573 - DNA, 15 bp, Homo sapiens
aactaataattacta

SEQ ID NO: 2074574 - DNA, 15 bp, Homo sapiens
actaataattactat

SEQ ID NO: 2074575 - DNA, 15 bp, Homo sapiens
ctaataattactatt

SEQ ID NO: 2074576 - DNA, 15 bp, Homo sapiens
taataattactatta

SEQ ID NO: 2074577 - DNA, 15 bp, Homo sapiens
aataattactattaa

SEQ ID NO: 2074578 - DNA, 15 bp, Homo sapiens
ataattactattaat

SEQ ID NO: 2074579 - DNA, 15 bp, Homo sapiens
taattactattaata

SEQ ID NO: 2074580 - DNA, 15 bp, Homo sapiens
aattactattaatac

SEQ ID NO: 2074581 - DNA, 15 bp, Homo sapiens
attactattaatacc

SEQ ID NO: 2074582 - DNA, 15 bp, Homo sapiens
ttactattaatacct

SEQ ID NO: 2074583 - DNA, 15 bp, Homo sapiens
tactattaatacctg

SEQ ID NO: 2074584 - DNA, 15 bp, Homo sapiens
actattaatacctgg

SEQ ID NO: 2074585 - DNA, 15 bp, Homo sapiens
ctattaatacctggc

SEQ ID NO: 2074586 - DNA, 15 bp, Homo sapiens
tattaatacctggcc

SEQ ID NO: 2074587 - DNA, 15 bp, Homo sapiens
attaatacctggccc

SEQ ID NO: 2074588 - DNA, 15 bp, Homo sapiens
ttaatacctggcccc

SEQ ID NO: 2074589 - DNA, 15 bp, Homo sapiens
taatacctggcccct

SEQ ID NO: 2074590 - DNA, 15 bp, Homo sapiens
aatacctggcccctc

SEQ ID NO: 2074591 - DNA, 15 bp, Homo sapiens
atacctggcccctcc

SEQ ID NO: 2074592 - DNA, 15 bp, Homo sapiens
tacctggcccctccc

SEQ ID NO: 2074593 - DNA, 15 bp, Homo sapiens
acctggcccctccct

SEQ ID NO: 2074594 - DNA, 15 bp, Homo sapiens
cctggcccctccctg

SEQ ID NO: 2074595 - DNA, 15 bp, Homo sapiens
ctggcccctccctgg

SEQ ID NO: 2074596 - DNA, 15 bp, Homo sapiens
tggcccctccctggc

SEQ ID NO: 2074597 - DNA, 15 bp, Homo sapiens
ggcccctccctggcc

SEQ ID NO: 2074598 - DNA, 15 bp, Homo sapiens
gcccctccctggccc

SEQ ID NO: 2074599 - DNA, 15 bp, Homo sapiens
cccctccctggccct

SEQ ID NO: 2074600 - DNA, 15 bp, Homo sapiens
ccctccctggccctt

SEQ ID NO: 2074601 - DNA, 15 bp, Homo sapiens
cctccctggcccttt

SEQ ID NO: 2074602 - DNA, 15 bp, Homo sapiens
ctccctggccctttc

SEQ ID NO: 2074603 - DNA, 15 bp, Homo sapiens
tccctggccctttca

SEQ ID NO: 2074604 - DNA, 15 bp, Homo sapiens
ccctggccctttcat

SEQ ID NO: 2074605 - DNA, 15 bp, Homo sapiens
cctggccctttcatc

SEQ ID NO: 2074606 - DNA, 15 bp, Homo sapiens
ctggccctttcatcc

SEQ ID NO: 2074607 - DNA, 15 bp, Homo sapiens
tggccctttcatcca

SEQ ID NO: 2074608 - DNA, 15 bp, Homo sapiens
ggccctttcatccag

SEQ ID NO: 2074609 - DNA, 15 bp, Homo sapiens
gccctttcatccagg

SEQ ID NO: 2074610 - DNA, 15 bp, Homo sapiens
ccctttcatccaggt

SEQ ID NO: 2074611 - DNA, 15 bp, Homo sapiens
cctttcatccaggtg

SEQ ID NO: 2074612 - DNA, 15 bp, Homo sapiens
ctttcatccaggtgg

SEQ ID NO: 2074613 - DNA, 15 bp, Homo sapiens
tttcatccaggtggg

SEQ ID NO: 2074614 - DNA, 15 bp, Homo sapiens
ttcatccaggtgggt

SEQ ID NO: 2074615 - DNA, 15 bp, Homo sapiens
tcatccaggtgggtg

SEQ ID NO: 2074616 - DNA, 15 bp, Homo sapiens
catccaggtgggtgg

SEQ ID NO: 2074617 - DNA, 15 bp, Homo sapiens
atccaggtgggtggg

SEQ ID NO: 2074618 - DNA, 15 bp, Homo sapiens
tccaggtgggtgggg

SEQ ID NO: 2074619 - DNA, 15 bp, Homo sapiens
ccaggtgggtgggga

SEQ ID NO: 2074620 - DNA, 15 bp, Homo sapiens
caggtgggtggggag

SEQ ID NO: 2074621 - DNA, 15 bp, Homo sapiens
aggtgggtggggagg

SEQ ID NO: 2074622 - DNA, 15 bp, Homo sapiens
ggtgggtggggaggt

SEQ ID NO: 2074623 - DNA, 15 bp, Homo sapiens
gtgggtggggaggtt

SEQ ID NO: 2074624 - DNA, 15 bp, Homo sapiens
tgggtggggaggttt

SEQ ID NO: 2074625 - DNA, 15 bp, Homo sapiens
gggtggggaggtttt

SEQ ID NO: 2074626 - DNA, 15 bp, Homo sapiens
ggtggggaggttttg

SEQ ID NO: 2074627 - DNA, 15 bp, Homo sapiens
gtggggaggttttga

SEQ ID NO: 2074628 - DNA, 15 bp, Homo sapiens
tggggaggttttgaa

SEQ ID NO: 2074629 - DNA, 15 bp, Homo sapiens
ggggaggttttgaag

SEQ ID NO: 2074630 - DNA, 15 bp, Homo sapiens
gggaggttttgaaga

SEQ ID NO: 2074631 - DNA, 15 bp, Homo sapiens
ggaggttttgaagat

SEQ ID NO: 2074632 - DNA, 15 bp, Homo sapiens
gaggttttgaagatg

SEQ ID NO: 2074633 - DNA, 15 bp, Homo sapiens
aggttttgaagatga

SEQ ID NO: 2074634 - DNA, 15 bp, Homo sapiens
ggttttgaagatgaa

SEQ ID NO: 2074635 - DNA, 15 bp, Homo sapiens
gttttgaagatgaaa

SEQ ID NO: 2074636 - DNA, 15 bp, Homo sapiens
ttttgaagatgaaag

SEQ ID NO: 2074637 - DNA, 15 bp, Homo sapiens
tttgaagatgaaagt

SEQ ID NO: 2074638 - DNA, 15 bp, Homo sapiens
ttgaagatgaaagtc

SEQ ID NO: 2074639 - DNA, 15 bp, Homo sapiens
tgaagatgaaagtct

SEQ ID NO: 2074640 - DNA, 15 bp, Homo sapiens
gaagatgaaagtctg

SEQ ID NO: 2074641 - DNA, 15 bp, Homo sapiens
aagatgaaagtctgg

SEQ ID NO: 2074642 - DNA, 15 bp, Homo sapiens
agatgaaagtctggg

SEQ ID NO: 2074643 - DNA, 15 bp, Homo sapiens
gatgaaagtctgggg

SEQ ID NO: 2074644 - DNA, 15 bp, Homo sapiens
atgaaagtctggggg

SEQ ID NO: 2074645 - DNA, 15 bp, Homo sapiens
tgaaagtctgggggg

SEQ ID NO: 2074646 - DNA, 15 bp, Homo sapiens
gaaagtctggggggc

SEQ ID NO: 2074647 - DNA, 15 bp, Homo sapiens
aaagtctggggggcc

SEQ ID NO: 2074648 - DNA, 15 bp, Homo sapiens
aagtctggggggcct

SEQ ID NO: 2074649 - DNA, 15 bp, Homo sapiens
agtctggggggcctc

SEQ ID NO: 2074650 - DNA, 15 bp, Homo sapiens
gtctggggggcctct

SEQ ID NO: 2074651 - DNA, 15 bp, Homo sapiens
tctggggggcctctc

SEQ ID NO: 2074652 - DNA, 15 bp, Homo sapiens
ctggggggcctctct

SEQ ID NO: 2074653 - DNA, 15 bp, Homo sapiens
tggggggcctctcta

SEQ ID NO: 2074654 - DNA, 15 bp, Homo sapiens
ggggggcctctctag

SEQ ID NO: 2074655 - DNA, 15 bp, Homo sapiens
gggggcctctctaga

SEQ ID NO: 2074656 - DNA, 15 bp, Homo sapiens
ggggcctctctagat

SEQ ID NO: 2074657 - DNA, 15 bp, Homo sapiens
gggcctctctagatg

SEQ ID NO: 2074658 - DNA, 15 bp, Homo sapiens
ggcctctctagatgc

SEQ ID NO: 2074659 - DNA, 15 bp, Homo sapiens
gcctctctagatgca

SEQ ID NO: 2074660 - DNA, 15 bp, Homo sapiens
cctctctagatgcag

SEQ ID NO: 2074661 - DNA, 15 bp, Homo sapiens
ctctctagatgcagg

SEQ ID NO: 2074662 - DNA, 15 bp, Homo sapiens
tctctagatgcaggt

SEQ ID NO: 2074663 - DNA, 15 bp, Homo sapiens
ctctagatgcaggtt

SEQ ID NO: 2074664 - DNA, 15 bp, Homo sapiens
tctagatgcaggttt

SEQ ID NO: 2074665 - DNA, 15 bp, Homo sapiens
ctagatgcaggtttc

SEQ ID NO: 2074666 - DNA, 15 bp, Homo sapiens
tagatgcaggtttcg

SEQ ID NO: 2074667 - DNA, 15 bp, Homo sapiens
agatgcaggtttcgg

SEQ ID NO: 2074668 - DNA, 15 bp, Homo sapiens
gatgcaggtttcggg

SEQ ID NO: 2074669 - DNA, 15 bp, Homo sapiens
atgcaggtttcgggg

SEQ ID NO: 2074670 - DNA, 15 bp, Homo sapiens
tgcaggtttcgggga

SEQ ID NO: 2074671 - DNA, 15 bp, Homo sapiens
gcaggtttcggggat

SEQ ID NO: 2074672 - DNA, 15 bp, Homo sapiens
caggtttcggggatt

SEQ ID NO: 2074673 - DNA, 15 bp, Homo sapiens
aggtttcggggattc

SEQ ID NO: 2074674 - DNA, 15 bp, Homo sapiens
ggtttcggggattca

SEQ ID NO: 2074675 - DNA, 15 bp, Homo sapiens
gtttcggggattcac

SEQ ID NO: 2074676 - DNA, 15 bp, Homo sapiens
tttcggggattcaca

SEQ ID NO: 2074677 - DNA, 15 bp, Homo sapiens
ttcggggattcacaa

SEQ ID NO: 2074678 - DNA, 15 bp, Homo sapiens
tcggggattcacaac

SEQ ID NO: 2074679 - DNA, 15 bp, Homo sapiens
cggggattcacaact

SEQ ID NO: 2074680 - DNA, 15 bp, Homo sapiens
ggggattcacaacta

SEQ ID NO: 2074681 - DNA, 15 bp, Homo sapiens
gggattcacaactac

SEQ ID NO: 2074682 - DNA, 15 bp, Homo sapiens
ggattcacaactact

SEQ ID NO: 2074683 - DNA, 15 bp, Homo sapiens
gattcacaactacta

SEQ ID NO: 2074684 - DNA, 15 bp, Homo sapiens
attcacaactactaa

SEQ ID NO: 2074685 - DNA, 15 bp, Homo sapiens
ttcacaactactaat

SEQ ID NO: 2074686 - DNA, 15 bp, Homo sapiens
tcacaactactaatt

SEQ ID NO: 2074687 - DNA, 15 bp, Homo sapiens
cacaactactaatta

SEQ ID NO: 2074688 - DNA, 15 bp, Homo sapiens
acaactactaattaa

SEQ ID NO: 2074689 - DNA, 15 bp, Homo sapiens
caactactaattaag

SEQ ID NO: 2074690 - DNA, 15 bp, Homo sapiens
aactactaattaagc

SEQ ID NO: 2074691 - DNA, 15 bp, Homo sapiens
actactaattaagct

SEQ ID NO: 2074692 - DNA, 15 bp, Homo sapiens
ctactaattaagctt

SEQ ID NO: 2074693 - DNA, 15 bp, Homo sapiens
tactaattaagcttg

SEQ ID NO: 2074694 - DNA, 15 bp, Homo sapiens
actaattaagcttgg

SEQ ID NO: 2074695 - DNA, 15 bp, Homo sapiens
ctaattaagcttggc

SEQ ID NO: 2074696 - DNA, 15 bp, Homo sapiens
taattaagcttggca

SEQ ID NO: 2074697 - DNA, 15 bp, Homo sapiens
aattaagcttggcag

SEQ ID NO: 2074698 - DNA, 15 bp, Homo sapiens
attaagcttggcagc

SEQ ID NO: 2074699 - DNA, 15 bp, Homo sapiens
ttaagcttggcagcc

SEQ ID NO: 2074700 - DNA, 15 bp, Homo sapiens
taagcttggcagccc

SEQ ID NO: 2074701 - DNA, 15 bp, Homo sapiens
aagcttggcagcccc

SEQ ID NO: 2074702 - DNA, 15 bp, Homo sapiens
agcttggcagcccct

SEQ ID NO: 2074703 - DNA, 15 bp, Homo sapiens
gcttggcagcccctc

SEQ ID NO: 2074704 - DNA, 15 bp, Homo sapiens
cttggcagcccctct

SEQ ID NO: 2074705 - DNA, 15 bp, Homo sapiens
ttggcagcccctcta

SEQ ID NO: 2074706 - DNA, 15 bp, Homo sapiens
tggcagcccctctag

SEQ ID NO: 2074707 - DNA, 15 bp, Homo sapiens
ggcagcccctctagt

SEQ ID NO: 2074708 - DNA, 15 bp, Homo sapiens
gcagcccctctagtt

SEQ ID NO: 2074709 - DNA, 15 bp, Homo sapiens
cagcccctctagttc

SEQ ID NO: 2074710 - DNA, 15 bp, Homo sapiens
agcccctctagttcc

SEQ ID NO: 2074711 - DNA, 15 bp, Homo sapiens
gcccctctagttccc

SEQ ID NO: 2074712 - DNA, 15 bp, Homo sapiens
cccctctagttccct

SEQ ID NO: 2074713 - DNA, 15 bp, Homo sapiens
ccctctagttccctc

SEQ ID NO: 2074714 - DNA, 15 bp, Homo sapiens
cctctagttccctcc

SEQ ID NO: 2074715 - DNA, 15 bp, Homo sapiens
ctctagttccctccc

SEQ ID NO: 2074716 - DNA, 15 bp, Homo sapiens
tctagttccctcccc

SEQ ID NO: 2074717 - DNA, 15 bp, Homo sapiens
ctagttccctccccc

SEQ ID NO: 2074718 - DNA, 15 bp, Homo sapiens
tagttccctccccca

SEQ ID NO: 2074719 - DNA, 15 bp, Homo sapiens
agttccctcccccac

SEQ ID NO: 2074720 - DNA, 15 bp, Homo sapiens
gttccctcccccacc

SEQ ID NO: 2074721 - DNA, 15 bp, Homo sapiens
ttccctcccccaccc

SEQ ID NO: 2074722 - DNA, 15 bp, Homo sapiens
tccctcccccacccc

SEQ ID NO: 2074723 - DNA, 15 bp, Homo sapiens
ccctcccccaccccc

SEQ ID NO: 2074724 - DNA, 15 bp, Homo sapiens
cctcccccacccccg

SEQ ID NO: 2074725 - DNA, 15 bp, Homo sapiens
ctcccccacccccgg

SEQ ID NO: 2074726 - DNA, 15 bp, Homo sapiens
tcccccacccccggg

SEQ ID NO: 2074727 - DNA, 15 bp, Homo sapiens
cccccacccccgggg

SEQ ID NO: 2074728 - DNA, 15 bp, Homo sapiens
ccccacccccgggga

SEQ ID NO: 2074729 - DNA, 15 bp, Homo sapiens
cccacccccggggat

SEQ ID NO: 2074730 - DNA, 15 bp, Homo sapiens
ccacccccggggatg

SEQ ID NO: 2074731 - DNA, 15 bp, Homo sapiens
cacccccggggatgc

SEQ ID NO: 2074732 - DNA, 15 bp, Homo sapiens
acccccggggatgct

SEQ ID NO: 2074733 - DNA, 15 bp, Homo sapiens
cccccggggatgctg

SEQ ID NO: 2074734 - DNA, 15 bp, Homo sapiens
ccccggggatgctgc

SEQ ID NO: 2074735 - DNA, 15 bp, Homo sapiens
cccggggatgctgca

SEQ ID NO: 2074736 - DNA, 15 bp, Homo sapiens
ccggggatgctgcac

SEQ ID NO: 2074737 - DNA, 15 bp, Homo sapiens
cggggatgctgcacc

SEQ ID NO: 2074738 - DNA, 15 bp, Homo sapiens
ggggatgctgcacca

SEQ ID NO: 2074739 - DNA, 15 bp, Homo sapiens
gggatgctgcaccag

SEQ ID NO: 2074740 - DNA, 15 bp, Homo sapiens
ggatgctgcaccagc

SEQ ID NO: 2074741 - DNA, 15 bp, Homo sapiens
gatgctgcaccagca

SEQ ID NO: 2074742 - DNA, 15 bp, Homo sapiens
atgctgcaccagcag

SEQ ID NO: 2074743 - DNA, 15 bp, Homo sapiens
tgctgcaccagcaga

SEQ ID NO: 2074744 - DNA, 15 bp, Homo sapiens
gctgcaccagcagac

SEQ ID NO: 2074745 - DNA, 15 bp, Homo sapiens
ctgcaccagcagact

SEQ ID NO: 2074746 - DNA, 15 bp, Homo sapiens
tgcaccagcagactc

SEQ ID NO: 2074747 - DNA, 15 bp, Homo sapiens
gcaccagcagactca

SEQ ID NO: 2074748 - DNA, 15 bp, Homo sapiens
caccagcagactcaa

SEQ ID NO: 2074749 - DNA, 15 bp, Homo sapiens
accagcagactcaat

SEQ ID NO: 2074750 - DNA, 15 bp, Homo sapiens
ccagcagactcaatg

SEQ ID NO: 2074751 - DNA, 15 bp, Homo sapiens
cagcagactcaatgc

SEQ ID NO: 2074752 - DNA, 15 bp, Homo sapiens
agcagactcaatgcc

SEQ ID NO: 2074753 - DNA, 15 bp, Homo sapiens
gcagactcaatgcct

SEQ ID NO: 2074754 - DNA, 15 bp, Homo sapiens
cagactcaatgcctt

SEQ ID NO: 2074755 - DNA, 15 bp, Homo sapiens
agactcaatgccttt

SEQ ID NO: 2074756 - DNA, 15 bp, Homo sapiens
gactcaatgcctttc

SEQ ID NO: 2074757 - DNA, 15 bp, Homo sapiens
actcaatgcctttcc

SEQ ID NO: 2074758 - DNA, 15 bp, Homo sapiens
ctcaatgcctttcca

SEQ ID NO: 2074759 - DNA, 15 bp, Homo sapiens
tcaatgcctttccag

SEQ ID NO: 2074760 - DNA, 15 bp, Homo sapiens
caatgcctttccagg

SEQ ID NO: 2074761 - DNA, 15 bp, Homo sapiens
aatgcctttccaggt

SEQ ID NO: 2074762 - DNA, 15 bp, Homo sapiens
atgcctttccaggtg

SEQ ID NO: 2074763 - DNA, 15 bp, Homo sapiens
tgcctttccaggtgg

SEQ ID NO: 2074764 - DNA, 15 bp, Homo sapiens
gcctttccaggtggg

SEQ ID NO: 2074765 - DNA, 15 bp, Homo sapiens
cctttccaggtggga

SEQ ID NO: 2074766 - DNA, 15 bp, Homo sapiens
ctttccaggtgggac

SEQ ID NO: 2074767 - DNA, 15 bp, Homo sapiens
tttccaggtgggaca

SEQ ID NO: 2074768 - DNA, 15 bp, Homo sapiens
ttccaggtgggacac

SEQ ID NO: 2074769 - DNA, 15 bp, Homo sapiens
tccaggtgggacaca

SEQ ID NO: 2074770 - DNA, 15 bp, Homo sapiens
ccaggtgggacacag

SEQ ID NO: 2074771 - DNA, 15 bp, Homo sapiens
caggtgggacacagc

SEQ ID NO: 2074772 - DNA, 15 bp, Homo sapiens
aggtgggacacagca

SEQ ID NO: 2074773 - DNA, 15 bp, Homo sapiens
ggtgggacacagcag

SEQ ID NO: 2074774 - DNA, 15 bp, Homo sapiens
gtgggacacagcagg

SEQ ID NO: 2074775 - DNA, 15 bp, Homo sapiens
tgggacacagcaggg

SEQ ID NO: 2074776 - DNA, 15 bp, Homo sapiens
gggacacagcaggga

SEQ ID NO: 2074777 - DNA, 15 bp, Homo sapiens
ggacacagcagggag

SEQ ID NO: 2074778 - DNA, 15 bp, Homo sapiens
gacacagcagggagc

SEQ ID NO: 2074779 - DNA, 15 bp, Homo sapiens
acacagcagggagct

SEQ ID NO: 2074780 - DNA, 15 bp, Homo sapiens
cacagcagggagctg

SEQ ID NO: 2074781 - DNA, 15 bp, Homo sapiens
acagcagggagctgc

SEQ ID NO: 2074782 - DNA, 15 bp, Homo sapiens
cagcagggagctgct

SEQ ID NO: 2074783 - DNA, 15 bp, Homo sapiens
agcagggagctgctc

SEQ ID NO: 2074784 - DNA, 15 bp, Homo sapiens
gcagggagctgctcc

SEQ ID NO: 2074785 - DNA, 15 bp, Homo sapiens
cagggagctgctccc

SEQ ID NO: 2074786 - DNA, 15 bp, Homo sapiens
agggagctgctccct

SEQ ID NO: 2074787 - DNA, 15 bp, Homo sapiens
gggagctgctccctg

SEQ ID NO: 2074788 - DNA, 15 bp, Homo sapiens
ggagctgctccctgg

SEQ ID NO: 2074789 - DNA, 15 bp, Homo sapiens
gagctgctccctggg

SEQ ID NO: 2074790 - DNA, 15 bp, Homo sapiens
agctgctccctgggc

SEQ ID NO: 2074791 - DNA, 15 bp, Homo sapiens
gctgctccctgggct

SEQ ID NO: 2074792 - DNA, 15 bp, Homo sapiens
ctgctccctgggctg

SEQ ID NO: 2074793 - DNA, 15 bp, Homo sapiens
tgctccctgggctgg

SEQ ID NO: 2074794 - DNA, 15 bp, Homo sapiens
gctccctgggctggg

SEQ ID NO: 2074795 - DNA, 15 bp, Homo sapiens
tccctgggctgggcc

SEQ ID NO: 2074796 - DNA, 15 bp, Homo sapiens
ccctgggctgggcct

SEQ ID NO: 2074797 - DNA, 15 bp, Homo sapiens
cctgggctgggcctc

SEQ ID NO: 2074798 - DNA, 15 bp, Homo sapiens
ctgggctgggcctcc

SEQ ID NO: 2074799 - DNA, 15 bp, Homo sapiens
tgggctgggcctcct

SEQ ID NO: 2074800 - DNA, 15 bp, Homo sapiens
gggctgggcctcctc

SEQ ID NO: 2074801 - DNA, 15 bp, Homo sapiens
ggctgggcctcctcc

SEQ ID NO: 2074802 - DNA, 15 bp, Homo sapiens
tgggcctcctcctga

SEQ ID NO: 2074803 - DNA, 15 bp, Homo sapiens
gggcctcctcctgag

SEQ ID NO: 2074804 - DNA, 15 bp, Homo sapiens
ggcctcctcctgaga

SEQ ID NO: 2074805 - DNA, 15 bp, Homo sapiens
gcctcctcctgagag

SEQ ID NO: 2074806 - DNA, 15 bp, Homo sapiens
cctcctcctgagagg

SEQ ID NO: 2074807 - DNA, 15 bp, Homo sapiens
ctcctcctgagaggt

SEQ ID NO: 2074808 - DNA, 15 bp, Homo sapiens
tcctcctgagaggtg

SEQ ID NO: 2074809 - DNA, 15 bp, Homo sapiens
cctcctgagaggtgt

SEQ ID NO: 2074810 - DNA, 15 bp, Homo sapiens
ctcctgagaggtgtt

SEQ ID NO: 2074811 - DNA, 15 bp, Homo sapiens
tcctgagaggtgttg

SEQ ID NO: 2074812 - DNA, 15 bp, Homo sapiens
cctgagaggtgttga

SEQ ID NO: 2074813 - DNA, 15 bp, Homo sapiens
ctgagaggtgttgag

SEQ ID NO: 2074814 - DNA, 15 bp, Homo sapiens
tgagaggtgttgagt

SEQ ID NO: 2074815 - DNA, 15 bp, Homo sapiens
gagaggtgttgagta

SEQ ID NO: 2074816 - DNA, 15 bp, Homo sapiens
agaggtgttgagtag

SEQ ID NO: 2074817 - DNA, 15 bp, Homo sapiens
gaggtgttgagtagc

SEQ ID NO: 2074818 - DNA, 15 bp, Homo sapiens
aggtgttgagtagct

SEQ ID NO: 2074819 - DNA, 15 bp, Homo sapiens
ggtgttgagtagctg

SEQ ID NO: 2074820 - DNA, 15 bp, Homo sapiens
gtgttgagtagctgc

SEQ ID NO: 2074821 - DNA, 15 bp, Homo sapiens
tgttgagtagctgca

SEQ ID NO: 2074822 - DNA, 15 bp, Homo sapiens
gttgagtagctgcag

SEQ ID NO: 2074823 - DNA, 15 bp, Homo sapiens
ttgagtagctgcagt

SEQ ID NO: 2074824 - DNA, 15 bp, Homo sapiens
tgagtagctgcagtt

SEQ ID NO: 2074825 - DNA, 15 bp, Homo sapiens
gagtagctgcagttg

SEQ ID NO: 2074826 - DNA, 15 bp, Homo sapiens
agtagctgcagttgt

SEQ ID NO: 2074827 - DNA, 15 bp, Homo sapiens
gtagctgcagttgtg

SEQ ID NO: 2074828 - DNA, 15 bp, Homo sapiens
tagctgcagttgtgg

SEQ ID NO: 2074829 - DNA, 15 bp, Homo sapiens
agctgcagttgtggg

SEQ ID NO: 2074830 - DNA, 15 bp, Homo sapiens
gctgcagttgtgggg

SEQ ID NO: 2074831 - DNA, 15 bp, Homo sapiens
ctgcagttgtggggg

SEQ ID NO: 2074832 - DNA, 15 bp, Homo sapiens
tgcagttgtggggga

SEQ ID NO: 2074833 - DNA, 15 bp, Homo sapiens
gcagttgtgggggat

SEQ ID NO: 2074834 - DNA, 15 bp, Homo sapiens
cagttgtgggggatg

SEQ ID NO: 2074835 - DNA, 15 bp, Homo sapiens
agttgtgggggatgg

SEQ ID NO: 2074836 - DNA, 15 bp, Homo sapiens
gttgtgggggatggg

SEQ ID NO: 2074837 - DNA, 15 bp, Homo sapiens
ttgtgggggatgggg

SEQ ID NO: 2074838 - DNA, 15 bp, Homo sapiens
gtgggggatggggct

SEQ ID NO: 2074839 - DNA, 15 bp, Homo sapiens
tgggggatggggctg

SEQ ID NO: 2074840 - DNA, 15 bp, Homo sapiens
gggggatggggctgt

SEQ ID NO: 2074841 - DNA, 15 bp, Homo sapiens
ggggatggggctgtc

SEQ ID NO: 2074842 - DNA, 15 bp, Homo sapiens
gggatggggctgtca

SEQ ID NO: 2074843 - DNA, 15 bp, Homo sapiens
ggatggggctgtcag

SEQ ID NO: 2074844 - DNA, 15 bp, Homo sapiens
gatggggctgtcagg

SEQ ID NO: 2074845 - DNA, 15 bp, Homo sapiens
atggggctgtcaggc

SEQ ID NO: 2074846 - DNA, 15 bp, Homo sapiens
tggggctgtcaggca

SEQ ID NO: 2074847 - DNA, 15 bp, Homo sapiens
ggggctgtcaggcaa

SEQ ID NO: 2074848 - DNA, 15 bp, Homo sapiens
gggctgtcaggcaag

SEQ ID NO: 2074849 - DNA, 15 bp, Homo sapiens
ggctgtcaggcaaga

SEQ ID NO: 2074850 - DNA, 15 bp, Homo sapiens
gctgtcaggcaagac

SEQ ID NO: 2074851 - DNA, 15 bp, Homo sapiens
ctgtcaggcaagaca

SEQ ID NO: 2074852 - DNA, 15 bp, Homo sapiens
tgtcaggcaagacag

SEQ ID NO: 2074853 - DNA, 15 bp, Homo sapiens
gtcaggcaagacagt

SEQ ID NO: 2074854 - DNA, 15 bp, Homo sapiens
tcaggcaagacagtc

SEQ ID NO: 2074855 - DNA, 15 bp, Homo sapiens
caggcaagacagtca

SEQ ID NO: 2074856 - DNA, 15 bp, Homo sapiens
aggcaagacagtcat

SEQ ID NO: 2074857 - DNA, 15 bp, Homo sapiens
ggcaagacagtcatg

SEQ ID NO: 2074858 - DNA, 15 bp, Homo sapiens
gcaagacagtcatga

SEQ ID NO: 2074859 - DNA, 15 bp, Homo sapiens
caagacagtcatgag

SEQ ID NO: 2074860 - DNA, 15 bp, Homo sapiens
aagacagtcatgagg

SEQ ID NO: 2074861 - DNA, 15 bp, Homo sapiens
agacagtcatgagga

SEQ ID NO: 2074862 - DNA, 15 bp, Homo sapiens
gacagtcatgaggag

SEQ ID NO: 2074863 - DNA, 15 bp, Homo sapiens
acagtcatgaggagg

SEQ ID NO: 2074864 - DNA, 15 bp, Homo sapiens
cagtcatgaggaggt

SEQ ID NO: 2074865 - DNA, 15 bp, Homo sapiens
agtcatgaggaggtg

SEQ ID NO: 2074866 - DNA, 15 bp, Homo sapiens
gtcatgaggaggtgc

SEQ ID NO: 2074867 - DNA, 15 bp, Homo sapiens
tcatgaggaggtgcc

SEQ ID NO: 2074868 - DNA, 15 bp, Homo sapiens
catgaggaggtgccg

SEQ ID NO: 2074869 - DNA, 15 bp, Homo sapiens
atgaggaggtgccgg

SEQ ID NO: 2074870 - DNA, 15 bp, Homo sapiens
tgaggaggtgccgga

SEQ ID NO: 2074871 - DNA, 15 bp, Homo sapiens
gaggaggtgccggaa

SEQ ID NO: 2074872 - DNA, 15 bp, Homo sapiens
aggaggtgccggaaa

SEQ ID NO: 2074873 - DNA, 15 bp, Homo sapiens
ggaggtgccggaaag

SEQ ID NO: 2074874 - DNA, 15 bp, Homo sapiens
gaggtgccggaaaga

SEQ ID NO: 2074875 - DNA, 15 bp, Homo sapiens
aggtgccggaaagag

SEQ ID NO: 2074876 - DNA, 15 bp, Homo sapiens
ggtgccggaaagagg

SEQ ID NO: 2074877 - DNA, 15 bp, Homo sapiens
gtgccggaaagagga

SEQ ID NO: 2074878 - DNA, 15 bp, Homo sapiens
tgccggaaagaggaa

SEQ ID NO: 2074879 - DNA, 15 bp, Homo sapiens
gccggaaagaggaac

SEQ ID NO: 2074880 - DNA, 15 bp, Homo sapiens
ccggaaagaggaacc

SEQ ID NO: 2074881 - DNA, 15 bp, Homo sapiens
cggaaagaggaacct

SEQ ID NO: 2074882 - DNA, 15 bp, Homo sapiens
ggaaagaggaacctc

SEQ ID NO: 2074883 - DNA, 15 bp, Homo sapiens
gaaagaggaacctca

SEQ ID NO: 2074884 - DNA, 15 bp, Homo sapiens
aaagaggaacctcac

SEQ ID NO: 2074885 - DNA, 15 bp, Homo sapiens
aagaggaacctcaca

SEQ ID NO: 2074886 - DNA, 15 bp, Homo sapiens
agaggaacctcacac

SEQ ID NO: 2074887 - DNA, 15 bp, Homo sapiens
gaggaacctcacacc

SEQ ID NO: 2074888 - DNA, 15 bp, Homo sapiens
aggaacctcacacca

SEQ ID NO: 2074889 - DNA, 15 bp, Homo sapiens
ggaacctcacaccag

SEQ ID NO: 2074890 - DNA, 15 bp, Homo sapiens
gaacctcacaccagg

SEQ ID NO: 2074891 - DNA, 15 bp, Homo sapiens
aacctcacaccaggt

SEQ ID NO: 2074892 - DNA, 15 bp, Homo sapiens
acctcacaccaggtg

SEQ ID NO: 2074893 - DNA, 15 bp, Homo sapiens
cctcacaccaggtgg

SEQ ID NO: 2074894 - DNA, 15 bp, Homo sapiens
ctcacaccaggtggc

SEQ ID NO: 2074895 - DNA, 15 bp, Homo sapiens
tcacaccaggtggct

SEQ ID NO: 2074896 - DNA, 15 bp, Homo sapiens
cacaccaggtggctg

SEQ ID NO: 2074897 - DNA, 15 bp, Homo sapiens
acaccaggtggctga

SEQ ID NO: 2074898 - DNA, 15 bp, Homo sapiens
caccaggtggctgag

SEQ ID NO: 2074899 - DNA, 15 bp, Homo sapiens
accaggtggctgaga

SEQ ID NO: 2074900 - DNA, 15 bp, Homo sapiens
ccaggtggctgagac

SEQ ID NO: 2074901 - DNA, 15 bp, Homo sapiens
caggtggctgagact

SEQ ID NO: 2074902 - DNA, 15 bp, Homo sapiens
aggtggctgagactc

SEQ ID NO: 2074903 - DNA, 15 bp, Homo sapiens
ggtggctgagactca

SEQ ID NO: 2074904 - DNA, 15 bp, Homo sapiens
gtggctgagactcag

SEQ ID NO: 2074905 - DNA, 15 bp, Homo sapiens
tggctgagactcagg

SEQ ID NO: 2074906 - DNA, 15 bp, Homo sapiens
ggctgagactcagga

SEQ ID NO: 2074907 - DNA, 15 bp, Homo sapiens
gctgagactcaggag

SEQ ID NO: 2074908 - DNA, 15 bp, Homo sapiens
ctgagactcaggagc

SEQ ID NO: 2074909 - DNA, 15 bp, Homo sapiens
tgagactcaggagcc

SEQ ID NO: 2074910 - DNA, 15 bp, Homo sapiens
gagactcaggagccc

SEQ ID NO: 2074911 - DNA, 15 bp, Homo sapiens
agactcaggagccct

SEQ ID NO: 2074912 - DNA, 15 bp, Homo sapiens
gactcaggagccctg

SEQ ID NO: 2074913 - DNA, 15 bp, Homo sapiens
actcaggagccctgc

SEQ ID NO: 2074914 - DNA, 15 bp, Homo sapiens
ctcaggagccctgcc

SEQ ID NO: 2074915 - DNA, 15 bp, Homo sapiens
tcaggagccctgccc

SEQ ID NO: 2074916 - DNA, 15 bp, Homo sapiens
caggagccctgcccc

SEQ ID NO: 2074917 - DNA, 15 bp, Homo sapiens
aggagccctgccccc

SEQ ID NO: 2074918 - DNA, 15 bp, Homo sapiens
ggagccctgccccca

SEQ ID NO: 2074919 - DNA, 15 bp, Homo sapiens
gagccctgcccccag

SEQ ID NO: 2074920 - DNA, 15 bp, Homo sapiens
agccctgcccccagc

SEQ ID NO: 2074921 - DNA, 15 bp, Homo sapiens
gccctgcccccagct

SEQ ID NO: 2074922 - DNA, 15 bp, Homo sapiens
ccctgcccccagctg

SEQ ID NO: 2074923 - DNA, 15 bp, Homo sapiens
cctgcccccagctga

SEQ ID NO: 2074924 - DNA, 15 bp, Homo sapiens
ctgcccccagctgaa

SEQ ID NO: 2074925 - DNA, 15 bp, Homo sapiens
tgcccccagctgaaa

SEQ ID NO: 2074926 - DNA, 15 bp, Homo sapiens
gcccccagctgaaat

SEQ ID NO: 2074927 - DNA, 15 bp, Homo sapiens
cccccagctgaaatt

SEQ ID NO: 2074928 - DNA, 15 bp, Homo sapiens
ccccagctgaaatta

SEQ ID NO: 2074929 - DNA, 15 bp, Homo sapiens
cccagctgaaattac

SEQ ID NO: 2074930 - DNA, 15 bp, Homo sapiens
ccagctgaaattaca

SEQ ID NO: 2074931 - DNA, 15 bp, Homo sapiens
cagctgaaattacag

SEQ ID NO: 2074932 - DNA, 15 bp, Homo sapiens
agctgaaattacagc

SEQ ID NO: 2074933 - DNA, 15 bp, Homo sapiens
gctgaaattacagcc

SEQ ID NO: 2074934 - DNA, 15 bp, Homo sapiens
ctgaaattacagccc

SEQ ID NO: 2074935 - DNA, 15 bp, Homo sapiens
tgaaattacagcccc

SEQ ID NO: 2074936 - DNA, 15 bp, Homo sapiens
gaaattacagcccca

SEQ ID NO: 2074937 - DNA, 15 bp, Homo sapiens
aaattacagccccat

SEQ ID NO: 2074938 - DNA, 15 bp, Homo sapiens
aattacagccccatc

SEQ ID NO: 2074939 - DNA, 15 bp, Homo sapiens
attacagccccatcc

SEQ ID NO: 2074940 - DNA, 15 bp, Homo sapiens
ttacagccccatccc

SEQ ID NO: 2074941 - DNA, 15 bp, Homo sapiens
tacagccccatccct

SEQ ID NO: 2074942 - DNA, 15 bp, Homo sapiens
acagccccatccctg

SEQ ID NO: 2074943 - DNA, 15 bp, Homo sapiens
cagccccatccctga

SEQ ID NO: 2074944 - DNA, 15 bp, Homo sapiens
agccccatccctgag

SEQ ID NO: 2074945 - DNA, 15 bp, Homo sapiens
gccccatccctgagg

SEQ ID NO: 2074946 - DNA, 15 bp, Homo sapiens
ccccatccctgaggc

SEQ ID NO: 2074947 - DNA, 15 bp, Homo sapiens
cccatccctgaggct

SEQ ID NO: 2074948 - DNA, 15 bp, Homo sapiens
ccatccctgaggctg

SEQ ID NO: 2074949 - DNA, 15 bp, Homo sapiens
catccctgaggctgc

SEQ ID NO: 2074950 - DNA, 15 bp, Homo sapiens
atccctgaggctgcc

SEQ ID NO: 2074951 - DNA, 15 bp, Homo sapiens
tccctgaggctgccc

SEQ ID NO: 2074952 - DNA, 15 bp, Homo sapiens
ccctgaggctgcccc

SEQ ID NO: 2074953 - DNA, 15 bp, Homo sapiens
cctgaggctgcccct

SEQ ID NO: 2074954 - DNA, 15 bp, Homo sapiens
ctgaggctgcccctc

SEQ ID NO: 2074955 - DNA, 15 bp, Homo sapiens
tgaggctgcccctca

SEQ ID NO: 2074956 - DNA, 15 bp, Homo sapiens
gaggctgcccctcat

SEQ ID NO: 2074957 - DNA, 15 bp, Homo sapiens
aggctgcccctcatc

SEQ ID NO: 2074958 - DNA, 15 bp, Homo sapiens
ggctgcccctcatcc

SEQ ID NO: 2074959 - DNA, 15 bp, Homo sapiens
gctgcccctcatccc

SEQ ID NO: 2074960 - DNA, 15 bp, Homo sapiens
ctgcccctcatccca

SEQ ID NO: 2074961 - DNA, 15 bp, Homo sapiens
tgcccctcatcccac

SEQ ID NO: 2074962 - DNA, 15 bp, Homo sapiens
gcccctcatcccacc

SEQ ID NO: 2074963 - DNA, 15 bp, Homo sapiens
cccctcatcccaccc

SEQ ID NO: 2074964 - DNA, 15 bp, Homo sapiens
ccctcatcccacccc

SEQ ID NO: 2074965 - DNA, 15 bp, Homo sapiens
cctcatcccacccca

SEQ ID NO: 2074966 - DNA, 15 bp, Homo sapiens
ctcatcccaccccag

SEQ ID NO: 2074967 - DNA, 15 bp, Homo sapiens
tcatcccaccccagg

SEQ ID NO: 2074968 - DNA, 15 bp, Homo sapiens
catcccaccccaggg

SEQ ID NO: 2074969 - DNA, 15 bp, Homo sapiens
atcccaccccagggt

SEQ ID NO: 2074970 - DNA, 15 bp, Homo sapiens
tcccaccccagggtc

SEQ ID NO: 2074971 - DNA, 15 bp, Homo sapiens
cccaccccagggtct

SEQ ID NO: 2074972 - DNA, 15 bp, Homo sapiens
ccaccccagggtctg

SEQ ID NO: 2074973 - DNA, 15 bp, Homo sapiens
caccccagggtctgt

SEQ ID NO: 2074974 - DNA, 15 bp, Homo sapiens
accccagggtctgtg

SEQ ID NO: 2074975 - DNA, 15 bp, Homo sapiens
ccccagggtctgtgt

SEQ ID NO: 2074976 - DNA, 15 bp, Homo sapiens
cccagggtctgtgtg

SEQ ID NO: 2074977 - DNA, 15 bp, Homo sapiens
ccagggtctgtgtgt

SEQ ID NO: 2074978 - DNA, 15 bp, Homo sapiens
cagggtctgtgtgtc

SEQ ID NO: 2074979 - DNA, 15 bp, Homo sapiens
agggtctgtgtgtct

SEQ ID NO: 2074980 - DNA, 15 bp, Homo sapiens
gggtctgtgtgtctc

SEQ ID NO: 2074981 - DNA, 15 bp, Homo sapiens
ggtctgtgtgtctct

SEQ ID NO: 2074982 - DNA, 15 bp, Homo sapiens
gtctgtgtgtctctg

SEQ ID NO: 2074983 - DNA, 15 bp, Homo sapiens
tctgtgtgtctctgg

SEQ ID NO: 2074984 - DNA, 15 bp, Homo sapiens
ctgtgtgtctctgga

SEQ ID NO: 2074985 - DNA, 15 bp, Homo sapiens
tgtgtgtctctggac

SEQ ID NO: 2074986 - DNA, 15 bp, Homo sapiens
gtgtgtctctggacc

SEQ ID NO: 2074987 - DNA, 15 bp, Homo sapiens
tgtgtctctggaccc

SEQ ID NO: 2074988 - DNA, 15 bp, Homo sapiens
gtgtctctggaccct

SEQ ID NO: 2074989 - DNA, 15 bp, Homo sapiens
tgtctctggaccctg

SEQ ID NO: 2074990 - DNA, 15 bp, Homo sapiens
gtctctggaccctgc

SEQ ID NO: 2074991 - DNA, 15 bp, Homo sapiens
tctctggaccctgcc

SEQ ID NO: 2074992 - DNA, 15 bp, Homo sapiens
ctctggaccctgcca

SEQ ID NO: 2074993 - DNA, 15 bp, Homo sapiens
tctggaccctgccag

SEQ ID NO: 2074994 - DNA, 15 bp, Homo sapiens
ctggaccctgccaga

SEQ ID NO: 2074995 - DNA, 15 bp, Homo sapiens
tggaccctgccagat

SEQ ID NO: 2074996 - DNA, 15 bp, Homo sapiens
ggaccctgccagatg

SEQ ID NO: 2074997 - DNA, 15 bp, Homo sapiens
gaccctgccagatgg

SEQ ID NO: 2074998 - DNA, 15 bp, Homo sapiens
accctgccagatggt

SEQ ID NO: 2074999 - DNA, 15 bp, Homo sapiens
ccctgccagatggta

SEQ ID NO: 2075000 - DNA, 15 bp, Homo sapiens
cctgccagatggtag

SEQ ID NO: 2075001 - DNA, 15 bp, Homo sapiens
ctgccagatggtagt

SEQ ID NO: 2075002 - DNA, 15 bp, Homo sapiens
tgccagatggtagtg

SEQ ID NO: 2075003 - DNA, 15 bp, Homo sapiens
gccagatggtagtgg

SEQ ID NO: 2075004 - DNA, 15 bp, Homo sapiens
ccagatggtagtggg

SEQ ID NO: 2075005 - DNA, 15 bp, Homo sapiens
cagatggtagtgggg

SEQ ID NO: 2075006 - DNA, 15 bp, Homo sapiens
agatggtagtggggg

SEQ ID NO: 2075007 - DNA, 15 bp, Homo sapiens
gatggtagtggggga

SEQ ID NO: 2075008 - DNA, 15 bp, Homo sapiens
atggtagtgggggaa

SEQ ID NO: 2075009 - DNA, 15 bp, Homo sapiens
tggtagtgggggaat

SEQ ID NO: 2075010 - DNA, 15 bp, Homo sapiens
ggtagtgggggaatg

SEQ ID NO: 2075011 - DNA, 15 bp, Homo sapiens
gtagtgggggaatgg

SEQ ID NO: 2075012 - DNA, 15 bp, Homo sapiens
tagtgggggaatggt

SEQ ID NO: 2075013 - DNA, 15 bp, Homo sapiens
agtgggggaatggtg

SEQ ID NO: 2075014 - DNA, 15 bp, Homo sapiens
gtgggggaatggtgc

SEQ ID NO: 2075015 - DNA, 15 bp, Homo sapiens
tgggggaatggtgcc

SEQ ID NO: 2075016 - DNA, 15 bp, Homo sapiens
gggggaatggtgcca

SEQ ID NO: 2075017 - DNA, 15 bp, Homo sapiens
ggggaatggtgccaa

SEQ ID NO: 2075018 - DNA, 15 bp, Homo sapiens
gggaatggtgccaaa

SEQ ID NO: 2075019 - DNA, 15 bp, Homo sapiens
ggaatggtgccaaag

SEQ ID NO: 2075020 - DNA, 15 bp, Homo sapiens
gaatggtgccaaagg

SEQ ID NO: 2075021 - DNA, 15 bp, Homo sapiens
aatggtgccaaaggg

SEQ ID NO: 2075022 - DNA, 15 bp, Homo sapiens
atggtgccaaaggga

SEQ ID NO: 2075023 - DNA, 15 bp, Homo sapiens
tggtgccaaagggag

SEQ ID NO: 2075024 - DNA, 15 bp, Homo sapiens
ggtgccaaagggaga

SEQ ID NO: 2075025 - DNA, 15 bp, Homo sapiens
gtgccaaagggagag

SEQ ID NO: 2075026 - DNA, 15 bp, Homo sapiens
tgccaaagggagagg

SEQ ID NO: 2075027 - DNA, 15 bp, Homo sapiens
gccaaagggagagga

SEQ ID NO: 2075028 - DNA, 15 bp, Homo sapiens
ccaaagggagaggag

SEQ ID NO: 2075029 - DNA, 15 bp, Homo sapiens
caaagggagaggagg

SEQ ID NO: 2075030 - DNA, 15 bp, Homo sapiens
aaagggagaggaggc

SEQ ID NO: 2075031 - DNA, 15 bp, Homo sapiens
aagggagaggaggct

SEQ ID NO: 2075032 - DNA, 15 bp, Homo sapiens
agggagaggaggctc

SEQ ID NO: 2075033 - DNA, 15 bp, Homo sapiens
gggagaggaggctcc

SEQ ID NO: 2075034 - DNA, 15 bp, Homo sapiens
ggagaggaggctcca

SEQ ID NO: 2075035 - DNA, 15 bp, Homo sapiens
gagaggaggctccaa

SEQ ID NO: 2075036 - DNA, 15 bp, Homo sapiens
agaggaggctccaac

SEQ ID NO: 2075037 - DNA, 15 bp, Homo sapiens
gaggaggctccaacc

SEQ ID NO: 2075038 - DNA, 15 bp, Homo sapiens
aggaggctccaacca

SEQ ID NO: 2075039 - DNA, 15 bp, Homo sapiens
ggaggctccaaccag

SEQ ID NO: 2075040 - DNA, 15 bp, Homo sapiens
gaggctccaaccaga

SEQ ID NO: 2075041 - DNA, 15 bp, Homo sapiens
aggctccaaccagac

SEQ ID NO: 2075042 - DNA, 15 bp, Homo sapiens
ggctccaaccagaca

SEQ ID NO: 2075043 - DNA, 15 bp, Homo sapiens
gctccaaccagacaa

SEQ ID NO: 2075044 - DNA, 15 bp, Homo sapiens
ctccaaccagacaaa

SEQ ID NO: 2075045 - DNA, 15 bp, Homo sapiens
tccaaccagacaaag

SEQ ID NO: 2075046 - DNA, 15 bp, Homo sapiens
ccaaccagacaaaga

SEQ ID NO: 2075047 - DNA, 15 bp, Homo sapiens
caaccagacaaagag

SEQ ID NO: 2075048 - DNA, 15 bp, Homo sapiens
aaccagacaaagaga

SEQ ID NO: 2075049 - DNA, 15 bp, Homo sapiens
accagacaaagagac

SEQ ID NO: 2075050 - DNA, 15 bp, Homo sapiens
ccagacaaagagaca

SEQ ID NO: 2075051 - DNA, 15 bp, Homo sapiens
cagacaaagagacag

SEQ ID NO: 2075052 - DNA, 15 bp, Homo sapiens
agacaaagagacaga

SEQ ID NO: 2075053 - DNA, 15 bp, Homo sapiens
gacaaagagacagag

SEQ ID NO: 2075054 - DNA, 15 bp, Homo sapiens
acaaagagacagagc

SEQ ID NO: 2075055 - DNA, 15 bp, Homo sapiens
caaagagacagagcc

SEQ ID NO: 2075056 - DNA, 15 bp, Homo sapiens
aaagagacagagcca

SEQ ID NO: 2075057 - DNA, 15 bp, Homo sapiens
aagagacagagccag

SEQ ID NO: 2075058 - DNA, 15 bp, Homo sapiens
agagacagagccagc

SEQ ID NO: 2075059 - DNA, 15 bp, Homo sapiens
gagacagagccagca

SEQ ID NO: 2075060 - DNA, 15 bp, Homo sapiens
agacagagccagcat

SEQ ID NO: 2075061 - DNA, 15 bp, Homo sapiens
gacagagccagcata

SEQ ID NO: 2075062 - DNA, 15 bp, Homo sapiens
acagagccagcatat

SEQ ID NO: 2075063 - DNA, 15 bp, Homo sapiens
cagagccagcatatc

SEQ ID NO: 2075064 - DNA, 15 bp, Homo sapiens
agagccagcatatcc

SEQ ID NO: 2075065 - DNA, 15 bp, Homo sapiens
gagccagcatatcca

SEQ ID NO: 2075066 - DNA, 15 bp, Homo sapiens
agccagcatatccag

SEQ ID NO: 2075067 - DNA, 15 bp, Homo sapiens
gccagcatatccagc

SEQ ID NO: 2075068 - DNA, 15 bp, Homo sapiens
ccagcatatccagct

SEQ ID NO: 2075069 - DNA, 15 bp, Homo sapiens
cagcatatccagctc

SEQ ID NO: 2075070 - DNA, 15 bp, Homo sapiens
agcatatccagctcc

SEQ ID NO: 2075071 - DNA, 15 bp, Homo sapiens
gcatatccagctcct

SEQ ID NO: 2075072 - DNA, 15 bp, Homo sapiens
catatccagctcctc

SEQ ID NO: 2075073 - DNA, 15 bp, Homo sapiens
atatccagctcctcc

SEQ ID NO: 2075074 - DNA, 15 bp, Homo sapiens
tatccagctcctccg

SEQ ID NO: 2075075 - DNA, 15 bp, Homo sapiens
atccagctcctccgt

SEQ ID NO: 2075076 - DNA, 15 bp, Homo sapiens
tccagctcctccgtg

SEQ ID NO: 2075077 - DNA, 15 bp, Homo sapiens
ccagctcctccgtgt

SEQ ID NO: 2075078 - DNA, 15 bp, Homo sapiens
cagctcctccgtgtg

SEQ ID NO: 2075079 - DNA, 15 bp, Homo sapiens
agctcctccgtgtgg

SEQ ID NO: 2075080 - DNA, 15 bp, Homo sapiens
gctcctccgtgtggc

SEQ ID NO: 2075081 - DNA, 15 bp, Homo sapiens
ctcctccgtgtggcc

SEQ ID NO: 2075082 - DNA, 15 bp, Homo sapiens
tcctccgtgtggccc

SEQ ID NO: 2075083 - DNA, 15 bp, Homo sapiens
cctccgtgtggcccc

SEQ ID NO: 2075084 - DNA, 15 bp, Homo sapiens
ctccgtgtggcccca

SEQ ID NO: 2075085 - DNA, 15 bp, Homo sapiens
tccgtgtggccccag

SEQ ID NO: 2075086 - DNA, 15 bp, Homo sapiens
ccgtgtggccccagg

SEQ ID NO: 2075087 - DNA, 15 bp, Homo sapiens
cgtgtggccccaggg

SEQ ID NO: 2075088 - DNA, 15 bp, Homo sapiens
gtgtggccccagggg

SEQ ID NO: 2075089 - DNA, 15 bp, Homo sapiens
tgtggccccaggggc

SEQ ID NO: 2075090 - DNA, 15 bp, Homo sapiens
gtggccccaggggca

SEQ ID NO: 2075091 - DNA, 15 bp, Homo sapiens
tggccccaggggcac

SEQ ID NO: 2075092 - DNA, 15 bp, Homo sapiens
ggccccaggggcacc

SEQ ID NO: 2075093 - DNA, 15 bp, Homo sapiens
gccccaggggcaccg

SEQ ID NO: 2075094 - DNA, 15 bp, Homo sapiens
ccccaggggcaccga

SEQ ID NO: 2075095 - DNA, 15 bp, Homo sapiens
cccaggggcaccgag

SEQ ID NO: 2075096 - DNA, 15 bp, Homo sapiens
ccaggggcaccgagt

SEQ ID NO: 2075097 - DNA, 15 bp, Homo sapiens
caggggcaccgagtc

SEQ ID NO: 2075098 - DNA, 15 bp, Homo sapiens
aggggcaccgagtcc

SEQ ID NO: 2075099 - DNA, 15 bp, Homo sapiens
ggggcaccgagtcct

SEQ ID NO: 2075100 - DNA, 15 bp, Homo sapiens
gggcaccgagtcctg

SEQ ID NO: 2075101 - DNA, 15 bp, Homo sapiens
ggcaccgagtcctgc

SEQ ID NO: 2075102 - DNA, 15 bp, Homo sapiens
gcaccgagtcctgct

SEQ ID NO: 2075103 - DNA, 15 bp, Homo sapiens
caccgagtcctgcta

SEQ ID NO: 2075104 - DNA, 15 bp, Homo sapiens
accgagtcctgctat

SEQ ID NO: 2075105 - DNA, 15 bp, Homo sapiens
ccgagtcctgctatc

SEQ ID NO: 2075106 - DNA, 15 bp, Homo sapiens
cgagtcctgctatct

SEQ ID NO: 2075107 - DNA, 15 bp, Homo sapiens
gagtcctgctatctg

SEQ ID NO: 2075108 - DNA, 15 bp, Homo sapiens
agtcctgctatctgg

SEQ ID NO: 2075109 - DNA, 15 bp, Homo sapiens
gtcctgctatctggc

SEQ ID NO: 2075110 - DNA, 15 bp, Homo sapiens
tcctgctatctggca

SEQ ID NO: 2075111 - DNA, 15 bp, Homo sapiens
cctgctatctggcat

SEQ ID NO: 2075112 - DNA, 15 bp, Homo sapiens
ctgctatctggcatc

SEQ ID NO: 2075113 - DNA, 15 bp, Homo sapiens
tgctatctggcatcc

SEQ ID NO: 2075114 - DNA, 15 bp, Homo sapiens
gctatctggcatcct

SEQ ID NO: 2075115 - DNA, 15 bp, Homo sapiens
ctatctggcatcctc

SEQ ID NO: 2075116 - DNA, 15 bp, Homo sapiens
tatctggcatcctca

SEQ ID NO: 2075117 - DNA, 15 bp, Homo sapiens
atctggcatcctcag

SEQ ID NO: 2075118 - DNA, 15 bp, Homo sapiens
tctggcatcctcagg

SEQ ID NO: 2075119 - DNA, 15 bp, Homo sapiens
ctggcatcctcaggg

SEQ ID NO: 2075120 - DNA, 15 bp, Homo sapiens
tggcatcctcagggt

SEQ ID NO: 2075121 - DNA, 15 bp, Homo sapiens
ggcatcctcagggtc

SEQ ID NO: 2075122 - DNA, 15 bp, Homo sapiens
gcatcctcagggtct

SEQ ID NO: 2075123 - DNA, 15 bp, Homo sapiens
catcctcagggtcta

SEQ ID NO: 2075124 - DNA, 15 bp, Homo sapiens
atcctcagggtctat

SEQ ID NO: 2075125 - DNA, 15 bp, Homo sapiens
tcctcagggtctatt

SEQ ID NO: 2075126 - DNA, 15 bp, Homo sapiens
cctcagggtctattt

SEQ ID NO: 2075127 - DNA, 15 bp, Homo sapiens
ctcagggtctatttt

SEQ ID NO: 2075128 - DNA, 15 bp, Homo sapiens
tcagggtctattttg

SEQ ID NO: 2075129 - DNA, 15 bp, Homo sapiens
cagggtctattttgt

SEQ ID NO: 2075130 - DNA, 15 bp, Homo sapiens
agggtctattttgtt

SEQ ID NO: 2075131 - DNA, 15 bp, Homo sapiens
gggtctattttgttc

SEQ ID NO: 2075132 - DNA, 15 bp, Homo sapiens
ggtctattttgttcc

SEQ ID NO: 2075133 - DNA, 15 bp, Homo sapiens
gtctattttgttcca

SEQ ID NO: 2075134 - DNA, 15 bp, Homo sapiens
tctattttgttccac

SEQ ID NO: 2075135 - DNA, 15 bp, Homo sapiens
ctattttgttccacc

SEQ ID NO: 2075136 - DNA, 15 bp, Homo sapiens
tattttgttccacct

SEQ ID NO: 2075137 - DNA, 15 bp, Homo sapiens
attttgttccacctc

SEQ ID NO: 2075138 - DNA, 15 bp, Homo sapiens
ttttgttccacctcc

SEQ ID NO: 2075139 - DNA, 15 bp, Homo sapiens
tttgttccacctccc

SEQ ID NO: 2075140 - DNA, 15 bp, Homo sapiens
ttgttccacctcccc

SEQ ID NO: 2075141 - DNA, 15 bp, Homo sapiens
tgttccacctcccct

SEQ ID NO: 2075142 - DNA, 15 bp, Homo sapiens
gttccacctcccctc

SEQ ID NO: 2075143 - DNA, 15 bp, Homo sapiens
ttccacctcccctca

SEQ ID NO: 2075144 - DNA, 15 bp, Homo sapiens
tccacctcccctcaa

SEQ ID NO: 2075145 - DNA, 15 bp, Homo sapiens
ccacctcccctcaaa

SEQ ID NO: 2075146 - DNA, 15 bp, Homo sapiens
cacctcccctcaaag

SEQ ID NO: 2075147 - DNA, 15 bp, Homo sapiens
acctcccctcaaaga

SEQ ID NO: 2075148 - DNA, 15 bp, Homo sapiens
cctcccctcaaagag

SEQ ID NO: 2075149 - DNA, 15 bp, Homo sapiens
ctcccctcaaagagg

SEQ ID NO: 2075150 - DNA, 15 bp, Homo sapiens
tcccctcaaagaggc

SEQ ID NO: 2075151 - DNA, 15 bp, Homo sapiens
cccctcaaagaggcc

SEQ ID NO: 2075152 - DNA, 15 bp, Homo sapiens
ccctcaaagaggcct

SEQ ID NO: 2075153 - DNA, 15 bp, Homo sapiens
cctcaaagaggcctc

SEQ ID NO: 2075154 - DNA, 15 bp, Homo sapiens
ctcaaagaggcctcc

SEQ ID NO: 2075155 - DNA, 15 bp, Homo sapiens
tcaaagaggcctcct

SEQ ID NO: 2075156 - DNA, 15 bp, Homo sapiens
caaagaggcctcctc

SEQ ID NO: 2075157 - DNA, 15 bp, Homo sapiens
aaagaggcctcctct

SEQ ID NO: 2075158 - DNA, 15 bp, Homo sapiens
aagaggcctcctctc

SEQ ID NO: 2075159 - DNA, 15 bp, Homo sapiens
agaggcctcctctct

SEQ ID NO: 2075160 - DNA, 15 bp, Homo sapiens
gaggcctcctctctc

SEQ ID NO: 2075161 - DNA, 15 bp, Homo sapiens
aggcctcctctctct

SEQ ID NO: 2075162 - DNA, 15 bp, Homo sapiens
ggcctcctctctcta

SEQ ID NO: 2075163 - DNA, 15 bp, Homo sapiens
gcctcctctctctag

SEQ ID NO: 2075164 - DNA, 15 bp, Homo sapiens
cctcctctctctagt

SEQ ID NO: 2075165 - DNA, 15 bp, Homo sapiens
ctcctctctctagtg

SEQ ID NO: 2075166 - DNA, 15 bp, Homo sapiens
tcctctctctagtgg

SEQ ID NO: 2075167 - DNA, 15 bp, Homo sapiens
cctctctctagtggc

SEQ ID NO: 2075168 - DNA, 15 bp, Homo sapiens
ctctctctagtggca

SEQ ID NO: 2075169 - DNA, 15 bp, Homo sapiens
tctctctagtggcat

SEQ ID NO: 2075170 - DNA, 15 bp, Homo sapiens
ctctctagtggcatc

SEQ ID NO: 2075171 - DNA, 15 bp, Homo sapiens
tctctagtggcatca

SEQ ID NO: 2075172 - DNA, 15 bp, Homo sapiens
ctctagtggcatcag

SEQ ID NO: 2075173 - DNA, 15 bp, Homo sapiens
tctagtggcatcagc

SEQ ID NO: 2075174 - DNA, 15 bp, Homo sapiens
ctagtggcatcagcc

SEQ ID NO: 2075175 - DNA, 15 bp, Homo sapiens
tagtggcatcagcca

SEQ ID NO: 2075176 - DNA, 15 bp, Homo sapiens
agtggcatcagccag

SEQ ID NO: 2075177 - DNA, 15 bp, Homo sapiens
gtggcatcagccagc

SEQ ID NO: 2075178 - DNA, 15 bp, Homo sapiens
tggcatcagccagcc

SEQ ID NO: 2075179 - DNA, 15 bp, Homo sapiens
ggcatcagccagcct

SEQ ID NO: 2075180 - DNA, 15 bp, Homo sapiens
gcatcagccagcctg

SEQ ID NO: 2075181 - DNA, 15 bp, Homo sapiens
catcagccagcctgt

SEQ ID NO: 2075182 - DNA, 15 bp, Homo sapiens
atcagccagcctgtc

SEQ ID NO: 2075183 - DNA, 15 bp, Homo sapiens
tcagccagcctgtcc

SEQ ID NO: 2075184 - DNA, 15 bp, Homo sapiens
cagccagcctgtcct

SEQ ID NO: 2075185 - DNA, 15 bp, Homo sapiens
agccagcctgtcctg

SEQ ID NO: 2075186 - DNA, 15 bp, Homo sapiens
gccagcctgtcctgc

SEQ ID NO: 2075187 - DNA, 15 bp, Homo sapiens
ccagcctgtcctgca

SEQ ID NO: 2075188 - DNA, 15 bp, Homo sapiens
cagcctgtcctgcac

SEQ ID NO: 2075189 - DNA, 15 bp, Homo sapiens
agcctgtcctgcaca

SEQ ID NO: 2075190 - DNA, 15 bp, Homo sapiens
gcctgtcctgcacac

SEQ ID NO: 2075191 - DNA, 15 bp, Homo sapiens
cctgtcctgcacacc

SEQ ID NO: 2075192 - DNA, 15 bp, Homo sapiens
ctgtcctgcacacct

SEQ ID NO: 2075193 - DNA, 15 bp, Homo sapiens
tgtcctgcacacctc

SEQ ID NO: 2075194 - DNA, 15 bp, Homo sapiens
gtcctgcacacctcc

SEQ ID NO: 2075195 - DNA, 15 bp, Homo sapiens
tcctgcacacctccg

SEQ ID NO: 2075196 - DNA, 15 bp, Homo sapiens
cctgcacacctccgg

SEQ ID NO: 2075197 - DNA, 15 bp, Homo sapiens
ctgcacacctccggt

SEQ ID NO: 2075198 - DNA, 15 bp, Homo sapiens
tgcacacctccggtg

SEQ ID NO: 2075199 - DNA, 15 bp, Homo sapiens
gcacacctccggtga

SEQ ID NO: 2075200 - DNA, 15 bp, Homo sapiens
cacacctccggtgat

SEQ ID NO: 2075201 - DNA, 15 bp, Homo sapiens
acacctccggtgatg

SEQ ID NO: 2075202 - DNA, 15 bp, Homo sapiens
cacctccggtgatga

SEQ ID NO: 2075203 - DNA, 15 bp, Homo sapiens
acctccggtgatgag

SEQ ID NO: 2075204 - DNA, 15 bp, Homo sapiens
cctccggtgatgagg

SEQ ID NO: 2075205 - DNA, 15 bp, Homo sapiens
ctccggtgatgaggc

SEQ ID NO: 2075206 - DNA, 15 bp, Homo sapiens
tccggtgatgaggcc

SEQ ID NO: 2075207 - DNA, 15 bp, Homo sapiens
ccggtgatgaggcct

SEQ ID NO: 2075208 - DNA, 15 bp, Homo sapiens
cggtgatgaggcctt

SEQ ID NO: 2075209 - DNA, 15 bp, Homo sapiens
ggtgatgaggccttc

SEQ ID NO: 2075210 - DNA, 15 bp, Homo sapiens
gtgatgaggccttca

SEQ ID NO: 2075211 - DNA, 15 bp, Homo sapiens
tgatgaggccttcac

SEQ ID NO: 2075212 - DNA, 15 bp, Homo sapiens
gatgaggccttcact

SEQ ID NO: 2075213 - DNA, 15 bp, Homo sapiens
atgaggccttcacta

SEQ ID NO: 2075214 - DNA, 15 bp, Homo sapiens
tgaggccttcactac

SEQ ID NO: 2075215 - DNA, 15 bp, Homo sapiens
gaggccttcactacc

SEQ ID NO: 2075216 - DNA, 15 bp, Homo sapiens
aggccttcactacct

SEQ ID NO: 2075217 - DNA, 15 bp, Homo sapiens
ggccttcactacctg

SEQ ID NO: 2075218 - DNA, 15 bp, Homo sapiens
gccttcactacctgc

SEQ ID NO: 2075219 - DNA, 15 bp, Homo sapiens
ccttcactacctgcc

SEQ ID NO: 2075220 - DNA, 15 bp, Homo sapiens
cttcactacctgcca

SEQ ID NO: 2075221 - DNA, 15 bp, Homo sapiens
ttcactacctgccag

SEQ ID NO: 2075222 - DNA, 15 bp, Homo sapiens
tcactacctgccaga

SEQ ID NO: 2075223 - DNA, 15 bp, Homo sapiens
cactacctgccagac

SEQ ID NO: 2075224 - DNA, 15 bp, Homo sapiens
actacctgccagact

SEQ ID NO: 2075225 - DNA, 15 bp, Homo sapiens
ctacctgccagactg

SEQ ID NO: 2075226 - DNA, 15 bp, Homo sapiens
tacctgccagactgt

SEQ ID NO: 2075227 - DNA, 15 bp, Homo sapiens
acctgccagactgtg

SEQ ID NO: 2075228 - DNA, 15 bp, Homo sapiens
cctgccagactgtgg

SEQ ID NO: 2075229 - DNA, 15 bp, Homo sapiens
ctgccagactgtggg

SEQ ID NO: 2075230 - DNA, 15 bp, Homo sapiens
tgccagactgtgggc

SEQ ID NO: 2075231 - DNA, 15 bp, Homo sapiens
gccagactgtgggct

SEQ ID NO: 2075232 - DNA, 15 bp, Homo sapiens
ccagactgtgggctg

SEQ ID NO: 2075233 - DNA, 15 bp, Homo sapiens
cagactgtgggctgt

SEQ ID NO: 2075234 - DNA, 15 bp, Homo sapiens
agactgtgggctgtg

SEQ ID NO: 2075235 - DNA, 15 bp, Homo sapiens
gactgtgggctgtgt

SEQ ID NO: 2075236 - DNA, 15 bp, Homo sapiens
actgtgggctgtgtg

SEQ ID NO: 2075237 - DNA, 15 bp, Homo sapiens
ctgtgggctgtgtga

SEQ ID NO: 2075238 - DNA, 15 bp, Homo sapiens
tgtgggctgtgtgaa

SEQ ID NO: 2075239 - DNA, 15 bp, Homo sapiens
gtgggctgtgtgaag

SEQ ID NO: 2075240 - DNA, 15 bp, Homo sapiens
tgggctgtgtgaagg

SEQ ID NO: 2075241 - DNA, 15 bp, Homo sapiens
gggctgtgtgaaggg

SEQ ID NO: 2075242 - DNA, 15 bp, Homo sapiens
ggctgtgtgaaggga

SEQ ID NO: 2075243 - DNA, 15 bp, Homo sapiens
gctgtgtgaagggat

SEQ ID NO: 2075244 - DNA, 15 bp, Homo sapiens
ctgtgtgaagggatc

SEQ ID NO: 2075245 - DNA, 15 bp, Homo sapiens
tgtgtgaagggatct

SEQ ID NO: 2075246 - DNA, 15 bp, Homo sapiens
gtgtgaagggatctc

SEQ ID NO: 2075247 - DNA, 15 bp, Homo sapiens
tgtgaagggatctca

SEQ ID NO: 2075248 - DNA, 15 bp, Homo sapiens
gtgaagggatctcat

SEQ ID NO: 2075249 - DNA, 15 bp, Homo sapiens
tgaagggatctcatc

SEQ ID NO: 2075250 - DNA, 15 bp, Homo sapiens
gaagggatctcatcc

SEQ ID NO: 2075251 - DNA, 15 bp, Homo sapiens
aagggatctcatcca

SEQ ID NO: 2075252 - DNA, 15 bp, Homo sapiens
agggatctcatccaa

SEQ ID NO: 2075253 - DNA, 15 bp, Homo sapiens
gggatctcatccaat

SEQ ID NO: 2075254 - DNA, 15 bp, Homo sapiens
ggatctcatccaatc

SEQ ID NO: 2075255 - DNA, 15 bp, Homo sapiens
gatctcatccaatcc

SEQ ID NO: 2075256 - DNA, 15 bp, Homo sapiens
atctcatccaatccc

SEQ ID NO: 2075257 - DNA, 15 bp, Homo sapiens
tctcatccaatccct

SEQ ID NO: 2075258 - DNA, 15 bp, Homo sapiens
ctcatccaatccctt

SEQ ID NO: 2075259 - DNA, 15 bp, Homo sapiens
tcatccaatcccttg

SEQ ID NO: 2075260 - DNA, 15 bp, Homo sapiens
catccaatcccttga

SEQ ID NO: 2075261 - DNA, 15 bp, Homo sapiens
atccaatcccttgac

SEQ ID NO: 2075262 - DNA, 15 bp, Homo sapiens
tccaatcccttgaca

SEQ ID NO: 2075263 - DNA, 15 bp, Homo sapiens
ccaatcccttgacat

SEQ ID NO: 2075264 - DNA, 15 bp, Homo sapiens
caatcccttgacata

SEQ ID NO: 2075265 - DNA, 15 bp, Homo sapiens
aatcccttgacataa

SEQ ID NO: 2075266 - DNA, 15 bp, Homo sapiens
atcccttgacataaa

SEQ ID NO: 2075267 - DNA, 15 bp, Homo sapiens
tcccttgacataaaa

SEQ ID NO: 2075268 - DNA, 15 bp, Homo sapiens
cccttgacataaaat

SEQ ID NO: 2075269 - DNA, 15 bp, Homo sapiens
ccttgacataaaata

SEQ ID NO: 2075270 - DNA, 15 bp, Homo sapiens
cttgacataaaatac

SEQ ID NO: 2075271 - DNA, 15 bp, Homo sapiens
ttgacataaaataca

SEQ ID NO: 2075272 - DNA, 15 bp, Homo sapiens
tgacataaaatacaa

SEQ ID NO: 2075273 - DNA, 15 bp, Homo sapiens
gacataaaatacaac

SEQ ID NO: 2075274 - DNA, 15 bp, Homo sapiens
acataaaatacaacc

SEQ ID NO: 2075275 - DNA, 15 bp, Homo sapiens
cataaaatacaacct

SEQ ID NO: 2075276 - DNA, 15 bp, Homo sapiens
ataaaatacaaccta

SEQ ID NO: 2075277 - DNA, 15 bp, Homo sapiens
taaaatacaacctag

SEQ ID NO: 2075278 - DNA, 15 bp, Homo sapiens
aaaatacaacctaga

SEQ ID NO: 2075279 - DNA, 15 bp, Homo sapiens
aaatacaacctagag

SEQ ID NO: 2075280 - DNA, 15 bp, Homo sapiens
aatacaacctagagg

SEQ ID NO: 2075281 - DNA, 15 bp, Homo sapiens
atacaacctagaggc

SEQ ID NO: 2075282 - DNA, 15 bp, Homo sapiens
tacaacctagaggct

SEQ ID NO: 2075283 - DNA, 15 bp, Homo sapiens
acaacctagaggctc

SEQ ID NO: 2075284 - DNA, 15 bp, Homo sapiens
caacctagaggctcc

SEQ ID NO: 2075285 - DNA, 15 bp, Homo sapiens
aacctagaggctcct

SEQ ID NO: 2075286 - DNA, 15 bp, Homo sapiens
acctagaggctcctg

SEQ ID NO: 2075287 - DNA, 15 bp, Homo sapiens
cctagaggctcctga

SEQ ID NO: 2075288 - DNA, 15 bp, Homo sapiens
ctagaggctcctgag

SEQ ID NO: 2075289 - DNA, 15 bp, Homo sapiens
tagaggctcctgagg

SEQ ID NO: 2075290 - DNA, 15 bp, Homo sapiens
agaggctcctgaggt

SEQ ID NO: 2075291 - DNA, 15 bp, Homo sapiens
gaggctcctgaggtt

SEQ ID NO: 2075292 - DNA, 15 bp, Homo sapiens
aggctcctgaggtta

SEQ ID NO: 2075293 - DNA, 15 bp, Homo sapiens
ggctcctgaggttac

SEQ ID NO: 2075294 - DNA, 15 bp, Homo sapiens
gctcctgaggttaca

SEQ ID NO: 2075295 - DNA, 15 bp, Homo sapiens
ctcctgaggttacat

SEQ ID NO: 2075296 - DNA, 15 bp, Homo sapiens
tcctgaggttacatc

SEQ ID NO: 2075297 - DNA, 15 bp, Homo sapiens
cctgaggttacatca

SEQ ID NO: 2075298 - DNA, 15 bp, Homo sapiens
ctgaggttacatcag

SEQ ID NO: 2075299 - DNA, 15 bp, Homo sapiens
tgaggttacatcagc

SEQ ID NO: 2075300 - DNA, 15 bp, Homo sapiens
gaggttacatcagca

SEQ ID NO: 2075301 - DNA, 15 bp, Homo sapiens
aggttacatcagcag

SEQ ID NO: 2075302 - DNA, 15 bp, Homo sapiens
ggttacatcagcagt

SEQ ID NO: 2075303 - DNA, 15 bp, Homo sapiens
gttacatcagcagtc

SEQ ID NO: 2075304 - DNA, 15 bp, Homo sapiens
ttacatcagcagtcc

SEQ ID NO: 2075305 - DNA, 15 bp, Homo sapiens
tacatcagcagtcct

SEQ ID NO: 2075306 - DNA, 15 bp, Homo sapiens
acatcagcagtcctg

SEQ ID NO: 2075307 - DNA, 15 bp, Homo sapiens
catcagcagtcctga

SEQ ID NO: 2075308 - DNA, 15 bp, Homo sapiens
atcagcagtcctgaa

SEQ ID NO: 2075309 - DNA, 15 bp, Homo sapiens
tcagcagtcctgaac

SEQ ID NO: 2075310 - DNA, 15 bp, Homo sapiens
cagcagtcctgaact

SEQ ID NO: 2075311 - DNA, 15 bp, Homo sapiens
agcagtcctgaactt

SEQ ID NO: 2075312 - DNA, 15 bp, Homo sapiens
gcagtcctgaacttt

SEQ ID NO: 2075313 - DNA, 15 bp, Homo sapiens
cagtcctgaactttc

SEQ ID NO: 2075314 - DNA, 15 bp, Homo sapiens
agtcctgaactttcc

SEQ ID NO: 2075315 - DNA, 15 bp, Homo sapiens
gtcctgaactttcca

SEQ ID NO: 2075316 - DNA, 15 bp, Homo sapiens
tcctgaactttccaa

SEQ ID NO: 2075317 - DNA, 15 bp, Homo sapiens
cctgaactttccaat

SEQ ID NO: 2075318 - DNA, 15 bp, Homo sapiens
ctgaactttccaata

SEQ ID NO: 2075319 - DNA, 15 bp, Homo sapiens
tgaactttccaataa

SEQ ID NO: 2075320 - DNA, 15 bp, Homo sapiens
gaactttccaataag

SEQ ID NO: 2075321 - DNA, 15 bp, Homo sapiens
aactttccaataagc

SEQ ID NO: 2075322 - DNA, 15 bp, Homo sapiens
actttccaataagct

SEQ ID NO: 2075323 - DNA, 15 bp, Homo sapiens
ctttccaataagctc

SEQ ID NO: 2075324 - DNA, 15 bp, Homo sapiens
tttccaataagctcc

SEQ ID NO: 2075325 - DNA, 15 bp, Homo sapiens
ttccaataagctcca

SEQ ID NO: 2075326 - DNA, 15 bp, Homo sapiens
tccaataagctccaa

SEQ ID NO: 2075327 - DNA, 15 bp, Homo sapiens
ccaataagctccaac

SEQ ID NO: 2075328 - DNA, 15 bp, Homo sapiens
caataagctccaact

SEQ ID NO: 2075329 - DNA, 15 bp, Homo sapiens
aataagctccaactg

SEQ ID NO: 2075330 - DNA, 15 bp, Homo sapiens
ataagctccaactgc

SEQ ID NO: 2075331 - DNA, 15 bp, Homo sapiens
taagctccaactgct

SEQ ID NO: 2075332 - DNA, 15 bp, Homo sapiens
aagctccaactgctt

SEQ ID NO: 2075333 - DNA, 15 bp, Homo sapiens
agctccaactgcttg

SEQ ID NO: 2075334 - DNA, 15 bp, Homo sapiens
gctccaactgcttgc

SEQ ID NO: 2075335 - DNA, 15 bp, Homo sapiens
ctccaactgcttgcc

SEQ ID NO: 2075336 - DNA, 15 bp, Homo sapiens
tccaactgcttgccc

SEQ ID NO: 2075337 - DNA, 15 bp, Homo sapiens
ccaactgcttgcccc

SEQ ID NO: 2075338 - DNA, 15 bp, Homo sapiens
caactgcttgcccca

SEQ ID NO: 2075339 - DNA, 15 bp, Homo sapiens
aactgcttgccccat

SEQ ID NO: 2075340 - DNA, 15 bp, Homo sapiens
actgcttgccccatc

SEQ ID NO: 2075341 - DNA, 15 bp, Homo sapiens
ctgcttgccccatcc

SEQ ID NO: 2075342 - DNA, 15 bp, Homo sapiens
tgcttgccccatcct

SEQ ID NO: 2075343 - DNA, 15 bp, Homo sapiens
gcttgccccatcctt

SEQ ID NO: 2075344 - DNA, 15 bp, Homo sapiens
cttgccccatccttc

SEQ ID NO: 2075345 - DNA, 15 bp, Homo sapiens
ttgccccatccttct

SEQ ID NO: 2075346 - DNA, 15 bp, Homo sapiens
tgccccatccttcta

SEQ ID NO: 2075347 - DNA, 15 bp, Homo sapiens
gccccatccttctac

SEQ ID NO: 2075348 - DNA, 15 bp, Homo sapiens
ccccatccttctact

SEQ ID NO: 2075349 - DNA, 15 bp, Homo sapiens
cccatccttctacta

SEQ ID NO: 2075350 - DNA, 15 bp, Homo sapiens
ccatccttctactag

SEQ ID NO: 2075351 - DNA, 15 bp, Homo sapiens
catccttctactagg

SEQ ID NO: 2075352 - DNA, 15 bp, Homo sapiens
atccttctactagga

SEQ ID NO: 2075353 - DNA, 15 bp, Homo sapiens
tccttctactaggat

SEQ ID NO: 2075354 - DNA, 15 bp, Homo sapiens
ccttctactaggata

SEQ ID NO: 2075355 - DNA, 15 bp, Homo sapiens
cttctactaggatat

SEQ ID NO: 2075356 - DNA, 15 bp, Homo sapiens
ttctactaggatatc

SEQ ID NO: 2075357 - DNA, 15 bp, Homo sapiens
tctactaggatatca

SEQ ID NO: 2075358 - DNA, 15 bp, Homo sapiens
ctactaggatatcac

SEQ ID NO: 2075359 - DNA, 15 bp, Homo sapiens
tactaggatatcaca

SEQ ID NO: 2075360 - DNA, 15 bp, Homo sapiens
actaggatatcacac

SEQ ID NO: 2075361 - DNA, 15 bp, Homo sapiens
ctaggatatcacaca

SEQ ID NO: 2075362 - DNA, 15 bp, Homo sapiens
taggatatcacacag

SEQ ID NO: 2075363 - DNA, 15 bp, Homo sapiens
aggatatcacacaga

SEQ ID NO: 2075364 - DNA, 15 bp, Homo sapiens
ggatatcacacagaa

SEQ ID NO: 2075365 - DNA, 15 bp, Homo sapiens
gatatcacacagaag

SEQ ID NO: 2075366 - DNA, 15 bp, Homo sapiens
atatcacacagaagg

SEQ ID NO: 2075367 - DNA, 15 bp, Homo sapiens
tatcacacagaaggc

SEQ ID NO: 2075368 - DNA, 15 bp, Homo sapiens
atcacacagaaggct

SEQ ID NO: 2075369 - DNA, 15 bp, Homo sapiens
tcacacagaaggctc

SEQ ID NO: 2075370 - DNA, 15 bp, Homo sapiens
cacacagaaggctcc

SEQ ID NO: 2075371 - DNA, 15 bp, Homo sapiens
cacagaaggctccaa

SEQ ID NO: 2075372 - DNA, 15 bp, Homo sapiens
acagaaggctccaaa

SEQ ID NO: 2075373 - DNA, 15 bp, Homo sapiens
cagaaggctccaaaa

SEQ ID NO: 2075374 - DNA, 15 bp, Homo sapiens
agaaggctccaaaaa

SEQ ID NO: 2075375 - DNA, 15 bp, Homo sapiens
gaaggctccaaaaat

SEQ ID NO: 2075376 - DNA, 15 bp, Homo sapiens
aaggctccaaaaata

SEQ ID NO: 2075377 - DNA, 15 bp, Homo sapiens
aggctccaaaaatag

SEQ ID NO: 2075378 - DNA, 15 bp, Homo sapiens
ggctccaaaaatagc

SEQ ID NO: 2075379 - DNA, 15 bp, Homo sapiens
gctccaaaaatagca

SEQ ID NO: 2075380 - DNA, 15 bp, Homo sapiens
ctccaaaaatagcag

SEQ ID NO: 2075381 - DNA, 15 bp, Homo sapiens
tccaaaaatagcagg

SEQ ID NO: 2075382 - DNA, 15 bp, Homo sapiens
ccaaaaatagcaggg

SEQ ID NO: 2075383 - DNA, 15 bp, Homo sapiens
caaaaatagcagggc

SEQ ID NO: 2075384 - DNA, 15 bp, Homo sapiens
aaaaatagcagggcc

SEQ ID NO: 2075385 - DNA, 15 bp, Homo sapiens
aaaatagcagggcct

SEQ ID NO: 2075386 - DNA, 15 bp, Homo sapiens
aaatagcagggcctg

SEQ ID NO: 2075387 - DNA, 15 bp, Homo sapiens
aatagcagggcctga

SEQ ID NO: 2075388 - DNA, 15 bp, Homo sapiens
atagcagggcctgag

SEQ ID NO: 2075389 - DNA, 15 bp, Homo sapiens
tagcagggcctgagc

SEQ ID NO: 2075390 - DNA, 15 bp, Homo sapiens
agcagggcctgagcc

SEQ ID NO: 2075391 - DNA, 15 bp, Homo sapiens
gcagggcctgagcct

SEQ ID NO: 2075392 - DNA, 15 bp, Homo sapiens
cagggcctgagcctg

SEQ ID NO: 2075393 - DNA, 15 bp, Homo sapiens
agggcctgagcctga

SEQ ID NO: 2075394 - DNA, 15 bp, Homo sapiens
gggcctgagcctgat

SEQ ID NO: 2075395 - DNA, 15 bp, Homo sapiens
ggcctgagcctgatt

SEQ ID NO: 2075396 - DNA, 15 bp, Homo sapiens
gcctgagcctgattc

SEQ ID NO: 2075397 - DNA, 15 bp, Homo sapiens
cctgagcctgattcc

SEQ ID NO: 2075398 - DNA, 15 bp, Homo sapiens
ctgagcctgattcca

SEQ ID NO: 2075399 - DNA, 15 bp, Homo sapiens
tgagcctgattccag

SEQ ID NO: 2075400 - DNA, 15 bp, Homo sapiens
gagcctgattccagc

SEQ ID NO: 2075401 - DNA, 15 bp, Homo sapiens
agcctgattccagcc

SEQ ID NO: 2075402 - DNA, 15 bp, Homo sapiens
gcctgattccagcct

SEQ ID NO: 2075403 - DNA, 15 bp, Homo sapiens
cctgattccagcctc

SEQ ID NO: 2075404 - DNA, 15 bp, Homo sapiens
ctgattccagcctcc

SEQ ID NO: 2075405 - DNA, 15 bp, Homo sapiens
tgattccagcctcca

SEQ ID NO: 2075406 - DNA, 15 bp, Homo sapiens
gattccagcctccac

SEQ ID NO: 2075407 - DNA, 15 bp, Homo sapiens
attccagcctccacc

SEQ ID NO: 2075408 - DNA, 15 bp, Homo sapiens
ttccagcctccaccc

SEQ ID NO: 2075409 - DNA, 15 bp, Homo sapiens
tccagcctccaccca

SEQ ID NO: 2075410 - DNA, 15 bp, Homo sapiens
ccagcctccacccaa

SEQ ID NO: 2075411 - DNA, 15 bp, Homo sapiens
cagcctccacccaag

SEQ ID NO: 2075412 - DNA, 15 bp, Homo sapiens
agcctccacccaagt

SEQ ID NO: 2075413 - DNA, 15 bp, Homo sapiens
gcctccacccaagtt

SEQ ID NO: 2075414 - DNA, 15 bp, Homo sapiens
cctccacccaagttg

SEQ ID NO: 2075415 - DNA, 15 bp, Homo sapiens
ctccacccaagttgt

SEQ ID NO: 2075416 - DNA, 15 bp, Homo sapiens
tccacccaagttgtg

SEQ ID NO: 2075417 - DNA, 15 bp, Homo sapiens
ccacccaagttgtga

SEQ ID NO: 2075418 - DNA, 15 bp, Homo sapiens
cacccaagttgtgac

SEQ ID NO: 2075419 - DNA, 15 bp, Homo sapiens
acccaagttgtgacc

SEQ ID NO: 2075420 - DNA, 15 bp, Homo sapiens
cccaagttgtgacct

SEQ ID NO: 2075421 - DNA, 15 bp, Homo sapiens
ccaagttgtgacctc

SEQ ID NO: 2075422 - DNA, 15 bp, Homo sapiens
caagttgtgacctcc

SEQ ID NO: 2075423 - DNA, 15 bp, Homo sapiens
aagttgtgacctccc

SEQ ID NO: 2075424 - DNA, 15 bp, Homo sapiens
agttgtgacctcccc

SEQ ID NO: 2075425 - DNA, 15 bp, Homo sapiens
gttgtgacctccccc

SEQ ID NO: 2075426 - DNA, 15 bp, Homo sapiens
ttgtgacctccccct

SEQ ID NO: 2075427 - DNA, 15 bp, Homo sapiens
tgtgacctccccctg

SEQ ID NO: 2075428 - DNA, 15 bp, Homo sapiens
gtgacctccccctgg

SEQ ID NO: 2075429 - DNA, 15 bp, Homo sapiens
tgacctccccctggc

SEQ ID NO: 2075430 - DNA, 15 bp, Homo sapiens
gacctccccctggct

SEQ ID NO: 2075431 - DNA, 15 bp, Homo sapiens
acctccccctggctc

SEQ ID NO: 2075432 - DNA, 15 bp, Homo sapiens
cctccccctggctct

SEQ ID NO: 2075433 - DNA, 15 bp, Homo sapiens
ctccccctggctctc

SEQ ID NO: 2075434 - DNA, 15 bp, Homo sapiens
tccccctggctctcc

SEQ ID NO: 2075435 - DNA, 15 bp, Homo sapiens
ccccctggctctccc

SEQ ID NO: 2075436 - DNA, 15 bp, Homo sapiens
cccctggctctcccc

SEQ ID NO: 2075437 - DNA, 15 bp, Homo sapiens
ccctggctctcccca

SEQ ID NO: 2075438 - DNA, 15 bp, Homo sapiens
cctggctctccccac

SEQ ID NO: 2075439 - DNA, 15 bp, Homo sapiens
ctggctctccccacc

SEQ ID NO: 2075440 - DNA, 15 bp, Homo sapiens
tggctctccccacct

SEQ ID NO: 2075441 - DNA, 15 bp, Homo sapiens
ggctctccccacctt

SEQ ID NO: 2075442 - DNA, 15 bp, Homo sapiens
gctctccccaccttg

SEQ ID NO: 2075443 - DNA, 15 bp, Homo sapiens
ctctccccaccttgg

SEQ ID NO: 2075444 - DNA, 15 bp, Homo sapiens
tctccccaccttggt

SEQ ID NO: 2075445 - DNA, 15 bp, Homo sapiens
ctccccaccttggtt

SEQ ID NO: 2075446 - DNA, 15 bp, Homo sapiens
tccccaccttggtta

SEQ ID NO: 2075447 - DNA, 15 bp, Homo sapiens
ccccaccttggttaa

SEQ ID NO: 2075448 - DNA, 15 bp, Homo sapiens
cccaccttggttaat

SEQ ID NO: 2075449 - DNA, 15 bp, Homo sapiens
ccaccttggttaata

SEQ ID NO: 2075450 - DNA, 15 bp, Homo sapiens
caccttggttaatag

SEQ ID NO: 2075451 - DNA, 15 bp, Homo sapiens
accttggttaatagc

SEQ ID NO: 2075452 - DNA, 15 bp, Homo sapiens
ccttggttaatagcc

SEQ ID NO: 2075453 - DNA, 15 bp, Homo sapiens
cttggttaatagccc

SEQ ID NO: 2075454 - DNA, 15 bp, Homo sapiens
ttggttaatagcccc

SEQ ID NO: 2075455 - DNA, 15 bp, Homo sapiens
tggttaatagcccca

SEQ ID NO: 2075456 - DNA, 15 bp, Homo sapiens
ggttaatagccccat

SEQ ID NO: 2075457 - DNA, 15 bp, Homo sapiens
gttaatagccccatc

SEQ ID NO: 2075458 - DNA, 15 bp, Homo sapiens
ttaatagccccatca

SEQ ID NO: 2075459 - DNA, 15 bp, Homo sapiens
taatagccccatcat

SEQ ID NO: 2075460 - DNA, 15 bp, Homo sapiens
aatagccccatcatc

SEQ ID NO: 2075461 - DNA, 15 bp, Homo sapiens
atagccccatcatcc

SEQ ID NO: 2075462 - DNA, 15 bp, Homo sapiens
tagccccatcatcca

SEQ ID NO: 2075463 - DNA, 15 bp, Homo sapiens
agccccatcatccac

SEQ ID NO: 2075464 - DNA, 15 bp, Homo sapiens
gccccatcatccacc

SEQ ID NO: 2075465 - DNA, 15 bp, Homo sapiens
ccccatcatccaccc

SEQ ID NO: 2075466 - DNA, 15 bp, Homo sapiens
cccatcatccacccg

SEQ ID NO: 2075467 - DNA, 15 bp, Homo sapiens
ccatcatccacccgt

SEQ ID NO: 2075468 - DNA, 15 bp, Homo sapiens
catcatccacccgtt

SEQ ID NO: 2075469 - DNA, 15 bp, Homo sapiens
atcatccacccgttg

SEQ ID NO: 2075470 - DNA, 15 bp, Homo sapiens
tcatccacccgttgc

SEQ ID NO: 2075471 - DNA, 15 bp, Homo sapiens
catccacccgttgct

SEQ ID NO: 2075472 - DNA, 15 bp, Homo sapiens
atccacccgttgctc

SEQ ID NO: 2075473 - DNA, 15 bp, Homo sapiens
tccacccgttgctca

SEQ ID NO: 2075474 - DNA, 15 bp, Homo sapiens
ccacccgttgctcaa

SEQ ID NO: 2075475 - DNA, 15 bp, Homo sapiens
cacccgttgctcaag

SEQ ID NO: 2075476 - DNA, 15 bp, Homo sapiens
acccgttgctcaagc

SEQ ID NO: 2075477 - DNA, 15 bp, Homo sapiens
cccgttgctcaagcc

SEQ ID NO: 2075478 - DNA, 15 bp, Homo sapiens
ccgttgctcaagcct

SEQ ID NO: 2075479 - DNA, 15 bp, Homo sapiens
cgttgctcaagccta

SEQ ID NO: 2075480 - DNA, 15 bp, Homo sapiens
gttgctcaagcctag

SEQ ID NO: 2075481 - DNA, 15 bp, Homo sapiens
ttgctcaagcctaga

SEQ ID NO: 2075482 - DNA, 15 bp, Homo sapiens
tgctcaagcctagaa

SEQ ID NO: 2075483 - DNA, 15 bp, Homo sapiens
gctcaagcctagaac

SEQ ID NO: 2075484 - DNA, 15 bp, Homo sapiens
ctcaagcctagaacc

SEQ ID NO: 2075485 - DNA, 15 bp, Homo sapiens
tcaagcctagaacct

SEQ ID NO: 2075486 - DNA, 15 bp, Homo sapiens
caagcctagaaccta

SEQ ID NO: 2075487 - DNA, 15 bp, Homo sapiens
aagcctagaacctac

SEQ ID NO: 2075488 - DNA, 15 bp, Homo sapiens
agcctagaacctaca

SEQ ID NO: 2075489 - DNA, 15 bp, Homo sapiens
gcctagaacctacaa

SEQ ID NO: 2075490 - DNA, 15 bp, Homo sapiens
cctagaacctacaat

SEQ ID NO: 2075491 - DNA, 15 bp, Homo sapiens
ctagaacctacaatc

SEQ ID NO: 2075492 - DNA, 15 bp, Homo sapiens
tagaacctacaatca

SEQ ID NO: 2075493 - DNA, 15 bp, Homo sapiens
agaacctacaatcat

SEQ ID NO: 2075494 - DNA, 15 bp, Homo sapiens
gaacctacaatcatc

SEQ ID NO: 2075495 - DNA, 15 bp, Homo sapiens
aacctacaatcatcc

SEQ ID NO: 2075496 - DNA, 15 bp, Homo sapiens
acctacaatcatcct

SEQ ID NO: 2075497 - DNA, 15 bp, Homo sapiens
cctacaatcatcctc

SEQ ID NO: 2075498 - DNA, 15 bp, Homo sapiens
ctacaatcatcctca

SEQ ID NO: 2075499 - DNA, 15 bp, Homo sapiens
tacaatcatcctcac

SEQ ID NO: 2075500 - DNA, 15 bp, Homo sapiens
acaatcatcctcacc

SEQ ID NO: 2075501 - DNA, 15 bp, Homo sapiens
caatcatcctcaccc

SEQ ID NO: 2075502 - DNA, 15 bp, Homo sapiens
aatcatcctcacccc

SEQ ID NO: 2075503 - DNA, 15 bp, Homo sapiens
atcatcctcacccct

SEQ ID NO: 2075504 - DNA, 15 bp, Homo sapiens
tcatcctcacccctc

SEQ ID NO: 2075505 - DNA, 15 bp, Homo sapiens
catcctcacccctcc

SEQ ID NO: 2075506 - DNA, 15 bp, Homo sapiens
atcctcacccctcca

SEQ ID NO: 2075507 - DNA, 15 bp, Homo sapiens
tcctcacccctccat

SEQ ID NO: 2075508 - DNA, 15 bp, Homo sapiens
cctcacccctccatc

SEQ ID NO: 2075509 - DNA, 15 bp, Homo sapiens
ctcacccctccatcc

SEQ ID NO: 2075510 - DNA, 15 bp, Homo sapiens
tcacccctccatcca

SEQ ID NO: 2075511 - DNA, 15 bp, Homo sapiens
cacccctccatccaa

SEQ ID NO: 2075512 - DNA, 15 bp, Homo sapiens
acccctccatccaat

SEQ ID NO: 2075513 - DNA, 15 bp, Homo sapiens
cccctccatccaatt

SEQ ID NO: 2075514 - DNA, 15 bp, Homo sapiens
ccctccatccaattc

SEQ ID NO: 2075515 - DNA, 15 bp, Homo sapiens
cctccatccaattca

SEQ ID NO: 2075516 - DNA, 15 bp, Homo sapiens
ctccatccaattcat

SEQ ID NO: 2075517 - DNA, 15 bp, Homo sapiens
tccatccaattcatc

SEQ ID NO: 2075518 - DNA, 15 bp, Homo sapiens
ccatccaattcatct

SEQ ID NO: 2075519 - DNA, 15 bp, Homo sapiens
catccaattcatctg

SEQ ID NO: 2075520 - DNA, 15 bp, Homo sapiens
atccaattcatctga

SEQ ID NO: 2075521 - DNA, 15 bp, Homo sapiens
tccaattcatctgaa

SEQ ID NO: 2075522 - DNA, 15 bp, Homo sapiens
ccaattcatctgaaa

SEQ ID NO: 2075523 - DNA, 15 bp, Homo sapiens
caattcatctgaaaa

SEQ ID NO: 2075524 - DNA, 15 bp, Homo sapiens
aattcatctgaaaat

SEQ ID NO: 2075525 - DNA, 15 bp, Homo sapiens
attcatctgaaaatt

SEQ ID NO: 2075526 - DNA, 15 bp, Homo sapiens
ttcatctgaaaattc

SEQ ID NO: 2075527 - DNA, 15 bp, Homo sapiens
tcatctgaaaattct

SEQ ID NO: 2075528 - DNA, 15 bp, Homo sapiens
catctgaaaattcta

SEQ ID NO: 2075529 - DNA, 15 bp, Homo sapiens
atctgaaaattctac

SEQ ID NO: 2075530 - DNA, 15 bp, Homo sapiens
tctgaaaattctaca

SEQ ID NO: 2075531 - DNA, 15 bp, Homo sapiens
ctgaaaattctacag

SEQ ID NO: 2075532 - DNA, 15 bp, Homo sapiens
tgaaaattctacaga

SEQ ID NO: 2075533 - DNA, 15 bp, Homo sapiens
gaaaattctacagat

SEQ ID NO: 2075534 - DNA, 15 bp, Homo sapiens
aaattctacagattc

SEQ ID NO: 2075535 - DNA, 15 bp, Homo sapiens
aattctacagattct

SEQ ID NO: 2075536 - DNA, 15 bp, Homo sapiens
attctacagattctg

SEQ ID NO: 2075537 - DNA, 15 bp, Homo sapiens
ttctacagattctgc

SEQ ID NO: 2075538 - DNA, 15 bp, Homo sapiens
tctacagattctgct

SEQ ID NO: 2075539 - DNA, 15 bp, Homo sapiens
ctacagattctgctt

SEQ ID NO: 2075540 - DNA, 15 bp, Homo sapiens
tacagattctgcttc

SEQ ID NO: 2075541 - DNA, 15 bp, Homo sapiens
acagattctgcttcc

SEQ ID NO: 2075542 - DNA, 15 bp, Homo sapiens
cagattctgcttcca

SEQ ID NO: 2075543 - DNA, 15 bp, Homo sapiens
agattctgcttccaa

SEQ ID NO: 2075544 - DNA, 15 bp, Homo sapiens
gattctgcttccaaa

SEQ ID NO: 2075545 - DNA, 15 bp, Homo sapiens
attctgcttccaaag

SEQ ID NO: 2075546 - DNA, 15 bp, Homo sapiens
ttctgcttccaaagt

SEQ ID NO: 2075547 - DNA, 15 bp, Homo sapiens
tctgcttccaaagta

SEQ ID NO: 2075548 - DNA, 15 bp, Homo sapiens
ctgcttccaaagtat

SEQ ID NO: 2075549 - DNA, 15 bp, Homo sapiens
tgcttccaaagtatc

SEQ ID NO: 2075550 - DNA, 15 bp, Homo sapiens
gcttccaaagtatct

SEQ ID NO: 2075551 - DNA, 15 bp, Homo sapiens
cttccaaagtatctc

SEQ ID NO: 2075552 - DNA, 15 bp, Homo sapiens
ttccaaagtatctct

SEQ ID NO: 2075553 - DNA, 15 bp, Homo sapiens
tccaaagtatctctc

SEQ ID NO: 2075554 - DNA, 15 bp, Homo sapiens
ccaaagtatctctca

SEQ ID NO: 2075555 - DNA, 15 bp, Homo sapiens
caaagtatctctcag

SEQ ID NO: 2075556 - DNA, 15 bp, Homo sapiens
aaagtatctctcaga

SEQ ID NO: 2075557 - DNA, 15 bp, Homo sapiens
aagtatctctcagat

SEQ ID NO: 2075558 - DNA, 15 bp, Homo sapiens
agtatctctcagatc

SEQ ID NO: 2075559 - DNA, 15 bp, Homo sapiens
gtatctctcagatct

SEQ ID NO: 2075560 - DNA, 15 bp, Homo sapiens
tatctctcagatctg

SEQ ID NO: 2075561 - DNA, 15 bp, Homo sapiens
atctctcagatctga

SEQ ID NO: 2075562 - DNA, 15 bp, Homo sapiens
tctctcagatctgac

SEQ ID NO: 2075563 - DNA, 15 bp, Homo sapiens
ctctcagatctgacc

SEQ ID NO: 2075564 - DNA, 15 bp, Homo sapiens
tctcagatctgacca

SEQ ID NO: 2075565 - DNA, 15 bp, Homo sapiens
ctcagatctgaccat

SEQ ID NO: 2075566 - DNA, 15 bp, Homo sapiens
tcagatctgaccatt

SEQ ID NO: 2075567 - DNA, 15 bp, Homo sapiens
cagatctgaccattg

SEQ ID NO: 2075568 - DNA, 15 bp, Homo sapiens
agatctgaccattgt

SEQ ID NO: 2075569 - DNA, 15 bp, Homo sapiens
gatctgaccattgtt

SEQ ID NO: 2075570 - DNA, 15 bp, Homo sapiens
atctgaccattgttc

SEQ ID NO: 2075571 - DNA, 15 bp, Homo sapiens
tctgaccattgttct

SEQ ID NO: 2075572 - DNA, 15 bp, Homo sapiens
ctgaccattgttctc

SEQ ID NO: 2075573 - DNA, 15 bp, Homo sapiens
tgaccattgttctcc

SEQ ID NO: 2075574 - DNA, 15 bp, Homo sapiens
gaccattgttctcca

SEQ ID NO: 2075575 - DNA, 15 bp, Homo sapiens
accattgttctccat

SEQ ID NO: 2075576 - DNA, 15 bp, Homo sapiens
ccattgttctccatc

SEQ ID NO: 2075577 - DNA, 15 bp, Homo sapiens
cattgttctccatct

SEQ ID NO: 2075578 - DNA, 15 bp, Homo sapiens
attgttctccatctt

SEQ ID NO: 2075579 - DNA, 15 bp, Homo sapiens
ttgttctccatcttc

SEQ ID NO: 2075580 - DNA, 15 bp, Homo sapiens
tgttctccatcttca

SEQ ID NO: 2075581 - DNA, 15 bp, Homo sapiens
gttctccatcttcac

SEQ ID NO: 2075582 - DNA, 15 bp, Homo sapiens
ttctccatcttcaca

SEQ ID NO: 2075583 - DNA, 15 bp, Homo sapiens
tctccatcttcacag

SEQ ID NO: 2075584 - DNA, 15 bp, Homo sapiens
ctccatcttcacagc

SEQ ID NO: 2075585 - DNA, 15 bp, Homo sapiens
tccatcttcacagct

SEQ ID NO: 2075586 - DNA, 15 bp, Homo sapiens
ccatcttcacagctg

SEQ ID NO: 2075587 - DNA, 15 bp, Homo sapiens
catcttcacagctgc

SEQ ID NO: 2075588 - DNA, 15 bp, Homo sapiens
atcttcacagctgcc

SEQ ID NO: 2075589 - DNA, 15 bp, Homo sapiens
tcttcacagctgcca

SEQ ID NO: 2075590 - DNA, 15 bp, Homo sapiens
cttcacagctgccat

SEQ ID NO: 2075591 - DNA, 15 bp, Homo sapiens
ttcacagctgccatc

SEQ ID NO: 2075592 - DNA, 15 bp, Homo sapiens
tcacagctgccatcg

SEQ ID NO: 2075593 - DNA, 15 bp, Homo sapiens
cacagctgccatcgc

SEQ ID NO: 2075594 - DNA, 15 bp, Homo sapiens
acagctgccatcgcg

SEQ ID NO: 2075595 - DNA, 15 bp, Homo sapiens
cagctgccatcgcgg

SEQ ID NO: 2075596 - DNA, 15 bp, Homo sapiens
agctgccatcgcggt

SEQ ID NO: 2075597 - DNA, 15 bp, Homo sapiens
gctgccatcgcggtc

SEQ ID NO: 2075598 - DNA, 15 bp, Homo sapiens
ctgccatcgcggtct

SEQ ID NO: 2075599 - DNA, 15 bp, Homo sapiens
tgccatcgcggtctg

SEQ ID NO: 2075600 - DNA, 15 bp, Homo sapiens
gccatcgcggtctga

SEQ ID NO: 2075601 - DNA, 15 bp, Homo sapiens
ccatcgcggtctgag

SEQ ID NO: 2075602 - DNA, 15 bp, Homo sapiens
catcgcggtctgagc

SEQ ID NO: 2075603 - DNA, 15 bp, Homo sapiens
atcgcggtctgagcc

SEQ ID NO: 2075604 - DNA, 15 bp, Homo sapiens
tcgcggtctgagccc

SEQ ID NO: 2075605 - DNA, 15 bp, Homo sapiens
cgcggtctgagcccc

SEQ ID NO: 2075606 - DNA, 15 bp, Homo sapiens
gcggtctgagccccc

SEQ ID NO: 2075607 - DNA, 15 bp, Homo sapiens
cggtctgagcccccg

SEQ ID NO: 2075608 - DNA, 15 bp, Homo sapiens
ggtctgagcccccgt

SEQ ID NO: 2075609 - DNA, 15 bp, Homo sapiens
gtctgagcccccgtc

SEQ ID NO: 2075610 - DNA, 15 bp, Homo sapiens
tctgagcccccgtca

SEQ ID NO: 2075611 - DNA, 15 bp, Homo sapiens
ctgagcccccgtcac

SEQ ID NO: 2075612 - DNA, 15 bp, Homo sapiens
tgagcccccgtcacc

SEQ ID NO: 2075613 - DNA, 15 bp, Homo sapiens
gagcccccgtcacct

SEQ ID NO: 2075614 - DNA, 15 bp, Homo sapiens
agcccccgtcacctc

SEQ ID NO: 2075615 - DNA, 15 bp, Homo sapiens
gcccccgtcacctct

SEQ ID NO: 2075616 - DNA, 15 bp, Homo sapiens
cccccgtcacctctc

SEQ ID NO: 2075617 - DNA, 15 bp, Homo sapiens
ccccgtcacctctca

SEQ ID NO: 2075618 - DNA, 15 bp, Homo sapiens
cccgtcacctctcac

SEQ ID NO: 2075619 - DNA, 15 bp, Homo sapiens
ccgtcacctctcacc

SEQ ID NO: 2075620 - DNA, 15 bp, Homo sapiens
cgtcacctctcacca

SEQ ID NO: 2075621 - DNA, 15 bp, Homo sapiens
gtcacctctcaccag

SEQ ID NO: 2075622 - DNA, 15 bp, Homo sapiens
tcacctctcaccagc

SEQ ID NO: 2075623 - DNA, 15 bp, Homo sapiens
cacctctcaccagcg

SEQ ID NO: 2075624 - DNA, 15 bp, Homo sapiens
acctctcaccagcgt

SEQ ID NO: 2075625 - DNA, 15 bp, Homo sapiens
cctctcaccagcgtg

SEQ ID NO: 2075626 - DNA, 15 bp, Homo sapiens
ctctcaccagcgtga

SEQ ID NO: 2075627 - DNA, 15 bp, Homo sapiens
tctcaccagcgtgac

SEQ ID NO: 2075628 - DNA, 15 bp, Homo sapiens
ctcaccagcgtgacc

SEQ ID NO: 2075629 - DNA, 15 bp, Homo sapiens
tcaccagcgtgaccg

SEQ ID NO: 2075630 - DNA, 15 bp, Homo sapiens
caccagcgtgaccgt

SEQ ID NO: 2075631 - DNA, 15 bp, Homo sapiens
accagcgtgaccgtc

SEQ ID NO: 2075632 - DNA, 15 bp, Homo sapiens
ccagcgtgaccgtct

SEQ ID NO: 2075633 - DNA, 15 bp, Homo sapiens
cagcgtgaccgtctc

SEQ ID NO: 2075634 - DNA, 15 bp, Homo sapiens
agcgtgaccgtctcc

SEQ ID NO: 2075635 - DNA, 15 bp, Homo sapiens
gcgtgaccgtctcca

SEQ ID NO: 2075636 - DNA, 15 bp, Homo sapiens
cgtgaccgtctccac

SEQ ID NO: 2075637 - DNA, 15 bp, Homo sapiens
gtgaccgtctccacc

SEQ ID NO: 2075638 - DNA, 15 bp, Homo sapiens
tgaccgtctccacct

SEQ ID NO: 2075639 - DNA, 15 bp, Homo sapiens
gaccgtctccacctc

SEQ ID NO: 2075640 - DNA, 15 bp, Homo sapiens
accgtctccacctcc

SEQ ID NO: 2075641 - DNA, 15 bp, Homo sapiens
ccgtctccacctcct

SEQ ID NO: 2075642 - DNA, 15 bp, Homo sapiens
cgtctccacctcctc

SEQ ID NO: 2075643 - DNA, 15 bp, Homo sapiens
gtctccacctcctcc

SEQ ID NO: 2075644 - DNA, 15 bp, Homo sapiens
tctccacctcctcct

SEQ ID NO: 2075645 - DNA, 15 bp, Homo sapiens
ctccacctcctcctg

SEQ ID NO: 2075646 - DNA, 15 bp, Homo sapiens
tccacctcctcctgc

SEQ ID NO: 2075647 - DNA, 15 bp, Homo sapiens
ccacctcctcctgct

SEQ ID NO: 2075648 - DNA, 15 bp, Homo sapiens
cacctcctcctgctc

SEQ ID NO: 2075649 - DNA, 15 bp, Homo sapiens
acctcctcctgctcc

SEQ ID NO: 2075650 - DNA, 15 bp, Homo sapiens
cctcctcctgctccc

SEQ ID NO: 2075651 - DNA, 15 bp, Homo sapiens
ctcctcctgctccct

SEQ ID NO: 2075652 - DNA, 15 bp, Homo sapiens
tcctcctgctccctc

SEQ ID NO: 2075653 - DNA, 15 bp, Homo sapiens
cctgctccctctctt

SEQ ID NO: 2075654 - DNA, 15 bp, Homo sapiens
ctgctccctctcttg

SEQ ID NO: 2075655 - DNA, 15 bp, Homo sapiens
tgctccctctcttgc

SEQ ID NO: 2075656 - DNA, 15 bp, Homo sapiens
gctccctctcttgct

SEQ ID NO: 2075657 - DNA, 15 bp, Homo sapiens
ctccctctcttgctc

SEQ ID NO: 2075658 - DNA, 15 bp, Homo sapiens
tccctctcttgctca

SEQ ID NO: 2075659 - DNA, 15 bp, Homo sapiens
ccctctcttgctcac

SEQ ID NO: 2075660 - DNA, 15 bp, Homo sapiens
cctctcttgctcacc

SEQ ID NO: 2075661 - DNA, 15 bp, Homo sapiens
ctctcttgctcacct

SEQ ID NO: 2075662 - DNA, 15 bp, Homo sapiens
tctcttgctcacctt

SEQ ID NO: 2075663 - DNA, 15 bp, Homo sapiens
ctcttgctcaccttc

SEQ ID NO: 2075664 - DNA, 15 bp, Homo sapiens
tcttgctcaccttca

SEQ ID NO: 2075665 - DNA, 15 bp, Homo sapiens
cttgctcaccttcag

SEQ ID NO: 2075666 - DNA, 15 bp, Homo sapiens
ttgctcaccttcagc

SEQ ID NO: 2075667 - DNA, 15 bp, Homo sapiens
tgctcaccttcagcc

SEQ ID NO: 2075668 - DNA, 15 bp, Homo sapiens
gctcaccttcagcca

SEQ ID NO: 2075669 - DNA, 15 bp, Homo sapiens
ctcaccttcagccaa

SEQ ID NO: 2075670 - DNA, 15 bp, Homo sapiens
tcaccttcagccaat

SEQ ID NO: 2075671 - DNA, 15 bp, Homo sapiens
caccttcagccaatt

SEQ ID NO: 2075672 - DNA, 15 bp, Homo sapiens
accttcagccaattc

SEQ ID NO: 2075673 - DNA, 15 bp, Homo sapiens
ccttcagccaattct

SEQ ID NO: 2075674 - DNA, 15 bp, Homo sapiens
cttcagccaattctc

SEQ ID NO: 2075675 - DNA, 15 bp, Homo sapiens
ttcagccaattctcc

SEQ ID NO: 2075676 - DNA, 15 bp, Homo sapiens
tcagccaattctcca

SEQ ID NO: 2075677 - DNA, 15 bp, Homo sapiens
cagccaattctccaa

SEQ ID NO: 2075678 - DNA, 15 bp, Homo sapiens
agccaattctccaaa

SEQ ID NO: 2075679 - DNA, 15 bp, Homo sapiens
gccaattctccaaag

SEQ ID NO: 2075680 - DNA, 15 bp, Homo sapiens
ccaattctccaaagc

SEQ ID NO: 2075681 - DNA, 15 bp, Homo sapiens
caattctccaaagcc

SEQ ID NO: 2075682 - DNA, 15 bp, Homo sapiens
aattctccaaagcca

SEQ ID NO: 2075683 - DNA, 15 bp, Homo sapiens
attctccaaagccag

SEQ ID NO: 2075684 - DNA, 15 bp, Homo sapiens
ttctccaaagccaga

SEQ ID NO: 2075685 - DNA, 15 bp, Homo sapiens
tctccaaagccagag

SEQ ID NO: 2075686 - DNA, 15 bp, Homo sapiens
ctccaaagccagagt

SEQ ID NO: 2075687 - DNA, 15 bp, Homo sapiens
tccaaagccagagta

SEQ ID NO: 2075688 - DNA, 15 bp, Homo sapiens
ccaaagccagagtag

SEQ ID NO: 2075689 - DNA, 15 bp, Homo sapiens
caaagccagagtaga

SEQ ID NO: 2075690 - DNA, 15 bp, Homo sapiens
aaagccagagtagac

SEQ ID NO: 2075691 - DNA, 15 bp, Homo sapiens
aagccagagtagact

SEQ ID NO: 2075692 - DNA, 15 bp, Homo sapiens
agccagagtagactt

SEQ ID NO: 2075693 - DNA, 15 bp, Homo sapiens
gccagagtagacttt

SEQ ID NO: 2075694 - DNA, 15 bp, Homo sapiens
ccagagtagactttc

SEQ ID NO: 2075695 - DNA, 15 bp, Homo sapiens
cagagtagactttcg

SEQ ID NO: 2075696 - DNA, 15 bp, Homo sapiens
agagtagactttcgt

SEQ ID NO: 2075697 - DNA, 15 bp, Homo sapiens
gagtagactttcgtt

SEQ ID NO: 2075698 - DNA, 15 bp, Homo sapiens
agtagactttcgttt

SEQ ID NO: 2075699 - DNA, 15 bp, Homo sapiens
gtagactttcgttta

SEQ ID NO: 2075700 - DNA, 15 bp, Homo sapiens
tagactttcgtttat

SEQ ID NO: 2075701 - DNA, 15 bp, Homo sapiens
agactttcgtttatt

SEQ ID NO: 2075702 - DNA, 15 bp, Homo sapiens
gactttcgtttattt

SEQ ID NO: 2075703 - DNA, 15 bp, Homo sapiens
actttcgtttatttt

SEQ ID NO: 2075704 - DNA, 15 bp, Homo sapiens
ctttcgtttattttt

SEQ ID NO: 2075705 - DNA, 15 bp, Homo sapiens
tttcgtttatttttt

SEQ ID NO: 2075706 - DNA, 15 bp, Homo sapiens
ttcgtttatttttta

SEQ ID NO: 2075707 - DNA, 15 bp, Homo sapiens
tcgtttattttttaa

SEQ ID NO: 2075708 - DNA, 15 bp, Homo sapiens
cgtttattttttaaa

SEQ ID NO: 2075709 - DNA, 15 bp, Homo sapiens
tattttttaaattta

SEQ ID NO: 2075710 - DNA, 15 bp, Homo sapiens
attttttaaatttat

SEQ ID NO: 2075711 - DNA, 15 bp, Homo sapiens
tttaaatttatttta

SEQ ID NO: 2075712 - DNA, 15 bp, Homo sapiens
ttaaatttattttat

SEQ ID NO: 2075713 - DNA, 15 bp, Homo sapiens
taaatttattttatt

SEQ ID NO: 2075714 - DNA, 15 bp, Homo sapiens
aaatttattttattt

SEQ ID NO: 2075715 - DNA, 15 bp, Homo sapiens
aatttattttatttt

SEQ ID NO: 2075716 - DNA, 15 bp, Homo sapiens
tttattttattttta

SEQ ID NO: 2075717 - DNA, 15 bp, Homo sapiens
ttattttatttttat

SEQ ID NO: 2075718 - DNA, 15 bp, Homo sapiens
tattttatttttatt

SEQ ID NO: 2075719 - DNA, 15 bp, Homo sapiens
attttatttttattt

SEQ ID NO: 2075720 - DNA, 15 bp, Homo sapiens
tttatttttatttta

SEQ ID NO: 2075721 - DNA, 15 bp, Homo sapiens
ttatttttattttat

SEQ ID NO: 2075722 - DNA, 15 bp, Homo sapiens
tatttttattttatt

SEQ ID NO: 2075723 - DNA, 15 bp, Homo sapiens
atttttattttattt

SEQ ID NO: 2075724 - DNA, 15 bp, Homo sapiens
tttttattttattta

SEQ ID NO: 2075725 - DNA, 15 bp, Homo sapiens
ttttattttatttat

SEQ ID NO: 2075726 - DNA, 15 bp, Homo sapiens
tttattttatttatt

SEQ ID NO: 2075727 - DNA, 15 bp, Homo sapiens
attttatttatttta

SEQ ID NO: 2075728 - DNA, 15 bp, Homo sapiens
ttttatttattttat

SEQ ID NO: 2075729 - DNA, 15 bp, Homo sapiens
tttatttattttatt

SEQ ID NO: 2075730 - DNA, 15 bp, Homo sapiens
ttatttattttattt

SEQ ID NO: 2075731 - DNA, 15 bp, Homo sapiens
tatttttattttttg

SEQ ID NO: 2075732 - DNA, 15 bp, Homo sapiens
atttttattttttgt

SEQ ID NO: 2075733 - DNA, 15 bp, Homo sapiens
ttttattttttgtaa

SEQ ID NO: 2075734 - DNA, 15 bp, Homo sapiens
tttattttttgtaaa

SEQ ID NO: 2075735 - DNA, 15 bp, Homo sapiens
ttattttttgtaaag

SEQ ID NO: 2075736 - DNA, 15 bp, Homo sapiens
tattttttgtaaaga

SEQ ID NO: 2075737 - DNA, 15 bp, Homo sapiens
attttttgtaaagac

SEQ ID NO: 2075738 - DNA, 15 bp, Homo sapiens
ttttttgtaaagaca

SEQ ID NO: 2075739 - DNA, 15 bp, Homo sapiens
tttttgtaaagacaa

SEQ ID NO: 2075740 - DNA, 15 bp, Homo sapiens
ttttgtaaagacaag

SEQ ID NO: 2075741 - DNA, 15 bp, Homo sapiens
tttgtaaagacaagg

SEQ ID NO: 2075742 - DNA, 15 bp, Homo sapiens
ttgtaaagacaaggt

SEQ ID NO: 2075743 - DNA, 15 bp, Homo sapiens
tgtaaagacaaggtc

SEQ ID NO: 2075744 - DNA, 15 bp, Homo sapiens
gtaaagacaaggtct

SEQ ID NO: 2075745 - DNA, 15 bp, Homo sapiens
taaagacaaggtctt

SEQ ID NO: 2075746 - DNA, 15 bp, Homo sapiens
aaagacaaggtcttg

SEQ ID NO: 2075747 - DNA, 15 bp, Homo sapiens
aagacaaggtcttgc

SEQ ID NO: 2075748 - DNA, 15 bp, Homo sapiens
agacaaggtcttgct

SEQ ID NO: 2075749 - DNA, 15 bp, Homo sapiens
gacaaggtcttgctt

SEQ ID NO: 2075750 - DNA, 15 bp, Homo sapiens
acaaggtcttgcttg

SEQ ID NO: 2075751 - DNA, 15 bp, Homo sapiens
caaggtcttgcttgc

SEQ ID NO: 2075752 - DNA, 15 bp, Homo sapiens
aaggtcttgcttgct

SEQ ID NO: 2075753 - DNA, 15 bp, Homo sapiens
aggtcttgcttgcta

SEQ ID NO: 2075754 - DNA, 15 bp, Homo sapiens
ggtcttgcttgctaa

SEQ ID NO: 2075755 - DNA, 15 bp, Homo sapiens
gtcttgcttgctaag

SEQ ID NO: 2075756 - DNA, 15 bp, Homo sapiens
tcttgcttgctaagt

SEQ ID NO: 2075757 - DNA, 15 bp, Homo sapiens
cttgcttgctaagtt

SEQ ID NO: 2075758 - DNA, 15 bp, Homo sapiens
ttgcttgctaagttg

SEQ ID NO: 2075759 - DNA, 15 bp, Homo sapiens
tgcttgctaagttgc

SEQ ID NO: 2075760 - DNA, 15 bp, Homo sapiens
gcttgctaagttgcc

SEQ ID NO: 2075761 - DNA, 15 bp, Homo sapiens
cttgctaagttgccc

SEQ ID NO: 2075762 - DNA, 15 bp, Homo sapiens
ttgctaagttgccca

SEQ ID NO: 2075763 - DNA, 15 bp, Homo sapiens
tgctaagttgcccag

SEQ ID NO: 2075764 - DNA, 15 bp, Homo sapiens
gctaagttgcccagt

SEQ ID NO: 2075765 - DNA, 15 bp, Homo sapiens
ctaagttgcccagtc

SEQ ID NO: 2075766 - DNA, 15 bp, Homo sapiens
taagttgcccagtct

SEQ ID NO: 2075767 - DNA, 15 bp, Homo sapiens
aagttgcccagtctg

SEQ ID NO: 2075768 - DNA, 15 bp, Homo sapiens
agttgcccagtctgg

SEQ ID NO: 2075769 - DNA, 15 bp, Homo sapiens
gttgcccagtctgga

SEQ ID NO: 2075770 - DNA, 15 bp, Homo sapiens
ttgcccagtctggac

SEQ ID NO: 2075771 - DNA, 15 bp, Homo sapiens
tgcccagtctggact

SEQ ID NO: 2075772 - DNA, 15 bp, Homo sapiens
gcccagtctggactc

SEQ ID NO: 2075773 - DNA, 15 bp, Homo sapiens
cccagtctggactca

SEQ ID NO: 2075774 - DNA, 15 bp, Homo sapiens
ccagtctggactcaa

SEQ ID NO: 2075775 - DNA, 15 bp, Homo sapiens
cagtctggactcaaa

SEQ ID NO: 2075776 - DNA, 15 bp, Homo sapiens
agtctggactcaaac

SEQ ID NO: 2075777 - DNA, 15 bp, Homo sapiens
gtctggactcaaact

SEQ ID NO: 2075778 - DNA, 15 bp, Homo sapiens
tctggactcaaactc

SEQ ID NO: 2075779 - DNA, 15 bp, Homo sapiens
ctggactcaaactct

SEQ ID NO: 2075780 - DNA, 15 bp, Homo sapiens
tggactcaaactctt

SEQ ID NO: 2075781 - DNA, 15 bp, Homo sapiens
ggactcaaactcttg

SEQ ID NO: 2075782 - DNA, 15 bp, Homo sapiens
gactcaaactcttgg

SEQ ID NO: 2075783 - DNA, 15 bp, Homo sapiens
actcaaactcttggg

SEQ ID NO: 2075784 - DNA, 15 bp, Homo sapiens
aaactcttgggctca

SEQ ID NO: 2075785 - DNA, 15 bp, Homo sapiens
caagcgatcctcccg

SEQ ID NO: 2075786 - DNA, 15 bp, Homo sapiens
aagcgatcctcccgc

SEQ ID NO: 2075787 - DNA, 15 bp, Homo sapiens
agcgatcctcccgcc

SEQ ID NO: 2075788 - DNA, 15 bp, Homo sapiens
gcgatcctcccgcct

SEQ ID NO: 2075789 - DNA, 15 bp, Homo sapiens
cgatcctcccgcctc

SEQ ID NO: 2075790 - DNA, 15 bp, Homo sapiens
agccttccaaagtgc

SEQ ID NO: 2075791 - DNA, 15 bp, Homo sapiens
gccttccaaagtgct

SEQ ID NO: 2075792 - DNA, 15 bp, Homo sapiens
ggattacaggtgcaa

SEQ ID NO: 2075793 - DNA, 15 bp, Homo sapiens
gattacaggtgcaag

SEQ ID NO: 2075794 - DNA, 15 bp, Homo sapiens
attacaggtgcaagc

SEQ ID NO: 2075795 - DNA, 15 bp, Homo sapiens
ttacaggtgcaagcc

SEQ ID NO: 2075796 - DNA, 15 bp, Homo sapiens
acaggtgcaagccat

SEQ ID NO: 2075797 - DNA, 15 bp, Homo sapiens
caggtgcaagccatc

SEQ ID NO: 2075798 - DNA, 15 bp, Homo sapiens
aggtgcaagccatca

SEQ ID NO: 2075799 - DNA, 15 bp, Homo sapiens
ggtgcaagccatcac

SEQ ID NO: 2075800 - DNA, 15 bp, Homo sapiens
gtgcaagccatcact

SEQ ID NO: 2075801 - DNA, 15 bp, Homo sapiens
tgcaagccatcactc

SEQ ID NO: 2075802 - DNA, 15 bp, Homo sapiens
gcaagccatcactcc

SEQ ID NO: 2075803 - DNA, 15 bp, Homo sapiens
caagccatcactcct

SEQ ID NO: 2075804 - DNA, 15 bp, Homo sapiens
aagccatcactcctg

SEQ ID NO: 2075805 - DNA, 15 bp, Homo sapiens
agccatcactcctgg

SEQ ID NO: 2075806 - DNA, 15 bp, Homo sapiens
gccatcactcctggc

SEQ ID NO: 2075807 - DNA, 15 bp, Homo sapiens
ccatcactcctggcc

SEQ ID NO: 2075808 - DNA, 15 bp, Homo sapiens
catcactcctggccc

SEQ ID NO: 2075809 - DNA, 15 bp, Homo sapiens
atcactcctggccca

SEQ ID NO: 2075810 - DNA, 15 bp, Homo sapiens
tcactcctggcccag

SEQ ID NO: 2075811 - DNA, 15 bp, Homo sapiens
cactcctggcccaga

SEQ ID NO: 2075812 - DNA, 15 bp, Homo sapiens
actcctggcccagag

SEQ ID NO: 2075813 - DNA, 15 bp, Homo sapiens
ctcctggcccagagt

SEQ ID NO: 2075814 - DNA, 15 bp, Homo sapiens
tcctggcccagagtg

SEQ ID NO: 2075815 - DNA, 15 bp, Homo sapiens
cctggcccagagtgg

SEQ ID NO: 2075816 - DNA, 15 bp, Homo sapiens
ctggcccagagtgga

SEQ ID NO: 2075817 - DNA, 15 bp, Homo sapiens
tggcccagagtggac

SEQ ID NO: 2075818 - DNA, 15 bp, Homo sapiens
ggcccagagtggact

SEQ ID NO: 2075819 - DNA, 15 bp, Homo sapiens
gcccagagtggactt

SEQ ID NO: 2075820 - DNA, 15 bp, Homo sapiens
cccagagtggacttc

SEQ ID NO: 2075821 - DNA, 15 bp, Homo sapiens
ccagagtggacttct

SEQ ID NO: 2075822 - DNA, 15 bp, Homo sapiens
cagagtggacttcta

SEQ ID NO: 2075823 - DNA, 15 bp, Homo sapiens
agagtggacttctaa

SEQ ID NO: 2075824 - DNA, 15 bp, Homo sapiens
gagtggacttctaaa

SEQ ID NO: 2075825 - DNA, 15 bp, Homo sapiens
agtggacttctaaag

SEQ ID NO: 2075826 - DNA, 15 bp, Homo sapiens
gtggacttctaaaga

SEQ ID NO: 2075827 - DNA, 15 bp, Homo sapiens
tggacttctaaagac

SEQ ID NO: 2075828 - DNA, 15 bp, Homo sapiens
ggacttctaaagaca

SEQ ID NO: 2075829 - DNA, 15 bp, Homo sapiens
gacttctaaagacaa

SEQ ID NO: 2075830 - DNA, 15 bp, Homo sapiens
acttctaaagacaaa

SEQ ID NO: 2075831 - DNA, 15 bp, Homo sapiens
cttctaaagacaaat

SEQ ID NO: 2075832 - DNA, 15 bp, Homo sapiens
ttctaaagacaaatc

SEQ ID NO: 2075833 - DNA, 15 bp, Homo sapiens
tctaaagacaaatca

SEQ ID NO: 2075834 - DNA, 15 bp, Homo sapiens
ctaaagacaaatcag

SEQ ID NO: 2075835 - DNA, 15 bp, Homo sapiens
taaagacaaatcaga

SEQ ID NO: 2075836 - DNA, 15 bp, Homo sapiens
aaagacaaatcagaa

SEQ ID NO: 2075837 - DNA, 15 bp, Homo sapiens
aagacaaatcagaac

SEQ ID NO: 2075838 - DNA, 15 bp, Homo sapiens
agacaaatcagaaca

SEQ ID NO: 2075839 - DNA, 15 bp, Homo sapiens
gacaaatcagaacat

SEQ ID NO: 2075840 - DNA, 15 bp, Homo sapiens
acaaatcagaacatg

SEQ ID NO: 2075841 - DNA, 15 bp, Homo sapiens
caaatcagaacatgt

SEQ ID NO: 2075842 - DNA, 15 bp, Homo sapiens
aaatcagaacatgtg

SEQ ID NO: 2075843 - DNA, 15 bp, Homo sapiens
aatcagaacatgtgg

SEQ ID NO: 2075844 - DNA, 15 bp, Homo sapiens
atcagaacatgtggc

SEQ ID NO: 2075845 - DNA, 15 bp, Homo sapiens
tcagaacatgtggct

SEQ ID NO: 2075846 - DNA, 15 bp, Homo sapiens
cagaacatgtggctc

SEQ ID NO: 2075847 - DNA, 15 bp, Homo sapiens
agaacatgtggctcc

SEQ ID NO: 2075848 - DNA, 15 bp, Homo sapiens
gaacatgtggctccc

SEQ ID NO: 2075849 - DNA, 15 bp, Homo sapiens
aacatgtggctccct

SEQ ID NO: 2075850 - DNA, 15 bp, Homo sapiens
acatgtggctccctg

SEQ ID NO: 2075851 - DNA, 15 bp, Homo sapiens
catgtggctccctgc

SEQ ID NO: 2075852 - DNA, 15 bp, Homo sapiens
atgtggctccctgct

SEQ ID NO: 2075853 - DNA, 15 bp, Homo sapiens
tgtggctccctgctt

SEQ ID NO: 2075854 - DNA, 15 bp, Homo sapiens
gtggctccctgctta

SEQ ID NO: 2075855 - DNA, 15 bp, Homo sapiens
tggctccctgcttaa

SEQ ID NO: 2075856 - DNA, 15 bp, Homo sapiens
ggctccctgcttaaa

SEQ ID NO: 2075857 - DNA, 15 bp, Homo sapiens
gctccctgcttaaag

SEQ ID NO: 2075858 - DNA, 15 bp, Homo sapiens
ctccctgcttaaagc

SEQ ID NO: 2075859 - DNA, 15 bp, Homo sapiens
tccctgcttaaagct

SEQ ID NO: 2075860 - DNA, 15 bp, Homo sapiens
ccctgcttaaagctc

SEQ ID NO: 2075861 - DNA, 15 bp, Homo sapiens
cctgcttaaagctct

SEQ ID NO: 2075862 - DNA, 15 bp, Homo sapiens
ctgcttaaagctctt

SEQ ID NO: 2075863 - DNA, 15 bp, Homo sapiens
tgcttaaagctcttc

SEQ ID NO: 2075864 - DNA, 15 bp, Homo sapiens
gcttaaagctcttca

SEQ ID NO: 2075865 - DNA, 15 bp, Homo sapiens
cttaaagctcttcac

SEQ ID NO: 2075866 - DNA, 15 bp, Homo sapiens
ttaaagctcttcact

SEQ ID NO: 2075867 - DNA, 15 bp, Homo sapiens
taaagctcttcactg

SEQ ID NO: 2075868 - DNA, 15 bp, Homo sapiens
aaagctcttcactgc

SEQ ID NO: 2075869 - DNA, 15 bp, Homo sapiens
aagctcttcactgcc

SEQ ID NO: 2075870 - DNA, 15 bp, Homo sapiens
agctcttcactgcct

SEQ ID NO: 2075871 - DNA, 15 bp, Homo sapiens
gctcttcactgcctt

SEQ ID NO: 2075872 - DNA, 15 bp, Homo sapiens
ctcttcactgccttc

SEQ ID NO: 2075873 - DNA, 15 bp, Homo sapiens
tcttcactgccttcc

SEQ ID NO: 2075874 - DNA, 15 bp, Homo sapiens
cttcactgccttccc

SEQ ID NO: 2075875 - DNA, 15 bp, Homo sapiens
ttcactgccttccca

SEQ ID NO: 2075876 - DNA, 15 bp, Homo sapiens
tcactgccttcccat

SEQ ID NO: 2075877 - DNA, 15 bp, Homo sapiens
cactgccttcccatg

SEQ ID NO: 2075878 - DNA, 15 bp, Homo sapiens
actgccttcccatgc

SEQ ID NO: 2075879 - DNA, 15 bp, Homo sapiens
ctgccttcccatgca

SEQ ID NO: 2075880 - DNA, 15 bp, Homo sapiens
tgccttcccatgcaa

SEQ ID NO: 2075881 - DNA, 15 bp, Homo sapiens
gccttcccatgcaat

SEQ ID NO: 2075882 - DNA, 15 bp, Homo sapiens
ccttcccatgcaatc

SEQ ID NO: 2075883 - DNA, 15 bp, Homo sapiens
cttcccatgcaatca

SEQ ID NO: 2075884 - DNA, 15 bp, Homo sapiens
ttcccatgcaatcag

SEQ ID NO: 2075885 - DNA, 15 bp, Homo sapiens
tcccatgcaatcaga

SEQ ID NO: 2075886 - DNA, 15 bp, Homo sapiens
cccatgcaatcagaa

SEQ ID NO: 2075887 - DNA, 15 bp, Homo sapiens
ccatgcaatcagaat

SEQ ID NO: 2075888 - DNA, 15 bp, Homo sapiens
catgcaatcagaata

SEQ ID NO: 2075889 - DNA, 15 bp, Homo sapiens
atgcaatcagaatat

SEQ ID NO: 2075890 - DNA, 15 bp, Homo sapiens
tgcaatcagaatata

SEQ ID NO: 2075891 - DNA, 15 bp, Homo sapiens
gcaatcagaatataa

SEQ ID NO: 2075892 - DNA, 15 bp, Homo sapiens
caatcagaatataat

SEQ ID NO: 2075893 - DNA, 15 bp, Homo sapiens
aatcagaatataatc

SEQ ID NO: 2075894 - DNA, 15 bp, Homo sapiens
atcagaatataatct

SEQ ID NO: 2075895 - DNA, 15 bp, Homo sapiens
tcagaatataatcta

SEQ ID NO: 2075896 - DNA, 15 bp, Homo sapiens
cagaatataatctac

SEQ ID NO: 2075897 - DNA, 15 bp, Homo sapiens
agaatataatctaca

SEQ ID NO: 2075898 - DNA, 15 bp, Homo sapiens
gaatataatctacag

SEQ ID NO: 2075899 - DNA, 15 bp, Homo sapiens
aatataatctacagt

SEQ ID NO: 2075900 - DNA, 15 bp, Homo sapiens
atataatctacagtt

SEQ ID NO: 2075901 - DNA, 15 bp, Homo sapiens
tataatctacagttg

SEQ ID NO: 2075902 - DNA, 15 bp, Homo sapiens
ataatctacagttgg

SEQ ID NO: 2075903 - DNA, 15 bp, Homo sapiens
taatctacagttggc

SEQ ID NO: 2075904 - DNA, 15 bp, Homo sapiens
aatctacagttggcc

SEQ ID NO: 2075905 - DNA, 15 bp, Homo sapiens
atctacagttggccg

SEQ ID NO: 2075906 - DNA, 15 bp, Homo sapiens
tctacagttggccgg

SEQ ID NO: 2075907 - DNA, 15 bp, Homo sapiens
ctacagttggccggg

SEQ ID NO: 2075908 - DNA, 15 bp, Homo sapiens
tacagttggccgggc

SEQ ID NO: 2075909 - DNA, 15 bp, Homo sapiens
acagttggccgggcg

SEQ ID NO: 2075910 - DNA, 15 bp, Homo sapiens
cagttggccgggcgc

SEQ ID NO: 2075911 - DNA, 15 bp, Homo sapiens
agttggccgggcgca

SEQ ID NO: 2075912 - DNA, 15 bp, Homo sapiens
gttggccgggcgcag

SEQ ID NO: 2075913 - DNA, 15 bp, Homo sapiens
ttggccgggcgcagt

SEQ ID NO: 2075914 - DNA, 15 bp, Homo sapiens
tggccgggcgcagtg

SEQ ID NO: 2075915 - DNA, 15 bp, Homo sapiens
cacgcctgtaatcct

SEQ ID NO: 2075916 - DNA, 15 bp, Homo sapiens
acgcctgtaatccta

SEQ ID NO: 2075917 - DNA, 15 bp, Homo sapiens
cgcctgtaatcctaa

SEQ ID NO: 2075918 - DNA, 15 bp, Homo sapiens
gcctgtaatcctaac

SEQ ID NO: 2075919 - DNA, 15 bp, Homo sapiens
ctgtaatcctaacag

SEQ ID NO: 2075920 - DNA, 15 bp, Homo sapiens
tgtaatcctaacagt

SEQ ID NO: 2075921 - DNA, 15 bp, Homo sapiens
gtaatcctaacagtt

SEQ ID NO: 2075922 - DNA, 15 bp, Homo sapiens
taatcctaacagttt

SEQ ID NO: 2075923 - DNA, 15 bp, Homo sapiens
aatcctaacagtttg

SEQ ID NO: 2075924 - DNA, 15 bp, Homo sapiens
atcctaacagtttgg

SEQ ID NO: 2075925 - DNA, 15 bp, Homo sapiens
tcctaacagtttggg

SEQ ID NO: 2075926 - DNA, 15 bp, Homo sapiens
cctaacagtttggga

SEQ ID NO: 2075927 - DNA, 15 bp, Homo sapiens
ctaacagtttgggag

SEQ ID NO: 2075928 - DNA, 15 bp, Homo sapiens
taacagtttgggagc

SEQ ID NO: 2075929 - DNA, 15 bp, Homo sapiens
aacagtttgggagcc

SEQ ID NO: 2075930 - DNA, 15 bp, Homo sapiens
acagtttgggagccc

SEQ ID NO: 2075931 - DNA, 15 bp, Homo sapiens
cagtttgggagcccg

SEQ ID NO: 2075932 - DNA, 15 bp, Homo sapiens
agtttgggagcccgg

SEQ ID NO: 2075933 - DNA, 15 bp, Homo sapiens
gtttgggagcccgga

SEQ ID NO: 2075934 - DNA, 15 bp, Homo sapiens
tttgggagcccggag

SEQ ID NO: 2075935 - DNA, 15 bp, Homo sapiens
ttgggagcccggagc

SEQ ID NO: 2075936 - DNA, 15 bp, Homo sapiens
tgggagcccggagcg

SEQ ID NO: 2075937 - DNA, 15 bp, Homo sapiens
gggagcccggagcgg

SEQ ID NO: 2075938 - DNA, 15 bp, Homo sapiens
ggagcccggagcggg

SEQ ID NO: 2075939 - DNA, 15 bp, Homo sapiens
gagcccggagcgggt

SEQ ID NO: 2075940 - DNA, 15 bp, Homo sapiens
agcccggagcgggtg

SEQ ID NO: 2075941 - DNA, 15 bp, Homo sapiens
gcccggagcgggtgg

SEQ ID NO: 2075942 - DNA, 15 bp, Homo sapiens
cccggagcgggtgga

SEQ ID NO: 2075943 - DNA, 15 bp, Homo sapiens
ccggagcgggtggat

SEQ ID NO: 2075944 - DNA, 15 bp, Homo sapiens
cggagcgggtggatc

SEQ ID NO: 2075945 - DNA, 15 bp, Homo sapiens
ggagcgggtggatca

SEQ ID NO: 2075946 - DNA, 15 bp, Homo sapiens
gagcgggtggatcat

SEQ ID NO: 2075947 - DNA, 15 bp, Homo sapiens
agcgggtggatcatt

SEQ ID NO: 2075948 - DNA, 15 bp, Homo sapiens
gggcgtggtggcacg

SEQ ID NO: 2075949 - DNA, 15 bp, Homo sapiens
ggcgtggtggcacgt

SEQ ID NO: 2075950 - DNA, 15 bp, Homo sapiens
gcgtggtggcacgtg

SEQ ID NO: 2075951 - DNA, 15 bp, Homo sapiens
cgtggtggcacgtgc

SEQ ID NO: 2075952 - DNA, 15 bp, Homo sapiens
gtggtggcacgtgcc

SEQ ID NO: 2075953 - DNA, 15 bp, Homo sapiens
tggtggcacgtgcct

SEQ ID NO: 2075954 - DNA, 15 bp, Homo sapiens
ggtggcacgtgcctg

SEQ ID NO: 2075955 - DNA, 15 bp, Homo sapiens
gtggcacgtgcctgt

SEQ ID NO: 2075956 - DNA, 15 bp, Homo sapiens
tggcacgtgcctgta

SEQ ID NO: 2075957 - DNA, 15 bp, Homo sapiens
ggcacgtgcctgtaa

SEQ ID NO: 2075958 - DNA, 15 bp, Homo sapiens
gcacgtgcctgtaat

SEQ ID NO: 2075959 - DNA, 15 bp, Homo sapiens
cacgtgcctgtaatc

SEQ ID NO: 2075960 - DNA, 15 bp, Homo sapiens
acgtgcctgtaatcc

SEQ ID NO: 2075961 - DNA, 15 bp, Homo sapiens
cgtgcctgtaatccc

SEQ ID NO: 2075962 - DNA, 15 bp, Homo sapiens
gctacctgggaggca

SEQ ID NO: 2075963 - DNA, 15 bp, Homo sapiens
ctacctgggaggcag

SEQ ID NO: 2075964 - DNA, 15 bp, Homo sapiens
tacctgggaggcaga

SEQ ID NO: 2075965 - DNA, 15 bp, Homo sapiens
ggcagaggttgcaga

SEQ ID NO: 2075966 - DNA, 15 bp, Homo sapiens
gcagaggttgcagag

SEQ ID NO: 2075967 - DNA, 15 bp, Homo sapiens
cagaggttgcagaga

SEQ ID NO: 2075968 - DNA, 15 bp, Homo sapiens
agaggttgcagagag

SEQ ID NO: 2075969 - DNA, 15 bp, Homo sapiens
gaggttgcagagagc

SEQ ID NO: 2075970 - DNA, 15 bp, Homo sapiens
aggttgcagagagcc

SEQ ID NO: 2075971 - DNA, 15 bp, Homo sapiens
ggttgcagagagccg

SEQ ID NO: 2075972 - DNA, 15 bp, Homo sapiens
gttgcagagagccga

SEQ ID NO: 2075973 - DNA, 15 bp, Homo sapiens
ttgcagagagccgag

SEQ ID NO: 2075974 - DNA, 15 bp, Homo sapiens
tgcagagagccgaga

SEQ ID NO: 2075975 - DNA, 15 bp, Homo sapiens
gcagagagccgagat

SEQ ID NO: 2075976 - DNA, 15 bp, Homo sapiens
cagagagccgagatc

SEQ ID NO: 2075977 - DNA, 15 bp, Homo sapiens
agagagccgagatcg

SEQ ID NO: 2075978 - DNA, 15 bp, Homo sapiens
gagagccgagatcgc

SEQ ID NO: 2075979 - DNA, 15 bp, Homo sapiens
agagccgagatcgcg

SEQ ID NO: 2075980 - DNA, 15 bp, Homo sapiens
gagatcgcgccactg

SEQ ID NO: 2075981 - DNA, 15 bp, Homo sapiens
agatcgcgccactgc

SEQ ID NO: 2075982 - DNA, 15 bp, Homo sapiens
gatcgcgccactgca

SEQ ID NO: 2075983 - DNA, 15 bp, Homo sapiens
atcgcgccactgcac

SEQ ID NO: 2075984 - DNA, 15 bp, Homo sapiens
tcgcgccactgcact

SEQ ID NO: 2075985 - DNA, 15 bp, Homo sapiens
cgcgccactgcactc

SEQ ID NO: 2075986 - DNA, 15 bp, Homo sapiens
ccagcctgggcgact

SEQ ID NO: 2075987 - DNA, 15 bp, Homo sapiens
cagcctgggcgactg

SEQ ID NO: 2075988 - DNA, 15 bp, Homo sapiens
agcctgggcgactga

SEQ ID NO: 2075989 - DNA, 15 bp, Homo sapiens
gcctgggcgactgag

SEQ ID NO: 2075990 - DNA, 15 bp, Homo sapiens
cctgggcgactgagc

SEQ ID NO: 2075991 - DNA, 15 bp, Homo sapiens
ctgggcgactgagca

SEQ ID NO: 2075992 - DNA, 15 bp, Homo sapiens
tgggcgactgagcag

SEQ ID NO: 2075993 - DNA, 15 bp, Homo sapiens
gggcgactgagcaga

SEQ ID NO: 2075994 - DNA, 15 bp, Homo sapiens
ggcgactgagcagaa

SEQ ID NO: 2075995 - DNA, 15 bp, Homo sapiens
gcgactgagcagaac

SEQ ID NO: 2075996 - DNA, 15 bp, Homo sapiens
cgactgagcagaact

SEQ ID NO: 2075997 - DNA, 15 bp, Homo sapiens
gactgagcagaactg

SEQ ID NO: 2075998 - DNA, 15 bp, Homo sapiens
actgagcagaactgt

SEQ ID NO: 2075999 - DNA, 15 bp, Homo sapiens
ctgagcagaactgtt

SEQ ID NO: 2076000 - DNA, 15 bp, Homo sapiens
tgagcagaactgttt

SEQ ID NO: 2076001 - DNA, 15 bp, Homo sapiens
gagcagaactgtttc

SEQ ID NO: 2076002 - DNA, 15 bp, Homo sapiens
agcagaactgtttca

SEQ ID NO: 2076003 - DNA, 15 bp, Homo sapiens
gcagaactgtttcaa

SEQ ID NO: 2076004 - DNA, 15 bp, Homo sapiens
cagaactgtttcaaa

SEQ ID NO: 2076005 - DNA, 15 bp, Homo sapiens
agaactgtttcaaaa

SEQ ID NO: 2076006 - DNA, 15 bp, Homo sapiens
gaactgtttcaaaat

SEQ ID NO: 2076007 - DNA, 15 bp, Homo sapiens
aactgtttcaaaata

SEQ ID NO: 2076008 - DNA, 15 bp, Homo sapiens
actgtttcaaaataa

SEQ ID NO: 2076009 - DNA, 15 bp, Homo sapiens
ctgtttcaaaataat

SEQ ID NO: 2076010 - DNA, 15 bp, Homo sapiens
tgtttcaaaataata

SEQ ID NO: 2076011 - DNA, 15 bp, Homo sapiens
gtttcaaaataataa

SEQ ID NO: 2076012 - DNA, 15 bp, Homo sapiens
tttcaaaataataat

SEQ ID NO: 2076013 - DNA, 15 bp, Homo sapiens
ttcaaaataataata

SEQ ID NO: 2076014 - DNA, 15 bp, Homo sapiens
tcaaaataataataa

SEQ ID NO: 2076015 - DNA, 15 bp, Homo sapiens
caaaataataataat

SEQ ID NO: 2076016 - DNA, 15 bp, Homo sapiens
aaaataataataata

SEQ ID NO: 2076017 - DNA, 15 bp, Homo sapiens
ataataataataaca

SEQ ID NO: 2076018 - DNA, 15 bp, Homo sapiens
taataataataacaa

SEQ ID NO: 2076019 - DNA, 15 bp, Homo sapiens
aataataataacaac

SEQ ID NO: 2076020 - DNA, 15 bp, Homo sapiens
ataataataacaaca

SEQ ID NO: 2076021 - DNA, 15 bp, Homo sapiens
taacaacaacaacaa

SEQ ID NO: 2076022 - DNA, 15 bp, Homo sapiens
aacaacaacaacaac

SEQ ID NO: 2076023 - DNA, 15 bp, Homo sapiens
acaacaacaacaaca

SEQ ID NO: 2076024 - DNA, 15 bp, Homo sapiens
caacaacaacaacaa

SEQ ID NO: 2076025 - DNA, 15 bp, Homo sapiens
acaacaacaacaacg

SEQ ID NO: 2076026 - DNA, 15 bp, Homo sapiens
caacaacaacaacga

SEQ ID NO: 2076027 - DNA, 15 bp, Homo sapiens
aacaacaacaacgat

SEQ ID NO: 2076028 - DNA, 15 bp, Homo sapiens
acaacaacaacgata

SEQ ID NO: 2076029 - DNA, 15 bp, Homo sapiens
caacaacaacgataa

SEQ ID NO: 2076030 - DNA, 15 bp, Homo sapiens
aacaacaacgataat

SEQ ID NO: 2076031 - DNA, 15 bp, Homo sapiens
acaacaacgataata

SEQ ID NO: 2076032 - DNA, 15 bp, Homo sapiens
caacaacgataataa

SEQ ID NO: 2076033 - DNA, 15 bp, Homo sapiens
aacaacgataataat

SEQ ID NO: 2076034 - DNA, 15 bp, Homo sapiens
acaacgataataata

SEQ ID NO: 2076035 - DNA, 15 bp, Homo sapiens
caacgataataataa

SEQ ID NO: 2076036 - DNA, 15 bp, Homo sapiens
aacgataataataaa

SEQ ID NO: 2076037 - DNA, 15 bp, Homo sapiens
acgataataataaat

SEQ ID NO: 2076038 - DNA, 15 bp, Homo sapiens
cgataataataaatc

SEQ ID NO: 2076039 - DNA, 15 bp, Homo sapiens
gataataataaatct

SEQ ID NO: 2076040 - DNA, 15 bp, Homo sapiens
ataataataaatcta

SEQ ID NO: 2076041 - DNA, 15 bp, Homo sapiens
taataataaatctac

SEQ ID NO: 2076042 - DNA, 15 bp, Homo sapiens
aataataaatctaca

SEQ ID NO: 2076043 - DNA, 15 bp, Homo sapiens
ataataaatctacac

SEQ ID NO: 2076044 - DNA, 15 bp, Homo sapiens
taataaatctacact

SEQ ID NO: 2076045 - DNA, 15 bp, Homo sapiens
aataaatctacactc

SEQ ID NO: 2076046 - DNA, 15 bp, Homo sapiens
ataaatctacactcc

SEQ ID NO: 2076047 - DNA, 15 bp, Homo sapiens
taaatctacactcct

SEQ ID NO: 2076048 - DNA, 15 bp, Homo sapiens
aaatctacactcctt

SEQ ID NO: 2076049 - DNA, 15 bp, Homo sapiens
aatctacactccttg

SEQ ID NO: 2076050 - DNA, 15 bp, Homo sapiens
atctacactccttga

SEQ ID NO: 2076051 - DNA, 15 bp, Homo sapiens
tctacactccttgac

SEQ ID NO: 2076052 - DNA, 15 bp, Homo sapiens
ctacactccttgaca

SEQ ID NO: 2076053 - DNA, 15 bp, Homo sapiens
tacactccttgacaa

SEQ ID NO: 2076054 - DNA, 15 bp, Homo sapiens
acactccttgacaag

SEQ ID NO: 2076055 - DNA, 15 bp, Homo sapiens
cactccttgacaagg

SEQ ID NO: 2076056 - DNA, 15 bp, Homo sapiens
actccttgacaaggc

SEQ ID NO: 2076057 - DNA, 15 bp, Homo sapiens
ctccttgacaaggca

SEQ ID NO: 2076058 - DNA, 15 bp, Homo sapiens
tccttgacaaggcag

SEQ ID NO: 2076059 - DNA, 15 bp, Homo sapiens
ccttgacaaggcagg

SEQ ID NO: 2076060 - DNA, 15 bp, Homo sapiens
cttgacaaggcaggg

SEQ ID NO: 2076061 - DNA, 15 bp, Homo sapiens
ttgacaaggcagggc

SEQ ID NO: 2076062 - DNA, 15 bp, Homo sapiens
tgacaaggcagggcc

SEQ ID NO: 2076063 - DNA, 15 bp, Homo sapiens
gacaaggcagggcct

SEQ ID NO: 2076064 - DNA, 15 bp, Homo sapiens
acaaggcagggccta

SEQ ID NO: 2076065 - DNA, 15 bp, Homo sapiens
caaggcagggcctag

SEQ ID NO: 2076066 - DNA, 15 bp, Homo sapiens
aaggcagggcctagc

SEQ ID NO: 2076067 - DNA, 15 bp, Homo sapiens
aggcagggcctagca

SEQ ID NO: 2076068 - DNA, 15 bp, Homo sapiens
ggcagggcctagcag

SEQ ID NO: 2076069 - DNA, 15 bp, Homo sapiens
gcagggcctagcagg

SEQ ID NO: 2076070 - DNA, 15 bp, Homo sapiens
cagggcctagcaggc

SEQ ID NO: 2076071 - DNA, 15 bp, Homo sapiens
agggcctagcaggcc

SEQ ID NO: 2076072 - DNA, 15 bp, Homo sapiens
gggcctagcaggccc

SEQ ID NO: 2076073 - DNA, 15 bp, Homo sapiens
ggcctagcaggccca

SEQ ID NO: 2076074 - DNA, 15 bp, Homo sapiens
gcctagcaggcccag

SEQ ID NO: 2076075 - DNA, 15 bp, Homo sapiens
cctagcaggcccaga

SEQ ID NO: 2076076 - DNA, 15 bp, Homo sapiens
ctagcaggcccagag

SEQ ID NO: 2076077 - DNA, 15 bp, Homo sapiens
tagcaggcccagagg

SEQ ID NO: 2076078 - DNA, 15 bp, Homo sapiens
agcaggcccagagga

SEQ ID NO: 2076079 - DNA, 15 bp, Homo sapiens
gcaggcccagaggat

SEQ ID NO: 2076080 - DNA, 15 bp, Homo sapiens
caggcccagaggatc

SEQ ID NO: 2076081 - DNA, 15 bp, Homo sapiens
aggcccagaggatct

SEQ ID NO: 2076082 - DNA, 15 bp, Homo sapiens
ggcccagaggatctg

SEQ ID NO: 2076083 - DNA, 15 bp, Homo sapiens
gcccagaggatctgg

SEQ ID NO: 2076084 - DNA, 15 bp, Homo sapiens
cccagaggatctggc

SEQ ID NO: 2076085 - DNA, 15 bp, Homo sapiens
ccagaggatctggcc

SEQ ID NO: 2076086 - DNA, 15 bp, Homo sapiens
cagaggatctggccc

SEQ ID NO: 2076087 - DNA, 15 bp, Homo sapiens
agaggatctggcccc

SEQ ID NO: 2076088 - DNA, 15 bp, Homo sapiens
gaggatctggcccct

SEQ ID NO: 2076089 - DNA, 15 bp, Homo sapiens
aggatctggcccctg

SEQ ID NO: 2076090 - DNA, 15 bp, Homo sapiens
ggatctggcccctgc

SEQ ID NO: 2076091 - DNA, 15 bp, Homo sapiens
gatctggcccctgcc

SEQ ID NO: 2076092 - DNA, 15 bp, Homo sapiens
atctggcccctgccc

SEQ ID NO: 2076093 - DNA, 15 bp, Homo sapiens
tctggcccctgccct

SEQ ID NO: 2076094 - DNA, 15 bp, Homo sapiens
ctggcccctgccctc

SEQ ID NO: 2076095 - DNA, 15 bp, Homo sapiens
tggcccctgccctca

SEQ ID NO: 2076096 - DNA, 15 bp, Homo sapiens
ggcccctgccctcag

SEQ ID NO: 2076097 - DNA, 15 bp, Homo sapiens
gcccctgccctcagg

SEQ ID NO: 2076098 - DNA, 15 bp, Homo sapiens
cccctgccctcaggg

SEQ ID NO: 2076099 - DNA, 15 bp, Homo sapiens
ccctgccctcaggga

SEQ ID NO: 2076100 - DNA, 15 bp, Homo sapiens
cctgccctcagggac

SEQ ID NO: 2076101 - DNA, 15 bp, Homo sapiens
ctgccctcagggaca

SEQ ID NO: 2076102 - DNA, 15 bp, Homo sapiens
tgccctcagggacag

SEQ ID NO: 2076103 - DNA, 15 bp, Homo sapiens
gccctcagggacagc

SEQ ID NO: 2076104 - DNA, 15 bp, Homo sapiens
ccctcagggacagcc

SEQ ID NO: 2076105 - DNA, 15 bp, Homo sapiens
cctcagggacagccc

SEQ ID NO: 2076106 - DNA, 15 bp, Homo sapiens
ctcagggacagccct

SEQ ID NO: 2076107 - DNA, 15 bp, Homo sapiens
tcagggacagcccta

SEQ ID NO: 2076108 - DNA, 15 bp, Homo sapiens
cagggacagccctaa

SEQ ID NO: 2076109 - DNA, 15 bp, Homo sapiens
agggacagccctaac

SEQ ID NO: 2076110 - DNA, 15 bp, Homo sapiens
gggacagccctaaca

SEQ ID NO: 2076111 - DNA, 15 bp, Homo sapiens
ggacagccctaacac

SEQ ID NO: 2076112 - DNA, 15 bp, Homo sapiens
gacagccctaacact

SEQ ID NO: 2076113 - DNA, 15 bp, Homo sapiens
acagccctaacactc

SEQ ID NO: 2076114 - DNA, 15 bp, Homo sapiens
cagccctaacactct

SEQ ID NO: 2076115 - DNA, 15 bp, Homo sapiens
agccctaacactctt

SEQ ID NO: 2076116 - DNA, 15 bp, Homo sapiens
gccctaacactcttc

SEQ ID NO: 2076117 - DNA, 15 bp, Homo sapiens
ccctaacactcttct

SEQ ID NO: 2076118 - DNA, 15 bp, Homo sapiens
cctaacactcttctc

SEQ ID NO: 2076119 - DNA, 15 bp, Homo sapiens
ctaacactcttctct

SEQ ID NO: 2076120 - DNA, 15 bp, Homo sapiens
taacactcttctctc

SEQ ID NO: 2076121 - DNA, 15 bp, Homo sapiens
aacactcttctctct

SEQ ID NO: 2076122 - DNA, 15 bp, Homo sapiens
acactcttctctctc

SEQ ID NO: 2076123 - DNA, 15 bp, Homo sapiens
cactcttctctctcc

SEQ ID NO: 2076124 - DNA, 15 bp, Homo sapiens
actcttctctctcct

SEQ ID NO: 2076125 - DNA, 15 bp, Homo sapiens
ctcttctctctcctg

SEQ ID NO: 2076126 - DNA, 15 bp, Homo sapiens
tcttctctctcctgg

SEQ ID NO: 2076127 - DNA, 15 bp, Homo sapiens
cttctctctcctggc

SEQ ID NO: 2076128 - DNA, 15 bp, Homo sapiens
ttctctctcctggcc

SEQ ID NO: 2076129 - DNA, 15 bp, Homo sapiens
tctctctcctggccc

SEQ ID NO: 2076130 - DNA, 15 bp, Homo sapiens
ctctctcctggcccc

SEQ ID NO: 2076131 - DNA, 15 bp, Homo sapiens
tctctcctggcccca

SEQ ID NO: 2076132 - DNA, 15 bp, Homo sapiens
ctctcctggccccag

SEQ ID NO: 2076133 - DNA, 15 bp, Homo sapiens
tctcctggccccagc

SEQ ID NO: 2076134 - DNA, 15 bp, Homo sapiens
ctcctggccccagcc

SEQ ID NO: 2076135 - DNA, 15 bp, Homo sapiens
tcctggccccagccc

SEQ ID NO: 2076136 - DNA, 15 bp, Homo sapiens
cctggccccagcccc

SEQ ID NO: 2076137 - DNA, 15 bp, Homo sapiens
ctggccccagccccg

SEQ ID NO: 2076138 - DNA, 15 bp, Homo sapiens
tggccccagccccgc

SEQ ID NO: 2076139 - DNA, 15 bp, Homo sapiens
ggccccagccccgcc

SEQ ID NO: 2076140 - DNA, 15 bp, Homo sapiens
gccccagccccgcct

SEQ ID NO: 2076141 - DNA, 15 bp, Homo sapiens
ccccagccccgcctc

SEQ ID NO: 2076142 - DNA, 15 bp, Homo sapiens
cccagccccgcctcc

SEQ ID NO: 2076143 - DNA, 15 bp, Homo sapiens
ccagccccgcctcct

SEQ ID NO: 2076144 - DNA, 15 bp, Homo sapiens
cagccccgcctcctt

SEQ ID NO: 2076145 - DNA, 15 bp, Homo sapiens
agccccgcctccttg

SEQ ID NO: 2076146 - DNA, 15 bp, Homo sapiens
gccccgcctccttgc

SEQ ID NO: 2076147 - DNA, 15 bp, Homo sapiens
ccccgcctccttgca

SEQ ID NO: 2076148 - DNA, 15 bp, Homo sapiens
cccgcctccttgcag

SEQ ID NO: 2076149 - DNA, 15 bp, Homo sapiens
ccgcctccttgcagt

SEQ ID NO: 2076150 - DNA, 15 bp, Homo sapiens
cgcctccttgcagtt

SEQ ID NO: 2076151 - DNA, 15 bp, Homo sapiens
gcctccttgcagttc

SEQ ID NO: 2076152 - DNA, 15 bp, Homo sapiens
cctccttgcagttcc

SEQ ID NO: 2076153 - DNA, 15 bp, Homo sapiens
ctccttgcagttcct

SEQ ID NO: 2076154 - DNA, 15 bp, Homo sapiens
tccttgcagttcctc

SEQ ID NO: 2076155 - DNA, 15 bp, Homo sapiens
ccttgcagttcctcg

SEQ ID NO: 2076156 - DNA, 15 bp, Homo sapiens
cttgcagttcctcgg

SEQ ID NO: 2076157 - DNA, 15 bp, Homo sapiens
ttgcagttcctcggg

SEQ ID NO: 2076158 - DNA, 15 bp, Homo sapiens
tgcagttcctcgggc

SEQ ID NO: 2076159 - DNA, 15 bp, Homo sapiens
gcagttcctcgggct

SEQ ID NO: 2076160 - DNA, 15 bp, Homo sapiens
cagttcctcgggctc

SEQ ID NO: 2076161 - DNA, 15 bp, Homo sapiens
agttcctcgggctcc

SEQ ID NO: 2076162 - DNA, 15 bp, Homo sapiens
gttcctcgggctcct

SEQ ID NO: 2076163 - DNA, 15 bp, Homo sapiens
ttcctcgggctcctc

SEQ ID NO: 2076164 - DNA, 15 bp, Homo sapiens
tcctcgggctcctcc

SEQ ID NO: 2076165 - DNA, 15 bp, Homo sapiens
cctcgggctcctccc

SEQ ID NO: 2076166 - DNA, 15 bp, Homo sapiens
ctcgggctcctccca

SEQ ID NO: 2076167 - DNA, 15 bp, Homo sapiens
tcgggctcctcccaa

SEQ ID NO: 2076168 - DNA, 15 bp, Homo sapiens
cgggctcctcccaat

SEQ ID NO: 2076169 - DNA, 15 bp, Homo sapiens
gggctcctcccaatt

SEQ ID NO: 2076170 - DNA, 15 bp, Homo sapiens
ggctcctcccaattt

SEQ ID NO: 2076171 - DNA, 15 bp, Homo sapiens
gctcctcccaatttt

SEQ ID NO: 2076172 - DNA, 15 bp, Homo sapiens
ctcctcccaattttg

SEQ ID NO: 2076173 - DNA, 15 bp, Homo sapiens
tcctcccaattttgg

SEQ ID NO: 2076174 - DNA, 15 bp, Homo sapiens
cctcccaattttggc

SEQ ID NO: 2076175 - DNA, 15 bp, Homo sapiens
ctcccaattttggca

SEQ ID NO: 2076176 - DNA, 15 bp, Homo sapiens
tcccaattttggcag

SEQ ID NO: 2076177 - DNA, 15 bp, Homo sapiens
cccaattttggcagc

SEQ ID NO: 2076178 - DNA, 15 bp, Homo sapiens
ccaattttggcagcc

SEQ ID NO: 2076179 - DNA, 15 bp, Homo sapiens
caattttggcagcct

SEQ ID NO: 2076180 - DNA, 15 bp, Homo sapiens
aattttggcagcctg

SEQ ID NO: 2076181 - DNA, 15 bp, Homo sapiens
attttggcagcctgt

SEQ ID NO: 2076182 - DNA, 15 bp, Homo sapiens
ttttggcagcctgtg

SEQ ID NO: 2076183 - DNA, 15 bp, Homo sapiens
tttggcagcctgtgc

SEQ ID NO: 2076184 - DNA, 15 bp, Homo sapiens
ttggcagcctgtgca

SEQ ID NO: 2076185 - DNA, 15 bp, Homo sapiens
tggcagcctgtgcac

SEQ ID NO: 2076186 - DNA, 15 bp, Homo sapiens
ggcagcctgtgcact

SEQ ID NO: 2076187 - DNA, 15 bp, Homo sapiens
gcagcctgtgcactg

SEQ ID NO: 2076188 - DNA, 15 bp, Homo sapiens
cagcctgtgcactgc

SEQ ID NO: 2076189 - DNA, 15 bp, Homo sapiens
agcctgtgcactgct

SEQ ID NO: 2076190 - DNA, 15 bp, Homo sapiens
gcctgtgcactgctg

SEQ ID NO: 2076191 - DNA, 15 bp, Homo sapiens
cctgtgcactgctgt

SEQ ID NO: 2076192 - DNA, 15 bp, Homo sapiens
ctgtgcactgctgtc

SEQ ID NO: 2076193 - DNA, 15 bp, Homo sapiens
tgtgcactgctgtcc

SEQ ID NO: 2076194 - DNA, 15 bp, Homo sapiens
gtgcactgctgtcct

SEQ ID NO: 2076195 - DNA, 15 bp, Homo sapiens
tgcactgctgtcctc

SEQ ID NO: 2076196 - DNA, 15 bp, Homo sapiens
gcactgctgtcctct

SEQ ID NO: 2076197 - DNA, 15 bp, Homo sapiens
actgctgtcctctct

SEQ ID NO: 2076198 - DNA, 15 bp, Homo sapiens
ctgctgtcctctctg

SEQ ID NO: 2076199 - DNA, 15 bp, Homo sapiens
tgctgtcctctctgc

SEQ ID NO: 2076200 - DNA, 15 bp, Homo sapiens
gctgtcctctctgcc

SEQ ID NO: 2076201 - DNA, 15 bp, Homo sapiens
ctgtcctctctgccc

SEQ ID NO: 2076202 - DNA, 15 bp, Homo sapiens
tgtcctctctgcccc

SEQ ID NO: 2076203 - DNA, 15 bp, Homo sapiens
gtcctctctgcccct

SEQ ID NO: 2076204 - DNA, 15 bp, Homo sapiens
tcctctctgccccta

SEQ ID NO: 2076205 - DNA, 15 bp, Homo sapiens
cctctctgcccctaa

SEQ ID NO: 2076206 - DNA, 15 bp, Homo sapiens
ctctctgcccctaag

SEQ ID NO: 2076207 - DNA, 15 bp, Homo sapiens
tctctgcccctaagg

SEQ ID NO: 2076208 - DNA, 15 bp, Homo sapiens
ctctgcccctaaggc

SEQ ID NO: 2076209 - DNA, 15 bp, Homo sapiens
tctgcccctaaggct

SEQ ID NO: 2076210 - DNA, 15 bp, Homo sapiens
ctgcccctaaggctg

SEQ ID NO: 2076211 - DNA, 15 bp, Homo sapiens
tgcccctaaggctgc

SEQ ID NO: 2076212 - DNA, 15 bp, Homo sapiens
gcccctaaggctgct

SEQ ID NO: 2076213 - DNA, 15 bp, Homo sapiens
cccctaaggctgctc

SEQ ID NO: 2076214 - DNA, 15 bp, Homo sapiens
ccctaaggctgctcc

SEQ ID NO: 2076215 - DNA, 15 bp, Homo sapiens
cctaaggctgctcct

SEQ ID NO: 2076216 - DNA, 15 bp, Homo sapiens
ctaaggctgctcctc

SEQ ID NO: 2076217 - DNA, 15 bp, Homo sapiens
taaggctgctcctcc

SEQ ID NO: 2076218 - DNA, 15 bp, Homo sapiens
aaggctgctcctcca

SEQ ID NO: 2076219 - DNA, 15 bp, Homo sapiens
aggctgctcctccag

SEQ ID NO: 2076220 - DNA, 15 bp, Homo sapiens
ggctgctcctccagc

SEQ ID NO: 2076221 - DNA, 15 bp, Homo sapiens
gctgctcctccagcc

SEQ ID NO: 2076222 - DNA, 15 bp, Homo sapiens
ctgctcctccagccc

SEQ ID NO: 2076223 - DNA, 15 bp, Homo sapiens
tgctcctccagccct

SEQ ID NO: 2076224 - DNA, 15 bp, Homo sapiens
gctcctccagccctc

SEQ ID NO: 2076225 - DNA, 15 bp, Homo sapiens
ctcctccagccctcc

SEQ ID NO: 2076226 - DNA, 15 bp, Homo sapiens
tcctccagccctcct

SEQ ID NO: 2076227 - DNA, 15 bp, Homo sapiens
cctccagccctcctc

SEQ ID NO: 2076228 - DNA, 15 bp, Homo sapiens
ctccagccctcctca

SEQ ID NO: 2076229 - DNA, 15 bp, Homo sapiens
tccagccctcctcat

SEQ ID NO: 2076230 - DNA, 15 bp, Homo sapiens
ccagccctcctcatg

SEQ ID NO: 2076231 - DNA, 15 bp, Homo sapiens
cagccctcctcatgg

SEQ ID NO: 2076232 - DNA, 15 bp, Homo sapiens
agccctcctcatggc

SEQ ID NO: 2076233 - DNA, 15 bp, Homo sapiens
gccctcctcatggct

SEQ ID NO: 2076234 - DNA, 15 bp, Homo sapiens
cctcctcatggctgc

SEQ ID NO: 2076235 - DNA, 15 bp, Homo sapiens
ctcctcatggctgca

SEQ ID NO: 2076236 - DNA, 15 bp, Homo sapiens
tcctcatggctgcac

SEQ ID NO: 2076237 - DNA, 15 bp, Homo sapiens
cctcatggctgcacc

SEQ ID NO: 2076238 - DNA, 15 bp, Homo sapiens
ctcatggctgcacct

SEQ ID NO: 2076239 - DNA, 15 bp, Homo sapiens
tcatggctgcacctc

SEQ ID NO: 2076240 - DNA, 15 bp, Homo sapiens
catggctgcacctcg

SEQ ID NO: 2076241 - DNA, 15 bp, Homo sapiens
atggctgcacctcgc

SEQ ID NO: 2076242 - DNA, 15 bp, Homo sapiens
tggctgcacctcgca

SEQ ID NO: 2076243 - DNA, 15 bp, Homo sapiens
ggctgcacctcgcac

SEQ ID NO: 2076244 - DNA, 15 bp, Homo sapiens
gctgcacctcgcacg

SEQ ID NO: 2076245 - DNA, 15 bp, Homo sapiens
ctgcacctcgcacgc

SEQ ID NO: 2076246 - DNA, 15 bp, Homo sapiens
tgcacctcgcacgct

SEQ ID NO: 2076247 - DNA, 15 bp, Homo sapiens
gcacctcgcacgctt

SEQ ID NO: 2076248 - DNA, 15 bp, Homo sapiens
cacctcgcacgcttc

SEQ ID NO: 2076249 - DNA, 15 bp, Homo sapiens
acctcgcacgcttca

SEQ ID NO: 2076250 - DNA, 15 bp, Homo sapiens
cctcgcacgcttcag

SEQ ID NO: 2076251 - DNA, 15 bp, Homo sapiens
ctcgcacgcttcagg

SEQ ID NO: 2076252 - DNA, 15 bp, Homo sapiens
tcgcacgcttcaggt

SEQ ID NO: 2076253 - DNA, 15 bp, Homo sapiens
cgcacgcttcaggtc

SEQ ID NO: 2076254 - DNA, 15 bp, Homo sapiens
gcacgcttcaggtct

SEQ ID NO: 2076255 - DNA, 15 bp, Homo sapiens
cacgcttcaggtctc

SEQ ID NO: 2076256 - DNA, 15 bp, Homo sapiens
acgcttcaggtctca

SEQ ID NO: 2076257 - DNA, 15 bp, Homo sapiens
cgcttcaggtctcag

SEQ ID NO: 2076258 - DNA, 15 bp, Homo sapiens
gcttcaggtctcagc

SEQ ID NO: 2076259 - DNA, 15 bp, Homo sapiens
cttcaggtctcagct

SEQ ID NO: 2076260 - DNA, 15 bp, Homo sapiens
ttcaggtctcagctt

SEQ ID NO: 2076261 - DNA, 15 bp, Homo sapiens
tcaggtctcagcttc

SEQ ID NO: 2076262 - DNA, 15 bp, Homo sapiens
caggtctcagcttcc

SEQ ID NO: 2076263 - DNA, 15 bp, Homo sapiens
aggtctcagcttcca

SEQ ID NO: 2076264 - DNA, 15 bp, Homo sapiens
ggtctcagcttccat

SEQ ID NO: 2076265 - DNA, 15 bp, Homo sapiens
gtctcagcttccata

SEQ ID NO: 2076266 - DNA, 15 bp, Homo sapiens
tctcagcttccatat

SEQ ID NO: 2076267 - DNA, 15 bp, Homo sapiens
ctcagcttccatatc

SEQ ID NO: 2076268 - DNA, 15 bp, Homo sapiens
tcagcttccatatct

SEQ ID NO: 2076269 - DNA, 15 bp, Homo sapiens
cagcttccatatctc

SEQ ID NO: 2076270 - DNA, 15 bp, Homo sapiens
agcttccatatctcc

SEQ ID NO: 2076271 - DNA, 15 bp, Homo sapiens
gcttccatatctcct

SEQ ID NO: 2076272 - DNA, 15 bp, Homo sapiens
cttccatatctcctc

SEQ ID NO: 2076273 - DNA, 15 bp, Homo sapiens
ttccatatctcctcc

SEQ ID NO: 2076274 - DNA, 15 bp, Homo sapiens
tccatatctcctcct

SEQ ID NO: 2076275 - DNA, 15 bp, Homo sapiens
ccatatctcctcctg

SEQ ID NO: 2076276 - DNA, 15 bp, Homo sapiens
catatctcctcctga

SEQ ID NO: 2076277 - DNA, 15 bp, Homo sapiens
atatctcctcctgag

SEQ ID NO: 2076278 - DNA, 15 bp, Homo sapiens
tatctcctcctgagc

SEQ ID NO: 2076279 - DNA, 15 bp, Homo sapiens
atctcctcctgagcc

SEQ ID NO: 2076280 - DNA, 15 bp, Homo sapiens
tctcctcctgagccc

SEQ ID NO: 2076281 - DNA, 15 bp, Homo sapiens
ctcctcctgagccct

SEQ ID NO: 2076282 - DNA, 15 bp, Homo sapiens
tcctcctgagccctc

SEQ ID NO: 2076283 - DNA, 15 bp, Homo sapiens
cctcctgagccctcc

SEQ ID NO: 2076284 - DNA, 15 bp, Homo sapiens
ctcctgagccctccc

SEQ ID NO: 2076285 - DNA, 15 bp, Homo sapiens
tcctgagccctccct

SEQ ID NO: 2076286 - DNA, 15 bp, Homo sapiens
cctgagccctccctg

SEQ ID NO: 2076287 - DNA, 15 bp, Homo sapiens
ctgagccctccctgt

SEQ ID NO: 2076288 - DNA, 15 bp, Homo sapiens
tgagccctccctgtg

SEQ ID NO: 2076289 - DNA, 15 bp, Homo sapiens
gagccctccctgtgc

SEQ ID NO: 2076290 - DNA, 15 bp, Homo sapiens
agccctccctgtgcc

SEQ ID NO: 2076291 - DNA, 15 bp, Homo sapiens
gccctccctgtgcct

SEQ ID NO: 2076292 - DNA, 15 bp, Homo sapiens
ccctccctgtgcctg

SEQ ID NO: 2076293 - DNA, 15 bp, Homo sapiens
cctccctgtgcctga

SEQ ID NO: 2076294 - DNA, 15 bp, Homo sapiens
ctccctgtgcctgag

SEQ ID NO: 2076295 - DNA, 15 bp, Homo sapiens
ccctgtgcctgagcc

SEQ ID NO: 2076296 - DNA, 15 bp, Homo sapiens
cctgtgcctgagccc

SEQ ID NO: 2076297 - DNA, 15 bp, Homo sapiens
ctgtgcctgagccct

SEQ ID NO: 2076298 - DNA, 15 bp, Homo sapiens
tgtgcctgagccctg

SEQ ID NO: 2076299 - DNA, 15 bp, Homo sapiens
gtgcctgagccctgc

SEQ ID NO: 2076300 - DNA, 15 bp, Homo sapiens
tgcctgagccctgcc

SEQ ID NO: 2076301 - DNA, 15 bp, Homo sapiens
gcctgagccctgccc

SEQ ID NO: 2076302 - DNA, 15 bp, Homo sapiens
cctgagccctgccca

SEQ ID NO: 2076303 - DNA, 15 bp, Homo sapiens
ctgagccctgcccac

SEQ ID NO: 2076304 - DNA, 15 bp, Homo sapiens
tgagccctgcccacc

SEQ ID NO: 2076305 - DNA, 15 bp, Homo sapiens
gagccctgcccacct

SEQ ID NO: 2076306 - DNA, 15 bp, Homo sapiens
agccctgcccacctc

SEQ ID NO: 2076307 - DNA, 15 bp, Homo sapiens
gccctgcccacctcg

SEQ ID NO: 2076308 - DNA, 15 bp, Homo sapiens
ccctgcccacctcga

SEQ ID NO: 2076309 - DNA, 15 bp, Homo sapiens
cctgcccacctcgag

SEQ ID NO: 2076310 - DNA, 15 bp, Homo sapiens
ctgcccacctcgaga

SEQ ID NO: 2076311 - DNA, 15 bp, Homo sapiens
tgcccacctcgagag

SEQ ID NO: 2076312 - DNA, 15 bp, Homo sapiens
gcccacctcgagagt

SEQ ID NO: 2076313 - DNA, 15 bp, Homo sapiens
cccacctcgagagtg

SEQ ID NO: 2076314 - DNA, 15 bp, Homo sapiens
ccacctcgagagtga

SEQ ID NO: 2076315 - DNA, 15 bp, Homo sapiens
cacctcgagagtgag

SEQ ID NO: 2076316 - DNA, 15 bp, Homo sapiens
acctcgagagtgagc

SEQ ID NO: 2076317 - DNA, 15 bp, Homo sapiens
cctcgagagtgagcc

SEQ ID NO: 2076318 - DNA, 15 bp, Homo sapiens
ctcgagagtgagcct

SEQ ID NO: 2076319 - DNA, 15 bp, Homo sapiens
tcgagagtgagccta

SEQ ID NO: 2076320 - DNA, 15 bp, Homo sapiens
cgagagtgagcctac

SEQ ID NO: 2076321 - DNA, 15 bp, Homo sapiens
gagagtgagcctacc

SEQ ID NO: 2076322 - DNA, 15 bp, Homo sapiens
agagtgagcctacct

SEQ ID NO: 2076323 - DNA, 15 bp, Homo sapiens
gagtgagcctacctt

SEQ ID NO: 2076324 - DNA, 15 bp, Homo sapiens
agtgagcctaccttg

SEQ ID NO: 2076325 - DNA, 15 bp, Homo sapiens
gtgagcctaccttgg

SEQ ID NO: 2076326 - DNA, 15 bp, Homo sapiens
tgagcctaccttgga

SEQ ID NO: 2076327 - DNA, 15 bp, Homo sapiens
gagcctaccttggaa

SEQ ID NO: 2076328 - DNA, 15 bp, Homo sapiens
agcctaccttggaat

SEQ ID NO: 2076329 - DNA, 15 bp, Homo sapiens
gcctaccttggaatc

SEQ ID NO: 2076330 - DNA, 15 bp, Homo sapiens
cctaccttggaatct

SEQ ID NO: 2076331 - DNA, 15 bp, Homo sapiens
ctaccttggaatctt

SEQ ID NO: 2076332 - DNA, 15 bp, Homo sapiens
taccttggaatcttc

SEQ ID NO: 2076333 - DNA, 15 bp, Homo sapiens
accttggaatcttct

SEQ ID NO: 2076334 - DNA, 15 bp, Homo sapiens
ccttggaatcttctc

SEQ ID NO: 2076335 - DNA, 15 bp, Homo sapiens
cttggaatcttctca

SEQ ID NO: 2076336 - DNA, 15 bp, Homo sapiens
ttggaatcttctcag

SEQ ID NO: 2076337 - DNA, 15 bp, Homo sapiens
tggaatcttctcagg

SEQ ID NO: 2076338 - DNA, 15 bp, Homo sapiens
ggaatcttctcaggt

SEQ ID NO: 2076339 - DNA, 15 bp, Homo sapiens
gaatcttctcaggtg

SEQ ID NO: 2076340 - DNA, 15 bp, Homo sapiens
aatcttctcaggtgt

SEQ ID NO: 2076341 - DNA, 15 bp, Homo sapiens
atcttctcaggtgtg

SEQ ID NO: 2076342 - DNA, 15 bp, Homo sapiens
tcttctcaggtgtgc

SEQ ID NO: 2076343 - DNA, 15 bp, Homo sapiens
cttctcaggtgtgcg

SEQ ID NO: 2076344 - DNA, 15 bp, Homo sapiens
ttctcaggtgtgcgt

SEQ ID NO: 2076345 - DNA, 15 bp, Homo sapiens
tctcaggtgtgcgta

SEQ ID NO: 2076346 - DNA, 15 bp, Homo sapiens
ctcaggtgtgcgtat

SEQ ID NO: 2076347 - DNA, 15 bp, Homo sapiens
tcaggtgtgcgtatt

SEQ ID NO: 2076348 - DNA, 15 bp, Homo sapiens
caggtgtgcgtattt

SEQ ID NO: 2076349 - DNA, 15 bp, Homo sapiens
aggtgtgcgtatttc

SEQ ID NO: 2076350 - DNA, 15 bp, Homo sapiens
ggtgtgcgtatttcc

SEQ ID NO: 2076351 - DNA, 15 bp, Homo sapiens
gtgtgcgtatttcct

SEQ ID NO: 2076352 - DNA, 15 bp, Homo sapiens
tgtgcgtatttcctt

SEQ ID NO: 2076353 - DNA, 15 bp, Homo sapiens
gtgcgtatttccttc

SEQ ID NO: 2076354 - DNA, 15 bp, Homo sapiens
tgcgtatttccttca

SEQ ID NO: 2076355 - DNA, 15 bp, Homo sapiens
gcgtatttccttcat

SEQ ID NO: 2076356 - DNA, 15 bp, Homo sapiens
cgtatttccttcata

SEQ ID NO: 2076357 - DNA, 15 bp, Homo sapiens
gtatttccttcatag

SEQ ID NO: 2076358 - DNA, 15 bp, Homo sapiens
tatttccttcatagc

SEQ ID NO: 2076359 - DNA, 15 bp, Homo sapiens
atttccttcatagcc

SEQ ID NO: 2076360 - DNA, 15 bp, Homo sapiens
tttccttcatagccc

SEQ ID NO: 2076361 - DNA, 15 bp, Homo sapiens
ttccttcatagccct

SEQ ID NO: 2076362 - DNA, 15 bp, Homo sapiens
tccttcatagccctt

SEQ ID NO: 2076363 - DNA, 15 bp, Homo sapiens
ccttcatagccctta

SEQ ID NO: 2076364 - DNA, 15 bp, Homo sapiens
cttcatagcccttac

SEQ ID NO: 2076365 - DNA, 15 bp, Homo sapiens
ttcatagcccttacc

SEQ ID NO: 2076366 - DNA, 15 bp, Homo sapiens
tcatagcccttacca

SEQ ID NO: 2076367 - DNA, 15 bp, Homo sapiens
catagcccttaccac

SEQ ID NO: 2076368 - DNA, 15 bp, Homo sapiens
atagcccttaccaca

SEQ ID NO: 2076369 - DNA, 15 bp, Homo sapiens
tagcccttaccacaa

SEQ ID NO: 2076370 - DNA, 15 bp, Homo sapiens
agcccttaccacaat

SEQ ID NO: 2076371 - DNA, 15 bp, Homo sapiens
gcccttaccacaatc

SEQ ID NO: 2076372 - DNA, 15 bp, Homo sapiens
cccttaccacaatct

SEQ ID NO: 2076373 - DNA, 15 bp, Homo sapiens
ccttaccacaatctc

SEQ ID NO: 2076374 - DNA, 15 bp, Homo sapiens
cttaccacaatctct

SEQ ID NO: 2076375 - DNA, 15 bp, Homo sapiens
ttaccacaatctcta

SEQ ID NO: 2076376 - DNA, 15 bp, Homo sapiens
taccacaatctctaa

SEQ ID NO: 2076377 - DNA, 15 bp, Homo sapiens
accacaatctctaat

SEQ ID NO: 2076378 - DNA, 15 bp, Homo sapiens
ccacaatctctaata

SEQ ID NO: 2076379 - DNA, 15 bp, Homo sapiens
cacaatctctaataa

SEQ ID NO: 2076380 - DNA, 15 bp, Homo sapiens
acaatctctaataat

SEQ ID NO: 2076381 - DNA, 15 bp, Homo sapiens
caatctctaataata

SEQ ID NO: 2076382 - DNA, 15 bp, Homo sapiens
aatctctaataataa

SEQ ID NO: 2076383 - DNA, 15 bp, Homo sapiens
atctctaataataaa

SEQ ID NO: 2076384 - DNA, 15 bp, Homo sapiens
tctctaataataaag

SEQ ID NO: 2076385 - DNA, 15 bp, Homo sapiens
ctctaataataaagt

SEQ ID NO: 2076386 - DNA, 15 bp, Homo sapiens
tctaataataaagtt

SEQ ID NO: 2076387 - DNA, 15 bp, Homo sapiens
ctaataataaagttg

SEQ ID NO: 2076388 - DNA, 15 bp, Homo sapiens
taataataaagttgt

SEQ ID NO: 2076389 - DNA, 15 bp, Homo sapiens
aataataaagttgtt

SEQ ID NO: 2076390 - DNA, 15 bp, Homo sapiens
ataataaagttgttg

SEQ ID NO: 2076391 - DNA, 15 bp, Homo sapiens
taataaagttgttgg

SEQ ID NO: 2076392 - DNA, 15 bp, Homo sapiens
aataaagttgttggc

SEQ ID NO: 2076393 - DNA, 15 bp, Homo sapiens
ataaagttgttggca

SEQ ID NO: 2076394 - DNA, 15 bp, Homo sapiens
taaagttgttggcag

SEQ ID NO: 2076395 - DNA, 15 bp, Homo sapiens
aaagttgttggcagg

SEQ ID NO: 2076396 - DNA, 15 bp, Homo sapiens
aagttgttggcaggc

SEQ ID NO: 2076397 - DNA, 15 bp, Homo sapiens
agttgttggcaggct

SEQ ID NO: 2076398 - DNA, 15 bp, Homo sapiens
gttgttggcaggctt

SEQ ID NO: 2076399 - DNA, 15 bp, Homo sapiens
ttgttggcaggctta

SEQ ID NO: 2076400 - DNA, 15 bp, Homo sapiens
tgttggcaggcttat

SEQ ID NO: 2076401 - DNA, 15 bp, Homo sapiens
gttggcaggcttatc

SEQ ID NO: 2076402 - DNA, 15 bp, Homo sapiens
ttggcaggcttatct

SEQ ID NO: 2076403 - DNA, 15 bp, Homo sapiens
tggcaggcttatctg

SEQ ID NO: 2076404 - DNA, 15 bp, Homo sapiens
ggcaggcttatctgt

SEQ ID NO: 2076405 - DNA, 15 bp, Homo sapiens
gcaggcttatctgta

SEQ ID NO: 2076406 - DNA, 15 bp, Homo sapiens
caggcttatctgtat

SEQ ID NO: 2076407 - DNA, 15 bp, Homo sapiens
aggcttatctgtata

SEQ ID NO: 2076408 - DNA, 15 bp, Homo sapiens
ggcttatctgtataa

SEQ ID NO: 2076409 - DNA, 15 bp, Homo sapiens
gcttatctgtataac

SEQ ID NO: 2076410 - DNA, 15 bp, Homo sapiens
cttatctgtataacg

SEQ ID NO: 2076411 - DNA, 15 bp, Homo sapiens
ttatctgtataacgc

SEQ ID NO: 2076412 - DNA, 15 bp, Homo sapiens
tatctgtataacgcc

SEQ ID NO: 2076413 - DNA, 15 bp, Homo sapiens
atctgtataacgcct

SEQ ID NO: 2076414 - DNA, 15 bp, Homo sapiens
tctgtataacgcctg

SEQ ID NO: 2076415 - DNA, 15 bp, Homo sapiens
ctgtataacgcctgg

SEQ ID NO: 2076416 - DNA, 15 bp, Homo sapiens
tgtataacgcctggc

SEQ ID NO: 2076417 - DNA, 15 bp, Homo sapiens
gtataacgcctggct

SEQ ID NO: 2076418 - DNA, 15 bp, Homo sapiens
tataacgcctggctg

SEQ ID NO: 2076419 - DNA, 15 bp, Homo sapiens
ataacgcctggctgt

SEQ ID NO: 2076420 - DNA, 15 bp, Homo sapiens
taacgcctggctgtc

SEQ ID NO: 2076421 - DNA, 15 bp, Homo sapiens
aacgcctggctgtct

SEQ ID NO: 2076422 - DNA, 15 bp, Homo sapiens
acgcctggctgtctc

SEQ ID NO: 2076423 - DNA, 15 bp, Homo sapiens
cgcctggctgtctcc

SEQ ID NO: 2076424 - DNA, 15 bp, Homo sapiens
gcctggctgtctccc

SEQ ID NO: 2076425 - DNA, 15 bp, Homo sapiens
cctggctgtctcccc

SEQ ID NO: 2076426 - DNA, 15 bp, Homo sapiens
ctggctgtctcccca

SEQ ID NO: 2076427 - DNA, 15 bp, Homo sapiens
tggctgtctccccat

SEQ ID NO: 2076428 - DNA, 15 bp, Homo sapiens
ggctgtctccccatt

SEQ ID NO: 2076429 - DNA, 15 bp, Homo sapiens
gctgtctccccatta

SEQ ID NO: 2076430 - DNA, 15 bp, Homo sapiens
ctgtctccccattag

SEQ ID NO: 2076431 - DNA, 15 bp, Homo sapiens
tgtctccccattagg

SEQ ID NO: 2076432 - DNA, 15 bp, Homo sapiens
gtctccccattaggt

SEQ ID NO: 2076433 - DNA, 15 bp, Homo sapiens
tctccccattaggtt

SEQ ID NO: 2076434 - DNA, 15 bp, Homo sapiens
ctccccattaggttg

SEQ ID NO: 2076435 - DNA, 15 bp, Homo sapiens
tccccattaggttgt

SEQ ID NO: 2076436 - DNA, 15 bp, Homo sapiens
ccccattaggttgtc

SEQ ID NO: 2076437 - DNA, 15 bp, Homo sapiens
cccattaggttgtcc

SEQ ID NO: 2076438 - DNA, 15 bp, Homo sapiens
ccattaggttgtccc

SEQ ID NO: 2076439 - DNA, 15 bp, Homo sapiens
cattaggttgtccct

SEQ ID NO: 2076440 - DNA, 15 bp, Homo sapiens
attaggttgtccctt

SEQ ID NO: 2076441 - DNA, 15 bp, Homo sapiens
ttaggttgtcccttc

SEQ ID NO: 2076442 - DNA, 15 bp, Homo sapiens
taggttgtcccttcc

SEQ ID NO: 2076443 - DNA, 15 bp, Homo sapiens
aggttgtcccttccg

SEQ ID NO: 2076444 - DNA, 15 bp, Homo sapiens
ggttgtcccttccgt

SEQ ID NO: 2076445 - DNA, 15 bp, Homo sapiens
gttgtcccttccgtg

SEQ ID NO: 2076446 - DNA, 15 bp, Homo sapiens
ttgtcccttccgtgg

SEQ ID NO: 2076447 - DNA, 15 bp, Homo sapiens
tgtcccttccgtggg

SEQ ID NO: 2076448 - DNA, 15 bp, Homo sapiens
gtcccttccgtgggg

SEQ ID NO: 2076449 - DNA, 15 bp, Homo sapiens
tcccttccgtgggga

SEQ ID NO: 2076450 - DNA, 15 bp, Homo sapiens
cccttccgtggggaa

SEQ ID NO: 2076451 - DNA, 15 bp, Homo sapiens
ccttccgtggggaag

SEQ ID NO: 2076452 - DNA, 15 bp, Homo sapiens
cttccgtggggaagg

SEQ ID NO: 2076453 - DNA, 15 bp, Homo sapiens
ttccgtggggaagga

SEQ ID NO: 2076454 - DNA, 15 bp, Homo sapiens
tccgtggggaaggag

SEQ ID NO: 2076455 - DNA, 15 bp, Homo sapiens
ccgtggggaaggaga

SEQ ID NO: 2076456 - DNA, 15 bp, Homo sapiens
cgtggggaaggagac

SEQ ID NO: 2076457 - DNA, 15 bp, Homo sapiens
gtggggaaggagacc

SEQ ID NO: 2076458 - DNA, 15 bp, Homo sapiens
tggggaaggagaccc

SEQ ID NO: 2076459 - DNA, 15 bp, Homo sapiens
ggggaaggagaccca

SEQ ID NO: 2076460 - DNA, 15 bp, Homo sapiens
gggaaggagacccat

SEQ ID NO: 2076461 - DNA, 15 bp, Homo sapiens
ggaaggagacccatg

SEQ ID NO: 2076462 - DNA, 15 bp, Homo sapiens
gaaggagacccatgt

SEQ ID NO: 2076463 - DNA, 15 bp, Homo sapiens
aaggagacccatgtc

SEQ ID NO: 2076464 - DNA, 15 bp, Homo sapiens
aggagacccatgtct

SEQ ID NO: 2076465 - DNA, 15 bp, Homo sapiens
ggagacccatgtctg

SEQ ID NO: 2076466 - DNA, 15 bp, Homo sapiens
gagacccatgtctgt

SEQ ID NO: 2076467 - DNA, 15 bp, Homo sapiens
agacccatgtctgtg

SEQ ID NO: 2076468 - DNA, 15 bp, Homo sapiens
gacccatgtctgtgt

SEQ ID NO: 2076469 - DNA, 15 bp, Homo sapiens
acccatgtctgtgtt

SEQ ID NO: 2076470 - DNA, 15 bp, Homo sapiens
cccatgtctgtgtta

SEQ ID NO: 2076471 - DNA, 15 bp, Homo sapiens
ccatgtctgtgttat

SEQ ID NO: 2076472 - DNA, 15 bp, Homo sapiens
catgtctgtgttatc

SEQ ID NO: 2076473 - DNA, 15 bp, Homo sapiens
atgtctgtgttatcc

SEQ ID NO: 2076474 - DNA, 15 bp, Homo sapiens
tgtctgtgttatccg

SEQ ID NO: 2076475 - DNA, 15 bp, Homo sapiens
gtctgtgttatccgt

SEQ ID NO: 2076476 - DNA, 15 bp, Homo sapiens
tctgtgttatccgtt

SEQ ID NO: 2076477 - DNA, 15 bp, Homo sapiens
ctgtgttatccgttg

SEQ ID NO: 2076478 - DNA, 15 bp, Homo sapiens
tgtgttatccgttgc

SEQ ID NO: 2076479 - DNA, 15 bp, Homo sapiens
gtgttatccgttgct

SEQ ID NO: 2076480 - DNA, 15 bp, Homo sapiens
tgttatccgttgctt

SEQ ID NO: 2076481 - DNA, 15 bp, Homo sapiens
gttatccgttgcttt

SEQ ID NO: 2076482 - DNA, 15 bp, Homo sapiens
ttatccgttgcttta

SEQ ID NO: 2076483 - DNA, 15 bp, Homo sapiens
tatccgttgctttat

SEQ ID NO: 2076484 - DNA, 15 bp, Homo sapiens
atccgttgctttatc

SEQ ID NO: 2076485 - DNA, 15 bp, Homo sapiens
tccgttgctttatcg

SEQ ID NO: 2076486 - DNA, 15 bp, Homo sapiens
ccgttgctttatcgc

SEQ ID NO: 2076487 - DNA, 15 bp, Homo sapiens
cgttgctttatcgct

SEQ ID NO: 2076488 - DNA, 15 bp, Homo sapiens
gttgctttatcgctc

SEQ ID NO: 2076489 - DNA, 15 bp, Homo sapiens
ttgctttatcgctca

SEQ ID NO: 2076490 - DNA, 15 bp, Homo sapiens
tgctttatcgctcac

SEQ ID NO: 2076491 - DNA, 15 bp, Homo sapiens
gctttatcgctcacc

SEQ ID NO: 2076492 - DNA, 15 bp, Homo sapiens
ctttatcgctcacca

SEQ ID NO: 2076493 - DNA, 15 bp, Homo sapiens
tttatcgctcaccag

SEQ ID NO: 2076494 - DNA, 15 bp, Homo sapiens
ttatcgctcaccagt

SEQ ID NO: 2076495 - DNA, 15 bp, Homo sapiens
tatcgctcaccagtg

SEQ ID NO: 2076496 - DNA, 15 bp, Homo sapiens
atcgctcaccagtgc

SEQ ID NO: 2076497 - DNA, 15 bp, Homo sapiens
tcgctcaccagtgcc

SEQ ID NO: 2076498 - DNA, 15 bp, Homo sapiens
cgctcaccagtgcct

SEQ ID NO: 2076499 - DNA, 15 bp, Homo sapiens
gctcaccagtgcctg

SEQ ID NO: 2076500 - DNA, 15 bp, Homo sapiens
ctcaccagtgcctgg

SEQ ID NO: 2076501 - DNA, 15 bp, Homo sapiens
tcaccagtgcctggc

SEQ ID NO: 2076502 - DNA, 15 bp, Homo sapiens
caccagtgcctggca

SEQ ID NO: 2076503 - DNA, 15 bp, Homo sapiens
accagtgcctggcac

SEQ ID NO: 2076504 - DNA, 15 bp, Homo sapiens
ccagtgcctggcaca

SEQ ID NO: 2076505 - DNA, 15 bp, Homo sapiens
cagtgcctggcacac

SEQ ID NO: 2076506 - DNA, 15 bp, Homo sapiens
tggcacacagtaggt

SEQ ID NO: 2076507 - DNA, 15 bp, Homo sapiens
ggcacacagtaggtg

SEQ ID NO: 2076508 - DNA, 15 bp, Homo sapiens
gcacacagtaggtgc

SEQ ID NO: 2076509 - DNA, 15 bp, Homo sapiens
cacacagtaggtgct

SEQ ID NO: 2076510 - DNA, 15 bp, Homo sapiens
acacagtaggtgctc

SEQ ID NO: 2076511 - DNA, 15 bp, Homo sapiens
cacagtaggtgctca

SEQ ID NO: 2076512 - DNA, 15 bp, Homo sapiens
acagtaggtgctcaa

SEQ ID NO: 2076513 - DNA, 15 bp, Homo sapiens
cagtaggtgctcaat

SEQ ID NO: 2076514 - DNA, 15 bp, Homo sapiens
agtaggtgctcaata

SEQ ID NO: 2076515 - DNA, 15 bp, Homo sapiens
gtaggtgctcaataa

SEQ ID NO: 2076516 - DNA, 15 bp, Homo sapiens
taggtgctcaataaa

SEQ ID NO: 2076517 - DNA, 15 bp, Homo sapiens
gtgctcaataaaccc

SEQ ID NO: 2076518 - DNA, 15 bp, Homo sapiens
tgctcaataaacccg

SEQ ID NO: 2076519 - DNA, 15 bp, Homo sapiens
gctcaataaacccgc

SEQ ID NO: 2076520 - DNA, 15 bp, Homo sapiens
ctcaataaacccgct

SEQ ID NO: 2076521 - DNA, 15 bp, Homo sapiens
tcaataaacccgctg

SEQ ID NO: 2076522 - DNA, 15 bp, Homo sapiens
caataaacccgctga

SEQ ID NO: 2076523 - DNA, 15 bp, Homo sapiens
aataaacccgctgaa

SEQ ID NO: 2076524 - DNA, 15 bp, Homo sapiens
ataaacccgctgaat

SEQ ID NO: 2076525 - DNA, 15 bp, Homo sapiens
taaacccgctgaatg

SEQ ID NO: 2076526 - DNA, 15 bp, Homo sapiens
aaacccgctgaatga

SEQ ID NO: 2076527 - DNA, 15 bp, Homo sapiens
aacccgctgaatgaa

SEQ ID NO: 2076528 - DNA, 15 bp, Homo sapiens
acccgctgaatgaat

SEQ ID NO: 2076529 - DNA, 15 bp, Homo sapiens
cccgctgaatgaata

SEQ ID NO: 2076530 - DNA, 15 bp, Homo sapiens
ccgctgaatgaataa

SEQ ID NO: 2076531 - DNA, 15 bp, Homo sapiens
cgctgaatgaataaa

SEQ ID NO: 2076532 - DNA, 15 bp, Homo sapiens
gctgaatgaataaac

SEQ ID NO: 2076533 - DNA, 15 bp, Homo sapiens
ctgaatgaataaacg

SEQ ID NO: 2076534 - DNA, 15 bp, Homo sapiens
tgaatgaataaacga

SEQ ID NO: 2076535 - DNA, 15 bp, Homo sapiens
gaatgaataaacgac

SEQ ID NO: 2076536 - DNA, 15 bp, Homo sapiens
aatgaataaacgact

SEQ ID NO: 2076537 - DNA, 15 bp, Homo sapiens
atgaataaacgactc

SEQ ID NO: 2076538 - DNA, 15 bp, Homo sapiens
tgaataaacgactcg

SEQ ID NO: 2076539 - DNA, 15 bp, Homo sapiens
gaataaacgactcgg

SEQ ID NO: 2076540 - DNA, 15 bp, Homo sapiens
aataaacgactcggg

SEQ ID NO: 2076541 - DNA, 15 bp, Homo sapiens
ataaacgactcggga

SEQ ID NO: 2076542 - DNA, 15 bp, Homo sapiens
taaacgactcgggat

SEQ ID NO: 2076543 - DNA, 15 bp, Homo sapiens
aaacgactcgggatc

SEQ ID NO: 2076544 - DNA, 15 bp, Homo sapiens
aacgactcgggatcc

SEQ ID NO: 2076545 - DNA, 15 bp, Homo sapiens
acgactcgggatcca

SEQ ID NO: 2076546 - DNA, 15 bp, Homo sapiens
cgactcgggatccat

SEQ ID NO: 2076547 - DNA, 15 bp, Homo sapiens
gactcgggatccatg

SEQ ID NO: 2076548 - DNA, 15 bp, Homo sapiens
actcgggatccatgc

SEQ ID NO: 2076549 - DNA, 15 bp, Homo sapiens
ctcgggatccatgcc

SEQ ID NO: 2076550 - DNA, 15 bp, Homo sapiens
tcgggatccatgccc

SEQ ID NO: 2076551 - DNA, 15 bp, Homo sapiens
cgggatccatgccct

SEQ ID NO: 2076552 - DNA, 15 bp, Homo sapiens
gggatccatgccctg

SEQ ID NO: 2076553 - DNA, 15 bp, Homo sapiens
ggatccatgccctgg

SEQ ID NO: 2076554 - DNA, 15 bp, Homo sapiens
gatccatgccctggc

SEQ ID NO: 2076555 - DNA, 15 bp, Homo sapiens
atccatgccctggca

SEQ ID NO: 2076556 - DNA, 15 bp, Homo sapiens
tccatgccctggcac

SEQ ID NO: 2076557 - DNA, 15 bp, Homo sapiens
ccatgccctggcact

SEQ ID NO: 2076558 - DNA, 15 bp, Homo sapiens
catgccctggcactg

SEQ ID NO: 2076559 - DNA, 15 bp, Homo sapiens
atgccctggcactgc

SEQ ID NO: 2076560 - DNA, 15 bp, Homo sapiens
tgccctggcactgcc

SEQ ID NO: 2076561 - DNA, 15 bp, Homo sapiens
gccctggcactgcca

SEQ ID NO: 2076562 - DNA, 15 bp, Homo sapiens
ccctggcactgccag

SEQ ID NO: 2076563 - DNA, 15 bp, Homo sapiens
cctggcactgccagc

SEQ ID NO: 2076564 - DNA, 15 bp, Homo sapiens
ctggcactgccagcc

SEQ ID NO: 2076565 - DNA, 15 bp, Homo sapiens
tggcactgccagcca

SEQ ID NO: 2076566 - DNA, 15 bp, Homo sapiens
ggcactgccagccat

SEQ ID NO: 2076567 - DNA, 15 bp, Homo sapiens
gcactgccagccatt

SEQ ID NO: 2076568 - DNA, 15 bp, Homo sapiens
cactgccagccattg

SEQ ID NO: 2076569 - DNA, 15 bp, Homo sapiens
actgccagccattgg

SEQ ID NO: 2076570 - DNA, 15 bp, Homo sapiens
ctgccagccattggg

SEQ ID NO: 2076571 - DNA, 15 bp, Homo sapiens
tgccagccattgggc

SEQ ID NO: 2076572 - DNA, 15 bp, Homo sapiens
gccagccattgggct

SEQ ID NO: 2076573 - DNA, 15 bp, Homo sapiens
ccagccattgggctg

SEQ ID NO: 2076574 - DNA, 15 bp, Homo sapiens
cagccattgggctgc

SEQ ID NO: 2076575 - DNA, 15 bp, Homo sapiens
agccattgggctgcc

SEQ ID NO: 2076576 - DNA, 15 bp, Homo sapiens
gccattgggctgccc

SEQ ID NO: 2076577 - DNA, 15 bp, Homo sapiens
ccattgggctgccct

SEQ ID NO: 2076578 - DNA, 15 bp, Homo sapiens
cattgggctgccctg

SEQ ID NO: 2076579 - DNA, 15 bp, Homo sapiens
attgggctgccctgg

SEQ ID NO: 2076580 - DNA, 15 bp, Homo sapiens
ttgggctgccctggc

SEQ ID NO: 2076581 - DNA, 15 bp, Homo sapiens
tgggctgccctggca

SEQ ID NO: 2076582 - DNA, 15 bp, Homo sapiens
gggctgccctggcac

SEQ ID NO: 2076583 - DNA, 15 bp, Homo sapiens
ggctgccctggcact

SEQ ID NO: 2076584 - DNA, 15 bp, Homo sapiens
gctgccctggcactg

SEQ ID NO: 2076585 - DNA, 15 bp, Homo sapiens
ctgccctggcactgc

SEQ ID NO: 2076586 - DNA, 15 bp, Homo sapiens
gccctggcactgccc

SEQ ID NO: 2076587 - DNA, 15 bp, Homo sapiens
ccctggcactgccct

SEQ ID NO: 2076588 - DNA, 15 bp, Homo sapiens
cctggcactgccctt

SEQ ID NO: 2076589 - DNA, 15 bp, Homo sapiens
ctggcactgcccttc

SEQ ID NO: 2076590 - DNA, 15 bp, Homo sapiens
tggcactgcccttcc

SEQ ID NO: 2076591 - DNA, 15 bp, Homo sapiens
ggcactgcccttccc

SEQ ID NO: 2076592 - DNA, 15 bp, Homo sapiens
gcactgcccttccct

SEQ ID NO: 2076593 - DNA, 15 bp, Homo sapiens
cactgcccttccctt

SEQ ID NO: 2076594 - DNA, 15 bp, Homo sapiens
actgcccttcccttt

SEQ ID NO: 2076595 - DNA, 15 bp, Homo sapiens
ctgcccttccctttg

SEQ ID NO: 2076596 - DNA, 15 bp, Homo sapiens
tgcccttccctttgg

SEQ ID NO: 2076597 - DNA, 15 bp, Homo sapiens
gcccttccctttgga

SEQ ID NO: 2076598 - DNA, 15 bp, Homo sapiens
cccttccctttggat

SEQ ID NO: 2076599 - DNA, 15 bp, Homo sapiens
ccttccctttggatg

SEQ ID NO: 2076600 - DNA, 15 bp, Homo sapiens
cttccctttggatgg

SEQ ID NO: 2076601 - DNA, 15 bp, Homo sapiens
ttccctttggatgga

SEQ ID NO: 2076602 - DNA, 15 bp, Homo sapiens
tccctttggatggac

SEQ ID NO: 2076603 - DNA, 15 bp, Homo sapiens
ccctttggatggact

SEQ ID NO: 2076604 - DNA, 15 bp, Homo sapiens
cctttggatggactg

SEQ ID NO: 2076605 - DNA, 15 bp, Homo sapiens
ctttggatggactga

SEQ ID NO: 2076606 - DNA, 15 bp, Homo sapiens
tttggatggactgag

SEQ ID NO: 2076607 - DNA, 15 bp, Homo sapiens
ttggatggactgagc

SEQ ID NO: 2076608 - DNA, 15 bp, Homo sapiens
tggatggactgagcg

SEQ ID NO: 2076609 - DNA, 15 bp, Homo sapiens
ggatggactgagcgc

SEQ ID NO: 2076610 - DNA, 15 bp, Homo sapiens
gatggactgagcgca

SEQ ID NO: 2076611 - DNA, 15 bp, Homo sapiens
atggactgagcgcag

SEQ ID NO: 2076612 - DNA, 15 bp, Homo sapiens
tggactgagcgcagg

SEQ ID NO: 2076613 - DNA, 15 bp, Homo sapiens
ggactgagcgcaggc

SEQ ID NO: 2076614 - DNA, 15 bp, Homo sapiens
gactgagcgcaggcc

SEQ ID NO: 2076615 - DNA, 15 bp, Homo sapiens
actgagcgcaggccc

SEQ ID NO: 2076616 - DNA, 15 bp, Homo sapiens
ctgagcgcaggccct

SEQ ID NO: 2076617 - DNA, 15 bp, Homo sapiens
tgagcgcaggccctc

SEQ ID NO: 2076618 - DNA, 15 bp, Homo sapiens
gagcgcaggccctct

SEQ ID NO: 2076619 - DNA, 15 bp, Homo sapiens
agcgcaggccctctg

SEQ ID NO: 2076620 - DNA, 15 bp, Homo sapiens
gcgcaggccctctgc

SEQ ID NO: 2076621 - DNA, 15 bp, Homo sapiens
cgcaggccctctgcg

SEQ ID NO: 2076622 - DNA, 15 bp, Homo sapiens
gcaggccctctgcga

SEQ ID NO: 2076623 - DNA, 15 bp, Homo sapiens
caggccctctgcgag

SEQ ID NO: 2076624 - DNA, 15 bp, Homo sapiens
aggccctctgcgagc

SEQ ID NO: 2076625 - DNA, 15 bp, Homo sapiens
ggccctctgcgagct

SEQ ID NO: 2076626 - DNA, 15 bp, Homo sapiens
gccctctgcgagctg

SEQ ID NO: 2076627 - DNA, 15 bp, Homo sapiens
ccctctgcgagctgg

SEQ ID NO: 2076628 - DNA, 15 bp, Homo sapiens
cctctgcgagctggc

SEQ ID NO: 2076629 - DNA, 15 bp, Homo sapiens
ctctgcgagctggcc

SEQ ID NO: 2076630 - DNA, 15 bp, Homo sapiens
tctgcgagctggcct

SEQ ID NO: 2076631 - DNA, 15 bp, Homo sapiens
ctgcgagctggcctg

SEQ ID NO: 2076632 - DNA, 15 bp, Homo sapiens
tgcgagctggcctgc

SEQ ID NO: 2076633 - DNA, 15 bp, Homo sapiens
gcgagctggcctgcg

SEQ ID NO: 2076634 - DNA, 15 bp, Homo sapiens
cgagctggcctgcgg

SEQ ID NO: 2076635 - DNA, 15 bp, Homo sapiens
gagctggcctgcggc

SEQ ID NO: 2076636 - DNA, 15 bp, Homo sapiens
agctggcctgcggca

SEQ ID NO: 2076637 - DNA, 15 bp, Homo sapiens
gctggcctgcggcag

SEQ ID NO: 2076638 - DNA, 15 bp, Homo sapiens
ctggcctgcggcagg

SEQ ID NO: 2076639 - DNA, 15 bp, Homo sapiens
tggcctgcggcaggc

SEQ ID NO: 2076640 - DNA, 15 bp, Homo sapiens
ggcctgcggcaggca

SEQ ID NO: 2076641 - DNA, 15 bp, Homo sapiens
gcctgcggcaggcag

SEQ ID NO: 2076642 - DNA, 15 bp, Homo sapiens
cctgcggcaggcagg

SEQ ID NO: 2076643 - DNA, 15 bp, Homo sapiens
ctgcggcaggcaggg

SEQ ID NO: 2076644 - DNA, 15 bp, Homo sapiens
tgcggcaggcagggc

SEQ ID NO: 2076645 - DNA, 15 bp, Homo sapiens
gcggcaggcagggca

SEQ ID NO: 2076646 - DNA, 15 bp, Homo sapiens
cggcaggcagggcac

SEQ ID NO: 2076647 - DNA, 15 bp, Homo sapiens
ggcaggcagggcaca

SEQ ID NO: 2076648 - DNA, 15 bp, Homo sapiens
gcaggcagggcacac

SEQ ID NO: 2076649 - DNA, 15 bp, Homo sapiens
caggcagggcacaca

SEQ ID NO: 2076650 - DNA, 15 bp, Homo sapiens
aggcagggcacacag

SEQ ID NO: 2076651 - DNA, 15 bp, Homo sapiens
ggcagggcacacaga

SEQ ID NO: 2076652 - DNA, 15 bp, Homo sapiens
gcagggcacacagag

SEQ ID NO: 2076653 - DNA, 15 bp, Homo sapiens
cagggcacacagagg

SEQ ID NO: 2076654 - DNA, 15 bp, Homo sapiens
agggcacacagaggc

SEQ ID NO: 2076655 - DNA, 15 bp, Homo sapiens
gggcacacagaggcc

SEQ ID NO: 2076656 - DNA, 15 bp, Homo sapiens
ggcacacagaggccg

SEQ ID NO: 2076657 - DNA, 15 bp, Homo sapiens
gcacacagaggccgg

SEQ ID NO: 2076658 - DNA, 15 bp, Homo sapiens
acacagaggccgggt

SEQ ID NO: 2076659 - DNA, 15 bp, Homo sapiens
cacagaggccgggtg

SEQ ID NO: 2076660 - DNA, 15 bp, Homo sapiens
acagaggccgggtgc

SEQ ID NO: 2076661 - DNA, 15 bp, Homo sapiens
cagaggccgggtgcc

SEQ ID NO: 2076662 - DNA, 15 bp, Homo sapiens
agaggccgggtgcca

SEQ ID NO: 2076663 - DNA, 15 bp, Homo sapiens
gaggccgggtgccat

SEQ ID NO: 2076664 - DNA, 15 bp, Homo sapiens
aggccgggtgccatc

SEQ ID NO: 2076665 - DNA, 15 bp, Homo sapiens
ggccgggtgccatct

SEQ ID NO: 2076666 - DNA, 15 bp, Homo sapiens
gccgggtgccatctt

SEQ ID NO: 2076667 - DNA, 15 bp, Homo sapiens
ccgggtgccatcttt

SEQ ID NO: 2076668 - DNA, 15 bp, Homo sapiens
cgggtgccatctttg

SEQ ID NO: 2076669 - DNA, 15 bp, Homo sapiens
gggtgccatctttgt

SEQ ID NO: 2076670 - DNA, 15 bp, Homo sapiens
ggtgccatctttgtc

SEQ ID NO: 2076671 - DNA, 15 bp, Homo sapiens
gtgccatctttgtcc

SEQ ID NO: 2076672 - DNA, 15 bp, Homo sapiens
tgccatctttgtcca

SEQ ID NO: 2076673 - DNA, 15 bp, Homo sapiens
gccatctttgtccac

SEQ ID NO: 2076674 - DNA, 15 bp, Homo sapiens
ccatctttgtccact

SEQ ID NO: 2076675 - DNA, 15 bp, Homo sapiens
catctttgtccactt

SEQ ID NO: 2076676 - DNA, 15 bp, Homo sapiens
atctttgtccacttc

SEQ ID NO: 2076677 - DNA, 15 bp, Homo sapiens
tctttgtccacttca

SEQ ID NO: 2076678 - DNA, 15 bp, Homo sapiens
ctttgtccacttcac

SEQ ID NO: 2076679 - DNA, 15 bp, Homo sapiens
tttgtccacttcacc

SEQ ID NO: 2076680 - DNA, 15 bp, Homo sapiens
ttgtccacttcacca

SEQ ID NO: 2076681 - DNA, 15 bp, Homo sapiens
tgtccacttcaccac

SEQ ID NO: 2076682 - DNA, 15 bp, Homo sapiens
gtccacttcaccacc

SEQ ID NO: 2076683 - DNA, 15 bp, Homo sapiens
tccacttcaccaccc

SEQ ID NO: 2076684 - DNA, 15 bp, Homo sapiens
ccacttcaccaccct

SEQ ID NO: 2076685 - DNA, 15 bp, Homo sapiens
cacttcaccaccctg

SEQ ID NO: 2076686 - DNA, 15 bp, Homo sapiens
acttcaccaccctga

SEQ ID NO: 2076687 - DNA, 15 bp, Homo sapiens
cttcaccaccctgaa

SEQ ID NO: 2076688 - DNA, 15 bp, Homo sapiens
ttcaccaccctgaac

SEQ ID NO: 2076689 - DNA, 15 bp, Homo sapiens
tcaccaccctgaacc

SEQ ID NO: 2076690 - DNA, 15 bp, Homo sapiens
caccaccctgaacca

SEQ ID NO: 2076691 - DNA, 15 bp, Homo sapiens
accaccctgaaccag

SEQ ID NO: 2076692 - DNA, 15 bp, Homo sapiens
ccaccctgaaccagc

SEQ ID NO: 2076693 - DNA, 15 bp, Homo sapiens
caccctgaaccagct

SEQ ID NO: 2076694 - DNA, 15 bp, Homo sapiens
accctgaaccagctg

SEQ ID NO: 2076695 - DNA, 15 bp, Homo sapiens
ccctgaaccagctga

SEQ ID NO: 2076696 - DNA, 15 bp, Homo sapiens
cctgaaccagctgag

SEQ ID NO: 2076697 - DNA, 15 bp, Homo sapiens
ctgaaccagctgagt

SEQ ID NO: 2076698 - DNA, 15 bp, Homo sapiens
tgaaccagctgagtg

SEQ ID NO: 2076699 - DNA, 15 bp, Homo sapiens
gaaccagctgagtga

SEQ ID NO: 2076700 - DNA, 15 bp, Homo sapiens
aaccagctgagtgac

SEQ ID NO: 2076701 - DNA, 15 bp, Homo sapiens
accagctgagtgacc

SEQ ID NO: 2076702 - DNA, 15 bp, Homo sapiens
ccagctgagtgacct

SEQ ID NO: 2076703 - DNA, 15 bp, Homo sapiens
cagctgagtgacctg

SEQ ID NO: 2076704 - DNA, 15 bp, Homo sapiens
agctgagtgacctgg

SEQ ID NO: 2076705 - DNA, 15 bp, Homo sapiens
gctgagtgacctggg

SEQ ID NO: 2076706 - DNA, 15 bp, Homo sapiens
ctgagtgacctgggc

SEQ ID NO: 2076707 - DNA, 15 bp, Homo sapiens
tgagtgacctgggcg

SEQ ID NO: 2076708 - DNA, 15 bp, Homo sapiens
gagtgacctgggcgc

SEQ ID NO: 2076709 - DNA, 15 bp, Homo sapiens
agtgacctgggcgca

SEQ ID NO: 2076710 - DNA, 15 bp, Homo sapiens
gtgacctgggcgcag

SEQ ID NO: 2076711 - DNA, 15 bp, Homo sapiens
tgacctgggcgcagc

SEQ ID NO: 2076712 - DNA, 15 bp, Homo sapiens
gacctgggcgcagcc

SEQ ID NO: 2076713 - DNA, 15 bp, Homo sapiens
acctgggcgcagccc

SEQ ID NO: 2076714 - DNA, 15 bp, Homo sapiens
cctgggcgcagccct

SEQ ID NO: 2076715 - DNA, 15 bp, Homo sapiens
ctgggcgcagccctg

SEQ ID NO: 2076716 - DNA, 15 bp, Homo sapiens
tgggcgcagccctga

SEQ ID NO: 2076717 - DNA, 15 bp, Homo sapiens
gggcgcagccctgac

SEQ ID NO: 2076718 - DNA, 15 bp, Homo sapiens
ggcgcagccctgacc

SEQ ID NO: 2076719 - DNA, 15 bp, Homo sapiens
gcgcagccctgacct

SEQ ID NO: 2076720 - DNA, 15 bp, Homo sapiens
cgcagccctgacctc

SEQ ID NO: 2076721 - DNA, 15 bp, Homo sapiens
gcagccctgacctca

SEQ ID NO: 2076722 - DNA, 15 bp, Homo sapiens
cagccctgacctcat

SEQ ID NO: 2076723 - DNA, 15 bp, Homo sapiens
agccctgacctcatc

SEQ ID NO: 2076724 - DNA, 15 bp, Homo sapiens
gccctgacctcatcc

SEQ ID NO: 2076725 - DNA, 15 bp, Homo sapiens
ccctgacctcatcct

SEQ ID NO: 2076726 - DNA, 15 bp, Homo sapiens
cctgacctcatccta

SEQ ID NO: 2076727 - DNA, 15 bp, Homo sapiens
ctgacctcatcctac

SEQ ID NO: 2076728 - DNA, 15 bp, Homo sapiens
tgacctcatcctact

SEQ ID NO: 2076729 - DNA, 15 bp, Homo sapiens
gacctcatcctactt

SEQ ID NO: 2076730 - DNA, 15 bp, Homo sapiens
acctcatcctactta

SEQ ID NO: 2076731 - DNA, 15 bp, Homo sapiens
cctcatcctacttaa

SEQ ID NO: 2076732 - DNA, 15 bp, Homo sapiens
ctcatcctacttaaa

SEQ ID NO: 2076733 - DNA, 15 bp, Homo sapiens
tcatcctacttaaag

SEQ ID NO: 2076734 - DNA, 15 bp, Homo sapiens
catcctacttaaagc

SEQ ID NO: 2076735 - DNA, 15 bp, Homo sapiens
atcctacttaaagct

SEQ ID NO: 2076736 - DNA, 15 bp, Homo sapiens
tcctacttaaagctt

SEQ ID NO: 2076737 - DNA, 15 bp, Homo sapiens
cctacttaaagcttc

SEQ ID NO: 2076738 - DNA, 15 bp, Homo sapiens
ctacttaaagcttcc

SEQ ID NO: 2076739 - DNA, 15 bp, Homo sapiens
tacttaaagcttccc

SEQ ID NO: 2076740 - DNA, 15 bp, Homo sapiens
acttaaagcttcccg

SEQ ID NO: 2076741 - DNA, 15 bp, Homo sapiens
cttaaagcttcccgc

SEQ ID NO: 2076742 - DNA, 15 bp, Homo sapiens
ttaaagcttcccgct

SEQ ID NO: 2076743 - DNA, 15 bp, Homo sapiens
taaagcttcccgctg

SEQ ID NO: 2076744 - DNA, 15 bp, Homo sapiens
aaagcttcccgctga

SEQ ID NO: 2076745 - DNA, 15 bp, Homo sapiens
aagcttcccgctgag

SEQ ID NO: 2076746 - DNA, 15 bp, Homo sapiens
agcttcccgctgagt

SEQ ID NO: 2076747 - DNA, 15 bp, Homo sapiens
gcttcccgctgagta

SEQ ID NO: 2076748 - DNA, 15 bp, Homo sapiens
cttcccgctgagtaa

SEQ ID NO: 2076749 - DNA, 15 bp, Homo sapiens
ttcccgctgagtaaa

SEQ ID NO: 2076750 - DNA, 15 bp, Homo sapiens
tcccgctgagtaaaa

SEQ ID NO: 2076751 - DNA, 15 bp, Homo sapiens
cccgctgagtaaaat

SEQ ID NO: 2076752 - DNA, 15 bp, Homo sapiens
ccgctgagtaaaatg

SEQ ID NO: 2076753 - DNA, 15 bp, Homo sapiens
cgctgagtaaaatga

SEQ ID NO: 2076754 - DNA, 15 bp, Homo sapiens
gctgagtaaaatgag

SEQ ID NO: 2076755 - DNA, 15 bp, Homo sapiens
ctgagtaaaatgaga

SEQ ID NO: 2076756 - DNA, 15 bp, Homo sapiens
tgagtaaaatgagaa

SEQ ID NO: 2076757 - DNA, 15 bp, Homo sapiens
gagtaaaatgagaat

SEQ ID NO: 2076758 - DNA, 15 bp, Homo sapiens
agtaaaatgagaata

SEQ ID NO: 2076759 - DNA, 15 bp, Homo sapiens
gtaaaatgagaataa

SEQ ID NO: 2076760 - DNA, 15 bp, Homo sapiens
taaaatgagaataat

SEQ ID NO: 2076761 - DNA, 15 bp, Homo sapiens
aaaatgagaataata

SEQ ID NO: 2076762 - DNA, 15 bp, Homo sapiens
aaatgagaataataa

SEQ ID NO: 2076763 - DNA, 15 bp, Homo sapiens
aatgagaataataat

SEQ ID NO: 2076764 - DNA, 15 bp, Homo sapiens
atgagaataataatc

SEQ ID NO: 2076765 - DNA, 15 bp, Homo sapiens
tgagaataataatct

SEQ ID NO: 2076766 - DNA, 15 bp, Homo sapiens
gagaataataatctg

SEQ ID NO: 2076767 - DNA, 15 bp, Homo sapiens
agaataataatctga

SEQ ID NO: 2076768 - DNA, 15 bp, Homo sapiens
gaataataatctgag

SEQ ID NO: 2076769 - DNA, 15 bp, Homo sapiens
aataataatctgagc

SEQ ID NO: 2076770 - DNA, 15 bp, Homo sapiens
ataataatctgagct

SEQ ID NO: 2076771 - DNA, 15 bp, Homo sapiens
taataatctgagctc

SEQ ID NO: 2076772 - DNA, 15 bp, Homo sapiens
aataatctgagctcc

SEQ ID NO: 2076773 - DNA, 15 bp, Homo sapiens
ataatctgagctcct

SEQ ID NO: 2076774 - DNA, 15 bp, Homo sapiens
taatctgagctcctg

SEQ ID NO: 2076775 - DNA, 15 bp, Homo sapiens
aatctgagctcctgg

SEQ ID NO: 2076776 - DNA, 15 bp, Homo sapiens
atctgagctcctggg

SEQ ID NO: 2076777 - DNA, 15 bp, Homo sapiens
tctgagctcctgggg

SEQ ID NO: 2076778 - DNA, 15 bp, Homo sapiens
ctgagctcctggggt

SEQ ID NO: 2076779 - DNA, 15 bp, Homo sapiens
tgagctcctggggtg

SEQ ID NO: 2076780 - DNA, 15 bp, Homo sapiens
gagctcctggggtgt

SEQ ID NO: 2076781 - DNA, 15 bp, Homo sapiens
agctcctggggtgtg

SEQ ID NO: 2076782 - DNA, 15 bp, Homo sapiens
gctcctggggtgtga

SEQ ID NO: 2076783 - DNA, 15 bp, Homo sapiens
ctcctggggtgtgat

SEQ ID NO: 2076784 - DNA, 15 bp, Homo sapiens
tcctggggtgtgatg

SEQ ID NO: 2076785 - DNA, 15 bp, Homo sapiens
cctggggtgtgatgg

SEQ ID NO: 2076786 - DNA, 15 bp, Homo sapiens
ctggggtgtgatggg

SEQ ID NO: 2076787 - DNA, 15 bp, Homo sapiens
tggggtgtgatggga

SEQ ID NO: 2076788 - DNA, 15 bp, Homo sapiens
ggggtgtgatgggac

SEQ ID NO: 2076789 - DNA, 15 bp, Homo sapiens
gggtgtgatgggaca

SEQ ID NO: 2076790 - DNA, 15 bp, Homo sapiens
ggtgtgatgggacac

SEQ ID NO: 2076791 - DNA, 15 bp, Homo sapiens
gtgtgatgggacaca

SEQ ID NO: 2076792 - DNA, 15 bp, Homo sapiens
tgtgatgggacacaa

SEQ ID NO: 2076793 - DNA, 15 bp, Homo sapiens
gtgatgggacacaaa

SEQ ID NO: 2076794 - DNA, 15 bp, Homo sapiens
tgatgggacacaaag

SEQ ID NO: 2076795 - DNA, 15 bp, Homo sapiens
gatgggacacaaagg

SEQ ID NO: 2076796 - DNA, 15 bp, Homo sapiens
atgggacacaaaggg

SEQ ID NO: 2076797 - DNA, 15 bp, Homo sapiens
tgggacacaaaggga

SEQ ID NO: 2076798 - DNA, 15 bp, Homo sapiens
gggacacaaagggag

SEQ ID NO: 2076799 - DNA, 15 bp, Homo sapiens
ggacacaaagggaga

SEQ ID NO: 2076800 - DNA, 15 bp, Homo sapiens
gacacaaagggagaa

SEQ ID NO: 2076801 - DNA, 15 bp, Homo sapiens
acacaaagggagaat

SEQ ID NO: 2076802 - DNA, 15 bp, Homo sapiens
cacaaagggagaatg

SEQ ID NO: 2076803 - DNA, 15 bp, Homo sapiens
acaaagggagaatgt

SEQ ID NO: 2076804 - DNA, 15 bp, Homo sapiens
caaagggagaatgta

SEQ ID NO: 2076805 - DNA, 15 bp, Homo sapiens
aaagggagaatgtac

SEQ ID NO: 2076806 - DNA, 15 bp, Homo sapiens
aagggagaatgtaca

SEQ ID NO: 2076807 - DNA, 15 bp, Homo sapiens
agggagaatgtacat

SEQ ID NO: 2076808 - DNA, 15 bp, Homo sapiens
gggagaatgtacatc

SEQ ID NO: 2076809 - DNA, 15 bp, Homo sapiens
ggagaatgtacatca

SEQ ID NO: 2076810 - DNA, 15 bp, Homo sapiens
gagaatgtacatcaa

SEQ ID NO: 2076811 - DNA, 15 bp, Homo sapiens
agaatgtacatcaag

SEQ ID NO: 2076812 - DNA, 15 bp, Homo sapiens
gaatgtacatcaagg

SEQ ID NO: 2076813 - DNA, 15 bp, Homo sapiens
aatgtacatcaaggc

SEQ ID NO: 2076814 - DNA, 15 bp, Homo sapiens
atgtacatcaaggcc

SEQ ID NO: 2076815 - DNA, 15 bp, Homo sapiens
tgtacatcaaggccg

SEQ ID NO: 2076816 - DNA, 15 bp, Homo sapiens
gtacatcaaggccgt

SEQ ID NO: 2076817 - DNA, 15 bp, Homo sapiens
tacatcaaggccgtc

SEQ ID NO: 2076818 - DNA, 15 bp, Homo sapiens
acatcaaggccgtcg

SEQ ID NO: 2076819 - DNA, 15 bp, Homo sapiens
catcaaggccgtcgt

SEQ ID NO: 2076820 - DNA, 15 bp, Homo sapiens
atcaaggccgtcgtc

SEQ ID NO: 2076821 - DNA, 15 bp, Homo sapiens
tcaaggccgtcgtca

SEQ ID NO: 2076822 - DNA, 15 bp, Homo sapiens
caaggccgtcgtcac

SEQ ID NO: 2076823 - DNA, 15 bp, Homo sapiens
aaggccgtcgtcaca

SEQ ID NO: 2076824 - DNA, 15 bp, Homo sapiens
aggccgtcgtcacat

SEQ ID NO: 2076825 - DNA, 15 bp, Homo sapiens
ggccgtcgtcacatc

SEQ ID NO: 2076826 - DNA, 15 bp, Homo sapiens
gccgtcgtcacatca

SEQ ID NO: 2076827 - DNA, 15 bp, Homo sapiens
ccgtcgtcacatcac

SEQ ID NO: 2076828 - DNA, 15 bp, Homo sapiens
cgtcgtcacatcaca

SEQ ID NO: 2076829 - DNA, 15 bp, Homo sapiens
gtcgtcacatcacaa

SEQ ID NO: 2076830 - DNA, 15 bp, Homo sapiens
tcgtcacatcacaac

SEQ ID NO: 2076831 - DNA, 15 bp, Homo sapiens
cgtcacatcacaacc

SEQ ID NO: 2076832 - DNA, 15 bp, Homo sapiens
gtcacatcacaacca

SEQ ID NO: 2076833 - DNA, 15 bp, Homo sapiens
tcacatcacaaccac

SEQ ID NO: 2076834 - DNA, 15 bp, Homo sapiens
cacatcacaaccaca

SEQ ID NO: 2076835 - DNA, 15 bp, Homo sapiens
acatcacaaccacat

SEQ ID NO: 2076836 - DNA, 15 bp, Homo sapiens
catcacaaccacatc

SEQ ID NO: 2076837 - DNA, 15 bp, Homo sapiens
atcacaaccacatcc

SEQ ID NO: 2076838 - DNA, 15 bp, Homo sapiens
tcacaaccacatcct

SEQ ID NO: 2076839 - DNA, 15 bp, Homo sapiens
cacaaccacatccta

SEQ ID NO: 2076840 - DNA, 15 bp, Homo sapiens
acaaccacatcctag

SEQ ID NO: 2076841 - DNA, 15 bp, Homo sapiens
caaccacatcctagg

SEQ ID NO: 2076842 - DNA, 15 bp, Homo sapiens
aaccacatcctagga

SEQ ID NO: 2076843 - DNA, 15 bp, Homo sapiens
accacatcctaggac

SEQ ID NO: 2076844 - DNA, 15 bp, Homo sapiens
ccacatcctaggacg

SEQ ID NO: 2076845 - DNA, 15 bp, Homo sapiens
cacatcctaggacgt

SEQ ID NO: 2076846 - DNA, 15 bp, Homo sapiens
acatcctaggacgtc

SEQ ID NO: 2076847 - DNA, 15 bp, Homo sapiens
catcctaggacgtcc

SEQ ID NO: 2076848 - DNA, 15 bp, Homo sapiens
atcctaggacgtccc

SEQ ID NO: 2076849 - DNA, 15 bp, Homo sapiens
tcctaggacgtccca

SEQ ID NO: 2076850 - DNA, 15 bp, Homo sapiens
cctaggacgtcccaa

SEQ ID NO: 2076851 - DNA, 15 bp, Homo sapiens
ctaggacgtcccaac

SEQ ID NO: 2076852 - DNA, 15 bp, Homo sapiens
taggacgtcccaacc

SEQ ID NO: 2076853 - DNA, 15 bp, Homo sapiens
aggacgtcccaacca

SEQ ID NO: 2076854 - DNA, 15 bp, Homo sapiens
ggacgtcccaaccat

SEQ ID NO: 2076855 - DNA, 15 bp, Homo sapiens
gacgtcccaaccatc

SEQ ID NO: 2076856 - DNA, 15 bp, Homo sapiens
acgtcccaaccatct

SEQ ID NO: 2076857 - DNA, 15 bp, Homo sapiens
cgtcccaaccatctt

SEQ ID NO: 2076858 - DNA, 15 bp, Homo sapiens
gtcccaaccatcttc

SEQ ID NO: 2076859 - DNA, 15 bp, Homo sapiens
tcccaaccatcttct

SEQ ID NO: 2076860 - DNA, 15 bp, Homo sapiens
cccaaccatcttctg

SEQ ID NO: 2076861 - DNA, 15 bp, Homo sapiens
ccaaccatcttctgg

SEQ ID NO: 2076862 - DNA, 15 bp, Homo sapiens
caaccatcttctggg

SEQ ID NO: 2076863 - DNA, 15 bp, Homo sapiens
aaccatcttctgggc

SEQ ID NO: 2076864 - DNA, 15 bp, Homo sapiens
accatcttctgggct

SEQ ID NO: 2076865 - DNA, 15 bp, Homo sapiens
ccatcttctgggctt

SEQ ID NO: 2076866 - DNA, 15 bp, Homo sapiens
catcttctgggctta

SEQ ID NO: 2076867 - DNA, 15 bp, Homo sapiens
atcttctgggcttag

SEQ ID NO: 2076868 - DNA, 15 bp, Homo sapiens
tcttctgggcttaga

SEQ ID NO: 2076869 - DNA, 15 bp, Homo sapiens
cttctgggcttagac

SEQ ID NO: 2076870 - DNA, 15 bp, Homo sapiens
ttctgggcttagaca

SEQ ID NO: 2076871 - DNA, 15 bp, Homo sapiens
tctgggcttagacac

SEQ ID NO: 2076872 - DNA, 15 bp, Homo sapiens
ctgggcttagacacc

SEQ ID NO: 2076873 - DNA, 15 bp, Homo sapiens
tgggcttagacacct

SEQ ID NO: 2076874 - DNA, 15 bp, Homo sapiens
gggcttagacacctc

SEQ ID NO: 2076875 - DNA, 15 bp, Homo sapiens
ggcttagacacctca

SEQ ID NO: 2076876 - DNA, 15 bp, Homo sapiens
gcttagacacctcac

SEQ ID NO: 2076877 - DNA, 15 bp, Homo sapiens
cttagacacctcacc

SEQ ID NO: 2076878 - DNA, 15 bp, Homo sapiens
ttagacacctcaccc

SEQ ID NO: 2076879 - DNA, 15 bp, Homo sapiens
tagacacctcaccct

SEQ ID NO: 2076880 - DNA, 15 bp, Homo sapiens
agacacctcaccctg

SEQ ID NO: 2076881 - DNA, 15 bp, Homo sapiens
gacacctcaccctgc

SEQ ID NO: 2076882 - DNA, 15 bp, Homo sapiens
acacctcaccctgcg

SEQ ID NO: 2076883 - DNA, 15 bp, Homo sapiens
cacctcaccctgcgc

SEQ ID NO: 2076884 - DNA, 15 bp, Homo sapiens
acctcaccctgcgcc

SEQ ID NO: 2076885 - DNA, 15 bp, Homo sapiens
cctcaccctgcgcct

SEQ ID NO: 2076886 - DNA, 15 bp, Homo sapiens
ctcaccctgcgcctt

SEQ ID NO: 2076887 - DNA, 15 bp, Homo sapiens
tcaccctgcgccttc

SEQ ID NO: 2076888 - DNA, 15 bp, Homo sapiens
caccctgcgccttcc

SEQ ID NO: 2076889 - DNA, 15 bp, Homo sapiens
accctgcgccttccg

SEQ ID NO: 2076890 - DNA, 15 bp, Homo sapiens
ccctgcgccttccgc

SEQ ID NO: 2076891 - DNA, 15 bp, Homo sapiens
cctgcgccttccgcc

SEQ ID NO: 2076892 - DNA, 15 bp, Homo sapiens
ctgcgccttccgccc

SEQ ID NO: 2076893 - DNA, 15 bp, Homo sapiens
tgcgccttccgccca

SEQ ID NO: 2076894 - DNA, 15 bp, Homo sapiens
gcgccttccgcccac

SEQ ID NO: 2076895 - DNA, 15 bp, Homo sapiens
cgccttccgcccacc

SEQ ID NO: 2076896 - DNA, 15 bp, Homo sapiens
gccttccgcccaccc

SEQ ID NO: 2076897 - DNA, 15 bp, Homo sapiens
ccttccgcccaccct

SEQ ID NO: 2076898 - DNA, 15 bp, Homo sapiens
cttccgcccaccctc

SEQ ID NO: 2076899 - DNA, 15 bp, Homo sapiens
ttccgcccaccctcc

SEQ ID NO: 2076900 - DNA, 15 bp, Homo sapiens
tccgcccaccctcca

SEQ ID NO: 2076901 - DNA, 15 bp, Homo sapiens
ccgcccaccctccac

SEQ ID NO: 2076902 - DNA, 15 bp, Homo sapiens
cgcccaccctccacc

SEQ ID NO: 2076903 - DNA, 15 bp, Homo sapiens
gcccaccctccaccc

SEQ ID NO: 2076904 - DNA, 15 bp, Homo sapiens
cccaccctccaccct

SEQ ID NO: 2076905 - DNA, 15 bp, Homo sapiens
ccaccctccaccctc

SEQ ID NO: 2076906 - DNA, 15 bp, Homo sapiens
caccctccaccctcc

SEQ ID NO: 2076907 - DNA, 15 bp, Homo sapiens
accctccaccctcca

SEQ ID NO: 2076908 - DNA, 15 bp, Homo sapiens
ccctccaccctccac

SEQ ID NO: 2076909 - DNA, 15 bp, Homo sapiens
cctccaccctccacc

SEQ ID NO: 2076910 - DNA, 15 bp, Homo sapiens
ctccaccctccaccc

SEQ ID NO: 2076911 - DNA, 15 bp, Homo sapiens
tccaccctccaccct

SEQ ID NO: 2076912 - DNA, 15 bp, Homo sapiens
cctccaccctccacg

SEQ ID NO: 2076913 - DNA, 15 bp, Homo sapiens
ctccaccctccacgt

SEQ ID NO: 2076914 - DNA, 15 bp, Homo sapiens
tccaccctccacgtg

SEQ ID NO: 2076915 - DNA, 15 bp, Homo sapiens
ccaccctccacgtgt

SEQ ID NO: 2076916 - DNA, 15 bp, Homo sapiens
caccctccacgtgta

SEQ ID NO: 2076917 - DNA, 15 bp, Homo sapiens
accctccacgtgtac

SEQ ID NO: 2076918 - DNA, 15 bp, Homo sapiens
ccctccacgtgtacc

SEQ ID NO: 2076919 - DNA, 15 bp, Homo sapiens
cctccacgtgtacct

SEQ ID NO: 2076920 - DNA, 15 bp, Homo sapiens
ctccacgtgtacctg

SEQ ID NO: 2076921 - DNA, 15 bp, Homo sapiens
tccacgtgtacctgc

SEQ ID NO: 2076922 - DNA, 15 bp, Homo sapiens
ccacgtgtacctgcc

SEQ ID NO: 2076923 - DNA, 15 bp, Homo sapiens
cacgtgtacctgccc

SEQ ID NO: 2076924 - DNA, 15 bp, Homo sapiens
acgtgtacctgcccc

SEQ ID NO: 2076925 - DNA, 15 bp, Homo sapiens
cgtgtacctgccccg

SEQ ID NO: 2076926 - DNA, 15 bp, Homo sapiens
gtgtacctgccccgc

SEQ ID NO: 2076927 - DNA, 15 bp, Homo sapiens
tgtacctgccccgcc

SEQ ID NO: 2076928 - DNA, 15 bp, Homo sapiens
gtacctgccccgccg

SEQ ID NO: 2076929 - DNA, 15 bp, Homo sapiens
tacctgccccgccga

SEQ ID NO: 2076930 - DNA, 15 bp, Homo sapiens
acctgccccgccgag

SEQ ID NO: 2076931 - DNA, 15 bp, Homo sapiens
cctgccccgccgagg

SEQ ID NO: 2076932 - DNA, 15 bp, Homo sapiens
ctgccccgccgaggc

SEQ ID NO: 2076933 - DNA, 15 bp, Homo sapiens
tgccccgccgaggcg

SEQ ID NO: 2076934 - DNA, 15 bp, Homo sapiens
gccccgccgaggcgg

SEQ ID NO: 2076935 - DNA, 15 bp, Homo sapiens
ccccgccgaggcggg

SEQ ID NO: 2076936 - DNA, 15 bp, Homo sapiens
cccgccgaggcgggt

SEQ ID NO: 2076937 - DNA, 15 bp, Homo sapiens
ccgccgaggcgggtc

SEQ ID NO: 2076938 - DNA, 15 bp, Homo sapiens
cgccgaggcgggtcc

SEQ ID NO: 2076939 - DNA, 15 bp, Homo sapiens
gccgaggcgggtcct

SEQ ID NO: 2076940 - DNA, 15 bp, Homo sapiens
ccgaggcgggtcctt

SEQ ID NO: 2076941 - DNA, 15 bp, Homo sapiens
cgaggcgggtccttc

SEQ ID NO: 2076942 - DNA, 15 bp, Homo sapiens
gaggcgggtccttcc

SEQ ID NO: 2076943 - DNA, 15 bp, Homo sapiens
aggcgggtccttccc

SEQ ID NO: 2076944 - DNA, 15 bp, Homo sapiens
ggcgggtccttcccc

SEQ ID NO: 2076945 - DNA, 15 bp, Homo sapiens
gcgggtccttcccct

SEQ ID NO: 2076946 - DNA, 15 bp, Homo sapiens
cgggtccttcccctg

SEQ ID NO: 2076947 - DNA, 15 bp, Homo sapiens
gggtccttcccctgc

SEQ ID NO: 2076948 - DNA, 15 bp, Homo sapiens
ggtccttcccctgca

SEQ ID NO: 2076949 - DNA, 15 bp, Homo sapiens
gtccttcccctgcag

SEQ ID NO: 2076950 - DNA, 15 bp, Homo sapiens
tccttcccctgcagc

SEQ ID NO: 2076951 - DNA, 15 bp, Homo sapiens
ccttcccctgcagca

SEQ ID NO: 2076952 - DNA, 15 bp, Homo sapiens
cttcccctgcagcac

SEQ ID NO: 2076953 - DNA, 15 bp, Homo sapiens
ttcccctgcagcacg

SEQ ID NO: 2076954 - DNA, 15 bp, Homo sapiens
tcccctgcagcacgg

SEQ ID NO: 2076955 - DNA, 15 bp, Homo sapiens
cccctgcagcacgga

SEQ ID NO: 2076956 - DNA, 15 bp, Homo sapiens
ccctgcagcacggag

SEQ ID NO: 2076957 - DNA, 15 bp, Homo sapiens
cctgcagcacggaga

SEQ ID NO: 2076958 - DNA, 15 bp, Homo sapiens
ctgcagcacggagat

SEQ ID NO: 2076959 - DNA, 15 bp, Homo sapiens
tgcagcacggagatc

SEQ ID NO: 2076960 - DNA, 15 bp, Homo sapiens
gcagcacggagatct

SEQ ID NO: 2076961 - DNA, 15 bp, Homo sapiens
cagcacggagatctg

SEQ ID NO: 2076962 - DNA, 15 bp, Homo sapiens
agcacggagatctgg

SEQ ID NO: 2076963 - DNA, 15 bp, Homo sapiens
gcacggagatctggc

SEQ ID NO: 2076964 - DNA, 15 bp, Homo sapiens
cacggagatctggcg

SEQ ID NO: 2076965 - DNA, 15 bp, Homo sapiens
acggagatctggcgc

SEQ ID NO: 2076966 - DNA, 15 bp, Homo sapiens
cggagatctggcgcc

SEQ ID NO: 2076967 - DNA, 15 bp, Homo sapiens
ggagatctggcgcca

SEQ ID NO: 2076968 - DNA, 15 bp, Homo sapiens
gagatctggcgccat

SEQ ID NO: 2076969 - DNA, 15 bp, Homo sapiens
agatctggcgccatc

SEQ ID NO: 2076970 - DNA, 15 bp, Homo sapiens
gatctggcgccatct

SEQ ID NO: 2076971 - DNA, 15 bp, Homo sapiens
atctggcgccatcta

SEQ ID NO: 2076972 - DNA, 15 bp, Homo sapiens
tctggcgccatctag

SEQ ID NO: 2076973 - DNA, 15 bp, Homo sapiens
ctggcgccatctagc

SEQ ID NO: 2076974 - DNA, 15 bp, Homo sapiens
tggcgccatctagcg

SEQ ID NO: 2076975 - DNA, 15 bp, Homo sapiens
ggcgccatctagcgg

SEQ ID NO: 2076976 - DNA, 15 bp, Homo sapiens
gcgccatctagcggg

SEQ ID NO: 2076977 - DNA, 15 bp, Homo sapiens
cgccatctagcgggc

SEQ ID NO: 2076978 - DNA, 15 bp, Homo sapiens
gccatctagcgggca

SEQ ID NO: 2076979 - DNA, 15 bp, Homo sapiens
ccatctagcgggcac

SEQ ID NO: 2076980 - DNA, 15 bp, Homo sapiens
catctagcgggcact

SEQ ID NO: 2076981 - DNA, 15 bp, Homo sapiens
atctagcgggcactt

SEQ ID NO: 2076982 - DNA, 15 bp, Homo sapiens
tctagcgggcacttc

SEQ ID NO: 2076983 - DNA, 15 bp, Homo sapiens
ctagcgggcacttcg

SEQ ID NO: 2076984 - DNA, 15 bp, Homo sapiens
tagcgggcacttcgg

SEQ ID NO: 2076985 - DNA, 15 bp, Homo sapiens
agcgggcacttcggg

SEQ ID NO: 2076986 - DNA, 15 bp, Homo sapiens
gcgggcacttcggga

SEQ ID NO: 2076987 - DNA, 15 bp, Homo sapiens
cgggcacttcgggaa

SEQ ID NO: 2076988 - DNA, 15 bp, Homo sapiens
gggcacttcgggaag

SEQ ID NO: 2076989 - DNA, 15 bp, Homo sapiens
ggcacttcgggaaga

SEQ ID NO: 2076990 - DNA, 15 bp, Homo sapiens
gcacttcgggaagag

SEQ ID NO: 2076991 - DNA, 15 bp, Homo sapiens
cacttcgggaagagc

SEQ ID NO: 2076992 - DNA, 15 bp, Homo sapiens
acttcgggaagagcg

SEQ ID NO: 2076993 - DNA, 15 bp, Homo sapiens
cttcgggaagagcgg

SEQ ID NO: 2076994 - DNA, 15 bp, Homo sapiens
ttcgggaagagcggg

SEQ ID NO: 2076995 - DNA, 15 bp, Homo sapiens
tcgggaagagcgggc

SEQ ID NO: 2076996 - DNA, 15 bp, Homo sapiens
cgggaagagcgggcg

SEQ ID NO: 2076997 - DNA, 15 bp, Homo sapiens
gggaagagcgggcgt

SEQ ID NO: 2076998 - DNA, 15 bp, Homo sapiens
ggaagagcgggcgtt

SEQ ID NO: 2076999 - DNA, 15 bp, Homo sapiens
gaagagcgggcgttc

SEQ ID NO: 2077000 - DNA, 15 bp, Homo sapiens
aagagcgggcgttcc

SEQ ID NO: 2077001 - DNA, 15 bp, Homo sapiens
agagcgggcgttccc

SEQ ID NO: 2077002 - DNA, 15 bp, Homo sapiens
gagcgggcgttcccc

SEQ ID NO: 2077003 - DNA, 15 bp, Homo sapiens
agcgggcgttccccg

SEQ ID NO: 2077004 - DNA, 15 bp, Homo sapiens
gcgggcgttccccgc

SEQ ID NO: 2077005 - DNA, 15 bp, Homo sapiens
cgggcgttccccgcc

SEQ ID NO: 2077006 - DNA, 15 bp, Homo sapiens
gggcgttccccgccc

SEQ ID NO: 2077007 - DNA, 15 bp, Homo sapiens
ggcgttccccgcccc

SEQ ID NO: 2077008 - DNA, 15 bp, Homo sapiens
gcgttccccgcccct

SEQ ID NO: 2077009 - DNA, 15 bp, Homo sapiens
cgttccccgcccctg

SEQ ID NO: 2077010 - DNA, 15 bp, Homo sapiens
gttccccgcccctgt

SEQ ID NO: 2077011 - DNA, 15 bp, Homo sapiens
ttccccgcccctgta

SEQ ID NO: 2077012 - DNA, 15 bp, Homo sapiens
tccccgcccctgtat

SEQ ID NO: 2077013 - DNA, 15 bp, Homo sapiens
ccccgcccctgtatt

SEQ ID NO: 2077014 - DNA, 15 bp, Homo sapiens
cccgcccctgtattc

SEQ ID NO: 2077015 - DNA, 15 bp, Homo sapiens
ccgcccctgtattcc

SEQ ID NO: 2077016 - DNA, 15 bp, Homo sapiens
cgcccctgtattcca

SEQ ID NO: 2077017 - DNA, 15 bp, Homo sapiens
gcccctgtattccac

SEQ ID NO: 2077018 - DNA, 15 bp, Homo sapiens
cccctgtattccacg

SEQ ID NO: 2077019 - DNA, 15 bp, Homo sapiens
ccctgtattccacgc

SEQ ID NO: 2077020 - DNA, 15 bp, Homo sapiens
cctgtattccacgca

SEQ ID NO: 2077021 - DNA, 15 bp, Homo sapiens
ctgtattccacgcac

SEQ ID NO: 2077022 - DNA, 15 bp, Homo sapiens
tgtattccacgcacc

SEQ ID NO: 2077023 - DNA, 15 bp, Homo sapiens
gtattccacgcaccg

SEQ ID NO: 2077024 - DNA, 15 bp, Homo sapiens
tattccacgcaccgt

SEQ ID NO: 2077025 - DNA, 15 bp, Homo sapiens
attccacgcaccgtg

SEQ ID NO: 2077026 - DNA, 15 bp, Homo sapiens
ttccacgcaccgtgg

SEQ ID NO: 2077027 - DNA, 15 bp, Homo sapiens
tccacgcaccgtggg

SEQ ID NO: 2077028 - DNA, 15 bp, Homo sapiens
ccacgcaccgtgggt

SEQ ID NO: 2077029 - DNA, 15 bp, Homo sapiens
cacgcaccgtgggtg

SEQ ID NO: 2077030 - DNA, 15 bp, Homo sapiens
acgcaccgtgggtgg

SEQ ID NO: 2077031 - DNA, 15 bp, Homo sapiens
cgcaccgtgggtggg

SEQ ID NO: 2077032 - DNA, 15 bp, Homo sapiens
gcaccgtgggtgggg

SEQ ID NO: 2077033 - DNA, 15 bp, Homo sapiens
caccgtgggtggggc

SEQ ID NO: 2077034 - DNA, 15 bp, Homo sapiens
accgtgggtggggcc

SEQ ID NO: 2077035 - DNA, 15 bp, Homo sapiens
ccgtgggtggggccg

SEQ ID NO: 2077036 - DNA, 15 bp, Homo sapiens
cgtgggtggggccgc

SEQ ID NO: 2077037 - DNA, 15 bp, Homo sapiens
gtgggtggggccgca

SEQ ID NO: 2077038 - DNA, 15 bp, Homo sapiens
tgggtggggccgcac

SEQ ID NO: 2077039 - DNA, 15 bp, Homo sapiens
gggtggggccgcacc

SEQ ID NO: 2077040 - DNA, 15 bp, Homo sapiens
ggtggggccgcaccc

SEQ ID NO: 2077041 - DNA, 15 bp, Homo sapiens
gtggggccgcacccc

SEQ ID NO: 2077042 - DNA, 15 bp, Homo sapiens
tggggccgcaccccg

SEQ ID NO: 2077043 - DNA, 15 bp, Homo sapiens
ggggccgcaccccgg

SEQ ID NO: 2077044 - DNA, 15 bp, Homo sapiens
gggccgcaccccggg

SEQ ID NO: 2077045 - DNA, 15 bp, Homo sapiens
ggccgcaccccggga

SEQ ID NO: 2077046 - DNA, 15 bp, Homo sapiens
gccgcaccccgggac

SEQ ID NO: 2077047 - DNA, 15 bp, Homo sapiens
ccgcaccccgggacc

SEQ ID NO: 2077048 - DNA, 15 bp, Homo sapiens
cgcaccccgggaccc

SEQ ID NO: 2077049 - DNA, 15 bp, Homo sapiens
gcaccccgggacccc

SEQ ID NO: 2077050 - DNA, 15 bp, Homo sapiens
caccccgggaccccg

SEQ ID NO: 2077051 - DNA, 15 bp, Homo sapiens
accccgggaccccgc

SEQ ID NO: 2077052 - DNA, 15 bp, Homo sapiens
ccccgggaccccgcc

SEQ ID NO: 2077053 - DNA, 15 bp, Homo sapiens
cccgggaccccgccc

SEQ ID NO: 2077054 - DNA, 15 bp, Homo sapiens
ccgggaccccgcccc

SEQ ID NO: 2077055 - DNA, 15 bp, Homo sapiens
cgggaccccgccccg

SEQ ID NO: 2077056 - DNA, 15 bp, Homo sapiens
gggaccccgccccga

SEQ ID NO: 2077057 - DNA, 15 bp, Homo sapiens
ggaccccgccccgac

SEQ ID NO: 2077058 - DNA, 15 bp, Homo sapiens
gaccccgccccgaca

SEQ ID NO: 2077059 - DNA, 15 bp, Homo sapiens
accccgccccgacat

SEQ ID NO: 2077060 - DNA, 15 bp, Homo sapiens
ccccgccccgacatt

SEQ ID NO: 2077061 - DNA, 15 bp, Homo sapiens
cccgccccgacattc

SEQ ID NO: 2077062 - DNA, 15 bp, Homo sapiens
ccgccccgacattcc

SEQ ID NO: 2077063 - DNA, 15 bp, Homo sapiens
cgccccgacattcct

SEQ ID NO: 2077064 - DNA, 15 bp, Homo sapiens
gccccgacattcctc

SEQ ID NO: 2077065 - DNA, 15 bp, Homo sapiens
ccccgacattcctca

SEQ ID NO: 2077066 - DNA, 15 bp, Homo sapiens
cccgacattcctcac

SEQ ID NO: 2077067 - DNA, 15 bp, Homo sapiens
ccgacattcctcact

SEQ ID NO: 2077068 - DNA, 15 bp, Homo sapiens
cgacattcctcactg

SEQ ID NO: 2077069 - DNA, 15 bp, Homo sapiens
gacattcctcactga

SEQ ID NO: 2077070 - DNA, 15 bp, Homo sapiens
acattcctcactgag

SEQ ID NO: 2077071 - DNA, 15 bp, Homo sapiens
cattcctcactgagc

SEQ ID NO: 2077072 - DNA, 15 bp, Homo sapiens
attcctcactgagca

SEQ ID NO: 2077073 - DNA, 15 bp, Homo sapiens
ttcctcactgagcag

SEQ ID NO: 2077074 - DNA, 15 bp, Homo sapiens
tcctcactgagcaga

SEQ ID NO: 2077075 - DNA, 15 bp, Homo sapiens
cctcactgagcagag

SEQ ID NO: 2077076 - DNA, 15 bp, Homo sapiens
ctcactgagcagagt

SEQ ID NO: 2077077 - DNA, 15 bp, Homo sapiens
tcactgagcagagtt

SEQ ID NO: 2077078 - DNA, 15 bp, Homo sapiens
cactgagcagagttg

SEQ ID NO: 2077079 - DNA, 15 bp, Homo sapiens
actgagcagagttgg

SEQ ID NO: 2077080 - DNA, 15 bp, Homo sapiens
ctgagcagagttggg

SEQ ID NO: 2077081 - DNA, 15 bp, Homo sapiens
tgagcagagttgggc

SEQ ID NO: 2077082 - DNA, 15 bp, Homo sapiens
gagcagagttgggcc

SEQ ID NO: 2077083 - DNA, 15 bp, Homo sapiens
agcagagttgggccc

SEQ ID NO: 2077084 - DNA, 15 bp, Homo sapiens
gcagagttgggccca

SEQ ID NO: 2077085 - DNA, 15 bp, Homo sapiens
cagagttgggcccag

SEQ ID NO: 2077086 - DNA, 15 bp, Homo sapiens
agagttgggcccagg

SEQ ID NO: 2077087 - DNA, 15 bp, Homo sapiens
gagttgggcccagga

SEQ ID NO: 2077088 - DNA, 15 bp, Homo sapiens
agttgggcccaggat

SEQ ID NO: 2077089 - DNA, 15 bp, Homo sapiens
gttgggcccaggatc

SEQ ID NO: 2077090 - DNA, 15 bp, Homo sapiens
ttgggcccaggatca

SEQ ID NO: 2077091 - DNA, 15 bp, Homo sapiens
tgggcccaggatcaa

SEQ ID NO: 2077092 - DNA, 15 bp, Homo sapiens
gggcccaggatcaaa

SEQ ID NO: 2077093 - DNA, 15 bp, Homo sapiens
ggcccaggatcaaac

SEQ ID NO: 2077094 - DNA, 15 bp, Homo sapiens
gcccaggatcaaacc

SEQ ID NO: 2077095 - DNA, 15 bp, Homo sapiens
cccaggatcaaaccg

SEQ ID NO: 2077096 - DNA, 15 bp, Homo sapiens
ccaggatcaaaccga

SEQ ID NO: 2077097 - DNA, 15 bp, Homo sapiens
caggatcaaaccgag

SEQ ID NO: 2077098 - DNA, 15 bp, Homo sapiens
aggatcaaaccgagg

SEQ ID NO: 2077099 - DNA, 15 bp, Homo sapiens
ggatcaaaccgagga

SEQ ID NO: 2077100 - DNA, 15 bp, Homo sapiens
gatcaaaccgaggat

SEQ ID NO: 2077101 - DNA, 15 bp, Homo sapiens
atcaaaccgaggatc

SEQ ID NO: 2077102 - DNA, 15 bp, Homo sapiens
tcaaaccgaggatct

SEQ ID NO: 2077103 - DNA, 15 bp, Homo sapiens
caaaccgaggatctg

SEQ ID NO: 2077104 - DNA, 15 bp, Homo sapiens
aaaccgaggatctgc

SEQ ID NO: 2077105 - DNA, 15 bp, Homo sapiens
aaccgaggatctgcc

SEQ ID NO: 2077106 - DNA, 15 bp, Homo sapiens
accgaggatctgcct

SEQ ID NO: 2077107 - DNA, 15 bp, Homo sapiens
ccgaggatctgcctc

SEQ ID NO: 2077108 - DNA, 15 bp, Homo sapiens
cgaggatctgcctcc

SEQ ID NO: 2077109 - DNA, 15 bp, Homo sapiens
gaggatctgcctccg

SEQ ID NO: 2077110 - DNA, 15 bp, Homo sapiens
aggatctgcctccgt

SEQ ID NO: 2077111 - DNA, 15 bp, Homo sapiens
ggatctgcctccgtt

SEQ ID NO: 2077112 - DNA, 15 bp, Homo sapiens
gatctgcctccgttg

SEQ ID NO: 2077113 - DNA, 15 bp, Homo sapiens
atctgcctccgttgg

SEQ ID NO: 2077114 - DNA, 15 bp, Homo sapiens
tctgcctccgttggg

SEQ ID NO: 2077115 - DNA, 15 bp, Homo sapiens
ctgcctccgttgggt

SEQ ID NO: 2077116 - DNA, 15 bp, Homo sapiens
tgcctccgttgggtc

SEQ ID NO: 2077117 - DNA, 15 bp, Homo sapiens
gcctccgttgggtca

SEQ ID NO: 2077118 - DNA, 15 bp, Homo sapiens
cctccgttgggtcag

SEQ ID NO: 2077119 - DNA, 15 bp, Homo sapiens
ctccgttgggtcaga

SEQ ID NO: 2077120 - DNA, 15 bp, Homo sapiens
tccgttgggtcagag

SEQ ID NO: 2077121 - DNA, 15 bp, Homo sapiens
ccgttgggtcagagc

SEQ ID NO: 2077122 - DNA, 15 bp, Homo sapiens
cgttgggtcagagcg

SEQ ID NO: 2077123 - DNA, 15 bp, Homo sapiens
gttgggtcagagcga

SEQ ID NO: 2077124 - DNA, 15 bp, Homo sapiens
ttgggtcagagcgag

SEQ ID NO: 2077125 - DNA, 15 bp, Homo sapiens
tgggtcagagcgagg

SEQ ID NO: 2077126 - DNA, 15 bp, Homo sapiens
gggtcagagcgaggg

SEQ ID NO: 2077127 - DNA, 15 bp, Homo sapiens
ggtcagagcgaggga

SEQ ID NO: 2077128 - DNA, 15 bp, Homo sapiens
gtcagagcgagggag

SEQ ID NO: 2077129 - DNA, 15 bp, Homo sapiens
tcagagcgagggaga

SEQ ID NO: 2077130 - DNA, 15 bp, Homo sapiens
cagagcgagggagac

SEQ ID NO: 2077131 - DNA, 15 bp, Homo sapiens
agagcgagggagacc

SEQ ID NO: 2077132 - DNA, 15 bp, Homo sapiens
gagcgagggagacct

SEQ ID NO: 2077133 - DNA, 15 bp, Homo sapiens
agcgagggagacctc

SEQ ID NO: 2077134 - DNA, 15 bp, Homo sapiens
gcgagggagacctct

SEQ ID NO: 2077135 - DNA, 15 bp, Homo sapiens
cgagggagacctctc

SEQ ID NO: 2077136 - DNA, 15 bp, Homo sapiens
gagggagacctctca

SEQ ID NO: 2077137 - DNA, 15 bp, Homo sapiens
agggagacctctcac

SEQ ID NO: 2077138 - DNA, 15 bp, Homo sapiens
gggagacctctcacc

SEQ ID NO: 2077139 - DNA, 15 bp, Homo sapiens
ggagacctctcaccc

SEQ ID NO: 2077140 - DNA, 15 bp, Homo sapiens
gagacctctcaccca

SEQ ID NO: 2077141 - DNA, 15 bp, Homo sapiens
agacctctcacccac

SEQ ID NO: 2077142 - DNA, 15 bp, Homo sapiens
gacctctcacccacc

SEQ ID NO: 2077143 - DNA, 15 bp, Homo sapiens
acctctcacccaccg

SEQ ID NO: 2077144 - DNA, 15 bp, Homo sapiens
cctctcacccaccgc

SEQ ID NO: 2077145 - DNA, 15 bp, Homo sapiens
ctctcacccaccgcc

SEQ ID NO: 2077146 - DNA, 15 bp, Homo sapiens
tctcacccaccgccc

SEQ ID NO: 2077147 - DNA, 15 bp, Homo sapiens
ctcacccaccgcccc

SEQ ID NO: 2077148 - DNA, 15 bp, Homo sapiens
tcacccaccgccccc

SEQ ID NO: 2077149 - DNA, 15 bp, Homo sapiens
cacccaccgccccca

SEQ ID NO: 2077150 - DNA, 15 bp, Homo sapiens
acccaccgcccccaa

SEQ ID NO: 2077151 - DNA, 15 bp, Homo sapiens
cccaccgcccccaag

SEQ ID NO: 2077152 - DNA, 15 bp, Homo sapiens
ccaccgcccccaagg

SEQ ID NO: 2077153 - DNA, 15 bp, Homo sapiens
caccgcccccaaggc

SEQ ID NO: 2077154 - DNA, 15 bp, Homo sapiens
accgcccccaaggcc

SEQ ID NO: 2077155 - DNA, 15 bp, Homo sapiens
ccgcccccaaggccc

SEQ ID NO: 2077156 - DNA, 15 bp, Homo sapiens
cgcccccaaggccca

SEQ ID NO: 2077157 - DNA, 15 bp, Homo sapiens
gcccccaaggcccag

SEQ ID NO: 2077158 - DNA, 15 bp, Homo sapiens
cccccaaggcccagg

SEQ ID NO: 2077159 - DNA, 15 bp, Homo sapiens
ccccaaggcccaggc

SEQ ID NO: 2077160 - DNA, 15 bp, Homo sapiens
cccaaggcccaggcc

SEQ ID NO: 2077161 - DNA, 15 bp, Homo sapiens
ccaaggcccaggccc

SEQ ID NO: 2077162 - DNA, 15 bp, Homo sapiens
caaggcccaggcccc

SEQ ID NO: 2077163 - DNA, 15 bp, Homo sapiens
aaggcccaggcccca

SEQ ID NO: 2077164 - DNA, 15 bp, Homo sapiens
aggcccaggccccaa

SEQ ID NO: 2077165 - DNA, 15 bp, Homo sapiens
ggcccaggccccaac

SEQ ID NO: 2077166 - DNA, 15 bp, Homo sapiens
gcccaggccccaacc

SEQ ID NO: 2077167 - DNA, 15 bp, Homo sapiens
cccaggccccaacct

SEQ ID NO: 2077168 - DNA, 15 bp, Homo sapiens
ccaggccccaacctt

SEQ ID NO: 2077169 - DNA, 15 bp, Homo sapiens
caggccccaaccttt

SEQ ID NO: 2077170 - DNA, 15 bp, Homo sapiens
aggccccaacctttg

SEQ ID NO: 2077171 - DNA, 15 bp, Homo sapiens
ggccccaacctttga

SEQ ID NO: 2077172 - DNA, 15 bp, Homo sapiens
gccccaacctttgat

SEQ ID NO: 2077173 - DNA, 15 bp, Homo sapiens
ccccaacctttgatc

SEQ ID NO: 2077174 - DNA, 15 bp, Homo sapiens
cccaacctttgatct

SEQ ID NO: 2077175 - DNA, 15 bp, Homo sapiens
ccaacctttgatctt

SEQ ID NO: 2077176 - DNA, 15 bp, Homo sapiens
caacctttgatctta

SEQ ID NO: 2077177 - DNA, 15 bp, Homo sapiens
aacctttgatcttac

SEQ ID NO: 2077178 - DNA, 15 bp, Homo sapiens
acctttgatcttacc

SEQ ID NO: 2077179 - DNA, 15 bp, Homo sapiens
cctttgatcttacct

SEQ ID NO: 2077180 - DNA, 15 bp, Homo sapiens
ctttgatcttacctc

SEQ ID NO: 2077181 - DNA, 15 bp, Homo sapiens
tttgatcttacctcc

SEQ ID NO: 2077182 - DNA, 15 bp, Homo sapiens
ttgatcttacctccc

SEQ ID NO: 2077183 - DNA, 15 bp, Homo sapiens
tgatcttacctccca

SEQ ID NO: 2077184 - DNA, 15 bp, Homo sapiens
gatcttacctcccac

SEQ ID NO: 2077185 - DNA, 15 bp, Homo sapiens
atcttacctcccacc

SEQ ID NO: 2077186 - DNA, 15 bp, Homo sapiens
tcttacctcccaccc

SEQ ID NO: 2077187 - DNA, 15 bp, Homo sapiens
cttacctcccaccca

SEQ ID NO: 2077188 - DNA, 15 bp, Homo sapiens
ttacctcccacccac

SEQ ID NO: 2077189 - DNA, 15 bp, Homo sapiens
tacctcccacccacc

SEQ ID NO: 2077190 - DNA, 15 bp, Homo sapiens
acctcccacccaccc

SEQ ID NO: 2077191 - DNA, 15 bp, Homo sapiens
cctcccacccacccc

SEQ ID NO: 2077192 - DNA, 15 bp, Homo sapiens
ctcccacccaccccc

SEQ ID NO: 2077193 - DNA, 15 bp, Homo sapiens
tcccacccaccccct

SEQ ID NO: 2077194 - DNA, 15 bp, Homo sapiens
cccacccaccccctc

SEQ ID NO: 2077195 - DNA, 15 bp, Homo sapiens
ccacccaccccctcc

SEQ ID NO: 2077196 - DNA, 15 bp, Homo sapiens
cacccaccccctccc

SEQ ID NO: 2077197 - DNA, 15 bp, Homo sapiens
acccaccccctcccc

SEQ ID NO: 2077198 - DNA, 15 bp, Homo sapiens
cccaccccctcccct

SEQ ID NO: 2077199 - DNA, 15 bp, Homo sapiens
ccaccccctcccctc

SEQ ID NO: 2077200 - DNA, 15 bp, Homo sapiens
caccccctcccctca

SEQ ID NO: 2077201 - DNA, 15 bp, Homo sapiens
accccctcccctcag

SEQ ID NO: 2077202 - DNA, 15 bp, Homo sapiens
ccccctcccctcagc

SEQ ID NO: 2077203 - DNA, 15 bp, Homo sapiens
cccctcccctcagca

SEQ ID NO: 2077204 - DNA, 15 bp, Homo sapiens
ccctcccctcagcac

SEQ ID NO: 2077205 - DNA, 15 bp, Homo sapiens
cctcccctcagcaca

SEQ ID NO: 2077206 - DNA, 15 bp, Homo sapiens
ctcccctcagcacag

SEQ ID NO: 2077207 - DNA, 15 bp, Homo sapiens
tcccctcagcacaga

SEQ ID NO: 2077208 - DNA, 15 bp, Homo sapiens
cccctcagcacagag

SEQ ID NO: 2077209 - DNA, 15 bp, Homo sapiens
ccctcagcacagaga

SEQ ID NO: 2077210 - DNA, 15 bp, Homo sapiens
cctcagcacagagac

SEQ ID NO: 2077211 - DNA, 15 bp, Homo sapiens
ctcagcacagagact

SEQ ID NO: 2077212 - DNA, 15 bp, Homo sapiens
tcagcacagagactt

SEQ ID NO: 2077213 - DNA, 15 bp, Homo sapiens
cagcacagagacttc

SEQ ID NO: 2077214 - DNA, 15 bp, Homo sapiens
agcacagagacttct

SEQ ID NO: 2077215 - DNA, 15 bp, Homo sapiens
gcacagagacttctc

SEQ ID NO: 2077216 - DNA, 15 bp, Homo sapiens
cacagagacttctcc

SEQ ID NO: 2077217 - DNA, 15 bp, Homo sapiens
acagagacttctccc

SEQ ID NO: 2077218 - DNA, 15 bp, Homo sapiens
cagagacttctcccg

SEQ ID NO: 2077219 - DNA, 15 bp, Homo sapiens
agagacttctcccga

SEQ ID NO: 2077220 - DNA, 15 bp, Homo sapiens
gagacttctcccgaa

SEQ ID NO: 2077221 - DNA, 15 bp, Homo sapiens
agacttctcccgaat

SEQ ID NO: 2077222 - DNA, 15 bp, Homo sapiens
gacttctcccgaatc

SEQ ID NO: 2077223 - DNA, 15 bp, Homo sapiens
acttctcccgaatcc

SEQ ID NO: 2077224 - DNA, 15 bp, Homo sapiens
cttctcccgaatccc

SEQ ID NO: 2077225 - DNA, 15 bp, Homo sapiens
ttctcccgaatccct

SEQ ID NO: 2077226 - DNA, 15 bp, Homo sapiens
tctcccgaatccctg

SEQ ID NO: 2077227 - DNA, 15 bp, Homo sapiens
ctcccgaatccctga

SEQ ID NO: 2077228 - DNA, 15 bp, Homo sapiens
tcccgaatccctgaa

SEQ ID NO: 2077229 - DNA, 15 bp, Homo sapiens
cccgaatccctgaat

SEQ ID NO: 2077230 - DNA, 15 bp, Homo sapiens
ccgaatccctgaatg

SEQ ID NO: 2077231 - DNA, 15 bp, Homo sapiens
cgaatccctgaatga

SEQ ID NO: 2077232 - DNA, 15 bp, Homo sapiens
gaatccctgaatgat

SEQ ID NO: 2077233 - DNA, 15 bp, Homo sapiens
aatccctgaatgatc

SEQ ID NO: 2077234 - DNA, 15 bp, Homo sapiens
atccctgaatgatcc

SEQ ID NO: 2077235 - DNA, 15 bp, Homo sapiens
tccctgaatgatccc

SEQ ID NO: 2077236 - DNA, 15 bp, Homo sapiens
ccctgaatgatccca

SEQ ID NO: 2077237 - DNA, 15 bp, Homo sapiens
cctgaatgatcccag

SEQ ID NO: 2077238 - DNA, 15 bp, Homo sapiens
ctgaatgatcccagg

SEQ ID NO: 2077239 - DNA, 15 bp, Homo sapiens
tgaatgatcccaggt

SEQ ID NO: 2077240 - DNA, 15 bp, Homo sapiens
gaatgatcccaggtc

SEQ ID NO: 2077241 - DNA, 15 bp, Homo sapiens
aatgatcccaggtcc

SEQ ID NO: 2077242 - DNA, 15 bp, Homo sapiens
atgatcccaggtccc

SEQ ID NO: 2077243 - DNA, 15 bp, Homo sapiens
tgatcccaggtcccc

SEQ ID NO: 2077244 - DNA, 15 bp, Homo sapiens
gatcccaggtcccct

SEQ ID NO: 2077245 - DNA, 15 bp, Homo sapiens
atcccaggtcccctt

SEQ ID NO: 2077246 - DNA, 15 bp, Homo sapiens
tcccaggtccccttt

SEQ ID NO: 2077247 - DNA, 15 bp, Homo sapiens
cccaggtcccctttg

SEQ ID NO: 2077248 - DNA, 15 bp, Homo sapiens
ccaggtcccctttga

SEQ ID NO: 2077249 - DNA, 15 bp, Homo sapiens
caggtcccctttgat

SEQ ID NO: 2077250 - DNA, 15 bp, Homo sapiens
aggtcccctttgatt

SEQ ID NO: 2077251 - DNA, 15 bp, Homo sapiens
ggtcccctttgattc

SEQ ID NO: 2077252 - DNA, 15 bp, Homo sapiens
gtcccctttgattca

SEQ ID NO: 2077253 - DNA, 15 bp, Homo sapiens
tcccctttgattcaa

SEQ ID NO: 2077254 - DNA, 15 bp, Homo sapiens
cccctttgattcaag

SEQ ID NO: 2077255 - DNA, 15 bp, Homo sapiens
ccctttgattcaaga

SEQ ID NO: 2077256 - DNA, 15 bp, Homo sapiens
cctttgattcaagac

SEQ ID NO: 2077257 - DNA, 15 bp, Homo sapiens
ctttgattcaagacc

SEQ ID NO: 2077258 - DNA, 15 bp, Homo sapiens
tttgattcaagacct

SEQ ID NO: 2077259 - DNA, 15 bp, Homo sapiens
ttgattcaagacctt

SEQ ID NO: 2077260 - DNA, 15 bp, Homo sapiens
tgattcaagaccttt

SEQ ID NO: 2077261 - DNA, 15 bp, Homo sapiens
gattcaagacctttc

SEQ ID NO: 2077262 - DNA, 15 bp, Homo sapiens
attcaagacctttcc

SEQ ID NO: 2077263 - DNA, 15 bp, Homo sapiens
ttcaagacctttcca

SEQ ID NO: 2077264 - DNA, 15 bp, Homo sapiens
tcaagacctttccac

SEQ ID NO: 2077265 - DNA, 15 bp, Homo sapiens
caagacctttccacg

SEQ ID NO: 2077266 - DNA, 15 bp, Homo sapiens
aagacctttccacgt

SEQ ID NO: 2077267 - DNA, 15 bp, Homo sapiens
agacctttccacgtg

SEQ ID NO: 2077268 - DNA, 15 bp, Homo sapiens
gacctttccacgtgc

SEQ ID NO: 2077269 - DNA, 15 bp, Homo sapiens
acctttccacgtgct

SEQ ID NO: 2077270 - DNA, 15 bp, Homo sapiens
cctttccacgtgctg

SEQ ID NO: 2077271 - DNA, 15 bp, Homo sapiens
ctttccacgtgctgt

SEQ ID NO: 2077272 - DNA, 15 bp, Homo sapiens
tttccacgtgctgtt

SEQ ID NO: 2077273 - DNA, 15 bp, Homo sapiens
ttccacgtgctgttt

SEQ ID NO: 2077274 - DNA, 15 bp, Homo sapiens
tccacgtgctgtttc

SEQ ID NO: 2077275 - DNA, 15 bp, Homo sapiens
ccacgtgctgtttcg

SEQ ID NO: 2077276 - DNA, 15 bp, Homo sapiens
cacgtgctgtttcgt

SEQ ID NO: 2077277 - DNA, 15 bp, Homo sapiens
acgtgctgtttcgtg

SEQ ID NO: 2077278 - DNA, 15 bp, Homo sapiens
cgtgctgtttcgtga

SEQ ID NO: 2077279 - DNA, 15 bp, Homo sapiens
gtgctgtttcgtgag

SEQ ID NO: 2077280 - DNA, 15 bp, Homo sapiens
tgctgtttcgtgagc

SEQ ID NO: 2077281 - DNA, 15 bp, Homo sapiens
gctgtttcgtgagct

SEQ ID NO: 2077282 - DNA, 15 bp, Homo sapiens
ctgtttcgtgagctg

SEQ ID NO: 2077283 - DNA, 15 bp, Homo sapiens
tgtttcgtgagctgg

SEQ ID NO: 2077284 - DNA, 15 bp, Homo sapiens
gtttcgtgagctggg

SEQ ID NO: 2077285 - DNA, 15 bp, Homo sapiens
tttcgtgagctggga

SEQ ID NO: 2077286 - DNA, 15 bp, Homo sapiens
ttcgtgagctgggag

SEQ ID NO: 2077287 - DNA, 15 bp, Homo sapiens
tcgtgagctgggagt

SEQ ID NO: 2077288 - DNA, 15 bp, Homo sapiens
cgtgagctgggagtt

SEQ ID NO: 2077289 - DNA, 15 bp, Homo sapiens
gtgagctgggagttt

SEQ ID NO: 2077290 - DNA, 15 bp, Homo sapiens
tgagctgggagtttt

SEQ ID NO: 2077291 - DNA, 15 bp, Homo sapiens
gagctgggagttttc

SEQ ID NO: 2077292 - DNA, 15 bp, Homo sapiens
agctgggagttttct

SEQ ID NO: 2077293 - DNA, 15 bp, Homo sapiens
gctgggagttttctt

SEQ ID NO: 2077294 - DNA, 15 bp, Homo sapiens
ctgggagttttcttt

SEQ ID NO: 2077295 - DNA, 15 bp, Homo sapiens
tgggagttttctttt

SEQ ID NO: 2077296 - DNA, 15 bp, Homo sapiens
gggagttttcttttt

SEQ ID NO: 2077297 - DNA, 15 bp, Homo sapiens
ggagttttctttttc

SEQ ID NO: 2077298 - DNA, 15 bp, Homo sapiens
gagttttctttttct

SEQ ID NO: 2077299 - DNA, 15 bp, Homo sapiens
agttttctttttctt

SEQ ID NO: 2077300 - DNA, 15 bp, Homo sapiens
gttttctttttcttt

SEQ ID NO: 2077301 - DNA, 15 bp, Homo sapiens
ttgagacagagtctt

SEQ ID NO: 2077302 - DNA, 15 bp, Homo sapiens
tgagacagagtcttg

SEQ ID NO: 2077303 - DNA, 15 bp, Homo sapiens
aagctccgcctcccg

SEQ ID NO: 2077304 - DNA, 15 bp, Homo sapiens
agctccgcctcccgg

SEQ ID NO: 2077305 - DNA, 15 bp, Homo sapiens
gctccgcctcccggg

SEQ ID NO: 2077306 - DNA, 15 bp, Homo sapiens
ccgcctcccgggttg

SEQ ID NO: 2077307 - DNA, 15 bp, Homo sapiens
cgcctcccgggttga

SEQ ID NO: 2077308 - DNA, 15 bp, Homo sapiens
gcctcccgggttgac

SEQ ID NO: 2077309 - DNA, 15 bp, Homo sapiens
cctcccgggttgacg

SEQ ID NO: 2077310 - DNA, 15 bp, Homo sapiens
ctcccgggttgacgc

SEQ ID NO: 2077311 - DNA, 15 bp, Homo sapiens
tcccgggttgacgcc

SEQ ID NO: 2077312 - DNA, 15 bp, Homo sapiens
cccgggttgacgccg

SEQ ID NO: 2077313 - DNA, 15 bp, Homo sapiens
ccgggttgacgccgt

SEQ ID NO: 2077314 - DNA, 15 bp, Homo sapiens
cgggttgacgccgtt

SEQ ID NO: 2077315 - DNA, 15 bp, Homo sapiens
gggttgacgccgttc

SEQ ID NO: 2077316 - DNA, 15 bp, Homo sapiens
ggttgacgccgttct

SEQ ID NO: 2077317 - DNA, 15 bp, Homo sapiens
gttgacgccgttctc

SEQ ID NO: 2077318 - DNA, 15 bp, Homo sapiens
ttgacgccgttctcc

SEQ ID NO: 2077319 - DNA, 15 bp, Homo sapiens
tgacgccgttctcct

SEQ ID NO: 2077320 - DNA, 15 bp, Homo sapiens
gacgccgttctcctg

SEQ ID NO: 2077321 - DNA, 15 bp, Homo sapiens
acgccgttctcctgc

SEQ ID NO: 2077322 - DNA, 15 bp, Homo sapiens
cgccgttctcctgcc

SEQ ID NO: 2077323 - DNA, 15 bp, Homo sapiens
gccgttctcctgcct

SEQ ID NO: 2077324 - DNA, 15 bp, Homo sapiens
ccgttctcctgcctc

SEQ ID NO: 2077325 - DNA, 15 bp, Homo sapiens
cgttctcctgcctca

SEQ ID NO: 2077326 - DNA, 15 bp, Homo sapiens
gttctcctgcctcag

SEQ ID NO: 2077327 - DNA, 15 bp, Homo sapiens
gggactacaggcgtc

SEQ ID NO: 2077328 - DNA, 15 bp, Homo sapiens
ggactacaggcgtcc

SEQ ID NO: 2077329 - DNA, 15 bp, Homo sapiens
gactacaggcgtccg

SEQ ID NO: 2077330 - DNA, 15 bp, Homo sapiens
actacaggcgtccgc

SEQ ID NO: 2077331 - DNA, 15 bp, Homo sapiens
ctacaggcgtccgcc

SEQ ID NO: 2077332 - DNA, 15 bp, Homo sapiens
tacaggcgtccgcca

SEQ ID NO: 2077333 - DNA, 15 bp, Homo sapiens
acaggcgtccgccac

SEQ ID NO: 2077334 - DNA, 15 bp, Homo sapiens
caggcgtccgccacc

SEQ ID NO: 2077335 - DNA, 15 bp, Homo sapiens
aggcgtccgccacca

SEQ ID NO: 2077336 - DNA, 15 bp, Homo sapiens
ggcgtccgccaccac

SEQ ID NO: 2077337 - DNA, 15 bp, Homo sapiens
gcgtccgccaccacg

SEQ ID NO: 2077338 - DNA, 15 bp, Homo sapiens
cgtccgccaccacgc

SEQ ID NO: 2077339 - DNA, 15 bp, Homo sapiens
gtccgccaccacgcc

SEQ ID NO: 2077340 - DNA, 15 bp, Homo sapiens
tccgccaccacgcct

SEQ ID NO: 2077341 - DNA, 15 bp, Homo sapiens
ctggctaattttttt

SEQ ID NO: 2077342 - DNA, 15 bp, Homo sapiens
tggctaattttttta

SEQ ID NO: 2077343 - DNA, 15 bp, Homo sapiens
ggctaatttttttat

SEQ ID NO: 2077344 - DNA, 15 bp, Homo sapiens
gctaatttttttatt

SEQ ID NO: 2077345 - DNA, 15 bp, Homo sapiens
ctaatttttttattt

SEQ ID NO: 2077346 - DNA, 15 bp, Homo sapiens
taatttttttatttt

SEQ ID NO: 2077347 - DNA, 15 bp, Homo sapiens
aatttttttattttt

SEQ ID NO: 2077348 - DNA, 15 bp, Homo sapiens
ctcgtgatccacccg

SEQ ID NO: 2077349 - DNA, 15 bp, Homo sapiens
tcgtgatccacccgc

SEQ ID NO: 2077350 - DNA, 15 bp, Homo sapiens
cgtgatccacccgcc

SEQ ID NO: 2077351 - DNA, 15 bp, Homo sapiens
caccgcgcccggcct

SEQ ID NO: 2077352 - DNA, 15 bp, Homo sapiens
accgcgcccggcctg

SEQ ID NO: 2077353 - DNA, 15 bp, Homo sapiens
ccgcgcccggcctga

SEQ ID NO: 2077354 - DNA, 15 bp, Homo sapiens
cgcgcccggcctgag

SEQ ID NO: 2077355 - DNA, 15 bp, Homo sapiens
gcgcccggcctgagc

SEQ ID NO: 2077356 - DNA, 15 bp, Homo sapiens
cgcccggcctgagct

SEQ ID NO: 2077357 - DNA, 15 bp, Homo sapiens
gcccggcctgagctg

SEQ ID NO: 2077358 - DNA, 15 bp, Homo sapiens
cccggcctgagctgg

SEQ ID NO: 2077359 - DNA, 15 bp, Homo sapiens
ccggcctgagctggg

SEQ ID NO: 2077360 - DNA, 15 bp, Homo sapiens
cggcctgagctggga

SEQ ID NO: 2077361 - DNA, 15 bp, Homo sapiens
ggcctgagctgggag

SEQ ID NO: 2077362 - DNA, 15 bp, Homo sapiens
gcctgagctgggagt

SEQ ID NO: 2077363 - DNA, 15 bp, Homo sapiens
cctgagctgggagtt

SEQ ID NO: 2077364 - DNA, 15 bp, Homo sapiens
ctgagctgggagttt

SEQ ID NO: 2077365 - DNA, 15 bp, Homo sapiens
gctgggagttttctc

SEQ ID NO: 2077366 - DNA, 15 bp, Homo sapiens
ctgggagttttctcc

SEQ ID NO: 2077367 - DNA, 15 bp, Homo sapiens
tgggagttttctccc

SEQ ID NO: 2077368 - DNA, 15 bp, Homo sapiens
gggagttttctccca

SEQ ID NO: 2077369 - DNA, 15 bp, Homo sapiens
ggagttttctcccac

SEQ ID NO: 2077370 - DNA, 15 bp, Homo sapiens
agttttctcccaccc

SEQ ID NO: 2077371 - DNA, 15 bp, Homo sapiens
gttttctcccaccct

SEQ ID NO: 2077372 - DNA, 15 bp, Homo sapiens
ttttctcccaccctc

SEQ ID NO: 2077373 - DNA, 15 bp, Homo sapiens
tttctcccaccctct

SEQ ID NO: 2077374 - DNA, 15 bp, Homo sapiens
ttctcccaccctctt

SEQ ID NO: 2077375 - DNA, 15 bp, Homo sapiens
tctcccaccctcttc

SEQ ID NO: 2077376 - DNA, 15 bp, Homo sapiens
ctcccaccctcttct

SEQ ID NO: 2077377 - DNA, 15 bp, Homo sapiens
tcccaccctcttctt

SEQ ID NO: 2077378 - DNA, 15 bp, Homo sapiens
cccaccctcttcttc

SEQ ID NO: 2077379 - DNA, 15 bp, Homo sapiens
ccaccctcttcttcc

SEQ ID NO: 2077380 - DNA, 15 bp, Homo sapiens
caccctcttcttcct

SEQ ID NO: 2077381 - DNA, 15 bp, Homo sapiens
accctcttcttcctg

SEQ ID NO: 2077382 - DNA, 15 bp, Homo sapiens
ccctcttcttcctgt

SEQ ID NO: 2077383 - DNA, 15 bp, Homo sapiens
cctcttcttcctgtc

SEQ ID NO: 2077384 - DNA, 15 bp, Homo sapiens
ctcttcttcctgtcc

SEQ ID NO: 2077385 - DNA, 15 bp, Homo sapiens
tcttcttcctgtcct

SEQ ID NO: 2077386 - DNA, 15 bp, Homo sapiens
cttcttcctgtcctg

SEQ ID NO: 2077387 - DNA, 15 bp, Homo sapiens
ttcttcctgtcctgg

SEQ ID NO: 2077388 - DNA, 15 bp, Homo sapiens
tcttcctgtcctggc

SEQ ID NO: 2077389 - DNA, 15 bp, Homo sapiens
cttcctgtcctggct

SEQ ID NO: 2077390 - DNA, 15 bp, Homo sapiens
ttcctgtcctggctg

SEQ ID NO: 2077391 - DNA, 15 bp, Homo sapiens
tcctgtcctggctgt

SEQ ID NO: 2077392 - DNA, 15 bp, Homo sapiens
cctgtcctggctgtc

SEQ ID NO: 2077393 - DNA, 15 bp, Homo sapiens
ctgtcctggctgtct

SEQ ID NO: 2077394 - DNA, 15 bp, Homo sapiens
tgtcctggctgtctc

SEQ ID NO: 2077395 - DNA, 15 bp, Homo sapiens
gtcctggctgtctcc

SEQ ID NO: 2077396 - DNA, 15 bp, Homo sapiens
tcctggctgtctcct

SEQ ID NO: 2077397 - DNA, 15 bp, Homo sapiens
cctggctgtctccta

SEQ ID NO: 2077398 - DNA, 15 bp, Homo sapiens
ctggctgtctcctac

SEQ ID NO: 2077399 - DNA, 15 bp, Homo sapiens
tggctgtctcctact

SEQ ID NO: 2077400 - DNA, 15 bp, Homo sapiens
ggctgtctcctactc

SEQ ID NO: 2077401 - DNA, 15 bp, Homo sapiens
gctgtctcctactcc

SEQ ID NO: 2077402 - DNA, 15 bp, Homo sapiens
ctgtctcctactccc

SEQ ID NO: 2077403 - DNA, 15 bp, Homo sapiens
tgtctcctactccca

SEQ ID NO: 2077404 - DNA, 15 bp, Homo sapiens
gtctcctactcccat

SEQ ID NO: 2077405 - DNA, 15 bp, Homo sapiens
tctcctactcccatt

SEQ ID NO: 2077406 - DNA, 15 bp, Homo sapiens
ctcctactcccattt

SEQ ID NO: 2077407 - DNA, 15 bp, Homo sapiens
tcctactcccatttt

SEQ ID NO: 2077408 - DNA, 15 bp, Homo sapiens
cctactcccattttg

SEQ ID NO: 2077409 - DNA, 15 bp, Homo sapiens
ctactcccattttgg

SEQ ID NO: 2077410 - DNA, 15 bp, Homo sapiens
tactcccattttggg

SEQ ID NO: 2077411 - DNA, 15 bp, Homo sapiens
actcccattttgggc

SEQ ID NO: 2077412 - DNA, 15 bp, Homo sapiens
ctcccattttgggcc

SEQ ID NO: 2077413 - DNA, 15 bp, Homo sapiens
tcccattttgggccc

SEQ ID NO: 2077414 - DNA, 15 bp, Homo sapiens
cccattttgggccct

SEQ ID NO: 2077415 - DNA, 15 bp, Homo sapiens
ccattttgggccctc

SEQ ID NO: 2077416 - DNA, 15 bp, Homo sapiens
cattttgggccctcc

SEQ ID NO: 2077417 - DNA, 15 bp, Homo sapiens
attttgggccctcca

SEQ ID NO: 2077418 - DNA, 15 bp, Homo sapiens
ttttgggccctccag

SEQ ID NO: 2077419 - DNA, 15 bp, Homo sapiens
tttgggccctccagc

SEQ ID NO: 2077420 - DNA, 15 bp, Homo sapiens
ttgggccctccagca

SEQ ID NO: 2077421 - DNA, 15 bp, Homo sapiens
tgggccctccagcaa

SEQ ID NO: 2077422 - DNA, 15 bp, Homo sapiens
gggccctccagcaag

SEQ ID NO: 2077423 - DNA, 15 bp, Homo sapiens
ggccctccagcaagg

SEQ ID NO: 2077424 - DNA, 15 bp, Homo sapiens
gccctccagcaaggc

SEQ ID NO: 2077425 - DNA, 15 bp, Homo sapiens
ccctccagcaaggcc

SEQ ID NO: 2077426 - DNA, 15 bp, Homo sapiens
cctccagcaaggccc

SEQ ID NO: 2077427 - DNA, 15 bp, Homo sapiens
ctccagcaaggcccc

SEQ ID NO: 2077428 - DNA, 15 bp, Homo sapiens
tccagcaaggcccct

SEQ ID NO: 2077429 - DNA, 15 bp, Homo sapiens
ccagcaaggcccctg

SEQ ID NO: 2077430 - DNA, 15 bp, Homo sapiens
cagcaaggcccctga

SEQ ID NO: 2077431 - DNA, 15 bp, Homo sapiens
agcaaggcccctgag

SEQ ID NO: 2077432 - DNA, 15 bp, Homo sapiens
gcaaggcccctgagc

SEQ ID NO: 2077433 - DNA, 15 bp, Homo sapiens
caaggcccctgagca

SEQ ID NO: 2077434 - DNA, 15 bp, Homo sapiens
aaggcccctgagcaa

SEQ ID NO: 2077435 - DNA, 15 bp, Homo sapiens
aggcccctgagcaag

SEQ ID NO: 2077436 - DNA, 15 bp, Homo sapiens
ggcccctgagcaagc

SEQ ID NO: 2077437 - DNA, 15 bp, Homo sapiens
gcccctgagcaagcc

SEQ ID NO: 2077438 - DNA, 15 bp, Homo sapiens
cccctgagcaagcca

SEQ ID NO: 2077439 - DNA, 15 bp, Homo sapiens
ccctgagcaagccag

SEQ ID NO: 2077440 - DNA, 15 bp, Homo sapiens
cctgagcaagccaga

SEQ ID NO: 2077441 - DNA, 15 bp, Homo sapiens
ctgagcaagccagag

SEQ ID NO: 2077442 - DNA, 15 bp, Homo sapiens
tgagcaagccagagc

SEQ ID NO: 2077443 - DNA, 15 bp, Homo sapiens
gagcaagccagagcc

SEQ ID NO: 2077444 - DNA, 15 bp, Homo sapiens
agcaagccagagccc

SEQ ID NO: 2077445 - DNA, 15 bp, Homo sapiens
gcaagccagagccct

SEQ ID NO: 2077446 - DNA, 15 bp, Homo sapiens
caagccagagccctc

SEQ ID NO: 2077447 - DNA, 15 bp, Homo sapiens
aagccagagccctcc

SEQ ID NO: 2077448 - DNA, 15 bp, Homo sapiens
agccagagccctccg

SEQ ID NO: 2077449 - DNA, 15 bp, Homo sapiens
gccagagccctccgt

SEQ ID NO: 2077450 - DNA, 15 bp, Homo sapiens
ccagagccctccgta

SEQ ID NO: 2077451 - DNA, 15 bp, Homo sapiens
cagagccctccgtat

SEQ ID NO: 2077452 - DNA, 15 bp, Homo sapiens
agagccctccgtatc

SEQ ID NO: 2077453 - DNA, 15 bp, Homo sapiens
gagccctccgtatcc

SEQ ID NO: 2077454 - DNA, 15 bp, Homo sapiens
agccctccgtatccc

SEQ ID NO: 2077455 - DNA, 15 bp, Homo sapiens
gccctccgtatcccc

SEQ ID NO: 2077456 - DNA, 15 bp, Homo sapiens
ccctccgtatccccc

SEQ ID NO: 2077457 - DNA, 15 bp, Homo sapiens
cctccgtatcccccg

SEQ ID NO: 2077458 - DNA, 15 bp, Homo sapiens
ctccgtatcccccgt

SEQ ID NO: 2077459 - DNA, 15 bp, Homo sapiens
tccgtatcccccgtt

SEQ ID NO: 2077460 - DNA, 15 bp, Homo sapiens
ccgtatcccccgttc

SEQ ID NO: 2077461 - DNA, 15 bp, Homo sapiens
cgtatcccccgttcc

SEQ ID NO: 2077462 - DNA, 15 bp, Homo sapiens
gtatcccccgttcct

SEQ ID NO: 2077463 - DNA, 15 bp, Homo sapiens
tatcccccgttcctt

SEQ ID NO: 2077464 - DNA, 15 bp, Homo sapiens
atcccccgttcctta

SEQ ID NO: 2077465 - DNA, 15 bp, Homo sapiens
tcccccgttccttac

SEQ ID NO: 2077466 - DNA, 15 bp, Homo sapiens
cccccgttccttact

SEQ ID NO: 2077467 - DNA, 15 bp, Homo sapiens
ccccgttccttactt

SEQ ID NO: 2077468 - DNA, 15 bp, Homo sapiens
cccgttccttacttt

SEQ ID NO: 2077469 - DNA, 15 bp, Homo sapiens
ccgttccttactttg

SEQ ID NO: 2077470 - DNA, 15 bp, Homo sapiens
cgttccttactttgt

SEQ ID NO: 2077471 - DNA, 15 bp, Homo sapiens
gttccttactttgtc

SEQ ID NO: 2077472 - DNA, 15 bp, Homo sapiens
ttccttactttgtcc

SEQ ID NO: 2077473 - DNA, 15 bp, Homo sapiens
tccttactttgtcct

SEQ ID NO: 2077474 - DNA, 15 bp, Homo sapiens
ccttactttgtcctt

SEQ ID NO: 2077475 - DNA, 15 bp, Homo sapiens
cttactttgtccttg

SEQ ID NO: 2077476 - DNA, 15 bp, Homo sapiens
ttactttgtccttgt

SEQ ID NO: 2077477 - DNA, 15 bp, Homo sapiens
tactttgtccttgtt

SEQ ID NO: 2077478 - DNA, 15 bp, Homo sapiens
actttgtccttgttt

SEQ ID NO: 2077479 - DNA, 15 bp, Homo sapiens
ctttgtccttgtttc

SEQ ID NO: 2077480 - DNA, 15 bp, Homo sapiens
tttgtccttgtttct

SEQ ID NO: 2077481 - DNA, 15 bp, Homo sapiens
ttgtccttgtttctt

SEQ ID NO: 2077482 - DNA, 15 bp, Homo sapiens
tgtccttgtttcttg

SEQ ID NO: 2077483 - DNA, 15 bp, Homo sapiens
gtccttgtttcttgc

SEQ ID NO: 2077484 - DNA, 15 bp, Homo sapiens
tccttgtttcttgcc

SEQ ID NO: 2077485 - DNA, 15 bp, Homo sapiens
ccttgtttcttgccc

SEQ ID NO: 2077486 - DNA, 15 bp, Homo sapiens
cttgtttcttgccca

SEQ ID NO: 2077487 - DNA, 15 bp, Homo sapiens
ttgtttcttgcccat

SEQ ID NO: 2077488 - DNA, 15 bp, Homo sapiens
tgtttcttgcccata

SEQ ID NO: 2077489 - DNA, 15 bp, Homo sapiens
gtttcttgcccatat

SEQ ID NO: 2077490 - DNA, 15 bp, Homo sapiens
tttcttgcccatatt

SEQ ID NO: 2077491 - DNA, 15 bp, Homo sapiens
ttcttgcccatattc

SEQ ID NO: 2077492 - DNA, 15 bp, Homo sapiens
tcttgcccatattcc

SEQ ID NO: 2077493 - DNA, 15 bp, Homo sapiens
cttgcccatattccc

SEQ ID NO: 2077494 - DNA, 15 bp, Homo sapiens
ttgcccatattccct

SEQ ID NO: 2077495 - DNA, 15 bp, Homo sapiens
tgcccatattccctg

SEQ ID NO: 2077496 - DNA, 15 bp, Homo sapiens
gcccatattccctgc

SEQ ID NO: 2077497 - DNA, 15 bp, Homo sapiens
cccatattccctgct

SEQ ID NO: 2077498 - DNA, 15 bp, Homo sapiens
ccatattccctgcta

SEQ ID NO: 2077499 - DNA, 15 bp, Homo sapiens
catattccctgctag

SEQ ID NO: 2077500 - DNA, 15 bp, Homo sapiens
atattccctgctaga

SEQ ID NO: 2077501 - DNA, 15 bp, Homo sapiens
tattccctgctagac

SEQ ID NO: 2077502 - DNA, 15 bp, Homo sapiens
attccctgctagaca

SEQ ID NO: 2077503 - DNA, 15 bp, Homo sapiens
ttccctgctagacaa

SEQ ID NO: 2077504 - DNA, 15 bp, Homo sapiens
tccctgctagacaaa

SEQ ID NO: 2077505 - DNA, 15 bp, Homo sapiens
ccctgctagacaaag

SEQ ID NO: 2077506 - DNA, 15 bp, Homo sapiens
cctgctagacaaagc

SEQ ID NO: 2077507 - DNA, 15 bp, Homo sapiens
ctgctagacaaagcc

SEQ ID NO: 2077508 - DNA, 15 bp, Homo sapiens
tgctagacaaagccc

SEQ ID NO: 2077509 - DNA, 15 bp, Homo sapiens
gctagacaaagcccc

SEQ ID NO: 2077510 - DNA, 15 bp, Homo sapiens
ctagacaaagcccct

SEQ ID NO: 2077511 - DNA, 15 bp, Homo sapiens
tagacaaagcccctt

SEQ ID NO: 2077512 - DNA, 15 bp, Homo sapiens
agacaaagccccttg

SEQ ID NO: 2077513 - DNA, 15 bp, Homo sapiens
gacaaagccccttgg

SEQ ID NO: 2077514 - DNA, 15 bp, Homo sapiens
acaaagccccttggc

SEQ ID NO: 2077515 - DNA, 15 bp, Homo sapiens
caaagccccttggca

SEQ ID NO: 2077516 - DNA, 15 bp, Homo sapiens
aaagccccttggcag

SEQ ID NO: 2077517 - DNA, 15 bp, Homo sapiens
aagccccttggcagc

SEQ ID NO: 2077518 - DNA, 15 bp, Homo sapiens
agccccttggcagca

SEQ ID NO: 2077519 - DNA, 15 bp, Homo sapiens
gccccttggcagcag

SEQ ID NO: 2077520 - DNA, 15 bp, Homo sapiens
ccccttggcagcagg

SEQ ID NO: 2077521 - DNA, 15 bp, Homo sapiens
cccttggcagcaggc

SEQ ID NO: 2077522 - DNA, 15 bp, Homo sapiens
ccttggcagcaggcc

SEQ ID NO: 2077523 - DNA, 15 bp, Homo sapiens
cttggcagcaggccg

SEQ ID NO: 2077524 - DNA, 15 bp, Homo sapiens
ttggcagcaggccgt

SEQ ID NO: 2077525 - DNA, 15 bp, Homo sapiens
tggcagcaggccgtg

SEQ ID NO: 2077526 - DNA, 15 bp, Homo sapiens
ggcagcaggccgtga

SEQ ID NO: 2077527 - DNA, 15 bp, Homo sapiens
gcagcaggccgtgac

SEQ ID NO: 2077528 - DNA, 15 bp, Homo sapiens
cagcaggccgtgaca

SEQ ID NO: 2077529 - DNA, 15 bp, Homo sapiens
agcaggccgtgacac

SEQ ID NO: 2077530 - DNA, 15 bp, Homo sapiens
gcaggccgtgacacg

SEQ ID NO: 2077531 - DNA, 15 bp, Homo sapiens
caggccgtgacacgg

SEQ ID NO: 2077532 - DNA, 15 bp, Homo sapiens
aggccgtgacacggt

SEQ ID NO: 2077533 - DNA, 15 bp, Homo sapiens
ggccgtgacacggtc

SEQ ID NO: 2077534 - DNA, 15 bp, Homo sapiens
gccgtgacacggtca

SEQ ID NO: 2077535 - DNA, 15 bp, Homo sapiens
ccgtgacacggtcac

SEQ ID NO: 2077536 - DNA, 15 bp, Homo sapiens
cgtgacacggtcact

SEQ ID NO: 2077537 - DNA, 15 bp, Homo sapiens
gtgacacggtcactg

SEQ ID NO: 2077538 - DNA, 15 bp, Homo sapiens
tgacacggtcactgt

SEQ ID NO: 2077539 - DNA, 15 bp, Homo sapiens
gacacggtcactgtg

SEQ ID NO: 2077540 - DNA, 15 bp, Homo sapiens
acacggtcactgtgt

SEQ ID NO: 2077541 - DNA, 15 bp, Homo sapiens
cacggtcactgtgtg

SEQ ID NO: 2077542 - DNA, 15 bp, Homo sapiens
acggtcactgtgtgg

SEQ ID NO: 2077543 - DNA, 15 bp, Homo sapiens
cggtcactgtgtggc

SEQ ID NO: 2077544 - DNA, 15 bp, Homo sapiens
ggtcactgtgtggcg

SEQ ID NO: 2077545 - DNA, 15 bp, Homo sapiens
gtcactgtgtggcga

SEQ ID NO: 2077546 - DNA, 15 bp, Homo sapiens
tcactgtgtggcgag

SEQ ID NO: 2077547 - DNA, 15 bp, Homo sapiens
cactgtgtggcgagt

SEQ ID NO: 2077548 - DNA, 15 bp, Homo sapiens
actgtgtggcgagtg

SEQ ID NO: 2077549 - DNA, 15 bp, Homo sapiens
ctgtgtggcgagtgc

SEQ ID NO: 2077550 - DNA, 15 bp, Homo sapiens
tgtgtggcgagtgct

SEQ ID NO: 2077551 - DNA, 15 bp, Homo sapiens
gtgtggcgagtgctg

SEQ ID NO: 2077552 - DNA, 15 bp, Homo sapiens
tgtggcgagtgctga

SEQ ID NO: 2077553 - DNA, 15 bp, Homo sapiens
gtggcgagtgctgag

SEQ ID NO: 2077554 - DNA, 15 bp, Homo sapiens
tggcgagtgctgaga

SEQ ID NO: 2077555 - DNA, 15 bp, Homo sapiens
ggcgagtgctgagat

SEQ ID NO: 2077556 - DNA, 15 bp, Homo sapiens
gcgagtgctgagatg

SEQ ID NO: 2077557 - DNA, 15 bp, Homo sapiens
cgagtgctgagatga

SEQ ID NO: 2077558 - DNA, 15 bp, Homo sapiens
gagtgctgagatgac

SEQ ID NO: 2077559 - DNA, 15 bp, Homo sapiens
agtgctgagatgaca

SEQ ID NO: 2077560 - DNA, 15 bp, Homo sapiens
gtgctgagatgacag

SEQ ID NO: 2077561 - DNA, 15 bp, Homo sapiens
tgctgagatgacagg

SEQ ID NO: 2077562 - DNA, 15 bp, Homo sapiens
gctgagatgacaggt

SEQ ID NO: 2077563 - DNA, 15 bp, Homo sapiens
ctgagatgacaggtc

SEQ ID NO: 2077564 - DNA, 15 bp, Homo sapiens
tgagatgacaggtcc

SEQ ID NO: 2077565 - DNA, 15 bp, Homo sapiens
gagatgacaggtcct

SEQ ID NO: 2077566 - DNA, 15 bp, Homo sapiens
agatgacaggtcctg

SEQ ID NO: 2077567 - DNA, 15 bp, Homo sapiens
gatgacaggtcctgg

SEQ ID NO: 2077568 - DNA, 15 bp, Homo sapiens
atgacaggtcctggg

SEQ ID NO: 2077569 - DNA, 15 bp, Homo sapiens
tgacaggtcctgggg

SEQ ID NO: 2077570 - DNA, 15 bp, Homo sapiens
gacaggtcctggggc

SEQ ID NO: 2077571 - DNA, 15 bp, Homo sapiens
acaggtcctggggca

SEQ ID NO: 2077572 - DNA, 15 bp, Homo sapiens
caggtcctggggcac

SEQ ID NO: 2077573 - DNA, 15 bp, Homo sapiens
aggtcctggggcaca

SEQ ID NO: 2077574 - DNA, 15 bp, Homo sapiens
ggtcctggggcacac

SEQ ID NO: 2077575 - DNA, 15 bp, Homo sapiens
gtcctggggcacaca

SEQ ID NO: 2077576 - DNA, 15 bp, Homo sapiens
tcctggggcacacag

SEQ ID NO: 2077577 - DNA, 15 bp, Homo sapiens
cctggggcacacagg

SEQ ID NO: 2077578 - DNA, 15 bp, Homo sapiens
ctggggcacacaggg

SEQ ID NO: 2077579 - DNA, 15 bp, Homo sapiens
tggggcacacagggg

SEQ ID NO: 2077580 - DNA, 15 bp, Homo sapiens
ggggcacacaggggc

SEQ ID NO: 2077581 - DNA, 15 bp, Homo sapiens
gggcacacaggggct

SEQ ID NO: 2077582 - DNA, 15 bp, Homo sapiens
ggcacacaggggctc

SEQ ID NO: 2077583 - DNA, 15 bp, Homo sapiens
gcacacaggggctcc

SEQ ID NO: 2077584 - DNA, 15 bp, Homo sapiens
cacacaggggctccc

SEQ ID NO: 2077585 - DNA, 15 bp, Homo sapiens
acacaggggctccca

SEQ ID NO: 2077586 - DNA, 15 bp, Homo sapiens
cacaggggctcccat

SEQ ID NO: 2077587 - DNA, 15 bp, Homo sapiens
acaggggctcccatc

SEQ ID NO: 2077588 - DNA, 15 bp, Homo sapiens
caggggctcccatca

SEQ ID NO: 2077589 - DNA, 15 bp, Homo sapiens
aggggctcccatcag

SEQ ID NO: 2077590 - DNA, 15 bp, Homo sapiens
ggggctcccatcagt

SEQ ID NO: 2077591 - DNA, 15 bp, Homo sapiens
gggctcccatcagtt

SEQ ID NO: 2077592 - DNA, 15 bp, Homo sapiens
ggctcccatcagttg

SEQ ID NO: 2077593 - DNA, 15 bp, Homo sapiens
gctcccatcagttgc

SEQ ID NO: 2077594 - DNA, 15 bp, Homo sapiens
ctcccatcagttgct

SEQ ID NO: 2077595 - DNA, 15 bp, Homo sapiens
tcccatcagttgctc

SEQ ID NO: 2077596 - DNA, 15 bp, Homo sapiens
cccatcagttgctcg

SEQ ID NO: 2077597 - DNA, 15 bp, Homo sapiens
ccatcagttgctcgc

SEQ ID NO: 2077598 - DNA, 15 bp, Homo sapiens
catcagttgctcgca

SEQ ID NO: 2077599 - DNA, 15 bp, Homo sapiens
atcagttgctcgcag

SEQ ID NO: 2077600 - DNA, 15 bp, Homo sapiens
tcagttgctcgcaga

SEQ ID NO: 2077601 - DNA, 15 bp, Homo sapiens
cagttgctcgcagac

SEQ ID NO: 2077602 - DNA, 15 bp, Homo sapiens
agttgctcgcagacc

SEQ ID NO: 2077603 - DNA, 15 bp, Homo sapiens
gttgctcgcagaccg

SEQ ID NO: 2077604 - DNA, 15 bp, Homo sapiens
ttgctcgcagaccgc

SEQ ID NO: 2077605 - DNA, 15 bp, Homo sapiens
tgctcgcagaccgcg

SEQ ID NO: 2077606 - DNA, 15 bp, Homo sapiens
gctcgcagaccgcgt

SEQ ID NO: 2077607 - DNA, 15 bp, Homo sapiens
ctcgcagaccgcgtg

SEQ ID NO: 2077608 - DNA, 15 bp, Homo sapiens
tcgcagaccgcgtgt

SEQ ID NO: 2077609 - DNA, 15 bp, Homo sapiens
cgcagaccgcgtgtg

SEQ ID NO: 2077610 - DNA, 15 bp, Homo sapiens
gcagaccgcgtgtga

SEQ ID NO: 2077611 - DNA, 15 bp, Homo sapiens
cagaccgcgtgtgag

SEQ ID NO: 2077612 - DNA, 15 bp, Homo sapiens
agaccgcgtgtgagt

SEQ ID NO: 2077613 - DNA, 15 bp, Homo sapiens
gaccgcgtgtgagtc

SEQ ID NO: 2077614 - DNA, 15 bp, Homo sapiens
accgcgtgtgagtcc

SEQ ID NO: 2077615 - DNA, 15 bp, Homo sapiens
ccgcgtgtgagtcct

SEQ ID NO: 2077616 - DNA, 15 bp, Homo sapiens
cgcgtgtgagtcctg

SEQ ID NO: 2077617 - DNA, 15 bp, Homo sapiens
gcgtgtgagtcctgt

SEQ ID NO: 2077618 - DNA, 15 bp, Homo sapiens
cgtgtgagtcctgtg

SEQ ID NO: 2077619 - DNA, 15 bp, Homo sapiens
gtgtgagtcctgtga

SEQ ID NO: 2077620 - DNA, 15 bp, Homo sapiens
tgtgagtcctgtgag

SEQ ID NO: 2077621 - DNA, 15 bp, Homo sapiens
gtgagtcctgtgagc

SEQ ID NO: 2077622 - DNA, 15 bp, Homo sapiens
tgagtcctgtgagca

SEQ ID NO: 2077623 - DNA, 15 bp, Homo sapiens
gagtcctgtgagcac

SEQ ID NO: 2077624 - DNA, 15 bp, Homo sapiens
agtcctgtgagcacg

SEQ ID NO: 2077625 - DNA, 15 bp, Homo sapiens
gtcctgtgagcacgg

SEQ ID NO: 2077626 - DNA, 15 bp, Homo sapiens
tcctgtgagcacggg

SEQ ID NO: 2077627 - DNA, 15 bp, Homo sapiens
cctgtgagcacgggg

SEQ ID NO: 2077628 - DNA, 15 bp, Homo sapiens
ctgtgagcacgggga

SEQ ID NO: 2077629 - DNA, 15 bp, Homo sapiens
tgtgagcacggggag

SEQ ID NO: 2077630 - DNA, 15 bp, Homo sapiens
gtgagcacggggagc

SEQ ID NO: 2077631 - DNA, 15 bp, Homo sapiens
tgagcacggggagca

SEQ ID NO: 2077632 - DNA, 15 bp, Homo sapiens
gagcacggggagcag

SEQ ID NO: 2077633 - DNA, 15 bp, Homo sapiens
agcacggggagcagg

SEQ ID NO: 2077634 - DNA, 15 bp, Homo sapiens
gcacggggagcaggt

SEQ ID NO: 2077635 - DNA, 15 bp, Homo sapiens
cacggggagcaggtg

SEQ ID NO: 2077636 - DNA, 15 bp, Homo sapiens
acggggagcaggtga

SEQ ID NO: 2077637 - DNA, 15 bp, Homo sapiens
cggggagcaggtgaa

SEQ ID NO: 2077638 - DNA, 15 bp, Homo sapiens
ggggagcaggtgaat

SEQ ID NO: 2077639 - DNA, 15 bp, Homo sapiens
gggagcaggtgaatt

SEQ ID NO: 2077640 - DNA, 15 bp, Homo sapiens
ggagcaggtgaatta

SEQ ID NO: 2077641 - DNA, 15 bp, Homo sapiens
gagcaggtgaattac

SEQ ID NO: 2077642 - DNA, 15 bp, Homo sapiens
agcaggtgaattaca

SEQ ID NO: 2077643 - DNA, 15 bp, Homo sapiens
gcaggtgaattacag

SEQ ID NO: 2077644 - DNA, 15 bp, Homo sapiens
caggtgaattacagc

SEQ ID NO: 2077645 - DNA, 15 bp, Homo sapiens
aggtgaattacagcc

SEQ ID NO: 2077646 - DNA, 15 bp, Homo sapiens
ggtgaattacagccc

SEQ ID NO: 2077647 - DNA, 15 bp, Homo sapiens
gtgaattacagccct

SEQ ID NO: 2077648 - DNA, 15 bp, Homo sapiens
tgaattacagccctg

SEQ ID NO: 2077649 - DNA, 15 bp, Homo sapiens
gaattacagccctgg

SEQ ID NO: 2077650 - DNA, 15 bp, Homo sapiens
aattacagccctgga

SEQ ID NO: 2077651 - DNA, 15 bp, Homo sapiens
attacagccctggag

SEQ ID NO: 2077652 - DNA, 15 bp, Homo sapiens
ttacagccctggagg

SEQ ID NO: 2077653 - DNA, 15 bp, Homo sapiens
tacagccctggagga

SEQ ID NO: 2077654 - DNA, 15 bp, Homo sapiens
acagccctggaggac

SEQ ID NO: 2077655 - DNA, 15 bp, Homo sapiens
cagccctggaggacg

SEQ ID NO: 2077656 - DNA, 15 bp, Homo sapiens
agccctggaggacga

SEQ ID NO: 2077657 - DNA, 15 bp, Homo sapiens
gccctggaggacgaa

SEQ ID NO: 2077658 - DNA, 15 bp, Homo sapiens
ccctggaggacgaag

SEQ ID NO: 2077659 - DNA, 15 bp, Homo sapiens
cctggaggacgaagc

SEQ ID NO: 2077660 - DNA, 15 bp, Homo sapiens
ctggaggacgaagcc

SEQ ID NO: 2077661 - DNA, 15 bp, Homo sapiens
tggaggacgaagcct

SEQ ID NO: 2077662 - DNA, 15 bp, Homo sapiens
ggaggacgaagcctg

SEQ ID NO: 2077663 - DNA, 15 bp, Homo sapiens
gaggacgaagcctgc

SEQ ID NO: 2077664 - DNA, 15 bp, Homo sapiens
aggacgaagcctgcc

SEQ ID NO: 2077665 - DNA, 15 bp, Homo sapiens
ggacgaagcctgccg

SEQ ID NO: 2077666 - DNA, 15 bp, Homo sapiens
gacgaagcctgccgg

SEQ ID NO: 2077667 - DNA, 15 bp, Homo sapiens
acgaagcctgccggt

SEQ ID NO: 2077668 - DNA, 15 bp, Homo sapiens
cgaagcctgccggtc

SEQ ID NO: 2077669 - DNA, 15 bp, Homo sapiens
gaagcctgccggtct

SEQ ID NO: 2077670 - DNA, 15 bp, Homo sapiens
aagcctgccggtctc

SEQ ID NO: 2077671 - DNA, 15 bp, Homo sapiens
agcctgccggtctct

SEQ ID NO: 2077672 - DNA, 15 bp, Homo sapiens
gcctgccggtctcta

SEQ ID NO: 2077673 - DNA, 15 bp, Homo sapiens
cctgccggtctctag

SEQ ID NO: 2077674 - DNA, 15 bp, Homo sapiens
ctgccggtctctaga

SEQ ID NO: 2077675 - DNA, 15 bp, Homo sapiens
tgccggtctctagag

SEQ ID NO: 2077676 - DNA, 15 bp, Homo sapiens
gccggtctctagagg

SEQ ID NO: 2077677 - DNA, 15 bp, Homo sapiens
ccggtctctagaggg

SEQ ID NO: 2077678 - DNA, 15 bp, Homo sapiens
cggtctctagagggg

SEQ ID NO: 2077679 - DNA, 15 bp, Homo sapiens
ggtctctagaggggc

SEQ ID NO: 2077680 - DNA, 15 bp, Homo sapiens
gtctctagaggggca

SEQ ID NO: 2077681 - DNA, 15 bp, Homo sapiens
tctctagaggggcat

SEQ ID NO: 2077682 - DNA, 15 bp, Homo sapiens
ctctagaggggcatt

SEQ ID NO: 2077683 - DNA, 15 bp, Homo sapiens
tctagaggggcattg

SEQ ID NO: 2077684 - DNA, 15 bp, Homo sapiens
ctagaggggcattgc

SEQ ID NO: 2077685 - DNA, 15 bp, Homo sapiens
tagaggggcattgct

SEQ ID NO: 2077686 - DNA, 15 bp, Homo sapiens
agaggggcattgcta

SEQ ID NO: 2077687 - DNA, 15 bp, Homo sapiens
gaggggcattgctac

SEQ ID NO: 2077688 - DNA, 15 bp, Homo sapiens
aggggcattgctaca

SEQ ID NO: 2077689 - DNA, 15 bp, Homo sapiens
ggggcattgctacag

SEQ ID NO: 2077690 - DNA, 15 bp, Homo sapiens
gggcattgctacaga

SEQ ID NO: 2077691 - DNA, 15 bp, Homo sapiens
ggcattgctacagag

SEQ ID NO: 2077692 - DNA, 15 bp, Homo sapiens
gcattgctacagagg

SEQ ID NO: 2077693 - DNA, 15 bp, Homo sapiens
cattgctacagaggg

SEQ ID NO: 2077694 - DNA, 15 bp, Homo sapiens
attgctacagaggga

SEQ ID NO: 2077695 - DNA, 15 bp, Homo sapiens
ttgctacagagggag

SEQ ID NO: 2077696 - DNA, 15 bp, Homo sapiens
tgctacagagggagc

SEQ ID NO: 2077697 - DNA, 15 bp, Homo sapiens
gctacagagggagcc

SEQ ID NO: 2077698 - DNA, 15 bp, Homo sapiens
ctacagagggagcca

SEQ ID NO: 2077699 - DNA, 15 bp, Homo sapiens
tacagagggagccat

SEQ ID NO: 2077700 - DNA, 15 bp, Homo sapiens
acagagggagccatc

SEQ ID NO: 2077701 - DNA, 15 bp, Homo sapiens
cagagggagccatct

SEQ ID NO: 2077702 - DNA, 15 bp, Homo sapiens
agagggagccatctc

SEQ ID NO: 2077703 - DNA, 15 bp, Homo sapiens
gagggagccatctcc

SEQ ID NO: 2077704 - DNA, 15 bp, Homo sapiens
agggagccatctcca

SEQ ID NO: 2077705 - DNA, 15 bp, Homo sapiens
gggagccatctccag

SEQ ID NO: 2077706 - DNA, 15 bp, Homo sapiens
ggagccatctccagg

SEQ ID NO: 2077707 - DNA, 15 bp, Homo sapiens
gagccatctccaggc

SEQ ID NO: 2077708 - DNA, 15 bp, Homo sapiens
agccatctccaggcc

SEQ ID NO: 2077709 - DNA, 15 bp, Homo sapiens
gccatctccaggcct

SEQ ID NO: 2077710 - DNA, 15 bp, Homo sapiens
ccatctccaggcctt

SEQ ID NO: 2077711 - DNA, 15 bp, Homo sapiens
catctccaggccttt

SEQ ID NO: 2077712 - DNA, 15 bp, Homo sapiens
atctccaggcctttt

SEQ ID NO: 2077713 - DNA, 15 bp, Homo sapiens
tctccaggccttttg

SEQ ID NO: 2077714 - DNA, 15 bp, Homo sapiens
ctccaggccttttgt

SEQ ID NO: 2077715 - DNA, 15 bp, Homo sapiens
tccaggccttttgta

SEQ ID NO: 2077716 - DNA, 15 bp, Homo sapiens
ccaggccttttgtag

SEQ ID NO: 2077717 - DNA, 15 bp, Homo sapiens
caggccttttgtagc

SEQ ID NO: 2077718 - DNA, 15 bp, Homo sapiens
aggccttttgtagcc

SEQ ID NO: 2077719 - DNA, 15 bp, Homo sapiens
ggccttttgtagccc

SEQ ID NO: 2077720 - DNA, 15 bp, Homo sapiens
gccttttgtagcccc

SEQ ID NO: 2077721 - DNA, 15 bp, Homo sapiens
ccttttgtagcccct

SEQ ID NO: 2077722 - DNA, 15 bp, Homo sapiens
cttttgtagcccctc

SEQ ID NO: 2077723 - DNA, 15 bp, Homo sapiens
ttttgtagcccctcc

SEQ ID NO: 2077724 - DNA, 15 bp, Homo sapiens
tttgtagcccctcct

SEQ ID NO: 2077725 - DNA, 15 bp, Homo sapiens
ttgtagcccctcctc

SEQ ID NO: 2077726 - DNA, 15 bp, Homo sapiens
tgtagcccctcctcc

SEQ ID NO: 2077727 - DNA, 15 bp, Homo sapiens
gtagcccctcctccc

SEQ ID NO: 2077728 - DNA, 15 bp, Homo sapiens
tagcccctcctcccc

SEQ ID NO: 2077729 - DNA, 15 bp, Homo sapiens
gcccctcctcccctg

SEQ ID NO: 2077730 - DNA, 15 bp, Homo sapiens
cccctcctcccctgg

SEQ ID NO: 2077731 - DNA, 15 bp, Homo sapiens
ccctcctcccctgga

SEQ ID NO: 2077732 - DNA, 15 bp, Homo sapiens
cctcctcccctggac

SEQ ID NO: 2077733 - DNA, 15 bp, Homo sapiens
ctcctcccctggacc

SEQ ID NO: 2077734 - DNA, 15 bp, Homo sapiens
tcctcccctggaccc

SEQ ID NO: 2077735 - DNA, 15 bp, Homo sapiens
cctcccctggaccct

SEQ ID NO: 2077736 - DNA, 15 bp, Homo sapiens
ctcccctggaccctg

SEQ ID NO: 2077737 - DNA, 15 bp, Homo sapiens
tcccctggaccctgg

SEQ ID NO: 2077738 - DNA, 15 bp, Homo sapiens
cccctggaccctgga

SEQ ID NO: 2077739 - DNA, 15 bp, Homo sapiens
ccctggaccctggag

SEQ ID NO: 2077740 - DNA, 15 bp, Homo sapiens
cctggaccctggagg

SEQ ID NO: 2077741 - DNA, 15 bp, Homo sapiens
ctggaccctggaggg

SEQ ID NO: 2077742 - DNA, 15 bp, Homo sapiens
tggaccctggagggt

SEQ ID NO: 2077743 - DNA, 15 bp, Homo sapiens
ggaccctggagggtg

SEQ ID NO: 2077744 - DNA, 15 bp, Homo sapiens
gaccctggagggtgt

SEQ ID NO: 2077745 - DNA, 15 bp, Homo sapiens
accctggagggtgtg

SEQ ID NO: 2077746 - DNA, 15 bp, Homo sapiens
ccctggagggtgtgc

SEQ ID NO: 2077747 - DNA, 15 bp, Homo sapiens
cctggagggtgtgca

SEQ ID NO: 2077748 - DNA, 15 bp, Homo sapiens
ctggagggtgtgcac

SEQ ID NO: 2077749 - DNA, 15 bp, Homo sapiens
tggagggtgtgcacc

SEQ ID NO: 2077750 - DNA, 15 bp, Homo sapiens
ggagggtgtgcacct

SEQ ID NO: 2077751 - DNA, 15 bp, Homo sapiens
gagggtgtgcacctg

SEQ ID NO: 2077752 - DNA, 15 bp, Homo sapiens
agggtgtgcacctgg

SEQ ID NO: 2077753 - DNA, 15 bp, Homo sapiens
gggtgtgcacctggc

SEQ ID NO: 2077754 - DNA, 15 bp, Homo sapiens
ggtgtgcacctggcc

SEQ ID NO: 2077755 - DNA, 15 bp, Homo sapiens
gtgtgcacctggcct

SEQ ID NO: 2077756 - DNA, 15 bp, Homo sapiens
tgtgcacctggccta

SEQ ID NO: 2077757 - DNA, 15 bp, Homo sapiens
gtgcacctggcctaa

SEQ ID NO: 2077758 - DNA, 15 bp, Homo sapiens
tgcacctggcctaat

SEQ ID NO: 2077759 - DNA, 15 bp, Homo sapiens
gcacctggcctaatc

SEQ ID NO: 2077760 - DNA, 15 bp, Homo sapiens
cacctggcctaatcc

SEQ ID NO: 2077761 - DNA, 15 bp, Homo sapiens
acctggcctaatccc

SEQ ID NO: 2077762 - DNA, 15 bp, Homo sapiens
cctggcctaatcccc

SEQ ID NO: 2077763 - DNA, 15 bp, Homo sapiens
ctggcctaatcccca

SEQ ID NO: 2077764 - DNA, 15 bp, Homo sapiens
tggcctaatccccaa

SEQ ID NO: 2077765 - DNA, 15 bp, Homo sapiens
ggcctaatccccaac

SEQ ID NO: 2077766 - DNA, 15 bp, Homo sapiens
gcctaatccccaaca

SEQ ID NO: 2077767 - DNA, 15 bp, Homo sapiens
cctaatccccaacac

SEQ ID NO: 2077768 - DNA, 15 bp, Homo sapiens
ctaatccccaacaca

SEQ ID NO: 2077769 - DNA, 15 bp, Homo sapiens
taatccccaacacac

SEQ ID NO: 2077770 - DNA, 15 bp, Homo sapiens
aatccccaacacaca

SEQ ID NO: 2077771 - DNA, 15 bp, Homo sapiens
atccccaacacacac

SEQ ID NO: 2077772 - DNA, 15 bp, Homo sapiens
tccccaacacacaca

SEQ ID NO: 2077773 - DNA, 15 bp, Homo sapiens
ccccaacacacacac

SEQ ID NO: 2077774 - DNA, 15 bp, Homo sapiens
cccaacacacacacc

SEQ ID NO: 2077775 - DNA, 15 bp, Homo sapiens
ccaacacacacaccg

SEQ ID NO: 2077776 - DNA, 15 bp, Homo sapiens
caacacacacaccgc

SEQ ID NO: 2077777 - DNA, 15 bp, Homo sapiens
aacacacacaccgcc

SEQ ID NO: 2077778 - DNA, 15 bp, Homo sapiens
acacacacaccgccg

SEQ ID NO: 2077779 - DNA, 15 bp, Homo sapiens
cacacacaccgccgc

SEQ ID NO: 2077780 - DNA, 15 bp, Homo sapiens
acacacaccgccgct

SEQ ID NO: 2077781 - DNA, 15 bp, Homo sapiens
cacacaccgccgctc

SEQ ID NO: 2077782 - DNA, 15 bp, Homo sapiens
acacaccgccgctct

SEQ ID NO: 2077783 - DNA, 15 bp, Homo sapiens
cacaccgccgctctc

SEQ ID NO: 2077784 - DNA, 15 bp, Homo sapiens
acaccgccgctctcc

SEQ ID NO: 2077785 - DNA, 15 bp, Homo sapiens
caccgccgctctccc

SEQ ID NO: 2077786 - DNA, 15 bp, Homo sapiens
accgccgctctccct

SEQ ID NO: 2077787 - DNA, 15 bp, Homo sapiens
ccgccgctctccctt

SEQ ID NO: 2077788 - DNA, 15 bp, Homo sapiens
cgccgctctcccttg

SEQ ID NO: 2077789 - DNA, 15 bp, Homo sapiens
gccgctctcccttgt

SEQ ID NO: 2077790 - DNA, 15 bp, Homo sapiens
ccgctctcccttgtg

SEQ ID NO: 2077791 - DNA, 15 bp, Homo sapiens
cgctctcccttgtgt

SEQ ID NO: 2077792 - DNA, 15 bp, Homo sapiens
gctctcccttgtgtg

SEQ ID NO: 2077793 - DNA, 15 bp, Homo sapiens
ctctcccttgtgtgc

SEQ ID NO: 2077794 - DNA, 15 bp, Homo sapiens
tctcccttgtgtgcc

SEQ ID NO: 2077795 - DNA, 15 bp, Homo sapiens
ctcccttgtgtgcca

SEQ ID NO: 2077796 - DNA, 15 bp, Homo sapiens
tcccttgtgtgccac

SEQ ID NO: 2077797 - DNA, 15 bp, Homo sapiens
cccttgtgtgccaca

SEQ ID NO: 2077798 - DNA, 15 bp, Homo sapiens
ccttgtgtgccacac

SEQ ID NO: 2077799 - DNA, 15 bp, Homo sapiens
cttgtgtgccacact

SEQ ID NO: 2077800 - DNA, 15 bp, Homo sapiens
ttgtgtgccacactt

SEQ ID NO: 2077801 - DNA, 15 bp, Homo sapiens
tgtgtgccacactta

SEQ ID NO: 2077802 - DNA, 15 bp, Homo sapiens
gtgtgccacacttac

SEQ ID NO: 2077803 - DNA, 15 bp, Homo sapiens
tgtgccacacttaca

SEQ ID NO: 2077804 - DNA, 15 bp, Homo sapiens
gtgccacacttacac

SEQ ID NO: 2077805 - DNA, 15 bp, Homo sapiens
tgccacacttacaca

SEQ ID NO: 2077806 - DNA, 15 bp, Homo sapiens
gccacacttacacac

SEQ ID NO: 2077807 - DNA, 15 bp, Homo sapiens
ccacacttacacacg

SEQ ID NO: 2077808 - DNA, 15 bp, Homo sapiens
cacacttacacacgc

SEQ ID NO: 2077809 - DNA, 15 bp, Homo sapiens
acacttacacacgca

SEQ ID NO: 2077810 - DNA, 15 bp, Homo sapiens
cacttacacacgcag

SEQ ID NO: 2077811 - DNA, 15 bp, Homo sapiens
acttacacacgcaga

SEQ ID NO: 2077812 - DNA, 15 bp, Homo sapiens
cttacacacgcagac

SEQ ID NO: 2077813 - DNA, 15 bp, Homo sapiens
ttacacacgcagact

SEQ ID NO: 2077814 - DNA, 15 bp, Homo sapiens
tacacacgcagacta

SEQ ID NO: 2077815 - DNA, 15 bp, Homo sapiens
acacacgcagactag

SEQ ID NO: 2077816 - DNA, 15 bp, Homo sapiens
cacacgcagactagc

SEQ ID NO: 2077817 - DNA, 15 bp, Homo sapiens
acacgcagactagcg

SEQ ID NO: 2077818 - DNA, 15 bp, Homo sapiens
cacgcagactagcgc

SEQ ID NO: 2077819 - DNA, 15 bp, Homo sapiens
acgcagactagcgct

SEQ ID NO: 2077820 - DNA, 15 bp, Homo sapiens
cgcagactagcgctc

SEQ ID NO: 2077821 - DNA, 15 bp, Homo sapiens
gcagactagcgctca

SEQ ID NO: 2077822 - DNA, 15 bp, Homo sapiens
cagactagcgctcat

SEQ ID NO: 2077823 - DNA, 15 bp, Homo sapiens
agactagcgctcatg

SEQ ID NO: 2077824 - DNA, 15 bp, Homo sapiens
gactagcgctcatgt

SEQ ID NO: 2077825 - DNA, 15 bp, Homo sapiens
actagcgctcatgtg

SEQ ID NO: 2077826 - DNA, 15 bp, Homo sapiens
ctagcgctcatgtgt

SEQ ID NO: 2077827 - DNA, 15 bp, Homo sapiens
tagcgctcatgtgtg

SEQ ID NO: 2077828 - DNA, 15 bp, Homo sapiens
agcgctcatgtgtgt

SEQ ID NO: 2077829 - DNA, 15 bp, Homo sapiens
gcgctcatgtgtgtt

SEQ ID NO: 2077830 - DNA, 15 bp, Homo sapiens
cgctcatgtgtgttc

SEQ ID NO: 2077831 - DNA, 15 bp, Homo sapiens
gctcatgtgtgttct

SEQ ID NO: 2077832 - DNA, 15 bp, Homo sapiens
ctcatgtgtgttctg

SEQ ID NO: 2077833 - DNA, 15 bp, Homo sapiens
tcatgtgtgttctgg

SEQ ID NO: 2077834 - DNA, 15 bp, Homo sapiens
catgtgtgttctggg

SEQ ID NO: 2077835 - DNA, 15 bp, Homo sapiens
atgtgtgttctgggg

SEQ ID NO: 2077836 - DNA, 15 bp, Homo sapiens
tgtgtgttctggggc

SEQ ID NO: 2077837 - DNA, 15 bp, Homo sapiens
gtgtgttctggggct

SEQ ID NO: 2077838 - DNA, 15 bp, Homo sapiens
tgtgttctggggctc

SEQ ID NO: 2077839 - DNA, 15 bp, Homo sapiens
gtgttctggggctca

SEQ ID NO: 2077840 - DNA, 15 bp, Homo sapiens
tgttctggggctcag

SEQ ID NO: 2077841 - DNA, 15 bp, Homo sapiens
gttctggggctcaga

SEQ ID NO: 2077842 - DNA, 15 bp, Homo sapiens
ttctggggctcagac

SEQ ID NO: 2077843 - DNA, 15 bp, Homo sapiens
tctggggctcagacc

SEQ ID NO: 2077844 - DNA, 15 bp, Homo sapiens
ctggggctcagacca

SEQ ID NO: 2077845 - DNA, 15 bp, Homo sapiens
tggggctcagaccag

SEQ ID NO: 2077846 - DNA, 15 bp, Homo sapiens
ggggctcagaccagc

SEQ ID NO: 2077847 - DNA, 15 bp, Homo sapiens
gggctcagaccagca

SEQ ID NO: 2077848 - DNA, 15 bp, Homo sapiens
ggctcagaccagcaa

SEQ ID NO: 2077849 - DNA, 15 bp, Homo sapiens
gctcagaccagcaat

SEQ ID NO: 2077850 - DNA, 15 bp, Homo sapiens
ctcagaccagcaata

SEQ ID NO: 2077851 - DNA, 15 bp, Homo sapiens
tcagaccagcaatag

SEQ ID NO: 2077852 - DNA, 15 bp, Homo sapiens
cagaccagcaataga

SEQ ID NO: 2077853 - DNA, 15 bp, Homo sapiens
agaccagcaatagac

SEQ ID NO: 2077854 - DNA, 15 bp, Homo sapiens
gaccagcaatagacc

SEQ ID NO: 2077855 - DNA, 15 bp, Homo sapiens
accagcaatagaccc

SEQ ID NO: 2077856 - DNA, 15 bp, Homo sapiens
ccagcaatagaccca

SEQ ID NO: 2077857 - DNA, 15 bp, Homo sapiens
cagcaatagacccat

SEQ ID NO: 2077858 - DNA, 15 bp, Homo sapiens
agcaatagacccatg

SEQ ID NO: 2077859 - DNA, 15 bp, Homo sapiens
gcaatagacccatga

SEQ ID NO: 2077860 - DNA, 15 bp, Homo sapiens
caatagacccatgac

SEQ ID NO: 2077861 - DNA, 15 bp, Homo sapiens
aatagacccatgact

SEQ ID NO: 2077862 - DNA, 15 bp, Homo sapiens
atagacccatgactc

SEQ ID NO: 2077863 - DNA, 15 bp, Homo sapiens
tagacccatgactcc

SEQ ID NO: 2077864 - DNA, 15 bp, Homo sapiens
agacccatgactcca

SEQ ID NO: 2077865 - DNA, 15 bp, Homo sapiens
gacccatgactccac

SEQ ID NO: 2077866 - DNA, 15 bp, Homo sapiens
acccatgactccacg

SEQ ID NO: 2077867 - DNA, 15 bp, Homo sapiens
cccatgactccacga

SEQ ID NO: 2077868 - DNA, 15 bp, Homo sapiens
ccatgactccacgac

SEQ ID NO: 2077869 - DNA, 15 bp, Homo sapiens
catgactccacgaca

SEQ ID NO: 2077870 - DNA, 15 bp, Homo sapiens
atgactccacgacag

SEQ ID NO: 2077871 - DNA, 15 bp, Homo sapiens
tgactccacgacagc

SEQ ID NO: 2077872 - DNA, 15 bp, Homo sapiens
gactccacgacagct

SEQ ID NO: 2077873 - DNA, 15 bp, Homo sapiens
actccacgacagctt

SEQ ID NO: 2077874 - DNA, 15 bp, Homo sapiens
ctccacgacagcttc

SEQ ID NO: 2077875 - DNA, 15 bp, Homo sapiens
tccacgacagcttca

SEQ ID NO: 2077876 - DNA, 15 bp, Homo sapiens
ccacgacagcttcac

SEQ ID NO: 2077877 - DNA, 15 bp, Homo sapiens
cacgacagcttcaca

SEQ ID NO: 2077878 - DNA, 15 bp, Homo sapiens
acgacagcttcacag

SEQ ID NO: 2077879 - DNA, 15 bp, Homo sapiens
cgacagcttcacagc

SEQ ID NO: 2077880 - DNA, 15 bp, Homo sapiens
gacagcttcacagca

SEQ ID NO: 2077881 - DNA, 15 bp, Homo sapiens
acagcttcacagcag

SEQ ID NO: 2077882 - DNA, 15 bp, Homo sapiens
cagcttcacagcagc

SEQ ID NO: 2077883 - DNA, 15 bp, Homo sapiens
agcttcacagcagcc

SEQ ID NO: 2077884 - DNA, 15 bp, Homo sapiens
gcttcacagcagcca

SEQ ID NO: 2077885 - DNA, 15 bp, Homo sapiens
cttcacagcagccaa

SEQ ID NO: 2077886 - DNA, 15 bp, Homo sapiens
ttcacagcagccaac

SEQ ID NO: 2077887 - DNA, 15 bp, Homo sapiens
tcacagcagccaaca

SEQ ID NO: 2077888 - DNA, 15 bp, Homo sapiens
cacagcagccaacac

SEQ ID NO: 2077889 - DNA, 15 bp, Homo sapiens
acagcagccaacact

SEQ ID NO: 2077890 - DNA, 15 bp, Homo sapiens
cagcagccaacactt

SEQ ID NO: 2077891 - DNA, 15 bp, Homo sapiens
agcagccaacacttt

SEQ ID NO: 2077892 - DNA, 15 bp, Homo sapiens
gcagccaacactttt

SEQ ID NO: 2077893 - DNA, 15 bp, Homo sapiens
cagccaacacttttg

SEQ ID NO: 2077894 - DNA, 15 bp, Homo sapiens
agccaacacttttga

SEQ ID NO: 2077895 - DNA, 15 bp, Homo sapiens
gccaacacttttgag

SEQ ID NO: 2077896 - DNA, 15 bp, Homo sapiens
ccaacacttttgaga

SEQ ID NO: 2077897 - DNA, 15 bp, Homo sapiens
caacacttttgagaa

SEQ ID NO: 2077898 - DNA, 15 bp, Homo sapiens
aacacttttgagaag

SEQ ID NO: 2077899 - DNA, 15 bp, Homo sapiens
acacttttgagaagg

SEQ ID NO: 2077900 - DNA, 15 bp, Homo sapiens
cacttttgagaaggt

SEQ ID NO: 2077901 - DNA, 15 bp, Homo sapiens
acttttgagaaggtc

SEQ ID NO: 2077902 - DNA, 15 bp, Homo sapiens
cttttgagaaggtcc

SEQ ID NO: 2077903 - DNA, 15 bp, Homo sapiens
ttttgagaaggtcct

SEQ ID NO: 2077904 - DNA, 15 bp, Homo sapiens
tttgagaaggtcctc

SEQ ID NO: 2077905 - DNA, 15 bp, Homo sapiens
ttgagaaggtcctcc

SEQ ID NO: 2077906 - DNA, 15 bp, Homo sapiens
tgagaaggtcctccc

SEQ ID NO: 2077907 - DNA, 15 bp, Homo sapiens
gagaaggtcctccct

SEQ ID NO: 2077908 - DNA, 15 bp, Homo sapiens
agaaggtcctccctc

SEQ ID NO: 2077909 - DNA, 15 bp, Homo sapiens
gaaggtcctccctcc

SEQ ID NO: 2077910 - DNA, 15 bp, Homo sapiens
aaggtcctccctcca

SEQ ID NO: 2077911 - DNA, 15 bp, Homo sapiens
aggtcctccctccaa

SEQ ID NO: 2077912 - DNA, 15 bp, Homo sapiens
ggtcctccctccaag

SEQ ID NO: 2077913 - DNA, 15 bp, Homo sapiens
gtcctccctccaagt

SEQ ID NO: 2077914 - DNA, 15 bp, Homo sapiens
tcctccctccaagtc

SEQ ID NO: 2077915 - DNA, 15 bp, Homo sapiens
cctccctccaagtcc

SEQ ID NO: 2077916 - DNA, 15 bp, Homo sapiens
ctccctccaagtccc

SEQ ID NO: 2077917 - DNA, 15 bp, Homo sapiens
tccctccaagtccca

SEQ ID NO: 2077918 - DNA, 15 bp, Homo sapiens
ccctccaagtcccag

SEQ ID NO: 2077919 - DNA, 15 bp, Homo sapiens
cctccaagtcccagg

SEQ ID NO: 2077920 - DNA, 15 bp, Homo sapiens
ctccaagtcccagga

SEQ ID NO: 2077921 - DNA, 15 bp, Homo sapiens
tccaagtcccaggac

SEQ ID NO: 2077922 - DNA, 15 bp, Homo sapiens
ccaagtcccaggacc

SEQ ID NO: 2077923 - DNA, 15 bp, Homo sapiens
caagtcccaggacca

SEQ ID NO: 2077924 - DNA, 15 bp, Homo sapiens
aagtcccaggaccac

SEQ ID NO: 2077925 - DNA, 15 bp, Homo sapiens
agtcccaggaccacc

SEQ ID NO: 2077926 - DNA, 15 bp, Homo sapiens
gtcccaggaccacct

SEQ ID NO: 2077927 - DNA, 15 bp, Homo sapiens
tcccaggaccacctg

SEQ ID NO: 2077928 - DNA, 15 bp, Homo sapiens
cccaggaccacctgg

SEQ ID NO: 2077929 - DNA, 15 bp, Homo sapiens
ccaggaccacctggg

SEQ ID NO: 2077930 - DNA, 15 bp, Homo sapiens
caggaccacctgggc

SEQ ID NO: 2077931 - DNA, 15 bp, Homo sapiens
aggaccacctgggcc

SEQ ID NO: 2077932 - DNA, 15 bp, Homo sapiens
ggaccacctgggcca

SEQ ID NO: 2077933 - DNA, 15 bp, Homo sapiens
gaccacctgggccac

SEQ ID NO: 2077934 - DNA, 15 bp, Homo sapiens
accacctgggccaca

SEQ ID NO: 2077935 - DNA, 15 bp, Homo sapiens
ccacctgggccacag

SEQ ID NO: 2077936 - DNA, 15 bp, Homo sapiens
cacctgggccacagt

SEQ ID NO: 2077937 - DNA, 15 bp, Homo sapiens
acctgggccacagtt

SEQ ID NO: 2077938 - DNA, 15 bp, Homo sapiens
cctgggccacagttg

SEQ ID NO: 2077939 - DNA, 15 bp, Homo sapiens
ctgggccacagttgg

SEQ ID NO: 2077940 - DNA, 15 bp, Homo sapiens
tgggccacagttggt

SEQ ID NO: 2077941 - DNA, 15 bp, Homo sapiens
gggccacagttggtg

SEQ ID NO: 2077942 - DNA, 15 bp, Homo sapiens
ggccacagttggtgt

SEQ ID NO: 2077943 - DNA, 15 bp, Homo sapiens
gccacagttggtgtc

SEQ ID NO: 2077944 - DNA, 15 bp, Homo sapiens
ccacagttggtgtct

SEQ ID NO: 2077945 - DNA, 15 bp, Homo sapiens
cacagttggtgtctg

SEQ ID NO: 2077946 - DNA, 15 bp, Homo sapiens
acagttggtgtctga

SEQ ID NO: 2077947 - DNA, 15 bp, Homo sapiens
cagttggtgtctgat

SEQ ID NO: 2077948 - DNA, 15 bp, Homo sapiens
agttggtgtctgatt

SEQ ID NO: 2077949 - DNA, 15 bp, Homo sapiens
gttggtgtctgattc

SEQ ID NO: 2077950 - DNA, 15 bp, Homo sapiens
ttggtgtctgattcc

SEQ ID NO: 2077951 - DNA, 15 bp, Homo sapiens
tggtgtctgattcct

SEQ ID NO: 2077952 - DNA, 15 bp, Homo sapiens
ggtgtctgattcctg

SEQ ID NO: 2077953 - DNA, 15 bp, Homo sapiens
gtgtctgattcctgg

SEQ ID NO: 2077954 - DNA, 15 bp, Homo sapiens
tgtctgattcctggc

SEQ ID NO: 2077955 - DNA, 15 bp, Homo sapiens
gtctgattcctggct

SEQ ID NO: 2077956 - DNA, 15 bp, Homo sapiens
tctgattcctggctg

SEQ ID NO: 2077957 - DNA, 15 bp, Homo sapiens
ctgattcctggctgt

SEQ ID NO: 2077958 - DNA, 15 bp, Homo sapiens
tgattcctggctgtg

SEQ ID NO: 2077959 - DNA, 15 bp, Homo sapiens
gattcctggctgtgt

SEQ ID NO: 2077960 - DNA, 15 bp, Homo sapiens
attcctggctgtgtg

SEQ ID NO: 2077961 - DNA, 15 bp, Homo sapiens
ttcctggctgtgtgt

SEQ ID NO: 2077962 - DNA, 15 bp, Homo sapiens
tcctggctgtgtgtc

SEQ ID NO: 2077963 - DNA, 15 bp, Homo sapiens
cctggctgtgtgtcc

SEQ ID NO: 2077964 - DNA, 15 bp, Homo sapiens
tggctgtgtgtcctg

SEQ ID NO: 2077965 - DNA, 15 bp, Homo sapiens
ggctgtgtgtcctgg

SEQ ID NO: 2077966 - DNA, 15 bp, Homo sapiens
gctgtgtgtcctggt

SEQ ID NO: 2077967 - DNA, 15 bp, Homo sapiens
ctgtgtgtcctggtg

SEQ ID NO: 2077968 - DNA, 15 bp, Homo sapiens
tgtgtgtcctggtga

SEQ ID NO: 2077969 - DNA, 15 bp, Homo sapiens
gtgtgtcctggtgag

SEQ ID NO: 2077970 - DNA, 15 bp, Homo sapiens
ggtctgatttgaaga

SEQ ID NO: 2077971 - DNA, 15 bp, Homo sapiens
gtctgatttgaagat

SEQ ID NO: 2077972 - DNA, 15 bp, Homo sapiens
tctgatttgaagata

SEQ ID NO: 2077973 - DNA, 15 bp, Homo sapiens
ctgatttgaagatag

SEQ ID NO: 2077974 - DNA, 15 bp, Homo sapiens
tgatttgaagatagg

SEQ ID NO: 2077975 - DNA, 15 bp, Homo sapiens
gatttgaagatagga

SEQ ID NO: 2077976 - DNA, 15 bp, Homo sapiens
atttgaagataggaa

SEQ ID NO: 2077977 - DNA, 15 bp, Homo sapiens
tttgaagataggaac

SEQ ID NO: 2077978 - DNA, 15 bp, Homo sapiens
ttgaagataggaaca

SEQ ID NO: 2077979 - DNA, 15 bp, Homo sapiens
tgaagataggaacat

SEQ ID NO: 2077980 - DNA, 15 bp, Homo sapiens
gaagataggaacatt

SEQ ID NO: 2077981 - DNA, 15 bp, Homo sapiens
aagataggaacattt

SEQ ID NO: 2077982 - DNA, 15 bp, Homo sapiens
agataggaacattta

SEQ ID NO: 2077983 - DNA, 15 bp, Homo sapiens
gataggaacatttaa

SEQ ID NO: 2077984 - DNA, 15 bp, Homo sapiens
ataggaacatttaac

SEQ ID NO: 2077985 - DNA, 15 bp, Homo sapiens
taggaacatttaact

SEQ ID NO: 2077986 - DNA, 15 bp, Homo sapiens
aggaacatttaactt

SEQ ID NO: 2077987 - DNA, 15 bp, Homo sapiens
ggaacatttaacttc

SEQ ID NO: 2077988 - DNA, 15 bp, Homo sapiens
gaacatttaacttcg

SEQ ID NO: 2077989 - DNA, 15 bp, Homo sapiens
aacatttaacttcgt

SEQ ID NO: 2077990 - DNA, 15 bp, Homo sapiens
acatttaacttcgta

SEQ ID NO: 2077991 - DNA, 15 bp, Homo sapiens
catttaacttcgtac

SEQ ID NO: 2077992 - DNA, 15 bp, Homo sapiens
atttaacttcgtaca

SEQ ID NO: 2077993 - DNA, 15 bp, Homo sapiens
tttaacttcgtacac

SEQ ID NO: 2077994 - DNA, 15 bp, Homo sapiens
ttaacttcgtacacc

SEQ ID NO: 2077995 - DNA, 15 bp, Homo sapiens
taacttcgtacaccc

SEQ ID NO: 2077996 - DNA, 15 bp, Homo sapiens
aacttcgtacaccca

SEQ ID NO: 2077997 - DNA, 15 bp, Homo sapiens
acttcgtacacccaa

SEQ ID NO: 2077998 - DNA, 15 bp, Homo sapiens
cttcgtacacccaag

SEQ ID NO: 2077999 - DNA, 15 bp, Homo sapiens
ttcgtacacccaaga

SEQ ID NO: 2078000 - DNA, 15 bp, Homo sapiens
tcgtacacccaagac

SEQ ID NO: 2078001 - DNA, 15 bp, Homo sapiens
cgtacacccaagact

SEQ ID NO: 2078002 - DNA, 15 bp, Homo sapiens
gtacacccaagactt

SEQ ID NO: 2078003 - DNA, 15 bp, Homo sapiens
tacacccaagactta

SEQ ID NO: 2078004 - DNA, 15 bp, Homo sapiens
acacccaagacttac

SEQ ID NO: 2078005 - DNA, 15 bp, Homo sapiens
cacccaagacttaca

SEQ ID NO: 2078006 - DNA, 15 bp, Homo sapiens
acccaagacttacac

SEQ ID NO: 2078007 - DNA, 15 bp, Homo sapiens
cccaagacttacact

SEQ ID NO: 2078008 - DNA, 15 bp, Homo sapiens
ccaagacttacactt

SEQ ID NO: 2078009 - DNA, 15 bp, Homo sapiens
caagacttacacttg

SEQ ID NO: 2078010 - DNA, 15 bp, Homo sapiens
aagacttacacttga

SEQ ID NO: 2078011 - DNA, 15 bp, Homo sapiens
agacttacacttgaa

SEQ ID NO: 2078012 - DNA, 15 bp, Homo sapiens
gacttacacttgaag

SEQ ID NO: 2078013 - DNA, 15 bp, Homo sapiens
acttacacttgaagt

SEQ ID NO: 2078014 - DNA, 15 bp, Homo sapiens
cttacacttgaagta

SEQ ID NO: 2078015 - DNA, 15 bp, Homo sapiens
ttacacttgaagtac

SEQ ID NO: 2078016 - DNA, 15 bp, Homo sapiens
tacacttgaagtact

SEQ ID NO: 2078017 - DNA, 15 bp, Homo sapiens
acacttgaagtactt

SEQ ID NO: 2078018 - DNA, 15 bp, Homo sapiens
cacttgaagtactta

SEQ ID NO: 2078019 - DNA, 15 bp, Homo sapiens
acttgaagtacttac

SEQ ID NO: 2078020 - DNA, 15 bp, Homo sapiens
cttgaagtacttact

SEQ ID NO: 2078021 - DNA, 15 bp, Homo sapiens
ttgaagtacttactg

SEQ ID NO: 2078022 - DNA, 15 bp, Homo sapiens
tgaagtacttactgt

SEQ ID NO: 2078023 - DNA, 15 bp, Homo sapiens
gaagtacttactgtg

SEQ ID NO: 2078024 - DNA, 15 bp, Homo sapiens
aagtacttactgtgg

SEQ ID NO: 2078025 - DNA, 15 bp, Homo sapiens
agtacttactgtggt

SEQ ID NO: 2078026 - DNA, 15 bp, Homo sapiens
gtacttactgtggtc

SEQ ID NO: 2078027 - DNA, 15 bp, Homo sapiens
tacttactgtggtca

SEQ ID NO: 2078028 - DNA, 15 bp, Homo sapiens
acttactgtggtcac

SEQ ID NO: 2078029 - DNA, 15 bp, Homo sapiens
cttactgtggtcaca

SEQ ID NO: 2078030 - DNA, 15 bp, Homo sapiens
ttactgtggtcacac

SEQ ID NO: 2078031 - DNA, 15 bp, Homo sapiens
tactgtggtcacaca

SEQ ID NO: 2078032 - DNA, 15 bp, Homo sapiens
actgtggtcacacac

SEQ ID NO: 2078033 - DNA, 15 bp, Homo sapiens
ctgtggtcacacact

SEQ ID NO: 2078034 - DNA, 15 bp, Homo sapiens
tgtggtcacacactt

SEQ ID NO: 2078035 - DNA, 15 bp, Homo sapiens
gtggtcacacactta

SEQ ID NO: 2078036 - DNA, 15 bp, Homo sapiens
tggtcacacacttaa

SEQ ID NO: 2078037 - DNA, 15 bp, Homo sapiens
ggtcacacacttaac

SEQ ID NO: 2078038 - DNA, 15 bp, Homo sapiens
gtcacacacttaact

SEQ ID NO: 2078039 - DNA, 15 bp, Homo sapiens
tcacacacttaacta

SEQ ID NO: 2078040 - DNA, 15 bp, Homo sapiens
cacacacttaactaa

SEQ ID NO: 2078041 - DNA, 15 bp, Homo sapiens
acacacttaactaaa

SEQ ID NO: 2078042 - DNA, 15 bp, Homo sapiens
cacacttaactaaag

SEQ ID NO: 2078043 - DNA, 15 bp, Homo sapiens
acacttaactaaagt

SEQ ID NO: 2078044 - DNA, 15 bp, Homo sapiens
cacttaactaaagtt

SEQ ID NO: 2078045 - DNA, 15 bp, Homo sapiens
acttaactaaagttt

SEQ ID NO: 2078046 - DNA, 15 bp, Homo sapiens
cttaactaaagttta

SEQ ID NO: 2078047 - DNA, 15 bp, Homo sapiens
ttaactaaagtttat

SEQ ID NO: 2078048 - DNA, 15 bp, Homo sapiens
taactaaagtttata

SEQ ID NO: 2078049 - DNA, 15 bp, Homo sapiens
aactaaagtttatat

SEQ ID NO: 2078050 - DNA, 15 bp, Homo sapiens
actaaagtttatata

SEQ ID NO: 2078051 - DNA, 15 bp, Homo sapiens
ctaaagtttatatag

SEQ ID NO: 2078052 - DNA, 15 bp, Homo sapiens
taaagtttatatagg

SEQ ID NO: 2078053 - DNA, 15 bp, Homo sapiens
aaagtttatataggg

SEQ ID NO: 2078054 - DNA, 15 bp, Homo sapiens
aagtttatataggga

SEQ ID NO: 2078055 - DNA, 15 bp, Homo sapiens
agtttatatagggaa

SEQ ID NO: 2078056 - DNA, 15 bp, Homo sapiens
gtttatatagggaag

SEQ ID NO: 2078057 - DNA, 15 bp, Homo sapiens
tttatatagggaagg

SEQ ID NO: 2078058 - DNA, 15 bp, Homo sapiens
ttatatagggaaggc

SEQ ID NO: 2078059 - DNA, 15 bp, Homo sapiens
tatatagggaaggca

SEQ ID NO: 2078060 - DNA, 15 bp, Homo sapiens
atatagggaaggcag

SEQ ID NO: 2078061 - DNA, 15 bp, Homo sapiens
tatagggaaggcaga

SEQ ID NO: 2078062 - DNA, 15 bp, Homo sapiens
atagggaaggcagag

SEQ ID NO: 2078063 - DNA, 15 bp, Homo sapiens
tagggaaggcagagg

SEQ ID NO: 2078064 - DNA, 15 bp, Homo sapiens
agggaaggcagagga

SEQ ID NO: 2078065 - DNA, 15 bp, Homo sapiens
gggaaggcagaggag

SEQ ID NO: 2078066 - DNA, 15 bp, Homo sapiens
ggaaggcagaggaga

SEQ ID NO: 2078067 - DNA, 15 bp, Homo sapiens
gaaggcagaggagag

SEQ ID NO: 2078068 - DNA, 15 bp, Homo sapiens
aaggcagaggagaga

SEQ ID NO: 2078069 - DNA, 15 bp, Homo sapiens
aggcagaggagagat

SEQ ID NO: 2078070 - DNA, 15 bp, Homo sapiens
ggcagaggagagatc

SEQ ID NO: 2078071 - DNA, 15 bp, Homo sapiens
gcagaggagagatct

SEQ ID NO: 2078072 - DNA, 15 bp, Homo sapiens
cagaggagagatcta

SEQ ID NO: 2078073 - DNA, 15 bp, Homo sapiens
agaggagagatctag

SEQ ID NO: 2078074 - DNA, 15 bp, Homo sapiens
gaggagagatctagg

SEQ ID NO: 2078075 - DNA, 15 bp, Homo sapiens
aggagagatctagga

SEQ ID NO: 2078076 - DNA, 15 bp, Homo sapiens
ggagagatctaggaa

SEQ ID NO: 2078077 - DNA, 15 bp, Homo sapiens
gagagatctaggaac

SEQ ID NO: 2078078 - DNA, 15 bp, Homo sapiens
agagatctaggaaca

SEQ ID NO: 2078079 - DNA, 15 bp, Homo sapiens
gagatctaggaacac

SEQ ID NO: 2078080 - DNA, 15 bp, Homo sapiens
agatctaggaacacc

SEQ ID NO: 2078081 - DNA, 15 bp, Homo sapiens
gatctaggaacacct

SEQ ID NO: 2078082 - DNA, 15 bp, Homo sapiens
atctaggaacacctg

SEQ ID NO: 2078083 - DNA, 15 bp, Homo sapiens
tctaggaacacctga

SEQ ID NO: 2078084 - DNA, 15 bp, Homo sapiens
ctaggaacacctgag

SEQ ID NO: 2078085 - DNA, 15 bp, Homo sapiens
taggaacacctgaga

SEQ ID NO: 2078086 - DNA, 15 bp, Homo sapiens
aggaacacctgagac

SEQ ID NO: 2078087 - DNA, 15 bp, Homo sapiens
ggaacacctgagaca

SEQ ID NO: 2078088 - DNA, 15 bp, Homo sapiens
gaacacctgagacag

SEQ ID NO: 2078089 - DNA, 15 bp, Homo sapiens
aacacctgagacaga

SEQ ID NO: 2078090 - DNA, 15 bp, Homo sapiens
acacctgagacagac

SEQ ID NO: 2078091 - DNA, 15 bp, Homo sapiens
cacctgagacagact

SEQ ID NO: 2078092 - DNA, 15 bp, Homo sapiens
acctgagacagacta

SEQ ID NO: 2078093 - DNA, 15 bp, Homo sapiens
cctgagacagactag

SEQ ID NO: 2078094 - DNA, 15 bp, Homo sapiens
ctgagacagactagg

SEQ ID NO: 2078095 - DNA, 15 bp, Homo sapiens
tgagacagactaggg

SEQ ID NO: 2078096 - DNA, 15 bp, Homo sapiens
gagacagactagggt

SEQ ID NO: 2078097 - DNA, 15 bp, Homo sapiens
agacagactagggta

SEQ ID NO: 2078098 - DNA, 15 bp, Homo sapiens
gacagactagggtag

SEQ ID NO: 2078099 - DNA, 15 bp, Homo sapiens
acagactagggtagt

SEQ ID NO: 2078100 - DNA, 15 bp, Homo sapiens
cagactagggtagtt

SEQ ID NO: 2078101 - DNA, 15 bp, Homo sapiens
agactagggtagtta

SEQ ID NO: 2078102 - DNA, 15 bp, Homo sapiens
gactagggtagttat

SEQ ID NO: 2078103 - DNA, 15 bp, Homo sapiens
actagggtagttatt

SEQ ID NO: 2078104 - DNA, 15 bp, Homo sapiens
ctagggtagttattt

SEQ ID NO: 2078105 - DNA, 15 bp, Homo sapiens
tagggtagttatttg

SEQ ID NO: 2078106 - DNA, 15 bp, Homo sapiens
agggtagttatttgt

SEQ ID NO: 2078107 - DNA, 15 bp, Homo sapiens
gggtagttatttgtg

SEQ ID NO: 2078108 - DNA, 15 bp, Homo sapiens
ggtagttatttgtgg

SEQ ID NO: 2078109 - DNA, 15 bp, Homo sapiens
gtagttatttgtggt

SEQ ID NO: 2078110 - DNA, 15 bp, Homo sapiens
tagttatttgtggtg

SEQ ID NO: 2078111 - DNA, 15 bp, Homo sapiens
agttatttgtggtgt

SEQ ID NO: 2078112 - DNA, 15 bp, Homo sapiens
gttatttgtggtgta

SEQ ID NO: 2078113 - DNA, 15 bp, Homo sapiens
ttatttgtggtgtag

SEQ ID NO: 2078114 - DNA, 15 bp, Homo sapiens
tatttgtggtgtaga

SEQ ID NO: 2078115 - DNA, 15 bp, Homo sapiens
atttgtggtgtagag

SEQ ID NO: 2078116 - DNA, 15 bp, Homo sapiens
tttgtggtgtagagg

SEQ ID NO: 2078117 - DNA, 15 bp, Homo sapiens
ttgtggtgtagaggc

SEQ ID NO: 2078118 - DNA, 15 bp, Homo sapiens
tgtggtgtagaggca

SEQ ID NO: 2078119 - DNA, 15 bp, Homo sapiens
gtggtgtagaggcat

SEQ ID NO: 2078120 - DNA, 15 bp, Homo sapiens
tggtgtagaggcatc

SEQ ID NO: 2078121 - DNA, 15 bp, Homo sapiens
ggtgtagaggcatct

SEQ ID NO: 2078122 - DNA, 15 bp, Homo sapiens
gtgtagaggcatctt

SEQ ID NO: 2078123 - DNA, 15 bp, Homo sapiens
tgtagaggcatcttg

SEQ ID NO: 2078124 - DNA, 15 bp, Homo sapiens
gtagaggcatcttgg

SEQ ID NO: 2078125 - DNA, 15 bp, Homo sapiens
tagaggcatcttggc

SEQ ID NO: 2078126 - DNA, 15 bp, Homo sapiens
agaggcatcttggca

SEQ ID NO: 2078127 - DNA, 15 bp, Homo sapiens
gaggcatcttggcag

SEQ ID NO: 2078128 - DNA, 15 bp, Homo sapiens
aggcatcttggcagg

SEQ ID NO: 2078129 - DNA, 15 bp, Homo sapiens
ggcatcttggcagga

SEQ ID NO: 2078130 - DNA, 15 bp, Homo sapiens
gcatcttggcaggag

SEQ ID NO: 2078131 - DNA, 15 bp, Homo sapiens
catcttggcaggagg

SEQ ID NO: 2078132 - DNA, 15 bp, Homo sapiens
atcttggcaggaggc

SEQ ID NO: 2078133 - DNA, 15 bp, Homo sapiens
tcttggcaggaggca

SEQ ID NO: 2078134 - DNA, 15 bp, Homo sapiens
cttggcaggaggcag

SEQ ID NO: 2078135 - DNA, 15 bp, Homo sapiens
ttggcaggaggcaga

SEQ ID NO: 2078136 - DNA, 15 bp, Homo sapiens
tggcaggaggcagag

SEQ ID NO: 2078137 - DNA, 15 bp, Homo sapiens
ggcaggaggcagaga

SEQ ID NO: 2078138 - DNA, 15 bp, Homo sapiens
gcaggaggcagagag

SEQ ID NO: 2078139 - DNA, 15 bp, Homo sapiens
caggaggcagagagt

SEQ ID NO: 2078140 - DNA, 15 bp, Homo sapiens
aggaggcagagagtg

SEQ ID NO: 2078141 - DNA, 15 bp, Homo sapiens
ggaggcagagagtgc

SEQ ID NO: 2078142 - DNA, 15 bp, Homo sapiens
gaggcagagagtgct

SEQ ID NO: 2078143 - DNA, 15 bp, Homo sapiens
aggcagagagtgctg

SEQ ID NO: 2078144 - DNA, 15 bp, Homo sapiens
ggcagagagtgctgg

SEQ ID NO: 2078145 - DNA, 15 bp, Homo sapiens
gcagagagtgctggg

SEQ ID NO: 2078146 - DNA, 15 bp, Homo sapiens
cagagagtgctgggc

SEQ ID NO: 2078147 - DNA, 15 bp, Homo sapiens
agagagtgctgggct

SEQ ID NO: 2078148 - DNA, 15 bp, Homo sapiens
gagagtgctgggctg

SEQ ID NO: 2078149 - DNA, 15 bp, Homo sapiens
agagtgctgggctgg

SEQ ID NO: 2078150 - DNA, 15 bp, Homo sapiens
gagtgctgggctggg

SEQ ID NO: 2078151 - DNA, 15 bp, Homo sapiens
agtgctgggctggga

SEQ ID NO: 2078152 - DNA, 15 bp, Homo sapiens
gtgctgggctgggag

SEQ ID NO: 2078153 - DNA, 15 bp, Homo sapiens
tgctgggctgggagt

SEQ ID NO: 2078154 - DNA, 15 bp, Homo sapiens
gctgggctgggagtc

SEQ ID NO: 2078155 - DNA, 15 bp, Homo sapiens
ctgggctgggagtca

SEQ ID NO: 2078156 - DNA, 15 bp, Homo sapiens
tgggctgggagtcag

SEQ ID NO: 2078157 - DNA, 15 bp, Homo sapiens
gggctgggagtcagg

SEQ ID NO: 2078158 - DNA, 15 bp, Homo sapiens
ggctgggagtcagga

SEQ ID NO: 2078159 - DNA, 15 bp, Homo sapiens
gctgggagtcaggac

SEQ ID NO: 2078160 - DNA, 15 bp, Homo sapiens
ctgggagtcaggaca

SEQ ID NO: 2078161 - DNA, 15 bp, Homo sapiens
tgggagtcaggacac

SEQ ID NO: 2078162 - DNA, 15 bp, Homo sapiens
gggagtcaggacacg

SEQ ID NO: 2078163 - DNA, 15 bp, Homo sapiens
ggagtcaggacacgt

SEQ ID NO: 2078164 - DNA, 15 bp, Homo sapiens
gagtcaggacacgtt

SEQ ID NO: 2078165 - DNA, 15 bp, Homo sapiens
agtcaggacacgttg

SEQ ID NO: 2078166 - DNA, 15 bp, Homo sapiens
gtcaggacacgttgt

SEQ ID NO: 2078167 - DNA, 15 bp, Homo sapiens
tcaggacacgttgtt

SEQ ID NO: 2078168 - DNA, 15 bp, Homo sapiens
caggacacgttgttt

SEQ ID NO: 2078169 - DNA, 15 bp, Homo sapiens
aggacacgttgtttc

SEQ ID NO: 2078170 - DNA, 15 bp, Homo sapiens
ggacacgttgtttct

SEQ ID NO: 2078171 - DNA, 15 bp, Homo sapiens
gacacgttgtttcta

SEQ ID NO: 2078172 - DNA, 15 bp, Homo sapiens
acacgttgtttctat

SEQ ID NO: 2078173 - DNA, 15 bp, Homo sapiens
cacgttgtttctatg

SEQ ID NO: 2078174 - DNA, 15 bp, Homo sapiens
acgttgtttctatgt

SEQ ID NO: 2078175 - DNA, 15 bp, Homo sapiens
cgttgtttctatgtt

SEQ ID NO: 2078176 - DNA, 15 bp, Homo sapiens
gttgtttctatgttt

SEQ ID NO: 2078177 - DNA, 15 bp, Homo sapiens
ttgtttctatgtttg

SEQ ID NO: 2078178 - DNA, 15 bp, Homo sapiens
tgtttctatgtttgg

SEQ ID NO: 2078179 - DNA, 15 bp, Homo sapiens
gtttctatgtttggt

SEQ ID NO: 2078180 - DNA, 15 bp, Homo sapiens
tttctatgtttggtt

SEQ ID NO: 2078181 - DNA, 15 bp, Homo sapiens
ttctatgtttggttt

SEQ ID NO: 2078182 - DNA, 15 bp, Homo sapiens
tctatgtttggtttt

SEQ ID NO: 2078183 - DNA, 15 bp, Homo sapiens
ctatgtttggttttg

SEQ ID NO: 2078184 - DNA, 15 bp, Homo sapiens
tatgtttggttttgc

SEQ ID NO: 2078185 - DNA, 15 bp, Homo sapiens
atgtttggttttgcc

SEQ ID NO: 2078186 - DNA, 15 bp, Homo sapiens
tgtttggttttgcca

SEQ ID NO: 2078187 - DNA, 15 bp, Homo sapiens
gtttggttttgccac

SEQ ID NO: 2078188 - DNA, 15 bp, Homo sapiens
tttggttttgccact

SEQ ID NO: 2078189 - DNA, 15 bp, Homo sapiens
ttggttttgccactg

SEQ ID NO: 2078190 - DNA, 15 bp, Homo sapiens
tggttttgccactgt

SEQ ID NO: 2078191 - DNA, 15 bp, Homo sapiens
ggttttgccactgtc

SEQ ID NO: 2078192 - DNA, 15 bp, Homo sapiens
gttttgccactgtct

SEQ ID NO: 2078193 - DNA, 15 bp, Homo sapiens
ttttgccactgtctt

SEQ ID NO: 2078194 - DNA, 15 bp, Homo sapiens
tttgccactgtcttt

SEQ ID NO: 2078195 - DNA, 15 bp, Homo sapiens
ttgccactgtcttta

SEQ ID NO: 2078196 - DNA, 15 bp, Homo sapiens
tgccactgtctttac

SEQ ID NO: 2078197 - DNA, 15 bp, Homo sapiens
gccactgtctttact

SEQ ID NO: 2078198 - DNA, 15 bp, Homo sapiens
ccactgtctttactg

SEQ ID NO: 2078199 - DNA, 15 bp, Homo sapiens
cactgtctttactgt

SEQ ID NO: 2078200 - DNA, 15 bp, Homo sapiens
actgtctttactgtg

SEQ ID NO: 2078201 - DNA, 15 bp, Homo sapiens
ctgtctttactgtga

SEQ ID NO: 2078202 - DNA, 15 bp, Homo sapiens
tgtctttactgtgac

SEQ ID NO: 2078203 - DNA, 15 bp, Homo sapiens
gtctttactgtgacc

SEQ ID NO: 2078204 - DNA, 15 bp, Homo sapiens
tctttactgtgacca

SEQ ID NO: 2078205 - DNA, 15 bp, Homo sapiens
ctttactgtgaccat

SEQ ID NO: 2078206 - DNA, 15 bp, Homo sapiens
tttactgtgaccata

SEQ ID NO: 2078207 - DNA, 15 bp, Homo sapiens
ttactgtgaccatag

SEQ ID NO: 2078208 - DNA, 15 bp, Homo sapiens
tactgtgaccatagg

SEQ ID NO: 2078209 - DNA, 15 bp, Homo sapiens
actgtgaccataggc

SEQ ID NO: 2078210 - DNA, 15 bp, Homo sapiens
ctgtgaccataggct

SEQ ID NO: 2078211 - DNA, 15 bp, Homo sapiens
tgtgaccataggctg

SEQ ID NO: 2078212 - DNA, 15 bp, Homo sapiens
gtgaccataggctga

SEQ ID NO: 2078213 - DNA, 15 bp, Homo sapiens
tgaccataggctgag

SEQ ID NO: 2078214 - DNA, 15 bp, Homo sapiens
gaccataggctgaga

SEQ ID NO: 2078215 - DNA, 15 bp, Homo sapiens
accataggctgagac

SEQ ID NO: 2078216 - DNA, 15 bp, Homo sapiens
ccataggctgagaca

SEQ ID NO: 2078217 - DNA, 15 bp, Homo sapiens
cataggctgagacac

SEQ ID NO: 2078218 - DNA, 15 bp, Homo sapiens
ataggctgagacact

SEQ ID NO: 2078219 - DNA, 15 bp, Homo sapiens
taggctgagacactc

SEQ ID NO: 2078220 - DNA, 15 bp, Homo sapiens
aggctgagacactct

SEQ ID NO: 2078221 - DNA, 15 bp, Homo sapiens
ggctgagacactctc

SEQ ID NO: 2078222 - DNA, 15 bp, Homo sapiens
gctgagacactctct

SEQ ID NO: 2078223 - DNA, 15 bp, Homo sapiens
ctgagacactctcta

SEQ ID NO: 2078224 - DNA, 15 bp, Homo sapiens
tgagacactctctat

SEQ ID NO: 2078225 - DNA, 15 bp, Homo sapiens
gagacactctctatc

SEQ ID NO: 2078226 - DNA, 15 bp, Homo sapiens
agacactctctatct

SEQ ID NO: 2078227 - DNA, 15 bp, Homo sapiens
gacactctctatctt

SEQ ID NO: 2078228 - DNA, 15 bp, Homo sapiens
acactctctatcttc

SEQ ID NO: 2078229 - DNA, 15 bp, Homo sapiens
cactctctatcttca

SEQ ID NO: 2078230 - DNA, 15 bp, Homo sapiens
actctctatcttcac

SEQ ID NO: 2078231 - DNA, 15 bp, Homo sapiens
ctctctatcttcacc

SEQ ID NO: 2078232 - DNA, 15 bp, Homo sapiens
tctctatcttcacca

SEQ ID NO: 2078233 - DNA, 15 bp, Homo sapiens
ctctatcttcaccat

SEQ ID NO: 2078234 - DNA, 15 bp, Homo sapiens
tctatcttcaccatc

SEQ ID NO: 2078235 - DNA, 15 bp, Homo sapiens
ctatcttcaccatct

SEQ ID NO: 2078236 - DNA, 15 bp, Homo sapiens
tatcttcaccatctg

SEQ ID NO: 2078237 - DNA, 15 bp, Homo sapiens
atcttcaccatctgc

SEQ ID NO: 2078238 - DNA, 15 bp, Homo sapiens
tcttcaccatctgca

SEQ ID NO: 2078239 - DNA, 15 bp, Homo sapiens
cttcaccatctgcag

SEQ ID NO: 2078240 - DNA, 15 bp, Homo sapiens
ttcaccatctgcagg

SEQ ID NO: 2078241 - DNA, 15 bp, Homo sapiens
tcaccatctgcagga

SEQ ID NO: 2078242 - DNA, 15 bp, Homo sapiens
caccatctgcaggat

SEQ ID NO: 2078243 - DNA, 15 bp, Homo sapiens
accatctgcaggata

SEQ ID NO: 2078244 - DNA, 15 bp, Homo sapiens
ccatctgcaggatat

SEQ ID NO: 2078245 - DNA, 15 bp, Homo sapiens
catctgcaggatatc

SEQ ID NO: 2078246 - DNA, 15 bp, Homo sapiens
atctgcaggatatcg

SEQ ID NO: 2078247 - DNA, 15 bp, Homo sapiens
tctgcaggatatcga

SEQ ID NO: 2078248 - DNA, 15 bp, Homo sapiens
ctgcaggatatcgat

SEQ ID NO: 2078249 - DNA, 15 bp, Homo sapiens
tgcaggatatcgatt

SEQ ID NO: 2078250 - DNA, 15 bp, Homo sapiens
gcaggatatcgatta

SEQ ID NO: 2078251 - DNA, 15 bp, Homo sapiens
caggatatcgattag

SEQ ID NO: 2078252 - DNA, 15 bp, Homo sapiens
aggatatcgattagt

SEQ ID NO: 2078253 - DNA, 15 bp, Homo sapiens
ggatatcgattagtg

SEQ ID NO: 2078254 - DNA, 15 bp, Homo sapiens
gatatcgattagtgt

SEQ ID NO: 2078255 - DNA, 15 bp, Homo sapiens
atatcgattagtgtt

SEQ ID NO: 2078256 - DNA, 15 bp, Homo sapiens
tatcgattagtgtta

SEQ ID NO: 2078257 - DNA, 15 bp, Homo sapiens
atcgattagtgttag

SEQ ID NO: 2078258 - DNA, 15 bp, Homo sapiens
tcgattagtgttagt

SEQ ID NO: 2078259 - DNA, 15 bp, Homo sapiens
cgattagtgttagtg

SEQ ID NO: 2078260 - DNA, 15 bp, Homo sapiens
gattagtgttagtgt

SEQ ID NO: 2078261 - DNA, 15 bp, Homo sapiens
attagtgttagtgtc

SEQ ID NO: 2078262 - DNA, 15 bp, Homo sapiens
ttagtgttagtgtct

SEQ ID NO: 2078263 - DNA, 15 bp, Homo sapiens
tagtgttagtgtctt

SEQ ID NO: 2078264 - DNA, 15 bp, Homo sapiens
agtgttagtgtcttc

SEQ ID NO: 2078265 - DNA, 15 bp, Homo sapiens
gtgttagtgtcttct

SEQ ID NO: 2078266 - DNA, 15 bp, Homo sapiens
tgttagtgtcttctg

SEQ ID NO: 2078267 - DNA, 15 bp, Homo sapiens
gttagtgtcttctga

SEQ ID NO: 2078268 - DNA, 15 bp, Homo sapiens
ttagtgtcttctgaa

SEQ ID NO: 2078269 - DNA, 15 bp, Homo sapiens
tagtgtcttctgaaa

SEQ ID NO: 2078270 - DNA, 15 bp, Homo sapiens
agtgtcttctgaaaa

SEQ ID NO: 2078271 - DNA, 15 bp, Homo sapiens
gtgtcttctgaaaat

SEQ ID NO: 2078272 - DNA, 15 bp, Homo sapiens
tgtcttctgaaaatg

SEQ ID NO: 2078273 - DNA, 15 bp, Homo sapiens
gtcttctgaaaatgt

SEQ ID NO: 2078274 - DNA, 15 bp, Homo sapiens
tcttctgaaaatgtt

SEQ ID NO: 2078275 - DNA, 15 bp, Homo sapiens
cttctgaaaatgtta

SEQ ID NO: 2078276 - DNA, 15 bp, Homo sapiens
ttctgaaaatgttaa

SEQ ID NO: 2078277 - DNA, 15 bp, Homo sapiens
tctgaaaatgttaaa

SEQ ID NO: 2078278 - DNA, 15 bp, Homo sapiens
ctgaaaatgttaaat

SEQ ID NO: 2078279 - DNA, 15 bp, Homo sapiens
tgaaaatgttaaatt

SEQ ID NO: 2078280 - DNA, 15 bp, Homo sapiens
gaaaatgttaaattg

SEQ ID NO: 2078281 - DNA, 15 bp, Homo sapiens
aaaatgttaaattgt

SEQ ID NO: 2078282 - DNA, 15 bp, Homo sapiens
aaatgttaaattgtt

SEQ ID NO: 2078283 - DNA, 15 bp, Homo sapiens
aatgttaaattgttc

SEQ ID NO: 2078284 - DNA, 15 bp, Homo sapiens
atgttaaattgttct

SEQ ID NO: 2078285 - DNA, 15 bp, Homo sapiens
tgttaaattgttctg

SEQ ID NO: 2078286 - DNA, 15 bp, Homo sapiens
gttaaattgttctga

SEQ ID NO: 2078287 - DNA, 15 bp, Homo sapiens
ttaaattgttctgaa

SEQ ID NO: 2078288 - DNA, 15 bp, Homo sapiens
taaattgttctgaac

SEQ ID NO: 2078289 - DNA, 15 bp, Homo sapiens
aaattgttctgaaca

SEQ ID NO: 2078290 - DNA, 15 bp, Homo sapiens
aattgttctgaacac

SEQ ID NO: 2078291 - DNA, 15 bp, Homo sapiens
attgttctgaacacc

SEQ ID NO: 2078292 - DNA, 15 bp, Homo sapiens
ttgttctgaacacca

SEQ ID NO: 2078293 - DNA, 15 bp, Homo sapiens
tgttctgaacaccag

SEQ ID NO: 2078294 - DNA, 15 bp, Homo sapiens
gttctgaacaccagg

SEQ ID NO: 2078295 - DNA, 15 bp, Homo sapiens
ttctgaacaccagga

SEQ ID NO: 2078296 - DNA, 15 bp, Homo sapiens
tctgaacaccaggag

SEQ ID NO: 2078297 - DNA, 15 bp, Homo sapiens
ctgaacaccaggagg

SEQ ID NO: 2078298 - DNA, 15 bp, Homo sapiens
tgaacaccaggaggt

SEQ ID NO: 2078299 - DNA, 15 bp, Homo sapiens
gaacaccaggaggtt

SEQ ID NO: 2078300 - DNA, 15 bp, Homo sapiens
aacaccaggaggttc

SEQ ID NO: 2078301 - DNA, 15 bp, Homo sapiens
acaccaggaggttca

SEQ ID NO: 2078302 - DNA, 15 bp, Homo sapiens
caccaggaggttcag

SEQ ID NO: 2078303 - DNA, 15 bp, Homo sapiens
accaggaggttcaga

SEQ ID NO: 2078304 - DNA, 15 bp, Homo sapiens
ccaggaggttcagaa

SEQ ID NO: 2078305 - DNA, 15 bp, Homo sapiens
caggaggttcagaag

SEQ ID NO: 2078306 - DNA, 15 bp, Homo sapiens
aggaggttcagaagg

SEQ ID NO: 2078307 - DNA, 15 bp, Homo sapiens
ggaggttcagaaggc

SEQ ID NO: 2078308 - DNA, 15 bp, Homo sapiens
gaggttcagaaggcc

SEQ ID NO: 2078309 - DNA, 15 bp, Homo sapiens
aggttcagaaggcct

SEQ ID NO: 2078310 - DNA, 15 bp, Homo sapiens
ggttcagaaggcctg

SEQ ID NO: 2078311 - DNA, 15 bp, Homo sapiens
gttcagaaggcctgg

SEQ ID NO: 2078312 - DNA, 15 bp, Homo sapiens
ttcagaaggcctggg

SEQ ID NO: 2078313 - DNA, 15 bp, Homo sapiens
tcagaaggcctgggg

SEQ ID NO: 2078314 - DNA, 15 bp, Homo sapiens
cagaaggcctggggc

SEQ ID NO: 2078315 - DNA, 15 bp, Homo sapiens
agaaggcctggggct

SEQ ID NO: 2078316 - DNA, 15 bp, Homo sapiens
gaaggcctggggctt

SEQ ID NO: 2078317 - DNA, 15 bp, Homo sapiens
aaggcctggggcttt

SEQ ID NO: 2078318 - DNA, 15 bp, Homo sapiens
aggcctggggcttta

SEQ ID NO: 2078319 - DNA, 15 bp, Homo sapiens
ggcctggggctttag

SEQ ID NO: 2078320 - DNA, 15 bp, Homo sapiens
gcctggggctttagg

SEQ ID NO: 2078321 - DNA, 15 bp, Homo sapiens
cctggggctttaggc

SEQ ID NO: 2078322 - DNA, 15 bp, Homo sapiens
ctggggctttaggcc

SEQ ID NO: 2078323 - DNA, 15 bp, Homo sapiens
tggggctttaggccg

SEQ ID NO: 2078324 - DNA, 15 bp, Homo sapiens
ggggctttaggccgg

SEQ ID NO: 2078325 - DNA, 15 bp, Homo sapiens
gggctttaggccgga

SEQ ID NO: 2078326 - DNA, 15 bp, Homo sapiens
ggctttaggccggaa

SEQ ID NO: 2078327 - DNA, 15 bp, Homo sapiens
gctttaggccggaag

SEQ ID NO: 2078328 - DNA, 15 bp, Homo sapiens
ctttaggccggaagc

SEQ ID NO: 2078329 - DNA, 15 bp, Homo sapiens
tttaggccggaagca

SEQ ID NO: 2078330 - DNA, 15 bp, Homo sapiens
ttaggccggaagcag

SEQ ID NO: 2078331 - DNA, 15 bp, Homo sapiens
taggccggaagcagt

SEQ ID NO: 2078332 - DNA, 15 bp, Homo sapiens
aggccggaagcagtc

SEQ ID NO: 2078333 - DNA, 15 bp, Homo sapiens
ggccggaagcagtct

SEQ ID NO: 2078334 - DNA, 15 bp, Homo sapiens
gccggaagcagtctt

SEQ ID NO: 2078335 - DNA, 15 bp, Homo sapiens
ccggaagcagtctta

SEQ ID NO: 2078336 - DNA, 15 bp, Homo sapiens
cggaagcagtcttat

SEQ ID NO: 2078337 - DNA, 15 bp, Homo sapiens
ggaagcagtcttatc

SEQ ID NO: 2078338 - DNA, 15 bp, Homo sapiens
gaagcagtcttatcc

SEQ ID NO: 2078339 - DNA, 15 bp, Homo sapiens
aagcagtcttatcct

SEQ ID NO: 2078340 - DNA, 15 bp, Homo sapiens
agcagtcttatccta

SEQ ID NO: 2078341 - DNA, 15 bp, Homo sapiens
gcagtcttatcctag

SEQ ID NO: 2078342 - DNA, 15 bp, Homo sapiens
cagtcttatcctagc

SEQ ID NO: 2078343 - DNA, 15 bp, Homo sapiens
agtcttatcctagcc

SEQ ID NO: 2078344 - DNA, 15 bp, Homo sapiens
gtcttatcctagcct

SEQ ID NO: 2078345 - DNA, 15 bp, Homo sapiens
tcttatcctagcctt

SEQ ID NO: 2078346 - DNA, 15 bp, Homo sapiens
cttatcctagccttc

SEQ ID NO: 2078347 - DNA, 15 bp, Homo sapiens
ttatcctagccttcc

SEQ ID NO: 2078348 - DNA, 15 bp, Homo sapiens
tatcctagccttcca

SEQ ID NO: 2078349 - DNA, 15 bp, Homo sapiens
atcctagccttccac

SEQ ID NO: 2078350 - DNA, 15 bp, Homo sapiens
tcctagccttccact

SEQ ID NO: 2078351 - DNA, 15 bp, Homo sapiens
cctagccttccactt

SEQ ID NO: 2078352 - DNA, 15 bp, Homo sapiens
ctagccttccacttt

SEQ ID NO: 2078353 - DNA, 15 bp, Homo sapiens
tagccttccactttc

SEQ ID NO: 2078354 - DNA, 15 bp, Homo sapiens
agccttccactttct

SEQ ID NO: 2078355 - DNA, 15 bp, Homo sapiens
gccttccactttctc

SEQ ID NO: 2078356 - DNA, 15 bp, Homo sapiens
ccttccactttctca

SEQ ID NO: 2078357 - DNA, 15 bp, Homo sapiens
ctttctcattcattc

SEQ ID NO: 2078358 - DNA, 15 bp, Homo sapiens
tttctcattcattct

SEQ ID NO: 2078359 - DNA, 15 bp, Homo sapiens
ttctcattcattctc

SEQ ID NO: 2078360 - DNA, 15 bp, Homo sapiens
tctcattcattctca

SEQ ID NO: 2078361 - DNA, 15 bp, Homo sapiens
ctcattcattctcac

SEQ ID NO: 2078362 - DNA, 15 bp, Homo sapiens
tcattcattctcacc

SEQ ID NO: 2078363 - DNA, 15 bp, Homo sapiens
cattcattctcaccc

SEQ ID NO: 2078364 - DNA, 15 bp, Homo sapiens
attcattctcacccg

SEQ ID NO: 2078365 - DNA, 15 bp, Homo sapiens
ttcattctcacccgc

SEQ ID NO: 2078366 - DNA, 15 bp, Homo sapiens
tcattctcacccgcc

SEQ ID NO: 2078367 - DNA, 15 bp, Homo sapiens
cattctcacccgcct

SEQ ID NO: 2078368 - DNA, 15 bp, Homo sapiens
attctcacccgcctt

SEQ ID NO: 2078369 - DNA, 15 bp, Homo sapiens
ttctcacccgccttc

SEQ ID NO: 2078370 - DNA, 15 bp, Homo sapiens
tctcacccgccttcc

SEQ ID NO: 2078371 - DNA, 15 bp, Homo sapiens
ctcacccgccttcct

SEQ ID NO: 2078372 - DNA, 15 bp, Homo sapiens
tcacccgccttcctc

SEQ ID NO: 2078373 - DNA, 15 bp, Homo sapiens
cacccgccttcctcc

SEQ ID NO: 2078374 - DNA, 15 bp, Homo sapiens
acccgccttcctcct

SEQ ID NO: 2078375 - DNA, 15 bp, Homo sapiens
cccgccttcctcctg

SEQ ID NO: 2078376 - DNA, 15 bp, Homo sapiens
ccgccttcctcctgt

SEQ ID NO: 2078377 - DNA, 15 bp, Homo sapiens
cgccttcctcctgtc

SEQ ID NO: 2078378 - DNA, 15 bp, Homo sapiens
gccttcctcctgtca

SEQ ID NO: 2078379 - DNA, 15 bp, Homo sapiens
ccttcctcctgtcag

SEQ ID NO: 2078380 - DNA, 15 bp, Homo sapiens
cttcctcctgtcagt

SEQ ID NO: 2078381 - DNA, 15 bp, Homo sapiens
ttcctcctgtcagtt

SEQ ID NO: 2078382 - DNA, 15 bp, Homo sapiens
tcctcctgtcagttt

SEQ ID NO: 2078383 - DNA, 15 bp, Homo sapiens
cctcctgtcagtttc

SEQ ID NO: 2078384 - DNA, 15 bp, Homo sapiens
ctcctgtcagtttct

SEQ ID NO: 2078385 - DNA, 15 bp, Homo sapiens
tcctgtcagtttctc

SEQ ID NO: 2078386 - DNA, 15 bp, Homo sapiens
cctgtcagtttctct

SEQ ID NO: 2078387 - DNA, 15 bp, Homo sapiens
ctgtcagtttctctc

SEQ ID NO: 2078388 - DNA, 15 bp, Homo sapiens
tgtcagtttctctct

SEQ ID NO: 2078389 - DNA, 15 bp, Homo sapiens
gtcagtttctctctc

SEQ ID NO: 2078390 - DNA, 15 bp, Homo sapiens
tcagtttctctctcc

SEQ ID NO: 2078391 - DNA, 15 bp, Homo sapiens
cagtttctctctccc

SEQ ID NO: 2078392 - DNA, 15 bp, Homo sapiens
agtttctctctccct

SEQ ID NO: 2078393 - DNA, 15 bp, Homo sapiens
gtttctctctccctt

SEQ ID NO: 2078394 - DNA, 15 bp, Homo sapiens
tttctctctccctta

SEQ ID NO: 2078395 - DNA, 15 bp, Homo sapiens
ttctctctcccttag

SEQ ID NO: 2078396 - DNA, 15 bp, Homo sapiens
tctctctcccttaga

SEQ ID NO: 2078397 - DNA, 15 bp, Homo sapiens
ctctctcccttagat

SEQ ID NO: 2078398 - DNA, 15 bp, Homo sapiens
tctctcccttagatc

SEQ ID NO: 2078399 - DNA, 15 bp, Homo sapiens
ctctcccttagatct

SEQ ID NO: 2078400 - DNA, 15 bp, Homo sapiens
tctcccttagatctt

SEQ ID NO: 2078401 - DNA, 15 bp, Homo sapiens
ctcccttagatcttg

SEQ ID NO: 2078402 - DNA, 15 bp, Homo sapiens
tcccttagatcttgt

SEQ ID NO: 2078403 - DNA, 15 bp, Homo sapiens
cccttagatcttgtg

SEQ ID NO: 2078404 - DNA, 15 bp, Homo sapiens
ccttagatcttgtga

SEQ ID NO: 2078405 - DNA, 15 bp, Homo sapiens
cttagatcttgtgac

SEQ ID NO: 2078406 - DNA, 15 bp, Homo sapiens
ttagatcttgtgaca

SEQ ID NO: 2078407 - DNA, 15 bp, Homo sapiens
tagatcttgtgacag

SEQ ID NO: 2078408 - DNA, 15 bp, Homo sapiens
agatcttgtgacagt

SEQ ID NO: 2078409 - DNA, 15 bp, Homo sapiens
gatcttgtgacagta

SEQ ID NO: 2078410 - DNA, 15 bp, Homo sapiens
atcttgtgacagtat

SEQ ID NO: 2078411 - DNA, 15 bp, Homo sapiens
tcttgtgacagtatg

SEQ ID NO: 2078412 - DNA, 15 bp, Homo sapiens
cttgtgacagtatga

SEQ ID NO: 2078413 - DNA, 15 bp, Homo sapiens
ttgtgacagtatgat

SEQ ID NO: 2078414 - DNA, 15 bp, Homo sapiens
tgtgacagtatgatt

SEQ ID NO: 2078415 - DNA, 15 bp, Homo sapiens
gtgacagtatgattg

SEQ ID NO: 2078416 - DNA, 15 bp, Homo sapiens
tgacagtatgattgc

SEQ ID NO: 2078417 - DNA, 15 bp, Homo sapiens
gacagtatgattgca

SEQ ID NO: 2078418 - DNA, 15 bp, Homo sapiens
acagtatgattgcaa

SEQ ID NO: 2078419 - DNA, 15 bp, Homo sapiens
cagtatgattgcaat

SEQ ID NO: 2078420 - DNA, 15 bp, Homo sapiens
agtatgattgcaatt

SEQ ID NO: 2078421 - DNA, 15 bp, Homo sapiens
gtatgattgcaatta

SEQ ID NO: 2078422 - DNA, 15 bp, Homo sapiens
tatgattgcaattat

SEQ ID NO: 2078423 - DNA, 15 bp, Homo sapiens
atgattgcaattatt

SEQ ID NO: 2078424 - DNA, 15 bp, Homo sapiens
tgattgcaattatta

SEQ ID NO: 2078425 - DNA, 15 bp, Homo sapiens
gattgcaattattat

SEQ ID NO: 2078426 - DNA, 15 bp, Homo sapiens
attgcaattattatg

SEQ ID NO: 2078427 - DNA, 15 bp, Homo sapiens
ttgcaattattatga

SEQ ID NO: 2078428 - DNA, 15 bp, Homo sapiens
tgcaattattatgaa

SEQ ID NO: 2078429 - DNA, 15 bp, Homo sapiens
gcaattattatgaag

SEQ ID NO: 2078430 - DNA, 15 bp, Homo sapiens
caattattatgaagg

SEQ ID NO: 2078431 - DNA, 15 bp, Homo sapiens
ttattatgaaggtca

SEQ ID NO: 2078432 - DNA, 15 bp, Homo sapiens
tattatgaaggtcat

SEQ ID NO: 2078433 - DNA, 15 bp, Homo sapiens
attatgaaggtcata

SEQ ID NO: 2078434 - DNA, 15 bp, Homo sapiens
ttatgaaggtcataa

SEQ ID NO: 2078435 - DNA, 15 bp, Homo sapiens
tatgaaggtcataat

SEQ ID NO: 2078436 - DNA, 15 bp, Homo sapiens
atgaaggtcataata

SEQ ID NO: 2078437 - DNA, 15 bp, Homo sapiens
tgaaggtcataatag

SEQ ID NO: 2078438 - DNA, 15 bp, Homo sapiens
gaaggtcataatagg

SEQ ID NO: 2078439 - DNA, 15 bp, Homo sapiens
aaggtcataataggt

SEQ ID NO: 2078440 - DNA, 15 bp, Homo sapiens
aggtcataataggtt

SEQ ID NO: 2078441 - DNA, 15 bp, Homo sapiens
ggtcataataggtta

SEQ ID NO: 2078442 - DNA, 15 bp, Homo sapiens
gtcataataggttag

SEQ ID NO: 2078443 - DNA, 15 bp, Homo sapiens
tcataataggttaga

SEQ ID NO: 2078444 - DNA, 15 bp, Homo sapiens
cataataggttagag

SEQ ID NO: 2078445 - DNA, 15 bp, Homo sapiens
ataataggttagagt

SEQ ID NO: 2078446 - DNA, 15 bp, Homo sapiens
taataggttagagtt

SEQ ID NO: 2078447 - DNA, 15 bp, Homo sapiens
aataggttagagtta

SEQ ID NO: 2078448 - DNA, 15 bp, Homo sapiens
ataggttagagttat

SEQ ID NO: 2078449 - DNA, 15 bp, Homo sapiens
taggttagagttatt

SEQ ID NO: 2078450 - DNA, 15 bp, Homo sapiens
aggttagagttattt

SEQ ID NO: 2078451 - DNA, 15 bp, Homo sapiens
ggttagagttattta

SEQ ID NO: 2078452 - DNA, 15 bp, Homo sapiens
gttagagttatttag

SEQ ID NO: 2078453 - DNA, 15 bp, Homo sapiens
ttagagttatttagt

SEQ ID NO: 2078454 - DNA, 15 bp, Homo sapiens
tagagttatttagtc

SEQ ID NO: 2078455 - DNA, 15 bp, Homo sapiens
agagttatttagtct

SEQ ID NO: 2078456 - DNA, 15 bp, Homo sapiens
gagttatttagtctc

SEQ ID NO: 2078457 - DNA, 15 bp, Homo sapiens
agttatttagtctca

SEQ ID NO: 2078458 - DNA, 15 bp, Homo sapiens
gttatttagtctcag

SEQ ID NO: 2078459 - DNA, 15 bp, Homo sapiens
ttatttagtctcagg

SEQ ID NO: 2078460 - DNA, 15 bp, Homo sapiens
tatttagtctcagga

SEQ ID NO: 2078461 - DNA, 15 bp, Homo sapiens
atttagtctcaggac

SEQ ID NO: 2078462 - DNA, 15 bp, Homo sapiens
tttagtctcaggacc

SEQ ID NO: 2078463 - DNA, 15 bp, Homo sapiens
ttagtctcaggaccc

SEQ ID NO: 2078464 - DNA, 15 bp, Homo sapiens
tagtctcaggaccca

SEQ ID NO: 2078465 - DNA, 15 bp, Homo sapiens
agtctcaggacccat

SEQ ID NO: 2078466 - DNA, 15 bp, Homo sapiens
gtctcaggacccatc

SEQ ID NO: 2078467 - DNA, 15 bp, Homo sapiens
tctcaggacccatca

SEQ ID NO: 2078468 - DNA, 15 bp, Homo sapiens
ctcaggacccatcag

SEQ ID NO: 2078469 - DNA, 15 bp, Homo sapiens
tcaggacccatcaga

SEQ ID NO: 2078470 - DNA, 15 bp, Homo sapiens
caggacccatcagat

SEQ ID NO: 2078471 - DNA, 15 bp, Homo sapiens
aggacccatcagatt

SEQ ID NO: 2078472 - DNA, 15 bp, Homo sapiens
ggacccatcagattt

SEQ ID NO: 2078473 - DNA, 15 bp, Homo sapiens
gacccatcagatttc

SEQ ID NO: 2078474 - DNA, 15 bp, Homo sapiens
acccatcagatttct

SEQ ID NO: 2078475 - DNA, 15 bp, Homo sapiens
cccatcagatttctg

SEQ ID NO: 2078476 - DNA, 15 bp, Homo sapiens
ccatcagatttctga

SEQ ID NO: 2078477 - DNA, 15 bp, Homo sapiens
catcagatttctgag

SEQ ID NO: 2078478 - DNA, 15 bp, Homo sapiens
atcagatttctgaga

SEQ ID NO: 2078479 - DNA, 15 bp, Homo sapiens
tcagatttctgagat

SEQ ID NO: 2078480 - DNA, 15 bp, Homo sapiens
cagatttctgagatg

SEQ ID NO: 2078481 - DNA, 15 bp, Homo sapiens
agatttctgagatgg

SEQ ID NO: 2078482 - DNA, 15 bp, Homo sapiens
gatttctgagatggg

SEQ ID NO: 2078483 - DNA, 15 bp, Homo sapiens
atttctgagatgggt

SEQ ID NO: 2078484 - DNA, 15 bp, Homo sapiens
tttctgagatgggtc

SEQ ID NO: 2078485 - DNA, 15 bp, Homo sapiens
ttctgagatgggtct

SEQ ID NO: 2078486 - DNA, 15 bp, Homo sapiens
tctgagatgggtctt

SEQ ID NO: 2078487 - DNA, 15 bp, Homo sapiens
ctgagatgggtcttt

SEQ ID NO: 2078488 - DNA, 15 bp, Homo sapiens
tgagatgggtctttt

SEQ ID NO: 2078489 - DNA, 15 bp, Homo sapiens
gagatgggtcttttc

SEQ ID NO: 2078490 - DNA, 15 bp, Homo sapiens
agatgggtcttttcc

SEQ ID NO: 2078491 - DNA, 15 bp, Homo sapiens
gatgggtcttttcca

SEQ ID NO: 2078492 - DNA, 15 bp, Homo sapiens
atgggtcttttccat

SEQ ID NO: 2078493 - DNA, 15 bp, Homo sapiens
tgggtcttttccatt

SEQ ID NO: 2078494 - DNA, 15 bp, Homo sapiens
gggtcttttccatta

SEQ ID NO: 2078495 - DNA, 15 bp, Homo sapiens
ggtcttttccattag

SEQ ID NO: 2078496 - DNA, 15 bp, Homo sapiens
gtcttttccattagc

SEQ ID NO: 2078497 - DNA, 15 bp, Homo sapiens
tcttttccattagcc

SEQ ID NO: 2078498 - DNA, 15 bp, Homo sapiens
cttttccattagcct

SEQ ID NO: 2078499 - DNA, 15 bp, Homo sapiens
ttttccattagcctg

SEQ ID NO: 2078500 - DNA, 15 bp, Homo sapiens
tttccattagcctgc

SEQ ID NO: 2078501 - DNA, 15 bp, Homo sapiens
ttccattagcctgcc

SEQ ID NO: 2078502 - DNA, 15 bp, Homo sapiens
tccattagcctgcct

SEQ ID NO: 2078503 - DNA, 15 bp, Homo sapiens
ccattagcctgcctt

SEQ ID NO: 2078504 - DNA, 15 bp, Homo sapiens
cattagcctgccttt

SEQ ID NO: 2078505 - DNA, 15 bp, Homo sapiens
attagcctgcctttt

SEQ ID NO: 2078506 - DNA, 15 bp, Homo sapiens
ttagcctgccttttg

SEQ ID NO: 2078507 - DNA, 15 bp, Homo sapiens
tagcctgccttttgg

SEQ ID NO: 2078508 - DNA, 15 bp, Homo sapiens
agcctgccttttgga

SEQ ID NO: 2078509 - DNA, 15 bp, Homo sapiens
gcctgccttttggat

SEQ ID NO: 2078510 - DNA, 15 bp, Homo sapiens
cctgccttttggata

SEQ ID NO: 2078511 - DNA, 15 bp, Homo sapiens
ctgccttttggatat

SEQ ID NO: 2078512 - DNA, 15 bp, Homo sapiens
tgccttttggatata

SEQ ID NO: 2078513 - DNA, 15 bp, Homo sapiens
gccttttggatatat

SEQ ID NO: 2078514 - DNA, 15 bp, Homo sapiens
ccttttggatatatt

SEQ ID NO: 2078515 - DNA, 15 bp, Homo sapiens
cttttggatatattt

SEQ ID NO: 2078516 - DNA, 15 bp, Homo sapiens
ttttggatatatttt

SEQ ID NO: 2078517 - DNA, 15 bp, Homo sapiens
tttggatatatttta

SEQ ID NO: 2078518 - DNA, 15 bp, Homo sapiens
ttggatatattttag

SEQ ID NO: 2078519 - DNA, 15 bp, Homo sapiens
tggatatattttagt

SEQ ID NO: 2078520 - DNA, 15 bp, Homo sapiens
ggatatattttagtg

SEQ ID NO: 2078521 - DNA, 15 bp, Homo sapiens
gatatattttagtgc

SEQ ID NO: 2078522 - DNA, 15 bp, Homo sapiens
atatattttagtgcc

SEQ ID NO: 2078523 - DNA, 15 bp, Homo sapiens
tatattttagtgcct

SEQ ID NO: 2078524 - DNA, 15 bp, Homo sapiens
atattttagtgcctt

SEQ ID NO: 2078525 - DNA, 15 bp, Homo sapiens
tattttagtgccttt

SEQ ID NO: 2078526 - DNA, 15 bp, Homo sapiens
attttagtgcctttg

SEQ ID NO: 2078527 - DNA, 15 bp, Homo sapiens
ttttagtgcctttga

SEQ ID NO: 2078528 - DNA, 15 bp, Homo sapiens
tttagtgcctttgat

SEQ ID NO: 2078529 - DNA, 15 bp, Homo sapiens
ttagtgcctttgata

SEQ ID NO: 2078530 - DNA, 15 bp, Homo sapiens
tagtgcctttgatat

SEQ ID NO: 2078531 - DNA, 15 bp, Homo sapiens
agtgcctttgatatt

SEQ ID NO: 2078532 - DNA, 15 bp, Homo sapiens
gtgcctttgatattt

SEQ ID NO: 2078533 - DNA, 15 bp, Homo sapiens
tgcctttgatatttg

SEQ ID NO: 2078534 - DNA, 15 bp, Homo sapiens
gcctttgatatttga

SEQ ID NO: 2078535 - DNA, 15 bp, Homo sapiens
cctttgatatttgat

SEQ ID NO: 2078536 - DNA, 15 bp, Homo sapiens
ctttgatatttgatg

SEQ ID NO: 2078537 - DNA, 15 bp, Homo sapiens
tttgatatttgatgt

SEQ ID NO: 2078538 - DNA, 15 bp, Homo sapiens
ttgatatttgatgtt

SEQ ID NO: 2078539 - DNA, 15 bp, Homo sapiens
tgatatttgatgttg

SEQ ID NO: 2078540 - DNA, 15 bp, Homo sapiens
gatatttgatgttgg

SEQ ID NO: 2078541 - DNA, 15 bp, Homo sapiens
atatttgatgttggt

SEQ ID NO: 2078542 - DNA, 15 bp, Homo sapiens
tatttgatgttggtg

SEQ ID NO: 2078543 - DNA, 15 bp, Homo sapiens
atttgatgttggtga

SEQ ID NO: 2078544 - DNA, 15 bp, Homo sapiens
tttgatgttggtgac

SEQ ID NO: 2078545 - DNA, 15 bp, Homo sapiens
ttgatgttggtgaca

SEQ ID NO: 2078546 - DNA, 15 bp, Homo sapiens
tgatgttggtgacaa

SEQ ID NO: 2078547 - DNA, 15 bp, Homo sapiens
gatgttggtgacaaa

SEQ ID NO: 2078548 - DNA, 15 bp, Homo sapiens
atgttggtgacaaag

SEQ ID NO: 2078549 - DNA, 15 bp, Homo sapiens
tgttggtgacaaaga

SEQ ID NO: 2078550 - DNA, 15 bp, Homo sapiens
gttggtgacaaagat

SEQ ID NO: 2078551 - DNA, 15 bp, Homo sapiens
ttggtgacaaagatt

SEQ ID NO: 2078552 - DNA, 15 bp, Homo sapiens
tggtgacaaagattt

SEQ ID NO: 2078553 - DNA, 15 bp, Homo sapiens
ggtgacaaagattta

SEQ ID NO: 2078554 - DNA, 15 bp, Homo sapiens
gtgacaaagatttag

SEQ ID NO: 2078555 - DNA, 15 bp, Homo sapiens
tgacaaagatttagt

SEQ ID NO: 2078556 - DNA, 15 bp, Homo sapiens
gacaaagatttagtt

SEQ ID NO: 2078557 - DNA, 15 bp, Homo sapiens
acaaagatttagttc

SEQ ID NO: 2078558 - DNA, 15 bp, Homo sapiens
caaagatttagttct

SEQ ID NO: 2078559 - DNA, 15 bp, Homo sapiens
aaagatttagttcta

SEQ ID NO: 2078560 - DNA, 15 bp, Homo sapiens
aagatttagttctaa

SEQ ID NO: 2078561 - DNA, 15 bp, Homo sapiens
agatttagttctaaa

SEQ ID NO: 2078562 - DNA, 15 bp, Homo sapiens
gatttagttctaaat

SEQ ID NO: 2078563 - DNA, 15 bp, Homo sapiens
atttagttctaaata

SEQ ID NO: 2078564 - DNA, 15 bp, Homo sapiens
tttagttctaaatag

SEQ ID NO: 2078565 - DNA, 15 bp, Homo sapiens
ttagttctaaatagt

SEQ ID NO: 2078566 - DNA, 15 bp, Homo sapiens
tagttctaaatagtt

SEQ ID NO: 2078567 - DNA, 15 bp, Homo sapiens
agttctaaatagttg

SEQ ID NO: 2078568 - DNA, 15 bp, Homo sapiens
gttctaaatagttgt

SEQ ID NO: 2078569 - DNA, 15 bp, Homo sapiens
ttctaaatagttgtg

SEQ ID NO: 2078570 - DNA, 15 bp, Homo sapiens
tctaaatagttgtgg

SEQ ID NO: 2078571 - DNA, 15 bp, Homo sapiens
ctaaatagttgtggg

SEQ ID NO: 2078572 - DNA, 15 bp, Homo sapiens
taaatagttgtggga

SEQ ID NO: 2078573 - DNA, 15 bp, Homo sapiens
aaatagttgtgggag

SEQ ID NO: 2078574 - DNA, 15 bp, Homo sapiens
aatagttgtgggagt

SEQ ID NO: 2078575 - DNA, 15 bp, Homo sapiens
atagttgtgggagtc

SEQ ID NO: 2078576 - DNA, 15 bp, Homo sapiens
tagttgtgggagtca

SEQ ID NO: 2078577 - DNA, 15 bp, Homo sapiens
agttgtgggagtcaa

SEQ ID NO: 2078578 - DNA, 15 bp, Homo sapiens
gttgtgggagtcaaa

SEQ ID NO: 2078579 - DNA, 15 bp, Homo sapiens
ttgtgggagtcaaat

SEQ ID NO: 2078580 - DNA, 15 bp, Homo sapiens
tgtgggagtcaaatc

SEQ ID NO: 2078581 - DNA, 15 bp, Homo sapiens
gtgggagtcaaatca

SEQ ID NO: 2078582 - DNA, 15 bp, Homo sapiens
tgggagtcaaatcag

SEQ ID NO: 2078583 - DNA, 15 bp, Homo sapiens
gggagtcaaatcagt

SEQ ID NO: 2078584 - DNA, 15 bp, Homo sapiens
ggagtcaaatcagtt

SEQ ID NO: 2078585 - DNA, 15 bp, Homo sapiens
gagtcaaatcagttg

SEQ ID NO: 2078586 - DNA, 15 bp, Homo sapiens
agtcaaatcagttgc

SEQ ID NO: 2078587 - DNA, 15 bp, Homo sapiens
gtcaaatcagttgca

SEQ ID NO: 2078588 - DNA, 15 bp, Homo sapiens
tcaaatcagttgcat

SEQ ID NO: 2078589 - DNA, 15 bp, Homo sapiens
caaatcagttgcatt

SEQ ID NO: 2078590 - DNA, 15 bp, Homo sapiens
aaatcagttgcattt

SEQ ID NO: 2078591 - DNA, 15 bp, Homo sapiens
aatcagttgcatttt

SEQ ID NO: 2078592 - DNA, 15 bp, Homo sapiens
atcagttgcattttt

SEQ ID NO: 2078593 - DNA, 15 bp, Homo sapiens
tcagttgcatttttg

SEQ ID NO: 2078594 - DNA, 15 bp, Homo sapiens
cagttgcatttttga

SEQ ID NO: 2078595 - DNA, 15 bp, Homo sapiens
agttgcatttttgaa

SEQ ID NO: 2078596 - DNA, 15 bp, Homo sapiens
gttgcatttttgaac

SEQ ID NO: 2078597 - DNA, 15 bp, Homo sapiens
ttgcatttttgaaca

SEQ ID NO: 2078598 - DNA, 15 bp, Homo sapiens
tgcatttttgaacat

SEQ ID NO: 2078599 - DNA, 15 bp, Homo sapiens
gcatttttgaacatt

SEQ ID NO: 2078600 - DNA, 15 bp, Homo sapiens
catttttgaacattt

SEQ ID NO: 2078601 - DNA, 15 bp, Homo sapiens
atttttgaacatttt

SEQ ID NO: 2078602 - DNA, 15 bp, Homo sapiens
tttttgaacattttg

SEQ ID NO: 2078603 - DNA, 15 bp, Homo sapiens
ttttgaacattttga

SEQ ID NO: 2078604 - DNA, 15 bp, Homo sapiens
tttgaacattttgaa

SEQ ID NO: 2078605 - DNA, 15 bp, Homo sapiens
ttgaacattttgaag

SEQ ID NO: 2078606 - DNA, 15 bp, Homo sapiens
tgaacattttgaagg

SEQ ID NO: 2078607 - DNA, 15 bp, Homo sapiens
gaacattttgaaggg

SEQ ID NO: 2078608 - DNA, 15 bp, Homo sapiens
aacattttgaaggga

SEQ ID NO: 2078609 - DNA, 15 bp, Homo sapiens
acattttgaagggat

SEQ ID NO: 2078610 - DNA, 15 bp, Homo sapiens
cattttgaagggatc

SEQ ID NO: 2078611 - DNA, 15 bp, Homo sapiens
attttgaagggatca

SEQ ID NO: 2078612 - DNA, 15 bp, Homo sapiens
ttttgaagggatcag

SEQ ID NO: 2078613 - DNA, 15 bp, Homo sapiens
tttgaagggatcagg

SEQ ID NO: 2078614 - DNA, 15 bp, Homo sapiens
ttgaagggatcaggt

SEQ ID NO: 2078615 - DNA, 15 bp, Homo sapiens
tgaagggatcaggtg

SEQ ID NO: 2078616 - DNA, 15 bp, Homo sapiens
gaagggatcaggtgg

SEQ ID NO: 2078617 - DNA, 15 bp, Homo sapiens
aagggatcaggtgga

SEQ ID NO: 2078618 - DNA, 15 bp, Homo sapiens
agggatcaggtggag

SEQ ID NO: 2078619 - DNA, 15 bp, Homo sapiens
gggatcaggtggagc

SEQ ID NO: 2078620 - DNA, 15 bp, Homo sapiens
ggatcaggtggagca

SEQ ID NO: 2078621 - DNA, 15 bp, Homo sapiens
gatcaggtggagcac

SEQ ID NO: 2078622 - DNA, 15 bp, Homo sapiens
atcaggtggagcaca

SEQ ID NO: 2078623 - DNA, 15 bp, Homo sapiens
tcaggtggagcacag

SEQ ID NO: 2078624 - DNA, 15 bp, Homo sapiens
caggtggagcacagg

SEQ ID NO: 2078625 - DNA, 15 bp, Homo sapiens
aggtggagcacagga

SEQ ID NO: 2078626 - DNA, 15 bp, Homo sapiens
ggtggagcacaggaa

SEQ ID NO: 2078627 - DNA, 15 bp, Homo sapiens
gtggagcacaggaaa

SEQ ID NO: 2078628 - DNA, 15 bp, Homo sapiens
tggagcacaggaaaa

SEQ ID NO: 2078629 - DNA, 15 bp, Homo sapiens
ggagcacaggaaaac

SEQ ID NO: 2078630 - DNA, 15 bp, Homo sapiens
gagcacaggaaaaca

SEQ ID NO: 2078631 - DNA, 15 bp, Homo sapiens
agcacaggaaaacag

SEQ ID NO: 2078632 - DNA, 15 bp, Homo sapiens
gcacaggaaaacagg

SEQ ID NO: 2078633 - DNA, 15 bp, Homo sapiens
cacaggaaaacagga

SEQ ID NO: 2078634 - DNA, 15 bp, Homo sapiens
acaggaaaacaggag

SEQ ID NO: 2078635 - DNA, 15 bp, Homo sapiens
caggaaaacaggaga

SEQ ID NO: 2078636 - DNA, 15 bp, Homo sapiens
aggaaaacaggagat

SEQ ID NO: 2078637 - DNA, 15 bp, Homo sapiens
ggaaaacaggagatg

SEQ ID NO: 2078638 - DNA, 15 bp, Homo sapiens
gaaaacaggagatga

SEQ ID NO: 2078639 - DNA, 15 bp, Homo sapiens
aaaacaggagatgag

SEQ ID NO: 2078640 - DNA, 15 bp, Homo sapiens
aaacaggagatgaga

SEQ ID NO: 2078641 - DNA, 15 bp, Homo sapiens
aacaggagatgagag

SEQ ID NO: 2078642 - DNA, 15 bp, Homo sapiens
acaggagatgagagg

SEQ ID NO: 2078643 - DNA, 15 bp, Homo sapiens
caggagatgagaggc

SEQ ID NO: 2078644 - DNA, 15 bp, Homo sapiens
aggagatgagaggct

SEQ ID NO: 2078645 - DNA, 15 bp, Homo sapiens
ggagatgagaggctt

SEQ ID NO: 2078646 - DNA, 15 bp, Homo sapiens
gagatgagaggcttg

SEQ ID NO: 2078647 - DNA, 15 bp, Homo sapiens
agatgagaggcttga

SEQ ID NO: 2078648 - DNA, 15 bp, Homo sapiens
gatgagaggcttgag

SEQ ID NO: 2078649 - DNA, 15 bp, Homo sapiens
atgagaggcttgagg

SEQ ID NO: 2078650 - DNA, 15 bp, Homo sapiens
tgagaggcttgaggg

SEQ ID NO: 2078651 - DNA, 15 bp, Homo sapiens
gagaggcttgagggc

SEQ ID NO: 2078652 - DNA, 15 bp, Homo sapiens
agaggcttgagggct

SEQ ID NO: 2078653 - DNA, 15 bp, Homo sapiens
gaggcttgagggctg

SEQ ID NO: 2078654 - DNA, 15 bp, Homo sapiens
aggcttgagggctgt

SEQ ID NO: 2078655 - DNA, 15 bp, Homo sapiens
ggcttgagggctgtg

SEQ ID NO: 2078656 - DNA, 15 bp, Homo sapiens
gcttgagggctgtgt

SEQ ID NO: 2078657 - DNA, 15 bp, Homo sapiens
cttgagggctgtgtt

SEQ ID NO: 2078658 - DNA, 15 bp, Homo sapiens
ttgagggctgtgttg

SEQ ID NO: 2078659 - DNA, 15 bp, Homo sapiens
tgagggctgtgttgg

SEQ ID NO: 2078660 - DNA, 15 bp, Homo sapiens
gagggctgtgttggt

SEQ ID NO: 2078661 - DNA, 15 bp, Homo sapiens
agggctgtgttggta

SEQ ID NO: 2078662 - DNA, 15 bp, Homo sapiens
gggctgtgttggtaa

SEQ ID NO: 2078663 - DNA, 15 bp, Homo sapiens
ggctgtgttggtaag

SEQ ID NO: 2078664 - DNA, 15 bp, Homo sapiens
gctgtgttggtaagg

SEQ ID NO: 2078665 - DNA, 15 bp, Homo sapiens
ctgtgttggtaaggg

SEQ ID NO: 2078666 - DNA, 15 bp, Homo sapiens
tgtgttggtaagggt

SEQ ID NO: 2078667 - DNA, 15 bp, Homo sapiens
gtgttggtaagggtc

SEQ ID NO: 2078668 - DNA, 15 bp, Homo sapiens
tgttggtaagggtcc

SEQ ID NO: 2078669 - DNA, 15 bp, Homo sapiens
gttggtaagggtccc

SEQ ID NO: 2078670 - DNA, 15 bp, Homo sapiens
ttggtaagggtccct

SEQ ID NO: 2078671 - DNA, 15 bp, Homo sapiens
tggtaagggtccctt

SEQ ID NO: 2078672 - DNA, 15 bp, Homo sapiens
ggtaagggtcccttg

SEQ ID NO: 2078673 - DNA, 15 bp, Homo sapiens
gtaagggtcccttga

SEQ ID NO: 2078674 - DNA, 15 bp, Homo sapiens
taagggtcccttgaa

SEQ ID NO: 2078675 - DNA, 15 bp, Homo sapiens
aagggtcccttgaat

SEQ ID NO: 2078676 - DNA, 15 bp, Homo sapiens
agggtcccttgaatt

SEQ ID NO: 2078677 - DNA, 15 bp, Homo sapiens
gggtcccttgaattc

SEQ ID NO: 2078678 - DNA, 15 bp, Homo sapiens
ggtcccttgaattct

SEQ ID NO: 2078679 - DNA, 15 bp, Homo sapiens
gtcccttgaattcta

SEQ ID NO: 2078680 - DNA, 15 bp, Homo sapiens
tcccttgaattctaa

SEQ ID NO: 2078681 - DNA, 15 bp, Homo sapiens
cccttgaattctaag

SEQ ID NO: 2078682 - DNA, 15 bp, Homo sapiens
ccttgaattctaagc

SEQ ID NO: 2078683 - DNA, 15 bp, Homo sapiens
cttgaattctaagct

SEQ ID NO: 2078684 - DNA, 15 bp, Homo sapiens
ttgaattctaagctg

SEQ ID NO: 2078685 - DNA, 15 bp, Homo sapiens
tgaattctaagctga

SEQ ID NO: 2078686 - DNA, 15 bp, Homo sapiens
gaattctaagctgag

SEQ ID NO: 2078687 - DNA, 15 bp, Homo sapiens
aattctaagctgagg

SEQ ID NO: 2078688 - DNA, 15 bp, Homo sapiens
attctaagctgagga

SEQ ID NO: 2078689 - DNA, 15 bp, Homo sapiens
ttctaagctgaggag

SEQ ID NO: 2078690 - DNA, 15 bp, Homo sapiens
tctaagctgaggagt

SEQ ID NO: 2078691 - DNA, 15 bp, Homo sapiens
ctaagctgaggagtt

SEQ ID NO: 2078692 - DNA, 15 bp, Homo sapiens
taagctgaggagttc

SEQ ID NO: 2078693 - DNA, 15 bp, Homo sapiens
aagctgaggagttca

SEQ ID NO: 2078694 - DNA, 15 bp, Homo sapiens
agctgaggagttcat

SEQ ID NO: 2078695 - DNA, 15 bp, Homo sapiens
gctgaggagttcatg

SEQ ID NO: 2078696 - DNA, 15 bp, Homo sapiens
ctgaggagttcatgc

SEQ ID NO: 2078697 - DNA, 15 bp, Homo sapiens
tgaggagttcatgca

SEQ ID NO: 2078698 - DNA, 15 bp, Homo sapiens
gaggagttcatgcag

SEQ ID NO: 2078699 - DNA, 15 bp, Homo sapiens
aggagttcatgcagg

SEQ ID NO: 2078700 - DNA, 15 bp, Homo sapiens
ggagttcatgcagga

SEQ ID NO: 2078701 - DNA, 15 bp, Homo sapiens
gagttcatgcaggaa

SEQ ID NO: 2078702 - DNA, 15 bp, Homo sapiens
agttcatgcaggaat

SEQ ID NO: 2078703 - DNA, 15 bp, Homo sapiens
gttcatgcaggaatc

SEQ ID NO: 2078704 - DNA, 15 bp, Homo sapiens
ttcatgcaggaatca

SEQ ID NO: 2078705 - DNA, 15 bp, Homo sapiens
tcatgcaggaatcaa

SEQ ID NO: 2078706 - DNA, 15 bp, Homo sapiens
catgcaggaatcaag

SEQ ID NO: 2078707 - DNA, 15 bp, Homo sapiens
atgcaggaatcaagc

SEQ ID NO: 2078708 - DNA, 15 bp, Homo sapiens
tgcaggaatcaagca

SEQ ID NO: 2078709 - DNA, 15 bp, Homo sapiens
gcaggaatcaagcag

SEQ ID NO: 2078710 - DNA, 15 bp, Homo sapiens
caggaatcaagcagc

SEQ ID NO: 2078711 - DNA, 15 bp, Homo sapiens
aggaatcaagcagct

SEQ ID NO: 2078712 - DNA, 15 bp, Homo sapiens
ggaatcaagcagctc

SEQ ID NO: 2078713 - DNA, 15 bp, Homo sapiens
gaatcaagcagctcc

SEQ ID NO: 2078714 - DNA, 15 bp, Homo sapiens
aatcaagcagctccc

SEQ ID NO: 2078715 - DNA, 15 bp, Homo sapiens
atcaagcagctccct

SEQ ID NO: 2078716 - DNA, 15 bp, Homo sapiens
tcaagcagctccctc

SEQ ID NO: 2078717 - DNA, 15 bp, Homo sapiens
caagcagctccctcg

SEQ ID NO: 2078718 - DNA, 15 bp, Homo sapiens
aagcagctccctcgc

SEQ ID NO: 2078719 - DNA, 15 bp, Homo sapiens
agcagctccctcgcc

SEQ ID NO: 2078720 - DNA, 15 bp, Homo sapiens
gcagctccctcgccc

SEQ ID NO: 2078721 - DNA, 15 bp, Homo sapiens
cagctccctcgcccc

SEQ ID NO: 2078722 - DNA, 15 bp, Homo sapiens
agctccctcgcccca

SEQ ID NO: 2078723 - DNA, 15 bp, Homo sapiens
gctccctcgccccat

SEQ ID NO: 2078724 - DNA, 15 bp, Homo sapiens
ctccctcgccccatg

SEQ ID NO: 2078725 - DNA, 15 bp, Homo sapiens
tccctcgccccatga

SEQ ID NO: 2078726 - DNA, 15 bp, Homo sapiens
ccctcgccccatgaa

SEQ ID NO: 2078727 - DNA, 15 bp, Homo sapiens
cctcgccccatgaag

SEQ ID NO: 2078728 - DNA, 15 bp, Homo sapiens
ctcgccccatgaagg

SEQ ID NO: 2078729 - DNA, 15 bp, Homo sapiens
tcgccccatgaaggg

SEQ ID NO: 2078730 - DNA, 15 bp, Homo sapiens
cgccccatgaagggt

SEQ ID NO: 2078731 - DNA, 15 bp, Homo sapiens
gccccatgaagggtg

SEQ ID NO: 2078732 - DNA, 15 bp, Homo sapiens
ccccatgaagggtgt

SEQ ID NO: 2078733 - DNA, 15 bp, Homo sapiens
cccatgaagggtgtt

SEQ ID NO: 2078734 - DNA, 15 bp, Homo sapiens
ccatgaagggtgtta

SEQ ID NO: 2078735 - DNA, 15 bp, Homo sapiens
catgaagggtgttag

SEQ ID NO: 2078736 - DNA, 15 bp, Homo sapiens
atgaagggtgttagg

SEQ ID NO: 2078737 - DNA, 15 bp, Homo sapiens
tgaagggtgttagga

SEQ ID NO: 2078738 - DNA, 15 bp, Homo sapiens
gaagggtgttaggaa

SEQ ID NO: 2078739 - DNA, 15 bp, Homo sapiens
aagggtgttaggaat

SEQ ID NO: 2078740 - DNA, 15 bp, Homo sapiens
agggtgttaggaatg

SEQ ID NO: 2078741 - DNA, 15 bp, Homo sapiens
gggtgttaggaatgg

SEQ ID NO: 2078742 - DNA, 15 bp, Homo sapiens
ggtgttaggaatggt

SEQ ID NO: 2078743 - DNA, 15 bp, Homo sapiens
gtgttaggaatggta

SEQ ID NO: 2078744 - DNA, 15 bp, Homo sapiens
tgttaggaatggtac

SEQ ID NO: 2078745 - DNA, 15 bp, Homo sapiens
gttaggaatggtacc

SEQ ID NO: 2078746 - DNA, 15 bp, Homo sapiens
ttaggaatggtacca

SEQ ID NO: 2078747 - DNA, 15 bp, Homo sapiens
taggaatggtaccag

SEQ ID NO: 2078748 - DNA, 15 bp, Homo sapiens
aggaatggtaccagt

SEQ ID NO: 2078749 - DNA, 15 bp, Homo sapiens
ggaatggtaccagta

SEQ ID NO: 2078750 - DNA, 15 bp, Homo sapiens
gaatggtaccagtac

SEQ ID NO: 2078751 - DNA, 15 bp, Homo sapiens
aatggtaccagtaca

SEQ ID NO: 2078752 - DNA, 15 bp, Homo sapiens
atggtaccagtacat

SEQ ID NO: 2078753 - DNA, 15 bp, Homo sapiens
tggtaccagtacatg

SEQ ID NO: 2078754 - DNA, 15 bp, Homo sapiens
ggtaccagtacatgg

SEQ ID NO: 2078755 - DNA, 15 bp, Homo sapiens
gtaccagtacatggg

SEQ ID NO: 2078756 - DNA, 15 bp, Homo sapiens
taccagtacatgggt

SEQ ID NO: 2078757 - DNA, 15 bp, Homo sapiens
accagtacatgggta

SEQ ID NO: 2078758 - DNA, 15 bp, Homo sapiens
ccagtacatgggtag

SEQ ID NO: 2078759 - DNA, 15 bp, Homo sapiens
cagtacatgggtagc

SEQ ID NO: 2078760 - DNA, 15 bp, Homo sapiens
agtacatgggtagct

SEQ ID NO: 2078761 - DNA, 15 bp, Homo sapiens
gtacatgggtagctg

SEQ ID NO: 2078762 - DNA, 15 bp, Homo sapiens
tacatgggtagctgt

SEQ ID NO: 2078763 - DNA, 15 bp, Homo sapiens
acatgggtagctgtt

SEQ ID NO: 2078764 - DNA, 15 bp, Homo sapiens
catgggtagctgttg

SEQ ID NO: 2078765 - DNA, 15 bp, Homo sapiens
atgggtagctgttgg

SEQ ID NO: 2078766 - DNA, 15 bp, Homo sapiens
tgggtagctgttggt

SEQ ID NO: 2078767 - DNA, 15 bp, Homo sapiens
gggtagctgttggtc

SEQ ID NO: 2078768 - DNA, 15 bp, Homo sapiens
ggtagctgttggtct

SEQ ID NO: 2078769 - DNA, 15 bp, Homo sapiens
gtagctgttggtctt

SEQ ID NO: 2078770 - DNA, 15 bp, Homo sapiens
tagctgttggtcttg

SEQ ID NO: 2078771 - DNA, 15 bp, Homo sapiens
agctgttggtcttgg

SEQ ID NO: 2078772 - DNA, 15 bp, Homo sapiens
gctgttggtcttggg

SEQ ID NO: 2078773 - DNA, 15 bp, Homo sapiens
ctgttggtcttgggt

SEQ ID NO: 2078774 - DNA, 15 bp, Homo sapiens
tgttggtcttgggtt

SEQ ID NO: 2078775 - DNA, 15 bp, Homo sapiens
gttggtcttgggttt

SEQ ID NO: 2078776 - DNA, 15 bp, Homo sapiens
ttggtcttgggtttc

SEQ ID NO: 2078777 - DNA, 15 bp, Homo sapiens
tggtcttgggtttct

SEQ ID NO: 2078778 - DNA, 15 bp, Homo sapiens
ggtcttgggtttctt

SEQ ID NO: 2078779 - DNA, 15 bp, Homo sapiens
gtcttgggtttcttc

SEQ ID NO: 2078780 - DNA, 15 bp, Homo sapiens
tcttgggtttcttct

SEQ ID NO: 2078781 - DNA, 15 bp, Homo sapiens
cttgggtttcttctt

SEQ ID NO: 2078782 - DNA, 15 bp, Homo sapiens
ttgggtttcttcttg

SEQ ID NO: 2078783 - DNA, 15 bp, Homo sapiens
tgggtttcttcttgc

SEQ ID NO: 2078784 - DNA, 15 bp, Homo sapiens
gggtttcttcttgcc

SEQ ID NO: 2078785 - DNA, 15 bp, Homo sapiens
ggtttcttcttgcct

SEQ ID NO: 2078786 - DNA, 15 bp, Homo sapiens
gtttcttcttgcctt

SEQ ID NO: 2078787 - DNA, 15 bp, Homo sapiens
tttcttcttgccttt

SEQ ID NO: 2078788 - DNA, 15 bp, Homo sapiens
ttcttcttgcctttt

SEQ ID NO: 2078789 - DNA, 15 bp, Homo sapiens
tcttcttgccttttg

SEQ ID NO: 2078790 - DNA, 15 bp, Homo sapiens
cttcttgccttttgg

SEQ ID NO: 2078791 - DNA, 15 bp, Homo sapiens
ttcttgccttttggg

SEQ ID NO: 2078792 - DNA, 15 bp, Homo sapiens
tcttgccttttgggg

SEQ ID NO: 2078793 - DNA, 15 bp, Homo sapiens
cttgccttttggggt

SEQ ID NO: 2078794 - DNA, 15 bp, Homo sapiens
ttgccttttggggtg

SEQ ID NO: 2078795 - DNA, 15 bp, Homo sapiens
tgccttttggggtgc

SEQ ID NO: 2078796 - DNA, 15 bp, Homo sapiens
gccttttggggtgca

SEQ ID NO: 2078797 - DNA, 15 bp, Homo sapiens
ccttttggggtgcag

SEQ ID NO: 2078798 - DNA, 15 bp, Homo sapiens
cttttggggtgcagc

SEQ ID NO: 2078799 - DNA, 15 bp, Homo sapiens
ttttggggtgcagcc

SEQ ID NO: 2078800 - DNA, 15 bp, Homo sapiens
tttggggtgcagcct

SEQ ID NO: 2078801 - DNA, 15 bp, Homo sapiens
ttggggtgcagcctt

SEQ ID NO: 2078802 - DNA, 15 bp, Homo sapiens
tggggtgcagccttc

SEQ ID NO: 2078803 - DNA, 15 bp, Homo sapiens
ggggtgcagccttca

SEQ ID NO: 2078804 - DNA, 15 bp, Homo sapiens
gggtgcagccttcag

SEQ ID NO: 2078805 - DNA, 15 bp, Homo sapiens
ggtgcagccttcagg

SEQ ID NO: 2078806 - DNA, 15 bp, Homo sapiens
gtgcagccttcaggc

SEQ ID NO: 2078807 - DNA, 15 bp, Homo sapiens
tgcagccttcaggca

SEQ ID NO: 2078808 - DNA, 15 bp, Homo sapiens
gcagccttcaggcat

SEQ ID NO: 2078809 - DNA, 15 bp, Homo sapiens
cagccttcaggcatc

SEQ ID NO: 2078810 - DNA, 15 bp, Homo sapiens
agccttcaggcatct

SEQ ID NO: 2078811 - DNA, 15 bp, Homo sapiens
gccttcaggcatctg

SEQ ID NO: 2078812 - DNA, 15 bp, Homo sapiens
ccttcaggcatctgc

SEQ ID NO: 2078813 - DNA, 15 bp, Homo sapiens
cttcaggcatctgct

SEQ ID NO: 2078814 - DNA, 15 bp, Homo sapiens
ttcaggcatctgctg

SEQ ID NO: 2078815 - DNA, 15 bp, Homo sapiens
tcaggcatctgctgc

SEQ ID NO: 2078816 - DNA, 15 bp, Homo sapiens
caggcatctgctgct

SEQ ID NO: 2078817 - DNA, 15 bp, Homo sapiens
aggcatctgctgcta

SEQ ID NO: 2078818 - DNA, 15 bp, Homo sapiens
ggcatctgctgctag

SEQ ID NO: 2078819 - DNA, 15 bp, Homo sapiens
gcatctgctgctaga

SEQ ID NO: 2078820 - DNA, 15 bp, Homo sapiens
catctgctgctagat

SEQ ID NO: 2078821 - DNA, 15 bp, Homo sapiens
atctgctgctagatc

SEQ ID NO: 2078822 - DNA, 15 bp, Homo sapiens
tctgctgctagatcc

SEQ ID NO: 2078823 - DNA, 15 bp, Homo sapiens
ctgctgctagatccc

SEQ ID NO: 2078824 - DNA, 15 bp, Homo sapiens
tgctgctagatccct

SEQ ID NO: 2078825 - DNA, 15 bp, Homo sapiens
gctgctagatcccta

SEQ ID NO: 2078826 - DNA, 15 bp, Homo sapiens
ctgctagatccctag

SEQ ID NO: 2078827 - DNA, 15 bp, Homo sapiens
tgctagatccctagg

SEQ ID NO: 2078828 - DNA, 15 bp, Homo sapiens
gctagatccctaggc

SEQ ID NO: 2078829 - DNA, 15 bp, Homo sapiens
ctagatccctaggct

SEQ ID NO: 2078830 - DNA, 15 bp, Homo sapiens
tagatccctaggctt

SEQ ID NO: 2078831 - DNA, 15 bp, Homo sapiens
agatccctaggcttc

SEQ ID NO: 2078832 - DNA, 15 bp, Homo sapiens
gatccctaggcttct

SEQ ID NO: 2078833 - DNA, 15 bp, Homo sapiens
atccctaggcttcta

SEQ ID NO: 2078834 - DNA, 15 bp, Homo sapiens
tccctaggcttctat

SEQ ID NO: 2078835 - DNA, 15 bp, Homo sapiens
ccctaggcttctatc

SEQ ID NO: 2078836 - DNA, 15 bp, Homo sapiens
cctaggcttctatct

SEQ ID NO: 2078837 - DNA, 15 bp, Homo sapiens
ctaggcttctatctt

SEQ ID NO: 2078838 - DNA, 15 bp, Homo sapiens
taggcttctatcttg

SEQ ID NO: 2078839 - DNA, 15 bp, Homo sapiens
aggcttctatcttgt

SEQ ID NO: 2078840 - DNA, 15 bp, Homo sapiens
ggcttctatcttgta

SEQ ID NO: 2078841 - DNA, 15 bp, Homo sapiens
gcttctatcttgtag

SEQ ID NO: 2078842 - DNA, 15 bp, Homo sapiens
cttctatcttgtagg

SEQ ID NO: 2078843 - DNA, 15 bp, Homo sapiens
ttctatcttgtaggt

SEQ ID NO: 2078844 - DNA, 15 bp, Homo sapiens
tctatcttgtaggtg

SEQ ID NO: 2078845 - DNA, 15 bp, Homo sapiens
ctatcttgtaggtgc

SEQ ID NO: 2078846 - DNA, 15 bp, Homo sapiens
tatcttgtaggtgct

SEQ ID NO: 2078847 - DNA, 15 bp, Homo sapiens
atcttgtaggtgctg

SEQ ID NO: 2078848 - DNA, 15 bp, Homo sapiens
tcttgtaggtgctgt

SEQ ID NO: 2078849 - DNA, 15 bp, Homo sapiens
cttgtaggtgctgtg

SEQ ID NO: 2078850 - DNA, 15 bp, Homo sapiens
ttgtaggtgctgtga

SEQ ID NO: 2078851 - DNA, 15 bp, Homo sapiens
tgtaggtgctgtgag

SEQ ID NO: 2078852 - DNA, 15 bp, Homo sapiens
gtaggtgctgtgagc

SEQ ID NO: 2078853 - DNA, 15 bp, Homo sapiens
taggtgctgtgagct

SEQ ID NO: 2078854 - DNA, 15 bp, Homo sapiens
aggtgctgtgagctg

SEQ ID NO: 2078855 - DNA, 15 bp, Homo sapiens
ggtgctgtgagctga

SEQ ID NO: 2078856 - DNA, 15 bp, Homo sapiens
gtgctgtgagctgag

SEQ ID NO: 2078857 - DNA, 15 bp, Homo sapiens
tgctgtgagctgagc

SEQ ID NO: 2078858 - DNA, 15 bp, Homo sapiens
gctgtgagctgagct

SEQ ID NO: 2078859 - DNA, 15 bp, Homo sapiens
ctgtgagctgagctg

SEQ ID NO: 2078860 - DNA, 15 bp, Homo sapiens
tgtgagctgagctgt

SEQ ID NO: 2078861 - DNA, 15 bp, Homo sapiens
gtgagctgagctgtt

SEQ ID NO: 2078862 - DNA, 15 bp, Homo sapiens
tgagctgagctgttg

SEQ ID NO: 2078863 - DNA, 15 bp, Homo sapiens
gagctgagctgttgg

SEQ ID NO: 2078864 - DNA, 15 bp, Homo sapiens
agctgagctgttggt

SEQ ID NO: 2078865 - DNA, 15 bp, Homo sapiens
gctgagctgttggta

SEQ ID NO: 2078866 - DNA, 15 bp, Homo sapiens
ctgagctgttggtag

SEQ ID NO: 2078867 - DNA, 15 bp, Homo sapiens
tgagctgttggtagt

SEQ ID NO: 2078868 - DNA, 15 bp, Homo sapiens
gagctgttggtagtt

SEQ ID NO: 2078869 - DNA, 15 bp, Homo sapiens
agctgttggtagttt

SEQ ID NO: 2078870 - DNA, 15 bp, Homo sapiens
gctgttggtagtttc

SEQ ID NO: 2078871 - DNA, 15 bp, Homo sapiens
ctgttggtagtttct

SEQ ID NO: 2078872 - DNA, 15 bp, Homo sapiens
tgttggtagtttctg

SEQ ID NO: 2078873 - DNA, 15 bp, Homo sapiens
gttggtagtttctgg

SEQ ID NO: 2078874 - DNA, 15 bp, Homo sapiens
ttggtagtttctggg

SEQ ID NO: 2078875 - DNA, 15 bp, Homo sapiens
tggtagtttctgggg

SEQ ID NO: 2078876 - DNA, 15 bp, Homo sapiens
ggtagtttctgggga

SEQ ID NO: 2078877 - DNA, 15 bp, Homo sapiens
gtagtttctggggaa

SEQ ID NO: 2078878 - DNA, 15 bp, Homo sapiens
tagtttctggggaaa

SEQ ID NO: 2078879 - DNA, 15 bp, Homo sapiens
agtttctggggaaag

SEQ ID NO: 2078880 - DNA, 15 bp, Homo sapiens
gtttctggggaaagg

SEQ ID NO: 2078881 - DNA, 15 bp, Homo sapiens
tttctggggaaagga

SEQ ID NO: 2078882 - DNA, 15 bp, Homo sapiens
ttctggggaaaggat

SEQ ID NO: 2078883 - DNA, 15 bp, Homo sapiens
tctggggaaaggata

SEQ ID NO: 2078884 - DNA, 15 bp, Homo sapiens
ctggggaaaggatac

SEQ ID NO: 2078885 - DNA, 15 bp, Homo sapiens
tggggaaaggatact

SEQ ID NO: 2078886 - DNA, 15 bp, Homo sapiens
ggggaaaggatactt

SEQ ID NO: 2078887 - DNA, 15 bp, Homo sapiens
gggaaaggatacttc

SEQ ID NO: 2078888 - DNA, 15 bp, Homo sapiens
ggaaaggatacttct

SEQ ID NO: 2078889 - DNA, 15 bp, Homo sapiens
gaaaggatacttctc

SEQ ID NO: 2078890 - DNA, 15 bp, Homo sapiens
aaaggatacttctca

SEQ ID NO: 2078891 - DNA, 15 bp, Homo sapiens
aaggatacttctcat

SEQ ID NO: 2078892 - DNA, 15 bp, Homo sapiens
aggatacttctcatg

SEQ ID NO: 2078893 - DNA, 15 bp, Homo sapiens
ggatacttctcatgg

SEQ ID NO: 2078894 - DNA, 15 bp, Homo sapiens
gatacttctcatggt

SEQ ID NO: 2078895 - DNA, 15 bp, Homo sapiens
atacttctcatggta

SEQ ID NO: 2078896 - DNA, 15 bp, Homo sapiens
tacttctcatggtac

SEQ ID NO: 2078897 - DNA, 15 bp, Homo sapiens
acttctcatggtact

SEQ ID NO: 2078898 - DNA, 15 bp, Homo sapiens
cttctcatggtactt

SEQ ID NO: 2078899 - DNA, 15 bp, Homo sapiens
ttctcatggtacttt

SEQ ID NO: 2078900 - DNA, 15 bp, Homo sapiens
tctcatggtactttg

SEQ ID NO: 2078901 - DNA, 15 bp, Homo sapiens
ctcatggtactttgc

SEQ ID NO: 2078902 - DNA, 15 bp, Homo sapiens
tcatggtactttgcc

SEQ ID NO: 2078903 - DNA, 15 bp, Homo sapiens
catggtactttgcca

SEQ ID NO: 2078904 - DNA, 15 bp, Homo sapiens
atggtactttgccat

SEQ ID NO: 2078905 - DNA, 15 bp, Homo sapiens
tggtactttgccatg

SEQ ID NO: 2078906 - DNA, 15 bp, Homo sapiens
ggtactttgccatgt

SEQ ID NO: 2078907 - DNA, 15 bp, Homo sapiens
gtactttgccatgtg

SEQ ID NO: 2078908 - DNA, 15 bp, Homo sapiens
tactttgccatgtgg

SEQ ID NO: 2078909 - DNA, 15 bp, Homo sapiens
actttgccatgtggc

SEQ ID NO: 2078910 - DNA, 15 bp, Homo sapiens
ctttgccatgtggcc

SEQ ID NO: 2078911 - DNA, 15 bp, Homo sapiens
tttgccatgtggcca

SEQ ID NO: 2078912 - DNA, 15 bp, Homo sapiens
ttgccatgtggccac

SEQ ID NO: 2078913 - DNA, 15 bp, Homo sapiens
tgccatgtggccaca

SEQ ID NO: 2078914 - DNA, 15 bp, Homo sapiens
gccatgtggccacag

SEQ ID NO: 2078915 - DNA, 15 bp, Homo sapiens
ccatgtggccacagt

SEQ ID NO: 2078916 - DNA, 15 bp, Homo sapiens
catgtggccacagtt

SEQ ID NO: 2078917 - DNA, 15 bp, Homo sapiens
atgtggccacagttg

SEQ ID NO: 2078918 - DNA, 15 bp, Homo sapiens
tgtggccacagttga

SEQ ID NO: 2078919 - DNA, 15 bp, Homo sapiens
gtggccacagttgat

SEQ ID NO: 2078920 - DNA, 15 bp, Homo sapiens
tggccacagttgata

SEQ ID NO: 2078921 - DNA, 15 bp, Homo sapiens
ggccacagttgatac

SEQ ID NO: 2078922 - DNA, 15 bp, Homo sapiens
gccacagttgatacc

SEQ ID NO: 2078923 - DNA, 15 bp, Homo sapiens
ccacagttgataccc

SEQ ID NO: 2078924 - DNA, 15 bp, Homo sapiens
cacagttgatacccc

SEQ ID NO: 2078925 - DNA, 15 bp, Homo sapiens
acagttgataccccc

SEQ ID NO: 2078926 - DNA, 15 bp, Homo sapiens
cagttgatacccccc

SEQ ID NO: 2078927 - DNA, 15 bp, Homo sapiens
agttgataccccccc

SEQ ID NO: 2078928 - DNA, 15 bp, Homo sapiens
gttgataccccccca

SEQ ID NO: 2078929 - DNA, 15 bp, Homo sapiens
ttgatacccccccaa

SEQ ID NO: 2078930 - DNA, 15 bp, Homo sapiens
tgatacccccccaag

SEQ ID NO: 2078931 - DNA, 15 bp, Homo sapiens
gatacccccccaagt

SEQ ID NO: 2078932 - DNA, 15 bp, Homo sapiens
atacccccccaagtg

SEQ ID NO: 2078933 - DNA, 15 bp, Homo sapiens
tacccccccaagtgc

SEQ ID NO: 2078934 - DNA, 15 bp, Homo sapiens
acccccccaagtgca

SEQ ID NO: 2078935 - DNA, 15 bp, Homo sapiens
cccccccaagtgcaa

SEQ ID NO: 2078936 - DNA, 15 bp, Homo sapiens
ccccccaagtgcaag

SEQ ID NO: 2078937 - DNA, 15 bp, Homo sapiens
cccccaagtgcaagg

SEQ ID NO: 2078938 - DNA, 15 bp, Homo sapiens
ccccaagtgcaagga

SEQ ID NO: 2078939 - DNA, 15 bp, Homo sapiens
cccaagtgcaaggag

SEQ ID NO: 2078940 - DNA, 15 bp, Homo sapiens
ccaagtgcaaggaga

SEQ ID NO: 2078941 - DNA, 15 bp, Homo sapiens
caagtgcaaggagaa

SEQ ID NO: 2078942 - DNA, 15 bp, Homo sapiens
aagtgcaaggagaaa

SEQ ID NO: 2078943 - DNA, 15 bp, Homo sapiens
agtgcaaggagaaag

SEQ ID NO: 2078944 - DNA, 15 bp, Homo sapiens
gtgcaaggagaaaga

SEQ ID NO: 2078945 - DNA, 15 bp, Homo sapiens
tgcaaggagaaagaa

SEQ ID NO: 2078946 - DNA, 15 bp, Homo sapiens
gcaaggagaaagaag

SEQ ID NO: 2078947 - DNA, 15 bp, Homo sapiens
caaggagaaagaagt

SEQ ID NO: 2078948 - DNA, 15 bp, Homo sapiens
aaggagaaagaagtt

SEQ ID NO: 2078949 - DNA, 15 bp, Homo sapiens
aggagaaagaagttt

SEQ ID NO: 2078950 - DNA, 15 bp, Homo sapiens
ggagaaagaagtttt

SEQ ID NO: 2078951 - DNA, 15 bp, Homo sapiens
gagaaagaagtttta

SEQ ID NO: 2078952 - DNA, 15 bp, Homo sapiens
agaaagaagttttag

SEQ ID NO: 2078953 - DNA, 15 bp, Homo sapiens
gaaagaagttttagt

SEQ ID NO: 2078954 - DNA, 15 bp, Homo sapiens
aaagaagttttagtg

SEQ ID NO: 2078955 - DNA, 15 bp, Homo sapiens
aagaagttttagtga

SEQ ID NO: 2078956 - DNA, 15 bp, Homo sapiens
agaagttttagtgag

SEQ ID NO: 2078957 - DNA, 15 bp, Homo sapiens
gaagttttagtgagg

SEQ ID NO: 2078958 - DNA, 15 bp, Homo sapiens
aagttttagtgaggc

SEQ ID NO: 2078959 - DNA, 15 bp, Homo sapiens
agttttagtgaggca

SEQ ID NO: 2078960 - DNA, 15 bp, Homo sapiens
gttttagtgaggcag

SEQ ID NO: 2078961 - DNA, 15 bp, Homo sapiens
ttttagtgaggcaga

SEQ ID NO: 2078962 - DNA, 15 bp, Homo sapiens
tttagtgaggcagaa

SEQ ID NO: 2078963 - DNA, 15 bp, Homo sapiens
ttagtgaggcagaaa

SEQ ID NO: 2078964 - DNA, 15 bp, Homo sapiens
tagtgaggcagaaat

SEQ ID NO: 2078965 - DNA, 15 bp, Homo sapiens
agtgaggcagaaatg

SEQ ID NO: 2078966 - DNA, 15 bp, Homo sapiens
gtgaggcagaaatga

SEQ ID NO: 2078967 - DNA, 15 bp, Homo sapiens
tgaggcagaaatgag

SEQ ID NO: 2078968 - DNA, 15 bp, Homo sapiens
gaggcagaaatgaga

SEQ ID NO: 2078969 - DNA, 15 bp, Homo sapiens
aggcagaaatgagag

SEQ ID NO: 2078970 - DNA, 15 bp, Homo sapiens
ggcagaaatgagaga

SEQ ID NO: 2078971 - DNA, 15 bp, Homo sapiens
gcagaaatgagagaa

SEQ ID NO: 2078972 - DNA, 15 bp, Homo sapiens
cagaaatgagagaat

SEQ ID NO: 2078973 - DNA, 15 bp, Homo sapiens
agaaatgagagaata

SEQ ID NO: 2078974 - DNA, 15 bp, Homo sapiens
gaaatgagagaatac

SEQ ID NO: 2078975 - DNA, 15 bp, Homo sapiens
aaatgagagaataca

SEQ ID NO: 2078976 - DNA, 15 bp, Homo sapiens
aatgagagaatacag

SEQ ID NO: 2078977 - DNA, 15 bp, Homo sapiens
atgagagaatacagt

SEQ ID NO: 2078978 - DNA, 15 bp, Homo sapiens
tgagagaatacagta

SEQ ID NO: 2078979 - DNA, 15 bp, Homo sapiens
gagagaatacagtag

SEQ ID NO: 2078980 - DNA, 15 bp, Homo sapiens
agagaatacagtaga

SEQ ID NO: 2078981 - DNA, 15 bp, Homo sapiens
gagaatacagtagag

SEQ ID NO: 2078982 - DNA, 15 bp, Homo sapiens
agaatacagtagagt

SEQ ID NO: 2078983 - DNA, 15 bp, Homo sapiens
gaatacagtagagta

SEQ ID NO: 2078984 - DNA, 15 bp, Homo sapiens
aatacagtagagtat

SEQ ID NO: 2078985 - DNA, 15 bp, Homo sapiens
atacagtagagtatt

SEQ ID NO: 2078986 - DNA, 15 bp, Homo sapiens
tacagtagagtattg

SEQ ID NO: 2078987 - DNA, 15 bp, Homo sapiens
acagtagagtattgg

SEQ ID NO: 2078988 - DNA, 15 bp, Homo sapiens
cagtagagtattgga

SEQ ID NO: 2078989 - DNA, 15 bp, Homo sapiens
agtagagtattggat

SEQ ID NO: 2078990 - DNA, 15 bp, Homo sapiens
gtagagtattggatg

SEQ ID NO: 2078991 - DNA, 15 bp, Homo sapiens
tagagtattggatgg

SEQ ID NO: 2078992 - DNA, 15 bp, Homo sapiens
agagtattggatgga

SEQ ID NO: 2078993 - DNA, 15 bp, Homo sapiens
gagtattggatggaa

SEQ ID NO: 2078994 - DNA, 15 bp, Homo sapiens
agtattggatggaag

SEQ ID NO: 2078995 - DNA, 15 bp, Homo sapiens
gtattggatggaaga

SEQ ID NO: 2078996 - DNA, 15 bp, Homo sapiens
tattggatggaagaa

SEQ ID NO: 2078997 - DNA, 15 bp, Homo sapiens
attggatggaagaag

SEQ ID NO: 2078998 - DNA, 15 bp, Homo sapiens
ttggatggaagaaga

SEQ ID NO: 2078999 - DNA, 15 bp, Homo sapiens
tggatggaagaagac

SEQ ID NO: 2079000 - DNA, 15 bp, Homo sapiens
ggatggaagaagaca

SEQ ID NO: 2079001 - DNA, 15 bp, Homo sapiens
gatggaagaagacag

SEQ ID NO: 2079002 - DNA, 15 bp, Homo sapiens
atggaagaagacagg

SEQ ID NO: 2079003 - DNA, 15 bp, Homo sapiens
tggaagaagacaggg

SEQ ID NO: 2079004 - DNA, 15 bp, Homo sapiens
ggaagaagacaggga

SEQ ID NO: 2079005 - DNA, 15 bp, Homo sapiens
gaagaagacagggac

SEQ ID NO: 2079006 - DNA, 15 bp, Homo sapiens
aagaagacagggaca

SEQ ID NO: 2079007 - DNA, 15 bp, Homo sapiens
agaagacagggacat

SEQ ID NO: 2079008 - DNA, 15 bp, Homo sapiens
gaagacagggacatg

SEQ ID NO: 2079009 - DNA, 15 bp, Homo sapiens
aagacagggacatga

SEQ ID NO: 2079010 - DNA, 15 bp, Homo sapiens
agacagggacatgaa

SEQ ID NO: 2079011 - DNA, 15 bp, Homo sapiens
gacagggacatgaag

SEQ ID NO: 2079012 - DNA, 15 bp, Homo sapiens
acagggacatgaagc

SEQ ID NO: 2079013 - DNA, 15 bp, Homo sapiens
cagggacatgaagca

SEQ ID NO: 2079014 - DNA, 15 bp, Homo sapiens
agggacatgaagcag

SEQ ID NO: 2079015 - DNA, 15 bp, Homo sapiens
gggacatgaagcagg

SEQ ID NO: 2079016 - DNA, 15 bp, Homo sapiens
ggacatgaagcagga

SEQ ID NO: 2079017 - DNA, 15 bp, Homo sapiens
gacatgaagcaggac

SEQ ID NO: 2079018 - DNA, 15 bp, Homo sapiens
acatgaagcaggact

SEQ ID NO: 2079019 - DNA, 15 bp, Homo sapiens
catgaagcaggacta

SEQ ID NO: 2079020 - DNA, 15 bp, Homo sapiens
atgaagcaggactag

SEQ ID NO: 2079021 - DNA, 15 bp, Homo sapiens
tgaagcaggactagg

SEQ ID NO: 2079022 - DNA, 15 bp, Homo sapiens
gaagcaggactaggg

SEQ ID NO: 2079023 - DNA, 15 bp, Homo sapiens
aagcaggactagggt

SEQ ID NO: 2079024 - DNA, 15 bp, Homo sapiens
agcaggactagggtt

SEQ ID NO: 2079025 - DNA, 15 bp, Homo sapiens
gcaggactagggttt

SEQ ID NO: 2079026 - DNA, 15 bp, Homo sapiens
caggactagggtttc

SEQ ID NO: 2079027 - DNA, 15 bp, Homo sapiens
aggactagggtttca

SEQ ID NO: 2079028 - DNA, 15 bp, Homo sapiens
ggactagggtttcat

SEQ ID NO: 2079029 - DNA, 15 bp, Homo sapiens
gactagggtttcatt

SEQ ID NO: 2079030 - DNA, 15 bp, Homo sapiens
actagggtttcattt

SEQ ID NO: 2079031 - DNA, 15 bp, Homo sapiens
ctagggtttcattta

SEQ ID NO: 2079032 - DNA, 15 bp, Homo sapiens
tagggtttcatttaa

SEQ ID NO: 2079033 - DNA, 15 bp, Homo sapiens
agggtttcatttaat

SEQ ID NO: 2079034 - DNA, 15 bp, Homo sapiens
gggtttcatttaata

SEQ ID NO: 2079035 - DNA, 15 bp, Homo sapiens
ggtttcatttaatag

SEQ ID NO: 2079036 - DNA, 15 bp, Homo sapiens
gtttcatttaatagc

SEQ ID NO: 2079037 - DNA, 15 bp, Homo sapiens
tttcatttaatagcc

SEQ ID NO: 2079038 - DNA, 15 bp, Homo sapiens
ttcatttaatagcca

SEQ ID NO: 2079039 - DNA, 15 bp, Homo sapiens
tcatttaatagccag

SEQ ID NO: 2079040 - DNA, 15 bp, Homo sapiens
catttaatagccagg

SEQ ID NO: 2079041 - DNA, 15 bp, Homo sapiens
atttaatagccaggg

SEQ ID NO: 2079042 - DNA, 15 bp, Homo sapiens
tttaatagccagggg

SEQ ID NO: 2079043 - DNA, 15 bp, Homo sapiens
ttaatagccagggga

SEQ ID NO: 2079044 - DNA, 15 bp, Homo sapiens
taatagccaggggaa

SEQ ID NO: 2079045 - DNA, 15 bp, Homo sapiens
aatagccaggggaaa

SEQ ID NO: 2079046 - DNA, 15 bp, Homo sapiens
atagccaggggaaag

SEQ ID NO: 2079047 - DNA, 15 bp, Homo sapiens
tagccaggggaaagg

SEQ ID NO: 2079048 - DNA, 15 bp, Homo sapiens
agccaggggaaaggg

SEQ ID NO: 2079049 - DNA, 15 bp, Homo sapiens
gccaggggaaaggga

SEQ ID NO: 2079050 - DNA, 15 bp, Homo sapiens
ccaggggaaagggat

SEQ ID NO: 2079051 - DNA, 15 bp, Homo sapiens
caggggaaagggatt

SEQ ID NO: 2079052 - DNA, 15 bp, Homo sapiens
aggggaaagggattc

SEQ ID NO: 2079053 - DNA, 15 bp, Homo sapiens
ggggaaagggattct

SEQ ID NO: 2079054 - DNA, 15 bp, Homo sapiens
gggaaagggattctg

SEQ ID NO: 2079055 - DNA, 15 bp, Homo sapiens
ggaaagggattctgg

SEQ ID NO: 2079056 - DNA, 15 bp, Homo sapiens
gaaagggattctgga

SEQ ID NO: 2079057 - DNA, 15 bp, Homo sapiens
aaagggattctggaa

SEQ ID NO: 2079058 - DNA, 15 bp, Homo sapiens
aagggattctggaaa

SEQ ID NO: 2079059 - DNA, 15 bp, Homo sapiens
agggattctggaaat

SEQ ID NO: 2079060 - DNA, 15 bp, Homo sapiens
gggattctggaaatg

SEQ ID NO: 2079061 - DNA, 15 bp, Homo sapiens
ggattctggaaatgt

SEQ ID NO: 2079062 - DNA, 15 bp, Homo sapiens
gattctggaaatgtt

SEQ ID NO: 2079063 - DNA, 15 bp, Homo sapiens
attctggaaatgttt

SEQ ID NO: 2079064 - DNA, 15 bp, Homo sapiens
ttctggaaatgtttt

SEQ ID NO: 2079065 - DNA, 15 bp, Homo sapiens
tctggaaatgttttg

SEQ ID NO: 2079066 - DNA, 15 bp, Homo sapiens
ctggaaatgttttgt

SEQ ID NO: 2079067 - DNA, 15 bp, Homo sapiens
tggaaatgttttgtc

SEQ ID NO: 2079068 - DNA, 15 bp, Homo sapiens
ggaaatgttttgtct

SEQ ID NO: 2079069 - DNA, 15 bp, Homo sapiens
gaaatgttttgtctg

SEQ ID NO: 2079070 - DNA, 15 bp, Homo sapiens
aaatgttttgtctgt

SEQ ID NO: 2079071 - DNA, 15 bp, Homo sapiens
aatgttttgtctgtt

SEQ ID NO: 2079072 - DNA, 15 bp, Homo sapiens
atgttttgtctgtta

SEQ ID NO: 2079073 - DNA, 15 bp, Homo sapiens
tgttttgtctgttaa

SEQ ID NO: 2079074 - DNA, 15 bp, Homo sapiens
gttttgtctgttaac

SEQ ID NO: 2079075 - DNA, 15 bp, Homo sapiens
ttttgtctgttaacc

SEQ ID NO: 2079076 - DNA, 15 bp, Homo sapiens
tttgtctgttaacct

SEQ ID NO: 2079077 - DNA, 15 bp, Homo sapiens
ttgtctgttaacctt

SEQ ID NO: 2079078 - DNA, 15 bp, Homo sapiens
tgtctgttaaccttg

SEQ ID NO: 2079079 - DNA, 15 bp, Homo sapiens
gtctgttaaccttga

SEQ ID NO: 2079080 - DNA, 15 bp, Homo sapiens
tctgttaaccttgag

SEQ ID NO: 2079081 - DNA, 15 bp, Homo sapiens
ctgttaaccttgagt

SEQ ID NO: 2079082 - DNA, 15 bp, Homo sapiens
tgttaaccttgagtt

SEQ ID NO: 2079083 - DNA, 15 bp, Homo sapiens
gttaaccttgagttt

SEQ ID NO: 2079084 - DNA, 15 bp, Homo sapiens
ttaaccttgagtttc

SEQ ID NO: 2079085 - DNA, 15 bp, Homo sapiens
taaccttgagtttct

SEQ ID NO: 2079086 - DNA, 15 bp, Homo sapiens
aaccttgagtttctt

SEQ ID NO: 2079087 - DNA, 15 bp, Homo sapiens
accttgagtttcttt

SEQ ID NO: 2079088 - DNA, 15 bp, Homo sapiens
ccttgagtttctttt

SEQ ID NO: 2079089 - DNA, 15 bp, Homo sapiens
cttgagtttcttttc

SEQ ID NO: 2079090 - DNA, 15 bp, Homo sapiens
ttgagtttcttttcc

SEQ ID NO: 2079091 - DNA, 15 bp, Homo sapiens
tgagtttcttttcct

SEQ ID NO: 2079092 - DNA, 15 bp, Homo sapiens
gagtttcttttcctt

SEQ ID NO: 2079093 - DNA, 15 bp, Homo sapiens
agtttcttttccttc

SEQ ID NO: 2079094 - DNA, 15 bp, Homo sapiens
gtttcttttccttcc

SEQ ID NO: 2079095 - DNA, 15 bp, Homo sapiens
tttcttttccttcca

SEQ ID NO: 2079096 - DNA, 15 bp, Homo sapiens
ttcttttccttccac

SEQ ID NO: 2079097 - DNA, 15 bp, Homo sapiens
tcttttccttccact

SEQ ID NO: 2079098 - DNA, 15 bp, Homo sapiens
cttttccttccactc

SEQ ID NO: 2079099 - DNA, 15 bp, Homo sapiens
ttttccttccactca

SEQ ID NO: 2079100 - DNA, 15 bp, Homo sapiens
tttccttccactcag

SEQ ID NO: 2079101 - DNA, 15 bp, Homo sapiens
ttccttccactcaga

SEQ ID NO: 2079102 - DNA, 15 bp, Homo sapiens
tccttccactcagaa

SEQ ID NO: 2079103 - DNA, 15 bp, Homo sapiens
ccttccactcagaaa

SEQ ID NO: 2079104 - DNA, 15 bp, Homo sapiens
cttccactcagaaat

SEQ ID NO: 2079105 - DNA, 15 bp, Homo sapiens
ttccactcagaaatg

SEQ ID NO: 2079106 - DNA, 15 bp, Homo sapiens
tccactcagaaatgg

SEQ ID NO: 2079107 - DNA, 15 bp, Homo sapiens
ccactcagaaatggc

SEQ ID NO: 2079108 - DNA, 15 bp, Homo sapiens
actcagaaatggcac

SEQ ID NO: 2079109 - DNA, 15 bp, Homo sapiens
ctcagaaatggcacc

SEQ ID NO: 2079110 - DNA, 15 bp, Homo sapiens
tcagaaatggcacct

SEQ ID NO: 2079111 - DNA, 15 bp, Homo sapiens
cagaaatggcacctc

SEQ ID NO: 2079112 - DNA, 15 bp, Homo sapiens
agaaatggcacctcg

SEQ ID NO: 2079113 - DNA, 15 bp, Homo sapiens
gaaatggcacctcga

SEQ ID NO: 2079114 - DNA, 15 bp, Homo sapiens
aaatggcacctcgaa

SEQ ID NO: 2079115 - DNA, 15 bp, Homo sapiens
aatggcacctcgaaa

SEQ ID NO: 2079116 - DNA, 15 bp, Homo sapiens
atggcacctcgaaag

SEQ ID NO: 2079117 - DNA, 15 bp, Homo sapiens
tggcacctcgaaagg

SEQ ID NO: 2079118 - DNA, 15 bp, Homo sapiens
ggcacctcgaaaggg

SEQ ID NO: 2079119 - DNA, 15 bp, Homo sapiens
gcacctcgaaagggg

SEQ ID NO: 2079120 - DNA, 15 bp, Homo sapiens
cacctcgaaagggga

SEQ ID NO: 2079121 - DNA, 15 bp, Homo sapiens
acctcgaaaggggaa

SEQ ID NO: 2079122 - DNA, 15 bp, Homo sapiens
cctcgaaaggggaag

SEQ ID NO: 2079123 - DNA, 15 bp, Homo sapiens
ctcgaaaggggaagg

SEQ ID NO: 2079124 - DNA, 15 bp, Homo sapiens
tcgaaaggggaagga

SEQ ID NO: 2079125 - DNA, 15 bp, Homo sapiens
cgaaaggggaaggaa

SEQ ID NO: 2079126 - DNA, 15 bp, Homo sapiens
gaaaggggaaggaaa

SEQ ID NO: 2079127 - DNA, 15 bp, Homo sapiens
aaaggggaaggaaaa

SEQ ID NO: 2079128 - DNA, 15 bp, Homo sapiens
aaggggaaggaaaag

SEQ ID NO: 2079129 - DNA, 15 bp, Homo sapiens
aggggaaggaaaaga

SEQ ID NO: 2079130 - DNA, 15 bp, Homo sapiens
ggggaaggaaaagaa

SEQ ID NO: 2079131 - DNA, 15 bp, Homo sapiens
gggaaggaaaagaag

SEQ ID NO: 2079132 - DNA, 15 bp, Homo sapiens
ggaaggaaaagaagg

SEQ ID NO: 2079133 - DNA, 15 bp, Homo sapiens
gaaggaaaagaagga

SEQ ID NO: 2079134 - DNA, 15 bp, Homo sapiens
aaggaaaagaaggaa

SEQ ID NO: 2079135 - DNA, 15 bp, Homo sapiens
aggaaaagaaggaag

SEQ ID NO: 2079136 - DNA, 15 bp, Homo sapiens
ggaaaagaaggaaga

SEQ ID NO: 2079137 - DNA, 15 bp, Homo sapiens
gaaaagaaggaagaa

SEQ ID NO: 2079138 - DNA, 15 bp, Homo sapiens
aaaagaaggaagaac

SEQ ID NO: 2079139 - DNA, 15 bp, Homo sapiens
aaagaaggaagaaca

SEQ ID NO: 2079140 - DNA, 15 bp, Homo sapiens
aagaaggaagaacag

SEQ ID NO: 2079141 - DNA, 15 bp, Homo sapiens
agaaggaagaacagg

SEQ ID NO: 2079142 - DNA, 15 bp, Homo sapiens
gaaggaagaacaggt

SEQ ID NO: 2079143 - DNA, 15 bp, Homo sapiens
aaggaagaacaggtc

SEQ ID NO: 2079144 - DNA, 15 bp, Homo sapiens
aggaagaacaggtca

SEQ ID NO: 2079145 - DNA, 15 bp, Homo sapiens
ggaagaacaggtcat

SEQ ID NO: 2079146 - DNA, 15 bp, Homo sapiens
gaagaacaggtcatc

SEQ ID NO: 2079147 - DNA, 15 bp, Homo sapiens
aagaacaggtcatca

SEQ ID NO: 2079148 - DNA, 15 bp, Homo sapiens
agaacaggtcatcag

SEQ ID NO: 2079149 - DNA, 15 bp, Homo sapiens
gaacaggtcatcagc

SEQ ID NO: 2079150 - DNA, 15 bp, Homo sapiens
aacaggtcatcagcc

SEQ ID NO: 2079151 - DNA, 15 bp, Homo sapiens
acaggtcatcagcct

SEQ ID NO: 2079152 - DNA, 15 bp, Homo sapiens
caggtcatcagcctc

SEQ ID NO: 2079153 - DNA, 15 bp, Homo sapiens
aggtcatcagcctcg

SEQ ID NO: 2079154 - DNA, 15 bp, Homo sapiens
ggtcatcagcctcgg

SEQ ID NO: 2079155 - DNA, 15 bp, Homo sapiens
gtcatcagcctcgga

SEQ ID NO: 2079156 - DNA, 15 bp, Homo sapiens
tcatcagcctcggac

SEQ ID NO: 2079157 - DNA, 15 bp, Homo sapiens
catcagcctcggacc

SEQ ID NO: 2079158 - DNA, 15 bp, Homo sapiens
atcagcctcggacct

SEQ ID NO: 2079159 - DNA, 15 bp, Homo sapiens
tcagcctcggacctc

SEQ ID NO: 2079160 - DNA, 15 bp, Homo sapiens
cagcctcggacctca

SEQ ID NO: 2079161 - DNA, 15 bp, Homo sapiens
agcctcggacctcag

SEQ ID NO: 2079162 - DNA, 15 bp, Homo sapiens
gcctcggacctcagg

SEQ ID NO: 2079163 - DNA, 15 bp, Homo sapiens
cctcggacctcaggt

SEQ ID NO: 2079164 - DNA, 15 bp, Homo sapiens
ctcggacctcaggtg

SEQ ID NO: 2079165 - DNA, 15 bp, Homo sapiens
tcggacctcaggtgg

SEQ ID NO: 2079166 - DNA, 15 bp, Homo sapiens
cggacctcaggtggc

SEQ ID NO: 2079167 - DNA, 15 bp, Homo sapiens
ggacctcaggtggct

SEQ ID NO: 2079168 - DNA, 15 bp, Homo sapiens
gacctcaggtggctg

SEQ ID NO: 2079169 - DNA, 15 bp, Homo sapiens
acctcaggtggctga

SEQ ID NO: 2079170 - DNA, 15 bp, Homo sapiens
cctcaggtggctgaa

SEQ ID NO: 2079171 - DNA, 15 bp, Homo sapiens
ctcaggtggctgaag

SEQ ID NO: 2079172 - DNA, 15 bp, Homo sapiens
tcaggtggctgaagg

SEQ ID NO: 2079173 - DNA, 15 bp, Homo sapiens
caggtggctgaagga

SEQ ID NO: 2079174 - DNA, 15 bp, Homo sapiens
aggtggctgaaggag

SEQ ID NO: 2079175 - DNA, 15 bp, Homo sapiens
ggtggctgaaggaga

SEQ ID NO: 2079176 - DNA, 15 bp, Homo sapiens
gtggctgaaggagag

SEQ ID NO: 2079177 - DNA, 15 bp, Homo sapiens
tggctgaaggagaga

SEQ ID NO: 2079178 - DNA, 15 bp, Homo sapiens
ggctgaaggagagaa

SEQ ID NO: 2079179 - DNA, 15 bp, Homo sapiens
gctgaaggagagaat

SEQ ID NO: 2079180 - DNA, 15 bp, Homo sapiens
ctgaaggagagaatg

SEQ ID NO: 2079181 - DNA, 15 bp, Homo sapiens
tgaaggagagaatgt

SEQ ID NO: 2079182 - DNA, 15 bp, Homo sapiens
gaaggagagaatgta

SEQ ID NO: 2079183 - DNA, 15 bp, Homo sapiens
aaggagagaatgtat

SEQ ID NO: 2079184 - DNA, 15 bp, Homo sapiens
aggagagaatgtatt

SEQ ID NO: 2079185 - DNA, 15 bp, Homo sapiens
ggagagaatgtattt

SEQ ID NO: 2079186 - DNA, 15 bp, Homo sapiens
gagagaatgtatttg

SEQ ID NO: 2079187 - DNA, 15 bp, Homo sapiens
agagaatgtatttgg

SEQ ID NO: 2079188 - DNA, 15 bp, Homo sapiens
gagaatgtatttggt

SEQ ID NO: 2079189 - DNA, 15 bp, Homo sapiens
agaatgtatttggtg

SEQ ID NO: 2079190 - DNA, 15 bp, Homo sapiens
gaatgtatttggtgt

SEQ ID NO: 2079191 - DNA, 15 bp, Homo sapiens
aatgtatttggtgtc

SEQ ID NO: 2079192 - DNA, 15 bp, Homo sapiens
atgtatttggtgtct

SEQ ID NO: 2079193 - DNA, 15 bp, Homo sapiens
tgtatttggtgtctg

SEQ ID NO: 2079194 - DNA, 15 bp, Homo sapiens
gtatttggtgtctgc

SEQ ID NO: 2079195 - DNA, 15 bp, Homo sapiens
tatttggtgtctgcc

SEQ ID NO: 2079196 - DNA, 15 bp, Homo sapiens
atttggtgtctgcca

SEQ ID NO: 2079197 - DNA, 15 bp, Homo sapiens
tttggtgtctgccat

SEQ ID NO: 2079198 - DNA, 15 bp, Homo sapiens
ttggtgtctgccata

SEQ ID NO: 2079199 - DNA, 15 bp, Homo sapiens
tggtgtctgccatat

SEQ ID NO: 2079200 - DNA, 15 bp, Homo sapiens
ggtgtctgccatatc

SEQ ID NO: 2079201 - DNA, 15 bp, Homo sapiens
gtgtctgccatatct

SEQ ID NO: 2079202 - DNA, 15 bp, Homo sapiens
tgtctgccatatctt

SEQ ID NO: 2079203 - DNA, 15 bp, Homo sapiens
gtctgccatatcttt

SEQ ID NO: 2079204 - DNA, 15 bp, Homo sapiens
tctgccatatctttg

SEQ ID NO: 2079205 - DNA, 15 bp, Homo sapiens
ctgccatatctttgc

SEQ ID NO: 2079206 - DNA, 15 bp, Homo sapiens
tgccatatctttgca

SEQ ID NO: 2079207 - DNA, 15 bp, Homo sapiens
gccatatctttgcat

SEQ ID NO: 2079208 - DNA, 15 bp, Homo sapiens
ccatatctttgcatc

SEQ ID NO: 2079209 - DNA, 15 bp, Homo sapiens
catatctttgcatcc

SEQ ID NO: 2079210 - DNA, 15 bp, Homo sapiens
atatctttgcatcct

SEQ ID NO: 2079211 - DNA, 15 bp, Homo sapiens
tatctttgcatcctt

SEQ ID NO: 2079212 - DNA, 15 bp, Homo sapiens
atctttgcatccttc

SEQ ID NO: 2079213 - DNA, 15 bp, Homo sapiens
tctttgcatccttca

SEQ ID NO: 2079214 - DNA, 15 bp, Homo sapiens
ctttgcatccttcaa

SEQ ID NO: 2079215 - DNA, 15 bp, Homo sapiens
tttgcatccttcaat

SEQ ID NO: 2079216 - DNA, 15 bp, Homo sapiens
ttgcatccttcaatg

SEQ ID NO: 2079217 - DNA, 15 bp, Homo sapiens
tgcatccttcaatga

SEQ ID NO: 2079218 - DNA, 15 bp, Homo sapiens
gcatccttcaatgac

SEQ ID NO: 2079219 - DNA, 15 bp, Homo sapiens
catccttcaatgaca

SEQ ID NO: 2079220 - DNA, 15 bp, Homo sapiens
atccttcaatgacac

SEQ ID NO: 2079221 - DNA, 15 bp, Homo sapiens
tccttcaatgacact

SEQ ID NO: 2079222 - DNA, 15 bp, Homo sapiens
ccttcaatgacactt

SEQ ID NO: 2079223 - DNA, 15 bp, Homo sapiens
cttcaatgacacttt

SEQ ID NO: 2079224 - DNA, 15 bp, Homo sapiens
ttcaatgacactttt

SEQ ID NO: 2079225 - DNA, 15 bp, Homo sapiens
tcaatgacacttttg

SEQ ID NO: 2079226 - DNA, 15 bp, Homo sapiens
caatgacacttttgt

SEQ ID NO: 2079227 - DNA, 15 bp, Homo sapiens
aatgacacttttgtc

SEQ ID NO: 2079228 - DNA, 15 bp, Homo sapiens
atgacacttttgtcc

SEQ ID NO: 2079229 - DNA, 15 bp, Homo sapiens
tgacacttttgtcca

SEQ ID NO: 2079230 - DNA, 15 bp, Homo sapiens
gacacttttgtccat

SEQ ID NO: 2079231 - DNA, 15 bp, Homo sapiens
acacttttgtccatg

SEQ ID NO: 2079232 - DNA, 15 bp, Homo sapiens
cacttttgtccatgt

SEQ ID NO: 2079233 - DNA, 15 bp, Homo sapiens
acttttgtccatgtc

SEQ ID NO: 2079234 - DNA, 15 bp, Homo sapiens
cttttgtccatgtca

SEQ ID NO: 2079235 - DNA, 15 bp, Homo sapiens
ttttgtccatgtcac

SEQ ID NO: 2079236 - DNA, 15 bp, Homo sapiens
tttgtccatgtcact

SEQ ID NO: 2079237 - DNA, 15 bp, Homo sapiens
ttgtccatgtcactg

SEQ ID NO: 2079238 - DNA, 15 bp, Homo sapiens
tgtccatgtcactga

SEQ ID NO: 2079239 - DNA, 15 bp, Homo sapiens
gtccatgtcactgat

SEQ ID NO: 2079240 - DNA, 15 bp, Homo sapiens
tccatgtcactgatc

SEQ ID NO: 2079241 - DNA, 15 bp, Homo sapiens
ccatgtcactgatct

SEQ ID NO: 2079242 - DNA, 15 bp, Homo sapiens
catgtcactgatctt

SEQ ID NO: 2079243 - DNA, 15 bp, Homo sapiens
atgtcactgatcttt

SEQ ID NO: 2079244 - DNA, 15 bp, Homo sapiens
tgtcactgatctttc

SEQ ID NO: 2079245 - DNA, 15 bp, Homo sapiens
gtcactgatctttct

SEQ ID NO: 2079246 - DNA, 15 bp, Homo sapiens
tcactgatctttctg

SEQ ID NO: 2079247 - DNA, 15 bp, Homo sapiens
cactgatctttctgg

SEQ ID NO: 2079248 - DNA, 15 bp, Homo sapiens
actgatctttctggc

SEQ ID NO: 2079249 - DNA, 15 bp, Homo sapiens
ctgatctttctggca

SEQ ID NO: 2079250 - DNA, 15 bp, Homo sapiens
tgatctttctggcaa

SEQ ID NO: 2079251 - DNA, 15 bp, Homo sapiens
gatctttctggcaag

SEQ ID NO: 2079252 - DNA, 15 bp, Homo sapiens
atctttctggcaagt

SEQ ID NO: 2079253 - DNA, 15 bp, Homo sapiens
tctttctggcaagtg

SEQ ID NO: 2079254 - DNA, 15 bp, Homo sapiens
ctttctggcaagtga

SEQ ID NO: 2079255 - DNA, 15 bp, Homo sapiens
tttctggcaagtgag

SEQ ID NO: 2079256 - DNA, 15 bp, Homo sapiens
ttctggcaagtgagt

SEQ ID NO: 2079257 - DNA, 15 bp, Homo sapiens
tctggcaagtgagta

SEQ ID NO: 2079258 - DNA, 15 bp, Homo sapiens
ctggcaagtgagtac

SEQ ID NO: 2079259 - DNA, 15 bp, Homo sapiens
tggcaagtgagtacc

SEQ ID NO: 2079260 - DNA, 15 bp, Homo sapiens
ggcaagtgagtacct

SEQ ID NO: 2079261 - DNA, 15 bp, Homo sapiens
gcaagtgagtacctg

SEQ ID NO: 2079262 - DNA, 15 bp, Homo sapiens
caagtgagtacctgg

SEQ ID NO: 2079263 - DNA, 15 bp, Homo sapiens
aagtgagtacctggg

SEQ ID NO: 2079264 - DNA, 15 bp, Homo sapiens
agtgagtacctgggt

SEQ ID NO: 2079265 - DNA, 15 bp, Homo sapiens
gtgagtacctgggtg

SEQ ID NO: 2079266 - DNA, 15 bp, Homo sapiens
tgagtacctgggtgg

SEQ ID NO: 2079267 - DNA, 15 bp, Homo sapiens
gagtacctgggtgga

SEQ ID NO: 2079268 - DNA, 15 bp, Homo sapiens
agtacctgggtggag

SEQ ID NO: 2079269 - DNA, 15 bp, Homo sapiens
gtacctgggtggaga

SEQ ID NO: 2079270 - DNA, 15 bp, Homo sapiens
tacctgggtggagag

SEQ ID NO: 2079271 - DNA, 15 bp, Homo sapiens
acctgggtggagagg

SEQ ID NO: 2079272 - DNA, 15 bp, Homo sapiens
cctgggtggagaggc

SEQ ID NO: 2079273 - DNA, 15 bp, Homo sapiens
ctgggtggagaggca

SEQ ID NO: 2079274 - DNA, 15 bp, Homo sapiens
tgggtggagaggcat

SEQ ID NO: 2079275 - DNA, 15 bp, Homo sapiens
gggtggagaggcatc

SEQ ID NO: 2079276 - DNA, 15 bp, Homo sapiens
ggtggagaggcatcc

SEQ ID NO: 2079277 - DNA, 15 bp, Homo sapiens
gtggagaggcatcca

SEQ ID NO: 2079278 - DNA, 15 bp, Homo sapiens
tggagaggcatccag

SEQ ID NO: 2079279 - DNA, 15 bp, Homo sapiens
ggagaggcatccagc

SEQ ID NO: 2079280 - DNA, 15 bp, Homo sapiens
gagaggcatccagct

SEQ ID NO: 2079281 - DNA, 15 bp, Homo sapiens
agaggcatccagctg

SEQ ID NO: 2079282 - DNA, 15 bp, Homo sapiens
gaggcatccagctgg

SEQ ID NO: 2079283 - DNA, 15 bp, Homo sapiens
aggcatccagctggc

SEQ ID NO: 2079284 - DNA, 15 bp, Homo sapiens
ggcatccagctggca

SEQ ID NO: 2079285 - DNA, 15 bp, Homo sapiens
gcatccagctggcaa

SEQ ID NO: 2079286 - DNA, 15 bp, Homo sapiens
catccagctggcaaa

SEQ ID NO: 2079287 - DNA, 15 bp, Homo sapiens
atccagctggcaaaa

SEQ ID NO: 2079288 - DNA, 15 bp, Homo sapiens
tccagctggcaaaag

SEQ ID NO: 2079289 - DNA, 15 bp, Homo sapiens
ccagctggcaaaagg

SEQ ID NO: 2079290 - DNA, 15 bp, Homo sapiens
cagctggcaaaaggc

SEQ ID NO: 2079291 - DNA, 15 bp, Homo sapiens
agctggcaaaaggct

SEQ ID NO: 2079292 - DNA, 15 bp, Homo sapiens
gctggcaaaaggctg

SEQ ID NO: 2079293 - DNA, 15 bp, Homo sapiens
ctggcaaaaggctga

SEQ ID NO: 2079294 - DNA, 15 bp, Homo sapiens
tggcaaaaggctgag

SEQ ID NO: 2079295 - DNA, 15 bp, Homo sapiens
ggcaaaaggctgagg

SEQ ID NO: 2079296 - DNA, 15 bp, Homo sapiens
gcaaaaggctgagga

SEQ ID NO: 2079297 - DNA, 15 bp, Homo sapiens
caaaaggctgaggaa

SEQ ID NO: 2079298 - DNA, 15 bp, Homo sapiens
aaaaggctgaggaag

SEQ ID NO: 2079299 - DNA, 15 bp, Homo sapiens
aaaggctgaggaagg

SEQ ID NO: 2079300 - DNA, 15 bp, Homo sapiens
aaggctgaggaaggc

SEQ ID NO: 2079301 - DNA, 15 bp, Homo sapiens
aggctgaggaaggca

SEQ ID NO: 2079302 - DNA, 15 bp, Homo sapiens
ggctgaggaaggcaa

SEQ ID NO: 2079303 - DNA, 15 bp, Homo sapiens
gctgaggaaggcaat

SEQ ID NO: 2079304 - DNA, 15 bp, Homo sapiens
ctgaggaaggcaatg

SEQ ID NO: 2079305 - DNA, 15 bp, Homo sapiens
tgaggaaggcaatgg

SEQ ID NO: 2079306 - DNA, 15 bp, Homo sapiens
gaggaaggcaatggc

SEQ ID NO: 2079307 - DNA, 15 bp, Homo sapiens
aggaaggcaatggct

SEQ ID NO: 2079308 - DNA, 15 bp, Homo sapiens
ggaaggcaatggctg

SEQ ID NO: 2079309 - DNA, 15 bp, Homo sapiens
gaaggcaatggctgg

SEQ ID NO: 2079310 - DNA, 15 bp, Homo sapiens
aaggcaatggctggg

SEQ ID NO: 2079311 - DNA, 15 bp, Homo sapiens
aggcaatggctggga

SEQ ID NO: 2079312 - DNA, 15 bp, Homo sapiens
ggcaatggctgggac

SEQ ID NO: 2079313 - DNA, 15 bp, Homo sapiens
gcaatggctgggacg

SEQ ID NO: 2079314 - DNA, 15 bp, Homo sapiens
caatggctgggacgg

SEQ ID NO: 2079315 - DNA, 15 bp, Homo sapiens
aatggctgggacggg

SEQ ID NO: 2079316 - DNA, 15 bp, Homo sapiens
atggctgggacgggc

SEQ ID NO: 2079317 - DNA, 15 bp, Homo sapiens
tggctgggacgggct

SEQ ID NO: 2079318 - DNA, 15 bp, Homo sapiens
ggctgggacgggcta

SEQ ID NO: 2079319 - DNA, 15 bp, Homo sapiens
gctgggacgggctag

SEQ ID NO: 2079320 - DNA, 15 bp, Homo sapiens
ctgggacgggctagc

SEQ ID NO: 2079321 - DNA, 15 bp, Homo sapiens
tgggacgggctagca

SEQ ID NO: 2079322 - DNA, 15 bp, Homo sapiens
gggacgggctagcag

SEQ ID NO: 2079323 - DNA, 15 bp, Homo sapiens
ggacgggctagcagt

SEQ ID NO: 2079324 - DNA, 15 bp, Homo sapiens
gacgggctagcagtt

SEQ ID NO: 2079325 - DNA, 15 bp, Homo sapiens
acgggctagcagttc

SEQ ID NO: 2079326 - DNA, 15 bp, Homo sapiens
cgggctagcagttca

SEQ ID NO: 2079327 - DNA, 15 bp, Homo sapiens
gggctagcagttcag

SEQ ID NO: 2079328 - DNA, 15 bp, Homo sapiens
ggctagcagttcagg

SEQ ID NO: 2079329 - DNA, 15 bp, Homo sapiens
gctagcagttcaggg

SEQ ID NO: 2079330 - DNA, 15 bp, Homo sapiens
ctagcagttcagggg

SEQ ID NO: 2079331 - DNA, 15 bp, Homo sapiens
tagcagttcagggga

SEQ ID NO: 2079332 - DNA, 15 bp, Homo sapiens
agcagttcaggggat

SEQ ID NO: 2079333 - DNA, 15 bp, Homo sapiens
gcagttcaggggatt

SEQ ID NO: 2079334 - DNA, 15 bp, Homo sapiens
cagttcaggggattc

SEQ ID NO: 2079335 - DNA, 15 bp, Homo sapiens
agttcaggggattct

SEQ ID NO: 2079336 - DNA, 15 bp, Homo sapiens
gttcaggggattctc

SEQ ID NO: 2079337 - DNA, 15 bp, Homo sapiens
ttcaggggattctct

SEQ ID NO: 2079338 - DNA, 15 bp, Homo sapiens
tcaggggattctctc

SEQ ID NO: 2079339 - DNA, 15 bp, Homo sapiens
caggggattctctct

SEQ ID NO: 2079340 - DNA, 15 bp, Homo sapiens
aggggattctctcta

SEQ ID NO: 2079341 - DNA, 15 bp, Homo sapiens
ggggattctctctaa

SEQ ID NO: 2079342 - DNA, 15 bp, Homo sapiens
gggattctctctaaa

SEQ ID NO: 2079343 - DNA, 15 bp, Homo sapiens
ggattctctctaaag

SEQ ID NO: 2079344 - DNA, 15 bp, Homo sapiens
gattctctctaaaga

SEQ ID NO: 2079345 - DNA, 15 bp, Homo sapiens
attctctctaaagaa

SEQ ID NO: 2079346 - DNA, 15 bp, Homo sapiens
ttctctctaaagaaa

SEQ ID NO: 2079347 - DNA, 15 bp, Homo sapiens
tctctctaaagaaat

SEQ ID NO: 2079348 - DNA, 15 bp, Homo sapiens
ctctctaaagaaatg

SEQ ID NO: 2079349 - DNA, 15 bp, Homo sapiens
tctctaaagaaatgc

SEQ ID NO: 2079350 - DNA, 15 bp, Homo sapiens
ctctaaagaaatgct

SEQ ID NO: 2079351 - DNA, 15 bp, Homo sapiens
tctaaagaaatgctg

SEQ ID NO: 2079352 - DNA, 15 bp, Homo sapiens
ctaaagaaatgctgt

SEQ ID NO: 2079353 - DNA, 15 bp, Homo sapiens
taaagaaatgctgtt

SEQ ID NO: 2079354 - DNA, 15 bp, Homo sapiens
aaagaaatgctgttt

SEQ ID NO: 2079355 - DNA, 15 bp, Homo sapiens
aagaaatgctgtttt

SEQ ID NO: 2079356 - DNA, 15 bp, Homo sapiens
agaaatgctgttttg

SEQ ID NO: 2079357 - DNA, 15 bp, Homo sapiens
gaaatgctgttttgt

SEQ ID NO: 2079358 - DNA, 15 bp, Homo sapiens
aaatgctgttttgtc

SEQ ID NO: 2079359 - DNA, 15 bp, Homo sapiens
aatgctgttttgtcc

SEQ ID NO: 2079360 - DNA, 15 bp, Homo sapiens
atgctgttttgtcca

SEQ ID NO: 2079361 - DNA, 15 bp, Homo sapiens
tgctgttttgtccag

SEQ ID NO: 2079362 - DNA, 15 bp, Homo sapiens
gctgttttgtccagg

SEQ ID NO: 2079363 - DNA, 15 bp, Homo sapiens
ctgttttgtccaggt

SEQ ID NO: 2079364 - DNA, 15 bp, Homo sapiens
tgttttgtccaggta

SEQ ID NO: 2079365 - DNA, 15 bp, Homo sapiens
gttttgtccaggtaa

SEQ ID NO: 2079366 - DNA, 15 bp, Homo sapiens
ttttgtccaggtaag

SEQ ID NO: 2079367 - DNA, 15 bp, Homo sapiens
tttgtccaggtaaga

SEQ ID NO: 2079368 - DNA, 15 bp, Homo sapiens
ttgtccaggtaagaa

SEQ ID NO: 2079369 - DNA, 15 bp, Homo sapiens
tgtccaggtaagaaa

SEQ ID NO: 2079370 - DNA, 15 bp, Homo sapiens
gtccaggtaagaaaa

SEQ ID NO: 2079371 - DNA, 15 bp, Homo sapiens
tccaggtaagaaaat

SEQ ID NO: 2079372 - DNA, 15 bp, Homo sapiens
ccaggtaagaaaatg

SEQ ID NO: 2079373 - DNA, 15 bp, Homo sapiens
caggtaagaaaatgt

SEQ ID NO: 2079374 - DNA, 15 bp, Homo sapiens
aggtaagaaaatgtg

SEQ ID NO: 2079375 - DNA, 15 bp, Homo sapiens
ggtaagaaaatgtgc

SEQ ID NO: 2079376 - DNA, 15 bp, Homo sapiens
gtaagaaaatgtgct

SEQ ID NO: 2079377 - DNA, 15 bp, Homo sapiens
taagaaaatgtgctt

SEQ ID NO: 2079378 - DNA, 15 bp, Homo sapiens
aagaaaatgtgcttg

SEQ ID NO: 2079379 - DNA, 15 bp, Homo sapiens
agaaaatgtgcttgt

SEQ ID NO: 2079380 - DNA, 15 bp, Homo sapiens
gaaaatgtgcttgtc

SEQ ID NO: 2079381 - DNA, 15 bp, Homo sapiens
aaaatgtgcttgtcc

SEQ ID NO: 2079382 - DNA, 15 bp, Homo sapiens
aaatgtgcttgtcca

SEQ ID NO: 2079383 - DNA, 15 bp, Homo sapiens
aatgtgcttgtccat

SEQ ID NO: 2079384 - DNA, 15 bp, Homo sapiens
atgtgcttgtccatt

SEQ ID NO: 2079385 - DNA, 15 bp, Homo sapiens
tgtgcttgtccattt

SEQ ID NO: 2079386 - DNA, 15 bp, Homo sapiens
gtgcttgtccattta

SEQ ID NO: 2079387 - DNA, 15 bp, Homo sapiens
tgcttgtccatttag

SEQ ID NO: 2079388 - DNA, 15 bp, Homo sapiens
gcttgtccatttagc

SEQ ID NO: 2079389 - DNA, 15 bp, Homo sapiens
cttgtccatttagcc

SEQ ID NO: 2079390 - DNA, 15 bp, Homo sapiens
ttgtccatttagccc

SEQ ID NO: 2079391 - DNA, 15 bp, Homo sapiens
tgtccatttagccca

SEQ ID NO: 2079392 - DNA, 15 bp, Homo sapiens
gtccatttagcccac

SEQ ID NO: 2079393 - DNA, 15 bp, Homo sapiens
tccatttagcccaca

SEQ ID NO: 2079394 - DNA, 15 bp, Homo sapiens
ccatttagcccacaa

SEQ ID NO: 2079395 - DNA, 15 bp, Homo sapiens
catttagcccacaaa

SEQ ID NO: 2079396 - DNA, 15 bp, Homo sapiens
atttagcccacaaat

SEQ ID NO: 2079397 - DNA, 15 bp, Homo sapiens
tttagcccacaaata

SEQ ID NO: 2079398 - DNA, 15 bp, Homo sapiens
ttagcccacaaatat

SEQ ID NO: 2079399 - DNA, 15 bp, Homo sapiens
tagcccacaaatatt

SEQ ID NO: 2079400 - DNA, 15 bp, Homo sapiens
agcccacaaatattg

SEQ ID NO: 2079401 - DNA, 15 bp, Homo sapiens
gcccacaaatattgt

SEQ ID NO: 2079402 - DNA, 15 bp, Homo sapiens
cccacaaatattgtg

SEQ ID NO: 2079403 - DNA, 15 bp, Homo sapiens
ccacaaatattgtga

SEQ ID NO: 2079404 - DNA, 15 bp, Homo sapiens
cacaaatattgtgat

SEQ ID NO: 2079405 - DNA, 15 bp, Homo sapiens
acaaatattgtgatt

SEQ ID NO: 2079406 - DNA, 15 bp, Homo sapiens
caaatattgtgattt

SEQ ID NO: 2079407 - DNA, 15 bp, Homo sapiens
aaatattgtgatttc

SEQ ID NO: 2079408 - DNA, 15 bp, Homo sapiens
aatattgtgatttcc

SEQ ID NO: 2079409 - DNA, 15 bp, Homo sapiens
atattgtgatttccc

SEQ ID NO: 2079410 - DNA, 15 bp, Homo sapiens
tattgtgatttccca

SEQ ID NO: 2079411 - DNA, 15 bp, Homo sapiens
attgtgatttcccag

SEQ ID NO: 2079412 - DNA, 15 bp, Homo sapiens
ttgtgatttcccagg

SEQ ID NO: 2079413 - DNA, 15 bp, Homo sapiens
tgtgatttcccaggg

SEQ ID NO: 2079414 - DNA, 15 bp, Homo sapiens
gtgatttcccagggg

SEQ ID NO: 2079415 - DNA, 15 bp, Homo sapiens
tgatttcccaggggt

SEQ ID NO: 2079416 - DNA, 15 bp, Homo sapiens
gatttcccaggggtt

SEQ ID NO: 2079417 - DNA, 15 bp, Homo sapiens
atttcccaggggtta

SEQ ID NO: 2079418 - DNA, 15 bp, Homo sapiens
tttcccaggggttac

SEQ ID NO: 2079419 - DNA, 15 bp, Homo sapiens
ttcccaggggttaca

SEQ ID NO: 2079420 - DNA, 15 bp, Homo sapiens
tcccaggggttacaa

SEQ ID NO: 2079421 - DNA, 15 bp, Homo sapiens
cccaggggttacaag

SEQ ID NO: 2079422 - DNA, 15 bp, Homo sapiens
ccaggggttacaaga

SEQ ID NO: 2079423 - DNA, 15 bp, Homo sapiens
caggggttacaagag

SEQ ID NO: 2079424 - DNA, 15 bp, Homo sapiens
aggggttacaagaga

SEQ ID NO: 2079425 - DNA, 15 bp, Homo sapiens
ggggttacaagagag

SEQ ID NO: 2079426 - DNA, 15 bp, Homo sapiens
gggttacaagagagg

SEQ ID NO: 2079427 - DNA, 15 bp, Homo sapiens
ggttacaagagagga

SEQ ID NO: 2079428 - DNA, 15 bp, Homo sapiens
gttacaagagaggag

SEQ ID NO: 2079429 - DNA, 15 bp, Homo sapiens
ttacaagagaggaga

SEQ ID NO: 2079430 - DNA, 15 bp, Homo sapiens
tacaagagaggagac

SEQ ID NO: 2079431 - DNA, 15 bp, Homo sapiens
acaagagaggagaca

SEQ ID NO: 2079432 - DNA, 15 bp, Homo sapiens
caagagaggagacac

SEQ ID NO: 2079433 - DNA, 15 bp, Homo sapiens
aagagaggagacaca

SEQ ID NO: 2079434 - DNA, 15 bp, Homo sapiens
agagaggagacacat

SEQ ID NO: 2079435 - DNA, 15 bp, Homo sapiens
gagaggagacacatt

SEQ ID NO: 2079436 - DNA, 15 bp, Homo sapiens
agaggagacacattc

SEQ ID NO: 2079437 - DNA, 15 bp, Homo sapiens
gaggagacacattct

SEQ ID NO: 2079438 - DNA, 15 bp, Homo sapiens
aggagacacattctt

SEQ ID NO: 2079439 - DNA, 15 bp, Homo sapiens
ggagacacattcttc

SEQ ID NO: 2079440 - DNA, 15 bp, Homo sapiens
gagacacattcttcg

SEQ ID NO: 2079441 - DNA, 15 bp, Homo sapiens
agacacattcttcgt

SEQ ID NO: 2079442 - DNA, 15 bp, Homo sapiens
gacacattcttcgtc

SEQ ID NO: 2079443 - DNA, 15 bp, Homo sapiens
acacattcttcgtcc

SEQ ID NO: 2079444 - DNA, 15 bp, Homo sapiens
cacattcttcgtcct

SEQ ID NO: 2079445 - DNA, 15 bp, Homo sapiens
acattcttcgtcctt

SEQ ID NO: 2079446 - DNA, 15 bp, Homo sapiens
cattcttcgtcctta

SEQ ID NO: 2079447 - DNA, 15 bp, Homo sapiens
attcttcgtccttac

SEQ ID NO: 2079448 - DNA, 15 bp, Homo sapiens
ttcttcgtccttaca

SEQ ID NO: 2079449 - DNA, 15 bp, Homo sapiens
tcttcgtccttacag

SEQ ID NO: 2079450 - DNA, 15 bp, Homo sapiens
cttcgtccttacagc

SEQ ID NO: 2079451 - DNA, 15 bp, Homo sapiens
ttcgtccttacagcg

SEQ ID NO: 2079452 - DNA, 15 bp, Homo sapiens
tcgtccttacagcgt

SEQ ID NO: 2079453 - DNA, 15 bp, Homo sapiens
cgtccttacagcgtg

SEQ ID NO: 2079454 - DNA, 15 bp, Homo sapiens
gtccttacagcgtga

SEQ ID NO: 2079455 - DNA, 15 bp, Homo sapiens
tccttacagcgtgat

SEQ ID NO: 2079456 - DNA, 15 bp, Homo sapiens
ccttacagcgtgatg

SEQ ID NO: 2079457 - DNA, 15 bp, Homo sapiens
cttacagcgtgatgg

SEQ ID NO: 2079458 - DNA, 15 bp, Homo sapiens
ttacagcgtgatggt

SEQ ID NO: 2079459 - DNA, 15 bp, Homo sapiens
tacagcgtgatggtc

SEQ ID NO: 2079460 - DNA, 15 bp, Homo sapiens
acagcgtgatggtca

SEQ ID NO: 2079461 - DNA, 15 bp, Homo sapiens
cagcgtgatggtcat

SEQ ID NO: 2079462 - DNA, 15 bp, Homo sapiens
agcgtgatggtcatt

SEQ ID NO: 2079463 - DNA, 15 bp, Homo sapiens
gcgtgatggtcattg

SEQ ID NO: 2079464 - DNA, 15 bp, Homo sapiens
cgtgatggtcattga

SEQ ID NO: 2079465 - DNA, 15 bp, Homo sapiens
gtgatggtcattgaa

SEQ ID NO: 2079466 - DNA, 15 bp, Homo sapiens
tgatggtcattgaat

SEQ ID NO: 2079467 - DNA, 15 bp, Homo sapiens
gatggtcattgaatc

SEQ ID NO: 2079468 - DNA, 15 bp, Homo sapiens
atggtcattgaatcc

SEQ ID NO: 2079469 - DNA, 15 bp, Homo sapiens
tggtcattgaatcct

SEQ ID NO: 2079470 - DNA, 15 bp, Homo sapiens
ggtcattgaatcctt

SEQ ID NO: 2079471 - DNA, 15 bp, Homo sapiens
gtcattgaatccttg

SEQ ID NO: 2079472 - DNA, 15 bp, Homo sapiens
tcattgaatccttgg

SEQ ID NO: 2079473 - DNA, 15 bp, Homo sapiens
cattgaatccttggt

SEQ ID NO: 2079474 - DNA, 15 bp, Homo sapiens
attgaatccttggtt

SEQ ID NO: 2079475 - DNA, 15 bp, Homo sapiens
ttgaatccttggttt

SEQ ID NO: 2079476 - DNA, 15 bp, Homo sapiens
tgaatccttggtttc

SEQ ID NO: 2079477 - DNA, 15 bp, Homo sapiens
gaatccttggtttct

SEQ ID NO: 2079478 - DNA, 15 bp, Homo sapiens
aatccttggtttctt

SEQ ID NO: 2079479 - DNA, 15 bp, Homo sapiens
atccttggtttcttg

SEQ ID NO: 2079480 - DNA, 15 bp, Homo sapiens
tccttggtttcttgg

SEQ ID NO: 2079481 - DNA, 15 bp, Homo sapiens
ccttggtttcttggg

SEQ ID NO: 2079482 - DNA, 15 bp, Homo sapiens
cttggtttcttggga

SEQ ID NO: 2079483 - DNA, 15 bp, Homo sapiens
ttggtttcttgggaa

SEQ ID NO: 2079484 - DNA, 15 bp, Homo sapiens
tggtttcttgggaat

SEQ ID NO: 2079485 - DNA, 15 bp, Homo sapiens
ggtttcttgggaatt

SEQ ID NO: 2079486 - DNA, 15 bp, Homo sapiens
gtttcttgggaatta

SEQ ID NO: 2079487 - DNA, 15 bp, Homo sapiens
tttcttgggaattat

SEQ ID NO: 2079488 - DNA, 15 bp, Homo sapiens
ttcttgggaattatc

SEQ ID NO: 2079489 - DNA, 15 bp, Homo sapiens
tcttgggaattatct

SEQ ID NO: 2079490 - DNA, 15 bp, Homo sapiens
cttgggaattatctt

SEQ ID NO: 2079491 - DNA, 15 bp, Homo sapiens
ttgggaattatcttc

SEQ ID NO: 2079492 - DNA, 15 bp, Homo sapiens
tgggaattatcttct

SEQ ID NO: 2079493 - DNA, 15 bp, Homo sapiens
gggaattatcttctt

SEQ ID NO: 2079494 - DNA, 15 bp, Homo sapiens
ggaattatcttcttt

SEQ ID NO: 2079495 - DNA, 15 bp, Homo sapiens
gaattatcttctttc

SEQ ID NO: 2079496 - DNA, 15 bp, Homo sapiens
aattatcttctttcc

SEQ ID NO: 2079497 - DNA, 15 bp, Homo sapiens
attatcttctttccc

SEQ ID NO: 2079498 - DNA, 15 bp, Homo sapiens
ttatcttctttccct

SEQ ID NO: 2079499 - DNA, 15 bp, Homo sapiens
tatcttctttcccta

SEQ ID NO: 2079500 - DNA, 15 bp, Homo sapiens
atcttctttccctag

SEQ ID NO: 2079501 - DNA, 15 bp, Homo sapiens
tcttctttccctagt

SEQ ID NO: 2079502 - DNA, 15 bp, Homo sapiens
cttctttccctagtt

SEQ ID NO: 2079503 - DNA, 15 bp, Homo sapiens
ttctttccctagttc

SEQ ID NO: 2079504 - DNA, 15 bp, Homo sapiens
tctttccctagttcc

SEQ ID NO: 2079505 - DNA, 15 bp, Homo sapiens
ctttccctagttccc

SEQ ID NO: 2079506 - DNA, 15 bp, Homo sapiens
tttccctagttccct

SEQ ID NO: 2079507 - DNA, 15 bp, Homo sapiens
ttccctagttccctt

SEQ ID NO: 2079508 - DNA, 15 bp, Homo sapiens
tccctagttcccttt

SEQ ID NO: 2079509 - DNA, 15 bp, Homo sapiens
ccctagttccctttg

SEQ ID NO: 2079510 - DNA, 15 bp, Homo sapiens
cctagttccctttgc

SEQ ID NO: 2079511 - DNA, 15 bp, Homo sapiens
ctagttccctttgca

SEQ ID NO: 2079512 - DNA, 15 bp, Homo sapiens
tagttccctttgcag

SEQ ID NO: 2079513 - DNA, 15 bp, Homo sapiens
agttccctttgcagg

SEQ ID NO: 2079514 - DNA, 15 bp, Homo sapiens
gttccctttgcagga

SEQ ID NO: 2079515 - DNA, 15 bp, Homo sapiens
ttccctttgcaggag

SEQ ID NO: 2079516 - DNA, 15 bp, Homo sapiens
tccctttgcaggagc

SEQ ID NO: 2079517 - DNA, 15 bp, Homo sapiens
ccctttgcaggagca

SEQ ID NO: 2079518 - DNA, 15 bp, Homo sapiens
cctttgcaggagcag

SEQ ID NO: 2079519 - DNA, 15 bp, Homo sapiens
ctttgcaggagcagc

SEQ ID NO: 2079520 - DNA, 15 bp, Homo sapiens
tttgcaggagcagca

SEQ ID NO: 2079521 - DNA, 15 bp, Homo sapiens
ttgcaggagcagcag

SEQ ID NO: 2079522 - DNA, 15 bp, Homo sapiens
tgcaggagcagcagt

SEQ ID NO: 2079523 - DNA, 15 bp, Homo sapiens
gcaggagcagcagtg

SEQ ID NO: 2079524 - DNA, 15 bp, Homo sapiens
caggagcagcagtgg

SEQ ID NO: 2079525 - DNA, 15 bp, Homo sapiens
aggagcagcagtgga

SEQ ID NO: 2079526 - DNA, 15 bp, Homo sapiens
ggagcagcagtggac

SEQ ID NO: 2079527 - DNA, 15 bp, Homo sapiens
gagcagcagtggact

SEQ ID NO: 2079528 - DNA, 15 bp, Homo sapiens
agcagcagtggactg

SEQ ID NO: 2079529 - DNA, 15 bp, Homo sapiens
gcagcagtggactgc

SEQ ID NO: 2079530 - DNA, 15 bp, Homo sapiens
cagcagtggactgca

SEQ ID NO: 2079531 - DNA, 15 bp, Homo sapiens
agcagtggactgcaa

SEQ ID NO: 2079532 - DNA, 15 bp, Homo sapiens
gcagtggactgcaag

SEQ ID NO: 2079533 - DNA, 15 bp, Homo sapiens
cagtggactgcaagt

SEQ ID NO: 2079534 - DNA, 15 bp, Homo sapiens
agtggactgcaagtg

SEQ ID NO: 2079535 - DNA, 15 bp, Homo sapiens
gtggactgcaagtgg

SEQ ID NO: 2079536 - DNA, 15 bp, Homo sapiens
tggactgcaagtggg

SEQ ID NO: 2079537 - DNA, 15 bp, Homo sapiens
ggactgcaagtgggc

SEQ ID NO: 2079538 - DNA, 15 bp, Homo sapiens
gactgcaagtgggct

SEQ ID NO: 2079539 - DNA, 15 bp, Homo sapiens
actgcaagtgggctc

SEQ ID NO: 2079540 - DNA, 15 bp, Homo sapiens
ctgcaagtgggctct

SEQ ID NO: 2079541 - DNA, 15 bp, Homo sapiens
tgcaagtgggctctg

SEQ ID NO: 2079542 - DNA, 15 bp, Homo sapiens
gcaagtgggctctgg

SEQ ID NO: 2079543 - DNA, 15 bp, Homo sapiens
caagtgggctctggg

SEQ ID NO: 2079544 - DNA, 15 bp, Homo sapiens
aagtgggctctgggt

SEQ ID NO: 2079545 - DNA, 15 bp, Homo sapiens
agtgggctctgggtg

SEQ ID NO: 2079546 - DNA, 15 bp, Homo sapiens
gtgggctctgggtgc

SEQ ID NO: 2079547 - DNA, 15 bp, Homo sapiens
tgggctctgggtgcg

SEQ ID NO: 2079548 - DNA, 15 bp, Homo sapiens
gggctctgggtgcgg

SEQ ID NO: 2079549 - DNA, 15 bp, Homo sapiens
ggctctgggtgcggg

SEQ ID NO: 2079550 - DNA, 15 bp, Homo sapiens
gctctgggtgcgggt

SEQ ID NO: 2079551 - DNA, 15 bp, Homo sapiens
ctctgggtgcgggtt

SEQ ID NO: 2079552 - DNA, 15 bp, Homo sapiens
tctgggtgcgggttc

SEQ ID NO: 2079553 - DNA, 15 bp, Homo sapiens
ctgggtgcgggttcg

SEQ ID NO: 2079554 - DNA, 15 bp, Homo sapiens
tgggtgcgggttcga

SEQ ID NO: 2079555 - DNA, 15 bp, Homo sapiens
gggtgcgggttcgac

SEQ ID NO: 2079556 - DNA, 15 bp, Homo sapiens
ggtgcgggttcgacg

SEQ ID NO: 2079557 - DNA, 15 bp, Homo sapiens
gtgcgggttcgacgg

SEQ ID NO: 2079558 - DNA, 15 bp, Homo sapiens
tgcgggttcgacggc

SEQ ID NO: 2079559 - DNA, 15 bp, Homo sapiens
gcgggttcgacggcc

SEQ ID NO: 2079560 - DNA, 15 bp, Homo sapiens
cgggttcgacggcca

SEQ ID NO: 2079561 - DNA, 15 bp, Homo sapiens
gggttcgacggccat

SEQ ID NO: 2079562 - DNA, 15 bp, Homo sapiens
ggttcgacggccatt

SEQ ID NO: 2079563 - DNA, 15 bp, Homo sapiens
gttcgacggccattt

SEQ ID NO: 2079564 - DNA, 15 bp, Homo sapiens
ttcgacggccattta

SEQ ID NO: 2079565 - DNA, 15 bp, Homo sapiens
tcgacggccatttag

SEQ ID NO: 2079566 - DNA, 15 bp, Homo sapiens
cgacggccatttagc

SEQ ID NO: 2079567 - DNA, 15 bp, Homo sapiens
gacggccatttagca

SEQ ID NO: 2079568 - DNA, 15 bp, Homo sapiens
acggccatttagcaa

SEQ ID NO: 2079569 - DNA, 15 bp, Homo sapiens
cggccatttagcaag

SEQ ID NO: 2079570 - DNA, 15 bp, Homo sapiens
ggccatttagcaagt

SEQ ID NO: 2079571 - DNA, 15 bp, Homo sapiens
gccatttagcaagtt

SEQ ID NO: 2079572 - DNA, 15 bp, Homo sapiens
ccatttagcaagttg

SEQ ID NO: 2079573 - DNA, 15 bp, Homo sapiens
catttagcaagttgt

SEQ ID NO: 2079574 - DNA, 15 bp, Homo sapiens
atttagcaagttgtg

SEQ ID NO: 2079575 - DNA, 15 bp, Homo sapiens
tttagcaagttgtga

SEQ ID NO: 2079576 - DNA, 15 bp, Homo sapiens
ttagcaagttgtgac

SEQ ID NO: 2079577 - DNA, 15 bp, Homo sapiens
tagcaagttgtgact

SEQ ID NO: 2079578 - DNA, 15 bp, Homo sapiens
agcaagttgtgactt

SEQ ID NO: 2079579 - DNA, 15 bp, Homo sapiens
gcaagttgtgacttg

SEQ ID NO: 2079580 - DNA, 15 bp, Homo sapiens
caagttgtgacttgt

SEQ ID NO: 2079581 - DNA, 15 bp, Homo sapiens
aagttgtgacttgtg

SEQ ID NO: 2079582 - DNA, 15 bp, Homo sapiens
agttgtgacttgtgt

SEQ ID NO: 2079583 - DNA, 15 bp, Homo sapiens
gttgtgacttgtgtg

SEQ ID NO: 2079584 - DNA, 15 bp, Homo sapiens
ttgtgacttgtgtga

SEQ ID NO: 2079585 - DNA, 15 bp, Homo sapiens
tgtgacttgtgtgaa

SEQ ID NO: 2079586 - DNA, 15 bp, Homo sapiens
gtgacttgtgtgaaa

SEQ ID NO: 2079587 - DNA, 15 bp, Homo sapiens
tgacttgtgtgaaat

SEQ ID NO: 2079588 - DNA, 15 bp, Homo sapiens
gacttgtgtgaaatc

SEQ ID NO: 2079589 - DNA, 15 bp, Homo sapiens
acttgtgtgaaatca

SEQ ID NO: 2079590 - DNA, 15 bp, Homo sapiens
cttgtgtgaaatcac

SEQ ID NO: 2079591 - DNA, 15 bp, Homo sapiens
ttgtgtgaaatcact

SEQ ID NO: 2079592 - DNA, 15 bp, Homo sapiens
tgtgtgaaatcactc

SEQ ID NO: 2079593 - DNA, 15 bp, Homo sapiens
gtgtgaaatcactca

SEQ ID NO: 2079594 - DNA, 15 bp, Homo sapiens
tgtgaaatcactcag

SEQ ID NO: 2079595 - DNA, 15 bp, Homo sapiens
gtgaaatcactcaga

SEQ ID NO: 2079596 - DNA, 15 bp, Homo sapiens
tgaaatcactcagat

SEQ ID NO: 2079597 - DNA, 15 bp, Homo sapiens
gaaatcactcagatt

SEQ ID NO: 2079598 - DNA, 15 bp, Homo sapiens
aaatcactcagattc

SEQ ID NO: 2079599 - DNA, 15 bp, Homo sapiens
aatcactcagattct

SEQ ID NO: 2079600 - DNA, 15 bp, Homo sapiens
atcactcagattctg

SEQ ID NO: 2079601 - DNA, 15 bp, Homo sapiens
tcactcagattctga

SEQ ID NO: 2079602 - DNA, 15 bp, Homo sapiens
cactcagattctgag

SEQ ID NO: 2079603 - DNA, 15 bp, Homo sapiens
actcagattctgagt

SEQ ID NO: 2079604 - DNA, 15 bp, Homo sapiens
ctcagattctgagtt

SEQ ID NO: 2079605 - DNA, 15 bp, Homo sapiens
tcagattctgagttt

SEQ ID NO: 2079606 - DNA, 15 bp, Homo sapiens
cagattctgagtttt

SEQ ID NO: 2079607 - DNA, 15 bp, Homo sapiens
agattctgagttttg

SEQ ID NO: 2079608 - DNA, 15 bp, Homo sapiens
gattctgagttttgg

SEQ ID NO: 2079609 - DNA, 15 bp, Homo sapiens
attctgagttttggt

SEQ ID NO: 2079610 - DNA, 15 bp, Homo sapiens
ttctgagttttggtt

SEQ ID NO: 2079611 - DNA, 15 bp, Homo sapiens
tctgagttttggttt

SEQ ID NO: 2079612 - DNA, 15 bp, Homo sapiens
ctgagttttggtttc

SEQ ID NO: 2079613 - DNA, 15 bp, Homo sapiens
tgagttttggtttcc

SEQ ID NO: 2079614 - DNA, 15 bp, Homo sapiens
gagttttggtttcct

SEQ ID NO: 2079615 - DNA, 15 bp, Homo sapiens
agttttggtttcctc

SEQ ID NO: 2079616 - DNA, 15 bp, Homo sapiens
gttttggtttcctca

SEQ ID NO: 2079617 - DNA, 15 bp, Homo sapiens
ttttggtttcctcat

SEQ ID NO: 2079618 - DNA, 15 bp, Homo sapiens
tttggtttcctcata

SEQ ID NO: 2079619 - DNA, 15 bp, Homo sapiens
ttggtttcctcatat

SEQ ID NO: 2079620 - DNA, 15 bp, Homo sapiens
tggtttcctcatatg

SEQ ID NO: 2079621 - DNA, 15 bp, Homo sapiens
ggtttcctcatatgt

SEQ ID NO: 2079622 - DNA, 15 bp, Homo sapiens
tcctcatatgtaaaa

SEQ ID NO: 2079623 - DNA, 15 bp, Homo sapiens
cctcatatgtaaaat

SEQ ID NO: 2079624 - DNA, 15 bp, Homo sapiens
ctcatatgtaaaatt

SEQ ID NO: 2079625 - DNA, 15 bp, Homo sapiens
tcatatgtaaaatta

SEQ ID NO: 2079626 - DNA, 15 bp, Homo sapiens
catatgtaaaattag

SEQ ID NO: 2079627 - DNA, 15 bp, Homo sapiens
atatgtaaaattagg

SEQ ID NO: 2079628 - DNA, 15 bp, Homo sapiens
tatgtaaaattagga

SEQ ID NO: 2079629 - DNA, 15 bp, Homo sapiens
atgtaaaattaggac

SEQ ID NO: 2079630 - DNA, 15 bp, Homo sapiens
tgtaaaattaggaca

SEQ ID NO: 2079631 - DNA, 15 bp, Homo sapiens
gtaaaattaggacag

SEQ ID NO: 2079632 - DNA, 15 bp, Homo sapiens
taaaattaggacagt

SEQ ID NO: 2079633 - DNA, 15 bp, Homo sapiens
aaaattaggacagta

SEQ ID NO: 2079634 - DNA, 15 bp, Homo sapiens
aaattaggacagtaa

SEQ ID NO: 2079635 - DNA, 15 bp, Homo sapiens
aattaggacagtaat

SEQ ID NO: 2079636 - DNA, 15 bp, Homo sapiens
attaggacagtaatg

SEQ ID NO: 2079637 - DNA, 15 bp, Homo sapiens
ttaggacagtaatgt

SEQ ID NO: 2079638 - DNA, 15 bp, Homo sapiens
taggacagtaatgtc

SEQ ID NO: 2079639 - DNA, 15 bp, Homo sapiens
aggacagtaatgtct

SEQ ID NO: 2079640 - DNA, 15 bp, Homo sapiens
ggacagtaatgtcta

SEQ ID NO: 2079641 - DNA, 15 bp, Homo sapiens
gacagtaatgtctac

SEQ ID NO: 2079642 - DNA, 15 bp, Homo sapiens
acagtaatgtctacc

SEQ ID NO: 2079643 - DNA, 15 bp, Homo sapiens
cagtaatgtctacct

SEQ ID NO: 2079644 - DNA, 15 bp, Homo sapiens
agtaatgtctacctt

SEQ ID NO: 2079645 - DNA, 15 bp, Homo sapiens
gtaatgtctaccttg

SEQ ID NO: 2079646 - DNA, 15 bp, Homo sapiens
taatgtctaccttgt

SEQ ID NO: 2079647 - DNA, 15 bp, Homo sapiens
aatgtctaccttgtg

SEQ ID NO: 2079648 - DNA, 15 bp, Homo sapiens
atgtctaccttgtgg

SEQ ID NO: 2079649 - DNA, 15 bp, Homo sapiens
tgtctaccttgtgga

SEQ ID NO: 2079650 - DNA, 15 bp, Homo sapiens
gtctaccttgtggag

SEQ ID NO: 2079651 - DNA, 15 bp, Homo sapiens
tctaccttgtggagt

SEQ ID NO: 2079652 - DNA, 15 bp, Homo sapiens
ctaccttgtggagta

SEQ ID NO: 2079653 - DNA, 15 bp, Homo sapiens
taccttgtggagtaa

SEQ ID NO: 2079654 - DNA, 15 bp, Homo sapiens
accttgtggagtaat

SEQ ID NO: 2079655 - DNA, 15 bp, Homo sapiens
ccttgtggagtaatg

SEQ ID NO: 2079656 - DNA, 15 bp, Homo sapiens
cttgtggagtaatgg

SEQ ID NO: 2079657 - DNA, 15 bp, Homo sapiens
ttgtggagtaatggt

SEQ ID NO: 2079658 - DNA, 15 bp, Homo sapiens
tgtggagtaatggta

SEQ ID NO: 2079659 - DNA, 15 bp, Homo sapiens
gtggagtaatggtaa

SEQ ID NO: 2079660 - DNA, 15 bp, Homo sapiens
tggagtaatggtaag

SEQ ID NO: 2079661 - DNA, 15 bp, Homo sapiens
ggagtaatggtaagg

SEQ ID NO: 2079662 - DNA, 15 bp, Homo sapiens
gagtaatggtaagga

SEQ ID NO: 2079663 - DNA, 15 bp, Homo sapiens
agtaatggtaaggat

SEQ ID NO: 2079664 - DNA, 15 bp, Homo sapiens
gtaatggtaaggatt

SEQ ID NO: 2079665 - DNA, 15 bp, Homo sapiens
taatggtaaggatta

SEQ ID NO: 2079666 - DNA, 15 bp, Homo sapiens
aatggtaaggattaa

SEQ ID NO: 2079667 - DNA, 15 bp, Homo sapiens
atggtaaggattaaa

SEQ ID NO: 2079668 - DNA, 15 bp, Homo sapiens
tggtaaggattaaat

SEQ ID NO: 2079669 - DNA, 15 bp, Homo sapiens
ggtaaggattaaatg

SEQ ID NO: 2079670 - DNA, 15 bp, Homo sapiens
gtaaggattaaatgc

SEQ ID NO: 2079671 - DNA, 15 bp, Homo sapiens
taaggattaaatgca

SEQ ID NO: 2079672 - DNA, 15 bp, Homo sapiens
aaggattaaatgcaa

SEQ ID NO: 2079673 - DNA, 15 bp, Homo sapiens
aggattaaatgcaaa

SEQ ID NO: 2079674 - DNA, 15 bp, Homo sapiens
ggattaaatgcaaaa

SEQ ID NO: 2079675 - DNA, 15 bp, Homo sapiens
gattaaatgcaaaag

SEQ ID NO: 2079676 - DNA, 15 bp, Homo sapiens
attaaatgcaaaagt

SEQ ID NO: 2079677 - DNA, 15 bp, Homo sapiens
ttaaatgcaaaagta

SEQ ID NO: 2079678 - DNA, 15 bp, Homo sapiens
taaatgcaaaagtag

SEQ ID NO: 2079679 - DNA, 15 bp, Homo sapiens
aaatgcaaaagtaga

SEQ ID NO: 2079680 - DNA, 15 bp, Homo sapiens
aatgcaaaagtagat

SEQ ID NO: 2079681 - DNA, 15 bp, Homo sapiens
atgcaaaagtagata

SEQ ID NO: 2079682 - DNA, 15 bp, Homo sapiens
tgcaaaagtagatat

SEQ ID NO: 2079683 - DNA, 15 bp, Homo sapiens
gcaaaagtagatata

SEQ ID NO: 2079684 - DNA, 15 bp, Homo sapiens
caaaagtagatatat

SEQ ID NO: 2079685 - DNA, 15 bp, Homo sapiens
aaaagtagatatata

SEQ ID NO: 2079686 - DNA, 15 bp, Homo sapiens
aaagtagatatataa

SEQ ID NO: 2079687 - DNA, 15 bp, Homo sapiens
aagtagatatataaa

SEQ ID NO: 2079688 - DNA, 15 bp, Homo sapiens
agtagatatataaaa

SEQ ID NO: 2079689 - DNA, 15 bp, Homo sapiens
gtagatatataaaat

SEQ ID NO: 2079690 - DNA, 15 bp, Homo sapiens
tagatatataaaatg

SEQ ID NO: 2079691 - DNA, 15 bp, Homo sapiens
agatatataaaatgt

SEQ ID NO: 2079692 - DNA, 15 bp, Homo sapiens
gatatataaaatgtt

SEQ ID NO: 2079693 - DNA, 15 bp, Homo sapiens
atatataaaatgtta

SEQ ID NO: 2079694 - DNA, 15 bp, Homo sapiens
tatataaaatgttaa

SEQ ID NO: 2079695 - DNA, 15 bp, Homo sapiens
atataaaatgttaat

SEQ ID NO: 2079696 - DNA, 15 bp, Homo sapiens
tataaaatgttaata

SEQ ID NO: 2079697 - DNA, 15 bp, Homo sapiens
ataaaatgttaatac

SEQ ID NO: 2079698 - DNA, 15 bp, Homo sapiens
taaaatgttaatact

SEQ ID NO: 2079699 - DNA, 15 bp, Homo sapiens
aaaatgttaatactg

SEQ ID NO: 2079700 - DNA, 15 bp, Homo sapiens
aaatgttaatactga

SEQ ID NO: 2079701 - DNA, 15 bp, Homo sapiens
aatgttaatactgag

SEQ ID NO: 2079702 - DNA, 15 bp, Homo sapiens
atgttaatactgagt

SEQ ID NO: 2079703 - DNA, 15 bp, Homo sapiens
tgttaatactgagta

SEQ ID NO: 2079704 - DNA, 15 bp, Homo sapiens
gttaatactgagtat

SEQ ID NO: 2079705 - DNA, 15 bp, Homo sapiens
ttaatactgagtata

SEQ ID NO: 2079706 - DNA, 15 bp, Homo sapiens
taatactgagtatag

SEQ ID NO: 2079707 - DNA, 15 bp, Homo sapiens
aatactgagtatagc

SEQ ID NO: 2079708 - DNA, 15 bp, Homo sapiens
atactgagtatagct

SEQ ID NO: 2079709 - DNA, 15 bp, Homo sapiens
tactgagtatagcta

SEQ ID NO: 2079710 - DNA, 15 bp, Homo sapiens
actgagtatagctat

SEQ ID NO: 2079711 - DNA, 15 bp, Homo sapiens
ctgagtatagctata

SEQ ID NO: 2079712 - DNA, 15 bp, Homo sapiens
tgagtatagctatat

SEQ ID NO: 2079713 - DNA, 15 bp, Homo sapiens
gagtatagctatatt

SEQ ID NO: 2079714 - DNA, 15 bp, Homo sapiens
agtatagctatattg

SEQ ID NO: 2079715 - DNA, 15 bp, Homo sapiens
gtatagctatattgg

SEQ ID NO: 2079716 - DNA, 15 bp, Homo sapiens
tatagctatattggg

SEQ ID NO: 2079717 - DNA, 15 bp, Homo sapiens
atagctatattgggc

SEQ ID NO: 2079718 - DNA, 15 bp, Homo sapiens
tagctatattgggcc

SEQ ID NO: 2079719 - DNA, 15 bp, Homo sapiens
agctatattgggcca

SEQ ID NO: 2079720 - DNA, 15 bp, Homo sapiens
gctatattgggccat

SEQ ID NO: 2079721 - DNA, 15 bp, Homo sapiens
ctatattgggccatt

SEQ ID NO: 2079722 - DNA, 15 bp, Homo sapiens
tatattgggccattc

SEQ ID NO: 2079723 - DNA, 15 bp, Homo sapiens
atattgggccattca

SEQ ID NO: 2079724 - DNA, 15 bp, Homo sapiens
tattgggccattcaa

SEQ ID NO: 2079725 - DNA, 15 bp, Homo sapiens
attgggccattcaac

SEQ ID NO: 2079726 - DNA, 15 bp, Homo sapiens
ttgggccattcaacc

SEQ ID NO: 2079727 - DNA, 15 bp, Homo sapiens
tgggccattcaaccc

SEQ ID NO: 2079728 - DNA, 15 bp, Homo sapiens
gggccattcaacccc

SEQ ID NO: 2079729 - DNA, 15 bp, Homo sapiens
ggccattcaacccca

SEQ ID NO: 2079730 - DNA, 15 bp, Homo sapiens
gccattcaaccccac

SEQ ID NO: 2079731 - DNA, 15 bp, Homo sapiens
ccattcaaccccact

SEQ ID NO: 2079732 - DNA, 15 bp, Homo sapiens
cattcaaccccactg

SEQ ID NO: 2079733 - DNA, 15 bp, Homo sapiens
attcaaccccactgg

SEQ ID NO: 2079734 - DNA, 15 bp, Homo sapiens
ttcaaccccactgga

SEQ ID NO: 2079735 - DNA, 15 bp, Homo sapiens
tcaaccccactggac

SEQ ID NO: 2079736 - DNA, 15 bp, Homo sapiens
caaccccactggact

SEQ ID NO: 2079737 - DNA, 15 bp, Homo sapiens
aaccccactggactg

SEQ ID NO: 2079738 - DNA, 15 bp, Homo sapiens
accccactggactga

SEQ ID NO: 2079739 - DNA, 15 bp, Homo sapiens
ccccactggactgaa

SEQ ID NO: 2079740 - DNA, 15 bp, Homo sapiens
cccactggactgaac

SEQ ID NO: 2079741 - DNA, 15 bp, Homo sapiens
ccactggactgaact

SEQ ID NO: 2079742 - DNA, 15 bp, Homo sapiens
cactggactgaactc

SEQ ID NO: 2079743 - DNA, 15 bp, Homo sapiens
actggactgaactcc

SEQ ID NO: 2079744 - DNA, 15 bp, Homo sapiens
ctggactgaactcca

SEQ ID NO: 2079745 - DNA, 15 bp, Homo sapiens
tggactgaactccat

SEQ ID NO: 2079746 - DNA, 15 bp, Homo sapiens
ggactgaactccatg

SEQ ID NO: 2079747 - DNA, 15 bp, Homo sapiens
gactgaactccatga

SEQ ID NO: 2079748 - DNA, 15 bp, Homo sapiens
actgaactccatgag

SEQ ID NO: 2079749 - DNA, 15 bp, Homo sapiens
ctgaactccatgagg

SEQ ID NO: 2079750 - DNA, 15 bp, Homo sapiens
tgaactccatgaggg

SEQ ID NO: 2079751 - DNA, 15 bp, Homo sapiens
gaactccatgagggc

SEQ ID NO: 2079752 - DNA, 15 bp, Homo sapiens
aactccatgagggca

SEQ ID NO: 2079753 - DNA, 15 bp, Homo sapiens
actccatgagggcag

SEQ ID NO: 2079754 - DNA, 15 bp, Homo sapiens
ctccatgagggcaga

SEQ ID NO: 2079755 - DNA, 15 bp, Homo sapiens
tccatgagggcagag

SEQ ID NO: 2079756 - DNA, 15 bp, Homo sapiens
ccatgagggcagagc

SEQ ID NO: 2079757 - DNA, 15 bp, Homo sapiens
catgagggcagagcc

SEQ ID NO: 2079758 - DNA, 15 bp, Homo sapiens
atgagggcagagccc

SEQ ID NO: 2079759 - DNA, 15 bp, Homo sapiens
tgagggcagagccca

SEQ ID NO: 2079760 - DNA, 15 bp, Homo sapiens
gagggcagagcccat

SEQ ID NO: 2079761 - DNA, 15 bp, Homo sapiens
agggcagagcccatg

SEQ ID NO: 2079762 - DNA, 15 bp, Homo sapiens
gggcagagcccatga

SEQ ID NO: 2079763 - DNA, 15 bp, Homo sapiens
ggcagagcccatgac

SEQ ID NO: 2079764 - DNA, 15 bp, Homo sapiens
gcagagcccatgacc

SEQ ID NO: 2079765 - DNA, 15 bp, Homo sapiens
cagagcccatgacca

SEQ ID NO: 2079766 - DNA, 15 bp, Homo sapiens
agagcccatgaccat

SEQ ID NO: 2079767 - DNA, 15 bp, Homo sapiens
gagcccatgaccatc

SEQ ID NO: 2079768 - DNA, 15 bp, Homo sapiens
agcccatgaccatca

SEQ ID NO: 2079769 - DNA, 15 bp, Homo sapiens
gcccatgaccatcat

SEQ ID NO: 2079770 - DNA, 15 bp, Homo sapiens
cccatgaccatcatc

SEQ ID NO: 2079771 - DNA, 15 bp, Homo sapiens
ccatgaccatcatcc

SEQ ID NO: 2079772 - DNA, 15 bp, Homo sapiens
catgaccatcatcct

SEQ ID NO: 2079773 - DNA, 15 bp, Homo sapiens
atgaccatcatcctc

SEQ ID NO: 2079774 - DNA, 15 bp, Homo sapiens
tgaccatcatcctcc

SEQ ID NO: 2079775 - DNA, 15 bp, Homo sapiens
gaccatcatcctcca

SEQ ID NO: 2079776 - DNA, 15 bp, Homo sapiens
accatcatcctccac

SEQ ID NO: 2079777 - DNA, 15 bp, Homo sapiens
ccatcatcctccacc

SEQ ID NO: 2079778 - DNA, 15 bp, Homo sapiens
catcatcctccacca

SEQ ID NO: 2079779 - DNA, 15 bp, Homo sapiens
atcatcctccaccat

SEQ ID NO: 2079780 - DNA, 15 bp, Homo sapiens
tcatcctccaccatg

SEQ ID NO: 2079781 - DNA, 15 bp, Homo sapiens
catcctccaccatga

SEQ ID NO: 2079782 - DNA, 15 bp, Homo sapiens
atcctccaccatgac

SEQ ID NO: 2079783 - DNA, 15 bp, Homo sapiens
tcctccaccatgact

SEQ ID NO: 2079784 - DNA, 15 bp, Homo sapiens
cctccaccatgactg

SEQ ID NO: 2079785 - DNA, 15 bp, Homo sapiens
ctccaccatgactga

SEQ ID NO: 2079786 - DNA, 15 bp, Homo sapiens
tccaccatgactgag

SEQ ID NO: 2079787 - DNA, 15 bp, Homo sapiens
ccaccatgactgagc

SEQ ID NO: 2079788 - DNA, 15 bp, Homo sapiens
caccatgactgagct

SEQ ID NO: 2079789 - DNA, 15 bp, Homo sapiens
accatgactgagctg

SEQ ID NO: 2079790 - DNA, 15 bp, Homo sapiens
ccatgactgagctgt

SEQ ID NO: 2079791 - DNA, 15 bp, Homo sapiens
catgactgagctgtg

SEQ ID NO: 2079792 - DNA, 15 bp, Homo sapiens
atgactgagctgtgt

SEQ ID NO: 2079793 - DNA, 15 bp, Homo sapiens
tgactgagctgtgtt

SEQ ID NO: 2079794 - DNA, 15 bp, Homo sapiens
gactgagctgtgttg

SEQ ID NO: 2079795 - DNA, 15 bp, Homo sapiens
actgagctgtgttgc

SEQ ID NO: 2079796 - DNA, 15 bp, Homo sapiens
ctgagctgtgttgct

SEQ ID NO: 2079797 - DNA, 15 bp, Homo sapiens
tgagctgtgttgctc

SEQ ID NO: 2079798 - DNA, 15 bp, Homo sapiens
gagctgtgttgctct

SEQ ID NO: 2079799 - DNA, 15 bp, Homo sapiens
agctgtgttgctctt

SEQ ID NO: 2079800 - DNA, 15 bp, Homo sapiens
gctgtgttgctcttc

SEQ ID NO: 2079801 - DNA, 15 bp, Homo sapiens
ctgtgttgctcttca

SEQ ID NO: 2079802 - DNA, 15 bp, Homo sapiens
tgtgttgctcttcac

SEQ ID NO: 2079803 - DNA, 15 bp, Homo sapiens
gtgttgctcttcact

SEQ ID NO: 2079804 - DNA, 15 bp, Homo sapiens
tgttgctcttcactc

SEQ ID NO: 2079805 - DNA, 15 bp, Homo sapiens
gttgctcttcactca

SEQ ID NO: 2079806 - DNA, 15 bp, Homo sapiens
ttgctcttcactcat

SEQ ID NO: 2079807 - DNA, 15 bp, Homo sapiens
tgctcttcactcatt

SEQ ID NO: 2079808 - DNA, 15 bp, Homo sapiens
gctcttcactcatta

SEQ ID NO: 2079809 - DNA, 15 bp, Homo sapiens
ctcttcactcattag

SEQ ID NO: 2079810 - DNA, 15 bp, Homo sapiens
tcttcactcattagg

SEQ ID NO: 2079811 - DNA, 15 bp, Homo sapiens
cttcactcattagga

SEQ ID NO: 2079812 - DNA, 15 bp, Homo sapiens
ttcactcattaggat

SEQ ID NO: 2079813 - DNA, 15 bp, Homo sapiens
tcactcattaggata

SEQ ID NO: 2079814 - DNA, 15 bp, Homo sapiens
cactcattaggatat

SEQ ID NO: 2079815 - DNA, 15 bp, Homo sapiens
actcattaggatatc

SEQ ID NO: 2079816 - DNA, 15 bp, Homo sapiens
ctcattaggatatcg

SEQ ID NO: 2079817 - DNA, 15 bp, Homo sapiens
tcattaggatatcgt

SEQ ID NO: 2079818 - DNA, 15 bp, Homo sapiens
cattaggatatcgta

SEQ ID NO: 2079819 - DNA, 15 bp, Homo sapiens
attaggatatcgtaa

SEQ ID NO: 2079820 - DNA, 15 bp, Homo sapiens
ttaggatatcgtaag

SEQ ID NO: 2079821 - DNA, 15 bp, Homo sapiens
taggatatcgtaagc

SEQ ID NO: 2079822 - DNA, 15 bp, Homo sapiens
aggatatcgtaagca

SEQ ID NO: 2079823 - DNA, 15 bp, Homo sapiens
ggatatcgtaagcac

SEQ ID NO: 2079824 - DNA, 15 bp, Homo sapiens
gatatcgtaagcact

SEQ ID NO: 2079825 - DNA, 15 bp, Homo sapiens
atatcgtaagcactc

SEQ ID NO: 2079826 - DNA, 15 bp, Homo sapiens
tatcgtaagcactcc

SEQ ID NO: 2079827 - DNA, 15 bp, Homo sapiens
atcgtaagcactcct

SEQ ID NO: 2079828 - DNA, 15 bp, Homo sapiens
tcgtaagcactcctt

SEQ ID NO: 2079829 - DNA, 15 bp, Homo sapiens
cgtaagcactccttg

SEQ ID NO: 2079830 - DNA, 15 bp, Homo sapiens
gtaagcactccttgt

SEQ ID NO: 2079831 - DNA, 15 bp, Homo sapiens
taagcactccttgtt

SEQ ID NO: 2079832 - DNA, 15 bp, Homo sapiens
aagcactccttgttg

SEQ ID NO: 2079833 - DNA, 15 bp, Homo sapiens
agcactccttgttgg

SEQ ID NO: 2079834 - DNA, 15 bp, Homo sapiens
gcactccttgttgga

SEQ ID NO: 2079835 - DNA, 15 bp, Homo sapiens
cactccttgttggac

SEQ ID NO: 2079836 - DNA, 15 bp, Homo sapiens
actccttgttggacg

SEQ ID NO: 2079837 - DNA, 15 bp, Homo sapiens
ctccttgttggacga

SEQ ID NO: 2079838 - DNA, 15 bp, Homo sapiens
tccttgttggacgag

SEQ ID NO: 2079839 - DNA, 15 bp, Homo sapiens
ccttgttggacgagg

SEQ ID NO: 2079840 - DNA, 15 bp, Homo sapiens
cttgttggacgagga

SEQ ID NO: 2079841 - DNA, 15 bp, Homo sapiens
ttgttggacgaggaa

SEQ ID NO: 2079842 - DNA, 15 bp, Homo sapiens
tgttggacgaggaag

SEQ ID NO: 2079843 - DNA, 15 bp, Homo sapiens
gttggacgaggaaga

SEQ ID NO: 2079844 - DNA, 15 bp, Homo sapiens
ttggacgaggaagaa

SEQ ID NO: 2079845 - DNA, 15 bp, Homo sapiens
tggacgaggaagaaa

SEQ ID NO: 2079846 - DNA, 15 bp, Homo sapiens
ggacgaggaagaaat

SEQ ID NO: 2079847 - DNA, 15 bp, Homo sapiens
gacgaggaagaaatg

SEQ ID NO: 2079848 - DNA, 15 bp, Homo sapiens
acgaggaagaaatga

SEQ ID NO: 2079849 - DNA, 15 bp, Homo sapiens
cgaggaagaaatgac

SEQ ID NO: 2079850 - DNA, 15 bp, Homo sapiens
gaggaagaaatgacc

SEQ ID NO: 2079851 - DNA, 15 bp, Homo sapiens
aggaagaaatgaccc

SEQ ID NO: 2079852 - DNA, 15 bp, Homo sapiens
ggaagaaatgaccct

SEQ ID NO: 2079853 - DNA, 15 bp, Homo sapiens
gaagaaatgaccctg

SEQ ID NO: 2079854 - DNA, 15 bp, Homo sapiens
aagaaatgaccctgt

SEQ ID NO: 2079855 - DNA, 15 bp, Homo sapiens
agaaatgaccctgtg

SEQ ID NO: 2079856 - DNA, 15 bp, Homo sapiens
gaaatgaccctgtgc

SEQ ID NO: 2079857 - DNA, 15 bp, Homo sapiens
aaatgaccctgtgct

SEQ ID NO: 2079858 - DNA, 15 bp, Homo sapiens
aatgaccctgtgctt

SEQ ID NO: 2079859 - DNA, 15 bp, Homo sapiens
atgaccctgtgcttt

SEQ ID NO: 2079860 - DNA, 15 bp, Homo sapiens
gaccctgtgcttttg

SEQ ID NO: 2079861 - DNA, 15 bp, Homo sapiens
accctgtgcttttgt

SEQ ID NO: 2079862 - DNA, 15 bp, Homo sapiens
ccctgtgcttttgtc

SEQ ID NO: 2079863 - DNA, 15 bp, Homo sapiens
cctgtgcttttgtcc

SEQ ID NO: 2079864 - DNA, 15 bp, Homo sapiens
ctgtgcttttgtccc

SEQ ID NO: 2079865 - DNA, 15 bp, Homo sapiens
tgtgcttttgtcccc

SEQ ID NO: 2079866 - DNA, 15 bp, Homo sapiens
gtgcttttgtcccca

SEQ ID NO: 2079867 - DNA, 15 bp, Homo sapiens
tgcttttgtccccag

SEQ ID NO: 2079868 - DNA, 15 bp, Homo sapiens
gcttttgtccccagg

SEQ ID NO: 2079869 - DNA, 15 bp, Homo sapiens
cttttgtccccaggg

SEQ ID NO: 2079870 - DNA, 15 bp, Homo sapiens
ttttgtccccaggga

SEQ ID NO: 2079871 - DNA, 15 bp, Homo sapiens
tttgtccccagggaa

SEQ ID NO: 2079872 - DNA, 15 bp, Homo sapiens
ttgtccccagggaaa

SEQ ID NO: 2079873 - DNA, 15 bp, Homo sapiens
tgtccccagggaaac

SEQ ID NO: 2079874 - DNA, 15 bp, Homo sapiens
gtccccagggaaacc

SEQ ID NO: 2079875 - DNA, 15 bp, Homo sapiens
tccccagggaaacca

SEQ ID NO: 2079876 - DNA, 15 bp, Homo sapiens
ccccagggaaaccat

SEQ ID NO: 2079877 - DNA, 15 bp, Homo sapiens
cccagggaaaccatc

SEQ ID NO: 2079878 - DNA, 15 bp, Homo sapiens
ccagggaaaccatct

SEQ ID NO: 2079879 - DNA, 15 bp, Homo sapiens
cagggaaaccatctg

SEQ ID NO: 2079880 - DNA, 15 bp, Homo sapiens
agggaaaccatctgc

SEQ ID NO: 2079881 - DNA, 15 bp, Homo sapiens
gggaaaccatctgcc

SEQ ID NO: 2079882 - DNA, 15 bp, Homo sapiens
ggaaaccatctgccg

SEQ ID NO: 2079883 - DNA, 15 bp, Homo sapiens
gaaaccatctgccgt

SEQ ID NO: 2079884 - DNA, 15 bp, Homo sapiens
aaaccatctgccgtg

SEQ ID NO: 2079885 - DNA, 15 bp, Homo sapiens
aaccatctgccgtgt

SEQ ID NO: 2079886 - DNA, 15 bp, Homo sapiens
accatctgccgtgtg

SEQ ID NO: 2079887 - DNA, 15 bp, Homo sapiens
ccatctgccgtgtga

SEQ ID NO: 2079888 - DNA, 15 bp, Homo sapiens
catctgccgtgtgac

SEQ ID NO: 2079889 - DNA, 15 bp, Homo sapiens
atctgccgtgtgact

SEQ ID NO: 2079890 - DNA, 15 bp, Homo sapiens
tctgccgtgtgactg

SEQ ID NO: 2079891 - DNA, 15 bp, Homo sapiens
ctgccgtgtgactgg

SEQ ID NO: 2079892 - DNA, 15 bp, Homo sapiens
tgccgtgtgactggt

SEQ ID NO: 2079893 - DNA, 15 bp, Homo sapiens
gccgtgtgactggtg

SEQ ID NO: 2079894 - DNA, 15 bp, Homo sapiens
ccgtgtgactggtgg

SEQ ID NO: 2079895 - DNA, 15 bp, Homo sapiens
cgtgtgactggtggg

SEQ ID NO: 2079896 - DNA, 15 bp, Homo sapiens
gtgtgactggtggga

SEQ ID NO: 2079897 - DNA, 15 bp, Homo sapiens
tgtgactggtgggat

SEQ ID NO: 2079898 - DNA, 15 bp, Homo sapiens
gtgactggtgggatg

SEQ ID NO: 2079899 - DNA, 15 bp, Homo sapiens
tgactggtgggatga

SEQ ID NO: 2079900 - DNA, 15 bp, Homo sapiens
gactggtgggatgaa

SEQ ID NO: 2079901 - DNA, 15 bp, Homo sapiens
actggtgggatgaag

SEQ ID NO: 2079902 - DNA, 15 bp, Homo sapiens
ctggtgggatgaagg

SEQ ID NO: 2079903 - DNA, 15 bp, Homo sapiens
tggtgggatgaaggt

SEQ ID NO: 2079904 - DNA, 15 bp, Homo sapiens
ggtgggatgaaggta

SEQ ID NO: 2079905 - DNA, 15 bp, Homo sapiens
gtgggatgaaggtaa

SEQ ID NO: 2079906 - DNA, 15 bp, Homo sapiens
tgggatgaaggtaaa

SEQ ID NO: 2079907 - DNA, 15 bp, Homo sapiens
gggatgaaggtaaag

SEQ ID NO: 2079908 - DNA, 15 bp, Homo sapiens
ggatgaaggtaaagg

SEQ ID NO: 2079909 - DNA, 15 bp, Homo sapiens
gatgaaggtaaaggc

SEQ ID NO: 2079910 - DNA, 15 bp, Homo sapiens
atgaaggtaaaggca

SEQ ID NO: 2079911 - DNA, 15 bp, Homo sapiens
tgaaggtaaaggcag

SEQ ID NO: 2079912 - DNA, 15 bp, Homo sapiens
gaaggtaaaggcaga

SEQ ID NO: 2079913 - DNA, 15 bp, Homo sapiens
aaggtaaaggcagac

SEQ ID NO: 2079914 - DNA, 15 bp, Homo sapiens
aggtaaaggcagacc

SEQ ID NO: 2079915 - DNA, 15 bp, Homo sapiens
ggtaaaggcagaccg

SEQ ID NO: 2079916 - DNA, 15 bp, Homo sapiens
gtaaaggcagaccga

SEQ ID NO: 2079917 - DNA, 15 bp, Homo sapiens
taaaggcagaccgag

SEQ ID NO: 2079918 - DNA, 15 bp, Homo sapiens
aaaggcagaccgaga

SEQ ID NO: 2079919 - DNA, 15 bp, Homo sapiens
aaggcagaccgagat

SEQ ID NO: 2079920 - DNA, 15 bp, Homo sapiens
aggcagaccgagatg

SEQ ID NO: 2079921 - DNA, 15 bp, Homo sapiens
ggcagaccgagatga

SEQ ID NO: 2079922 - DNA, 15 bp, Homo sapiens
gcagaccgagatgaa

SEQ ID NO: 2079923 - DNA, 15 bp, Homo sapiens
cagaccgagatgaat

SEQ ID NO: 2079924 - DNA, 15 bp, Homo sapiens
agaccgagatgaatc

SEQ ID NO: 2079925 - DNA, 15 bp, Homo sapiens
gaccgagatgaatcc

SEQ ID NO: 2079926 - DNA, 15 bp, Homo sapiens
accgagatgaatcct

SEQ ID NO: 2079927 - DNA, 15 bp, Homo sapiens
ccgagatgaatcctc

SEQ ID NO: 2079928 - DNA, 15 bp, Homo sapiens
cgagatgaatcctca

SEQ ID NO: 2079929 - DNA, 15 bp, Homo sapiens
gagatgaatcctcac

SEQ ID NO: 2079930 - DNA, 15 bp, Homo sapiens
agatgaatcctcacc

SEQ ID NO: 2079931 - DNA, 15 bp, Homo sapiens
gatgaatcctcacca

SEQ ID NO: 2079932 - DNA, 15 bp, Homo sapiens
atgaatcctcaccat

SEQ ID NO: 2079933 - DNA, 15 bp, Homo sapiens
tgaatcctcaccata

SEQ ID NO: 2079934 - DNA, 15 bp, Homo sapiens
gaatcctcaccatat

SEQ ID NO: 2079935 - DNA, 15 bp, Homo sapiens
aatcctcaccatatg

SEQ ID NO: 2079936 - DNA, 15 bp, Homo sapiens
atcctcaccatatgc

SEQ ID NO: 2079937 - DNA, 15 bp, Homo sapiens
tcctcaccatatgct

SEQ ID NO: 2079938 - DNA, 15 bp, Homo sapiens
cctcaccatatgctg

SEQ ID NO: 2079939 - DNA, 15 bp, Homo sapiens
ctcaccatatgctgc

SEQ ID NO: 2079940 - DNA, 15 bp, Homo sapiens
tcaccatatgctgct

SEQ ID NO: 2079941 - DNA, 15 bp, Homo sapiens
caccatatgctgcta

SEQ ID NO: 2079942 - DNA, 15 bp, Homo sapiens
accatatgctgctat

SEQ ID NO: 2079943 - DNA, 15 bp, Homo sapiens
ccatatgctgctatg

SEQ ID NO: 2079944 - DNA, 15 bp, Homo sapiens
catatgctgctatgt

SEQ ID NO: 2079945 - DNA, 15 bp, Homo sapiens
atatgctgctatgtt

SEQ ID NO: 2079946 - DNA, 15 bp, Homo sapiens
tatgctgctatgttg

SEQ ID NO: 2079947 - DNA, 15 bp, Homo sapiens
atgctgctatgttgg

SEQ ID NO: 2079948 - DNA, 15 bp, Homo sapiens
tgctgctatgttggc

SEQ ID NO: 2079949 - DNA, 15 bp, Homo sapiens
gctgctatgttggct

SEQ ID NO: 2079950 - DNA, 15 bp, Homo sapiens
ctgctatgttggctg

SEQ ID NO: 2079951 - DNA, 15 bp, Homo sapiens
tgctatgttggctgc

SEQ ID NO: 2079952 - DNA, 15 bp, Homo sapiens
gctatgttggctgcc

SEQ ID NO: 2079953 - DNA, 15 bp, Homo sapiens
ctatgttggctgccc

SEQ ID NO: 2079954 - DNA, 15 bp, Homo sapiens
tatgttggctgccca

SEQ ID NO: 2079955 - DNA, 15 bp, Homo sapiens
atgttggctgcccag

SEQ ID NO: 2079956 - DNA, 15 bp, Homo sapiens
tgttggctgcccagg

SEQ ID NO: 2079957 - DNA, 15 bp, Homo sapiens
gttggctgcccagga

SEQ ID NO: 2079958 - DNA, 15 bp, Homo sapiens
ttggctgcccaggat

SEQ ID NO: 2079959 - DNA, 15 bp, Homo sapiens
tggctgcccaggatg

SEQ ID NO: 2079960 - DNA, 15 bp, Homo sapiens
ggctgcccaggatgt

SEQ ID NO: 2079961 - DNA, 15 bp, Homo sapiens
gctgcccaggatgtg

SEQ ID NO: 2079962 - DNA, 15 bp, Homo sapiens
ctgcccaggatgtgg

SEQ ID NO: 2079963 - DNA, 15 bp, Homo sapiens
tgcccaggatgtggc

SEQ ID NO: 2079964 - DNA, 15 bp, Homo sapiens
gcccaggatgtggcc

SEQ ID NO: 2079965 - DNA, 15 bp, Homo sapiens
cccaggatgtggccc

SEQ ID NO: 2079966 - DNA, 15 bp, Homo sapiens
ccaggatgtggccca

SEQ ID NO: 2079967 - DNA, 15 bp, Homo sapiens
caggatgtggcccag

SEQ ID NO: 2079968 - DNA, 15 bp, Homo sapiens
aggatgtggcccaga

SEQ ID NO: 2079969 - DNA, 15 bp, Homo sapiens
attttaggcatatac

SEQ ID NO: 2079970 - DNA, 15 bp, Homo sapiens
ttttaggcatataca

SEQ ID NO: 2079971 - DNA, 15 bp, Homo sapiens
tttaggcatatacat

SEQ ID NO: 2079972 - DNA, 15 bp, Homo sapiens
ttaggcatatacata

SEQ ID NO: 2079973 - DNA, 15 bp, Homo sapiens
taggcatatacatac

SEQ ID NO: 2079974 - DNA, 15 bp, Homo sapiens
aggcatatacatact

SEQ ID NO: 2079975 - DNA, 15 bp, Homo sapiens
ggcatatacatactt

SEQ ID NO: 2079976 - DNA, 15 bp, Homo sapiens
gcatatacatactta

SEQ ID NO: 2079977 - DNA, 15 bp, Homo sapiens
catatacatacttaa

SEQ ID NO: 2079978 - DNA, 15 bp, Homo sapiens
atatacatacttaat

SEQ ID NO: 2079979 - DNA, 15 bp, Homo sapiens
tatacatacttaata

SEQ ID NO: 2079980 - DNA, 15 bp, Homo sapiens
atacatacttaataa

SEQ ID NO: 2079981 - DNA, 15 bp, Homo sapiens
tacatacttaataat

SEQ ID NO: 2079982 - DNA, 15 bp, Homo sapiens
acatacttaataatt

SEQ ID NO: 2079983 - DNA, 15 bp, Homo sapiens
catacttaataattg

SEQ ID NO: 2079984 - DNA, 15 bp, Homo sapiens
atacttaataattgg

SEQ ID NO: 2079985 - DNA, 15 bp, Homo sapiens
tacttaataattggc

SEQ ID NO: 2079986 - DNA, 15 bp, Homo sapiens
acttaataattggct

SEQ ID NO: 2079987 - DNA, 15 bp, Homo sapiens
cttaataattggctc

SEQ ID NO: 2079988 - DNA, 15 bp, Homo sapiens
ttaataattggctcc

SEQ ID NO: 2079989 - DNA, 15 bp, Homo sapiens
taataattggctcct

SEQ ID NO: 2079990 - DNA, 15 bp, Homo sapiens
aataattggctcctg

SEQ ID NO: 2079991 - DNA, 15 bp, Homo sapiens
ataattggctcctgt

SEQ ID NO: 2079992 - DNA, 15 bp, Homo sapiens
taattggctcctgtg

SEQ ID NO: 2079993 - DNA, 15 bp, Homo sapiens
aattggctcctgtgt

SEQ ID NO: 2079994 - DNA, 15 bp, Homo sapiens
attggctcctgtgta

SEQ ID NO: 2079995 - DNA, 15 bp, Homo sapiens
ttggctcctgtgtac

SEQ ID NO: 2079996 - DNA, 15 bp, Homo sapiens
tggctcctgtgtaca

SEQ ID NO: 2079997 - DNA, 15 bp, Homo sapiens
ggctcctgtgtacac

SEQ ID NO: 2079998 - DNA, 15 bp, Homo sapiens
gctcctgtgtacacc

SEQ ID NO: 2079999 - DNA, 15 bp, Homo sapiens
ctcctgtgtacaccc

SEQ ID NO: 2080000 - DNA, 15 bp, Homo sapiens
tcctgtgtacacccc

SEQ ID NO: 2080001 - DNA, 15 bp, Homo sapiens
cctgtgtacaccccc

SEQ ID NO: 2080002 - DNA, 15 bp, Homo sapiens
ctgtgtacacccccc

SEQ ID NO: 2080003 - DNA, 15 bp, Homo sapiens
tgtgtacacccccca

SEQ ID NO: 2080004 - DNA, 15 bp, Homo sapiens
gtgtacaccccccag

SEQ ID NO: 2080005 - DNA, 15 bp, Homo sapiens
tgtacaccccccagc

SEQ ID NO: 2080006 - DNA, 15 bp, Homo sapiens
gtacaccccccagca

SEQ ID NO: 2080007 - DNA, 15 bp, Homo sapiens
tacaccccccagcag

SEQ ID NO: 2080008 - DNA, 15 bp, Homo sapiens
acaccccccagcagc

SEQ ID NO: 2080009 - DNA, 15 bp, Homo sapiens
caccccccagcagct

SEQ ID NO: 2080010 - DNA, 15 bp, Homo sapiens
accccccagcagctc

SEQ ID NO: 2080011 - DNA, 15 bp, Homo sapiens
ccccccagcagctca

SEQ ID NO: 2080012 - DNA, 15 bp, Homo sapiens
cccccagcagctcag

SEQ ID NO: 2080013 - DNA, 15 bp, Homo sapiens
ccccagcagctcagt

SEQ ID NO: 2080014 - DNA, 15 bp, Homo sapiens
cccagcagctcagtg

SEQ ID NO: 2080015 - DNA, 15 bp, Homo sapiens
ccagcagctcagtgt

SEQ ID NO: 2080016 - DNA, 15 bp, Homo sapiens
cagcagctcagtgtt

SEQ ID NO: 2080017 - DNA, 15 bp, Homo sapiens
agcagctcagtgttg

SEQ ID NO: 2080018 - DNA, 15 bp, Homo sapiens
gcagctcagtgttga

SEQ ID NO: 2080019 - DNA, 15 bp, Homo sapiens
cagctcagtgttgag

SEQ ID NO: 2080020 - DNA, 15 bp, Homo sapiens
agctcagtgttgagc

SEQ ID NO: 2080021 - DNA, 15 bp, Homo sapiens
gctcagtgttgagca

SEQ ID NO: 2080022 - DNA, 15 bp, Homo sapiens
ctcagtgttgagcac

SEQ ID NO: 2080023 - DNA, 15 bp, Homo sapiens
tcagtgttgagcacc

SEQ ID NO: 2080024 - DNA, 15 bp, Homo sapiens
cagtgttgagcaccc

SEQ ID NO: 2080025 - DNA, 15 bp, Homo sapiens
agtgttgagcaccca

SEQ ID NO: 2080026 - DNA, 15 bp, Homo sapiens
gtgttgagcacccac

SEQ ID NO: 2080027 - DNA, 15 bp, Homo sapiens
tgttgagcacccact

SEQ ID NO: 2080028 - DNA, 15 bp, Homo sapiens
gttgagcacccactg

SEQ ID NO: 2080029 - DNA, 15 bp, Homo sapiens
ttgagcacccactgt

SEQ ID NO: 2080030 - DNA, 15 bp, Homo sapiens
tgagcacccactgta

SEQ ID NO: 2080031 - DNA, 15 bp, Homo sapiens
gagcacccactgtat

SEQ ID NO: 2080032 - DNA, 15 bp, Homo sapiens
agcacccactgtata

SEQ ID NO: 2080033 - DNA, 15 bp, Homo sapiens
gcacccactgtatac

SEQ ID NO: 2080034 - DNA, 15 bp, Homo sapiens
cacccactgtatact

SEQ ID NO: 2080035 - DNA, 15 bp, Homo sapiens
acccactgtatacta

SEQ ID NO: 2080036 - DNA, 15 bp, Homo sapiens
cccactgtatactag

SEQ ID NO: 2080037 - DNA, 15 bp, Homo sapiens
ccactgtatactagg

SEQ ID NO: 2080038 - DNA, 15 bp, Homo sapiens
cactgtatactagga

SEQ ID NO: 2080039 - DNA, 15 bp, Homo sapiens
actgtatactaggag

SEQ ID NO: 2080040 - DNA, 15 bp, Homo sapiens
ctgtatactaggagc

SEQ ID NO: 2080041 - DNA, 15 bp, Homo sapiens
tgtatactaggagct

SEQ ID NO: 2080042 - DNA, 15 bp, Homo sapiens
gtatactaggagctg

SEQ ID NO: 2080043 - DNA, 15 bp, Homo sapiens
tatactaggagctgt

SEQ ID NO: 2080044 - DNA, 15 bp, Homo sapiens
atactaggagctgtg

SEQ ID NO: 2080045 - DNA, 15 bp, Homo sapiens
tactaggagctgtgt

SEQ ID NO: 2080046 - DNA, 15 bp, Homo sapiens
actaggagctgtgtt

SEQ ID NO: 2080047 - DNA, 15 bp, Homo sapiens
ctaggagctgtgttt

SEQ ID NO: 2080048 - DNA, 15 bp, Homo sapiens
taggagctgtgtttc

SEQ ID NO: 2080049 - DNA, 15 bp, Homo sapiens
aggagctgtgtttca

SEQ ID NO: 2080050 - DNA, 15 bp, Homo sapiens
ggagctgtgtttcag

SEQ ID NO: 2080051 - DNA, 15 bp, Homo sapiens
gagctgtgtttcagg

SEQ ID NO: 2080052 - DNA, 15 bp, Homo sapiens
agctgtgtttcaggt

SEQ ID NO: 2080053 - DNA, 15 bp, Homo sapiens
gctgtgtttcaggta

SEQ ID NO: 2080054 - DNA, 15 bp, Homo sapiens
ctgtgtttcaggtac

SEQ ID NO: 2080055 - DNA, 15 bp, Homo sapiens
tgtgtttcaggtact

SEQ ID NO: 2080056 - DNA, 15 bp, Homo sapiens
gtgtttcaggtacta

SEQ ID NO: 2080057 - DNA, 15 bp, Homo sapiens
tgtttcaggtactag

SEQ ID NO: 2080058 - DNA, 15 bp, Homo sapiens
gtttcaggtactaga

SEQ ID NO: 2080059 - DNA, 15 bp, Homo sapiens
tttcaggtactagaa

SEQ ID NO: 2080060 - DNA, 15 bp, Homo sapiens
ttcaggtactagaag

SEQ ID NO: 2080061 - DNA, 15 bp, Homo sapiens
tcaggtactagaaga

SEQ ID NO: 2080062 - DNA, 15 bp, Homo sapiens
caggtactagaagag

SEQ ID NO: 2080063 - DNA, 15 bp, Homo sapiens
aggtactagaagaga

SEQ ID NO: 2080064 - DNA, 15 bp, Homo sapiens
ggtactagaagagag

SEQ ID NO: 2080065 - DNA, 15 bp, Homo sapiens
gtactagaagagagt

SEQ ID NO: 2080066 - DNA, 15 bp, Homo sapiens
tactagaagagagtg

SEQ ID NO: 2080067 - DNA, 15 bp, Homo sapiens
actagaagagagtga

SEQ ID NO: 2080068 - DNA, 15 bp, Homo sapiens
ctagaagagagtgat

SEQ ID NO: 2080069 - DNA, 15 bp, Homo sapiens
tagaagagagtgatg

SEQ ID NO: 2080070 - DNA, 15 bp, Homo sapiens
agaagagagtgatgg

SEQ ID NO: 2080071 - DNA, 15 bp, Homo sapiens
gaagagagtgatggg

SEQ ID NO: 2080072 - DNA, 15 bp, Homo sapiens
aagagagtgatgggg

SEQ ID NO: 2080073 - DNA, 15 bp, Homo sapiens
agagagtgatgggga

SEQ ID NO: 2080074 - DNA, 15 bp, Homo sapiens
gagagtgatggggaa

SEQ ID NO: 2080075 - DNA, 15 bp, Homo sapiens
agagtgatggggaaa

SEQ ID NO: 2080076 - DNA, 15 bp, Homo sapiens
gagtgatggggaaac

SEQ ID NO: 2080077 - DNA, 15 bp, Homo sapiens
agtgatggggaaaca

SEQ ID NO: 2080078 - DNA, 15 bp, Homo sapiens
gtgatggggaaacag

SEQ ID NO: 2080079 - DNA, 15 bp, Homo sapiens
tgatggggaaacaga

SEQ ID NO: 2080080 - DNA, 15 bp, Homo sapiens
gatggggaaacagac

SEQ ID NO: 2080081 - DNA, 15 bp, Homo sapiens
atggggaaacagaca

SEQ ID NO: 2080082 - DNA, 15 bp, Homo sapiens
tggggaaacagacat

SEQ ID NO: 2080083 - DNA, 15 bp, Homo sapiens
ggggaaacagacatg

SEQ ID NO: 2080084 - DNA, 15 bp, Homo sapiens
gggaaacagacatgg

SEQ ID NO: 2080085 - DNA, 15 bp, Homo sapiens
ggaaacagacatggt

SEQ ID NO: 2080086 - DNA, 15 bp, Homo sapiens
gaaacagacatggtc

SEQ ID NO: 2080087 - DNA, 15 bp, Homo sapiens
aaacagacatggtct

SEQ ID NO: 2080088 - DNA, 15 bp, Homo sapiens
aacagacatggtctc

SEQ ID NO: 2080089 - DNA, 15 bp, Homo sapiens
acagacatggtctct

SEQ ID NO: 2080090 - DNA, 15 bp, Homo sapiens
cagacatggtctcta

SEQ ID NO: 2080091 - DNA, 15 bp, Homo sapiens
agacatggtctctac

SEQ ID NO: 2080092 - DNA, 15 bp, Homo sapiens
gacatggtctctacc

SEQ ID NO: 2080093 - DNA, 15 bp, Homo sapiens
acatggtctctaccc

SEQ ID NO: 2080094 - DNA, 15 bp, Homo sapiens
catggtctctaccct

SEQ ID NO: 2080095 - DNA, 15 bp, Homo sapiens
atggtctctaccctc

SEQ ID NO: 2080096 - DNA, 15 bp, Homo sapiens
tggtctctaccctcc

SEQ ID NO: 2080097 - DNA, 15 bp, Homo sapiens
ggtctctaccctcct

SEQ ID NO: 2080098 - DNA, 15 bp, Homo sapiens
gtctctaccctcctt

SEQ ID NO: 2080099 - DNA, 15 bp, Homo sapiens
tctctaccctccttg

SEQ ID NO: 2080100 - DNA, 15 bp, Homo sapiens
ctctaccctccttgt

SEQ ID NO: 2080101 - DNA, 15 bp, Homo sapiens
tctaccctccttgtg

SEQ ID NO: 2080102 - DNA, 15 bp, Homo sapiens
ctaccctccttgtgt

SEQ ID NO: 2080103 - DNA, 15 bp, Homo sapiens
taccctccttgtgtg

SEQ ID NO: 2080104 - DNA, 15 bp, Homo sapiens
accctccttgtgtgg

SEQ ID NO: 2080105 - DNA, 15 bp, Homo sapiens
ccctccttgtgtggg

SEQ ID NO: 2080106 - DNA, 15 bp, Homo sapiens
cctccttgtgtggga

SEQ ID NO: 2080107 - DNA, 15 bp, Homo sapiens
ctccttgtgtgggac

SEQ ID NO: 2080108 - DNA, 15 bp, Homo sapiens
tccttgtgtgggacc

SEQ ID NO: 2080109 - DNA, 15 bp, Homo sapiens
ccttgtgtgggaccg

SEQ ID NO: 2080110 - DNA, 15 bp, Homo sapiens
cttgtgtgggaccga

SEQ ID NO: 2080111 - DNA, 15 bp, Homo sapiens
ttgtgtgggaccgag

SEQ ID NO: 2080112 - DNA, 15 bp, Homo sapiens
tgtgtgggaccgagg

SEQ ID NO: 2080113 - DNA, 15 bp, Homo sapiens
gtgtgggaccgaggc

SEQ ID NO: 2080114 - DNA, 15 bp, Homo sapiens
tgtgggaccgaggct

SEQ ID NO: 2080115 - DNA, 15 bp, Homo sapiens
gtgggaccgaggctg

SEQ ID NO: 2080116 - DNA, 15 bp, Homo sapiens
tgggaccgaggctgg

SEQ ID NO: 2080117 - DNA, 15 bp, Homo sapiens
gggaccgaggctggt

SEQ ID NO: 2080118 - DNA, 15 bp, Homo sapiens
ggaccgaggctggtg

SEQ ID NO: 2080119 - DNA, 15 bp, Homo sapiens
gaccgaggctggtgg

SEQ ID NO: 2080120 - DNA, 15 bp, Homo sapiens
accgaggctggtggg

SEQ ID NO: 2080121 - DNA, 15 bp, Homo sapiens
ccgaggctggtggga

SEQ ID NO: 2080122 - DNA, 15 bp, Homo sapiens
cgaggctggtgggag

SEQ ID NO: 2080123 - DNA, 15 bp, Homo sapiens
gaggctggtgggaga

SEQ ID NO: 2080124 - DNA, 15 bp, Homo sapiens
ggctggtgggagagt

SEQ ID NO: 2080125 - DNA, 15 bp, Homo sapiens
gctggtgggagagtc

SEQ ID NO: 2080126 - DNA, 15 bp, Homo sapiens
ctggtgggagagtca

SEQ ID NO: 2080127 - DNA, 15 bp, Homo sapiens
tggtgggagagtcag

SEQ ID NO: 2080128 - DNA, 15 bp, Homo sapiens
ggtgggagagtcaga

SEQ ID NO: 2080129 - DNA, 15 bp, Homo sapiens
gtgggagagtcagac

SEQ ID NO: 2080130 - DNA, 15 bp, Homo sapiens
tgggagagtcagact

SEQ ID NO: 2080131 - DNA, 15 bp, Homo sapiens
gggagagtcagactt

SEQ ID NO: 2080132 - DNA, 15 bp, Homo sapiens
ggagagtcagacttt

SEQ ID NO: 2080133 - DNA, 15 bp, Homo sapiens
gagagtcagacttta

SEQ ID NO: 2080134 - DNA, 15 bp, Homo sapiens
agagtcagactttaa

SEQ ID NO: 2080135 - DNA, 15 bp, Homo sapiens
gagtcagactttaaa

SEQ ID NO: 2080136 - DNA, 15 bp, Homo sapiens
agtcagactttaaac

SEQ ID NO: 2080137 - DNA, 15 bp, Homo sapiens
gtcagactttaaaca

SEQ ID NO: 2080138 - DNA, 15 bp, Homo sapiens
tcagactttaaacaa

SEQ ID NO: 2080139 - DNA, 15 bp, Homo sapiens
cagactttaaacaac

SEQ ID NO: 2080140 - DNA, 15 bp, Homo sapiens
agactttaaacaaca

SEQ ID NO: 2080141 - DNA, 15 bp, Homo sapiens
gactttaaacaacag

SEQ ID NO: 2080142 - DNA, 15 bp, Homo sapiens
actttaaacaacaga

SEQ ID NO: 2080143 - DNA, 15 bp, Homo sapiens
ctttaaacaacagag

SEQ ID NO: 2080144 - DNA, 15 bp, Homo sapiens
tttaaacaacagagc

SEQ ID NO: 2080145 - DNA, 15 bp, Homo sapiens
ttaaacaacagagca

SEQ ID NO: 2080146 - DNA, 15 bp, Homo sapiens
taaacaacagagcac

SEQ ID NO: 2080147 - DNA, 15 bp, Homo sapiens
aaacaacagagcacc

SEQ ID NO: 2080148 - DNA, 15 bp, Homo sapiens
aacaacagagcacca

SEQ ID NO: 2080149 - DNA, 15 bp, Homo sapiens
acaacagagcaccag

SEQ ID NO: 2080150 - DNA, 15 bp, Homo sapiens
caacagagcaccagg

SEQ ID NO: 2080151 - DNA, 15 bp, Homo sapiens
aacagagcaccaggg

SEQ ID NO: 2080152 - DNA, 15 bp, Homo sapiens
acagagcaccaggga

SEQ ID NO: 2080153 - DNA, 15 bp, Homo sapiens
cagagcaccagggag

SEQ ID NO: 2080154 - DNA, 15 bp, Homo sapiens
agagcaccagggagt

SEQ ID NO: 2080155 - DNA, 15 bp, Homo sapiens
gagcaccagggagta

SEQ ID NO: 2080156 - DNA, 15 bp, Homo sapiens
agcaccagggagtat

SEQ ID NO: 2080157 - DNA, 15 bp, Homo sapiens
gcaccagggagtatg

SEQ ID NO: 2080158 - DNA, 15 bp, Homo sapiens
caccagggagtatgt

SEQ ID NO: 2080159 - DNA, 15 bp, Homo sapiens
accagggagtatgtg

SEQ ID NO: 2080160 - DNA, 15 bp, Homo sapiens
ccagggagtatgtgg

SEQ ID NO: 2080161 - DNA, 15 bp, Homo sapiens
cagggagtatgtggt

SEQ ID NO: 2080162 - DNA, 15 bp, Homo sapiens
agggagtatgtggtt

SEQ ID NO: 2080163 - DNA, 15 bp, Homo sapiens
gggagtatgtggttt

SEQ ID NO: 2080164 - DNA, 15 bp, Homo sapiens
ggagtatgtggtttt

SEQ ID NO: 2080165 - DNA, 15 bp, Homo sapiens
gagtatgtggttttc

SEQ ID NO: 2080166 - DNA, 15 bp, Homo sapiens
agtatgtggttttca

SEQ ID NO: 2080167 - DNA, 15 bp, Homo sapiens
gtatgtggttttcat

SEQ ID NO: 2080168 - DNA, 15 bp, Homo sapiens
tatgtggttttcatt

SEQ ID NO: 2080169 - DNA, 15 bp, Homo sapiens
atgtggttttcattt

SEQ ID NO: 2080170 - DNA, 15 bp, Homo sapiens
gtggttttcatttgt

SEQ ID NO: 2080171 - DNA, 15 bp, Homo sapiens
tggttttcatttgtg

SEQ ID NO: 2080172 - DNA, 15 bp, Homo sapiens
ggttttcatttgtga

SEQ ID NO: 2080173 - DNA, 15 bp, Homo sapiens
gttttcatttgtgac

SEQ ID NO: 2080174 - DNA, 15 bp, Homo sapiens
ttttcatttgtgaca

SEQ ID NO: 2080175 - DNA, 15 bp, Homo sapiens
tttcatttgtgacaa

SEQ ID NO: 2080176 - DNA, 15 bp, Homo sapiens
ttcatttgtgacaaa

SEQ ID NO: 2080177 - DNA, 15 bp, Homo sapiens
tcatttgtgacaaat

SEQ ID NO: 2080178 - DNA, 15 bp, Homo sapiens
catttgtgacaaatg

SEQ ID NO: 2080179 - DNA, 15 bp, Homo sapiens
atttgtgacaaatgc

SEQ ID NO: 2080180 - DNA, 15 bp, Homo sapiens
tttgtgacaaatgcc

SEQ ID NO: 2080181 - DNA, 15 bp, Homo sapiens
ttgtgacaaatgcca

SEQ ID NO: 2080182 - DNA, 15 bp, Homo sapiens
tgtgacaaatgccag

SEQ ID NO: 2080183 - DNA, 15 bp, Homo sapiens
gtgacaaatgccagg

SEQ ID NO: 2080184 - DNA, 15 bp, Homo sapiens
tgacaaatgccagga

SEQ ID NO: 2080185 - DNA, 15 bp, Homo sapiens
gacaaatgccaggaa

SEQ ID NO: 2080186 - DNA, 15 bp, Homo sapiens
acaaatgccaggaag

SEQ ID NO: 2080187 - DNA, 15 bp, Homo sapiens
caaatgccaggaagc

SEQ ID NO: 2080188 - DNA, 15 bp, Homo sapiens
aaatgccaggaagca

SEQ ID NO: 2080189 - DNA, 15 bp, Homo sapiens
aatgccaggaagcac

SEQ ID NO: 2080190 - DNA, 15 bp, Homo sapiens
atgccaggaagcaca

SEQ ID NO: 2080191 - DNA, 15 bp, Homo sapiens
tgccaggaagcacaa

SEQ ID NO: 2080192 - DNA, 15 bp, Homo sapiens
gccaggaagcacaag

SEQ ID NO: 2080193 - DNA, 15 bp, Homo sapiens
ccaggaagcacaagt

SEQ ID NO: 2080194 - DNA, 15 bp, Homo sapiens
caggaagcacaagta

SEQ ID NO: 2080195 - DNA, 15 bp, Homo sapiens
aggaagcacaagtaa

SEQ ID NO: 2080196 - DNA, 15 bp, Homo sapiens
ggaagcacaagtaag

SEQ ID NO: 2080197 - DNA, 15 bp, Homo sapiens
gaagcacaagtaagg

SEQ ID NO: 2080198 - DNA, 15 bp, Homo sapiens
aagcacaagtaagga

SEQ ID NO: 2080199 - DNA, 15 bp, Homo sapiens
agcacaagtaaggag

SEQ ID NO: 2080200 - DNA, 15 bp, Homo sapiens
gcacaagtaaggagt

SEQ ID NO: 2080201 - DNA, 15 bp, Homo sapiens
cacaagtaaggagtt

SEQ ID NO: 2080202 - DNA, 15 bp, Homo sapiens
acaagtaaggagttg

SEQ ID NO: 2080203 - DNA, 15 bp, Homo sapiens
caagtaaggagttgg

SEQ ID NO: 2080204 - DNA, 15 bp, Homo sapiens
aagtaaggagttggt

SEQ ID NO: 2080205 - DNA, 15 bp, Homo sapiens
agtaaggagttggtg

SEQ ID NO: 2080206 - DNA, 15 bp, Homo sapiens
gtaaggagttggtga

SEQ ID NO: 2080207 - DNA, 15 bp, Homo sapiens
taaggagttggtgat

SEQ ID NO: 2080208 - DNA, 15 bp, Homo sapiens
aaggagttggtgata

SEQ ID NO: 2080209 - DNA, 15 bp, Homo sapiens
aggagttggtgataa

SEQ ID NO: 2080210 - DNA, 15 bp, Homo sapiens
ggagttggtgataaa

SEQ ID NO: 2080211 - DNA, 15 bp, Homo sapiens
gagttggtgataaag

SEQ ID NO: 2080212 - DNA, 15 bp, Homo sapiens
agttggtgataaagt

SEQ ID NO: 2080213 - DNA, 15 bp, Homo sapiens
gttggtgataaagtg

SEQ ID NO: 2080214 - DNA, 15 bp, Homo sapiens
ttggtgataaagtgt

SEQ ID NO: 2080215 - DNA, 15 bp, Homo sapiens
tggtgataaagtgta

SEQ ID NO: 2080216 - DNA, 15 bp, Homo sapiens
ggtgataaagtgtaa

SEQ ID NO: 2080217 - DNA, 15 bp, Homo sapiens
gtgataaagtgtaat

SEQ ID NO: 2080218 - DNA, 15 bp, Homo sapiens
tgataaagtgtaatt

SEQ ID NO: 2080219 - DNA, 15 bp, Homo sapiens
gataaagtgtaattt

SEQ ID NO: 2080220 - DNA, 15 bp, Homo sapiens
ataaagtgtaattta

SEQ ID NO: 2080221 - DNA, 15 bp, Homo sapiens
taaagtgtaatttaa

SEQ ID NO: 2080222 - DNA, 15 bp, Homo sapiens
aaagtgtaatttaaa

SEQ ID NO: 2080223 - DNA, 15 bp, Homo sapiens
aagtgtaatttaaac

SEQ ID NO: 2080224 - DNA, 15 bp, Homo sapiens
agtgtaatttaaact

SEQ ID NO: 2080225 - DNA, 15 bp, Homo sapiens
gtgtaatttaaacta

SEQ ID NO: 2080226 - DNA, 15 bp, Homo sapiens
tgtaatttaaactag

SEQ ID NO: 2080227 - DNA, 15 bp, Homo sapiens
gtaatttaaactagg

SEQ ID NO: 2080228 - DNA, 15 bp, Homo sapiens
taatttaaactaggg

SEQ ID NO: 2080229 - DNA, 15 bp, Homo sapiens
aatttaaactagggt

SEQ ID NO: 2080230 - DNA, 15 bp, Homo sapiens
atttaaactagggtc

SEQ ID NO: 2080231 - DNA, 15 bp, Homo sapiens
tttaaactagggtct

SEQ ID NO: 2080232 - DNA, 15 bp, Homo sapiens
ttaaactagggtcta

SEQ ID NO: 2080233 - DNA, 15 bp, Homo sapiens
taaactagggtctaa

SEQ ID NO: 2080234 - DNA, 15 bp, Homo sapiens
aaactagggtctaaa

SEQ ID NO: 2080235 - DNA, 15 bp, Homo sapiens
aactagggtctaaat

SEQ ID NO: 2080236 - DNA, 15 bp, Homo sapiens
actagggtctaaatg

SEQ ID NO: 2080237 - DNA, 15 bp, Homo sapiens
ctagggtctaaatga

SEQ ID NO: 2080238 - DNA, 15 bp, Homo sapiens
tagggtctaaatgat

SEQ ID NO: 2080239 - DNA, 15 bp, Homo sapiens
agggtctaaatgata

SEQ ID NO: 2080240 - DNA, 15 bp, Homo sapiens
gggtctaaatgataa

SEQ ID NO: 2080241 - DNA, 15 bp, Homo sapiens
ggtctaaatgataag

SEQ ID NO: 2080242 - DNA, 15 bp, Homo sapiens
gtctaaatgataagt

SEQ ID NO: 2080243 - DNA, 15 bp, Homo sapiens
tctaaatgataagtc

SEQ ID NO: 2080244 - DNA, 15 bp, Homo sapiens
ctaaatgataagtcc

SEQ ID NO: 2080245 - DNA, 15 bp, Homo sapiens
taaatgataagtccg

SEQ ID NO: 2080246 - DNA, 15 bp, Homo sapiens
aaatgataagtccgg

SEQ ID NO: 2080247 - DNA, 15 bp, Homo sapiens
aatgataagtccgga

SEQ ID NO: 2080248 - DNA, 15 bp, Homo sapiens
atgataagtccggag

SEQ ID NO: 2080249 - DNA, 15 bp, Homo sapiens
tgataagtccggagt

SEQ ID NO: 2080250 - DNA, 15 bp, Homo sapiens
gataagtccggagtc

SEQ ID NO: 2080251 - DNA, 15 bp, Homo sapiens
ataagtccggagtcc

SEQ ID NO: 2080252 - DNA, 15 bp, Homo sapiens
taagtccggagtcct

SEQ ID NO: 2080253 - DNA, 15 bp, Homo sapiens
aagtccggagtcctt

SEQ ID NO: 2080254 - DNA, 15 bp, Homo sapiens
agtccggagtccttc

SEQ ID NO: 2080255 - DNA, 15 bp, Homo sapiens
gtccggagtccttcc

SEQ ID NO: 2080256 - DNA, 15 bp, Homo sapiens
tccggagtccttcca

SEQ ID NO: 2080257 - DNA, 15 bp, Homo sapiens
ccggagtccttccag

SEQ ID NO: 2080258 - DNA, 15 bp, Homo sapiens
cggagtccttccagt

SEQ ID NO: 2080259 - DNA, 15 bp, Homo sapiens
ggagtccttccagtg

SEQ ID NO: 2080260 - DNA, 15 bp, Homo sapiens
gagtccttccagtga

SEQ ID NO: 2080261 - DNA, 15 bp, Homo sapiens
agtccttccagtgaa

SEQ ID NO: 2080262 - DNA, 15 bp, Homo sapiens
gtccttccagtgaaa

SEQ ID NO: 2080263 - DNA, 15 bp, Homo sapiens
tccttccagtgaaat

SEQ ID NO: 2080264 - DNA, 15 bp, Homo sapiens
ccttccagtgaaata

SEQ ID NO: 2080265 - DNA, 15 bp, Homo sapiens
cttccagtgaaataa

SEQ ID NO: 2080266 - DNA, 15 bp, Homo sapiens
ttccagtgaaataag

SEQ ID NO: 2080267 - DNA, 15 bp, Homo sapiens
tccagtgaaataagg

SEQ ID NO: 2080268 - DNA, 15 bp, Homo sapiens
ccagtgaaataagga

SEQ ID NO: 2080269 - DNA, 15 bp, Homo sapiens
cagtgaaataaggac

SEQ ID NO: 2080270 - DNA, 15 bp, Homo sapiens
agtgaaataaggaca

SEQ ID NO: 2080271 - DNA, 15 bp, Homo sapiens
gtgaaataaggacag

SEQ ID NO: 2080272 - DNA, 15 bp, Homo sapiens
tgaaataaggacagg

SEQ ID NO: 2080273 - DNA, 15 bp, Homo sapiens
gaaataaggacagga

SEQ ID NO: 2080274 - DNA, 15 bp, Homo sapiens
aaataaggacaggag

SEQ ID NO: 2080275 - DNA, 15 bp, Homo sapiens
aataaggacaggagg

SEQ ID NO: 2080276 - DNA, 15 bp, Homo sapiens
ataaggacaggagga

SEQ ID NO: 2080277 - DNA, 15 bp, Homo sapiens
taaggacaggaggag

SEQ ID NO: 2080278 - DNA, 15 bp, Homo sapiens
aaggacaggaggagg

SEQ ID NO: 2080279 - DNA, 15 bp, Homo sapiens
aggacaggaggaggg

SEQ ID NO: 2080280 - DNA, 15 bp, Homo sapiens
ggacaggaggagggt

SEQ ID NO: 2080281 - DNA, 15 bp, Homo sapiens
gacaggaggagggta

SEQ ID NO: 2080282 - DNA, 15 bp, Homo sapiens
acaggaggagggtat

SEQ ID NO: 2080283 - DNA, 15 bp, Homo sapiens
caggaggagggtatt

SEQ ID NO: 2080284 - DNA, 15 bp, Homo sapiens
aggaggagggtattc

SEQ ID NO: 2080285 - DNA, 15 bp, Homo sapiens
ggaggagggtattcc

SEQ ID NO: 2080286 - DNA, 15 bp, Homo sapiens
gaggagggtattcca

SEQ ID NO: 2080287 - DNA, 15 bp, Homo sapiens
aggagggtattccag

SEQ ID NO: 2080288 - DNA, 15 bp, Homo sapiens
ggagggtattccagc

SEQ ID NO: 2080289 - DNA, 15 bp, Homo sapiens
gagggtattccagct

SEQ ID NO: 2080290 - DNA, 15 bp, Homo sapiens
agggtattccagcta

SEQ ID NO: 2080291 - DNA, 15 bp, Homo sapiens
gggtattccagctag

SEQ ID NO: 2080292 - DNA, 15 bp, Homo sapiens
ggtattccagctaga

SEQ ID NO: 2080293 - DNA, 15 bp, Homo sapiens
gtattccagctagag

SEQ ID NO: 2080294 - DNA, 15 bp, Homo sapiens
tattccagctagaga

SEQ ID NO: 2080295 - DNA, 15 bp, Homo sapiens
attccagctagagac

SEQ ID NO: 2080296 - DNA, 15 bp, Homo sapiens
ttccagctagagaca

SEQ ID NO: 2080297 - DNA, 15 bp, Homo sapiens
tccagctagagacaa

SEQ ID NO: 2080298 - DNA, 15 bp, Homo sapiens
ccagctagagacaac

SEQ ID NO: 2080299 - DNA, 15 bp, Homo sapiens
cagctagagacaact

SEQ ID NO: 2080300 - DNA, 15 bp, Homo sapiens
agctagagacaactg

SEQ ID NO: 2080301 - DNA, 15 bp, Homo sapiens
gctagagacaactgc

SEQ ID NO: 2080302 - DNA, 15 bp, Homo sapiens
ctagagacaactgca

SEQ ID NO: 2080303 - DNA, 15 bp, Homo sapiens
tagagacaactgcag

SEQ ID NO: 2080304 - DNA, 15 bp, Homo sapiens
agagacaactgcagg

SEQ ID NO: 2080305 - DNA, 15 bp, Homo sapiens
gagacaactgcaggg

SEQ ID NO: 2080306 - DNA, 15 bp, Homo sapiens
agacaactgcaggga

SEQ ID NO: 2080307 - DNA, 15 bp, Homo sapiens
gacaactgcagggaa

SEQ ID NO: 2080308 - DNA, 15 bp, Homo sapiens
acaactgcagggaaa

SEQ ID NO: 2080309 - DNA, 15 bp, Homo sapiens
caactgcagggaaag

SEQ ID NO: 2080310 - DNA, 15 bp, Homo sapiens
aactgcagggaaagg

SEQ ID NO: 2080311 - DNA, 15 bp, Homo sapiens
actgcagggaaaggt

SEQ ID NO: 2080312 - DNA, 15 bp, Homo sapiens
ctgcagggaaaggtc

SEQ ID NO: 2080313 - DNA, 15 bp, Homo sapiens
tgcagggaaaggtct

SEQ ID NO: 2080314 - DNA, 15 bp, Homo sapiens
gcagggaaaggtctt

SEQ ID NO: 2080315 - DNA, 15 bp, Homo sapiens
cagggaaaggtcttg

SEQ ID NO: 2080316 - DNA, 15 bp, Homo sapiens
agggaaaggtcttga

SEQ ID NO: 2080317 - DNA, 15 bp, Homo sapiens
gggaaaggtcttgag

SEQ ID NO: 2080318 - DNA, 15 bp, Homo sapiens
ggaaaggtcttgagg

SEQ ID NO: 2080319 - DNA, 15 bp, Homo sapiens
gaaaggtcttgaggt

SEQ ID NO: 2080320 - DNA, 15 bp, Homo sapiens
aaaggtcttgaggtg

SEQ ID NO: 2080321 - DNA, 15 bp, Homo sapiens
aaggtcttgaggtgg

SEQ ID NO: 2080322 - DNA, 15 bp, Homo sapiens
aggtcttgaggtggg

SEQ ID NO: 2080323 - DNA, 15 bp, Homo sapiens
ggtcttgaggtgggg

SEQ ID NO: 2080324 - DNA, 15 bp, Homo sapiens
gtcttgaggtggggg

SEQ ID NO: 2080325 - DNA, 15 bp, Homo sapiens
tcttgaggtgggggt

SEQ ID NO: 2080326 - DNA, 15 bp, Homo sapiens
cttgaggtgggggtg

SEQ ID NO: 2080327 - DNA, 15 bp, Homo sapiens
ttgaggtgggggtga

SEQ ID NO: 2080328 - DNA, 15 bp, Homo sapiens
tgaggtgggggtgaa

SEQ ID NO: 2080329 - DNA, 15 bp, Homo sapiens
gaggtgggggtgaac

SEQ ID NO: 2080330 - DNA, 15 bp, Homo sapiens
aggtgggggtgaacc

SEQ ID NO: 2080331 - DNA, 15 bp, Homo sapiens
ggtgggggtgaacct

SEQ ID NO: 2080332 - DNA, 15 bp, Homo sapiens
gtgggggtgaacctg

SEQ ID NO: 2080333 - DNA, 15 bp, Homo sapiens
tgggggtgaacctgg

SEQ ID NO: 2080334 - DNA, 15 bp, Homo sapiens
gggggtgaacctggg

SEQ ID NO: 2080335 - DNA, 15 bp, Homo sapiens
ggggtgaacctgggc

SEQ ID NO: 2080336 - DNA, 15 bp, Homo sapiens
gggtgaacctgggca

SEQ ID NO: 2080337 - DNA, 15 bp, Homo sapiens
ggtgaacctgggcac

SEQ ID NO: 2080338 - DNA, 15 bp, Homo sapiens
gtgaacctgggcacc

SEQ ID NO: 2080339 - DNA, 15 bp, Homo sapiens
tgaacctgggcacct

SEQ ID NO: 2080340 - DNA, 15 bp, Homo sapiens
gaacctgggcacctg

SEQ ID NO: 2080341 - DNA, 15 bp, Homo sapiens
aacctgggcacctgt

SEQ ID NO: 2080342 - DNA, 15 bp, Homo sapiens
acctgggcacctgtg

SEQ ID NO: 2080343 - DNA, 15 bp, Homo sapiens
cctgggcacctgtga

SEQ ID NO: 2080344 - DNA, 15 bp, Homo sapiens
ctgggcacctgtgaa

SEQ ID NO: 2080345 - DNA, 15 bp, Homo sapiens
tgggcacctgtgaag

SEQ ID NO: 2080346 - DNA, 15 bp, Homo sapiens
gggcacctgtgaagg

SEQ ID NO: 2080347 - DNA, 15 bp, Homo sapiens
ggcacctgtgaagga

SEQ ID NO: 2080348 - DNA, 15 bp, Homo sapiens
gcacctgtgaaggaa

SEQ ID NO: 2080349 - DNA, 15 bp, Homo sapiens
cacctgtgaaggaaa

SEQ ID NO: 2080350 - DNA, 15 bp, Homo sapiens
acctgtgaaggaaag

SEQ ID NO: 2080351 - DNA, 15 bp, Homo sapiens
cctgtgaaggaaaga

SEQ ID NO: 2080352 - DNA, 15 bp, Homo sapiens
ctgtgaaggaaagag

SEQ ID NO: 2080353 - DNA, 15 bp, Homo sapiens
tgtgaaggaaagagt

SEQ ID NO: 2080354 - DNA, 15 bp, Homo sapiens
gtgaaggaaagagtg

SEQ ID NO: 2080355 - DNA, 15 bp, Homo sapiens
tgaaggaaagagtgg

SEQ ID NO: 2080356 - DNA, 15 bp, Homo sapiens
gaaggaaagagtggc

SEQ ID NO: 2080357 - DNA, 15 bp, Homo sapiens
aaggaaagagtggca

SEQ ID NO: 2080358 - DNA, 15 bp, Homo sapiens
aggaaagagtggcat

SEQ ID NO: 2080359 - DNA, 15 bp, Homo sapiens
ggaaagagtggcatg

SEQ ID NO: 2080360 - DNA, 15 bp, Homo sapiens
gaaagagtggcatga

SEQ ID NO: 2080361 - DNA, 15 bp, Homo sapiens
aaagagtggcatgag

SEQ ID NO: 2080362 - DNA, 15 bp, Homo sapiens
aagagtggcatgagg

SEQ ID NO: 2080363 - DNA, 15 bp, Homo sapiens
agagtggcatgaggt

SEQ ID NO: 2080364 - DNA, 15 bp, Homo sapiens
gagtggcatgaggtg

SEQ ID NO: 2080365 - DNA, 15 bp, Homo sapiens
agtggcatgaggtgc

SEQ ID NO: 2080366 - DNA, 15 bp, Homo sapiens
gtggcatgaggtgca

SEQ ID NO: 2080367 - DNA, 15 bp, Homo sapiens
tggcatgaggtgcag

SEQ ID NO: 2080368 - DNA, 15 bp, Homo sapiens
ggcatgaggtgcagt

SEQ ID NO: 2080369 - DNA, 15 bp, Homo sapiens
gcatgaggtgcagtc

SEQ ID NO: 2080370 - DNA, 15 bp, Homo sapiens
catgaggtgcagtca

SEQ ID NO: 2080371 - DNA, 15 bp, Homo sapiens
atgaggtgcagtcag

SEQ ID NO: 2080372 - DNA, 15 bp, Homo sapiens
tgaggtgcagtcaga

SEQ ID NO: 2080373 - DNA, 15 bp, Homo sapiens
gaggtgcagtcagag

SEQ ID NO: 2080374 - DNA, 15 bp, Homo sapiens
aggtgcagtcagagg

SEQ ID NO: 2080375 - DNA, 15 bp, Homo sapiens
ggtgcagtcagaggg

SEQ ID NO: 2080376 - DNA, 15 bp, Homo sapiens
gtgcagtcagagggg

SEQ ID NO: 2080377 - DNA, 15 bp, Homo sapiens
tgcagtcagagggga

SEQ ID NO: 2080378 - DNA, 15 bp, Homo sapiens
gcagtcagaggggaa

SEQ ID NO: 2080379 - DNA, 15 bp, Homo sapiens
cagtcagaggggaag

SEQ ID NO: 2080380 - DNA, 15 bp, Homo sapiens
agtcagaggggaaga

SEQ ID NO: 2080381 - DNA, 15 bp, Homo sapiens
gtcagaggggaagag

SEQ ID NO: 2080382 - DNA, 15 bp, Homo sapiens
tcagaggggaagagg

SEQ ID NO: 2080383 - DNA, 15 bp, Homo sapiens
cagaggggaagaggt

SEQ ID NO: 2080384 - DNA, 15 bp, Homo sapiens
agaggggaagaggtg

SEQ ID NO: 2080385 - DNA, 15 bp, Homo sapiens
gaggggaagaggtgg

SEQ ID NO: 2080386 - DNA, 15 bp, Homo sapiens
aggggaagaggtgga

SEQ ID NO: 2080387 - DNA, 15 bp, Homo sapiens
ggggaagaggtggag

SEQ ID NO: 2080388 - DNA, 15 bp, Homo sapiens
gggaagaggtggagt

SEQ ID NO: 2080389 - DNA, 15 bp, Homo sapiens
ggaagaggtggagtc

SEQ ID NO: 2080390 - DNA, 15 bp, Homo sapiens
gaagaggtggagtcc

SEQ ID NO: 2080391 - DNA, 15 bp, Homo sapiens
aagaggtggagtcct

SEQ ID NO: 2080392 - DNA, 15 bp, Homo sapiens
agaggtggagtcctg

SEQ ID NO: 2080393 - DNA, 15 bp, Homo sapiens
gaggtggagtcctgt

SEQ ID NO: 2080394 - DNA, 15 bp, Homo sapiens
aggtggagtcctgta

SEQ ID NO: 2080395 - DNA, 15 bp, Homo sapiens
ggtggagtcctgtag

SEQ ID NO: 2080396 - DNA, 15 bp, Homo sapiens
gtggagtcctgtagg

SEQ ID NO: 2080397 - DNA, 15 bp, Homo sapiens
tggagtcctgtagga

SEQ ID NO: 2080398 - DNA, 15 bp, Homo sapiens
ggagtcctgtaggag

SEQ ID NO: 2080399 - DNA, 15 bp, Homo sapiens
gagtcctgtaggaga

SEQ ID NO: 2080400 - DNA, 15 bp, Homo sapiens
agtcctgtaggagag

SEQ ID NO: 2080401 - DNA, 15 bp, Homo sapiens
gtcctgtaggagagg

SEQ ID NO: 2080402 - DNA, 15 bp, Homo sapiens
tcctgtaggagaggg

SEQ ID NO: 2080403 - DNA, 15 bp, Homo sapiens
cctgtaggagagggg

SEQ ID NO: 2080404 - DNA, 15 bp, Homo sapiens
ctgtaggagagggga

SEQ ID NO: 2080405 - DNA, 15 bp, Homo sapiens
tgtaggagaggggaa

SEQ ID NO: 2080406 - DNA, 15 bp, Homo sapiens
gtaggagaggggaag

SEQ ID NO: 2080407 - DNA, 15 bp, Homo sapiens
taggagaggggaagg

SEQ ID NO: 2080408 - DNA, 15 bp, Homo sapiens
aggagaggggaagga

SEQ ID NO: 2080409 - DNA, 15 bp, Homo sapiens
ggagaggggaaggac

SEQ ID NO: 2080410 - DNA, 15 bp, Homo sapiens
gagaggggaaggacc

SEQ ID NO: 2080411 - DNA, 15 bp, Homo sapiens
agaggggaaggacct

SEQ ID NO: 2080412 - DNA, 15 bp, Homo sapiens
gaggggaaggacctg

SEQ ID NO: 2080413 - DNA, 15 bp, Homo sapiens
aggggaaggacctgg

SEQ ID NO: 2080414 - DNA, 15 bp, Homo sapiens
ggggaaggacctgga

SEQ ID NO: 2080415 - DNA, 15 bp, Homo sapiens
gggaaggacctggat

SEQ ID NO: 2080416 - DNA, 15 bp, Homo sapiens
ggaaggacctggatt

SEQ ID NO: 2080417 - DNA, 15 bp, Homo sapiens
gaaggacctggattt

SEQ ID NO: 2080418 - DNA, 15 bp, Homo sapiens
aaggacctggatttg

SEQ ID NO: 2080419 - DNA, 15 bp, Homo sapiens
aggacctggatttga

SEQ ID NO: 2080420 - DNA, 15 bp, Homo sapiens
ggacctggatttgag

SEQ ID NO: 2080421 - DNA, 15 bp, Homo sapiens
gacctggatttgagt

SEQ ID NO: 2080422 - DNA, 15 bp, Homo sapiens
acctggatttgagtg

SEQ ID NO: 2080423 - DNA, 15 bp, Homo sapiens
cctggatttgagtga

SEQ ID NO: 2080424 - DNA, 15 bp, Homo sapiens
ctggatttgagtgat

SEQ ID NO: 2080425 - DNA, 15 bp, Homo sapiens
tggatttgagtgatg

SEQ ID NO: 2080426 - DNA, 15 bp, Homo sapiens
ggatttgagtgatgg

SEQ ID NO: 2080427 - DNA, 15 bp, Homo sapiens
gatttgagtgatggg

SEQ ID NO: 2080428 - DNA, 15 bp, Homo sapiens
atttgagtgatgggg

SEQ ID NO: 2080429 - DNA, 15 bp, Homo sapiens
tttgagtgatggggg

SEQ ID NO: 2080430 - DNA, 15 bp, Homo sapiens
ttgagtgatgggggc

SEQ ID NO: 2080431 - DNA, 15 bp, Homo sapiens
tgagtgatgggggca

SEQ ID NO: 2080432 - DNA, 15 bp, Homo sapiens
gagtgatgggggcat

SEQ ID NO: 2080433 - DNA, 15 bp, Homo sapiens
agtgatgggggcatg

SEQ ID NO: 2080434 - DNA, 15 bp, Homo sapiens
gtgatgggggcatga

SEQ ID NO: 2080435 - DNA, 15 bp, Homo sapiens
tgatgggggcatgaa

SEQ ID NO: 2080436 - DNA, 15 bp, Homo sapiens
gatgggggcatgaaa

SEQ ID NO: 2080437 - DNA, 15 bp, Homo sapiens
atgggggcatgaaag

SEQ ID NO: 2080438 - DNA, 15 bp, Homo sapiens
tgggggcatgaaagc

SEQ ID NO: 2080439 - DNA, 15 bp, Homo sapiens
gggggcatgaaagct

SEQ ID NO: 2080440 - DNA, 15 bp, Homo sapiens
ggggcatgaaagctg

SEQ ID NO: 2080441 - DNA, 15 bp, Homo sapiens
gggcatgaaagctga

SEQ ID NO: 2080442 - DNA, 15 bp, Homo sapiens
ggcatgaaagctgaa

SEQ ID NO: 2080443 - DNA, 15 bp, Homo sapiens
gcatgaaagctgaaa

SEQ ID NO: 2080444 - DNA, 15 bp, Homo sapiens
catgaaagctgaaat

SEQ ID NO: 2080445 - DNA, 15 bp, Homo sapiens
atgaaagctgaaata

SEQ ID NO: 2080446 - DNA, 15 bp, Homo sapiens
tgaaagctgaaatag

SEQ ID NO: 2080447 - DNA, 15 bp, Homo sapiens
gaaagctgaaataga

SEQ ID NO: 2080448 - DNA, 15 bp, Homo sapiens
aaagctgaaatagat

SEQ ID NO: 2080449 - DNA, 15 bp, Homo sapiens
aagctgaaatagatg

SEQ ID NO: 2080450 - DNA, 15 bp, Homo sapiens
agctgaaatagatga

SEQ ID NO: 2080451 - DNA, 15 bp, Homo sapiens
gctgaaatagatgac

SEQ ID NO: 2080452 - DNA, 15 bp, Homo sapiens
ctgaaatagatgact

SEQ ID NO: 2080453 - DNA, 15 bp, Homo sapiens
tgaaatagatgactg

SEQ ID NO: 2080454 - DNA, 15 bp, Homo sapiens
gaaatagatgactgt

SEQ ID NO: 2080455 - DNA, 15 bp, Homo sapiens
aaatagatgactgtt

SEQ ID NO: 2080456 - DNA, 15 bp, Homo sapiens
aatagatgactgttg

SEQ ID NO: 2080457 - DNA, 15 bp, Homo sapiens
atagatgactgttgc

SEQ ID NO: 2080458 - DNA, 15 bp, Homo sapiens
tagatgactgttgcg

SEQ ID NO: 2080459 - DNA, 15 bp, Homo sapiens
agatgactgttgcgt

SEQ ID NO: 2080460 - DNA, 15 bp, Homo sapiens
gatgactgttgcgtg

SEQ ID NO: 2080461 - DNA, 15 bp, Homo sapiens
atgactgttgcgtga

SEQ ID NO: 2080462 - DNA, 15 bp, Homo sapiens
tgactgttgcgtgaa

SEQ ID NO: 2080463 - DNA, 15 bp, Homo sapiens
gactgttgcgtgaac

SEQ ID NO: 2080464 - DNA, 15 bp, Homo sapiens
actgttgcgtgaaca

SEQ ID NO: 2080465 - DNA, 15 bp, Homo sapiens
ctgttgcgtgaacaa

SEQ ID NO: 2080466 - DNA, 15 bp, Homo sapiens
tgttgcgtgaacaag

SEQ ID NO: 2080467 - DNA, 15 bp, Homo sapiens
gttgcgtgaacaagc

SEQ ID NO: 2080468 - DNA, 15 bp, Homo sapiens
ttgcgtgaacaagcc

SEQ ID NO: 2080469 - DNA, 15 bp, Homo sapiens
tgcgtgaacaagcca

SEQ ID NO: 2080470 - DNA, 15 bp, Homo sapiens
gcgtgaacaagccag

SEQ ID NO: 2080471 - DNA, 15 bp, Homo sapiens
cgtgaacaagccaga

SEQ ID NO: 2080472 - DNA, 15 bp, Homo sapiens
gtgaacaagccagac

SEQ ID NO: 2080473 - DNA, 15 bp, Homo sapiens
tgaacaagccagaca

SEQ ID NO: 2080474 - DNA, 15 bp, Homo sapiens
gaacaagccagacag

SEQ ID NO: 2080475 - DNA, 15 bp, Homo sapiens
aacaagccagacagt

SEQ ID NO: 2080476 - DNA, 15 bp, Homo sapiens
acaagccagacagtg

SEQ ID NO: 2080477 - DNA, 15 bp, Homo sapiens
caagccagacagtgg

SEQ ID NO: 2080478 - DNA, 15 bp, Homo sapiens
aagccagacagtggt

SEQ ID NO: 2080479 - DNA, 15 bp, Homo sapiens
agccagacagtggtc

SEQ ID NO: 2080480 - DNA, 15 bp, Homo sapiens
gccagacagtggtca

SEQ ID NO: 2080481 - DNA, 15 bp, Homo sapiens
ccagacagtggtcag

SEQ ID NO: 2080482 - DNA, 15 bp, Homo sapiens
cagacagtggtcaga

SEQ ID NO: 2080483 - DNA, 15 bp, Homo sapiens
agacagtggtcagaa

SEQ ID NO: 2080484 - DNA, 15 bp, Homo sapiens
gacagtggtcagaac

SEQ ID NO: 2080485 - DNA, 15 bp, Homo sapiens
acagtggtcagaaca

SEQ ID NO: 2080486 - DNA, 15 bp, Homo sapiens
cagtggtcagaacat

SEQ ID NO: 2080487 - DNA, 15 bp, Homo sapiens
agtggtcagaacata

SEQ ID NO: 2080488 - DNA, 15 bp, Homo sapiens
gtggtcagaacataa

SEQ ID NO: 2080489 - DNA, 15 bp, Homo sapiens
tggtcagaacataac

SEQ ID NO: 2080490 - DNA, 15 bp, Homo sapiens
ggtcagaacataaca

SEQ ID NO: 2080491 - DNA, 15 bp, Homo sapiens
gtcagaacataacaa

SEQ ID NO: 2080492 - DNA, 15 bp, Homo sapiens
tcagaacataacaac

SEQ ID NO: 2080493 - DNA, 15 bp, Homo sapiens
cagaacataacaaca

SEQ ID NO: 2080494 - DNA, 15 bp, Homo sapiens
agaacataacaacaa

SEQ ID NO: 2080495 - DNA, 15 bp, Homo sapiens
gaacataacaacaaa

SEQ ID NO: 2080496 - DNA, 15 bp, Homo sapiens
aacataacaacaaac

SEQ ID NO: 2080497 - DNA, 15 bp, Homo sapiens
acataacaacaaacc

SEQ ID NO: 2080498 - DNA, 15 bp, Homo sapiens
cataacaacaaacca

SEQ ID NO: 2080499 - DNA, 15 bp, Homo sapiens
ataacaacaaaccat

SEQ ID NO: 2080500 - DNA, 15 bp, Homo sapiens
taacaacaaaccata

SEQ ID NO: 2080501 - DNA, 15 bp, Homo sapiens
aacaacaaaccatag

SEQ ID NO: 2080502 - DNA, 15 bp, Homo sapiens
acaacaaaccatagt

SEQ ID NO: 2080503 - DNA, 15 bp, Homo sapiens
caacaaaccatagtg

SEQ ID NO: 2080504 - DNA, 15 bp, Homo sapiens
aacaaaccatagtgg

SEQ ID NO: 2080505 - DNA, 15 bp, Homo sapiens
acaaaccatagtggc

SEQ ID NO: 2080506 - DNA, 15 bp, Homo sapiens
caaaccatagtggcc

SEQ ID NO: 2080507 - DNA, 15 bp, Homo sapiens
aaaccatagtggccc

SEQ ID NO: 2080508 - DNA, 15 bp, Homo sapiens
aaccatagtggcccc

SEQ ID NO: 2080509 - DNA, 15 bp, Homo sapiens
accatagtggccccc

SEQ ID NO: 2080510 - DNA, 15 bp, Homo sapiens
ccatagtggccccct

SEQ ID NO: 2080511 - DNA, 15 bp, Homo sapiens
catagtggccccctc

SEQ ID NO: 2080512 - DNA, 15 bp, Homo sapiens
atagtggccccctca

SEQ ID NO: 2080513 - DNA, 15 bp, Homo sapiens
tagtggccccctcag

SEQ ID NO: 2080514 - DNA, 15 bp, Homo sapiens
agtggccccctcagc

SEQ ID NO: 2080515 - DNA, 15 bp, Homo sapiens
gtggccccctcagcc

SEQ ID NO: 2080516 - DNA, 15 bp, Homo sapiens
tggccccctcagcct

SEQ ID NO: 2080517 - DNA, 15 bp, Homo sapiens
ggccccctcagccta

SEQ ID NO: 2080518 - DNA, 15 bp, Homo sapiens
gccccctcagcctaa

SEQ ID NO: 2080519 - DNA, 15 bp, Homo sapiens
ccccctcagcctaaa

SEQ ID NO: 2080520 - DNA, 15 bp, Homo sapiens
cccctcagcctaaaa

SEQ ID NO: 2080521 - DNA, 15 bp, Homo sapiens
ccctcagcctaaaat

SEQ ID NO: 2080522 - DNA, 15 bp, Homo sapiens
cctcagcctaaaata

SEQ ID NO: 2080523 - DNA, 15 bp, Homo sapiens
ctcagcctaaaatat

SEQ ID NO: 2080524 - DNA, 15 bp, Homo sapiens
tcagcctaaaatatt

SEQ ID NO: 2080525 - DNA, 15 bp, Homo sapiens
gcctaaaatatttac

SEQ ID NO: 2080526 - DNA, 15 bp, Homo sapiens
ctaaaatatttactg

SEQ ID NO: 2080527 - DNA, 15 bp, Homo sapiens
taaaatatttactgt

SEQ ID NO: 2080528 - DNA, 15 bp, Homo sapiens
aaaatatttactgtc

SEQ ID NO: 2080529 - DNA, 15 bp, Homo sapiens
aaatatttactgtct

SEQ ID NO: 2080530 - DNA, 15 bp, Homo sapiens
aatatttactgtctg

SEQ ID NO: 2080531 - DNA, 15 bp, Homo sapiens
atatttactgtctgg

SEQ ID NO: 2080532 - DNA, 15 bp, Homo sapiens
tatttactgtctggc

SEQ ID NO: 2080533 - DNA, 15 bp, Homo sapiens
atttactgtctggct

SEQ ID NO: 2080534 - DNA, 15 bp, Homo sapiens
tttactgtctggctt

SEQ ID NO: 2080535 - DNA, 15 bp, Homo sapiens
ttactgtctggcttt

SEQ ID NO: 2080536 - DNA, 15 bp, Homo sapiens
tactgtctggctttt

SEQ ID NO: 2080537 - DNA, 15 bp, Homo sapiens
actgtctggcttttt

SEQ ID NO: 2080538 - DNA, 15 bp, Homo sapiens
ctgtctggctttttt

SEQ ID NO: 2080539 - DNA, 15 bp, Homo sapiens
tgtctggcttttttt

SEQ ID NO: 2080540 - DNA, 15 bp, Homo sapiens
gtctggctttttttt

SEQ ID NO: 2080541 - DNA, 15 bp, Homo sapiens
tctggcttttttttt

SEQ ID NO: 2080542 - DNA, 15 bp, Homo sapiens
ctggctttttttttt

SEQ ID NO: 2080543 - DNA, 15 bp, Homo sapiens
tggcttttttttttt

SEQ ID NO: 2080544 - DNA, 15 bp, Homo sapiens
gcttttttttttttc

SEQ ID NO: 2080545 - DNA, 15 bp, Homo sapiens
ttttttttcctcttt

SEQ ID NO: 2080546 - DNA, 15 bp, Homo sapiens
tttttttcctctttt

SEQ ID NO: 2080547 - DNA, 15 bp, Homo sapiens
ttttttcctcttttt

SEQ ID NO: 2080548 - DNA, 15 bp, Homo sapiens
tttcctcttttttga

SEQ ID NO: 2080549 - DNA, 15 bp, Homo sapiens
ttcctcttttttgag

SEQ ID NO: 2080550 - DNA, 15 bp, Homo sapiens
tcctcttttttgaga

SEQ ID NO: 2080551 - DNA, 15 bp, Homo sapiens
cctcttttttgagac

SEQ ID NO: 2080552 - DNA, 15 bp, Homo sapiens
ctcttttttgagaca

SEQ ID NO: 2080553 - DNA, 15 bp, Homo sapiens
cagggtctcactctc

SEQ ID NO: 2080554 - DNA, 15 bp, Homo sapiens
agggtctcactctca

SEQ ID NO: 2080555 - DNA, 15 bp, Homo sapiens
gggtctcactctcac

SEQ ID NO: 2080556 - DNA, 15 bp, Homo sapiens
ggtctcactctcacc

SEQ ID NO: 2080557 - DNA, 15 bp, Homo sapiens
gtctcactctcaccc

SEQ ID NO: 2080558 - DNA, 15 bp, Homo sapiens
tctcactctcaccca

SEQ ID NO: 2080559 - DNA, 15 bp, Homo sapiens
ctcactctcacccag

SEQ ID NO: 2080560 - DNA, 15 bp, Homo sapiens
tcactctcacccagg

SEQ ID NO: 2080561 - DNA, 15 bp, Homo sapiens
cactctcacccaggc

SEQ ID NO: 2080562 - DNA, 15 bp, Homo sapiens
actctcacccaggct

SEQ ID NO: 2080563 - DNA, 15 bp, Homo sapiens
ctctcacccaggctg

SEQ ID NO: 2080564 - DNA, 15 bp, Homo sapiens
tgcagtggcgctatc

SEQ ID NO: 2080565 - DNA, 15 bp, Homo sapiens
gcagtggcgctatct

SEQ ID NO: 2080566 - DNA, 15 bp, Homo sapiens
cagtggcgctatctc

SEQ ID NO: 2080567 - DNA, 15 bp, Homo sapiens
agtggcgctatctca

SEQ ID NO: 2080568 - DNA, 15 bp, Homo sapiens
gtggcgctatctcag

SEQ ID NO: 2080569 - DNA, 15 bp, Homo sapiens
tggcgctatctcagc

SEQ ID NO: 2080570 - DNA, 15 bp, Homo sapiens
ggcgctatctcagct

SEQ ID NO: 2080571 - DNA, 15 bp, Homo sapiens
gcgctatctcagctt

SEQ ID NO: 2080572 - DNA, 15 bp, Homo sapiens
cgctatctcagctta

SEQ ID NO: 2080573 - DNA, 15 bp, Homo sapiens
gctatctcagcttac

SEQ ID NO: 2080574 - DNA, 15 bp, Homo sapiens
ctatctcagcttact

SEQ ID NO: 2080575 - DNA, 15 bp, Homo sapiens
tatctcagcttactg

SEQ ID NO: 2080576 - DNA, 15 bp, Homo sapiens
atctcagcttactgc

SEQ ID NO: 2080577 - DNA, 15 bp, Homo sapiens
tctcagcttactgca

SEQ ID NO: 2080578 - DNA, 15 bp, Homo sapiens
ctcagcttactgcag

SEQ ID NO: 2080579 - DNA, 15 bp, Homo sapiens
tcagcttactgcagt

SEQ ID NO: 2080580 - DNA, 15 bp, Homo sapiens
cagcttactgcagtc

SEQ ID NO: 2080581 - DNA, 15 bp, Homo sapiens
agcttactgcagtct

SEQ ID NO: 2080582 - DNA, 15 bp, Homo sapiens
gcttactgcagtctc

SEQ ID NO: 2080583 - DNA, 15 bp, Homo sapiens
cttactgcagtctct

SEQ ID NO: 2080584 - DNA, 15 bp, Homo sapiens
ttactgcagtctctg

SEQ ID NO: 2080585 - DNA, 15 bp, Homo sapiens
tactgcagtctctgg

SEQ ID NO: 2080586 - DNA, 15 bp, Homo sapiens
actgcagtctctggc

SEQ ID NO: 2080587 - DNA, 15 bp, Homo sapiens
ctgcagtctctggct

SEQ ID NO: 2080588 - DNA, 15 bp, Homo sapiens
tgcagtctctggctt

SEQ ID NO: 2080589 - DNA, 15 bp, Homo sapiens
gcagtctctggcttt

SEQ ID NO: 2080590 - DNA, 15 bp, Homo sapiens
cagtctctggctttc

SEQ ID NO: 2080591 - DNA, 15 bp, Homo sapiens
agtctctggctttca

SEQ ID NO: 2080592 - DNA, 15 bp, Homo sapiens
gtctctggctttcag

SEQ ID NO: 2080593 - DNA, 15 bp, Homo sapiens
tctctggctttcagg

SEQ ID NO: 2080594 - DNA, 15 bp, Homo sapiens
ctctggctttcaggc

SEQ ID NO: 2080595 - DNA, 15 bp, Homo sapiens
tctggctttcaggct

SEQ ID NO: 2080596 - DNA, 15 bp, Homo sapiens
ctggctttcaggctc

SEQ ID NO: 2080597 - DNA, 15 bp, Homo sapiens
tggctttcaggctct

SEQ ID NO: 2080598 - DNA, 15 bp, Homo sapiens
ggctttcaggctcta

SEQ ID NO: 2080599 - DNA, 15 bp, Homo sapiens
gctttcaggctctag

SEQ ID NO: 2080600 - DNA, 15 bp, Homo sapiens
ctttcaggctctagc

SEQ ID NO: 2080601 - DNA, 15 bp, Homo sapiens
tttcaggctctagca

SEQ ID NO: 2080602 - DNA, 15 bp, Homo sapiens
ttcaggctctagcag

SEQ ID NO: 2080603 - DNA, 15 bp, Homo sapiens
tcaggctctagcagt

SEQ ID NO: 2080604 - DNA, 15 bp, Homo sapiens
caggctctagcagtc

SEQ ID NO: 2080605 - DNA, 15 bp, Homo sapiens
aggctctagcagtcc

SEQ ID NO: 2080606 - DNA, 15 bp, Homo sapiens
ggctctagcagtcct

SEQ ID NO: 2080607 - DNA, 15 bp, Homo sapiens
gctctagcagtcctc

SEQ ID NO: 2080608 - DNA, 15 bp, Homo sapiens
ctctagcagtcctcc

SEQ ID NO: 2080609 - DNA, 15 bp, Homo sapiens
tctagcagtcctccc

SEQ ID NO: 2080610 - DNA, 15 bp, Homo sapiens
ctagcagtcctccca

SEQ ID NO: 2080611 - DNA, 15 bp, Homo sapiens
tagcagtcctcccac

SEQ ID NO: 2080612 - DNA, 15 bp, Homo sapiens
agcagtcctcccacc

SEQ ID NO: 2080613 - DNA, 15 bp, Homo sapiens
gcagtcctcccacct

SEQ ID NO: 2080614 - DNA, 15 bp, Homo sapiens
cagtcctcccacctc

SEQ ID NO: 2080615 - DNA, 15 bp, Homo sapiens
agtcctcccacctca

SEQ ID NO: 2080616 - DNA, 15 bp, Homo sapiens
gtcctcccacctcag

SEQ ID NO: 2080617 - DNA, 15 bp, Homo sapiens
cacctcagcctcccg

SEQ ID NO: 2080618 - DNA, 15 bp, Homo sapiens
acctcagcctcccga

SEQ ID NO: 2080619 - DNA, 15 bp, Homo sapiens
gtagctgggactgct

SEQ ID NO: 2080620 - DNA, 15 bp, Homo sapiens
tagctgggactgcta

SEQ ID NO: 2080621 - DNA, 15 bp, Homo sapiens
agctgggactgctag

SEQ ID NO: 2080622 - DNA, 15 bp, Homo sapiens
gctgggactgctagt

SEQ ID NO: 2080623 - DNA, 15 bp, Homo sapiens
ctgggactgctagta

SEQ ID NO: 2080624 - DNA, 15 bp, Homo sapiens
tgggactgctagtag

SEQ ID NO: 2080625 - DNA, 15 bp, Homo sapiens
gggactgctagtagt

SEQ ID NO: 2080626 - DNA, 15 bp, Homo sapiens
ggactgctagtagta

SEQ ID NO: 2080627 - DNA, 15 bp, Homo sapiens
gactgctagtagtag

SEQ ID NO: 2080628 - DNA, 15 bp, Homo sapiens
actgctagtagtagt

SEQ ID NO: 2080629 - DNA, 15 bp, Homo sapiens
ctgctagtagtagtg

SEQ ID NO: 2080630 - DNA, 15 bp, Homo sapiens
tgctagtagtagtgc

SEQ ID NO: 2080631 - DNA, 15 bp, Homo sapiens
gctagtagtagtgcc

SEQ ID NO: 2080632 - DNA, 15 bp, Homo sapiens
ctagtagtagtgcca

SEQ ID NO: 2080633 - DNA, 15 bp, Homo sapiens
tagtagtagtgccac

SEQ ID NO: 2080634 - DNA, 15 bp, Homo sapiens
agtagtagtgccacc

SEQ ID NO: 2080635 - DNA, 15 bp, Homo sapiens
gtagtagtgccacca

SEQ ID NO: 2080636 - DNA, 15 bp, Homo sapiens
tagtagtgccaccac

SEQ ID NO: 2080637 - DNA, 15 bp, Homo sapiens
agtagtgccaccacg

SEQ ID NO: 2080638 - DNA, 15 bp, Homo sapiens
gtagtgccaccacgc

SEQ ID NO: 2080639 - DNA, 15 bp, Homo sapiens
tagtgccaccacgcc

SEQ ID NO: 2080640 - DNA, 15 bp, Homo sapiens
agtgccaccacgcct

SEQ ID NO: 2080641 - DNA, 15 bp, Homo sapiens
ccacgcctggctaaa

SEQ ID NO: 2080642 - DNA, 15 bp, Homo sapiens
cacgcctggctaaat

SEQ ID NO: 2080643 - DNA, 15 bp, Homo sapiens
acgcctggctaaatt

SEQ ID NO: 2080644 - DNA, 15 bp, Homo sapiens
cgcctggctaaattg

SEQ ID NO: 2080645 - DNA, 15 bp, Homo sapiens
gcctggctaaattgt

SEQ ID NO: 2080646 - DNA, 15 bp, Homo sapiens
cctggctaaattgtg

SEQ ID NO: 2080647 - DNA, 15 bp, Homo sapiens
ctggctaaattgtgt

SEQ ID NO: 2080648 - DNA, 15 bp, Homo sapiens
tggctaaattgtgta

SEQ ID NO: 2080649 - DNA, 15 bp, Homo sapiens
ggctaaattgtgtat

SEQ ID NO: 2080650 - DNA, 15 bp, Homo sapiens
gctaaattgtgtatt

SEQ ID NO: 2080651 - DNA, 15 bp, Homo sapiens
ctaaattgtgtattt

SEQ ID NO: 2080652 - DNA, 15 bp, Homo sapiens
taaattgtgtatttt

SEQ ID NO: 2080653 - DNA, 15 bp, Homo sapiens
aaattgtgtattttt

SEQ ID NO: 2080654 - DNA, 15 bp, Homo sapiens
aattgtgtatttttg

SEQ ID NO: 2080655 - DNA, 15 bp, Homo sapiens
attgtgtatttttgt

SEQ ID NO: 2080656 - DNA, 15 bp, Homo sapiens
ttgtgtatttttgta

SEQ ID NO: 2080657 - DNA, 15 bp, Homo sapiens
tgtgtatttttgtag

SEQ ID NO: 2080658 - DNA, 15 bp, Homo sapiens
gtgtatttttgtaga

SEQ ID NO: 2080659 - DNA, 15 bp, Homo sapiens
tatttttgtagagat

SEQ ID NO: 2080660 - DNA, 15 bp, Homo sapiens
atttttgtagagatg

SEQ ID NO: 2080661 - DNA, 15 bp, Homo sapiens
atgttgctcaggctg

SEQ ID NO: 2080662 - DNA, 15 bp, Homo sapiens
tgttgctcaggctgg

SEQ ID NO: 2080663 - DNA, 15 bp, Homo sapiens
gttgctcaggctggt

SEQ ID NO: 2080664 - DNA, 15 bp, Homo sapiens
ttgctcaggctggtc

SEQ ID NO: 2080665 - DNA, 15 bp, Homo sapiens
tgctcaggctggtct

SEQ ID NO: 2080666 - DNA, 15 bp, Homo sapiens
gctcaggctggtctt

SEQ ID NO: 2080667 - DNA, 15 bp, Homo sapiens
ctcaggctggtcttg

SEQ ID NO: 2080668 - DNA, 15 bp, Homo sapiens
tcaggctggtcttga

SEQ ID NO: 2080669 - DNA, 15 bp, Homo sapiens
tgaactcctgagctg

SEQ ID NO: 2080670 - DNA, 15 bp, Homo sapiens
gaactcctgagctga

SEQ ID NO: 2080671 - DNA, 15 bp, Homo sapiens
aactcctgagctgaa

SEQ ID NO: 2080672 - DNA, 15 bp, Homo sapiens
actcctgagctgaag

SEQ ID NO: 2080673 - DNA, 15 bp, Homo sapiens
ctcctgagctgaagc

SEQ ID NO: 2080674 - DNA, 15 bp, Homo sapiens
tcctgagctgaagca

SEQ ID NO: 2080675 - DNA, 15 bp, Homo sapiens
cctgagctgaagcag

SEQ ID NO: 2080676 - DNA, 15 bp, Homo sapiens
ctgagctgaagcagt

SEQ ID NO: 2080677 - DNA, 15 bp, Homo sapiens
tgagctgaagcagtc

SEQ ID NO: 2080678 - DNA, 15 bp, Homo sapiens
gagctgaagcagtcc

SEQ ID NO: 2080679 - DNA, 15 bp, Homo sapiens
agctgaagcagtccg

SEQ ID NO: 2080680 - DNA, 15 bp, Homo sapiens
gctgaagcagtccgc

SEQ ID NO: 2080681 - DNA, 15 bp, Homo sapiens
ctgaagcagtccgcc

SEQ ID NO: 2080682 - DNA, 15 bp, Homo sapiens
tgaagcagtccgccc

SEQ ID NO: 2080683 - DNA, 15 bp, Homo sapiens
gaagcagtccgccct

SEQ ID NO: 2080684 - DNA, 15 bp, Homo sapiens
aagcagtccgccctg

SEQ ID NO: 2080685 - DNA, 15 bp, Homo sapiens
agcagtccgccctgc

SEQ ID NO: 2080686 - DNA, 15 bp, Homo sapiens
gcagtccgccctgcc

SEQ ID NO: 2080687 - DNA, 15 bp, Homo sapiens
cagtccgccctgcct

SEQ ID NO: 2080688 - DNA, 15 bp, Homo sapiens
agtccgccctgcctt

SEQ ID NO: 2080689 - DNA, 15 bp, Homo sapiens
gtccgccctgcctta

SEQ ID NO: 2080690 - DNA, 15 bp, Homo sapiens
tccgccctgccttag

SEQ ID NO: 2080691 - DNA, 15 bp, Homo sapiens
ccgccctgccttagc

SEQ ID NO: 2080692 - DNA, 15 bp, Homo sapiens
cgccctgccttagcc

SEQ ID NO: 2080693 - DNA, 15 bp, Homo sapiens
gccctgccttagcct

SEQ ID NO: 2080694 - DNA, 15 bp, Homo sapiens
ccctgccttagcctc

SEQ ID NO: 2080695 - DNA, 15 bp, Homo sapiens
ctgccttagcctccc

SEQ ID NO: 2080696 - DNA, 15 bp, Homo sapiens
tgccttagcctccca

SEQ ID NO: 2080697 - DNA, 15 bp, Homo sapiens
gccttagcctcccaa

SEQ ID NO: 2080698 - DNA, 15 bp, Homo sapiens
ccttagcctcccaag

SEQ ID NO: 2080699 - DNA, 15 bp, Homo sapiens
cttagcctcccaagg

SEQ ID NO: 2080700 - DNA, 15 bp, Homo sapiens
ttagcctcccaaggt

SEQ ID NO: 2080701 - DNA, 15 bp, Homo sapiens
tagcctcccaaggtg

SEQ ID NO: 2080702 - DNA, 15 bp, Homo sapiens
agcctcccaaggtgc

SEQ ID NO: 2080703 - DNA, 15 bp, Homo sapiens
ctcccaaggtgctga

SEQ ID NO: 2080704 - DNA, 15 bp, Homo sapiens
tcccaaggtgctgag

SEQ ID NO: 2080705 - DNA, 15 bp, Homo sapiens
cccaaggtgctgaga

SEQ ID NO: 2080706 - DNA, 15 bp, Homo sapiens
ccaaggtgctgagat

SEQ ID NO: 2080707 - DNA, 15 bp, Homo sapiens
caaggtgctgagatt

SEQ ID NO: 2080708 - DNA, 15 bp, Homo sapiens
aaggtgctgagatta

SEQ ID NO: 2080709 - DNA, 15 bp, Homo sapiens
aggtgctgagattat

SEQ ID NO: 2080710 - DNA, 15 bp, Homo sapiens
ggtgctgagattatg

SEQ ID NO: 2080711 - DNA, 15 bp, Homo sapiens
gtgctgagattatgg

SEQ ID NO: 2080712 - DNA, 15 bp, Homo sapiens
tgctgagattatggg

SEQ ID NO: 2080713 - DNA, 15 bp, Homo sapiens
gctgagattatgggt

SEQ ID NO: 2080714 - DNA, 15 bp, Homo sapiens
ctgagattatgggtg

SEQ ID NO: 2080715 - DNA, 15 bp, Homo sapiens
tgagattatgggtgt

SEQ ID NO: 2080716 - DNA, 15 bp, Homo sapiens
gagattatgggtgtg

SEQ ID NO: 2080717 - DNA, 15 bp, Homo sapiens
agattatgggtgtga

SEQ ID NO: 2080718 - DNA, 15 bp, Homo sapiens
gattatgggtgtgaa

SEQ ID NO: 2080719 - DNA, 15 bp, Homo sapiens
attatgggtgtgaac

SEQ ID NO: 2080720 - DNA, 15 bp, Homo sapiens
ttatgggtgtgaacc

SEQ ID NO: 2080721 - DNA, 15 bp, Homo sapiens
tatgggtgtgaacca

SEQ ID NO: 2080722 - DNA, 15 bp, Homo sapiens
atgggtgtgaaccac

SEQ ID NO: 2080723 - DNA, 15 bp, Homo sapiens
tgggtgtgaaccact

SEQ ID NO: 2080724 - DNA, 15 bp, Homo sapiens
gggtgtgaaccactg

SEQ ID NO: 2080725 - DNA, 15 bp, Homo sapiens
ggtgtgaaccactgt

SEQ ID NO: 2080726 - DNA, 15 bp, Homo sapiens
gtgtgaaccactgtg

SEQ ID NO: 2080727 - DNA, 15 bp, Homo sapiens
tgtgaaccactgtgt

SEQ ID NO: 2080728 - DNA, 15 bp, Homo sapiens
gtgaaccactgtgta

SEQ ID NO: 2080729 - DNA, 15 bp, Homo sapiens
tgaaccactgtgtac

SEQ ID NO: 2080730 - DNA, 15 bp, Homo sapiens
gaaccactgtgtaca

SEQ ID NO: 2080731 - DNA, 15 bp, Homo sapiens
aaccactgtgtacag

SEQ ID NO: 2080732 - DNA, 15 bp, Homo sapiens
accactgtgtacagc

SEQ ID NO: 2080733 - DNA, 15 bp, Homo sapiens
ccactgtgtacagcc

SEQ ID NO: 2080734 - DNA, 15 bp, Homo sapiens
cactgtgtacagccc

SEQ ID NO: 2080735 - DNA, 15 bp, Homo sapiens
actgtgtacagccct

SEQ ID NO: 2080736 - DNA, 15 bp, Homo sapiens
ctgtgtacagccctg

SEQ ID NO: 2080737 - DNA, 15 bp, Homo sapiens
tgtgtacagccctgt

SEQ ID NO: 2080738 - DNA, 15 bp, Homo sapiens
gtgtacagccctgtc

SEQ ID NO: 2080739 - DNA, 15 bp, Homo sapiens
tgtacagccctgtct

SEQ ID NO: 2080740 - DNA, 15 bp, Homo sapiens
gtacagccctgtctg

SEQ ID NO: 2080741 - DNA, 15 bp, Homo sapiens
tacagccctgtctgg

SEQ ID NO: 2080742 - DNA, 15 bp, Homo sapiens
acagccctgtctggc

SEQ ID NO: 2080743 - DNA, 15 bp, Homo sapiens
cagccctgtctggct

SEQ ID NO: 2080744 - DNA, 15 bp, Homo sapiens
agccctgtctggctc

SEQ ID NO: 2080745 - DNA, 15 bp, Homo sapiens
gccctgtctggctct

SEQ ID NO: 2080746 - DNA, 15 bp, Homo sapiens
ccctgtctggctctt

SEQ ID NO: 2080747 - DNA, 15 bp, Homo sapiens
cctgtctggctcttt

SEQ ID NO: 2080748 - DNA, 15 bp, Homo sapiens
ctgtctggctcttta

SEQ ID NO: 2080749 - DNA, 15 bp, Homo sapiens
tgtctggctctttac

SEQ ID NO: 2080750 - DNA, 15 bp, Homo sapiens
gtctggctctttaca

SEQ ID NO: 2080751 - DNA, 15 bp, Homo sapiens
tctggctctttacag

SEQ ID NO: 2080752 - DNA, 15 bp, Homo sapiens
ctggctctttacaga

SEQ ID NO: 2080753 - DNA, 15 bp, Homo sapiens
tggctctttacagaa

SEQ ID NO: 2080754 - DNA, 15 bp, Homo sapiens
ggctctttacagaaa

SEQ ID NO: 2080755 - DNA, 15 bp, Homo sapiens
gctctttacagaaag

SEQ ID NO: 2080756 - DNA, 15 bp, Homo sapiens
ctctttacagaaagt

SEQ ID NO: 2080757 - DNA, 15 bp, Homo sapiens
tctttacagaaagtt

SEQ ID NO: 2080758 - DNA, 15 bp, Homo sapiens
ctttacagaaagttt

SEQ ID NO: 2080759 - DNA, 15 bp, Homo sapiens
tttacagaaagtttg

SEQ ID NO: 2080760 - DNA, 15 bp, Homo sapiens
ttacagaaagtttgc

SEQ ID NO: 2080761 - DNA, 15 bp, Homo sapiens
tacagaaagtttgca

SEQ ID NO: 2080762 - DNA, 15 bp, Homo sapiens
acagaaagtttgcag

SEQ ID NO: 2080763 - DNA, 15 bp, Homo sapiens
cagaaagtttgcaga

SEQ ID NO: 2080764 - DNA, 15 bp, Homo sapiens
agaaagtttgcagac

SEQ ID NO: 2080765 - DNA, 15 bp, Homo sapiens
gaaagtttgcagacc

SEQ ID NO: 2080766 - DNA, 15 bp, Homo sapiens
aaagtttgcagacct

SEQ ID NO: 2080767 - DNA, 15 bp, Homo sapiens
aagtttgcagacctc

SEQ ID NO: 2080768 - DNA, 15 bp, Homo sapiens
agtttgcagacctct

SEQ ID NO: 2080769 - DNA, 15 bp, Homo sapiens
gtttgcagacctctg

SEQ ID NO: 2080770 - DNA, 15 bp, Homo sapiens
tttgcagacctctga

SEQ ID NO: 2080771 - DNA, 15 bp, Homo sapiens
ttgcagacctctgaa

SEQ ID NO: 2080772 - DNA, 15 bp, Homo sapiens
tgcagacctctgaac

SEQ ID NO: 2080773 - DNA, 15 bp, Homo sapiens
gcagacctctgaact

SEQ ID NO: 2080774 - DNA, 15 bp, Homo sapiens
cagacctctgaacta

SEQ ID NO: 2080775 - DNA, 15 bp, Homo sapiens
agacctctgaactag

SEQ ID NO: 2080776 - DNA, 15 bp, Homo sapiens
gacctctgaactagc

SEQ ID NO: 2080777 - DNA, 15 bp, Homo sapiens
acctctgaactagcg

SEQ ID NO: 2080778 - DNA, 15 bp, Homo sapiens
cctctgaactagcgg

SEQ ID NO: 2080779 - DNA, 15 bp, Homo sapiens
ctctgaactagcggg

SEQ ID NO: 2080780 - DNA, 15 bp, Homo sapiens
tctgaactagcgggg

SEQ ID NO: 2080781 - DNA, 15 bp, Homo sapiens
ctgaactagcggggt

SEQ ID NO: 2080782 - DNA, 15 bp, Homo sapiens
tgaactagcggggtg

SEQ ID NO: 2080783 - DNA, 15 bp, Homo sapiens
gaactagcggggtgt

SEQ ID NO: 2080784 - DNA, 15 bp, Homo sapiens
aactagcggggtgtt

SEQ ID NO: 2080785 - DNA, 15 bp, Homo sapiens
actagcggggtgttg

SEQ ID NO: 2080786 - DNA, 15 bp, Homo sapiens
ctagcggggtgttgg

SEQ ID NO: 2080787 - DNA, 15 bp, Homo sapiens
tagcggggtgttggg

SEQ ID NO: 2080788 - DNA, 15 bp, Homo sapiens
agcggggtgttggga

SEQ ID NO: 2080789 - DNA, 15 bp, Homo sapiens
gcggggtgttgggat

SEQ ID NO: 2080790 - DNA, 15 bp, Homo sapiens
cggggtgttgggatc

SEQ ID NO: 2080791 - DNA, 15 bp, Homo sapiens
ggggtgttgggatct

SEQ ID NO: 2080792 - DNA, 15 bp, Homo sapiens
gggtgttgggatctt

SEQ ID NO: 2080793 - DNA, 15 bp, Homo sapiens
ggtgttgggatctta

SEQ ID NO: 2080794 - DNA, 15 bp, Homo sapiens
gtgttgggatcttag

SEQ ID NO: 2080795 - DNA, 15 bp, Homo sapiens
tgttgggatcttaga

SEQ ID NO: 2080796 - DNA, 15 bp, Homo sapiens
gttgggatcttagaa

SEQ ID NO: 2080797 - DNA, 15 bp, Homo sapiens
ttgggatcttagaaa

SEQ ID NO: 2080798 - DNA, 15 bp, Homo sapiens
tgggatcttagaaag

SEQ ID NO: 2080799 - DNA, 15 bp, Homo sapiens
gggatcttagaaagg

SEQ ID NO: 2080800 - DNA, 15 bp, Homo sapiens
ggatcttagaaagga

SEQ ID NO: 2080801 - DNA, 15 bp, Homo sapiens
gatcttagaaaggag

SEQ ID NO: 2080802 - DNA, 15 bp, Homo sapiens
atcttagaaaggaga

SEQ ID NO: 2080803 - DNA, 15 bp, Homo sapiens
tcttagaaaggagat

SEQ ID NO: 2080804 - DNA, 15 bp, Homo sapiens
cttagaaaggagatc

SEQ ID NO: 2080805 - DNA, 15 bp, Homo sapiens
ttagaaaggagatct

SEQ ID NO: 2080806 - DNA, 15 bp, Homo sapiens
tagaaaggagatctt

SEQ ID NO: 2080807 - DNA, 15 bp, Homo sapiens
agaaaggagatcttc

SEQ ID NO: 2080808 - DNA, 15 bp, Homo sapiens
gaaaggagatcttcc

SEQ ID NO: 2080809 - DNA, 15 bp, Homo sapiens
aaaggagatcttcca

SEQ ID NO: 2080810 - DNA, 15 bp, Homo sapiens
aaggagatcttccat

SEQ ID NO: 2080811 - DNA, 15 bp, Homo sapiens
aggagatcttccatt

SEQ ID NO: 2080812 - DNA, 15 bp, Homo sapiens
ggagatcttccattg

SEQ ID NO: 2080813 - DNA, 15 bp, Homo sapiens
gagatcttccattga

SEQ ID NO: 2080814 - DNA, 15 bp, Homo sapiens
agatcttccattgac

SEQ ID NO: 2080815 - DNA, 15 bp, Homo sapiens
gatcttccattgact

SEQ ID NO: 2080816 - DNA, 15 bp, Homo sapiens
atcttccattgactt

SEQ ID NO: 2080817 - DNA, 15 bp, Homo sapiens
tcttccattgacttg

SEQ ID NO: 2080818 - DNA, 15 bp, Homo sapiens
cttccattgacttgg

SEQ ID NO: 2080819 - DNA, 15 bp, Homo sapiens
ttccattgacttggc

SEQ ID NO: 2080820 - DNA, 15 bp, Homo sapiens
tccattgacttggcc

SEQ ID NO: 2080821 - DNA, 15 bp, Homo sapiens
ccattgacttggcca

SEQ ID NO: 2080822 - DNA, 15 bp, Homo sapiens
cattgacttggccaa

SEQ ID NO: 2080823 - DNA, 15 bp, Homo sapiens
attgacttggccaaa

SEQ ID NO: 2080824 - DNA, 15 bp, Homo sapiens
ttgacttggccaaag

SEQ ID NO: 2080825 - DNA, 15 bp, Homo sapiens
tgacttggccaaagg

SEQ ID NO: 2080826 - DNA, 15 bp, Homo sapiens
gacttggccaaaggc

SEQ ID NO: 2080827 - DNA, 15 bp, Homo sapiens
acttggccaaaggct

SEQ ID NO: 2080828 - DNA, 15 bp, Homo sapiens
cttggccaaaggctc

SEQ ID NO: 2080829 - DNA, 15 bp, Homo sapiens
ttggccaaaggctct

SEQ ID NO: 2080830 - DNA, 15 bp, Homo sapiens
tggccaaaggctctt

SEQ ID NO: 2080831 - DNA, 15 bp, Homo sapiens
ggccaaaggctcttc

SEQ ID NO: 2080832 - DNA, 15 bp, Homo sapiens
gccaaaggctcttct

SEQ ID NO: 2080833 - DNA, 15 bp, Homo sapiens
ccaaaggctcttctt

SEQ ID NO: 2080834 - DNA, 15 bp, Homo sapiens
caaaggctcttctta

SEQ ID NO: 2080835 - DNA, 15 bp, Homo sapiens
aaaggctcttcttaa

SEQ ID NO: 2080836 - DNA, 15 bp, Homo sapiens
aaggctcttcttaac

SEQ ID NO: 2080837 - DNA, 15 bp, Homo sapiens
aggctcttcttaact

SEQ ID NO: 2080838 - DNA, 15 bp, Homo sapiens
ggctcttcttaactt

SEQ ID NO: 2080839 - DNA, 15 bp, Homo sapiens
gctcttcttaactta

SEQ ID NO: 2080840 - DNA, 15 bp, Homo sapiens
ctcttcttaacttaa

SEQ ID NO: 2080841 - DNA, 15 bp, Homo sapiens
tcttcttaacttaaa

SEQ ID NO: 2080842 - DNA, 15 bp, Homo sapiens
cttcttaacttaaac

SEQ ID NO: 2080843 - DNA, 15 bp, Homo sapiens
ttcttaacttaaacc

SEQ ID NO: 2080844 - DNA, 15 bp, Homo sapiens
tcttaacttaaacct

SEQ ID NO: 2080845 - DNA, 15 bp, Homo sapiens
cttaacttaaacctt

SEQ ID NO: 2080846 - DNA, 15 bp, Homo sapiens
ttaacttaaaccttc

SEQ ID NO: 2080847 - DNA, 15 bp, Homo sapiens
taacttaaaccttca

SEQ ID NO: 2080848 - DNA, 15 bp, Homo sapiens
aacttaaaccttcat

SEQ ID NO: 2080849 - DNA, 15 bp, Homo sapiens
acttaaaccttcatt

SEQ ID NO: 2080850 - DNA, 15 bp, Homo sapiens
cttaaaccttcattt

SEQ ID NO: 2080851 - DNA, 15 bp, Homo sapiens
ttaaaccttcatttt

SEQ ID NO: 2080852 - DNA, 15 bp, Homo sapiens
taaaccttcattttc

SEQ ID NO: 2080853 - DNA, 15 bp, Homo sapiens
aaaccttcattttct

SEQ ID NO: 2080854 - DNA, 15 bp, Homo sapiens
aaccttcattttcta

SEQ ID NO: 2080855 - DNA, 15 bp, Homo sapiens
accttcattttctag

SEQ ID NO: 2080856 - DNA, 15 bp, Homo sapiens
ccttcattttctagg

SEQ ID NO: 2080857 - DNA, 15 bp, Homo sapiens
cttcattttctagga

SEQ ID NO: 2080858 - DNA, 15 bp, Homo sapiens
ttcattttctaggac

SEQ ID NO: 2080859 - DNA, 15 bp, Homo sapiens
tcattttctaggacc

SEQ ID NO: 2080860 - DNA, 15 bp, Homo sapiens
cattttctaggacca

SEQ ID NO: 2080861 - DNA, 15 bp, Homo sapiens
attttctaggaccaa

SEQ ID NO: 2080862 - DNA, 15 bp, Homo sapiens
ttttctaggaccaag

SEQ ID NO: 2080863 - DNA, 15 bp, Homo sapiens
ttctaggaccaagac

SEQ ID NO: 2080864 - DNA, 15 bp, Homo sapiens
tctaggaccaagacc

SEQ ID NO: 2080865 - DNA, 15 bp, Homo sapiens
ctaggaccaagaccc

SEQ ID NO: 2080866 - DNA, 15 bp, Homo sapiens
taggaccaagacccc

SEQ ID NO: 2080867 - DNA, 15 bp, Homo sapiens
aggaccaagacccct

SEQ ID NO: 2080868 - DNA, 15 bp, Homo sapiens
ggaccaagacccctg

SEQ ID NO: 2080869 - DNA, 15 bp, Homo sapiens
gaccaagacccctgg

SEQ ID NO: 2080870 - DNA, 15 bp, Homo sapiens
accaagacccctgga

SEQ ID NO: 2080871 - DNA, 15 bp, Homo sapiens
ccaagacccctggac

SEQ ID NO: 2080872 - DNA, 15 bp, Homo sapiens
caagacccctggacc

SEQ ID NO: 2080873 - DNA, 15 bp, Homo sapiens
aagacccctggacct

SEQ ID NO: 2080874 - DNA, 15 bp, Homo sapiens
agacccctggacctg

SEQ ID NO: 2080875 - DNA, 15 bp, Homo sapiens
gacccctggacctgg

SEQ ID NO: 2080876 - DNA, 15 bp, Homo sapiens
acccctggacctggg

SEQ ID NO: 2080877 - DNA, 15 bp, Homo sapiens
cccctggacctgggg

SEQ ID NO: 2080878 - DNA, 15 bp, Homo sapiens
ccctggacctggggc

SEQ ID NO: 2080879 - DNA, 15 bp, Homo sapiens
cctggacctggggcc

SEQ ID NO: 2080880 - DNA, 15 bp, Homo sapiens
ctggacctggggccc

SEQ ID NO: 2080881 - DNA, 15 bp, Homo sapiens
tggacctggggccca

SEQ ID NO: 2080882 - DNA, 15 bp, Homo sapiens
ggacctggggcccag

SEQ ID NO: 2080883 - DNA, 15 bp, Homo sapiens
gacctggggcccagt

SEQ ID NO: 2080884 - DNA, 15 bp, Homo sapiens
acctggggcccagtc

SEQ ID NO: 2080885 - DNA, 15 bp, Homo sapiens
cctggggcccagtcg

SEQ ID NO: 2080886 - DNA, 15 bp, Homo sapiens
ctggggcccagtcgg

SEQ ID NO: 2080887 - DNA, 15 bp, Homo sapiens
tggggcccagtcggc

SEQ ID NO: 2080888 - DNA, 15 bp, Homo sapiens
ggggcccagtcggcc

SEQ ID NO: 2080889 - DNA, 15 bp, Homo sapiens
gggcccagtcggccc

SEQ ID NO: 2080890 - DNA, 15 bp, Homo sapiens
ggcccagtcggccct

SEQ ID NO: 2080891 - DNA, 15 bp, Homo sapiens
gcccagtcggccctc

SEQ ID NO: 2080892 - DNA, 15 bp, Homo sapiens
cccagtcggccctca

SEQ ID NO: 2080893 - DNA, 15 bp, Homo sapiens
ccagtcggccctcag

SEQ ID NO: 2080894 - DNA, 15 bp, Homo sapiens
cagtcggccctcaga

SEQ ID NO: 2080895 - DNA, 15 bp, Homo sapiens
agtcggccctcagag

SEQ ID NO: 2080896 - DNA, 15 bp, Homo sapiens
gtcggccctcagagc

SEQ ID NO: 2080897 - DNA, 15 bp, Homo sapiens
tcggccctcagagcc

SEQ ID NO: 2080898 - DNA, 15 bp, Homo sapiens
cggccctcagagccc

SEQ ID NO: 2080899 - DNA, 15 bp, Homo sapiens
ggccctcagagccct

SEQ ID NO: 2080900 - DNA, 15 bp, Homo sapiens
gccctcagagccctt

SEQ ID NO: 2080901 - DNA, 15 bp, Homo sapiens
ccctcagagcccttg

SEQ ID NO: 2080902 - DNA, 15 bp, Homo sapiens
cctcagagcccttgc

SEQ ID NO: 2080903 - DNA, 15 bp, Homo sapiens
ctcagagcccttgcc

SEQ ID NO: 2080904 - DNA, 15 bp, Homo sapiens
tcagagcccttgccc

SEQ ID NO: 2080905 - DNA, 15 bp, Homo sapiens
cagagcccttgcccg

SEQ ID NO: 2080906 - DNA, 15 bp, Homo sapiens
agagcccttgcccgc

SEQ ID NO: 2080907 - DNA, 15 bp, Homo sapiens
gagcccttgcccgct

SEQ ID NO: 2080908 - DNA, 15 bp, Homo sapiens
agcccttgcccgctc

SEQ ID NO: 2080909 - DNA, 15 bp, Homo sapiens
gcccttgcccgctcg

SEQ ID NO: 2080910 - DNA, 15 bp, Homo sapiens
cccttgcccgctcgg

SEQ ID NO: 2080911 - DNA, 15 bp, Homo sapiens
ccttgcccgctcggg

SEQ ID NO: 2080912 - DNA, 15 bp, Homo sapiens
cttgcccgctcgggt

SEQ ID NO: 2080913 - DNA, 15 bp, Homo sapiens
ttgcccgctcgggta

SEQ ID NO: 2080914 - DNA, 15 bp, Homo sapiens
tgcccgctcgggtat

SEQ ID NO: 2080915 - DNA, 15 bp, Homo sapiens
gcccgctcgggtatg

SEQ ID NO: 2080916 - DNA, 15 bp, Homo sapiens
cccgctcgggtatga

SEQ ID NO: 2080917 - DNA, 15 bp, Homo sapiens
ccgctcgggtatgaa

SEQ ID NO: 2080918 - DNA, 15 bp, Homo sapiens
cgctcgggtatgaag

SEQ ID NO: 2080919 - DNA, 15 bp, Homo sapiens
gctcgggtatgaaga

SEQ ID NO: 2080920 - DNA, 15 bp, Homo sapiens
ctcgggtatgaagat

SEQ ID NO: 2080921 - DNA, 15 bp, Homo sapiens
tcgggtatgaagatc

SEQ ID NO: 2080922 - DNA, 15 bp, Homo sapiens
cgggtatgaagatcg

SEQ ID NO: 2080923 - DNA, 15 bp, Homo sapiens
gggtatgaagatcgg

SEQ ID NO: 2080924 - DNA, 15 bp, Homo sapiens
ggtatgaagatcggg

SEQ ID NO: 2080925 - DNA, 15 bp, Homo sapiens
gtatgaagatcgggc

SEQ ID NO: 2080926 - DNA, 15 bp, Homo sapiens
tatgaagatcgggcg

SEQ ID NO: 2080927 - DNA, 15 bp, Homo sapiens
atgaagatcgggcgg

SEQ ID NO: 2080928 - DNA, 15 bp, Homo sapiens
tgaagatcgggcgga

SEQ ID NO: 2080929 - DNA, 15 bp, Homo sapiens
gaagatcgggcggat

SEQ ID NO: 2080930 - DNA, 15 bp, Homo sapiens
aagatcgggcggatt

SEQ ID NO: 2080931 - DNA, 15 bp, Homo sapiens
agatcgggcggattg

SEQ ID NO: 2080932 - DNA, 15 bp, Homo sapiens
gatcgggcggattgg

SEQ ID NO: 2080933 - DNA, 15 bp, Homo sapiens
atcgggcggattggt

SEQ ID NO: 2080934 - DNA, 15 bp, Homo sapiens
tcgggcggattggta

SEQ ID NO: 2080935 - DNA, 15 bp, Homo sapiens
cgggcggattggtaa

SEQ ID NO: 2080936 - DNA, 15 bp, Homo sapiens
gggcggattggtaag

SEQ ID NO: 2080937 - DNA, 15 bp, Homo sapiens
ggcggattggtaagt

SEQ ID NO: 2080938 - DNA, 15 bp, Homo sapiens
gcggattggtaagtg

SEQ ID NO: 2080939 - DNA, 15 bp, Homo sapiens
cggattggtaagtgc

SEQ ID NO: 2080940 - DNA, 15 bp, Homo sapiens
ggattggtaagtgcc

SEQ ID NO: 2080941 - DNA, 15 bp, Homo sapiens
gattggtaagtgccc

SEQ ID NO: 2080942 - DNA, 15 bp, Homo sapiens
attggtaagtgcccc

SEQ ID NO: 2080943 - DNA, 15 bp, Homo sapiens
ttggtaagtgccccc

SEQ ID NO: 2080944 - DNA, 15 bp, Homo sapiens
tggtaagtgcccccc

SEQ ID NO: 2080945 - DNA, 15 bp, Homo sapiens
ggtaagtgcccccct

SEQ ID NO: 2080946 - DNA, 15 bp, Homo sapiens
gtaagtgcccccctc

SEQ ID NO: 2080947 - DNA, 15 bp, Homo sapiens
taagtgcccccctct

SEQ ID NO: 2080948 - DNA, 15 bp, Homo sapiens
aagtgcccccctcta

SEQ ID NO: 2080949 - DNA, 15 bp, Homo sapiens
agtgcccccctctag

SEQ ID NO: 2080950 - DNA, 15 bp, Homo sapiens
gtgcccccctctagc

SEQ ID NO: 2080951 - DNA, 15 bp, Homo sapiens
tgcccccctctagct

SEQ ID NO: 2080952 - DNA, 15 bp, Homo sapiens
gcccccctctagcta

SEQ ID NO: 2080953 - DNA, 15 bp, Homo sapiens
cccccctctagctaa

SEQ ID NO: 2080954 - DNA, 15 bp, Homo sapiens
ccccctctagctaat

SEQ ID NO: 2080955 - DNA, 15 bp, Homo sapiens
cccctctagctaatg

SEQ ID NO: 2080956 - DNA, 15 bp, Homo sapiens
ccctctagctaatgc

SEQ ID NO: 2080957 - DNA, 15 bp, Homo sapiens
cctctagctaatgct

SEQ ID NO: 2080958 - DNA, 15 bp, Homo sapiens
ctctagctaatgctt

SEQ ID NO: 2080959 - DNA, 15 bp, Homo sapiens
tctagctaatgcttg

SEQ ID NO: 2080960 - DNA, 15 bp, Homo sapiens
ctagctaatgcttgg

SEQ ID NO: 2080961 - DNA, 15 bp, Homo sapiens
tagctaatgcttggg

SEQ ID NO: 2080962 - DNA, 15 bp, Homo sapiens
agctaatgcttgggt

SEQ ID NO: 2080963 - DNA, 15 bp, Homo sapiens
gctaatgcttgggtt

SEQ ID NO: 2080964 - DNA, 15 bp, Homo sapiens
ctaatgcttgggttt

SEQ ID NO: 2080965 - DNA, 15 bp, Homo sapiens
taatgcttgggttta

SEQ ID NO: 2080966 - DNA, 15 bp, Homo sapiens
aatgcttgggtttat

SEQ ID NO: 2080967 - DNA, 15 bp, Homo sapiens
atgcttgggtttatt

SEQ ID NO: 2080968 - DNA, 15 bp, Homo sapiens
tgcttgggtttattt

SEQ ID NO: 2080969 - DNA, 15 bp, Homo sapiens
gcttgggtttatttt

SEQ ID NO: 2080970 - DNA, 15 bp, Homo sapiens
cttgggtttattttg

SEQ ID NO: 2080971 - DNA, 15 bp, Homo sapiens
ttgggtttattttga

SEQ ID NO: 2080972 - DNA, 15 bp, Homo sapiens
tgggtttattttgaa

SEQ ID NO: 2080973 - DNA, 15 bp, Homo sapiens
gggtttattttgaag

SEQ ID NO: 2080974 - DNA, 15 bp, Homo sapiens
ggtttattttgaagc

SEQ ID NO: 2080975 - DNA, 15 bp, Homo sapiens
gtttattttgaagca

SEQ ID NO: 2080976 - DNA, 15 bp, Homo sapiens
tttattttgaagcat

SEQ ID NO: 2080977 - DNA, 15 bp, Homo sapiens
ttattttgaagcatt

SEQ ID NO: 2080978 - DNA, 15 bp, Homo sapiens
tattttgaagcattg

SEQ ID NO: 2080979 - DNA, 15 bp, Homo sapiens
attttgaagcattgg

SEQ ID NO: 2080980 - DNA, 15 bp, Homo sapiens
ttttgaagcattggc

SEQ ID NO: 2080981 - DNA, 15 bp, Homo sapiens
tttgaagcattggcc

SEQ ID NO: 2080982 - DNA, 15 bp, Homo sapiens
ttgaagcattggccc

SEQ ID NO: 2080983 - DNA, 15 bp, Homo sapiens
tgaagcattggcccc

SEQ ID NO: 2080984 - DNA, 15 bp, Homo sapiens
gaagcattggcccca

SEQ ID NO: 2080985 - DNA, 15 bp, Homo sapiens
aagcattggccccaa

SEQ ID NO: 2080986 - DNA, 15 bp, Homo sapiens
agcattggccccaaa

SEQ ID NO: 2080987 - DNA, 15 bp, Homo sapiens
gcattggccccaaaa

SEQ ID NO: 2080988 - DNA, 15 bp, Homo sapiens
cattggccccaaaaa

SEQ ID NO: 2080989 - DNA, 15 bp, Homo sapiens
attggccccaaaaag

SEQ ID NO: 2080990 - DNA, 15 bp, Homo sapiens
ttggccccaaaaagc

SEQ ID NO: 2080991 - DNA, 15 bp, Homo sapiens
tggccccaaaaagca

SEQ ID NO: 2080992 - DNA, 15 bp, Homo sapiens
ggccccaaaaagcac

SEQ ID NO: 2080993 - DNA, 15 bp, Homo sapiens
gccccaaaaagcacg

SEQ ID NO: 2080994 - DNA, 15 bp, Homo sapiens
ccccaaaaagcacgt

SEQ ID NO: 2080995 - DNA, 15 bp, Homo sapiens
cccaaaaagcacgtg

SEQ ID NO: 2080996 - DNA, 15 bp, Homo sapiens
ccaaaaagcacgtgc

SEQ ID NO: 2080997 - DNA, 15 bp, Homo sapiens
caaaaagcacgtgct

SEQ ID NO: 2080998 - DNA, 15 bp, Homo sapiens
aaaaagcacgtgctg

SEQ ID NO: 2080999 - DNA, 15 bp, Homo sapiens
aaaagcacgtgctgt

SEQ ID NO: 2081000 - DNA, 15 bp, Homo sapiens
aaagcacgtgctgtg

SEQ ID NO: 2081001 - DNA, 15 bp, Homo sapiens
aagcacgtgctgtgc

SEQ ID NO: 2081002 - DNA, 15 bp, Homo sapiens
agcacgtgctgtgcc

SEQ ID NO: 2081003 - DNA, 15 bp, Homo sapiens
gcacgtgctgtgccc

SEQ ID NO: 2081004 - DNA, 15 bp, Homo sapiens
cacgtgctgtgccca

SEQ ID NO: 2081005 - DNA, 15 bp, Homo sapiens
acgtgctgtgcccag

SEQ ID NO: 2081006 - DNA, 15 bp, Homo sapiens
cgtgctgtgcccagt

SEQ ID NO: 2081007 - DNA, 15 bp, Homo sapiens
gtgctgtgcccagtg

SEQ ID NO: 2081008 - DNA, 15 bp, Homo sapiens
tgctgtgcccagtgg

SEQ ID NO: 2081009 - DNA, 15 bp, Homo sapiens
gctgtgcccagtgga

SEQ ID NO: 2081010 - DNA, 15 bp, Homo sapiens
ctgtgcccagtggat

SEQ ID NO: 2081011 - DNA, 15 bp, Homo sapiens
tgtgcccagtggatg

SEQ ID NO: 2081012 - DNA, 15 bp, Homo sapiens
gtgcccagtggatgt

SEQ ID NO: 2081013 - DNA, 15 bp, Homo sapiens
tgcccagtggatgtg

SEQ ID NO: 2081014 - DNA, 15 bp, Homo sapiens
gcccagtggatgtgc

SEQ ID NO: 2081015 - DNA, 15 bp, Homo sapiens
cccagtggatgtgca

SEQ ID NO: 2081016 - DNA, 15 bp, Homo sapiens
ccagtggatgtgcag

SEQ ID NO: 2081017 - DNA, 15 bp, Homo sapiens
cagtggatgtgcagc

SEQ ID NO: 2081018 - DNA, 15 bp, Homo sapiens
agtggatgtgcagcg

SEQ ID NO: 2081019 - DNA, 15 bp, Homo sapiens
gtggatgtgcagcgg

SEQ ID NO: 2081020 - DNA, 15 bp, Homo sapiens
tggatgtgcagcggc

SEQ ID NO: 2081021 - DNA, 15 bp, Homo sapiens
ggatgtgcagcggct

SEQ ID NO: 2081022 - DNA, 15 bp, Homo sapiens
gatgtgcagcggctg

SEQ ID NO: 2081023 - DNA, 15 bp, Homo sapiens
atgtgcagcggctgg

SEQ ID NO: 2081024 - DNA, 15 bp, Homo sapiens
tgtgcagcggctggt

SEQ ID NO: 2081025 - DNA, 15 bp, Homo sapiens
gtgcagcggctggtc

SEQ ID NO: 2081026 - DNA, 15 bp, Homo sapiens
tgcagcggctggtct

SEQ ID NO: 2081027 - DNA, 15 bp, Homo sapiens
gcagcggctggtctg

SEQ ID NO: 2081028 - DNA, 15 bp, Homo sapiens
cagcggctggtctgg

SEQ ID NO: 2081029 - DNA, 15 bp, Homo sapiens
agcggctggtctggt

SEQ ID NO: 2081030 - DNA, 15 bp, Homo sapiens
gcggctggtctggtc

SEQ ID NO: 2081031 - DNA, 15 bp, Homo sapiens
cggctggtctggtca

SEQ ID NO: 2081032 - DNA, 15 bp, Homo sapiens
ggctggtctggtcac

SEQ ID NO: 2081033 - DNA, 15 bp, Homo sapiens
gctggtctggtcact

SEQ ID NO: 2081034 - DNA, 15 bp, Homo sapiens
ctggtctggtcactt

SEQ ID NO: 2081035 - DNA, 15 bp, Homo sapiens
tggtctggtcacttt

SEQ ID NO: 2081036 - DNA, 15 bp, Homo sapiens
ggtctggtcactttt

SEQ ID NO: 2081037 - DNA, 15 bp, Homo sapiens
gtctggtcacttttg

SEQ ID NO: 2081038 - DNA, 15 bp, Homo sapiens
tctggtcacttttgg

SEQ ID NO: 2081039 - DNA, 15 bp, Homo sapiens
ctggtcacttttggc

SEQ ID NO: 2081040 - DNA, 15 bp, Homo sapiens
tggtcacttttggca

SEQ ID NO: 2081041 - DNA, 15 bp, Homo sapiens
ggtcacttttggcag

SEQ ID NO: 2081042 - DNA, 15 bp, Homo sapiens
gtcacttttggcagt

SEQ ID NO: 2081043 - DNA, 15 bp, Homo sapiens
tcacttttggcagtt

SEQ ID NO: 2081044 - DNA, 15 bp, Homo sapiens
cacttttggcagtta

SEQ ID NO: 2081045 - DNA, 15 bp, Homo sapiens
acttttggcagttaa

SEQ ID NO: 2081046 - DNA, 15 bp, Homo sapiens
cttttggcagttaag

SEQ ID NO: 2081047 - DNA, 15 bp, Homo sapiens
ttttggcagttaagt

SEQ ID NO: 2081048 - DNA, 15 bp, Homo sapiens
tttggcagttaagtt

SEQ ID NO: 2081049 - DNA, 15 bp, Homo sapiens
ttggcagttaagttt

SEQ ID NO: 2081050 - DNA, 15 bp, Homo sapiens
tggcagttaagtttg

SEQ ID NO: 2081051 - DNA, 15 bp, Homo sapiens
ggcagttaagtttgt

SEQ ID NO: 2081052 - DNA, 15 bp, Homo sapiens
gcagttaagtttgtt

SEQ ID NO: 2081053 - DNA, 15 bp, Homo sapiens
cagttaagtttgtta

SEQ ID NO: 2081054 - DNA, 15 bp, Homo sapiens
agttaagtttgttaa

SEQ ID NO: 2081055 - DNA, 15 bp, Homo sapiens
gttaagtttgttaag

SEQ ID NO: 2081056 - DNA, 15 bp, Homo sapiens
ttaagtttgttaagg

SEQ ID NO: 2081057 - DNA, 15 bp, Homo sapiens
taagtttgttaaggg

SEQ ID NO: 2081058 - DNA, 15 bp, Homo sapiens
aagtttgttaaggga

SEQ ID NO: 2081059 - DNA, 15 bp, Homo sapiens
agtttgttaagggag

SEQ ID NO: 2081060 - DNA, 15 bp, Homo sapiens
gtttgttaagggagg

SEQ ID NO: 2081061 - DNA, 15 bp, Homo sapiens
tttgttaagggaggc

SEQ ID NO: 2081062 - DNA, 15 bp, Homo sapiens
ttgttaagggaggct

SEQ ID NO: 2081063 - DNA, 15 bp, Homo sapiens
tgttaagggaggctg

SEQ ID NO: 2081064 - DNA, 15 bp, Homo sapiens
gttaagggaggctgc

SEQ ID NO: 2081065 - DNA, 15 bp, Homo sapiens
ttaagggaggctgca

SEQ ID NO: 2081066 - DNA, 15 bp, Homo sapiens
taagggaggctgcaa

SEQ ID NO: 2081067 - DNA, 15 bp, Homo sapiens
aagggaggctgcaag

SEQ ID NO: 2081068 - DNA, 15 bp, Homo sapiens
agggaggctgcaaga

SEQ ID NO: 2081069 - DNA, 15 bp, Homo sapiens
gggaggctgcaagag

SEQ ID NO: 2081070 - DNA, 15 bp, Homo sapiens
ggaggctgcaagagg

SEQ ID NO: 2081071 - DNA, 15 bp, Homo sapiens
gaggctgcaagaggc

SEQ ID NO: 2081072 - DNA, 15 bp, Homo sapiens
aggctgcaagaggca

SEQ ID NO: 2081073 - DNA, 15 bp, Homo sapiens
ggctgcaagaggcac

SEQ ID NO: 2081074 - DNA, 15 bp, Homo sapiens
gctgcaagaggcacc

SEQ ID NO: 2081075 - DNA, 15 bp, Homo sapiens
ctgcaagaggcacct

SEQ ID NO: 2081076 - DNA, 15 bp, Homo sapiens
tgcaagaggcacctt

SEQ ID NO: 2081077 - DNA, 15 bp, Homo sapiens
gcaagaggcaccttg

SEQ ID NO: 2081078 - DNA, 15 bp, Homo sapiens
caagaggcaccttgt

SEQ ID NO: 2081079 - DNA, 15 bp, Homo sapiens
aagaggcaccttgtg

SEQ ID NO: 2081080 - DNA, 15 bp, Homo sapiens
agaggcaccttgtga

SEQ ID NO: 2081081 - DNA, 15 bp, Homo sapiens
gaggcaccttgtgac

SEQ ID NO: 2081082 - DNA, 15 bp, Homo sapiens
aggcaccttgtgact

SEQ ID NO: 2081083 - DNA, 15 bp, Homo sapiens
ggcaccttgtgactt

SEQ ID NO: 2081084 - DNA, 15 bp, Homo sapiens
gcaccttgtgactta

SEQ ID NO: 2081085 - DNA, 15 bp, Homo sapiens
caccttgtgacttaa

SEQ ID NO: 2081086 - DNA, 15 bp, Homo sapiens
accttgtgacttaaa

SEQ ID NO: 2081087 - DNA, 15 bp, Homo sapiens
ccttgtgacttaaaa

SEQ ID NO: 2081088 - DNA, 15 bp, Homo sapiens
cttgtgacttaaaaa

SEQ ID NO: 2081089 - DNA, 15 bp, Homo sapiens
ttgtgacttaaaaat

SEQ ID NO: 2081090 - DNA, 15 bp, Homo sapiens
tgtgacttaaaaatc

SEQ ID NO: 2081091 - DNA, 15 bp, Homo sapiens
gtgacttaaaaatct

SEQ ID NO: 2081092 - DNA, 15 bp, Homo sapiens
cttaaaaatctctcc

SEQ ID NO: 2081093 - DNA, 15 bp, Homo sapiens
ttaaaaatctctccc

SEQ ID NO: 2081094 - DNA, 15 bp, Homo sapiens
taaaaatctctccct

SEQ ID NO: 2081095 - DNA, 15 bp, Homo sapiens
aaaaatctctccctg

SEQ ID NO: 2081096 - DNA, 15 bp, Homo sapiens
aaaatctctccctga

SEQ ID NO: 2081097 - DNA, 15 bp, Homo sapiens
aaatctctccctgaa

SEQ ID NO: 2081098 - DNA, 15 bp, Homo sapiens
aatctctccctgaat

SEQ ID NO: 2081099 - DNA, 15 bp, Homo sapiens
atctctccctgaata

SEQ ID NO: 2081100 - DNA, 15 bp, Homo sapiens
tctctccctgaatat

SEQ ID NO: 2081101 - DNA, 15 bp, Homo sapiens
ctctccctgaatatc

SEQ ID NO: 2081102 - DNA, 15 bp, Homo sapiens
tctccctgaatatct

SEQ ID NO: 2081103 - DNA, 15 bp, Homo sapiens
ctccctgaatatctc

SEQ ID NO: 2081104 - DNA, 15 bp, Homo sapiens
tccctgaatatctct

SEQ ID NO: 2081105 - DNA, 15 bp, Homo sapiens
ccctgaatatctctg

SEQ ID NO: 2081106 - DNA, 15 bp, Homo sapiens
cctgaatatctctgt

SEQ ID NO: 2081107 - DNA, 15 bp, Homo sapiens
ctgaatatctctgtc

SEQ ID NO: 2081108 - DNA, 15 bp, Homo sapiens
tgaatatctctgtca

SEQ ID NO: 2081109 - DNA, 15 bp, Homo sapiens
gaatatctctgtcac

SEQ ID NO: 2081110 - DNA, 15 bp, Homo sapiens
aatatctctgtcacc

SEQ ID NO: 2081111 - DNA, 15 bp, Homo sapiens
atatctctgtcacct

SEQ ID NO: 2081112 - DNA, 15 bp, Homo sapiens
tatctctgtcacctt

SEQ ID NO: 2081113 - DNA, 15 bp, Homo sapiens
atctctgtcaccttg

SEQ ID NO: 2081114 - DNA, 15 bp, Homo sapiens
tctctgtcaccttga

SEQ ID NO: 2081115 - DNA, 15 bp, Homo sapiens
ctctgtcaccttgat

SEQ ID NO: 2081116 - DNA, 15 bp, Homo sapiens
tctgtcaccttgata

SEQ ID NO: 2081117 - DNA, 15 bp, Homo sapiens
ctgtcaccttgatat

SEQ ID NO: 2081118 - DNA, 15 bp, Homo sapiens
tgtcaccttgatatg

SEQ ID NO: 2081119 - DNA, 15 bp, Homo sapiens
gtcaccttgatatga

SEQ ID NO: 2081120 - DNA, 15 bp, Homo sapiens
tcaccttgatatgaa

SEQ ID NO: 2081121 - DNA, 15 bp, Homo sapiens
caccttgatatgaat

SEQ ID NO: 2081122 - DNA, 15 bp, Homo sapiens
accttgatatgaatg

SEQ ID NO: 2081123 - DNA, 15 bp, Homo sapiens
ccttgatatgaatgt

SEQ ID NO: 2081124 - DNA, 15 bp, Homo sapiens
cttgatatgaatgtc

SEQ ID NO: 2081125 - DNA, 15 bp, Homo sapiens
ttgatatgaatgtcc

SEQ ID NO: 2081126 - DNA, 15 bp, Homo sapiens
tgatatgaatgtcct

SEQ ID NO: 2081127 - DNA, 15 bp, Homo sapiens
gatatgaatgtcctg

SEQ ID NO: 2081128 - DNA, 15 bp, Homo sapiens
atatgaatgtcctgt

SEQ ID NO: 2081129 - DNA, 15 bp, Homo sapiens
tatgaatgtcctgtt

SEQ ID NO: 2081130 - DNA, 15 bp, Homo sapiens
atgaatgtcctgttt

SEQ ID NO: 2081131 - DNA, 15 bp, Homo sapiens
tgaatgtcctgtttc

SEQ ID NO: 2081132 - DNA, 15 bp, Homo sapiens
gaatgtcctgtttca

SEQ ID NO: 2081133 - DNA, 15 bp, Homo sapiens
tgtcctgtttcattt

SEQ ID NO: 2081134 - DNA, 15 bp, Homo sapiens
gtcctgtttcatttg

SEQ ID NO: 2081135 - DNA, 15 bp, Homo sapiens
tcctgtttcatttgt

SEQ ID NO: 2081136 - DNA, 15 bp, Homo sapiens
ctgtttcatttgtga

SEQ ID NO: 2081137 - DNA, 15 bp, Homo sapiens
tgtttcatttgtgaa

SEQ ID NO: 2081138 - DNA, 15 bp, Homo sapiens
gtttcatttgtgaat

SEQ ID NO: 2081139 - DNA, 15 bp, Homo sapiens
tttcatttgtgaatc

SEQ ID NO: 2081140 - DNA, 15 bp, Homo sapiens
ttcatttgtgaatct

SEQ ID NO: 2081141 - DNA, 15 bp, Homo sapiens
tcatttgtgaatctc

SEQ ID NO: 2081142 - DNA, 15 bp, Homo sapiens
catttgtgaatctct

SEQ ID NO: 2081143 - DNA, 15 bp, Homo sapiens
atttgtgaatctctg

SEQ ID NO: 2081144 - DNA, 15 bp, Homo sapiens
tttgtgaatctctgt

SEQ ID NO: 2081145 - DNA, 15 bp, Homo sapiens
ttgtgaatctctgtc

SEQ ID NO: 2081146 - DNA, 15 bp, Homo sapiens
tgtgaatctctgtcc

SEQ ID NO: 2081147 - DNA, 15 bp, Homo sapiens
gtgaatctctgtcct

SEQ ID NO: 2081148 - DNA, 15 bp, Homo sapiens
tgaatctctgtccta

SEQ ID NO: 2081149 - DNA, 15 bp, Homo sapiens
gaatctctgtcctac

SEQ ID NO: 2081150 - DNA, 15 bp, Homo sapiens
aatctctgtcctaca

SEQ ID NO: 2081151 - DNA, 15 bp, Homo sapiens
atctctgtcctacac

SEQ ID NO: 2081152 - DNA, 15 bp, Homo sapiens
tctctgtcctacact

SEQ ID NO: 2081153 - DNA, 15 bp, Homo sapiens
ctctgtcctacactg

SEQ ID NO: 2081154 - DNA, 15 bp, Homo sapiens
tctgtcctacactgc

SEQ ID NO: 2081155 - DNA, 15 bp, Homo sapiens
ctgtcctacactgcc

SEQ ID NO: 2081156 - DNA, 15 bp, Homo sapiens
tgtcctacactgcct

SEQ ID NO: 2081157 - DNA, 15 bp, Homo sapiens
gtcctacactgcctg

SEQ ID NO: 2081158 - DNA, 15 bp, Homo sapiens
tcctacactgcctgg

SEQ ID NO: 2081159 - DNA, 15 bp, Homo sapiens
cctacactgcctggt

SEQ ID NO: 2081160 - DNA, 15 bp, Homo sapiens
ctacactgcctggtg

SEQ ID NO: 2081161 - DNA, 15 bp, Homo sapiens
tacactgcctggtgc

SEQ ID NO: 2081162 - DNA, 15 bp, Homo sapiens
acactgcctggtgca

SEQ ID NO: 2081163 - DNA, 15 bp, Homo sapiens
cactgcctggtgcag

SEQ ID NO: 2081164 - DNA, 15 bp, Homo sapiens
actgcctggtgcagg

SEQ ID NO: 2081165 - DNA, 15 bp, Homo sapiens
ctgcctggtgcaggt

SEQ ID NO: 2081166 - DNA, 15 bp, Homo sapiens
tgcctggtgcaggta

SEQ ID NO: 2081167 - DNA, 15 bp, Homo sapiens
gcctggtgcaggtaa

SEQ ID NO: 2081168 - DNA, 15 bp, Homo sapiens
cctggtgcaggtaaa

SEQ ID NO: 2081169 - DNA, 15 bp, Homo sapiens
ctggtgcaggtaaaa

SEQ ID NO: 2081170 - DNA, 15 bp, Homo sapiens
tggtgcaggtaaaac

SEQ ID NO: 2081171 - DNA, 15 bp, Homo sapiens
ggtgcaggtaaaact

SEQ ID NO: 2081172 - DNA, 15 bp, Homo sapiens
gtgcaggtaaaactg

SEQ ID NO: 2081173 - DNA, 15 bp, Homo sapiens
tgcaggtaaaactga

SEQ ID NO: 2081174 - DNA, 15 bp, Homo sapiens
gcaggtaaaactgac

SEQ ID NO: 2081175 - DNA, 15 bp, Homo sapiens
caggtaaaactgaca

SEQ ID NO: 2081176 - DNA, 15 bp, Homo sapiens
aggtaaaactgacaa

SEQ ID NO: 2081177 - DNA, 15 bp, Homo sapiens
ggtaaaactgacaag

SEQ ID NO: 2081178 - DNA, 15 bp, Homo sapiens
gtaaaactgacaaga

SEQ ID NO: 2081179 - DNA, 15 bp, Homo sapiens
taaaactgacaagag

SEQ ID NO: 2081180 - DNA, 15 bp, Homo sapiens
aaaactgacaagaga

SEQ ID NO: 2081181 - DNA, 15 bp, Homo sapiens
aaactgacaagagat

SEQ ID NO: 2081182 - DNA, 15 bp, Homo sapiens
aactgacaagagatg

SEQ ID NO: 2081183 - DNA, 15 bp, Homo sapiens
actgacaagagatga

SEQ ID NO: 2081184 - DNA, 15 bp, Homo sapiens
ctgacaagagatgaa

SEQ ID NO: 2081185 - DNA, 15 bp, Homo sapiens
tgacaagagatgaat

SEQ ID NO: 2081186 - DNA, 15 bp, Homo sapiens
gacaagagatgaatt

SEQ ID NO: 2081187 - DNA, 15 bp, Homo sapiens
acaagagatgaattg

SEQ ID NO: 2081188 - DNA, 15 bp, Homo sapiens
caagagatgaattgt

SEQ ID NO: 2081189 - DNA, 15 bp, Homo sapiens
aagagatgaattgtc

SEQ ID NO: 2081190 - DNA, 15 bp, Homo sapiens
agagatgaattgtcc

SEQ ID NO: 2081191 - DNA, 15 bp, Homo sapiens
gagatgaattgtcct

SEQ ID NO: 2081192 - DNA, 15 bp, Homo sapiens
agatgaattgtcctt

SEQ ID NO: 2081193 - DNA, 15 bp, Homo sapiens
gatgaattgtccttt

SEQ ID NO: 2081194 - DNA, 15 bp, Homo sapiens
atgaattgtcctttc

SEQ ID NO: 2081195 - DNA, 15 bp, Homo sapiens
tgaattgtcctttcc

SEQ ID NO: 2081196 - DNA, 15 bp, Homo sapiens
gaattgtcctttcct

SEQ ID NO: 2081197 - DNA, 15 bp, Homo sapiens
aattgtcctttcctc

SEQ ID NO: 2081198 - DNA, 15 bp, Homo sapiens
attgtcctttcctcc

SEQ ID NO: 2081199 - DNA, 15 bp, Homo sapiens
ttgtcctttcctcca

SEQ ID NO: 2081200 - DNA, 15 bp, Homo sapiens
tgtcctttcctccat

SEQ ID NO: 2081201 - DNA, 15 bp, Homo sapiens
gtcctttcctccatt

SEQ ID NO: 2081202 - DNA, 15 bp, Homo sapiens
tcctttcctccattc

SEQ ID NO: 2081203 - DNA, 15 bp, Homo sapiens
cctttcctccattct

SEQ ID NO: 2081204 - DNA, 15 bp, Homo sapiens
ctttcctccattctt

SEQ ID NO: 2081205 - DNA, 15 bp, Homo sapiens
tttcctccattcttg

SEQ ID NO: 2081206 - DNA, 15 bp, Homo sapiens
ttcctccattcttga

SEQ ID NO: 2081207 - DNA, 15 bp, Homo sapiens
tcctccattcttgag

SEQ ID NO: 2081208 - DNA, 15 bp, Homo sapiens
cctccattcttgagg

SEQ ID NO: 2081209 - DNA, 15 bp, Homo sapiens
ctccattcttgaggt

SEQ ID NO: 2081210 - DNA, 15 bp, Homo sapiens
tccattcttgaggtc

SEQ ID NO: 2081211 - DNA, 15 bp, Homo sapiens
ccattcttgaggtca

SEQ ID NO: 2081212 - DNA, 15 bp, Homo sapiens
cattcttgaggtcat

SEQ ID NO: 2081213 - DNA, 15 bp, Homo sapiens
attcttgaggtcatt

SEQ ID NO: 2081214 - DNA, 15 bp, Homo sapiens
ttcttgaggtcattg

SEQ ID NO: 2081215 - DNA, 15 bp, Homo sapiens
tcttgaggtcattgc

SEQ ID NO: 2081216 - DNA, 15 bp, Homo sapiens
cttgaggtcattgct

SEQ ID NO: 2081217 - DNA, 15 bp, Homo sapiens
ttgaggtcattgcta

SEQ ID NO: 2081218 - DNA, 15 bp, Homo sapiens
tgaggtcattgctat

SEQ ID NO: 2081219 - DNA, 15 bp, Homo sapiens
gaggtcattgctatt

SEQ ID NO: 2081220 - DNA, 15 bp, Homo sapiens
aggtcattgctatta

SEQ ID NO: 2081221 - DNA, 15 bp, Homo sapiens
ggtcattgctattag

SEQ ID NO: 2081222 - DNA, 15 bp, Homo sapiens
gtcattgctattagc

SEQ ID NO: 2081223 - DNA, 15 bp, Homo sapiens
tcattgctattagca

SEQ ID NO: 2081224 - DNA, 15 bp, Homo sapiens
cattgctattagcat

SEQ ID NO: 2081225 - DNA, 15 bp, Homo sapiens
attgctattagcatt

SEQ ID NO: 2081226 - DNA, 15 bp, Homo sapiens
ttgctattagcattt

SEQ ID NO: 2081227 - DNA, 15 bp, Homo sapiens
tgctattagcatttt

SEQ ID NO: 2081228 - DNA, 15 bp, Homo sapiens
gctattagcattttg

SEQ ID NO: 2081229 - DNA, 15 bp, Homo sapiens
ctattagcattttgt

SEQ ID NO: 2081230 - DNA, 15 bp, Homo sapiens
tattagcattttgtg

SEQ ID NO: 2081231 - DNA, 15 bp, Homo sapiens
attagcattttgtgt

SEQ ID NO: 2081232 - DNA, 15 bp, Homo sapiens
ttagcattttgtgtg

SEQ ID NO: 2081233 - DNA, 15 bp, Homo sapiens
tagcattttgtgtgt

SEQ ID NO: 2081234 - DNA, 15 bp, Homo sapiens
agcattttgtgtgta

SEQ ID NO: 2081235 - DNA, 15 bp, Homo sapiens
gcattttgtgtgtac

SEQ ID NO: 2081236 - DNA, 15 bp, Homo sapiens
cattttgtgtgtacc

SEQ ID NO: 2081237 - DNA, 15 bp, Homo sapiens
attttgtgtgtacca

SEQ ID NO: 2081238 - DNA, 15 bp, Homo sapiens
ttttgtgtgtaccat

SEQ ID NO: 2081239 - DNA, 15 bp, Homo sapiens
tttgtgtgtaccatc

SEQ ID NO: 2081240 - DNA, 15 bp, Homo sapiens
ttgtgtgtaccatct

SEQ ID NO: 2081241 - DNA, 15 bp, Homo sapiens
tgtgtgtaccatctc

SEQ ID NO: 2081242 - DNA, 15 bp, Homo sapiens
gtgtgtaccatctcc

SEQ ID NO: 2081243 - DNA, 15 bp, Homo sapiens
tgtgtaccatctcct

SEQ ID NO: 2081244 - DNA, 15 bp, Homo sapiens
gtgtaccatctcctg

SEQ ID NO: 2081245 - DNA, 15 bp, Homo sapiens
tgtaccatctcctgc

SEQ ID NO: 2081246 - DNA, 15 bp, Homo sapiens
gtaccatctcctgca

SEQ ID NO: 2081247 - DNA, 15 bp, Homo sapiens
taccatctcctgcat

SEQ ID NO: 2081248 - DNA, 15 bp, Homo sapiens
accatctcctgcatt

SEQ ID NO: 2081249 - DNA, 15 bp, Homo sapiens
ccatctcctgcattg

SEQ ID NO: 2081250 - DNA, 15 bp, Homo sapiens
catctcctgcattgt

SEQ ID NO: 2081251 - DNA, 15 bp, Homo sapiens
atctcctgcattgta

SEQ ID NO: 2081252 - DNA, 15 bp, Homo sapiens
tctcctgcattgtag

SEQ ID NO: 2081253 - DNA, 15 bp, Homo sapiens
ctcctgcattgtagg

SEQ ID NO: 2081254 - DNA, 15 bp, Homo sapiens
tcctgcattgtagga

SEQ ID NO: 2081255 - DNA, 15 bp, Homo sapiens
cctgcattgtaggat

SEQ ID NO: 2081256 - DNA, 15 bp, Homo sapiens
ctgcattgtaggatg

SEQ ID NO: 2081257 - DNA, 15 bp, Homo sapiens
tgcattgtaggatgt

SEQ ID NO: 2081258 - DNA, 15 bp, Homo sapiens
gcattgtaggatgtt

SEQ ID NO: 2081259 - DNA, 15 bp, Homo sapiens
cattgtaggatgttc

SEQ ID NO: 2081260 - DNA, 15 bp, Homo sapiens
attgtaggatgttca

SEQ ID NO: 2081261 - DNA, 15 bp, Homo sapiens
ttgtaggatgttcag

SEQ ID NO: 2081262 - DNA, 15 bp, Homo sapiens
tgtaggatgttcagc

SEQ ID NO: 2081263 - DNA, 15 bp, Homo sapiens
gtaggatgttcagca

SEQ ID NO: 2081264 - DNA, 15 bp, Homo sapiens
taggatgttcagcat

SEQ ID NO: 2081265 - DNA, 15 bp, Homo sapiens
aggatgttcagcatt

SEQ ID NO: 2081266 - DNA, 15 bp, Homo sapiens
ggatgttcagcattt

SEQ ID NO: 2081267 - DNA, 15 bp, Homo sapiens
gatgttcagcatttt

SEQ ID NO: 2081268 - DNA, 15 bp, Homo sapiens
atgttcagcattttt

SEQ ID NO: 2081269 - DNA, 15 bp, Homo sapiens
tgttcagcatttttg

SEQ ID NO: 2081270 - DNA, 15 bp, Homo sapiens
gttcagcatttttgg

SEQ ID NO: 2081271 - DNA, 15 bp, Homo sapiens
ttcagcatttttggt

SEQ ID NO: 2081272 - DNA, 15 bp, Homo sapiens
tcagcatttttggtt

SEQ ID NO: 2081273 - DNA, 15 bp, Homo sapiens
cagcatttttggttt

SEQ ID NO: 2081274 - DNA, 15 bp, Homo sapiens
agcatttttggtttc

SEQ ID NO: 2081275 - DNA, 15 bp, Homo sapiens
gcatttttggtttcc

SEQ ID NO: 2081276 - DNA, 15 bp, Homo sapiens
catttttggtttccg

SEQ ID NO: 2081277 - DNA, 15 bp, Homo sapiens
atttttggtttccgc

SEQ ID NO: 2081278 - DNA, 15 bp, Homo sapiens
tttttggtttccgcc

SEQ ID NO: 2081279 - DNA, 15 bp, Homo sapiens
ttttggtttccgcct

SEQ ID NO: 2081280 - DNA, 15 bp, Homo sapiens
tttggtttccgccta

SEQ ID NO: 2081281 - DNA, 15 bp, Homo sapiens
ttggtttccgcctac

SEQ ID NO: 2081282 - DNA, 15 bp, Homo sapiens
tggtttccgcctact

SEQ ID NO: 2081283 - DNA, 15 bp, Homo sapiens
ggtttccgcctacta

SEQ ID NO: 2081284 - DNA, 15 bp, Homo sapiens
gtttccgcctactaa

SEQ ID NO: 2081285 - DNA, 15 bp, Homo sapiens
tttccgcctactaaa

SEQ ID NO: 2081286 - DNA, 15 bp, Homo sapiens
ttccgcctactaaat

SEQ ID NO: 2081287 - DNA, 15 bp, Homo sapiens
tccgcctactaaata

SEQ ID NO: 2081288 - DNA, 15 bp, Homo sapiens
ccgcctactaaatat

SEQ ID NO: 2081289 - DNA, 15 bp, Homo sapiens
cgcctactaaatatc

SEQ ID NO: 2081290 - DNA, 15 bp, Homo sapiens
gcctactaaatatca

SEQ ID NO: 2081291 - DNA, 15 bp, Homo sapiens
cctactaaatatcag

SEQ ID NO: 2081292 - DNA, 15 bp, Homo sapiens
ctactaaatatcagt

SEQ ID NO: 2081293 - DNA, 15 bp, Homo sapiens
tactaaatatcagtt

SEQ ID NO: 2081294 - DNA, 15 bp, Homo sapiens
actaaatatcagttg

SEQ ID NO: 2081295 - DNA, 15 bp, Homo sapiens
ctaaatatcagttgg

SEQ ID NO: 2081296 - DNA, 15 bp, Homo sapiens
taaatatcagttggg

SEQ ID NO: 2081297 - DNA, 15 bp, Homo sapiens
aaatatcagttgggc

SEQ ID NO: 2081298 - DNA, 15 bp, Homo sapiens
aatatcagttgggca

SEQ ID NO: 2081299 - DNA, 15 bp, Homo sapiens
atatcagttgggcat

SEQ ID NO: 2081300 - DNA, 15 bp, Homo sapiens
tatcagttgggcatg

SEQ ID NO: 2081301 - DNA, 15 bp, Homo sapiens
atcagttgggcatgc

SEQ ID NO: 2081302 - DNA, 15 bp, Homo sapiens
tcagttgggcatgcc

SEQ ID NO: 2081303 - DNA, 15 bp, Homo sapiens
cagttgggcatgcca

SEQ ID NO: 2081304 - DNA, 15 bp, Homo sapiens
agttgggcatgccag

SEQ ID NO: 2081305 - DNA, 15 bp, Homo sapiens
gttgggcatgccagt

SEQ ID NO: 2081306 - DNA, 15 bp, Homo sapiens
ttgggcatgccagtc

SEQ ID NO: 2081307 - DNA, 15 bp, Homo sapiens
tgggcatgccagtcg

SEQ ID NO: 2081308 - DNA, 15 bp, Homo sapiens
gggcatgccagtcgt

SEQ ID NO: 2081309 - DNA, 15 bp, Homo sapiens
ggcatgccagtcgtg

SEQ ID NO: 2081310 - DNA, 15 bp, Homo sapiens
gcatgccagtcgtgt

SEQ ID NO: 2081311 - DNA, 15 bp, Homo sapiens
catgccagtcgtgtg

SEQ ID NO: 2081312 - DNA, 15 bp, Homo sapiens
atgccagtcgtgtga

SEQ ID NO: 2081313 - DNA, 15 bp, Homo sapiens
tgccagtcgtgtgac

SEQ ID NO: 2081314 - DNA, 15 bp, Homo sapiens
gccagtcgtgtgaca

SEQ ID NO: 2081315 - DNA, 15 bp, Homo sapiens
ccagtcgtgtgacag

SEQ ID NO: 2081316 - DNA, 15 bp, Homo sapiens
cagtcgtgtgacagc

SEQ ID NO: 2081317 - DNA, 15 bp, Homo sapiens
agtcgtgtgacagcc

SEQ ID NO: 2081318 - DNA, 15 bp, Homo sapiens
gtcgtgtgacagcca

SEQ ID NO: 2081319 - DNA, 15 bp, Homo sapiens
tcgtgtgacagccaa

SEQ ID NO: 2081320 - DNA, 15 bp, Homo sapiens
cgtgtgacagccaaa

SEQ ID NO: 2081321 - DNA, 15 bp, Homo sapiens
gtgtgacagccaaaa

SEQ ID NO: 2081322 - DNA, 15 bp, Homo sapiens
tgtgacagccaaaaa

SEQ ID NO: 2081323 - DNA, 15 bp, Homo sapiens
gtgacagccaaaaat

SEQ ID NO: 2081324 - DNA, 15 bp, Homo sapiens
tgacagccaaaaatg

SEQ ID NO: 2081325 - DNA, 15 bp, Homo sapiens
gacagccaaaaatga

SEQ ID NO: 2081326 - DNA, 15 bp, Homo sapiens
acagccaaaaatgaa

SEQ ID NO: 2081327 - DNA, 15 bp, Homo sapiens
cagccaaaaatgaag

SEQ ID NO: 2081328 - DNA, 15 bp, Homo sapiens
agccaaaaatgaagt

SEQ ID NO: 2081329 - DNA, 15 bp, Homo sapiens
gccaaaaatgaagtg

SEQ ID NO: 2081330 - DNA, 15 bp, Homo sapiens
ccaaaaatgaagtgg

SEQ ID NO: 2081331 - DNA, 15 bp, Homo sapiens
caaaaatgaagtggg

SEQ ID NO: 2081332 - DNA, 15 bp, Homo sapiens
aaaaatgaagtgggg

SEQ ID NO: 2081333 - DNA, 15 bp, Homo sapiens
aaaatgaagtggggg

SEQ ID NO: 2081334 - DNA, 15 bp, Homo sapiens
aaatgaagtgggggg

SEQ ID NO: 2081335 - DNA, 15 bp, Homo sapiens
aatgaagtggggggt

SEQ ID NO: 2081336 - DNA, 15 bp, Homo sapiens
atgaagtggggggta

SEQ ID NO: 2081337 - DNA, 15 bp, Homo sapiens
tgaagtggggggtac

SEQ ID NO: 2081338 - DNA, 15 bp, Homo sapiens
gaagtggggggtacc

SEQ ID NO: 2081339 - DNA, 15 bp, Homo sapiens
aagtggggggtacca

SEQ ID NO: 2081340 - DNA, 15 bp, Homo sapiens
agtggggggtaccag

SEQ ID NO: 2081341 - DNA, 15 bp, Homo sapiens
gtggggggtaccagc

SEQ ID NO: 2081342 - DNA, 15 bp, Homo sapiens
tggggggtaccagct

SEQ ID NO: 2081343 - DNA, 15 bp, Homo sapiens
ggggggtaccagctt

SEQ ID NO: 2081344 - DNA, 15 bp, Homo sapiens
gggggtaccagcttc

SEQ ID NO: 2081345 - DNA, 15 bp, Homo sapiens
ggggtaccagcttct

SEQ ID NO: 2081346 - DNA, 15 bp, Homo sapiens
gggtaccagcttctg

SEQ ID NO: 2081347 - DNA, 15 bp, Homo sapiens
ggtaccagcttctgt

SEQ ID NO: 2081348 - DNA, 15 bp, Homo sapiens
gtaccagcttctgtt

SEQ ID NO: 2081349 - DNA, 15 bp, Homo sapiens
taccagcttctgtta

SEQ ID NO: 2081350 - DNA, 15 bp, Homo sapiens
accagcttctgttat

SEQ ID NO: 2081351 - DNA, 15 bp, Homo sapiens
ccagcttctgttatt

SEQ ID NO: 2081352 - DNA, 15 bp, Homo sapiens
cagcttctgttatta

SEQ ID NO: 2081353 - DNA, 15 bp, Homo sapiens
agcttctgttattaa

SEQ ID NO: 2081354 - DNA, 15 bp, Homo sapiens
gcttctgttattaat

SEQ ID NO: 2081355 - DNA, 15 bp, Homo sapiens
cttctgttattaata

SEQ ID NO: 2081356 - DNA, 15 bp, Homo sapiens
ttctgttattaatac

SEQ ID NO: 2081357 - DNA, 15 bp, Homo sapiens
tctgttattaatacc

SEQ ID NO: 2081358 - DNA, 15 bp, Homo sapiens
ctgttattaataccc

SEQ ID NO: 2081359 - DNA, 15 bp, Homo sapiens
tgttattaataccct

SEQ ID NO: 2081360 - DNA, 15 bp, Homo sapiens
gttattaataccctc

SEQ ID NO: 2081361 - DNA, 15 bp, Homo sapiens
ttattaataccctca

SEQ ID NO: 2081362 - DNA, 15 bp, Homo sapiens
tattaataccctcag

SEQ ID NO: 2081363 - DNA, 15 bp, Homo sapiens
attaataccctcagg

SEQ ID NO: 2081364 - DNA, 15 bp, Homo sapiens
ttaataccctcaggc

SEQ ID NO: 2081365 - DNA, 15 bp, Homo sapiens
taataccctcaggcc

SEQ ID NO: 2081366 - DNA, 15 bp, Homo sapiens
aataccctcaggcct

SEQ ID NO: 2081367 - DNA, 15 bp, Homo sapiens
ataccctcaggcctg

SEQ ID NO: 2081368 - DNA, 15 bp, Homo sapiens
taccctcaggcctgt

SEQ ID NO: 2081369 - DNA, 15 bp, Homo sapiens
accctcaggcctgtg

SEQ ID NO: 2081370 - DNA, 15 bp, Homo sapiens
ccctcaggcctgtga

SEQ ID NO: 2081371 - DNA, 15 bp, Homo sapiens
cctcaggcctgtgat

SEQ ID NO: 2081372 - DNA, 15 bp, Homo sapiens
ctcaggcctgtgatc

SEQ ID NO: 2081373 - DNA, 15 bp, Homo sapiens
tcaggcctgtgatct

SEQ ID NO: 2081374 - DNA, 15 bp, Homo sapiens
caggcctgtgatctc

SEQ ID NO: 2081375 - DNA, 15 bp, Homo sapiens
aggcctgtgatctcc

SEQ ID NO: 2081376 - DNA, 15 bp, Homo sapiens
ggcctgtgatctcct

SEQ ID NO: 2081377 - DNA, 15 bp, Homo sapiens
gcctgtgatctcctg

SEQ ID NO: 2081378 - DNA, 15 bp, Homo sapiens
cctgtgatctcctgg

SEQ ID NO: 2081379 - DNA, 15 bp, Homo sapiens
ctgtgatctcctggc

SEQ ID NO: 2081380 - DNA, 15 bp, Homo sapiens
tgtgatctcctggct

SEQ ID NO: 2081381 - DNA, 15 bp, Homo sapiens
gtgatctcctggctc

SEQ ID NO: 2081382 - DNA, 15 bp, Homo sapiens
tgatctcctggctcc

SEQ ID NO: 2081383 - DNA, 15 bp, Homo sapiens
gatctcctggctcct

SEQ ID NO: 2081384 - DNA, 15 bp, Homo sapiens
atctcctggctcctt

SEQ ID NO: 2081385 - DNA, 15 bp, Homo sapiens
tctcctggctcctta

SEQ ID NO: 2081386 - DNA, 15 bp, Homo sapiens
ctcctggctccttac

SEQ ID NO: 2081387 - DNA, 15 bp, Homo sapiens
tcctggctccttaca

SEQ ID NO: 2081388 - DNA, 15 bp, Homo sapiens
cctggctccttacag

SEQ ID NO: 2081389 - DNA, 15 bp, Homo sapiens
ctggctccttacagc

SEQ ID NO: 2081390 - DNA, 15 bp, Homo sapiens
tggctccttacagct

SEQ ID NO: 2081391 - DNA, 15 bp, Homo sapiens
ggctccttacagctc

SEQ ID NO: 2081392 - DNA, 15 bp, Homo sapiens
gctccttacagctct

SEQ ID NO: 2081393 - DNA, 15 bp, Homo sapiens
ctccttacagctctt

SEQ ID NO: 2081394 - DNA, 15 bp, Homo sapiens
tccttacagctctta

SEQ ID NO: 2081395 - DNA, 15 bp, Homo sapiens
ccttacagctcttag

SEQ ID NO: 2081396 - DNA, 15 bp, Homo sapiens
cttacagctcttagg

SEQ ID NO: 2081397 - DNA, 15 bp, Homo sapiens
ttacagctcttagga

SEQ ID NO: 2081398 - DNA, 15 bp, Homo sapiens
tacagctcttaggaa

SEQ ID NO: 2081399 - DNA, 15 bp, Homo sapiens
acagctcttaggaag

SEQ ID NO: 2081400 - DNA, 15 bp, Homo sapiens
cagctcttaggaagg

SEQ ID NO: 2081401 - DNA, 15 bp, Homo sapiens
agctcttaggaaggg

SEQ ID NO: 2081402 - DNA, 15 bp, Homo sapiens
gctcttaggaaggga

SEQ ID NO: 2081403 - DNA, 15 bp, Homo sapiens
ctcttaggaagggaa

SEQ ID NO: 2081404 - DNA, 15 bp, Homo sapiens
tcttaggaagggaac

SEQ ID NO: 2081405 - DNA, 15 bp, Homo sapiens
cttaggaagggaaca

SEQ ID NO: 2081406 - DNA, 15 bp, Homo sapiens
ttaggaagggaacag

SEQ ID NO: 2081407 - DNA, 15 bp, Homo sapiens
taggaagggaacagt

SEQ ID NO: 2081408 - DNA, 15 bp, Homo sapiens
aggaagggaacagta

SEQ ID NO: 2081409 - DNA, 15 bp, Homo sapiens
ggaagggaacagtag

SEQ ID NO: 2081410 - DNA, 15 bp, Homo sapiens
gaagggaacagtagt

SEQ ID NO: 2081411 - DNA, 15 bp, Homo sapiens
aagggaacagtagtc

SEQ ID NO: 2081412 - DNA, 15 bp, Homo sapiens
agggaacagtagtct

SEQ ID NO: 2081413 - DNA, 15 bp, Homo sapiens
gggaacagtagtctt

SEQ ID NO: 2081414 - DNA, 15 bp, Homo sapiens
ggaacagtagtcttt

SEQ ID NO: 2081415 - DNA, 15 bp, Homo sapiens
gaacagtagtctttc

SEQ ID NO: 2081416 - DNA, 15 bp, Homo sapiens
aacagtagtctttcc

SEQ ID NO: 2081417 - DNA, 15 bp, Homo sapiens
acagtagtctttccc

SEQ ID NO: 2081418 - DNA, 15 bp, Homo sapiens
cagtagtctttccct

SEQ ID NO: 2081419 - DNA, 15 bp, Homo sapiens
agtagtctttccctg

SEQ ID NO: 2081420 - DNA, 15 bp, Homo sapiens
gtagtctttccctgc

SEQ ID NO: 2081421 - DNA, 15 bp, Homo sapiens
tagtctttccctgca

SEQ ID NO: 2081422 - DNA, 15 bp, Homo sapiens
agtctttccctgcac

SEQ ID NO: 2081423 - DNA, 15 bp, Homo sapiens
gtctttccctgcaca

SEQ ID NO: 2081424 - DNA, 15 bp, Homo sapiens
tctttccctgcacat

SEQ ID NO: 2081425 - DNA, 15 bp, Homo sapiens
ctttccctgcacatt

SEQ ID NO: 2081426 - DNA, 15 bp, Homo sapiens
tttccctgcacattg

SEQ ID NO: 2081427 - DNA, 15 bp, Homo sapiens
ttccctgcacattgt

SEQ ID NO: 2081428 - DNA, 15 bp, Homo sapiens
tccctgcacattgtt

SEQ ID NO: 2081429 - DNA, 15 bp, Homo sapiens
ccctgcacattgttc

SEQ ID NO: 2081430 - DNA, 15 bp, Homo sapiens
cctgcacattgttct

SEQ ID NO: 2081431 - DNA, 15 bp, Homo sapiens
ctgcacattgttctg

SEQ ID NO: 2081432 - DNA, 15 bp, Homo sapiens
tgcacattgttctgt

SEQ ID NO: 2081433 - DNA, 15 bp, Homo sapiens
gcacattgttctgtg

SEQ ID NO: 2081434 - DNA, 15 bp, Homo sapiens
cacattgttctgtgc

SEQ ID NO: 2081435 - DNA, 15 bp, Homo sapiens
acattgttctgtgca

SEQ ID NO: 2081436 - DNA, 15 bp, Homo sapiens
cattgttctgtgcag

SEQ ID NO: 2081437 - DNA, 15 bp, Homo sapiens
attgttctgtgcagt

SEQ ID NO: 2081438 - DNA, 15 bp, Homo sapiens
ttgttctgtgcagtt

SEQ ID NO: 2081439 - DNA, 15 bp, Homo sapiens
tgttctgtgcagtta

SEQ ID NO: 2081440 - DNA, 15 bp, Homo sapiens
gttctgtgcagttag

SEQ ID NO: 2081441 - DNA, 15 bp, Homo sapiens
ttctgtgcagttagt

SEQ ID NO: 2081442 - DNA, 15 bp, Homo sapiens
tctgtgcagttagta

SEQ ID NO: 2081443 - DNA, 15 bp, Homo sapiens
ctgtgcagttagtag

SEQ ID NO: 2081444 - DNA, 15 bp, Homo sapiens
tgtgcagttagtagc

SEQ ID NO: 2081445 - DNA, 15 bp, Homo sapiens
gtgcagttagtagcg

SEQ ID NO: 2081446 - DNA, 15 bp, Homo sapiens
tgcagttagtagcga

SEQ ID NO: 2081447 - DNA, 15 bp, Homo sapiens
gcagttagtagcgac

SEQ ID NO: 2081448 - DNA, 15 bp, Homo sapiens
cagttagtagcgaca

SEQ ID NO: 2081449 - DNA, 15 bp, Homo sapiens
agttagtagcgacat

SEQ ID NO: 2081450 - DNA, 15 bp, Homo sapiens
gttagtagcgacata

SEQ ID NO: 2081451 - DNA, 15 bp, Homo sapiens
ttagtagcgacatac

SEQ ID NO: 2081452 - DNA, 15 bp, Homo sapiens
tagtagcgacataca

SEQ ID NO: 2081453 - DNA, 15 bp, Homo sapiens
agtagcgacatacac

SEQ ID NO: 2081454 - DNA, 15 bp, Homo sapiens
gtagcgacatacact

SEQ ID NO: 2081455 - DNA, 15 bp, Homo sapiens
tagcgacatacactg

SEQ ID NO: 2081456 - DNA, 15 bp, Homo sapiens
agcgacatacactga

SEQ ID NO: 2081457 - DNA, 15 bp, Homo sapiens
gcgacatacactgac

SEQ ID NO: 2081458 - DNA, 15 bp, Homo sapiens
cgacatacactgacg

SEQ ID NO: 2081459 - DNA, 15 bp, Homo sapiens
gacatacactgacgc

SEQ ID NO: 2081460 - DNA, 15 bp, Homo sapiens
acatacactgacgcc

SEQ ID NO: 2081461 - DNA, 15 bp, Homo sapiens
catacactgacgccc

SEQ ID NO: 2081462 - DNA, 15 bp, Homo sapiens
atacactgacgcccc

SEQ ID NO: 2081463 - DNA, 15 bp, Homo sapiens
tacactgacgcccca

SEQ ID NO: 2081464 - DNA, 15 bp, Homo sapiens
acactgacgccccag

SEQ ID NO: 2081465 - DNA, 15 bp, Homo sapiens
cactgacgccccagg

SEQ ID NO: 2081466 - DNA, 15 bp, Homo sapiens
actgacgccccaggc

SEQ ID NO: 2081467 - DNA, 15 bp, Homo sapiens
ctgacgccccaggcc

SEQ ID NO: 2081468 - DNA, 15 bp, Homo sapiens
tgacgccccaggcca

SEQ ID NO: 2081469 - DNA, 15 bp, Homo sapiens
gacgccccaggccaa

SEQ ID NO: 2081470 - DNA, 15 bp, Homo sapiens
acgccccaggccaaa

SEQ ID NO: 2081471 - DNA, 15 bp, Homo sapiens
cgccccaggccaaag

SEQ ID NO: 2081472 - DNA, 15 bp, Homo sapiens
gccccaggccaaagt

SEQ ID NO: 2081473 - DNA, 15 bp, Homo sapiens
ccccaggccaaagtt

SEQ ID NO: 2081474 - DNA, 15 bp, Homo sapiens
cccaggccaaagttc

SEQ ID NO: 2081475 - DNA, 15 bp, Homo sapiens
ccaggccaaagttcc

SEQ ID NO: 2081476 - DNA, 15 bp, Homo sapiens
caggccaaagttcct

SEQ ID NO: 2081477 - DNA, 15 bp, Homo sapiens
aggccaaagttccta

SEQ ID NO: 2081478 - DNA, 15 bp, Homo sapiens
ggccaaagttcctac

SEQ ID NO: 2081479 - DNA, 15 bp, Homo sapiens
gccaaagttcctact

SEQ ID NO: 2081480 - DNA, 15 bp, Homo sapiens
ccaaagttcctactg

SEQ ID NO: 2081481 - DNA, 15 bp, Homo sapiens
caaagttcctactgt

SEQ ID NO: 2081482 - DNA, 15 bp, Homo sapiens
aaagttcctactgtg

SEQ ID NO: 2081483 - DNA, 15 bp, Homo sapiens
aagttcctactgtgt

SEQ ID NO: 2081484 - DNA, 15 bp, Homo sapiens
agttcctactgtgtc

SEQ ID NO: 2081485 - DNA, 15 bp, Homo sapiens
gttcctactgtgtcc

SEQ ID NO: 2081486 - DNA, 15 bp, Homo sapiens
ttcctactgtgtcct

SEQ ID NO: 2081487 - DNA, 15 bp, Homo sapiens
tcctactgtgtccta

SEQ ID NO: 2081488 - DNA, 15 bp, Homo sapiens
cctactgtgtcctac

SEQ ID NO: 2081489 - DNA, 15 bp, Homo sapiens
ctactgtgtcctact

SEQ ID NO: 2081490 - DNA, 15 bp, Homo sapiens
tactgtgtcctactt

SEQ ID NO: 2081491 - DNA, 15 bp, Homo sapiens
actgtgtcctacttg

SEQ ID NO: 2081492 - DNA, 15 bp, Homo sapiens
ctgtgtcctacttga

SEQ ID NO: 2081493 - DNA, 15 bp, Homo sapiens
tgtgtcctacttgaa

SEQ ID NO: 2081494 - DNA, 15 bp, Homo sapiens
gtgtcctacttgaag

SEQ ID NO: 2081495 - DNA, 15 bp, Homo sapiens
tgtcctacttgaagg

SEQ ID NO: 2081496 - DNA, 15 bp, Homo sapiens
gtcctacttgaagga

SEQ ID NO: 2081497 - DNA, 15 bp, Homo sapiens
tcctacttgaaggat

SEQ ID NO: 2081498 - DNA, 15 bp, Homo sapiens
cctacttgaaggatg

SEQ ID NO: 2081499 - DNA, 15 bp, Homo sapiens
ctacttgaaggatga

SEQ ID NO: 2081500 - DNA, 15 bp, Homo sapiens
tacttgaaggatgat

SEQ ID NO: 2081501 - DNA, 15 bp, Homo sapiens
acttgaaggatgatt

SEQ ID NO: 2081502 - DNA, 15 bp, Homo sapiens
cttgaaggatgattt

SEQ ID NO: 2081503 - DNA, 15 bp, Homo sapiens
ttgaaggatgatttt

SEQ ID NO: 2081504 - DNA, 15 bp, Homo sapiens
tgaaggatgattttg

SEQ ID NO: 2081505 - DNA, 15 bp, Homo sapiens
gaaggatgattttgt

SEQ ID NO: 2081506 - DNA, 15 bp, Homo sapiens
aaggatgattttgtt

SEQ ID NO: 2081507 - DNA, 15 bp, Homo sapiens
aggatgattttgttt

SEQ ID NO: 2081508 - DNA, 15 bp, Homo sapiens
ggatgattttgtttt

SEQ ID NO: 2081509 - DNA, 15 bp, Homo sapiens
gatgattttgttttc

SEQ ID NO: 2081510 - DNA, 15 bp, Homo sapiens
atgattttgttttct

SEQ ID NO: 2081511 - DNA, 15 bp, Homo sapiens
tgattttgttttctt

SEQ ID NO: 2081512 - DNA, 15 bp, Homo sapiens
gattttgttttcttg

SEQ ID NO: 2081513 - DNA, 15 bp, Homo sapiens
attttgttttcttga

SEQ ID NO: 2081514 - DNA, 15 bp, Homo sapiens
ttttgttttcttgag

SEQ ID NO: 2081515 - DNA, 15 bp, Homo sapiens
tttgttttcttgaga

SEQ ID NO: 2081516 - DNA, 15 bp, Homo sapiens
ttgttttcttgagac

SEQ ID NO: 2081517 - DNA, 15 bp, Homo sapiens
tgttttcttgagaca

SEQ ID NO: 2081518 - DNA, 15 bp, Homo sapiens
gttttcttgagacag

SEQ ID NO: 2081519 - DNA, 15 bp, Homo sapiens
ttttcttgagacagg

SEQ ID NO: 2081520 - DNA, 15 bp, Homo sapiens
tttcttgagacaggg

SEQ ID NO: 2081521 - DNA, 15 bp, Homo sapiens
ttcttgagacagggt

SEQ ID NO: 2081522 - DNA, 15 bp, Homo sapiens
tcttgagacagggtc

SEQ ID NO: 2081523 - DNA, 15 bp, Homo sapiens
cttgagacagggtct

SEQ ID NO: 2081524 - DNA, 15 bp, Homo sapiens
ttgagacagggtctg

SEQ ID NO: 2081525 - DNA, 15 bp, Homo sapiens
tgagacagggtctgg

SEQ ID NO: 2081526 - DNA, 15 bp, Homo sapiens
gagacagggtctggc

SEQ ID NO: 2081527 - DNA, 15 bp, Homo sapiens
agacagggtctggct

SEQ ID NO: 2081528 - DNA, 15 bp, Homo sapiens
gacagggtctggctc

SEQ ID NO: 2081529 - DNA, 15 bp, Homo sapiens
acagggtctggctct

SEQ ID NO: 2081530 - DNA, 15 bp, Homo sapiens
cagggtctggctctg

SEQ ID NO: 2081531 - DNA, 15 bp, Homo sapiens
agggtctggctctgt

SEQ ID NO: 2081532 - DNA, 15 bp, Homo sapiens
gggtctggctctgtt

SEQ ID NO: 2081533 - DNA, 15 bp, Homo sapiens
ggtctggctctgttg

SEQ ID NO: 2081534 - DNA, 15 bp, Homo sapiens
gtctggctctgttgc

SEQ ID NO: 2081535 - DNA, 15 bp, Homo sapiens
tctggctctgttgcg

SEQ ID NO: 2081536 - DNA, 15 bp, Homo sapiens
ctggctctgttgcgt

SEQ ID NO: 2081537 - DNA, 15 bp, Homo sapiens
tggctctgttgcgtg

SEQ ID NO: 2081538 - DNA, 15 bp, Homo sapiens
ggctctgttgcgtgg

SEQ ID NO: 2081539 - DNA, 15 bp, Homo sapiens
gctctgttgcgtggg

SEQ ID NO: 2081540 - DNA, 15 bp, Homo sapiens
ctctgttgcgtgggc

SEQ ID NO: 2081541 - DNA, 15 bp, Homo sapiens
tctgttgcgtgggct

SEQ ID NO: 2081542 - DNA, 15 bp, Homo sapiens
ctgttgcgtgggctg

SEQ ID NO: 2081543 - DNA, 15 bp, Homo sapiens
tgttgcgtgggctgg

SEQ ID NO: 2081544 - DNA, 15 bp, Homo sapiens
gttgcgtgggctgga

SEQ ID NO: 2081545 - DNA, 15 bp, Homo sapiens
ttgcgtgggctggaa

SEQ ID NO: 2081546 - DNA, 15 bp, Homo sapiens
tgcgtgggctggaat

SEQ ID NO: 2081547 - DNA, 15 bp, Homo sapiens
gcgtgggctggaatt

SEQ ID NO: 2081548 - DNA, 15 bp, Homo sapiens
cgtgggctggaattc

SEQ ID NO: 2081549 - DNA, 15 bp, Homo sapiens
gtgggctggaattca

SEQ ID NO: 2081550 - DNA, 15 bp, Homo sapiens
tgggctggaattcag

SEQ ID NO: 2081551 - DNA, 15 bp, Homo sapiens
gggctggaattcagt

SEQ ID NO: 2081552 - DNA, 15 bp, Homo sapiens
ggctggaattcagtg

SEQ ID NO: 2081553 - DNA, 15 bp, Homo sapiens
gctggaattcagtgg

SEQ ID NO: 2081554 - DNA, 15 bp, Homo sapiens
ctggaattcagtggc

SEQ ID NO: 2081555 - DNA, 15 bp, Homo sapiens
tggaattcagtggca

SEQ ID NO: 2081556 - DNA, 15 bp, Homo sapiens
ggaattcagtggcac

SEQ ID NO: 2081557 - DNA, 15 bp, Homo sapiens
gaattcagtggcaca

SEQ ID NO: 2081558 - DNA, 15 bp, Homo sapiens
aattcagtggcacaa

SEQ ID NO: 2081559 - DNA, 15 bp, Homo sapiens
attcagtggcacaat

SEQ ID NO: 2081560 - DNA, 15 bp, Homo sapiens
ttcagtggcacaatc

SEQ ID NO: 2081561 - DNA, 15 bp, Homo sapiens
tcagtggcacaatct

SEQ ID NO: 2081562 - DNA, 15 bp, Homo sapiens
cagtggcacaatctc

SEQ ID NO: 2081563 - DNA, 15 bp, Homo sapiens
agtggcacaatctca

SEQ ID NO: 2081564 - DNA, 15 bp, Homo sapiens
gtggcacaatctcag

SEQ ID NO: 2081565 - DNA, 15 bp, Homo sapiens
tggcacaatctcagc

SEQ ID NO: 2081566 - DNA, 15 bp, Homo sapiens
ggcacaatctcagct

SEQ ID NO: 2081567 - DNA, 15 bp, Homo sapiens
gcacaatctcagctc

SEQ ID NO: 2081568 - DNA, 15 bp, Homo sapiens
cacaatctcagctca

SEQ ID NO: 2081569 - DNA, 15 bp, Homo sapiens
acaatctcagctcac

SEQ ID NO: 2081570 - DNA, 15 bp, Homo sapiens
atctcagctcactgt

SEQ ID NO: 2081571 - DNA, 15 bp, Homo sapiens
tctcagctcactgta

SEQ ID NO: 2081572 - DNA, 15 bp, Homo sapiens
ctcagctcactgtaa

SEQ ID NO: 2081573 - DNA, 15 bp, Homo sapiens
tcagctcactgtaaa

SEQ ID NO: 2081574 - DNA, 15 bp, Homo sapiens
cagctcactgtaaat

SEQ ID NO: 2081575 - DNA, 15 bp, Homo sapiens
agctcactgtaaatt

SEQ ID NO: 2081576 - DNA, 15 bp, Homo sapiens
gctcactgtaaattt

SEQ ID NO: 2081577 - DNA, 15 bp, Homo sapiens
ctcactgtaaatttc

SEQ ID NO: 2081578 - DNA, 15 bp, Homo sapiens
tcactgtaaatttcg

SEQ ID NO: 2081579 - DNA, 15 bp, Homo sapiens
cactgtaaatttcgc

SEQ ID NO: 2081580 - DNA, 15 bp, Homo sapiens
actgtaaatttcgcc

SEQ ID NO: 2081581 - DNA, 15 bp, Homo sapiens
ctgtaaatttcgcct

SEQ ID NO: 2081582 - DNA, 15 bp, Homo sapiens
tgtaaatttcgcctc

SEQ ID NO: 2081583 - DNA, 15 bp, Homo sapiens
gtaaatttcgcctcg

SEQ ID NO: 2081584 - DNA, 15 bp, Homo sapiens
taaatttcgcctcgt

SEQ ID NO: 2081585 - DNA, 15 bp, Homo sapiens
aaatttcgcctcgtg

SEQ ID NO: 2081586 - DNA, 15 bp, Homo sapiens
aatttcgcctcgtgg

SEQ ID NO: 2081587 - DNA, 15 bp, Homo sapiens
atttcgcctcgtggg

SEQ ID NO: 2081588 - DNA, 15 bp, Homo sapiens
tttcgcctcgtgggc

SEQ ID NO: 2081589 - DNA, 15 bp, Homo sapiens
ttcgcctcgtgggcg

SEQ ID NO: 2081590 - DNA, 15 bp, Homo sapiens
tcgcctcgtgggcgg

SEQ ID NO: 2081591 - DNA, 15 bp, Homo sapiens
cgcctcgtgggcgga

SEQ ID NO: 2081592 - DNA, 15 bp, Homo sapiens
gcctcgtgggcggat

SEQ ID NO: 2081593 - DNA, 15 bp, Homo sapiens
cctcgtgggcggatc

SEQ ID NO: 2081594 - DNA, 15 bp, Homo sapiens
ctcgtgggcggatct

SEQ ID NO: 2081595 - DNA, 15 bp, Homo sapiens
tcgtgggcggatctg

SEQ ID NO: 2081596 - DNA, 15 bp, Homo sapiens
cgtgggcggatctgt

SEQ ID NO: 2081597 - DNA, 15 bp, Homo sapiens
gtgggcggatctgtc

SEQ ID NO: 2081598 - DNA, 15 bp, Homo sapiens
tgggcggatctgtcc

SEQ ID NO: 2081599 - DNA, 15 bp, Homo sapiens
gggcggatctgtcca

SEQ ID NO: 2081600 - DNA, 15 bp, Homo sapiens
ggcggatctgtccaa

SEQ ID NO: 2081601 - DNA, 15 bp, Homo sapiens
gcggatctgtccaaa

SEQ ID NO: 2081602 - DNA, 15 bp, Homo sapiens
cggatctgtccaaag

SEQ ID NO: 2081603 - DNA, 15 bp, Homo sapiens
ggatctgtccaaagg

SEQ ID NO: 2081604 - DNA, 15 bp, Homo sapiens
gatctgtccaaagga

SEQ ID NO: 2081605 - DNA, 15 bp, Homo sapiens
atctgtccaaaggat

SEQ ID NO: 2081606 - DNA, 15 bp, Homo sapiens
tctgtccaaaggatc

SEQ ID NO: 2081607 - DNA, 15 bp, Homo sapiens
ctgtccaaaggatcc

SEQ ID NO: 2081608 - DNA, 15 bp, Homo sapiens
tgtccaaaggatcct

SEQ ID NO: 2081609 - DNA, 15 bp, Homo sapiens
gtccaaaggatcctc

SEQ ID NO: 2081610 - DNA, 15 bp, Homo sapiens
tccaaaggatcctcc

SEQ ID NO: 2081611 - DNA, 15 bp, Homo sapiens
ccaaaggatcctccc

SEQ ID NO: 2081612 - DNA, 15 bp, Homo sapiens
caaaggatcctccca

SEQ ID NO: 2081613 - DNA, 15 bp, Homo sapiens
aaaggatcctcccac

SEQ ID NO: 2081614 - DNA, 15 bp, Homo sapiens
aaggatcctcccacc

SEQ ID NO: 2081615 - DNA, 15 bp, Homo sapiens
aggatcctcccacct

SEQ ID NO: 2081616 - DNA, 15 bp, Homo sapiens
ggatcctcccacctg

SEQ ID NO: 2081617 - DNA, 15 bp, Homo sapiens
gatcctcccacctgc

SEQ ID NO: 2081618 - DNA, 15 bp, Homo sapiens
atcctcccacctgca

SEQ ID NO: 2081619 - DNA, 15 bp, Homo sapiens
tcctcccacctgcat

SEQ ID NO: 2081620 - DNA, 15 bp, Homo sapiens
cctcccacctgcatc

SEQ ID NO: 2081621 - DNA, 15 bp, Homo sapiens
ctcccacctgcatct

SEQ ID NO: 2081622 - DNA, 15 bp, Homo sapiens
tcccacctgcatcta

SEQ ID NO: 2081623 - DNA, 15 bp, Homo sapiens
cccacctgcatctac

SEQ ID NO: 2081624 - DNA, 15 bp, Homo sapiens
ccacctgcatctact

SEQ ID NO: 2081625 - DNA, 15 bp, Homo sapiens
cacctgcatctactg

SEQ ID NO: 2081626 - DNA, 15 bp, Homo sapiens
acctgcatctactga

SEQ ID NO: 2081627 - DNA, 15 bp, Homo sapiens
cctgcatctactgag

SEQ ID NO: 2081628 - DNA, 15 bp, Homo sapiens
ctgcatctactgagt

SEQ ID NO: 2081629 - DNA, 15 bp, Homo sapiens
tgcatctactgagta

SEQ ID NO: 2081630 - DNA, 15 bp, Homo sapiens
gcatctactgagtag

SEQ ID NO: 2081631 - DNA, 15 bp, Homo sapiens
catctactgagtagc

SEQ ID NO: 2081632 - DNA, 15 bp, Homo sapiens
atctactgagtagct

SEQ ID NO: 2081633 - DNA, 15 bp, Homo sapiens
tctactgagtagctg

SEQ ID NO: 2081634 - DNA, 15 bp, Homo sapiens
ctactgagtagctgg

SEQ ID NO: 2081635 - DNA, 15 bp, Homo sapiens
tactgagtagctggg

SEQ ID NO: 2081636 - DNA, 15 bp, Homo sapiens
actgagtagctggga

SEQ ID NO: 2081637 - DNA, 15 bp, Homo sapiens
tgagtagctgggaca

SEQ ID NO: 2081638 - DNA, 15 bp, Homo sapiens
gagtagctgggacaa

SEQ ID NO: 2081639 - DNA, 15 bp, Homo sapiens
agtagctgggacaac

SEQ ID NO: 2081640 - DNA, 15 bp, Homo sapiens
gtagctgggacaaca

SEQ ID NO: 2081641 - DNA, 15 bp, Homo sapiens
tagctgggacaacag

SEQ ID NO: 2081642 - DNA, 15 bp, Homo sapiens
agctgggacaacagt

SEQ ID NO: 2081643 - DNA, 15 bp, Homo sapiens
gctgggacaacagtg

SEQ ID NO: 2081644 - DNA, 15 bp, Homo sapiens
ctgggacaacagtgt

SEQ ID NO: 2081645 - DNA, 15 bp, Homo sapiens
tgggacaacagtgtg

SEQ ID NO: 2081646 - DNA, 15 bp, Homo sapiens
gggacaacagtgtgt

SEQ ID NO: 2081647 - DNA, 15 bp, Homo sapiens
ggacaacagtgtgtg

SEQ ID NO: 2081648 - DNA, 15 bp, Homo sapiens
gacaacagtgtgtgc

SEQ ID NO: 2081649 - DNA, 15 bp, Homo sapiens
acaacagtgtgtgcc

SEQ ID NO: 2081650 - DNA, 15 bp, Homo sapiens
caacagtgtgtgcca

SEQ ID NO: 2081651 - DNA, 15 bp, Homo sapiens
aacagtgtgtgccac

SEQ ID NO: 2081652 - DNA, 15 bp, Homo sapiens
acagtgtgtgccaca

SEQ ID NO: 2081653 - DNA, 15 bp, Homo sapiens
cagtgtgtgccacac

SEQ ID NO: 2081654 - DNA, 15 bp, Homo sapiens
agtgtgtgccacacc

SEQ ID NO: 2081655 - DNA, 15 bp, Homo sapiens
gtgtgtgccacaccg

SEQ ID NO: 2081656 - DNA, 15 bp, Homo sapiens
tgtgtgccacaccgg

SEQ ID NO: 2081657 - DNA, 15 bp, Homo sapiens
gtgtgccacaccggg

SEQ ID NO: 2081658 - DNA, 15 bp, Homo sapiens
tgtgccacaccgggc

SEQ ID NO: 2081659 - DNA, 15 bp, Homo sapiens
gtgccacaccgggct

SEQ ID NO: 2081660 - DNA, 15 bp, Homo sapiens
tgccacaccgggctt

SEQ ID NO: 2081661 - DNA, 15 bp, Homo sapiens
gccacaccgggcttt

SEQ ID NO: 2081662 - DNA, 15 bp, Homo sapiens
ccacaccgggctttt

SEQ ID NO: 2081663 - DNA, 15 bp, Homo sapiens
cacaccgggcttttt

SEQ ID NO: 2081664 - DNA, 15 bp, Homo sapiens
acaccgggctttttt

SEQ ID NO: 2081665 - DNA, 15 bp, Homo sapiens
caccgggcttttttt

SEQ ID NO: 2081666 - DNA, 15 bp, Homo sapiens
accgggctttttttt

SEQ ID NO: 2081667 - DNA, 15 bp, Homo sapiens
ccgggcttttttttt

SEQ ID NO: 2081668 - DNA, 15 bp, Homo sapiens
cgggctttttttttt

SEQ ID NO: 2081669 - DNA, 15 bp, Homo sapiens
ggctttttttttttg

SEQ ID NO: 2081670 - DNA, 15 bp, Homo sapiens
gctttttttttttgt

SEQ ID NO: 2081671 - DNA, 15 bp, Homo sapiens
tttttttttgtagcg

SEQ ID NO: 2081672 - DNA, 15 bp, Homo sapiens
ttttttttgtagcgg

SEQ ID NO: 2081673 - DNA, 15 bp, Homo sapiens
tttttttgtagcggg

SEQ ID NO: 2081674 - DNA, 15 bp, Homo sapiens
ttttttgtagcgggg

SEQ ID NO: 2081675 - DNA, 15 bp, Homo sapiens
tttttgtagcgggga

SEQ ID NO: 2081676 - DNA, 15 bp, Homo sapiens
ttttgtagcggggag

SEQ ID NO: 2081677 - DNA, 15 bp, Homo sapiens
tttgtagcggggagt

SEQ ID NO: 2081678 - DNA, 15 bp, Homo sapiens
ttgtagcggggagtt

SEQ ID NO: 2081679 - DNA, 15 bp, Homo sapiens
tgtagcggggagttt

SEQ ID NO: 2081680 - DNA, 15 bp, Homo sapiens
gtagcggggagtttc

SEQ ID NO: 2081681 - DNA, 15 bp, Homo sapiens
tagcggggagtttca

SEQ ID NO: 2081682 - DNA, 15 bp, Homo sapiens
agcggggagtttcac

SEQ ID NO: 2081683 - DNA, 15 bp, Homo sapiens
gcggggagtttcacc

SEQ ID NO: 2081684 - DNA, 15 bp, Homo sapiens
cggggagtttcacca

SEQ ID NO: 2081685 - DNA, 15 bp, Homo sapiens
ggggagtttcaccat

SEQ ID NO: 2081686 - DNA, 15 bp, Homo sapiens
gggagtttcaccatg

SEQ ID NO: 2081687 - DNA, 15 bp, Homo sapiens
ccatgttgcccaggt

SEQ ID NO: 2081688 - DNA, 15 bp, Homo sapiens
catgttgcccaggtt

SEQ ID NO: 2081689 - DNA, 15 bp, Homo sapiens
atgttgcccaggttg

SEQ ID NO: 2081690 - DNA, 15 bp, Homo sapiens
tgcccaggttggtcc

SEQ ID NO: 2081691 - DNA, 15 bp, Homo sapiens
gcccaggttggtccc

SEQ ID NO: 2081692 - DNA, 15 bp, Homo sapiens
cccaggttggtccca

SEQ ID NO: 2081693 - DNA, 15 bp, Homo sapiens
ccaggttggtcccaa

SEQ ID NO: 2081694 - DNA, 15 bp, Homo sapiens
caggttggtcccaaa

SEQ ID NO: 2081695 - DNA, 15 bp, Homo sapiens
aggttggtcccaaac

SEQ ID NO: 2081696 - DNA, 15 bp, Homo sapiens
ggttggtcccaaact

SEQ ID NO: 2081697 - DNA, 15 bp, Homo sapiens
gttggtcccaaactc

SEQ ID NO: 2081698 - DNA, 15 bp, Homo sapiens
ggggctgaaagattc

SEQ ID NO: 2081699 - DNA, 15 bp, Homo sapiens
gggctgaaagattca

SEQ ID NO: 2081700 - DNA, 15 bp, Homo sapiens
ggctgaaagattcat

SEQ ID NO: 2081701 - DNA, 15 bp, Homo sapiens
gctgaaagattcatc

SEQ ID NO: 2081702 - DNA, 15 bp, Homo sapiens
ctgaaagattcatcc

SEQ ID NO: 2081703 - DNA, 15 bp, Homo sapiens
tgaaagattcatccc

SEQ ID NO: 2081704 - DNA, 15 bp, Homo sapiens
gaaagattcatccca

SEQ ID NO: 2081705 - DNA, 15 bp, Homo sapiens
aaagattcatcccag

SEQ ID NO: 2081706 - DNA, 15 bp, Homo sapiens
aagattcatcccagg

SEQ ID NO: 2081707 - DNA, 15 bp, Homo sapiens
agattcatcccaggc

SEQ ID NO: 2081708 - DNA, 15 bp, Homo sapiens
gattcatcccaggct

SEQ ID NO: 2081709 - DNA, 15 bp, Homo sapiens
attcatcccaggctc

SEQ ID NO: 2081710 - DNA, 15 bp, Homo sapiens
ttcatcccaggctcc

SEQ ID NO: 2081711 - DNA, 15 bp, Homo sapiens
tcatcccaggctcct

SEQ ID NO: 2081712 - DNA, 15 bp, Homo sapiens
catcccaggctcctc

SEQ ID NO: 2081713 - DNA, 15 bp, Homo sapiens
atcccaggctcctcg

SEQ ID NO: 2081714 - DNA, 15 bp, Homo sapiens
tcccaggctcctcgt

SEQ ID NO: 2081715 - DNA, 15 bp, Homo sapiens
cccaggctcctcgtg

SEQ ID NO: 2081716 - DNA, 15 bp, Homo sapiens
ccaggctcctcgtgt

SEQ ID NO: 2081717 - DNA, 15 bp, Homo sapiens
caggctcctcgtgtg

SEQ ID NO: 2081718 - DNA, 15 bp, Homo sapiens
aggctcctcgtgtga

SEQ ID NO: 2081719 - DNA, 15 bp, Homo sapiens
ggctcctcgtgtgac

SEQ ID NO: 2081720 - DNA, 15 bp, Homo sapiens
gctcctcgtgtgacc

SEQ ID NO: 2081721 - DNA, 15 bp, Homo sapiens
ctcctcgtgtgaccc

SEQ ID NO: 2081722 - DNA, 15 bp, Homo sapiens
tcctcgtgtgacccc

SEQ ID NO: 2081723 - DNA, 15 bp, Homo sapiens
cctcgtgtgacccct

SEQ ID NO: 2081724 - DNA, 15 bp, Homo sapiens
ctcgtgtgacccctt

SEQ ID NO: 2081725 - DNA, 15 bp, Homo sapiens
tcgtgtgaccccttc

SEQ ID NO: 2081726 - DNA, 15 bp, Homo sapiens
cgtgtgaccccttct

SEQ ID NO: 2081727 - DNA, 15 bp, Homo sapiens
gtgtgaccccttctg

SEQ ID NO: 2081728 - DNA, 15 bp, Homo sapiens
tgtgaccccttctgt

SEQ ID NO: 2081729 - DNA, 15 bp, Homo sapiens
gtgaccccttctgtg

SEQ ID NO: 2081730 - DNA, 15 bp, Homo sapiens
tgaccccttctgtgc

SEQ ID NO: 2081731 - DNA, 15 bp, Homo sapiens
gaccccttctgtgcc

SEQ ID NO: 2081732 - DNA, 15 bp, Homo sapiens
accccttctgtgccc

SEQ ID NO: 2081733 - DNA, 15 bp, Homo sapiens
ccccttctgtgcccc

SEQ ID NO: 2081734 - DNA, 15 bp, Homo sapiens
cccttctgtgccccc

SEQ ID NO: 2081735 - DNA, 15 bp, Homo sapiens
ccttctgtgcccccc

SEQ ID NO: 2081736 - DNA, 15 bp, Homo sapiens
cttctgtgcccccca

SEQ ID NO: 2081737 - DNA, 15 bp, Homo sapiens
ttctgtgccccccaa

SEQ ID NO: 2081738 - DNA, 15 bp, Homo sapiens
tctgtgccccccaac

SEQ ID NO: 2081739 - DNA, 15 bp, Homo sapiens
ctgtgccccccaacc

SEQ ID NO: 2081740 - DNA, 15 bp, Homo sapiens
tgtgccccccaaccc

SEQ ID NO: 2081741 - DNA, 15 bp, Homo sapiens
gtgccccccaaccct

SEQ ID NO: 2081742 - DNA, 15 bp, Homo sapiens
tgccccccaaccctg

SEQ ID NO: 2081743 - DNA, 15 bp, Homo sapiens
gccccccaaccctgc

SEQ ID NO: 2081744 - DNA, 15 bp, Homo sapiens
ccccccaaccctgcc

SEQ ID NO: 2081745 - DNA, 15 bp, Homo sapiens
cccccaaccctgcct

SEQ ID NO: 2081746 - DNA, 15 bp, Homo sapiens
ccccaaccctgcctg

SEQ ID NO: 2081747 - DNA, 15 bp, Homo sapiens
cccaaccctgcctgg

SEQ ID NO: 2081748 - DNA, 15 bp, Homo sapiens
ccaaccctgcctgga

SEQ ID NO: 2081749 - DNA, 15 bp, Homo sapiens
caaccctgcctggat

SEQ ID NO: 2081750 - DNA, 15 bp, Homo sapiens
aaccctgcctggatc

SEQ ID NO: 2081751 - DNA, 15 bp, Homo sapiens
accctgcctggatct

SEQ ID NO: 2081752 - DNA, 15 bp, Homo sapiens
ccctgcctggatctc

SEQ ID NO: 2081753 - DNA, 15 bp, Homo sapiens
cctgcctggatctcc

SEQ ID NO: 2081754 - DNA, 15 bp, Homo sapiens
ctgcctggatctccc

SEQ ID NO: 2081755 - DNA, 15 bp, Homo sapiens
tgcctggatctccct

SEQ ID NO: 2081756 - DNA, 15 bp, Homo sapiens
gcctggatctccctg

SEQ ID NO: 2081757 - DNA, 15 bp, Homo sapiens
cctggatctccctgc

SEQ ID NO: 2081758 - DNA, 15 bp, Homo sapiens
ctggatctccctgct

SEQ ID NO: 2081759 - DNA, 15 bp, Homo sapiens
tggatctccctgctt

SEQ ID NO: 2081760 - DNA, 15 bp, Homo sapiens
ggatctccctgcttc

SEQ ID NO: 2081761 - DNA, 15 bp, Homo sapiens
gatctccctgcttca

SEQ ID NO: 2081762 - DNA, 15 bp, Homo sapiens
atctccctgcttcac

SEQ ID NO: 2081763 - DNA, 15 bp, Homo sapiens
tctccctgcttcacc

SEQ ID NO: 2081764 - DNA, 15 bp, Homo sapiens
ctccctgcttcaccc

SEQ ID NO: 2081765 - DNA, 15 bp, Homo sapiens
tccctgcttcacccc

SEQ ID NO: 2081766 - DNA, 15 bp, Homo sapiens
ccctgcttcacccct

SEQ ID NO: 2081767 - DNA, 15 bp, Homo sapiens
cctgcttcacccctg

SEQ ID NO: 2081768 - DNA, 15 bp, Homo sapiens
ctgcttcacccctgt

SEQ ID NO: 2081769 - DNA, 15 bp, Homo sapiens
tgcttcacccctgtg

SEQ ID NO: 2081770 - DNA, 15 bp, Homo sapiens
gcttcacccctgtgg

SEQ ID NO: 2081771 - DNA, 15 bp, Homo sapiens
cttcacccctgtggc

SEQ ID NO: 2081772 - DNA, 15 bp, Homo sapiens
ttcacccctgtggcc

SEQ ID NO: 2081773 - DNA, 15 bp, Homo sapiens
tcacccctgtggccc

SEQ ID NO: 2081774 - DNA, 15 bp, Homo sapiens
cacccctgtggccca

SEQ ID NO: 2081775 - DNA, 15 bp, Homo sapiens
acccctgtggcccac

SEQ ID NO: 2081776 - DNA, 15 bp, Homo sapiens
cccctgtggcccacc

SEQ ID NO: 2081777 - DNA, 15 bp, Homo sapiens
ccctgtggcccacca

SEQ ID NO: 2081778 - DNA, 15 bp, Homo sapiens
cctgtggcccaccag

SEQ ID NO: 2081779 - DNA, 15 bp, Homo sapiens
ctgtggcccaccagg

SEQ ID NO: 2081780 - DNA, 15 bp, Homo sapiens
tgtggcccaccaggt

SEQ ID NO: 2081781 - DNA, 15 bp, Homo sapiens
gtggcccaccaggtg

SEQ ID NO: 2081782 - DNA, 15 bp, Homo sapiens
tggcccaccaggtgg

SEQ ID NO: 2081783 - DNA, 15 bp, Homo sapiens
ggcccaccaggtggg

SEQ ID NO: 2081784 - DNA, 15 bp, Homo sapiens
gcccaccaggtgggc

SEQ ID NO: 2081785 - DNA, 15 bp, Homo sapiens
cccaccaggtgggcc

SEQ ID NO: 2081786 - DNA, 15 bp, Homo sapiens
ccaccaggtgggcca

SEQ ID NO: 2081787 - DNA, 15 bp, Homo sapiens
caccaggtgggccat

SEQ ID NO: 2081788 - DNA, 15 bp, Homo sapiens
accaggtgggccatg

SEQ ID NO: 2081789 - DNA, 15 bp, Homo sapiens
ccaggtgggccatga

SEQ ID NO: 2081790 - DNA, 15 bp, Homo sapiens
caggtgggccatgaa

SEQ ID NO: 2081791 - DNA, 15 bp, Homo sapiens
aggtgggccatgaaa

SEQ ID NO: 2081792 - DNA, 15 bp, Homo sapiens
ggtgggccatgaaag

SEQ ID NO: 2081793 - DNA, 15 bp, Homo sapiens
gtgggccatgaaagg

SEQ ID NO: 2081794 - DNA, 15 bp, Homo sapiens
tgggccatgaaagga

SEQ ID NO: 2081795 - DNA, 15 bp, Homo sapiens
gggccatgaaaggag

SEQ ID NO: 2081796 - DNA, 15 bp, Homo sapiens
ggccatgaaaggaga

SEQ ID NO: 2081797 - DNA, 15 bp, Homo sapiens
gccatgaaaggagag

SEQ ID NO: 2081798 - DNA, 15 bp, Homo sapiens
ccatgaaaggagagg

SEQ ID NO: 2081799 - DNA, 15 bp, Homo sapiens
catgaaaggagagga

SEQ ID NO: 2081800 - DNA, 15 bp, Homo sapiens
atgaaaggagaggat

SEQ ID NO: 2081801 - DNA, 15 bp, Homo sapiens
tgaaaggagaggatg

SEQ ID NO: 2081802 - DNA, 15 bp, Homo sapiens
gaaaggagaggatgg

SEQ ID NO: 2081803 - DNA, 15 bp, Homo sapiens
aaaggagaggatgga

SEQ ID NO: 2081804 - DNA, 15 bp, Homo sapiens
aaggagaggatggat

SEQ ID NO: 2081805 - DNA, 15 bp, Homo sapiens
aggagaggatggata

SEQ ID NO: 2081806 - DNA, 15 bp, Homo sapiens
ggagaggatggatag

SEQ ID NO: 2081807 - DNA, 15 bp, Homo sapiens
gagaggatggatagg

SEQ ID NO: 2081808 - DNA, 15 bp, Homo sapiens
agaggatggataggg

SEQ ID NO: 2081809 - DNA, 15 bp, Homo sapiens
gaggatggataggga

SEQ ID NO: 2081810 - DNA, 15 bp, Homo sapiens
aggatggatagggat

SEQ ID NO: 2081811 - DNA, 15 bp, Homo sapiens
ggatggatagggatg

SEQ ID NO: 2081812 - DNA, 15 bp, Homo sapiens
gatggatagggatgg

SEQ ID NO: 2081813 - DNA, 15 bp, Homo sapiens
atggatagggatggc

SEQ ID NO: 2081814 - DNA, 15 bp, Homo sapiens
tggatagggatggct

SEQ ID NO: 2081815 - DNA, 15 bp, Homo sapiens
ggatagggatggctg

SEQ ID NO: 2081816 - DNA, 15 bp, Homo sapiens
gatagggatggctgg

SEQ ID NO: 2081817 - DNA, 15 bp, Homo sapiens
atagggatggctggg

SEQ ID NO: 2081818 - DNA, 15 bp, Homo sapiens
tagggatggctggga

SEQ ID NO: 2081819 - DNA, 15 bp, Homo sapiens
agggatggctgggaa

SEQ ID NO: 2081820 - DNA, 15 bp, Homo sapiens
gggatggctgggaaa

SEQ ID NO: 2081821 - DNA, 15 bp, Homo sapiens
ggatggctgggaaat

SEQ ID NO: 2081822 - DNA, 15 bp, Homo sapiens
gatggctgggaaatg

SEQ ID NO: 2081823 - DNA, 15 bp, Homo sapiens
atggctgggaaatgg

SEQ ID NO: 2081824 - DNA, 15 bp, Homo sapiens
tggctgggaaatgga

SEQ ID NO: 2081825 - DNA, 15 bp, Homo sapiens
ggctgggaaatggag

SEQ ID NO: 2081826 - DNA, 15 bp, Homo sapiens
gctgggaaatggaga

SEQ ID NO: 2081827 - DNA, 15 bp, Homo sapiens
ctgggaaatggagat

SEQ ID NO: 2081828 - DNA, 15 bp, Homo sapiens
tgggaaatggagatc

SEQ ID NO: 2081829 - DNA, 15 bp, Homo sapiens
gggaaatggagatca

SEQ ID NO: 2081830 - DNA, 15 bp, Homo sapiens
ggaaatggagatcac

SEQ ID NO: 2081831 - DNA, 15 bp, Homo sapiens
gaaatggagatcact

SEQ ID NO: 2081832 - DNA, 15 bp, Homo sapiens
aaatggagatcactg

SEQ ID NO: 2081833 - DNA, 15 bp, Homo sapiens
aatggagatcactga

SEQ ID NO: 2081834 - DNA, 15 bp, Homo sapiens
atggagatcactgaa

SEQ ID NO: 2081835 - DNA, 15 bp, Homo sapiens
tggagatcactgaag

SEQ ID NO: 2081836 - DNA, 15 bp, Homo sapiens
ggagatcactgaagt

SEQ ID NO: 2081837 - DNA, 15 bp, Homo sapiens
gagatcactgaagta

SEQ ID NO: 2081838 - DNA, 15 bp, Homo sapiens
agatcactgaagtac

SEQ ID NO: 2081839 - DNA, 15 bp, Homo sapiens
gatcactgaagtaca

SEQ ID NO: 2081840 - DNA, 15 bp, Homo sapiens
atcactgaagtacac

SEQ ID NO: 2081841 - DNA, 15 bp, Homo sapiens
tcactgaagtacaca

SEQ ID NO: 2081842 - DNA, 15 bp, Homo sapiens
cactgaagtacacag

SEQ ID NO: 2081843 - DNA, 15 bp, Homo sapiens
actgaagtacacagg

SEQ ID NO: 2081844 - DNA, 15 bp, Homo sapiens
ctgaagtacacaggg

SEQ ID NO: 2081845 - DNA, 15 bp, Homo sapiens
tgaagtacacaggga

SEQ ID NO: 2081846 - DNA, 15 bp, Homo sapiens
gaagtacacagggac

SEQ ID NO: 2081847 - DNA, 15 bp, Homo sapiens
aagtacacagggact

SEQ ID NO: 2081848 - DNA, 15 bp, Homo sapiens
agtacacagggacta

SEQ ID NO: 2081849 - DNA, 15 bp, Homo sapiens
gtacacagggactaa

SEQ ID NO: 2081850 - DNA, 15 bp, Homo sapiens
tacacagggactaac

SEQ ID NO: 2081851 - DNA, 15 bp, Homo sapiens
acacagggactaacc

SEQ ID NO: 2081852 - DNA, 15 bp, Homo sapiens
cacagggactaacca

SEQ ID NO: 2081853 - DNA, 15 bp, Homo sapiens
acagggactaaccaa

SEQ ID NO: 2081854 - DNA, 15 bp, Homo sapiens
cagggactaaccaag

SEQ ID NO: 2081855 - DNA, 15 bp, Homo sapiens
agggactaaccaagg

SEQ ID NO: 2081856 - DNA, 15 bp, Homo sapiens
gggactaaccaagga

SEQ ID NO: 2081857 - DNA, 15 bp, Homo sapiens
ggactaaccaaggag

SEQ ID NO: 2081858 - DNA, 15 bp, Homo sapiens
gactaaccaaggaga

SEQ ID NO: 2081859 - DNA, 15 bp, Homo sapiens
actaaccaaggagat

SEQ ID NO: 2081860 - DNA, 15 bp, Homo sapiens
ctaaccaaggagatg

SEQ ID NO: 2081861 - DNA, 15 bp, Homo sapiens
taaccaaggagatga

SEQ ID NO: 2081862 - DNA, 15 bp, Homo sapiens
aaccaaggagatgag

SEQ ID NO: 2081863 - DNA, 15 bp, Homo sapiens
accaaggagatgagg

SEQ ID NO: 2081864 - DNA, 15 bp, Homo sapiens
ccaaggagatgaggg

SEQ ID NO: 2081865 - DNA, 15 bp, Homo sapiens
caaggagatgagggg

SEQ ID NO: 2081866 - DNA, 15 bp, Homo sapiens
aaggagatgaggggg

SEQ ID NO: 2081867 - DNA, 15 bp, Homo sapiens
aggagatgagggggt

SEQ ID NO: 2081868 - DNA, 15 bp, Homo sapiens
ggagatgagggggtc

SEQ ID NO: 2081869 - DNA, 15 bp, Homo sapiens
gagatgagggggtcg

SEQ ID NO: 2081870 - DNA, 15 bp, Homo sapiens
agatgagggggtcga

SEQ ID NO: 2081871 - DNA, 15 bp, Homo sapiens
gatgagggggtcgac

SEQ ID NO: 2081872 - DNA, 15 bp, Homo sapiens
atgagggggtcgaca

SEQ ID NO: 2081873 - DNA, 15 bp, Homo sapiens
tgagggggtcgacag

SEQ ID NO: 2081874 - DNA, 15 bp, Homo sapiens
gagggggtcgacagg

SEQ ID NO: 2081875 - DNA, 15 bp, Homo sapiens
agggggtcgacaggt

SEQ ID NO: 2081876 - DNA, 15 bp, Homo sapiens
gggggtcgacaggtt

SEQ ID NO: 2081877 - DNA, 15 bp, Homo sapiens
ggggtcgacaggttg

SEQ ID NO: 2081878 - DNA, 15 bp, Homo sapiens
gggtcgacaggttga

SEQ ID NO: 2081879 - DNA, 15 bp, Homo sapiens
ggtcgacaggttgaa

SEQ ID NO: 2081880 - DNA, 15 bp, Homo sapiens
gtcgacaggttgaac

SEQ ID NO: 2081881 - DNA, 15 bp, Homo sapiens
tcgacaggttgaacg

SEQ ID NO: 2081882 - DNA, 15 bp, Homo sapiens
cgacaggttgaacgt

SEQ ID NO: 2081883 - DNA, 15 bp, Homo sapiens
gacaggttgaacgtc

SEQ ID NO: 2081884 - DNA, 15 bp, Homo sapiens
acaggttgaacgtct

SEQ ID NO: 2081885 - DNA, 15 bp, Homo sapiens
caggttgaacgtctt

SEQ ID NO: 2081886 - DNA, 15 bp, Homo sapiens
aggttgaacgtcttc

SEQ ID NO: 2081887 - DNA, 15 bp, Homo sapiens
ggttgaacgtcttca

SEQ ID NO: 2081888 - DNA, 15 bp, Homo sapiens
gttgaacgtcttcag

SEQ ID NO: 2081889 - DNA, 15 bp, Homo sapiens
ttgaacgtcttcagg

SEQ ID NO: 2081890 - DNA, 15 bp, Homo sapiens
tgaacgtcttcaggc

SEQ ID NO: 2081891 - DNA, 15 bp, Homo sapiens
gaacgtcttcaggcc

SEQ ID NO: 2081892 - DNA, 15 bp, Homo sapiens
aacgtcttcaggccc

SEQ ID NO: 2081893 - DNA, 15 bp, Homo sapiens
acgtcttcaggccca

SEQ ID NO: 2081894 - DNA, 15 bp, Homo sapiens
cgtcttcaggcccag

SEQ ID NO: 2081895 - DNA, 15 bp, Homo sapiens
gtcttcaggcccagg

SEQ ID NO: 2081896 - DNA, 15 bp, Homo sapiens
tcttcaggcccagga

SEQ ID NO: 2081897 - DNA, 15 bp, Homo sapiens
cttcaggcccaggac

SEQ ID NO: 2081898 - DNA, 15 bp, Homo sapiens
ttcaggcccaggacc

SEQ ID NO: 2081899 - DNA, 15 bp, Homo sapiens
tcaggcccaggaccc

SEQ ID NO: 2081900 - DNA, 15 bp, Homo sapiens
caggcccaggacccc

SEQ ID NO: 2081901 - DNA, 15 bp, Homo sapiens
aggcccaggacccca

SEQ ID NO: 2081902 - DNA, 15 bp, Homo sapiens
ggcccaggaccccaa

SEQ ID NO: 2081903 - DNA, 15 bp, Homo sapiens
gcccaggaccccaag

SEQ ID NO: 2081904 - DNA, 15 bp, Homo sapiens
cccaggaccccaagc

SEQ ID NO: 2081905 - DNA, 15 bp, Homo sapiens
ccaggaccccaagct

SEQ ID NO: 2081906 - DNA, 15 bp, Homo sapiens
caggaccccaagctc

SEQ ID NO: 2081907 - DNA, 15 bp, Homo sapiens
aggaccccaagctcc

SEQ ID NO: 2081908 - DNA, 15 bp, Homo sapiens
ggaccccaagctcct

SEQ ID NO: 2081909 - DNA, 15 bp, Homo sapiens
gaccccaagctcctc

SEQ ID NO: 2081910 - DNA, 15 bp, Homo sapiens
accccaagctcctca

SEQ ID NO: 2081911 - DNA, 15 bp, Homo sapiens
ccccaagctcctcag

SEQ ID NO: 2081912 - DNA, 15 bp, Homo sapiens
cccaagctcctcagc

SEQ ID NO: 2081913 - DNA, 15 bp, Homo sapiens
ccaagctcctcagcc

SEQ ID NO: 2081914 - DNA, 15 bp, Homo sapiens
caagctcctcagcct

SEQ ID NO: 2081915 - DNA, 15 bp, Homo sapiens
aagctcctcagcctg

SEQ ID NO: 2081916 - DNA, 15 bp, Homo sapiens
agctcctcagcctgg

SEQ ID NO: 2081917 - DNA, 15 bp, Homo sapiens
gctcctcagcctggc

SEQ ID NO: 2081918 - DNA, 15 bp, Homo sapiens
ctcctcagcctggcc

SEQ ID NO: 2081919 - DNA, 15 bp, Homo sapiens
tcctcagcctggccc

SEQ ID NO: 2081920 - DNA, 15 bp, Homo sapiens
cctcagcctggcccc

SEQ ID NO: 2081921 - DNA, 15 bp, Homo sapiens
ctcagcctggcccct

SEQ ID NO: 2081922 - DNA, 15 bp, Homo sapiens
tcagcctggcccctg

SEQ ID NO: 2081923 - DNA, 15 bp, Homo sapiens
cagcctggcccctgg

SEQ ID NO: 2081924 - DNA, 15 bp, Homo sapiens
agcctggcccctggg

SEQ ID NO: 2081925 - DNA, 15 bp, Homo sapiens
gcctggcccctggga

SEQ ID NO: 2081926 - DNA, 15 bp, Homo sapiens
cctggcccctgggat

SEQ ID NO: 2081927 - DNA, 15 bp, Homo sapiens
ctggcccctgggatt

SEQ ID NO: 2081928 - DNA, 15 bp, Homo sapiens
tggcccctgggattg

SEQ ID NO: 2081929 - DNA, 15 bp, Homo sapiens
ggcccctgggattgc

SEQ ID NO: 2081930 - DNA, 15 bp, Homo sapiens
gcccctgggattgca

SEQ ID NO: 2081931 - DNA, 15 bp, Homo sapiens
cccctgggattgcag

SEQ ID NO: 2081932 - DNA, 15 bp, Homo sapiens
ccctgggattgcagt

SEQ ID NO: 2081933 - DNA, 15 bp, Homo sapiens
cctgggattgcagtt

SEQ ID NO: 2081934 - DNA, 15 bp, Homo sapiens
ctgggattgcagttg

SEQ ID NO: 2081935 - DNA, 15 bp, Homo sapiens
tgggattgcagttga

SEQ ID NO: 2081936 - DNA, 15 bp, Homo sapiens
gggattgcagttgag

SEQ ID NO: 2081937 - DNA, 15 bp, Homo sapiens
ggattgcagttgaga

SEQ ID NO: 2081938 - DNA, 15 bp, Homo sapiens
gattgcagttgagag

SEQ ID NO: 2081939 - DNA, 15 bp, Homo sapiens
attgcagttgagagt

SEQ ID NO: 2081940 - DNA, 15 bp, Homo sapiens
ttgcagttgagagtt

SEQ ID NO: 2081941 - DNA, 15 bp, Homo sapiens
tgcagttgagagtta

SEQ ID NO: 2081942 - DNA, 15 bp, Homo sapiens
gcagttgagagttat

SEQ ID NO: 2081943 - DNA, 15 bp, Homo sapiens
cagttgagagttatt

SEQ ID NO: 2081944 - DNA, 15 bp, Homo sapiens
agttgagagttattc

SEQ ID NO: 2081945 - DNA, 15 bp, Homo sapiens
gttgagagttattca

SEQ ID NO: 2081946 - DNA, 15 bp, Homo sapiens
ttgagagttattcag

SEQ ID NO: 2081947 - DNA, 15 bp, Homo sapiens
tgagagttattcagt

SEQ ID NO: 2081948 - DNA, 15 bp, Homo sapiens
gagagttattcagtg

SEQ ID NO: 2081949 - DNA, 15 bp, Homo sapiens
agagttattcagtga

SEQ ID NO: 2081950 - DNA, 15 bp, Homo sapiens
gagttattcagtgaa

SEQ ID NO: 2081951 - DNA, 15 bp, Homo sapiens
agttattcagtgaat

SEQ ID NO: 2081952 - DNA, 15 bp, Homo sapiens
gttattcagtgaatc

SEQ ID NO: 2081953 - DNA, 15 bp, Homo sapiens
ttattcagtgaatcc

SEQ ID NO: 2081954 - DNA, 15 bp, Homo sapiens
tattcagtgaatcca

SEQ ID NO: 2081955 - DNA, 15 bp, Homo sapiens
attcagtgaatccat

SEQ ID NO: 2081956 - DNA, 15 bp, Homo sapiens
ttcagtgaatccatt

SEQ ID NO: 2081957 - DNA, 15 bp, Homo sapiens
tcagtgaatccattt

SEQ ID NO: 2081958 - DNA, 15 bp, Homo sapiens
cagtgaatccatttt

SEQ ID NO: 2081959 - DNA, 15 bp, Homo sapiens
agtgaatccatttta

SEQ ID NO: 2081960 - DNA, 15 bp, Homo sapiens
gtgaatccattttat

SEQ ID NO: 2081961 - DNA, 15 bp, Homo sapiens
tgaatccattttatc

SEQ ID NO: 2081962 - DNA, 15 bp, Homo sapiens
gaatccattttatca

SEQ ID NO: 2081963 - DNA, 15 bp, Homo sapiens
aatccattttatcag

SEQ ID NO: 2081964 - DNA, 15 bp, Homo sapiens
atccattttatcagt

SEQ ID NO: 2081965 - DNA, 15 bp, Homo sapiens
tccattttatcagtt

SEQ ID NO: 2081966 - DNA, 15 bp, Homo sapiens
ccattttatcagttt

SEQ ID NO: 2081967 - DNA, 15 bp, Homo sapiens
cattttatcagtttg

SEQ ID NO: 2081968 - DNA, 15 bp, Homo sapiens
attttatcagtttgg

SEQ ID NO: 2081969 - DNA, 15 bp, Homo sapiens
ttttatcagtttggc

SEQ ID NO: 2081970 - DNA, 15 bp, Homo sapiens
tttatcagtttggca

SEQ ID NO: 2081971 - DNA, 15 bp, Homo sapiens
ttatcagtttggcac

SEQ ID NO: 2081972 - DNA, 15 bp, Homo sapiens
tatcagtttggcact

SEQ ID NO: 2081973 - DNA, 15 bp, Homo sapiens
atcagtttggcactc

SEQ ID NO: 2081974 - DNA, 15 bp, Homo sapiens
tcagtttggcactcg

SEQ ID NO: 2081975 - DNA, 15 bp, Homo sapiens
cagtttggcactcga

SEQ ID NO: 2081976 - DNA, 15 bp, Homo sapiens
agtttggcactcgac

SEQ ID NO: 2081977 - DNA, 15 bp, Homo sapiens
gtttggcactcgaca

SEQ ID NO: 2081978 - DNA, 15 bp, Homo sapiens
tttggcactcgacag

SEQ ID NO: 2081979 - DNA, 15 bp, Homo sapiens
ttggcactcgacagc

SEQ ID NO: 2081980 - DNA, 15 bp, Homo sapiens
tggcactcgacagca

SEQ ID NO: 2081981 - DNA, 15 bp, Homo sapiens
ggcactcgacagcaa

SEQ ID NO: 2081982 - DNA, 15 bp, Homo sapiens
gcactcgacagcaaa

SEQ ID NO: 2081983 - DNA, 15 bp, Homo sapiens
cactcgacagcaaat

SEQ ID NO: 2081984 - DNA, 15 bp, Homo sapiens
actcgacagcaaatt

SEQ ID NO: 2081985 - DNA, 15 bp, Homo sapiens
ctcgacagcaaattt

SEQ ID NO: 2081986 - DNA, 15 bp, Homo sapiens
tcgacagcaaatttc

SEQ ID NO: 2081987 - DNA, 15 bp, Homo sapiens
cgacagcaaatttct

SEQ ID NO: 2081988 - DNA, 15 bp, Homo sapiens
gacagcaaatttctt

SEQ ID NO: 2081989 - DNA, 15 bp, Homo sapiens
acagcaaatttcttg

SEQ ID NO: 2081990 - DNA, 15 bp, Homo sapiens
cagcaaatttcttga

SEQ ID NO: 2081991 - DNA, 15 bp, Homo sapiens
agcaaatttcttgat

SEQ ID NO: 2081992 - DNA, 15 bp, Homo sapiens
gcaaatttcttgata

SEQ ID NO: 2081993 - DNA, 15 bp, Homo sapiens
caaatttcttgatat

SEQ ID NO: 2081994 - DNA, 15 bp, Homo sapiens
aaatttcttgatatc

SEQ ID NO: 2081995 - DNA, 15 bp, Homo sapiens
aatttcttgatatca

SEQ ID NO: 2081996 - DNA, 15 bp, Homo sapiens
atttcttgatatcaa

SEQ ID NO: 2081997 - DNA, 15 bp, Homo sapiens
tttcttgatatcaag

SEQ ID NO: 2081998 - DNA, 15 bp, Homo sapiens
ttcttgatatcaagg

SEQ ID NO: 2081999 - DNA, 15 bp, Homo sapiens
tcttgatatcaagga

SEQ ID NO: 2082000 - DNA, 15 bp, Homo sapiens
cttgatatcaaggaa

SEQ ID NO: 2082001 - DNA, 15 bp, Homo sapiens
ttgatatcaaggaaa

SEQ ID NO: 2082002 - DNA, 15 bp, Homo sapiens
tgatatcaaggaaag

SEQ ID NO: 2082003 - DNA, 15 bp, Homo sapiens
gatatcaaggaaagt

SEQ ID NO: 2082004 - DNA, 15 bp, Homo sapiens
atatcaaggaaagtg

SEQ ID NO: 2082005 - DNA, 15 bp, Homo sapiens
tatcaaggaaagtgg

SEQ ID NO: 2082006 - DNA, 15 bp, Homo sapiens
atcaaggaaagtggg

SEQ ID NO: 2082007 - DNA, 15 bp, Homo sapiens
tcaaggaaagtgggg

SEQ ID NO: 2082008 - DNA, 15 bp, Homo sapiens
caaggaaagtggggc

SEQ ID NO: 2082009 - DNA, 15 bp, Homo sapiens
aaggaaagtggggca

SEQ ID NO: 2082010 - DNA, 15 bp, Homo sapiens
aggaaagtggggcac

SEQ ID NO: 2082011 - DNA, 15 bp, Homo sapiens
ggaaagtggggcact

SEQ ID NO: 2082012 - DNA, 15 bp, Homo sapiens
gaaagtggggcactg

SEQ ID NO: 2082013 - DNA, 15 bp, Homo sapiens
aaagtggggcactga

SEQ ID NO: 2082014 - DNA, 15 bp, Homo sapiens
aagtggggcactgag

SEQ ID NO: 2082015 - DNA, 15 bp, Homo sapiens
agtggggcactgaga

SEQ ID NO: 2082016 - DNA, 15 bp, Homo sapiens
gtggggcactgagaa

SEQ ID NO: 2082017 - DNA, 15 bp, Homo sapiens
tggggcactgagaaa

SEQ ID NO: 2082018 - DNA, 15 bp, Homo sapiens
ggggcactgagaaag

SEQ ID NO: 2082019 - DNA, 15 bp, Homo sapiens
gggcactgagaaagg

SEQ ID NO: 2082020 - DNA, 15 bp, Homo sapiens
ggcactgagaaaggc

SEQ ID NO: 2082021 - DNA, 15 bp, Homo sapiens
gcactgagaaaggca

SEQ ID NO: 2082022 - DNA, 15 bp, Homo sapiens
cactgagaaaggcag

SEQ ID NO: 2082023 - DNA, 15 bp, Homo sapiens
actgagaaaggcagg

SEQ ID NO: 2082024 - DNA, 15 bp, Homo sapiens
ctgagaaaggcaggg

SEQ ID NO: 2082025 - DNA, 15 bp, Homo sapiens
tgagaaaggcaggga

SEQ ID NO: 2082026 - DNA, 15 bp, Homo sapiens
gagaaaggcagggac

SEQ ID NO: 2082027 - DNA, 15 bp, Homo sapiens
agaaaggcagggact

SEQ ID NO: 2082028 - DNA, 15 bp, Homo sapiens
gaaaggcagggactt

SEQ ID NO: 2082029 - DNA, 15 bp, Homo sapiens
aaaggcagggacttg

SEQ ID NO: 2082030 - DNA, 15 bp, Homo sapiens
aaggcagggacttgc

SEQ ID NO: 2082031 - DNA, 15 bp, Homo sapiens
aggcagggacttgcc

SEQ ID NO: 2082032 - DNA, 15 bp, Homo sapiens
ggcagggacttgccc

SEQ ID NO: 2082033 - DNA, 15 bp, Homo sapiens
gcagggacttgccca

SEQ ID NO: 2082034 - DNA, 15 bp, Homo sapiens
cagggacttgcccaa

SEQ ID NO: 2082035 - DNA, 15 bp, Homo sapiens
agggacttgcccaag

SEQ ID NO: 2082036 - DNA, 15 bp, Homo sapiens
gggacttgcccaagg

SEQ ID NO: 2082037 - DNA, 15 bp, Homo sapiens
ggacttgcccaaggg

SEQ ID NO: 2082038 - DNA, 15 bp, Homo sapiens
gacttgcccaagggc

SEQ ID NO: 2082039 - DNA, 15 bp, Homo sapiens
acttgcccaagggca

SEQ ID NO: 2082040 - DNA, 15 bp, Homo sapiens
cttgcccaagggcat

SEQ ID NO: 2082041 - DNA, 15 bp, Homo sapiens
ttgcccaagggcata

SEQ ID NO: 2082042 - DNA, 15 bp, Homo sapiens
tgcccaagggcatat

SEQ ID NO: 2082043 - DNA, 15 bp, Homo sapiens
gcccaagggcatata

SEQ ID NO: 2082044 - DNA, 15 bp, Homo sapiens
cccaagggcatatag

SEQ ID NO: 2082045 - DNA, 15 bp, Homo sapiens
ccaagggcatatagt

SEQ ID NO: 2082046 - DNA, 15 bp, Homo sapiens
caagggcatatagtg

SEQ ID NO: 2082047 - DNA, 15 bp, Homo sapiens
aagggcatatagtga

SEQ ID NO: 2082048 - DNA, 15 bp, Homo sapiens
agggcatatagtgag

SEQ ID NO: 2082049 - DNA, 15 bp, Homo sapiens
gggcatatagtgaga

SEQ ID NO: 2082050 - DNA, 15 bp, Homo sapiens
ggcatatagtgagac

SEQ ID NO: 2082051 - DNA, 15 bp, Homo sapiens
gcatatagtgagaca

SEQ ID NO: 2082052 - DNA, 15 bp, Homo sapiens
catatagtgagacag

SEQ ID NO: 2082053 - DNA, 15 bp, Homo sapiens
atatagtgagacagt

SEQ ID NO: 2082054 - DNA, 15 bp, Homo sapiens
tatagtgagacagtg

SEQ ID NO: 2082055 - DNA, 15 bp, Homo sapiens
atagtgagacagtgg

SEQ ID NO: 2082056 - DNA, 15 bp, Homo sapiens
tagtgagacagtggc

SEQ ID NO: 2082057 - DNA, 15 bp, Homo sapiens
agtgagacagtggca

SEQ ID NO: 2082058 - DNA, 15 bp, Homo sapiens
gtgagacagtggcag

SEQ ID NO: 2082059 - DNA, 15 bp, Homo sapiens
tgagacagtggcagg

SEQ ID NO: 2082060 - DNA, 15 bp, Homo sapiens
gagacagtggcaggg

SEQ ID NO: 2082061 - DNA, 15 bp, Homo sapiens
agacagtggcaggga

SEQ ID NO: 2082062 - DNA, 15 bp, Homo sapiens
gacagtggcagggaa

SEQ ID NO: 2082063 - DNA, 15 bp, Homo sapiens
acagtggcagggaac

SEQ ID NO: 2082064 - DNA, 15 bp, Homo sapiens
cagtggcagggaacc

SEQ ID NO: 2082065 - DNA, 15 bp, Homo sapiens
agtggcagggaaccc

SEQ ID NO: 2082066 - DNA, 15 bp, Homo sapiens
gtggcagggaaccca

SEQ ID NO: 2082067 - DNA, 15 bp, Homo sapiens
tggcagggaacccaa

SEQ ID NO: 2082068 - DNA, 15 bp, Homo sapiens
ggcagggaacccaat

SEQ ID NO: 2082069 - DNA, 15 bp, Homo sapiens
gcagggaacccaatg

SEQ ID NO: 2082070 - DNA, 15 bp, Homo sapiens
cagggaacccaatgc

SEQ ID NO: 2082071 - DNA, 15 bp, Homo sapiens
agggaacccaatgct

SEQ ID NO: 2082072 - DNA, 15 bp, Homo sapiens
gggaacccaatgctc

SEQ ID NO: 2082073 - DNA, 15 bp, Homo sapiens
ggaacccaatgctct

SEQ ID NO: 2082074 - DNA, 15 bp, Homo sapiens
gaacccaatgctctg

SEQ ID NO: 2082075 - DNA, 15 bp, Homo sapiens
aacccaatgctctgt

SEQ ID NO: 2082076 - DNA, 15 bp, Homo sapiens
acccaatgctctgtc

SEQ ID NO: 2082077 - DNA, 15 bp, Homo sapiens
cccaatgctctgtct

SEQ ID NO: 2082078 - DNA, 15 bp, Homo sapiens
ccaatgctctgtctc

SEQ ID NO: 2082079 - DNA, 15 bp, Homo sapiens
caatgctctgtctct

SEQ ID NO: 2082080 - DNA, 15 bp, Homo sapiens
aatgctctgtctctg

SEQ ID NO: 2082081 - DNA, 15 bp, Homo sapiens
atgctctgtctctgg

SEQ ID NO: 2082082 - DNA, 15 bp, Homo sapiens
tgctctgtctctgga

SEQ ID NO: 2082083 - DNA, 15 bp, Homo sapiens
gctctgtctctggac

SEQ ID NO: 2082084 - DNA, 15 bp, Homo sapiens
ctctgtctctggacc

SEQ ID NO: 2082085 - DNA, 15 bp, Homo sapiens
tctgtctctggaccc

SEQ ID NO: 2082086 - DNA, 15 bp, Homo sapiens
ctgtctctggaccca

SEQ ID NO: 2082087 - DNA, 15 bp, Homo sapiens
tgtctctggacccag

SEQ ID NO: 2082088 - DNA, 15 bp, Homo sapiens
gtctctggacccagg

SEQ ID NO: 2082089 - DNA, 15 bp, Homo sapiens
tctctggacccaggc

SEQ ID NO: 2082090 - DNA, 15 bp, Homo sapiens
ctctggacccaggct

SEQ ID NO: 2082091 - DNA, 15 bp, Homo sapiens
tctggacccaggctg

SEQ ID NO: 2082092 - DNA, 15 bp, Homo sapiens
ctggacccaggctgc

SEQ ID NO: 2082093 - DNA, 15 bp, Homo sapiens
tggacccaggctgcc

SEQ ID NO: 2082094 - DNA, 15 bp, Homo sapiens
ggacccaggctgcct

SEQ ID NO: 2082095 - DNA, 15 bp, Homo sapiens
gacccaggctgcctg

SEQ ID NO: 2082096 - DNA, 15 bp, Homo sapiens
acccaggctgcctgc

SEQ ID NO: 2082097 - DNA, 15 bp, Homo sapiens
cccaggctgcctgct

SEQ ID NO: 2082098 - DNA, 15 bp, Homo sapiens
ccaggctgcctgctg

SEQ ID NO: 2082099 - DNA, 15 bp, Homo sapiens
caggctgcctgctga

SEQ ID NO: 2082100 - DNA, 15 bp, Homo sapiens
aggctgcctgctgaa

SEQ ID NO: 2082101 - DNA, 15 bp, Homo sapiens
ggctgcctgctgaag

SEQ ID NO: 2082102 - DNA, 15 bp, Homo sapiens
gctgcctgctgaagt

SEQ ID NO: 2082103 - DNA, 15 bp, Homo sapiens
ctgcctgctgaagtc

SEQ ID NO: 2082104 - DNA, 15 bp, Homo sapiens
tgcctgctgaagtct

SEQ ID NO: 2082105 - DNA, 15 bp, Homo sapiens
gcctgctgaagtctg

SEQ ID NO: 2082106 - DNA, 15 bp, Homo sapiens
cctgctgaagtctga

SEQ ID NO: 2082107 - DNA, 15 bp, Homo sapiens
ctgctgaagtctgaa

SEQ ID NO: 2082108 - DNA, 15 bp, Homo sapiens
tgctgaagtctgaag

SEQ ID NO: 2082109 - DNA, 15 bp, Homo sapiens
gctgaagtctgaagt

SEQ ID NO: 2082110 - DNA, 15 bp, Homo sapiens
ctgaagtctgaagtg

SEQ ID NO: 2082111 - DNA, 15 bp, Homo sapiens
tgaagtctgaagtgg

SEQ ID NO: 2082112 - DNA, 15 bp, Homo sapiens
gaagtctgaagtggg

SEQ ID NO: 2082113 - DNA, 15 bp, Homo sapiens
aagtctgaagtgggg

SEQ ID NO: 2082114 - DNA, 15 bp, Homo sapiens
agtctgaagtggggt

SEQ ID NO: 2082115 - DNA, 15 bp, Homo sapiens
gtctgaagtggggtc

SEQ ID NO: 2082116 - DNA, 15 bp, Homo sapiens
tctgaagtggggtct

SEQ ID NO: 2082117 - DNA, 15 bp, Homo sapiens
ctgaagtggggtctg

SEQ ID NO: 2082118 - DNA, 15 bp, Homo sapiens
tgaagtggggtctgg

SEQ ID NO: 2082119 - DNA, 15 bp, Homo sapiens
gaagtggggtctggc

SEQ ID NO: 2082120 - DNA, 15 bp, Homo sapiens
aagtggggtctggcc

SEQ ID NO: 2082121 - DNA, 15 bp, Homo sapiens
agtggggtctggcct

SEQ ID NO: 2082122 - DNA, 15 bp, Homo sapiens
gtggggtctggcctg

SEQ ID NO: 2082123 - DNA, 15 bp, Homo sapiens
tggggtctggcctgg

SEQ ID NO: 2082124 - DNA, 15 bp, Homo sapiens
ggggtctggcctggg

SEQ ID NO: 2082125 - DNA, 15 bp, Homo sapiens
gggtctggcctggga

SEQ ID NO: 2082126 - DNA, 15 bp, Homo sapiens
ggtctggcctgggag

SEQ ID NO: 2082127 - DNA, 15 bp, Homo sapiens
gtctggcctgggagg

SEQ ID NO: 2082128 - DNA, 15 bp, Homo sapiens
tctggcctgggagga

SEQ ID NO: 2082129 - DNA, 15 bp, Homo sapiens
ctggcctgggaggag

SEQ ID NO: 2082130 - DNA, 15 bp, Homo sapiens
tggcctgggaggagg

SEQ ID NO: 2082131 - DNA, 15 bp, Homo sapiens
ggcctgggaggaggt

SEQ ID NO: 2082132 - DNA, 15 bp, Homo sapiens
gcctgggaggaggtc

SEQ ID NO: 2082133 - DNA, 15 bp, Homo sapiens
cctgggaggaggtct

SEQ ID NO: 2082134 - DNA, 15 bp, Homo sapiens
ctgggaggaggtctg

SEQ ID NO: 2082135 - DNA, 15 bp, Homo sapiens
tgggaggaggtctga

SEQ ID NO: 2082136 - DNA, 15 bp, Homo sapiens
gggaggaggtctgat

SEQ ID NO: 2082137 - DNA, 15 bp, Homo sapiens
ggaggaggtctgata

SEQ ID NO: 2082138 - DNA, 15 bp, Homo sapiens
gaggaggtctgataa

SEQ ID NO: 2082139 - DNA, 15 bp, Homo sapiens
aggaggtctgataag

SEQ ID NO: 2082140 - DNA, 15 bp, Homo sapiens
ggaggtctgataagt

SEQ ID NO: 2082141 - DNA, 15 bp, Homo sapiens
gaggtctgataagtg

SEQ ID NO: 2082142 - DNA, 15 bp, Homo sapiens
aggtctgataagtgc

SEQ ID NO: 2082143 - DNA, 15 bp, Homo sapiens
ggtctgataagtgcc

SEQ ID NO: 2082144 - DNA, 15 bp, Homo sapiens
gtctgataagtgcct

SEQ ID NO: 2082145 - DNA, 15 bp, Homo sapiens
tctgataagtgcctt

SEQ ID NO: 2082146 - DNA, 15 bp, Homo sapiens
ctgataagtgccttc

SEQ ID NO: 2082147 - DNA, 15 bp, Homo sapiens
tgataagtgccttca

SEQ ID NO: 2082148 - DNA, 15 bp, Homo sapiens
gataagtgccttcaa

SEQ ID NO: 2082149 - DNA, 15 bp, Homo sapiens
ataagtgccttcaag

SEQ ID NO: 2082150 - DNA, 15 bp, Homo sapiens
taagtgccttcaagg

SEQ ID NO: 2082151 - DNA, 15 bp, Homo sapiens
aagtgccttcaagga

SEQ ID NO: 2082152 - DNA, 15 bp, Homo sapiens
agtgccttcaaggag

SEQ ID NO: 2082153 - DNA, 15 bp, Homo sapiens
gtgccttcaaggagc

SEQ ID NO: 2082154 - DNA, 15 bp, Homo sapiens
tgccttcaaggagct

SEQ ID NO: 2082155 - DNA, 15 bp, Homo sapiens
gccttcaaggagctt

SEQ ID NO: 2082156 - DNA, 15 bp, Homo sapiens
ccttcaaggagctta

SEQ ID NO: 2082157 - DNA, 15 bp, Homo sapiens
cttcaaggagcttac

SEQ ID NO: 2082158 - DNA, 15 bp, Homo sapiens
ttcaaggagcttacg

SEQ ID NO: 2082159 - DNA, 15 bp, Homo sapiens
tcaaggagcttacgt

SEQ ID NO: 2082160 - DNA, 15 bp, Homo sapiens
caaggagcttacgtt

SEQ ID NO: 2082161 - DNA, 15 bp, Homo sapiens
aaggagcttacgttc

SEQ ID NO: 2082162 - DNA, 15 bp, Homo sapiens
aggagcttacgttct

SEQ ID NO: 2082163 - DNA, 15 bp, Homo sapiens
ggagcttacgttcta

SEQ ID NO: 2082164 - DNA, 15 bp, Homo sapiens
gagcttacgttctag

SEQ ID NO: 2082165 - DNA, 15 bp, Homo sapiens
agcttacgttctagt

SEQ ID NO: 2082166 - DNA, 15 bp, Homo sapiens
gcttacgttctagtt

SEQ ID NO: 2082167 - DNA, 15 bp, Homo sapiens
cttacgttctagtta

SEQ ID NO: 2082168 - DNA, 15 bp, Homo sapiens
ttacgttctagttag

SEQ ID NO: 2082169 - DNA, 15 bp, Homo sapiens
tacgttctagttagg

SEQ ID NO: 2082170 - DNA, 15 bp, Homo sapiens
acgttctagttaggg

SEQ ID NO: 2082171 - DNA, 15 bp, Homo sapiens
cgttctagttaggga

SEQ ID NO: 2082172 - DNA, 15 bp, Homo sapiens
gttctagttagggaa

SEQ ID NO: 2082173 - DNA, 15 bp, Homo sapiens
ttctagttagggaaa

SEQ ID NO: 2082174 - DNA, 15 bp, Homo sapiens
tctagttagggaaat

SEQ ID NO: 2082175 - DNA, 15 bp, Homo sapiens
ctagttagggaaatt

SEQ ID NO: 2082176 - DNA, 15 bp, Homo sapiens
tagttagggaaattg

SEQ ID NO: 2082177 - DNA, 15 bp, Homo sapiens
agttagggaaattgg

SEQ ID NO: 2082178 - DNA, 15 bp, Homo sapiens
gttagggaaattgga

SEQ ID NO: 2082179 - DNA, 15 bp, Homo sapiens
ttagggaaattggat

SEQ ID NO: 2082180 - DNA, 15 bp, Homo sapiens
tagggaaattggatg

SEQ ID NO: 2082181 - DNA, 15 bp, Homo sapiens
agggaaattggatgc

SEQ ID NO: 2082182 - DNA, 15 bp, Homo sapiens
gggaaattggatgcc

SEQ ID NO: 2082183 - DNA, 15 bp, Homo sapiens
ggaaattggatgcct

SEQ ID NO: 2082184 - DNA, 15 bp, Homo sapiens
gaaattggatgcctt

SEQ ID NO: 2082185 - DNA, 15 bp, Homo sapiens
aaattggatgccttc

SEQ ID NO: 2082186 - DNA, 15 bp, Homo sapiens
aattggatgccttca

SEQ ID NO: 2082187 - DNA, 15 bp, Homo sapiens
attggatgccttcac

SEQ ID NO: 2082188 - DNA, 15 bp, Homo sapiens
ttggatgccttcaca

SEQ ID NO: 2082189 - DNA, 15 bp, Homo sapiens
tggatgccttcacaa

SEQ ID NO: 2082190 - DNA, 15 bp, Homo sapiens
ggatgccttcacaag

SEQ ID NO: 2082191 - DNA, 15 bp, Homo sapiens
gatgccttcacaagg

SEQ ID NO: 2082192 - DNA, 15 bp, Homo sapiens
atgccttcacaaggc

SEQ ID NO: 2082193 - DNA, 15 bp, Homo sapiens
tgccttcacaaggct

SEQ ID NO: 2082194 - DNA, 15 bp, Homo sapiens
gccttcacaaggctc

SEQ ID NO: 2082195 - DNA, 15 bp, Homo sapiens
ccttcacaaggctca

SEQ ID NO: 2082196 - DNA, 15 bp, Homo sapiens
cttcacaaggctcag

SEQ ID NO: 2082197 - DNA, 15 bp, Homo sapiens
ttcacaaggctcagt

SEQ ID NO: 2082198 - DNA, 15 bp, Homo sapiens
tcacaaggctcagtg

SEQ ID NO: 2082199 - DNA, 15 bp, Homo sapiens
cacaaggctcagtga

SEQ ID NO: 2082200 - DNA, 15 bp, Homo sapiens
acaaggctcagtgac

SEQ ID NO: 2082201 - DNA, 15 bp, Homo sapiens
caaggctcagtgaca

SEQ ID NO: 2082202 - DNA, 15 bp, Homo sapiens
aaggctcagtgacaa

SEQ ID NO: 2082203 - DNA, 15 bp, Homo sapiens
aggctcagtgacaaa

SEQ ID NO: 2082204 - DNA, 15 bp, Homo sapiens
ggctcagtgacaaac

SEQ ID NO: 2082205 - DNA, 15 bp, Homo sapiens
gctcagtgacaaacc

SEQ ID NO: 2082206 - DNA, 15 bp, Homo sapiens
ctcagtgacaaacct

SEQ ID NO: 2082207 - DNA, 15 bp, Homo sapiens
tcagtgacaaacctg

SEQ ID NO: 2082208 - DNA, 15 bp, Homo sapiens
cagtgacaaacctga

SEQ ID NO: 2082209 - DNA, 15 bp, Homo sapiens
agtgacaaacctgaa

SEQ ID NO: 2082210 - DNA, 15 bp, Homo sapiens
gtgacaaacctgaag

SEQ ID NO: 2082211 - DNA, 15 bp, Homo sapiens
tgacaaacctgaaga

SEQ ID NO: 2082212 - DNA, 15 bp, Homo sapiens
gacaaacctgaagaa

SEQ ID NO: 2082213 - DNA, 15 bp, Homo sapiens
acaaacctgaagaag

SEQ ID NO: 2082214 - DNA, 15 bp, Homo sapiens
caaacctgaagaaga

SEQ ID NO: 2082215 - DNA, 15 bp, Homo sapiens
aaacctgaagaagat

SEQ ID NO: 2082216 - DNA, 15 bp, Homo sapiens
aacctgaagaagatt

SEQ ID NO: 2082217 - DNA, 15 bp, Homo sapiens
acctgaagaagattg

SEQ ID NO: 2082218 - DNA, 15 bp, Homo sapiens
cctgaagaagattgg

SEQ ID NO: 2082219 - DNA, 15 bp, Homo sapiens
ctgaagaagattgga

SEQ ID NO: 2082220 - DNA, 15 bp, Homo sapiens
tgaagaagattggag

SEQ ID NO: 2082221 - DNA, 15 bp, Homo sapiens
gaagaagattggagg

SEQ ID NO: 2082222 - DNA, 15 bp, Homo sapiens
aagaagattggagga

SEQ ID NO: 2082223 - DNA, 15 bp, Homo sapiens
agaagattggaggaa

SEQ ID NO: 2082224 - DNA, 15 bp, Homo sapiens
gaagattggaggaac

SEQ ID NO: 2082225 - DNA, 15 bp, Homo sapiens
aagattggaggaacc

SEQ ID NO: 2082226 - DNA, 15 bp, Homo sapiens
agattggaggaacct

SEQ ID NO: 2082227 - DNA, 15 bp, Homo sapiens
gattggaggaacctt

SEQ ID NO: 2082228 - DNA, 15 bp, Homo sapiens
attggaggaaccttg

SEQ ID NO: 2082229 - DNA, 15 bp, Homo sapiens
ttggaggaaccttga

SEQ ID NO: 2082230 - DNA, 15 bp, Homo sapiens
tggaggaaccttgaa

SEQ ID NO: 2082231 - DNA, 15 bp, Homo sapiens
ggaggaaccttgaag

SEQ ID NO: 2082232 - DNA, 15 bp, Homo sapiens
gaggaaccttgaaga

SEQ ID NO: 2082233 - DNA, 15 bp, Homo sapiens
aggaaccttgaagag

SEQ ID NO: 2082234 - DNA, 15 bp, Homo sapiens
ggaaccttgaagagt

SEQ ID NO: 2082235 - DNA, 15 bp, Homo sapiens
gaaccttgaagagtg

SEQ ID NO: 2082236 - DNA, 15 bp, Homo sapiens
aaccttgaagagtga

SEQ ID NO: 2082237 - DNA, 15 bp, Homo sapiens
accttgaagagtgag

SEQ ID NO: 2082238 - DNA, 15 bp, Homo sapiens
ccttgaagagtgaga

SEQ ID NO: 2082239 - DNA, 15 bp, Homo sapiens
cttgaagagtgagaa

SEQ ID NO: 2082240 - DNA, 15 bp, Homo sapiens
ttgaagagtgagaaa

SEQ ID NO: 2082241 - DNA, 15 bp, Homo sapiens
tgaagagtgagaaac

SEQ ID NO: 2082242 - DNA, 15 bp, Homo sapiens
gaagagtgagaaaca

SEQ ID NO: 2082243 - DNA, 15 bp, Homo sapiens
aagagtgagaaacac

SEQ ID NO: 2082244 - DNA, 15 bp, Homo sapiens
agagtgagaaacacc

SEQ ID NO: 2082245 - DNA, 15 bp, Homo sapiens
gagtgagaaacacct

SEQ ID NO: 2082246 - DNA, 15 bp, Homo sapiens
agtgagaaacaccta

SEQ ID NO: 2082247 - DNA, 15 bp, Homo sapiens
gtgagaaacacctag

SEQ ID NO: 2082248 - DNA, 15 bp, Homo sapiens
tgagaaacacctagg

SEQ ID NO: 2082249 - DNA, 15 bp, Homo sapiens
gagaaacacctaggg

SEQ ID NO: 2082250 - DNA, 15 bp, Homo sapiens
agaaacacctagggg

SEQ ID NO: 2082251 - DNA, 15 bp, Homo sapiens
gaaacacctaggggg

SEQ ID NO: 2082252 - DNA, 15 bp, Homo sapiens
aaacacctaggggga

SEQ ID NO: 2082253 - DNA, 15 bp, Homo sapiens
aacacctagggggac

SEQ ID NO: 2082254 - DNA, 15 bp, Homo sapiens
acacctagggggaca

SEQ ID NO: 2082255 - DNA, 15 bp, Homo sapiens
cacctagggggacag

SEQ ID NO: 2082256 - DNA, 15 bp, Homo sapiens
acctagggggacaga

SEQ ID NO: 2082257 - DNA, 15 bp, Homo sapiens
cctagggggacagac

SEQ ID NO: 2082258 - DNA, 15 bp, Homo sapiens
ctagggggacagaca

SEQ ID NO: 2082259 - DNA, 15 bp, Homo sapiens
tagggggacagacag

SEQ ID NO: 2082260 - DNA, 15 bp, Homo sapiens
agggggacagacagg

SEQ ID NO: 2082261 - DNA, 15 bp, Homo sapiens
gggggacagacaggg

SEQ ID NO: 2082262 - DNA, 15 bp, Homo sapiens
ggggacagacaggga

SEQ ID NO: 2082263 - DNA, 15 bp, Homo sapiens
gggacagacagggaa

SEQ ID NO: 2082264 - DNA, 15 bp, Homo sapiens
ggacagacagggaaa

SEQ ID NO: 2082265 - DNA, 15 bp, Homo sapiens
gacagacagggaaag

SEQ ID NO: 2082266 - DNA, 15 bp, Homo sapiens
acagacagggaaagc

SEQ ID NO: 2082267 - DNA, 15 bp, Homo sapiens
cagacagggaaagct

SEQ ID NO: 2082268 - DNA, 15 bp, Homo sapiens
agacagggaaagctg

SEQ ID NO: 2082269 - DNA, 15 bp, Homo sapiens
gacagggaaagctgc

SEQ ID NO: 2082270 - DNA, 15 bp, Homo sapiens
acagggaaagctgcg

SEQ ID NO: 2082271 - DNA, 15 bp, Homo sapiens
cagggaaagctgcga

SEQ ID NO: 2082272 - DNA, 15 bp, Homo sapiens
agggaaagctgcgaa

SEQ ID NO: 2082273 - DNA, 15 bp, Homo sapiens
gggaaagctgcgaat

SEQ ID NO: 2082274 - DNA, 15 bp, Homo sapiens
ggaaagctgcgaatt

SEQ ID NO: 2082275 - DNA, 15 bp, Homo sapiens
gaaagctgcgaattc

SEQ ID NO: 2082276 - DNA, 15 bp, Homo sapiens
aaagctgcgaattct

SEQ ID NO: 2082277 - DNA, 15 bp, Homo sapiens
aagctgcgaattctc

SEQ ID NO: 2082278 - DNA, 15 bp, Homo sapiens
agctgcgaattctct

SEQ ID NO: 2082279 - DNA, 15 bp, Homo sapiens
gctgcgaattctctt

SEQ ID NO: 2082280 - DNA, 15 bp, Homo sapiens
ctgcgaattctcttg

SEQ ID NO: 2082281 - DNA, 15 bp, Homo sapiens
tgcgaattctcttgt

SEQ ID NO: 2082282 - DNA, 15 bp, Homo sapiens
gcgaattctcttgtc

SEQ ID NO: 2082283 - DNA, 15 bp, Homo sapiens
cgaattctcttgtcc

SEQ ID NO: 2082284 - DNA, 15 bp, Homo sapiens
gaattctcttgtcca

SEQ ID NO: 2082285 - DNA, 15 bp, Homo sapiens
aattctcttgtccaa

SEQ ID NO: 2082286 - DNA, 15 bp, Homo sapiens
attctcttgtccaaa

SEQ ID NO: 2082287 - DNA, 15 bp, Homo sapiens
ttctcttgtccaaat

SEQ ID NO: 2082288 - DNA, 15 bp, Homo sapiens
tctcttgtccaaata

SEQ ID NO: 2082289 - DNA, 15 bp, Homo sapiens
ctcttgtccaaatag

SEQ ID NO: 2082290 - DNA, 15 bp, Homo sapiens
tcttgtccaaatagt

SEQ ID NO: 2082291 - DNA, 15 bp, Homo sapiens
cttgtccaaatagtg

SEQ ID NO: 2082292 - DNA, 15 bp, Homo sapiens
ttgtccaaatagtgg

SEQ ID NO: 2082293 - DNA, 15 bp, Homo sapiens
tgtccaaatagtgga

SEQ ID NO: 2082294 - DNA, 15 bp, Homo sapiens
gtccaaatagtggat

SEQ ID NO: 2082295 - DNA, 15 bp, Homo sapiens
tccaaatagtggatt

SEQ ID NO: 2082296 - DNA, 15 bp, Homo sapiens
ccaaatagtggattg

SEQ ID NO: 2082297 - DNA, 15 bp, Homo sapiens
caaatagtggattgg

SEQ ID NO: 2082298 - DNA, 15 bp, Homo sapiens
aaatagtggattggg

SEQ ID NO: 2082299 - DNA, 15 bp, Homo sapiens
aatagtggattgggc

SEQ ID NO: 2082300 - DNA, 15 bp, Homo sapiens
atagtggattgggca

SEQ ID NO: 2082301 - DNA, 15 bp, Homo sapiens
tagtggattgggcag

SEQ ID NO: 2082302 - DNA, 15 bp, Homo sapiens
agtggattgggcaga

SEQ ID NO: 2082303 - DNA, 15 bp, Homo sapiens
gtggattgggcagac

SEQ ID NO: 2082304 - DNA, 15 bp, Homo sapiens
tggattgggcagact

SEQ ID NO: 2082305 - DNA, 15 bp, Homo sapiens
ggattgggcagactg

SEQ ID NO: 2082306 - DNA, 15 bp, Homo sapiens
gattgggcagactgg

SEQ ID NO: 2082307 - DNA, 15 bp, Homo sapiens
attgggcagactggc

SEQ ID NO: 2082308 - DNA, 15 bp, Homo sapiens
ttgggcagactggcc

SEQ ID NO: 2082309 - DNA, 15 bp, Homo sapiens
tgggcagactggcct

SEQ ID NO: 2082310 - DNA, 15 bp, Homo sapiens
gggcagactggcctg

SEQ ID NO: 2082311 - DNA, 15 bp, Homo sapiens
ggcagactggcctgg

SEQ ID NO: 2082312 - DNA, 15 bp, Homo sapiens
gcagactggcctgga

SEQ ID NO: 2082313 - DNA, 15 bp, Homo sapiens
cagactggcctggag

SEQ ID NO: 2082314 - DNA, 15 bp, Homo sapiens
agactggcctggagg

SEQ ID NO: 2082315 - DNA, 15 bp, Homo sapiens
gactggcctggagga

SEQ ID NO: 2082316 - DNA, 15 bp, Homo sapiens
actggcctggaggaa

SEQ ID NO: 2082317 - DNA, 15 bp, Homo sapiens
ctggcctggaggaaa

SEQ ID NO: 2082318 - DNA, 15 bp, Homo sapiens
tggcctggaggaaat

SEQ ID NO: 2082319 - DNA, 15 bp, Homo sapiens
ggcctggaggaaatg

SEQ ID NO: 2082320 - DNA, 15 bp, Homo sapiens
gcctggaggaaatgc

SEQ ID NO: 2082321 - DNA, 15 bp, Homo sapiens
cctggaggaaatgct

SEQ ID NO: 2082322 - DNA, 15 bp, Homo sapiens
ctggaggaaatgcta

SEQ ID NO: 2082323 - DNA, 15 bp, Homo sapiens
tggaggaaatgctag

SEQ ID NO: 2082324 - DNA, 15 bp, Homo sapiens
ggaggaaatgctaga

SEQ ID NO: 2082325 - DNA, 15 bp, Homo sapiens
gaggaaatgctagaa

SEQ ID NO: 2082326 - DNA, 15 bp, Homo sapiens
aggaaatgctagaac

SEQ ID NO: 2082327 - DNA, 15 bp, Homo sapiens
ggaaatgctagaaca

SEQ ID NO: 2082328 - DNA, 15 bp, Homo sapiens
gaaatgctagaacag

SEQ ID NO: 2082329 - DNA, 15 bp, Homo sapiens
aaatgctagaacaga

SEQ ID NO: 2082330 - DNA, 15 bp, Homo sapiens
aatgctagaacagag

SEQ ID NO: 2082331 - DNA, 15 bp, Homo sapiens
atgctagaacagagg

SEQ ID NO: 2082332 - DNA, 15 bp, Homo sapiens
tgctagaacagaggg

SEQ ID NO: 2082333 - DNA, 15 bp, Homo sapiens
gctagaacagaggga

SEQ ID NO: 2082334 - DNA, 15 bp, Homo sapiens
ctagaacagagggaa

SEQ ID NO: 2082335 - DNA, 15 bp, Homo sapiens
tagaacagagggaaa

SEQ ID NO: 2082336 - DNA, 15 bp, Homo sapiens
agaacagagggaaag

SEQ ID NO: 2082337 - DNA, 15 bp, Homo sapiens
gaacagagggaaagg

SEQ ID NO: 2082338 - DNA, 15 bp, Homo sapiens
aacagagggaaagga

SEQ ID NO: 2082339 - DNA, 15 bp, Homo sapiens
acagagggaaaggag

SEQ ID NO: 2082340 - DNA, 15 bp, Homo sapiens
cagagggaaaggagg

SEQ ID NO: 2082341 - DNA, 15 bp, Homo sapiens
agagggaaaggaggc

SEQ ID NO: 2082342 - DNA, 15 bp, Homo sapiens
gagggaaaggaggct

SEQ ID NO: 2082343 - DNA, 15 bp, Homo sapiens
agggaaaggaggctg

SEQ ID NO: 2082344 - DNA, 15 bp, Homo sapiens
gggaaaggaggctgg

SEQ ID NO: 2082345 - DNA, 15 bp, Homo sapiens
ggaaaggaggctgga

SEQ ID NO: 2082346 - DNA, 15 bp, Homo sapiens
gaaaggaggctggag

SEQ ID NO: 2082347 - DNA, 15 bp, Homo sapiens
aaaggaggctggaga

SEQ ID NO: 2082348 - DNA, 15 bp, Homo sapiens
aaggaggctggagag

SEQ ID NO: 2082349 - DNA, 15 bp, Homo sapiens
aggaggctggagagg

SEQ ID NO: 2082350 - DNA, 15 bp, Homo sapiens
ggaggctggagaggc

SEQ ID NO: 2082351 - DNA, 15 bp, Homo sapiens
gaggctggagaggct

SEQ ID NO: 2082352 - DNA, 15 bp, Homo sapiens
aggctggagaggctt

SEQ ID NO: 2082353 - DNA, 15 bp, Homo sapiens
ggctggagaggcttc

SEQ ID NO: 2082354 - DNA, 15 bp, Homo sapiens
gctggagaggcttct

SEQ ID NO: 2082355 - DNA, 15 bp, Homo sapiens
ctggagaggcttctg

SEQ ID NO: 2082356 - DNA, 15 bp, Homo sapiens
tggagaggcttctga

SEQ ID NO: 2082357 - DNA, 15 bp, Homo sapiens
ggagaggcttctgat

SEQ ID NO: 2082358 - DNA, 15 bp, Homo sapiens
gagaggcttctgatg

SEQ ID NO: 2082359 - DNA, 15 bp, Homo sapiens
agaggcttctgatgg

SEQ ID NO: 2082360 - DNA, 15 bp, Homo sapiens
gaggcttctgatggt

SEQ ID NO: 2082361 - DNA, 15 bp, Homo sapiens
aggcttctgatggtg

SEQ ID NO: 2082362 - DNA, 15 bp, Homo sapiens
ggcttctgatggtgg

SEQ ID NO: 2082363 - DNA, 15 bp, Homo sapiens
gcttctgatggtgga

SEQ ID NO: 2082364 - DNA, 15 bp, Homo sapiens
cttctgatggtggag

SEQ ID NO: 2082365 - DNA, 15 bp, Homo sapiens
ttctgatggtggaga

SEQ ID NO: 2082366 - DNA, 15 bp, Homo sapiens
tctgatggtggagat

SEQ ID NO: 2082367 - DNA, 15 bp, Homo sapiens
ctgatggtggagatc

SEQ ID NO: 2082368 - DNA, 15 bp, Homo sapiens
tgatggtggagatct

SEQ ID NO: 2082369 - DNA, 15 bp, Homo sapiens
gatggtggagatctg

SEQ ID NO: 2082370 - DNA, 15 bp, Homo sapiens
atggtggagatctgg

SEQ ID NO: 2082371 - DNA, 15 bp, Homo sapiens
tggtggagatctggc

SEQ ID NO: 2082372 - DNA, 15 bp, Homo sapiens
ggtggagatctggca

SEQ ID NO: 2082373 - DNA, 15 bp, Homo sapiens
gtggagatctggcat

SEQ ID NO: 2082374 - DNA, 15 bp, Homo sapiens
tggagatctggcatg

SEQ ID NO: 2082375 - DNA, 15 bp, Homo sapiens
ggagatctggcatgc

SEQ ID NO: 2082376 - DNA, 15 bp, Homo sapiens
gagatctggcatgcc

SEQ ID NO: 2082377 - DNA, 15 bp, Homo sapiens
agatctggcatgcca

SEQ ID NO: 2082378 - DNA, 15 bp, Homo sapiens
gatctggcatgccag

SEQ ID NO: 2082379 - DNA, 15 bp, Homo sapiens
atctggcatgccagg

SEQ ID NO: 2082380 - DNA, 15 bp, Homo sapiens
tctggcatgccaggc

SEQ ID NO: 2082381 - DNA, 15 bp, Homo sapiens
ctggcatgccaggct

SEQ ID NO: 2082382 - DNA, 15 bp, Homo sapiens
tggcatgccaggctt

SEQ ID NO: 2082383 - DNA, 15 bp, Homo sapiens
ggcatgccaggctta

SEQ ID NO: 2082384 - DNA, 15 bp, Homo sapiens
gcatgccaggcttag

SEQ ID NO: 2082385 - DNA, 15 bp, Homo sapiens
catgccaggcttagg

SEQ ID NO: 2082386 - DNA, 15 bp, Homo sapiens
atgccaggcttaggt

SEQ ID NO: 2082387 - DNA, 15 bp, Homo sapiens
tgccaggcttaggtg

SEQ ID NO: 2082388 - DNA, 15 bp, Homo sapiens
gccaggcttaggtgt

SEQ ID NO: 2082389 - DNA, 15 bp, Homo sapiens
ccaggcttaggtgtc

SEQ ID NO: 2082390 - DNA, 15 bp, Homo sapiens
caggcttaggtgtct

SEQ ID NO: 2082391 - DNA, 15 bp, Homo sapiens
aggcttaggtgtcta

SEQ ID NO: 2082392 - DNA, 15 bp, Homo sapiens
ggcttaggtgtctag

SEQ ID NO: 2082393 - DNA, 15 bp, Homo sapiens
gcttaggtgtctaga

SEQ ID NO: 2082394 - DNA, 15 bp, Homo sapiens
cttaggtgtctagaa

SEQ ID NO: 2082395 - DNA, 15 bp, Homo sapiens
ttaggtgtctagaac

SEQ ID NO: 2082396 - DNA, 15 bp, Homo sapiens
taggtgtctagaaca

SEQ ID NO: 2082397 - DNA, 15 bp, Homo sapiens
aggtgtctagaacag

SEQ ID NO: 2082398 - DNA, 15 bp, Homo sapiens
ggtgtctagaacagc

SEQ ID NO: 2082399 - DNA, 15 bp, Homo sapiens
gtgtctagaacagca

SEQ ID NO: 2082400 - DNA, 15 bp, Homo sapiens
tgtctagaacagcaa

SEQ ID NO: 2082401 - DNA, 15 bp, Homo sapiens
gtctagaacagcaac

SEQ ID NO: 2082402 - DNA, 15 bp, Homo sapiens
tctagaacagcaact

SEQ ID NO: 2082403 - DNA, 15 bp, Homo sapiens
ctagaacagcaactg

SEQ ID NO: 2082404 - DNA, 15 bp, Homo sapiens
tagaacagcaactgt

SEQ ID NO: 2082405 - DNA, 15 bp, Homo sapiens
agaacagcaactgta

SEQ ID NO: 2082406 - DNA, 15 bp, Homo sapiens
gaacagcaactgtat

SEQ ID NO: 2082407 - DNA, 15 bp, Homo sapiens
aacagcaactgtatg

SEQ ID NO: 2082408 - DNA, 15 bp, Homo sapiens
acagcaactgtatgt

SEQ ID NO: 2082409 - DNA, 15 bp, Homo sapiens
cagcaactgtatgtg

SEQ ID NO: 2082410 - DNA, 15 bp, Homo sapiens
agcaactgtatgtga

SEQ ID NO: 2082411 - DNA, 15 bp, Homo sapiens
gcaactgtatgtgaa

SEQ ID NO: 2082412 - DNA, 15 bp, Homo sapiens
caactgtatgtgaag

SEQ ID NO: 2082413 - DNA, 15 bp, Homo sapiens
aactgtatgtgaagg

SEQ ID NO: 2082414 - DNA, 15 bp, Homo sapiens
actgtatgtgaaggg

SEQ ID NO: 2082415 - DNA, 15 bp, Homo sapiens
ctgtatgtgaagggg

SEQ ID NO: 2082416 - DNA, 15 bp, Homo sapiens
tgtatgtgaagggga

SEQ ID NO: 2082417 - DNA, 15 bp, Homo sapiens
gtatgtgaaggggag

SEQ ID NO: 2082418 - DNA, 15 bp, Homo sapiens
tatgtgaaggggagc

SEQ ID NO: 2082419 - DNA, 15 bp, Homo sapiens
atgtgaaggggagcc

SEQ ID NO: 2082420 - DNA, 15 bp, Homo sapiens
tgtgaaggggagcca

SEQ ID NO: 2082421 - DNA, 15 bp, Homo sapiens
gtgaaggggagccag

SEQ ID NO: 2082422 - DNA, 15 bp, Homo sapiens
tgaaggggagccagg

SEQ ID NO: 2082423 - DNA, 15 bp, Homo sapiens
gaaggggagccaggg

SEQ ID NO: 2082424 - DNA, 15 bp, Homo sapiens
aaggggagccaggga

SEQ ID NO: 2082425 - DNA, 15 bp, Homo sapiens
aggggagccagggaa

SEQ ID NO: 2082426 - DNA, 15 bp, Homo sapiens
ggggagccagggaac

SEQ ID NO: 2082427 - DNA, 15 bp, Homo sapiens
gggagccagggaacg

SEQ ID NO: 2082428 - DNA, 15 bp, Homo sapiens
ggagccagggaacgt

SEQ ID NO: 2082429 - DNA, 15 bp, Homo sapiens
gagccagggaacgtt

SEQ ID NO: 2082430 - DNA, 15 bp, Homo sapiens
agccagggaacgttt

SEQ ID NO: 2082431 - DNA, 15 bp, Homo sapiens
gccagggaacgtttc

SEQ ID NO: 2082432 - DNA, 15 bp, Homo sapiens
ccagggaacgtttct

SEQ ID NO: 2082433 - DNA, 15 bp, Homo sapiens
cagggaacgtttctg

SEQ ID NO: 2082434 - DNA, 15 bp, Homo sapiens
agggaacgtttctga

SEQ ID NO: 2082435 - DNA, 15 bp, Homo sapiens
gggaacgtttctgaa

SEQ ID NO: 2082436 - DNA, 15 bp, Homo sapiens
ggaacgtttctgaac

SEQ ID NO: 2082437 - DNA, 15 bp, Homo sapiens
gaacgtttctgaact

SEQ ID NO: 2082438 - DNA, 15 bp, Homo sapiens
aacgtttctgaacta

SEQ ID NO: 2082439 - DNA, 15 bp, Homo sapiens
acgtttctgaactaa

SEQ ID NO: 2082440 - DNA, 15 bp, Homo sapiens
cgtttctgaactaag

SEQ ID NO: 2082441 - DNA, 15 bp, Homo sapiens
gtttctgaactaagc

SEQ ID NO: 2082442 - DNA, 15 bp, Homo sapiens
tttctgaactaagca

SEQ ID NO: 2082443 - DNA, 15 bp, Homo sapiens
ttctgaactaagcaa

SEQ ID NO: 2082444 - DNA, 15 bp, Homo sapiens
tctgaactaagcaag

SEQ ID NO: 2082445 - DNA, 15 bp, Homo sapiens
ctgaactaagcaagg

SEQ ID NO: 2082446 - DNA, 15 bp, Homo sapiens
tgaactaagcaagga

SEQ ID NO: 2082447 - DNA, 15 bp, Homo sapiens
gaactaagcaaggac

SEQ ID NO: 2082448 - DNA, 15 bp, Homo sapiens
aactaagcaaggaca

SEQ ID NO: 2082449 - DNA, 15 bp, Homo sapiens
actaagcaaggacaa

SEQ ID NO: 2082450 - DNA, 15 bp, Homo sapiens
ctaagcaaggacaaa

SEQ ID NO: 2082451 - DNA, 15 bp, Homo sapiens
taagcaaggacaaat

SEQ ID NO: 2082452 - DNA, 15 bp, Homo sapiens
aagcaaggacaaatt

SEQ ID NO: 2082453 - DNA, 15 bp, Homo sapiens
agcaaggacaaattc

SEQ ID NO: 2082454 - DNA, 15 bp, Homo sapiens
gcaaggacaaattca

SEQ ID NO: 2082455 - DNA, 15 bp, Homo sapiens
caaggacaaattcag

SEQ ID NO: 2082456 - DNA, 15 bp, Homo sapiens
aaggacaaattcaga

SEQ ID NO: 2082457 - DNA, 15 bp, Homo sapiens
aggacaaattcagag

SEQ ID NO: 2082458 - DNA, 15 bp, Homo sapiens
ggacaaattcagaga

SEQ ID NO: 2082459 - DNA, 15 bp, Homo sapiens
gacaaattcagagac

SEQ ID NO: 2082460 - DNA, 15 bp, Homo sapiens
acaaattcagagacc

SEQ ID NO: 2082461 - DNA, 15 bp, Homo sapiens
caaattcagagaccc

SEQ ID NO: 2082462 - DNA, 15 bp, Homo sapiens
aaattcagagaccct

SEQ ID NO: 2082463 - DNA, 15 bp, Homo sapiens
aattcagagaccctg

SEQ ID NO: 2082464 - DNA, 15 bp, Homo sapiens
attcagagaccctga

SEQ ID NO: 2082465 - DNA, 15 bp, Homo sapiens
ttcagagaccctgag

SEQ ID NO: 2082466 - DNA, 15 bp, Homo sapiens
tcagagaccctgagc

SEQ ID NO: 2082467 - DNA, 15 bp, Homo sapiens
cagagaccctgagct

SEQ ID NO: 2082468 - DNA, 15 bp, Homo sapiens
agagaccctgagctt

SEQ ID NO: 2082469 - DNA, 15 bp, Homo sapiens
gagaccctgagcttt

SEQ ID NO: 2082470 - DNA, 15 bp, Homo sapiens
agaccctgagcttta

SEQ ID NO: 2082471 - DNA, 15 bp, Homo sapiens
gaccctgagctttag

SEQ ID NO: 2082472 - DNA, 15 bp, Homo sapiens
accctgagctttaga

SEQ ID NO: 2082473 - DNA, 15 bp, Homo sapiens
ccctgagctttagaa

SEQ ID NO: 2082474 - DNA, 15 bp, Homo sapiens
cctgagctttagaaa

SEQ ID NO: 2082475 - DNA, 15 bp, Homo sapiens
ctgagctttagaaag

SEQ ID NO: 2082476 - DNA, 15 bp, Homo sapiens
tgagctttagaaaga

SEQ ID NO: 2082477 - DNA, 15 bp, Homo sapiens
gagctttagaaagac

SEQ ID NO: 2082478 - DNA, 15 bp, Homo sapiens
agctttagaaagaca

SEQ ID NO: 2082479 - DNA, 15 bp, Homo sapiens
gctttagaaagacaa

SEQ ID NO: 2082480 - DNA, 15 bp, Homo sapiens
ctttagaaagacaag

SEQ ID NO: 2082481 - DNA, 15 bp, Homo sapiens
tttagaaagacaagt

SEQ ID NO: 2082482 - DNA, 15 bp, Homo sapiens
ttagaaagacaagtg

SEQ ID NO: 2082483 - DNA, 15 bp, Homo sapiens
tagaaagacaagtgg

SEQ ID NO: 2082484 - DNA, 15 bp, Homo sapiens
agaaagacaagtggg

SEQ ID NO: 2082485 - DNA, 15 bp, Homo sapiens
gaaagacaagtgggt

SEQ ID NO: 2082486 - DNA, 15 bp, Homo sapiens
aaagacaagtgggtg

SEQ ID NO: 2082487 - DNA, 15 bp, Homo sapiens
aagacaagtgggtgg

SEQ ID NO: 2082488 - DNA, 15 bp, Homo sapiens
agacaagtgggtggc

SEQ ID NO: 2082489 - DNA, 15 bp, Homo sapiens
gacaagtgggtggct

SEQ ID NO: 2082490 - DNA, 15 bp, Homo sapiens
acaagtgggtggctt

SEQ ID NO: 2082491 - DNA, 15 bp, Homo sapiens
caagtgggtggcttt

SEQ ID NO: 2082492 - DNA, 15 bp, Homo sapiens
aagtgggtggctttg

SEQ ID NO: 2082493 - DNA, 15 bp, Homo sapiens
agtgggtggctttga

SEQ ID NO: 2082494 - DNA, 15 bp, Homo sapiens
gtgggtggctttgat

SEQ ID NO: 2082495 - DNA, 15 bp, Homo sapiens
tgggtggctttgatg

SEQ ID NO: 2082496 - DNA, 15 bp, Homo sapiens
gggtggctttgatgg

SEQ ID NO: 2082497 - DNA, 15 bp, Homo sapiens
ggtggctttgatgga

SEQ ID NO: 2082498 - DNA, 15 bp, Homo sapiens
gtggctttgatggac

SEQ ID NO: 2082499 - DNA, 15 bp, Homo sapiens
tggctttgatggacg

SEQ ID NO: 2082500 - DNA, 15 bp, Homo sapiens
ggctttgatggacgg

SEQ ID NO: 2082501 - DNA, 15 bp, Homo sapiens
gctttgatggacggt

SEQ ID NO: 2082502 - DNA, 15 bp, Homo sapiens
ctttgatggacggtt

SEQ ID NO: 2082503 - DNA, 15 bp, Homo sapiens
tttgatggacggttt

SEQ ID NO: 2082504 - DNA, 15 bp, Homo sapiens
ttgatggacggtttg

SEQ ID NO: 2082505 - DNA, 15 bp, Homo sapiens
tgatggacggtttgg

SEQ ID NO: 2082506 - DNA, 15 bp, Homo sapiens
gatggacggtttgga

SEQ ID NO: 2082507 - DNA, 15 bp, Homo sapiens
atggacggtttggag

SEQ ID NO: 2082508 - DNA, 15 bp, Homo sapiens
tggacggtttggagg

SEQ ID NO: 2082509 - DNA, 15 bp, Homo sapiens
ggacggtttggagga

SEQ ID NO: 2082510 - DNA, 15 bp, Homo sapiens
gacggtttggaggag

SEQ ID NO: 2082511 - DNA, 15 bp, Homo sapiens
acggtttggaggagg

SEQ ID NO: 2082512 - DNA, 15 bp, Homo sapiens
cggtttggaggaggc

SEQ ID NO: 2082513 - DNA, 15 bp, Homo sapiens
ggtttggaggaggca

SEQ ID NO: 2082514 - DNA, 15 bp, Homo sapiens
gtttggaggaggcaa

SEQ ID NO: 2082515 - DNA, 15 bp, Homo sapiens
tttggaggaggcaag

SEQ ID NO: 2082516 - DNA, 15 bp, Homo sapiens
ttggaggaggcaaga

SEQ ID NO: 2082517 - DNA, 15 bp, Homo sapiens
tggaggaggcaagac

SEQ ID NO: 2082518 - DNA, 15 bp, Homo sapiens
ggaggaggcaagact

SEQ ID NO: 2082519 - DNA, 15 bp, Homo sapiens
gaggaggcaagactg

SEQ ID NO: 2082520 - DNA, 15 bp, Homo sapiens
aggaggcaagactgg

SEQ ID NO: 2082521 - DNA, 15 bp, Homo sapiens
ggaggcaagactgga

SEQ ID NO: 2082522 - DNA, 15 bp, Homo sapiens
gaggcaagactggag

SEQ ID NO: 2082523 - DNA, 15 bp, Homo sapiens
aggcaagactggagg

SEQ ID NO: 2082524 - DNA, 15 bp, Homo sapiens
ggcaagactggaggt

SEQ ID NO: 2082525 - DNA, 15 bp, Homo sapiens
gcaagactggaggtg

SEQ ID NO: 2082526 - DNA, 15 bp, Homo sapiens
caagactggaggtgg

SEQ ID NO: 2082527 - DNA, 15 bp, Homo sapiens
aagactggaggtggg

SEQ ID NO: 2082528 - DNA, 15 bp, Homo sapiens
agactggaggtggga

SEQ ID NO: 2082529 - DNA, 15 bp, Homo sapiens
gactggaggtgggaa

SEQ ID NO: 2082530 - DNA, 15 bp, Homo sapiens
actggaggtgggaaa

SEQ ID NO: 2082531 - DNA, 15 bp, Homo sapiens
ctggaggtgggaaaa

SEQ ID NO: 2082532 - DNA, 15 bp, Homo sapiens
tggaggtgggaaaat

SEQ ID NO: 2082533 - DNA, 15 bp, Homo sapiens
ggaggtgggaaaatt

SEQ ID NO: 2082534 - DNA, 15 bp, Homo sapiens
gaggtgggaaaatta

SEQ ID NO: 2082535 - DNA, 15 bp, Homo sapiens
aggtgggaaaattag

SEQ ID NO: 2082536 - DNA, 15 bp, Homo sapiens
ggtgggaaaattagc

SEQ ID NO: 2082537 - DNA, 15 bp, Homo sapiens
gtgggaaaattagca

SEQ ID NO: 2082538 - DNA, 15 bp, Homo sapiens
tgggaaaattagcaa

SEQ ID NO: 2082539 - DNA, 15 bp, Homo sapiens
gggaaaattagcaag

SEQ ID NO: 2082540 - DNA, 15 bp, Homo sapiens
ggaaaattagcaagg

SEQ ID NO: 2082541 - DNA, 15 bp, Homo sapiens
gaaaattagcaagga

SEQ ID NO: 2082542 - DNA, 15 bp, Homo sapiens
aaaattagcaaggag

SEQ ID NO: 2082543 - DNA, 15 bp, Homo sapiens
aaattagcaaggagg

SEQ ID NO: 2082544 - DNA, 15 bp, Homo sapiens
aattagcaaggaggt

SEQ ID NO: 2082545 - DNA, 15 bp, Homo sapiens
attagcaaggaggtc

SEQ ID NO: 2082546 - DNA, 15 bp, Homo sapiens
ttagcaaggaggtct

SEQ ID NO: 2082547 - DNA, 15 bp, Homo sapiens
tagcaaggaggtctg

SEQ ID NO: 2082548 - DNA, 15 bp, Homo sapiens
agcaaggaggtctgt

SEQ ID NO: 2082549 - DNA, 15 bp, Homo sapiens
gcaaggaggtctgtg

SEQ ID NO: 2082550 - DNA, 15 bp, Homo sapiens
caaggaggtctgtga

SEQ ID NO: 2082551 - DNA, 15 bp, Homo sapiens
aaggaggtctgtgaa

SEQ ID NO: 2082552 - DNA, 15 bp, Homo sapiens
aggaggtctgtgaaa

SEQ ID NO: 2082553 - DNA, 15 bp, Homo sapiens
ggaggtctgtgaaat

SEQ ID NO: 2082554 - DNA, 15 bp, Homo sapiens
gaggtctgtgaaata

SEQ ID NO: 2082555 - DNA, 15 bp, Homo sapiens
aggtctgtgaaataa

SEQ ID NO: 2082556 - DNA, 15 bp, Homo sapiens
ggtctgtgaaataat

SEQ ID NO: 2082557 - DNA, 15 bp, Homo sapiens
gtctgtgaaataatc

SEQ ID NO: 2082558 - DNA, 15 bp, Homo sapiens
tctgtgaaataatcc

SEQ ID NO: 2082559 - DNA, 15 bp, Homo sapiens
ctgtgaaataatcca

SEQ ID NO: 2082560 - DNA, 15 bp, Homo sapiens
tgtgaaataatccag

SEQ ID NO: 2082561 - DNA, 15 bp, Homo sapiens
gtgaaataatccagg

SEQ ID NO: 2082562 - DNA, 15 bp, Homo sapiens
tgaaataatccagga

SEQ ID NO: 2082563 - DNA, 15 bp, Homo sapiens
gaaataatccaggag

SEQ ID NO: 2082564 - DNA, 15 bp, Homo sapiens
aaataatccaggaga

SEQ ID NO: 2082565 - DNA, 15 bp, Homo sapiens
aataatccaggagaa

SEQ ID NO: 2082566 - DNA, 15 bp, Homo sapiens
ataatccaggagaac

SEQ ID NO: 2082567 - DNA, 15 bp, Homo sapiens
taatccaggagaaca

SEQ ID NO: 2082568 - DNA, 15 bp, Homo sapiens
aatccaggagaacaa

SEQ ID NO: 2082569 - DNA, 15 bp, Homo sapiens
atccaggagaacaat

SEQ ID NO: 2082570 - DNA, 15 bp, Homo sapiens
tccaggagaacaatg

SEQ ID NO: 2082571 - DNA, 15 bp, Homo sapiens
ccaggagaacaatga

SEQ ID NO: 2082572 - DNA, 15 bp, Homo sapiens
caggagaacaatgat

SEQ ID NO: 2082573 - DNA, 15 bp, Homo sapiens
aggagaacaatgatg

SEQ ID NO: 2082574 - DNA, 15 bp, Homo sapiens
ggagaacaatgatga

SEQ ID NO: 2082575 - DNA, 15 bp, Homo sapiens
gagaacaatgatgag

SEQ ID NO: 2082576 - DNA, 15 bp, Homo sapiens
gaacaatgatgaggc

SEQ ID NO: 2082577 - DNA, 15 bp, Homo sapiens
aacaatgatgaggcc

SEQ ID NO: 2082578 - DNA, 15 bp, Homo sapiens
acaatgatgaggcct

SEQ ID NO: 2082579 - DNA, 15 bp, Homo sapiens
caatgatgaggcctg

SEQ ID NO: 2082580 - DNA, 15 bp, Homo sapiens
aatgatgaggcctgg

SEQ ID NO: 2082581 - DNA, 15 bp, Homo sapiens
atgatgaggcctgga

SEQ ID NO: 2082582 - DNA, 15 bp, Homo sapiens
tgatgaggcctggat

SEQ ID NO: 2082583 - DNA, 15 bp, Homo sapiens
gatgaggcctggatt

SEQ ID NO: 2082584 - DNA, 15 bp, Homo sapiens
atgaggcctggattg

SEQ ID NO: 2082585 - DNA, 15 bp, Homo sapiens
tgaggcctggattgg

SEQ ID NO: 2082586 - DNA, 15 bp, Homo sapiens
gaggcctggattgga

SEQ ID NO: 2082587 - DNA, 15 bp, Homo sapiens
aggcctggattggat

SEQ ID NO: 2082588 - DNA, 15 bp, Homo sapiens
ggcctggattggatt

SEQ ID NO: 2082589 - DNA, 15 bp, Homo sapiens
gcctggattggattc

SEQ ID NO: 2082590 - DNA, 15 bp, Homo sapiens
cctggattggattcg

SEQ ID NO: 2082591 - DNA, 15 bp, Homo sapiens
ctggattggattcgg

SEQ ID NO: 2082592 - DNA, 15 bp, Homo sapiens
tggattggattcggt

SEQ ID NO: 2082593 - DNA, 15 bp, Homo sapiens
ggattggattcggta

SEQ ID NO: 2082594 - DNA, 15 bp, Homo sapiens
gattggattcggtaa

SEQ ID NO: 2082595 - DNA, 15 bp, Homo sapiens
attggattcggtaaa

SEQ ID NO: 2082596 - DNA, 15 bp, Homo sapiens
ttggattcggtaaaa

SEQ ID NO: 2082597 - DNA, 15 bp, Homo sapiens
tggattcggtaaaaa

SEQ ID NO: 2082598 - DNA, 15 bp, Homo sapiens
ggattcggtaaaaag

SEQ ID NO: 2082599 - DNA, 15 bp, Homo sapiens
gattcggtaaaaaga

SEQ ID NO: 2082600 - DNA, 15 bp, Homo sapiens
attcggtaaaaagag

SEQ ID NO: 2082601 - DNA, 15 bp, Homo sapiens
ttcggtaaaaagagg

SEQ ID NO: 2082602 - DNA, 15 bp, Homo sapiens
tcggtaaaaagaggg

SEQ ID NO: 2082603 - DNA, 15 bp, Homo sapiens
cggtaaaaagagggg

SEQ ID NO: 2082604 - DNA, 15 bp, Homo sapiens
ggtaaaaagaggggg

SEQ ID NO: 2082605 - DNA, 15 bp, Homo sapiens
gtaaaaagagggggt

SEQ ID NO: 2082606 - DNA, 15 bp, Homo sapiens
taaaaagagggggtt

SEQ ID NO: 2082607 - DNA, 15 bp, Homo sapiens
aaaaagagggggttg

SEQ ID NO: 2082608 - DNA, 15 bp, Homo sapiens
aaaagagggggttgc

SEQ ID NO: 2082609 - DNA, 15 bp, Homo sapiens
aaagagggggttgct

SEQ ID NO: 2082610 - DNA, 15 bp, Homo sapiens
aagagggggttgcta

SEQ ID NO: 2082611 - DNA, 15 bp, Homo sapiens
agagggggttgctag

SEQ ID NO: 2082612 - DNA, 15 bp, Homo sapiens
gagggggttgctaga

SEQ ID NO: 2082613 - DNA, 15 bp, Homo sapiens
agggggttgctagaa

SEQ ID NO: 2082614 - DNA, 15 bp, Homo sapiens
gggggttgctagaag

SEQ ID NO: 2082615 - DNA, 15 bp, Homo sapiens
ggggttgctagaagg

SEQ ID NO: 2082616 - DNA, 15 bp, Homo sapiens
gggttgctagaagga

SEQ ID NO: 2082617 - DNA, 15 bp, Homo sapiens
ggttgctagaaggaa

SEQ ID NO: 2082618 - DNA, 15 bp, Homo sapiens
gttgctagaaggaaa

SEQ ID NO: 2082619 - DNA, 15 bp, Homo sapiens
ttgctagaaggaaaa

SEQ ID NO: 2082620 - DNA, 15 bp, Homo sapiens
tgctagaaggaaaaa

SEQ ID NO: 2082621 - DNA, 15 bp, Homo sapiens
gctagaaggaaaaac

SEQ ID NO: 2082622 - DNA, 15 bp, Homo sapiens
ctagaaggaaaaaca

SEQ ID NO: 2082623 - DNA, 15 bp, Homo sapiens
tagaaggaaaaacag

SEQ ID NO: 2082624 - DNA, 15 bp, Homo sapiens
agaaggaaaaacagg

SEQ ID NO: 2082625 - DNA, 15 bp, Homo sapiens
gaaggaaaaacaggt

SEQ ID NO: 2082626 - DNA, 15 bp, Homo sapiens
aaggaaaaacaggtg

SEQ ID NO: 2082627 - DNA, 15 bp, Homo sapiens
aggaaaaacaggtgt

SEQ ID NO: 2082628 - DNA, 15 bp, Homo sapiens
ggaaaaacaggtgtg

SEQ ID NO: 2082629 - DNA, 15 bp, Homo sapiens
gaaaaacaggtgtga

SEQ ID NO: 2082630 - DNA, 15 bp, Homo sapiens
aaaaacaggtgtgac

SEQ ID NO: 2082631 - DNA, 15 bp, Homo sapiens
aaaacaggtgtgacc

SEQ ID NO: 2082632 - DNA, 15 bp, Homo sapiens
aaacaggtgtgacct

SEQ ID NO: 2082633 - DNA, 15 bp, Homo sapiens
aacaggtgtgacctg

SEQ ID NO: 2082634 - DNA, 15 bp, Homo sapiens
acaggtgtgacctga

SEQ ID NO: 2082635 - DNA, 15 bp, Homo sapiens
caggtgtgacctgat

SEQ ID NO: 2082636 - DNA, 15 bp, Homo sapiens
aggtgtgacctgatc

SEQ ID NO: 2082637 - DNA, 15 bp, Homo sapiens
ggtgtgacctgatcc

SEQ ID NO: 2082638 - DNA, 15 bp, Homo sapiens
gtgtgacctgatcct

SEQ ID NO: 2082639 - DNA, 15 bp, Homo sapiens
tgtgacctgatcctg

SEQ ID NO: 2082640 - DNA, 15 bp, Homo sapiens
gtgacctgatcctgc

SEQ ID NO: 2082641 - DNA, 15 bp, Homo sapiens
tgacctgatcctgcc

SEQ ID NO: 2082642 - DNA, 15 bp, Homo sapiens
gacctgatcctgccc

SEQ ID NO: 2082643 - DNA, 15 bp, Homo sapiens
acctgatcctgcccc

SEQ ID NO: 2082644 - DNA, 15 bp, Homo sapiens
cctgatcctgcccct

SEQ ID NO: 2082645 - DNA, 15 bp, Homo sapiens
ctgatcctgcccctt

SEQ ID NO: 2082646 - DNA, 15 bp, Homo sapiens
tgatcctgccccttc

SEQ ID NO: 2082647 - DNA, 15 bp, Homo sapiens
gatcctgccccttcc

SEQ ID NO: 2082648 - DNA, 15 bp, Homo sapiens
atcctgccccttcct

SEQ ID NO: 2082649 - DNA, 15 bp, Homo sapiens
tcctgccccttcctt

SEQ ID NO: 2082650 - DNA, 15 bp, Homo sapiens
cctgccccttccttc

SEQ ID NO: 2082651 - DNA, 15 bp, Homo sapiens
ctgccccttccttct

SEQ ID NO: 2082652 - DNA, 15 bp, Homo sapiens
tgccccttccttctt

SEQ ID NO: 2082653 - DNA, 15 bp, Homo sapiens
gccccttccttcttg

SEQ ID NO: 2082654 - DNA, 15 bp, Homo sapiens
ccccttccttcttgc

SEQ ID NO: 2082655 - DNA, 15 bp, Homo sapiens
cccttccttcttgcc

SEQ ID NO: 2082656 - DNA, 15 bp, Homo sapiens
ccttccttcttgcct

SEQ ID NO: 2082657 - DNA, 15 bp, Homo sapiens
cttccttcttgcctg

SEQ ID NO: 2082658 - DNA, 15 bp, Homo sapiens
ttccttcttgcctgt

SEQ ID NO: 2082659 - DNA, 15 bp, Homo sapiens
tccttcttgcctgta

SEQ ID NO: 2082660 - DNA, 15 bp, Homo sapiens
ccttcttgcctgtag

SEQ ID NO: 2082661 - DNA, 15 bp, Homo sapiens
cttcttgcctgtagc

SEQ ID NO: 2082662 - DNA, 15 bp, Homo sapiens
ttcttgcctgtagct

SEQ ID NO: 2082663 - DNA, 15 bp, Homo sapiens
tcttgcctgtagctc

SEQ ID NO: 2082664 - DNA, 15 bp, Homo sapiens
cttgcctgtagctcc

SEQ ID NO: 2082665 - DNA, 15 bp, Homo sapiens
ttgcctgtagctcct

SEQ ID NO: 2082666 - DNA, 15 bp, Homo sapiens
tgcctgtagctcctg

SEQ ID NO: 2082667 - DNA, 15 bp, Homo sapiens
gcctgtagctcctgc

SEQ ID NO: 2082668 - DNA, 15 bp, Homo sapiens
cctgtagctcctgct

SEQ ID NO: 2082669 - DNA, 15 bp, Homo sapiens
ctgtagctcctgctg

SEQ ID NO: 2082670 - DNA, 15 bp, Homo sapiens
tgtagctcctgctgg

SEQ ID NO: 2082671 - DNA, 15 bp, Homo sapiens
gtagctcctgctgga

SEQ ID NO: 2082672 - DNA, 15 bp, Homo sapiens
tagctcctgctggag

SEQ ID NO: 2082673 - DNA, 15 bp, Homo sapiens
agctcctgctggagg

SEQ ID NO: 2082674 - DNA, 15 bp, Homo sapiens
gctcctgctggagga

SEQ ID NO: 2082675 - DNA, 15 bp, Homo sapiens
ctcctgctggaggaa

SEQ ID NO: 2082676 - DNA, 15 bp, Homo sapiens
tcctgctggaggaag

SEQ ID NO: 2082677 - DNA, 15 bp, Homo sapiens
cctgctggaggaaga

SEQ ID NO: 2082678 - DNA, 15 bp, Homo sapiens
ctgctggaggaagag

SEQ ID NO: 2082679 - DNA, 15 bp, Homo sapiens
tgctggaggaagagg

SEQ ID NO: 2082680 - DNA, 15 bp, Homo sapiens
gctggaggaagagga

SEQ ID NO: 2082681 - DNA, 15 bp, Homo sapiens
ctggaggaagaggat

SEQ ID NO: 2082682 - DNA, 15 bp, Homo sapiens
tggaggaagaggatt

SEQ ID NO: 2082683 - DNA, 15 bp, Homo sapiens
ggaggaagaggattc

SEQ ID NO: 2082684 - DNA, 15 bp, Homo sapiens
gaggaagaggattcc

SEQ ID NO: 2082685 - DNA, 15 bp, Homo sapiens
aggaagaggattcca

SEQ ID NO: 2082686 - DNA, 15 bp, Homo sapiens
gaagaggattccagc

SEQ ID NO: 2082687 - DNA, 15 bp, Homo sapiens
aagaggattccagcc

SEQ ID NO: 2082688 - DNA, 15 bp, Homo sapiens
agaggattccagcct

SEQ ID NO: 2082689 - DNA, 15 bp, Homo sapiens
gaggattccagcctg

SEQ ID NO: 2082690 - DNA, 15 bp, Homo sapiens
aggattccagcctgt

SEQ ID NO: 2082691 - DNA, 15 bp, Homo sapiens
ggattccagcctgtt

SEQ ID NO: 2082692 - DNA, 15 bp, Homo sapiens
gattccagcctgttg

SEQ ID NO: 2082693 - DNA, 15 bp, Homo sapiens
attccagcctgttgg

SEQ ID NO: 2082694 - DNA, 15 bp, Homo sapiens
ttccagcctgttggc

SEQ ID NO: 2082695 - DNA, 15 bp, Homo sapiens
tccagcctgttggcc

SEQ ID NO: 2082696 - DNA, 15 bp, Homo sapiens
ccagcctgttggccc

SEQ ID NO: 2082697 - DNA, 15 bp, Homo sapiens
cagcctgttggcccc

SEQ ID NO: 2082698 - DNA, 15 bp, Homo sapiens
agcctgttggcccct

SEQ ID NO: 2082699 - DNA, 15 bp, Homo sapiens
gcctgttggcccctg

SEQ ID NO: 2082700 - DNA, 15 bp, Homo sapiens
cctgttggcccctgt

SEQ ID NO: 2082701 - DNA, 15 bp, Homo sapiens
ctgttggcccctgtc

SEQ ID NO: 2082702 - DNA, 15 bp, Homo sapiens
tgttggcccctgtct

SEQ ID NO: 2082703 - DNA, 15 bp, Homo sapiens
gttggcccctgtctt

SEQ ID NO: 2082704 - DNA, 15 bp, Homo sapiens
ttggcccctgtcttc

SEQ ID NO: 2082705 - DNA, 15 bp, Homo sapiens
tggcccctgtcttcg

SEQ ID NO: 2082706 - DNA, 15 bp, Homo sapiens
ggcccctgtcttcga

SEQ ID NO: 2082707 - DNA, 15 bp, Homo sapiens
gcccctgtcttcgac

SEQ ID NO: 2082708 - DNA, 15 bp, Homo sapiens
cccctgtcttcgacc

SEQ ID NO: 2082709 - DNA, 15 bp, Homo sapiens
ccctgtcttcgaccc

SEQ ID NO: 2082710 - DNA, 15 bp, Homo sapiens
cctgtcttcgaccca

SEQ ID NO: 2082711 - DNA, 15 bp, Homo sapiens
ctgtcttcgacccag

SEQ ID NO: 2082712 - DNA, 15 bp, Homo sapiens
tgtcttcgacccagc

SEQ ID NO: 2082713 - DNA, 15 bp, Homo sapiens
gtcttcgacccagcc

SEQ ID NO: 2082714 - DNA, 15 bp, Homo sapiens
tcttcgacccagccc

SEQ ID NO: 2082715 - DNA, 15 bp, Homo sapiens
cttcgacccagccca

SEQ ID NO: 2082716 - DNA, 15 bp, Homo sapiens
ttcgacccagcccag

SEQ ID NO: 2082717 - DNA, 15 bp, Homo sapiens
tcgacccagcccagc

SEQ ID NO: 2082718 - DNA, 15 bp, Homo sapiens
cgacccagcccagcc

SEQ ID NO: 2082719 - DNA, 15 bp, Homo sapiens
gacccagcccagccc

SEQ ID NO: 2082720 - DNA, 15 bp, Homo sapiens
acccagcccagcccc

SEQ ID NO: 2082721 - DNA, 15 bp, Homo sapiens
cccagcccagccccc

SEQ ID NO: 2082722 - DNA, 15 bp, Homo sapiens
ccagcccagccccct

SEQ ID NO: 2082723 - DNA, 15 bp, Homo sapiens
cagcccagccccctc

SEQ ID NO: 2082724 - DNA, 15 bp, Homo sapiens
agcccagccccctct

SEQ ID NO: 2082725 - DNA, 15 bp, Homo sapiens
gcccagccccctctg

SEQ ID NO: 2082726 - DNA, 15 bp, Homo sapiens
cccagccccctctgt

SEQ ID NO: 2082727 - DNA, 15 bp, Homo sapiens
ccagccccctctgtt

SEQ ID NO: 2082728 - DNA, 15 bp, Homo sapiens
cagccccctctgttg

SEQ ID NO: 2082729 - DNA, 15 bp, Homo sapiens
agccccctctgttgc

SEQ ID NO: 2082730 - DNA, 15 bp, Homo sapiens
gccccctctgttgct

SEQ ID NO: 2082731 - DNA, 15 bp, Homo sapiens
ccccctctgttgctc

SEQ ID NO: 2082732 - DNA, 15 bp, Homo sapiens
cccctctgttgctct

SEQ ID NO: 2082733 - DNA, 15 bp, Homo sapiens
ccctctgttgctctg

SEQ ID NO: 2082734 - DNA, 15 bp, Homo sapiens
cctctgttgctctgc

SEQ ID NO: 2082735 - DNA, 15 bp, Homo sapiens
ctctgttgctctgca

SEQ ID NO: 2082736 - DNA, 15 bp, Homo sapiens
tctgttgctctgcat

SEQ ID NO: 2082737 - DNA, 15 bp, Homo sapiens
ctgttgctctgcata

SEQ ID NO: 2082738 - DNA, 15 bp, Homo sapiens
tgttgctctgcatat

SEQ ID NO: 2082739 - DNA, 15 bp, Homo sapiens
gttgctctgcatatt

SEQ ID NO: 2082740 - DNA, 15 bp, Homo sapiens
ttgctctgcatattg

SEQ ID NO: 2082741 - DNA, 15 bp, Homo sapiens
tgctctgcatattgg

SEQ ID NO: 2082742 - DNA, 15 bp, Homo sapiens
gctctgcatattggc

SEQ ID NO: 2082743 - DNA, 15 bp, Homo sapiens
ctctgcatattggcc

SEQ ID NO: 2082744 - DNA, 15 bp, Homo sapiens
tctgcatattggccg

SEQ ID NO: 2082745 - DNA, 15 bp, Homo sapiens
ctgcatattggccgt

SEQ ID NO: 2082746 - DNA, 15 bp, Homo sapiens
tgcatattggccgtc

SEQ ID NO: 2082747 - DNA, 15 bp, Homo sapiens
gcatattggccgtct

SEQ ID NO: 2082748 - DNA, 15 bp, Homo sapiens
catattggccgtctg

SEQ ID NO: 2082749 - DNA, 15 bp, Homo sapiens
atattggccgtctgg

SEQ ID NO: 2082750 - DNA, 15 bp, Homo sapiens
tattggccgtctggg

SEQ ID NO: 2082751 - DNA, 15 bp, Homo sapiens
attggccgtctgggg

SEQ ID NO: 2082752 - DNA, 15 bp, Homo sapiens
ttggccgtctggggt

SEQ ID NO: 2082753 - DNA, 15 bp, Homo sapiens
tggccgtctggggtc

SEQ ID NO: 2082754 - DNA, 15 bp, Homo sapiens
ggccgtctggggtcc

SEQ ID NO: 2082755 - DNA, 15 bp, Homo sapiens
gccgtctggggtcca

SEQ ID NO: 2082756 - DNA, 15 bp, Homo sapiens
ccgtctggggtccat

SEQ ID NO: 2082757 - DNA, 15 bp, Homo sapiens
cgtctggggtccatc

SEQ ID NO: 2082758 - DNA, 15 bp, Homo sapiens
gtctggggtccatct

SEQ ID NO: 2082759 - DNA, 15 bp, Homo sapiens
tctggggtccatctc

SEQ ID NO: 2082760 - DNA, 15 bp, Homo sapiens
ctggggtccatctcc

SEQ ID NO: 2082761 - DNA, 15 bp, Homo sapiens
tggggtccatctccc

SEQ ID NO: 2082762 - DNA, 15 bp, Homo sapiens
ggggtccatctccct

SEQ ID NO: 2082763 - DNA, 15 bp, Homo sapiens
gggtccatctccctc

SEQ ID NO: 2082764 - DNA, 15 bp, Homo sapiens
ggtccatctccctcc

SEQ ID NO: 2082765 - DNA, 15 bp, Homo sapiens
gtccatctccctcct

SEQ ID NO: 2082766 - DNA, 15 bp, Homo sapiens
tccatctccctcctg

SEQ ID NO: 2082767 - DNA, 15 bp, Homo sapiens
ccatctccctcctga

SEQ ID NO: 2082768 - DNA, 15 bp, Homo sapiens
catctccctcctgag

SEQ ID NO: 2082769 - DNA, 15 bp, Homo sapiens
atctccctcctgagc

SEQ ID NO: 2082770 - DNA, 15 bp, Homo sapiens
tctccctcctgagct

SEQ ID NO: 2082771 - DNA, 15 bp, Homo sapiens
ctccctcctgagcta

SEQ ID NO: 2082772 - DNA, 15 bp, Homo sapiens
tccctcctgagctag

SEQ ID NO: 2082773 - DNA, 15 bp, Homo sapiens
ccctcctgagctaga

SEQ ID NO: 2082774 - DNA, 15 bp, Homo sapiens
cctcctgagctagaa

SEQ ID NO: 2082775 - DNA, 15 bp, Homo sapiens
ctcctgagctagaaa

SEQ ID NO: 2082776 - DNA, 15 bp, Homo sapiens
tcctgagctagaaac

SEQ ID NO: 2082777 - DNA, 15 bp, Homo sapiens
cctgagctagaaacc

SEQ ID NO: 2082778 - DNA, 15 bp, Homo sapiens
ctgagctagaaaccc

SEQ ID NO: 2082779 - DNA, 15 bp, Homo sapiens
tgagctagaaaccca

SEQ ID NO: 2082780 - DNA, 15 bp, Homo sapiens
gagctagaaacccag

SEQ ID NO: 2082781 - DNA, 15 bp, Homo sapiens
agctagaaacccaga

SEQ ID NO: 2082782 - DNA, 15 bp, Homo sapiens
gctagaaacccagag

SEQ ID NO: 2082783 - DNA, 15 bp, Homo sapiens
ctagaaacccagaga

SEQ ID NO: 2082784 - DNA, 15 bp, Homo sapiens
tagaaacccagagat

SEQ ID NO: 2082785 - DNA, 15 bp, Homo sapiens
agaaacccagagatg

SEQ ID NO: 2082786 - DNA, 15 bp, Homo sapiens
gaaacccagagatgg

SEQ ID NO: 2082787 - DNA, 15 bp, Homo sapiens
aaacccagagatgga

SEQ ID NO: 2082788 - DNA, 15 bp, Homo sapiens
aacccagagatggag

SEQ ID NO: 2082789 - DNA, 15 bp, Homo sapiens
acccagagatggagg

SEQ ID NO: 2082790 - DNA, 15 bp, Homo sapiens
cccagagatggaggc

SEQ ID NO: 2082791 - DNA, 15 bp, Homo sapiens
ccagagatggaggct

SEQ ID NO: 2082792 - DNA, 15 bp, Homo sapiens
cagagatggaggctg

SEQ ID NO: 2082793 - DNA, 15 bp, Homo sapiens
agagatggaggctgt

SEQ ID NO: 2082794 - DNA, 15 bp, Homo sapiens
gagatggaggctgtc

SEQ ID NO: 2082795 - DNA, 15 bp, Homo sapiens
agatggaggctgtct

SEQ ID NO: 2082796 - DNA, 15 bp, Homo sapiens
gatggaggctgtctt

SEQ ID NO: 2082797 - DNA, 15 bp, Homo sapiens
atggaggctgtcttg

SEQ ID NO: 2082798 - DNA, 15 bp, Homo sapiens
tggaggctgtcttgc

SEQ ID NO: 2082799 - DNA, 15 bp, Homo sapiens
ggaggctgtcttgct

SEQ ID NO: 2082800 - DNA, 15 bp, Homo sapiens
gaggctgtcttgcta

SEQ ID NO: 2082801 - DNA, 15 bp, Homo sapiens
aggctgtcttgctat

SEQ ID NO: 2082802 - DNA, 15 bp, Homo sapiens
ggctgtcttgctatg

SEQ ID NO: 2082803 - DNA, 15 bp, Homo sapiens
gctgtcttgctatgg

SEQ ID NO: 2082804 - DNA, 15 bp, Homo sapiens
ctgtcttgctatggc

SEQ ID NO: 2082805 - DNA, 15 bp, Homo sapiens
tgtcttgctatggca

SEQ ID NO: 2082806 - DNA, 15 bp, Homo sapiens
gtcttgctatggcag

SEQ ID NO: 2082807 - DNA, 15 bp, Homo sapiens
tcttgctatggcagg

SEQ ID NO: 2082808 - DNA, 15 bp, Homo sapiens
cttgctatggcaggg

SEQ ID NO: 2082809 - DNA, 15 bp, Homo sapiens
ttgctatggcaggga

SEQ ID NO: 2082810 - DNA, 15 bp, Homo sapiens
tgctatggcagggag

SEQ ID NO: 2082811 - DNA, 15 bp, Homo sapiens
gctatggcagggagg

SEQ ID NO: 2082812 - DNA, 15 bp, Homo sapiens
ctatggcagggaggt

SEQ ID NO: 2082813 - DNA, 15 bp, Homo sapiens
tatggcagggaggtg

SEQ ID NO: 2082814 - DNA, 15 bp, Homo sapiens
atggcagggaggtga

SEQ ID NO: 2082815 - DNA, 15 bp, Homo sapiens
tggcagggaggtgac

SEQ ID NO: 2082816 - DNA, 15 bp, Homo sapiens
ggcagggaggtgaca

SEQ ID NO: 2082817 - DNA, 15 bp, Homo sapiens
gcagggaggtgacag

SEQ ID NO: 2082818 - DNA, 15 bp, Homo sapiens
cagggaggtgacagc

SEQ ID NO: 2082819 - DNA, 15 bp, Homo sapiens
agggaggtgacagcc

SEQ ID NO: 2082820 - DNA, 15 bp, Homo sapiens
gggaggtgacagcct

SEQ ID NO: 2082821 - DNA, 15 bp, Homo sapiens
ggaggtgacagcctg

SEQ ID NO: 2082822 - DNA, 15 bp, Homo sapiens
gaggtgacagcctgc

SEQ ID NO: 2082823 - DNA, 15 bp, Homo sapiens
aggtgacagcctgct

SEQ ID NO: 2082824 - DNA, 15 bp, Homo sapiens
ggtgacagcctgctg

SEQ ID NO: 2082825 - DNA, 15 bp, Homo sapiens
gtgacagcctgctgg

SEQ ID NO: 2082826 - DNA, 15 bp, Homo sapiens
tgacagcctgctggc

SEQ ID NO: 2082827 - DNA, 15 bp, Homo sapiens
gacagcctgctggca

SEQ ID NO: 2082828 - DNA, 15 bp, Homo sapiens
acagcctgctggcac

SEQ ID NO: 2082829 - DNA, 15 bp, Homo sapiens
cagcctgctggcact

SEQ ID NO: 2082830 - DNA, 15 bp, Homo sapiens
agcctgctggcactg

SEQ ID NO: 2082831 - DNA, 15 bp, Homo sapiens
gcctgctggcactgt

SEQ ID NO: 2082832 - DNA, 15 bp, Homo sapiens
cctgctggcactgta

SEQ ID NO: 2082833 - DNA, 15 bp, Homo sapiens
ctgctggcactgtat

SEQ ID NO: 2082834 - DNA, 15 bp, Homo sapiens
tgctggcactgtata

SEQ ID NO: 2082835 - DNA, 15 bp, Homo sapiens
gctggcactgtatat

SEQ ID NO: 2082836 - DNA, 15 bp, Homo sapiens
ctggcactgtatatt

SEQ ID NO: 2082837 - DNA, 15 bp, Homo sapiens
tggcactgtatattt

SEQ ID NO: 2082838 - DNA, 15 bp, Homo sapiens
ggcactgtatattta

SEQ ID NO: 2082839 - DNA, 15 bp, Homo sapiens
gcactgtatatttag

SEQ ID NO: 2082840 - DNA, 15 bp, Homo sapiens
cactgtatatttagt

SEQ ID NO: 2082841 - DNA, 15 bp, Homo sapiens
actgtatatttagtg

SEQ ID NO: 2082842 - DNA, 15 bp, Homo sapiens
ctgtatatttagtgt

SEQ ID NO: 2082843 - DNA, 15 bp, Homo sapiens
tgtatatttagtgtc

SEQ ID NO: 2082844 - DNA, 15 bp, Homo sapiens
gtatatttagtgtct

SEQ ID NO: 2082845 - DNA, 15 bp, Homo sapiens
tatatttagtgtctt

SEQ ID NO: 2082846 - DNA, 15 bp, Homo sapiens
atatttagtgtctta

SEQ ID NO: 2082847 - DNA, 15 bp, Homo sapiens
tatttagtgtcttac

SEQ ID NO: 2082848 - DNA, 15 bp, Homo sapiens
atttagtgtcttact

SEQ ID NO: 2082849 - DNA, 15 bp, Homo sapiens
tttagtgtcttactt

SEQ ID NO: 2082850 - DNA, 15 bp, Homo sapiens
ttagtgtcttactta

SEQ ID NO: 2082851 - DNA, 15 bp, Homo sapiens
tagtgtcttacttaa

SEQ ID NO: 2082852 - DNA, 15 bp, Homo sapiens
agtgtcttacttaag

SEQ ID NO: 2082853 - DNA, 15 bp, Homo sapiens
gtgtcttacttaagg

SEQ ID NO: 2082854 - DNA, 15 bp, Homo sapiens
tgtcttacttaagga

SEQ ID NO: 2082855 - DNA, 15 bp, Homo sapiens
gtcttacttaaggat

SEQ ID NO: 2082856 - DNA, 15 bp, Homo sapiens
tcttacttaaggatt

SEQ ID NO: 2082857 - DNA, 15 bp, Homo sapiens
cttacttaaggattt

SEQ ID NO: 2082858 - DNA, 15 bp, Homo sapiens
ttacttaaggattta

SEQ ID NO: 2082859 - DNA, 15 bp, Homo sapiens
tacttaaggatttat

SEQ ID NO: 2082860 - DNA, 15 bp, Homo sapiens
acttaaggatttatg

SEQ ID NO: 2082861 - DNA, 15 bp, Homo sapiens
cttaaggatttatgc

SEQ ID NO: 2082862 - DNA, 15 bp, Homo sapiens
ttaaggatttatgca

SEQ ID NO: 2082863 - DNA, 15 bp, Homo sapiens
taaggatttatgcat

SEQ ID NO: 2082864 - DNA, 15 bp, Homo sapiens
aaggatttatgcatg

SEQ ID NO: 2082865 - DNA, 15 bp, Homo sapiens
aggatttatgcatgg

SEQ ID NO: 2082866 - DNA, 15 bp, Homo sapiens
ggatttatgcatgga

SEQ ID NO: 2082867 - DNA, 15 bp, Homo sapiens
gatttatgcatggaa

SEQ ID NO: 2082868 - DNA, 15 bp, Homo sapiens
atttatgcatggaat

SEQ ID NO: 2082869 - DNA, 15 bp, Homo sapiens
tttatgcatggaatt

SEQ ID NO: 2082870 - DNA, 15 bp, Homo sapiens
ttatgcatggaattt

SEQ ID NO: 2082871 - DNA, 15 bp, Homo sapiens
tatgcatggaattta

SEQ ID NO: 2082872 - DNA, 15 bp, Homo sapiens
atgcatggaatttaa

SEQ ID NO: 2082873 - DNA, 15 bp, Homo sapiens
tgcatggaatttaat

SEQ ID NO: 2082874 - DNA, 15 bp, Homo sapiens
gcatggaatttaatg

SEQ ID NO: 2082875 - DNA, 15 bp, Homo sapiens
catggaatttaatgt

SEQ ID NO: 2082876 - DNA, 15 bp, Homo sapiens
atggaatttaatgta

SEQ ID NO: 2082877 - DNA, 15 bp, Homo sapiens
tggaatttaatgtag

SEQ ID NO: 2082878 - DNA, 15 bp, Homo sapiens
ggaatttaatgtagt

SEQ ID NO: 2082879 - DNA, 15 bp, Homo sapiens
gaatttaatgtagta

SEQ ID NO: 2082880 - DNA, 15 bp, Homo sapiens
aatttaatgtagtac

SEQ ID NO: 2082881 - DNA, 15 bp, Homo sapiens
atttaatgtagtaca

SEQ ID NO: 2082882 - DNA, 15 bp, Homo sapiens
tttaatgtagtacaa

SEQ ID NO: 2082883 - DNA, 15 bp, Homo sapiens
ttaatgtagtacaag

SEQ ID NO: 2082884 - DNA, 15 bp, Homo sapiens
taatgtagtacaagc

SEQ ID NO: 2082885 - DNA, 15 bp, Homo sapiens
aatgtagtacaagct

SEQ ID NO: 2082886 - DNA, 15 bp, Homo sapiens
atgtagtacaagctt

SEQ ID NO: 2082887 - DNA, 15 bp, Homo sapiens
tgtagtacaagcttc

SEQ ID NO: 2082888 - DNA, 15 bp, Homo sapiens
gtagtacaagcttcg

SEQ ID NO: 2082889 - DNA, 15 bp, Homo sapiens
tagtacaagcttcgg

SEQ ID NO: 2082890 - DNA, 15 bp, Homo sapiens
agtacaagcttcggg

SEQ ID NO: 2082891 - DNA, 15 bp, Homo sapiens
gtacaagcttcgggc

SEQ ID NO: 2082892 - DNA, 15 bp, Homo sapiens
tacaagcttcgggct

SEQ ID NO: 2082893 - DNA, 15 bp, Homo sapiens
acaagcttcgggctt

SEQ ID NO: 2082894 - DNA, 15 bp, Homo sapiens
caagcttcgggcttt

SEQ ID NO: 2082895 - DNA, 15 bp, Homo sapiens
aagcttcgggctttt

SEQ ID NO: 2082896 - DNA, 15 bp, Homo sapiens
agcttcgggcttttt

SEQ ID NO: 2082897 - DNA, 15 bp, Homo sapiens
gcttcgggctttttt

SEQ ID NO: 2082898 - DNA, 15 bp, Homo sapiens
cttcgggcttttttg

SEQ ID NO: 2082899 - DNA, 15 bp, Homo sapiens
ttcgggcttttttgt

SEQ ID NO: 2082900 - DNA, 15 bp, Homo sapiens
tcgggcttttttgtt

SEQ ID NO: 2082901 - DNA, 15 bp, Homo sapiens
cgggcttttttgttt

SEQ ID NO: 2082902 - DNA, 15 bp, Homo sapiens
gggcttttttgtttg

SEQ ID NO: 2082903 - DNA, 15 bp, Homo sapiens
ggcttttttgtttgt

SEQ ID NO: 2082904 - DNA, 15 bp, Homo sapiens
gcttttttgtttgtt

SEQ ID NO: 2082905 - DNA, 15 bp, Homo sapiens
ttgtttgtttgttta

SEQ ID NO: 2082906 - DNA, 15 bp, Homo sapiens
tgtttgtttgtttaa

SEQ ID NO: 2082907 - DNA, 15 bp, Homo sapiens
gtttgtttgtttaag

SEQ ID NO: 2082908 - DNA, 15 bp, Homo sapiens
tttgtttgtttaagc

SEQ ID NO: 2082909 - DNA, 15 bp, Homo sapiens
ttgtttgtttaagct

SEQ ID NO: 2082910 - DNA, 15 bp, Homo sapiens
tgtttgtttaagctt

SEQ ID NO: 2082911 - DNA, 15 bp, Homo sapiens
gtttgtttaagcttt

SEQ ID NO: 2082912 - DNA, 15 bp, Homo sapiens
tttgtttaagctttc

SEQ ID NO: 2082913 - DNA, 15 bp, Homo sapiens
ttgtttaagctttca

SEQ ID NO: 2082914 - DNA, 15 bp, Homo sapiens
tgtttaagctttcag

SEQ ID NO: 2082915 - DNA, 15 bp, Homo sapiens
gtttaagctttcagg

SEQ ID NO: 2082916 - DNA, 15 bp, Homo sapiens
tttaagctttcaggt

SEQ ID NO: 2082917 - DNA, 15 bp, Homo sapiens
ttaagctttcaggtg

SEQ ID NO: 2082918 - DNA, 15 bp, Homo sapiens
taagctttcaggtgc

SEQ ID NO: 2082919 - DNA, 15 bp, Homo sapiens
aagctttcaggtgct

SEQ ID NO: 2082920 - DNA, 15 bp, Homo sapiens
agctttcaggtgctt

SEQ ID NO: 2082921 - DNA, 15 bp, Homo sapiens
gctttcaggtgcttc

SEQ ID NO: 2082922 - DNA, 15 bp, Homo sapiens
ctttcaggtgcttca

SEQ ID NO: 2082923 - DNA, 15 bp, Homo sapiens
tttcaggtgcttcat

SEQ ID NO: 2082924 - DNA, 15 bp, Homo sapiens
ttcaggtgcttcatt

SEQ ID NO: 2082925 - DNA, 15 bp, Homo sapiens
tcaggtgcttcatta

SEQ ID NO: 2082926 - DNA, 15 bp, Homo sapiens
caggtgcttcattag

SEQ ID NO: 2082927 - DNA, 15 bp, Homo sapiens
aggtgcttcattagc

SEQ ID NO: 2082928 - DNA, 15 bp, Homo sapiens
ggtgcttcattagct

SEQ ID NO: 2082929 - DNA, 15 bp, Homo sapiens
gtgcttcattagctt

SEQ ID NO: 2082930 - DNA, 15 bp, Homo sapiens
tgcttcattagcttt

SEQ ID NO: 2082931 - DNA, 15 bp, Homo sapiens
gcttcattagctttc

SEQ ID NO: 2082932 - DNA, 15 bp, Homo sapiens
cttcattagctttca

SEQ ID NO: 2082933 - DNA, 15 bp, Homo sapiens
ttcattagctttcag

SEQ ID NO: 2082934 - DNA, 15 bp, Homo sapiens
tcattagctttcagt

SEQ ID NO: 2082935 - DNA, 15 bp, Homo sapiens
cattagctttcagtt

SEQ ID NO: 2082936 - DNA, 15 bp, Homo sapiens
attagctttcagttc

SEQ ID NO: 2082937 - DNA, 15 bp, Homo sapiens
ttagctttcagttcc

SEQ ID NO: 2082938 - DNA, 15 bp, Homo sapiens
tagctttcagttcct

SEQ ID NO: 2082939 - DNA, 15 bp, Homo sapiens
agctttcagttcctt

SEQ ID NO: 2082940 - DNA, 15 bp, Homo sapiens
gctttcagttccttt

SEQ ID NO: 2082941 - DNA, 15 bp, Homo sapiens
ctttcagttcctttg

SEQ ID NO: 2082942 - DNA, 15 bp, Homo sapiens
tttcagttcctttgg

SEQ ID NO: 2082943 - DNA, 15 bp, Homo sapiens
ttcagttcctttggt

SEQ ID NO: 2082944 - DNA, 15 bp, Homo sapiens
tcagttcctttggta

SEQ ID NO: 2082945 - DNA, 15 bp, Homo sapiens
cagttcctttggtag

SEQ ID NO: 2082946 - DNA, 15 bp, Homo sapiens
agttcctttggtagt

SEQ ID NO: 2082947 - DNA, 15 bp, Homo sapiens
gttcctttggtagtg

SEQ ID NO: 2082948 - DNA, 15 bp, Homo sapiens
ttcctttggtagtgt

SEQ ID NO: 2082949 - DNA, 15 bp, Homo sapiens
tcctttggtagtgtg

SEQ ID NO: 2082950 - DNA, 15 bp, Homo sapiens
cctttggtagtgtgg

SEQ ID NO: 2082951 - DNA, 15 bp, Homo sapiens
ctttggtagtgtggg

SEQ ID NO: 2082952 - DNA, 15 bp, Homo sapiens
tttggtagtgtgggc

SEQ ID NO: 2082953 - DNA, 15 bp, Homo sapiens
ttggtagtgtgggca

SEQ ID NO: 2082954 - DNA, 15 bp, Homo sapiens
tggtagtgtgggcat

SEQ ID NO: 2082955 - DNA, 15 bp, Homo sapiens
ggtagtgtgggcatt

SEQ ID NO: 2082956 - DNA, 15 bp, Homo sapiens
gtagtgtgggcattt

SEQ ID NO: 2082957 - DNA, 15 bp, Homo sapiens
tagtgtgggcatttc

SEQ ID NO: 2082958 - DNA, 15 bp, Homo sapiens
agtgtgggcatttcc

SEQ ID NO: 2082959 - DNA, 15 bp, Homo sapiens
gtgtgggcatttcct

SEQ ID NO: 2082960 - DNA, 15 bp, Homo sapiens
tgtgggcatttcctt

SEQ ID NO: 2082961 - DNA, 15 bp, Homo sapiens
gtgggcatttccttg

SEQ ID NO: 2082962 - DNA, 15 bp, Homo sapiens
tgggcatttccttgg

SEQ ID NO: 2082963 - DNA, 15 bp, Homo sapiens
gggcatttccttggc

SEQ ID NO: 2082964 - DNA, 15 bp, Homo sapiens
ggcatttccttggct

SEQ ID NO: 2082965 - DNA, 15 bp, Homo sapiens
gcatttccttggctg

SEQ ID NO: 2082966 - DNA, 15 bp, Homo sapiens
catttccttggctga

SEQ ID NO: 2082967 - DNA, 15 bp, Homo sapiens
atttccttggctgac

SEQ ID NO: 2082968 - DNA, 15 bp, Homo sapiens
tttccttggctgaca

SEQ ID NO: 2082969 - DNA, 15 bp, Homo sapiens
ttccttggctgacag

SEQ ID NO: 2082970 - DNA, 15 bp, Homo sapiens
tccttggctgacagt

SEQ ID NO: 2082971 - DNA, 15 bp, Homo sapiens
ccttggctgacagtg

SEQ ID NO: 2082972 - DNA, 15 bp, Homo sapiens
cttggctgacagtgg

SEQ ID NO: 2082973 - DNA, 15 bp, Homo sapiens
ttggctgacagtgga

SEQ ID NO: 2082974 - DNA, 15 bp, Homo sapiens
tggctgacagtggat

SEQ ID NO: 2082975 - DNA, 15 bp, Homo sapiens
ggctgacagtggata

SEQ ID NO: 2082976 - DNA, 15 bp, Homo sapiens
gctgacagtggatat

SEQ ID NO: 2082977 - DNA, 15 bp, Homo sapiens
ctgacagtggatatt

SEQ ID NO: 2082978 - DNA, 15 bp, Homo sapiens
tgacagtggatattc

SEQ ID NO: 2082979 - DNA, 15 bp, Homo sapiens
gacagtggatattct

SEQ ID NO: 2082980 - DNA, 15 bp, Homo sapiens
acagtggatattctt

SEQ ID NO: 2082981 - DNA, 15 bp, Homo sapiens
cagtggatattcttg

SEQ ID NO: 2082982 - DNA, 15 bp, Homo sapiens
agtggatattcttgt

SEQ ID NO: 2082983 - DNA, 15 bp, Homo sapiens
gtggatattcttgta

SEQ ID NO: 2082984 - DNA, 15 bp, Homo sapiens
tggatattcttgtac

SEQ ID NO: 2082985 - DNA, 15 bp, Homo sapiens
ggatattcttgtacc

SEQ ID NO: 2082986 - DNA, 15 bp, Homo sapiens
gatattcttgtaccc

SEQ ID NO: 2082987 - DNA, 15 bp, Homo sapiens
atattcttgtaccct

SEQ ID NO: 2082988 - DNA, 15 bp, Homo sapiens
tattcttgtaccctt

SEQ ID NO: 2082989 - DNA, 15 bp, Homo sapiens
attcttgtacccttc

SEQ ID NO: 2082990 - DNA, 15 bp, Homo sapiens
ttcttgtacccttct

SEQ ID NO: 2082991 - DNA, 15 bp, Homo sapiens
tcttgtacccttctt

SEQ ID NO: 2082992 - DNA, 15 bp, Homo sapiens
cttgtacccttcttg

SEQ ID NO: 2082993 - DNA, 15 bp, Homo sapiens
ttgtacccttcttgg

SEQ ID NO: 2082994 - DNA, 15 bp, Homo sapiens
tgtacccttcttggg

SEQ ID NO: 2082995 - DNA, 15 bp, Homo sapiens
gtacccttcttgggt

SEQ ID NO: 2082996 - DNA, 15 bp, Homo sapiens
tacccttcttgggtc

SEQ ID NO: 2082997 - DNA, 15 bp, Homo sapiens
acccttcttgggtcc

SEQ ID NO: 2082998 - DNA, 15 bp, Homo sapiens
cccttcttgggtcct

SEQ ID NO: 2082999 - DNA, 15 bp, Homo sapiens
ccttcttgggtcctg

SEQ ID NO: 2083000 - DNA, 15 bp, Homo sapiens
cttcttgggtcctgg

SEQ ID NO: 2083001 - DNA, 15 bp, Homo sapiens
ttcttgggtcctggg

SEQ ID NO: 2083002 - DNA, 15 bp, Homo sapiens
tcttgggtcctggga

SEQ ID NO: 2083003 - DNA, 15 bp, Homo sapiens
cttgggtcctgggat

SEQ ID NO: 2083004 - DNA, 15 bp, Homo sapiens
ttgggtcctgggatc

SEQ ID NO: 2083005 - DNA, 15 bp, Homo sapiens
tgggtcctgggatct

SEQ ID NO: 2083006 - DNA, 15 bp, Homo sapiens
gggtcctgggatctc

SEQ ID NO: 2083007 - DNA, 15 bp, Homo sapiens
ggtcctgggatctct

SEQ ID NO: 2083008 - DNA, 15 bp, Homo sapiens
gtcctgggatctctt

SEQ ID NO: 2083009 - DNA, 15 bp, Homo sapiens
tcctgggatctcttg

SEQ ID NO: 2083010 - DNA, 15 bp, Homo sapiens
cctgggatctcttga

SEQ ID NO: 2083011 - DNA, 15 bp, Homo sapiens
ctgggatctcttgaa

SEQ ID NO: 2083012 - DNA, 15 bp, Homo sapiens
tgggatctcttgaaa

SEQ ID NO: 2083013 - DNA, 15 bp, Homo sapiens
gggatctcttgaaat

SEQ ID NO: 2083014 - DNA, 15 bp, Homo sapiens
ggatctcttgaaatc

SEQ ID NO: 2083015 - DNA, 15 bp, Homo sapiens
gatctcttgaaatcc

SEQ ID NO: 2083016 - DNA, 15 bp, Homo sapiens
atctcttgaaatccc

SEQ ID NO: 2083017 - DNA, 15 bp, Homo sapiens
tctcttgaaatcccc

SEQ ID NO: 2083018 - DNA, 15 bp, Homo sapiens
ctcttgaaatcccca

SEQ ID NO: 2083019 - DNA, 15 bp, Homo sapiens
tcttgaaatccccaa

SEQ ID NO: 2083020 - DNA, 15 bp, Homo sapiens
cttgaaatccccaat

SEQ ID NO: 2083021 - DNA, 15 bp, Homo sapiens
ttgaaatccccaata

SEQ ID NO: 2083022 - DNA, 15 bp, Homo sapiens
tgaaatccccaataa

SEQ ID NO: 2083023 - DNA, 15 bp, Homo sapiens
gaaatccccaataaa

SEQ ID NO: 2083024 - DNA, 15 bp, Homo sapiens
aaatccccaataaag

SEQ ID NO: 2083025 - DNA, 15 bp, Homo sapiens
aatccccaataaaga

SEQ ID NO: 2083026 - DNA, 15 bp, Homo sapiens
atccccaataaagag

SEQ ID NO: 2083027 - DNA, 15 bp, Homo sapiens
tccccaataaagaga

SEQ ID NO: 2083028 - DNA, 15 bp, Homo sapiens
ccccaataaagagag

SEQ ID NO: 2083029 - DNA, 15 bp, Homo sapiens
cccaataaagagaga

SEQ ID NO: 2083030 - DNA, 15 bp, Homo sapiens
ccaataaagagagag

SEQ ID NO: 2083031 - DNA, 15 bp, Homo sapiens
caataaagagagagt

SEQ ID NO: 2083032 - DNA, 15 bp, Homo sapiens
aataaagagagagtt

SEQ ID NO: 2083033 - DNA, 15 bp, Homo sapiens
ataaagagagagttg

SEQ ID NO: 2083034 - DNA, 15 bp, Homo sapiens
taaagagagagttgt

SEQ ID NO: 2083035 - DNA, 15 bp, Homo sapiens
aaagagagagttgtg

SEQ ID NO: 2083036 - DNA, 15 bp, Homo sapiens
aagagagagttgtgc

SEQ ID NO: 2083037 - DNA, 15 bp, Homo sapiens
agagagagttgtgct

SEQ ID NO: 2083038 - DNA, 15 bp, Homo sapiens
gagagagttgtgcta

SEQ ID NO: 2083039 - DNA, 15 bp, Homo sapiens
agagagttgtgctat

SEQ ID NO: 2083040 - DNA, 15 bp, Homo sapiens
gagagttgtgctatt

SEQ ID NO: 2083041 - DNA, 15 bp, Homo sapiens
agagttgtgctattt

SEQ ID NO: 2083042 - DNA, 15 bp, Homo sapiens
gagttgtgctattta

SEQ ID NO: 2083043 - DNA, 15 bp, Homo sapiens
agttgtgctatttaa

SEQ ID NO: 2083044 - DNA, 15 bp, Homo sapiens
gttgtgctatttaag

SEQ ID NO: 2083045 - DNA, 15 bp, Homo sapiens
ttgtgctatttaagc

SEQ ID NO: 2083046 - DNA, 15 bp, Homo sapiens
tgtgctatttaagct

SEQ ID NO: 2083047 - DNA, 15 bp, Homo sapiens
gtgctatttaagctg

SEQ ID NO: 2083048 - DNA, 15 bp, Homo sapiens
tgctatttaagctga

SEQ ID NO: 2083049 - DNA, 15 bp, Homo sapiens
gctatttaagctgac

SEQ ID NO: 2083050 - DNA, 15 bp, Homo sapiens
ctatttaagctgacc

SEQ ID NO: 2083051 - DNA, 15 bp, Homo sapiens
tatttaagctgacca

SEQ ID NO: 2083052 - DNA, 15 bp, Homo sapiens
atttaagctgaccag

SEQ ID NO: 2083053 - DNA, 15 bp, Homo sapiens
tttaagctgaccagt

SEQ ID NO: 2083054 - DNA, 15 bp, Homo sapiens
ttaagctgaccagta

SEQ ID NO: 2083055 - DNA, 15 bp, Homo sapiens
taagctgaccagtat

SEQ ID NO: 2083056 - DNA, 15 bp, Homo sapiens
aagctgaccagtatc

SEQ ID NO: 2083057 - DNA, 15 bp, Homo sapiens
agctgaccagtatct

SEQ ID NO: 2083058 - DNA, 15 bp, Homo sapiens
gctgaccagtatcta

SEQ ID NO: 2083059 - DNA, 15 bp, Homo sapiens
ctgaccagtatctat

SEQ ID NO: 2083060 - DNA, 15 bp, Homo sapiens
tgaccagtatctata

SEQ ID NO: 2083061 - DNA, 15 bp, Homo sapiens
gaccagtatctataa

SEQ ID NO: 2083062 - DNA, 15 bp, Homo sapiens
accagtatctataaa

SEQ ID NO: 2083063 - DNA, 15 bp, Homo sapiens
ccagtatctataaac

SEQ ID NO: 2083064 - DNA, 15 bp, Homo sapiens
cagtatctataaacg

SEQ ID NO: 2083065 - DNA, 15 bp, Homo sapiens
agtatctataaacgt

SEQ ID NO: 2083066 - DNA, 15 bp, Homo sapiens
gtatctataaacgtg

SEQ ID NO: 2083067 - DNA, 15 bp, Homo sapiens
tatctataaacgtgt

SEQ ID NO: 2083068 - DNA, 15 bp, Homo sapiens
atctataaacgtgtt

SEQ ID NO: 2083069 - DNA, 15 bp, Homo sapiens
tctataaacgtgttt

SEQ ID NO: 2083070 - DNA, 15 bp, Homo sapiens
ctataaacgtgtttg

SEQ ID NO: 2083071 - DNA, 15 bp, Homo sapiens
tataaacgtgtttgc

SEQ ID NO: 2083072 - DNA, 15 bp, Homo sapiens
ataaacgtgtttgca

SEQ ID NO: 2083073 - DNA, 15 bp, Homo sapiens
taaacgtgtttgcat

SEQ ID NO: 2083074 - DNA, 15 bp, Homo sapiens
aaacgtgtttgcatg

SEQ ID NO: 2083075 - DNA, 15 bp, Homo sapiens
aacgtgtttgcatga

SEQ ID NO: 2083076 - DNA, 15 bp, Homo sapiens
acgtgtttgcatgag

SEQ ID NO: 2083077 - DNA, 15 bp, Homo sapiens
cgtgtttgcatgagt

SEQ ID NO: 2083078 - DNA, 15 bp, Homo sapiens
gtgtttgcatgagtt

SEQ ID NO: 2083079 - DNA, 15 bp, Homo sapiens
tgtttgcatgagttt

SEQ ID NO: 2083080 - DNA, 15 bp, Homo sapiens
gtttgcatgagttta

SEQ ID NO: 2083081 - DNA, 15 bp, Homo sapiens
tttgcatgagtttac

SEQ ID NO: 2083082 - DNA, 15 bp, Homo sapiens
ttgcatgagtttaca

SEQ ID NO: 2083083 - DNA, 15 bp, Homo sapiens
tgcatgagtttacat

SEQ ID NO: 2083084 - DNA, 15 bp, Homo sapiens
gcatgagtttacatc

SEQ ID NO: 2083085 - DNA, 15 bp, Homo sapiens
catgagtttacatcc

SEQ ID NO: 2083086 - DNA, 15 bp, Homo sapiens
atgagtttacatccc

SEQ ID NO: 2083087 - DNA, 15 bp, Homo sapiens
tgagtttacatccca

SEQ ID NO: 2083088 - DNA, 15 bp, Homo sapiens
gagtttacatcccag

SEQ ID NO: 2083089 - DNA, 15 bp, Homo sapiens
agtttacatcccagg

SEQ ID NO: 2083090 - DNA, 15 bp, Homo sapiens
gtttacatcccagga

SEQ ID NO: 2083091 - DNA, 15 bp, Homo sapiens
tttacatcccaggat

SEQ ID NO: 2083092 - DNA, 15 bp, Homo sapiens
ttacatcccaggatt

SEQ ID NO: 2083093 - DNA, 15 bp, Homo sapiens
tacatcccaggattc

SEQ ID NO: 2083094 - DNA, 15 bp, Homo sapiens
acatcccaggattcc

SEQ ID NO: 2083095 - DNA, 15 bp, Homo sapiens
catcccaggattcca

SEQ ID NO: 2083096 - DNA, 15 bp, Homo sapiens
atcccaggattccat

SEQ ID NO: 2083097 - DNA, 15 bp, Homo sapiens
tcccaggattccatg

SEQ ID NO: 2083098 - DNA, 15 bp, Homo sapiens
cccaggattccatga

SEQ ID NO: 2083099 - DNA, 15 bp, Homo sapiens
ccaggattccatgat

SEQ ID NO: 2083100 - DNA, 15 bp, Homo sapiens
caggattccatgatt

SEQ ID NO: 2083101 - DNA, 15 bp, Homo sapiens
aggattccatgattc

SEQ ID NO: 2083102 - DNA, 15 bp, Homo sapiens
ggattccatgattct

SEQ ID NO: 2083103 - DNA, 15 bp, Homo sapiens
gattccatgattctg

SEQ ID NO: 2083104 - DNA, 15 bp, Homo sapiens
attccatgattctgt

SEQ ID NO: 2083105 - DNA, 15 bp, Homo sapiens
ttccatgattctgta

SEQ ID NO: 2083106 - DNA, 15 bp, Homo sapiens
tccatgattctgtaa

SEQ ID NO: 2083107 - DNA, 15 bp, Homo sapiens
ccatgattctgtaaa

SEQ ID NO: 2083108 - DNA, 15 bp, Homo sapiens
catgattctgtaaat

SEQ ID NO: 2083109 - DNA, 15 bp, Homo sapiens
atgattctgtaaatg

SEQ ID NO: 2083110 - DNA, 15 bp, Homo sapiens
tgattctgtaaatgc

SEQ ID NO: 2083111 - DNA, 15 bp, Homo sapiens
gattctgtaaatgcc

SEQ ID NO: 2083112 - DNA, 15 bp, Homo sapiens
attctgtaaatgcct

SEQ ID NO: 2083113 - DNA, 15 bp, Homo sapiens
ttctgtaaatgccta

SEQ ID NO: 2083114 - DNA, 15 bp, Homo sapiens
tctgtaaatgcctat

SEQ ID NO: 2083115 - DNA, 15 bp, Homo sapiens
ctgtaaatgcctatg

SEQ ID NO: 2083116 - DNA, 15 bp, Homo sapiens
tgtaaatgcctatgc

SEQ ID NO: 2083117 - DNA, 15 bp, Homo sapiens
gtaaatgcctatgca

SEQ ID NO: 2083118 - DNA, 15 bp, Homo sapiens
taaatgcctatgcat

SEQ ID NO: 2083119 - DNA, 15 bp, Homo sapiens
aaatgcctatgcatt

SEQ ID NO: 2083120 - DNA, 15 bp, Homo sapiens
aatgcctatgcattc

SEQ ID NO: 2083121 - DNA, 15 bp, Homo sapiens
atgcctatgcattca

SEQ ID NO: 2083122 - DNA, 15 bp, Homo sapiens
tgcctatgcattcat

SEQ ID NO: 2083123 - DNA, 15 bp, Homo sapiens
gcctatgcattcatg

SEQ ID NO: 2083124 - DNA, 15 bp, Homo sapiens
cctatgcattcatgt

SEQ ID NO: 2083125 - DNA, 15 bp, Homo sapiens
ctatgcattcatgtc

SEQ ID NO: 2083126 - DNA, 15 bp, Homo sapiens
tatgcattcatgtct

SEQ ID NO: 2083127 - DNA, 15 bp, Homo sapiens
atgcattcatgtctg

SEQ ID NO: 2083128 - DNA, 15 bp, Homo sapiens
tgcattcatgtctgt

SEQ ID NO: 2083129 - DNA, 15 bp, Homo sapiens
gcattcatgtctgtc

SEQ ID NO: 2083130 - DNA, 15 bp, Homo sapiens
cattcatgtctgtct

SEQ ID NO: 2083131 - DNA, 15 bp, Homo sapiens
attcatgtctgtctc

SEQ ID NO: 2083132 - DNA, 15 bp, Homo sapiens
ttcatgtctgtctcc

SEQ ID NO: 2083133 - DNA, 15 bp, Homo sapiens
tcatgtctgtctcca

SEQ ID NO: 2083134 - DNA, 15 bp, Homo sapiens
catgtctgtctccat

SEQ ID NO: 2083135 - DNA, 15 bp, Homo sapiens
atgtctgtctccatg

SEQ ID NO: 2083136 - DNA, 15 bp, Homo sapiens
tgtctgtctccatgc

SEQ ID NO: 2083137 - DNA, 15 bp, Homo sapiens
gtctgtctccatgca

SEQ ID NO: 2083138 - DNA, 15 bp, Homo sapiens
tctgtctccatgcat

SEQ ID NO: 2083139 - DNA, 15 bp, Homo sapiens
ctgtctccatgcatg

SEQ ID NO: 2083140 - DNA, 15 bp, Homo sapiens
tgtctccatgcatgt

SEQ ID NO: 2083141 - DNA, 15 bp, Homo sapiens
gtctccatgcatgtg

SEQ ID NO: 2083142 - DNA, 15 bp, Homo sapiens
tctccatgcatgtga

SEQ ID NO: 2083143 - DNA, 15 bp, Homo sapiens
ctccatgcatgtgaa

SEQ ID NO: 2083144 - DNA, 15 bp, Homo sapiens
tccatgcatgtgaaa

SEQ ID NO: 2083145 - DNA, 15 bp, Homo sapiens
ccatgcatgtgaaaa

SEQ ID NO: 2083146 - DNA, 15 bp, Homo sapiens
catgcatgtgaaaac

SEQ ID NO: 2083147 - DNA, 15 bp, Homo sapiens
atgcatgtgaaaaca

SEQ ID NO: 2083148 - DNA, 15 bp, Homo sapiens
tgcatgtgaaaacag

SEQ ID NO: 2083149 - DNA, 15 bp, Homo sapiens
gcatgtgaaaacagg

SEQ ID NO: 2083150 - DNA, 15 bp, Homo sapiens
catgtgaaaacagga

SEQ ID NO: 2083151 - DNA, 15 bp, Homo sapiens
atgtgaaaacaggag

SEQ ID NO: 2083152 - DNA, 15 bp, Homo sapiens
tgtgaaaacaggaga

SEQ ID NO: 2083153 - DNA, 15 bp, Homo sapiens
gtgaaaacaggagag

SEQ ID NO: 2083154 - DNA, 15 bp, Homo sapiens
tgaaaacaggagagt

SEQ ID NO: 2083155 - DNA, 15 bp, Homo sapiens
gaaaacaggagagtg

SEQ ID NO: 2083156 - DNA, 15 bp, Homo sapiens
aaaacaggagagtgt

SEQ ID NO: 2083157 - DNA, 15 bp, Homo sapiens
aaacaggagagtgtt

SEQ ID NO: 2083158 - DNA, 15 bp, Homo sapiens
aacaggagagtgttt

SEQ ID NO: 2083159 - DNA, 15 bp, Homo sapiens
acaggagagtgtttt

SEQ ID NO: 2083160 - DNA, 15 bp, Homo sapiens
caggagagtgttttc

SEQ ID NO: 2083161 - DNA, 15 bp, Homo sapiens
aggagagtgttttca

SEQ ID NO: 2083162 - DNA, 15 bp, Homo sapiens
ggagagtgttttcat

SEQ ID NO: 2083163 - DNA, 15 bp, Homo sapiens
gagagtgttttcatt

SEQ ID NO: 2083164 - DNA, 15 bp, Homo sapiens
agagtgttttcattt

SEQ ID NO: 2083165 - DNA, 15 bp, Homo sapiens
gagtgttttcatttt

SEQ ID NO: 2083166 - DNA, 15 bp, Homo sapiens
agtgttttcattttg

SEQ ID NO: 2083167 - DNA, 15 bp, Homo sapiens
gtgttttcattttgt

SEQ ID NO: 2083168 - DNA, 15 bp, Homo sapiens
tgttttcattttgtg

SEQ ID NO: 2083169 - DNA, 15 bp, Homo sapiens
gttttcattttgtgt

SEQ ID NO: 2083170 - DNA, 15 bp, Homo sapiens
ttttcattttgtgtc

SEQ ID NO: 2083171 - DNA, 15 bp, Homo sapiens
tttcattttgtgtct

SEQ ID NO: 2083172 - DNA, 15 bp, Homo sapiens
ttcattttgtgtcta

SEQ ID NO: 2083173 - DNA, 15 bp, Homo sapiens
tcattttgtgtctag

SEQ ID NO: 2083174 - DNA, 15 bp, Homo sapiens
cattttgtgtctagg

SEQ ID NO: 2083175 - DNA, 15 bp, Homo sapiens
attttgtgtctaggt

SEQ ID NO: 2083176 - DNA, 15 bp, Homo sapiens
ttttgtgtctaggtt

SEQ ID NO: 2083177 - DNA, 15 bp, Homo sapiens
tttgtgtctaggttt

SEQ ID NO: 2083178 - DNA, 15 bp, Homo sapiens
ttgtgtctaggtttg

SEQ ID NO: 2083179 - DNA, 15 bp, Homo sapiens
tgtgtctaggtttgt

SEQ ID NO: 2083180 - DNA, 15 bp, Homo sapiens
gtgtctaggtttgtg

SEQ ID NO: 2083181 - DNA, 15 bp, Homo sapiens
tgtctaggtttgtgt

SEQ ID NO: 2083182 - DNA, 15 bp, Homo sapiens
gtctaggtttgtgtg

SEQ ID NO: 2083183 - DNA, 15 bp, Homo sapiens
tctaggtttgtgtga

SEQ ID NO: 2083184 - DNA, 15 bp, Homo sapiens
ctaggtttgtgtgag

SEQ ID NO: 2083185 - DNA, 15 bp, Homo sapiens
taggtttgtgtgagt

SEQ ID NO: 2083186 - DNA, 15 bp, Homo sapiens
aggtttgtgtgagta

SEQ ID NO: 2083187 - DNA, 15 bp, Homo sapiens
ggtttgtgtgagtaa

SEQ ID NO: 2083188 - DNA, 15 bp, Homo sapiens
gtttgtgtgagtaag

SEQ ID NO: 2083189 - DNA, 15 bp, Homo sapiens
tttgtgtgagtaagc

SEQ ID NO: 2083190 - DNA, 15 bp, Homo sapiens
ttgtgtgagtaagca

SEQ ID NO: 2083191 - DNA, 15 bp, Homo sapiens
tgtgtgagtaagcaa

SEQ ID NO: 2083192 - DNA, 15 bp, Homo sapiens
gtgtgagtaagcaag

SEQ ID NO: 2083193 - DNA, 15 bp, Homo sapiens
tgtgagtaagcaaga

SEQ ID NO: 2083194 - DNA, 15 bp, Homo sapiens
gtgagtaagcaagaa

SEQ ID NO: 2083195 - DNA, 15 bp, Homo sapiens
tgagtaagcaagaaa

SEQ ID NO: 2083196 - DNA, 15 bp, Homo sapiens
gagtaagcaagaaat

SEQ ID NO: 2083197 - DNA, 15 bp, Homo sapiens
agtaagcaagaaata

SEQ ID NO: 2083198 - DNA, 15 bp, Homo sapiens
gtaagcaagaaataa

SEQ ID NO: 2083199 - DNA, 15 bp, Homo sapiens
taagcaagaaataaa

SEQ ID NO: 2083200 - DNA, 15 bp, Homo sapiens
aagcaagaaataaac

SEQ ID NO: 2083201 - DNA, 15 bp, Homo sapiens
agcaagaaataaacc

SEQ ID NO: 2083202 - DNA, 15 bp, Homo sapiens
gcaagaaataaacct

SEQ ID NO: 2083203 - DNA, 15 bp, Homo sapiens
caagaaataaacctt

SEQ ID NO: 2083204 - DNA, 15 bp, Homo sapiens
aagaaataaaccttt

SEQ ID NO: 2083205 - DNA, 15 bp, Homo sapiens
agaaataaacctttg

SEQ ID NO: 2083206 - DNA, 15 bp, Homo sapiens
gaaataaacctttgt

SEQ ID NO: 2083207 - DNA, 15 bp, Homo sapiens
aaataaacctttgtt

SEQ ID NO: 2083208 - DNA, 15 bp, Homo sapiens
aataaacctttgttg

SEQ ID NO: 2083209 - DNA, 15 bp, Homo sapiens
ataaacctttgttgt

SEQ ID NO: 2083210 - DNA, 15 bp, Homo sapiens
taaacctttgttgtt

SEQ ID NO: 2083211 - DNA, 15 bp, Homo sapiens
aaacctttgttgttg

SEQ ID NO: 2083212 - DNA, 15 bp, Homo sapiens
aacctttgttgttgt

SEQ ID NO: 2083213 - DNA, 15 bp, Homo sapiens
acctttgttgttgta

SEQ ID NO: 2083214 - DNA, 15 bp, Homo sapiens
cctttgttgttgtaa

SEQ ID NO: 2083215 - DNA, 15 bp, Homo sapiens
ctttgttgttgtaag

SEQ ID NO: 2083216 - DNA, 15 bp, Homo sapiens
tttgttgttgtaagc

SEQ ID NO: 2083217 - DNA, 15 bp, Homo sapiens
ttgttgttgtaagcc

SEQ ID NO: 2083218 - DNA, 15 bp, Homo sapiens
tgttgttgtaagcca

SEQ ID NO: 2083219 - DNA, 15 bp, Homo sapiens
gttgttgtaagccac

SEQ ID NO: 2083220 - DNA, 15 bp, Homo sapiens
ttgttgtaagccact

SEQ ID NO: 2083221 - DNA, 15 bp, Homo sapiens
tgttgtaagccactg

SEQ ID NO: 2083222 - DNA, 15 bp, Homo sapiens
gttgtaagccactga

SEQ ID NO: 2083223 - DNA, 15 bp, Homo sapiens
ttgtaagccactgag

SEQ ID NO: 2083224 - DNA, 15 bp, Homo sapiens
tgtaagccactgaga

SEQ ID NO: 2083225 - DNA, 15 bp, Homo sapiens
gtaagccactgagat

SEQ ID NO: 2083226 - DNA, 15 bp, Homo sapiens
taagccactgagatt

SEQ ID NO: 2083227 - DNA, 15 bp, Homo sapiens
aagccactgagattt

SEQ ID NO: 2083228 - DNA, 15 bp, Homo sapiens
agccactgagatttg

SEQ ID NO: 2083229 - DNA, 15 bp, Homo sapiens
gccactgagatttgg

SEQ ID NO: 2083230 - DNA, 15 bp, Homo sapiens
ccactgagatttgga

SEQ ID NO: 2083231 - DNA, 15 bp, Homo sapiens
cactgagatttggag

SEQ ID NO: 2083232 - DNA, 15 bp, Homo sapiens
actgagatttggaga

SEQ ID NO: 2083233 - DNA, 15 bp, Homo sapiens
ctgagatttggagag

SEQ ID NO: 2083234 - DNA, 15 bp, Homo sapiens
tgagatttggagagt

SEQ ID NO: 2083235 - DNA, 15 bp, Homo sapiens
gagatttggagagtg

SEQ ID NO: 2083236 - DNA, 15 bp, Homo sapiens
agatttggagagtgt

SEQ ID NO: 2083237 - DNA, 15 bp, Homo sapiens
gatttggagagtgtt

SEQ ID NO: 2083238 - DNA, 15 bp, Homo sapiens
atttggagagtgtta

SEQ ID NO: 2083239 - DNA, 15 bp, Homo sapiens
tttggagagtgttac

SEQ ID NO: 2083240 - DNA, 15 bp, Homo sapiens
ttggagagtgttacc

SEQ ID NO: 2083241 - DNA, 15 bp, Homo sapiens
tggagagtgttacca

SEQ ID NO: 2083242 - DNA, 15 bp, Homo sapiens
ggagagtgttaccac

SEQ ID NO: 2083243 - DNA, 15 bp, Homo sapiens
gagagtgttaccaca

SEQ ID NO: 2083244 - DNA, 15 bp, Homo sapiens
agagtgttaccacag

SEQ ID NO: 2083245 - DNA, 15 bp, Homo sapiens
gagtgttaccacagc

SEQ ID NO: 2083246 - DNA, 15 bp, Homo sapiens
agtgttaccacagcc

SEQ ID NO: 2083247 - DNA, 15 bp, Homo sapiens
gtgttaccacagcct

SEQ ID NO: 2083248 - DNA, 15 bp, Homo sapiens
tgttaccacagccta

SEQ ID NO: 2083249 - DNA, 15 bp, Homo sapiens
gttaccacagcctaa

SEQ ID NO: 2083250 - DNA, 15 bp, Homo sapiens
ttaccacagcctaac

SEQ ID NO: 2083251 - DNA, 15 bp, Homo sapiens
taccacagcctaacc

SEQ ID NO: 2083252 - DNA, 15 bp, Homo sapiens
accacagcctaacct

SEQ ID NO: 2083253 - DNA, 15 bp, Homo sapiens
ccacagcctaaccta

SEQ ID NO: 2083254 - DNA, 15 bp, Homo sapiens
cacagcctaacctag

SEQ ID NO: 2083255 - DNA, 15 bp, Homo sapiens
acagcctaacctagt

SEQ ID NO: 2083256 - DNA, 15 bp, Homo sapiens
cagcctaacctagtc

SEQ ID NO: 2083257 - DNA, 15 bp, Homo sapiens
agcctaacctagtct

SEQ ID NO: 2083258 - DNA, 15 bp, Homo sapiens
gcctaacctagtcta

SEQ ID NO: 2083259 - DNA, 15 bp, Homo sapiens
cctaacctagtctat

SEQ ID NO: 2083260 - DNA, 15 bp, Homo sapiens
ctaacctagtctatc

SEQ ID NO: 2083261 - DNA, 15 bp, Homo sapiens
taacctagtctatcc

SEQ ID NO: 2083262 - DNA, 15 bp, Homo sapiens
aacctagtctatcct

SEQ ID NO: 2083263 - DNA, 15 bp, Homo sapiens
acctagtctatcctg

SEQ ID NO: 2083264 - DNA, 15 bp, Homo sapiens
cctagtctatcctga

SEQ ID NO: 2083265 - DNA, 15 bp, Homo sapiens
ctagtctatcctgac

SEQ ID NO: 2083266 - DNA, 15 bp, Homo sapiens
tagtctatcctgact

SEQ ID NO: 2083267 - DNA, 15 bp, Homo sapiens
agtctatcctgactg

SEQ ID NO: 2083268 - DNA, 15 bp, Homo sapiens
gtctatcctgactga

SEQ ID NO: 2083269 - DNA, 15 bp, Homo sapiens
tctatcctgactgac

SEQ ID NO: 2083270 - DNA, 15 bp, Homo sapiens
ctatcctgactgaca

SEQ ID NO: 2083271 - DNA, 15 bp, Homo sapiens
tatcctgactgacag

SEQ ID NO: 2083272 - DNA, 15 bp, Homo sapiens
atcctgactgacaga

SEQ ID NO: 2083273 - DNA, 15 bp, Homo sapiens
tcctgactgacagaa

SEQ ID NO: 2083274 - DNA, 15 bp, Homo sapiens
cctgactgacagaaa

SEQ ID NO: 2083275 - DNA, 15 bp, Homo sapiens
ctgactgacagaaag

SEQ ID NO: 2083276 - DNA, 15 bp, Homo sapiens
tgactgacagaaagg

SEQ ID NO: 2083277 - DNA, 15 bp, Homo sapiens
gactgacagaaagga

SEQ ID NO: 2083278 - DNA, 15 bp, Homo sapiens
actgacagaaaggac

SEQ ID NO: 2083279 - DNA, 15 bp, Homo sapiens
ctgacagaaaggact

SEQ ID NO: 2083280 - DNA, 15 bp, Homo sapiens
tgacagaaaggactt

SEQ ID NO: 2083281 - DNA, 15 bp, Homo sapiens
gacagaaaggacttg

SEQ ID NO: 2083282 - DNA, 15 bp, Homo sapiens
acagaaaggacttgt

SEQ ID NO: 2083283 - DNA, 15 bp, Homo sapiens
cagaaaggacttgtt

SEQ ID NO: 2083284 - DNA, 15 bp, Homo sapiens
agaaaggacttgttc

SEQ ID NO: 2083285 - DNA, 15 bp, Homo sapiens
gaaaggacttgttca

SEQ ID NO: 2083286 - DNA, 15 bp, Homo sapiens
aaaggacttgttcat

SEQ ID NO: 2083287 - DNA, 15 bp, Homo sapiens
aaggacttgttcatt

SEQ ID NO: 2083288 - DNA, 15 bp, Homo sapiens
aggacttgttcattt

SEQ ID NO: 2083289 - DNA, 15 bp, Homo sapiens
ggacttgttcatttc

SEQ ID NO: 2083290 - DNA, 15 bp, Homo sapiens
gacttgttcatttcg

SEQ ID NO: 2083291 - DNA, 15 bp, Homo sapiens
acttgttcatttcgc

SEQ ID NO: 2083292 - DNA, 15 bp, Homo sapiens
cttgttcatttcgct

SEQ ID NO: 2083293 - DNA, 15 bp, Homo sapiens
ttgttcatttcgctt

SEQ ID NO: 2083294 - DNA, 15 bp, Homo sapiens
tgttcatttcgcttc

SEQ ID NO: 2083295 - DNA, 15 bp, Homo sapiens
gttcatttcgcttct

SEQ ID NO: 2083296 - DNA, 15 bp, Homo sapiens
ttcatttcgcttctc

SEQ ID NO: 2083297 - DNA, 15 bp, Homo sapiens
tcatttcgcttctca

SEQ ID NO: 2083298 - DNA, 15 bp, Homo sapiens
catttcgcttctcaa

SEQ ID NO: 2083299 - DNA, 15 bp, Homo sapiens
atttcgcttctcaaa

SEQ ID NO: 2083300 - DNA, 15 bp, Homo sapiens
tttcgcttctcaaag

SEQ ID NO: 2083301 - DNA, 15 bp, Homo sapiens
ttcgcttctcaaagt

SEQ ID NO: 2083302 - DNA, 15 bp, Homo sapiens
tcgcttctcaaagtg

SEQ ID NO: 2083303 - DNA, 15 bp, Homo sapiens
cgcttctcaaagtga

SEQ ID NO: 2083304 - DNA, 15 bp, Homo sapiens
gcttctcaaagtgaa

SEQ ID NO: 2083305 - DNA, 15 bp, Homo sapiens
cttctcaaagtgaaa

SEQ ID NO: 2083306 - DNA, 15 bp, Homo sapiens
ttctcaaagtgaaaa

SEQ ID NO: 2083307 - DNA, 15 bp, Homo sapiens
tctcaaagtgaaaaa

SEQ ID NO: 2083308 - DNA, 15 bp, Homo sapiens
ctcaaagtgaaaaat

SEQ ID NO: 2083309 - DNA, 15 bp, Homo sapiens
tcaaagtgaaaaatc

SEQ ID NO: 2083310 - DNA, 15 bp, Homo sapiens
caaagtgaaaaatct

SEQ ID NO: 2083311 - DNA, 15 bp, Homo sapiens
aaagtgaaaaatctg

SEQ ID NO: 2083312 - DNA, 15 bp, Homo sapiens
aagtgaaaaatctgt

SEQ ID NO: 2083313 - DNA, 15 bp, Homo sapiens
agtgaaaaatctgtt

SEQ ID NO: 2083314 - DNA, 15 bp, Homo sapiens
gtgaaaaatctgtta

SEQ ID NO: 2083315 - DNA, 15 bp, Homo sapiens
tgaaaaatctgttat

SEQ ID NO: 2083316 - DNA, 15 bp, Homo sapiens
gaaaaatctgttatc

SEQ ID NO: 2083317 - DNA, 15 bp, Homo sapiens
aaaaatctgttatcc

SEQ ID NO: 2083318 - DNA, 15 bp, Homo sapiens
aaaatctgttatcca

SEQ ID NO: 2083319 - DNA, 15 bp, Homo sapiens
aaatctgttatccaa

SEQ ID NO: 2083320 - DNA, 15 bp, Homo sapiens
aatctgttatccaat

SEQ ID NO: 2083321 - DNA, 15 bp, Homo sapiens
atctgttatccaata

SEQ ID NO: 2083322 - DNA, 15 bp, Homo sapiens
tctgttatccaatag

SEQ ID NO: 2083323 - DNA, 15 bp, Homo sapiens
ctgttatccaatagc

SEQ ID NO: 2083324 - DNA, 15 bp, Homo sapiens
tgttatccaatagct

SEQ ID NO: 2083325 - DNA, 15 bp, Homo sapiens
gttatccaatagcta

SEQ ID NO: 2083326 - DNA, 15 bp, Homo sapiens
ttatccaatagctac

SEQ ID NO: 2083327 - DNA, 15 bp, Homo sapiens
tatccaatagctacc

SEQ ID NO: 2083328 - DNA, 15 bp, Homo sapiens
atccaatagctacca

SEQ ID NO: 2083329 - DNA, 15 bp, Homo sapiens
tccaatagctaccat

SEQ ID NO: 2083330 - DNA, 15 bp, Homo sapiens
ccaatagctaccata

SEQ ID NO: 2083331 - DNA, 15 bp, Homo sapiens
caatagctaccatag

SEQ ID NO: 2083332 - DNA, 15 bp, Homo sapiens
aatagctaccataga

SEQ ID NO: 2083333 - DNA, 15 bp, Homo sapiens
atagctaccatagat

SEQ ID NO: 2083334 - DNA, 15 bp, Homo sapiens
tagctaccatagatg

SEQ ID NO: 2083335 - DNA, 15 bp, Homo sapiens
agctaccatagatga

SEQ ID NO: 2083336 - DNA, 15 bp, Homo sapiens
gctaccatagatgaa

SEQ ID NO: 2083337 - DNA, 15 bp, Homo sapiens
ctaccatagatgaaa

SEQ ID NO: 2083338 - DNA, 15 bp, Homo sapiens
taccatagatgaaaa

SEQ ID NO: 2083339 - DNA, 15 bp, Homo sapiens
accatagatgaaaac

SEQ ID NO: 2083340 - DNA, 15 bp, Homo sapiens
ccatagatgaaaaca

SEQ ID NO: 2083341 - DNA, 15 bp, Homo sapiens
catagatgaaaacaa

SEQ ID NO: 2083342 - DNA, 15 bp, Homo sapiens
atagatgaaaacaaa

SEQ ID NO: 2083343 - DNA, 15 bp, Homo sapiens
tagatgaaaacaaac

SEQ ID NO: 2083344 - DNA, 15 bp, Homo sapiens
agatgaaaacaaact

SEQ ID NO: 2083345 - DNA, 15 bp, Homo sapiens
gatgaaaacaaactt

SEQ ID NO: 2083346 - DNA, 15 bp, Homo sapiens
atgaaaacaaacttg

SEQ ID NO: 2083347 - DNA, 15 bp, Homo sapiens
tgaaaacaaacttgg

SEQ ID NO: 2083348 - DNA, 15 bp, Homo sapiens
gaaaacaaacttgga

SEQ ID NO: 2083349 - DNA, 15 bp, Homo sapiens
aaaacaaacttggat

SEQ ID NO: 2083350 - DNA, 15 bp, Homo sapiens
aaacaaacttggatt

SEQ ID NO: 2083351 - DNA, 15 bp, Homo sapiens
aacaaacttggattt

SEQ ID NO: 2083352 - DNA, 15 bp, Homo sapiens
acaaacttggatttt

SEQ ID NO: 2083353 - DNA, 15 bp, Homo sapiens
caaacttggattttt

SEQ ID NO: 2083354 - DNA, 15 bp, Homo sapiens
aaacttggatttttt

SEQ ID NO: 2083355 - DNA, 15 bp, Homo sapiens
aacttggattttttt

SEQ ID NO: 2083356 - DNA, 15 bp, Homo sapiens
acttggatttttttc

SEQ ID NO: 2083357 - DNA, 15 bp, Homo sapiens
cttggatttttttct

SEQ ID NO: 2083358 - DNA, 15 bp, Homo sapiens
ttggatttttttctt

SEQ ID NO: 2083359 - DNA, 15 bp, Homo sapiens
tggatttttttcttt

SEQ ID NO: 2083360 - DNA, 15 bp, Homo sapiens
ggatttttttctttg

SEQ ID NO: 2083361 - DNA, 15 bp, Homo sapiens
gatttttttctttgt

SEQ ID NO: 2083362 - DNA, 15 bp, Homo sapiens
atttttttctttgtc

SEQ ID NO: 2083363 - DNA, 15 bp, Homo sapiens
tttttttctttgtcc

SEQ ID NO: 2083364 - DNA, 15 bp, Homo sapiens
ttttttctttgtcca

SEQ ID NO: 2083365 - DNA, 15 bp, Homo sapiens
tttttctttgtccaa

SEQ ID NO: 2083366 - DNA, 15 bp, Homo sapiens
ttttctttgtccaaa

SEQ ID NO: 2083367 - DNA, 15 bp, Homo sapiens
tttctttgtccaaat

SEQ ID NO: 2083368 - DNA, 15 bp, Homo sapiens
ttctttgtccaaata

SEQ ID NO: 2083369 - DNA, 15 bp, Homo sapiens
tctttgtccaaataa

SEQ ID NO: 2083370 - DNA, 15 bp, Homo sapiens
ctttgtccaaataaa

SEQ ID NO: 2083371 - DNA, 15 bp, Homo sapiens
tttgtccaaataaaa

SEQ ID NO: 2083372 - DNA, 15 bp, Homo sapiens
ttgtccaaataaaaa

SEQ ID NO: 2083373 - DNA, 15 bp, Homo sapiens
tgtccaaataaaaaa

SEQ ID NO: 2083374 - DNA, 15 bp, Homo sapiens
gtccaaataaaaaaa

SEQ ID NO: 2083375 - DNA, 15 bp, Homo sapiens
tccaaataaaaaaaa

SEQ ID NO: 2083376 - DNA, 15 bp, Homo sapiens
ccaaataaaaaaaaa

SEQ ID NO: 2083377 - DNA, 15 bp, Homo sapiens
caaataaaaaaaaat

SEQ ID NO: 2083378 - DNA, 15 bp, Homo sapiens
aaataaaaaaaaatg

SEQ ID NO: 2083379 - DNA, 15 bp, Homo sapiens
aataaaaaaaaatga

SEQ ID NO: 2083380 - DNA, 15 bp, Homo sapiens
ataaaaaaaaatgat

SEQ ID NO: 2083381 - DNA, 15 bp, Homo sapiens
taaaaaaaaatgatg

SEQ ID NO: 2083382 - DNA, 15 bp, Homo sapiens
aaaaaaaaatgatgt

SEQ ID NO: 2083383 - DNA, 15 bp, Homo sapiens
aaaaaaaatgatgta

SEQ ID NO: 2083384 - DNA, 15 bp, Homo sapiens
aaaaaaatgatgtaa

SEQ ID NO: 2083385 - DNA, 15 bp, Homo sapiens
aaaaaatgatgtaaa

SEQ ID NO: 2083386 - DNA, 15 bp, Homo sapiens
aaaaatgatgtaaag

SEQ ID NO: 2083387 - DNA, 15 bp, Homo sapiens
aaaatgatgtaaaga

SEQ ID NO: 2083388 - DNA, 15 bp, Homo sapiens
aaatgatgtaaagaa

SEQ ID NO: 2083389 - DNA, 15 bp, Homo sapiens
aatgatgtaaagaaa

SEQ ID NO: 2083390 - DNA, 15 bp, Homo sapiens
atgatgtaaagaaat

SEQ ID NO: 2083391 - DNA, 15 bp, Homo sapiens
tgatgtaaagaaata

SEQ ID NO: 2083392 - DNA, 15 bp, Homo sapiens
gatgtaaagaaataa

SEQ ID NO: 2083393 - DNA, 15 bp, Homo sapiens
atgtaaagaaataat

SEQ ID NO: 2083394 - DNA, 15 bp, Homo sapiens
tgtaaagaaataatg

SEQ ID NO: 2083395 - DNA, 15 bp, Homo sapiens
gtaaagaaataatgg

SEQ ID NO: 2083396 - DNA, 15 bp, Homo sapiens
taaagaaataatggg

SEQ ID NO: 2083397 - DNA, 15 bp, Homo sapiens
aaagaaataatgggg

SEQ ID NO: 2083398 - DNA, 15 bp, Homo sapiens
aagaaataatggggg

SEQ ID NO: 2083399 - DNA, 15 bp, Homo sapiens
agaaataatggggga

SEQ ID NO: 2083400 - DNA, 15 bp, Homo sapiens
gaaataatgggggat

SEQ ID NO: 2083401 - DNA, 15 bp, Homo sapiens
aaataatgggggatt

SEQ ID NO: 2083402 - DNA, 15 bp, Homo sapiens
aataatgggggattc

SEQ ID NO: 2083403 - DNA, 15 bp, Homo sapiens
ataatgggggattca

SEQ ID NO: 2083404 - DNA, 15 bp, Homo sapiens
taatgggggattcac

SEQ ID NO: 2083405 - DNA, 15 bp, Homo sapiens
aatgggggattcact

SEQ ID NO: 2083406 - DNA, 15 bp, Homo sapiens
atgggggattcactg

SEQ ID NO: 2083407 - DNA, 15 bp, Homo sapiens
tgggggattcactga

SEQ ID NO: 2083408 - DNA, 15 bp, Homo sapiens
gggggattcactgat

SEQ ID NO: 2083409 - DNA, 15 bp, Homo sapiens
ggggattcactgatt

SEQ ID NO: 2083410 - DNA, 15 bp, Homo sapiens
gggattcactgatta

SEQ ID NO: 2083411 - DNA, 15 bp, Homo sapiens
ggattcactgattaa

SEQ ID NO: 2083412 - DNA, 15 bp, Homo sapiens
gattcactgattaat

SEQ ID NO: 2083413 - DNA, 15 bp, Homo sapiens
attcactgattaatt

SEQ ID NO: 2083414 - DNA, 15 bp, Homo sapiens
ttcactgattaattg

SEQ ID NO: 2083415 - DNA, 15 bp, Homo sapiens
tcactgattaattgc

SEQ ID NO: 2083416 - DNA, 15 bp, Homo sapiens
cactgattaattgcc

SEQ ID NO: 2083417 - DNA, 15 bp, Homo sapiens
actgattaattgccc

SEQ ID NO: 2083418 - DNA, 15 bp, Homo sapiens
ctgattaattgcccg

SEQ ID NO: 2083419 - DNA, 15 bp, Homo sapiens
tgattaattgcccgc

SEQ ID NO: 2083420 - DNA, 15 bp, Homo sapiens
gattaattgcccgct

SEQ ID NO: 2083421 - DNA, 15 bp, Homo sapiens
attaattgcccgctc

SEQ ID NO: 2083422 - DNA, 15 bp, Homo sapiens
ttaattgcccgctct

SEQ ID NO: 2083423 - DNA, 15 bp, Homo sapiens
taattgcccgctctg

SEQ ID NO: 2083424 - DNA, 15 bp, Homo sapiens
aattgcccgctctgt

SEQ ID NO: 2083425 - DNA, 15 bp, Homo sapiens
attgcccgctctgtg

SEQ ID NO: 2083426 - DNA, 15 bp, Homo sapiens
ttgcccgctctgtgc

SEQ ID NO: 2083427 - DNA, 15 bp, Homo sapiens
tgcccgctctgtgcc

SEQ ID NO: 2083428 - DNA, 15 bp, Homo sapiens
gcccgctctgtgcca

SEQ ID NO: 2083429 - DNA, 15 bp, Homo sapiens
cccgctctgtgccag

SEQ ID NO: 2083430 - DNA, 15 bp, Homo sapiens
ccgctctgtgccagg

SEQ ID NO: 2083431 - DNA, 15 bp, Homo sapiens
cgctctgtgccaggc

SEQ ID NO: 2083432 - DNA, 15 bp, Homo sapiens
gctctgtgccaggca

SEQ ID NO: 2083433 - DNA, 15 bp, Homo sapiens
ctctgtgccaggcat

SEQ ID NO: 2083434 - DNA, 15 bp, Homo sapiens
tctgtgccaggcata

SEQ ID NO: 2083435 - DNA, 15 bp, Homo sapiens
ctgtgccaggcatag

SEQ ID NO: 2083436 - DNA, 15 bp, Homo sapiens
tgtgccaggcataga

SEQ ID NO: 2083437 - DNA, 15 bp, Homo sapiens
gtgccaggcatagac

SEQ ID NO: 2083438 - DNA, 15 bp, Homo sapiens
tgccaggcatagaca

SEQ ID NO: 2083439 - DNA, 15 bp, Homo sapiens
gccaggcatagacag

SEQ ID NO: 2083440 - DNA, 15 bp, Homo sapiens
ccaggcatagacagt

SEQ ID NO: 2083441 - DNA, 15 bp, Homo sapiens
caggcatagacagtt

SEQ ID NO: 2083442 - DNA, 15 bp, Homo sapiens
aggcatagacagttt

SEQ ID NO: 2083443 - DNA, 15 bp, Homo sapiens
ggcatagacagtttc

SEQ ID NO: 2083444 - DNA, 15 bp, Homo sapiens
gcatagacagtttcc

SEQ ID NO: 2083445 - DNA, 15 bp, Homo sapiens
catagacagtttcca

SEQ ID NO: 2083446 - DNA, 15 bp, Homo sapiens
atagacagtttccag

SEQ ID NO: 2083447 - DNA, 15 bp, Homo sapiens
tagacagtttccagc

SEQ ID NO: 2083448 - DNA, 15 bp, Homo sapiens
agacagtttccagct

SEQ ID NO: 2083449 - DNA, 15 bp, Homo sapiens
gacagtttccagctg

SEQ ID NO: 2083450 - DNA, 15 bp, Homo sapiens
acagtttccagctgt

SEQ ID NO: 2083451 - DNA, 15 bp, Homo sapiens
cagtttccagctgtc

SEQ ID NO: 2083452 - DNA, 15 bp, Homo sapiens
agtttccagctgtct

SEQ ID NO: 2083453 - DNA, 15 bp, Homo sapiens
gtttccagctgtcta

SEQ ID NO: 2083454 - DNA, 15 bp, Homo sapiens
tttccagctgtctag

SEQ ID NO: 2083455 - DNA, 15 bp, Homo sapiens
ttccagctgtctaga

SEQ ID NO: 2083456 - DNA, 15 bp, Homo sapiens
tccagctgtctagag

SEQ ID NO: 2083457 - DNA, 15 bp, Homo sapiens
ccagctgtctagagg

SEQ ID NO: 2083458 - DNA, 15 bp, Homo sapiens
cagctgtctagaggg

SEQ ID NO: 2083459 - DNA, 15 bp, Homo sapiens
agctgtctagagggg

SEQ ID NO: 2083460 - DNA, 15 bp, Homo sapiens
gctgtctagaggggc

SEQ ID NO: 2083461 - DNA, 15 bp, Homo sapiens
ctgtctagaggggct

SEQ ID NO: 2083462 - DNA, 15 bp, Homo sapiens
tgtctagaggggcta

SEQ ID NO: 2083463 - DNA, 15 bp, Homo sapiens
gtctagaggggctac

SEQ ID NO: 2083464 - DNA, 15 bp, Homo sapiens
tctagaggggctaca

SEQ ID NO: 2083465 - DNA, 15 bp, Homo sapiens
ctagaggggctacaa

SEQ ID NO: 2083466 - DNA, 15 bp, Homo sapiens
tagaggggctacaaa

SEQ ID NO: 2083467 - DNA, 15 bp, Homo sapiens
agaggggctacaaat

SEQ ID NO: 2083468 - DNA, 15 bp, Homo sapiens
gaggggctacaaatc

SEQ ID NO: 2083469 - DNA, 15 bp, Homo sapiens
aggggctacaaatcg

SEQ ID NO: 2083470 - DNA, 15 bp, Homo sapiens
ggggctacaaatcga

SEQ ID NO: 2083471 - DNA, 15 bp, Homo sapiens
gggctacaaatcgaa

SEQ ID NO: 2083472 - DNA, 15 bp, Homo sapiens
ggctacaaatcgaaa

SEQ ID NO: 2083473 - DNA, 15 bp, Homo sapiens
gctacaaatcgaaat

SEQ ID NO: 2083474 - DNA, 15 bp, Homo sapiens
ctacaaatcgaaatg

SEQ ID NO: 2083475 - DNA, 15 bp, Homo sapiens
tacaaatcgaaatgc

SEQ ID NO: 2083476 - DNA, 15 bp, Homo sapiens
acaaatcgaaatgcc

SEQ ID NO: 2083477 - DNA, 15 bp, Homo sapiens
caaatcgaaatgcct

SEQ ID NO: 2083478 - DNA, 15 bp, Homo sapiens
aaatcgaaatgccta

SEQ ID NO: 2083479 - DNA, 15 bp, Homo sapiens
aatcgaaatgcctac

SEQ ID NO: 2083480 - DNA, 15 bp, Homo sapiens
atcgaaatgcctaca

SEQ ID NO: 2083481 - DNA, 15 bp, Homo sapiens
tcgaaatgcctacag

SEQ ID NO: 2083482 - DNA, 15 bp, Homo sapiens
cgaaatgcctacagg

SEQ ID NO: 2083483 - DNA, 15 bp, Homo sapiens
gaaatgcctacaggg

SEQ ID NO: 2083484 - DNA, 15 bp, Homo sapiens
aaatgcctacagggc

SEQ ID NO: 2083485 - DNA, 15 bp, Homo sapiens
aatgcctacagggct

SEQ ID NO: 2083486 - DNA, 15 bp, Homo sapiens
atgcctacagggctg

SEQ ID NO: 2083487 - DNA, 15 bp, Homo sapiens
tgcctacagggctga

SEQ ID NO: 2083488 - DNA, 15 bp, Homo sapiens
gcctacagggctgag

SEQ ID NO: 2083489 - DNA, 15 bp, Homo sapiens
cctacagggctgagc

SEQ ID NO: 2083490 - DNA, 15 bp, Homo sapiens
ctacagggctgagca

SEQ ID NO: 2083491 - DNA, 15 bp, Homo sapiens
tacagggctgagcag

SEQ ID NO: 2083492 - DNA, 15 bp, Homo sapiens
acagggctgagcaga

SEQ ID NO: 2083493 - DNA, 15 bp, Homo sapiens
cagggctgagcagat

SEQ ID NO: 2083494 - DNA, 15 bp, Homo sapiens
agggctgagcagatc

SEQ ID NO: 2083495 - DNA, 15 bp, Homo sapiens
gggctgagcagatca

SEQ ID NO: 2083496 - DNA, 15 bp, Homo sapiens
ggctgagcagatcaa

SEQ ID NO: 2083497 - DNA, 15 bp, Homo sapiens
gctgagcagatcaaa

SEQ ID NO: 2083498 - DNA, 15 bp, Homo sapiens
ctgagcagatcaaat

SEQ ID NO: 2083499 - DNA, 15 bp, Homo sapiens
tgagcagatcaaata

SEQ ID NO: 2083500 - DNA, 15 bp, Homo sapiens
gagcagatcaaataa

SEQ ID NO: 2083501 - DNA, 15 bp, Homo sapiens
agcagatcaaataaa

SEQ ID NO: 2083502 - DNA, 15 bp, Homo sapiens
gcagatcaaataaat

SEQ ID NO: 2083503 - DNA, 15 bp, Homo sapiens
cagatcaaataaatg

SEQ ID NO: 2083504 - DNA, 15 bp, Homo sapiens
agatcaaataaatga

SEQ ID NO: 2083505 - DNA, 15 bp, Homo sapiens
gatcaaataaatgag

SEQ ID NO: 2083506 - DNA, 15 bp, Homo sapiens
atcaaataaatgagt

SEQ ID NO: 2083507 - DNA, 15 bp, Homo sapiens
tcaaataaatgagta

SEQ ID NO: 2083508 - DNA, 15 bp, Homo sapiens
caaataaatgagtaa

SEQ ID NO: 2083509 - DNA, 15 bp, Homo sapiens
aaataaatgagtaaa

SEQ ID NO: 2083510 - DNA, 15 bp, Homo sapiens
aataaatgagtaaag

SEQ ID NO: 2083511 - DNA, 15 bp, Homo sapiens
ataaatgagtaaaga

SEQ ID NO: 2083512 - DNA, 15 bp, Homo sapiens
taaatgagtaaagaa

SEQ ID NO: 2083513 - DNA, 15 bp, Homo sapiens
aaatgagtaaagaag

SEQ ID NO: 2083514 - DNA, 15 bp, Homo sapiens
aatgagtaaagaagg

SEQ ID NO: 2083515 - DNA, 15 bp, Homo sapiens
atgagtaaagaaggc

SEQ ID NO: 2083516 - DNA, 15 bp, Homo sapiens
tgagtaaagaaggcc

SEQ ID NO: 2083517 - DNA, 15 bp, Homo sapiens
gagtaaagaaggcca

SEQ ID NO: 2083518 - DNA, 15 bp, Homo sapiens
agtaaagaaggccag

SEQ ID NO: 2083519 - DNA, 15 bp, Homo sapiens
gtaaagaaggccaga

SEQ ID NO: 2083520 - DNA, 15 bp, Homo sapiens
taaagaaggccagat

SEQ ID NO: 2083521 - DNA, 15 bp, Homo sapiens
aaagaaggccagatg

SEQ ID NO: 2083522 - DNA, 15 bp, Homo sapiens
aagaaggccagatgg

SEQ ID NO: 2083523 - DNA, 15 bp, Homo sapiens
agaaggccagatgga

SEQ ID NO: 2083524 - DNA, 15 bp, Homo sapiens
gaaggccagatggac

SEQ ID NO: 2083525 - DNA, 15 bp, Homo sapiens
aaggccagatggacc

SEQ ID NO: 2083526 - DNA, 15 bp, Homo sapiens
aggccagatggaccc

SEQ ID NO: 2083527 - DNA, 15 bp, Homo sapiens
ggccagatggaccct

SEQ ID NO: 2083528 - DNA, 15 bp, Homo sapiens
gccagatggaccctg

SEQ ID NO: 2083529 - DNA, 15 bp, Homo sapiens
ccagatggaccctgg

SEQ ID NO: 2083530 - DNA, 15 bp, Homo sapiens
cagatggaccctggc

SEQ ID NO: 2083531 - DNA, 15 bp, Homo sapiens
agatggaccctggca

SEQ ID NO: 2083532 - DNA, 15 bp, Homo sapiens
gatggaccctggcaa

SEQ ID NO: 2083533 - DNA, 15 bp, Homo sapiens
atggaccctggcaaa

SEQ ID NO: 2083534 - DNA, 15 bp, Homo sapiens
tggaccctggcaaac

SEQ ID NO: 2083535 - DNA, 15 bp, Homo sapiens
ggaccctggcaaact

SEQ ID NO: 2083536 - DNA, 15 bp, Homo sapiens
gaccctggcaaactg

SEQ ID NO: 2083537 - DNA, 15 bp, Homo sapiens
accctggcaaactga

SEQ ID NO: 2083538 - DNA, 15 bp, Homo sapiens
ccctggcaaactgag

SEQ ID NO: 2083539 - DNA, 15 bp, Homo sapiens
cctggcaaactgaga

SEQ ID NO: 2083540 - DNA, 15 bp, Homo sapiens
ctggcaaactgagaa

SEQ ID NO: 2083541 - DNA, 15 bp, Homo sapiens
tggcaaactgagaat

SEQ ID NO: 2083542 - DNA, 15 bp, Homo sapiens
ggcaaactgagaatg

SEQ ID NO: 2083543 - DNA, 15 bp, Homo sapiens
gcaaactgagaatgg

SEQ ID NO: 2083544 - DNA, 15 bp, Homo sapiens
caaactgagaatgga

SEQ ID NO: 2083545 - DNA, 15 bp, Homo sapiens
aaactgagaatggat

SEQ ID NO: 2083546 - DNA, 15 bp, Homo sapiens
aactgagaatggatg

SEQ ID NO: 2083547 - DNA, 15 bp, Homo sapiens
actgagaatggatgc

SEQ ID NO: 2083548 - DNA, 15 bp, Homo sapiens
ctgagaatggatgcc

SEQ ID NO: 2083549 - DNA, 15 bp, Homo sapiens
tgagaatggatgcct

SEQ ID NO: 2083550 - DNA, 15 bp, Homo sapiens
gagaatggatgcctt

SEQ ID NO: 2083551 - DNA, 15 bp, Homo sapiens
agaatggatgccttg

SEQ ID NO: 2083552 - DNA, 15 bp, Homo sapiens
gaatggatgccttgc

SEQ ID NO: 2083553 - DNA, 15 bp, Homo sapiens
aatggatgccttgcc

SEQ ID NO: 2083554 - DNA, 15 bp, Homo sapiens
atggatgccttgcct

SEQ ID NO: 2083555 - DNA, 15 bp, Homo sapiens
tggatgccttgccta

SEQ ID NO: 2083556 - DNA, 15 bp, Homo sapiens
ggatgccttgcctaa

SEQ ID NO: 2083557 - DNA, 15 bp, Homo sapiens
gatgccttgcctaag

SEQ ID NO: 2083558 - DNA, 15 bp, Homo sapiens
atgccttgcctaagg

SEQ ID NO: 2083559 - DNA, 15 bp, Homo sapiens
tgccttgcctaagga

SEQ ID NO: 2083560 - DNA, 15 bp, Homo sapiens
gccttgcctaaggag

SEQ ID NO: 2083561 - DNA, 15 bp, Homo sapiens
ccttgcctaaggagc

SEQ ID NO: 2083562 - DNA, 15 bp, Homo sapiens
cttgcctaaggagca

SEQ ID NO: 2083563 - DNA, 15 bp, Homo sapiens
ttgcctaaggagcag

SEQ ID NO: 2083564 - DNA, 15 bp, Homo sapiens
tgcctaaggagcagc

SEQ ID NO: 2083565 - DNA, 15 bp, Homo sapiens
gcctaaggagcagcc

SEQ ID NO: 2083566 - DNA, 15 bp, Homo sapiens
cctaaggagcagcct

SEQ ID NO: 2083567 - DNA, 15 bp, Homo sapiens
ctaaggagcagcctc

SEQ ID NO: 2083568 - DNA, 15 bp, Homo sapiens
taaggagcagcctcc

SEQ ID NO: 2083569 - DNA, 15 bp, Homo sapiens
aaggagcagcctcct

SEQ ID NO: 2083570 - DNA, 15 bp, Homo sapiens
aggagcagcctcctt

SEQ ID NO: 2083571 - DNA, 15 bp, Homo sapiens
ggagcagcctccttt

SEQ ID NO: 2083572 - DNA, 15 bp, Homo sapiens
gagcagcctcctttt

SEQ ID NO: 2083573 - DNA, 15 bp, Homo sapiens
agcagcctccttttg

SEQ ID NO: 2083574 - DNA, 15 bp, Homo sapiens
gcagcctccttttgg

SEQ ID NO: 2083575 - DNA, 15 bp, Homo sapiens
cagcctccttttggc

SEQ ID NO: 2083576 - DNA, 15 bp, Homo sapiens
agcctccttttggcc

SEQ ID NO: 2083577 - DNA, 15 bp, Homo sapiens
gcctccttttggccc

SEQ ID NO: 2083578 - DNA, 15 bp, Homo sapiens
cctccttttggccct

SEQ ID NO: 2083579 - DNA, 15 bp, Homo sapiens
ctccttttggcccta

SEQ ID NO: 2083580 - DNA, 15 bp, Homo sapiens
tccttttggccctag

SEQ ID NO: 2083581 - DNA, 15 bp, Homo sapiens
ccttttggccctagc

SEQ ID NO: 2083582 - DNA, 15 bp, Homo sapiens
cttttggccctagca

SEQ ID NO: 2083583 - DNA, 15 bp, Homo sapiens
ttttggccctagcag

SEQ ID NO: 2083584 - DNA, 15 bp, Homo sapiens
tttggccctagcaga

SEQ ID NO: 2083585 - DNA, 15 bp, Homo sapiens
ttggccctagcagat

SEQ ID NO: 2083586 - DNA, 15 bp, Homo sapiens
tggccctagcagatt

SEQ ID NO: 2083587 - DNA, 15 bp, Homo sapiens
ggccctagcagatta

SEQ ID NO: 2083588 - DNA, 15 bp, Homo sapiens
gccctagcagattac

SEQ ID NO: 2083589 - DNA, 15 bp, Homo sapiens
ccctagcagattact

SEQ ID NO: 2083590 - DNA, 15 bp, Homo sapiens
cctagcagattactg

SEQ ID NO: 2083591 - DNA, 15 bp, Homo sapiens
ctagcagattactgc

SEQ ID NO: 2083592 - DNA, 15 bp, Homo sapiens
tagcagattactgcc

SEQ ID NO: 2083593 - DNA, 15 bp, Homo sapiens
agcagattactgcca

SEQ ID NO: 2083594 - DNA, 15 bp, Homo sapiens
gcagattactgccag

SEQ ID NO: 2083595 - DNA, 15 bp, Homo sapiens
cagattactgccagg

SEQ ID NO: 2083596 - DNA, 15 bp, Homo sapiens
agattactgccaggc

SEQ ID NO: 2083597 - DNA, 15 bp, Homo sapiens
gattactgccaggcg

SEQ ID NO: 2083598 - DNA, 15 bp, Homo sapiens
attactgccaggcgg

SEQ ID NO: 2083599 - DNA, 15 bp, Homo sapiens
ttactgccaggcggg

SEQ ID NO: 2083600 - DNA, 15 bp, Homo sapiens
tactgccaggcggga

SEQ ID NO: 2083601 - DNA, 15 bp, Homo sapiens
actgccaggcgggaa

SEQ ID NO: 2083602 - DNA, 15 bp, Homo sapiens
ctgccaggcgggaat

SEQ ID NO: 2083603 - DNA, 15 bp, Homo sapiens
tgccaggcgggaatg

SEQ ID NO: 2083604 - DNA, 15 bp, Homo sapiens
gccaggcgggaatgt

SEQ ID NO: 2083605 - DNA, 15 bp, Homo sapiens
ccaggcgggaatgtg

SEQ ID NO: 2083606 - DNA, 15 bp, Homo sapiens
caggcgggaatgtgg

SEQ ID NO: 2083607 - DNA, 15 bp, Homo sapiens
aggcgggaatgtgga

SEQ ID NO: 2083608 - DNA, 15 bp, Homo sapiens
ggcgggaatgtggac

SEQ ID NO: 2083609 - DNA, 15 bp, Homo sapiens
gcgggaatgtggact

SEQ ID NO: 2083610 - DNA, 15 bp, Homo sapiens
cgggaatgtggactc

SEQ ID NO: 2083611 - DNA, 15 bp, Homo sapiens
gggaatgtggactca

SEQ ID NO: 2083612 - DNA, 15 bp, Homo sapiens
ggaatgtggactcag

SEQ ID NO: 2083613 - DNA, 15 bp, Homo sapiens
gaatgtggactcagt

SEQ ID NO: 2083614 - DNA, 15 bp, Homo sapiens
aatgtggactcagtg

SEQ ID NO: 2083615 - DNA, 15 bp, Homo sapiens
atgtggactcagtgt

SEQ ID NO: 2083616 - DNA, 15 bp, Homo sapiens
tgtggactcagtgtt

SEQ ID NO: 2083617 - DNA, 15 bp, Homo sapiens
gtggactcagtgttg

SEQ ID NO: 2083618 - DNA, 15 bp, Homo sapiens
tggactcagtgttgc

SEQ ID NO: 2083619 - DNA, 15 bp, Homo sapiens
ggactcagtgttgct

SEQ ID NO: 2083620 - DNA, 15 bp, Homo sapiens
gactcagtgttgctc

SEQ ID NO: 2083621 - DNA, 15 bp, Homo sapiens
actcagtgttgctcc

SEQ ID NO: 2083622 - DNA, 15 bp, Homo sapiens
ctcagtgttgctcca

SEQ ID NO: 2083623 - DNA, 15 bp, Homo sapiens
tcagtgttgctccat

SEQ ID NO: 2083624 - DNA, 15 bp, Homo sapiens
cagtgttgctccatc

SEQ ID NO: 2083625 - DNA, 15 bp, Homo sapiens
agtgttgctccatct

SEQ ID NO: 2083626 - DNA, 15 bp, Homo sapiens
gtgttgctccatctt

SEQ ID NO: 2083627 - DNA, 15 bp, Homo sapiens
tgttgctccatcttc

SEQ ID NO: 2083628 - DNA, 15 bp, Homo sapiens
gttgctccatcttct

SEQ ID NO: 2083629 - DNA, 15 bp, Homo sapiens
ttgctccatcttctg

SEQ ID NO: 2083630 - DNA, 15 bp, Homo sapiens
tgctccatcttctga

SEQ ID NO: 2083631 - DNA, 15 bp, Homo sapiens
gctccatcttctgat

SEQ ID NO: 2083632 - DNA, 15 bp, Homo sapiens
ctccatcttctgatt

SEQ ID NO: 2083633 - DNA, 15 bp, Homo sapiens
tccatcttctgattt

SEQ ID NO: 2083634 - DNA, 15 bp, Homo sapiens
ccatcttctgatttt

SEQ ID NO: 2083635 - DNA, 15 bp, Homo sapiens
catcttctgattttt

SEQ ID NO: 2083636 - DNA, 15 bp, Homo sapiens
atcttctgatttttt

SEQ ID NO: 2083637 - DNA, 15 bp, Homo sapiens
tcttctgatttttta

SEQ ID NO: 2083638 - DNA, 15 bp, Homo sapiens
cttctgattttttaa

SEQ ID NO: 2083639 - DNA, 15 bp, Homo sapiens
ttctgattttttaag

SEQ ID NO: 2083640 - DNA, 15 bp, Homo sapiens
tctgattttttaaga

SEQ ID NO: 2083641 - DNA, 15 bp, Homo sapiens
ctgattttttaagag

SEQ ID NO: 2083642 - DNA, 15 bp, Homo sapiens
tgattttttaagaga

SEQ ID NO: 2083643 - DNA, 15 bp, Homo sapiens
gattttttaagagaa

SEQ ID NO: 2083644 - DNA, 15 bp, Homo sapiens
tcagacccgcaggag

SEQ ID NO: 2083645 - DNA, 15 bp, Homo sapiens
cagacccgcaggagc

SEQ ID NO: 2083646 - DNA, 15 bp, Homo sapiens
agacccgcaggagcc

SEQ ID NO: 2083647 - DNA, 15 bp, Homo sapiens
gacccgcaggagccg

SEQ ID NO: 2083648 - DNA, 15 bp, Homo sapiens
acccgcaggagccgg

SEQ ID NO: 2083649 - DNA, 15 bp, Homo sapiens
cccgcaggagccgga

SEQ ID NO: 2083650 - DNA, 15 bp, Homo sapiens
ccgcaggagccggag

SEQ ID NO: 2083651 - DNA, 15 bp, Homo sapiens
cgcaggagccggagc

SEQ ID NO: 2083652 - DNA, 15 bp, Homo sapiens
gcaggagccggagcc

SEQ ID NO: 2083653 - DNA, 15 bp, Homo sapiens
caggagccggagccc

SEQ ID NO: 2083654 - DNA, 15 bp, Homo sapiens
aggagccggagcccg

SEQ ID NO: 2083655 - DNA, 15 bp, Homo sapiens
ggagccggagcccgg

SEQ ID NO: 2083656 - DNA, 15 bp, Homo sapiens
gagccggagcccggc

SEQ ID NO: 2083657 - DNA, 15 bp, Homo sapiens
agccggagcccggcg

SEQ ID NO: 2083658 - DNA, 15 bp, Homo sapiens
gccggagcccggcgt

SEQ ID NO: 2083659 - DNA, 15 bp, Homo sapiens
ccggagcccggcgtt

SEQ ID NO: 2083660 - DNA, 15 bp, Homo sapiens
cggagcccggcgttg

SEQ ID NO: 2083661 - DNA, 15 bp, Homo sapiens
ggagcccggcgttga

SEQ ID NO: 2083662 - DNA, 15 bp, Homo sapiens
gagcccggcgttgaa

SEQ ID NO: 2083663 - DNA, 15 bp, Homo sapiens
agcccggcgttgaag

SEQ ID NO: 2083664 - DNA, 15 bp, Homo sapiens
gcccggcgttgaagg

SEQ ID NO: 2083665 - DNA, 15 bp, Homo sapiens
cccggcgttgaaggg

SEQ ID NO: 2083666 - DNA, 15 bp, Homo sapiens
ccggcgttgaagggg

SEQ ID NO: 2083667 - DNA, 15 bp, Homo sapiens
cggcgttgaaggggc

SEQ ID NO: 2083668 - DNA, 15 bp, Homo sapiens
ggcgttgaaggggcc

SEQ ID NO: 2083669 - DNA, 15 bp, Homo sapiens
gcgttgaaggggccg

SEQ ID NO: 2083670 - DNA, 15 bp, Homo sapiens
cgttgaaggggccgt

SEQ ID NO: 2083671 - DNA, 15 bp, Homo sapiens
gttgaaggggccgtg

SEQ ID NO: 2083672 - DNA, 15 bp, Homo sapiens
ttgaaggggccgtgg

SEQ ID NO: 2083673 - DNA, 15 bp, Homo sapiens
tgaaggggccgtggg

SEQ ID NO: 2083674 - DNA, 15 bp, Homo sapiens
gaaggggccgtggga

SEQ ID NO: 2083675 - DNA, 15 bp, Homo sapiens
aaggggccgtgggaa

SEQ ID NO: 2083676 - DNA, 15 bp, Homo sapiens
aggggccgtgggaag

SEQ ID NO: 2083677 - DNA, 15 bp, Homo sapiens
ggggccgtgggaagt

SEQ ID NO: 2083678 - DNA, 15 bp, Homo sapiens
gggccgtgggaagta

SEQ ID NO: 2083679 - DNA, 15 bp, Homo sapiens
ggccgtgggaagtaa

SEQ ID NO: 2083680 - DNA, 15 bp, Homo sapiens
gccgtgggaagtaac

SEQ ID NO: 2083681 - DNA, 15 bp, Homo sapiens
ccgtgggaagtaacg

SEQ ID NO: 2083682 - DNA, 15 bp, Homo sapiens
cgtgggaagtaacgg

SEQ ID NO: 2083683 - DNA, 15 bp, Homo sapiens
gtgggaagtaacggg

SEQ ID NO: 2083684 - DNA, 15 bp, Homo sapiens
tgggaagtaacgggg

SEQ ID NO: 2083685 - DNA, 15 bp, Homo sapiens
gggaagtaacggggg

SEQ ID NO: 2083686 - DNA, 15 bp, Homo sapiens
ggaagtaacgggggg

SEQ ID NO: 2083687 - DNA, 15 bp, Homo sapiens
gaagtaacggggggt

SEQ ID NO: 2083688 - DNA, 15 bp, Homo sapiens
aagtaacggggggta

SEQ ID NO: 2083689 - DNA, 15 bp, Homo sapiens
agtaacggggggtac

SEQ ID NO: 2083690 - DNA, 15 bp, Homo sapiens
gtaacggggggtacc

SEQ ID NO: 2083691 - DNA, 15 bp, Homo sapiens
taacggggggtacca

SEQ ID NO: 2083692 - DNA, 15 bp, Homo sapiens
aacggggggtaccac

SEQ ID NO: 2083693 - DNA, 15 bp, Homo sapiens
acggggggtaccacg

SEQ ID NO: 2083694 - DNA, 15 bp, Homo sapiens
cggggggtaccacgg

SEQ ID NO: 2083695 - DNA, 15 bp, Homo sapiens
ggggggtaccacggt

SEQ ID NO: 2083696 - DNA, 15 bp, Homo sapiens
gggggtaccacggtt

SEQ ID NO: 2083697 - DNA, 15 bp, Homo sapiens
ggggtaccacggttt

SEQ ID NO: 2083698 - DNA, 15 bp, Homo sapiens
gggtaccacggttta

SEQ ID NO: 2083699 - DNA, 15 bp, Homo sapiens
ggtaccacggtttag

SEQ ID NO: 2083700 - DNA, 15 bp, Homo sapiens
gtaccacggtttagg

SEQ ID NO: 2083701 - DNA, 15 bp, Homo sapiens
taccacggtttagga

SEQ ID NO: 2083702 - DNA, 15 bp, Homo sapiens
accacggtttaggat

SEQ ID NO: 2083703 - DNA, 15 bp, Homo sapiens
ccacggtttaggatg

SEQ ID NO: 2083704 - DNA, 15 bp, Homo sapiens
cacggtttaggatgc

SEQ ID NO: 2083705 - DNA, 15 bp, Homo sapiens
acggtttaggatgcg

SEQ ID NO: 2083706 - DNA, 15 bp, Homo sapiens
cggtttaggatgcgc

SEQ ID NO: 2083707 - DNA, 15 bp, Homo sapiens
ggtttaggatgcgct

SEQ ID NO: 2083708 - DNA, 15 bp, Homo sapiens
gtttaggatgcgctg

SEQ ID NO: 2083709 - DNA, 15 bp, Homo sapiens
tttaggatgcgctgg

SEQ ID NO: 2083710 - DNA, 15 bp, Homo sapiens
ttaggatgcgctgga

SEQ ID NO: 2083711 - DNA, 15 bp, Homo sapiens
taggatgcgctggag

SEQ ID NO: 2083712 - DNA, 15 bp, Homo sapiens
aggatgcgctggagc

SEQ ID NO: 2083713 - DNA, 15 bp, Homo sapiens
ggatgcgctggagcg

SEQ ID NO: 2083714 - DNA, 15 bp, Homo sapiens
gatgcgctggagcga

SEQ ID NO: 2083715 - DNA, 15 bp, Homo sapiens
atgcgctggagcgaa

SEQ ID NO: 2083716 - DNA, 15 bp, Homo sapiens
tgcgctggagcgaaa

SEQ ID NO: 2083717 - DNA, 15 bp, Homo sapiens
gcgctggagcgaaag

SEQ ID NO: 2083718 - DNA, 15 bp, Homo sapiens
cgctggagcgaaagg

SEQ ID NO: 2083719 - DNA, 15 bp, Homo sapiens
gctggagcgaaagga

SEQ ID NO: 2083720 - DNA, 15 bp, Homo sapiens
ctggagcgaaaggat

SEQ ID NO: 2083721 - DNA, 15 bp, Homo sapiens
tggagcgaaaggatt

SEQ ID NO: 2083722 - DNA, 15 bp, Homo sapiens
ggagcgaaaggattg

SEQ ID NO: 2083723 - DNA, 15 bp, Homo sapiens
gagcgaaaggattgg

SEQ ID NO: 2083724 - DNA, 15 bp, Homo sapiens
agcgaaaggattggg

SEQ ID NO: 2083725 - DNA, 15 bp, Homo sapiens
gcgaaaggattgggg

SEQ ID NO: 2083726 - DNA, 15 bp, Homo sapiens
cgaaaggattggggt

SEQ ID NO: 2083727 - DNA, 15 bp, Homo sapiens
gaaaggattggggtg

SEQ ID NO: 2083728 - DNA, 15 bp, Homo sapiens
aaaggattggggtgg

SEQ ID NO: 2083729 - DNA, 15 bp, Homo sapiens
aaggattggggtggg

SEQ ID NO: 2083730 - DNA, 15 bp, Homo sapiens
aggattggggtgggg

SEQ ID NO: 2083731 - DNA, 15 bp, Homo sapiens
ggattggggtggggt

SEQ ID NO: 2083732 - DNA, 15 bp, Homo sapiens
gattggggtggggtc

SEQ ID NO: 2083733 - DNA, 15 bp, Homo sapiens
attggggtggggtcc

SEQ ID NO: 2083734 - DNA, 15 bp, Homo sapiens
ttggggtggggtccg

SEQ ID NO: 2083735 - DNA, 15 bp, Homo sapiens
tggggtggggtccgt

SEQ ID NO: 2083736 - DNA, 15 bp, Homo sapiens
ggggtggggtccgtg

SEQ ID NO: 2083737 - DNA, 15 bp, Homo sapiens
gggtggggtccgtgc

SEQ ID NO: 2083738 - DNA, 15 bp, Homo sapiens
ggtggggtccgtgct

SEQ ID NO: 2083739 - DNA, 15 bp, Homo sapiens
gtggggtccgtgctc

SEQ ID NO: 2083740 - DNA, 15 bp, Homo sapiens
tggggtccgtgctct

SEQ ID NO: 2083741 - DNA, 15 bp, Homo sapiens
ggggtccgtgctctt

SEQ ID NO: 2083742 - DNA, 15 bp, Homo sapiens
gggtccgtgctcttg

SEQ ID NO: 2083743 - DNA, 15 bp, Homo sapiens
ggtccgtgctcttgg

SEQ ID NO: 2083744 - DNA, 15 bp, Homo sapiens
gtccgtgctcttggc

SEQ ID NO: 2083745 - DNA, 15 bp, Homo sapiens
tccgtgctcttggca

SEQ ID NO: 2083746 - DNA, 15 bp, Homo sapiens
ccgtgctcttggcag

SEQ ID NO: 2083747 - DNA, 15 bp, Homo sapiens
cgtgctcttggcagt

SEQ ID NO: 2083748 - DNA, 15 bp, Homo sapiens
gtgctcttggcagtc

SEQ ID NO: 2083749 - DNA, 15 bp, Homo sapiens
tgctcttggcagtcg

SEQ ID NO: 2083750 - DNA, 15 bp, Homo sapiens
gctcttggcagtcgt

SEQ ID NO: 2083751 - DNA, 15 bp, Homo sapiens
ctcttggcagtcgtc

SEQ ID NO: 2083752 - DNA, 15 bp, Homo sapiens
tcttggcagtcgtct

SEQ ID NO: 2083753 - DNA, 15 bp, Homo sapiens
cttggcagtcgtctc

SEQ ID NO: 2083754 - DNA, 15 bp, Homo sapiens
ttggcagtcgtctct

SEQ ID NO: 2083755 - DNA, 15 bp, Homo sapiens
tggcagtcgtctctg

SEQ ID NO: 2083756 - DNA, 15 bp, Homo sapiens
ggcagtcgtctctgc

SEQ ID NO: 2083757 - DNA, 15 bp, Homo sapiens
gcagtcgtctctgcc

SEQ ID NO: 2083758 - DNA, 15 bp, Homo sapiens
cagtcgtctctgcca

SEQ ID NO: 2083759 - DNA, 15 bp, Homo sapiens
agtcgtctctgccag

SEQ ID NO: 2083760 - DNA, 15 bp, Homo sapiens
gtcgtctctgccagg

SEQ ID NO: 2083761 - DNA, 15 bp, Homo sapiens
tcgtctctgccaggc

SEQ ID NO: 2083762 - DNA, 15 bp, Homo sapiens
cgtctctgccaggcc

SEQ ID NO: 2083763 - DNA, 15 bp, Homo sapiens
gtctctgccaggcct

SEQ ID NO: 2083764 - DNA, 15 bp, Homo sapiens
tctctgccaggcctg

SEQ ID NO: 2083765 - DNA, 15 bp, Homo sapiens
ctctgccaggcctgt

SEQ ID NO: 2083766 - DNA, 15 bp, Homo sapiens
tctgccaggcctgtg

SEQ ID NO: 2083767 - DNA, 15 bp, Homo sapiens
ctgccaggcctgtgt

SEQ ID NO: 2083768 - DNA, 15 bp, Homo sapiens
tgccaggcctgtgtt

SEQ ID NO: 2083769 - DNA, 15 bp, Homo sapiens
gccaggcctgtgttc

SEQ ID NO: 2083770 - DNA, 15 bp, Homo sapiens
ccaggcctgtgttca

SEQ ID NO: 2083771 - DNA, 15 bp, Homo sapiens
caggcctgtgttcac

SEQ ID NO: 2083772 - DNA, 15 bp, Homo sapiens
aggcctgtgttcaca

SEQ ID NO: 2083773 - DNA, 15 bp, Homo sapiens
ggcctgtgttcacat

SEQ ID NO: 2083774 - DNA, 15 bp, Homo sapiens
gcctgtgttcacatg

SEQ ID NO: 2083775 - DNA, 15 bp, Homo sapiens
cctgtgttcacatgc

SEQ ID NO: 2083776 - DNA, 15 bp, Homo sapiens
ctgtgttcacatgct

SEQ ID NO: 2083777 - DNA, 15 bp, Homo sapiens
tgtgttcacatgctt

SEQ ID NO: 2083778 - DNA, 15 bp, Homo sapiens
gtgttcacatgcttg

SEQ ID NO: 2083779 - DNA, 15 bp, Homo sapiens
tgttcacatgcttga

SEQ ID NO: 2083780 - DNA, 15 bp, Homo sapiens
gttcacatgcttgac

SEQ ID NO: 2083781 - DNA, 15 bp, Homo sapiens
ttcacatgcttgact

SEQ ID NO: 2083782 - DNA, 15 bp, Homo sapiens
tcacatgcttgactt

SEQ ID NO: 2083783 - DNA, 15 bp, Homo sapiens
cacatgcttgacttt

SEQ ID NO: 2083784 - DNA, 15 bp, Homo sapiens
acatgcttgactttc

SEQ ID NO: 2083785 - DNA, 15 bp, Homo sapiens
catgcttgactttct

SEQ ID NO: 2083786 - DNA, 15 bp, Homo sapiens
atgcttgactttctc

SEQ ID NO: 2083787 - DNA, 15 bp, Homo sapiens
tgcttgactttctcc

SEQ ID NO: 2083788 - DNA, 15 bp, Homo sapiens
gcttgactttctccc

SEQ ID NO: 2083789 - DNA, 15 bp, Homo sapiens
cttgactttctccct

SEQ ID NO: 2083790 - DNA, 15 bp, Homo sapiens
ttgactttctccctc

SEQ ID NO: 2083791 - DNA, 15 bp, Homo sapiens
tgactttctccctca

SEQ ID NO: 2083792 - DNA, 15 bp, Homo sapiens
gactttctccctcag

SEQ ID NO: 2083793 - DNA, 15 bp, Homo sapiens
actttctccctcaga

SEQ ID NO: 2083794 - DNA, 15 bp, Homo sapiens
ctttctccctcagat

SEQ ID NO: 2083795 - DNA, 15 bp, Homo sapiens
tttctccctcagatg

SEQ ID NO: 2083796 - DNA, 15 bp, Homo sapiens
ttctccctcagatgc

SEQ ID NO: 2083797 - DNA, 15 bp, Homo sapiens
tctccctcagatgcc

SEQ ID NO: 2083798 - DNA, 15 bp, Homo sapiens
ctccctcagatgcct

SEQ ID NO: 2083799 - DNA, 15 bp, Homo sapiens
tccctcagatgcctg

SEQ ID NO: 2083800 - DNA, 15 bp, Homo sapiens
ccctcagatgcctgg

SEQ ID NO: 2083801 - DNA, 15 bp, Homo sapiens
cctcagatgcctgga

SEQ ID NO: 2083802 - DNA, 15 bp, Homo sapiens
ctcagatgcctggag

SEQ ID NO: 2083803 - DNA, 15 bp, Homo sapiens
tcagatgcctggagt

SEQ ID NO: 2083804 - DNA, 15 bp, Homo sapiens
cagatgcctggagtt

SEQ ID NO: 2083805 - DNA, 15 bp, Homo sapiens
agatgcctggagtta

SEQ ID NO: 2083806 - DNA, 15 bp, Homo sapiens
gatgcctggagttac

SEQ ID NO: 2083807 - DNA, 15 bp, Homo sapiens
atgcctggagttact

SEQ ID NO: 2083808 - DNA, 15 bp, Homo sapiens
tgcctggagttactg

SEQ ID NO: 2083809 - DNA, 15 bp, Homo sapiens
gcctggagttactgt

SEQ ID NO: 2083810 - DNA, 15 bp, Homo sapiens
cctggagttactgta

SEQ ID NO: 2083811 - DNA, 15 bp, Homo sapiens
ctggagttactgtaa

SEQ ID NO: 2083812 - DNA, 15 bp, Homo sapiens
tggagttactgtaaa

SEQ ID NO: 2083813 - DNA, 15 bp, Homo sapiens
ggagttactgtaaaa

SEQ ID NO: 2083814 - DNA, 15 bp, Homo sapiens
gagttactgtaaaag

SEQ ID NO: 2083815 - DNA, 15 bp, Homo sapiens
agttactgtaaaaga

SEQ ID NO: 2083816 - DNA, 15 bp, Homo sapiens
gttactgtaaaagac

SEQ ID NO: 2083817 - DNA, 15 bp, Homo sapiens
ttactgtaaaagacg

SEQ ID NO: 2083818 - DNA, 15 bp, Homo sapiens
tactgtaaaagacgt

SEQ ID NO: 2083819 - DNA, 15 bp, Homo sapiens
actgtaaaagacgtg

SEQ ID NO: 2083820 - DNA, 15 bp, Homo sapiens
ctgtaaaagacgtga

SEQ ID NO: 2083821 - DNA, 15 bp, Homo sapiens
tgtaaaagacgtgaa

SEQ ID NO: 2083822 - DNA, 15 bp, Homo sapiens
gtaaaagacgtgaac

SEQ ID NO: 2083823 - DNA, 15 bp, Homo sapiens
taaaagacgtgaacc

SEQ ID NO: 2083824 - DNA, 15 bp, Homo sapiens
aaaagacgtgaacca

SEQ ID NO: 2083825 - DNA, 15 bp, Homo sapiens
aaagacgtgaaccag

SEQ ID NO: 2083826 - DNA, 15 bp, Homo sapiens
aagacgtgaaccagc

SEQ ID NO: 2083827 - DNA, 15 bp, Homo sapiens
agacgtgaaccagca

SEQ ID NO: 2083828 - DNA, 15 bp, Homo sapiens
gacgtgaaccagcag

SEQ ID NO: 2083829 - DNA, 15 bp, Homo sapiens
acgtgaaccagcagg

SEQ ID NO: 2083830 - DNA, 15 bp, Homo sapiens
cgtgaaccagcagga

SEQ ID NO: 2083831 - DNA, 15 bp, Homo sapiens
gtgaaccagcaggag

SEQ ID NO: 2083832 - DNA, 15 bp, Homo sapiens
tgaaccagcaggagt

SEQ ID NO: 2083833 - DNA, 15 bp, Homo sapiens
gaaccagcaggagtt

SEQ ID NO: 2083834 - DNA, 15 bp, Homo sapiens
aaccagcaggagttc

SEQ ID NO: 2083835 - DNA, 15 bp, Homo sapiens
accagcaggagttcg

SEQ ID NO: 2083836 - DNA, 15 bp, Homo sapiens
ccagcaggagttcgt

SEQ ID NO: 2083837 - DNA, 15 bp, Homo sapiens
cagcaggagttcgtc

SEQ ID NO: 2083838 - DNA, 15 bp, Homo sapiens
agcaggagttcgtca

SEQ ID NO: 2083839 - DNA, 15 bp, Homo sapiens
gcaggagttcgtcag

SEQ ID NO: 2083840 - DNA, 15 bp, Homo sapiens
caggagttcgtcaga

SEQ ID NO: 2083841 - DNA, 15 bp, Homo sapiens
aggagttcgtcagag

SEQ ID NO: 2083842 - DNA, 15 bp, Homo sapiens
ggagttcgtcagagc

SEQ ID NO: 2083843 - DNA, 15 bp, Homo sapiens
gagttcgtcagagct

SEQ ID NO: 2083844 - DNA, 15 bp, Homo sapiens
agttcgtcagagctc

SEQ ID NO: 2083845 - DNA, 15 bp, Homo sapiens
gttcgtcagagctct

SEQ ID NO: 2083846 - DNA, 15 bp, Homo sapiens
ttcgtcagagctctg

SEQ ID NO: 2083847 - DNA, 15 bp, Homo sapiens
tcgtcagagctctgg

SEQ ID NO: 2083848 - DNA, 15 bp, Homo sapiens
cgtcagagctctggc

SEQ ID NO: 2083849 - DNA, 15 bp, Homo sapiens
gtcagagctctggca

SEQ ID NO: 2083850 - DNA, 15 bp, Homo sapiens
tcagagctctggcag

SEQ ID NO: 2083851 - DNA, 15 bp, Homo sapiens
cagagctctggcagc

SEQ ID NO: 2083852 - DNA, 15 bp, Homo sapiens
agagctctggcagcc

SEQ ID NO: 2083853 - DNA, 15 bp, Homo sapiens
gagctctggcagcct

SEQ ID NO: 2083854 - DNA, 15 bp, Homo sapiens
agctctggcagcctt

SEQ ID NO: 2083855 - DNA, 15 bp, Homo sapiens
gctctggcagccttc

SEQ ID NO: 2083856 - DNA, 15 bp, Homo sapiens
ctctggcagccttcc

SEQ ID NO: 2083857 - DNA, 15 bp, Homo sapiens
tctggcagccttcct

SEQ ID NO: 2083858 - DNA, 15 bp, Homo sapiens
ctggcagccttcctc

SEQ ID NO: 2083859 - DNA, 15 bp, Homo sapiens
tggcagccttcctca

SEQ ID NO: 2083860 - DNA, 15 bp, Homo sapiens
ggcagccttcctcaa

SEQ ID NO: 2083861 - DNA, 15 bp, Homo sapiens
gcagccttcctcaaa

SEQ ID NO: 2083862 - DNA, 15 bp, Homo sapiens
cagccttcctcaaaa

SEQ ID NO: 2083863 - DNA, 15 bp, Homo sapiens
agccttcctcaaaaa

SEQ ID NO: 2083864 - DNA, 15 bp, Homo sapiens
gccttcctcaaaaag

SEQ ID NO: 2083865 - DNA, 15 bp, Homo sapiens
ccttcctcaaaaagt

SEQ ID NO: 2083866 - DNA, 15 bp, Homo sapiens
cttcctcaaaaagtg

SEQ ID NO: 2083867 - DNA, 15 bp, Homo sapiens
ttcctcaaaaagtga

SEQ ID NO: 2083868 - DNA, 15 bp, Homo sapiens
tcctcaaaaagtgag

SEQ ID NO: 2083869 - DNA, 15 bp, Homo sapiens
cctcaaaaagtgagt

SEQ ID NO: 2083870 - DNA, 15 bp, Homo sapiens
ctcaaaaagtgagtt

SEQ ID NO: 2083871 - DNA, 15 bp, Homo sapiens
tcaaaaagtgagttt

SEQ ID NO: 2083872 - DNA, 15 bp, Homo sapiens
caaaaagtgagtttg

SEQ ID NO: 2083873 - DNA, 15 bp, Homo sapiens
aaaaagtgagtttgg

SEQ ID NO: 2083874 - DNA, 15 bp, Homo sapiens
aaaagtgagtttggg

SEQ ID NO: 2083875 - DNA, 15 bp, Homo sapiens
aaagtgagtttgggg

SEQ ID NO: 2083876 - DNA, 15 bp, Homo sapiens
aagtgagtttgggga

SEQ ID NO: 2083877 - DNA, 15 bp, Homo sapiens
agtgagtttggggac

SEQ ID NO: 2083878 - DNA, 15 bp, Homo sapiens
gtgagtttggggact

SEQ ID NO: 2083879 - DNA, 15 bp, Homo sapiens
tgagtttggggactg

SEQ ID NO: 2083880 - DNA, 15 bp, Homo sapiens
gagtttggggactga

SEQ ID NO: 2083881 - DNA, 15 bp, Homo sapiens
agtttggggactgag

SEQ ID NO: 2083882 - DNA, 15 bp, Homo sapiens
gtttggggactgagg

SEQ ID NO: 2083883 - DNA, 15 bp, Homo sapiens
tttggggactgaggt

SEQ ID NO: 2083884 - DNA, 15 bp, Homo sapiens
ttggggactgaggtt

SEQ ID NO: 2083885 - DNA, 15 bp, Homo sapiens
tggggactgaggttc

SEQ ID NO: 2083886 - DNA, 15 bp, Homo sapiens
ggggactgaggttca

SEQ ID NO: 2083887 - DNA, 15 bp, Homo sapiens
gggactgaggttcaa

SEQ ID NO: 2083888 - DNA, 15 bp, Homo sapiens
ggactgaggttcaaa

SEQ ID NO: 2083889 - DNA, 15 bp, Homo sapiens
gactgaggttcaaaa

SEQ ID NO: 2083890 - DNA, 15 bp, Homo sapiens
actgaggttcaaaac

SEQ ID NO: 2083891 - DNA, 15 bp, Homo sapiens
ctgaggttcaaaacg

SEQ ID NO: 2083892 - DNA, 15 bp, Homo sapiens
tgaggttcaaaacgg

SEQ ID NO: 2083893 - DNA, 15 bp, Homo sapiens
gaggttcaaaacggg

SEQ ID NO: 2083894 - DNA, 15 bp, Homo sapiens
aggttcaaaacgggt

SEQ ID NO: 2083895 - DNA, 15 bp, Homo sapiens
ggttcaaaacgggtg

SEQ ID NO: 2083896 - DNA, 15 bp, Homo sapiens
gttcaaaacgggtgg

SEQ ID NO: 2083897 - DNA, 15 bp, Homo sapiens
ttcaaaacgggtgga

SEQ ID NO: 2083898 - DNA, 15 bp, Homo sapiens
tcaaaacgggtggag

SEQ ID NO: 2083899 - DNA, 15 bp, Homo sapiens
caaaacgggtggagg

SEQ ID NO: 2083900 - DNA, 15 bp, Homo sapiens
aaaacgggtggaggc

SEQ ID NO: 2083901 - DNA, 15 bp, Homo sapiens
aaacgggtggaggct

SEQ ID NO: 2083902 - DNA, 15 bp, Homo sapiens
aacgggtggaggctg

SEQ ID NO: 2083903 - DNA, 15 bp, Homo sapiens
acgggtggaggctgt

SEQ ID NO: 2083904 - DNA, 15 bp, Homo sapiens
cgggtggaggctgtc

SEQ ID NO: 2083905 - DNA, 15 bp, Homo sapiens
gggtggaggctgtcg

SEQ ID NO: 2083906 - DNA, 15 bp, Homo sapiens
ggtggaggctgtcgc

SEQ ID NO: 2083907 - DNA, 15 bp, Homo sapiens
gtggaggctgtcgcc

SEQ ID NO: 2083908 - DNA, 15 bp, Homo sapiens
tggaggctgtcgcct

SEQ ID NO: 2083909 - DNA, 15 bp, Homo sapiens
ggaggctgtcgcctt

SEQ ID NO: 2083910 - DNA, 15 bp, Homo sapiens
gaggctgtcgccttg

SEQ ID NO: 2083911 - DNA, 15 bp, Homo sapiens
aggctgtcgccttgg

SEQ ID NO: 2083912 - DNA, 15 bp, Homo sapiens
ggctgtcgccttggc

SEQ ID NO: 2083913 - DNA, 15 bp, Homo sapiens
gctgtcgccttggcc

SEQ ID NO: 2083914 - DNA, 15 bp, Homo sapiens
ctgtcgccttggcct

SEQ ID NO: 2083915 - DNA, 15 bp, Homo sapiens
tgtcgccttggcctg

SEQ ID NO: 2083916 - DNA, 15 bp, Homo sapiens
gtcgccttggcctgc

SEQ ID NO: 2083917 - DNA, 15 bp, Homo sapiens
tcgccttggcctgcc

SEQ ID NO: 2083918 - DNA, 15 bp, Homo sapiens
cgccttggcctgccc

SEQ ID NO: 2083919 - DNA, 15 bp, Homo sapiens
gccttggcctgccca

SEQ ID NO: 2083920 - DNA, 15 bp, Homo sapiens
ccttggcctgcccat

SEQ ID NO: 2083921 - DNA, 15 bp, Homo sapiens
cttggcctgcccatc

SEQ ID NO: 2083922 - DNA, 15 bp, Homo sapiens
ttggcctgcccatct

SEQ ID NO: 2083923 - DNA, 15 bp, Homo sapiens
tggcctgcccatctg

SEQ ID NO: 2083924 - DNA, 15 bp, Homo sapiens
ggcctgcccatctga

SEQ ID NO: 2083925 - DNA, 15 bp, Homo sapiens
gcctgcccatctgag

SEQ ID NO: 2083926 - DNA, 15 bp, Homo sapiens
cctgcccatctgagc

SEQ ID NO: 2083927 - DNA, 15 bp, Homo sapiens
ctgcccatctgagcc

SEQ ID NO: 2083928 - DNA, 15 bp, Homo sapiens
tgcccatctgagccc

SEQ ID NO: 2083929 - DNA, 15 bp, Homo sapiens
gcccatctgagcccc

SEQ ID NO: 2083930 - DNA, 15 bp, Homo sapiens
cccatctgagcccca

SEQ ID NO: 2083931 - DNA, 15 bp, Homo sapiens
ccatctgagccccag

SEQ ID NO: 2083932 - DNA, 15 bp, Homo sapiens
catctgagccccagt

SEQ ID NO: 2083933 - DNA, 15 bp, Homo sapiens
atctgagccccagtg

SEQ ID NO: 2083934 - DNA, 15 bp, Homo sapiens
tctgagccccagtgt

SEQ ID NO: 2083935 - DNA, 15 bp, Homo sapiens
ctgagccccagtgtt

SEQ ID NO: 2083936 - DNA, 15 bp, Homo sapiens
tgagccccagtgttt

SEQ ID NO: 2083937 - DNA, 15 bp, Homo sapiens
gagccccagtgtttg

SEQ ID NO: 2083938 - DNA, 15 bp, Homo sapiens
agccccagtgtttgc

SEQ ID NO: 2083939 - DNA, 15 bp, Homo sapiens
gccccagtgtttgcc

SEQ ID NO: 2083940 - DNA, 15 bp, Homo sapiens
ccccagtgtttgccg

SEQ ID NO: 2083941 - DNA, 15 bp, Homo sapiens
cccagtgtttgccgg

SEQ ID NO: 2083942 - DNA, 15 bp, Homo sapiens
ccagtgtttgccggt

SEQ ID NO: 2083943 - DNA, 15 bp, Homo sapiens
cagtgtttgccggtc

SEQ ID NO: 2083944 - DNA, 15 bp, Homo sapiens
agtgtttgccggtcc

SEQ ID NO: 2083945 - DNA, 15 bp, Homo sapiens
gtgtttgccggtcct

SEQ ID NO: 2083946 - DNA, 15 bp, Homo sapiens
tgtttgccggtcctg

SEQ ID NO: 2083947 - DNA, 15 bp, Homo sapiens
gtttgccggtcctgg

SEQ ID NO: 2083948 - DNA, 15 bp, Homo sapiens
tttgccggtcctggc

SEQ ID NO: 2083949 - DNA, 15 bp, Homo sapiens
ttgccggtcctggca

SEQ ID NO: 2083950 - DNA, 15 bp, Homo sapiens
tgccggtcctggcag

SEQ ID NO: 2083951 - DNA, 15 bp, Homo sapiens
gccggtcctggcagg

SEQ ID NO: 2083952 - DNA, 15 bp, Homo sapiens
ccggtcctggcaggg

SEQ ID NO: 2083953 - DNA, 15 bp, Homo sapiens
cggtcctggcagggg

SEQ ID NO: 2083954 - DNA, 15 bp, Homo sapiens
ggtcctggcagggga

SEQ ID NO: 2083955 - DNA, 15 bp, Homo sapiens
gtcctggcaggggag

SEQ ID NO: 2083956 - DNA, 15 bp, Homo sapiens
tcctggcaggggagg

SEQ ID NO: 2083957 - DNA, 15 bp, Homo sapiens
cctggcaggggaggc

SEQ ID NO: 2083958 - DNA, 15 bp, Homo sapiens
ctggcaggggaggct

SEQ ID NO: 2083959 - DNA, 15 bp, Homo sapiens
tggcaggggaggctt

SEQ ID NO: 2083960 - DNA, 15 bp, Homo sapiens
ggcaggggaggcttg

SEQ ID NO: 2083961 - DNA, 15 bp, Homo sapiens
gcaggggaggcttgt

SEQ ID NO: 2083962 - DNA, 15 bp, Homo sapiens
caggggaggcttgtt

SEQ ID NO: 2083963 - DNA, 15 bp, Homo sapiens
aggggaggcttgttt

SEQ ID NO: 2083964 - DNA, 15 bp, Homo sapiens
ggggaggcttgtttg

SEQ ID NO: 2083965 - DNA, 15 bp, Homo sapiens
gggaggcttgtttgg

SEQ ID NO: 2083966 - DNA, 15 bp, Homo sapiens
ggaggcttgtttggg

SEQ ID NO: 2083967 - DNA, 15 bp, Homo sapiens
gaggcttgtttgggg

SEQ ID NO: 2083968 - DNA, 15 bp, Homo sapiens
aggcttgtttggggc

SEQ ID NO: 2083969 - DNA, 15 bp, Homo sapiens
ggcttgtttggggcc

SEQ ID NO: 2083970 - DNA, 15 bp, Homo sapiens
gcttgtttggggcct

SEQ ID NO: 2083971 - DNA, 15 bp, Homo sapiens
cttgtttggggcctc

SEQ ID NO: 2083972 - DNA, 15 bp, Homo sapiens
ttgtttggggcctcc

SEQ ID NO: 2083973 - DNA, 15 bp, Homo sapiens
tgtttggggcctccg

SEQ ID NO: 2083974 - DNA, 15 bp, Homo sapiens
gtttggggcctccgt

SEQ ID NO: 2083975 - DNA, 15 bp, Homo sapiens
tttggggcctccgtg

SEQ ID NO: 2083976 - DNA, 15 bp, Homo sapiens
ttggggcctccgtgg

SEQ ID NO: 2083977 - DNA, 15 bp, Homo sapiens
tggggcctccgtggc

SEQ ID NO: 2083978 - DNA, 15 bp, Homo sapiens
ggggcctccgtggct

SEQ ID NO: 2083979 - DNA, 15 bp, Homo sapiens
gggcctccgtggctc

SEQ ID NO: 2083980 - DNA, 15 bp, Homo sapiens
ggcctccgtggctcc

SEQ ID NO: 2083981 - DNA, 15 bp, Homo sapiens
gcctccgtggctcct

SEQ ID NO: 2083982 - DNA, 15 bp, Homo sapiens
cctccgtggctcctt

SEQ ID NO: 2083983 - DNA, 15 bp, Homo sapiens
ctccgtggctccttt

SEQ ID NO: 2083984 - DNA, 15 bp, Homo sapiens
tccgtggctcctttc

SEQ ID NO: 2083985 - DNA, 15 bp, Homo sapiens
ccgtggctcctttca

SEQ ID NO: 2083986 - DNA, 15 bp, Homo sapiens
cgtggctcctttcag

SEQ ID NO: 2083987 - DNA, 15 bp, Homo sapiens
gtggctcctttcagc

SEQ ID NO: 2083988 - DNA, 15 bp, Homo sapiens
tggctcctttcagcg

SEQ ID NO: 2083989 - DNA, 15 bp, Homo sapiens
ggctcctttcagcgt

SEQ ID NO: 2083990 - DNA, 15 bp, Homo sapiens
gctcctttcagcgtg

SEQ ID NO: 2083991 - DNA, 15 bp, Homo sapiens
ctcctttcagcgtga

SEQ ID NO: 2083992 - DNA, 15 bp, Homo sapiens
tcctttcagcgtgag

SEQ ID NO: 2083993 - DNA, 15 bp, Homo sapiens
cctttcagcgtgagg

SEQ ID NO: 2083994 - DNA, 15 bp, Homo sapiens
ctttcagcgtgaggc

SEQ ID NO: 2083995 - DNA, 15 bp, Homo sapiens
tttcagcgtgaggcc

SEQ ID NO: 2083996 - DNA, 15 bp, Homo sapiens
ttcagcgtgaggcct

SEQ ID NO: 2083997 - DNA, 15 bp, Homo sapiens
tcagcgtgaggcctg

SEQ ID NO: 2083998 - DNA, 15 bp, Homo sapiens
cagcgtgaggcctgg

SEQ ID NO: 2083999 - DNA, 15 bp, Homo sapiens
agcgtgaggcctggc

SEQ ID NO: 2084000 - DNA, 15 bp, Homo sapiens
gcgtgaggcctggct

SEQ ID NO: 2084001 - DNA, 15 bp, Homo sapiens
cgtgaggcctggctt

SEQ ID NO: 2084002 - DNA, 15 bp, Homo sapiens
gtgaggcctggcttg

SEQ ID NO: 2084003 - DNA, 15 bp, Homo sapiens
tgaggcctggcttgt

SEQ ID NO: 2084004 - DNA, 15 bp, Homo sapiens
gaggcctggcttgtg

SEQ ID NO: 2084005 - DNA, 15 bp, Homo sapiens
aggcctggcttgtgt

SEQ ID NO: 2084006 - DNA, 15 bp, Homo sapiens
ggcctggcttgtgtt

SEQ ID NO: 2084007 - DNA, 15 bp, Homo sapiens
gcctggcttgtgttc

SEQ ID NO: 2084008 - DNA, 15 bp, Homo sapiens
cctggcttgtgttcc

SEQ ID NO: 2084009 - DNA, 15 bp, Homo sapiens
ctggcttgtgttccg

SEQ ID NO: 2084010 - DNA, 15 bp, Homo sapiens
tggcttgtgttccgg

SEQ ID NO: 2084011 - DNA, 15 bp, Homo sapiens
ggcttgtgttccggt

SEQ ID NO: 2084012 - DNA, 15 bp, Homo sapiens
gcttgtgttccggtt

SEQ ID NO: 2084013 - DNA, 15 bp, Homo sapiens
cttgtgttccggttc

SEQ ID NO: 2084014 - DNA, 15 bp, Homo sapiens
ttgtgttccggttcc

SEQ ID NO: 2084015 - DNA, 15 bp, Homo sapiens
tgtgttccggttcca

SEQ ID NO: 2084016 - DNA, 15 bp, Homo sapiens
gtgttccggttccag

SEQ ID NO: 2084017 - DNA, 15 bp, Homo sapiens
tgttccggttccagc

SEQ ID NO: 2084018 - DNA, 15 bp, Homo sapiens
gttccggttccagcc

SEQ ID NO: 2084019 - DNA, 15 bp, Homo sapiens
ttccggttccagcct

SEQ ID NO: 2084020 - DNA, 15 bp, Homo sapiens
tccggttccagcctc

SEQ ID NO: 2084021 - DNA, 15 bp, Homo sapiens
ccggttccagcctct

SEQ ID NO: 2084022 - DNA, 15 bp, Homo sapiens
cggttccagcctctc

SEQ ID NO: 2084023 - DNA, 15 bp, Homo sapiens
ggttccagcctctct

SEQ ID NO: 2084024 - DNA, 15 bp, Homo sapiens
gttccagcctctctt

SEQ ID NO: 2084025 - DNA, 15 bp, Homo sapiens
ttccagcctctcttt

SEQ ID NO: 2084026 - DNA, 15 bp, Homo sapiens
tccagcctctctttg

SEQ ID NO: 2084027 - DNA, 15 bp, Homo sapiens
ccagcctctctttgt

SEQ ID NO: 2084028 - DNA, 15 bp, Homo sapiens
cagcctctctttgta

SEQ ID NO: 2084029 - DNA, 15 bp, Homo sapiens
agcctctctttgtac

SEQ ID NO: 2084030 - DNA, 15 bp, Homo sapiens
gcctctctttgtact

SEQ ID NO: 2084031 - DNA, 15 bp, Homo sapiens
cctctctttgtactc

SEQ ID NO: 2084032 - DNA, 15 bp, Homo sapiens
ctctctttgtactct

SEQ ID NO: 2084033 - DNA, 15 bp, Homo sapiens
tctctttgtactctg

SEQ ID NO: 2084034 - DNA, 15 bp, Homo sapiens
ctctttgtactctgg

SEQ ID NO: 2084035 - DNA, 15 bp, Homo sapiens
tctttgtactctggg

SEQ ID NO: 2084036 - DNA, 15 bp, Homo sapiens
ctttgtactctgggc

SEQ ID NO: 2084037 - DNA, 15 bp, Homo sapiens
tttgtactctgggca

SEQ ID NO: 2084038 - DNA, 15 bp, Homo sapiens
ttgtactctgggcac

SEQ ID NO: 2084039 - DNA, 15 bp, Homo sapiens
tgtactctgggcaca

SEQ ID NO: 2084040 - DNA, 15 bp, Homo sapiens
gtactctgggcacag

SEQ ID NO: 2084041 - DNA, 15 bp, Homo sapiens
tactctgggcacagc

SEQ ID NO: 2084042 - DNA, 15 bp, Homo sapiens
actctgggcacagca

SEQ ID NO: 2084043 - DNA, 15 bp, Homo sapiens
ctctgggcacagcat

SEQ ID NO: 2084044 - DNA, 15 bp, Homo sapiens
tctgggcacagcata

SEQ ID NO: 2084045 - DNA, 15 bp, Homo sapiens
ctgggcacagcatag

SEQ ID NO: 2084046 - DNA, 15 bp, Homo sapiens
tgggcacagcatagt

SEQ ID NO: 2084047 - DNA, 15 bp, Homo sapiens
gggcacagcatagtt

SEQ ID NO: 2084048 - DNA, 15 bp, Homo sapiens
ggcacagcatagttg

SEQ ID NO: 2084049 - DNA, 15 bp, Homo sapiens
gcacagcatagttgt

SEQ ID NO: 2084050 - DNA, 15 bp, Homo sapiens
cacagcatagttgtg

SEQ ID NO: 2084051 - DNA, 15 bp, Homo sapiens
acagcatagttgtgt

SEQ ID NO: 2084052 - DNA, 15 bp, Homo sapiens
cagcatagttgtgtt

SEQ ID NO: 2084053 - DNA, 15 bp, Homo sapiens
agcatagttgtgttg

SEQ ID NO: 2084054 - DNA, 15 bp, Homo sapiens
gcatagttgtgttga

SEQ ID NO: 2084055 - DNA, 15 bp, Homo sapiens
catagttgtgttgag

SEQ ID NO: 2084056 - DNA, 15 bp, Homo sapiens
atagttgtgttgagg

SEQ ID NO: 2084057 - DNA, 15 bp, Homo sapiens
tagttgtgttgaggg

SEQ ID NO: 2084058 - DNA, 15 bp, Homo sapiens
agttgtgttgagggg

SEQ ID NO: 2084059 - DNA, 15 bp, Homo sapiens
gttgtgttgagggga

SEQ ID NO: 2084060 - DNA, 15 bp, Homo sapiens
ttgtgttgaggggag

SEQ ID NO: 2084061 - DNA, 15 bp, Homo sapiens
tgtgttgaggggagg

SEQ ID NO: 2084062 - DNA, 15 bp, Homo sapiens
gtgttgaggggaggg

SEQ ID NO: 2084063 - DNA, 15 bp, Homo sapiens
tgttgaggggagggc

SEQ ID NO: 2084064 - DNA, 15 bp, Homo sapiens
gttgaggggagggca

SEQ ID NO: 2084065 - DNA, 15 bp, Homo sapiens
ttgaggggagggcat

SEQ ID NO: 2084066 - DNA, 15 bp, Homo sapiens
tgaggggagggcatt

SEQ ID NO: 2084067 - DNA, 15 bp, Homo sapiens
gaggggagggcattt

SEQ ID NO: 2084068 - DNA, 15 bp, Homo sapiens
aggggagggcatttg

SEQ ID NO: 2084069 - DNA, 15 bp, Homo sapiens
ggggagggcatttgg

SEQ ID NO: 2084070 - DNA, 15 bp, Homo sapiens
gggagggcatttggg

SEQ ID NO: 2084071 - DNA, 15 bp, Homo sapiens
ggagggcatttggga

SEQ ID NO: 2084072 - DNA, 15 bp, Homo sapiens
gagggcatttgggat

SEQ ID NO: 2084073 - DNA, 15 bp, Homo sapiens
agggcatttgggata

SEQ ID NO: 2084074 - DNA, 15 bp, Homo sapiens
gggcatttgggatat

SEQ ID NO: 2084075 - DNA, 15 bp, Homo sapiens
ggcatttgggatatg

SEQ ID NO: 2084076 - DNA, 15 bp, Homo sapiens
gcatttgggatatgg

SEQ ID NO: 2084077 - DNA, 15 bp, Homo sapiens
catttgggatatggg

SEQ ID NO: 2084078 - DNA, 15 bp, Homo sapiens
atttgggatatgggg

SEQ ID NO: 2084079 - DNA, 15 bp, Homo sapiens
tttgggatatggggt

SEQ ID NO: 2084080 - DNA, 15 bp, Homo sapiens
ttgggatatggggta

SEQ ID NO: 2084081 - DNA, 15 bp, Homo sapiens
tgggatatggggtag

SEQ ID NO: 2084082 - DNA, 15 bp, Homo sapiens
gggatatggggtagt

SEQ ID NO: 2084083 - DNA, 15 bp, Homo sapiens
ggatatggggtagtt

SEQ ID NO: 2084084 - DNA, 15 bp, Homo sapiens
gatatggggtagttt

SEQ ID NO: 2084085 - DNA, 15 bp, Homo sapiens
atatggggtagtttg

SEQ ID NO: 2084086 - DNA, 15 bp, Homo sapiens
tatggggtagtttgt

SEQ ID NO: 2084087 - DNA, 15 bp, Homo sapiens
atggggtagtttgtg

SEQ ID NO: 2084088 - DNA, 15 bp, Homo sapiens
tggggtagtttgtgg

SEQ ID NO: 2084089 - DNA, 15 bp, Homo sapiens
ggggtagtttgtgga

SEQ ID NO: 2084090 - DNA, 15 bp, Homo sapiens
gggtagtttgtggag

SEQ ID NO: 2084091 - DNA, 15 bp, Homo sapiens
ggtagtttgtggaga

SEQ ID NO: 2084092 - DNA, 15 bp, Homo sapiens
gtagtttgtggagat

SEQ ID NO: 2084093 - DNA, 15 bp, Homo sapiens
tagtttgtggagatg

SEQ ID NO: 2084094 - DNA, 15 bp, Homo sapiens
agtttgtggagatga

SEQ ID NO: 2084095 - DNA, 15 bp, Homo sapiens
gtttgtggagatgac

SEQ ID NO: 2084096 - DNA, 15 bp, Homo sapiens
tttgtggagatgact

SEQ ID NO: 2084097 - DNA, 15 bp, Homo sapiens
ttgtggagatgactg

SEQ ID NO: 2084098 - DNA, 15 bp, Homo sapiens
tgtggagatgactga

SEQ ID NO: 2084099 - DNA, 15 bp, Homo sapiens
gtggagatgactgaa

SEQ ID NO: 2084100 - DNA, 15 bp, Homo sapiens
tggagatgactgaat

SEQ ID NO: 2084101 - DNA, 15 bp, Homo sapiens
ggagatgactgaatc

SEQ ID NO: 2084102 - DNA, 15 bp, Homo sapiens
gagatgactgaatcg

SEQ ID NO: 2084103 - DNA, 15 bp, Homo sapiens
agatgactgaatcgt

SEQ ID NO: 2084104 - DNA, 15 bp, Homo sapiens
gatgactgaatcgtg

SEQ ID NO: 2084105 - DNA, 15 bp, Homo sapiens
atgactgaatcgtgc

SEQ ID NO: 2084106 - DNA, 15 bp, Homo sapiens
tgactgaatcgtgct

SEQ ID NO: 2084107 - DNA, 15 bp, Homo sapiens
gactgaatcgtgctt

SEQ ID NO: 2084108 - DNA, 15 bp, Homo sapiens
actgaatcgtgcttt

SEQ ID NO: 2084109 - DNA, 15 bp, Homo sapiens
ctgaatcgtgctttt

SEQ ID NO: 2084110 - DNA, 15 bp, Homo sapiens
tgaatcgtgcttttc

SEQ ID NO: 2084111 - DNA, 15 bp, Homo sapiens
gaatcgtgcttttcc

SEQ ID NO: 2084112 - DNA, 15 bp, Homo sapiens
aatcgtgcttttccc

SEQ ID NO: 2084113 - DNA, 15 bp, Homo sapiens
atcgtgcttttccca

SEQ ID NO: 2084114 - DNA, 15 bp, Homo sapiens
tcgtgcttttcccac

SEQ ID NO: 2084115 - DNA, 15 bp, Homo sapiens
cgtgcttttcccact

SEQ ID NO: 2084116 - DNA, 15 bp, Homo sapiens
gtgcttttcccactg

SEQ ID NO: 2084117 - DNA, 15 bp, Homo sapiens
tgcttttcccactgt

SEQ ID NO: 2084118 - DNA, 15 bp, Homo sapiens
gcttttcccactgtt

SEQ ID NO: 2084119 - DNA, 15 bp, Homo sapiens
cttttcccactgttt

SEQ ID NO: 2084120 - DNA, 15 bp, Homo sapiens
ttttcccactgtttt

SEQ ID NO: 2084121 - DNA, 15 bp, Homo sapiens
tttcccactgttttg

SEQ ID NO: 2084122 - DNA, 15 bp, Homo sapiens
ttcccactgttttgg

SEQ ID NO: 2084123 - DNA, 15 bp, Homo sapiens
tcccactgttttggt

SEQ ID NO: 2084124 - DNA, 15 bp, Homo sapiens
cccactgttttggtc

SEQ ID NO: 2084125 - DNA, 15 bp, Homo sapiens
ccactgttttggtct

SEQ ID NO: 2084126 - DNA, 15 bp, Homo sapiens
cactgttttggtctt

SEQ ID NO: 2084127 - DNA, 15 bp, Homo sapiens
actgttttggtctta

SEQ ID NO: 2084128 - DNA, 15 bp, Homo sapiens
ctgttttggtcttag

SEQ ID NO: 2084129 - DNA, 15 bp, Homo sapiens
tgttttggtcttagg

SEQ ID NO: 2084130 - DNA, 15 bp, Homo sapiens
gttttggtcttaggt

SEQ ID NO: 2084131 - DNA, 15 bp, Homo sapiens
ttttggtcttaggtc

SEQ ID NO: 2084132 - DNA, 15 bp, Homo sapiens
tttggtcttaggtcc

SEQ ID NO: 2084133 - DNA, 15 bp, Homo sapiens
ttggtcttaggtccg

SEQ ID NO: 2084134 - DNA, 15 bp, Homo sapiens
tggtcttaggtccgg

SEQ ID NO: 2084135 - DNA, 15 bp, Homo sapiens
ggtcttaggtccggg

SEQ ID NO: 2084136 - DNA, 15 bp, Homo sapiens
gtcttaggtccggga

SEQ ID NO: 2084137 - DNA, 15 bp, Homo sapiens
tcttaggtccgggaa

SEQ ID NO: 2084138 - DNA, 15 bp, Homo sapiens
cttaggtccgggaag

SEQ ID NO: 2084139 - DNA, 15 bp, Homo sapiens
ttaggtccgggaagc

SEQ ID NO: 2084140 - DNA, 15 bp, Homo sapiens
taggtccgggaagct

SEQ ID NO: 2084141 - DNA, 15 bp, Homo sapiens
aggtccgggaagctg

SEQ ID NO: 2084142 - DNA, 15 bp, Homo sapiens
ggtccgggaagctga

SEQ ID NO: 2084143 - DNA, 15 bp, Homo sapiens
gtccgggaagctgaa

SEQ ID NO: 2084144 - DNA, 15 bp, Homo sapiens
tccgggaagctgaaa

SEQ ID NO: 2084145 - DNA, 15 bp, Homo sapiens
ccgggaagctgaaag

SEQ ID NO: 2084146 - DNA, 15 bp, Homo sapiens
cgggaagctgaaagt

SEQ ID NO: 2084147 - DNA, 15 bp, Homo sapiens
gggaagctgaaagtc

SEQ ID NO: 2084148 - DNA, 15 bp, Homo sapiens
ggaagctgaaagtcc

SEQ ID NO: 2084149 - DNA, 15 bp, Homo sapiens
gaagctgaaagtccc

SEQ ID NO: 2084150 - DNA, 15 bp, Homo sapiens
aagctgaaagtcccc

SEQ ID NO: 2084151 - DNA, 15 bp, Homo sapiens
agctgaaagtccccg

SEQ ID NO: 2084152 - DNA, 15 bp, Homo sapiens
gctgaaagtccccga

SEQ ID NO: 2084153 - DNA, 15 bp, Homo sapiens
ctgaaagtccccgaa

SEQ ID NO: 2084154 - DNA, 15 bp, Homo sapiens
tgaaagtccccgaat

SEQ ID NO: 2084155 - DNA, 15 bp, Homo sapiens
gaaagtccccgaatg

SEQ ID NO: 2084156 - DNA, 15 bp, Homo sapiens
aaagtccccgaatgg

SEQ ID NO: 2084157 - DNA, 15 bp, Homo sapiens
aagtccccgaatggg

SEQ ID NO: 2084158 - DNA, 15 bp, Homo sapiens
agtccccgaatgggt

SEQ ID NO: 2084159 - DNA, 15 bp, Homo sapiens
gtccccgaatgggtg

SEQ ID NO: 2084160 - DNA, 15 bp, Homo sapiens
tccccgaatgggtgg

SEQ ID NO: 2084161 - DNA, 15 bp, Homo sapiens
ccccgaatgggtgga

SEQ ID NO: 2084162 - DNA, 15 bp, Homo sapiens
cccgaatgggtggat

SEQ ID NO: 2084163 - DNA, 15 bp, Homo sapiens
ccgaatgggtggata

SEQ ID NO: 2084164 - DNA, 15 bp, Homo sapiens
cgaatgggtggatac

SEQ ID NO: 2084165 - DNA, 15 bp, Homo sapiens
gaatgggtggatacc

SEQ ID NO: 2084166 - DNA, 15 bp, Homo sapiens
aatgggtggataccg

SEQ ID NO: 2084167 - DNA, 15 bp, Homo sapiens
atgggtggataccgt

SEQ ID NO: 2084168 - DNA, 15 bp, Homo sapiens
tgggtggataccgtc

SEQ ID NO: 2084169 - DNA, 15 bp, Homo sapiens
gggtggataccgtca

SEQ ID NO: 2084170 - DNA, 15 bp, Homo sapiens
ggtggataccgtcaa

SEQ ID NO: 2084171 - DNA, 15 bp, Homo sapiens
gtggataccgtcaag

SEQ ID NO: 2084172 - DNA, 15 bp, Homo sapiens
tggataccgtcaagc

SEQ ID NO: 2084173 - DNA, 15 bp, Homo sapiens
ggataccgtcaagct

SEQ ID NO: 2084174 - DNA, 15 bp, Homo sapiens
gataccgtcaagctg

SEQ ID NO: 2084175 - DNA, 15 bp, Homo sapiens
ataccgtcaagctgg

SEQ ID NO: 2084176 - DNA, 15 bp, Homo sapiens
taccgtcaagctggc

SEQ ID NO: 2084177 - DNA, 15 bp, Homo sapiens
accgtcaagctggcc

SEQ ID NO: 2084178 - DNA, 15 bp, Homo sapiens
ccgtcaagctggcca

SEQ ID NO: 2084179 - DNA, 15 bp, Homo sapiens
cgtcaagctggccaa

SEQ ID NO: 2084180 - DNA, 15 bp, Homo sapiens
gtcaagctggccaag

SEQ ID NO: 2084181 - DNA, 15 bp, Homo sapiens
tcaagctggccaagc

SEQ ID NO: 2084182 - DNA, 15 bp, Homo sapiens
caagctggccaagca

SEQ ID NO: 2084183 - DNA, 15 bp, Homo sapiens
aagctggccaagcac

SEQ ID NO: 2084184 - DNA, 15 bp, Homo sapiens
agctggccaagcaca

SEQ ID NO: 2084185 - DNA, 15 bp, Homo sapiens
gctggccaagcacaa

SEQ ID NO: 2084186 - DNA, 15 bp, Homo sapiens
ctggccaagcacaaa

SEQ ID NO: 2084187 - DNA, 15 bp, Homo sapiens
tggccaagcacaaag

SEQ ID NO: 2084188 - DNA, 15 bp, Homo sapiens
ggccaagcacaaaga

SEQ ID NO: 2084189 - DNA, 15 bp, Homo sapiens
gccaagcacaaagag

SEQ ID NO: 2084190 - DNA, 15 bp, Homo sapiens
ccaagcacaaagagc

SEQ ID NO: 2084191 - DNA, 15 bp, Homo sapiens
caagcacaaagagct

SEQ ID NO: 2084192 - DNA, 15 bp, Homo sapiens
aagcacaaagagctt

SEQ ID NO: 2084193 - DNA, 15 bp, Homo sapiens
agcacaaagagcttg

SEQ ID NO: 2084194 - DNA, 15 bp, Homo sapiens
gcacaaagagcttgc

SEQ ID NO: 2084195 - DNA, 15 bp, Homo sapiens
cacaaagagcttgct

SEQ ID NO: 2084196 - DNA, 15 bp, Homo sapiens
acaaagagcttgctc

SEQ ID NO: 2084197 - DNA, 15 bp, Homo sapiens
caaagagcttgctcc

SEQ ID NO: 2084198 - DNA, 15 bp, Homo sapiens
aaagagcttgctccc

SEQ ID NO: 2084199 - DNA, 15 bp, Homo sapiens
aagagcttgctccct

SEQ ID NO: 2084200 - DNA, 15 bp, Homo sapiens
agagcttgctcccta

SEQ ID NO: 2084201 - DNA, 15 bp, Homo sapiens
gagcttgctccctac

SEQ ID NO: 2084202 - DNA, 15 bp, Homo sapiens
agcttgctccctacg

SEQ ID NO: 2084203 - DNA, 15 bp, Homo sapiens
gcttgctccctacga

SEQ ID NO: 2084204 - DNA, 15 bp, Homo sapiens
cttgctccctacgat

SEQ ID NO: 2084205 - DNA, 15 bp, Homo sapiens
ttgctccctacgatg

SEQ ID NO: 2084206 - DNA, 15 bp, Homo sapiens
tgctccctacgatga

SEQ ID NO: 2084207 - DNA, 15 bp, Homo sapiens
gctccctacgatgag

SEQ ID NO: 2084208 - DNA, 15 bp, Homo sapiens
ctccctacgatgaga

SEQ ID NO: 2084209 - DNA, 15 bp, Homo sapiens
tccctacgatgagaa

SEQ ID NO: 2084210 - DNA, 15 bp, Homo sapiens
ccctacgatgagaac

SEQ ID NO: 2084211 - DNA, 15 bp, Homo sapiens
cctacgatgagaact

SEQ ID NO: 2084212 - DNA, 15 bp, Homo sapiens
ctacgatgagaactg

SEQ ID NO: 2084213 - DNA, 15 bp, Homo sapiens
tacgatgagaactgg

SEQ ID NO: 2084214 - DNA, 15 bp, Homo sapiens
acgatgagaactggt

SEQ ID NO: 2084215 - DNA, 15 bp, Homo sapiens
cgatgagaactggtt

SEQ ID NO: 2084216 - DNA, 15 bp, Homo sapiens
gatgagaactggttc

SEQ ID NO: 2084217 - DNA, 15 bp, Homo sapiens
atgagaactggttct

SEQ ID NO: 2084218 - DNA, 15 bp, Homo sapiens
tgagaactggttcta

SEQ ID NO: 2084219 - DNA, 15 bp, Homo sapiens
gagaactggttctac

SEQ ID NO: 2084220 - DNA, 15 bp, Homo sapiens
agaactggttctaca

SEQ ID NO: 2084221 - DNA, 15 bp, Homo sapiens
gaactggttctacac

SEQ ID NO: 2084222 - DNA, 15 bp, Homo sapiens
aactggttctacacg

SEQ ID NO: 2084223 - DNA, 15 bp, Homo sapiens
actggttctacacgc

SEQ ID NO: 2084224 - DNA, 15 bp, Homo sapiens
ctggttctacacgcg

SEQ ID NO: 2084225 - DNA, 15 bp, Homo sapiens
tggttctacacgcga

SEQ ID NO: 2084226 - DNA, 15 bp, Homo sapiens
ggttctacacgcgag

SEQ ID NO: 2084227 - DNA, 15 bp, Homo sapiens
gttctacacgcgagc

SEQ ID NO: 2084228 - DNA, 15 bp, Homo sapiens
ttctacacgcgagct

SEQ ID NO: 2084229 - DNA, 15 bp, Homo sapiens
tctacacgcgagctg

SEQ ID NO: 2084230 - DNA, 15 bp, Homo sapiens
ctacacgcgagctgg

SEQ ID NO: 2084231 - DNA, 15 bp, Homo sapiens
tacacgcgagctggt

SEQ ID NO: 2084232 - DNA, 15 bp, Homo sapiens
acacgcgagctggtg

SEQ ID NO: 2084233 - DNA, 15 bp, Homo sapiens
cacgcgagctggtga

SEQ ID NO: 2084234 - DNA, 15 bp, Homo sapiens
acgcgagctggtgag

SEQ ID NO: 2084235 - DNA, 15 bp, Homo sapiens
cgcgagctggtgagg

SEQ ID NO: 2084236 - DNA, 15 bp, Homo sapiens
gcgagctggtgagga

SEQ ID NO: 2084237 - DNA, 15 bp, Homo sapiens
cgagctggtgaggaa

SEQ ID NO: 2084238 - DNA, 15 bp, Homo sapiens
gagctggtgaggaac

SEQ ID NO: 2084239 - DNA, 15 bp, Homo sapiens
agctggtgaggaact

SEQ ID NO: 2084240 - DNA, 15 bp, Homo sapiens
gctggtgaggaactt

SEQ ID NO: 2084241 - DNA, 15 bp, Homo sapiens
ctggtgaggaactta

SEQ ID NO: 2084242 - DNA, 15 bp, Homo sapiens
tggtgaggaacttag

SEQ ID NO: 2084243 - DNA, 15 bp, Homo sapiens
ggtgaggaacttagg

SEQ ID NO: 2084244 - DNA, 15 bp, Homo sapiens
gtgaggaacttaggt

SEQ ID NO: 2084245 - DNA, 15 bp, Homo sapiens
tgaggaacttaggtc

SEQ ID NO: 2084246 - DNA, 15 bp, Homo sapiens
gaggaacttaggtct

SEQ ID NO: 2084247 - DNA, 15 bp, Homo sapiens
aggaacttaggtctt

SEQ ID NO: 2084248 - DNA, 15 bp, Homo sapiens
ggaacttaggtcttt

SEQ ID NO: 2084249 - DNA, 15 bp, Homo sapiens
gaacttaggtctttg

SEQ ID NO: 2084250 - DNA, 15 bp, Homo sapiens
aacttaggtctttgg

SEQ ID NO: 2084251 - DNA, 15 bp, Homo sapiens
acttaggtctttggc

SEQ ID NO: 2084252 - DNA, 15 bp, Homo sapiens
cttaggtctttggct

SEQ ID NO: 2084253 - DNA, 15 bp, Homo sapiens
ttaggtctttggctg

SEQ ID NO: 2084254 - DNA, 15 bp, Homo sapiens
taggtctttggctgg

SEQ ID NO: 2084255 - DNA, 15 bp, Homo sapiens
aggtctttggctgga

SEQ ID NO: 2084256 - DNA, 15 bp, Homo sapiens
ggtctttggctggag

SEQ ID NO: 2084257 - DNA, 15 bp, Homo sapiens
gtctttggctggaga

SEQ ID NO: 2084258 - DNA, 15 bp, Homo sapiens
tctttggctggagag

SEQ ID NO: 2084259 - DNA, 15 bp, Homo sapiens
ctttggctggagagt

SEQ ID NO: 2084260 - DNA, 15 bp, Homo sapiens
tttggctggagagtg

SEQ ID NO: 2084261 - DNA, 15 bp, Homo sapiens
ttggctggagagtgg

SEQ ID NO: 2084262 - DNA, 15 bp, Homo sapiens
tggctggagagtggg

SEQ ID NO: 2084263 - DNA, 15 bp, Homo sapiens
ggctggagagtgggg

SEQ ID NO: 2084264 - DNA, 15 bp, Homo sapiens
gctggagagtgggga

SEQ ID NO: 2084265 - DNA, 15 bp, Homo sapiens
ctggagagtggggag

SEQ ID NO: 2084266 - DNA, 15 bp, Homo sapiens
tggagagtggggagc

SEQ ID NO: 2084267 - DNA, 15 bp, Homo sapiens
ggagagtggggagct

SEQ ID NO: 2084268 - DNA, 15 bp, Homo sapiens
gagagtggggagctg

SEQ ID NO: 2084269 - DNA, 15 bp, Homo sapiens
agagtggggagctgg

SEQ ID NO: 2084270 - DNA, 15 bp, Homo sapiens
gagtggggagctggg

SEQ ID NO: 2084271 - DNA, 15 bp, Homo sapiens
agtggggagctgggt

SEQ ID NO: 2084272 - DNA, 15 bp, Homo sapiens
gtggggagctgggtg

SEQ ID NO: 2084273 - DNA, 15 bp, Homo sapiens
tggggagctgggtga

SEQ ID NO: 2084274 - DNA, 15 bp, Homo sapiens
ggggagctgggtgac

SEQ ID NO: 2084275 - DNA, 15 bp, Homo sapiens
gggagctgggtgacc

SEQ ID NO: 2084276 - DNA, 15 bp, Homo sapiens
ggagctgggtgaccc

SEQ ID NO: 2084277 - DNA, 15 bp, Homo sapiens
gagctgggtgacccc

SEQ ID NO: 2084278 - DNA, 15 bp, Homo sapiens
agctgggtgacccct

SEQ ID NO: 2084279 - DNA, 15 bp, Homo sapiens
gctgggtgacccctg

SEQ ID NO: 2084280 - DNA, 15 bp, Homo sapiens
ctgggtgacccctgg

SEQ ID NO: 2084281 - DNA, 15 bp, Homo sapiens
tgggtgacccctggc

SEQ ID NO: 2084282 - DNA, 15 bp, Homo sapiens
gggtgacccctggca

SEQ ID NO: 2084283 - DNA, 15 bp, Homo sapiens
ggtgacccctggcac

SEQ ID NO: 2084284 - DNA, 15 bp, Homo sapiens
gtgacccctggcaca

SEQ ID NO: 2084285 - DNA, 15 bp, Homo sapiens
tgacccctggcacaa

SEQ ID NO: 2084286 - DNA, 15 bp, Homo sapiens
gacccctggcacaaa

SEQ ID NO: 2084287 - DNA, 15 bp, Homo sapiens
acccctggcacaaac

SEQ ID NO: 2084288 - DNA, 15 bp, Homo sapiens
cccctggcacaaacc

SEQ ID NO: 2084289 - DNA, 15 bp, Homo sapiens
ccctggcacaaacca

SEQ ID NO: 2084290 - DNA, 15 bp, Homo sapiens
cctggcacaaaccat

SEQ ID NO: 2084291 - DNA, 15 bp, Homo sapiens
ctggcacaaaccata

SEQ ID NO: 2084292 - DNA, 15 bp, Homo sapiens
tggcacaaaccatac

SEQ ID NO: 2084293 - DNA, 15 bp, Homo sapiens
ggcacaaaccatact

SEQ ID NO: 2084294 - DNA, 15 bp, Homo sapiens
gcacaaaccatactt

SEQ ID NO: 2084295 - DNA, 15 bp, Homo sapiens
cacaaaccatacttc

SEQ ID NO: 2084296 - DNA, 15 bp, Homo sapiens
acaaaccatacttcc

SEQ ID NO: 2084297 - DNA, 15 bp, Homo sapiens
caaaccatacttccc

SEQ ID NO: 2084298 - DNA, 15 bp, Homo sapiens
aaaccatacttccct

SEQ ID NO: 2084299 - DNA, 15 bp, Homo sapiens
aaccatacttccctg

SEQ ID NO: 2084300 - DNA, 15 bp, Homo sapiens
accatacttccctgt

SEQ ID NO: 2084301 - DNA, 15 bp, Homo sapiens
ccatacttccctgtc

SEQ ID NO: 2084302 - DNA, 15 bp, Homo sapiens
catacttccctgtct

SEQ ID NO: 2084303 - DNA, 15 bp, Homo sapiens
atacttccctgtctc

SEQ ID NO: 2084304 - DNA, 15 bp, Homo sapiens
tacttccctgtctcc

SEQ ID NO: 2084305 - DNA, 15 bp, Homo sapiens
acttccctgtctcct

SEQ ID NO: 2084306 - DNA, 15 bp, Homo sapiens
cttccctgtctcctc

SEQ ID NO: 2084307 - DNA, 15 bp, Homo sapiens
ttccctgtctcctct

SEQ ID NO: 2084308 - DNA, 15 bp, Homo sapiens
tccctgtctcctctg

SEQ ID NO: 2084309 - DNA, 15 bp, Homo sapiens
ccctgtctcctctga

SEQ ID NO: 2084310 - DNA, 15 bp, Homo sapiens
cctgtctcctctgag

SEQ ID NO: 2084311 - DNA, 15 bp, Homo sapiens
ctgtctcctctgagc

SEQ ID NO: 2084312 - DNA, 15 bp, Homo sapiens
tgtctcctctgagct

SEQ ID NO: 2084313 - DNA, 15 bp, Homo sapiens
gtctcctctgagctc

SEQ ID NO: 2084314 - DNA, 15 bp, Homo sapiens
tctcctctgagctct

SEQ ID NO: 2084315 - DNA, 15 bp, Homo sapiens
ctcctctgagctctt

SEQ ID NO: 2084316 - DNA, 15 bp, Homo sapiens
tcctctgagctcttt

SEQ ID NO: 2084317 - DNA, 15 bp, Homo sapiens
cctctgagctctttc

SEQ ID NO: 2084318 - DNA, 15 bp, Homo sapiens
ctctgagctctttcc

SEQ ID NO: 2084319 - DNA, 15 bp, Homo sapiens
tctgagctctttccc

SEQ ID NO: 2084320 - DNA, 15 bp, Homo sapiens
ctgagctctttcccg

SEQ ID NO: 2084321 - DNA, 15 bp, Homo sapiens
tgagctctttcccgc

SEQ ID NO: 2084322 - DNA, 15 bp, Homo sapiens
gagctctttcccgcc

SEQ ID NO: 2084323 - DNA, 15 bp, Homo sapiens
agctctttcccgccc

SEQ ID NO: 2084324 - DNA, 15 bp, Homo sapiens
gctctttcccgcccc

SEQ ID NO: 2084325 - DNA, 15 bp, Homo sapiens
ctctttcccgcccca

SEQ ID NO: 2084326 - DNA, 15 bp, Homo sapiens
tctttcccgccccaa

SEQ ID NO: 2084327 - DNA, 15 bp, Homo sapiens
acccgcaagtgacaa

SEQ ID NO: 2084328 - DNA, 15 bp, Homo sapiens
cccgcaagtgacaac

SEQ ID NO: 2084329 - DNA, 15 bp, Homo sapiens
ccgcaagtgacaacc

SEQ ID NO: 2084330 - DNA, 15 bp, Homo sapiens
cgcaagtgacaacct

SEQ ID NO: 2084331 - DNA, 15 bp, Homo sapiens
gcaagtgacaacctc

SEQ ID NO: 2084332 - DNA, 15 bp, Homo sapiens
caagtgacaacctcc

SEQ ID NO: 2084333 - DNA, 15 bp, Homo sapiens
aagtgacaacctccc

SEQ ID NO: 2084334 - DNA, 15 bp, Homo sapiens
agtgacaacctcccc

SEQ ID NO: 2084335 - DNA, 15 bp, Homo sapiens
gtgacaacctcccct

SEQ ID NO: 2084336 - DNA, 15 bp, Homo sapiens
tgacaacctcccctc

SEQ ID NO: 2084337 - DNA, 15 bp, Homo sapiens
gacaacctcccctct

SEQ ID NO: 2084338 - DNA, 15 bp, Homo sapiens
acaacctcccctctc

SEQ ID NO: 2084339 - DNA, 15 bp, Homo sapiens
caacctcccctctct

SEQ ID NO: 2084340 - DNA, 15 bp, Homo sapiens
aacctcccctctctg

SEQ ID NO: 2084341 - DNA, 15 bp, Homo sapiens
acctcccctctctgg

SEQ ID NO: 2084342 - DNA, 15 bp, Homo sapiens
cctcccctctctggc

SEQ ID NO: 2084343 - DNA, 15 bp, Homo sapiens
ctcccctctctggcc

SEQ ID NO: 2084344 - DNA, 15 bp, Homo sapiens
tcccctctctggcct

SEQ ID NO: 2084345 - DNA, 15 bp, Homo sapiens
cccctctctggcctc

SEQ ID NO: 2084346 - DNA, 15 bp, Homo sapiens
ccctctctggcctcg

SEQ ID NO: 2084347 - DNA, 15 bp, Homo sapiens
cctctctggcctcgg

SEQ ID NO: 2084348 - DNA, 15 bp, Homo sapiens
ctctctggcctcggt

SEQ ID NO: 2084349 - DNA, 15 bp, Homo sapiens
tctctggcctcggtt

SEQ ID NO: 2084350 - DNA, 15 bp, Homo sapiens
ctctggcctcggttt

SEQ ID NO: 2084351 - DNA, 15 bp, Homo sapiens
tctggcctcggtttc

SEQ ID NO: 2084352 - DNA, 15 bp, Homo sapiens
ctggcctcggtttcc

SEQ ID NO: 2084353 - DNA, 15 bp, Homo sapiens
tggcctcggtttccc

SEQ ID NO: 2084354 - DNA, 15 bp, Homo sapiens
ggcctcggtttcccc

SEQ ID NO: 2084355 - DNA, 15 bp, Homo sapiens
gcctcggtttccccc

SEQ ID NO: 2084356 - DNA, 15 bp, Homo sapiens
cctcggtttccccct

SEQ ID NO: 2084357 - DNA, 15 bp, Homo sapiens
ctcggtttccccctc

SEQ ID NO: 2084358 - DNA, 15 bp, Homo sapiens
tcggtttccccctct

SEQ ID NO: 2084359 - DNA, 15 bp, Homo sapiens
cggtttccccctctg

SEQ ID NO: 2084360 - DNA, 15 bp, Homo sapiens
ggtttccccctctgt

SEQ ID NO: 2084361 - DNA, 15 bp, Homo sapiens
gtttccccctctgta

SEQ ID NO: 2084362 - DNA, 15 bp, Homo sapiens
tttccccctctgtaa

SEQ ID NO: 2084363 - DNA, 15 bp, Homo sapiens
ttccccctctgtaaa

SEQ ID NO: 2084364 - DNA, 15 bp, Homo sapiens
tccccctctgtaaaa

SEQ ID NO: 2084365 - DNA, 15 bp, Homo sapiens
ccccctctgtaaaat

SEQ ID NO: 2084366 - DNA, 15 bp, Homo sapiens
cccctctgtaaaatg

SEQ ID NO: 2084367 - DNA, 15 bp, Homo sapiens
ccctctgtaaaatgg

SEQ ID NO: 2084368 - DNA, 15 bp, Homo sapiens
cctctgtaaaatggg

SEQ ID NO: 2084369 - DNA, 15 bp, Homo sapiens
ctctgtaaaatgggg

SEQ ID NO: 2084370 - DNA, 15 bp, Homo sapiens
tctgtaaaatggggg

SEQ ID NO: 2084371 - DNA, 15 bp, Homo sapiens
ctgtaaaatggggga

SEQ ID NO: 2084372 - DNA, 15 bp, Homo sapiens
tgtaaaatgggggat

SEQ ID NO: 2084373 - DNA, 15 bp, Homo sapiens
gtaaaatgggggatg

SEQ ID NO: 2084374 - DNA, 15 bp, Homo sapiens
taaaatgggggatgg

SEQ ID NO: 2084375 - DNA, 15 bp, Homo sapiens
aaaatgggggatggc

SEQ ID NO: 2084376 - DNA, 15 bp, Homo sapiens
aaatgggggatggcc

SEQ ID NO: 2084377 - DNA, 15 bp, Homo sapiens
aatgggggatggcct

SEQ ID NO: 2084378 - DNA, 15 bp, Homo sapiens
atgggggatggccta

SEQ ID NO: 2084379 - DNA, 15 bp, Homo sapiens
tgggggatggcctac

SEQ ID NO: 2084380 - DNA, 15 bp, Homo sapiens
gggggatggcctacc

SEQ ID NO: 2084381 - DNA, 15 bp, Homo sapiens
ggggatggcctacct

SEQ ID NO: 2084382 - DNA, 15 bp, Homo sapiens
gggatggcctacctt

SEQ ID NO: 2084383 - DNA, 15 bp, Homo sapiens
ggatggcctaccttg

SEQ ID NO: 2084384 - DNA, 15 bp, Homo sapiens
gatggcctaccttgc

SEQ ID NO: 2084385 - DNA, 15 bp, Homo sapiens
atggcctaccttgcc

SEQ ID NO: 2084386 - DNA, 15 bp, Homo sapiens
tggcctaccttgcca

SEQ ID NO: 2084387 - DNA, 15 bp, Homo sapiens
ggcctaccttgccag

SEQ ID NO: 2084388 - DNA, 15 bp, Homo sapiens
gcctaccttgccagt

SEQ ID NO: 2084389 - DNA, 15 bp, Homo sapiens
cctaccttgccagtc

SEQ ID NO: 2084390 - DNA, 15 bp, Homo sapiens
ctaccttgccagtca

SEQ ID NO: 2084391 - DNA, 15 bp, Homo sapiens
taccttgccagtcat

SEQ ID NO: 2084392 - DNA, 15 bp, Homo sapiens
accttgccagtcatg

SEQ ID NO: 2084393 - DNA, 15 bp, Homo sapiens
ccttgccagtcatgg

SEQ ID NO: 2084394 - DNA, 15 bp, Homo sapiens
cttgccagtcatggc

SEQ ID NO: 2084395 - DNA, 15 bp, Homo sapiens
ttgccagtcatggca

SEQ ID NO: 2084396 - DNA, 15 bp, Homo sapiens
tgccagtcatggcag

SEQ ID NO: 2084397 - DNA, 15 bp, Homo sapiens
gccagtcatggcagg

SEQ ID NO: 2084398 - DNA, 15 bp, Homo sapiens
ccagtcatggcaggt

SEQ ID NO: 2084399 - DNA, 15 bp, Homo sapiens
cagtcatggcaggtc

SEQ ID NO: 2084400 - DNA, 15 bp, Homo sapiens
agtcatggcaggtca

SEQ ID NO: 2084401 - DNA, 15 bp, Homo sapiens
gtcatggcaggtcaa

SEQ ID NO: 2084402 - DNA, 15 bp, Homo sapiens
tcatggcaggtcaat

SEQ ID NO: 2084403 - DNA, 15 bp, Homo sapiens
catggcaggtcaata

SEQ ID NO: 2084404 - DNA, 15 bp, Homo sapiens
atggcaggtcaatat

SEQ ID NO: 2084405 - DNA, 15 bp, Homo sapiens
tggcaggtcaatata

SEQ ID NO: 2084406 - DNA, 15 bp, Homo sapiens
ggcaggtcaatataa

SEQ ID NO: 2084407 - DNA, 15 bp, Homo sapiens
gcaggtcaatataaa

SEQ ID NO: 2084408 - DNA, 15 bp, Homo sapiens
caggtcaatataaaa

SEQ ID NO: 2084409 - DNA, 15 bp, Homo sapiens
aggtcaatataaaac

SEQ ID NO: 2084410 - DNA, 15 bp, Homo sapiens
ggtcaatataaaaca

SEQ ID NO: 2084411 - DNA, 15 bp, Homo sapiens
gtcaatataaaacaa

SEQ ID NO: 2084412 - DNA, 15 bp, Homo sapiens
tcaatataaaacaac

SEQ ID NO: 2084413 - DNA, 15 bp, Homo sapiens
caatataaaacaact

SEQ ID NO: 2084414 - DNA, 15 bp, Homo sapiens
aatataaaacaactt

SEQ ID NO: 2084415 - DNA, 15 bp, Homo sapiens
atataaaacaacttc

SEQ ID NO: 2084416 - DNA, 15 bp, Homo sapiens
tataaaacaacttct

SEQ ID NO: 2084417 - DNA, 15 bp, Homo sapiens
ataaaacaacttctg

SEQ ID NO: 2084418 - DNA, 15 bp, Homo sapiens
taaaacaacttctgg

SEQ ID NO: 2084419 - DNA, 15 bp, Homo sapiens
aaaacaacttctggc

SEQ ID NO: 2084420 - DNA, 15 bp, Homo sapiens
aaacaacttctggct

SEQ ID NO: 2084421 - DNA, 15 bp, Homo sapiens
aacaacttctggctg

SEQ ID NO: 2084422 - DNA, 15 bp, Homo sapiens
acaacttctggctgt

SEQ ID NO: 2084423 - DNA, 15 bp, Homo sapiens
caacttctggctgtg

SEQ ID NO: 2084424 - DNA, 15 bp, Homo sapiens
aacttctggctgtgc

SEQ ID NO: 2084425 - DNA, 15 bp, Homo sapiens
acttctggctgtgca

SEQ ID NO: 2084426 - DNA, 15 bp, Homo sapiens
cttctggctgtgcac

SEQ ID NO: 2084427 - DNA, 15 bp, Homo sapiens
ttctggctgtgcaca

SEQ ID NO: 2084428 - DNA, 15 bp, Homo sapiens
tctggctgtgcacag

SEQ ID NO: 2084429 - DNA, 15 bp, Homo sapiens
ctggctgtgcacagt

SEQ ID NO: 2084430 - DNA, 15 bp, Homo sapiens
tggctgtgcacagtg

SEQ ID NO: 2084431 - DNA, 15 bp, Homo sapiens
ggctgtgcacagtgg

SEQ ID NO: 2084432 - DNA, 15 bp, Homo sapiens
gctgtgcacagtggc

SEQ ID NO: 2084433 - DNA, 15 bp, Homo sapiens
ctgtgcacagtggca

SEQ ID NO: 2084434 - DNA, 15 bp, Homo sapiens
tgtgcacagtggcac

SEQ ID NO: 2084435 - DNA, 15 bp, Homo sapiens
gtgcacagtggcaca

SEQ ID NO: 2084436 - DNA, 15 bp, Homo sapiens
tgcacagtggcacat

SEQ ID NO: 2084437 - DNA, 15 bp, Homo sapiens
gcacagtggcacatg

SEQ ID NO: 2084438 - DNA, 15 bp, Homo sapiens
cacagtggcacatgc

SEQ ID NO: 2084439 - DNA, 15 bp, Homo sapiens
acagtggcacatgcc

SEQ ID NO: 2084440 - DNA, 15 bp, Homo sapiens
cagtggcacatgcct

SEQ ID NO: 2084441 - DNA, 15 bp, Homo sapiens
agtggcacatgcctg

SEQ ID NO: 2084442 - DNA, 15 bp, Homo sapiens
gtggcacatgcctgt

SEQ ID NO: 2084443 - DNA, 15 bp, Homo sapiens
tggcacatgcctgta

SEQ ID NO: 2084444 - DNA, 15 bp, Homo sapiens
ggcacatgcctgtaa

SEQ ID NO: 2084445 - DNA, 15 bp, Homo sapiens
gcacatgcctgtaat

SEQ ID NO: 2084446 - DNA, 15 bp, Homo sapiens
cacatgcctgtaatc

SEQ ID NO: 2084447 - DNA, 15 bp, Homo sapiens
gaggattgcttgagg

SEQ ID NO: 2084448 - DNA, 15 bp, Homo sapiens
aggattgcttgaggc

SEQ ID NO: 2084449 - DNA, 15 bp, Homo sapiens
cctgggcaatatagc

SEQ ID NO: 2084450 - DNA, 15 bp, Homo sapiens
ctgggcaatatagca

SEQ ID NO: 2084451 - DNA, 15 bp, Homo sapiens
tgggcaatatagcaa

SEQ ID NO: 2084452 - DNA, 15 bp, Homo sapiens
gggcaatatagcaag

SEQ ID NO: 2084453 - DNA, 15 bp, Homo sapiens
ggcaatatagcaaga

SEQ ID NO: 2084454 - DNA, 15 bp, Homo sapiens
gcaatatagcaagat

SEQ ID NO: 2084455 - DNA, 15 bp, Homo sapiens
caatatagcaagatc

SEQ ID NO: 2084456 - DNA, 15 bp, Homo sapiens
aatatagcaagatcc

SEQ ID NO: 2084457 - DNA, 15 bp, Homo sapiens
atatagcaagatccc

SEQ ID NO: 2084458 - DNA, 15 bp, Homo sapiens
tatagcaagatccca

SEQ ID NO: 2084459 - DNA, 15 bp, Homo sapiens
atagcaagatcccat

SEQ ID NO: 2084460 - DNA, 15 bp, Homo sapiens
tagcaagatcccatc

SEQ ID NO: 2084461 - DNA, 15 bp, Homo sapiens
agcaagatcccatcc

SEQ ID NO: 2084462 - DNA, 15 bp, Homo sapiens
gcaagatcccatccc

SEQ ID NO: 2084463 - DNA, 15 bp, Homo sapiens
caagatcccatccct

SEQ ID NO: 2084464 - DNA, 15 bp, Homo sapiens
aagatcccatccctc

SEQ ID NO: 2084465 - DNA, 15 bp, Homo sapiens
agatcccatccctct

SEQ ID NO: 2084466 - DNA, 15 bp, Homo sapiens
gatcccatccctctt

SEQ ID NO: 2084467 - DNA, 15 bp, Homo sapiens
atcccatccctctta

SEQ ID NO: 2084468 - DNA, 15 bp, Homo sapiens
tcccatccctcttaa

SEQ ID NO: 2084469 - DNA, 15 bp, Homo sapiens
cccatccctcttaaa

SEQ ID NO: 2084470 - DNA, 15 bp, Homo sapiens
ccatccctcttaaaa

SEQ ID NO: 2084471 - DNA, 15 bp, Homo sapiens
catccctcttaaaaa

SEQ ID NO: 2084472 - DNA, 15 bp, Homo sapiens
atccctcttaaaaaa

SEQ ID NO: 2084473 - DNA, 15 bp, Homo sapiens
tccctcttaaaaaaa

SEQ ID NO: 2084474 - DNA, 15 bp, Homo sapiens
ccctcttaaaaaaaa

SEQ ID NO: 2084475 - DNA, 15 bp, Homo sapiens
cctcttaaaaaaaaa

SEQ ID NO: 2084476 - DNA, 15 bp, Homo sapiens
ttaaaaaaaaaaaag

SEQ ID NO: 2084477 - DNA, 15 bp, Homo sapiens
taaaaaaaaaaaaga

SEQ ID NO: 2084478 - DNA, 15 bp, Homo sapiens
aaaaaaaaagaagaa

SEQ ID NO: 2084479 - DNA, 15 bp, Homo sapiens
aaaaaaaagaagaaa

SEQ ID NO: 2084480 - DNA, 15 bp, Homo sapiens
aaaaaaagaagaaaa

SEQ ID NO: 2084481 - DNA, 15 bp, Homo sapiens
aaaaaagaagaaaaa

SEQ ID NO: 2084482 - DNA, 15 bp, Homo sapiens
aaaaagaagaaaaat

SEQ ID NO: 2084483 - DNA, 15 bp, Homo sapiens
aaaagaagaaaaata

SEQ ID NO: 2084484 - DNA, 15 bp, Homo sapiens
aaagaagaaaaatat

SEQ ID NO: 2084485 - DNA, 15 bp, Homo sapiens
aagaagaaaaatata

SEQ ID NO: 2084486 - DNA, 15 bp, Homo sapiens
agaagaaaaatatat

SEQ ID NO: 2084487 - DNA, 15 bp, Homo sapiens
gaagaaaaatatatg

SEQ ID NO: 2084488 - DNA, 15 bp, Homo sapiens
aagaaaaatatatgt

SEQ ID NO: 2084489 - DNA, 15 bp, Homo sapiens
agaaaaatatatgtt

SEQ ID NO: 2084490 - DNA, 15 bp, Homo sapiens
gaaaaatatatgttg

SEQ ID NO: 2084491 - DNA, 15 bp, Homo sapiens
aaaaatatatgttgt

SEQ ID NO: 2084492 - DNA, 15 bp, Homo sapiens
aaaatatatgttgtt

SEQ ID NO: 2084493 - DNA, 15 bp, Homo sapiens
aaatatatgttgttg

SEQ ID NO: 2084494 - DNA, 15 bp, Homo sapiens
aatatatgttgttgt

SEQ ID NO: 2084495 - DNA, 15 bp, Homo sapiens
atatatgttgttgtt

SEQ ID NO: 2084496 - DNA, 15 bp, Homo sapiens
tatatgttgttgttg

SEQ ID NO: 2084497 - DNA, 15 bp, Homo sapiens
atatgttgttgttgt

SEQ ID NO: 2084498 - DNA, 15 bp, Homo sapiens
tatgttgttgttgtt

SEQ ID NO: 2084499 - DNA, 15 bp, Homo sapiens
atgttgttgttgtta

SEQ ID NO: 2084500 - DNA, 15 bp, Homo sapiens
ttgttgttgttatta

SEQ ID NO: 2084501 - DNA, 15 bp, Homo sapiens
ttgttgttattattg

SEQ ID NO: 2084502 - DNA, 15 bp, Homo sapiens
tgttgttattattgt

SEQ ID NO: 2084503 - DNA, 15 bp, Homo sapiens
gttgttattattgtt

SEQ ID NO: 2084504 - DNA, 15 bp, Homo sapiens
ttgttattattgtta

SEQ ID NO: 2084505 - DNA, 15 bp, Homo sapiens
tgttattattgttat

SEQ ID NO: 2084506 - DNA, 15 bp, Homo sapiens
gttattattgttatt

SEQ ID NO: 2084507 - DNA, 15 bp, Homo sapiens
ttattattgttatta

SEQ ID NO: 2084508 - DNA, 15 bp, Homo sapiens
tattattgttattat

SEQ ID NO: 2084509 - DNA, 15 bp, Homo sapiens
attattgttattatt

SEQ ID NO: 2084510 - DNA, 15 bp, Homo sapiens
ttattgttattatta

SEQ ID NO: 2084511 - DNA, 15 bp, Homo sapiens
tattgttattattag

SEQ ID NO: 2084512 - DNA, 15 bp, Homo sapiens
attgttattattaga

SEQ ID NO: 2084513 - DNA, 15 bp, Homo sapiens
ttgttattattagag

SEQ ID NO: 2084514 - DNA, 15 bp, Homo sapiens
tgttattattagaga

SEQ ID NO: 2084515 - DNA, 15 bp, Homo sapiens
gttattattagagac

SEQ ID NO: 2084516 - DNA, 15 bp, Homo sapiens
ttattattagagaca

SEQ ID NO: 2084517 - DNA, 15 bp, Homo sapiens
tattattagagacag

SEQ ID NO: 2084518 - DNA, 15 bp, Homo sapiens
attattagagacaga

SEQ ID NO: 2084519 - DNA, 15 bp, Homo sapiens
ttattagagacagag

SEQ ID NO: 2084520 - DNA, 15 bp, Homo sapiens
tattagagacagagt

SEQ ID NO: 2084521 - DNA, 15 bp, Homo sapiens
attagagacagagtt

SEQ ID NO: 2084522 - DNA, 15 bp, Homo sapiens
agagacagagtttcg

SEQ ID NO: 2084523 - DNA, 15 bp, Homo sapiens
gagacagagtttcgc

SEQ ID NO: 2084524 - DNA, 15 bp, Homo sapiens
gacagagtttcgctt

SEQ ID NO: 2084525 - DNA, 15 bp, Homo sapiens
acagagtttcgcttt

SEQ ID NO: 2084526 - DNA, 15 bp, Homo sapiens
cagagtttcgctttt

SEQ ID NO: 2084527 - DNA, 15 bp, Homo sapiens
agagtttcgcttttg

SEQ ID NO: 2084528 - DNA, 15 bp, Homo sapiens
gagtttcgcttttgt

SEQ ID NO: 2084529 - DNA, 15 bp, Homo sapiens
agtttcgcttttgtc

SEQ ID NO: 2084530 - DNA, 15 bp, Homo sapiens
gtttcgcttttgtca

SEQ ID NO: 2084531 - DNA, 15 bp, Homo sapiens
tttcgcttttgtcac

SEQ ID NO: 2084532 - DNA, 15 bp, Homo sapiens
ttcgcttttgtcacc

SEQ ID NO: 2084533 - DNA, 15 bp, Homo sapiens
tcgcttttgtcaccc

SEQ ID NO: 2084534 - DNA, 15 bp, Homo sapiens
cgcttttgtcaccca

SEQ ID NO: 2084535 - DNA, 15 bp, Homo sapiens
gcttttgtcacccag

SEQ ID NO: 2084536 - DNA, 15 bp, Homo sapiens
cttttgtcacccagg

SEQ ID NO: 2084537 - DNA, 15 bp, Homo sapiens
ttttgtcacccaggc

SEQ ID NO: 2084538 - DNA, 15 bp, Homo sapiens
aatggtgtgatctca

SEQ ID NO: 2084539 - DNA, 15 bp, Homo sapiens
atggtgtgatctcag

SEQ ID NO: 2084540 - DNA, 15 bp, Homo sapiens
cctcctgggttcaac

SEQ ID NO: 2084541 - DNA, 15 bp, Homo sapiens
ctcctgggttcaact

SEQ ID NO: 2084542 - DNA, 15 bp, Homo sapiens
tcctgggttcaactg

SEQ ID NO: 2084543 - DNA, 15 bp, Homo sapiens
cctgggttcaactga

SEQ ID NO: 2084544 - DNA, 15 bp, Homo sapiens
ctgggttcaactgat

SEQ ID NO: 2084545 - DNA, 15 bp, Homo sapiens
tgggttcaactgatt

SEQ ID NO: 2084546 - DNA, 15 bp, Homo sapiens
gggttcaactgattc

SEQ ID NO: 2084547 - DNA, 15 bp, Homo sapiens
ggttcaactgattct

SEQ ID NO: 2084548 - DNA, 15 bp, Homo sapiens
gttcaactgattctc

SEQ ID NO: 2084549 - DNA, 15 bp, Homo sapiens
ttcaactgattctcc

SEQ ID NO: 2084550 - DNA, 15 bp, Homo sapiens
tcaactgattctcct

SEQ ID NO: 2084551 - DNA, 15 bp, Homo sapiens
caactgattctcctg

SEQ ID NO: 2084552 - DNA, 15 bp, Homo sapiens
aactgattctcctgc

SEQ ID NO: 2084553 - DNA, 15 bp, Homo sapiens
actgattctcctgcc

SEQ ID NO: 2084554 - DNA, 15 bp, Homo sapiens
ctgattctcctgcct

SEQ ID NO: 2084555 - DNA, 15 bp, Homo sapiens
ctgagtagctggaat

SEQ ID NO: 2084556 - DNA, 15 bp, Homo sapiens
tgagtagctggaata

SEQ ID NO: 2084557 - DNA, 15 bp, Homo sapiens
gagtagctggaataa

SEQ ID NO: 2084558 - DNA, 15 bp, Homo sapiens
agtagctggaataat

SEQ ID NO: 2084559 - DNA, 15 bp, Homo sapiens
gtagctggaataata

SEQ ID NO: 2084560 - DNA, 15 bp, Homo sapiens
tagctggaataatag

SEQ ID NO: 2084561 - DNA, 15 bp, Homo sapiens
agctggaataatagg

SEQ ID NO: 2084562 - DNA, 15 bp, Homo sapiens
gctggaataataggc

SEQ ID NO: 2084563 - DNA, 15 bp, Homo sapiens
ctggaataataggca

SEQ ID NO: 2084564 - DNA, 15 bp, Homo sapiens
tggaataataggcat

SEQ ID NO: 2084565 - DNA, 15 bp, Homo sapiens
ggaataataggcatg

SEQ ID NO: 2084566 - DNA, 15 bp, Homo sapiens
gaataataggcatgt

SEQ ID NO: 2084567 - DNA, 15 bp, Homo sapiens
aataataggcatgtg

SEQ ID NO: 2084568 - DNA, 15 bp, Homo sapiens
ataataggcatgtgc

SEQ ID NO: 2084569 - DNA, 15 bp, Homo sapiens
taataggcatgtgcc

SEQ ID NO: 2084570 - DNA, 15 bp, Homo sapiens
aataggcatgtgcca

SEQ ID NO: 2084571 - DNA, 15 bp, Homo sapiens
taggcatgtgccaca

SEQ ID NO: 2084572 - DNA, 15 bp, Homo sapiens
aggcatgtgccacaa

SEQ ID NO: 2084573 - DNA, 15 bp, Homo sapiens
ggcatgtgccacaac

SEQ ID NO: 2084574 - DNA, 15 bp, Homo sapiens
gcatgtgccacaaca

SEQ ID NO: 2084575 - DNA, 15 bp, Homo sapiens
catgtgccacaacat

SEQ ID NO: 2084576 - DNA, 15 bp, Homo sapiens
atgtgccacaacatc

SEQ ID NO: 2084577 - DNA, 15 bp, Homo sapiens
tgtgccacaacatct

SEQ ID NO: 2084578 - DNA, 15 bp, Homo sapiens
gtgccacaacatctg

SEQ ID NO: 2084579 - DNA, 15 bp, Homo sapiens
tgccacaacatctgg

SEQ ID NO: 2084580 - DNA, 15 bp, Homo sapiens
gccacaacatctggc

SEQ ID NO: 2084581 - DNA, 15 bp, Homo sapiens
ccacaacatctggct

SEQ ID NO: 2084582 - DNA, 15 bp, Homo sapiens
cacaacatctggcta

SEQ ID NO: 2084583 - DNA, 15 bp, Homo sapiens
acaacatctggctaa

SEQ ID NO: 2084584 - DNA, 15 bp, Homo sapiens
caacatctggctaat

SEQ ID NO: 2084585 - DNA, 15 bp, Homo sapiens
aacatctggctaatt

SEQ ID NO: 2084586 - DNA, 15 bp, Homo sapiens
acatctggctaattt

SEQ ID NO: 2084587 - DNA, 15 bp, Homo sapiens
catctggctaatttt

SEQ ID NO: 2084588 - DNA, 15 bp, Homo sapiens
atctggctaattttg

SEQ ID NO: 2084589 - DNA, 15 bp, Homo sapiens
tctggctaattttgt

SEQ ID NO: 2084590 - DNA, 15 bp, Homo sapiens
gagatggggtttcgc

SEQ ID NO: 2084591 - DNA, 15 bp, Homo sapiens
agatggggtttcgcc

SEQ ID NO: 2084592 - DNA, 15 bp, Homo sapiens
gatggggtttcgcca

SEQ ID NO: 2084593 - DNA, 15 bp, Homo sapiens
atggggtttcgccat

SEQ ID NO: 2084594 - DNA, 15 bp, Homo sapiens
tggggtttcgccatg

SEQ ID NO: 2084595 - DNA, 15 bp, Homo sapiens
ctggtctcaaactcg

SEQ ID NO: 2084596 - DNA, 15 bp, Homo sapiens
tggtctcaaactcga

SEQ ID NO: 2084597 - DNA, 15 bp, Homo sapiens
ggtctcaaactcgac

SEQ ID NO: 2084598 - DNA, 15 bp, Homo sapiens
gtctcaaactcgacc

SEQ ID NO: 2084599 - DNA, 15 bp, Homo sapiens
tctcaaactcgacct

SEQ ID NO: 2084600 - DNA, 15 bp, Homo sapiens
ctcaaactcgacctc

SEQ ID NO: 2084601 - DNA, 15 bp, Homo sapiens
tcaaactcgacctca

SEQ ID NO: 2084602 - DNA, 15 bp, Homo sapiens
caaactcgacctcag

SEQ ID NO: 2084603 - DNA, 15 bp, Homo sapiens
aaactcgacctcagg

SEQ ID NO: 2084604 - DNA, 15 bp, Homo sapiens
aactcgacctcaggt

SEQ ID NO: 2084605 - DNA, 15 bp, Homo sapiens
actcgacctcaggtg

SEQ ID NO: 2084606 - DNA, 15 bp, Homo sapiens
ctcgacctcaggtga

SEQ ID NO: 2084607 - DNA, 15 bp, Homo sapiens
tcgacctcaggtgat

SEQ ID NO: 2084608 - DNA, 15 bp, Homo sapiens
cgacctcaggtgatt

SEQ ID NO: 2084609 - DNA, 15 bp, Homo sapiens
aggtgattctcctgt

SEQ ID NO: 2084610 - DNA, 15 bp, Homo sapiens
ggtgattctcctgtc

SEQ ID NO: 2084611 - DNA, 15 bp, Homo sapiens
gtgattctcctgtct

SEQ ID NO: 2084612 - DNA, 15 bp, Homo sapiens
tgattctcctgtctc

SEQ ID NO: 2084613 - DNA, 15 bp, Homo sapiens
gattctcctgtctca

SEQ ID NO: 2084614 - DNA, 15 bp, Homo sapiens
attctcctgtctcag

SEQ ID NO: 2084615 - DNA, 15 bp, Homo sapiens
ttctcctgtctcagc

SEQ ID NO: 2084616 - DNA, 15 bp, Homo sapiens
tctcctgtctcagcc

SEQ ID NO: 2084617 - DNA, 15 bp, Homo sapiens
tcagcctcccaaagg

SEQ ID NO: 2084618 - DNA, 15 bp, Homo sapiens
cagcctcccaaaggg

SEQ ID NO: 2084619 - DNA, 15 bp, Homo sapiens
agcctcccaaagggc

SEQ ID NO: 2084620 - DNA, 15 bp, Homo sapiens
gcctcccaaagggct

SEQ ID NO: 2084621 - DNA, 15 bp, Homo sapiens
cctcccaaagggctg

SEQ ID NO: 2084622 - DNA, 15 bp, Homo sapiens
tcccaaagggctggg

SEQ ID NO: 2084623 - DNA, 15 bp, Homo sapiens
cccaaagggctggga

SEQ ID NO: 2084624 - DNA, 15 bp, Homo sapiens
ccaaagggctgggat

SEQ ID NO: 2084625 - DNA, 15 bp, Homo sapiens
caaagggctgggatt

SEQ ID NO: 2084626 - DNA, 15 bp, Homo sapiens
aaagggctgggatta

SEQ ID NO: 2084627 - DNA, 15 bp, Homo sapiens
aagggctgggattac

SEQ ID NO: 2084628 - DNA, 15 bp, Homo sapiens
agggctgggattaca

SEQ ID NO: 2084629 - DNA, 15 bp, Homo sapiens
gggctgggattacag

SEQ ID NO: 2084630 - DNA, 15 bp, Homo sapiens
gggattacaggcata

SEQ ID NO: 2084631 - DNA, 15 bp, Homo sapiens
ggattacaggcataa

SEQ ID NO: 2084632 - DNA, 15 bp, Homo sapiens
gattacaggcataag

SEQ ID NO: 2084633 - DNA, 15 bp, Homo sapiens
attacaggcataagc

SEQ ID NO: 2084634 - DNA, 15 bp, Homo sapiens
ttacaggcataagcc

SEQ ID NO: 2084635 - DNA, 15 bp, Homo sapiens
tacaggcataagcca

SEQ ID NO: 2084636 - DNA, 15 bp, Homo sapiens
acaggcataagccac

SEQ ID NO: 2084637 - DNA, 15 bp, Homo sapiens
caggcataagccacc

SEQ ID NO: 2084638 - DNA, 15 bp, Homo sapiens
aggcataagccacca

SEQ ID NO: 2084639 - DNA, 15 bp, Homo sapiens
ggcataagccaccat

SEQ ID NO: 2084640 - DNA, 15 bp, Homo sapiens
gcataagccaccata

SEQ ID NO: 2084641 - DNA, 15 bp, Homo sapiens
cataagccaccatag

SEQ ID NO: 2084642 - DNA, 15 bp, Homo sapiens
ataagccaccatagc

SEQ ID NO: 2084643 - DNA, 15 bp, Homo sapiens
taagccaccatagct

SEQ ID NO: 2084644 - DNA, 15 bp, Homo sapiens
aagccaccatagctg

SEQ ID NO: 2084645 - DNA, 15 bp, Homo sapiens
agccaccatagctgg

SEQ ID NO: 2084646 - DNA, 15 bp, Homo sapiens
gccaccatagctggc

SEQ ID NO: 2084647 - DNA, 15 bp, Homo sapiens
ccaccatagctggcc

SEQ ID NO: 2084648 - DNA, 15 bp, Homo sapiens
caccatagctggcct

SEQ ID NO: 2084649 - DNA, 15 bp, Homo sapiens
accatagctggcctg

SEQ ID NO: 2084650 - DNA, 15 bp, Homo sapiens
ccatagctggcctgt

SEQ ID NO: 2084651 - DNA, 15 bp, Homo sapiens
catagctggcctgtt

SEQ ID NO: 2084652 - DNA, 15 bp, Homo sapiens
atagctggcctgttt

SEQ ID NO: 2084653 - DNA, 15 bp, Homo sapiens
tagctggcctgtttt

SEQ ID NO: 2084654 - DNA, 15 bp, Homo sapiens
agctggcctgttttt

SEQ ID NO: 2084655 - DNA, 15 bp, Homo sapiens
gctggcctgtttttt

SEQ ID NO: 2084656 - DNA, 15 bp, Homo sapiens
ctggcctgttttttt

SEQ ID NO: 2084657 - DNA, 15 bp, Homo sapiens
tggcctgttttttta

SEQ ID NO: 2084658 - DNA, 15 bp, Homo sapiens
ggcctgtttttttaa

SEQ ID NO: 2084659 - DNA, 15 bp, Homo sapiens
gcctgtttttttaaa

SEQ ID NO: 2084660 - DNA, 15 bp, Homo sapiens
ctgtttttttaaaaa

SEQ ID NO: 2084661 - DNA, 15 bp, Homo sapiens
gtttttttaaaaaaa

SEQ ID NO: 2084662 - DNA, 15 bp, Homo sapiens
ttttaaaaaaagaat

SEQ ID NO: 2084663 - DNA, 15 bp, Homo sapiens
tttaaaaaaagaatt

SEQ ID NO: 2084664 - DNA, 15 bp, Homo sapiens
ttaaaaaaagaattc

SEQ ID NO: 2084665 - DNA, 15 bp, Homo sapiens
taaaaaaagaattcc

SEQ ID NO: 2084666 - DNA, 15 bp, Homo sapiens
aaaaaaagaattcca

SEQ ID NO: 2084667 - DNA, 15 bp, Homo sapiens
aaaaaagaattccag

SEQ ID NO: 2084668 - DNA, 15 bp, Homo sapiens
aaaaagaattccagt

SEQ ID NO: 2084669 - DNA, 15 bp, Homo sapiens
aaaagaattccagta

SEQ ID NO: 2084670 - DNA, 15 bp, Homo sapiens
aaagaattccagtaa

SEQ ID NO: 2084671 - DNA, 15 bp, Homo sapiens
aagaattccagtaaa

SEQ ID NO: 2084672 - DNA, 15 bp, Homo sapiens
agaattccagtaaag

SEQ ID NO: 2084673 - DNA, 15 bp, Homo sapiens
gaattccagtaaaga

SEQ ID NO: 2084674 - DNA, 15 bp, Homo sapiens
aattccagtaaagag

SEQ ID NO: 2084675 - DNA, 15 bp, Homo sapiens
attccagtaaagagc

SEQ ID NO: 2084676 - DNA, 15 bp, Homo sapiens
ttccagtaaagagct

SEQ ID NO: 2084677 - DNA, 15 bp, Homo sapiens
tccagtaaagagctg

SEQ ID NO: 2084678 - DNA, 15 bp, Homo sapiens
ccagtaaagagctga

SEQ ID NO: 2084679 - DNA, 15 bp, Homo sapiens
cagtaaagagctgat

SEQ ID NO: 2084680 - DNA, 15 bp, Homo sapiens
agtaaagagctgatc

SEQ ID NO: 2084681 - DNA, 15 bp, Homo sapiens
gtaaagagctgatca

SEQ ID NO: 2084682 - DNA, 15 bp, Homo sapiens
taaagagctgatcat

SEQ ID NO: 2084683 - DNA, 15 bp, Homo sapiens
aaagagctgatcatg

SEQ ID NO: 2084684 - DNA, 15 bp, Homo sapiens
aagagctgatcatgg

SEQ ID NO: 2084685 - DNA, 15 bp, Homo sapiens
agagctgatcatggt

SEQ ID NO: 2084686 - DNA, 15 bp, Homo sapiens
gagctgatcatggtt

SEQ ID NO: 2084687 - DNA, 15 bp, Homo sapiens
agctgatcatggttc

SEQ ID NO: 2084688 - DNA, 15 bp, Homo sapiens
gctgatcatggttct

SEQ ID NO: 2084689 - DNA, 15 bp, Homo sapiens
ctgatcatggttctc

SEQ ID NO: 2084690 - DNA, 15 bp, Homo sapiens
tgatcatggttctca

SEQ ID NO: 2084691 - DNA, 15 bp, Homo sapiens
gatcatggttctcac

SEQ ID NO: 2084692 - DNA, 15 bp, Homo sapiens
atcatggttctcact

SEQ ID NO: 2084693 - DNA, 15 bp, Homo sapiens
tcatggttctcactc

SEQ ID NO: 2084694 - DNA, 15 bp, Homo sapiens
catggttctcactcc

SEQ ID NO: 2084695 - DNA, 15 bp, Homo sapiens
atggttctcactcct

SEQ ID NO: 2084696 - DNA, 15 bp, Homo sapiens
tggttctcactcctt

SEQ ID NO: 2084697 - DNA, 15 bp, Homo sapiens
ggttctcactccttg

SEQ ID NO: 2084698 - DNA, 15 bp, Homo sapiens
gttctcactccttga

SEQ ID NO: 2084699 - DNA, 15 bp, Homo sapiens
ttctcactccttgaa

SEQ ID NO: 2084700 - DNA, 15 bp, Homo sapiens
tctcactccttgaat

SEQ ID NO: 2084701 - DNA, 15 bp, Homo sapiens
ctcactccttgaata

SEQ ID NO: 2084702 - DNA, 15 bp, Homo sapiens
tcactccttgaatac

SEQ ID NO: 2084703 - DNA, 15 bp, Homo sapiens
cactccttgaatacc

SEQ ID NO: 2084704 - DNA, 15 bp, Homo sapiens
actccttgaatacca

SEQ ID NO: 2084705 - DNA, 15 bp, Homo sapiens
ctccttgaataccag

SEQ ID NO: 2084706 - DNA, 15 bp, Homo sapiens
tccttgaataccagg

SEQ ID NO: 2084707 - DNA, 15 bp, Homo sapiens
ccttgaataccagga

SEQ ID NO: 2084708 - DNA, 15 bp, Homo sapiens
cttgaataccaggaa

SEQ ID NO: 2084709 - DNA, 15 bp, Homo sapiens
ttgaataccaggaac

SEQ ID NO: 2084710 - DNA, 15 bp, Homo sapiens
tgaataccaggaaca

SEQ ID NO: 2084711 - DNA, 15 bp, Homo sapiens
gaataccaggaacac

SEQ ID NO: 2084712 - DNA, 15 bp, Homo sapiens
aataccaggaacacc

SEQ ID NO: 2084713 - DNA, 15 bp, Homo sapiens
ataccaggaacacca

SEQ ID NO: 2084714 - DNA, 15 bp, Homo sapiens
taccaggaacaccat

SEQ ID NO: 2084715 - DNA, 15 bp, Homo sapiens
accaggaacaccatc

SEQ ID NO: 2084716 - DNA, 15 bp, Homo sapiens
ccaggaacaccatct

SEQ ID NO: 2084717 - DNA, 15 bp, Homo sapiens
caggaacaccatctc

SEQ ID NO: 2084718 - DNA, 15 bp, Homo sapiens
aggaacaccatctcg

SEQ ID NO: 2084719 - DNA, 15 bp, Homo sapiens
ggaacaccatctcgt

SEQ ID NO: 2084720 - DNA, 15 bp, Homo sapiens
gaacaccatctcgta

SEQ ID NO: 2084721 - DNA, 15 bp, Homo sapiens
aacaccatctcgtat

SEQ ID NO: 2084722 - DNA, 15 bp, Homo sapiens
acaccatctcgtatc

SEQ ID NO: 2084723 - DNA, 15 bp, Homo sapiens
caccatctcgtatca

SEQ ID NO: 2084724 - DNA, 15 bp, Homo sapiens
accatctcgtatcac

SEQ ID NO: 2084725 - DNA, 15 bp, Homo sapiens
ccatctcgtatcaca

SEQ ID NO: 2084726 - DNA, 15 bp, Homo sapiens
catctcgtatcacat

SEQ ID NO: 2084727 - DNA, 15 bp, Homo sapiens
atctcgtatcacata

SEQ ID NO: 2084728 - DNA, 15 bp, Homo sapiens
tctcgtatcacataa

SEQ ID NO: 2084729 - DNA, 15 bp, Homo sapiens
ctcgtatcacataat

SEQ ID NO: 2084730 - DNA, 15 bp, Homo sapiens
tcgtatcacataatg

SEQ ID NO: 2084731 - DNA, 15 bp, Homo sapiens
cgtatcacataatga

SEQ ID NO: 2084732 - DNA, 15 bp, Homo sapiens
gtatcacataatgag

SEQ ID NO: 2084733 - DNA, 15 bp, Homo sapiens
tatcacataatgaga

SEQ ID NO: 2084734 - DNA, 15 bp, Homo sapiens
atcacataatgagac

SEQ ID NO: 2084735 - DNA, 15 bp, Homo sapiens
tcacataatgagaca

SEQ ID NO: 2084736 - DNA, 15 bp, Homo sapiens
cacataatgagacag

SEQ ID NO: 2084737 - DNA, 15 bp, Homo sapiens
acataatgagacagg

SEQ ID NO: 2084738 - DNA, 15 bp, Homo sapiens
cataatgagacaggg

SEQ ID NO: 2084739 - DNA, 15 bp, Homo sapiens
ataatgagacaggga

SEQ ID NO: 2084740 - DNA, 15 bp, Homo sapiens
taatgagacagggag

SEQ ID NO: 2084741 - DNA, 15 bp, Homo sapiens
aatgagacagggaga

SEQ ID NO: 2084742 - DNA, 15 bp, Homo sapiens
atgagacagggagac

SEQ ID NO: 2084743 - DNA, 15 bp, Homo sapiens
tgagacagggagaca

SEQ ID NO: 2084744 - DNA, 15 bp, Homo sapiens
gagacagggagacat

SEQ ID NO: 2084745 - DNA, 15 bp, Homo sapiens
agacagggagacatt

SEQ ID NO: 2084746 - DNA, 15 bp, Homo sapiens
gacagggagacattc

SEQ ID NO: 2084747 - DNA, 15 bp, Homo sapiens
acagggagacattct

SEQ ID NO: 2084748 - DNA, 15 bp, Homo sapiens
cagggagacattctg

SEQ ID NO: 2084749 - DNA, 15 bp, Homo sapiens
agggagacattctgg

SEQ ID NO: 2084750 - DNA, 15 bp, Homo sapiens
gggagacattctggt

SEQ ID NO: 2084751 - DNA, 15 bp, Homo sapiens
ggagacattctggtc

SEQ ID NO: 2084752 - DNA, 15 bp, Homo sapiens
gagacattctggtcc

SEQ ID NO: 2084753 - DNA, 15 bp, Homo sapiens
agacattctggtcct

SEQ ID NO: 2084754 - DNA, 15 bp, Homo sapiens
gacattctggtcctc

SEQ ID NO: 2084755 - DNA, 15 bp, Homo sapiens
acattctggtcctca

SEQ ID NO: 2084756 - DNA, 15 bp, Homo sapiens
cattctggtcctcat

SEQ ID NO: 2084757 - DNA, 15 bp, Homo sapiens
attctggtcctcatc

SEQ ID NO: 2084758 - DNA, 15 bp, Homo sapiens
ttctggtcctcatct

SEQ ID NO: 2084759 - DNA, 15 bp, Homo sapiens
tctggtcctcatctc

SEQ ID NO: 2084760 - DNA, 15 bp, Homo sapiens
ctggtcctcatctca

SEQ ID NO: 2084761 - DNA, 15 bp, Homo sapiens
tggtcctcatctcac

SEQ ID NO: 2084762 - DNA, 15 bp, Homo sapiens
ggtcctcatctcaca

SEQ ID NO: 2084763 - DNA, 15 bp, Homo sapiens
gtcctcatctcacag

SEQ ID NO: 2084764 - DNA, 15 bp, Homo sapiens
tcctcatctcacaga

SEQ ID NO: 2084765 - DNA, 15 bp, Homo sapiens
cctcatctcacagat

SEQ ID NO: 2084766 - DNA, 15 bp, Homo sapiens
ctcatctcacagatg

SEQ ID NO: 2084767 - DNA, 15 bp, Homo sapiens
tcatctcacagatga

SEQ ID NO: 2084768 - DNA, 15 bp, Homo sapiens
catctcacagatgaa

SEQ ID NO: 2084769 - DNA, 15 bp, Homo sapiens
atctcacagatgaaa

SEQ ID NO: 2084770 - DNA, 15 bp, Homo sapiens
tctcacagatgaaaa

SEQ ID NO: 2084771 - DNA, 15 bp, Homo sapiens
ctcacagatgaaaaa

SEQ ID NO: 2084772 - DNA, 15 bp, Homo sapiens
tcacagatgaaaaat

SEQ ID NO: 2084773 - DNA, 15 bp, Homo sapiens
cacagatgaaaaatg

SEQ ID NO: 2084774 - DNA, 15 bp, Homo sapiens
acagatgaaaaatgt

SEQ ID NO: 2084775 - DNA, 15 bp, Homo sapiens
cagatgaaaaatgtc

SEQ ID NO: 2084776 - DNA, 15 bp, Homo sapiens
agatgaaaaatgtca

SEQ ID NO: 2084777 - DNA, 15 bp, Homo sapiens
gatgaaaaatgtcaa

SEQ ID NO: 2084778 - DNA, 15 bp, Homo sapiens
atgaaaaatgtcaag

SEQ ID NO: 2084779 - DNA, 15 bp, Homo sapiens
tgaaaaatgtcaagc

SEQ ID NO: 2084780 - DNA, 15 bp, Homo sapiens
gaaaaatgtcaagct

SEQ ID NO: 2084781 - DNA, 15 bp, Homo sapiens
aaaaatgtcaagctt

SEQ ID NO: 2084782 - DNA, 15 bp, Homo sapiens
aaaatgtcaagcttc

SEQ ID NO: 2084783 - DNA, 15 bp, Homo sapiens
aaatgtcaagcttcg

SEQ ID NO: 2084784 - DNA, 15 bp, Homo sapiens
aatgtcaagcttcga

SEQ ID NO: 2084785 - DNA, 15 bp, Homo sapiens
atgtcaagcttcgaa

SEQ ID NO: 2084786 - DNA, 15 bp, Homo sapiens
tgtcaagcttcgaag

SEQ ID NO: 2084787 - DNA, 15 bp, Homo sapiens
gtcaagcttcgaagg

SEQ ID NO: 2084788 - DNA, 15 bp, Homo sapiens
tcaagcttcgaagga

SEQ ID NO: 2084789 - DNA, 15 bp, Homo sapiens
caagcttcgaaggat

SEQ ID NO: 2084790 - DNA, 15 bp, Homo sapiens
aagcttcgaaggatc

SEQ ID NO: 2084791 - DNA, 15 bp, Homo sapiens
agcttcgaaggatca

SEQ ID NO: 2084792 - DNA, 15 bp, Homo sapiens
gcttcgaaggatcaa

SEQ ID NO: 2084793 - DNA, 15 bp, Homo sapiens
cttcgaaggatcaaa

SEQ ID NO: 2084794 - DNA, 15 bp, Homo sapiens
ttcgaaggatcaaag

SEQ ID NO: 2084795 - DNA, 15 bp, Homo sapiens
tcgaaggatcaaagt

SEQ ID NO: 2084796 - DNA, 15 bp, Homo sapiens
cgaaggatcaaagtg

SEQ ID NO: 2084797 - DNA, 15 bp, Homo sapiens
gaaggatcaaagtgc

SEQ ID NO: 2084798 - DNA, 15 bp, Homo sapiens
aaggatcaaagtgcc

SEQ ID NO: 2084799 - DNA, 15 bp, Homo sapiens
aggatcaaagtgccc

SEQ ID NO: 2084800 - DNA, 15 bp, Homo sapiens
ggatcaaagtgccca

SEQ ID NO: 2084801 - DNA, 15 bp, Homo sapiens
gatcaaagtgcccac

SEQ ID NO: 2084802 - DNA, 15 bp, Homo sapiens
atcaaagtgcccacc

SEQ ID NO: 2084803 - DNA, 15 bp, Homo sapiens
tcaaagtgcccacct

SEQ ID NO: 2084804 - DNA, 15 bp, Homo sapiens
caaagtgcccaccta

SEQ ID NO: 2084805 - DNA, 15 bp, Homo sapiens
aaagtgcccacctag

SEQ ID NO: 2084806 - DNA, 15 bp, Homo sapiens
aagtgcccacctagt

SEQ ID NO: 2084807 - DNA, 15 bp, Homo sapiens
agtgcccacctagtc

SEQ ID NO: 2084808 - DNA, 15 bp, Homo sapiens
gtgcccacctagtca

SEQ ID NO: 2084809 - DNA, 15 bp, Homo sapiens
tgcccacctagtcac

SEQ ID NO: 2084810 - DNA, 15 bp, Homo sapiens
gcccacctagtcaca

SEQ ID NO: 2084811 - DNA, 15 bp, Homo sapiens
cccacctagtcacac

SEQ ID NO: 2084812 - DNA, 15 bp, Homo sapiens
ccacctagtcacacg

SEQ ID NO: 2084813 - DNA, 15 bp, Homo sapiens
cacctagtcacacgg

SEQ ID NO: 2084814 - DNA, 15 bp, Homo sapiens
acctagtcacacggg

SEQ ID NO: 2084815 - DNA, 15 bp, Homo sapiens
cctagtcacacgggt

SEQ ID NO: 2084816 - DNA, 15 bp, Homo sapiens
ctagtcacacgggta

SEQ ID NO: 2084817 - DNA, 15 bp, Homo sapiens
tagtcacacgggtag

SEQ ID NO: 2084818 - DNA, 15 bp, Homo sapiens
agtcacacgggtagt

SEQ ID NO: 2084819 - DNA, 15 bp, Homo sapiens
gtcacacgggtagtc

SEQ ID NO: 2084820 - DNA, 15 bp, Homo sapiens
tcacacgggtagtca

SEQ ID NO: 2084821 - DNA, 15 bp, Homo sapiens
cacacgggtagtcag

SEQ ID NO: 2084822 - DNA, 15 bp, Homo sapiens
acacgggtagtcagc

SEQ ID NO: 2084823 - DNA, 15 bp, Homo sapiens
cacgggtagtcagcc

SEQ ID NO: 2084824 - DNA, 15 bp, Homo sapiens
acgggtagtcagcca

SEQ ID NO: 2084825 - DNA, 15 bp, Homo sapiens
cgggtagtcagccac

SEQ ID NO: 2084826 - DNA, 15 bp, Homo sapiens
gggtagtcagccaca

SEQ ID NO: 2084827 - DNA, 15 bp, Homo sapiens
ggtagtcagccacag

SEQ ID NO: 2084828 - DNA, 15 bp, Homo sapiens
gtagtcagccacagg

SEQ ID NO: 2084829 - DNA, 15 bp, Homo sapiens
tagtcagccacaggt

SEQ ID NO: 2084830 - DNA, 15 bp, Homo sapiens
agtcagccacaggtc

SEQ ID NO: 2084831 - DNA, 15 bp, Homo sapiens
gtcagccacaggtca

SEQ ID NO: 2084832 - DNA, 15 bp, Homo sapiens
tcagccacaggtcag

SEQ ID NO: 2084833 - DNA, 15 bp, Homo sapiens
cagccacaggtcagc

SEQ ID NO: 2084834 - DNA, 15 bp, Homo sapiens
agccacaggtcagcc

SEQ ID NO: 2084835 - DNA, 15 bp, Homo sapiens
gccacaggtcagcct

SEQ ID NO: 2084836 - DNA, 15 bp, Homo sapiens
ccacaggtcagcctg

SEQ ID NO: 2084837 - DNA, 15 bp, Homo sapiens
cacaggtcagcctgc

SEQ ID NO: 2084838 - DNA, 15 bp, Homo sapiens
acaggtcagcctgcc

SEQ ID NO: 2084839 - DNA, 15 bp, Homo sapiens
caggtcagcctgcct

SEQ ID NO: 2084840 - DNA, 15 bp, Homo sapiens
aggtcagcctgcctt

SEQ ID NO: 2084841 - DNA, 15 bp, Homo sapiens
ggtcagcctgcctta

SEQ ID NO: 2084842 - DNA, 15 bp, Homo sapiens
gtcagcctgccttat

SEQ ID NO: 2084843 - DNA, 15 bp, Homo sapiens
tcagcctgccttatt

SEQ ID NO: 2084844 - DNA, 15 bp, Homo sapiens
cagcctgccttattt

SEQ ID NO: 2084845 - DNA, 15 bp, Homo sapiens
agcctgccttattta

SEQ ID NO: 2084846 - DNA, 15 bp, Homo sapiens
gcctgccttatttat

SEQ ID NO: 2084847 - DNA, 15 bp, Homo sapiens
cctgccttatttatt

SEQ ID NO: 2084848 - DNA, 15 bp, Homo sapiens
ctgccttatttattc

SEQ ID NO: 2084849 - DNA, 15 bp, Homo sapiens
tgccttatttattct

SEQ ID NO: 2084850 - DNA, 15 bp, Homo sapiens
gccttatttattctt

SEQ ID NO: 2084851 - DNA, 15 bp, Homo sapiens
ccttatttattcttc

SEQ ID NO: 2084852 - DNA, 15 bp, Homo sapiens
cttatttattcttca

SEQ ID NO: 2084853 - DNA, 15 bp, Homo sapiens
ttatttattcttcat

SEQ ID NO: 2084854 - DNA, 15 bp, Homo sapiens
tatttattcttcatg

SEQ ID NO: 2084855 - DNA, 15 bp, Homo sapiens
atttattcttcatga

SEQ ID NO: 2084856 - DNA, 15 bp, Homo sapiens
tttattcttcatgag

SEQ ID NO: 2084857 - DNA, 15 bp, Homo sapiens
ttattcttcatgagt

SEQ ID NO: 2084858 - DNA, 15 bp, Homo sapiens
tattcttcatgagta

SEQ ID NO: 2084859 - DNA, 15 bp, Homo sapiens
attcttcatgagtat

SEQ ID NO: 2084860 - DNA, 15 bp, Homo sapiens
ttcttcatgagtatt

SEQ ID NO: 2084861 - DNA, 15 bp, Homo sapiens
tcttcatgagtattt

SEQ ID NO: 2084862 - DNA, 15 bp, Homo sapiens
cttcatgagtattta

SEQ ID NO: 2084863 - DNA, 15 bp, Homo sapiens
ttcatgagtatttat

SEQ ID NO: 2084864 - DNA, 15 bp, Homo sapiens
tcatgagtatttata

SEQ ID NO: 2084865 - DNA, 15 bp, Homo sapiens
catgagtatttatag

SEQ ID NO: 2084866 - DNA, 15 bp, Homo sapiens
atgagtatttatagt

SEQ ID NO: 2084867 - DNA, 15 bp, Homo sapiens
tgagtatttatagtg

SEQ ID NO: 2084868 - DNA, 15 bp, Homo sapiens
gagtatttatagtga

SEQ ID NO: 2084869 - DNA, 15 bp, Homo sapiens
agtatttatagtgac

SEQ ID NO: 2084870 - DNA, 15 bp, Homo sapiens
gtatttatagtgact

SEQ ID NO: 2084871 - DNA, 15 bp, Homo sapiens
tatttatagtgacta

SEQ ID NO: 2084872 - DNA, 15 bp, Homo sapiens
atttatagtgactaa

SEQ ID NO: 2084873 - DNA, 15 bp, Homo sapiens
tttatagtgactaac

SEQ ID NO: 2084874 - DNA, 15 bp, Homo sapiens
ttatagtgactaaca

SEQ ID NO: 2084875 - DNA, 15 bp, Homo sapiens
tatagtgactaacat

SEQ ID NO: 2084876 - DNA, 15 bp, Homo sapiens
atagtgactaacatt

SEQ ID NO: 2084877 - DNA, 15 bp, Homo sapiens
tagtgactaacattt

SEQ ID NO: 2084878 - DNA, 15 bp, Homo sapiens
agtgactaacattta

SEQ ID NO: 2084879 - DNA, 15 bp, Homo sapiens
gtgactaacatttac

SEQ ID NO: 2084880 - DNA, 15 bp, Homo sapiens
tgactaacatttact

SEQ ID NO: 2084881 - DNA, 15 bp, Homo sapiens
gactaacatttactg

SEQ ID NO: 2084882 - DNA, 15 bp, Homo sapiens
actaacatttactgg

SEQ ID NO: 2084883 - DNA, 15 bp, Homo sapiens
ctaacatttactggg

SEQ ID NO: 2084884 - DNA, 15 bp, Homo sapiens
taacatttactgggc

SEQ ID NO: 2084885 - DNA, 15 bp, Homo sapiens
aacatttactgggcg

SEQ ID NO: 2084886 - DNA, 15 bp, Homo sapiens
acatttactgggcgc

SEQ ID NO: 2084887 - DNA, 15 bp, Homo sapiens
catttactgggcgcc

SEQ ID NO: 2084888 - DNA, 15 bp, Homo sapiens
atttactgggcgcct

SEQ ID NO: 2084889 - DNA, 15 bp, Homo sapiens
tttactgggcgccta

SEQ ID NO: 2084890 - DNA, 15 bp, Homo sapiens
ttactgggcgcctac

SEQ ID NO: 2084891 - DNA, 15 bp, Homo sapiens
tactgggcgcctact

SEQ ID NO: 2084892 - DNA, 15 bp, Homo sapiens
actgggcgcctactg

SEQ ID NO: 2084893 - DNA, 15 bp, Homo sapiens
ctgggcgcctactgt

SEQ ID NO: 2084894 - DNA, 15 bp, Homo sapiens
tgggcgcctactgtg

SEQ ID NO: 2084895 - DNA, 15 bp, Homo sapiens
gggcgcctactgtgg

SEQ ID NO: 2084896 - DNA, 15 bp, Homo sapiens
ggcgcctactgtggg

SEQ ID NO: 2084897 - DNA, 15 bp, Homo sapiens
gcgcctactgtgggc

SEQ ID NO: 2084898 - DNA, 15 bp, Homo sapiens
cgcctactgtgggcc

SEQ ID NO: 2084899 - DNA, 15 bp, Homo sapiens
gcctactgtgggcca

SEQ ID NO: 2084900 - DNA, 15 bp, Homo sapiens
cctactgtgggccat

SEQ ID NO: 2084901 - DNA, 15 bp, Homo sapiens
ctactgtgggccatt

SEQ ID NO: 2084902 - DNA, 15 bp, Homo sapiens
tactgtgggccattt

SEQ ID NO: 2084903 - DNA, 15 bp, Homo sapiens
actgtgggccatttc

SEQ ID NO: 2084904 - DNA, 15 bp, Homo sapiens
ctgtgggccatttct

SEQ ID NO: 2084905 - DNA, 15 bp, Homo sapiens
tgtgggccatttctg

SEQ ID NO: 2084906 - DNA, 15 bp, Homo sapiens
gtgggccatttctgt

SEQ ID NO: 2084907 - DNA, 15 bp, Homo sapiens
tgggccatttctgtg

SEQ ID NO: 2084908 - DNA, 15 bp, Homo sapiens
gggccatttctgtgc

SEQ ID NO: 2084909 - DNA, 15 bp, Homo sapiens
ggccatttctgtgca

SEQ ID NO: 2084910 - DNA, 15 bp, Homo sapiens
gccatttctgtgcat

SEQ ID NO: 2084911 - DNA, 15 bp, Homo sapiens
ccatttctgtgcatg

SEQ ID NO: 2084912 - DNA, 15 bp, Homo sapiens
catttctgtgcatgt

SEQ ID NO: 2084913 - DNA, 15 bp, Homo sapiens
atttctgtgcatgtg

SEQ ID NO: 2084914 - DNA, 15 bp, Homo sapiens
tttctgtgcatgtga

SEQ ID NO: 2084915 - DNA, 15 bp, Homo sapiens
ttctgtgcatgtgac

SEQ ID NO: 2084916 - DNA, 15 bp, Homo sapiens
tctgtgcatgtgaca

SEQ ID NO: 2084917 - DNA, 15 bp, Homo sapiens
ctgtgcatgtgacaa

SEQ ID NO: 2084918 - DNA, 15 bp, Homo sapiens
tgtgcatgtgacaac

SEQ ID NO: 2084919 - DNA, 15 bp, Homo sapiens
gtgcatgtgacaacc

SEQ ID NO: 2084920 - DNA, 15 bp, Homo sapiens
tgcatgtgacaaccc

SEQ ID NO: 2084921 - DNA, 15 bp, Homo sapiens
gcatgtgacaacccc

SEQ ID NO: 2084922 - DNA, 15 bp, Homo sapiens
catgtgacaacccct

SEQ ID NO: 2084923 - DNA, 15 bp, Homo sapiens
atgtgacaacccctt

SEQ ID NO: 2084924 - DNA, 15 bp, Homo sapiens
tgtgacaaccccttt

SEQ ID NO: 2084925 - DNA, 15 bp, Homo sapiens
gtgacaaccccttta

SEQ ID NO: 2084926 - DNA, 15 bp, Homo sapiens
tgacaacccctttaa

SEQ ID NO: 2084927 - DNA, 15 bp, Homo sapiens
gacaacccctttaag

SEQ ID NO: 2084928 - DNA, 15 bp, Homo sapiens
acaacccctttaagt

SEQ ID NO: 2084929 - DNA, 15 bp, Homo sapiens
caacccctttaagtc

SEQ ID NO: 2084930 - DNA, 15 bp, Homo sapiens
aacccctttaagtcc

SEQ ID NO: 2084931 - DNA, 15 bp, Homo sapiens
acccctttaagtcct

SEQ ID NO: 2084932 - DNA, 15 bp, Homo sapiens
cccctttaagtcctt

SEQ ID NO: 2084933 - DNA, 15 bp, Homo sapiens
ccctttaagtccttg

SEQ ID NO: 2084934 - DNA, 15 bp, Homo sapiens
cctttaagtccttgt

SEQ ID NO: 2084935 - DNA, 15 bp, Homo sapiens
ctttaagtccttgtt

SEQ ID NO: 2084936 - DNA, 15 bp, Homo sapiens
tttaagtccttgttt

SEQ ID NO: 2084937 - DNA, 15 bp, Homo sapiens
ttaagtccttgtttc

SEQ ID NO: 2084938 - DNA, 15 bp, Homo sapiens
taagtccttgtttct

SEQ ID NO: 2084939 - DNA, 15 bp, Homo sapiens
aagtccttgtttcta

SEQ ID NO: 2084940 - DNA, 15 bp, Homo sapiens
agtccttgtttctaa

SEQ ID NO: 2084941 - DNA, 15 bp, Homo sapiens
gtccttgtttctaat

SEQ ID NO: 2084942 - DNA, 15 bp, Homo sapiens
tccttgtttctaatc

SEQ ID NO: 2084943 - DNA, 15 bp, Homo sapiens
ccttgtttctaatcc

SEQ ID NO: 2084944 - DNA, 15 bp, Homo sapiens
cttgtttctaatccc

SEQ ID NO: 2084945 - DNA, 15 bp, Homo sapiens
ttgtttctaatccca

SEQ ID NO: 2084946 - DNA, 15 bp, Homo sapiens
tgtttctaatcccaa

SEQ ID NO: 2084947 - DNA, 15 bp, Homo sapiens
gtttctaatcccaag

SEQ ID NO: 2084948 - DNA, 15 bp, Homo sapiens
tttctaatcccaaga

SEQ ID NO: 2084949 - DNA, 15 bp, Homo sapiens
ttctaatcccaagaa

SEQ ID NO: 2084950 - DNA, 15 bp, Homo sapiens
tctaatcccaagaag

SEQ ID NO: 2084951 - DNA, 15 bp, Homo sapiens
ctaatcccaagaagc

SEQ ID NO: 2084952 - DNA, 15 bp, Homo sapiens
taatcccaagaagca

SEQ ID NO: 2084953 - DNA, 15 bp, Homo sapiens
aatcccaagaagcaa

SEQ ID NO: 2084954 - DNA, 15 bp, Homo sapiens
atcccaagaagcaag

SEQ ID NO: 2084955 - DNA, 15 bp, Homo sapiens
tcccaagaagcaagg

SEQ ID NO: 2084956 - DNA, 15 bp, Homo sapiens
cccaagaagcaagga

SEQ ID NO: 2084957 - DNA, 15 bp, Homo sapiens
ccaagaagcaaggaa

SEQ ID NO: 2084958 - DNA, 15 bp, Homo sapiens
caagaagcaaggaaa

SEQ ID NO: 2084959 - DNA, 15 bp, Homo sapiens
aagaagcaaggaaat

SEQ ID NO: 2084960 - DNA, 15 bp, Homo sapiens
agaagcaaggaaatg

SEQ ID NO: 2084961 - DNA, 15 bp, Homo sapiens
gaagcaaggaaatgg

SEQ ID NO: 2084962 - DNA, 15 bp, Homo sapiens
aagcaaggaaatggg

SEQ ID NO: 2084963 - DNA, 15 bp, Homo sapiens
agcaaggaaatgggg

SEQ ID NO: 2084964 - DNA, 15 bp, Homo sapiens
gcaaggaaatggggt

SEQ ID NO: 2084965 - DNA, 15 bp, Homo sapiens
caaggaaatggggtc

SEQ ID NO: 2084966 - DNA, 15 bp, Homo sapiens
aaggaaatggggtca

SEQ ID NO: 2084967 - DNA, 15 bp, Homo sapiens
aggaaatggggtcag

SEQ ID NO: 2084968 - DNA, 15 bp, Homo sapiens
ggaaatggggtcagg

SEQ ID NO: 2084969 - DNA, 15 bp, Homo sapiens
gaaatggggtcaggg

SEQ ID NO: 2084970 - DNA, 15 bp, Homo sapiens
aaatggggtcaggga

SEQ ID NO: 2084971 - DNA, 15 bp, Homo sapiens
aatggggtcagggaa

SEQ ID NO: 2084972 - DNA, 15 bp, Homo sapiens
atggggtcagggaag

SEQ ID NO: 2084973 - DNA, 15 bp, Homo sapiens
tggggtcagggaagg

SEQ ID NO: 2084974 - DNA, 15 bp, Homo sapiens
ggggtcagggaaggg

SEQ ID NO: 2084975 - DNA, 15 bp, Homo sapiens
gggtcagggaaggga

SEQ ID NO: 2084976 - DNA, 15 bp, Homo sapiens
ggtcagggaagggac

SEQ ID NO: 2084977 - DNA, 15 bp, Homo sapiens
gtcagggaagggaca

SEQ ID NO: 2084978 - DNA, 15 bp, Homo sapiens
tcagggaagggacaa

SEQ ID NO: 2084979 - DNA, 15 bp, Homo sapiens
cagggaagggacaag

SEQ ID NO: 2084980 - DNA, 15 bp, Homo sapiens
agggaagggacaagg

SEQ ID NO: 2084981 - DNA, 15 bp, Homo sapiens
gggaagggacaaggt

SEQ ID NO: 2084982 - DNA, 15 bp, Homo sapiens
ggaagggacaaggtt

SEQ ID NO: 2084983 - DNA, 15 bp, Homo sapiens
gaagggacaaggttt

SEQ ID NO: 2084984 - DNA, 15 bp, Homo sapiens
aagggacaaggtttg

SEQ ID NO: 2084985 - DNA, 15 bp, Homo sapiens
agggacaaggtttgc

SEQ ID NO: 2084986 - DNA, 15 bp, Homo sapiens
gggacaaggtttgcc

SEQ ID NO: 2084987 - DNA, 15 bp, Homo sapiens
ggacaaggtttgccc

SEQ ID NO: 2084988 - DNA, 15 bp, Homo sapiens
gacaaggtttgccca

SEQ ID NO: 2084989 - DNA, 15 bp, Homo sapiens
acaaggtttgcccaa

SEQ ID NO: 2084990 - DNA, 15 bp, Homo sapiens
caaggtttgcccaag

SEQ ID NO: 2084991 - DNA, 15 bp, Homo sapiens
aaggtttgcccaagt

SEQ ID NO: 2084992 - DNA, 15 bp, Homo sapiens
aggtttgcccaagtc

SEQ ID NO: 2084993 - DNA, 15 bp, Homo sapiens
ggtttgcccaagtcc

SEQ ID NO: 2084994 - DNA, 15 bp, Homo sapiens
gtttgcccaagtcca

SEQ ID NO: 2084995 - DNA, 15 bp, Homo sapiens
tttgcccaagtccag

SEQ ID NO: 2084996 - DNA, 15 bp, Homo sapiens
ttgcccaagtccagg

SEQ ID NO: 2084997 - DNA, 15 bp, Homo sapiens
tgcccaagtccaggc

SEQ ID NO: 2084998 - DNA, 15 bp, Homo sapiens
gcccaagtccaggca

SEQ ID NO: 2084999 - DNA, 15 bp, Homo sapiens
cccaagtccaggcag

SEQ ID NO: 2085000 - DNA, 15 bp, Homo sapiens
ccaagtccaggcagg

SEQ ID NO: 2085001 - DNA, 15 bp, Homo sapiens
caagtccaggcaggg

SEQ ID NO: 2085002 - DNA, 15 bp, Homo sapiens
aagtccaggcagggg

SEQ ID NO: 2085003 - DNA, 15 bp, Homo sapiens
agtccaggcaggggg

SEQ ID NO: 2085004 - DNA, 15 bp, Homo sapiens
gtccaggcaggggga

SEQ ID NO: 2085005 - DNA, 15 bp, Homo sapiens
tccaggcagggggag

SEQ ID NO: 2085006 - DNA, 15 bp, Homo sapiens
ccaggcagggggaga

SEQ ID NO: 2085007 - DNA, 15 bp, Homo sapiens
caggcagggggagag

SEQ ID NO: 2085008 - DNA, 15 bp, Homo sapiens
aggcagggggagagg

SEQ ID NO: 2085009 - DNA, 15 bp, Homo sapiens
ggcagggggagaggt

SEQ ID NO: 2085010 - DNA, 15 bp, Homo sapiens
gcagggggagaggtc

SEQ ID NO: 2085011 - DNA, 15 bp, Homo sapiens
cagggggagaggtca

SEQ ID NO: 2085012 - DNA, 15 bp, Homo sapiens
agggggagaggtcaa

SEQ ID NO: 2085013 - DNA, 15 bp, Homo sapiens
gggggagaggtcaag

SEQ ID NO: 2085014 - DNA, 15 bp, Homo sapiens
ggggagaggtcaagc

SEQ ID NO: 2085015 - DNA, 15 bp, Homo sapiens
gggagaggtcaagct

SEQ ID NO: 2085016 - DNA, 15 bp, Homo sapiens
ggagaggtcaagctc

SEQ ID NO: 2085017 - DNA, 15 bp, Homo sapiens
gagaggtcaagctca

SEQ ID NO: 2085018 - DNA, 15 bp, Homo sapiens
agaggtcaagctcag

SEQ ID NO: 2085019 - DNA, 15 bp, Homo sapiens
gaggtcaagctcaga

SEQ ID NO: 2085020 - DNA, 15 bp, Homo sapiens
aggtcaagctcagaa

SEQ ID NO: 2085021 - DNA, 15 bp, Homo sapiens
ggtcaagctcagaac

SEQ ID NO: 2085022 - DNA, 15 bp, Homo sapiens
gtcaagctcagaacc

SEQ ID NO: 2085023 - DNA, 15 bp, Homo sapiens
tcaagctcagaacca

SEQ ID NO: 2085024 - DNA, 15 bp, Homo sapiens
caagctcagaaccat

SEQ ID NO: 2085025 - DNA, 15 bp, Homo sapiens
aagctcagaaccatc

SEQ ID NO: 2085026 - DNA, 15 bp, Homo sapiens
agctcagaaccatca

SEQ ID NO: 2085027 - DNA, 15 bp, Homo sapiens
gctcagaaccatcac

SEQ ID NO: 2085028 - DNA, 15 bp, Homo sapiens
ctcagaaccatcacc

SEQ ID NO: 2085029 - DNA, 15 bp, Homo sapiens
tcagaaccatcacct

SEQ ID NO: 2085030 - DNA, 15 bp, Homo sapiens
cagaaccatcacctg

SEQ ID NO: 2085031 - DNA, 15 bp, Homo sapiens
agaaccatcacctgc

SEQ ID NO: 2085032 - DNA, 15 bp, Homo sapiens
gaaccatcacctgcc

SEQ ID NO: 2085033 - DNA, 15 bp, Homo sapiens
aaccatcacctgccc

SEQ ID NO: 2085034 - DNA, 15 bp, Homo sapiens
accatcacctgccca

SEQ ID NO: 2085035 - DNA, 15 bp, Homo sapiens
ccatcacctgcccat

SEQ ID NO: 2085036 - DNA, 15 bp, Homo sapiens
catcacctgcccatg

SEQ ID NO: 2085037 - DNA, 15 bp, Homo sapiens
atcacctgcccatga

SEQ ID NO: 2085038 - DNA, 15 bp, Homo sapiens
tcacctgcccatgac

SEQ ID NO: 2085039 - DNA, 15 bp, Homo sapiens
cacctgcccatgaca

SEQ ID NO: 2085040 - DNA, 15 bp, Homo sapiens
acctgcccatgacac

SEQ ID NO: 2085041 - DNA, 15 bp, Homo sapiens
cctgcccatgacaca

SEQ ID NO: 2085042 - DNA, 15 bp, Homo sapiens
ctgcccatgacacat

SEQ ID NO: 2085043 - DNA, 15 bp, Homo sapiens
tgcccatgacacatg

SEQ ID NO: 2085044 - DNA, 15 bp, Homo sapiens
gcccatgacacatgc

SEQ ID NO: 2085045 - DNA, 15 bp, Homo sapiens
cccatgacacatgcc

SEQ ID NO: 2085046 - DNA, 15 bp, Homo sapiens
ccatgacacatgccc

SEQ ID NO: 2085047 - DNA, 15 bp, Homo sapiens
catgacacatgccca

SEQ ID NO: 2085048 - DNA, 15 bp, Homo sapiens
atgacacatgcccag

SEQ ID NO: 2085049 - DNA, 15 bp, Homo sapiens
tgacacatgcccagg

SEQ ID NO: 2085050 - DNA, 15 bp, Homo sapiens
gacacatgcccagga

SEQ ID NO: 2085051 - DNA, 15 bp, Homo sapiens
acacatgcccaggac

SEQ ID NO: 2085052 - DNA, 15 bp, Homo sapiens
cacatgcccaggact

SEQ ID NO: 2085053 - DNA, 15 bp, Homo sapiens
acatgcccaggactc

SEQ ID NO: 2085054 - DNA, 15 bp, Homo sapiens
catgcccaggactca

SEQ ID NO: 2085055 - DNA, 15 bp, Homo sapiens
atgcccaggactcag

SEQ ID NO: 2085056 - DNA, 15 bp, Homo sapiens
tgcccaggactcagg

SEQ ID NO: 2085057 - DNA, 15 bp, Homo sapiens
gcccaggactcaggt

SEQ ID NO: 2085058 - DNA, 15 bp, Homo sapiens
cccaggactcaggtt

SEQ ID NO: 2085059 - DNA, 15 bp, Homo sapiens
ccaggactcaggttc

SEQ ID NO: 2085060 - DNA, 15 bp, Homo sapiens
caggactcaggttcc

SEQ ID NO: 2085061 - DNA, 15 bp, Homo sapiens
aggactcaggttccc

SEQ ID NO: 2085062 - DNA, 15 bp, Homo sapiens
ggactcaggttccct

SEQ ID NO: 2085063 - DNA, 15 bp, Homo sapiens
gactcaggttcccta

SEQ ID NO: 2085064 - DNA, 15 bp, Homo sapiens
actcaggttccctag

SEQ ID NO: 2085065 - DNA, 15 bp, Homo sapiens
ctcaggttccctagg

SEQ ID NO: 2085066 - DNA, 15 bp, Homo sapiens
tcaggttccctaggc

SEQ ID NO: 2085067 - DNA, 15 bp, Homo sapiens
caggttccctaggct

SEQ ID NO: 2085068 - DNA, 15 bp, Homo sapiens
aggttccctaggctt

SEQ ID NO: 2085069 - DNA, 15 bp, Homo sapiens
ggttccctaggcttc

SEQ ID NO: 2085070 - DNA, 15 bp, Homo sapiens
gttccctaggcttcc

SEQ ID NO: 2085071 - DNA, 15 bp, Homo sapiens
ttccctaggcttcct

SEQ ID NO: 2085072 - DNA, 15 bp, Homo sapiens
tccctaggcttcctt

SEQ ID NO: 2085073 - DNA, 15 bp, Homo sapiens
ccctaggcttccttc

SEQ ID NO: 2085074 - DNA, 15 bp, Homo sapiens
cctaggcttccttcc

SEQ ID NO: 2085075 - DNA, 15 bp, Homo sapiens
ctaggcttccttcca

SEQ ID NO: 2085076 - DNA, 15 bp, Homo sapiens
taggcttccttccaa

SEQ ID NO: 2085077 - DNA, 15 bp, Homo sapiens
aggcttccttccaaa

SEQ ID NO: 2085078 - DNA, 15 bp, Homo sapiens
ggcttccttccaaag

SEQ ID NO: 2085079 - DNA, 15 bp, Homo sapiens
gcttccttccaaagg

SEQ ID NO: 2085080 - DNA, 15 bp, Homo sapiens
cttccttccaaaggc

SEQ ID NO: 2085081 - DNA, 15 bp, Homo sapiens
ttccttccaaaggct

SEQ ID NO: 2085082 - DNA, 15 bp, Homo sapiens
tccttccaaaggctc

SEQ ID NO: 2085083 - DNA, 15 bp, Homo sapiens
ccttccaaaggctca

SEQ ID NO: 2085084 - DNA, 15 bp, Homo sapiens
cttccaaaggctcag

SEQ ID NO: 2085085 - DNA, 15 bp, Homo sapiens
tccaaaggctcagca

SEQ ID NO: 2085086 - DNA, 15 bp, Homo sapiens
ccaaaggctcagcag

SEQ ID NO: 2085087 - DNA, 15 bp, Homo sapiens
caaaggctcagcagt

SEQ ID NO: 2085088 - DNA, 15 bp, Homo sapiens
aaaggctcagcagtg

SEQ ID NO: 2085089 - DNA, 15 bp, Homo sapiens
aaggctcagcagtga

SEQ ID NO: 2085090 - DNA, 15 bp, Homo sapiens
aggctcagcagtgac

SEQ ID NO: 2085091 - DNA, 15 bp, Homo sapiens
ggctcagcagtgacg

SEQ ID NO: 2085092 - DNA, 15 bp, Homo sapiens
gctcagcagtgacga

SEQ ID NO: 2085093 - DNA, 15 bp, Homo sapiens
ctcagcagtgacgag

SEQ ID NO: 2085094 - DNA, 15 bp, Homo sapiens
tcagcagtgacgagc

SEQ ID NO: 2085095 - DNA, 15 bp, Homo sapiens
cagcagtgacgagcc

SEQ ID NO: 2085096 - DNA, 15 bp, Homo sapiens
agcagtgacgagcca

SEQ ID NO: 2085097 - DNA, 15 bp, Homo sapiens
gcagtgacgagccag

SEQ ID NO: 2085098 - DNA, 15 bp, Homo sapiens
cagtgacgagccagc

SEQ ID NO: 2085099 - DNA, 15 bp, Homo sapiens
agtgacgagccagcc

SEQ ID NO: 2085100 - DNA, 15 bp, Homo sapiens
gtgacgagccagccc

SEQ ID NO: 2085101 - DNA, 15 bp, Homo sapiens
tgacgagccagccct

SEQ ID NO: 2085102 - DNA, 15 bp, Homo sapiens
gacgagccagccctt

SEQ ID NO: 2085103 - DNA, 15 bp, Homo sapiens
acgagccagcccttg

SEQ ID NO: 2085104 - DNA, 15 bp, Homo sapiens
cgagccagcccttga

SEQ ID NO: 2085105 - DNA, 15 bp, Homo sapiens
gagccagcccttgaa

SEQ ID NO: 2085106 - DNA, 15 bp, Homo sapiens
agccagcccttgaac

SEQ ID NO: 2085107 - DNA, 15 bp, Homo sapiens
gccagcccttgaacc

SEQ ID NO: 2085108 - DNA, 15 bp, Homo sapiens
ccagcccttgaacca

SEQ ID NO: 2085109 - DNA, 15 bp, Homo sapiens
cagcccttgaaccag

SEQ ID NO: 2085110 - DNA, 15 bp, Homo sapiens
agcccttgaaccagc

SEQ ID NO: 2085111 - DNA, 15 bp, Homo sapiens
gcccttgaaccagcc

SEQ ID NO: 2085112 - DNA, 15 bp, Homo sapiens
cccttgaaccagcct

SEQ ID NO: 2085113 - DNA, 15 bp, Homo sapiens
ccttgaaccagcctc

SEQ ID NO: 2085114 - DNA, 15 bp, Homo sapiens
cttgaaccagcctct

SEQ ID NO: 2085115 - DNA, 15 bp, Homo sapiens
ttgaaccagcctctt

SEQ ID NO: 2085116 - DNA, 15 bp, Homo sapiens
tgaaccagcctcttc

SEQ ID NO: 2085117 - DNA, 15 bp, Homo sapiens
gaaccagcctcttcc

SEQ ID NO: 2085118 - DNA, 15 bp, Homo sapiens
aaccagcctcttccc

SEQ ID NO: 2085119 - DNA, 15 bp, Homo sapiens
accagcctcttcccc

SEQ ID NO: 2085120 - DNA, 15 bp, Homo sapiens
ccagcctcttccccc

SEQ ID NO: 2085121 - DNA, 15 bp, Homo sapiens
cagcctcttccccca

SEQ ID NO: 2085122 - DNA, 15 bp, Homo sapiens
agcctcttcccccac

SEQ ID NO: 2085123 - DNA, 15 bp, Homo sapiens
gcctcttcccccacc

SEQ ID NO: 2085124 - DNA, 15 bp, Homo sapiens
cctcttcccccaccc

SEQ ID NO: 2085125 - DNA, 15 bp, Homo sapiens
ctcttcccccaccca

SEQ ID NO: 2085126 - DNA, 15 bp, Homo sapiens
tcttcccccacccaa

SEQ ID NO: 2085127 - DNA, 15 bp, Homo sapiens
cttcccccacccaag

SEQ ID NO: 2085128 - DNA, 15 bp, Homo sapiens
ttcccccacccaagc

SEQ ID NO: 2085129 - DNA, 15 bp, Homo sapiens
tcccccacccaagca

SEQ ID NO: 2085130 - DNA, 15 bp, Homo sapiens
cccccacccaagcag

SEQ ID NO: 2085131 - DNA, 15 bp, Homo sapiens
ccccacccaagcagc

SEQ ID NO: 2085132 - DNA, 15 bp, Homo sapiens
cccacccaagcagcc

SEQ ID NO: 2085133 - DNA, 15 bp, Homo sapiens
ccacccaagcagcca

SEQ ID NO: 2085134 - DNA, 15 bp, Homo sapiens
cacccaagcagccac

SEQ ID NO: 2085135 - DNA, 15 bp, Homo sapiens
acccaagcagccacc

SEQ ID NO: 2085136 - DNA, 15 bp, Homo sapiens
cccaagcagccacct

SEQ ID NO: 2085137 - DNA, 15 bp, Homo sapiens
ccaagcagccacctc

SEQ ID NO: 2085138 - DNA, 15 bp, Homo sapiens
caagcagccacctct

SEQ ID NO: 2085139 - DNA, 15 bp, Homo sapiens
aagcagccacctctc

SEQ ID NO: 2085140 - DNA, 15 bp, Homo sapiens
agcagccacctctca

SEQ ID NO: 2085141 - DNA, 15 bp, Homo sapiens
gcagccacctctcag

SEQ ID NO: 2085142 - DNA, 15 bp, Homo sapiens
cagccacctctcagg

SEQ ID NO: 2085143 - DNA, 15 bp, Homo sapiens
agccacctctcaggg

SEQ ID NO: 2085144 - DNA, 15 bp, Homo sapiens
gccacctctcagggg

SEQ ID NO: 2085145 - DNA, 15 bp, Homo sapiens
ccacctctcagggga

SEQ ID NO: 2085146 - DNA, 15 bp, Homo sapiens
cacctctcaggggaa

SEQ ID NO: 2085147 - DNA, 15 bp, Homo sapiens
acctctcaggggaat

SEQ ID NO: 2085148 - DNA, 15 bp, Homo sapiens
cctctcaggggaatt

SEQ ID NO: 2085149 - DNA, 15 bp, Homo sapiens
ctctcaggggaattg

SEQ ID NO: 2085150 - DNA, 15 bp, Homo sapiens
tctcaggggaattgt

SEQ ID NO: 2085151 - DNA, 15 bp, Homo sapiens
ctcaggggaattgtg

SEQ ID NO: 2085152 - DNA, 15 bp, Homo sapiens
tcaggggaattgtgg

SEQ ID NO: 2085153 - DNA, 15 bp, Homo sapiens
caggggaattgtggc

SEQ ID NO: 2085154 - DNA, 15 bp, Homo sapiens
aggggaattgtggcc

SEQ ID NO: 2085155 - DNA, 15 bp, Homo sapiens
ggggaattgtggcca

SEQ ID NO: 2085156 - DNA, 15 bp, Homo sapiens
gggaattgtggccac

SEQ ID NO: 2085157 - DNA, 15 bp, Homo sapiens
ggaattgtggccacc

SEQ ID NO: 2085158 - DNA, 15 bp, Homo sapiens
gaattgtggccacca

SEQ ID NO: 2085159 - DNA, 15 bp, Homo sapiens
aattgtggccaccac

SEQ ID NO: 2085160 - DNA, 15 bp, Homo sapiens
attgtggccaccaca

SEQ ID NO: 2085161 - DNA, 15 bp, Homo sapiens
ttgtggccaccacag

SEQ ID NO: 2085162 - DNA, 15 bp, Homo sapiens
tgtggccaccacagg

SEQ ID NO: 2085163 - DNA, 15 bp, Homo sapiens
gtggccaccacaggt

SEQ ID NO: 2085164 - DNA, 15 bp, Homo sapiens
tggccaccacaggtg

SEQ ID NO: 2085165 - DNA, 15 bp, Homo sapiens
gccaccacaggtgca

SEQ ID NO: 2085166 - DNA, 15 bp, Homo sapiens
ccaccacaggtgcag

SEQ ID NO: 2085167 - DNA, 15 bp, Homo sapiens
caccacaggtgcagg

SEQ ID NO: 2085168 - DNA, 15 bp, Homo sapiens
accacaggtgcaggg

SEQ ID NO: 2085169 - DNA, 15 bp, Homo sapiens
ccacaggtgcaggga

SEQ ID NO: 2085170 - DNA, 15 bp, Homo sapiens
cacaggtgcagggag

SEQ ID NO: 2085171 - DNA, 15 bp, Homo sapiens
acaggtgcagggagc

SEQ ID NO: 2085172 - DNA, 15 bp, Homo sapiens
caggtgcagggagca

SEQ ID NO: 2085173 - DNA, 15 bp, Homo sapiens
aggtgcagggagcag

SEQ ID NO: 2085174 - DNA, 15 bp, Homo sapiens
ggtgcagggagcagt

SEQ ID NO: 2085175 - DNA, 15 bp, Homo sapiens
gtgcagggagcagtt

SEQ ID NO: 2085176 - DNA, 15 bp, Homo sapiens
tgcagggagcagttt

SEQ ID NO: 2085177 - DNA, 15 bp, Homo sapiens
gcagggagcagtttc

SEQ ID NO: 2085178 - DNA, 15 bp, Homo sapiens
cagggagcagtttct

SEQ ID NO: 2085179 - DNA, 15 bp, Homo sapiens
agggagcagtttctc

SEQ ID NO: 2085180 - DNA, 15 bp, Homo sapiens
gggagcagtttctct

SEQ ID NO: 2085181 - DNA, 15 bp, Homo sapiens
ggagcagtttctctc

SEQ ID NO: 2085182 - DNA, 15 bp, Homo sapiens
gagcagtttctctcc

SEQ ID NO: 2085183 - DNA, 15 bp, Homo sapiens
agcagtttctctcca

SEQ ID NO: 2085184 - DNA, 15 bp, Homo sapiens
gcagtttctctccac

SEQ ID NO: 2085185 - DNA, 15 bp, Homo sapiens
cagtttctctccact

SEQ ID NO: 2085186 - DNA, 15 bp, Homo sapiens
agtttctctccactc

SEQ ID NO: 2085187 - DNA, 15 bp, Homo sapiens
gtttctctccactca

SEQ ID NO: 2085188 - DNA, 15 bp, Homo sapiens
tttctctccactcac

SEQ ID NO: 2085189 - DNA, 15 bp, Homo sapiens
ttctctccactcaca

SEQ ID NO: 2085190 - DNA, 15 bp, Homo sapiens
tctctccactcacag

SEQ ID NO: 2085191 - DNA, 15 bp, Homo sapiens
ctctccactcacagc

SEQ ID NO: 2085192 - DNA, 15 bp, Homo sapiens
tctccactcacagcc

SEQ ID NO: 2085193 - DNA, 15 bp, Homo sapiens
ctccactcacagcct

SEQ ID NO: 2085194 - DNA, 15 bp, Homo sapiens
tccactcacagcctg

SEQ ID NO: 2085195 - DNA, 15 bp, Homo sapiens
ccactcacagcctga

SEQ ID NO: 2085196 - DNA, 15 bp, Homo sapiens
cactcacagcctgaa

SEQ ID NO: 2085197 - DNA, 15 bp, Homo sapiens
actcacagcctgaag

SEQ ID NO: 2085198 - DNA, 15 bp, Homo sapiens
ctcacagcctgaagc

SEQ ID NO: 2085199 - DNA, 15 bp, Homo sapiens
tcacagcctgaagca

SEQ ID NO: 2085200 - DNA, 15 bp, Homo sapiens
cacagcctgaagcat

SEQ ID NO: 2085201 - DNA, 15 bp, Homo sapiens
acagcctgaagcata

SEQ ID NO: 2085202 - DNA, 15 bp, Homo sapiens
cagcctgaagcatac

SEQ ID NO: 2085203 - DNA, 15 bp, Homo sapiens
agcctgaagcatacc

SEQ ID NO: 2085204 - DNA, 15 bp, Homo sapiens
gcctgaagcataccc

SEQ ID NO: 2085205 - DNA, 15 bp, Homo sapiens
cctgaagcatacccg

SEQ ID NO: 2085206 - DNA, 15 bp, Homo sapiens
ctgaagcatacccgg

SEQ ID NO: 2085207 - DNA, 15 bp, Homo sapiens
tgaagcatacccggc

SEQ ID NO: 2085208 - DNA, 15 bp, Homo sapiens
gaagcatacccggca

SEQ ID NO: 2085209 - DNA, 15 bp, Homo sapiens
aagcatacccggcag

SEQ ID NO: 2085210 - DNA, 15 bp, Homo sapiens
agcatacccggcagg

SEQ ID NO: 2085211 - DNA, 15 bp, Homo sapiens
gcatacccggcaggg

SEQ ID NO: 2085212 - DNA, 15 bp, Homo sapiens
catacccggcagggg

SEQ ID NO: 2085213 - DNA, 15 bp, Homo sapiens
atacccggcaggggc

SEQ ID NO: 2085214 - DNA, 15 bp, Homo sapiens
tacccggcaggggct

SEQ ID NO: 2085215 - DNA, 15 bp, Homo sapiens
acccggcaggggctg

SEQ ID NO: 2085216 - DNA, 15 bp, Homo sapiens
cccggcaggggctgt

SEQ ID NO: 2085217 - DNA, 15 bp, Homo sapiens
ccggcaggggctgtc

SEQ ID NO: 2085218 - DNA, 15 bp, Homo sapiens
cggcaggggctgtcc

SEQ ID NO: 2085219 - DNA, 15 bp, Homo sapiens
ggcaggggctgtccc

SEQ ID NO: 2085220 - DNA, 15 bp, Homo sapiens
gcaggggctgtcccc

SEQ ID NO: 2085221 - DNA, 15 bp, Homo sapiens
caggggctgtcccca

SEQ ID NO: 2085222 - DNA, 15 bp, Homo sapiens
aggggctgtccccag

SEQ ID NO: 2085223 - DNA, 15 bp, Homo sapiens
ggggctgtccccagg

SEQ ID NO: 2085224 - DNA, 15 bp, Homo sapiens
gggctgtccccaggc

SEQ ID NO: 2085225 - DNA, 15 bp, Homo sapiens
ggctgtccccaggcc

SEQ ID NO: 2085226 - DNA, 15 bp, Homo sapiens
gctgtccccaggccc

SEQ ID NO: 2085227 - DNA, 15 bp, Homo sapiens
ctgtccccaggccca

SEQ ID NO: 2085228 - DNA, 15 bp, Homo sapiens
tgtccccaggcccaa

SEQ ID NO: 2085229 - DNA, 15 bp, Homo sapiens
gtccccaggcccaac

SEQ ID NO: 2085230 - DNA, 15 bp, Homo sapiens
tccccaggcccaaca

SEQ ID NO: 2085231 - DNA, 15 bp, Homo sapiens
ccccaggcccaacaa

SEQ ID NO: 2085232 - DNA, 15 bp, Homo sapiens
cccaggcccaacaag

SEQ ID NO: 2085233 - DNA, 15 bp, Homo sapiens
ccaggcccaacaagc

SEQ ID NO: 2085234 - DNA, 15 bp, Homo sapiens
caggcccaacaagca

SEQ ID NO: 2085235 - DNA, 15 bp, Homo sapiens
aggcccaacaagcaa

SEQ ID NO: 2085236 - DNA, 15 bp, Homo sapiens
ggcccaacaagcaaa

SEQ ID NO: 2085237 - DNA, 15 bp, Homo sapiens
gcccaacaagcaaag

SEQ ID NO: 2085238 - DNA, 15 bp, Homo sapiens
cccaacaagcaaagg

SEQ ID NO: 2085239 - DNA, 15 bp, Homo sapiens
ccaacaagcaaaggg

SEQ ID NO: 2085240 - DNA, 15 bp, Homo sapiens
caacaagcaaagggc

SEQ ID NO: 2085241 - DNA, 15 bp, Homo sapiens
aacaagcaaagggcc

SEQ ID NO: 2085242 - DNA, 15 bp, Homo sapiens
acaagcaaagggccc

SEQ ID NO: 2085243 - DNA, 15 bp, Homo sapiens
caagcaaagggccca

SEQ ID NO: 2085244 - DNA, 15 bp, Homo sapiens
aagcaaagggcccag

SEQ ID NO: 2085245 - DNA, 15 bp, Homo sapiens
agcaaagggcccagt

SEQ ID NO: 2085246 - DNA, 15 bp, Homo sapiens
gcaaagggcccagta

SEQ ID NO: 2085247 - DNA, 15 bp, Homo sapiens
caaagggcccagtag

SEQ ID NO: 2085248 - DNA, 15 bp, Homo sapiens
aaagggcccagtagc

SEQ ID NO: 2085249 - DNA, 15 bp, Homo sapiens
aagggcccagtagcg

SEQ ID NO: 2085250 - DNA, 15 bp, Homo sapiens
agggcccagtagcga

SEQ ID NO: 2085251 - DNA, 15 bp, Homo sapiens
gggcccagtagcgag

SEQ ID NO: 2085252 - DNA, 15 bp, Homo sapiens
ggcccagtagcgagg

SEQ ID NO: 2085253 - DNA, 15 bp, Homo sapiens
gcccagtagcgaggg

SEQ ID NO: 2085254 - DNA, 15 bp, Homo sapiens
cccagtagcgagggc

SEQ ID NO: 2085255 - DNA, 15 bp, Homo sapiens
ccagtagcgagggcc

SEQ ID NO: 2085256 - DNA, 15 bp, Homo sapiens
cagtagcgagggcca

SEQ ID NO: 2085257 - DNA, 15 bp, Homo sapiens
agtagcgagggccac

SEQ ID NO: 2085258 - DNA, 15 bp, Homo sapiens
gtagcgagggccact

SEQ ID NO: 2085259 - DNA, 15 bp, Homo sapiens
tagcgagggccactg

SEQ ID NO: 2085260 - DNA, 15 bp, Homo sapiens
agcgagggccactgg

SEQ ID NO: 2085261 - DNA, 15 bp, Homo sapiens
gcgagggccactgga

SEQ ID NO: 2085262 - DNA, 15 bp, Homo sapiens
cgagggccactggag

SEQ ID NO: 2085263 - DNA, 15 bp, Homo sapiens
gagggccactggagc

SEQ ID NO: 2085264 - DNA, 15 bp, Homo sapiens
agggccactggagcc

SEQ ID NO: 2085265 - DNA, 15 bp, Homo sapiens
gggccactggagccc

SEQ ID NO: 2085266 - DNA, 15 bp, Homo sapiens
ggccactggagccca

SEQ ID NO: 2085267 - DNA, 15 bp, Homo sapiens
gccactggagcccat

SEQ ID NO: 2085268 - DNA, 15 bp, Homo sapiens
ccactggagcccatc

SEQ ID NO: 2085269 - DNA, 15 bp, Homo sapiens
cactggagcccatct

SEQ ID NO: 2085270 - DNA, 15 bp, Homo sapiens
actggagcccatctc

SEQ ID NO: 2085271 - DNA, 15 bp, Homo sapiens
ctggagcccatctcc

SEQ ID NO: 2085272 - DNA, 15 bp, Homo sapiens
tggagcccatctccg

SEQ ID NO: 2085273 - DNA, 15 bp, Homo sapiens
ggagcccatctccgg

SEQ ID NO: 2085274 - DNA, 15 bp, Homo sapiens
gagcccatctccggg

SEQ ID NO: 2085275 - DNA, 15 bp, Homo sapiens
agcccatctccgggg

SEQ ID NO: 2085276 - DNA, 15 bp, Homo sapiens
gcccatctccggggg

SEQ ID NO: 2085277 - DNA, 15 bp, Homo sapiens
cccatctccgggggg

SEQ ID NO: 2085278 - DNA, 15 bp, Homo sapiens
ccatctccggggggc

SEQ ID NO: 2085279 - DNA, 15 bp, Homo sapiens
catctccggggggct

SEQ ID NO: 2085280 - DNA, 15 bp, Homo sapiens
atctccggggggctg

SEQ ID NO: 2085281 - DNA, 15 bp, Homo sapiens
tctccggggggctgg

SEQ ID NO: 2085282 - DNA, 15 bp, Homo sapiens
ctccggggggctggg

SEQ ID NO: 2085283 - DNA, 15 bp, Homo sapiens
tccggggggctgggc

SEQ ID NO: 2085284 - DNA, 15 bp, Homo sapiens
ccggggggctgggca

SEQ ID NO: 2085285 - DNA, 15 bp, Homo sapiens
cggggggctgggcag

SEQ ID NO: 2085286 - DNA, 15 bp, Homo sapiens
ggggggctgggcagg

SEQ ID NO: 2085287 - DNA, 15 bp, Homo sapiens
gggggctgggcagga

SEQ ID NO: 2085288 - DNA, 15 bp, Homo sapiens
ggggctgggcaggaa

SEQ ID NO: 2085289 - DNA, 15 bp, Homo sapiens
gggctgggcaggaag

SEQ ID NO: 2085290 - DNA, 15 bp, Homo sapiens
ggctgggcaggaagt

SEQ ID NO: 2085291 - DNA, 15 bp, Homo sapiens
gctgggcaggaagta

SEQ ID NO: 2085292 - DNA, 15 bp, Homo sapiens
ctgggcaggaagtag

SEQ ID NO: 2085293 - DNA, 15 bp, Homo sapiens
tgggcaggaagtagg

SEQ ID NO: 2085294 - DNA, 15 bp, Homo sapiens
gggcaggaagtaggg

SEQ ID NO: 2085295 - DNA, 15 bp, Homo sapiens
ggcaggaagtagggt

SEQ ID NO: 2085296 - DNA, 15 bp, Homo sapiens
gcaggaagtagggtg

SEQ ID NO: 2085297 - DNA, 15 bp, Homo sapiens
caggaagtagggtgg

SEQ ID NO: 2085298 - DNA, 15 bp, Homo sapiens
aggaagtagggtggg

SEQ ID NO: 2085299 - DNA, 15 bp, Homo sapiens
ggaagtagggtgggg

SEQ ID NO: 2085300 - DNA, 15 bp, Homo sapiens
gaagtagggtggggt

SEQ ID NO: 2085301 - DNA, 15 bp, Homo sapiens
aagtagggtggggtt

SEQ ID NO: 2085302 - DNA, 15 bp, Homo sapiens
agtagggtggggttt

SEQ ID NO: 2085303 - DNA, 15 bp, Homo sapiens
gtagggtggggtttg

SEQ ID NO: 2085304 - DNA, 15 bp, Homo sapiens
tagggtggggtttgg

SEQ ID NO: 2085305 - DNA, 15 bp, Homo sapiens
agggtggggtttggg

SEQ ID NO: 2085306 - DNA, 15 bp, Homo sapiens
gggtggggtttgggg

SEQ ID NO: 2085307 - DNA, 15 bp, Homo sapiens
ggtggggtttggggt

SEQ ID NO: 2085308 - DNA, 15 bp, Homo sapiens
gtggggtttggggta

SEQ ID NO: 2085309 - DNA, 15 bp, Homo sapiens
tggggtttggggtag

SEQ ID NO: 2085310 - DNA, 15 bp, Homo sapiens
ggggtttggggtagg

SEQ ID NO: 2085311 - DNA, 15 bp, Homo sapiens
gggtttggggtaggg

SEQ ID NO: 2085312 - DNA, 15 bp, Homo sapiens
ggtttggggtaggga

SEQ ID NO: 2085313 - DNA, 15 bp, Homo sapiens
gtttggggtagggat

SEQ ID NO: 2085314 - DNA, 15 bp, Homo sapiens
tttggggtagggatc

SEQ ID NO: 2085315 - DNA, 15 bp, Homo sapiens
ttggggtagggatct

SEQ ID NO: 2085316 - DNA, 15 bp, Homo sapiens
tggggtagggatctg

SEQ ID NO: 2085317 - DNA, 15 bp, Homo sapiens
ggggtagggatctgg

SEQ ID NO: 2085318 - DNA, 15 bp, Homo sapiens
gggtagggatctggt

SEQ ID NO: 2085319 - DNA, 15 bp, Homo sapiens
ggtagggatctggta

SEQ ID NO: 2085320 - DNA, 15 bp, Homo sapiens
gtagggatctggtac

SEQ ID NO: 2085321 - DNA, 15 bp, Homo sapiens
tagggatctggtacc

SEQ ID NO: 2085322 - DNA, 15 bp, Homo sapiens
agggatctggtaccc

SEQ ID NO: 2085323 - DNA, 15 bp, Homo sapiens
gggatctggtaccct

SEQ ID NO: 2085324 - DNA, 15 bp, Homo sapiens
ggatctggtaccctg

SEQ ID NO: 2085325 - DNA, 15 bp, Homo sapiens
gatctggtaccctgg

SEQ ID NO: 2085326 - DNA, 15 bp, Homo sapiens
atctggtaccctggg

SEQ ID NO: 2085327 - DNA, 15 bp, Homo sapiens
tctggtaccctggga

SEQ ID NO: 2085328 - DNA, 15 bp, Homo sapiens
ctggtaccctgggac

SEQ ID NO: 2085329 - DNA, 15 bp, Homo sapiens
tggtaccctgggact

SEQ ID NO: 2085330 - DNA, 15 bp, Homo sapiens
ggtaccctgggactg

SEQ ID NO: 2085331 - DNA, 15 bp, Homo sapiens
gtaccctgggactgc

SEQ ID NO: 2085332 - DNA, 15 bp, Homo sapiens
taccctgggactgct

SEQ ID NO: 2085333 - DNA, 15 bp, Homo sapiens
accctgggactgctg

SEQ ID NO: 2085334 - DNA, 15 bp, Homo sapiens
ccctgggactgctgc

SEQ ID NO: 2085335 - DNA, 15 bp, Homo sapiens
cctgggactgctgca

SEQ ID NO: 2085336 - DNA, 15 bp, Homo sapiens
ctgggactgctgcaa

SEQ ID NO: 2085337 - DNA, 15 bp, Homo sapiens
tgggactgctgcaac

SEQ ID NO: 2085338 - DNA, 15 bp, Homo sapiens
gggactgctgcaact

SEQ ID NO: 2085339 - DNA, 15 bp, Homo sapiens
ggactgctgcaactc

SEQ ID NO: 2085340 - DNA, 15 bp, Homo sapiens
gactgctgcaactca

SEQ ID NO: 2085341 - DNA, 15 bp, Homo sapiens
actgctgcaactcaa

SEQ ID NO: 2085342 - DNA, 15 bp, Homo sapiens
ctgctgcaactcaaa

SEQ ID NO: 2085343 - DNA, 15 bp, Homo sapiens
tgctgcaactcaaac

SEQ ID NO: 2085344 - DNA, 15 bp, Homo sapiens
gctgcaactcaaact

SEQ ID NO: 2085345 - DNA, 15 bp, Homo sapiens
ctgcaactcaaacta

SEQ ID NO: 2085346 - DNA, 15 bp, Homo sapiens
tgcaactcaaactaa

SEQ ID NO: 2085347 - DNA, 15 bp, Homo sapiens
gcaactcaaactaac

SEQ ID NO: 2085348 - DNA, 15 bp, Homo sapiens
caactcaaactaacc

SEQ ID NO: 2085349 - DNA, 15 bp, Homo sapiens
aactcaaactaacca

SEQ ID NO: 2085350 - DNA, 15 bp, Homo sapiens
actcaaactaaccaa

SEQ ID NO: 2085351 - DNA, 15 bp, Homo sapiens
ctcaaactaaccaac

SEQ ID NO: 2085352 - DNA, 15 bp, Homo sapiens
tcaaactaaccaacc

SEQ ID NO: 2085353 - DNA, 15 bp, Homo sapiens
caaactaaccaaccc

SEQ ID NO: 2085354 - DNA, 15 bp, Homo sapiens
aaactaaccaaccca

SEQ ID NO: 2085355 - DNA, 15 bp, Homo sapiens
aactaaccaacccac

SEQ ID NO: 2085356 - DNA, 15 bp, Homo sapiens
actaaccaacccact

SEQ ID NO: 2085357 - DNA, 15 bp, Homo sapiens
ctaaccaacccactg

SEQ ID NO: 2085358 - DNA, 15 bp, Homo sapiens
taaccaacccactgg

SEQ ID NO: 2085359 - DNA, 15 bp, Homo sapiens
aaccaacccactggg

SEQ ID NO: 2085360 - DNA, 15 bp, Homo sapiens
accaacccactggga

SEQ ID NO: 2085361 - DNA, 15 bp, Homo sapiens
ccaacccactgggag

SEQ ID NO: 2085362 - DNA, 15 bp, Homo sapiens
caacccactgggaga

SEQ ID NO: 2085363 - DNA, 15 bp, Homo sapiens
aacccactgggagaa

SEQ ID NO: 2085364 - DNA, 15 bp, Homo sapiens
acccactgggagaag

SEQ ID NO: 2085365 - DNA, 15 bp, Homo sapiens
cccactgggagaaga

SEQ ID NO: 2085366 - DNA, 15 bp, Homo sapiens
ccactgggagaagat

SEQ ID NO: 2085367 - DNA, 15 bp, Homo sapiens
cactgggagaagatg

SEQ ID NO: 2085368 - DNA, 15 bp, Homo sapiens
actgggagaagatgc

SEQ ID NO: 2085369 - DNA, 15 bp, Homo sapiens
ctgggagaagatgcc

SEQ ID NO: 2085370 - DNA, 15 bp, Homo sapiens
tgggagaagatgcct

SEQ ID NO: 2085371 - DNA, 15 bp, Homo sapiens
gggagaagatgcctg

SEQ ID NO: 2085372 - DNA, 15 bp, Homo sapiens
ggagaagatgcctgg

SEQ ID NO: 2085373 - DNA, 15 bp, Homo sapiens
gagaagatgcctggg

SEQ ID NO: 2085374 - DNA, 15 bp, Homo sapiens
agaagatgcctgggg

SEQ ID NO: 2085375 - DNA, 15 bp, Homo sapiens
gaagatgcctggggg

SEQ ID NO: 2085376 - DNA, 15 bp, Homo sapiens
aagatgcctgggggt

SEQ ID NO: 2085377 - DNA, 15 bp, Homo sapiens
agatgcctgggggtc

SEQ ID NO: 2085378 - DNA, 15 bp, Homo sapiens
gatgcctgggggtcc

SEQ ID NO: 2085379 - DNA, 15 bp, Homo sapiens
atgcctgggggtcca

SEQ ID NO: 2085380 - DNA, 15 bp, Homo sapiens
tgcctgggggtccag

SEQ ID NO: 2085381 - DNA, 15 bp, Homo sapiens
gcctgggggtccagg

SEQ ID NO: 2085382 - DNA, 15 bp, Homo sapiens
cctgggggtccagga

SEQ ID NO: 2085383 - DNA, 15 bp, Homo sapiens
ctgggggtccaggag

SEQ ID NO: 2085384 - DNA, 15 bp, Homo sapiens
tgggggtccaggagt

SEQ ID NO: 2085385 - DNA, 15 bp, Homo sapiens
gggggtccaggagtc

SEQ ID NO: 2085386 - DNA, 15 bp, Homo sapiens
ggggtccaggagtcc

SEQ ID NO: 2085387 - DNA, 15 bp, Homo sapiens
gggtccaggagtcct

SEQ ID NO: 2085388 - DNA, 15 bp, Homo sapiens
ggtccaggagtcctc

SEQ ID NO: 2085389 - DNA, 15 bp, Homo sapiens
gtccaggagtcctcc

SEQ ID NO: 2085390 - DNA, 15 bp, Homo sapiens
tccaggagtcctcca

SEQ ID NO: 2085391 - DNA, 15 bp, Homo sapiens
ccaggagtcctccaa

SEQ ID NO: 2085392 - DNA, 15 bp, Homo sapiens
caggagtcctccaag

SEQ ID NO: 2085393 - DNA, 15 bp, Homo sapiens
aggagtcctccaagc

SEQ ID NO: 2085394 - DNA, 15 bp, Homo sapiens
ggagtcctccaagct

SEQ ID NO: 2085395 - DNA, 15 bp, Homo sapiens
gagtcctccaagctc

SEQ ID NO: 2085396 - DNA, 15 bp, Homo sapiens
agtcctccaagctct

SEQ ID NO: 2085397 - DNA, 15 bp, Homo sapiens
gtcctccaagctctg

SEQ ID NO: 2085398 - DNA, 15 bp, Homo sapiens
tcctccaagctctgc

SEQ ID NO: 2085399 - DNA, 15 bp, Homo sapiens
cctccaagctctgcc

SEQ ID NO: 2085400 - DNA, 15 bp, Homo sapiens
ctccaagctctgcct

SEQ ID NO: 2085401 - DNA, 15 bp, Homo sapiens
tccaagctctgcctg

SEQ ID NO: 2085402 - DNA, 15 bp, Homo sapiens
ccaagctctgcctgc

SEQ ID NO: 2085403 - DNA, 15 bp, Homo sapiens
caagctctgcctgcc

SEQ ID NO: 2085404 - DNA, 15 bp, Homo sapiens
aagctctgcctgcca

SEQ ID NO: 2085405 - DNA, 15 bp, Homo sapiens
agctctgcctgccac

SEQ ID NO: 2085406 - DNA, 15 bp, Homo sapiens
gctctgcctgccacc

SEQ ID NO: 2085407 - DNA, 15 bp, Homo sapiens
ctctgcctgccacca

SEQ ID NO: 2085408 - DNA, 15 bp, Homo sapiens
tctgcctgccaccat

SEQ ID NO: 2085409 - DNA, 15 bp, Homo sapiens
ctgcctgccaccatc

SEQ ID NO: 2085410 - DNA, 15 bp, Homo sapiens
tgcctgccaccatct

SEQ ID NO: 2085411 - DNA, 15 bp, Homo sapiens
gcctgccaccatctt

SEQ ID NO: 2085412 - DNA, 15 bp, Homo sapiens
cctgccaccatcttc

SEQ ID NO: 2085413 - DNA, 15 bp, Homo sapiens
ctgccaccatcttcc

SEQ ID NO: 2085414 - DNA, 15 bp, Homo sapiens
tgccaccatcttcct

SEQ ID NO: 2085415 - DNA, 15 bp, Homo sapiens
gccaccatcttcctc

SEQ ID NO: 2085416 - DNA, 15 bp, Homo sapiens
ccaccatcttcctcc

SEQ ID NO: 2085417 - DNA, 15 bp, Homo sapiens
caccatcttcctcct

SEQ ID NO: 2085418 - DNA, 15 bp, Homo sapiens
accatcttcctcctc

SEQ ID NO: 2085419 - DNA, 15 bp, Homo sapiens
ccatcttcctcctct

SEQ ID NO: 2085420 - DNA, 15 bp, Homo sapiens
catcttcctcctctt

SEQ ID NO: 2085421 - DNA, 15 bp, Homo sapiens
atcttcctcctcttc

SEQ ID NO: 2085422 - DNA, 15 bp, Homo sapiens
tcttcctcctcttcc

SEQ ID NO: 2085423 - DNA, 15 bp, Homo sapiens
cttcctcctcttcct

SEQ ID NO: 2085424 - DNA, 15 bp, Homo sapiens
ttcctcctcttcctg

SEQ ID NO: 2085425 - DNA, 15 bp, Homo sapiens
tcctcctcttcctgc

SEQ ID NO: 2085426 - DNA, 15 bp, Homo sapiens
cctcctcttcctgct

SEQ ID NO: 2085427 - DNA, 15 bp, Homo sapiens
ctcctcttcctgctg

SEQ ID NO: 2085428 - DNA, 15 bp, Homo sapiens
tcctcttcctgctgt

SEQ ID NO: 2085429 - DNA, 15 bp, Homo sapiens
cctcttcctgctgtc

SEQ ID NO: 2085430 - DNA, 15 bp, Homo sapiens
ctcttcctgctgtct

SEQ ID NO: 2085431 - DNA, 15 bp, Homo sapiens
tcttcctgctgtctg

SEQ ID NO: 2085432 - DNA, 15 bp, Homo sapiens
cttcctgctgtctgc

SEQ ID NO: 2085433 - DNA, 15 bp, Homo sapiens
ttcctgctgtctgct

SEQ ID NO: 2085434 - DNA, 15 bp, Homo sapiens
tcctgctgtctgctg

SEQ ID NO: 2085435 - DNA, 15 bp, Homo sapiens
cctgctgtctgctgt

SEQ ID NO: 2085436 - DNA, 15 bp, Homo sapiens
ctgctgtctgctgtc

SEQ ID NO: 2085437 - DNA, 15 bp, Homo sapiens
tgctgtctgctgtct

SEQ ID NO: 2085438 - DNA, 15 bp, Homo sapiens
gctgtctgctgtcta

SEQ ID NO: 2085439 - DNA, 15 bp, Homo sapiens
ctgtctgctgtctac

SEQ ID NO: 2085440 - DNA, 15 bp, Homo sapiens
tgtctgctgtctacc

SEQ ID NO: 2085441 - DNA, 15 bp, Homo sapiens
gtctgctgtctacct

SEQ ID NO: 2085442 - DNA, 15 bp, Homo sapiens
tctgctgtctacctg

SEQ ID NO: 2085443 - DNA, 15 bp, Homo sapiens
ctgctgtctacctgg

SEQ ID NO: 2085444 - DNA, 15 bp, Homo sapiens
tgctgtctacctggg

SEQ ID NO: 2085445 - DNA, 15 bp, Homo sapiens
gctgtctacctgggt

SEQ ID NO: 2085446 - DNA, 15 bp, Homo sapiens
ctgtctacctgggta

SEQ ID NO: 2085447 - DNA, 15 bp, Homo sapiens
tgtctacctgggtat

SEQ ID NO: 2085448 - DNA, 15 bp, Homo sapiens
gtctacctgggtatg

SEQ ID NO: 2085449 - DNA, 15 bp, Homo sapiens
tctacctgggtatgt

SEQ ID NO: 2085450 - DNA, 15 bp, Homo sapiens
ctacctgggtatgtg

SEQ ID NO: 2085451 - DNA, 15 bp, Homo sapiens
tacctgggtatgtgg

SEQ ID NO: 2085452 - DNA, 15 bp, Homo sapiens
acctgggtatgtggc

SEQ ID NO: 2085453 - DNA, 15 bp, Homo sapiens
cctgggtatgtggcc

SEQ ID NO: 2085454 - DNA, 15 bp, Homo sapiens
ctgggtatgtggcca

SEQ ID NO: 2085455 - DNA, 15 bp, Homo sapiens
tgggtatgtggccaa

SEQ ID NO: 2085456 - DNA, 15 bp, Homo sapiens
gggtatgtggccaaa

SEQ ID NO: 2085457 - DNA, 15 bp, Homo sapiens
ggtatgtggccaaag

SEQ ID NO: 2085458 - DNA, 15 bp, Homo sapiens
gtatgtggccaaagg

SEQ ID NO: 2085459 - DNA, 15 bp, Homo sapiens
tatgtggccaaaggg

SEQ ID NO: 2085460 - DNA, 15 bp, Homo sapiens
atgtggccaaagggc

SEQ ID NO: 2085461 - DNA, 15 bp, Homo sapiens
tgtggccaaagggca

SEQ ID NO: 2085462 - DNA, 15 bp, Homo sapiens
gtggccaaagggcag

SEQ ID NO: 2085463 - DNA, 15 bp, Homo sapiens
tggccaaagggcagg

SEQ ID NO: 2085464 - DNA, 15 bp, Homo sapiens
ggccaaagggcagga

SEQ ID NO: 2085465 - DNA, 15 bp, Homo sapiens
gccaaagggcaggaa

SEQ ID NO: 2085466 - DNA, 15 bp, Homo sapiens
ccaaagggcaggaac

SEQ ID NO: 2085467 - DNA, 15 bp, Homo sapiens
caaagggcaggaact

SEQ ID NO: 2085468 - DNA, 15 bp, Homo sapiens
aaagggcaggaactg

SEQ ID NO: 2085469 - DNA, 15 bp, Homo sapiens
aagggcaggaactgg

SEQ ID NO: 2085470 - DNA, 15 bp, Homo sapiens
agggcaggaactggc

SEQ ID NO: 2085471 - DNA, 15 bp, Homo sapiens
gggcaggaactggcg

SEQ ID NO: 2085472 - DNA, 15 bp, Homo sapiens
ggcaggaactggcgg

SEQ ID NO: 2085473 - DNA, 15 bp, Homo sapiens
gcaggaactggcggg

SEQ ID NO: 2085474 - DNA, 15 bp, Homo sapiens
caggaactggcggga

SEQ ID NO: 2085475 - DNA, 15 bp, Homo sapiens
aggaactggcgggag

SEQ ID NO: 2085476 - DNA, 15 bp, Homo sapiens
ggaactggcgggagg

SEQ ID NO: 2085477 - DNA, 15 bp, Homo sapiens
gaactggcgggaggt

SEQ ID NO: 2085478 - DNA, 15 bp, Homo sapiens
aactggcgggaggtg

SEQ ID NO: 2085479 - DNA, 15 bp, Homo sapiens
actggcgggaggtgg

SEQ ID NO: 2085480 - DNA, 15 bp, Homo sapiens
ctggcgggaggtggg

SEQ ID NO: 2085481 - DNA, 15 bp, Homo sapiens
tggcgggaggtgggg

SEQ ID NO: 2085482 - DNA, 15 bp, Homo sapiens
ggcgggaggtggggg

SEQ ID NO: 2085483 - DNA, 15 bp, Homo sapiens
gcgggaggtggggga

SEQ ID NO: 2085484 - DNA, 15 bp, Homo sapiens
cgggaggtgggggaa

SEQ ID NO: 2085485 - DNA, 15 bp, Homo sapiens
gggaggtgggggaag

SEQ ID NO: 2085486 - DNA, 15 bp, Homo sapiens
ggaggtgggggaagc

SEQ ID NO: 2085487 - DNA, 15 bp, Homo sapiens
gaggtgggggaagct

SEQ ID NO: 2085488 - DNA, 15 bp, Homo sapiens
aggtgggggaagctg

SEQ ID NO: 2085489 - DNA, 15 bp, Homo sapiens
ggtgggggaagctgt

SEQ ID NO: 2085490 - DNA, 15 bp, Homo sapiens
gtgggggaagctgtg

SEQ ID NO: 2085491 - DNA, 15 bp, Homo sapiens
tgggggaagctgtgg

SEQ ID NO: 2085492 - DNA, 15 bp, Homo sapiens
gggggaagctgtgga

SEQ ID NO: 2085493 - DNA, 15 bp, Homo sapiens
ggggaagctgtggag

SEQ ID NO: 2085494 - DNA, 15 bp, Homo sapiens
gggaagctgtggagg

SEQ ID NO: 2085495 - DNA, 15 bp, Homo sapiens
ggaagctgtggaggc

SEQ ID NO: 2085496 - DNA, 15 bp, Homo sapiens
gaagctgtggaggct

SEQ ID NO: 2085497 - DNA, 15 bp, Homo sapiens
aagctgtggaggctg

SEQ ID NO: 2085498 - DNA, 15 bp, Homo sapiens
agctgtggaggctgc

SEQ ID NO: 2085499 - DNA, 15 bp, Homo sapiens
gctgtggaggctgca

SEQ ID NO: 2085500 - DNA, 15 bp, Homo sapiens
ctgtggaggctgcag

SEQ ID NO: 2085501 - DNA, 15 bp, Homo sapiens
tgtggaggctgcaga

SEQ ID NO: 2085502 - DNA, 15 bp, Homo sapiens
gtggaggctgcagag

SEQ ID NO: 2085503 - DNA, 15 bp, Homo sapiens
tggaggctgcagaga

SEQ ID NO: 2085504 - DNA, 15 bp, Homo sapiens
ggaggctgcagagag

SEQ ID NO: 2085505 - DNA, 15 bp, Homo sapiens
gaggctgcagagagg

SEQ ID NO: 2085506 - DNA, 15 bp, Homo sapiens
aggctgcagagaggg

SEQ ID NO: 2085507 - DNA, 15 bp, Homo sapiens
ggctgcagagagggc

SEQ ID NO: 2085508 - DNA, 15 bp, Homo sapiens
gctgcagagagggca

SEQ ID NO: 2085509 - DNA, 15 bp, Homo sapiens
ctgcagagagggcac

SEQ ID NO: 2085510 - DNA, 15 bp, Homo sapiens
tgcagagagggcaca

SEQ ID NO: 2085511 - DNA, 15 bp, Homo sapiens
gcagagagggcacag

SEQ ID NO: 2085512 - DNA, 15 bp, Homo sapiens
cagagagggcacagg

SEQ ID NO: 2085513 - DNA, 15 bp, Homo sapiens
agagagggcacaggc

SEQ ID NO: 2085514 - DNA, 15 bp, Homo sapiens
gagagggcacaggca

SEQ ID NO: 2085515 - DNA, 15 bp, Homo sapiens
agagggcacaggcag

SEQ ID NO: 2085516 - DNA, 15 bp, Homo sapiens
gagggcacaggcaga

SEQ ID NO: 2085517 - DNA, 15 bp, Homo sapiens
agggcacaggcagag

SEQ ID NO: 2085518 - DNA, 15 bp, Homo sapiens
gggcacaggcagagg

SEQ ID NO: 2085519 - DNA, 15 bp, Homo sapiens
ggcacaggcagaggg

SEQ ID NO: 2085520 - DNA, 15 bp, Homo sapiens
gcacaggcagaggga

SEQ ID NO: 2085521 - DNA, 15 bp, Homo sapiens
cacaggcagagggaa

SEQ ID NO: 2085522 - DNA, 15 bp, Homo sapiens
acaggcagagggaag

SEQ ID NO: 2085523 - DNA, 15 bp, Homo sapiens
caggcagagggaagg

SEQ ID NO: 2085524 - DNA, 15 bp, Homo sapiens
ggcagagggaagggg

SEQ ID NO: 2085525 - DNA, 15 bp, Homo sapiens
gcagagggaaggggg

SEQ ID NO: 2085526 - DNA, 15 bp, Homo sapiens
cagagggaagggggc

SEQ ID NO: 2085527 - DNA, 15 bp, Homo sapiens
agagggaagggggct

SEQ ID NO: 2085528 - DNA, 15 bp, Homo sapiens
gagggaagggggctc

SEQ ID NO: 2085529 - DNA, 15 bp, Homo sapiens
agggaagggggctca

SEQ ID NO: 2085530 - DNA, 15 bp, Homo sapiens
gggaagggggctcag

SEQ ID NO: 2085531 - DNA, 15 bp, Homo sapiens
ggaagggggctcagg

SEQ ID NO: 2085532 - DNA, 15 bp, Homo sapiens
gaagggggctcaggg

SEQ ID NO: 2085533 - DNA, 15 bp, Homo sapiens
aagggggctcaggga

SEQ ID NO: 2085534 - DNA, 15 bp, Homo sapiens
agggggctcagggaa

SEQ ID NO: 2085535 - DNA, 15 bp, Homo sapiens
gggggctcagggaaa

SEQ ID NO: 2085536 - DNA, 15 bp, Homo sapiens
ggggctcagggaaag

SEQ ID NO: 2085537 - DNA, 15 bp, Homo sapiens
gggctcagggaaagg

SEQ ID NO: 2085538 - DNA, 15 bp, Homo sapiens
ggctcagggaaaggg

SEQ ID NO: 2085539 - DNA, 15 bp, Homo sapiens
gctcagggaaagggg

SEQ ID NO: 2085540 - DNA, 15 bp, Homo sapiens
ctcagggaaagggga

SEQ ID NO: 2085541 - DNA, 15 bp, Homo sapiens
tcagggaaaggggaa

SEQ ID NO: 2085542 - DNA, 15 bp, Homo sapiens
cagggaaaggggaag

SEQ ID NO: 2085543 - DNA, 15 bp, Homo sapiens
agggaaaggggaaga

SEQ ID NO: 2085544 - DNA, 15 bp, Homo sapiens
gggaaaggggaagag

SEQ ID NO: 2085545 - DNA, 15 bp, Homo sapiens
ggaaaggggaagagg

SEQ ID NO: 2085546 - DNA, 15 bp, Homo sapiens
gaaaggggaagagga

SEQ ID NO: 2085547 - DNA, 15 bp, Homo sapiens
aaaggggaagaggag

SEQ ID NO: 2085548 - DNA, 15 bp, Homo sapiens
aaggggaagaggagg

SEQ ID NO: 2085549 - DNA, 15 bp, Homo sapiens
aggggaagaggaggc

SEQ ID NO: 2085550 - DNA, 15 bp, Homo sapiens
ggggaagaggaggca

SEQ ID NO: 2085551 - DNA, 15 bp, Homo sapiens
gggaagaggaggcag

SEQ ID NO: 2085552 - DNA, 15 bp, Homo sapiens
ggaagaggaggcaga

SEQ ID NO: 2085553 - DNA, 15 bp, Homo sapiens
gaagaggaggcagag

SEQ ID NO: 2085554 - DNA, 15 bp, Homo sapiens
aagaggaggcagagg

SEQ ID NO: 2085555 - DNA, 15 bp, Homo sapiens
agaggaggcagagga

SEQ ID NO: 2085556 - DNA, 15 bp, Homo sapiens
gaggaggcagaggat

SEQ ID NO: 2085557 - DNA, 15 bp, Homo sapiens
aggaggcagaggata

SEQ ID NO: 2085558 - DNA, 15 bp, Homo sapiens
ggaggcagaggatag

SEQ ID NO: 2085559 - DNA, 15 bp, Homo sapiens
gaggcagaggatagg

SEQ ID NO: 2085560 - DNA, 15 bp, Homo sapiens
aggcagaggataggg

SEQ ID NO: 2085561 - DNA, 15 bp, Homo sapiens
ggcagaggatagggg

SEQ ID NO: 2085562 - DNA, 15 bp, Homo sapiens
gcagaggatagggga

SEQ ID NO: 2085563 - DNA, 15 bp, Homo sapiens
cagaggataggggac

SEQ ID NO: 2085564 - DNA, 15 bp, Homo sapiens
agaggataggggacc

SEQ ID NO: 2085565 - DNA, 15 bp, Homo sapiens
gaggataggggaccc

SEQ ID NO: 2085566 - DNA, 15 bp, Homo sapiens
aggataggggaccca

SEQ ID NO: 2085567 - DNA, 15 bp, Homo sapiens
ggataggggacccag

SEQ ID NO: 2085568 - DNA, 15 bp, Homo sapiens
gataggggacccagg

SEQ ID NO: 2085569 - DNA, 15 bp, Homo sapiens
ataggggacccaggg

SEQ ID NO: 2085570 - DNA, 15 bp, Homo sapiens
taggggacccaggga

SEQ ID NO: 2085571 - DNA, 15 bp, Homo sapiens
aggggacccagggaa

SEQ ID NO: 2085572 - DNA, 15 bp, Homo sapiens
ggggacccagggaag

SEQ ID NO: 2085573 - DNA, 15 bp, Homo sapiens
gggacccagggaaga

SEQ ID NO: 2085574 - DNA, 15 bp, Homo sapiens
ggacccagggaagat

SEQ ID NO: 2085575 - DNA, 15 bp, Homo sapiens
gacccagggaagatg

SEQ ID NO: 2085576 - DNA, 15 bp, Homo sapiens
acccagggaagatgc

SEQ ID NO: 2085577 - DNA, 15 bp, Homo sapiens
cccagggaagatgcc

SEQ ID NO: 2085578 - DNA, 15 bp, Homo sapiens
ccagggaagatgcct

SEQ ID NO: 2085579 - DNA, 15 bp, Homo sapiens
cagggaagatgccta

SEQ ID NO: 2085580 - DNA, 15 bp, Homo sapiens
agggaagatgcctat

SEQ ID NO: 2085581 - DNA, 15 bp, Homo sapiens
gggaagatgcctata

SEQ ID NO: 2085582 - DNA, 15 bp, Homo sapiens
ggaagatgcctatag

SEQ ID NO: 2085583 - DNA, 15 bp, Homo sapiens
gaagatgcctataga

SEQ ID NO: 2085584 - DNA, 15 bp, Homo sapiens
aagatgcctatagaa

SEQ ID NO: 2085585 - DNA, 15 bp, Homo sapiens
agatgcctatagaaa

SEQ ID NO: 2085586 - DNA, 15 bp, Homo sapiens
gatgcctatagaaat

SEQ ID NO: 2085587 - DNA, 15 bp, Homo sapiens
atgcctatagaaatc

SEQ ID NO: 2085588 - DNA, 15 bp, Homo sapiens
tgcctatagaaatcg

SEQ ID NO: 2085589 - DNA, 15 bp, Homo sapiens
gcctatagaaatcgt

SEQ ID NO: 2085590 - DNA, 15 bp, Homo sapiens
cctatagaaatcgta

SEQ ID NO: 2085591 - DNA, 15 bp, Homo sapiens
ctatagaaatcgtat

SEQ ID NO: 2085592 - DNA, 15 bp, Homo sapiens
tatagaaatcgtatc

SEQ ID NO: 2085593 - DNA, 15 bp, Homo sapiens
atagaaatcgtatct

SEQ ID NO: 2085594 - DNA, 15 bp, Homo sapiens
tagaaatcgtatctg

SEQ ID NO: 2085595 - DNA, 15 bp, Homo sapiens
agaaatcgtatctgt

SEQ ID NO: 2085596 - DNA, 15 bp, Homo sapiens
gaaatcgtatctgtg

SEQ ID NO: 2085597 - DNA, 15 bp, Homo sapiens
aaatcgtatctgtgc

SEQ ID NO: 2085598 - DNA, 15 bp, Homo sapiens
aatcgtatctgtgcc

SEQ ID NO: 2085599 - DNA, 15 bp, Homo sapiens
atcgtatctgtgcca

SEQ ID NO: 2085600 - DNA, 15 bp, Homo sapiens
tcgtatctgtgccaa

SEQ ID NO: 2085601 - DNA, 15 bp, Homo sapiens
cgtatctgtgccaag

SEQ ID NO: 2085602 - DNA, 15 bp, Homo sapiens
gtatctgtgccaaga

SEQ ID NO: 2085603 - DNA, 15 bp, Homo sapiens
tatctgtgccaagat

SEQ ID NO: 2085604 - DNA, 15 bp, Homo sapiens
atctgtgccaagatg

SEQ ID NO: 2085605 - DNA, 15 bp, Homo sapiens
tctgtgccaagatgg

SEQ ID NO: 2085606 - DNA, 15 bp, Homo sapiens
ctgtgccaagatggg

SEQ ID NO: 2085607 - DNA, 15 bp, Homo sapiens
tgtgccaagatgggc

SEQ ID NO: 2085608 - DNA, 15 bp, Homo sapiens
gtgccaagatgggcc

SEQ ID NO: 2085609 - DNA, 15 bp, Homo sapiens
tgccaagatgggcca

SEQ ID NO: 2085610 - DNA, 15 bp, Homo sapiens
gccaagatgggccaa

SEQ ID NO: 2085611 - DNA, 15 bp, Homo sapiens
ccaagatgggccaag

SEQ ID NO: 2085612 - DNA, 15 bp, Homo sapiens
caagatgggccaagg

SEQ ID NO: 2085613 - DNA, 15 bp, Homo sapiens
aagatgggccaaggt

SEQ ID NO: 2085614 - DNA, 15 bp, Homo sapiens
agatgggccaaggtg

SEQ ID NO: 2085615 - DNA, 15 bp, Homo sapiens
gatgggccaaggtgg

SEQ ID NO: 2085616 - DNA, 15 bp, Homo sapiens
atgggccaaggtggg

SEQ ID NO: 2085617 - DNA, 15 bp, Homo sapiens
tgggccaaggtgggg

SEQ ID NO: 2085618 - DNA, 15 bp, Homo sapiens
gggccaaggtggggc

SEQ ID NO: 2085619 - DNA, 15 bp, Homo sapiens
ggccaaggtggggct

SEQ ID NO: 2085620 - DNA, 15 bp, Homo sapiens
gccaaggtggggctg

SEQ ID NO: 2085621 - DNA, 15 bp, Homo sapiens
ccaaggtggggctgg

SEQ ID NO: 2085622 - DNA, 15 bp, Homo sapiens
caaggtggggctgga

SEQ ID NO: 2085623 - DNA, 15 bp, Homo sapiens
aaggtggggctggag

SEQ ID NO: 2085624 - DNA, 15 bp, Homo sapiens
aggtggggctggagg

SEQ ID NO: 2085625 - DNA, 15 bp, Homo sapiens
ggtggggctggaggg

SEQ ID NO: 2085626 - DNA, 15 bp, Homo sapiens
gtggggctggaggga

SEQ ID NO: 2085627 - DNA, 15 bp, Homo sapiens
tggggctggagggag

SEQ ID NO: 2085628 - DNA, 15 bp, Homo sapiens
ggggctggagggagc

SEQ ID NO: 2085629 - DNA, 15 bp, Homo sapiens
gggctggagggagcc

SEQ ID NO: 2085630 - DNA, 15 bp, Homo sapiens
ggctggagggagccc

SEQ ID NO: 2085631 - DNA, 15 bp, Homo sapiens
gctggagggagccca

SEQ ID NO: 2085632 - DNA, 15 bp, Homo sapiens
ctggagggagcccag

SEQ ID NO: 2085633 - DNA, 15 bp, Homo sapiens
tggagggagcccagc

SEQ ID NO: 2085634 - DNA, 15 bp, Homo sapiens
ggagggagcccagcg

SEQ ID NO: 2085635 - DNA, 15 bp, Homo sapiens
gagggagcccagcga

SEQ ID NO: 2085636 - DNA, 15 bp, Homo sapiens
agggagcccagcgaa

SEQ ID NO: 2085637 - DNA, 15 bp, Homo sapiens
gggagcccagcgaag

SEQ ID NO: 2085638 - DNA, 15 bp, Homo sapiens
ggagcccagcgaagg

SEQ ID NO: 2085639 - DNA, 15 bp, Homo sapiens
gagcccagcgaagga

SEQ ID NO: 2085640 - DNA, 15 bp, Homo sapiens
agcccagcgaaggag

SEQ ID NO: 2085641 - DNA, 15 bp, Homo sapiens
gcccagcgaaggaga

SEQ ID NO: 2085642 - DNA, 15 bp, Homo sapiens
cccagcgaaggagaa

SEQ ID NO: 2085643 - DNA, 15 bp, Homo sapiens
ccagcgaaggagaag

SEQ ID NO: 2085644 - DNA, 15 bp, Homo sapiens
cagcgaaggagaagg

SEQ ID NO: 2085645 - DNA, 15 bp, Homo sapiens
agcgaaggagaaggg

SEQ ID NO: 2085646 - DNA, 15 bp, Homo sapiens
gcgaaggagaagggg

SEQ ID NO: 2085647 - DNA, 15 bp, Homo sapiens
cgaaggagaaggggc

SEQ ID NO: 2085648 - DNA, 15 bp, Homo sapiens
gaaggagaaggggcg

SEQ ID NO: 2085649 - DNA, 15 bp, Homo sapiens
aaggagaaggggcgt

SEQ ID NO: 2085650 - DNA, 15 bp, Homo sapiens
aggagaaggggcgtc

SEQ ID NO: 2085651 - DNA, 15 bp, Homo sapiens
ggagaaggggcgtcc

SEQ ID NO: 2085652 - DNA, 15 bp, Homo sapiens
gagaaggggcgtcca

SEQ ID NO: 2085653 - DNA, 15 bp, Homo sapiens
agaaggggcgtccac

SEQ ID NO: 2085654 - DNA, 15 bp, Homo sapiens
gaaggggcgtccaca

SEQ ID NO: 2085655 - DNA, 15 bp, Homo sapiens
aaggggcgtccacag

SEQ ID NO: 2085656 - DNA, 15 bp, Homo sapiens
aggggcgtccacagt

SEQ ID NO: 2085657 - DNA, 15 bp, Homo sapiens
ggggcgtccacagtc

SEQ ID NO: 2085658 - DNA, 15 bp, Homo sapiens
gggcgtccacagtct

SEQ ID NO: 2085659 - DNA, 15 bp, Homo sapiens
ggcgtccacagtctc

SEQ ID NO: 2085660 - DNA, 15 bp, Homo sapiens
gcgtccacagtctca

SEQ ID NO: 2085661 - DNA, 15 bp, Homo sapiens
cgtccacagtctcac

SEQ ID NO: 2085662 - DNA, 15 bp, Homo sapiens
gtccacagtctcaca

SEQ ID NO: 2085663 - DNA, 15 bp, Homo sapiens
tccacagtctcacac

SEQ ID NO: 2085664 - DNA, 15 bp, Homo sapiens
ccacagtctcacaca

SEQ ID NO: 2085665 - DNA, 15 bp, Homo sapiens
cacagtctcacacag

SEQ ID NO: 2085666 - DNA, 15 bp, Homo sapiens
acagtctcacacagg

SEQ ID NO: 2085667 - DNA, 15 bp, Homo sapiens
cagtctcacacaggg

SEQ ID NO: 2085668 - DNA, 15 bp, Homo sapiens
agtctcacacaggga

SEQ ID NO: 2085669 - DNA, 15 bp, Homo sapiens
gtctcacacagggag

SEQ ID NO: 2085670 - DNA, 15 bp, Homo sapiens
tctcacacagggagg

SEQ ID NO: 2085671 - DNA, 15 bp, Homo sapiens
ctcacacagggaggc

SEQ ID NO: 2085672 - DNA, 15 bp, Homo sapiens
tcacacagggaggca

SEQ ID NO: 2085673 - DNA, 15 bp, Homo sapiens
cacacagggaggcag

SEQ ID NO: 2085674 - DNA, 15 bp, Homo sapiens
acacagggaggcagg

SEQ ID NO: 2085675 - DNA, 15 bp, Homo sapiens
cacagggaggcagga

SEQ ID NO: 2085676 - DNA, 15 bp, Homo sapiens
acagggaggcaggag

SEQ ID NO: 2085677 - DNA, 15 bp, Homo sapiens
cagggaggcaggagc

SEQ ID NO: 2085678 - DNA, 15 bp, Homo sapiens
agggaggcaggagca

SEQ ID NO: 2085679 - DNA, 15 bp, Homo sapiens
gggaggcaggagcaa

SEQ ID NO: 2085680 - DNA, 15 bp, Homo sapiens
ggaggcaggagcaag

SEQ ID NO: 2085681 - DNA, 15 bp, Homo sapiens
gaggcaggagcaaga

SEQ ID NO: 2085682 - DNA, 15 bp, Homo sapiens
aggcaggagcaagag

SEQ ID NO: 2085683 - DNA, 15 bp, Homo sapiens
ggcaggagcaagagt

SEQ ID NO: 2085684 - DNA, 15 bp, Homo sapiens
gcaggagcaagagtc

SEQ ID NO: 2085685 - DNA, 15 bp, Homo sapiens
caggagcaagagtca

SEQ ID NO: 2085686 - DNA, 15 bp, Homo sapiens
aggagcaagagtcac

SEQ ID NO: 2085687 - DNA, 15 bp, Homo sapiens
ggagcaagagtcacc

SEQ ID NO: 2085688 - DNA, 15 bp, Homo sapiens
gagcaagagtcacct

SEQ ID NO: 2085689 - DNA, 15 bp, Homo sapiens
agcaagagtcacctc

SEQ ID NO: 2085690 - DNA, 15 bp, Homo sapiens
gcaagagtcacctcc

SEQ ID NO: 2085691 - DNA, 15 bp, Homo sapiens
caagagtcacctccc

SEQ ID NO: 2085692 - DNA, 15 bp, Homo sapiens
aagagtcacctcccc

SEQ ID NO: 2085693 - DNA, 15 bp, Homo sapiens
agagtcacctccccc

SEQ ID NO: 2085694 - DNA, 15 bp, Homo sapiens
gagtcacctccccca

SEQ ID NO: 2085695 - DNA, 15 bp, Homo sapiens
agtcacctcccccac

SEQ ID NO: 2085696 - DNA, 15 bp, Homo sapiens
gtcacctcccccacc

SEQ ID NO: 2085697 - DNA, 15 bp, Homo sapiens
tcacctcccccacct

SEQ ID NO: 2085698 - DNA, 15 bp, Homo sapiens
cacctcccccacctc

SEQ ID NO: 2085699 - DNA, 15 bp, Homo sapiens
acctcccccacctcc

SEQ ID NO: 2085700 - DNA, 15 bp, Homo sapiens
cctcccccacctcct

SEQ ID NO: 2085701 - DNA, 15 bp, Homo sapiens
ctcccccacctcctg

SEQ ID NO: 2085702 - DNA, 15 bp, Homo sapiens
tcccccacctcctgt

SEQ ID NO: 2085703 - DNA, 15 bp, Homo sapiens
cccccacctcctgtt

SEQ ID NO: 2085704 - DNA, 15 bp, Homo sapiens
ccccacctcctgttc

SEQ ID NO: 2085705 - DNA, 15 bp, Homo sapiens
cccacctcctgttcc

SEQ ID NO: 2085706 - DNA, 15 bp, Homo sapiens
ccacctcctgttccc

SEQ ID NO: 2085707 - DNA, 15 bp, Homo sapiens
cacctcctgttcccc

SEQ ID NO: 2085708 - DNA, 15 bp, Homo sapiens
acctcctgttcccca

SEQ ID NO: 2085709 - DNA, 15 bp, Homo sapiens
cctcctgttccccac

SEQ ID NO: 2085710 - DNA, 15 bp, Homo sapiens
ctcctgttccccaca

SEQ ID NO: 2085711 - DNA, 15 bp, Homo sapiens
tcctgttccccacag

SEQ ID NO: 2085712 - DNA, 15 bp, Homo sapiens
cctgttccccacagg

SEQ ID NO: 2085713 - DNA, 15 bp, Homo sapiens
ctgttccccacaggc

SEQ ID NO: 2085714 - DNA, 15 bp, Homo sapiens
tgttccccacaggcc

SEQ ID NO: 2085715 - DNA, 15 bp, Homo sapiens
gttccccacaggcca

SEQ ID NO: 2085716 - DNA, 15 bp, Homo sapiens
ttccccacaggccaa

SEQ ID NO: 2085717 - DNA, 15 bp, Homo sapiens
tccccacaggccaaa

SEQ ID NO: 2085718 - DNA, 15 bp, Homo sapiens
ccccacaggccaaaa

SEQ ID NO: 2085719 - DNA, 15 bp, Homo sapiens
cccacaggccaaaat

SEQ ID NO: 2085720 - DNA, 15 bp, Homo sapiens
ccacaggccaaaata

SEQ ID NO: 2085721 - DNA, 15 bp, Homo sapiens
cacaggccaaaataa

SEQ ID NO: 2085722 - DNA, 15 bp, Homo sapiens
acaggccaaaataag

SEQ ID NO: 2085723 - DNA, 15 bp, Homo sapiens
caggccaaaataagg

SEQ ID NO: 2085724 - DNA, 15 bp, Homo sapiens
aggccaaaataagga

SEQ ID NO: 2085725 - DNA, 15 bp, Homo sapiens
ggccaaaataaggaa

SEQ ID NO: 2085726 - DNA, 15 bp, Homo sapiens
gccaaaataaggaac

SEQ ID NO: 2085727 - DNA, 15 bp, Homo sapiens
ccaaaataaggaact

SEQ ID NO: 2085728 - DNA, 15 bp, Homo sapiens
caaaataaggaacta

SEQ ID NO: 2085729 - DNA, 15 bp, Homo sapiens
aaaataaggaactaa

SEQ ID NO: 2085730 - DNA, 15 bp, Homo sapiens
aaataaggaactaaa

SEQ ID NO: 2085731 - DNA, 15 bp, Homo sapiens
aataaggaactaaag

SEQ ID NO: 2085732 - DNA, 15 bp, Homo sapiens
ataaggaactaaagt

SEQ ID NO: 2085733 - DNA, 15 bp, Homo sapiens
taaggaactaaagtt

SEQ ID NO: 2085734 - DNA, 15 bp, Homo sapiens
aaggaactaaagttg

SEQ ID NO: 2085735 - DNA, 15 bp, Homo sapiens
aggaactaaagttgc

SEQ ID NO: 2085736 - DNA, 15 bp, Homo sapiens
ggaactaaagttgct

SEQ ID NO: 2085737 - DNA, 15 bp, Homo sapiens
gaactaaagttgctc

SEQ ID NO: 2085738 - DNA, 15 bp, Homo sapiens
aactaaagttgctct

SEQ ID NO: 2085739 - DNA, 15 bp, Homo sapiens
actaaagttgctctt

SEQ ID NO: 2085740 - DNA, 15 bp, Homo sapiens
ctaaagttgctcttg

SEQ ID NO: 2085741 - DNA, 15 bp, Homo sapiens
taaagttgctcttga

SEQ ID NO: 2085742 - DNA, 15 bp, Homo sapiens
aaagttgctcttgac

SEQ ID NO: 2085743 - DNA, 15 bp, Homo sapiens
aagttgctcttgact

SEQ ID NO: 2085744 - DNA, 15 bp, Homo sapiens
agttgctcttgactg

SEQ ID NO: 2085745 - DNA, 15 bp, Homo sapiens
gttgctcttgactga

SEQ ID NO: 2085746 - DNA, 15 bp, Homo sapiens
ttgctcttgactgag

SEQ ID NO: 2085747 - DNA, 15 bp, Homo sapiens
tgctcttgactgagc

SEQ ID NO: 2085748 - DNA, 15 bp, Homo sapiens
gctcttgactgagca

SEQ ID NO: 2085749 - DNA, 15 bp, Homo sapiens
ctcttgactgagcac

SEQ ID NO: 2085750 - DNA, 15 bp, Homo sapiens
tcttgactgagcacc

SEQ ID NO: 2085751 - DNA, 15 bp, Homo sapiens
cttgactgagcacca

SEQ ID NO: 2085752 - DNA, 15 bp, Homo sapiens
ttgactgagcaccag

SEQ ID NO: 2085753 - DNA, 15 bp, Homo sapiens
tgactgagcaccagg

SEQ ID NO: 2085754 - DNA, 15 bp, Homo sapiens
gactgagcaccaggg

SEQ ID NO: 2085755 - DNA, 15 bp, Homo sapiens
actgagcaccagggc

SEQ ID NO: 2085756 - DNA, 15 bp, Homo sapiens
ctgagcaccagggct

SEQ ID NO: 2085757 - DNA, 15 bp, Homo sapiens
tgagcaccagggctg

SEQ ID NO: 2085758 - DNA, 15 bp, Homo sapiens
gagcaccagggctgg

SEQ ID NO: 2085759 - DNA, 15 bp, Homo sapiens
agcaccagggctggg

SEQ ID NO: 2085760 - DNA, 15 bp, Homo sapiens
gcaccagggctgggg

SEQ ID NO: 2085761 - DNA, 15 bp, Homo sapiens
caccagggctggggg

SEQ ID NO: 2085762 - DNA, 15 bp, Homo sapiens
accagggctgggggc

SEQ ID NO: 2085763 - DNA, 15 bp, Homo sapiens
ccagggctgggggca

SEQ ID NO: 2085764 - DNA, 15 bp, Homo sapiens
cagggctgggggcag

SEQ ID NO: 2085765 - DNA, 15 bp, Homo sapiens
agggctgggggcagg

SEQ ID NO: 2085766 - DNA, 15 bp, Homo sapiens
gggctgggggcagga

SEQ ID NO: 2085767 - DNA, 15 bp, Homo sapiens
ggctgggggcaggaa

SEQ ID NO: 2085768 - DNA, 15 bp, Homo sapiens
gctgggggcaggaag

SEQ ID NO: 2085769 - DNA, 15 bp, Homo sapiens
ctgggggcaggaagg

SEQ ID NO: 2085770 - DNA, 15 bp, Homo sapiens
tgggggcaggaaggg

SEQ ID NO: 2085771 - DNA, 15 bp, Homo sapiens
gggggcaggaagggg

SEQ ID NO: 2085772 - DNA, 15 bp, Homo sapiens
ggggcaggaagggga

SEQ ID NO: 2085773 - DNA, 15 bp, Homo sapiens
gggcaggaaggggac

SEQ ID NO: 2085774 - DNA, 15 bp, Homo sapiens
ggcaggaaggggact

SEQ ID NO: 2085775 - DNA, 15 bp, Homo sapiens
gcaggaaggggactt

SEQ ID NO: 2085776 - DNA, 15 bp, Homo sapiens
caggaaggggactta

SEQ ID NO: 2085777 - DNA, 15 bp, Homo sapiens
aggaaggggacttag

SEQ ID NO: 2085778 - DNA, 15 bp, Homo sapiens
ggaaggggacttagg

SEQ ID NO: 2085779 - DNA, 15 bp, Homo sapiens
gaaggggacttaggg

SEQ ID NO: 2085780 - DNA, 15 bp, Homo sapiens
aggggacttaggggt

SEQ ID NO: 2085781 - DNA, 15 bp, Homo sapiens
ggggacttaggggta

SEQ ID NO: 2085782 - DNA, 15 bp, Homo sapiens
gggacttaggggtag

SEQ ID NO: 2085783 - DNA, 15 bp, Homo sapiens
ggacttaggggtagc

SEQ ID NO: 2085784 - DNA, 15 bp, Homo sapiens
gacttaggggtagca

SEQ ID NO: 2085785 - DNA, 15 bp, Homo sapiens
acttaggggtagcag

SEQ ID NO: 2085786 - DNA, 15 bp, Homo sapiens
cttaggggtagcagc

SEQ ID NO: 2085787 - DNA, 15 bp, Homo sapiens
ttaggggtagcagca

SEQ ID NO: 2085788 - DNA, 15 bp, Homo sapiens
taggggtagcagcat

SEQ ID NO: 2085789 - DNA, 15 bp, Homo sapiens
aggggtagcagcatt

SEQ ID NO: 2085790 - DNA, 15 bp, Homo sapiens
ggggtagcagcattc

SEQ ID NO: 2085791 - DNA, 15 bp, Homo sapiens
gggtagcagcattca

SEQ ID NO: 2085792 - DNA, 15 bp, Homo sapiens
ggtagcagcattcag

SEQ ID NO: 2085793 - DNA, 15 bp, Homo sapiens
gtagcagcattcagc

SEQ ID NO: 2085794 - DNA, 15 bp, Homo sapiens
tagcagcattcagcg

SEQ ID NO: 2085795 - DNA, 15 bp, Homo sapiens
agcagcattcagcgt

SEQ ID NO: 2085796 - DNA, 15 bp, Homo sapiens
gcagcattcagcgtc

SEQ ID NO: 2085797 - DNA, 15 bp, Homo sapiens
cagcattcagcgtct

SEQ ID NO: 2085798 - DNA, 15 bp, Homo sapiens
agcattcagcgtctg

SEQ ID NO: 2085799 - DNA, 15 bp, Homo sapiens
gcattcagcgtctgt

SEQ ID NO: 2085800 - DNA, 15 bp, Homo sapiens
cattcagcgtctgtc

SEQ ID NO: 2085801 - DNA, 15 bp, Homo sapiens
attcagcgtctgtca

SEQ ID NO: 2085802 - DNA, 15 bp, Homo sapiens
ttcagcgtctgtcaa

SEQ ID NO: 2085803 - DNA, 15 bp, Homo sapiens
tcagcgtctgtcaag

SEQ ID NO: 2085804 - DNA, 15 bp, Homo sapiens
cagcgtctgtcaagg

SEQ ID NO: 2085805 - DNA, 15 bp, Homo sapiens
agcgtctgtcaaggg

SEQ ID NO: 2085806 - DNA, 15 bp, Homo sapiens
gcgtctgtcaagggg

SEQ ID NO: 2085807 - DNA, 15 bp, Homo sapiens
cgtctgtcaagggga

SEQ ID NO: 2085808 - DNA, 15 bp, Homo sapiens
gtctgtcaaggggag

SEQ ID NO: 2085809 - DNA, 15 bp, Homo sapiens
tctgtcaaggggaga

SEQ ID NO: 2085810 - DNA, 15 bp, Homo sapiens
ctgtcaaggggagaa

SEQ ID NO: 2085811 - DNA, 15 bp, Homo sapiens
tgtcaaggggagaaa

SEQ ID NO: 2085812 - DNA, 15 bp, Homo sapiens
gtcaaggggagaaaa

SEQ ID NO: 2085813 - DNA, 15 bp, Homo sapiens
tcaaggggagaaaaa

SEQ ID NO: 2085814 - DNA, 15 bp, Homo sapiens
caaggggagaaaaag

SEQ ID NO: 2085815 - DNA, 15 bp, Homo sapiens
aaggggagaaaaagc

SEQ ID NO: 2085816 - DNA, 15 bp, Homo sapiens
aggggagaaaaagct

SEQ ID NO: 2085817 - DNA, 15 bp, Homo sapiens
ggggagaaaaagctt

SEQ ID NO: 2085818 - DNA, 15 bp, Homo sapiens
gggagaaaaagcttt

SEQ ID NO: 2085819 - DNA, 15 bp, Homo sapiens
ggagaaaaagctttc

SEQ ID NO: 2085820 - DNA, 15 bp, Homo sapiens
gagaaaaagctttct

SEQ ID NO: 2085821 - DNA, 15 bp, Homo sapiens
agaaaaagctttctc

SEQ ID NO: 2085822 - DNA, 15 bp, Homo sapiens
gaaaaagctttctct

SEQ ID NO: 2085823 - DNA, 15 bp, Homo sapiens
aaaaagctttctctg

SEQ ID NO: 2085824 - DNA, 15 bp, Homo sapiens
aaaagctttctctgc

SEQ ID NO: 2085825 - DNA, 15 bp, Homo sapiens
aaagctttctctgcc

SEQ ID NO: 2085826 - DNA, 15 bp, Homo sapiens
aagctttctctgcct

SEQ ID NO: 2085827 - DNA, 15 bp, Homo sapiens
agctttctctgcctt

SEQ ID NO: 2085828 - DNA, 15 bp, Homo sapiens
gctttctctgcctta

SEQ ID NO: 2085829 - DNA, 15 bp, Homo sapiens
ctttctctgccttaa

SEQ ID NO: 2085830 - DNA, 15 bp, Homo sapiens
tttctctgccttaaa

SEQ ID NO: 2085831 - DNA, 15 bp, Homo sapiens
ttctctgccttaaac

SEQ ID NO: 2085832 - DNA, 15 bp, Homo sapiens
tctctgccttaaacc

SEQ ID NO: 2085833 - DNA, 15 bp, Homo sapiens
ctctgccttaaacct

SEQ ID NO: 2085834 - DNA, 15 bp, Homo sapiens
tctgccttaaacctc

SEQ ID NO: 2085835 - DNA, 15 bp, Homo sapiens
ctgccttaaacctca

SEQ ID NO: 2085836 - DNA, 15 bp, Homo sapiens
tgccttaaacctcag

SEQ ID NO: 2085837 - DNA, 15 bp, Homo sapiens
gccttaaacctcagg

SEQ ID NO: 2085838 - DNA, 15 bp, Homo sapiens
ccttaaacctcaggt

SEQ ID NO: 2085839 - DNA, 15 bp, Homo sapiens
cttaaacctcaggtg

SEQ ID NO: 2085840 - DNA, 15 bp, Homo sapiens
ttaaacctcaggtgc

SEQ ID NO: 2085841 - DNA, 15 bp, Homo sapiens
taaacctcaggtgcc

SEQ ID NO: 2085842 - DNA, 15 bp, Homo sapiens
aaacctcaggtgcct

SEQ ID NO: 2085843 - DNA, 15 bp, Homo sapiens
aacctcaggtgcctc

SEQ ID NO: 2085844 - DNA, 15 bp, Homo sapiens
acctcaggtgcctct

SEQ ID NO: 2085845 - DNA, 15 bp, Homo sapiens
cctcaggtgcctctc

SEQ ID NO: 2085846 - DNA, 15 bp, Homo sapiens
ctcaggtgcctctct

SEQ ID NO: 2085847 - DNA, 15 bp, Homo sapiens
tcaggtgcctctctc

SEQ ID NO: 2085848 - DNA, 15 bp, Homo sapiens
caggtgcctctctct

SEQ ID NO: 2085849 - DNA, 15 bp, Homo sapiens
aggtgcctctctctg

SEQ ID NO: 2085850 - DNA, 15 bp, Homo sapiens
ggtgcctctctctgt

SEQ ID NO: 2085851 - DNA, 15 bp, Homo sapiens
gtgcctctctctgtt

SEQ ID NO: 2085852 - DNA, 15 bp, Homo sapiens
tgcctctctctgttg

SEQ ID NO: 2085853 - DNA, 15 bp, Homo sapiens
gcctctctctgttgg

SEQ ID NO: 2085854 - DNA, 15 bp, Homo sapiens
cctctctctgttggg

SEQ ID NO: 2085855 - DNA, 15 bp, Homo sapiens
ctctctctgttggga

SEQ ID NO: 2085856 - DNA, 15 bp, Homo sapiens
tctctctgttgggag

SEQ ID NO: 2085857 - DNA, 15 bp, Homo sapiens
ctctctgttgggagt

SEQ ID NO: 2085858 - DNA, 15 bp, Homo sapiens
tctctgttgggagtc

SEQ ID NO: 2085859 - DNA, 15 bp, Homo sapiens
ctctgttgggagtcc

SEQ ID NO: 2085860 - DNA, 15 bp, Homo sapiens
tctgttgggagtccc

SEQ ID NO: 2085861 - DNA, 15 bp, Homo sapiens
ctgttgggagtccct

SEQ ID NO: 2085862 - DNA, 15 bp, Homo sapiens
tgttgggagtccctt

SEQ ID NO: 2085863 - DNA, 15 bp, Homo sapiens
gttgggagtcccttc

SEQ ID NO: 2085864 - DNA, 15 bp, Homo sapiens
ttgggagtcccttct

SEQ ID NO: 2085865 - DNA, 15 bp, Homo sapiens
tgggagtcccttctc

SEQ ID NO: 2085866 - DNA, 15 bp, Homo sapiens
gggagtcccttctca

SEQ ID NO: 2085867 - DNA, 15 bp, Homo sapiens
ggagtcccttctcag

SEQ ID NO: 2085868 - DNA, 15 bp, Homo sapiens
gagtcccttctcagc

SEQ ID NO: 2085869 - DNA, 15 bp, Homo sapiens
agtcccttctcagca

SEQ ID NO: 2085870 - DNA, 15 bp, Homo sapiens
gtcccttctcagcac

SEQ ID NO: 2085871 - DNA, 15 bp, Homo sapiens
tcccttctcagcact

SEQ ID NO: 2085872 - DNA, 15 bp, Homo sapiens
cccttctcagcactg

SEQ ID NO: 2085873 - DNA, 15 bp, Homo sapiens
ccttctcagcactgg

SEQ ID NO: 2085874 - DNA, 15 bp, Homo sapiens
cttctcagcactggg

SEQ ID NO: 2085875 - DNA, 15 bp, Homo sapiens
ttctcagcactgggg

SEQ ID NO: 2085876 - DNA, 15 bp, Homo sapiens
tctcagcactggggg

SEQ ID NO: 2085877 - DNA, 15 bp, Homo sapiens
ctcagcactggggga

SEQ ID NO: 2085878 - DNA, 15 bp, Homo sapiens
tcagcactgggggaa

SEQ ID NO: 2085879 - DNA, 15 bp, Homo sapiens
cagcactgggggaat

SEQ ID NO: 2085880 - DNA, 15 bp, Homo sapiens
agcactgggggaatg

SEQ ID NO: 2085881 - DNA, 15 bp, Homo sapiens
gcactgggggaatgg

SEQ ID NO: 2085882 - DNA, 15 bp, Homo sapiens
cactgggggaatggg

SEQ ID NO: 2085883 - DNA, 15 bp, Homo sapiens
actgggggaatgggt

SEQ ID NO: 2085884 - DNA, 15 bp, Homo sapiens
ctgggggaatgggtg

SEQ ID NO: 2085885 - DNA, 15 bp, Homo sapiens
tgggggaatgggtgt

SEQ ID NO: 2085886 - DNA, 15 bp, Homo sapiens
gggggaatgggtgtc

SEQ ID NO: 2085887 - DNA, 15 bp, Homo sapiens
ggggaatgggtgtct

SEQ ID NO: 2085888 - DNA, 15 bp, Homo sapiens
gggaatgggtgtctc

SEQ ID NO: 2085889 - DNA, 15 bp, Homo sapiens
ggaatgggtgtctca

SEQ ID NO: 2085890 - DNA, 15 bp, Homo sapiens
gaatgggtgtctcat

SEQ ID NO: 2085891 - DNA, 15 bp, Homo sapiens
aatgggtgtctcatg

SEQ ID NO: 2085892 - DNA, 15 bp, Homo sapiens
atgggtgtctcatgg

SEQ ID NO: 2085893 - DNA, 15 bp, Homo sapiens
tgggtgtctcatgga

SEQ ID NO: 2085894 - DNA, 15 bp, Homo sapiens
gggtgtctcatggac

SEQ ID NO: 2085895 - DNA, 15 bp, Homo sapiens
ggtgtctcatggact

SEQ ID NO: 2085896 - DNA, 15 bp, Homo sapiens
gtgtctcatggactc

SEQ ID NO: 2085897 - DNA, 15 bp, Homo sapiens
tgtctcatggactcc

SEQ ID NO: 2085898 - DNA, 15 bp, Homo sapiens
gtctcatggactccc

SEQ ID NO: 2085899 - DNA, 15 bp, Homo sapiens
tctcatggactcccc

SEQ ID NO: 2085900 - DNA, 15 bp, Homo sapiens
ctcatggactccccc

SEQ ID NO: 2085901 - DNA, 15 bp, Homo sapiens
tcatggactccccct

SEQ ID NO: 2085902 - DNA, 15 bp, Homo sapiens
catggactccccctc

SEQ ID NO: 2085903 - DNA, 15 bp, Homo sapiens
atggactccccctca

SEQ ID NO: 2085904 - DNA, 15 bp, Homo sapiens
tggactccccctcac

SEQ ID NO: 2085905 - DNA, 15 bp, Homo sapiens
ggactccccctcacc

SEQ ID NO: 2085906 - DNA, 15 bp, Homo sapiens
gactccccctcacct

SEQ ID NO: 2085907 - DNA, 15 bp, Homo sapiens
actccccctcacctg

SEQ ID NO: 2085908 - DNA, 15 bp, Homo sapiens
ctccccctcacctgc

SEQ ID NO: 2085909 - DNA, 15 bp, Homo sapiens
tccccctcacctgct

SEQ ID NO: 2085910 - DNA, 15 bp, Homo sapiens
ccccctcacctgctc

SEQ ID NO: 2085911 - DNA, 15 bp, Homo sapiens
cccctcacctgctca

SEQ ID NO: 2085912 - DNA, 15 bp, Homo sapiens
ccctcacctgctcaa

SEQ ID NO: 2085913 - DNA, 15 bp, Homo sapiens
cctcacctgctcaag

SEQ ID NO: 2085914 - DNA, 15 bp, Homo sapiens
ctcacctgctcaagg

SEQ ID NO: 2085915 - DNA, 15 bp, Homo sapiens
tcacctgctcaagga

SEQ ID NO: 2085916 - DNA, 15 bp, Homo sapiens
cacctgctcaaggac

SEQ ID NO: 2085917 - DNA, 15 bp, Homo sapiens
acctgctcaaggaca

SEQ ID NO: 2085918 - DNA, 15 bp, Homo sapiens
cctgctcaaggacag

SEQ ID NO: 2085919 - DNA, 15 bp, Homo sapiens
ctgctcaaggacagc

SEQ ID NO: 2085920 - DNA, 15 bp, Homo sapiens
tgctcaaggacagct

SEQ ID NO: 2085921 - DNA, 15 bp, Homo sapiens
gctcaaggacagctg

SEQ ID NO: 2085922 - DNA, 15 bp, Homo sapiens
ctcaaggacagctgg

SEQ ID NO: 2085923 - DNA, 15 bp, Homo sapiens
tcaaggacagctggc

SEQ ID NO: 2085924 - DNA, 15 bp, Homo sapiens
caaggacagctggca

SEQ ID NO: 2085925 - DNA, 15 bp, Homo sapiens
aaggacagctggcag

SEQ ID NO: 2085926 - DNA, 15 bp, Homo sapiens
aggacagctggcagg

SEQ ID NO: 2085927 - DNA, 15 bp, Homo sapiens
ggacagctggcaggg

SEQ ID NO: 2085928 - DNA, 15 bp, Homo sapiens
gacagctggcagggg

SEQ ID NO: 2085929 - DNA, 15 bp, Homo sapiens
acagctggcaggggc

SEQ ID NO: 2085930 - DNA, 15 bp, Homo sapiens
cagctggcaggggct

SEQ ID NO: 2085931 - DNA, 15 bp, Homo sapiens
agctggcaggggctg

SEQ ID NO: 2085932 - DNA, 15 bp, Homo sapiens
gctggcaggggctgt

SEQ ID NO: 2085933 - DNA, 15 bp, Homo sapiens
ctggcaggggctgtg

SEQ ID NO: 2085934 - DNA, 15 bp, Homo sapiens
tggcaggggctgtgg

SEQ ID NO: 2085935 - DNA, 15 bp, Homo sapiens
ggcaggggctgtggc

SEQ ID NO: 2085936 - DNA, 15 bp, Homo sapiens
gcaggggctgtggcc

SEQ ID NO: 2085937 - DNA, 15 bp, Homo sapiens
caggggctgtggcca

SEQ ID NO: 2085938 - DNA, 15 bp, Homo sapiens
aggggctgtggccac

SEQ ID NO: 2085939 - DNA, 15 bp, Homo sapiens
ggggctgtggccacg

SEQ ID NO: 2085940 - DNA, 15 bp, Homo sapiens
gggctgtggccacgc

SEQ ID NO: 2085941 - DNA, 15 bp, Homo sapiens
ggctgtggccacgct

SEQ ID NO: 2085942 - DNA, 15 bp, Homo sapiens
gctgtggccacgcta

SEQ ID NO: 2085943 - DNA, 15 bp, Homo sapiens
ctgtggccacgctaa

SEQ ID NO: 2085944 - DNA, 15 bp, Homo sapiens
tgtggccacgctaac

SEQ ID NO: 2085945 - DNA, 15 bp, Homo sapiens
gtggccacgctaacc

SEQ ID NO: 2085946 - DNA, 15 bp, Homo sapiens
tggccacgctaaccc

SEQ ID NO: 2085947 - DNA, 15 bp, Homo sapiens
ggccacgctaaccca

SEQ ID NO: 2085948 - DNA, 15 bp, Homo sapiens
gccacgctaacccag

SEQ ID NO: 2085949 - DNA, 15 bp, Homo sapiens
ccacgctaacccagg

SEQ ID NO: 2085950 - DNA, 15 bp, Homo sapiens
cacgctaacccagga

SEQ ID NO: 2085951 - DNA, 15 bp, Homo sapiens
acgctaacccaggag

SEQ ID NO: 2085952 - DNA, 15 bp, Homo sapiens
cgctaacccaggagt

SEQ ID NO: 2085953 - DNA, 15 bp, Homo sapiens
gctaacccaggagtt

SEQ ID NO: 2085954 - DNA, 15 bp, Homo sapiens
ctaacccaggagttc

SEQ ID NO: 2085955 - DNA, 15 bp, Homo sapiens
taacccaggagttca

SEQ ID NO: 2085956 - DNA, 15 bp, Homo sapiens
aacccaggagttcag

SEQ ID NO: 2085957 - DNA, 15 bp, Homo sapiens
acccaggagttcaga

SEQ ID NO: 2085958 - DNA, 15 bp, Homo sapiens
cccaggagttcagag

SEQ ID NO: 2085959 - DNA, 15 bp, Homo sapiens
ccaggagttcagaga

SEQ ID NO: 2085960 - DNA, 15 bp, Homo sapiens
caggagttcagagaa

SEQ ID NO: 2085961 - DNA, 15 bp, Homo sapiens
aggagttcagagaaa

SEQ ID NO: 2085962 - DNA, 15 bp, Homo sapiens
ggagttcagagaaaa

SEQ ID NO: 2085963 - DNA, 15 bp, Homo sapiens
gagttcagagaaaaa

SEQ ID NO: 2085964 - DNA, 15 bp, Homo sapiens
agttcagagaaaaag

SEQ ID NO: 2085965 - DNA, 15 bp, Homo sapiens
gttcagagaaaaagg

SEQ ID NO: 2085966 - DNA, 15 bp, Homo sapiens
ttcagagaaaaaggt

SEQ ID NO: 2085967 - DNA, 15 bp, Homo sapiens
tcagagaaaaaggtt

SEQ ID NO: 2085968 - DNA, 15 bp, Homo sapiens
cagagaaaaaggttc

SEQ ID NO: 2085969 - DNA, 15 bp, Homo sapiens
agagaaaaaggttcc

SEQ ID NO: 2085970 - DNA, 15 bp, Homo sapiens
gagaaaaaggttccc

SEQ ID NO: 2085971 - DNA, 15 bp, Homo sapiens
agaaaaaggttcccc

SEQ ID NO: 2085972 - DNA, 15 bp, Homo sapiens
gaaaaaggttcccca

SEQ ID NO: 2085973 - DNA, 15 bp, Homo sapiens
aaaaaggttccccac

SEQ ID NO: 2085974 - DNA, 15 bp, Homo sapiens
aaaaggttccccacc

SEQ ID NO: 2085975 - DNA, 15 bp, Homo sapiens
aaaggttccccaccc

SEQ ID NO: 2085976 - DNA, 15 bp, Homo sapiens
aaggttccccaccca

SEQ ID NO: 2085977 - DNA, 15 bp, Homo sapiens
aggttccccacccaa

SEQ ID NO: 2085978 - DNA, 15 bp, Homo sapiens
ggttccccacccaag

SEQ ID NO: 2085979 - DNA, 15 bp, Homo sapiens
gttccccacccaagg

SEQ ID NO: 2085980 - DNA, 15 bp, Homo sapiens
ttccccacccaaggg

SEQ ID NO: 2085981 - DNA, 15 bp, Homo sapiens
tccccacccaagggg

SEQ ID NO: 2085982 - DNA, 15 bp, Homo sapiens
ccccacccaagggga

SEQ ID NO: 2085983 - DNA, 15 bp, Homo sapiens
cccacccaaggggac

SEQ ID NO: 2085984 - DNA, 15 bp, Homo sapiens
ccacccaaggggaca

SEQ ID NO: 2085985 - DNA, 15 bp, Homo sapiens
cacccaaggggacac

SEQ ID NO: 2085986 - DNA, 15 bp, Homo sapiens
acccaaggggacact

SEQ ID NO: 2085987 - DNA, 15 bp, Homo sapiens
cccaaggggacactg

SEQ ID NO: 2085988 - DNA, 15 bp, Homo sapiens
ccaaggggacactgg

SEQ ID NO: 2085989 - DNA, 15 bp, Homo sapiens
caaggggacactggg

SEQ ID NO: 2085990 - DNA, 15 bp, Homo sapiens
aaggggacactggga

SEQ ID NO: 2085991 - DNA, 15 bp, Homo sapiens
aggggacactgggag

SEQ ID NO: 2085992 - DNA, 15 bp, Homo sapiens
ggggacactgggagc

SEQ ID NO: 2085993 - DNA, 15 bp, Homo sapiens
gggacactgggagca

SEQ ID NO: 2085994 - DNA, 15 bp, Homo sapiens
ggacactgggagcaa

SEQ ID NO: 2085995 - DNA, 15 bp, Homo sapiens
gacactgggagcaag

SEQ ID NO: 2085996 - DNA, 15 bp, Homo sapiens
acactgggagcaagg

SEQ ID NO: 2085997 - DNA, 15 bp, Homo sapiens
cactgggagcaagga

SEQ ID NO: 2085998 - DNA, 15 bp, Homo sapiens
actgggagcaaggat

SEQ ID NO: 2085999 - DNA, 15 bp, Homo sapiens
ctgggagcaaggatt

SEQ ID NO: 2086000 - DNA, 15 bp, Homo sapiens
tgggagcaaggattg

SEQ ID NO: 2086001 - DNA, 15 bp, Homo sapiens
gggagcaaggattgg

SEQ ID NO: 2086002 - DNA, 15 bp, Homo sapiens
ggagcaaggattgga

SEQ ID NO: 2086003 - DNA, 15 bp, Homo sapiens
gagcaaggattggag

SEQ ID NO: 2086004 - DNA, 15 bp, Homo sapiens
agcaaggattggagt

SEQ ID NO: 2086005 - DNA, 15 bp, Homo sapiens
gcaaggattggagtt

SEQ ID NO: 2086006 - DNA, 15 bp, Homo sapiens
caaggattggagttc

SEQ ID NO: 2086007 - DNA, 15 bp, Homo sapiens
aaggattggagttca

SEQ ID NO: 2086008 - DNA, 15 bp, Homo sapiens
aggattggagttcac

SEQ ID NO: 2086009 - DNA, 15 bp, Homo sapiens
ggattggagttcacg

SEQ ID NO: 2086010 - DNA, 15 bp, Homo sapiens
gattggagttcacgt

SEQ ID NO: 2086011 - DNA, 15 bp, Homo sapiens
attggagttcacgtc

SEQ ID NO: 2086012 - DNA, 15 bp, Homo sapiens
ttggagttcacgtct

SEQ ID NO: 2086013 - DNA, 15 bp, Homo sapiens
tggagttcacgtctg

SEQ ID NO: 2086014 - DNA, 15 bp, Homo sapiens
ggagttcacgtctga

SEQ ID NO: 2086015 - DNA, 15 bp, Homo sapiens
gagttcacgtctgag

SEQ ID NO: 2086016 - DNA, 15 bp, Homo sapiens
agttcacgtctgagt

SEQ ID NO: 2086017 - DNA, 15 bp, Homo sapiens
gttcacgtctgagtc

SEQ ID NO: 2086018 - DNA, 15 bp, Homo sapiens
ttcacgtctgagtct

SEQ ID NO: 2086019 - DNA, 15 bp, Homo sapiens
tcacgtctgagtctt

SEQ ID NO: 2086020 - DNA, 15 bp, Homo sapiens
cacgtctgagtctta

SEQ ID NO: 2086021 - DNA, 15 bp, Homo sapiens
acgtctgagtcttaa

SEQ ID NO: 2086022 - DNA, 15 bp, Homo sapiens
cgtctgagtcttaag

SEQ ID NO: 2086023 - DNA, 15 bp, Homo sapiens
gtctgagtcttaagc

SEQ ID NO: 2086024 - DNA, 15 bp, Homo sapiens
tctgagtcttaagcc

SEQ ID NO: 2086025 - DNA, 15 bp, Homo sapiens
ctgagtcttaagccc

SEQ ID NO: 2086026 - DNA, 15 bp, Homo sapiens
tgagtcttaagcccg

SEQ ID NO: 2086027 - DNA, 15 bp, Homo sapiens
gagtcttaagcccgt

SEQ ID NO: 2086028 - DNA, 15 bp, Homo sapiens
agtcttaagcccgtg

SEQ ID NO: 2086029 - DNA, 15 bp, Homo sapiens
gtcttaagcccgtga

SEQ ID NO: 2086030 - DNA, 15 bp, Homo sapiens
ggcctggctgagagc

SEQ ID NO: 2086031 - DNA, 15 bp, Homo sapiens
gcctggctgagagct

SEQ ID NO: 2086032 - DNA, 15 bp, Homo sapiens
cctggctgagagctg

SEQ ID NO: 2086033 - DNA, 15 bp, Homo sapiens
ctggctgagagctgg

SEQ ID NO: 2086034 - DNA, 15 bp, Homo sapiens
tggctgagagctggg

SEQ ID NO: 2086035 - DNA, 15 bp, Homo sapiens
ggctgagagctgggg

SEQ ID NO: 2086036 - DNA, 15 bp, Homo sapiens
gctgagagctggggc

SEQ ID NO: 2086037 - DNA, 15 bp, Homo sapiens
ctgagagctggggct

SEQ ID NO: 2086038 - DNA, 15 bp, Homo sapiens
tgagagctggggctt

SEQ ID NO: 2086039 - DNA, 15 bp, Homo sapiens
gagagctggggcttc

SEQ ID NO: 2086040 - DNA, 15 bp, Homo sapiens
agagctggggcttcc

SEQ ID NO: 2086041 - DNA, 15 bp, Homo sapiens
gagctggggcttccc

SEQ ID NO: 2086042 - DNA, 15 bp, Homo sapiens
agctggggcttccca

SEQ ID NO: 2086043 - DNA, 15 bp, Homo sapiens
gctggggcttcccag

SEQ ID NO: 2086044 - DNA, 15 bp, Homo sapiens
ctggggcttcccaga

SEQ ID NO: 2086045 - DNA, 15 bp, Homo sapiens
tggggcttcccagag

SEQ ID NO: 2086046 - DNA, 15 bp, Homo sapiens
ggggcttcccagagg

SEQ ID NO: 2086047 - DNA, 15 bp, Homo sapiens
gggcttcccagagga

SEQ ID NO: 2086048 - DNA, 15 bp, Homo sapiens
ggcttcccagaggag

SEQ ID NO: 2086049 - DNA, 15 bp, Homo sapiens
gcttcccagaggagc

SEQ ID NO: 2086050 - DNA, 15 bp, Homo sapiens
cttcccagaggagcc

SEQ ID NO: 2086051 - DNA, 15 bp, Homo sapiens
ttcccagaggagccc

SEQ ID NO: 2086052 - DNA, 15 bp, Homo sapiens
tcccagaggagcccg

SEQ ID NO: 2086053 - DNA, 15 bp, Homo sapiens
cccagaggagcccgg

SEQ ID NO: 2086054 - DNA, 15 bp, Homo sapiens
ccagaggagcccgga

SEQ ID NO: 2086055 - DNA, 15 bp, Homo sapiens
cagaggagcccggat

SEQ ID NO: 2086056 - DNA, 15 bp, Homo sapiens
agaggagcccggatt

SEQ ID NO: 2086057 - DNA, 15 bp, Homo sapiens
gaggagcccggattg

SEQ ID NO: 2086058 - DNA, 15 bp, Homo sapiens
aggagcccggattgg

SEQ ID NO: 2086059 - DNA, 15 bp, Homo sapiens
ggagcccggattgga

SEQ ID NO: 2086060 - DNA, 15 bp, Homo sapiens
gagcccggattggac

SEQ ID NO: 2086061 - DNA, 15 bp, Homo sapiens
agcccggattggaca

SEQ ID NO: 2086062 - DNA, 15 bp, Homo sapiens
gcccggattggacac

SEQ ID NO: 2086063 - DNA, 15 bp, Homo sapiens
cccggattggacact

SEQ ID NO: 2086064 - DNA, 15 bp, Homo sapiens
ccggattggacactg

SEQ ID NO: 2086065 - DNA, 15 bp, Homo sapiens
cggattggacactgc

SEQ ID NO: 2086066 - DNA, 15 bp, Homo sapiens
ggattggacactgca

SEQ ID NO: 2086067 - DNA, 15 bp, Homo sapiens
gattggacactgcag

SEQ ID NO: 2086068 - DNA, 15 bp, Homo sapiens
attggacactgcagc

SEQ ID NO: 2086069 - DNA, 15 bp, Homo sapiens
ttggacactgcagcc

SEQ ID NO: 2086070 - DNA, 15 bp, Homo sapiens
tggacactgcagcca

SEQ ID NO: 2086071 - DNA, 15 bp, Homo sapiens
ggacactgcagccag

SEQ ID NO: 2086072 - DNA, 15 bp, Homo sapiens
gacactgcagccagc

SEQ ID NO: 2086073 - DNA, 15 bp, Homo sapiens
acactgcagccagcc

SEQ ID NO: 2086074 - DNA, 15 bp, Homo sapiens
cactgcagccagcct

SEQ ID NO: 2086075 - DNA, 15 bp, Homo sapiens
actgcagccagcctg

SEQ ID NO: 2086076 - DNA, 15 bp, Homo sapiens
ctgcagccagcctga

SEQ ID NO: 2086077 - DNA, 15 bp, Homo sapiens
tgcagccagcctgag

SEQ ID NO: 2086078 - DNA, 15 bp, Homo sapiens
gcagccagcctgagc

SEQ ID NO: 2086079 - DNA, 15 bp, Homo sapiens
cagccagcctgagcc

SEQ ID NO: 2086080 - DNA, 15 bp, Homo sapiens
agccagcctgagccg

SEQ ID NO: 2086081 - DNA, 15 bp, Homo sapiens
gccagcctgagccgc

SEQ ID NO: 2086082 - DNA, 15 bp, Homo sapiens
ccagcctgagccgcc

SEQ ID NO: 2086083 - DNA, 15 bp, Homo sapiens
cagcctgagccgcct

SEQ ID NO: 2086084 - DNA, 15 bp, Homo sapiens
agcctgagccgcctc

SEQ ID NO: 2086085 - DNA, 15 bp, Homo sapiens
gcctgagccgcctcg

SEQ ID NO: 2086086 - DNA, 15 bp, Homo sapiens
cctgagccgcctcgt

SEQ ID NO: 2086087 - DNA, 15 bp, Homo sapiens
ctgagccgcctcgtc

SEQ ID NO: 2086088 - DNA, 15 bp, Homo sapiens
tgagccgcctcgtct

SEQ ID NO: 2086089 - DNA, 15 bp, Homo sapiens
gagccgcctcgtctc

SEQ ID NO: 2086090 - DNA, 15 bp, Homo sapiens
agccgcctcgtctca

SEQ ID NO: 2086091 - DNA, 15 bp, Homo sapiens
gccgcctcgtctcac

SEQ ID NO: 2086092 - DNA, 15 bp, Homo sapiens
ccgcctcgtctcact

SEQ ID NO: 2086093 - DNA, 15 bp, Homo sapiens
cgcctcgtctcactc

SEQ ID NO: 2086094 - DNA, 15 bp, Homo sapiens
gcctcgtctcactca

SEQ ID NO: 2086095 - DNA, 15 bp, Homo sapiens
cctcgtctcactcag

SEQ ID NO: 2086096 - DNA, 15 bp, Homo sapiens
ctcgtctcactcaga

SEQ ID NO: 2086097 - DNA, 15 bp, Homo sapiens
tcgtctcactcagag

SEQ ID NO: 2086098 - DNA, 15 bp, Homo sapiens
cgtctcactcagaga

SEQ ID NO: 2086099 - DNA, 15 bp, Homo sapiens
gtctcactcagagac

SEQ ID NO: 2086100 - DNA, 15 bp, Homo sapiens
tctcactcagagaca

SEQ ID NO: 2086101 - DNA, 15 bp, Homo sapiens
ctcactcagagacac

SEQ ID NO: 2086102 - DNA, 15 bp, Homo sapiens
tcactcagagacacc

SEQ ID NO: 2086103 - DNA, 15 bp, Homo sapiens
cactcagagacaccc

SEQ ID NO: 2086104 - DNA, 15 bp, Homo sapiens
actcagagacacccc

SEQ ID NO: 2086105 - DNA, 15 bp, Homo sapiens
ctcagagacaccccc

SEQ ID NO: 2086106 - DNA, 15 bp, Homo sapiens
tcagagacaccccca

SEQ ID NO: 2086107 - DNA, 15 bp, Homo sapiens
cagagacacccccag

SEQ ID NO: 2086108 - DNA, 15 bp, Homo sapiens
agagacacccccagt

SEQ ID NO: 2086109 - DNA, 15 bp, Homo sapiens
gagacacccccagtc

SEQ ID NO: 2086110 - DNA, 15 bp, Homo sapiens
agacacccccagtct

SEQ ID NO: 2086111 - DNA, 15 bp, Homo sapiens
gacacccccagtctc

SEQ ID NO: 2086112 - DNA, 15 bp, Homo sapiens
acacccccagtctcc

SEQ ID NO: 2086113 - DNA, 15 bp, Homo sapiens
cacccccagtctcca

SEQ ID NO: 2086114 - DNA, 15 bp, Homo sapiens
acccccagtctccac

SEQ ID NO: 2086115 - DNA, 15 bp, Homo sapiens
cccccagtctccacc

SEQ ID NO: 2086116 - DNA, 15 bp, Homo sapiens
ccccagtctccaccc

SEQ ID NO: 2086117 - DNA, 15 bp, Homo sapiens
cccagtctccacccc

SEQ ID NO: 2086118 - DNA, 15 bp, Homo sapiens
ccagtctccaccccg

SEQ ID NO: 2086119 - DNA, 15 bp, Homo sapiens
cagtctccaccccgc

SEQ ID NO: 2086120 - DNA, 15 bp, Homo sapiens
agtctccaccccgct

SEQ ID NO: 2086121 - DNA, 15 bp, Homo sapiens
gtctccaccccgctc

SEQ ID NO: 2086122 - DNA, 15 bp, Homo sapiens
tctccaccccgctct

SEQ ID NO: 2086123 - DNA, 15 bp, Homo sapiens
ctccaccccgctctg

SEQ ID NO: 2086124 - DNA, 15 bp, Homo sapiens
tccaccccgctctga

SEQ ID NO: 2086125 - DNA, 15 bp, Homo sapiens
ccaccccgctctgag

SEQ ID NO: 2086126 - DNA, 15 bp, Homo sapiens
caccccgctctgagc

SEQ ID NO: 2086127 - DNA, 15 bp, Homo sapiens
accccgctctgagcc

SEQ ID NO: 2086128 - DNA, 15 bp, Homo sapiens
ccccgctctgagccc

SEQ ID NO: 2086129 - DNA, 15 bp, Homo sapiens
cccgctctgagcccc

SEQ ID NO: 2086130 - DNA, 15 bp, Homo sapiens
ccgctctgagcccct

SEQ ID NO: 2086131 - DNA, 15 bp, Homo sapiens
cgctctgagcccctt

SEQ ID NO: 2086132 - DNA, 15 bp, Homo sapiens
gctctgagccccttc

SEQ ID NO: 2086133 - DNA, 15 bp, Homo sapiens
ctctgagccccttca

SEQ ID NO: 2086134 - DNA, 15 bp, Homo sapiens
tctgagccccttcaa

SEQ ID NO: 2086135 - DNA, 15 bp, Homo sapiens
ctgagccccttcaat

SEQ ID NO: 2086136 - DNA, 15 bp, Homo sapiens
tgagccccttcaatc

SEQ ID NO: 2086137 - DNA, 15 bp, Homo sapiens
gagccccttcaatca

SEQ ID NO: 2086138 - DNA, 15 bp, Homo sapiens
agccccttcaatcac

SEQ ID NO: 2086139 - DNA, 15 bp, Homo sapiens
gccccttcaatcacc

SEQ ID NO: 2086140 - DNA, 15 bp, Homo sapiens
ccccttcaatcacca

SEQ ID NO: 2086141 - DNA, 15 bp, Homo sapiens
cccttcaatcaccag

SEQ ID NO: 2086142 - DNA, 15 bp, Homo sapiens
ccttcaatcaccagc

SEQ ID NO: 2086143 - DNA, 15 bp, Homo sapiens
cttcaatcaccagca

SEQ ID NO: 2086144 - DNA, 15 bp, Homo sapiens
ttcaatcaccagcag

SEQ ID NO: 2086145 - DNA, 15 bp, Homo sapiens
tcaatcaccagcagc

SEQ ID NO: 2086146 - DNA, 15 bp, Homo sapiens
caatcaccagcagcc

SEQ ID NO: 2086147 - DNA, 15 bp, Homo sapiens
aatcaccagcagccc

SEQ ID NO: 2086148 - DNA, 15 bp, Homo sapiens
atcaccagcagccca

SEQ ID NO: 2086149 - DNA, 15 bp, Homo sapiens
tcaccagcagcccag

SEQ ID NO: 2086150 - DNA, 15 bp, Homo sapiens
caccagcagcccagc

SEQ ID NO: 2086151 - DNA, 15 bp, Homo sapiens
accagcagcccagcc

SEQ ID NO: 2086152 - DNA, 15 bp, Homo sapiens
agcagcccagcccaa

SEQ ID NO: 2086153 - DNA, 15 bp, Homo sapiens
gcagcccagcccaag

SEQ ID NO: 2086154 - DNA, 15 bp, Homo sapiens
cagcccagcccaagg

SEQ ID NO: 2086155 - DNA, 15 bp, Homo sapiens
agcccagcccaagga

SEQ ID NO: 2086156 - DNA, 15 bp, Homo sapiens
gcccagcccaaggac

SEQ ID NO: 2086157 - DNA, 15 bp, Homo sapiens
cccagcccaaggact

SEQ ID NO: 2086158 - DNA, 15 bp, Homo sapiens
ccagcccaaggactg

SEQ ID NO: 2086159 - DNA, 15 bp, Homo sapiens
cagcccaaggactga

SEQ ID NO: 2086160 - DNA, 15 bp, Homo sapiens
agcccaaggactgaa

SEQ ID NO: 2086161 - DNA, 15 bp, Homo sapiens
gcccaaggactgaac

SEQ ID NO: 2086162 - DNA, 15 bp, Homo sapiens
cccaaggactgaact

SEQ ID NO: 2086163 - DNA, 15 bp, Homo sapiens
ccaaggactgaactc

SEQ ID NO: 2086164 - DNA, 15 bp, Homo sapiens
caaggactgaactca

SEQ ID NO: 2086165 - DNA, 15 bp, Homo sapiens
aaggactgaactcac

SEQ ID NO: 2086166 - DNA, 15 bp, Homo sapiens
aggactgaactcacc

SEQ ID NO: 2086167 - DNA, 15 bp, Homo sapiens
ggactgaactcaccc

SEQ ID NO: 2086168 - DNA, 15 bp, Homo sapiens
gactgaactcacccc

SEQ ID NO: 2086169 - DNA, 15 bp, Homo sapiens
actgaactcacccct

SEQ ID NO: 2086170 - DNA, 15 bp, Homo sapiens
ctgaactcacccctg

SEQ ID NO: 2086171 - DNA, 15 bp, Homo sapiens
tgaactcacccctga

SEQ ID NO: 2086172 - DNA, 15 bp, Homo sapiens
gaactcacccctgac

SEQ ID NO: 2086173 - DNA, 15 bp, Homo sapiens
aactcacccctgacc

SEQ ID NO: 2086174 - DNA, 15 bp, Homo sapiens
actcacccctgaccc

SEQ ID NO: 2086175 - DNA, 15 bp, Homo sapiens
ctcacccctgacccc

SEQ ID NO: 2086176 - DNA, 15 bp, Homo sapiens
tcacccctgacccct

SEQ ID NO: 2086177 - DNA, 15 bp, Homo sapiens
cacccctgaccccta

SEQ ID NO: 2086178 - DNA, 15 bp, Homo sapiens
acccctgacccctag

SEQ ID NO: 2086179 - DNA, 15 bp, Homo sapiens
cccctgacccctagg

SEQ ID NO: 2086180 - DNA, 15 bp, Homo sapiens
ccctgacccctaggt

SEQ ID NO: 2086181 - DNA, 15 bp, Homo sapiens
cctgacccctaggtt

SEQ ID NO: 2086182 - DNA, 15 bp, Homo sapiens
ctgacccctaggttg

SEQ ID NO: 2086183 - DNA, 15 bp, Homo sapiens
tgacccctaggttga

SEQ ID NO: 2086184 - DNA, 15 bp, Homo sapiens
gacccctaggttgac

SEQ ID NO: 2086185 - DNA, 15 bp, Homo sapiens
acccctaggttgaca

SEQ ID NO: 2086186 - DNA, 15 bp, Homo sapiens
cccctaggttgacac

SEQ ID NO: 2086187 - DNA, 15 bp, Homo sapiens
ccctaggttgacaca

SEQ ID NO: 2086188 - DNA, 15 bp, Homo sapiens
cctaggttgacacat

SEQ ID NO: 2086189 - DNA, 15 bp, Homo sapiens
ctaggttgacacata

SEQ ID NO: 2086190 - DNA, 15 bp, Homo sapiens
taggttgacacatac

SEQ ID NO: 2086191 - DNA, 15 bp, Homo sapiens
aggttgacacataca

SEQ ID NO: 2086192 - DNA, 15 bp, Homo sapiens
ggttgacacatacaa

SEQ ID NO: 2086193 - DNA, 15 bp, Homo sapiens
gttgacacatacaac

SEQ ID NO: 2086194 - DNA, 15 bp, Homo sapiens
ttgacacatacaact

SEQ ID NO: 2086195 - DNA, 15 bp, Homo sapiens
tgacacatacaactt

SEQ ID NO: 2086196 - DNA, 15 bp, Homo sapiens
gacacatacaactta

SEQ ID NO: 2086197 - DNA, 15 bp, Homo sapiens
acacatacaacttac

SEQ ID NO: 2086198 - DNA, 15 bp, Homo sapiens
cacatacaacttaca

SEQ ID NO: 2086199 - DNA, 15 bp, Homo sapiens
acatacaacttacag

SEQ ID NO: 2086200 - DNA, 15 bp, Homo sapiens
catacaacttacaga

SEQ ID NO: 2086201 - DNA, 15 bp, Homo sapiens
atacaacttacagag

SEQ ID NO: 2086202 - DNA, 15 bp, Homo sapiens
tacaacttacagaga

SEQ ID NO: 2086203 - DNA, 15 bp, Homo sapiens
acaacttacagagaa

SEQ ID NO: 2086204 - DNA, 15 bp, Homo sapiens
caacttacagagaat

SEQ ID NO: 2086205 - DNA, 15 bp, Homo sapiens
aacttacagagaatg

SEQ ID NO: 2086206 - DNA, 15 bp, Homo sapiens
acttacagagaatga

SEQ ID NO: 2086207 - DNA, 15 bp, Homo sapiens
cttacagagaatgag

SEQ ID NO: 2086208 - DNA, 15 bp, Homo sapiens
ttacagagaatgagg

SEQ ID NO: 2086209 - DNA, 15 bp, Homo sapiens
tacagagaatgaggg

SEQ ID NO: 2086210 - DNA, 15 bp, Homo sapiens
acagagaatgagggc

SEQ ID NO: 2086211 - DNA, 15 bp, Homo sapiens
cagagaatgagggcc

SEQ ID NO: 2086212 - DNA, 15 bp, Homo sapiens
agagaatgagggcca

SEQ ID NO: 2086213 - DNA, 15 bp, Homo sapiens
gagaatgagggccag

SEQ ID NO: 2086214 - DNA, 15 bp, Homo sapiens
agaatgagggccagg

SEQ ID NO: 2086215 - DNA, 15 bp, Homo sapiens
gaatgagggccaggc

SEQ ID NO: 2086216 - DNA, 15 bp, Homo sapiens
aatgagggccaggca

SEQ ID NO: 2086217 - DNA, 15 bp, Homo sapiens
atgagggccaggcac

SEQ ID NO: 2086218 - DNA, 15 bp, Homo sapiens
tgagggccaggcaca

SEQ ID NO: 2086219 - DNA, 15 bp, Homo sapiens
gagggccaggcacag

SEQ ID NO: 2086220 - DNA, 15 bp, Homo sapiens
agggccaggcacagg

SEQ ID NO: 2086221 - DNA, 15 bp, Homo sapiens
gggccaggcacaggg

SEQ ID NO: 2086222 - DNA, 15 bp, Homo sapiens
ggccaggcacagggt

SEQ ID NO: 2086223 - DNA, 15 bp, Homo sapiens
gccaggcacagggtc

SEQ ID NO: 2086224 - DNA, 15 bp, Homo sapiens
ccaggcacagggtca

SEQ ID NO: 2086225 - DNA, 15 bp, Homo sapiens
caggcacagggtcac

SEQ ID NO: 2086226 - DNA, 15 bp, Homo sapiens
aggcacagggtcaca

SEQ ID NO: 2086227 - DNA, 15 bp, Homo sapiens
ggcacagggtcacag

SEQ ID NO: 2086228 - DNA, 15 bp, Homo sapiens
gcacagggtcacagg

SEQ ID NO: 2086229 - DNA, 15 bp, Homo sapiens
cacagggtcacaggc

SEQ ID NO: 2086230 - DNA, 15 bp, Homo sapiens
acagggtcacaggcc

SEQ ID NO: 2086231 - DNA, 15 bp, Homo sapiens
cagggtcacaggcca

SEQ ID NO: 2086232 - DNA, 15 bp, Homo sapiens
agggtcacaggccag

SEQ ID NO: 2086233 - DNA, 15 bp, Homo sapiens
gggtcacaggccagg

SEQ ID NO: 2086234 - DNA, 15 bp, Homo sapiens
ggtcacaggccaggg

SEQ ID NO: 2086235 - DNA, 15 bp, Homo sapiens
gtcacaggccagggc

SEQ ID NO: 2086236 - DNA, 15 bp, Homo sapiens
acaggccagggcagg

SEQ ID NO: 2086237 - DNA, 15 bp, Homo sapiens
caggccagggcaggc

SEQ ID NO: 2086238 - DNA, 15 bp, Homo sapiens
aggccagggcaggcc

SEQ ID NO: 2086239 - DNA, 15 bp, Homo sapiens
ggccagggcaggcca

SEQ ID NO: 2086240 - DNA, 15 bp, Homo sapiens
gccagggcaggccac

SEQ ID NO: 2086241 - DNA, 15 bp, Homo sapiens
ccagggcaggccaca

SEQ ID NO: 2086242 - DNA, 15 bp, Homo sapiens
cagggcaggccacag

SEQ ID NO: 2086243 - DNA, 15 bp, Homo sapiens
agggcaggccacaga

SEQ ID NO: 2086244 - DNA, 15 bp, Homo sapiens
gggcaggccacagac

SEQ ID NO: 2086245 - DNA, 15 bp, Homo sapiens
ggcaggccacagact

SEQ ID NO: 2086246 - DNA, 15 bp, Homo sapiens
gcaggccacagactg

SEQ ID NO: 2086247 - DNA, 15 bp, Homo sapiens
caggccacagactgg

SEQ ID NO: 2086248 - DNA, 15 bp, Homo sapiens
aggccacagactggc

SEQ ID NO: 2086249 - DNA, 15 bp, Homo sapiens
ggccacagactggct

SEQ ID NO: 2086250 - DNA, 15 bp, Homo sapiens
gccacagactggctc

SEQ ID NO: 2086251 - DNA, 15 bp, Homo sapiens
ccacagactggctcc

SEQ ID NO: 2086252 - DNA, 15 bp, Homo sapiens
cacagactggctcct

SEQ ID NO: 2086253 - DNA, 15 bp, Homo sapiens
acagactggctcctc

SEQ ID NO: 2086254 - DNA, 15 bp, Homo sapiens
cagactggctcctca

SEQ ID NO: 2086255 - DNA, 15 bp, Homo sapiens
agactggctcctcag

SEQ ID NO: 2086256 - DNA, 15 bp, Homo sapiens
gactggctcctcagc

SEQ ID NO: 2086257 - DNA, 15 bp, Homo sapiens
actggctcctcagcc

SEQ ID NO: 2086258 - DNA, 15 bp, Homo sapiens
ctggctcctcagccc

SEQ ID NO: 2086259 - DNA, 15 bp, Homo sapiens
tggctcctcagccca

SEQ ID NO: 2086260 - DNA, 15 bp, Homo sapiens
ggctcctcagcccag

SEQ ID NO: 2086261 - DNA, 15 bp, Homo sapiens
gctcctcagcccagg

SEQ ID NO: 2086262 - DNA, 15 bp, Homo sapiens
ctcctcagcccaggc

SEQ ID NO: 2086263 - DNA, 15 bp, Homo sapiens
tcctcagcccaggca

SEQ ID NO: 2086264 - DNA, 15 bp, Homo sapiens
cctcagcccaggcag

SEQ ID NO: 2086265 - DNA, 15 bp, Homo sapiens
ctcagcccaggcagg

SEQ ID NO: 2086266 - DNA, 15 bp, Homo sapiens
tcagcccaggcaggg

SEQ ID NO: 2086267 - DNA, 15 bp, Homo sapiens
cagcccaggcaggga

SEQ ID NO: 2086268 - DNA, 15 bp, Homo sapiens
agcccaggcagggag

SEQ ID NO: 2086269 - DNA, 15 bp, Homo sapiens
gcccaggcagggaga

SEQ ID NO: 2086270 - DNA, 15 bp, Homo sapiens
cccaggcagggagag

SEQ ID NO: 2086271 - DNA, 15 bp, Homo sapiens
ccaggcagggagagg

SEQ ID NO: 2086272 - DNA, 15 bp, Homo sapiens
caggcagggagaggc

SEQ ID NO: 2086273 - DNA, 15 bp, Homo sapiens
aggcagggagaggcc

SEQ ID NO: 2086274 - DNA, 15 bp, Homo sapiens
ggcagggagaggcca

SEQ ID NO: 2086275 - DNA, 15 bp, Homo sapiens
gcagggagaggccag

SEQ ID NO: 2086276 - DNA, 15 bp, Homo sapiens
cagggagaggccagg

SEQ ID NO: 2086277 - DNA, 15 bp, Homo sapiens
agggagaggccaggg

SEQ ID NO: 2086278 - DNA, 15 bp, Homo sapiens
gggagaggccaggga

SEQ ID NO: 2086279 - DNA, 15 bp, Homo sapiens
ggagaggccagggag

SEQ ID NO: 2086280 - DNA, 15 bp, Homo sapiens
gagaggccagggagc

SEQ ID NO: 2086281 - DNA, 15 bp, Homo sapiens
agaggccagggagcc

SEQ ID NO: 2086282 - DNA, 15 bp, Homo sapiens
gaggccagggagcca

SEQ ID NO: 2086283 - DNA, 15 bp, Homo sapiens
aggccagggagccaa

SEQ ID NO: 2086284 - DNA, 15 bp, Homo sapiens
ggccagggagccaag

SEQ ID NO: 2086285 - DNA, 15 bp, Homo sapiens
gccagggagccaaga

SEQ ID NO: 2086286 - DNA, 15 bp, Homo sapiens
ccagggagccaagag

SEQ ID NO: 2086287 - DNA, 15 bp, Homo sapiens
cagggagccaagagt

SEQ ID NO: 2086288 - DNA, 15 bp, Homo sapiens
agggagccaagagtt

SEQ ID NO: 2086289 - DNA, 15 bp, Homo sapiens
gggagccaagagttt

SEQ ID NO: 2086290 - DNA, 15 bp, Homo sapiens
ggagccaagagtttg

SEQ ID NO: 2086291 - DNA, 15 bp, Homo sapiens
gagccaagagtttga

SEQ ID NO: 2086292 - DNA, 15 bp, Homo sapiens
agccaagagtttgaa

SEQ ID NO: 2086293 - DNA, 15 bp, Homo sapiens
gccaagagtttgaac

SEQ ID NO: 2086294 - DNA, 15 bp, Homo sapiens
ccaagagtttgaacc

SEQ ID NO: 2086295 - DNA, 15 bp, Homo sapiens
caagagtttgaaccc

SEQ ID NO: 2086296 - DNA, 15 bp, Homo sapiens
aagagtttgaaccca

SEQ ID NO: 2086297 - DNA, 15 bp, Homo sapiens
agagtttgaacccag

SEQ ID NO: 2086298 - DNA, 15 bp, Homo sapiens
gagtttgaacccagt

SEQ ID NO: 2086299 - DNA, 15 bp, Homo sapiens
agtttgaacccagtg

SEQ ID NO: 2086300 - DNA, 15 bp, Homo sapiens
gtttgaacccagtgc

SEQ ID NO: 2086301 - DNA, 15 bp, Homo sapiens
tttgaacccagtgcc

SEQ ID NO: 2086302 - DNA, 15 bp, Homo sapiens
gaacccagtgccact

SEQ ID NO: 2086303 - DNA, 15 bp, Homo sapiens
aacccagtgccactc

SEQ ID NO: 2086304 - DNA, 15 bp, Homo sapiens
acccagtgccactcc

SEQ ID NO: 2086305 - DNA, 15 bp, Homo sapiens
cccagtgccactcct

SEQ ID NO: 2086306 - DNA, 15 bp, Homo sapiens
ccagtgccactcctg

SEQ ID NO: 2086307 - DNA, 15 bp, Homo sapiens
cagtgccactcctga

SEQ ID NO: 2086308 - DNA, 15 bp, Homo sapiens
agtgccactcctgac

SEQ ID NO: 2086309 - DNA, 15 bp, Homo sapiens
gtgccactcctgact

SEQ ID NO: 2086310 - DNA, 15 bp, Homo sapiens
tgccactcctgactg

SEQ ID NO: 2086311 - DNA, 15 bp, Homo sapiens
gccactcctgactgc

SEQ ID NO: 2086312 - DNA, 15 bp, Homo sapiens
ccactcctgactgcc

SEQ ID NO: 2086313 - DNA, 15 bp, Homo sapiens
cactcctgactgcct

SEQ ID NO: 2086314 - DNA, 15 bp, Homo sapiens
actcctgactgcctg

SEQ ID NO: 2086315 - DNA, 15 bp, Homo sapiens
ctcctgactgcctgg

SEQ ID NO: 2086316 - DNA, 15 bp, Homo sapiens
tcctgactgcctggt

SEQ ID NO: 2086317 - DNA, 15 bp, Homo sapiens
cctgactgcctggtg

SEQ ID NO: 2086318 - DNA, 15 bp, Homo sapiens
ctgactgcctggtga

SEQ ID NO: 2086319 - DNA, 15 bp, Homo sapiens
tgactgcctggtgat

SEQ ID NO: 2086320 - DNA, 15 bp, Homo sapiens
gactgcctggtgatg

SEQ ID NO: 2086321 - DNA, 15 bp, Homo sapiens
actgcctggtgatgc

SEQ ID NO: 2086322 - DNA, 15 bp, Homo sapiens
ctgcctggtgatgct

SEQ ID NO: 2086323 - DNA, 15 bp, Homo sapiens
tgcctggtgatgctg

SEQ ID NO: 2086324 - DNA, 15 bp, Homo sapiens
gcctggtgatgctgg

SEQ ID NO: 2086325 - DNA, 15 bp, Homo sapiens
cctggtgatgctggc

SEQ ID NO: 2086326 - DNA, 15 bp, Homo sapiens
ctggtgatgctggca

SEQ ID NO: 2086327 - DNA, 15 bp, Homo sapiens
tggtgatgctggcaa

SEQ ID NO: 2086328 - DNA, 15 bp, Homo sapiens
ggtgatgctggcaac

SEQ ID NO: 2086329 - DNA, 15 bp, Homo sapiens
gtgatgctggcaacc

SEQ ID NO: 2086330 - DNA, 15 bp, Homo sapiens
tgatgctggcaaccc

SEQ ID NO: 2086331 - DNA, 15 bp, Homo sapiens
gatgctggcaacccg

SEQ ID NO: 2086332 - DNA, 15 bp, Homo sapiens
atgctggcaacccgc

SEQ ID NO: 2086333 - DNA, 15 bp, Homo sapiens
tgctggcaacccgcc

SEQ ID NO: 2086334 - DNA, 15 bp, Homo sapiens
gctggcaacccgcct

SEQ ID NO: 2086335 - DNA, 15 bp, Homo sapiens
ctggcaacccgcctg

SEQ ID NO: 2086336 - DNA, 15 bp, Homo sapiens
tggcaacccgcctgc

SEQ ID NO: 2086337 - DNA, 15 bp, Homo sapiens
ggcaacccgcctgcc

SEQ ID NO: 2086338 - DNA, 15 bp, Homo sapiens
gcaacccgcctgccc

SEQ ID NO: 2086339 - DNA, 15 bp, Homo sapiens
caacccgcctgccct

SEQ ID NO: 2086340 - DNA, 15 bp, Homo sapiens
aacccgcctgccctc

SEQ ID NO: 2086341 - DNA, 15 bp, Homo sapiens
acccgcctgccctcc

SEQ ID NO: 2086342 - DNA, 15 bp, Homo sapiens
cccgcctgccctccc

SEQ ID NO: 2086343 - DNA, 15 bp, Homo sapiens
ccgcctgccctccca

SEQ ID NO: 2086344 - DNA, 15 bp, Homo sapiens
cgcctgccctcccag

SEQ ID NO: 2086345 - DNA, 15 bp, Homo sapiens
gcctgccctcccaga

SEQ ID NO: 2086346 - DNA, 15 bp, Homo sapiens
cctgccctcccagag

SEQ ID NO: 2086347 - DNA, 15 bp, Homo sapiens
ctgccctcccagagc

SEQ ID NO: 2086348 - DNA, 15 bp, Homo sapiens
tgccctcccagagcc

SEQ ID NO: 2086349 - DNA, 15 bp, Homo sapiens
gccctcccagagcct

SEQ ID NO: 2086350 - DNA, 15 bp, Homo sapiens
ccctcccagagcctc

SEQ ID NO: 2086351 - DNA, 15 bp, Homo sapiens
cctcccagagcctca

SEQ ID NO: 2086352 - DNA, 15 bp, Homo sapiens
ctcccagagcctcag

SEQ ID NO: 2086353 - DNA, 15 bp, Homo sapiens
tcccagagcctcagc

SEQ ID NO: 2086354 - DNA, 15 bp, Homo sapiens
cccagagcctcagcc

SEQ ID NO: 2086355 - DNA, 15 bp, Homo sapiens
ccagagcctcagcca

SEQ ID NO: 2086356 - DNA, 15 bp, Homo sapiens
cagagcctcagccat

SEQ ID NO: 2086357 - DNA, 15 bp, Homo sapiens
agagcctcagccatc

SEQ ID NO: 2086358 - DNA, 15 bp, Homo sapiens
gagcctcagccatcc

SEQ ID NO: 2086359 - DNA, 15 bp, Homo sapiens
agcctcagccatccc

SEQ ID NO: 2086360 - DNA, 15 bp, Homo sapiens
gcctcagccatccct

SEQ ID NO: 2086361 - DNA, 15 bp, Homo sapiens
cctcagccatccctc

SEQ ID NO: 2086362 - DNA, 15 bp, Homo sapiens
ctcagccatccctcc

SEQ ID NO: 2086363 - DNA, 15 bp, Homo sapiens
tcagccatccctcct

SEQ ID NO: 2086364 - DNA, 15 bp, Homo sapiens
cagccatccctcctg

SEQ ID NO: 2086365 - DNA, 15 bp, Homo sapiens
agccatccctcctgt

SEQ ID NO: 2086366 - DNA, 15 bp, Homo sapiens
gccatccctcctgta

SEQ ID NO: 2086367 - DNA, 15 bp, Homo sapiens
ccatccctcctgtaa

SEQ ID NO: 2086368 - DNA, 15 bp, Homo sapiens
catccctcctgtaaa

SEQ ID NO: 2086369 - DNA, 15 bp, Homo sapiens
atccctcctgtaaaa

SEQ ID NO: 2086370 - DNA, 15 bp, Homo sapiens
tccctcctgtaaaat

SEQ ID NO: 2086371 - DNA, 15 bp, Homo sapiens
ccctcctgtaaaatg

SEQ ID NO: 2086372 - DNA, 15 bp, Homo sapiens
cctcctgtaaaatgg

SEQ ID NO: 2086373 - DNA, 15 bp, Homo sapiens
ctcctgtaaaatggg

SEQ ID NO: 2086374 - DNA, 15 bp, Homo sapiens
tcctgtaaaatgggg

SEQ ID NO: 2086375 - DNA, 15 bp, Homo sapiens
cctgtaaaatggggc

SEQ ID NO: 2086376 - DNA, 15 bp, Homo sapiens
ctgtaaaatggggct

SEQ ID NO: 2086377 - DNA, 15 bp, Homo sapiens
tgtaaaatggggcta

SEQ ID NO: 2086378 - DNA, 15 bp, Homo sapiens
gtaaaatggggctaa

SEQ ID NO: 2086379 - DNA, 15 bp, Homo sapiens
taaaatggggctaag

SEQ ID NO: 2086380 - DNA, 15 bp, Homo sapiens
aaaatggggctaagg

SEQ ID NO: 2086381 - DNA, 15 bp, Homo sapiens
aaatggggctaagga

SEQ ID NO: 2086382 - DNA, 15 bp, Homo sapiens
aatggggctaaggag

SEQ ID NO: 2086383 - DNA, 15 bp, Homo sapiens
atggggctaaggaga

SEQ ID NO: 2086384 - DNA, 15 bp, Homo sapiens
tggggctaaggagag

SEQ ID NO: 2086385 - DNA, 15 bp, Homo sapiens
ggggctaaggagaga

SEQ ID NO: 2086386 - DNA, 15 bp, Homo sapiens
gggctaaggagagaa

SEQ ID NO: 2086387 - DNA, 15 bp, Homo sapiens
ggctaaggagagaac

SEQ ID NO: 2086388 - DNA, 15 bp, Homo sapiens
gctaaggagagaacc

SEQ ID NO: 2086389 - DNA, 15 bp, Homo sapiens
ctaaggagagaacct

SEQ ID NO: 2086390 - DNA, 15 bp, Homo sapiens
taaggagagaaccta

SEQ ID NO: 2086391 - DNA, 15 bp, Homo sapiens
aaggagagaacctac

SEQ ID NO: 2086392 - DNA, 15 bp, Homo sapiens
aggagagaacctact

SEQ ID NO: 2086393 - DNA, 15 bp, Homo sapiens
ggagagaacctactt

SEQ ID NO: 2086394 - DNA, 15 bp, Homo sapiens
gagagaacctacttc

SEQ ID NO: 2086395 - DNA, 15 bp, Homo sapiens
agagaacctacttct

SEQ ID NO: 2086396 - DNA, 15 bp, Homo sapiens
gagaacctacttcta

SEQ ID NO: 2086397 - DNA, 15 bp, Homo sapiens
agaacctacttctag

SEQ ID NO: 2086398 - DNA, 15 bp, Homo sapiens
gaacctacttctagg

SEQ ID NO: 2086399 - DNA, 15 bp, Homo sapiens
aacctacttctaggg

SEQ ID NO: 2086400 - DNA, 15 bp, Homo sapiens
acctacttctagggt

SEQ ID NO: 2086401 - DNA, 15 bp, Homo sapiens
cctacttctagggtt

SEQ ID NO: 2086402 - DNA, 15 bp, Homo sapiens
ctacttctagggttc

SEQ ID NO: 2086403 - DNA, 15 bp, Homo sapiens
tacttctagggttct

SEQ ID NO: 2086404 - DNA, 15 bp, Homo sapiens
acttctagggttctg

SEQ ID NO: 2086405 - DNA, 15 bp, Homo sapiens
cttctagggttctgt

SEQ ID NO: 2086406 - DNA, 15 bp, Homo sapiens
ttctagggttctgtg

SEQ ID NO: 2086407 - DNA, 15 bp, Homo sapiens
tctagggttctgtga

SEQ ID NO: 2086408 - DNA, 15 bp, Homo sapiens
ctagggttctgtgaa

SEQ ID NO: 2086409 - DNA, 15 bp, Homo sapiens
tagggttctgtgaat

SEQ ID NO: 2086410 - DNA, 15 bp, Homo sapiens
agggttctgtgaatg

SEQ ID NO: 2086411 - DNA, 15 bp, Homo sapiens
gggttctgtgaatga

SEQ ID NO: 2086412 - DNA, 15 bp, Homo sapiens
ggttctgtgaatgat

SEQ ID NO: 2086413 - DNA, 15 bp, Homo sapiens
gttctgtgaatgatt

SEQ ID NO: 2086414 - DNA, 15 bp, Homo sapiens
ttctgtgaatgatta

SEQ ID NO: 2086415 - DNA, 15 bp, Homo sapiens
tctgtgaatgattac

SEQ ID NO: 2086416 - DNA, 15 bp, Homo sapiens
ctgtgaatgattaca

SEQ ID NO: 2086417 - DNA, 15 bp, Homo sapiens
tgtgaatgattacac

SEQ ID NO: 2086418 - DNA, 15 bp, Homo sapiens
gtgaatgattacaca

SEQ ID NO: 2086419 - DNA, 15 bp, Homo sapiens
tgaatgattacacaa

SEQ ID NO: 2086420 - DNA, 15 bp, Homo sapiens
gaatgattacacaag

SEQ ID NO: 2086421 - DNA, 15 bp, Homo sapiens
aatgattacacaaga

SEQ ID NO: 2086422 - DNA, 15 bp, Homo sapiens
atgattacacaagaa

SEQ ID NO: 2086423 - DNA, 15 bp, Homo sapiens
tgattacacaagaaa

SEQ ID NO: 2086424 - DNA, 15 bp, Homo sapiens
gattacacaagaaaa

SEQ ID NO: 2086425 - DNA, 15 bp, Homo sapiens
attacacaagaaaaa

SEQ ID NO: 2086426 - DNA, 15 bp, Homo sapiens
ttacacaagaaaaag

SEQ ID NO: 2086427 - DNA, 15 bp, Homo sapiens
tacacaagaaaaagc

SEQ ID NO: 2086428 - DNA, 15 bp, Homo sapiens
acacaagaaaaagcg

SEQ ID NO: 2086429 - DNA, 15 bp, Homo sapiens
cacaagaaaaagcgc

SEQ ID NO: 2086430 - DNA, 15 bp, Homo sapiens
acaagaaaaagcgcc

SEQ ID NO: 2086431 - DNA, 15 bp, Homo sapiens
caagaaaaagcgcca

SEQ ID NO: 2086432 - DNA, 15 bp, Homo sapiens
aagaaaaagcgccag

SEQ ID NO: 2086433 - DNA, 15 bp, Homo sapiens
agaaaaagcgccagg

SEQ ID NO: 2086434 - DNA, 15 bp, Homo sapiens
gaaaaagcgccaggt

SEQ ID NO: 2086435 - DNA, 15 bp, Homo sapiens
aaaaagcgccaggtg

SEQ ID NO: 2086436 - DNA, 15 bp, Homo sapiens
aaaagcgccaggtgc

SEQ ID NO: 2086437 - DNA, 15 bp, Homo sapiens
aaagcgccaggtgct

SEQ ID NO: 2086438 - DNA, 15 bp, Homo sapiens
aagcgccaggtgctg

SEQ ID NO: 2086439 - DNA, 15 bp, Homo sapiens
agcgccaggtgctgg

SEQ ID NO: 2086440 - DNA, 15 bp, Homo sapiens
gcgccaggtgctggg

SEQ ID NO: 2086441 - DNA, 15 bp, Homo sapiens
cgccaggtgctgggc

SEQ ID NO: 2086442 - DNA, 15 bp, Homo sapiens
gccaggtgctgggcc

SEQ ID NO: 2086443 - DNA, 15 bp, Homo sapiens
ccaggtgctgggcct

SEQ ID NO: 2086444 - DNA, 15 bp, Homo sapiens
caggtgctgggcctg

SEQ ID NO: 2086445 - DNA, 15 bp, Homo sapiens
aggtgctgggcctgg

SEQ ID NO: 2086446 - DNA, 15 bp, Homo sapiens
ggtgctgggcctggc

SEQ ID NO: 2086447 - DNA, 15 bp, Homo sapiens
gtgctgggcctggct

SEQ ID NO: 2086448 - DNA, 15 bp, Homo sapiens
tgctgggcctggctg

SEQ ID NO: 2086449 - DNA, 15 bp, Homo sapiens
gctgggcctggctga

SEQ ID NO: 2086450 - DNA, 15 bp, Homo sapiens
ctgggcctggctgag

SEQ ID NO: 2086451 - DNA, 15 bp, Homo sapiens
tgggcctggctgagg

SEQ ID NO: 2086452 - DNA, 15 bp, Homo sapiens
gggcctggctgaggc

SEQ ID NO: 2086453 - DNA, 15 bp, Homo sapiens
ggcctggctgaggct

SEQ ID NO: 2086454 - DNA, 15 bp, Homo sapiens
gcctggctgaggctg

SEQ ID NO: 2086455 - DNA, 15 bp, Homo sapiens
cctggctgaggctgg

SEQ ID NO: 2086456 - DNA, 15 bp, Homo sapiens
ctggctgaggctggg

SEQ ID NO: 2086457 - DNA, 15 bp, Homo sapiens
tggctgaggctgggg

SEQ ID NO: 2086458 - DNA, 15 bp, Homo sapiens
ggctgaggctggggt

SEQ ID NO: 2086459 - DNA, 15 bp, Homo sapiens
gctgaggctggggtg

SEQ ID NO: 2086460 - DNA, 15 bp, Homo sapiens
ctgaggctggggtgc

SEQ ID NO: 2086461 - DNA, 15 bp, Homo sapiens
tgaggctggggtgca

SEQ ID NO: 2086462 - DNA, 15 bp, Homo sapiens
gaggctggggtgcaa

SEQ ID NO: 2086463 - DNA, 15 bp, Homo sapiens
aggctggggtgcaaa

SEQ ID NO: 2086464 - DNA, 15 bp, Homo sapiens
ggctggggtgcaaaa

SEQ ID NO: 2086465 - DNA, 15 bp, Homo sapiens
gctggggtgcaaaaa

SEQ ID NO: 2086466 - DNA, 15 bp, Homo sapiens
ctggggtgcaaaaat

SEQ ID NO: 2086467 - DNA, 15 bp, Homo sapiens
tggggtgcaaaaatg

SEQ ID NO: 2086468 - DNA, 15 bp, Homo sapiens
ggggtgcaaaaatgg

SEQ ID NO: 2086469 - DNA, 15 bp, Homo sapiens
gggtgcaaaaatgga

SEQ ID NO: 2086470 - DNA, 15 bp, Homo sapiens
ggtgcaaaaatggac

SEQ ID NO: 2086471 - DNA, 15 bp, Homo sapiens
gtgcaaaaatggacc

SEQ ID NO: 2086472 - DNA, 15 bp, Homo sapiens
tgcaaaaatggaccg

SEQ ID NO: 2086473 - DNA, 15 bp, Homo sapiens
gcaaaaatggaccgg

SEQ ID NO: 2086474 - DNA, 15 bp, Homo sapiens
caaaaatggaccggg

SEQ ID NO: 2086475 - DNA, 15 bp, Homo sapiens
aaaaatggaccggga

SEQ ID NO: 2086476 - DNA, 15 bp, Homo sapiens
aaaatggaccgggaa

SEQ ID NO: 2086477 - DNA, 15 bp, Homo sapiens
aaatggaccgggaag

SEQ ID NO: 2086478 - DNA, 15 bp, Homo sapiens
aatggaccgggaagg

SEQ ID NO: 2086479 - DNA, 15 bp, Homo sapiens
atggaccgggaaggc

SEQ ID NO: 2086480 - DNA, 15 bp, Homo sapiens
tggaccgggaaggct

SEQ ID NO: 2086481 - DNA, 15 bp, Homo sapiens
ggaccgggaaggctg

SEQ ID NO: 2086482 - DNA, 15 bp, Homo sapiens
gaccgggaaggctgc

SEQ ID NO: 2086483 - DNA, 15 bp, Homo sapiens
accgggaaggctgcg

SEQ ID NO: 2086484 - DNA, 15 bp, Homo sapiens
ccgggaaggctgcgg

SEQ ID NO: 2086485 - DNA, 15 bp, Homo sapiens
cgggaaggctgcggg

SEQ ID NO: 2086486 - DNA, 15 bp, Homo sapiens
gggaaggctgcggga

SEQ ID NO: 2086487 - DNA, 15 bp, Homo sapiens
ggaaggctgcgggag

SEQ ID NO: 2086488 - DNA, 15 bp, Homo sapiens
gaaggctgcgggagg

SEQ ID NO: 2086489 - DNA, 15 bp, Homo sapiens
ggctgcgggaggagg

SEQ ID NO: 2086490 - DNA, 15 bp, Homo sapiens
gctgcgggaggaggg

SEQ ID NO: 2086491 - DNA, 15 bp, Homo sapiens
ctgcgggaggagggg

SEQ ID NO: 2086492 - DNA, 15 bp, Homo sapiens
tgcgggaggagggga

SEQ ID NO: 2086493 - DNA, 15 bp, Homo sapiens
gcgggaggaggggac

SEQ ID NO: 2086494 - DNA, 15 bp, Homo sapiens
cgggaggaggggacg

SEQ ID NO: 2086495 - DNA, 15 bp, Homo sapiens
gggaggaggggacgc

SEQ ID NO: 2086496 - DNA, 15 bp, Homo sapiens
ggaggaggggacgcc

SEQ ID NO: 2086497 - DNA, 15 bp, Homo sapiens
gaggaggggacgcct

SEQ ID NO: 2086498 - DNA, 15 bp, Homo sapiens
aggaggggacgcctg

SEQ ID NO: 2086499 - DNA, 15 bp, Homo sapiens
ggaggggacgcctgc

SEQ ID NO: 2086500 - DNA, 15 bp, Homo sapiens
gaggggacgcctgca

SEQ ID NO: 2086501 - DNA, 15 bp, Homo sapiens
aggggacgcctgcac

SEQ ID NO: 2086502 - DNA, 15 bp, Homo sapiens
ggggacgcctgcact

SEQ ID NO: 2086503 - DNA, 15 bp, Homo sapiens
gggacgcctgcactg

SEQ ID NO: 2086504 - DNA, 15 bp, Homo sapiens
ggacgcctgcactgc

SEQ ID NO: 2086505 - DNA, 15 bp, Homo sapiens
gacgcctgcactgct

SEQ ID NO: 2086506 - DNA, 15 bp, Homo sapiens
acgcctgcactgctt

SEQ ID NO: 2086507 - DNA, 15 bp, Homo sapiens
cgcctgcactgcttc

SEQ ID NO: 2086508 - DNA, 15 bp, Homo sapiens
gcctgcactgcttct

SEQ ID NO: 2086509 - DNA, 15 bp, Homo sapiens
cctgcactgcttctg

SEQ ID NO: 2086510 - DNA, 15 bp, Homo sapiens
ctgcactgcttctgg

SEQ ID NO: 2086511 - DNA, 15 bp, Homo sapiens
tgcactgcttctgga

SEQ ID NO: 2086512 - DNA, 15 bp, Homo sapiens
gcactgcttctggaa

SEQ ID NO: 2086513 - DNA, 15 bp, Homo sapiens
cactgcttctggaag

SEQ ID NO: 2086514 - DNA, 15 bp, Homo sapiens
actgcttctggaagg

SEQ ID NO: 2086515 - DNA, 15 bp, Homo sapiens
ctgcttctggaagga

SEQ ID NO: 2086516 - DNA, 15 bp, Homo sapiens
tgcttctggaaggag

SEQ ID NO: 2086517 - DNA, 15 bp, Homo sapiens
gcttctggaaggagc

SEQ ID NO: 2086518 - DNA, 15 bp, Homo sapiens
cttctggaaggagct

SEQ ID NO: 2086519 - DNA, 15 bp, Homo sapiens
ttctggaaggagctg

SEQ ID NO: 2086520 - DNA, 15 bp, Homo sapiens
tctggaaggagctgt

SEQ ID NO: 2086521 - DNA, 15 bp, Homo sapiens
ctggaaggagctgtc

SEQ ID NO: 2086522 - DNA, 15 bp, Homo sapiens
tggaaggagctgtct

SEQ ID NO: 2086523 - DNA, 15 bp, Homo sapiens
ggaaggagctgtctg

SEQ ID NO: 2086524 - DNA, 15 bp, Homo sapiens
gaaggagctgtctgg

SEQ ID NO: 2086525 - DNA, 15 bp, Homo sapiens
aaggagctgtctgga

SEQ ID NO: 2086526 - DNA, 15 bp, Homo sapiens
aggagctgtctggac

SEQ ID NO: 2086527 - DNA, 15 bp, Homo sapiens
ggagctgtctggaca

SEQ ID NO: 2086528 - DNA, 15 bp, Homo sapiens
gagctgtctggacag

SEQ ID NO: 2086529 - DNA, 15 bp, Homo sapiens
agctgtctggacagc

SEQ ID NO: 2086530 - DNA, 15 bp, Homo sapiens
gctgtctggacagcg

SEQ ID NO: 2086531 - DNA, 15 bp, Homo sapiens
ctgtctggacagcgg

SEQ ID NO: 2086532 - DNA, 15 bp, Homo sapiens
tgtctggacagcggt

SEQ ID NO: 2086533 - DNA, 15 bp, Homo sapiens
gtctggacagcggtc

SEQ ID NO: 2086534 - DNA, 15 bp, Homo sapiens
tctggacagcggtcc

SEQ ID NO: 2086535 - DNA, 15 bp, Homo sapiens
ctggacagcggtcct

SEQ ID NO: 2086536 - DNA, 15 bp, Homo sapiens
tggacagcggtcctc

SEQ ID NO: 2086537 - DNA, 15 bp, Homo sapiens
ggacagcggtcctcc

SEQ ID NO: 2086538 - DNA, 15 bp, Homo sapiens
gacagcggtcctcca

SEQ ID NO: 2086539 - DNA, 15 bp, Homo sapiens
acagcggtcctccag

SEQ ID NO: 2086540 - DNA, 15 bp, Homo sapiens
cagcggtcctccagt

SEQ ID NO: 2086541 - DNA, 15 bp, Homo sapiens
agcggtcctccagtg

SEQ ID NO: 2086542 - DNA, 15 bp, Homo sapiens
gcggtcctccagtgc

SEQ ID NO: 2086543 - DNA, 15 bp, Homo sapiens
cggtcctccagtgcc

SEQ ID NO: 2086544 - DNA, 15 bp, Homo sapiens
ggtcctccagtgcct

SEQ ID NO: 2086545 - DNA, 15 bp, Homo sapiens
gtcctccagtgcctg

SEQ ID NO: 2086546 - DNA, 15 bp, Homo sapiens
tcctccagtgcctgg

SEQ ID NO: 2086547 - DNA, 15 bp, Homo sapiens
cctccagtgcctgga

SEQ ID NO: 2086548 - DNA, 15 bp, Homo sapiens
ctccagtgcctggaa

SEQ ID NO: 2086549 - DNA, 15 bp, Homo sapiens
tccagtgcctggaac

SEQ ID NO: 2086550 - DNA, 15 bp, Homo sapiens
ccagtgcctggaaca

SEQ ID NO: 2086551 - DNA, 15 bp, Homo sapiens
cagtgcctggaacaa

SEQ ID NO: 2086552 - DNA, 15 bp, Homo sapiens
agtgcctggaacaaa

SEQ ID NO: 2086553 - DNA, 15 bp, Homo sapiens
gtgcctggaacaaac

SEQ ID NO: 2086554 - DNA, 15 bp, Homo sapiens
tgcctggaacaaaca

SEQ ID NO: 2086555 - DNA, 15 bp, Homo sapiens
gcctggaacaaacat

SEQ ID NO: 2086556 - DNA, 15 bp, Homo sapiens
cctggaacaaacatc

SEQ ID NO: 2086557 - DNA, 15 bp, Homo sapiens
ctggaacaaacatcc

SEQ ID NO: 2086558 - DNA, 15 bp, Homo sapiens
tggaacaaacatcca

SEQ ID NO: 2086559 - DNA, 15 bp, Homo sapiens
ggaacaaacatccaa

SEQ ID NO: 2086560 - DNA, 15 bp, Homo sapiens
gaacaaacatccaaa

SEQ ID NO: 2086561 - DNA, 15 bp, Homo sapiens
aacaaacatccaaaa

SEQ ID NO: 2086562 - DNA, 15 bp, Homo sapiens
acaaacatccaaaat

SEQ ID NO: 2086563 - DNA, 15 bp, Homo sapiens
caaacatccaaaatc

SEQ ID NO: 2086564 - DNA, 15 bp, Homo sapiens
aaacatccaaaatcc

SEQ ID NO: 2086565 - DNA, 15 bp, Homo sapiens
aacatccaaaatcca

SEQ ID NO: 2086566 - DNA, 15 bp, Homo sapiens
acatccaaaatccag

SEQ ID NO: 2086567 - DNA, 15 bp, Homo sapiens
catccaaaatccaga

SEQ ID NO: 2086568 - DNA, 15 bp, Homo sapiens
atccaaaatccagag

SEQ ID NO: 2086569 - DNA, 15 bp, Homo sapiens
tccaaaatccagaga

SEQ ID NO: 2086570 - DNA, 15 bp, Homo sapiens
ccaaaatccagagag

SEQ ID NO: 2086571 - DNA, 15 bp, Homo sapiens
caaaatccagagagt

SEQ ID NO: 2086572 - DNA, 15 bp, Homo sapiens
aaaatccagagagtt

SEQ ID NO: 2086573 - DNA, 15 bp, Homo sapiens
aaatccagagagttc

SEQ ID NO: 2086574 - DNA, 15 bp, Homo sapiens
aatccagagagttca

SEQ ID NO: 2086575 - DNA, 15 bp, Homo sapiens
atccagagagttcac

SEQ ID NO: 2086576 - DNA, 15 bp, Homo sapiens
tccagagagttcaca

SEQ ID NO: 2086577 - DNA, 15 bp, Homo sapiens
ccagagagttcacag

SEQ ID NO: 2086578 - DNA, 15 bp, Homo sapiens
cagagagttcacagg

SEQ ID NO: 2086579 - DNA, 15 bp, Homo sapiens
agagagttcacaggg

SEQ ID NO: 2086580 - DNA, 15 bp, Homo sapiens
gagagttcacagggc

SEQ ID NO: 2086581 - DNA, 15 bp, Homo sapiens
agagttcacagggcc

SEQ ID NO: 2086582 - DNA, 15 bp, Homo sapiens
gagttcacagggcca

SEQ ID NO: 2086583 - DNA, 15 bp, Homo sapiens
agttcacagggccag

SEQ ID NO: 2086584 - DNA, 15 bp, Homo sapiens
gttcacagggccaga

SEQ ID NO: 2086585 - DNA, 15 bp, Homo sapiens
ttcacagggccagag

SEQ ID NO: 2086586 - DNA, 15 bp, Homo sapiens
tcacagggccagagt

SEQ ID NO: 2086587 - DNA, 15 bp, Homo sapiens
cacagggccagagta

SEQ ID NO: 2086588 - DNA, 15 bp, Homo sapiens
acagggccagagtac

SEQ ID NO: 2086589 - DNA, 15 bp, Homo sapiens
cagggccagagtaca

SEQ ID NO: 2086590 - DNA, 15 bp, Homo sapiens
agggccagagtacaa

SEQ ID NO: 2086591 - DNA, 15 bp, Homo sapiens
gggccagagtacaaa

SEQ ID NO: 2086592 - DNA, 15 bp, Homo sapiens
ggccagagtacaaag

SEQ ID NO: 2086593 - DNA, 15 bp, Homo sapiens
gccagagtacaaagt

SEQ ID NO: 2086594 - DNA, 15 bp, Homo sapiens
ccagagtacaaagtg

SEQ ID NO: 2086595 - DNA, 15 bp, Homo sapiens
cagagtacaaagtgc

SEQ ID NO: 2086596 - DNA, 15 bp, Homo sapiens
agagtacaaagtgcg

SEQ ID NO: 2086597 - DNA, 15 bp, Homo sapiens
gagtacaaagtgcgt

SEQ ID NO: 2086598 - DNA, 15 bp, Homo sapiens
agtacaaagtgcgta

SEQ ID NO: 2086599 - DNA, 15 bp, Homo sapiens
gtacaaagtgcgtat

SEQ ID NO: 2086600 - DNA, 15 bp, Homo sapiens
tacaaagtgcgtatg

SEQ ID NO: 2086601 - DNA, 15 bp, Homo sapiens
acaaagtgcgtatgc

SEQ ID NO: 2086602 - DNA, 15 bp, Homo sapiens
caaagtgcgtatgcg

SEQ ID NO: 2086603 - DNA, 15 bp, Homo sapiens
aaagtgcgtatgcgg

SEQ ID NO: 2086604 - DNA, 15 bp, Homo sapiens
aagtgcgtatgcggg

SEQ ID NO: 2086605 - DNA, 15 bp, Homo sapiens
agtgcgtatgcggga

SEQ ID NO: 2086606 - DNA, 15 bp, Homo sapiens
gtgcgtatgcgggag

SEQ ID NO: 2086607 - DNA, 15 bp, Homo sapiens
tgcgtatgcgggagg

SEQ ID NO: 2086608 - DNA, 15 bp, Homo sapiens
gcgtatgcgggaggg

SEQ ID NO: 2086609 - DNA, 15 bp, Homo sapiens
cgtatgcgggagggg

SEQ ID NO: 2086610 - DNA, 15 bp, Homo sapiens
gtatgcgggaggggg

SEQ ID NO: 2086611 - DNA, 15 bp, Homo sapiens
tatgcgggaggggga

SEQ ID NO: 2086612 - DNA, 15 bp, Homo sapiens
atgcgggagggggac

SEQ ID NO: 2086613 - DNA, 15 bp, Homo sapiens
tgcgggagggggaca

SEQ ID NO: 2086614 - DNA, 15 bp, Homo sapiens
gcgggagggggacaa

SEQ ID NO: 2086615 - DNA, 15 bp, Homo sapiens
cgggagggggacaag

SEQ ID NO: 2086616 - DNA, 15 bp, Homo sapiens
gggagggggacaaga

SEQ ID NO: 2086617 - DNA, 15 bp, Homo sapiens
ggagggggacaagag

SEQ ID NO: 2086618 - DNA, 15 bp, Homo sapiens
gagggggacaagaga

SEQ ID NO: 2086619 - DNA, 15 bp, Homo sapiens
agggggacaagagat

SEQ ID NO: 2086620 - DNA, 15 bp, Homo sapiens
gggggacaagagatg

SEQ ID NO: 2086621 - DNA, 15 bp, Homo sapiens
ggggacaagagatgg

SEQ ID NO: 2086622 - DNA, 15 bp, Homo sapiens
gggacaagagatggc

SEQ ID NO: 2086623 - DNA, 15 bp, Homo sapiens
ggacaagagatggcg

SEQ ID NO: 2086624 - DNA, 15 bp, Homo sapiens
gacaagagatggcgc

SEQ ID NO: 2086625 - DNA, 15 bp, Homo sapiens
acaagagatggcgct

SEQ ID NO: 2086626 - DNA, 15 bp, Homo sapiens
caagagatggcgctg

SEQ ID NO: 2086627 - DNA, 15 bp, Homo sapiens
aagagatggcgctgc

SEQ ID NO: 2086628 - DNA, 15 bp, Homo sapiens
agagatggcgctgca

SEQ ID NO: 2086629 - DNA, 15 bp, Homo sapiens
gagatggcgctgcag

SEQ ID NO: 2086630 - DNA, 15 bp, Homo sapiens
agatggcgctgcaga

SEQ ID NO: 2086631 - DNA, 15 bp, Homo sapiens
gatggcgctgcagag

SEQ ID NO: 2086632 - DNA, 15 bp, Homo sapiens
atggcgctgcagagg

SEQ ID NO: 2086633 - DNA, 15 bp, Homo sapiens
tggcgctgcagaggt

SEQ ID NO: 2086634 - DNA, 15 bp, Homo sapiens
ggcgctgcagaggtg

SEQ ID NO: 2086635 - DNA, 15 bp, Homo sapiens
gcgctgcagaggtga

SEQ ID NO: 2086636 - DNA, 15 bp, Homo sapiens
cgctgcagaggtgag

SEQ ID NO: 2086637 - DNA, 15 bp, Homo sapiens
gctgcagaggtgaga

SEQ ID NO: 2086638 - DNA, 15 bp, Homo sapiens
ctgcagaggtgagaa

SEQ ID NO: 2086639 - DNA, 15 bp, Homo sapiens
tgcagaggtgagaag

SEQ ID NO: 2086640 - DNA, 15 bp, Homo sapiens
gcagaggtgagaagg

SEQ ID NO: 2086641 - DNA, 15 bp, Homo sapiens
cagaggtgagaaggg

SEQ ID NO: 2086642 - DNA, 15 bp, Homo sapiens
agaggtgagaagggc

SEQ ID NO: 2086643 - DNA, 15 bp, Homo sapiens
gaggtgagaagggcc

SEQ ID NO: 2086644 - DNA, 15 bp, Homo sapiens
aggtgagaagggcct

SEQ ID NO: 2086645 - DNA, 15 bp, Homo sapiens
ggtgagaagggcctc

SEQ ID NO: 2086646 - DNA, 15 bp, Homo sapiens
gtgagaagggcctcc

SEQ ID NO: 2086647 - DNA, 15 bp, Homo sapiens
tgagaagggcctccc

SEQ ID NO: 2086648 - DNA, 15 bp, Homo sapiens
gagaagggcctccca

SEQ ID NO: 2086649 - DNA, 15 bp, Homo sapiens
agaagggcctcccag

SEQ ID NO: 2086650 - DNA, 15 bp, Homo sapiens
gaagggcctcccagg

SEQ ID NO: 2086651 - DNA, 15 bp, Homo sapiens
aagggcctcccaggg

SEQ ID NO: 2086652 - DNA, 15 bp, Homo sapiens
agggcctcccagggg

SEQ ID NO: 2086653 - DNA, 15 bp, Homo sapiens
gggcctcccaggggt

SEQ ID NO: 2086654 - DNA, 15 bp, Homo sapiens
ggcctcccaggggtc

SEQ ID NO: 2086655 - DNA, 15 bp, Homo sapiens
gcctcccaggggtct

SEQ ID NO: 2086656 - DNA, 15 bp, Homo sapiens
cctcccaggggtctt

SEQ ID NO: 2086657 - DNA, 15 bp, Homo sapiens
ctcccaggggtctta

SEQ ID NO: 2086658 - DNA, 15 bp, Homo sapiens
tcccaggggtcttac

SEQ ID NO: 2086659 - DNA, 15 bp, Homo sapiens
cccaggggtcttacc

SEQ ID NO: 2086660 - DNA, 15 bp, Homo sapiens
ccaggggtcttacca

SEQ ID NO: 2086661 - DNA, 15 bp, Homo sapiens
caggggtcttaccat

SEQ ID NO: 2086662 - DNA, 15 bp, Homo sapiens
aggggtcttaccatc

SEQ ID NO: 2086663 - DNA, 15 bp, Homo sapiens
ggggtcttaccatcc

SEQ ID NO: 2086664 - DNA, 15 bp, Homo sapiens
gggtcttaccatccc

SEQ ID NO: 2086665 - DNA, 15 bp, Homo sapiens
ggtcttaccatccca

SEQ ID NO: 2086666 - DNA, 15 bp, Homo sapiens
gtcttaccatcccag

SEQ ID NO: 2086667 - DNA, 15 bp, Homo sapiens
tcttaccatcccagg

SEQ ID NO: 2086668 - DNA, 15 bp, Homo sapiens
cttaccatcccaggg

SEQ ID NO: 2086669 - DNA, 15 bp, Homo sapiens
ttaccatcccaggga

SEQ ID NO: 2086670 - DNA, 15 bp, Homo sapiens
taccatcccagggag

SEQ ID NO: 2086671 - DNA, 15 bp, Homo sapiens
accatcccagggagt

SEQ ID NO: 2086672 - DNA, 15 bp, Homo sapiens
ccatcccagggagtc

SEQ ID NO: 2086673 - DNA, 15 bp, Homo sapiens
catcccagggagtct

SEQ ID NO: 2086674 - DNA, 15 bp, Homo sapiens
atcccagggagtctc

SEQ ID NO: 2086675 - DNA, 15 bp, Homo sapiens
tcccagggagtctca

SEQ ID NO: 2086676 - DNA, 15 bp, Homo sapiens
cccagggagtctcat

SEQ ID NO: 2086677 - DNA, 15 bp, Homo sapiens
ccagggagtctcatt

SEQ ID NO: 2086678 - DNA, 15 bp, Homo sapiens
cagggagtctcattc

SEQ ID NO: 2086679 - DNA, 15 bp, Homo sapiens
agggagtctcattct

SEQ ID NO: 2086680 - DNA, 15 bp, Homo sapiens
gggagtctcattctc

SEQ ID NO: 2086681 - DNA, 15 bp, Homo sapiens
ggagtctcattctcc

SEQ ID NO: 2086682 - DNA, 15 bp, Homo sapiens
gagtctcattctcct

SEQ ID NO: 2086683 - DNA, 15 bp, Homo sapiens
agtctcattctcctc

SEQ ID NO: 2086684 - DNA, 15 bp, Homo sapiens
gtctcattctcctct

SEQ ID NO: 2086685 - DNA, 15 bp, Homo sapiens
tctcattctcctctc

SEQ ID NO: 2086686 - DNA, 15 bp, Homo sapiens
ctcattctcctctcc

SEQ ID NO: 2086687 - DNA, 15 bp, Homo sapiens
tcattctcctctccc

SEQ ID NO: 2086688 - DNA, 15 bp, Homo sapiens
cattctcctctccca

SEQ ID NO: 2086689 - DNA, 15 bp, Homo sapiens
attctcctctcccag

SEQ ID NO: 2086690 - DNA, 15 bp, Homo sapiens
ttctcctctcccagg

SEQ ID NO: 2086691 - DNA, 15 bp, Homo sapiens
tctcctctcccagga

SEQ ID NO: 2086692 - DNA, 15 bp, Homo sapiens
ctcctctcccaggat

SEQ ID NO: 2086693 - DNA, 15 bp, Homo sapiens
tcctctcccaggata

SEQ ID NO: 2086694 - DNA, 15 bp, Homo sapiens
cctctcccaggatat

SEQ ID NO: 2086695 - DNA, 15 bp, Homo sapiens
ctctcccaggatatc

SEQ ID NO: 2086696 - DNA, 15 bp, Homo sapiens
tctcccaggatatcc

SEQ ID NO: 2086697 - DNA, 15 bp, Homo sapiens
ctcccaggatatcct

SEQ ID NO: 2086698 - DNA, 15 bp, Homo sapiens
tcccaggatatcctc

SEQ ID NO: 2086699 - DNA, 15 bp, Homo sapiens
cccaggatatcctca

SEQ ID NO: 2086700 - DNA, 15 bp, Homo sapiens
ccaggatatcctcac

SEQ ID NO: 2086701 - DNA, 15 bp, Homo sapiens
caggatatcctcacc

SEQ ID NO: 2086702 - DNA, 15 bp, Homo sapiens
aggatatcctcaccc

SEQ ID NO: 2086703 - DNA, 15 bp, Homo sapiens
ggatatcctcaccca

SEQ ID NO: 2086704 - DNA, 15 bp, Homo sapiens
gatatcctcacccac

SEQ ID NO: 2086705 - DNA, 15 bp, Homo sapiens
atatcctcacccacc

SEQ ID NO: 2086706 - DNA, 15 bp, Homo sapiens
tatcctcacccaccc

SEQ ID NO: 2086707 - DNA, 15 bp, Homo sapiens
atcctcacccacccc

SEQ ID NO: 2086708 - DNA, 15 bp, Homo sapiens
tcctcacccacccca

SEQ ID NO: 2086709 - DNA, 15 bp, Homo sapiens
cctcacccaccccaa

SEQ ID NO: 2086710 - DNA, 15 bp, Homo sapiens
ctcacccaccccaac

SEQ ID NO: 2086711 - DNA, 15 bp, Homo sapiens
tcacccaccccaacc

SEQ ID NO: 2086712 - DNA, 15 bp, Homo sapiens
cacccaccccaacca

SEQ ID NO: 2086713 - DNA, 15 bp, Homo sapiens
acccaccccaaccag

SEQ ID NO: 2086714 - DNA, 15 bp, Homo sapiens
cccaccccaaccagg

SEQ ID NO: 2086715 - DNA, 15 bp, Homo sapiens
ccaccccaaccaggt

SEQ ID NO: 2086716 - DNA, 15 bp, Homo sapiens
caccccaaccaggta

SEQ ID NO: 2086717 - DNA, 15 bp, Homo sapiens
accccaaccaggtat

SEQ ID NO: 2086718 - DNA, 15 bp, Homo sapiens
ccccaaccaggtatg

SEQ ID NO: 2086719 - DNA, 15 bp, Homo sapiens
cccaaccaggtatgt

SEQ ID NO: 2086720 - DNA, 15 bp, Homo sapiens
ccaaccaggtatgtc

SEQ ID NO: 2086721 - DNA, 15 bp, Homo sapiens
caaccaggtatgtcc

SEQ ID NO: 2086722 - DNA, 15 bp, Homo sapiens
aaccaggtatgtcct

SEQ ID NO: 2086723 - DNA, 15 bp, Homo sapiens
accaggtatgtcctc

SEQ ID NO: 2086724 - DNA, 15 bp, Homo sapiens
ccaggtatgtcctct

SEQ ID NO: 2086725 - DNA, 15 bp, Homo sapiens
caggtatgtcctctc

SEQ ID NO: 2086726 - DNA, 15 bp, Homo sapiens
aggtatgtcctctct

SEQ ID NO: 2086727 - DNA, 15 bp, Homo sapiens
ggtatgtcctctctc

SEQ ID NO: 2086728 - DNA, 15 bp, Homo sapiens
gtatgtcctctctcc

SEQ ID NO: 2086729 - DNA, 15 bp, Homo sapiens
tatgtcctctctcct

SEQ ID NO: 2086730 - DNA, 15 bp, Homo sapiens
atgtcctctctcctt

SEQ ID NO: 2086731 - DNA, 15 bp, Homo sapiens
tgtcctctctccttc

SEQ ID NO: 2086732 - DNA, 15 bp, Homo sapiens
gtcctctctccttcc

SEQ ID NO: 2086733 - DNA, 15 bp, Homo sapiens
tcctctctccttccc

SEQ ID NO: 2086734 - DNA, 15 bp, Homo sapiens
cctctctccttccca

SEQ ID NO: 2086735 - DNA, 15 bp, Homo sapiens
ctctctccttcccag

SEQ ID NO: 2086736 - DNA, 15 bp, Homo sapiens
tctctccttcccagg

SEQ ID NO: 2086737 - DNA, 15 bp, Homo sapiens
ctctccttcccaggg

SEQ ID NO: 2086738 - DNA, 15 bp, Homo sapiens
tctccttcccagggg

SEQ ID NO: 2086739 - DNA, 15 bp, Homo sapiens
ctccttcccaggggc

SEQ ID NO: 2086740 - DNA, 15 bp, Homo sapiens
tccttcccaggggct

SEQ ID NO: 2086741 - DNA, 15 bp, Homo sapiens
ccttcccaggggctt

SEQ ID NO: 2086742 - DNA, 15 bp, Homo sapiens
cttcccaggggcttc

SEQ ID NO: 2086743 - DNA, 15 bp, Homo sapiens
ttcccaggggcttct

SEQ ID NO: 2086744 - DNA, 15 bp, Homo sapiens
tcccaggggcttctt

SEQ ID NO: 2086745 - DNA, 15 bp, Homo sapiens
cccaggggcttcttc

SEQ ID NO: 2086746 - DNA, 15 bp, Homo sapiens
ccaggggcttcttca

SEQ ID NO: 2086747 - DNA, 15 bp, Homo sapiens
caggggcttcttcac

SEQ ID NO: 2086748 - DNA, 15 bp, Homo sapiens
aggggcttcttcact

SEQ ID NO: 2086749 - DNA, 15 bp, Homo sapiens
ggggcttcttcactt

SEQ ID NO: 2086750 - DNA, 15 bp, Homo sapiens
gggcttcttcacttt

SEQ ID NO: 2086751 - DNA, 15 bp, Homo sapiens
ggcttcttcactttc

SEQ ID NO: 2086752 - DNA, 15 bp, Homo sapiens
gcttcttcactttcc

SEQ ID NO: 2086753 - DNA, 15 bp, Homo sapiens
cttcttcactttccc

SEQ ID NO: 2086754 - DNA, 15 bp, Homo sapiens
ttcttcactttcccg

SEQ ID NO: 2086755 - DNA, 15 bp, Homo sapiens
tcttcactttcccgc

SEQ ID NO: 2086756 - DNA, 15 bp, Homo sapiens
cttcactttcccgca

SEQ ID NO: 2086757 - DNA, 15 bp, Homo sapiens
ttcactttcccgcat

SEQ ID NO: 2086758 - DNA, 15 bp, Homo sapiens
tcactttcccgcatc

SEQ ID NO: 2086759 - DNA, 15 bp, Homo sapiens
cactttcccgcatcc

SEQ ID NO: 2086760 - DNA, 15 bp, Homo sapiens
actttcccgcatccc

SEQ ID NO: 2086761 - DNA, 15 bp, Homo sapiens
ctttcccgcatcccc

SEQ ID NO: 2086762 - DNA, 15 bp, Homo sapiens
tttcccgcatccccc

SEQ ID NO: 2086763 - DNA, 15 bp, Homo sapiens
ttcccgcatcccccc

SEQ ID NO: 2086764 - DNA, 15 bp, Homo sapiens
tcccgcatcccccct

SEQ ID NO: 2086765 - DNA, 15 bp, Homo sapiens
cccgcatcccccctc

SEQ ID NO: 2086766 - DNA, 15 bp, Homo sapiens
ccgcatcccccctct

SEQ ID NO: 2086767 - DNA, 15 bp, Homo sapiens
cgcatcccccctctc

SEQ ID NO: 2086768 - DNA, 15 bp, Homo sapiens
gcatcccccctctcc

SEQ ID NO: 2086769 - DNA, 15 bp, Homo sapiens
catcccccctctccc

SEQ ID NO: 2086770 - DNA, 15 bp, Homo sapiens
atcccccctctcccc

SEQ ID NO: 2086771 - DNA, 15 bp, Homo sapiens
tcccccctctcccca

SEQ ID NO: 2086772 - DNA, 15 bp, Homo sapiens
cccccctctccccag

SEQ ID NO: 2086773 - DNA, 15 bp, Homo sapiens
ccccctctccccagg

SEQ ID NO: 2086774 - DNA, 15 bp, Homo sapiens
cccctctccccagga

SEQ ID NO: 2086775 - DNA, 15 bp, Homo sapiens
ccctctccccaggat

SEQ ID NO: 2086776 - DNA, 15 bp, Homo sapiens
cctctccccaggatg

SEQ ID NO: 2086777 - DNA, 15 bp, Homo sapiens
ctctccccaggatgt

SEQ ID NO: 2086778 - DNA, 15 bp, Homo sapiens
tctccccaggatgta

SEQ ID NO: 2086779 - DNA, 15 bp, Homo sapiens
ctccccaggatgtat

SEQ ID NO: 2086780 - DNA, 15 bp, Homo sapiens
tccccaggatgtatc

SEQ ID NO: 2086781 - DNA, 15 bp, Homo sapiens
ccccaggatgtatca

SEQ ID NO: 2086782 - DNA, 15 bp, Homo sapiens
cccaggatgtatcag

SEQ ID NO: 2086783 - DNA, 15 bp, Homo sapiens
ccaggatgtatcagc

SEQ ID NO: 2086784 - DNA, 15 bp, Homo sapiens
caggatgtatcagcc

SEQ ID NO: 2086785 - DNA, 15 bp, Homo sapiens
aggatgtatcagccc

SEQ ID NO: 2086786 - DNA, 15 bp, Homo sapiens
ggatgtatcagcccc

SEQ ID NO: 2086787 - DNA, 15 bp, Homo sapiens
gatgtatcagcccct

SEQ ID NO: 2086788 - DNA, 15 bp, Homo sapiens
atgtatcagcccctg

SEQ ID NO: 2086789 - DNA, 15 bp, Homo sapiens
tgtatcagcccctgt

SEQ ID NO: 2086790 - DNA, 15 bp, Homo sapiens
gtatcagcccctgtc

SEQ ID NO: 2086791 - DNA, 15 bp, Homo sapiens
tatcagcccctgtca

SEQ ID NO: 2086792 - DNA, 15 bp, Homo sapiens
atcagcccctgtcag

SEQ ID NO: 2086793 - DNA, 15 bp, Homo sapiens
tcagcccctgtcagg

SEQ ID NO: 2086794 - DNA, 15 bp, Homo sapiens
cagcccctgtcaggg

SEQ ID NO: 2086795 - DNA, 15 bp, Homo sapiens
agcccctgtcagggg

SEQ ID NO: 2086796 - DNA, 15 bp, Homo sapiens
gcccctgtcaggggc

SEQ ID NO: 2086797 - DNA, 15 bp, Homo sapiens
cccctgtcaggggct

SEQ ID NO: 2086798 - DNA, 15 bp, Homo sapiens
ccctgtcaggggctc

SEQ ID NO: 2086799 - DNA, 15 bp, Homo sapiens
cctgtcaggggctct

SEQ ID NO: 2086800 - DNA, 15 bp, Homo sapiens
ctgtcaggggctctc

SEQ ID NO: 2086801 - DNA, 15 bp, Homo sapiens
tgtcaggggctctct

SEQ ID NO: 2086802 - DNA, 15 bp, Homo sapiens
gtcaggggctctctc

SEQ ID NO: 2086803 - DNA, 15 bp, Homo sapiens
tcaggggctctctct

SEQ ID NO: 2086804 - DNA, 15 bp, Homo sapiens
caggggctctctctc

SEQ ID NO: 2086805 - DNA, 15 bp, Homo sapiens
aggggctctctctct

SEQ ID NO: 2086806 - DNA, 15 bp, Homo sapiens
ggggctctctctctc

SEQ ID NO: 2086807 - DNA, 15 bp, Homo sapiens
gggctctctctctcc

SEQ ID NO: 2086808 - DNA, 15 bp, Homo sapiens
ggctctctctctccc

SEQ ID NO: 2086809 - DNA, 15 bp, Homo sapiens
gctctctctctccct

SEQ ID NO: 2086810 - DNA, 15 bp, Homo sapiens
tctctctctccctcc

SEQ ID NO: 2086811 - DNA, 15 bp, Homo sapiens
ctctctctccctccc

SEQ ID NO: 2086812 - DNA, 15 bp, Homo sapiens
tctctctccctcccc

SEQ ID NO: 2086813 - DNA, 15 bp, Homo sapiens
ctctctccctcccca

SEQ ID NO: 2086814 - DNA, 15 bp, Homo sapiens
tctctccctccccac

SEQ ID NO: 2086815 - DNA, 15 bp, Homo sapiens
ctctccctccccacc

SEQ ID NO: 2086816 - DNA, 15 bp, Homo sapiens
tctccctccccaccc

SEQ ID NO: 2086817 - DNA, 15 bp, Homo sapiens
ctccctccccaccca

SEQ ID NO: 2086818 - DNA, 15 bp, Homo sapiens
tccctccccacccag

SEQ ID NO: 2086819 - DNA, 15 bp, Homo sapiens
ccctccccacccagg

SEQ ID NO: 2086820 - DNA, 15 bp, Homo sapiens
cctccccacccagga

SEQ ID NO: 2086821 - DNA, 15 bp, Homo sapiens
ctccccacccaggag

SEQ ID NO: 2086822 - DNA, 15 bp, Homo sapiens
tccccacccaggaga

SEQ ID NO: 2086823 - DNA, 15 bp, Homo sapiens
ccccacccaggagag

SEQ ID NO: 2086824 - DNA, 15 bp, Homo sapiens
cccacccaggagagt

SEQ ID NO: 2086825 - DNA, 15 bp, Homo sapiens
ccacccaggagagtc

SEQ ID NO: 2086826 - DNA, 15 bp, Homo sapiens
cacccaggagagtcc

SEQ ID NO: 2086827 - DNA, 15 bp, Homo sapiens
acccaggagagtcct

SEQ ID NO: 2086828 - DNA, 15 bp, Homo sapiens
cccaggagagtcctc

SEQ ID NO: 2086829 - DNA, 15 bp, Homo sapiens
ccaggagagtcctca

SEQ ID NO: 2086830 - DNA, 15 bp, Homo sapiens
caggagagtcctcac

SEQ ID NO: 2086831 - DNA, 15 bp, Homo sapiens
aggagagtcctcacc

SEQ ID NO: 2086832 - DNA, 15 bp, Homo sapiens
ggagagtcctcaccc

SEQ ID NO: 2086833 - DNA, 15 bp, Homo sapiens
gagagtcctcaccct

SEQ ID NO: 2086834 - DNA, 15 bp, Homo sapiens
agagtcctcaccctc

SEQ ID NO: 2086835 - DNA, 15 bp, Homo sapiens
gagtcctcaccctct

SEQ ID NO: 2086836 - DNA, 15 bp, Homo sapiens
agtcctcaccctctt

SEQ ID NO: 2086837 - DNA, 15 bp, Homo sapiens
gtcctcaccctcttc

SEQ ID NO: 2086838 - DNA, 15 bp, Homo sapiens
tcctcaccctcttcc

SEQ ID NO: 2086839 - DNA, 15 bp, Homo sapiens
cctcaccctcttccc

SEQ ID NO: 2086840 - DNA, 15 bp, Homo sapiens
ctcaccctcttccca

SEQ ID NO: 2086841 - DNA, 15 bp, Homo sapiens
tcaccctcttcccag

SEQ ID NO: 2086842 - DNA, 15 bp, Homo sapiens
caccctcttcccagg

SEQ ID NO: 2086843 - DNA, 15 bp, Homo sapiens
accctcttcccagga

SEQ ID NO: 2086844 - DNA, 15 bp, Homo sapiens
ccctcttcccaggag

SEQ ID NO: 2086845 - DNA, 15 bp, Homo sapiens
cctcttcccaggagt

SEQ ID NO: 2086846 - DNA, 15 bp, Homo sapiens
ctcttcccaggagtg

SEQ ID NO: 2086847 - DNA, 15 bp, Homo sapiens
tcttcccaggagtgc

SEQ ID NO: 2086848 - DNA, 15 bp, Homo sapiens
cttcccaggagtgct

SEQ ID NO: 2086849 - DNA, 15 bp, Homo sapiens
ttcccaggagtgctg

SEQ ID NO: 2086850 - DNA, 15 bp, Homo sapiens
tcccaggagtgctgg

SEQ ID NO: 2086851 - DNA, 15 bp, Homo sapiens
cccaggagtgctgga

SEQ ID NO: 2086852 - DNA, 15 bp, Homo sapiens
ccaggagtgctggaa

SEQ ID NO: 2086853 - DNA, 15 bp, Homo sapiens
caggagtgctggaac

SEQ ID NO: 2086854 - DNA, 15 bp, Homo sapiens
aggagtgctggaact

SEQ ID NO: 2086855 - DNA, 15 bp, Homo sapiens
ggagtgctggaactg

SEQ ID NO: 2086856 - DNA, 15 bp, Homo sapiens
gagtgctggaactgc

SEQ ID NO: 2086857 - DNA, 15 bp, Homo sapiens
agtgctggaactgca

SEQ ID NO: 2086858 - DNA, 15 bp, Homo sapiens
gtgctggaactgcag

SEQ ID NO: 2086859 - DNA, 15 bp, Homo sapiens
tgctggaactgcagg

SEQ ID NO: 2086860 - DNA, 15 bp, Homo sapiens
gctggaactgcaggg

SEQ ID NO: 2086861 - DNA, 15 bp, Homo sapiens
ctggaactgcagggg

SEQ ID NO: 2086862 - DNA, 15 bp, Homo sapiens
tggaactgcaggggc

SEQ ID NO: 2086863 - DNA, 15 bp, Homo sapiens
ggaactgcaggggcc

SEQ ID NO: 2086864 - DNA, 15 bp, Homo sapiens
gaactgcaggggcca

SEQ ID NO: 2086865 - DNA, 15 bp, Homo sapiens
aactgcaggggccag

SEQ ID NO: 2086866 - DNA, 15 bp, Homo sapiens
actgcaggggccagg

SEQ ID NO: 2086867 - DNA, 15 bp, Homo sapiens
ctgcaggggccaggg

SEQ ID NO: 2086868 - DNA, 15 bp, Homo sapiens
tgcaggggccagggc

SEQ ID NO: 2086869 - DNA, 15 bp, Homo sapiens
gcaggggccagggct

SEQ ID NO: 2086870 - DNA, 15 bp, Homo sapiens
caggggccagggctg

SEQ ID NO: 2086871 - DNA, 15 bp, Homo sapiens
gggccagggctgggg

SEQ ID NO: 2086872 - DNA, 15 bp, Homo sapiens
ggccagggctgggga

SEQ ID NO: 2086873 - DNA, 15 bp, Homo sapiens
gccagggctggggaa

SEQ ID NO: 2086874 - DNA, 15 bp, Homo sapiens
ccagggctggggaaa

SEQ ID NO: 2086875 - DNA, 15 bp, Homo sapiens
cagggctggggaaat

SEQ ID NO: 2086876 - DNA, 15 bp, Homo sapiens
agggctggggaaatg

SEQ ID NO: 2086877 - DNA, 15 bp, Homo sapiens
gggctggggaaatgt

SEQ ID NO: 2086878 - DNA, 15 bp, Homo sapiens
ggctggggaaatgtg

SEQ ID NO: 2086879 - DNA, 15 bp, Homo sapiens
gctggggaaatgtgt

SEQ ID NO: 2086880 - DNA, 15 bp, Homo sapiens
ctggggaaatgtgtc

SEQ ID NO: 2086881 - DNA, 15 bp, Homo sapiens
tggggaaatgtgtca

SEQ ID NO: 2086882 - DNA, 15 bp, Homo sapiens
ggggaaatgtgtcac

SEQ ID NO: 2086883 - DNA, 15 bp, Homo sapiens
gggaaatgtgtcacc

SEQ ID NO: 2086884 - DNA, 15 bp, Homo sapiens
ggaaatgtgtcacca

SEQ ID NO: 2086885 - DNA, 15 bp, Homo sapiens
gaaatgtgtcaccat

SEQ ID NO: 2086886 - DNA, 15 bp, Homo sapiens
aaatgtgtcaccatc

SEQ ID NO: 2086887 - DNA, 15 bp, Homo sapiens
aatgtgtcaccatcc

SEQ ID NO: 2086888 - DNA, 15 bp, Homo sapiens
atgtgtcaccatccc

SEQ ID NO: 2086889 - DNA, 15 bp, Homo sapiens
tgtgtcaccatcccc

SEQ ID NO: 2086890 - DNA, 15 bp, Homo sapiens
gtgtcaccatcccca

SEQ ID NO: 2086891 - DNA, 15 bp, Homo sapiens
tgtcaccatccccag

SEQ ID NO: 2086892 - DNA, 15 bp, Homo sapiens
gtcaccatccccagt

SEQ ID NO: 2086893 - DNA, 15 bp, Homo sapiens
tcaccatccccagtc

SEQ ID NO: 2086894 - DNA, 15 bp, Homo sapiens
caccatccccagtcc

SEQ ID NO: 2086895 - DNA, 15 bp, Homo sapiens
accatccccagtccc

SEQ ID NO: 2086896 - DNA, 15 bp, Homo sapiens
ccatccccagtccct

SEQ ID NO: 2086897 - DNA, 15 bp, Homo sapiens
catccccagtccctg

SEQ ID NO: 2086898 - DNA, 15 bp, Homo sapiens
atccccagtccctga

SEQ ID NO: 2086899 - DNA, 15 bp, Homo sapiens
tccccagtccctgac

SEQ ID NO: 2086900 - DNA, 15 bp, Homo sapiens
ccccagtccctgacc

SEQ ID NO: 2086901 - DNA, 15 bp, Homo sapiens
cccagtccctgaccc

SEQ ID NO: 2086902 - DNA, 15 bp, Homo sapiens
ccagtccctgaccca

SEQ ID NO: 2086903 - DNA, 15 bp, Homo sapiens
cagtccctgacccac

SEQ ID NO: 2086904 - DNA, 15 bp, Homo sapiens
agtccctgacccacc

SEQ ID NO: 2086905 - DNA, 15 bp, Homo sapiens
gtccctgacccaccc

SEQ ID NO: 2086906 - DNA, 15 bp, Homo sapiens
tccctgacccaccca

SEQ ID NO: 2086907 - DNA, 15 bp, Homo sapiens
ccctgacccacccac

SEQ ID NO: 2086908 - DNA, 15 bp, Homo sapiens
cctgacccacccacc

SEQ ID NO: 2086909 - DNA, 15 bp, Homo sapiens
ctgacccacccaccc

SEQ ID NO: 2086910 - DNA, 15 bp, Homo sapiens
tgacccacccaccct

SEQ ID NO: 2086911 - DNA, 15 bp, Homo sapiens
gacccacccaccctg

SEQ ID NO: 2086912 - DNA, 15 bp, Homo sapiens
acccacccaccctgt

SEQ ID NO: 2086913 - DNA, 15 bp, Homo sapiens
cccacccaccctgtc

SEQ ID NO: 2086914 - DNA, 15 bp, Homo sapiens
ccacccaccctgtct

SEQ ID NO: 2086915 - DNA, 15 bp, Homo sapiens
cacccaccctgtctc

SEQ ID NO: 2086916 - DNA, 15 bp, Homo sapiens
acccaccctgtctct

SEQ ID NO: 2086917 - DNA, 15 bp, Homo sapiens
cccaccctgtctctc

SEQ ID NO: 2086918 - DNA, 15 bp, Homo sapiens
ccaccctgtctctcc

SEQ ID NO: 2086919 - DNA, 15 bp, Homo sapiens
caccctgtctctcca

SEQ ID NO: 2086920 - DNA, 15 bp, Homo sapiens
accctgtctctccac

SEQ ID NO: 2086921 - DNA, 15 bp, Homo sapiens
ccctgtctctccaca

SEQ ID NO: 2086922 - DNA, 15 bp, Homo sapiens
cctgtctctccacag

SEQ ID NO: 2086923 - DNA, 15 bp, Homo sapiens
ctgtctctccacagg

SEQ ID NO: 2086924 - DNA, 15 bp, Homo sapiens
tgtctctccacaggc

SEQ ID NO: 2086925 - DNA, 15 bp, Homo sapiens
gtctctccacaggcc

SEQ ID NO: 2086926 - DNA, 15 bp, Homo sapiens
tctctccacaggccc

SEQ ID NO: 2086927 - DNA, 15 bp, Homo sapiens
ctctccacaggccct

SEQ ID NO: 2086928 - DNA, 15 bp, Homo sapiens
tctccacaggccctg

SEQ ID NO: 2086929 - DNA, 15 bp, Homo sapiens
ctccacaggccctgg

SEQ ID NO: 2086930 - DNA, 15 bp, Homo sapiens
tccacaggccctggg

SEQ ID NO: 2086931 - DNA, 15 bp, Homo sapiens
ccacaggccctgggt

SEQ ID NO: 2086932 - DNA, 15 bp, Homo sapiens
cacaggccctgggtg

SEQ ID NO: 2086933 - DNA, 15 bp, Homo sapiens
acaggccctgggtgc

SEQ ID NO: 2086934 - DNA, 15 bp, Homo sapiens
caggccctgggtgcc

SEQ ID NO: 2086935 - DNA, 15 bp, Homo sapiens
aggccctgggtgcca

SEQ ID NO: 2086936 - DNA, 15 bp, Homo sapiens
ggccctgggtgccag

SEQ ID NO: 2086937 - DNA, 15 bp, Homo sapiens
gccctgggtgccagg

SEQ ID NO: 2086938 - DNA, 15 bp, Homo sapiens
ccctgggtgccaggc

SEQ ID NO: 2086939 - DNA, 15 bp, Homo sapiens
cctgggtgccaggcc

SEQ ID NO: 2086940 - DNA, 15 bp, Homo sapiens
ctgggtgccaggccc

SEQ ID NO: 2086941 - DNA, 15 bp, Homo sapiens
tgggtgccaggccct

SEQ ID NO: 2086942 - DNA, 15 bp, Homo sapiens
gggtgccaggccctg

SEQ ID NO: 2086943 - DNA, 15 bp, Homo sapiens
ggtgccaggccctgt

SEQ ID NO: 2086944 - DNA, 15 bp, Homo sapiens
tgccaggccctgtgg

SEQ ID NO: 2086945 - DNA, 15 bp, Homo sapiens
gccaggccctgtgga

SEQ ID NO: 2086946 - DNA, 15 bp, Homo sapiens
ccaggccctgtggat

SEQ ID NO: 2086947 - DNA, 15 bp, Homo sapiens
caggccctgtggatg

SEQ ID NO: 2086948 - DNA, 15 bp, Homo sapiens
aggccctgtggatgc

SEQ ID NO: 2086949 - DNA, 15 bp, Homo sapiens
ggccctgtggatgca

SEQ ID NO: 2086950 - DNA, 15 bp, Homo sapiens
gccctgtggatgcac

SEQ ID NO: 2086951 - DNA, 15 bp, Homo sapiens
ccctgtggatgcaca

SEQ ID NO: 2086952 - DNA, 15 bp, Homo sapiens
cctgtggatgcacaa

SEQ ID NO: 2086953 - DNA, 15 bp, Homo sapiens
ctgtggatgcacaag

SEQ ID NO: 2086954 - DNA, 15 bp, Homo sapiens
tgtggatgcacaagg

SEQ ID NO: 2086955 - DNA, 15 bp, Homo sapiens
gtggatgcacaaggt

SEQ ID NO: 2086956 - DNA, 15 bp, Homo sapiens
tggatgcacaaggtc

SEQ ID NO: 2086957 - DNA, 15 bp, Homo sapiens
ggatgcacaaggtcc

SEQ ID NO: 2086958 - DNA, 15 bp, Homo sapiens
gatgcacaaggtccc

SEQ ID NO: 2086959 - DNA, 15 bp, Homo sapiens
atgcacaaggtccca

SEQ ID NO: 2086960 - DNA, 15 bp, Homo sapiens
tgcacaaggtcccag

SEQ ID NO: 2086961 - DNA, 15 bp, Homo sapiens
gcacaaggtcccagc

SEQ ID NO: 2086962 - DNA, 15 bp, Homo sapiens
cacaaggtcccagca

SEQ ID NO: 2086963 - DNA, 15 bp, Homo sapiens
acaaggtcccagcat

SEQ ID NO: 2086964 - DNA, 15 bp, Homo sapiens
caaggtcccagcatc

SEQ ID NO: 2086965 - DNA, 15 bp, Homo sapiens
aaggtcccagcatca

SEQ ID NO: 2086966 - DNA, 15 bp, Homo sapiens
aggtcccagcatcat

SEQ ID NO: 2086967 - DNA, 15 bp, Homo sapiens
ggtcccagcatcatt

SEQ ID NO: 2086968 - DNA, 15 bp, Homo sapiens
gtcccagcatcattg

SEQ ID NO: 2086969 - DNA, 15 bp, Homo sapiens
tcccagcatcattga

SEQ ID NO: 2086970 - DNA, 15 bp, Homo sapiens
cccagcatcattgat

SEQ ID NO: 2086971 - DNA, 15 bp, Homo sapiens
ccagcatcattgatg

SEQ ID NO: 2086972 - DNA, 15 bp, Homo sapiens
cagcatcattgatgg

SEQ ID NO: 2086973 - DNA, 15 bp, Homo sapiens
agcatcattgatggt

SEQ ID NO: 2086974 - DNA, 15 bp, Homo sapiens
gcatcattgatggtg

SEQ ID NO: 2086975 - DNA, 15 bp, Homo sapiens
catcattgatggtga

SEQ ID NO: 2086976 - DNA, 15 bp, Homo sapiens
atcattgatggtgag

SEQ ID NO: 2086977 - DNA, 15 bp, Homo sapiens
tcattgatggtgagc

SEQ ID NO: 2086978 - DNA, 15 bp, Homo sapiens
cattgatggtgagcc

SEQ ID NO: 2086979 - DNA, 15 bp, Homo sapiens
attgatggtgagcct

SEQ ID NO: 2086980 - DNA, 15 bp, Homo sapiens
ttgatggtgagcctg

SEQ ID NO: 2086981 - DNA, 15 bp, Homo sapiens
tgatggtgagcctgg

SEQ ID NO: 2086982 - DNA, 15 bp, Homo sapiens
gatggtgagcctggg

SEQ ID NO: 2086983 - DNA, 15 bp, Homo sapiens
atggtgagcctgggg

SEQ ID NO: 2086984 - DNA, 15 bp, Homo sapiens
tggtgagcctggggg

SEQ ID NO: 2086985 - DNA, 15 bp, Homo sapiens
ggtgagcctggggga

SEQ ID NO: 2086986 - DNA, 15 bp, Homo sapiens
gtgagcctgggggaa

SEQ ID NO: 2086987 - DNA, 15 bp, Homo sapiens
tgagcctgggggaag

SEQ ID NO: 2086988 - DNA, 15 bp, Homo sapiens
gagcctgggggaaga

SEQ ID NO: 2086989 - DNA, 15 bp, Homo sapiens
agcctgggggaagac

SEQ ID NO: 2086990 - DNA, 15 bp, Homo sapiens
gcctgggggaagacg

SEQ ID NO: 2086991 - DNA, 15 bp, Homo sapiens
cctgggggaagacgc

SEQ ID NO: 2086992 - DNA, 15 bp, Homo sapiens
ctgggggaagacgcc

SEQ ID NO: 2086993 - DNA, 15 bp, Homo sapiens
tgggggaagacgccc

SEQ ID NO: 2086994 - DNA, 15 bp, Homo sapiens
gggggaagacgccca

SEQ ID NO: 2086995 - DNA, 15 bp, Homo sapiens
ggggaagacgcccac

SEQ ID NO: 2086996 - DNA, 15 bp, Homo sapiens
gggaagacgcccact

SEQ ID NO: 2086997 - DNA, 15 bp, Homo sapiens
ggaagacgcccactt

SEQ ID NO: 2086998 - DNA, 15 bp, Homo sapiens
gaagacgcccacttc

SEQ ID NO: 2086999 - DNA, 15 bp, Homo sapiens
aagacgcccacttcc

SEQ ID NO: 2087000 - DNA, 15 bp, Homo sapiens
agacgcccacttcca

SEQ ID NO: 2087001 - DNA, 15 bp, Homo sapiens
gacgcccacttccaa

SEQ ID NO: 2087002 - DNA, 15 bp, Homo sapiens
acgcccacttccaat

SEQ ID NO: 2087003 - DNA, 15 bp, Homo sapiens
cgcccacttccaatg

SEQ ID NO: 2087004 - DNA, 15 bp, Homo sapiens
gcccacttccaatgc

SEQ ID NO: 2087005 - DNA, 15 bp, Homo sapiens
cccacttccaatgcc

SEQ ID NO: 2087006 - DNA, 15 bp, Homo sapiens
ccacttccaatgccc

SEQ ID NO: 2087007 - DNA, 15 bp, Homo sapiens
cacttccaatgcccg

SEQ ID NO: 2087008 - DNA, 15 bp, Homo sapiens
acttccaatgcccgc

SEQ ID NO: 2087009 - DNA, 15 bp, Homo sapiens
cttccaatgcccgca

SEQ ID NO: 2087010 - DNA, 15 bp, Homo sapiens
ttccaatgcccgcac

SEQ ID NO: 2087011 - DNA, 15 bp, Homo sapiens
tccaatgcccgcaca

SEQ ID NO: 2087012 - DNA, 15 bp, Homo sapiens
ccaatgcccgcacaa

SEQ ID NO: 2087013 - DNA, 15 bp, Homo sapiens
caatgcccgcacaat

SEQ ID NO: 2087014 - DNA, 15 bp, Homo sapiens
aatgcccgcacaata

SEQ ID NO: 2087015 - DNA, 15 bp, Homo sapiens
atgcccgcacaatag

SEQ ID NO: 2087016 - DNA, 15 bp, Homo sapiens
tgcccgcacaatagc

SEQ ID NO: 2087017 - DNA, 15 bp, Homo sapiens
gcccgcacaatagca

SEQ ID NO: 2087018 - DNA, 15 bp, Homo sapiens
cccgcacaatagcag

SEQ ID NO: 2087019 - DNA, 15 bp, Homo sapiens
ccgcacaatagcagc

SEQ ID NO: 2087020 - DNA, 15 bp, Homo sapiens
cgcacaatagcagca

SEQ ID NO: 2087021 - DNA, 15 bp, Homo sapiens
gcacaatagcagcaa

SEQ ID NO: 2087022 - DNA, 15 bp, Homo sapiens
cacaatagcagcaac

SEQ ID NO: 2087023 - DNA, 15 bp, Homo sapiens
acaatagcagcaaca

SEQ ID NO: 2087024 - DNA, 15 bp, Homo sapiens
caatagcagcaacaa

SEQ ID NO: 2087025 - DNA, 15 bp, Homo sapiens
aatagcagcaacaac

SEQ ID NO: 2087026 - DNA, 15 bp, Homo sapiens
atagcagcaacaacg

SEQ ID NO: 2087027 - DNA, 15 bp, Homo sapiens
tagcagcaacaacgc

SEQ ID NO: 2087028 - DNA, 15 bp, Homo sapiens
agcagcaacaacgcc

SEQ ID NO: 2087029 - DNA, 15 bp, Homo sapiens
gcagcaacaacgcca

SEQ ID NO: 2087030 - DNA, 15 bp, Homo sapiens
cagcaacaacgccaa

SEQ ID NO: 2087031 - DNA, 15 bp, Homo sapiens
agcaacaacgccaac

SEQ ID NO: 2087032 - DNA, 15 bp, Homo sapiens
gcaacaacgccaacg

SEQ ID NO: 2087033 - DNA, 15 bp, Homo sapiens
caacaacgccaacgt

SEQ ID NO: 2087034 - DNA, 15 bp, Homo sapiens
aacaacgccaacgtc

SEQ ID NO: 2087035 - DNA, 15 bp, Homo sapiens
acaacgccaacgtca

SEQ ID NO: 2087036 - DNA, 15 bp, Homo sapiens
caacgccaacgtcac

SEQ ID NO: 2087037 - DNA, 15 bp, Homo sapiens
aacgccaacgtcacc

SEQ ID NO: 2087038 - DNA, 15 bp, Homo sapiens
acgccaacgtcacct

SEQ ID NO: 2087039 - DNA, 15 bp, Homo sapiens
cgccaacgtcacctg

SEQ ID NO: 2087040 - DNA, 15 bp, Homo sapiens
gccaacgtcacctgg

SEQ ID NO: 2087041 - DNA, 15 bp, Homo sapiens
ccaacgtcacctggt

SEQ ID NO: 2087042 - DNA, 15 bp, Homo sapiens
caacgtcacctggtg

SEQ ID NO: 2087043 - DNA, 15 bp, Homo sapiens
aacgtcacctggtgg

SEQ ID NO: 2087044 - DNA, 15 bp, Homo sapiens
acgtcacctggtggc

SEQ ID NO: 2087045 - DNA, 15 bp, Homo sapiens
cgtcacctggtggcg

SEQ ID NO: 2087046 - DNA, 15 bp, Homo sapiens
gtcacctggtggcgc

SEQ ID NO: 2087047 - DNA, 15 bp, Homo sapiens
tcacctggtggcgcg

SEQ ID NO: 2087048 - DNA, 15 bp, Homo sapiens
cacctggtggcgcgt

SEQ ID NO: 2087049 - DNA, 15 bp, Homo sapiens
acctggtggcgcgtc

SEQ ID NO: 2087050 - DNA, 15 bp, Homo sapiens
cctggtggcgcgtcc

SEQ ID NO: 2087051 - DNA, 15 bp, Homo sapiens
ctggtggcgcgtcct

SEQ ID NO: 2087052 - DNA, 15 bp, Homo sapiens
tggtggcgcgtcctc

SEQ ID NO: 2087053 - DNA, 15 bp, Homo sapiens
ggtggcgcgtcctcc

SEQ ID NO: 2087054 - DNA, 15 bp, Homo sapiens
gtggcgcgtcctcca

SEQ ID NO: 2087055 - DNA, 15 bp, Homo sapiens
tggcgcgtcctccat

SEQ ID NO: 2087056 - DNA, 15 bp, Homo sapiens
ggcgcgtcctccatg

SEQ ID NO: 2087057 - DNA, 15 bp, Homo sapiens
gcgcgtcctccatgg

SEQ ID NO: 2087058 - DNA, 15 bp, Homo sapiens
cgcgtcctccatggc

SEQ ID NO: 2087059 - DNA, 15 bp, Homo sapiens
gcgtcctccatggca

SEQ ID NO: 2087060 - DNA, 15 bp, Homo sapiens
cgtcctccatggcaa

SEQ ID NO: 2087061 - DNA, 15 bp, Homo sapiens
gtcctccatggcaac

SEQ ID NO: 2087062 - DNA, 15 bp, Homo sapiens
tcctccatggcaact

SEQ ID NO: 2087063 - DNA, 15 bp, Homo sapiens
cctccatggcaacta

SEQ ID NO: 2087064 - DNA, 15 bp, Homo sapiens
ctccatggcaactac

SEQ ID NO: 2087065 - DNA, 15 bp, Homo sapiens
tccatggcaactaca

SEQ ID NO: 2087066 - DNA, 15 bp, Homo sapiens
ccatggcaactacac

SEQ ID NO: 2087067 - DNA, 15 bp, Homo sapiens
catggcaactacacg

SEQ ID NO: 2087068 - DNA, 15 bp, Homo sapiens
atggcaactacacgt

SEQ ID NO: 2087069 - DNA, 15 bp, Homo sapiens
tggcaactacacgtg

SEQ ID NO: 2087070 - DNA, 15 bp, Homo sapiens
ggcaactacacgtgg

SEQ ID NO: 2087071 - DNA, 15 bp, Homo sapiens
gcaactacacgtggc

SEQ ID NO: 2087072 - DNA, 15 bp, Homo sapiens
caactacacgtggcc

SEQ ID NO: 2087073 - DNA, 15 bp, Homo sapiens
aactacacgtggccc

SEQ ID NO: 2087074 - DNA, 15 bp, Homo sapiens
actacacgtggcccc

SEQ ID NO: 2087075 - DNA, 15 bp, Homo sapiens
ctacacgtggccccc

SEQ ID NO: 2087076 - DNA, 15 bp, Homo sapiens
tacacgtggccccct

SEQ ID NO: 2087077 - DNA, 15 bp, Homo sapiens
acacgtggccccctg

SEQ ID NO: 2087078 - DNA, 15 bp, Homo sapiens
cacgtggccccctga

SEQ ID NO: 2087079 - DNA, 15 bp, Homo sapiens
acgtggccccctgag

SEQ ID NO: 2087080 - DNA, 15 bp, Homo sapiens
cgtggccccctgagt

SEQ ID NO: 2087081 - DNA, 15 bp, Homo sapiens
gtggccccctgagtt

SEQ ID NO: 2087082 - DNA, 15 bp, Homo sapiens
tggccccctgagttc

SEQ ID NO: 2087083 - DNA, 15 bp, Homo sapiens
ggccccctgagttct

SEQ ID NO: 2087084 - DNA, 15 bp, Homo sapiens
gccccctgagttctt

SEQ ID NO: 2087085 - DNA, 15 bp, Homo sapiens
ccccctgagttcttg

SEQ ID NO: 2087086 - DNA, 15 bp, Homo sapiens
cccctgagttcttgg

SEQ ID NO: 2087087 - DNA, 15 bp, Homo sapiens
ccctgagttcttggg

SEQ ID NO: 2087088 - DNA, 15 bp, Homo sapiens
cctgagttcttgggc

SEQ ID NO: 2087089 - DNA, 15 bp, Homo sapiens
ctgagttcttgggcc

SEQ ID NO: 2087090 - DNA, 15 bp, Homo sapiens
tgagttcttgggccc

SEQ ID NO: 2087091 - DNA, 15 bp, Homo sapiens
gagttcttgggcccg

SEQ ID NO: 2087092 - DNA, 15 bp, Homo sapiens
agttcttgggcccgg

SEQ ID NO: 2087093 - DNA, 15 bp, Homo sapiens
gttcttgggcccggg

SEQ ID NO: 2087094 - DNA, 15 bp, Homo sapiens
ttcttgggcccgggc

SEQ ID NO: 2087095 - DNA, 15 bp, Homo sapiens
tcttgggcccgggcg

SEQ ID NO: 2087096 - DNA, 15 bp, Homo sapiens
cttgggcccgggcga

SEQ ID NO: 2087097 - DNA, 15 bp, Homo sapiens
ttgggcccgggcgag

SEQ ID NO: 2087098 - DNA, 15 bp, Homo sapiens
tgggcccgggcgagg

SEQ ID NO: 2087099 - DNA, 15 bp, Homo sapiens
gggcccgggcgagga

SEQ ID NO: 2087100 - DNA, 15 bp, Homo sapiens
ggcccgggcgaggac

SEQ ID NO: 2087101 - DNA, 15 bp, Homo sapiens
gcccgggcgaggacc

SEQ ID NO: 2087102 - DNA, 15 bp, Homo sapiens
cccgggcgaggaccc

SEQ ID NO: 2087103 - DNA, 15 bp, Homo sapiens
ccgggcgaggacccc

SEQ ID NO: 2087104 - DNA, 15 bp, Homo sapiens
cgggcgaggacccca

SEQ ID NO: 2087105 - DNA, 15 bp, Homo sapiens
gggcgaggaccccaa

SEQ ID NO: 2087106 - DNA, 15 bp, Homo sapiens
ggcgaggaccccaat

SEQ ID NO: 2087107 - DNA, 15 bp, Homo sapiens
gcgaggaccccaatg

SEQ ID NO: 2087108 - DNA, 15 bp, Homo sapiens
cgaggaccccaatgg

SEQ ID NO: 2087109 - DNA, 15 bp, Homo sapiens
gaggaccccaatggt

SEQ ID NO: 2087110 - DNA, 15 bp, Homo sapiens
aggaccccaatggta

SEQ ID NO: 2087111 - DNA, 15 bp, Homo sapiens
ggaccccaatggtac

SEQ ID NO: 2087112 - DNA, 15 bp, Homo sapiens
gaccccaatggtacg

SEQ ID NO: 2087113 - DNA, 15 bp, Homo sapiens
accccaatggtacgc

SEQ ID NO: 2087114 - DNA, 15 bp, Homo sapiens
ccccaatggtacgct

SEQ ID NO: 2087115 - DNA, 15 bp, Homo sapiens
cccaatggtacgctg

SEQ ID NO: 2087116 - DNA, 15 bp, Homo sapiens
ccaatggtacgctga

SEQ ID NO: 2087117 - DNA, 15 bp, Homo sapiens
caatggtacgctgat

SEQ ID NO: 2087118 - DNA, 15 bp, Homo sapiens
aatggtacgctgatc

SEQ ID NO: 2087119 - DNA, 15 bp, Homo sapiens
atggtacgctgatca

SEQ ID NO: 2087120 - DNA, 15 bp, Homo sapiens
tggtacgctgatcat

SEQ ID NO: 2087121 - DNA, 15 bp, Homo sapiens
ggtacgctgatcatc

SEQ ID NO: 2087122 - DNA, 15 bp, Homo sapiens
gtacgctgatcatcc

SEQ ID NO: 2087123 - DNA, 15 bp, Homo sapiens
tacgctgatcatcca

SEQ ID NO: 2087124 - DNA, 15 bp, Homo sapiens
acgctgatcatccag

SEQ ID NO: 2087125 - DNA, 15 bp, Homo sapiens
cgctgatcatccaga

SEQ ID NO: 2087126 - DNA, 15 bp, Homo sapiens
gctgatcatccagaa

SEQ ID NO: 2087127 - DNA, 15 bp, Homo sapiens
ctgatcatccagaat

SEQ ID NO: 2087128 - DNA, 15 bp, Homo sapiens
tgatcatccagaatg

SEQ ID NO: 2087129 - DNA, 15 bp, Homo sapiens
gatcatccagaatgt

SEQ ID NO: 2087130 - DNA, 15 bp, Homo sapiens
atcatccagaatgtg

SEQ ID NO: 2087131 - DNA, 15 bp, Homo sapiens
tcatccagaatgtga

SEQ ID NO: 2087132 - DNA, 15 bp, Homo sapiens
catccagaatgtgaa

SEQ ID NO: 2087133 - DNA, 15 bp, Homo sapiens
atccagaatgtgaac

SEQ ID NO: 2087134 - DNA, 15 bp, Homo sapiens
tccagaatgtgaaca

SEQ ID NO: 2087135 - DNA, 15 bp, Homo sapiens
ccagaatgtgaacaa

SEQ ID NO: 2087136 - DNA, 15 bp, Homo sapiens
cagaatgtgaacaag

SEQ ID NO: 2087137 - DNA, 15 bp, Homo sapiens
agaatgtgaacaaga

SEQ ID NO: 2087138 - DNA, 15 bp, Homo sapiens
gaatgtgaacaagag

SEQ ID NO: 2087139 - DNA, 15 bp, Homo sapiens
aatgtgaacaagagc

SEQ ID NO: 2087140 - DNA, 15 bp, Homo sapiens
atgtgaacaagagcc

SEQ ID NO: 2087141 - DNA, 15 bp, Homo sapiens
tgtgaacaagagcca

SEQ ID NO: 2087142 - DNA, 15 bp, Homo sapiens
gtgaacaagagccat

SEQ ID NO: 2087143 - DNA, 15 bp, Homo sapiens
tgaacaagagccatg

SEQ ID NO: 2087144 - DNA, 15 bp, Homo sapiens
gaacaagagccatgg

SEQ ID NO: 2087145 - DNA, 15 bp, Homo sapiens
aacaagagccatggg

SEQ ID NO: 2087146 - DNA, 15 bp, Homo sapiens
acaagagccatgggg

SEQ ID NO: 2087147 - DNA, 15 bp, Homo sapiens
caagagccatggggg

SEQ ID NO: 2087148 - DNA, 15 bp, Homo sapiens
aagagccatgggggc

SEQ ID NO: 2087149 - DNA, 15 bp, Homo sapiens
agagccatgggggca

SEQ ID NO: 2087150 - DNA, 15 bp, Homo sapiens
gagccatgggggcat

SEQ ID NO: 2087151 - DNA, 15 bp, Homo sapiens
agccatgggggcata

SEQ ID NO: 2087152 - DNA, 15 bp, Homo sapiens
gccatgggggcatat

SEQ ID NO: 2087153 - DNA, 15 bp, Homo sapiens
ccatgggggcatata

SEQ ID NO: 2087154 - DNA, 15 bp, Homo sapiens
catgggggcatatac

SEQ ID NO: 2087155 - DNA, 15 bp, Homo sapiens
atgggggcatatacg

SEQ ID NO: 2087156 - DNA, 15 bp, Homo sapiens
tgggggcatatacgt

SEQ ID NO: 2087157 - DNA, 15 bp, Homo sapiens
gggggcatatacgtg

SEQ ID NO: 2087158 - DNA, 15 bp, Homo sapiens
ggggcatatacgtgt

SEQ ID NO: 2087159 - DNA, 15 bp, Homo sapiens
gggcatatacgtgtg

SEQ ID NO: 2087160 - DNA, 15 bp, Homo sapiens
ggcatatacgtgtgc

SEQ ID NO: 2087161 - DNA, 15 bp, Homo sapiens
gcatatacgtgtgcc

SEQ ID NO: 2087162 - DNA, 15 bp, Homo sapiens
catatacgtgtgccg

SEQ ID NO: 2087163 - DNA, 15 bp, Homo sapiens
atatacgtgtgccgg

SEQ ID NO: 2087164 - DNA, 15 bp, Homo sapiens
tatacgtgtgccggg

SEQ ID NO: 2087165 - DNA, 15 bp, Homo sapiens
atacgtgtgccgggt

SEQ ID NO: 2087166 - DNA, 15 bp, Homo sapiens
tacgtgtgccgggtc

SEQ ID NO: 2087167 - DNA, 15 bp, Homo sapiens
acgtgtgccgggtcc

SEQ ID NO: 2087168 - DNA, 15 bp, Homo sapiens
cgtgtgccgggtcca

SEQ ID NO: 2087169 - DNA, 15 bp, Homo sapiens
gtgtgccgggtccag

SEQ ID NO: 2087170 - DNA, 15 bp, Homo sapiens
tgtgccgggtccagg

SEQ ID NO: 2087171 - DNA, 15 bp, Homo sapiens
gtgccgggtccagga

SEQ ID NO: 2087172 - DNA, 15 bp, Homo sapiens
tgccgggtccaggag

SEQ ID NO: 2087173 - DNA, 15 bp, Homo sapiens
gccgggtccaggagg

SEQ ID NO: 2087174 - DNA, 15 bp, Homo sapiens
ccgggtccaggaggg

SEQ ID NO: 2087175 - DNA, 15 bp, Homo sapiens
cgggtccaggagggc

SEQ ID NO: 2087176 - DNA, 15 bp, Homo sapiens
gggtccaggagggca

SEQ ID NO: 2087177 - DNA, 15 bp, Homo sapiens
ggtccaggagggcaa

SEQ ID NO: 2087178 - DNA, 15 bp, Homo sapiens
gtccaggagggcaac

SEQ ID NO: 2087179 - DNA, 15 bp, Homo sapiens
tccaggagggcaacg

SEQ ID NO: 2087180 - DNA, 15 bp, Homo sapiens
ccaggagggcaacga

SEQ ID NO: 2087181 - DNA, 15 bp, Homo sapiens
caggagggcaacgag

SEQ ID NO: 2087182 - DNA, 15 bp, Homo sapiens
aggagggcaacgagt

SEQ ID NO: 2087183 - DNA, 15 bp, Homo sapiens
ggagggcaacgagtc

SEQ ID NO: 2087184 - DNA, 15 bp, Homo sapiens
gagggcaacgagtca

SEQ ID NO: 2087185 - DNA, 15 bp, Homo sapiens
agggcaacgagtcat

SEQ ID NO: 2087186 - DNA, 15 bp, Homo sapiens
gggcaacgagtcata

SEQ ID NO: 2087187 - DNA, 15 bp, Homo sapiens
ggcaacgagtcatac

SEQ ID NO: 2087188 - DNA, 15 bp, Homo sapiens
gcaacgagtcatacc

SEQ ID NO: 2087189 - DNA, 15 bp, Homo sapiens
caacgagtcatacca

SEQ ID NO: 2087190 - DNA, 15 bp, Homo sapiens
aacgagtcataccag

SEQ ID NO: 2087191 - DNA, 15 bp, Homo sapiens
acgagtcataccagc

SEQ ID NO: 2087192 - DNA, 15 bp, Homo sapiens
cgagtcataccagca

SEQ ID NO: 2087193 - DNA, 15 bp, Homo sapiens
gagtcataccagcag

SEQ ID NO: 2087194 - DNA, 15 bp, Homo sapiens
agtcataccagcagt

SEQ ID NO: 2087195 - DNA, 15 bp, Homo sapiens
gtcataccagcagtc

SEQ ID NO: 2087196 - DNA, 15 bp, Homo sapiens
tcataccagcagtcc

SEQ ID NO: 2087197 - DNA, 15 bp, Homo sapiens
cataccagcagtcct

SEQ ID NO: 2087198 - DNA, 15 bp, Homo sapiens
ataccagcagtcctg

SEQ ID NO: 2087199 - DNA, 15 bp, Homo sapiens
taccagcagtcctgc

SEQ ID NO: 2087200 - DNA, 15 bp, Homo sapiens
accagcagtcctgcg

SEQ ID NO: 2087201 - DNA, 15 bp, Homo sapiens
ccagcagtcctgcgg

SEQ ID NO: 2087202 - DNA, 15 bp, Homo sapiens
cagcagtcctgcggc

SEQ ID NO: 2087203 - DNA, 15 bp, Homo sapiens
agcagtcctgcggca

SEQ ID NO: 2087204 - DNA, 15 bp, Homo sapiens
gcagtcctgcggcac

SEQ ID NO: 2087205 - DNA, 15 bp, Homo sapiens
cagtcctgcggcacc

SEQ ID NO: 2087206 - DNA, 15 bp, Homo sapiens
agtcctgcggcacct

SEQ ID NO: 2087207 - DNA, 15 bp, Homo sapiens
gtcctgcggcaccta

SEQ ID NO: 2087208 - DNA, 15 bp, Homo sapiens
tcctgcggcacctac

SEQ ID NO: 2087209 - DNA, 15 bp, Homo sapiens
cctgcggcacctacc

SEQ ID NO: 2087210 - DNA, 15 bp, Homo sapiens
ctgcggcacctacct

SEQ ID NO: 2087211 - DNA, 15 bp, Homo sapiens
tgcggcacctacctc

SEQ ID NO: 2087212 - DNA, 15 bp, Homo sapiens
gcggcacctacctcc

SEQ ID NO: 2087213 - DNA, 15 bp, Homo sapiens
cggcacctacctccg

SEQ ID NO: 2087214 - DNA, 15 bp, Homo sapiens
ggcacctacctccgc

SEQ ID NO: 2087215 - DNA, 15 bp, Homo sapiens
gcacctacctccgcg

SEQ ID NO: 2087216 - DNA, 15 bp, Homo sapiens
cacctacctccgcgt

SEQ ID NO: 2087217 - DNA, 15 bp, Homo sapiens
acctacctccgcgtg

SEQ ID NO: 2087218 - DNA, 15 bp, Homo sapiens
cctacctccgcgtgc

SEQ ID NO: 2087219 - DNA, 15 bp, Homo sapiens
ctacctccgcgtgcg

SEQ ID NO: 2087220 - DNA, 15 bp, Homo sapiens
tacctccgcgtgcgc

SEQ ID NO: 2087221 - DNA, 15 bp, Homo sapiens
acctccgcgtgcgcc

SEQ ID NO: 2087222 - DNA, 15 bp, Homo sapiens
cctccgcgtgcgccg

SEQ ID NO: 2087223 - DNA, 15 bp, Homo sapiens
ctccgcgtgcgccgt

SEQ ID NO: 2087224 - DNA, 15 bp, Homo sapiens
tccgcgtgcgccgtg

SEQ ID NO: 2087225 - DNA, 15 bp, Homo sapiens
ccgcgtgcgccgtga

SEQ ID NO: 2087226 - DNA, 15 bp, Homo sapiens
cgcgtgcgccgtgag

SEQ ID NO: 2087227 - DNA, 15 bp, Homo sapiens
gcgtgcgccgtgagt

SEQ ID NO: 2087228 - DNA, 15 bp, Homo sapiens
cgtgcgccgtgagtg

SEQ ID NO: 2087229 - DNA, 15 bp, Homo sapiens
gtgcgccgtgagtgg

SEQ ID NO: 2087230 - DNA, 15 bp, Homo sapiens
tgcgccgtgagtggc

SEQ ID NO: 2087231 - DNA, 15 bp, Homo sapiens
gcgccgtgagtggcc

SEQ ID NO: 2087232 - DNA, 15 bp, Homo sapiens
cgccgtgagtggccc

SEQ ID NO: 2087233 - DNA, 15 bp, Homo sapiens
gccgtgagtggccca

SEQ ID NO: 2087234 - DNA, 15 bp, Homo sapiens
ccgtgagtggcccag

SEQ ID NO: 2087235 - DNA, 15 bp, Homo sapiens
cgtgagtggcccagc

SEQ ID NO: 2087236 - DNA, 15 bp, Homo sapiens
gtgagtggcccagcc

SEQ ID NO: 2087237 - DNA, 15 bp, Homo sapiens
tgagtggcccagccc

SEQ ID NO: 2087238 - DNA, 15 bp, Homo sapiens
gagtggcccagccct

SEQ ID NO: 2087239 - DNA, 15 bp, Homo sapiens
agtggcccagccctg

SEQ ID NO: 2087240 - DNA, 15 bp, Homo sapiens
gtggcccagccctgg

SEQ ID NO: 2087241 - DNA, 15 bp, Homo sapiens
tggcccagccctggc

SEQ ID NO: 2087242 - DNA, 15 bp, Homo sapiens
ggcccagccctggcc

SEQ ID NO: 2087243 - DNA, 15 bp, Homo sapiens
gcccagccctggccc

SEQ ID NO: 2087244 - DNA, 15 bp, Homo sapiens
cagccctggccccta

SEQ ID NO: 2087245 - DNA, 15 bp, Homo sapiens
agccctggcccctac

SEQ ID NO: 2087246 - DNA, 15 bp, Homo sapiens
gccctggcccctact

SEQ ID NO: 2087247 - DNA, 15 bp, Homo sapiens
ccctggcccctactc

SEQ ID NO: 2087248 - DNA, 15 bp, Homo sapiens
cctggcccctactcc

SEQ ID NO: 2087249 - DNA, 15 bp, Homo sapiens
ctggcccctactccc

SEQ ID NO: 2087250 - DNA, 15 bp, Homo sapiens
tggcccctactccca

SEQ ID NO: 2087251 - DNA, 15 bp, Homo sapiens
ggcccctactcccac

SEQ ID NO: 2087252 - DNA, 15 bp, Homo sapiens
gcccctactcccact

SEQ ID NO: 2087253 - DNA, 15 bp, Homo sapiens
cccctactcccactg

SEQ ID NO: 2087254 - DNA, 15 bp, Homo sapiens
ccctactcccactgt

SEQ ID NO: 2087255 - DNA, 15 bp, Homo sapiens
cctactcccactgtc

SEQ ID NO: 2087256 - DNA, 15 bp, Homo sapiens
ctactcccactgtcc

SEQ ID NO: 2087257 - DNA, 15 bp, Homo sapiens
tactcccactgtccc

SEQ ID NO: 2087258 - DNA, 15 bp, Homo sapiens
actcccactgtcccg

SEQ ID NO: 2087259 - DNA, 15 bp, Homo sapiens
ctcccactgtcccgc

SEQ ID NO: 2087260 - DNA, 15 bp, Homo sapiens
tcccactgtcccgct

SEQ ID NO: 2087261 - DNA, 15 bp, Homo sapiens
cccactgtcccgctg

SEQ ID NO: 2087262 - DNA, 15 bp, Homo sapiens
ccactgtcccgctgg

SEQ ID NO: 2087263 - DNA, 15 bp, Homo sapiens
cactgtcccgctggg

SEQ ID NO: 2087264 - DNA, 15 bp, Homo sapiens
actgtcccgctgggg

SEQ ID NO: 2087265 - DNA, 15 bp, Homo sapiens
ctgtcccgctgggga

SEQ ID NO: 2087266 - DNA, 15 bp, Homo sapiens
tgtcccgctggggac

SEQ ID NO: 2087267 - DNA, 15 bp, Homo sapiens
gtcccgctggggaca

SEQ ID NO: 2087268 - DNA, 15 bp, Homo sapiens
tcccgctggggacac

SEQ ID NO: 2087269 - DNA, 15 bp, Homo sapiens
cccgctggggacact

SEQ ID NO: 2087270 - DNA, 15 bp, Homo sapiens
ccgctggggacactc

SEQ ID NO: 2087271 - DNA, 15 bp, Homo sapiens
cgctggggacactcg

SEQ ID NO: 2087272 - DNA, 15 bp, Homo sapiens
gctggggacactcgg

SEQ ID NO: 2087273 - DNA, 15 bp, Homo sapiens
ctggggacactcggt

SEQ ID NO: 2087274 - DNA, 15 bp, Homo sapiens
tggggacactcggtt

SEQ ID NO: 2087275 - DNA, 15 bp, Homo sapiens
ggggacactcggttt

SEQ ID NO: 2087276 - DNA, 15 bp, Homo sapiens
gggacactcggttta

SEQ ID NO: 2087277 - DNA, 15 bp, Homo sapiens
ggacactcggtttat

SEQ ID NO: 2087278 - DNA, 15 bp, Homo sapiens
gacactcggtttatc

SEQ ID NO: 2087279 - DNA, 15 bp, Homo sapiens
acactcggtttatct

SEQ ID NO: 2087280 - DNA, 15 bp, Homo sapiens
cactcggtttatctt

SEQ ID NO: 2087281 - DNA, 15 bp, Homo sapiens
actcggtttatcttt

SEQ ID NO: 2087282 - DNA, 15 bp, Homo sapiens
ctcggtttatctttg

SEQ ID NO: 2087283 - DNA, 15 bp, Homo sapiens
tcggtttatctttga

SEQ ID NO: 2087284 - DNA, 15 bp, Homo sapiens
cggtttatctttgaa

SEQ ID NO: 2087285 - DNA, 15 bp, Homo sapiens
ggtttatctttgaag

SEQ ID NO: 2087286 - DNA, 15 bp, Homo sapiens
gtttatctttgaagt

SEQ ID NO: 2087287 - DNA, 15 bp, Homo sapiens
tttatctttgaagtg

SEQ ID NO: 2087288 - DNA, 15 bp, Homo sapiens
ttatctttgaagtgg

SEQ ID NO: 2087289 - DNA, 15 bp, Homo sapiens
tatctttgaagtggg

SEQ ID NO: 2087290 - DNA, 15 bp, Homo sapiens
atctttgaagtgggg

SEQ ID NO: 2087291 - DNA, 15 bp, Homo sapiens
tctttgaagtgggga

SEQ ID NO: 2087292 - DNA, 15 bp, Homo sapiens
ctttgaagtggggat

SEQ ID NO: 2087293 - DNA, 15 bp, Homo sapiens
tttgaagtggggata

SEQ ID NO: 2087294 - DNA, 15 bp, Homo sapiens
ttgaagtggggatag

SEQ ID NO: 2087295 - DNA, 15 bp, Homo sapiens
tgaagtggggataga

SEQ ID NO: 2087296 - DNA, 15 bp, Homo sapiens
gaagtggggatagag

SEQ ID NO: 2087297 - DNA, 15 bp, Homo sapiens
aagtggggatagagc

SEQ ID NO: 2087298 - DNA, 15 bp, Homo sapiens
agtggggatagagcc

SEQ ID NO: 2087299 - DNA, 15 bp, Homo sapiens
gtggggatagagcca

SEQ ID NO: 2087300 - DNA, 15 bp, Homo sapiens
tggggatagagccag

SEQ ID NO: 2087301 - DNA, 15 bp, Homo sapiens
ggggatagagccagt

SEQ ID NO: 2087302 - DNA, 15 bp, Homo sapiens
gggatagagccagta

SEQ ID NO: 2087303 - DNA, 15 bp, Homo sapiens
ggatagagccagtac

SEQ ID NO: 2087304 - DNA, 15 bp, Homo sapiens
gatagagccagtacc

SEQ ID NO: 2087305 - DNA, 15 bp, Homo sapiens
atagagccagtacct

SEQ ID NO: 2087306 - DNA, 15 bp, Homo sapiens
tagagccagtacctt

SEQ ID NO: 2087307 - DNA, 15 bp, Homo sapiens
agagccagtaccttc

SEQ ID NO: 2087308 - DNA, 15 bp, Homo sapiens
gagccagtaccttca

SEQ ID NO: 2087309 - DNA, 15 bp, Homo sapiens
agccagtaccttcaa

SEQ ID NO: 2087310 - DNA, 15 bp, Homo sapiens
gccagtaccttcaat

SEQ ID NO: 2087311 - DNA, 15 bp, Homo sapiens
ccagtaccttcaatg

SEQ ID NO: 2087312 - DNA, 15 bp, Homo sapiens
cagtaccttcaatgt

SEQ ID NO: 2087313 - DNA, 15 bp, Homo sapiens
agtaccttcaatgtg

SEQ ID NO: 2087314 - DNA, 15 bp, Homo sapiens
gtaccttcaatgtgg

SEQ ID NO: 2087315 - DNA, 15 bp, Homo sapiens
taccttcaatgtggg

SEQ ID NO: 2087316 - DNA, 15 bp, Homo sapiens
accttcaatgtgggt

SEQ ID NO: 2087317 - DNA, 15 bp, Homo sapiens
ccttcaatgtgggtt

SEQ ID NO: 2087318 - DNA, 15 bp, Homo sapiens
cttcaatgtgggttt

SEQ ID NO: 2087319 - DNA, 15 bp, Homo sapiens
ttcaatgtgggtttc

SEQ ID NO: 2087320 - DNA, 15 bp, Homo sapiens
tcaatgtgggtttca

SEQ ID NO: 2087321 - DNA, 15 bp, Homo sapiens
caatgtgggtttcaa

SEQ ID NO: 2087322 - DNA, 15 bp, Homo sapiens
aatgtgggtttcaaa

SEQ ID NO: 2087323 - DNA, 15 bp, Homo sapiens
atgtgggtttcaaac

SEQ ID NO: 2087324 - DNA, 15 bp, Homo sapiens
tgtgggtttcaaacc

SEQ ID NO: 2087325 - DNA, 15 bp, Homo sapiens
gtgggtttcaaaccg

SEQ ID NO: 2087326 - DNA, 15 bp, Homo sapiens
tgggtttcaaaccgg

SEQ ID NO: 2087327 - DNA, 15 bp, Homo sapiens
gggtttcaaaccggc

SEQ ID NO: 2087328 - DNA, 15 bp, Homo sapiens
ggtttcaaaccggct

SEQ ID NO: 2087329 - DNA, 15 bp, Homo sapiens
gtttcaaaccggctt

SEQ ID NO: 2087330 - DNA, 15 bp, Homo sapiens
tttcaaaccggcttg

SEQ ID NO: 2087331 - DNA, 15 bp, Homo sapiens
ttcaaaccggcttgg

SEQ ID NO: 2087332 - DNA, 15 bp, Homo sapiens
tcaaaccggcttgga

SEQ ID NO: 2087333 - DNA, 15 bp, Homo sapiens
caaaccggcttggac

SEQ ID NO: 2087334 - DNA, 15 bp, Homo sapiens
aaaccggcttggaca

SEQ ID NO: 2087335 - DNA, 15 bp, Homo sapiens
aaccggcttggacag

SEQ ID NO: 2087336 - DNA, 15 bp, Homo sapiens
accggcttggacaga

SEQ ID NO: 2087337 - DNA, 15 bp, Homo sapiens
ccggcttggacagag

SEQ ID NO: 2087338 - DNA, 15 bp, Homo sapiens
cggcttggacagagg

SEQ ID NO: 2087339 - DNA, 15 bp, Homo sapiens
ggcttggacagaggg

SEQ ID NO: 2087340 - DNA, 15 bp, Homo sapiens
gcttggacagaggga

SEQ ID NO: 2087341 - DNA, 15 bp, Homo sapiens
cttggacagagggac

SEQ ID NO: 2087342 - DNA, 15 bp, Homo sapiens
ttggacagagggacg

SEQ ID NO: 2087343 - DNA, 15 bp, Homo sapiens
tggacagagggacgg

SEQ ID NO: 2087344 - DNA, 15 bp, Homo sapiens
ggacagagggacgga

SEQ ID NO: 2087345 - DNA, 15 bp, Homo sapiens
gacagagggacggac

SEQ ID NO: 2087346 - DNA, 15 bp, Homo sapiens
acagagggacggaca

SEQ ID NO: 2087347 - DNA, 15 bp, Homo sapiens
cagagggacggacat

SEQ ID NO: 2087348 - DNA, 15 bp, Homo sapiens
agagggacggacatt

SEQ ID NO: 2087349 - DNA, 15 bp, Homo sapiens
gagggacggacattc

SEQ ID NO: 2087350 - DNA, 15 bp, Homo sapiens
agggacggacattct

SEQ ID NO: 2087351 - DNA, 15 bp, Homo sapiens
gggacggacattctc

SEQ ID NO: 2087352 - DNA, 15 bp, Homo sapiens
ggacggacattctcc

SEQ ID NO: 2087353 - DNA, 15 bp, Homo sapiens
gacggacattctcct

SEQ ID NO: 2087354 - DNA, 15 bp, Homo sapiens
acggacattctcctc

SEQ ID NO: 2087355 - DNA, 15 bp, Homo sapiens
cggacattctcctct

SEQ ID NO: 2087356 - DNA, 15 bp, Homo sapiens
ggacattctcctctg

SEQ ID NO: 2087357 - DNA, 15 bp, Homo sapiens
gacattctcctctgc

SEQ ID NO: 2087358 - DNA, 15 bp, Homo sapiens
acattctcctctgca

SEQ ID NO: 2087359 - DNA, 15 bp, Homo sapiens
cattctcctctgcag

SEQ ID NO: 2087360 - DNA, 15 bp, Homo sapiens
attctcctctgcaga

SEQ ID NO: 2087361 - DNA, 15 bp, Homo sapiens
ttctcctctgcagag

SEQ ID NO: 2087362 - DNA, 15 bp, Homo sapiens
tctcctctgcagagt

SEQ ID NO: 2087363 - DNA, 15 bp, Homo sapiens
ctcctctgcagagtg

SEQ ID NO: 2087364 - DNA, 15 bp, Homo sapiens
tcctctgcagagtgg

SEQ ID NO: 2087365 - DNA, 15 bp, Homo sapiens
cctctgcagagtggg

SEQ ID NO: 2087366 - DNA, 15 bp, Homo sapiens
ctctgcagagtgggg

SEQ ID NO: 2087367 - DNA, 15 bp, Homo sapiens
tctgcagagtggggt

SEQ ID NO: 2087368 - DNA, 15 bp, Homo sapiens
ctgcagagtggggtc

SEQ ID NO: 2087369 - DNA, 15 bp, Homo sapiens
tgcagagtggggtct

SEQ ID NO: 2087370 - DNA, 15 bp, Homo sapiens
gcagagtggggtctc

SEQ ID NO: 2087371 - DNA, 15 bp, Homo sapiens
cagagtggggtctct

SEQ ID NO: 2087372 - DNA, 15 bp, Homo sapiens
agagtggggtctctg

SEQ ID NO: 2087373 - DNA, 15 bp, Homo sapiens
gagtggggtctctgg

SEQ ID NO: 2087374 - DNA, 15 bp, Homo sapiens
agtggggtctctggg

SEQ ID NO: 2087375 - DNA, 15 bp, Homo sapiens
gtggggtctctgggg

SEQ ID NO: 2087376 - DNA, 15 bp, Homo sapiens
tggggtctctggggg

SEQ ID NO: 2087377 - DNA, 15 bp, Homo sapiens
ggggtctctgggggg

SEQ ID NO: 2087378 - DNA, 15 bp, Homo sapiens
gggtctctggggggt

SEQ ID NO: 2087379 - DNA, 15 bp, Homo sapiens
ggtctctggggggtc

SEQ ID NO: 2087380 - DNA, 15 bp, Homo sapiens
gtctctggggggtct

SEQ ID NO: 2087381 - DNA, 15 bp, Homo sapiens
tctctggggggtctg

SEQ ID NO: 2087382 - DNA, 15 bp, Homo sapiens
ctctggggggtctgg

SEQ ID NO: 2087383 - DNA, 15 bp, Homo sapiens
tctggggggtctggg

SEQ ID NO: 2087384 - DNA, 15 bp, Homo sapiens
ctggggggtctgggg

SEQ ID NO: 2087385 - DNA, 15 bp, Homo sapiens
tggggggtctggggc

SEQ ID NO: 2087386 - DNA, 15 bp, Homo sapiens
ggggggtctggggcc

SEQ ID NO: 2087387 - DNA, 15 bp, Homo sapiens
gggggtctggggcct

SEQ ID NO: 2087388 - DNA, 15 bp, Homo sapiens
ggggtctggggcctt

SEQ ID NO: 2087389 - DNA, 15 bp, Homo sapiens
gggtctggggccttg

SEQ ID NO: 2087390 - DNA, 15 bp, Homo sapiens
ggtctggggccttgc

SEQ ID NO: 2087391 - DNA, 15 bp, Homo sapiens
gtctggggccttgca

SEQ ID NO: 2087392 - DNA, 15 bp, Homo sapiens
tctggggccttgcag

SEQ ID NO: 2087393 - DNA, 15 bp, Homo sapiens
ctggggccttgcagg

SEQ ID NO: 2087394 - DNA, 15 bp, Homo sapiens
tggggccttgcagga

SEQ ID NO: 2087395 - DNA, 15 bp, Homo sapiens
ggggccttgcaggag

SEQ ID NO: 2087396 - DNA, 15 bp, Homo sapiens
gggccttgcaggagg

SEQ ID NO: 2087397 - DNA, 15 bp, Homo sapiens
ggccttgcaggaggt

SEQ ID NO: 2087398 - DNA, 15 bp, Homo sapiens
gccttgcaggaggtg

SEQ ID NO: 2087399 - DNA, 15 bp, Homo sapiens
ccttgcaggaggtgg

SEQ ID NO: 2087400 - DNA, 15 bp, Homo sapiens
cttgcaggaggtggg

SEQ ID NO: 2087401 - DNA, 15 bp, Homo sapiens
ttgcaggaggtgggc

SEQ ID NO: 2087402 - DNA, 15 bp, Homo sapiens
tgcaggaggtgggcg

SEQ ID NO: 2087403 - DNA, 15 bp, Homo sapiens
gcaggaggtgggcgg

SEQ ID NO: 2087404 - DNA, 15 bp, Homo sapiens
caggaggtgggcggg

SEQ ID NO: 2087405 - DNA, 15 bp, Homo sapiens
aggaggtgggcgggg

SEQ ID NO: 2087406 - DNA, 15 bp, Homo sapiens
ggaggtgggcggggc

SEQ ID NO: 2087407 - DNA, 15 bp, Homo sapiens
gaggtgggcggggcc

SEQ ID NO: 2087408 - DNA, 15 bp, Homo sapiens
aggtgggcggggcca

SEQ ID NO: 2087409 - DNA, 15 bp, Homo sapiens
ggtgggcggggccag

SEQ ID NO: 2087410 - DNA, 15 bp, Homo sapiens
gtgggcggggccagg

SEQ ID NO: 2087411 - DNA, 15 bp, Homo sapiens
tgggcggggccagga

SEQ ID NO: 2087412 - DNA, 15 bp, Homo sapiens
gggcggggccaggag

SEQ ID NO: 2087413 - DNA, 15 bp, Homo sapiens
ggcggggccaggagg

SEQ ID NO: 2087414 - DNA, 15 bp, Homo sapiens
gcggggccaggaggc

SEQ ID NO: 2087415 - DNA, 15 bp, Homo sapiens
cggggccaggaggct

SEQ ID NO: 2087416 - DNA, 15 bp, Homo sapiens
ggggccaggaggcta

SEQ ID NO: 2087417 - DNA, 15 bp, Homo sapiens
gggccaggaggctag

SEQ ID NO: 2087418 - DNA, 15 bp, Homo sapiens
ggccaggaggctagg

SEQ ID NO: 2087419 - DNA, 15 bp, Homo sapiens
gccaggaggctaggg

SEQ ID NO: 2087420 - DNA, 15 bp, Homo sapiens
ccaggaggctaggga

SEQ ID NO: 2087421 - DNA, 15 bp, Homo sapiens
caggaggctagggag

SEQ ID NO: 2087422 - DNA, 15 bp, Homo sapiens
aggaggctagggagg

SEQ ID NO: 2087423 - DNA, 15 bp, Homo sapiens
ggaggctagggaggg

SEQ ID NO: 2087424 - DNA, 15 bp, Homo sapiens
gaggctagggagggc

SEQ ID NO: 2087425 - DNA, 15 bp, Homo sapiens
aggctagggagggca

SEQ ID NO: 2087426 - DNA, 15 bp, Homo sapiens
ggctagggagggcaa

SEQ ID NO: 2087427 - DNA, 15 bp, Homo sapiens
gctagggagggcaag

SEQ ID NO: 2087428 - DNA, 15 bp, Homo sapiens
ctagggagggcaaga

SEQ ID NO: 2087429 - DNA, 15 bp, Homo sapiens
tagggagggcaagag

SEQ ID NO: 2087430 - DNA, 15 bp, Homo sapiens
agggagggcaagagg

SEQ ID NO: 2087431 - DNA, 15 bp, Homo sapiens
gggagggcaagaggg

SEQ ID NO: 2087432 - DNA, 15 bp, Homo sapiens
ggagggcaagagggg

SEQ ID NO: 2087433 - DNA, 15 bp, Homo sapiens
gagggcaagaggggc

SEQ ID NO: 2087434 - DNA, 15 bp, Homo sapiens
agggcaagaggggcc

SEQ ID NO: 2087435 - DNA, 15 bp, Homo sapiens
gggcaagaggggcca

SEQ ID NO: 2087436 - DNA, 15 bp, Homo sapiens
ggcaagaggggccag

SEQ ID NO: 2087437 - DNA, 15 bp, Homo sapiens
gcaagaggggccagg

SEQ ID NO: 2087438 - DNA, 15 bp, Homo sapiens
caagaggggccaggg

SEQ ID NO: 2087439 - DNA, 15 bp, Homo sapiens
aagaggggccagggc

SEQ ID NO: 2087440 - DNA, 15 bp, Homo sapiens
agaggggccagggct

SEQ ID NO: 2087441 - DNA, 15 bp, Homo sapiens
gaggggccagggctc

SEQ ID NO: 2087442 - DNA, 15 bp, Homo sapiens
aggggccagggctct

SEQ ID NO: 2087443 - DNA, 15 bp, Homo sapiens
ggggccagggctctg

SEQ ID NO: 2087444 - DNA, 15 bp, Homo sapiens
gggccagggctctga

SEQ ID NO: 2087445 - DNA, 15 bp, Homo sapiens
ggccagggctctgag

SEQ ID NO: 2087446 - DNA, 15 bp, Homo sapiens
gccagggctctgagc

SEQ ID NO: 2087447 - DNA, 15 bp, Homo sapiens
ccagggctctgagcc

SEQ ID NO: 2087448 - DNA, 15 bp, Homo sapiens
cagggctctgagcca

SEQ ID NO: 2087449 - DNA, 15 bp, Homo sapiens
agggctctgagccat

SEQ ID NO: 2087450 - DNA, 15 bp, Homo sapiens
gggctctgagccata

SEQ ID NO: 2087451 - DNA, 15 bp, Homo sapiens
ggctctgagccatac

SEQ ID NO: 2087452 - DNA, 15 bp, Homo sapiens
gctctgagccatact

SEQ ID NO: 2087453 - DNA, 15 bp, Homo sapiens
ctctgagccatacta

SEQ ID NO: 2087454 - DNA, 15 bp, Homo sapiens
tctgagccatactac

SEQ ID NO: 2087455 - DNA, 15 bp, Homo sapiens
ctgagccatactacc

SEQ ID NO: 2087456 - DNA, 15 bp, Homo sapiens
tgagccatactacct

SEQ ID NO: 2087457 - DNA, 15 bp, Homo sapiens
gagccatactacctc

SEQ ID NO: 2087458 - DNA, 15 bp, Homo sapiens
agccatactacctcc

SEQ ID NO: 2087459 - DNA, 15 bp, Homo sapiens
gccatactacctcct

SEQ ID NO: 2087460 - DNA, 15 bp, Homo sapiens
ccatactacctcctt

SEQ ID NO: 2087461 - DNA, 15 bp, Homo sapiens
catactacctccttg

SEQ ID NO: 2087462 - DNA, 15 bp, Homo sapiens
atactacctccttgc

SEQ ID NO: 2087463 - DNA, 15 bp, Homo sapiens
tactacctccttgca

SEQ ID NO: 2087464 - DNA, 15 bp, Homo sapiens
actacctccttgcag

SEQ ID NO: 2087465 - DNA, 15 bp, Homo sapiens
ctacctccttgcaga

SEQ ID NO: 2087466 - DNA, 15 bp, Homo sapiens
tacctccttgcagag

SEQ ID NO: 2087467 - DNA, 15 bp, Homo sapiens
acctccttgcagagc

SEQ ID NO: 2087468 - DNA, 15 bp, Homo sapiens
cctccttgcagagcc

SEQ ID NO: 2087469 - DNA, 15 bp, Homo sapiens
ctccttgcagagccg

SEQ ID NO: 2087470 - DNA, 15 bp, Homo sapiens
tccttgcagagccgc

SEQ ID NO: 2087471 - DNA, 15 bp, Homo sapiens
ccttgcagagccgcc

SEQ ID NO: 2087472 - DNA, 15 bp, Homo sapiens
cttgcagagccgccc

SEQ ID NO: 2087473 - DNA, 15 bp, Homo sapiens
ttgcagagccgcccc

SEQ ID NO: 2087474 - DNA, 15 bp, Homo sapiens
tgcagagccgccccc

SEQ ID NO: 2087475 - DNA, 15 bp, Homo sapiens
gcagagccgcccccc

SEQ ID NO: 2087476 - DNA, 15 bp, Homo sapiens
cagagccgcccccca

SEQ ID NO: 2087477 - DNA, 15 bp, Homo sapiens
agagccgccccccag

SEQ ID NO: 2087478 - DNA, 15 bp, Homo sapiens
gagccgccccccagg

SEQ ID NO: 2087479 - DNA, 15 bp, Homo sapiens
agccgccccccaggc

SEQ ID NO: 2087480 - DNA, 15 bp, Homo sapiens
gccgccccccaggcc

SEQ ID NO: 2087481 - DNA, 15 bp, Homo sapiens
ccgccccccaggccc

SEQ ID NO: 2087482 - DNA, 15 bp, Homo sapiens
cgccccccaggccct

SEQ ID NO: 2087483 - DNA, 15 bp, Homo sapiens
gccccccaggccctt

SEQ ID NO: 2087484 - DNA, 15 bp, Homo sapiens
ccccccaggcccttc

SEQ ID NO: 2087485 - DNA, 15 bp, Homo sapiens
cccccaggcccttcc

SEQ ID NO: 2087486 - DNA, 15 bp, Homo sapiens
ccccaggcccttcct

SEQ ID NO: 2087487 - DNA, 15 bp, Homo sapiens
cccaggcccttcctg

SEQ ID NO: 2087488 - DNA, 15 bp, Homo sapiens
ccaggcccttcctgg

SEQ ID NO: 2087489 - DNA, 15 bp, Homo sapiens
caggcccttcctgga

SEQ ID NO: 2087490 - DNA, 15 bp, Homo sapiens
aggcccttcctggac

SEQ ID NO: 2087491 - DNA, 15 bp, Homo sapiens
ggcccttcctggaca

SEQ ID NO: 2087492 - DNA, 15 bp, Homo sapiens
gcccttcctggacat

SEQ ID NO: 2087493 - DNA, 15 bp, Homo sapiens
cccttcctggacatg

SEQ ID NO: 2087494 - DNA, 15 bp, Homo sapiens
ccttcctggacatgg

SEQ ID NO: 2087495 - DNA, 15 bp, Homo sapiens
cttcctggacatggg

SEQ ID NO: 2087496 - DNA, 15 bp, Homo sapiens
ttcctggacatgggg

SEQ ID NO: 2087497 - DNA, 15 bp, Homo sapiens
tcctggacatggggg

SEQ ID NO: 2087498 - DNA, 15 bp, Homo sapiens
cctggacatggggga

SEQ ID NO: 2087499 - DNA, 15 bp, Homo sapiens
ctggacatgggggag

SEQ ID NO: 2087500 - DNA, 15 bp, Homo sapiens
tggacatgggggagg

SEQ ID NO: 2087501 - DNA, 15 bp, Homo sapiens
ggacatgggggaggg

SEQ ID NO: 2087502 - DNA, 15 bp, Homo sapiens
gacatgggggagggc

SEQ ID NO: 2087503 - DNA, 15 bp, Homo sapiens
acatgggggagggca

SEQ ID NO: 2087504 - DNA, 15 bp, Homo sapiens
catgggggagggcac

SEQ ID NO: 2087505 - DNA, 15 bp, Homo sapiens
atgggggagggcacc

SEQ ID NO: 2087506 - DNA, 15 bp, Homo sapiens
tgggggagggcacca

SEQ ID NO: 2087507 - DNA, 15 bp, Homo sapiens
gggggagggcaccaa

SEQ ID NO: 2087508 - DNA, 15 bp, Homo sapiens
ggggagggcaccaag

SEQ ID NO: 2087509 - DNA, 15 bp, Homo sapiens
gggagggcaccaaga

SEQ ID NO: 2087510 - DNA, 15 bp, Homo sapiens
ggagggcaccaagaa

SEQ ID NO: 2087511 - DNA, 15 bp, Homo sapiens
gagggcaccaagaac

SEQ ID NO: 2087512 - DNA, 15 bp, Homo sapiens
agggcaccaagaacc

SEQ ID NO: 2087513 - DNA, 15 bp, Homo sapiens
gggcaccaagaaccg

SEQ ID NO: 2087514 - DNA, 15 bp, Homo sapiens
ggcaccaagaaccga

SEQ ID NO: 2087515 - DNA, 15 bp, Homo sapiens
gcaccaagaaccgaa

SEQ ID NO: 2087516 - DNA, 15 bp, Homo sapiens
caccaagaaccgaat

SEQ ID NO: 2087517 - DNA, 15 bp, Homo sapiens
accaagaaccgaatc

SEQ ID NO: 2087518 - DNA, 15 bp, Homo sapiens
ccaagaaccgaatca

SEQ ID NO: 2087519 - DNA, 15 bp, Homo sapiens
caagaaccgaatcat

SEQ ID NO: 2087520 - DNA, 15 bp, Homo sapiens
aagaaccgaatcatc

SEQ ID NO: 2087521 - DNA, 15 bp, Homo sapiens
agaaccgaatcatca

SEQ ID NO: 2087522 - DNA, 15 bp, Homo sapiens
gaaccgaatcatcac

SEQ ID NO: 2087523 - DNA, 15 bp, Homo sapiens
aaccgaatcatcaca

SEQ ID NO: 2087524 - DNA, 15 bp, Homo sapiens
accgaatcatcacag

SEQ ID NO: 2087525 - DNA, 15 bp, Homo sapiens
ccgaatcatcacagc

SEQ ID NO: 2087526 - DNA, 15 bp, Homo sapiens
cgaatcatcacagcc

SEQ ID NO: 2087527 - DNA, 15 bp, Homo sapiens
gaatcatcacagccg

SEQ ID NO: 2087528 - DNA, 15 bp, Homo sapiens
aatcatcacagccga

SEQ ID NO: 2087529 - DNA, 15 bp, Homo sapiens
atcatcacagccgag

SEQ ID NO: 2087530 - DNA, 15 bp, Homo sapiens
tcatcacagccgagg

SEQ ID NO: 2087531 - DNA, 15 bp, Homo sapiens
catcacagccgaggg

SEQ ID NO: 2087532 - DNA, 15 bp, Homo sapiens
atcacagccgagggg

SEQ ID NO: 2087533 - DNA, 15 bp, Homo sapiens
tcacagccgagggga

SEQ ID NO: 2087534 - DNA, 15 bp, Homo sapiens
cacagccgaggggat

SEQ ID NO: 2087535 - DNA, 15 bp, Homo sapiens
acagccgaggggatc

SEQ ID NO: 2087536 - DNA, 15 bp, Homo sapiens
cagccgaggggatca

SEQ ID NO: 2087537 - DNA, 15 bp, Homo sapiens
agccgaggggatcat

SEQ ID NO: 2087538 - DNA, 15 bp, Homo sapiens
gccgaggggatcatc

SEQ ID NO: 2087539 - DNA, 15 bp, Homo sapiens
ccgaggggatcatcc

SEQ ID NO: 2087540 - DNA, 15 bp, Homo sapiens
cgaggggatcatcct

SEQ ID NO: 2087541 - DNA, 15 bp, Homo sapiens
gaggggatcatcctc

SEQ ID NO: 2087542 - DNA, 15 bp, Homo sapiens
aggggatcatcctcc

SEQ ID NO: 2087543 - DNA, 15 bp, Homo sapiens
ggggatcatcctcct

SEQ ID NO: 2087544 - DNA, 15 bp, Homo sapiens
gggatcatcctcctg

SEQ ID NO: 2087545 - DNA, 15 bp, Homo sapiens
ggatcatcctcctgt

SEQ ID NO: 2087546 - DNA, 15 bp, Homo sapiens
gatcatcctcctgtt

SEQ ID NO: 2087547 - DNA, 15 bp, Homo sapiens
atcatcctcctgttc

SEQ ID NO: 2087548 - DNA, 15 bp, Homo sapiens
tcatcctcctgttct

SEQ ID NO: 2087549 - DNA, 15 bp, Homo sapiens
catcctcctgttctg

SEQ ID NO: 2087550 - DNA, 15 bp, Homo sapiens
atcctcctgttctgc

SEQ ID NO: 2087551 - DNA, 15 bp, Homo sapiens
tcctcctgttctgcg

SEQ ID NO: 2087552 - DNA, 15 bp, Homo sapiens
cctcctgttctgcgc

SEQ ID NO: 2087553 - DNA, 15 bp, Homo sapiens
ctcctgttctgcgcg

SEQ ID NO: 2087554 - DNA, 15 bp, Homo sapiens
tcctgttctgcgcgg

SEQ ID NO: 2087555 - DNA, 15 bp, Homo sapiens
cctgttctgcgcggt

SEQ ID NO: 2087556 - DNA, 15 bp, Homo sapiens
ctgttctgcgcggtg

SEQ ID NO: 2087557 - DNA, 15 bp, Homo sapiens
tgttctgcgcggtgg

SEQ ID NO: 2087558 - DNA, 15 bp, Homo sapiens
gttctgcgcggtggt

SEQ ID NO: 2087559 - DNA, 15 bp, Homo sapiens
ttctgcgcggtggtg

SEQ ID NO: 2087560 - DNA, 15 bp, Homo sapiens
tctgcgcggtggtgc

SEQ ID NO: 2087561 - DNA, 15 bp, Homo sapiens
ctgcgcggtggtgcc

SEQ ID NO: 2087562 - DNA, 15 bp, Homo sapiens
tgcgcggtggtgcct

SEQ ID NO: 2087563 - DNA, 15 bp, Homo sapiens
gcgcggtggtgcctg

SEQ ID NO: 2087564 - DNA, 15 bp, Homo sapiens
cgcggtggtgcctgg

SEQ ID NO: 2087565 - DNA, 15 bp, Homo sapiens
gcggtggtgcctggg

SEQ ID NO: 2087566 - DNA, 15 bp, Homo sapiens
cggtggtgcctggga

SEQ ID NO: 2087567 - DNA, 15 bp, Homo sapiens
ggtggtgcctgggac

SEQ ID NO: 2087568 - DNA, 15 bp, Homo sapiens
gtggtgcctgggacg

SEQ ID NO: 2087569 - DNA, 15 bp, Homo sapiens
tggtgcctgggacgc

SEQ ID NO: 2087570 - DNA, 15 bp, Homo sapiens
ggtgcctgggacgct

SEQ ID NO: 2087571 - DNA, 15 bp, Homo sapiens
gtgcctgggacgctg

SEQ ID NO: 2087572 - DNA, 15 bp, Homo sapiens
tgcctgggacgctgc

SEQ ID NO: 2087573 - DNA, 15 bp, Homo sapiens
gcctgggacgctgct

SEQ ID NO: 2087574 - DNA, 15 bp, Homo sapiens
cctgggacgctgctg

SEQ ID NO: 2087575 - DNA, 15 bp, Homo sapiens
ctgggacgctgctgc

SEQ ID NO: 2087576 - DNA, 15 bp, Homo sapiens
tgggacgctgctgct

SEQ ID NO: 2087577 - DNA, 15 bp, Homo sapiens
gggacgctgctgctg

SEQ ID NO: 2087578 - DNA, 15 bp, Homo sapiens
ggacgctgctgctgt

SEQ ID NO: 2087579 - DNA, 15 bp, Homo sapiens
gacgctgctgctgtt

SEQ ID NO: 2087580 - DNA, 15 bp, Homo sapiens
cccgggatcgccgag

SEQ ID NO: 2087581 - DNA, 15 bp, Homo sapiens
ccgggatcgccgagc

SEQ ID NO: 2087582 - DNA, 15 bp, Homo sapiens
cgggatcgccgagcc

SEQ ID NO: 2087583 - DNA, 15 bp, Homo sapiens
gggatcgccgagccc

SEQ ID NO: 2087584 - DNA, 15 bp, Homo sapiens
ggatcgccgagcccg

SEQ ID NO: 2087585 - DNA, 15 bp, Homo sapiens
gatcgccgagcccga

SEQ ID NO: 2087586 - DNA, 15 bp, Homo sapiens
atcgccgagcccgac

SEQ ID NO: 2087587 - DNA, 15 bp, Homo sapiens
tcgccgagcccgacc

SEQ ID NO: 2087588 - DNA, 15 bp, Homo sapiens
cgccgagcccgacct

SEQ ID NO: 2087589 - DNA, 15 bp, Homo sapiens
gccgagcccgacctc

SEQ ID NO: 2087590 - DNA, 15 bp, Homo sapiens
ccgagcccgacctcg

SEQ ID NO: 2087591 - DNA, 15 bp, Homo sapiens
cgagcccgacctcgg

SEQ ID NO: 2087592 - DNA, 15 bp, Homo sapiens
gagcccgacctcggg

SEQ ID NO: 2087593 - DNA, 15 bp, Homo sapiens
agcccgacctcgggc

SEQ ID NO: 2087594 - DNA, 15 bp, Homo sapiens
gcccgacctcgggcg

SEQ ID NO: 2087595 - DNA, 15 bp, Homo sapiens
cccgacctcgggcgc

SEQ ID NO: 2087596 - DNA, 15 bp, Homo sapiens
ccgacctcgggcgcc

SEQ ID NO: 2087597 - DNA, 15 bp, Homo sapiens
cgacctcgggcgccc

SEQ ID NO: 2087598 - DNA, 15 bp, Homo sapiens
gacctcgggcgcccc

SEQ ID NO: 2087599 - DNA, 15 bp, Homo sapiens
acctcgggcgccccg

SEQ ID NO: 2087600 - DNA, 15 bp, Homo sapiens
cctcgggcgccccgc

SEQ ID NO: 2087601 - DNA, 15 bp, Homo sapiens
ctcgggcgccccgcc

SEQ ID NO: 2087602 - DNA, 15 bp, Homo sapiens
tcgggcgccccgccg

SEQ ID NO: 2087603 - DNA, 15 bp, Homo sapiens
cgggcgccccgccgg

SEQ ID NO: 2087604 - DNA, 15 bp, Homo sapiens
gggcgccccgccggt

SEQ ID NO: 2087605 - DNA, 15 bp, Homo sapiens
ggcgccccgccggtc

SEQ ID NO: 2087606 - DNA, 15 bp, Homo sapiens
gcgccccgccggtca

SEQ ID NO: 2087607 - DNA, 15 bp, Homo sapiens
cgccccgccggtcac

SEQ ID NO: 2087608 - DNA, 15 bp, Homo sapiens
gccccgccggtcacc

SEQ ID NO: 2087609 - DNA, 15 bp, Homo sapiens
ccccgccggtcacct

SEQ ID NO: 2087610 - DNA, 15 bp, Homo sapiens
cccgccggtcacctc

SEQ ID NO: 2087611 - DNA, 15 bp, Homo sapiens
ccgccggtcacctcc

SEQ ID NO: 2087612 - DNA, 15 bp, Homo sapiens
cgccggtcacctccg

SEQ ID NO: 2087613 - DNA, 15 bp, Homo sapiens
gccggtcacctccgc

SEQ ID NO: 2087614 - DNA, 15 bp, Homo sapiens
ccggtcacctccgcg

SEQ ID NO: 2087615 - DNA, 15 bp, Homo sapiens
cggtcacctccgcgc

SEQ ID NO: 2087616 - DNA, 15 bp, Homo sapiens
ggtcacctccgcgcg

SEQ ID NO: 2087617 - DNA, 15 bp, Homo sapiens
gtcacctccgcgcgg

SEQ ID NO: 2087618 - DNA, 15 bp, Homo sapiens
tcacctccgcgcgga

SEQ ID NO: 2087619 - DNA, 15 bp, Homo sapiens
cacctccgcgcggac

SEQ ID NO: 2087620 - DNA, 15 bp, Homo sapiens
acctccgcgcggaca

SEQ ID NO: 2087621 - DNA, 15 bp, Homo sapiens
cctccgcgcggacac

SEQ ID NO: 2087622 - DNA, 15 bp, Homo sapiens
ctccgcgcggacacc

SEQ ID NO: 2087623 - DNA, 15 bp, Homo sapiens
tccgcgcggacacca

SEQ ID NO: 2087624 - DNA, 15 bp, Homo sapiens
ccgcgcggacaccag

SEQ ID NO: 2087625 - DNA, 15 bp, Homo sapiens
cgcgcggacaccagg

SEQ ID NO: 2087626 - DNA, 15 bp, Homo sapiens
gcgcggacaccaggt

SEQ ID NO: 2087627 - DNA, 15 bp, Homo sapiens
cgcggacaccaggta

SEQ ID NO: 2087628 - DNA, 15 bp, Homo sapiens
gcggacaccaggtac

SEQ ID NO: 2087629 - DNA, 15 bp, Homo sapiens
cggacaccaggtact

SEQ ID NO: 2087630 - DNA, 15 bp, Homo sapiens
ggacaccaggtactc

SEQ ID NO: 2087631 - DNA, 15 bp, Homo sapiens
gacaccaggtactcg

SEQ ID NO: 2087632 - DNA, 15 bp, Homo sapiens
acaccaggtactcgg

SEQ ID NO: 2087633 - DNA, 15 bp, Homo sapiens
caccaggtactcggt

SEQ ID NO: 2087634 - DNA, 15 bp, Homo sapiens
accaggtactcggtc

SEQ ID NO: 2087635 - DNA, 15 bp, Homo sapiens
ccaggtactcggtcc

SEQ ID NO: 2087636 - DNA, 15 bp, Homo sapiens
caggtactcggtccc

SEQ ID NO: 2087637 - DNA, 15 bp, Homo sapiens
aggtactcggtcccc

SEQ ID NO: 2087638 - DNA, 15 bp, Homo sapiens
ggtactcggtccccg

SEQ ID NO: 2087639 - DNA, 15 bp, Homo sapiens
gtactcggtccccgg

SEQ ID NO: 2087640 - DNA, 15 bp, Homo sapiens
tactcggtccccggc

SEQ ID NO: 2087641 - DNA, 15 bp, Homo sapiens
actcggtccccggcc

SEQ ID NO: 2087642 - DNA, 15 bp, Homo sapiens
ctcggtccccggccc

SEQ ID NO: 2087643 - DNA, 15 bp, Homo sapiens
tcggtccccggcccc

SEQ ID NO: 2087644 - DNA, 15 bp, Homo sapiens
cggtccccggccccg

SEQ ID NO: 2087645 - DNA, 15 bp, Homo sapiens
ggtccccggccccgc

SEQ ID NO: 2087646 - DNA, 15 bp, Homo sapiens
gtccccggccccgcc

SEQ ID NO: 2087647 - DNA, 15 bp, Homo sapiens
tccccggccccgccc

SEQ ID NO: 2087648 - DNA, 15 bp, Homo sapiens
ccccggccccgcccg

SEQ ID NO: 2087649 - DNA, 15 bp, Homo sapiens
cccggccccgcccgg

SEQ ID NO: 2087650 - DNA, 15 bp, Homo sapiens
ccggccccgcccggc

SEQ ID NO: 2087651 - DNA, 15 bp, Homo sapiens
cggccccgcccggcc

SEQ ID NO: 2087652 - DNA, 15 bp, Homo sapiens
ggccccgcccggcct

SEQ ID NO: 2087653 - DNA, 15 bp, Homo sapiens
gccccgcccggcctc

SEQ ID NO: 2087654 - DNA, 15 bp, Homo sapiens
ccccgcccggcctcc

SEQ ID NO: 2087655 - DNA, 15 bp, Homo sapiens
cccgcccggcctcct

SEQ ID NO: 2087656 - DNA, 15 bp, Homo sapiens
ccgcccggcctcctc

SEQ ID NO: 2087657 - DNA, 15 bp, Homo sapiens
cgcccggcctcctcc

SEQ ID NO: 2087658 - DNA, 15 bp, Homo sapiens
gcccggcctcctccc

SEQ ID NO: 2087659 - DNA, 15 bp, Homo sapiens
cccggcctcctcccc

SEQ ID NO: 2087660 - DNA, 15 bp, Homo sapiens
ccggcctcctcccct

SEQ ID NO: 2087661 - DNA, 15 bp, Homo sapiens
cggcctcctcccctc

SEQ ID NO: 2087662 - DNA, 15 bp, Homo sapiens
ggcctcctcccctcg

SEQ ID NO: 2087663 - DNA, 15 bp, Homo sapiens
gcctcctcccctcgg

SEQ ID NO: 2087664 - DNA, 15 bp, Homo sapiens
cctcctcccctcggc

SEQ ID NO: 2087665 - DNA, 15 bp, Homo sapiens
ctcctcccctcggct

SEQ ID NO: 2087666 - DNA, 15 bp, Homo sapiens
tcctcccctcggctg

SEQ ID NO: 2087667 - DNA, 15 bp, Homo sapiens
cctcccctcggctgt

SEQ ID NO: 2087668 - DNA, 15 bp, Homo sapiens
ctcccctcggctgtt

SEQ ID NO: 2087669 - DNA, 15 bp, Homo sapiens
tcccctcggctgttg

SEQ ID NO: 2087670 - DNA, 15 bp, Homo sapiens
cccctcggctgttgg

SEQ ID NO: 2087671 - DNA, 15 bp, Homo sapiens
ccctcggctgttggg

SEQ ID NO: 2087672 - DNA, 15 bp, Homo sapiens
cctcggctgttgggg

SEQ ID NO: 2087673 - DNA, 15 bp, Homo sapiens
ctcggctgttggggg

SEQ ID NO: 2087674 - DNA, 15 bp, Homo sapiens
tcggctgttggggga

SEQ ID NO: 2087675 - DNA, 15 bp, Homo sapiens
cggctgttgggggaa

SEQ ID NO: 2087676 - DNA, 15 bp, Homo sapiens
ggctgttgggggaag

SEQ ID NO: 2087677 - DNA, 15 bp, Homo sapiens
gctgttgggggaagt

SEQ ID NO: 2087678 - DNA, 15 bp, Homo sapiens
ctgttgggggaagtg

SEQ ID NO: 2087679 - DNA, 15 bp, Homo sapiens
tgttgggggaagtgg

SEQ ID NO: 2087680 - DNA, 15 bp, Homo sapiens
gttgggggaagtggg

SEQ ID NO: 2087681 - DNA, 15 bp, Homo sapiens
ttgggggaagtgggg

SEQ ID NO: 2087682 - DNA, 15 bp, Homo sapiens
tgggggaagtgggga

SEQ ID NO: 2087683 - DNA, 15 bp, Homo sapiens
gggggaagtggggag

SEQ ID NO: 2087684 - DNA, 15 bp, Homo sapiens
ggggaagtggggagg

SEQ ID NO: 2087685 - DNA, 15 bp, Homo sapiens
gggaagtggggagga

SEQ ID NO: 2087686 - DNA, 15 bp, Homo sapiens
ggaagtggggaggag

SEQ ID NO: 2087687 - DNA, 15 bp, Homo sapiens
gaagtggggaggagg

SEQ ID NO: 2087688 - DNA, 15 bp, Homo sapiens
aagtggggaggagga

SEQ ID NO: 2087689 - DNA, 15 bp, Homo sapiens
agtggggaggaggag

SEQ ID NO: 2087690 - DNA, 15 bp, Homo sapiens
gtggggaggaggagg

SEQ ID NO: 2087691 - DNA, 15 bp, Homo sapiens
tggggaggaggaggg

SEQ ID NO: 2087692 - DNA, 15 bp, Homo sapiens
ggggaggaggaggga

SEQ ID NO: 2087693 - DNA, 15 bp, Homo sapiens
gggaggaggagggag

SEQ ID NO: 2087694 - DNA, 15 bp, Homo sapiens
ggaggaggagggagg

SEQ ID NO: 2087695 - DNA, 15 bp, Homo sapiens
gaggaggagggaggg

SEQ ID NO: 2087696 - DNA, 15 bp, Homo sapiens
aggaggagggagggg

SEQ ID NO: 2087697 - DNA, 15 bp, Homo sapiens
ggaggagggaggggc

SEQ ID NO: 2087698 - DNA, 15 bp, Homo sapiens
gaggagggaggggct

SEQ ID NO: 2087699 - DNA, 15 bp, Homo sapiens
aggagggaggggctg

SEQ ID NO: 2087700 - DNA, 15 bp, Homo sapiens
ggagggaggggctgg

SEQ ID NO: 2087701 - DNA, 15 bp, Homo sapiens
gagggaggggctggg

SEQ ID NO: 2087702 - DNA, 15 bp, Homo sapiens
agggaggggctgggg

SEQ ID NO: 2087703 - DNA, 15 bp, Homo sapiens
gggaggggctggggc

SEQ ID NO: 2087704 - DNA, 15 bp, Homo sapiens
ggaggggctggggcg

SEQ ID NO: 2087705 - DNA, 15 bp, Homo sapiens
gaggggctggggcgc

SEQ ID NO: 2087706 - DNA, 15 bp, Homo sapiens
aggggctggggcgct

SEQ ID NO: 2087707 - DNA, 15 bp, Homo sapiens
ggggctggggcgctg

SEQ ID NO: 2087708 - DNA, 15 bp, Homo sapiens
gggctggggcgctgc

SEQ ID NO: 2087709 - DNA, 15 bp, Homo sapiens
ggctggggcgctgcc

SEQ ID NO: 2087710 - DNA, 15 bp, Homo sapiens
gctggggcgctgccg

SEQ ID NO: 2087711 - DNA, 15 bp, Homo sapiens
ctggggcgctgccgg

SEQ ID NO: 2087712 - DNA, 15 bp, Homo sapiens
tggggcgctgccggc

SEQ ID NO: 2087713 - DNA, 15 bp, Homo sapiens
ggggcgctgccggca

SEQ ID NO: 2087714 - DNA, 15 bp, Homo sapiens
gggcgctgccggcag

SEQ ID NO: 2087715 - DNA, 15 bp, Homo sapiens
ggcgctgccggcagc

SEQ ID NO: 2087716 - DNA, 15 bp, Homo sapiens
gcgctgccggcagcg

SEQ ID NO: 2087717 - DNA, 15 bp, Homo sapiens
cgctgccggcagcgg

SEQ ID NO: 2087718 - DNA, 15 bp, Homo sapiens
gctgccggcagcgga

SEQ ID NO: 2087719 - DNA, 15 bp, Homo sapiens
ctgccggcagcggag

SEQ ID NO: 2087720 - DNA, 15 bp, Homo sapiens
tgccggcagcggagg

SEQ ID NO: 2087721 - DNA, 15 bp, Homo sapiens
gccggcagcggaggg

SEQ ID NO: 2087722 - DNA, 15 bp, Homo sapiens
ccggcagcggagggg

SEQ ID NO: 2087723 - DNA, 15 bp, Homo sapiens
cggcagcggaggggc

SEQ ID NO: 2087724 - DNA, 15 bp, Homo sapiens
ggcagcggaggggcc

SEQ ID NO: 2087725 - DNA, 15 bp, Homo sapiens
gcagcggaggggccc

SEQ ID NO: 2087726 - DNA, 15 bp, Homo sapiens
cagcggaggggcccc

SEQ ID NO: 2087727 - DNA, 15 bp, Homo sapiens
agcggaggggccccc

SEQ ID NO: 2087728 - DNA, 15 bp, Homo sapiens
gcggaggggccccct

SEQ ID NO: 2087729 - DNA, 15 bp, Homo sapiens
cggaggggccccctt

SEQ ID NO: 2087730 - DNA, 15 bp, Homo sapiens
ggaggggcccccttc

SEQ ID NO: 2087731 - DNA, 15 bp, Homo sapiens
gaggggcccccttcg

SEQ ID NO: 2087732 - DNA, 15 bp, Homo sapiens
aggggcccccttcgg

SEQ ID NO: 2087733 - DNA, 15 bp, Homo sapiens
ggggcccccttcgga

SEQ ID NO: 2087734 - DNA, 15 bp, Homo sapiens
gggcccccttcggac

SEQ ID NO: 2087735 - DNA, 15 bp, Homo sapiens
ggcccccttcggacc

SEQ ID NO: 2087736 - DNA, 15 bp, Homo sapiens
gcccccttcggaccc

SEQ ID NO: 2087737 - DNA, 15 bp, Homo sapiens
cccccttcggacccc

SEQ ID NO: 2087738 - DNA, 15 bp, Homo sapiens
ccccttcggacccca

SEQ ID NO: 2087739 - DNA, 15 bp, Homo sapiens
cccttcggaccccac

SEQ ID NO: 2087740 - DNA, 15 bp, Homo sapiens
ccttcggaccccacg

SEQ ID NO: 2087741 - DNA, 15 bp, Homo sapiens
cttcggaccccacgg

SEQ ID NO: 2087742 - DNA, 15 bp, Homo sapiens
ttcggaccccacgga

SEQ ID NO: 2087743 - DNA, 15 bp, Homo sapiens
tcggaccccacggaa

SEQ ID NO: 2087744 - DNA, 15 bp, Homo sapiens
cggaccccacggaac

SEQ ID NO: 2087745 - DNA, 15 bp, Homo sapiens
ggaccccacggaacc

SEQ ID NO: 2087746 - DNA, 15 bp, Homo sapiens
gaccccacggaacca

SEQ ID NO: 2087747 - DNA, 15 bp, Homo sapiens
accccacggaaccag

SEQ ID NO: 2087748 - DNA, 15 bp, Homo sapiens
ccccacggaaccagc

SEQ ID NO: 2087749 - DNA, 15 bp, Homo sapiens
cccacggaaccagcg

SEQ ID NO: 2087750 - DNA, 15 bp, Homo sapiens
ccacggaaccagcgg

SEQ ID NO: 2087751 - DNA, 15 bp, Homo sapiens
cacggaaccagcggc

SEQ ID NO: 2087752 - DNA, 15 bp, Homo sapiens
acggaaccagcggcc

SEQ ID NO: 2087753 - DNA, 15 bp, Homo sapiens
ctgcaaagaggtccc

SEQ ID NO: 2087754 - DNA, 15 bp, Homo sapiens
tgcaaagaggtcccg

SEQ ID NO: 2087755 - DNA, 15 bp, Homo sapiens
gcaaagaggtcccgg

SEQ ID NO: 2087756 - DNA, 15 bp, Homo sapiens
caaagaggtcccggt

SEQ ID NO: 2087757 - DNA, 15 bp, Homo sapiens
aaagaggtcccggtg

SEQ ID NO: 2087758 - DNA, 15 bp, Homo sapiens
aagaggtcccggtgg

SEQ ID NO: 2087759 - DNA, 15 bp, Homo sapiens
agaggtcccggtgga

SEQ ID NO: 2087760 - DNA, 15 bp, Homo sapiens
gaggtcccggtggat

SEQ ID NO: 2087761 - DNA, 15 bp, Homo sapiens
aggtcccggtggatg

SEQ ID NO: 2087762 - DNA, 15 bp, Homo sapiens
ggtcccggtggatgg

SEQ ID NO: 2087763 - DNA, 15 bp, Homo sapiens
gtcccggtggatggt

SEQ ID NO: 2087764 - DNA, 15 bp, Homo sapiens
tcccggtggatggtg

SEQ ID NO: 2087765 - DNA, 15 bp, Homo sapiens
cccggtggatggtga

SEQ ID NO: 2087766 - DNA, 15 bp, Homo sapiens
ccggtggatggtgac

SEQ ID NO: 2087767 - DNA, 15 bp, Homo sapiens
cggtggatggtgaca

SEQ ID NO: 2087768 - DNA, 15 bp, Homo sapiens
ggtggatggtgacac

SEQ ID NO: 2087769 - DNA, 15 bp, Homo sapiens
gatggtgacactgtc

SEQ ID NO: 2087770 - DNA, 15 bp, Homo sapiens
atggtgacactgtct

SEQ ID NO: 2087771 - DNA, 15 bp, Homo sapiens
tggtgacactgtctc

SEQ ID NO: 2087772 - DNA, 15 bp, Homo sapiens
ggtgacactgtctct

SEQ ID NO: 2087773 - DNA, 15 bp, Homo sapiens
gtgacactgtctctg

SEQ ID NO: 2087774 - DNA, 15 bp, Homo sapiens
tgacactgtctctgg

SEQ ID NO: 2087775 - DNA, 15 bp, Homo sapiens
gacactgtctctggg

SEQ ID NO: 2087776 - DNA, 15 bp, Homo sapiens
acactgtctctgggg

SEQ ID NO: 2087777 - DNA, 15 bp, Homo sapiens
cactgtctctgggga

SEQ ID NO: 2087778 - DNA, 15 bp, Homo sapiens
actgtctctggggat

SEQ ID NO: 2087779 - DNA, 15 bp, Homo sapiens
ctgtctctggggatg

SEQ ID NO: 2087780 - DNA, 15 bp, Homo sapiens
tgtctctggggatgg

SEQ ID NO: 2087781 - DNA, 15 bp, Homo sapiens
gtctctggggatggc

SEQ ID NO: 2087782 - DNA, 15 bp, Homo sapiens
tctctggggatggca

SEQ ID NO: 2087783 - DNA, 15 bp, Homo sapiens
ctctggggatggcag

SEQ ID NO: 2087784 - DNA, 15 bp, Homo sapiens
tctggggatggcagg

SEQ ID NO: 2087785 - DNA, 15 bp, Homo sapiens
ctggggatggcagga

SEQ ID NO: 2087786 - DNA, 15 bp, Homo sapiens
tggggatggcaggaa

SEQ ID NO: 2087787 - DNA, 15 bp, Homo sapiens
ggggatggcaggaaa

SEQ ID NO: 2087788 - DNA, 15 bp, Homo sapiens
gggatggcaggaaaa

SEQ ID NO: 2087789 - DNA, 15 bp, Homo sapiens
ggatggcaggaaaat

SEQ ID NO: 2087790 - DNA, 15 bp, Homo sapiens
gatggcaggaaaatc

SEQ ID NO: 2087791 - DNA, 15 bp, Homo sapiens
atggcaggaaaatca

SEQ ID NO: 2087792 - DNA, 15 bp, Homo sapiens
tggcaggaaaatcag

SEQ ID NO: 2087793 - DNA, 15 bp, Homo sapiens
ggcaggaaaatcagc

SEQ ID NO: 2087794 - DNA, 15 bp, Homo sapiens
gcaggaaaatcagca

SEQ ID NO: 2087795 - DNA, 15 bp, Homo sapiens
caggaaaatcagcag

SEQ ID NO: 2087796 - DNA, 15 bp, Homo sapiens
aggaaaatcagcaga

SEQ ID NO: 2087797 - DNA, 15 bp, Homo sapiens
ggaaaatcagcagaa

SEQ ID NO: 2087798 - DNA, 15 bp, Homo sapiens
gaaaatcagcagaat

SEQ ID NO: 2087799 - DNA, 15 bp, Homo sapiens
aaaatcagcagaatg

SEQ ID NO: 2087800 - DNA, 15 bp, Homo sapiens
aaatcagcagaatgg

SEQ ID NO: 2087801 - DNA, 15 bp, Homo sapiens
aatcagcagaatggc

SEQ ID NO: 2087802 - DNA, 15 bp, Homo sapiens
atcagcagaatggcc

SEQ ID NO: 2087803 - DNA, 15 bp, Homo sapiens
tcagcagaatggcct

SEQ ID NO: 2087804 - DNA, 15 bp, Homo sapiens
cagcagaatggcctc

SEQ ID NO: 2087805 - DNA, 15 bp, Homo sapiens
agcagaatggcctct

SEQ ID NO: 2087806 - DNA, 15 bp, Homo sapiens
gcagaatggcctctt

SEQ ID NO: 2087807 - DNA, 15 bp, Homo sapiens
cagaatggcctcttc

SEQ ID NO: 2087808 - DNA, 15 bp, Homo sapiens
agaatggcctcttct

SEQ ID NO: 2087809 - DNA, 15 bp, Homo sapiens
gaatggcctcttctc

SEQ ID NO: 2087810 - DNA, 15 bp, Homo sapiens
aatggcctcttctcc

SEQ ID NO: 2087811 - DNA, 15 bp, Homo sapiens
atggcctcttctccc

SEQ ID NO: 2087812 - DNA, 15 bp, Homo sapiens
tggcctcttctcccc

SEQ ID NO: 2087813 - DNA, 15 bp, Homo sapiens
ggcctcttctccccc

SEQ ID NO: 2087814 - DNA, 15 bp, Homo sapiens
gcctcttctccccca

SEQ ID NO: 2087815 - DNA, 15 bp, Homo sapiens
cctcttctcccccat

SEQ ID NO: 2087816 - DNA, 15 bp, Homo sapiens
ctcttctcccccatg

SEQ ID NO: 2087817 - DNA, 15 bp, Homo sapiens
tcttctcccccatga

SEQ ID NO: 2087818 - DNA, 15 bp, Homo sapiens
cttctcccccatgac

SEQ ID NO: 2087819 - DNA, 15 bp, Homo sapiens
ttctcccccatgaca

SEQ ID NO: 2087820 - DNA, 15 bp, Homo sapiens
tctcccccatgacag

SEQ ID NO: 2087821 - DNA, 15 bp, Homo sapiens
ctcccccatgacagc

SEQ ID NO: 2087822 - DNA, 15 bp, Homo sapiens
tcccccatgacagct

SEQ ID NO: 2087823 - DNA, 15 bp, Homo sapiens
cccccatgacagctc

SEQ ID NO: 2087824 - DNA, 15 bp, Homo sapiens
ccccatgacagctca

SEQ ID NO: 2087825 - DNA, 15 bp, Homo sapiens
cccatgacagctcag

SEQ ID NO: 2087826 - DNA, 15 bp, Homo sapiens
ccatgacagctcaga

SEQ ID NO: 2087827 - DNA, 15 bp, Homo sapiens
catgacagctcagag

SEQ ID NO: 2087828 - DNA, 15 bp, Homo sapiens
atgacagctcagagg

SEQ ID NO: 2087829 - DNA, 15 bp, Homo sapiens
tgacagctcagaggc

SEQ ID NO: 2087830 - DNA, 15 bp, Homo sapiens
gacagctcagaggct

SEQ ID NO: 2087831 - DNA, 15 bp, Homo sapiens
acagctcagaggctt

SEQ ID NO: 2087832 - DNA, 15 bp, Homo sapiens
cagctcagaggcttt

SEQ ID NO: 2087833 - DNA, 15 bp, Homo sapiens
agctcagaggctttc

SEQ ID NO: 2087834 - DNA, 15 bp, Homo sapiens
gctcagaggctttct

SEQ ID NO: 2087835 - DNA, 15 bp, Homo sapiens
ctcagaggctttctc

SEQ ID NO: 2087836 - DNA, 15 bp, Homo sapiens
tcagaggctttctct

SEQ ID NO: 2087837 - DNA, 15 bp, Homo sapiens
cagaggctttctctg

SEQ ID NO: 2087838 - DNA, 15 bp, Homo sapiens
agaggctttctctgt

SEQ ID NO: 2087839 - DNA, 15 bp, Homo sapiens
gaggctttctctgtt

SEQ ID NO: 2087840 - DNA, 15 bp, Homo sapiens
aggctttctctgtta

SEQ ID NO: 2087841 - DNA, 15 bp, Homo sapiens
ggctttctctgttac

SEQ ID NO: 2087842 - DNA, 15 bp, Homo sapiens
gctttctctgttaca

SEQ ID NO: 2087843 - DNA, 15 bp, Homo sapiens
ctttctctgttacac

SEQ ID NO: 2087844 - DNA, 15 bp, Homo sapiens
tttctctgttacact

SEQ ID NO: 2087845 - DNA, 15 bp, Homo sapiens
ttctctgttacactg

SEQ ID NO: 2087846 - DNA, 15 bp, Homo sapiens
tctctgttacactga

SEQ ID NO: 2087847 - DNA, 15 bp, Homo sapiens
ctctgttacactgag

SEQ ID NO: 2087848 - DNA, 15 bp, Homo sapiens
tctgttacactgagg

SEQ ID NO: 2087849 - DNA, 15 bp, Homo sapiens
ctgttacactgaggg

SEQ ID NO: 2087850 - DNA, 15 bp, Homo sapiens
tgttacactgaggga

SEQ ID NO: 2087851 - DNA, 15 bp, Homo sapiens
gttacactgagggag

SEQ ID NO: 2087852 - DNA, 15 bp, Homo sapiens
ttacactgagggagc

SEQ ID NO: 2087853 - DNA, 15 bp, Homo sapiens
tacactgagggagct

SEQ ID NO: 2087854 - DNA, 15 bp, Homo sapiens
acactgagggagctt

SEQ ID NO: 2087855 - DNA, 15 bp, Homo sapiens
cactgagggagcttt

SEQ ID NO: 2087856 - DNA, 15 bp, Homo sapiens
actgagggagcttta

SEQ ID NO: 2087857 - DNA, 15 bp, Homo sapiens
ctgagggagctttat

SEQ ID NO: 2087858 - DNA, 15 bp, Homo sapiens
tgagggagctttatt

SEQ ID NO: 2087859 - DNA, 15 bp, Homo sapiens
gagggagctttattt

SEQ ID NO: 2087860 - DNA, 15 bp, Homo sapiens
agggagctttatttt

SEQ ID NO: 2087861 - DNA, 15 bp, Homo sapiens
gggagctttattttt

SEQ ID NO: 2087862 - DNA, 15 bp, Homo sapiens
ggagctttatttttc

SEQ ID NO: 2087863 - DNA, 15 bp, Homo sapiens
gagctttatttttct

SEQ ID NO: 2087864 - DNA, 15 bp, Homo sapiens
agctttatttttctg

SEQ ID NO: 2087865 - DNA, 15 bp, Homo sapiens
gctttatttttctgt

SEQ ID NO: 2087866 - DNA, 15 bp, Homo sapiens
ctttatttttctgtg

SEQ ID NO: 2087867 - DNA, 15 bp, Homo sapiens
tttatttttctgtgg

SEQ ID NO: 2087868 - DNA, 15 bp, Homo sapiens
ttatttttctgtggc

SEQ ID NO: 2087869 - DNA, 15 bp, Homo sapiens
tatttttctgtggcc

SEQ ID NO: 2087870 - DNA, 15 bp, Homo sapiens
atttttctgtggcct

SEQ ID NO: 2087871 - DNA, 15 bp, Homo sapiens
tttttctgtggccta

SEQ ID NO: 2087872 - DNA, 15 bp, Homo sapiens
ttttctgtggcctac

SEQ ID NO: 2087873 - DNA, 15 bp, Homo sapiens
tttctgtggcctact

SEQ ID NO: 2087874 - DNA, 15 bp, Homo sapiens
ttctgtggcctactc

SEQ ID NO: 2087875 - DNA, 15 bp, Homo sapiens
tctgtggcctactca

SEQ ID NO: 2087876 - DNA, 15 bp, Homo sapiens
ctgtggcctactcat

SEQ ID NO: 2087877 - DNA, 15 bp, Homo sapiens
tgtggcctactcata

SEQ ID NO: 2087878 - DNA, 15 bp, Homo sapiens
gtggcctactcatac

SEQ ID NO: 2087879 - DNA, 15 bp, Homo sapiens
tggcctactcatact

SEQ ID NO: 2087880 - DNA, 15 bp, Homo sapiens
ggcctactcatactg

SEQ ID NO: 2087881 - DNA, 15 bp, Homo sapiens
gcctactcatactga

SEQ ID NO: 2087882 - DNA, 15 bp, Homo sapiens
cctactcatactgaa

SEQ ID NO: 2087883 - DNA, 15 bp, Homo sapiens
ctactcatactgaaa

SEQ ID NO: 2087884 - DNA, 15 bp, Homo sapiens
tactcatactgaaac

SEQ ID NO: 2087885 - DNA, 15 bp, Homo sapiens
actcatactgaaacg

SEQ ID NO: 2087886 - DNA, 15 bp, Homo sapiens
ctcatactgaaacgt

SEQ ID NO: 2087887 - DNA, 15 bp, Homo sapiens
tcatactgaaacgtg

SEQ ID NO: 2087888 - DNA, 15 bp, Homo sapiens
catactgaaacgtgt

SEQ ID NO: 2087889 - DNA, 15 bp, Homo sapiens
atactgaaacgtgtg

SEQ ID NO: 2087890 - DNA, 15 bp, Homo sapiens
tactgaaacgtgtgt

SEQ ID NO: 2087891 - DNA, 15 bp, Homo sapiens
actgaaacgtgtgtg

SEQ ID NO: 2087892 - DNA, 15 bp, Homo sapiens
ctgaaacgtgtgtgt

SEQ ID NO: 2087893 - DNA, 15 bp, Homo sapiens
tgaaacgtgtgtgtc

SEQ ID NO: 2087894 - DNA, 15 bp, Homo sapiens
gaaacgtgtgtgtca

SEQ ID NO: 2087895 - DNA, 15 bp, Homo sapiens
aaacgtgtgtgtcag

SEQ ID NO: 2087896 - DNA, 15 bp, Homo sapiens
aacgtgtgtgtcagt

SEQ ID NO: 2087897 - DNA, 15 bp, Homo sapiens
acgtgtgtgtcagtg

SEQ ID NO: 2087898 - DNA, 15 bp, Homo sapiens
cgtgtgtgtcagtga

SEQ ID NO: 2087899 - DNA, 15 bp, Homo sapiens
gtgtgtgtcagtgac

SEQ ID NO: 2087900 - DNA, 15 bp, Homo sapiens
tgtgtgtcagtgaca

SEQ ID NO: 2087901 - DNA, 15 bp, Homo sapiens
gtgtgtcagtgacag

SEQ ID NO: 2087902 - DNA, 15 bp, Homo sapiens
tgtgtcagtgacagc

SEQ ID NO: 2087903 - DNA, 15 bp, Homo sapiens
gtgtcagtgacagcc

SEQ ID NO: 2087904 - DNA, 15 bp, Homo sapiens
tgtcagtgacagcct

SEQ ID NO: 2087905 - DNA, 15 bp, Homo sapiens
gtcagtgacagcctt

SEQ ID NO: 2087906 - DNA, 15 bp, Homo sapiens
tcagtgacagccttg

SEQ ID NO: 2087907 - DNA, 15 bp, Homo sapiens
cagtgacagccttgt

SEQ ID NO: 2087908 - DNA, 15 bp, Homo sapiens
agtgacagccttgtg

SEQ ID NO: 2087909 - DNA, 15 bp, Homo sapiens
gtgacagccttgtgg

SEQ ID NO: 2087910 - DNA, 15 bp, Homo sapiens
tgacagccttgtggc

SEQ ID NO: 2087911 - DNA, 15 bp, Homo sapiens
gacagccttgtggct

SEQ ID NO: 2087912 - DNA, 15 bp, Homo sapiens
acagccttgtggctg

SEQ ID NO: 2087913 - DNA, 15 bp, Homo sapiens
cagccttgtggctgc

SEQ ID NO: 2087914 - DNA, 15 bp, Homo sapiens
agccttgtggctgct

SEQ ID NO: 2087915 - DNA, 15 bp, Homo sapiens
gccttgtggctgctg

SEQ ID NO: 2087916 - DNA, 15 bp, Homo sapiens
ccttgtggctgctgc

SEQ ID NO: 2087917 - DNA, 15 bp, Homo sapiens
cttgtggctgctgca

SEQ ID NO: 2087918 - DNA, 15 bp, Homo sapiens
ttgtggctgctgcag

SEQ ID NO: 2087919 - DNA, 15 bp, Homo sapiens
tgtggctgctgcagt

SEQ ID NO: 2087920 - DNA, 15 bp, Homo sapiens
gtggctgctgcagtg

SEQ ID NO: 2087921 - DNA, 15 bp, Homo sapiens
tggctgctgcagtgc

SEQ ID NO: 2087922 - DNA, 15 bp, Homo sapiens
ggctgctgcagtgcc

SEQ ID NO: 2087923 - DNA, 15 bp, Homo sapiens
gctgctgcagtgcca

SEQ ID NO: 2087924 - DNA, 15 bp, Homo sapiens
ctgctgcagtgccag

SEQ ID NO: 2087925 - DNA, 15 bp, Homo sapiens
tgctgcagtgccagg

SEQ ID NO: 2087926 - DNA, 15 bp, Homo sapiens
gctgcagtgccagga

SEQ ID NO: 2087927 - DNA, 15 bp, Homo sapiens
ctgcagtgccaggac

SEQ ID NO: 2087928 - DNA, 15 bp, Homo sapiens
tgcagtgccaggacc

SEQ ID NO: 2087929 - DNA, 15 bp, Homo sapiens
gcagtgccaggaccc

SEQ ID NO: 2087930 - DNA, 15 bp, Homo sapiens
cagtgccaggacccc

SEQ ID NO: 2087931 - DNA, 15 bp, Homo sapiens
agtgccaggacccca

SEQ ID NO: 2087932 - DNA, 15 bp, Homo sapiens
gtgccaggaccccac

SEQ ID NO: 2087933 - DNA, 15 bp, Homo sapiens
tgccaggaccccact

SEQ ID NO: 2087934 - DNA, 15 bp, Homo sapiens
gccaggaccccactg

SEQ ID NO: 2087935 - DNA, 15 bp, Homo sapiens
ccaggaccccactgt

SEQ ID NO: 2087936 - DNA, 15 bp, Homo sapiens
caggaccccactgtg

SEQ ID NO: 2087937 - DNA, 15 bp, Homo sapiens
aggaccccactgtgt

SEQ ID NO: 2087938 - DNA, 15 bp, Homo sapiens
ggaccccactgtgtg

SEQ ID NO: 2087939 - DNA, 15 bp, Homo sapiens
gaccccactgtgtgt

SEQ ID NO: 2087940 - DNA, 15 bp, Homo sapiens
accccactgtgtgta

SEQ ID NO: 2087941 - DNA, 15 bp, Homo sapiens
ccccactgtgtgtat

SEQ ID NO: 2087942 - DNA, 15 bp, Homo sapiens
cccactgtgtgtatg

SEQ ID NO: 2087943 - DNA, 15 bp, Homo sapiens
ccactgtgtgtatgc

SEQ ID NO: 2087944 - DNA, 15 bp, Homo sapiens
cactgtgtgtatgca

SEQ ID NO: 2087945 - DNA, 15 bp, Homo sapiens
actgtgtgtatgcag

SEQ ID NO: 2087946 - DNA, 15 bp, Homo sapiens
ctgtgtgtatgcagg

SEQ ID NO: 2087947 - DNA, 15 bp, Homo sapiens
tgtgtgtatgcaggg

SEQ ID NO: 2087948 - DNA, 15 bp, Homo sapiens
gtgtgtatgcagggt

SEQ ID NO: 2087949 - DNA, 15 bp, Homo sapiens
tgtgtatgcagggtc

SEQ ID NO: 2087950 - DNA, 15 bp, Homo sapiens
gtgtatgcagggtcc

SEQ ID NO: 2087951 - DNA, 15 bp, Homo sapiens
tgtatgcagggtccc

SEQ ID NO: 2087952 - DNA, 15 bp, Homo sapiens
gtatgcagggtccct

SEQ ID NO: 2087953 - DNA, 15 bp, Homo sapiens
tatgcagggtcccta

SEQ ID NO: 2087954 - DNA, 15 bp, Homo sapiens
atgcagggtccctag

SEQ ID NO: 2087955 - DNA, 15 bp, Homo sapiens
tgcagggtccctaga

SEQ ID NO: 2087956 - DNA, 15 bp, Homo sapiens
gcagggtccctagag

SEQ ID NO: 2087957 - DNA, 15 bp, Homo sapiens
cagggtccctagagg

SEQ ID NO: 2087958 - DNA, 15 bp, Homo sapiens
agggtccctagaggg

SEQ ID NO: 2087959 - DNA, 15 bp, Homo sapiens
gggtccctagagggg

SEQ ID NO: 2087960 - DNA, 15 bp, Homo sapiens
ggtccctagaggggc

SEQ ID NO: 2087961 - DNA, 15 bp, Homo sapiens
gtccctagaggggct

SEQ ID NO: 2087962 - DNA, 15 bp, Homo sapiens
tccctagaggggcta

SEQ ID NO: 2087963 - DNA, 15 bp, Homo sapiens
ccctagaggggctat

SEQ ID NO: 2087964 - DNA, 15 bp, Homo sapiens
cctagaggggctatc

SEQ ID NO: 2087965 - DNA, 15 bp, Homo sapiens
ctagaggggctatca

SEQ ID NO: 2087966 - DNA, 15 bp, Homo sapiens
tagaggggctatcac

SEQ ID NO: 2087967 - DNA, 15 bp, Homo sapiens
agaggggctatcact

SEQ ID NO: 2087968 - DNA, 15 bp, Homo sapiens
gaggggctatcactc

SEQ ID NO: 2087969 - DNA, 15 bp, Homo sapiens
aggggctatcactca

SEQ ID NO: 2087970 - DNA, 15 bp, Homo sapiens
ggggctatcactcag

SEQ ID NO: 2087971 - DNA, 15 bp, Homo sapiens
gggctatcactcagg

SEQ ID NO: 2087972 - DNA, 15 bp, Homo sapiens
ggctatcactcaggc

SEQ ID NO: 2087973 - DNA, 15 bp, Homo sapiens
gctatcactcaggca

SEQ ID NO: 2087974 - DNA, 15 bp, Homo sapiens
ctatcactcaggcag

SEQ ID NO: 2087975 - DNA, 15 bp, Homo sapiens
tatcactcaggcagt

SEQ ID NO: 2087976 - DNA, 15 bp, Homo sapiens
atcactcaggcagtt

SEQ ID NO: 2087977 - DNA, 15 bp, Homo sapiens
tcactcaggcagttc

SEQ ID NO: 2087978 - DNA, 15 bp, Homo sapiens
cactcaggcagttca

SEQ ID NO: 2087979 - DNA, 15 bp, Homo sapiens
actcaggcagttcaa

SEQ ID NO: 2087980 - DNA, 15 bp, Homo sapiens
ctcaggcagttcaag

SEQ ID NO: 2087981 - DNA, 15 bp, Homo sapiens
tcaggcagttcaagc

SEQ ID NO: 2087982 - DNA, 15 bp, Homo sapiens
caggcagttcaagca

SEQ ID NO: 2087983 - DNA, 15 bp, Homo sapiens
aggcagttcaagcat

SEQ ID NO: 2087984 - DNA, 15 bp, Homo sapiens
ggcagttcaagcatg

SEQ ID NO: 2087985 - DNA, 15 bp, Homo sapiens
gcagttcaagcatgt

SEQ ID NO: 2087986 - DNA, 15 bp, Homo sapiens
cagttcaagcatgtg

SEQ ID NO: 2087987 - DNA, 15 bp, Homo sapiens
agttcaagcatgtga

SEQ ID NO: 2087988 - DNA, 15 bp, Homo sapiens
gttcaagcatgtgac

SEQ ID NO: 2087989 - DNA, 15 bp, Homo sapiens
ttcaagcatgtgacc

SEQ ID NO: 2087990 - DNA, 15 bp, Homo sapiens
tcaagcatgtgaccc

SEQ ID NO: 2087991 - DNA, 15 bp, Homo sapiens
caagcatgtgaccct

SEQ ID NO: 2087992 - DNA, 15 bp, Homo sapiens
aagcatgtgaccctg

SEQ ID NO: 2087993 - DNA, 15 bp, Homo sapiens
agcatgtgaccctgt

SEQ ID NO: 2087994 - DNA, 15 bp, Homo sapiens
gcatgtgaccctgtg

SEQ ID NO: 2087995 - DNA, 15 bp, Homo sapiens
catgtgaccctgtgc

SEQ ID NO: 2087996 - DNA, 15 bp, Homo sapiens
atgtgaccctgtgct

SEQ ID NO: 2087997 - DNA, 15 bp, Homo sapiens
tgtgaccctgtgctg

SEQ ID NO: 2087998 - DNA, 15 bp, Homo sapiens
gtgaccctgtgctgt

SEQ ID NO: 2087999 - DNA, 15 bp, Homo sapiens
tgaccctgtgctgtg

SEQ ID NO: 2088000 - DNA, 15 bp, Homo sapiens
gaccctgtgctgtga

SEQ ID NO: 2088001 - DNA, 15 bp, Homo sapiens
accctgtgctgtgag

SEQ ID NO: 2088002 - DNA, 15 bp, Homo sapiens
ccctgtgctgtgagt

SEQ ID NO: 2088003 - DNA, 15 bp, Homo sapiens
cctgtgctgtgagtg

SEQ ID NO: 2088004 - DNA, 15 bp, Homo sapiens
ctgtgctgtgagtga

SEQ ID NO: 2088005 - DNA, 15 bp, Homo sapiens
tgtgctgtgagtgag

SEQ ID NO: 2088006 - DNA, 15 bp, Homo sapiens
gtgctgtgagtgagc

SEQ ID NO: 2088007 - DNA, 15 bp, Homo sapiens
tgctgtgagtgagca

SEQ ID NO: 2088008 - DNA, 15 bp, Homo sapiens
gctgtgagtgagcac

SEQ ID NO: 2088009 - DNA, 15 bp, Homo sapiens
ctgtgagtgagcacc

SEQ ID NO: 2088010 - DNA, 15 bp, Homo sapiens
tgtgagtgagcacct

SEQ ID NO: 2088011 - DNA, 15 bp, Homo sapiens
gtgagtgagcacctg

SEQ ID NO: 2088012 - DNA, 15 bp, Homo sapiens
tgagtgagcacctgg

SEQ ID NO: 2088013 - DNA, 15 bp, Homo sapiens
gagtgagcacctggt

SEQ ID NO: 2088014 - DNA, 15 bp, Homo sapiens
agtgagcacctggtc

SEQ ID NO: 2088015 - DNA, 15 bp, Homo sapiens
gtgagcacctggtct

SEQ ID NO: 2088016 - DNA, 15 bp, Homo sapiens
tgagcacctggtctc

SEQ ID NO: 2088017 - DNA, 15 bp, Homo sapiens
gagcacctggtctct

SEQ ID NO: 2088018 - DNA, 15 bp, Homo sapiens
agcacctggtctctt

SEQ ID NO: 2088019 - DNA, 15 bp, Homo sapiens
gcacctggtctcttg

SEQ ID NO: 2088020 - DNA, 15 bp, Homo sapiens
cacctggtctcttgc

SEQ ID NO: 2088021 - DNA, 15 bp, Homo sapiens
acctggtctcttgct

SEQ ID NO: 2088022 - DNA, 15 bp, Homo sapiens
cctggtctcttgcta

SEQ ID NO: 2088023 - DNA, 15 bp, Homo sapiens
ctggtctcttgctat

SEQ ID NO: 2088024 - DNA, 15 bp, Homo sapiens
tggtctcttgctatg

SEQ ID NO: 2088025 - DNA, 15 bp, Homo sapiens
ggtctcttgctatgg

SEQ ID NO: 2088026 - DNA, 15 bp, Homo sapiens
gtctcttgctatggg

SEQ ID NO: 2088027 - DNA, 15 bp, Homo sapiens
tctcttgctatggga

SEQ ID NO: 2088028 - DNA, 15 bp, Homo sapiens
ctcttgctatgggag

SEQ ID NO: 2088029 - DNA, 15 bp, Homo sapiens
tcttgctatgggagt

SEQ ID NO: 2088030 - DNA, 15 bp, Homo sapiens
cttgctatgggagtg

SEQ ID NO: 2088031 - DNA, 15 bp, Homo sapiens
ttgctatgggagtgt

SEQ ID NO: 2088032 - DNA, 15 bp, Homo sapiens
tgctatgggagtgtg

SEQ ID NO: 2088033 - DNA, 15 bp, Homo sapiens
gctatgggagtgtgg

SEQ ID NO: 2088034 - DNA, 15 bp, Homo sapiens
ctatgggagtgtggg

SEQ ID NO: 2088035 - DNA, 15 bp, Homo sapiens
tatgggagtgtgggg

SEQ ID NO: 2088036 - DNA, 15 bp, Homo sapiens
atgggagtgtgggga

SEQ ID NO: 2088037 - DNA, 15 bp, Homo sapiens
tgggagtgtggggac

SEQ ID NO: 2088038 - DNA, 15 bp, Homo sapiens
gggagtgtggggact

SEQ ID NO: 2088039 - DNA, 15 bp, Homo sapiens
ggagtgtggggactt

SEQ ID NO: 2088040 - DNA, 15 bp, Homo sapiens
gagtgtggggactta

SEQ ID NO: 2088041 - DNA, 15 bp, Homo sapiens
agtgtggggacttat

SEQ ID NO: 2088042 - DNA, 15 bp, Homo sapiens
gtgtggggacttatg

SEQ ID NO: 2088043 - DNA, 15 bp, Homo sapiens
tgtggggacttatgc

SEQ ID NO: 2088044 - DNA, 15 bp, Homo sapiens
gtggggacttatgcc

SEQ ID NO: 2088045 - DNA, 15 bp, Homo sapiens
tggggacttatgcca

SEQ ID NO: 2088046 - DNA, 15 bp, Homo sapiens
ggggacttatgccag

SEQ ID NO: 2088047 - DNA, 15 bp, Homo sapiens
gggacttatgccagg

SEQ ID NO: 2088048 - DNA, 15 bp, Homo sapiens
ggacttatgccaggt

SEQ ID NO: 2088049 - DNA, 15 bp, Homo sapiens
gacttatgccaggta

SEQ ID NO: 2088050 - DNA, 15 bp, Homo sapiens
acttatgccaggtaa

SEQ ID NO: 2088051 - DNA, 15 bp, Homo sapiens
cttatgccaggtaaa

SEQ ID NO: 2088052 - DNA, 15 bp, Homo sapiens
ttatgccaggtaaag

SEQ ID NO: 2088053 - DNA, 15 bp, Homo sapiens
tatgccaggtaaaga

SEQ ID NO: 2088054 - DNA, 15 bp, Homo sapiens
atgccaggtaaagag

SEQ ID NO: 2088055 - DNA, 15 bp, Homo sapiens
tgccaggtaaagagt

SEQ ID NO: 2088056 - DNA, 15 bp, Homo sapiens
gccaggtaaagagtc

SEQ ID NO: 2088057 - DNA, 15 bp, Homo sapiens
ccaggtaaagagtct

SEQ ID NO: 2088058 - DNA, 15 bp, Homo sapiens
caggtaaagagtctt

SEQ ID NO: 2088059 - DNA, 15 bp, Homo sapiens
aggtaaagagtcttg

SEQ ID NO: 2088060 - DNA, 15 bp, Homo sapiens
ggtaaagagtcttgc

SEQ ID NO: 2088061 - DNA, 15 bp, Homo sapiens
gtaaagagtcttgcc

SEQ ID NO: 2088062 - DNA, 15 bp, Homo sapiens
taaagagtcttgcca

SEQ ID NO: 2088063 - DNA, 15 bp, Homo sapiens
aaagagtcttgccaa

SEQ ID NO: 2088064 - DNA, 15 bp, Homo sapiens
aagagtcttgccaac

SEQ ID NO: 2088065 - DNA, 15 bp, Homo sapiens
agagtcttgccaact

SEQ ID NO: 2088066 - DNA, 15 bp, Homo sapiens
gagtcttgccaactc

SEQ ID NO: 2088067 - DNA, 15 bp, Homo sapiens
agtcttgccaactca

SEQ ID NO: 2088068 - DNA, 15 bp, Homo sapiens
gtcttgccaactcag

SEQ ID NO: 2088069 - DNA, 15 bp, Homo sapiens
tcttgccaactcagt

SEQ ID NO: 2088070 - DNA, 15 bp, Homo sapiens
cttgccaactcagtt

SEQ ID NO: 2088071 - DNA, 15 bp, Homo sapiens
ttgccaactcagtta

SEQ ID NO: 2088072 - DNA, 15 bp, Homo sapiens
tgccaactcagttat

SEQ ID NO: 2088073 - DNA, 15 bp, Homo sapiens
gccaactcagttatt

SEQ ID NO: 2088074 - DNA, 15 bp, Homo sapiens
ccaactcagttattc

SEQ ID NO: 2088075 - DNA, 15 bp, Homo sapiens
caactcagttattcg

SEQ ID NO: 2088076 - DNA, 15 bp, Homo sapiens
aactcagttattcgg

SEQ ID NO: 2088077 - DNA, 15 bp, Homo sapiens
actcagttattcggg

SEQ ID NO: 2088078 - DNA, 15 bp, Homo sapiens
ctcagttattcgggg

SEQ ID NO: 2088079 - DNA, 15 bp, Homo sapiens
tcagttattcggggg

SEQ ID NO: 2088080 - DNA, 15 bp, Homo sapiens
cagttattcgggggc

SEQ ID NO: 2088081 - DNA, 15 bp, Homo sapiens
agttattcgggggct

SEQ ID NO: 2088082 - DNA, 15 bp, Homo sapiens
gttattcgggggctt

SEQ ID NO: 2088083 - DNA, 15 bp, Homo sapiens
ttattcgggggctta

SEQ ID NO: 2088084 - DNA, 15 bp, Homo sapiens
tattcgggggcttat

SEQ ID NO: 2088085 - DNA, 15 bp, Homo sapiens
attcgggggcttatt

SEQ ID NO: 2088086 - DNA, 15 bp, Homo sapiens
ttcgggggcttattt

SEQ ID NO: 2088087 - DNA, 15 bp, Homo sapiens
tcgggggcttatttc

SEQ ID NO: 2088088 - DNA, 15 bp, Homo sapiens
cgggggcttatttca

SEQ ID NO: 2088089 - DNA, 15 bp, Homo sapiens
gggggcttatttcaa

SEQ ID NO: 2088090 - DNA, 15 bp, Homo sapiens
ggggcttatttcaag

SEQ ID NO: 2088091 - DNA, 15 bp, Homo sapiens
gggcttatttcaagg

SEQ ID NO: 2088092 - DNA, 15 bp, Homo sapiens
ggcttatttcaaggt

SEQ ID NO: 2088093 - DNA, 15 bp, Homo sapiens
gcttatttcaaggtg

SEQ ID NO: 2088094 - DNA, 15 bp, Homo sapiens
cttatttcaaggtgt

SEQ ID NO: 2088095 - DNA, 15 bp, Homo sapiens
ttatttcaaggtgtt

SEQ ID NO: 2088096 - DNA, 15 bp, Homo sapiens
tatttcaaggtgttt

SEQ ID NO: 2088097 - DNA, 15 bp, Homo sapiens
atttcaaggtgtttt

SEQ ID NO: 2088098 - DNA, 15 bp, Homo sapiens
tttcaaggtgttttc

SEQ ID NO: 2088099 - DNA, 15 bp, Homo sapiens
ttcaaggtgttttct

SEQ ID NO: 2088100 - DNA, 15 bp, Homo sapiens
tcaaggtgttttctt

SEQ ID NO: 2088101 - DNA, 15 bp, Homo sapiens
caaggtgttttcttt

SEQ ID NO: 2088102 - DNA, 15 bp, Homo sapiens
aaggtgttttctttc

SEQ ID NO: 2088103 - DNA, 15 bp, Homo sapiens
aggtgttttctttct

SEQ ID NO: 2088104 - DNA, 15 bp, Homo sapiens
ggtgttttctttctc

SEQ ID NO: 2088105 - DNA, 15 bp, Homo sapiens
gtgttttctttctca

SEQ ID NO: 2088106 - DNA, 15 bp, Homo sapiens
gttttctttctcagg

SEQ ID NO: 2088107 - DNA, 15 bp, Homo sapiens
ttttctttctcagga

SEQ ID NO: 2088108 - DNA, 15 bp, Homo sapiens
tttctttctcaggat

SEQ ID NO: 2088109 - DNA, 15 bp, Homo sapiens
ttctttctcaggatg

SEQ ID NO: 2088110 - DNA, 15 bp, Homo sapiens
tctttctcaggatgt

SEQ ID NO: 2088111 - DNA, 15 bp, Homo sapiens
ctttctcaggatgtc

SEQ ID NO: 2088112 - DNA, 15 bp, Homo sapiens
tttctcaggatgtca

SEQ ID NO: 2088113 - DNA, 15 bp, Homo sapiens
ttctcaggatgtcat

SEQ ID NO: 2088114 - DNA, 15 bp, Homo sapiens
tctcaggatgtcatc

SEQ ID NO: 2088115 - DNA, 15 bp, Homo sapiens
ctcaggatgtcatca

SEQ ID NO: 2088116 - DNA, 15 bp, Homo sapiens
tcaggatgtcatcag

SEQ ID NO: 2088117 - DNA, 15 bp, Homo sapiens
caggatgtcatcagg

SEQ ID NO: 2088118 - DNA, 15 bp, Homo sapiens
aggatgtcatcaggt

SEQ ID NO: 2088119 - DNA, 15 bp, Homo sapiens
ggatgtcatcaggtt

SEQ ID NO: 2088120 - DNA, 15 bp, Homo sapiens
gatgtcatcaggtta

SEQ ID NO: 2088121 - DNA, 15 bp, Homo sapiens
atgtcatcaggttaa

SEQ ID NO: 2088122 - DNA, 15 bp, Homo sapiens
tgtcatcaggttaag

SEQ ID NO: 2088123 - DNA, 15 bp, Homo sapiens
gtcatcaggttaagt

SEQ ID NO: 2088124 - DNA, 15 bp, Homo sapiens
tcatcaggttaagta

SEQ ID NO: 2088125 - DNA, 15 bp, Homo sapiens
catcaggttaagtat

SEQ ID NO: 2088126 - DNA, 15 bp, Homo sapiens
atcaggttaagtatg

SEQ ID NO: 2088127 - DNA, 15 bp, Homo sapiens
tcaggttaagtatgt

SEQ ID NO: 2088128 - DNA, 15 bp, Homo sapiens
caggttaagtatgtc

SEQ ID NO: 2088129 - DNA, 15 bp, Homo sapiens
aggttaagtatgtca

SEQ ID NO: 2088130 - DNA, 15 bp, Homo sapiens
ggttaagtatgtcag

SEQ ID NO: 2088131 - DNA, 15 bp, Homo sapiens
gttaagtatgtcagt

SEQ ID NO: 2088132 - DNA, 15 bp, Homo sapiens
ttaagtatgtcagta

SEQ ID NO: 2088133 - DNA, 15 bp, Homo sapiens
taagtatgtcagtag

SEQ ID NO: 2088134 - DNA, 15 bp, Homo sapiens
aagtatgtcagtagg

SEQ ID NO: 2088135 - DNA, 15 bp, Homo sapiens
agtatgtcagtagga

SEQ ID NO: 2088136 - DNA, 15 bp, Homo sapiens
gtatgtcagtaggat

SEQ ID NO: 2088137 - DNA, 15 bp, Homo sapiens
tatgtcagtaggatg

SEQ ID NO: 2088138 - DNA, 15 bp, Homo sapiens
atgtcagtaggatgt

SEQ ID NO: 2088139 - DNA, 15 bp, Homo sapiens
tgtcagtaggatgtg

SEQ ID NO: 2088140 - DNA, 15 bp, Homo sapiens
gtcagtaggatgtgt

SEQ ID NO: 2088141 - DNA, 15 bp, Homo sapiens
tcagtaggatgtgtg

SEQ ID NO: 2088142 - DNA, 15 bp, Homo sapiens
cagtaggatgtgtgt

SEQ ID NO: 2088143 - DNA, 15 bp, Homo sapiens
agtaggatgtgtgtg

SEQ ID NO: 2088144 - DNA, 15 bp, Homo sapiens
gtaggatgtgtgtgt

SEQ ID NO: 2088145 - DNA, 15 bp, Homo sapiens
taggatgtgtgtgtg

SEQ ID NO: 2088146 - DNA, 15 bp, Homo sapiens
aggatgtgtgtgtgt

SEQ ID NO: 2088147 - DNA, 15 bp, Homo sapiens
ggatgtgtgtgtgtg

SEQ ID NO: 2088148 - DNA, 15 bp, Homo sapiens
gatgtgtgtgtgtgt

SEQ ID NO: 2088149 - DNA, 15 bp, Homo sapiens
gtgtgtgtgtgcacc

SEQ ID NO: 2088150 - DNA, 15 bp, Homo sapiens
tgtgtgtgtgcacca

SEQ ID NO: 2088151 - DNA, 15 bp, Homo sapiens
gtgtgtgtgcaccac

SEQ ID NO: 2088152 - DNA, 15 bp, Homo sapiens
tgtgtgtgcaccaca

SEQ ID NO: 2088153 - DNA, 15 bp, Homo sapiens
gtgtgtgcaccacac

SEQ ID NO: 2088154 - DNA, 15 bp, Homo sapiens
tgtgtgcaccacaca

SEQ ID NO: 2088155 - DNA, 15 bp, Homo sapiens
gtgtgcaccacacat

SEQ ID NO: 2088156 - DNA, 15 bp, Homo sapiens
tgtgcaccacacatg

SEQ ID NO: 2088157 - DNA, 15 bp, Homo sapiens
gtgcaccacacatgc

SEQ ID NO: 2088158 - DNA, 15 bp, Homo sapiens
tgcaccacacatgca

SEQ ID NO: 2088159 - DNA, 15 bp, Homo sapiens
gcaccacacatgcat

SEQ ID NO: 2088160 - DNA, 15 bp, Homo sapiens
caccacacatgcatg

SEQ ID NO: 2088161 - DNA, 15 bp, Homo sapiens
accacacatgcatgc

SEQ ID NO: 2088162 - DNA, 15 bp, Homo sapiens
ccacacatgcatgca

SEQ ID NO: 2088163 - DNA, 15 bp, Homo sapiens
cacacatgcatgcac

SEQ ID NO: 2088164 - DNA, 15 bp, Homo sapiens
acacatgcatgcacc

SEQ ID NO: 2088165 - DNA, 15 bp, Homo sapiens
cacatgcatgcacca

SEQ ID NO: 2088166 - DNA, 15 bp, Homo sapiens
acatgcatgcaccac

SEQ ID NO: 2088167 - DNA, 15 bp, Homo sapiens
catgcatgcaccacc

SEQ ID NO: 2088168 - DNA, 15 bp, Homo sapiens
atgcatgcaccacca

SEQ ID NO: 2088169 - DNA, 15 bp, Homo sapiens
tgcatgcaccaccaa

SEQ ID NO: 2088170 - DNA, 15 bp, Homo sapiens
gcatgcaccaccaaa

SEQ ID NO: 2088171 - DNA, 15 bp, Homo sapiens
catgcaccaccaaat

SEQ ID NO: 2088172 - DNA, 15 bp, Homo sapiens
atgcaccaccaaatt

SEQ ID NO: 2088173 - DNA, 15 bp, Homo sapiens
tgcaccaccaaattt

SEQ ID NO: 2088174 - DNA, 15 bp, Homo sapiens
gcaccaccaaatttc

SEQ ID NO: 2088175 - DNA, 15 bp, Homo sapiens
caccaccaaatttcc

SEQ ID NO: 2088176 - DNA, 15 bp, Homo sapiens
accaccaaatttccc

SEQ ID NO: 2088177 - DNA, 15 bp, Homo sapiens
ccaccaaatttcccc

SEQ ID NO: 2088178 - DNA, 15 bp, Homo sapiens
caccaaatttcccca

SEQ ID NO: 2088179 - DNA, 15 bp, Homo sapiens
accaaatttccccac

SEQ ID NO: 2088180 - DNA, 15 bp, Homo sapiens
ccaaatttccccact

SEQ ID NO: 2088181 - DNA, 15 bp, Homo sapiens
caaatttccccactc

SEQ ID NO: 2088182 - DNA, 15 bp, Homo sapiens
aaatttccccactcc

SEQ ID NO: 2088183 - DNA, 15 bp, Homo sapiens
aatttccccactcct

SEQ ID NO: 2088184 - DNA, 15 bp, Homo sapiens
atttccccactcctc

SEQ ID NO: 2088185 - DNA, 15 bp, Homo sapiens
tttccccactcctct

SEQ ID NO: 2088186 - DNA, 15 bp, Homo sapiens
ttccccactcctctc

SEQ ID NO: 2088187 - DNA, 15 bp, Homo sapiens
tccccactcctctcc

SEQ ID NO: 2088188 - DNA, 15 bp, Homo sapiens
ccccactcctctcct

SEQ ID NO: 2088189 - DNA, 15 bp, Homo sapiens
cccactcctctcctg

SEQ ID NO: 2088190 - DNA, 15 bp, Homo sapiens
ccactcctctcctgg

SEQ ID NO: 2088191 - DNA, 15 bp, Homo sapiens
cactcctctcctggg

SEQ ID NO: 2088192 - DNA, 15 bp, Homo sapiens
actcctctcctgggc

SEQ ID NO: 2088193 - DNA, 15 bp, Homo sapiens
ctcctctcctgggct

SEQ ID NO: 2088194 - DNA, 15 bp, Homo sapiens
tcctctcctgggctt

SEQ ID NO: 2088195 - DNA, 15 bp, Homo sapiens
cctctcctgggcttc

SEQ ID NO: 2088196 - DNA, 15 bp, Homo sapiens
ctctcctgggcttct

SEQ ID NO: 2088197 - DNA, 15 bp, Homo sapiens
tctcctgggcttcta

SEQ ID NO: 2088198 - DNA, 15 bp, Homo sapiens
ctcctgggcttctaa

SEQ ID NO: 2088199 - DNA, 15 bp, Homo sapiens
tcctgggcttctaaa

SEQ ID NO: 2088200 - DNA, 15 bp, Homo sapiens
cctgggcttctaaag

SEQ ID NO: 2088201 - DNA, 15 bp, Homo sapiens
ctgggcttctaaaga

SEQ ID NO: 2088202 - DNA, 15 bp, Homo sapiens
tgggcttctaaagag

SEQ ID NO: 2088203 - DNA, 15 bp, Homo sapiens
gggcttctaaagagg

SEQ ID NO: 2088204 - DNA, 15 bp, Homo sapiens
ggcttctaaagagga

SEQ ID NO: 2088205 - DNA, 15 bp, Homo sapiens
gcttctaaagaggaa

SEQ ID NO: 2088206 - DNA, 15 bp, Homo sapiens
cttctaaagaggaaa

SEQ ID NO: 2088207 - DNA, 15 bp, Homo sapiens
ttctaaagaggaaaa

SEQ ID NO: 2088208 - DNA, 15 bp, Homo sapiens
tctaaagaggaaaac

SEQ ID NO: 2088209 - DNA, 15 bp, Homo sapiens
ctaaagaggaaaacc

SEQ ID NO: 2088210 - DNA, 15 bp, Homo sapiens
taaagaggaaaacca

SEQ ID NO: 2088211 - DNA, 15 bp, Homo sapiens
aaagaggaaaaccac

SEQ ID NO: 2088212 - DNA, 15 bp, Homo sapiens
aagaggaaaaccaca

SEQ ID NO: 2088213 - DNA, 15 bp, Homo sapiens
agaggaaaaccacat

SEQ ID NO: 2088214 - DNA, 15 bp, Homo sapiens
gaggaaaaccacatt

SEQ ID NO: 2088215 - DNA, 15 bp, Homo sapiens
aggaaaaccacattg

SEQ ID NO: 2088216 - DNA, 15 bp, Homo sapiens
ggaaaaccacattgt

SEQ ID NO: 2088217 - DNA, 15 bp, Homo sapiens
gaaaaccacattgtc

SEQ ID NO: 2088218 - DNA, 15 bp, Homo sapiens
aaaaccacattgtcc

SEQ ID NO: 2088219 - DNA, 15 bp, Homo sapiens
aaaccacattgtcct

SEQ ID NO: 2088220 - DNA, 15 bp, Homo sapiens
aaccacattgtcctc

SEQ ID NO: 2088221 - DNA, 15 bp, Homo sapiens
accacattgtcctca

SEQ ID NO: 2088222 - DNA, 15 bp, Homo sapiens
ccacattgtcctcaa

SEQ ID NO: 2088223 - DNA, 15 bp, Homo sapiens
cacattgtcctcaat

SEQ ID NO: 2088224 - DNA, 15 bp, Homo sapiens
acattgtcctcaatt

SEQ ID NO: 2088225 - DNA, 15 bp, Homo sapiens
cattgtcctcaattg

SEQ ID NO: 2088226 - DNA, 15 bp, Homo sapiens
attgtcctcaattgt

SEQ ID NO: 2088227 - DNA, 15 bp, Homo sapiens
ttgtcctcaattgtc

SEQ ID NO: 2088228 - DNA, 15 bp, Homo sapiens
tgtcctcaattgtcc

SEQ ID NO: 2088229 - DNA, 15 bp, Homo sapiens
gtcctcaattgtcct

SEQ ID NO: 2088230 - DNA, 15 bp, Homo sapiens
tcctcaattgtcctg

SEQ ID NO: 2088231 - DNA, 15 bp, Homo sapiens
cctcaattgtcctgg

SEQ ID NO: 2088232 - DNA, 15 bp, Homo sapiens
ctcaattgtcctgga

SEQ ID NO: 2088233 - DNA, 15 bp, Homo sapiens
tcaattgtcctggag

SEQ ID NO: 2088234 - DNA, 15 bp, Homo sapiens
caattgtcctggagc

SEQ ID NO: 2088235 - DNA, 15 bp, Homo sapiens
aattgtcctggagct

SEQ ID NO: 2088236 - DNA, 15 bp, Homo sapiens
attgtcctggagcta

SEQ ID NO: 2088237 - DNA, 15 bp, Homo sapiens
ttgtcctggagctag

SEQ ID NO: 2088238 - DNA, 15 bp, Homo sapiens
tgtcctggagctagg

SEQ ID NO: 2088239 - DNA, 15 bp, Homo sapiens
gtcctggagctagga

SEQ ID NO: 2088240 - DNA, 15 bp, Homo sapiens
cctggagctaggagc

SEQ ID NO: 2088241 - DNA, 15 bp, Homo sapiens
ctggagctaggagca

SEQ ID NO: 2088242 - DNA, 15 bp, Homo sapiens
tggagctaggagcat

SEQ ID NO: 2088243 - DNA, 15 bp, Homo sapiens
ggagctaggagcatc

SEQ ID NO: 2088244 - DNA, 15 bp, Homo sapiens
gagctaggagcatct

SEQ ID NO: 2088245 - DNA, 15 bp, Homo sapiens
agctaggagcatctg

SEQ ID NO: 2088246 - DNA, 15 bp, Homo sapiens
gctaggagcatctgg

SEQ ID NO: 2088247 - DNA, 15 bp, Homo sapiens
ctaggagcatctggc

SEQ ID NO: 2088248 - DNA, 15 bp, Homo sapiens
taggagcatctggct

SEQ ID NO: 2088249 - DNA, 15 bp, Homo sapiens
aggagcatctggctt

SEQ ID NO: 2088250 - DNA, 15 bp, Homo sapiens
ggagcatctggctta

SEQ ID NO: 2088251 - DNA, 15 bp, Homo sapiens
gagcatctggcttaa

SEQ ID NO: 2088252 - DNA, 15 bp, Homo sapiens
agcatctggcttaaa

SEQ ID NO: 2088253 - DNA, 15 bp, Homo sapiens
gcatctggcttaaag

SEQ ID NO: 2088254 - DNA, 15 bp, Homo sapiens
catctggcttaaagt

SEQ ID NO: 2088255 - DNA, 15 bp, Homo sapiens
atctggcttaaagtt

SEQ ID NO: 2088256 - DNA, 15 bp, Homo sapiens
tctggcttaaagttg

SEQ ID NO: 2088257 - DNA, 15 bp, Homo sapiens
ctggcttaaagttga

SEQ ID NO: 2088258 - DNA, 15 bp, Homo sapiens
tggcttaaagttgaa

SEQ ID NO: 2088259 - DNA, 15 bp, Homo sapiens
ggcttaaagttgaac

SEQ ID NO: 2088260 - DNA, 15 bp, Homo sapiens
gcttaaagttgaaca

SEQ ID NO: 2088261 - DNA, 15 bp, Homo sapiens
cttaaagttgaacag

SEQ ID NO: 2088262 - DNA, 15 bp, Homo sapiens
aagttgaacaggagc

SEQ ID NO: 2088263 - DNA, 15 bp, Homo sapiens
agttgaacaggagcc

SEQ ID NO: 2088264 - DNA, 15 bp, Homo sapiens
gttgaacaggagcct

SEQ ID NO: 2088265 - DNA, 15 bp, Homo sapiens
ttgaacaggagcctc

SEQ ID NO: 2088266 - DNA, 15 bp, Homo sapiens
tgaacaggagcctcc

SEQ ID NO: 2088267 - DNA, 15 bp, Homo sapiens
gaacaggagcctccc

SEQ ID NO: 2088268 - DNA, 15 bp, Homo sapiens
aacaggagcctccca

SEQ ID NO: 2088269 - DNA, 15 bp, Homo sapiens
acaggagcctcccag

SEQ ID NO: 2088270 - DNA, 15 bp, Homo sapiens
caggagcctcccagc

SEQ ID NO: 2088271 - DNA, 15 bp, Homo sapiens
aggagcctcccagca

SEQ ID NO: 2088272 - DNA, 15 bp, Homo sapiens
ggagcctcccagcat

SEQ ID NO: 2088273 - DNA, 15 bp, Homo sapiens
gagcctcccagcatc

SEQ ID NO: 2088274 - DNA, 15 bp, Homo sapiens
agcctcccagcatcc

SEQ ID NO: 2088275 - DNA, 15 bp, Homo sapiens
gcctcccagcatcct

SEQ ID NO: 2088276 - DNA, 15 bp, Homo sapiens
cctcccagcatcctt

SEQ ID NO: 2088277 - DNA, 15 bp, Homo sapiens
ctcccagcatccttc

SEQ ID NO: 2088278 - DNA, 15 bp, Homo sapiens
tcccagcatccttct

SEQ ID NO: 2088279 - DNA, 15 bp, Homo sapiens
cccagcatccttctg

SEQ ID NO: 2088280 - DNA, 15 bp, Homo sapiens
ccagcatccttctgt

SEQ ID NO: 2088281 - DNA, 15 bp, Homo sapiens
cagcatccttctgtg

SEQ ID NO: 2088282 - DNA, 15 bp, Homo sapiens
agcatccttctgtgg

SEQ ID NO: 2088283 - DNA, 15 bp, Homo sapiens
gcatccttctgtgga

SEQ ID NO: 2088284 - DNA, 15 bp, Homo sapiens
catccttctgtggat

SEQ ID NO: 2088285 - DNA, 15 bp, Homo sapiens
atccttctgtggata

SEQ ID NO: 2088286 - DNA, 15 bp, Homo sapiens
tccttctgtggatat

SEQ ID NO: 2088287 - DNA, 15 bp, Homo sapiens
ccttctgtggatatc

SEQ ID NO: 2088288 - DNA, 15 bp, Homo sapiens
cttctgtggatatcc

SEQ ID NO: 2088289 - DNA, 15 bp, Homo sapiens
ttctgtggatatccc

SEQ ID NO: 2088290 - DNA, 15 bp, Homo sapiens
tctgtggatatccca

SEQ ID NO: 2088291 - DNA, 15 bp, Homo sapiens
ctgtggatatcccaa

SEQ ID NO: 2088292 - DNA, 15 bp, Homo sapiens
tgtggatatcccaaa

SEQ ID NO: 2088293 - DNA, 15 bp, Homo sapiens
gtggatatcccaaag

SEQ ID NO: 2088294 - DNA, 15 bp, Homo sapiens
tggatatcccaaagg

SEQ ID NO: 2088295 - DNA, 15 bp, Homo sapiens
ggatatcccaaaggc

SEQ ID NO: 2088296 - DNA, 15 bp, Homo sapiens
gatatcccaaaggcg

SEQ ID NO: 2088297 - DNA, 15 bp, Homo sapiens
atatcccaaaggcga

SEQ ID NO: 2088298 - DNA, 15 bp, Homo sapiens
tatcccaaaggcgat

SEQ ID NO: 2088299 - DNA, 15 bp, Homo sapiens
atcccaaaggcgatt

SEQ ID NO: 2088300 - DNA, 15 bp, Homo sapiens
tcccaaaggcgattg

SEQ ID NO: 2088301 - DNA, 15 bp, Homo sapiens
cccaaaggcgattgg

SEQ ID NO: 2088302 - DNA, 15 bp, Homo sapiens
ccaaaggcgattggt

SEQ ID NO: 2088303 - DNA, 15 bp, Homo sapiens
caaaggcgattggtt

SEQ ID NO: 2088304 - DNA, 15 bp, Homo sapiens
aaaggcgattggttt

SEQ ID NO: 2088305 - DNA, 15 bp, Homo sapiens
aaggcgattggtttg

SEQ ID NO: 2088306 - DNA, 15 bp, Homo sapiens
aggcgattggtttgg

SEQ ID NO: 2088307 - DNA, 15 bp, Homo sapiens
ggcgattggtttggg

SEQ ID NO: 2088308 - DNA, 15 bp, Homo sapiens
gcgattggtttgggg

SEQ ID NO: 2088309 - DNA, 15 bp, Homo sapiens
cgattggtttggggc

SEQ ID NO: 2088310 - DNA, 15 bp, Homo sapiens
gattggtttggggcc

SEQ ID NO: 2088311 - DNA, 15 bp, Homo sapiens
attggtttggggccg

SEQ ID NO: 2088312 - DNA, 15 bp, Homo sapiens
ttggtttggggccga

SEQ ID NO: 2088313 - DNA, 15 bp, Homo sapiens
tggtttggggccgag

SEQ ID NO: 2088314 - DNA, 15 bp, Homo sapiens
ggtttggggccgagt

SEQ ID NO: 2088315 - DNA, 15 bp, Homo sapiens
gtttggggccgagtg

SEQ ID NO: 2088316 - DNA, 15 bp, Homo sapiens
tttggggccgagtgg

SEQ ID NO: 2088317 - DNA, 15 bp, Homo sapiens
ttggggccgagtggt

SEQ ID NO: 2088318 - DNA, 15 bp, Homo sapiens
tggggccgagtggtg

SEQ ID NO: 2088319 - DNA, 15 bp, Homo sapiens
ggggccgagtggtgt

SEQ ID NO: 2088320 - DNA, 15 bp, Homo sapiens
gggccgagtggtgtg

SEQ ID NO: 2088321 - DNA, 15 bp, Homo sapiens
ggccgagtggtgtga

SEQ ID NO: 2088322 - DNA, 15 bp, Homo sapiens
gccgagtggtgtgaa

SEQ ID NO: 2088323 - DNA, 15 bp, Homo sapiens
ccgagtggtgtgaag

SEQ ID NO: 2088324 - DNA, 15 bp, Homo sapiens
cgagtggtgtgaagg

SEQ ID NO: 2088325 - DNA, 15 bp, Homo sapiens
gagtggtgtgaaggc

SEQ ID NO: 2088326 - DNA, 15 bp, Homo sapiens
agtggtgtgaaggca

SEQ ID NO: 2088327 - DNA, 15 bp, Homo sapiens
gtggtgtgaaggcag

SEQ ID NO: 2088328 - DNA, 15 bp, Homo sapiens
tggtgtgaaggcagg

SEQ ID NO: 2088329 - DNA, 15 bp, Homo sapiens
ggtgtgaaggcagga

SEQ ID NO: 2088330 - DNA, 15 bp, Homo sapiens
gtgtgaaggcaggaa

SEQ ID NO: 2088331 - DNA, 15 bp, Homo sapiens
tgtgaaggcaggaag

SEQ ID NO: 2088332 - DNA, 15 bp, Homo sapiens
gtgaaggcaggaaga

SEQ ID NO: 2088333 - DNA, 15 bp, Homo sapiens
tgaaggcaggaagac

SEQ ID NO: 2088334 - DNA, 15 bp, Homo sapiens
gaaggcaggaagaca

SEQ ID NO: 2088335 - DNA, 15 bp, Homo sapiens
aaggcaggaagacac

SEQ ID NO: 2088336 - DNA, 15 bp, Homo sapiens
aggcaggaagacacg

SEQ ID NO: 2088337 - DNA, 15 bp, Homo sapiens
ggcaggaagacacgc

SEQ ID NO: 2088338 - DNA, 15 bp, Homo sapiens
gcaggaagacacgcc

SEQ ID NO: 2088339 - DNA, 15 bp, Homo sapiens
caggaagacacgccc

SEQ ID NO: 2088340 - DNA, 15 bp, Homo sapiens
aggaagacacgccca

SEQ ID NO: 2088341 - DNA, 15 bp, Homo sapiens
ggaagacacgcccag

SEQ ID NO: 2088342 - DNA, 15 bp, Homo sapiens
gaagacacgcccagc

SEQ ID NO: 2088343 - DNA, 15 bp, Homo sapiens
aagacacgcccagcc

SEQ ID NO: 2088344 - DNA, 15 bp, Homo sapiens
agacacgcccagccc

SEQ ID NO: 2088345 - DNA, 15 bp, Homo sapiens
gacacgcccagccca

SEQ ID NO: 2088346 - DNA, 15 bp, Homo sapiens
acacgcccagcccaa

SEQ ID NO: 2088347 - DNA, 15 bp, Homo sapiens
cacgcccagcccaag

SEQ ID NO: 2088348 - DNA, 15 bp, Homo sapiens
acgcccagcccaaga

SEQ ID NO: 2088349 - DNA, 15 bp, Homo sapiens
cgcccagcccaagac

SEQ ID NO: 2088350 - DNA, 15 bp, Homo sapiens
gcccagcccaagacg

SEQ ID NO: 2088351 - DNA, 15 bp, Homo sapiens
cccagcccaagacgg

SEQ ID NO: 2088352 - DNA, 15 bp, Homo sapiens
ccagcccaagacggc

SEQ ID NO: 2088353 - DNA, 15 bp, Homo sapiens
cagcccaagacggcc

SEQ ID NO: 2088354 - DNA, 15 bp, Homo sapiens
agcccaagacggcca

SEQ ID NO: 2088355 - DNA, 15 bp, Homo sapiens
gcccaagacggccac

SEQ ID NO: 2088356 - DNA, 15 bp, Homo sapiens
cccaagacggccact

SEQ ID NO: 2088357 - DNA, 15 bp, Homo sapiens
ccaagacggccactt

SEQ ID NO: 2088358 - DNA, 15 bp, Homo sapiens
caagacggccacttc

SEQ ID NO: 2088359 - DNA, 15 bp, Homo sapiens
aagacggccacttct

SEQ ID NO: 2088360 - DNA, 15 bp, Homo sapiens
agacggccacttctg

SEQ ID NO: 2088361 - DNA, 15 bp, Homo sapiens
gacggccacttctgg

SEQ ID NO: 2088362 - DNA, 15 bp, Homo sapiens
acggccacttctgga

SEQ ID NO: 2088363 - DNA, 15 bp, Homo sapiens
cggccacttctggaa

SEQ ID NO: 2088364 - DNA, 15 bp, Homo sapiens
ggccacttctggaac

SEQ ID NO: 2088365 - DNA, 15 bp, Homo sapiens
gccacttctggaacc

SEQ ID NO: 2088366 - DNA, 15 bp, Homo sapiens
ccacttctggaaccg

SEQ ID NO: 2088367 - DNA, 15 bp, Homo sapiens
cacttctggaaccgc

SEQ ID NO: 2088368 - DNA, 15 bp, Homo sapiens
acttctggaaccgcc

SEQ ID NO: 2088369 - DNA, 15 bp, Homo sapiens
cttctggaaccgccc

SEQ ID NO: 2088370 - DNA, 15 bp, Homo sapiens
ttctggaaccgccca

SEQ ID NO: 2088371 - DNA, 15 bp, Homo sapiens
tctggaaccgcccag

SEQ ID NO: 2088372 - DNA, 15 bp, Homo sapiens
ctggaaccgcccagg

SEQ ID NO: 2088373 - DNA, 15 bp, Homo sapiens
tggaaccgcccaggc

SEQ ID NO: 2088374 - DNA, 15 bp, Homo sapiens
ggaaccgcccaggct

SEQ ID NO: 2088375 - DNA, 15 bp, Homo sapiens
gaaccgcccaggctg

SEQ ID NO: 2088376 - DNA, 15 bp, Homo sapiens
aaccgcccaggctgg

SEQ ID NO: 2088377 - DNA, 15 bp, Homo sapiens
accgcccaggctgga

SEQ ID NO: 2088378 - DNA, 15 bp, Homo sapiens
ccgcccaggctggag

SEQ ID NO: 2088379 - DNA, 15 bp, Homo sapiens
cgcccaggctggagc

SEQ ID NO: 2088380 - DNA, 15 bp, Homo sapiens
gcccaggctggagca

SEQ ID NO: 2088381 - DNA, 15 bp, Homo sapiens
cccaggctggagcag

SEQ ID NO: 2088382 - DNA, 15 bp, Homo sapiens
ccaggctggagcagc

SEQ ID NO: 2088383 - DNA, 15 bp, Homo sapiens
caggctggagcagcg

SEQ ID NO: 2088384 - DNA, 15 bp, Homo sapiens
aggctggagcagcgg

SEQ ID NO: 2088385 - DNA, 15 bp, Homo sapiens
ggctggagcagcggc

SEQ ID NO: 2088386 - DNA, 15 bp, Homo sapiens
gctggagcagcggcc

SEQ ID NO: 2088387 - DNA, 15 bp, Homo sapiens
ctggagcagcggcca

SEQ ID NO: 2088388 - DNA, 15 bp, Homo sapiens
tggagcagcggccaa

SEQ ID NO: 2088389 - DNA, 15 bp, Homo sapiens
ggagcagcggccaag

SEQ ID NO: 2088390 - DNA, 15 bp, Homo sapiens
gagcagcggccaagt

SEQ ID NO: 2088391 - DNA, 15 bp, Homo sapiens
agcagcggccaagtg

SEQ ID NO: 2088392 - DNA, 15 bp, Homo sapiens
gcagcggccaagtgc

SEQ ID NO: 2088393 - DNA, 15 bp, Homo sapiens
cagcggccaagtgcc

SEQ ID NO: 2088394 - DNA, 15 bp, Homo sapiens
agcggccaagtgcct

SEQ ID NO: 2088395 - DNA, 15 bp, Homo sapiens
gcggccaagtgcctt

SEQ ID NO: 2088396 - DNA, 15 bp, Homo sapiens
cggccaagtgcctta

SEQ ID NO: 2088397 - DNA, 15 bp, Homo sapiens
ggccaagtgccttag

SEQ ID NO: 2088398 - DNA, 15 bp, Homo sapiens
gccaagtgccttagc

SEQ ID NO: 2088399 - DNA, 15 bp, Homo sapiens
ccaagtgccttagca

SEQ ID NO: 2088400 - DNA, 15 bp, Homo sapiens
caagtgccttagcat

SEQ ID NO: 2088401 - DNA, 15 bp, Homo sapiens
aagtgccttagcatg

SEQ ID NO: 2088402 - DNA, 15 bp, Homo sapiens
agtgccttagcatgg

SEQ ID NO: 2088403 - DNA, 15 bp, Homo sapiens
gtgccttagcatgga

SEQ ID NO: 2088404 - DNA, 15 bp, Homo sapiens
tgccttagcatggaa

SEQ ID NO: 2088405 - DNA, 15 bp, Homo sapiens
gccttagcatggaag

SEQ ID NO: 2088406 - DNA, 15 bp, Homo sapiens
ccttagcatggaaga

SEQ ID NO: 2088407 - DNA, 15 bp, Homo sapiens
cttagcatggaagaa

SEQ ID NO: 2088408 - DNA, 15 bp, Homo sapiens
ttagcatggaagaag

SEQ ID NO: 2088409 - DNA, 15 bp, Homo sapiens
tagcatggaagaaga

SEQ ID NO: 2088410 - DNA, 15 bp, Homo sapiens
agcatggaagaagag

SEQ ID NO: 2088411 - DNA, 15 bp, Homo sapiens
gcatggaagaagaga

SEQ ID NO: 2088412 - DNA, 15 bp, Homo sapiens
catggaagaagagag

SEQ ID NO: 2088413 - DNA, 15 bp, Homo sapiens
atggaagaagagagc

SEQ ID NO: 2088414 - DNA, 15 bp, Homo sapiens
tggaagaagagagcc

SEQ ID NO: 2088415 - DNA, 15 bp, Homo sapiens
ggaagaagagagcct

SEQ ID NO: 2088416 - DNA, 15 bp, Homo sapiens
gaagaagagagcctg

SEQ ID NO: 2088417 - DNA, 15 bp, Homo sapiens
aagaagagagcctgt

SEQ ID NO: 2088418 - DNA, 15 bp, Homo sapiens
agaagagagcctgtg

SEQ ID NO: 2088419 - DNA, 15 bp, Homo sapiens
gaagagagcctgtgt

SEQ ID NO: 2088420 - DNA, 15 bp, Homo sapiens
aagagagcctgtgtt

SEQ ID NO: 2088421 - DNA, 15 bp, Homo sapiens
agagagcctgtgttc

SEQ ID NO: 2088422 - DNA, 15 bp, Homo sapiens
gagagcctgtgttca

SEQ ID NO: 2088423 - DNA, 15 bp, Homo sapiens
agagcctgtgttcag

SEQ ID NO: 2088424 - DNA, 15 bp, Homo sapiens
gagcctgtgttcagg

SEQ ID NO: 2088425 - DNA, 15 bp, Homo sapiens
agcctgtgttcaggg

SEQ ID NO: 2088426 - DNA, 15 bp, Homo sapiens
gcctgtgttcagggg

SEQ ID NO: 2088427 - DNA, 15 bp, Homo sapiens
cctgtgttcagggga

SEQ ID NO: 2088428 - DNA, 15 bp, Homo sapiens
ctgtgttcaggggac

SEQ ID NO: 2088429 - DNA, 15 bp, Homo sapiens
tgtgttcaggggacc

SEQ ID NO: 2088430 - DNA, 15 bp, Homo sapiens
gtgttcaggggacca

SEQ ID NO: 2088431 - DNA, 15 bp, Homo sapiens
tgttcaggggaccag

SEQ ID NO: 2088432 - DNA, 15 bp, Homo sapiens
gttcaggggaccagg

SEQ ID NO: 2088433 - DNA, 15 bp, Homo sapiens
ttcaggggaccaggc

SEQ ID NO: 2088434 - DNA, 15 bp, Homo sapiens
tcaggggaccaggcg

SEQ ID NO: 2088435 - DNA, 15 bp, Homo sapiens
caggggaccaggcgg

SEQ ID NO: 2088436 - DNA, 15 bp, Homo sapiens
aggggaccaggcggg

SEQ ID NO: 2088437 - DNA, 15 bp, Homo sapiens
ggggaccaggcgggt

SEQ ID NO: 2088438 - DNA, 15 bp, Homo sapiens
gggaccaggcgggtg

SEQ ID NO: 2088439 - DNA, 15 bp, Homo sapiens
ggaccaggcgggtga

SEQ ID NO: 2088440 - DNA, 15 bp, Homo sapiens
gaccaggcgggtgag

SEQ ID NO: 2088441 - DNA, 15 bp, Homo sapiens
accaggcgggtgaga

SEQ ID NO: 2088442 - DNA, 15 bp, Homo sapiens
ccaggcgggtgagac

SEQ ID NO: 2088443 - DNA, 15 bp, Homo sapiens
caggcgggtgagaca

SEQ ID NO: 2088444 - DNA, 15 bp, Homo sapiens
aggcgggtgagacac

SEQ ID NO: 2088445 - DNA, 15 bp, Homo sapiens
ggcgggtgagacaca

SEQ ID NO: 2088446 - DNA, 15 bp, Homo sapiens
gcgggtgagacacac

SEQ ID NO: 2088447 - DNA, 15 bp, Homo sapiens
cgggtgagacacacg

SEQ ID NO: 2088448 - DNA, 15 bp, Homo sapiens
gggtgagacacacgc

SEQ ID NO: 2088449 - DNA, 15 bp, Homo sapiens
ggtgagacacacgca

SEQ ID NO: 2088450 - DNA, 15 bp, Homo sapiens
gtgagacacacgcat

SEQ ID NO: 2088451 - DNA, 15 bp, Homo sapiens
tgagacacacgcata

SEQ ID NO: 2088452 - DNA, 15 bp, Homo sapiens
gagacacacgcataa

SEQ ID NO: 2088453 - DNA, 15 bp, Homo sapiens
agacacacgcataag

SEQ ID NO: 2088454 - DNA, 15 bp, Homo sapiens
gacacacgcataagc

SEQ ID NO: 2088455 - DNA, 15 bp, Homo sapiens
acacacgcataagca

SEQ ID NO: 2088456 - DNA, 15 bp, Homo sapiens
cacacgcataagcag

SEQ ID NO: 2088457 - DNA, 15 bp, Homo sapiens
acacgcataagcagg

SEQ ID NO: 2088458 - DNA, 15 bp, Homo sapiens
cacgcataagcaggg

SEQ ID NO: 2088459 - DNA, 15 bp, Homo sapiens
acgcataagcaggga

SEQ ID NO: 2088460 - DNA, 15 bp, Homo sapiens
cgcataagcagggac

SEQ ID NO: 2088461 - DNA, 15 bp, Homo sapiens
gcataagcagggact

SEQ ID NO: 2088462 - DNA, 15 bp, Homo sapiens
cataagcagggactg

SEQ ID NO: 2088463 - DNA, 15 bp, Homo sapiens
ataagcagggactgc

SEQ ID NO: 2088464 - DNA, 15 bp, Homo sapiens
taagcagggactgcc

SEQ ID NO: 2088465 - DNA, 15 bp, Homo sapiens
aagcagggactgccc

SEQ ID NO: 2088466 - DNA, 15 bp, Homo sapiens
agcagggactgcccg

SEQ ID NO: 2088467 - DNA, 15 bp, Homo sapiens
gcagggactgcccgc

SEQ ID NO: 2088468 - DNA, 15 bp, Homo sapiens
cagggactgcccgct

SEQ ID NO: 2088469 - DNA, 15 bp, Homo sapiens
agggactgcccgctg

SEQ ID NO: 2088470 - DNA, 15 bp, Homo sapiens
gggactgcccgctgg

SEQ ID NO: 2088471 - DNA, 15 bp, Homo sapiens
ggactgcccgctggt

SEQ ID NO: 2088472 - DNA, 15 bp, Homo sapiens
gactgcccgctggtg

SEQ ID NO: 2088473 - DNA, 15 bp, Homo sapiens
actgcccgctggtgt

SEQ ID NO: 2088474 - DNA, 15 bp, Homo sapiens
ctgcccgctggtgtt

SEQ ID NO: 2088475 - DNA, 15 bp, Homo sapiens
tgcccgctggtgttt

SEQ ID NO: 2088476 - DNA, 15 bp, Homo sapiens
gcccgctggtgtttt

SEQ ID NO: 2088477 - DNA, 15 bp, Homo sapiens
cccgctggtgttttc

SEQ ID NO: 2088478 - DNA, 15 bp, Homo sapiens
ccgctggtgttttct

SEQ ID NO: 2088479 - DNA, 15 bp, Homo sapiens
cgctggtgttttctt

SEQ ID NO: 2088480 - DNA, 15 bp, Homo sapiens
gctggtgttttcttt

SEQ ID NO: 2088481 - DNA, 15 bp, Homo sapiens
ctggtgttttctttg

SEQ ID NO: 2088482 - DNA, 15 bp, Homo sapiens
tggtgttttctttgg

SEQ ID NO: 2088483 - DNA, 15 bp, Homo sapiens
ggtgttttctttggc

SEQ ID NO: 2088484 - DNA, 15 bp, Homo sapiens
gtgttttctttggct

SEQ ID NO: 2088485 - DNA, 15 bp, Homo sapiens
tgttttctttggcta

SEQ ID NO: 2088486 - DNA, 15 bp, Homo sapiens
gttttctttggctac

SEQ ID NO: 2088487 - DNA, 15 bp, Homo sapiens
ttttctttggctaca

SEQ ID NO: 2088488 - DNA, 15 bp, Homo sapiens
tttctttggctacat

SEQ ID NO: 2088489 - DNA, 15 bp, Homo sapiens
ttctttggctacatg

SEQ ID NO: 2088490 - DNA, 15 bp, Homo sapiens
tctttggctacatga

SEQ ID NO: 2088491 - DNA, 15 bp, Homo sapiens
ctttggctacatgag

SEQ ID NO: 2088492 - DNA, 15 bp, Homo sapiens
tttggctacatgagt

SEQ ID NO: 2088493 - DNA, 15 bp, Homo sapiens
ttggctacatgagtc

SEQ ID NO: 2088494 - DNA, 15 bp, Homo sapiens
tggctacatgagtct

SEQ ID NO: 2088495 - DNA, 15 bp, Homo sapiens
ggctacatgagtctg

SEQ ID NO: 2088496 - DNA, 15 bp, Homo sapiens
gctacatgagtctgt

SEQ ID NO: 2088497 - DNA, 15 bp, Homo sapiens
ctacatgagtctgtg

SEQ ID NO: 2088498 - DNA, 15 bp, Homo sapiens
catgagtctgtgtgc

SEQ ID NO: 2088499 - DNA, 15 bp, Homo sapiens
atgagtctgtgtgca

SEQ ID NO: 2088500 - DNA, 15 bp, Homo sapiens
tgagtctgtgtgcaa

SEQ ID NO: 2088501 - DNA, 15 bp, Homo sapiens
gagtctgtgtgcaac

SEQ ID NO: 2088502 - DNA, 15 bp, Homo sapiens
agtctgtgtgcaact

SEQ ID NO: 2088503 - DNA, 15 bp, Homo sapiens
gtctgtgtgcaactt

SEQ ID NO: 2088504 - DNA, 15 bp, Homo sapiens
tctgtgtgcaacttg

SEQ ID NO: 2088505 - DNA, 15 bp, Homo sapiens
ctgtgtgcaacttga

SEQ ID NO: 2088506 - DNA, 15 bp, Homo sapiens
tgtgtgcaacttgaa

SEQ ID NO: 2088507 - DNA, 15 bp, Homo sapiens
gtgtgcaacttgaat

SEQ ID NO: 2088508 - DNA, 15 bp, Homo sapiens
tgtgcaacttgaatg

SEQ ID NO: 2088509 - DNA, 15 bp, Homo sapiens
gtgcaacttgaatgg

SEQ ID NO: 2088510 - DNA, 15 bp, Homo sapiens
tgcaacttgaatggg

SEQ ID NO: 2088511 - DNA, 15 bp, Homo sapiens
gcaacttgaatggga

SEQ ID NO: 2088512 - DNA, 15 bp, Homo sapiens
caacttgaatgggag

SEQ ID NO: 2088513 - DNA, 15 bp, Homo sapiens
aacttgaatgggagg

SEQ ID NO: 2088514 - DNA, 15 bp, Homo sapiens
acttgaatgggaggc

SEQ ID NO: 2088515 - DNA, 15 bp, Homo sapiens
cttgaatgggaggcc

SEQ ID NO: 2088516 - DNA, 15 bp, Homo sapiens
ttgaatgggaggcct

SEQ ID NO: 2088517 - DNA, 15 bp, Homo sapiens
tgaatgggaggcctt

SEQ ID NO: 2088518 - DNA, 15 bp, Homo sapiens
gaatgggaggccttg

SEQ ID NO: 2088519 - DNA, 15 bp, Homo sapiens
aatgggaggccttgt

SEQ ID NO: 2088520 - DNA, 15 bp, Homo sapiens
atgggaggccttgtg

SEQ ID NO: 2088521 - DNA, 15 bp, Homo sapiens
tgggaggccttgtgc

SEQ ID NO: 2088522 - DNA, 15 bp, Homo sapiens
gggaggccttgtgct

SEQ ID NO: 2088523 - DNA, 15 bp, Homo sapiens
ggaggccttgtgctt

SEQ ID NO: 2088524 - DNA, 15 bp, Homo sapiens
gaggccttgtgcttt

SEQ ID NO: 2088525 - DNA, 15 bp, Homo sapiens
aggccttgtgctttt

SEQ ID NO: 2088526 - DNA, 15 bp, Homo sapiens
ggccttgtgctttta

SEQ ID NO: 2088527 - DNA, 15 bp, Homo sapiens
gccttgtgcttttat

SEQ ID NO: 2088528 - DNA, 15 bp, Homo sapiens
ccttgtgcttttatt

SEQ ID NO: 2088529 - DNA, 15 bp, Homo sapiens
cttgtgcttttattt

SEQ ID NO: 2088530 - DNA, 15 bp, Homo sapiens
ttgtgcttttatttt

SEQ ID NO: 2088531 - DNA, 15 bp, Homo sapiens
tgtgcttttattttt

SEQ ID NO: 2088532 - DNA, 15 bp, Homo sapiens
gtgcttttatttttt

SEQ ID NO: 2088533 - DNA, 15 bp, Homo sapiens
tgcttttattttttt

SEQ ID NO: 2088534 - DNA, 15 bp, Homo sapiens
gcttttatttttttt

SEQ ID NO: 2088535 - DNA, 15 bp, Homo sapiens
cttttattttttttt

SEQ ID NO: 2088536 - DNA, 15 bp, Homo sapiens
tttttttttaatgtg

SEQ ID NO: 2088537 - DNA, 15 bp, Homo sapiens
ttttttttaatgtgc

SEQ ID NO: 2088538 - DNA, 15 bp, Homo sapiens
tttttttaatgtgct

SEQ ID NO: 2088539 - DNA, 15 bp, Homo sapiens
ttttttaatgtgctt

SEQ ID NO: 2088540 - DNA, 15 bp, Homo sapiens
tttttaatgtgcttt

SEQ ID NO: 2088541 - DNA, 15 bp, Homo sapiens
ttttaatgtgctttt

SEQ ID NO: 2088542 - DNA, 15 bp, Homo sapiens
tttaatgtgcttttt

SEQ ID NO: 2088543 - DNA, 15 bp, Homo sapiens
ttaatgtgctttttg

SEQ ID NO: 2088544 - DNA, 15 bp, Homo sapiens
taatgtgctttttgg

SEQ ID NO: 2088545 - DNA, 15 bp, Homo sapiens
aatgtgctttttggt

SEQ ID NO: 2088546 - DNA, 15 bp, Homo sapiens
atgtgctttttggtt

SEQ ID NO: 2088547 - DNA, 15 bp, Homo sapiens
tgtgctttttggtta

SEQ ID NO: 2088548 - DNA, 15 bp, Homo sapiens
gtgctttttggttaa

SEQ ID NO: 2088549 - DNA, 15 bp, Homo sapiens
tgctttttggttaac

SEQ ID NO: 2088550 - DNA, 15 bp, Homo sapiens
gctttttggttaaca

SEQ ID NO: 2088551 - DNA, 15 bp, Homo sapiens
ctttttggttaacaa

SEQ ID NO: 2088552 - DNA, 15 bp, Homo sapiens
tttttggttaacaac

SEQ ID NO: 2088553 - DNA, 15 bp, Homo sapiens
ttttggttaacaaca

SEQ ID NO: 2088554 - DNA, 15 bp, Homo sapiens
tttggttaacaacag

SEQ ID NO: 2088555 - DNA, 15 bp, Homo sapiens
ttggttaacaacaga

SEQ ID NO: 2088556 - DNA, 15 bp, Homo sapiens
tggttaacaacagaa

SEQ ID NO: 2088557 - DNA, 15 bp, Homo sapiens
ggttaacaacagaag

SEQ ID NO: 2088558 - DNA, 15 bp, Homo sapiens
gttaacaacagaagt

SEQ ID NO: 2088559 - DNA, 15 bp, Homo sapiens
ttaacaacagaagtc

SEQ ID NO: 2088560 - DNA, 15 bp, Homo sapiens
taacaacagaagtcc

SEQ ID NO: 2088561 - DNA, 15 bp, Homo sapiens
aacaacagaagtccc

SEQ ID NO: 2088562 - DNA, 15 bp, Homo sapiens
acaacagaagtccct

SEQ ID NO: 2088563 - DNA, 15 bp, Homo sapiens
caacagaagtcccta

SEQ ID NO: 2088564 - DNA, 15 bp, Homo sapiens
aacagaagtccctac

SEQ ID NO: 2088565 - DNA, 15 bp, Homo sapiens
acagaagtccctaca

SEQ ID NO: 2088566 - DNA, 15 bp, Homo sapiens
cagaagtccctacag

SEQ ID NO: 2088567 - DNA, 15 bp, Homo sapiens
agaagtccctacagt

SEQ ID NO: 2088568 - DNA, 15 bp, Homo sapiens
gaagtccctacagtt

SEQ ID NO: 2088569 - DNA, 15 bp, Homo sapiens
aagtccctacagttg

SEQ ID NO: 2088570 - DNA, 15 bp, Homo sapiens
agtccctacagttgg

SEQ ID NO: 2088571 - DNA, 15 bp, Homo sapiens
gtccctacagttggc

SEQ ID NO: 2088572 - DNA, 15 bp, Homo sapiens
tccctacagttggcc

SEQ ID NO: 2088573 - DNA, 15 bp, Homo sapiens
ccctacagttggccc

SEQ ID NO: 2088574 - DNA, 15 bp, Homo sapiens
cctacagttggccct

SEQ ID NO: 2088575 - DNA, 15 bp, Homo sapiens
ctacagttggccctc

SEQ ID NO: 2088576 - DNA, 15 bp, Homo sapiens
tacagttggccctct

SEQ ID NO: 2088577 - DNA, 15 bp, Homo sapiens
acagttggccctctg

SEQ ID NO: 2088578 - DNA, 15 bp, Homo sapiens
cagttggccctctgt

SEQ ID NO: 2088579 - DNA, 15 bp, Homo sapiens
agttggccctctgtg

SEQ ID NO: 2088580 - DNA, 15 bp, Homo sapiens
gttggccctctgtgt

SEQ ID NO: 2088581 - DNA, 15 bp, Homo sapiens
ttggccctctgtgtc

SEQ ID NO: 2088582 - DNA, 15 bp, Homo sapiens
tggccctctgtgtct

SEQ ID NO: 2088583 - DNA, 15 bp, Homo sapiens
ggccctctgtgtctg

SEQ ID NO: 2088584 - DNA, 15 bp, Homo sapiens
gccctctgtgtctgc

SEQ ID NO: 2088585 - DNA, 15 bp, Homo sapiens
ccctctgtgtctgca

SEQ ID NO: 2088586 - DNA, 15 bp, Homo sapiens
cctctgtgtctgcag

SEQ ID NO: 2088587 - DNA, 15 bp, Homo sapiens
ctctgtgtctgcagg

SEQ ID NO: 2088588 - DNA, 15 bp, Homo sapiens
tctgtgtctgcaggt

SEQ ID NO: 2088589 - DNA, 15 bp, Homo sapiens
ctgtgtctgcaggtt

SEQ ID NO: 2088590 - DNA, 15 bp, Homo sapiens
tgtgtctgcaggttc

SEQ ID NO: 2088591 - DNA, 15 bp, Homo sapiens
gtgtctgcaggttct

SEQ ID NO: 2088592 - DNA, 15 bp, Homo sapiens
tgtctgcaggttctg

SEQ ID NO: 2088593 - DNA, 15 bp, Homo sapiens
gtctgcaggttctgc

SEQ ID NO: 2088594 - DNA, 15 bp, Homo sapiens
tctgcaggttctgca

SEQ ID NO: 2088595 - DNA, 15 bp, Homo sapiens
ctgcaggttctgcat

SEQ ID NO: 2088596 - DNA, 15 bp, Homo sapiens
tgcaggttctgcatc

SEQ ID NO: 2088597 - DNA, 15 bp, Homo sapiens
gcaggttctgcatcc

SEQ ID NO: 2088598 - DNA, 15 bp, Homo sapiens
caggttctgcatccg

SEQ ID NO: 2088599 - DNA, 15 bp, Homo sapiens
aggttctgcatccgt

SEQ ID NO: 2088600 - DNA, 15 bp, Homo sapiens
ggttctgcatccgtg

SEQ ID NO: 2088601 - DNA, 15 bp, Homo sapiens
gttctgcatccgtgg

SEQ ID NO: 2088602 - DNA, 15 bp, Homo sapiens
ttctgcatccgtgga

SEQ ID NO: 2088603 - DNA, 15 bp, Homo sapiens
tctgcatccgtggat

SEQ ID NO: 2088604 - DNA, 15 bp, Homo sapiens
ctgcatccgtggatt

SEQ ID NO: 2088605 - DNA, 15 bp, Homo sapiens
tgcatccgtggattc

SEQ ID NO: 2088606 - DNA, 15 bp, Homo sapiens
gcatccgtggattca

SEQ ID NO: 2088607 - DNA, 15 bp, Homo sapiens
catccgtggattcaa

SEQ ID NO: 2088608 - DNA, 15 bp, Homo sapiens
atccgtggattcaat

SEQ ID NO: 2088609 - DNA, 15 bp, Homo sapiens
tccgtggattcaatc

SEQ ID NO: 2088610 - DNA, 15 bp, Homo sapiens
ccgtggattcaatca

SEQ ID NO: 2088611 - DNA, 15 bp, Homo sapiens
cgtggattcaatcaa

SEQ ID NO: 2088612 - DNA, 15 bp, Homo sapiens
gtggattcaatcaac

SEQ ID NO: 2088613 - DNA, 15 bp, Homo sapiens
tggattcaatcaact

SEQ ID NO: 2088614 - DNA, 15 bp, Homo sapiens
ggattcaatcaactg

SEQ ID NO: 2088615 - DNA, 15 bp, Homo sapiens
gattcaatcaactgc

SEQ ID NO: 2088616 - DNA, 15 bp, Homo sapiens
attcaatcaactgca

SEQ ID NO: 2088617 - DNA, 15 bp, Homo sapiens
ttcaatcaactgcag

SEQ ID NO: 2088618 - DNA, 15 bp, Homo sapiens
tcaatcaactgcaga

SEQ ID NO: 2088619 - DNA, 15 bp, Homo sapiens
caatcaactgcagat

SEQ ID NO: 2088620 - DNA, 15 bp, Homo sapiens
aatcaactgcagatg

SEQ ID NO: 2088621 - DNA, 15 bp, Homo sapiens
atcaactgcagatga

SEQ ID NO: 2088622 - DNA, 15 bp, Homo sapiens
tcaactgcagatgaa

SEQ ID NO: 2088623 - DNA, 15 bp, Homo sapiens
caactgcagatgaaa

SEQ ID NO: 2088624 - DNA, 15 bp, Homo sapiens
aactgcagatgaaaa

SEQ ID NO: 2088625 - DNA, 15 bp, Homo sapiens
actgcagatgaaaag

SEQ ID NO: 2088626 - DNA, 15 bp, Homo sapiens
ctgcagatgaaaagt

SEQ ID NO: 2088627 - DNA, 15 bp, Homo sapiens
tgcagatgaaaagtt

SEQ ID NO: 2088628 - DNA, 15 bp, Homo sapiens
gcagatgaaaagttt

SEQ ID NO: 2088629 - DNA, 15 bp, Homo sapiens
cagatgaaaagtttt

SEQ ID NO: 2088630 - DNA, 15 bp, Homo sapiens
agatgaaaagttttc

SEQ ID NO: 2088631 - DNA, 15 bp, Homo sapiens
gatgaaaagttttca

SEQ ID NO: 2088632 - DNA, 15 bp, Homo sapiens
atgaaaagttttcag

SEQ ID NO: 2088633 - DNA, 15 bp, Homo sapiens
tgaaaagttttcaga

SEQ ID NO: 2088634 - DNA, 15 bp, Homo sapiens
gaaaagttttcagaa

SEQ ID NO: 2088635 - DNA, 15 bp, Homo sapiens
aaaagttttcagaaa

SEQ ID NO: 2088636 - DNA, 15 bp, Homo sapiens
aaagttttcagaaaa

SEQ ID NO: 2088637 - DNA, 15 bp, Homo sapiens
aagttttcagaaaaa

SEQ ID NO: 2088638 - DNA, 15 bp, Homo sapiens
agttttcagaaaaaa

SEQ ID NO: 2088639 - DNA, 15 bp, Homo sapiens
gttttcagaaaaaat

SEQ ID NO: 2088640 - DNA, 15 bp, Homo sapiens
ttttcagaaaaaatc

SEQ ID NO: 2088641 - DNA, 15 bp, Homo sapiens
tttcagaaaaaatcc

SEQ ID NO: 2088642 - DNA, 15 bp, Homo sapiens
ttcagaaaaaatccc

SEQ ID NO: 2088643 - DNA, 15 bp, Homo sapiens
tcagaaaaaatcccc

SEQ ID NO: 2088644 - DNA, 15 bp, Homo sapiens
cagaaaaaatccccc

SEQ ID NO: 2088645 - DNA, 15 bp, Homo sapiens
agaaaaaatcccccc

SEQ ID NO: 2088646 - DNA, 15 bp, Homo sapiens
gaaaaaatcccccca

SEQ ID NO: 2088647 - DNA, 15 bp, Homo sapiens
aaaaaatccccccaa

SEQ ID NO: 2088648 - DNA, 15 bp, Homo sapiens
aaaaatccccccaaa

SEQ ID NO: 2088649 - DNA, 15 bp, Homo sapiens
aaaatccccccaaaa

SEQ ID NO: 2088650 - DNA, 15 bp, Homo sapiens
aaatccccccaaaat

SEQ ID NO: 2088651 - DNA, 15 bp, Homo sapiens
aatccccccaaaata

SEQ ID NO: 2088652 - DNA, 15 bp, Homo sapiens
atccccccaaaataa

SEQ ID NO: 2088653 - DNA, 15 bp, Homo sapiens
tccccccaaaataac

SEQ ID NO: 2088654 - DNA, 15 bp, Homo sapiens
ccccccaaaataaca

SEQ ID NO: 2088655 - DNA, 15 bp, Homo sapiens
cccccaaaataacaa

SEQ ID NO: 2088656 - DNA, 15 bp, Homo sapiens
ccccaaaataacaat

SEQ ID NO: 2088657 - DNA, 15 bp, Homo sapiens
cccaaaataacaata

SEQ ID NO: 2088658 - DNA, 15 bp, Homo sapiens
ccaaaataacaatac

SEQ ID NO: 2088659 - DNA, 15 bp, Homo sapiens
caaaataacaataca

SEQ ID NO: 2088660 - DNA, 15 bp, Homo sapiens
aaaataacaatacaa

SEQ ID NO: 2088661 - DNA, 15 bp, Homo sapiens
aaataacaatacaac

SEQ ID NO: 2088662 - DNA, 15 bp, Homo sapiens
aataacaatacaact

SEQ ID NO: 2088663 - DNA, 15 bp, Homo sapiens
ataacaatacaacta

SEQ ID NO: 2088664 - DNA, 15 bp, Homo sapiens
taacaatacaactaa

SEQ ID NO: 2088665 - DNA, 15 bp, Homo sapiens
aacaatacaactaaa

SEQ ID NO: 2088666 - DNA, 15 bp, Homo sapiens
acaatacaactaaaa

SEQ ID NO: 2088667 - DNA, 15 bp, Homo sapiens
caatacaactaaaaa

SEQ ID NO: 2088668 - DNA, 15 bp, Homo sapiens
aatacaactaaaaaa

SEQ ID NO: 2088669 - DNA, 15 bp, Homo sapiens
atacaactaaaaaaa

SEQ ID NO: 2088670 - DNA, 15 bp, Homo sapiens
tacaactaaaaaaag

SEQ ID NO: 2088671 - DNA, 15 bp, Homo sapiens
acaactaaaaaaaga

SEQ ID NO: 2088672 - DNA, 15 bp, Homo sapiens
caactaaaaaaagac

SEQ ID NO: 2088673 - DNA, 15 bp, Homo sapiens
aactaaaaaaagaca

SEQ ID NO: 2088674 - DNA, 15 bp, Homo sapiens
actaaaaaaagacat

SEQ ID NO: 2088675 - DNA, 15 bp, Homo sapiens
ctaaaaaaagacata

SEQ ID NO: 2088676 - DNA, 15 bp, Homo sapiens
taaaaaaagacataa

SEQ ID NO: 2088677 - DNA, 15 bp, Homo sapiens
aaaaaaagacataaa

SEQ ID NO: 2088678 - DNA, 15 bp, Homo sapiens
aaaaaagacataaaa

SEQ ID NO: 2088679 - DNA, 15 bp, Homo sapiens
aaaaagacataaaaa

SEQ ID NO: 2088680 - DNA, 15 bp, Homo sapiens
aaaagacataaaaac

SEQ ID NO: 2088681 - DNA, 15 bp, Homo sapiens
aaagacataaaaaca

SEQ ID NO: 2088682 - DNA, 15 bp, Homo sapiens
aagacataaaaacaa

SEQ ID NO: 2088683 - DNA, 15 bp, Homo sapiens
agacataaaaacaat

SEQ ID NO: 2088684 - DNA, 15 bp, Homo sapiens
gacataaaaacaata

SEQ ID NO: 2088685 - DNA, 15 bp, Homo sapiens
acataaaaacaatac

SEQ ID NO: 2088686 - DNA, 15 bp, Homo sapiens
cataaaaacaatact

SEQ ID NO: 2088687 - DNA, 15 bp, Homo sapiens
ataaaaacaatactg

SEQ ID NO: 2088688 - DNA, 15 bp, Homo sapiens
taaaaacaatactgt

SEQ ID NO: 2088689 - DNA, 15 bp, Homo sapiens
aaaaacaatactgta

SEQ ID NO: 2088690 - DNA, 15 bp, Homo sapiens
aaaacaatactgtat

SEQ ID NO: 2088691 - DNA, 15 bp, Homo sapiens
aaacaatactgtata

SEQ ID NO: 2088692 - DNA, 15 bp, Homo sapiens
aacaatactgtataa

SEQ ID NO: 2088693 - DNA, 15 bp, Homo sapiens
acaatactgtataac

SEQ ID NO: 2088694 - DNA, 15 bp, Homo sapiens
caatactgtataaca

SEQ ID NO: 2088695 - DNA, 15 bp, Homo sapiens
aatactgtataacaa

SEQ ID NO: 2088696 - DNA, 15 bp, Homo sapiens
atactgtataacaac

SEQ ID NO: 2088697 - DNA, 15 bp, Homo sapiens
tactgtataacaact

SEQ ID NO: 2088698 - DNA, 15 bp, Homo sapiens
actgtataacaacta

SEQ ID NO: 2088699 - DNA, 15 bp, Homo sapiens
ctgtataacaactat

SEQ ID NO: 2088700 - DNA, 15 bp, Homo sapiens
tgtataacaactatt

SEQ ID NO: 2088701 - DNA, 15 bp, Homo sapiens
gtataacaactattg

SEQ ID NO: 2088702 - DNA, 15 bp, Homo sapiens
tataacaactattga

SEQ ID NO: 2088703 - DNA, 15 bp, Homo sapiens
ataacaactattgac

SEQ ID NO: 2088704 - DNA, 15 bp, Homo sapiens
taacaactattgaca

SEQ ID NO: 2088705 - DNA, 15 bp, Homo sapiens
aacaactattgacat

SEQ ID NO: 2088706 - DNA, 15 bp, Homo sapiens
acaactattgacata

SEQ ID NO: 2088707 - DNA, 15 bp, Homo sapiens
caactattgacatag

SEQ ID NO: 2088708 - DNA, 15 bp, Homo sapiens
aactattgacatagc

SEQ ID NO: 2088709 - DNA, 15 bp, Homo sapiens
actattgacatagca

SEQ ID NO: 2088710 - DNA, 15 bp, Homo sapiens
ctattgacatagcat

SEQ ID NO: 2088711 - DNA, 15 bp, Homo sapiens
tattgacatagcatt

SEQ ID NO: 2088712 - DNA, 15 bp, Homo sapiens
attgacatagcattt

SEQ ID NO: 2088713 - DNA, 15 bp, Homo sapiens
ttgacatagcattta

SEQ ID NO: 2088714 - DNA, 15 bp, Homo sapiens
tgacatagcatttac

SEQ ID NO: 2088715 - DNA, 15 bp, Homo sapiens
gacatagcatttaca

SEQ ID NO: 2088716 - DNA, 15 bp, Homo sapiens
acatagcatttacat

SEQ ID NO: 2088717 - DNA, 15 bp, Homo sapiens
catagcatttacatc

SEQ ID NO: 2088718 - DNA, 15 bp, Homo sapiens
atagcatttacatcg

SEQ ID NO: 2088719 - DNA, 15 bp, Homo sapiens
tagcatttacatcgt

SEQ ID NO: 2088720 - DNA, 15 bp, Homo sapiens
agcatttacatcgta

SEQ ID NO: 2088721 - DNA, 15 bp, Homo sapiens
gcatttacatcgtat

SEQ ID NO: 2088722 - DNA, 15 bp, Homo sapiens
catttacatcgtatt

SEQ ID NO: 2088723 - DNA, 15 bp, Homo sapiens
atttacatcgtatta

SEQ ID NO: 2088724 - DNA, 15 bp, Homo sapiens
tttacatcgtattag

SEQ ID NO: 2088725 - DNA, 15 bp, Homo sapiens
ttacatcgtattagg

SEQ ID NO: 2088726 - DNA, 15 bp, Homo sapiens
tacatcgtattaggt

SEQ ID NO: 2088727 - DNA, 15 bp, Homo sapiens
acatcgtattaggta

SEQ ID NO: 2088728 - DNA, 15 bp, Homo sapiens
catcgtattaggtat

SEQ ID NO: 2088729 - DNA, 15 bp, Homo sapiens
atcgtattaggtatt

SEQ ID NO: 2088730 - DNA, 15 bp, Homo sapiens
tcgtattaggtatta

SEQ ID NO: 2088731 - DNA, 15 bp, Homo sapiens
cgtattaggtattat

SEQ ID NO: 2088732 - DNA, 15 bp, Homo sapiens
gtattaggtattata

SEQ ID NO: 2088733 - DNA, 15 bp, Homo sapiens
tattaggtattataa

SEQ ID NO: 2088734 - DNA, 15 bp, Homo sapiens
attaggtattataag

SEQ ID NO: 2088735 - DNA, 15 bp, Homo sapiens
ttaggtattataagt

SEQ ID NO: 2088736 - DNA, 15 bp, Homo sapiens
taggtattataagta

SEQ ID NO: 2088737 - DNA, 15 bp, Homo sapiens
aggtattataagtaa

SEQ ID NO: 2088738 - DNA, 15 bp, Homo sapiens
ggtattataagtaac

SEQ ID NO: 2088739 - DNA, 15 bp, Homo sapiens
gtattataagtaacc

SEQ ID NO: 2088740 - DNA, 15 bp, Homo sapiens
tattataagtaacct

SEQ ID NO: 2088741 - DNA, 15 bp, Homo sapiens
attataagtaaccta

SEQ ID NO: 2088742 - DNA, 15 bp, Homo sapiens
ttataagtaacctag

SEQ ID NO: 2088743 - DNA, 15 bp, Homo sapiens
tataagtaacctaga

SEQ ID NO: 2088744 - DNA, 15 bp, Homo sapiens
ataagtaacctagag

SEQ ID NO: 2088745 - DNA, 15 bp, Homo sapiens
taagtaacctagaga

SEQ ID NO: 2088746 - DNA, 15 bp, Homo sapiens
aagtaacctagagat

SEQ ID NO: 2088747 - DNA, 15 bp, Homo sapiens
agtaacctagagatg

SEQ ID NO: 2088748 - DNA, 15 bp, Homo sapiens
gtaacctagagatga

SEQ ID NO: 2088749 - DNA, 15 bp, Homo sapiens
taacctagagatgat

SEQ ID NO: 2088750 - DNA, 15 bp, Homo sapiens
aacctagagatgatt

SEQ ID NO: 2088751 - DNA, 15 bp, Homo sapiens
acctagagatgattt

SEQ ID NO: 2088752 - DNA, 15 bp, Homo sapiens
cctagagatgattta

SEQ ID NO: 2088753 - DNA, 15 bp, Homo sapiens
ctagagatgatttaa

SEQ ID NO: 2088754 - DNA, 15 bp, Homo sapiens
tagagatgatttaaa

SEQ ID NO: 2088755 - DNA, 15 bp, Homo sapiens
agagatgatttaaag

SEQ ID NO: 2088756 - DNA, 15 bp, Homo sapiens
gagatgatttaaaga

SEQ ID NO: 2088757 - DNA, 15 bp, Homo sapiens
agatgatttaaagaa

SEQ ID NO: 2088758 - DNA, 15 bp, Homo sapiens
gatgatttaaagaat

SEQ ID NO: 2088759 - DNA, 15 bp, Homo sapiens
atgatttaaagaata

SEQ ID NO: 2088760 - DNA, 15 bp, Homo sapiens
tgatttaaagaatac

SEQ ID NO: 2088761 - DNA, 15 bp, Homo sapiens
gatttaaagaatacg

SEQ ID NO: 2088762 - DNA, 15 bp, Homo sapiens
atttaaagaatacgg

SEQ ID NO: 2088763 - DNA, 15 bp, Homo sapiens
tttaaagaatacggg

SEQ ID NO: 2088764 - DNA, 15 bp, Homo sapiens
ttaaagaatacggga

SEQ ID NO: 2088765 - DNA, 15 bp, Homo sapiens
taaagaatacgggag

SEQ ID NO: 2088766 - DNA, 15 bp, Homo sapiens
aaagaatacgggagg

SEQ ID NO: 2088767 - DNA, 15 bp, Homo sapiens
aagaatacgggagga

SEQ ID NO: 2088768 - DNA, 15 bp, Homo sapiens
agaatacgggaggat

SEQ ID NO: 2088769 - DNA, 15 bp, Homo sapiens
gaatacgggaggatg

SEQ ID NO: 2088770 - DNA, 15 bp, Homo sapiens
aatacgggaggatgc

SEQ ID NO: 2088771 - DNA, 15 bp, Homo sapiens
atacgggaggatgcg

SEQ ID NO: 2088772 - DNA, 15 bp, Homo sapiens
tacgggaggatgcgc

SEQ ID NO: 2088773 - DNA, 15 bp, Homo sapiens
acgggaggatgcgca

SEQ ID NO: 2088774 - DNA, 15 bp, Homo sapiens
cgggaggatgcgcat

SEQ ID NO: 2088775 - DNA, 15 bp, Homo sapiens
gggaggatgcgcata

SEQ ID NO: 2088776 - DNA, 15 bp, Homo sapiens
ggaggatgcgcatag

SEQ ID NO: 2088777 - DNA, 15 bp, Homo sapiens
gaggatgcgcatagg

SEQ ID NO: 2088778 - DNA, 15 bp, Homo sapiens
aggatgcgcataggt

SEQ ID NO: 2088779 - DNA, 15 bp, Homo sapiens
ggatgcgcataggtg

SEQ ID NO: 2088780 - DNA, 15 bp, Homo sapiens
gatgcgcataggtga

SEQ ID NO: 2088781 - DNA, 15 bp, Homo sapiens
atgcgcataggtgat

SEQ ID NO: 2088782 - DNA, 15 bp, Homo sapiens
tgcgcataggtgata

SEQ ID NO: 2088783 - DNA, 15 bp, Homo sapiens
gcgcataggtgatat

SEQ ID NO: 2088784 - DNA, 15 bp, Homo sapiens
cgcataggtgatatg

SEQ ID NO: 2088785 - DNA, 15 bp, Homo sapiens
gcataggtgatatgc

SEQ ID NO: 2088786 - DNA, 15 bp, Homo sapiens
cataggtgatatgca

SEQ ID NO: 2088787 - DNA, 15 bp, Homo sapiens
ataggtgatatgcaa

SEQ ID NO: 2088788 - DNA, 15 bp, Homo sapiens
taggtgatatgcaaa

SEQ ID NO: 2088789 - DNA, 15 bp, Homo sapiens
aggtgatatgcaaat

SEQ ID NO: 2088790 - DNA, 15 bp, Homo sapiens
ggtgatatgcaaata

SEQ ID NO: 2088791 - DNA, 15 bp, Homo sapiens
gtgatatgcaaatac

SEQ ID NO: 2088792 - DNA, 15 bp, Homo sapiens
tgatatgcaaatacc

SEQ ID NO: 2088793 - DNA, 15 bp, Homo sapiens
gatatgcaaatacca

SEQ ID NO: 2088794 - DNA, 15 bp, Homo sapiens
atatgcaaataccac

SEQ ID NO: 2088795 - DNA, 15 bp, Homo sapiens
tatgcaaataccaca

SEQ ID NO: 2088796 - DNA, 15 bp, Homo sapiens
atgcaaataccacag

SEQ ID NO: 2088797 - DNA, 15 bp, Homo sapiens
tgcaaataccacagc

SEQ ID NO: 2088798 - DNA, 15 bp, Homo sapiens
gcaaataccacagca

SEQ ID NO: 2088799 - DNA, 15 bp, Homo sapiens
caaataccacagcat

SEQ ID NO: 2088800 - DNA, 15 bp, Homo sapiens
aaataccacagcatt

SEQ ID NO: 2088801 - DNA, 15 bp, Homo sapiens
aataccacagcattt

SEQ ID NO: 2088802 - DNA, 15 bp, Homo sapiens
ataccacagcatttt

SEQ ID NO: 2088803 - DNA, 15 bp, Homo sapiens
taccacagcatttta

SEQ ID NO: 2088804 - DNA, 15 bp, Homo sapiens
accacagcattttat

SEQ ID NO: 2088805 - DNA, 15 bp, Homo sapiens
ccacagcattttatg

SEQ ID NO: 2088806 - DNA, 15 bp, Homo sapiens
cacagcattttatgt

SEQ ID NO: 2088807 - DNA, 15 bp, Homo sapiens
acagcattttatgtc

SEQ ID NO: 2088808 - DNA, 15 bp, Homo sapiens
cagcattttatgtcg

SEQ ID NO: 2088809 - DNA, 15 bp, Homo sapiens
agcattttatgtcgg

SEQ ID NO: 2088810 - DNA, 15 bp, Homo sapiens
gcattttatgtcggg

SEQ ID NO: 2088811 - DNA, 15 bp, Homo sapiens
cattttatgtcgggg

SEQ ID NO: 2088812 - DNA, 15 bp, Homo sapiens
attttatgtcgggga

SEQ ID NO: 2088813 - DNA, 15 bp, Homo sapiens
ttttatgtcggggac

SEQ ID NO: 2088814 - DNA, 15 bp, Homo sapiens
tttatgtcggggact

SEQ ID NO: 2088815 - DNA, 15 bp, Homo sapiens
ttatgtcggggactt

SEQ ID NO: 2088816 - DNA, 15 bp, Homo sapiens
tatgtcggggacttg

SEQ ID NO: 2088817 - DNA, 15 bp, Homo sapiens
atgtcggggacttga

SEQ ID NO: 2088818 - DNA, 15 bp, Homo sapiens
tgtcggggacttgag

SEQ ID NO: 2088819 - DNA, 15 bp, Homo sapiens
gtcggggacttgagc

SEQ ID NO: 2088820 - DNA, 15 bp, Homo sapiens
tcggggacttgagca

SEQ ID NO: 2088821 - DNA, 15 bp, Homo sapiens
cggggacttgagcat

SEQ ID NO: 2088822 - DNA, 15 bp, Homo sapiens
ggggacttgagcatc

SEQ ID NO: 2088823 - DNA, 15 bp, Homo sapiens
gggacttgagcatct

SEQ ID NO: 2088824 - DNA, 15 bp, Homo sapiens
gacttgagcatctgc

SEQ ID NO: 2088825 - DNA, 15 bp, Homo sapiens
acttgagcatctgca

SEQ ID NO: 2088826 - DNA, 15 bp, Homo sapiens
cttgagcatctgcag

SEQ ID NO: 2088827 - DNA, 15 bp, Homo sapiens
ttgagcatctgcaga

SEQ ID NO: 2088828 - DNA, 15 bp, Homo sapiens
tgagcatctgcagat

SEQ ID NO: 2088829 - DNA, 15 bp, Homo sapiens
gagcatctgcagatc

SEQ ID NO: 2088830 - DNA, 15 bp, Homo sapiens
agcatctgcagatct

SEQ ID NO: 2088831 - DNA, 15 bp, Homo sapiens
gcatctgcagatctt

SEQ ID NO: 2088832 - DNA, 15 bp, Homo sapiens
catctgcagatcttg

SEQ ID NO: 2088833 - DNA, 15 bp, Homo sapiens
atctgcagatcttgg

SEQ ID NO: 2088834 - DNA, 15 bp, Homo sapiens
tctgcagatcttggt

SEQ ID NO: 2088835 - DNA, 15 bp, Homo sapiens
ctgcagatcttggta

SEQ ID NO: 2088836 - DNA, 15 bp, Homo sapiens
tgcagatcttggtat

SEQ ID NO: 2088837 - DNA, 15 bp, Homo sapiens
gcagatcttggtatc

SEQ ID NO: 2088838 - DNA, 15 bp, Homo sapiens
cagatcttggtatct

SEQ ID NO: 2088839 - DNA, 15 bp, Homo sapiens
agatcttggtatcta

SEQ ID NO: 2088840 - DNA, 15 bp, Homo sapiens
gatcttggtatctat

SEQ ID NO: 2088841 - DNA, 15 bp, Homo sapiens
atcttggtatctatg

SEQ ID NO: 2088842 - DNA, 15 bp, Homo sapiens
tcttggtatctatgg

SEQ ID NO: 2088843 - DNA, 15 bp, Homo sapiens
cttggtatctatggg

SEQ ID NO: 2088844 - DNA, 15 bp, Homo sapiens
ttggtatctatgggg

SEQ ID NO: 2088845 - DNA, 15 bp, Homo sapiens
tggtatctatggggg

SEQ ID NO: 2088846 - DNA, 15 bp, Homo sapiens
ggtatctatgggggt

SEQ ID NO: 2088847 - DNA, 15 bp, Homo sapiens
gtatctatgggggtc

SEQ ID NO: 2088848 - DNA, 15 bp, Homo sapiens
tatctatgggggtcc

SEQ ID NO: 2088849 - DNA, 15 bp, Homo sapiens
atctatgggggtcct

SEQ ID NO: 2088850 - DNA, 15 bp, Homo sapiens
tctatgggggtcctg

SEQ ID NO: 2088851 - DNA, 15 bp, Homo sapiens
ctatgggggtcctga

SEQ ID NO: 2088852 - DNA, 15 bp, Homo sapiens
tatgggggtcctgaa

SEQ ID NO: 2088853 - DNA, 15 bp, Homo sapiens
atgggggtcctgaaa

SEQ ID NO: 2088854 - DNA, 15 bp, Homo sapiens
tgggggtcctgaaac

SEQ ID NO: 2088855 - DNA, 15 bp, Homo sapiens
gggggtcctgaaacc

SEQ ID NO: 2088856 - DNA, 15 bp, Homo sapiens
ggggtcctgaaacca

SEQ ID NO: 2088857 - DNA, 15 bp, Homo sapiens
gggtcctgaaaccaa

SEQ ID NO: 2088858 - DNA, 15 bp, Homo sapiens
ggtcctgaaaccaat

SEQ ID NO: 2088859 - DNA, 15 bp, Homo sapiens
gtcctgaaaccaatt

SEQ ID NO: 2088860 - DNA, 15 bp, Homo sapiens
tcctgaaaccaattc

SEQ ID NO: 2088861 - DNA, 15 bp, Homo sapiens
cctgaaaccaattcc

SEQ ID NO: 2088862 - DNA, 15 bp, Homo sapiens
ctgaaaccaattccc

SEQ ID NO: 2088863 - DNA, 15 bp, Homo sapiens
tgaaaccaattcccc

SEQ ID NO: 2088864 - DNA, 15 bp, Homo sapiens
gaaaccaattcccct

SEQ ID NO: 2088865 - DNA, 15 bp, Homo sapiens
aaaccaattcccctc

SEQ ID NO: 2088866 - DNA, 15 bp, Homo sapiens
aaccaattcccctct

SEQ ID NO: 2088867 - DNA, 15 bp, Homo sapiens
accaattcccctctg

SEQ ID NO: 2088868 - DNA, 15 bp, Homo sapiens
ccaattcccctctga

SEQ ID NO: 2088869 - DNA, 15 bp, Homo sapiens
caattcccctctgac

SEQ ID NO: 2088870 - DNA, 15 bp, Homo sapiens
aattcccctctgaca

SEQ ID NO: 2088871 - DNA, 15 bp, Homo sapiens
attcccctctgacat

SEQ ID NO: 2088872 - DNA, 15 bp, Homo sapiens
ttcccctctgacatt

SEQ ID NO: 2088873 - DNA, 15 bp, Homo sapiens
tcccctctgacattg

SEQ ID NO: 2088874 - DNA, 15 bp, Homo sapiens
cccctctgacattga

SEQ ID NO: 2088875 - DNA, 15 bp, Homo sapiens
ccctctgacattgag

SEQ ID NO: 2088876 - DNA, 15 bp, Homo sapiens
cctctgacattgagg

SEQ ID NO: 2088877 - DNA, 15 bp, Homo sapiens
ctctgacattgaggg

SEQ ID NO: 2088878 - DNA, 15 bp, Homo sapiens
tctgacattgaggga

SEQ ID NO: 2088879 - DNA, 15 bp, Homo sapiens
ctgacattgagggac

SEQ ID NO: 2088880 - DNA, 15 bp, Homo sapiens
tgacattgagggacg

SEQ ID NO: 2088881 - DNA, 15 bp, Homo sapiens
gacattgagggacga

SEQ ID NO: 2088882 - DNA, 15 bp, Homo sapiens
acattgagggacgac

SEQ ID NO: 2088883 - DNA, 15 bp, Homo sapiens
cattgagggacgact

SEQ ID NO: 2088884 - DNA, 15 bp, Homo sapiens
attgagggacgactt

SEQ ID NO: 2088885 - DNA, 15 bp, Homo sapiens
ttgagggacgacttt

SEQ ID NO: 2088886 - DNA, 15 bp, Homo sapiens
tgagggacgacttta

SEQ ID NO: 2088887 - DNA, 15 bp, Homo sapiens
gagggacgactttat

SEQ ID NO: 2088888 - DNA, 15 bp, Homo sapiens
agggacgactttata

SEQ ID NO: 2088889 - DNA, 15 bp, Homo sapiens
gggacgactttatat

SEQ ID NO: 2088890 - DNA, 15 bp, Homo sapiens
ggacgactttatata

SEQ ID NO: 2088891 - DNA, 15 bp, Homo sapiens
gacgactttatataa

SEQ ID NO: 2088892 - DNA, 15 bp, Homo sapiens
acgactttatataaa

SEQ ID NO: 2088893 - DNA, 15 bp, Homo sapiens
cgactttatataaaa

SEQ ID NO: 2088894 - DNA, 15 bp, Homo sapiens
gactttatataaaat

SEQ ID NO: 2088895 - DNA, 15 bp, Homo sapiens
actttatataaaata

SEQ ID NO: 2088896 - DNA, 15 bp, Homo sapiens
ctttatataaaatat

SEQ ID NO: 2088897 - DNA, 15 bp, Homo sapiens
tttatataaaatata

SEQ ID NO: 2088898 - DNA, 15 bp, Homo sapiens
ttatataaaatatat

SEQ ID NO: 2088899 - DNA, 15 bp, Homo sapiens
tatataaaatatatg

SEQ ID NO: 2088900 - DNA, 15 bp, Homo sapiens
atataaaatatatga

SEQ ID NO: 2088901 - DNA, 15 bp, Homo sapiens
tataaaatatatgaa

SEQ ID NO: 2088902 - DNA, 15 bp, Homo sapiens
ataaaatatatgaat

SEQ ID NO: 2088903 - DNA, 15 bp, Homo sapiens
taaaatatatgaata

SEQ ID NO: 2088904 - DNA, 15 bp, Homo sapiens
aaaatatatgaatac

SEQ ID NO: 2088905 - DNA, 15 bp, Homo sapiens
aaatatatgaatact

SEQ ID NO: 2088906 - DNA, 15 bp, Homo sapiens
aatatatgaatactt

SEQ ID NO: 2088907 - DNA, 15 bp, Homo sapiens
atatatgaatacttg

SEQ ID NO: 2088908 - DNA, 15 bp, Homo sapiens
tatatgaatacttgc

SEQ ID NO: 2088909 - DNA, 15 bp, Homo sapiens
atatgaatacttgct

SEQ ID NO: 2088910 - DNA, 15 bp, Homo sapiens
tatgaatacttgctc

SEQ ID NO: 2088911 - DNA, 15 bp, Homo sapiens
atgaatacttgctcg

SEQ ID NO: 2088912 - DNA, 15 bp, Homo sapiens
tgaatacttgctcgt

SEQ ID NO: 2088913 - DNA, 15 bp, Homo sapiens
gaatacttgctcgta

SEQ ID NO: 2088914 - DNA, 15 bp, Homo sapiens
aatacttgctcgtaa

SEQ ID NO: 2088915 - DNA, 15 bp, Homo sapiens
atacttgctcgtaaa

SEQ ID NO: 2088916 - DNA, 15 bp, Homo sapiens
tacttgctcgtaaaa

SEQ ID NO: 2088917 - DNA, 15 bp, Homo sapiens
acttgctcgtaaaaa

SEQ ID NO: 2088918 - DNA, 15 bp, Homo sapiens
cttgctcgtaaaaaa

SEQ ID NO: 2088919 - DNA, 15 bp, Homo sapiens
ttgctcgtaaaaaaa

SEQ ID NO: 2088920 - DNA, 15 bp, Homo sapiens
tgctcgtaaaaaaaa

SEQ ID NO: 2088921 - DNA, 15 bp, Homo sapiens
gctcgtaaaaaaaag

SEQ ID NO: 2088922 - DNA, 15 bp, Homo sapiens
ctcgtaaaaaaaagt

SEQ ID NO: 2088923 - DNA, 15 bp, Homo sapiens
tcgtaaaaaaaagtt

SEQ ID NO: 2088924 - DNA, 15 bp, Homo sapiens
cgtaaaaaaaagttc

SEQ ID NO: 2088925 - DNA, 15 bp, Homo sapiens
gtaaaaaaaagttca

SEQ ID NO: 2088926 - DNA, 15 bp, Homo sapiens
taaaaaaaagttcaa

SEQ ID NO: 2088927 - DNA, 15 bp, Homo sapiens
aaaaaaaagttcaaa

SEQ ID NO: 2088928 - DNA, 15 bp, Homo sapiens
aaaaaaagttcaaat

SEQ ID NO: 2088929 - DNA, 15 bp, Homo sapiens
aaaaaagttcaaatg

SEQ ID NO: 2088930 - DNA, 15 bp, Homo sapiens
aaaaagttcaaatgg

SEQ ID NO: 2088931 - DNA, 15 bp, Homo sapiens
aaaagttcaaatgga

SEQ ID NO: 2088932 - DNA, 15 bp, Homo sapiens
aaagttcaaatggag

SEQ ID NO: 2088933 - DNA, 15 bp, Homo sapiens
aagttcaaatggagg

SEQ ID NO: 2088934 - DNA, 15 bp, Homo sapiens
agttcaaatggagga

SEQ ID NO: 2088935 - DNA, 15 bp, Homo sapiens
gttcaaatggaggaa

SEQ ID NO: 2088936 - DNA, 15 bp, Homo sapiens
ttcaaatggaggaaa

SEQ ID NO: 2088937 - DNA, 15 bp, Homo sapiens
tcaaatggaggaaaa

SEQ ID NO: 2088938 - DNA, 15 bp, Homo sapiens
caaatggaggaaaag

SEQ ID NO: 2088939 - DNA, 15 bp, Homo sapiens
aaatggaggaaaaga

SEQ ID NO: 2088940 - DNA, 15 bp, Homo sapiens
aatggaggaaaagag

SEQ ID NO: 2088941 - DNA, 15 bp, Homo sapiens
atggaggaaaagaga

SEQ ID NO: 2088942 - DNA, 15 bp, Homo sapiens
tggaggaaaagagag

SEQ ID NO: 2088943 - DNA, 15 bp, Homo sapiens
ggaggaaaagagaga

SEQ ID NO: 2088944 - DNA, 15 bp, Homo sapiens
gaggaaaagagagaa

SEQ ID NO: 2088945 - DNA, 15 bp, Homo sapiens
aggaaaagagagaaa

SEQ ID NO: 2088946 - DNA, 15 bp, Homo sapiens
ggaaaagagagaaag

SEQ ID NO: 2088947 - DNA, 15 bp, Homo sapiens
gaaaagagagaaagt

SEQ ID NO: 2088948 - DNA, 15 bp, Homo sapiens
aaagagagaaagttt

SEQ ID NO: 2088949 - DNA, 15 bp, Homo sapiens
aagagagaaagtttc

SEQ ID NO: 2088950 - DNA, 15 bp, Homo sapiens
agagagaaagtttcc

SEQ ID NO: 2088951 - DNA, 15 bp, Homo sapiens
gagagaaagtttccc

SEQ ID NO: 2088952 - DNA, 15 bp, Homo sapiens
agagaaagtttcccc

SEQ ID NO: 2088953 - DNA, 15 bp, Homo sapiens
gagaaagtttccccc

SEQ ID NO: 2088954 - DNA, 15 bp, Homo sapiens
agaaagtttccccca

SEQ ID NO: 2088955 - DNA, 15 bp, Homo sapiens
gaaagtttcccccat

SEQ ID NO: 2088956 - DNA, 15 bp, Homo sapiens
aaagtttcccccatt

SEQ ID NO: 2088957 - DNA, 15 bp, Homo sapiens
aagtttcccccattt

SEQ ID NO: 2088958 - DNA, 15 bp, Homo sapiens
agtttcccccatttt

SEQ ID NO: 2088959 - DNA, 15 bp, Homo sapiens
gtttcccccatttta

SEQ ID NO: 2088960 - DNA, 15 bp, Homo sapiens
tttcccccattttat

SEQ ID NO: 2088961 - DNA, 15 bp, Homo sapiens
ttcccccattttatt

SEQ ID NO: 2088962 - DNA, 15 bp, Homo sapiens
tcccccattttattc

SEQ ID NO: 2088963 - DNA, 15 bp, Homo sapiens
cccccattttattcc

SEQ ID NO: 2088964 - DNA, 15 bp, Homo sapiens
ccccattttattccc

SEQ ID NO: 2088965 - DNA, 15 bp, Homo sapiens
cccattttattcccc

SEQ ID NO: 2088966 - DNA, 15 bp, Homo sapiens
ccattttattcccct

SEQ ID NO: 2088967 - DNA, 15 bp, Homo sapiens
cattttattcccctc

SEQ ID NO: 2088968 - DNA, 15 bp, Homo sapiens
attttattcccctcc

SEQ ID NO: 2088969 - DNA, 15 bp, Homo sapiens
ttttattcccctcct

SEQ ID NO: 2088970 - DNA, 15 bp, Homo sapiens
tttattcccctcctg

SEQ ID NO: 2088971 - DNA, 15 bp, Homo sapiens
ttattcccctcctga

SEQ ID NO: 2088972 - DNA, 15 bp, Homo sapiens
tattcccctcctgag

SEQ ID NO: 2088973 - DNA, 15 bp, Homo sapiens
attcccctcctgagc

SEQ ID NO: 2088974 - DNA, 15 bp, Homo sapiens
ttcccctcctgagct

SEQ ID NO: 2088975 - DNA, 15 bp, Homo sapiens
tcccctcctgagcta

SEQ ID NO: 2088976 - DNA, 15 bp, Homo sapiens
cccctcctgagctat

SEQ ID NO: 2088977 - DNA, 15 bp, Homo sapiens
ccctcctgagctatt

SEQ ID NO: 2088978 - DNA, 15 bp, Homo sapiens
cctcctgagctatta

SEQ ID NO: 2088979 - DNA, 15 bp, Homo sapiens
ctcctgagctattat

SEQ ID NO: 2088980 - DNA, 15 bp, Homo sapiens
tcctgagctattatc

SEQ ID NO: 2088981 - DNA, 15 bp, Homo sapiens
cctgagctattatca

SEQ ID NO: 2088982 - DNA, 15 bp, Homo sapiens
ctgagctattatcac

SEQ ID NO: 2088983 - DNA, 15 bp, Homo sapiens
tgagctattatcacc

SEQ ID NO: 2088984 - DNA, 15 bp, Homo sapiens
gagctattatcacca

SEQ ID NO: 2088985 - DNA, 15 bp, Homo sapiens
agctattatcaccat

SEQ ID NO: 2088986 - DNA, 15 bp, Homo sapiens
gctattatcaccatc

SEQ ID NO: 2088987 - DNA, 15 bp, Homo sapiens
ctattatcaccatca

SEQ ID NO: 2088988 - DNA, 15 bp, Homo sapiens
tattatcaccatcat

SEQ ID NO: 2088989 - DNA, 15 bp, Homo sapiens
attatcaccatcatt

SEQ ID NO: 2088990 - DNA, 15 bp, Homo sapiens
ttatcaccatcattg

SEQ ID NO: 2088991 - DNA, 15 bp, Homo sapiens
tatcaccatcattga

SEQ ID NO: 2088992 - DNA, 15 bp, Homo sapiens
atcaccatcattgat

SEQ ID NO: 2088993 - DNA, 15 bp, Homo sapiens
tcaccatcattgatg

SEQ ID NO: 2088994 - DNA, 15 bp, Homo sapiens
caccatcattgatgt

SEQ ID NO: 2088995 - DNA, 15 bp, Homo sapiens
accatcattgatgtg

SEQ ID NO: 2088996 - DNA, 15 bp, Homo sapiens
ccatcattgatgtgg

SEQ ID NO: 2088997 - DNA, 15 bp, Homo sapiens
catcattgatgtgga

SEQ ID NO: 2088998 - DNA, 15 bp, Homo sapiens
atcattgatgtggat

SEQ ID NO: 2088999 - DNA, 15 bp, Homo sapiens
tcattgatgtggatc

SEQ ID NO: 2089000 - DNA, 15 bp, Homo sapiens
cattgatgtggatct

SEQ ID NO: 2089001 - DNA, 15 bp, Homo sapiens
attgatgtggatctt

SEQ ID NO: 2089002 - DNA, 15 bp, Homo sapiens
ttgatgtggatcttt

SEQ ID NO: 2089003 - DNA, 15 bp, Homo sapiens
tgatgtggatctttc

SEQ ID NO: 2089004 - DNA, 15 bp, Homo sapiens
gatgtggatctttct

SEQ ID NO: 2089005 - DNA, 15 bp, Homo sapiens
atgtggatctttcta

SEQ ID NO: 2089006 - DNA, 15 bp, Homo sapiens
tgtggatctttctag

SEQ ID NO: 2089007 - DNA, 15 bp, Homo sapiens
gtggatctttctaga

SEQ ID NO: 2089008 - DNA, 15 bp, Homo sapiens
tggatctttctagac

SEQ ID NO: 2089009 - DNA, 15 bp, Homo sapiens
ggatctttctagacc

SEQ ID NO: 2089010 - DNA, 15 bp, Homo sapiens
gatctttctagaccc

SEQ ID NO: 2089011 - DNA, 15 bp, Homo sapiens
atctttctagaccct

SEQ ID NO: 2089012 - DNA, 15 bp, Homo sapiens
tctttctagaccctt

SEQ ID NO: 2089013 - DNA, 15 bp, Homo sapiens
ctttctagacccttt

SEQ ID NO: 2089014 - DNA, 15 bp, Homo sapiens
tttctagaccctttt

SEQ ID NO: 2089015 - DNA, 15 bp, Homo sapiens
ttctagacccttttc

SEQ ID NO: 2089016 - DNA, 15 bp, Homo sapiens
tctagacccttttct

SEQ ID NO: 2089017 - DNA, 15 bp, Homo sapiens
ctagacccttttctg

SEQ ID NO: 2089018 - DNA, 15 bp, Homo sapiens
tagacccttttctgt

SEQ ID NO: 2089019 - DNA, 15 bp, Homo sapiens
agacccttttctgtg

SEQ ID NO: 2089020 - DNA, 15 bp, Homo sapiens
gacccttttctgtgt

SEQ ID NO: 2089021 - DNA, 15 bp, Homo sapiens
acccttttctgtgta

SEQ ID NO: 2089022 - DNA, 15 bp, Homo sapiens
cccttttctgtgtac

SEQ ID NO: 2089023 - DNA, 15 bp, Homo sapiens
ccttttctgtgtacc

SEQ ID NO: 2089024 - DNA, 15 bp, Homo sapiens
cttttctgtgtacca

SEQ ID NO: 2089025 - DNA, 15 bp, Homo sapiens
ttttctgtgtaccag

SEQ ID NO: 2089026 - DNA, 15 bp, Homo sapiens
tttctgtgtaccagg

SEQ ID NO: 2089027 - DNA, 15 bp, Homo sapiens
ttctgtgtaccagga

SEQ ID NO: 2089028 - DNA, 15 bp, Homo sapiens
tctgtgtaccaggag

SEQ ID NO: 2089029 - DNA, 15 bp, Homo sapiens
ctgtgtaccaggagc

SEQ ID NO: 2089030 - DNA, 15 bp, Homo sapiens
tgtgtaccaggagcc

SEQ ID NO: 2089031 - DNA, 15 bp, Homo sapiens
gtgtaccaggagcct

SEQ ID NO: 2089032 - DNA, 15 bp, Homo sapiens
tgtaccaggagcctg

SEQ ID NO: 2089033 - DNA, 15 bp, Homo sapiens
gtaccaggagcctgt

SEQ ID NO: 2089034 - DNA, 15 bp, Homo sapiens
taccaggagcctgta

SEQ ID NO: 2089035 - DNA, 15 bp, Homo sapiens
accaggagcctgtat

SEQ ID NO: 2089036 - DNA, 15 bp, Homo sapiens
ccaggagcctgtatg

SEQ ID NO: 2089037 - DNA, 15 bp, Homo sapiens
caggagcctgtatgt

SEQ ID NO: 2089038 - DNA, 15 bp, Homo sapiens
aggagcctgtatgta

SEQ ID NO: 2089039 - DNA, 15 bp, Homo sapiens
ggagcctgtatgtat

SEQ ID NO: 2089040 - DNA, 15 bp, Homo sapiens
gagcctgtatgtata

SEQ ID NO: 2089041 - DNA, 15 bp, Homo sapiens
agcctgtatgtatac

SEQ ID NO: 2089042 - DNA, 15 bp, Homo sapiens
gcctgtatgtataca

SEQ ID NO: 2089043 - DNA, 15 bp, Homo sapiens
cctgtatgtatacat

SEQ ID NO: 2089044 - DNA, 15 bp, Homo sapiens
ctgtatgtatacata

SEQ ID NO: 2089045 - DNA, 15 bp, Homo sapiens
tgtatgtatacatat

SEQ ID NO: 2089046 - DNA, 15 bp, Homo sapiens
gtatgtatacatatt

SEQ ID NO: 2089047 - DNA, 15 bp, Homo sapiens
tatgtatacatatta

SEQ ID NO: 2089048 - DNA, 15 bp, Homo sapiens
atgtatacatattaa

SEQ ID NO: 2089049 - DNA, 15 bp, Homo sapiens
tgtatacatattaat

SEQ ID NO: 2089050 - DNA, 15 bp, Homo sapiens
gtatacatattaata

SEQ ID NO: 2089051 - DNA, 15 bp, Homo sapiens
tatacatattaatat

SEQ ID NO: 2089052 - DNA, 15 bp, Homo sapiens
atacatattaatata

SEQ ID NO: 2089053 - DNA, 15 bp, Homo sapiens
tacatattaatatat

SEQ ID NO: 2089054 - DNA, 15 bp, Homo sapiens
acatattaatatata

SEQ ID NO: 2089055 - DNA, 15 bp, Homo sapiens
catattaatatatat

SEQ ID NO: 2089056 - DNA, 15 bp, Homo sapiens
atattaatatatatt

SEQ ID NO: 2089057 - DNA, 15 bp, Homo sapiens
tattaatatatattt

SEQ ID NO: 2089058 - DNA, 15 bp, Homo sapiens
attaatatatatttt

SEQ ID NO: 2089059 - DNA, 15 bp, Homo sapiens
ttaatatatatttta

SEQ ID NO: 2089060 - DNA, 15 bp, Homo sapiens
taatatatattttac

SEQ ID NO: 2089061 - DNA, 15 bp, Homo sapiens
aatatatattttaca

SEQ ID NO: 2089062 - DNA, 15 bp, Homo sapiens
atatatattttacat

SEQ ID NO: 2089063 - DNA, 15 bp, Homo sapiens
tatatattttacata

SEQ ID NO: 2089064 - DNA, 15 bp, Homo sapiens
atatattttacataa

SEQ ID NO: 2089065 - DNA, 15 bp, Homo sapiens
tatattttacataac

SEQ ID NO: 2089066 - DNA, 15 bp, Homo sapiens
atattttacataact

SEQ ID NO: 2089067 - DNA, 15 bp, Homo sapiens
tattttacataactt

SEQ ID NO: 2089068 - DNA, 15 bp, Homo sapiens
attttacataacttg

SEQ ID NO: 2089069 - DNA, 15 bp, Homo sapiens
ttttacataacttga

SEQ ID NO: 2089070 - DNA, 15 bp, Homo sapiens
tttacataacttgaa

SEQ ID NO: 2089071 - DNA, 15 bp, Homo sapiens
ttacataacttgaac

SEQ ID NO: 2089072 - DNA, 15 bp, Homo sapiens
tacataacttgaact

SEQ ID NO: 2089073 - DNA, 15 bp, Homo sapiens
acataacttgaacta

SEQ ID NO: 2089074 - DNA, 15 bp, Homo sapiens
cataacttgaactaa

SEQ ID NO: 2089075 - DNA, 15 bp, Homo sapiens
ataacttgaactaag

SEQ ID NO: 2089076 - DNA, 15 bp, Homo sapiens
taacttgaactaagt

SEQ ID NO: 2089077 - DNA, 15 bp, Homo sapiens
aacttgaactaagtg

SEQ ID NO: 2089078 - DNA, 15 bp, Homo sapiens
acttgaactaagtgt

SEQ ID NO: 2089079 - DNA, 15 bp, Homo sapiens
cttgaactaagtgta

SEQ ID NO: 2089080 - DNA, 15 bp, Homo sapiens
ttgaactaagtgtag

SEQ ID NO: 2089081 - DNA, 15 bp, Homo sapiens
tgaactaagtgtagg

SEQ ID NO: 2089082 - DNA, 15 bp, Homo sapiens
gaactaagtgtaggt

SEQ ID NO: 2089083 - DNA, 15 bp, Homo sapiens
aactaagtgtaggtg

SEQ ID NO: 2089084 - DNA, 15 bp, Homo sapiens
actaagtgtaggtga

SEQ ID NO: 2089085 - DNA, 15 bp, Homo sapiens
ctaagtgtaggtgaa

SEQ ID NO: 2089086 - DNA, 15 bp, Homo sapiens
taagtgtaggtgaac

SEQ ID NO: 2089087 - DNA, 15 bp, Homo sapiens
aagtgtaggtgaact

SEQ ID NO: 2089088 - DNA, 15 bp, Homo sapiens
agtgtaggtgaactt

SEQ ID NO: 2089089 - DNA, 15 bp, Homo sapiens
gtgtaggtgaacttg

SEQ ID NO: 2089090 - DNA, 15 bp, Homo sapiens
tgtaggtgaacttga

SEQ ID NO: 2089091 - DNA, 15 bp, Homo sapiens
gtaggtgaacttgaa

SEQ ID NO: 2089092 - DNA, 15 bp, Homo sapiens
taggtgaacttgaac

SEQ ID NO: 2089093 - DNA, 15 bp, Homo sapiens
aggtgaacttgaaca

SEQ ID NO: 2089094 - DNA, 15 bp, Homo sapiens
ggtgaacttgaacat

SEQ ID NO: 2089095 - DNA, 15 bp, Homo sapiens
gtgaacttgaacatg

SEQ ID NO: 2089096 - DNA, 15 bp, Homo sapiens
tgaacttgaacatgt

SEQ ID NO: 2089097 - DNA, 15 bp, Homo sapiens
gaacttgaacatgta

SEQ ID NO: 2089098 - DNA, 15 bp, Homo sapiens
aacttgaacatgtat

SEQ ID NO: 2089099 - DNA, 15 bp, Homo sapiens
acttgaacatgtata

SEQ ID NO: 2089100 - DNA, 15 bp, Homo sapiens
cttgaacatgtataa

SEQ ID NO: 2089101 - DNA, 15 bp, Homo sapiens
ttgaacatgtataat

SEQ ID NO: 2089102 - DNA, 15 bp, Homo sapiens
tgaacatgtataatt

SEQ ID NO: 2089103 - DNA, 15 bp, Homo sapiens
gaacatgtataatta

SEQ ID NO: 2089104 - DNA, 15 bp, Homo sapiens
aacatgtataattat

SEQ ID NO: 2089105 - DNA, 15 bp, Homo sapiens
acatgtataattatc

SEQ ID NO: 2089106 - DNA, 15 bp, Homo sapiens
catgtataattatct

SEQ ID NO: 2089107 - DNA, 15 bp, Homo sapiens
atgtataattatctt

SEQ ID NO: 2089108 - DNA, 15 bp, Homo sapiens
tgtataattatcttg

SEQ ID NO: 2089109 - DNA, 15 bp, Homo sapiens
gtataattatcttgc

SEQ ID NO: 2089110 - DNA, 15 bp, Homo sapiens
tataattatcttgca

SEQ ID NO: 2089111 - DNA, 15 bp, Homo sapiens
ataattatcttgcaa

SEQ ID NO: 2089112 - DNA, 15 bp, Homo sapiens
taattatcttgcaat

SEQ ID NO: 2089113 - DNA, 15 bp, Homo sapiens
aattatcttgcaatt

SEQ ID NO: 2089114 - DNA, 15 bp, Homo sapiens
attatcttgcaattt

SEQ ID NO: 2089115 - DNA, 15 bp, Homo sapiens
ttatcttgcaatttg

SEQ ID NO: 2089116 - DNA, 15 bp, Homo sapiens
tatcttgcaatttgt

SEQ ID NO: 2089117 - DNA, 15 bp, Homo sapiens
atcttgcaatttgtt

SEQ ID NO: 2089118 - DNA, 15 bp, Homo sapiens
tcttgcaatttgttt

SEQ ID NO: 2089119 - DNA, 15 bp, Homo sapiens
cttgcaatttgtttt

SEQ ID NO: 2089120 - DNA, 15 bp, Homo sapiens
ttgcaatttgttttt

SEQ ID NO: 2089121 - DNA, 15 bp, Homo sapiens
tgcaatttgtttttc

SEQ ID NO: 2089122 - DNA, 15 bp, Homo sapiens
gcaatttgtttttca

SEQ ID NO: 2089123 - DNA, 15 bp, Homo sapiens
caatttgtttttcaa

SEQ ID NO: 2089124 - DNA, 15 bp, Homo sapiens
aatttgtttttcaat

SEQ ID NO: 2089125 - DNA, 15 bp, Homo sapiens
atttgtttttcaatt

SEQ ID NO: 2089126 - DNA, 15 bp, Homo sapiens
tttgtttttcaattc

SEQ ID NO: 2089127 - DNA, 15 bp, Homo sapiens
ttgtttttcaattca

SEQ ID NO: 2089128 - DNA, 15 bp, Homo sapiens
tgtttttcaattcaa

SEQ ID NO: 2089129 - DNA, 15 bp, Homo sapiens
gtttttcaattcaaa

SEQ ID NO: 2089130 - DNA, 15 bp, Homo sapiens
tttttcaattcaaag

SEQ ID NO: 2089131 - DNA, 15 bp, Homo sapiens
ttttcaattcaaaga

SEQ ID NO: 2089132 - DNA, 15 bp, Homo sapiens
tttcaattcaaagat

SEQ ID NO: 2089133 - DNA, 15 bp, Homo sapiens
ttcaattcaaagata

SEQ ID NO: 2089134 - DNA, 15 bp, Homo sapiens
tcaattcaaagatac

SEQ ID NO: 2089135 - DNA, 15 bp, Homo sapiens
caattcaaagatacc

SEQ ID NO: 2089136 - DNA, 15 bp, Homo sapiens
aattcaaagatacca

SEQ ID NO: 2089137 - DNA, 15 bp, Homo sapiens
attcaaagataccag

SEQ ID NO: 2089138 - DNA, 15 bp, Homo sapiens
ttcaaagataccagc

SEQ ID NO: 2089139 - DNA, 15 bp, Homo sapiens
tcaaagataccagct

SEQ ID NO: 2089140 - DNA, 15 bp, Homo sapiens
caaagataccagctg

SEQ ID NO: 2089141 - DNA, 15 bp, Homo sapiens
aaagataccagctga

SEQ ID NO: 2089142 - DNA, 15 bp, Homo sapiens
aagataccagctgaa

SEQ ID NO: 2089143 - DNA, 15 bp, Homo sapiens
agataccagctgaaa

SEQ ID NO: 2089144 - DNA, 15 bp, Homo sapiens
gataccagctgaaaa

SEQ ID NO: 2089145 - DNA, 15 bp, Homo sapiens
ataccagctgaaaaa

SEQ ID NO: 2089146 - DNA, 15 bp, Homo sapiens
taccagctgaaaaat

SEQ ID NO: 2089147 - DNA, 15 bp, Homo sapiens
accagctgaaaaatt

SEQ ID NO: 2089148 - DNA, 15 bp, Homo sapiens
ccagctgaaaaattt

SEQ ID NO: 2089149 - DNA, 15 bp, Homo sapiens
cagctgaaaaatttt

SEQ ID NO: 2089150 - DNA, 15 bp, Homo sapiens
agctgaaaaattttc

SEQ ID NO: 2089151 - DNA, 15 bp, Homo sapiens
gctgaaaaattttcc

SEQ ID NO: 2089152 - DNA, 15 bp, Homo sapiens
ctgaaaaattttcca

SEQ ID NO: 2089153 - DNA, 15 bp, Homo sapiens
tgaaaaattttccat

SEQ ID NO: 2089154 - DNA, 15 bp, Homo sapiens
gaaaaattttccatg

SEQ ID NO: 2089155 - DNA, 15 bp, Homo sapiens
aaaaattttccatgt

SEQ ID NO: 2089156 - DNA, 15 bp, Homo sapiens
aaaattttccatgtc

SEQ ID NO: 2089157 - DNA, 15 bp, Homo sapiens
aaattttccatgtct

SEQ ID NO: 2089158 - DNA, 15 bp, Homo sapiens
aattttccatgtctc

SEQ ID NO: 2089159 - DNA, 15 bp, Homo sapiens
attttccatgtctca

SEQ ID NO: 2089160 - DNA, 15 bp, Homo sapiens
ttttccatgtctcag

SEQ ID NO: 2089161 - DNA, 15 bp, Homo sapiens
tttccatgtctcagc

SEQ ID NO: 2089162 - DNA, 15 bp, Homo sapiens
ttccatgtctcagca

SEQ ID NO: 2089163 - DNA, 15 bp, Homo sapiens
tccatgtctcagcaa

SEQ ID NO: 2089164 - DNA, 15 bp, Homo sapiens
ccatgtctcagcaat

SEQ ID NO: 2089165 - DNA, 15 bp, Homo sapiens
catgtctcagcaata

SEQ ID NO: 2089166 - DNA, 15 bp, Homo sapiens
atgtctcagcaataa

SEQ ID NO: 2089167 - DNA, 15 bp, Homo sapiens
tgtctcagcaataag

SEQ ID NO: 2089168 - DNA, 15 bp, Homo sapiens
gtctcagcaataagt

SEQ ID NO: 2089169 - DNA, 15 bp, Homo sapiens
tctcagcaataagtc

SEQ ID NO: 2089170 - DNA, 15 bp, Homo sapiens
ctcagcaataagtct

SEQ ID NO: 2089171 - DNA, 15 bp, Homo sapiens
tcagcaataagtcta

SEQ ID NO: 2089172 - DNA, 15 bp, Homo sapiens
cagcaataagtctac

SEQ ID NO: 2089173 - DNA, 15 bp, Homo sapiens
agcaataagtctacc

SEQ ID NO: 2089174 - DNA, 15 bp, Homo sapiens
gcaataagtctaccc

SEQ ID NO: 2089175 - DNA, 15 bp, Homo sapiens
caataagtctacccc

SEQ ID NO: 2089176 - DNA, 15 bp, Homo sapiens
aataagtctaccccg

SEQ ID NO: 2089177 - DNA, 15 bp, Homo sapiens
ataagtctaccccgc

SEQ ID NO: 2089178 - DNA, 15 bp, Homo sapiens
taagtctaccccgcg

SEQ ID NO: 2089179 - DNA, 15 bp, Homo sapiens
aagtctaccccgcgt

SEQ ID NO: 2089180 - DNA, 15 bp, Homo sapiens
agtctaccccgcgtt

SEQ ID NO: 2089181 - DNA, 15 bp, Homo sapiens
gtctaccccgcgttt

SEQ ID NO: 2089182 - DNA, 15 bp, Homo sapiens
ccaagcatggtggct

SEQ ID NO: 2089183 - DNA, 15 bp, Homo sapiens
caagcatggtggctc

SEQ ID NO: 2089184 - DNA, 15 bp, Homo sapiens
aagcatggtggctca

SEQ ID NO: 2089185 - DNA, 15 bp, Homo sapiens
agcatggtggctcaa

SEQ ID NO: 2089186 - DNA, 15 bp, Homo sapiens
gcatggtggctcaaa

SEQ ID NO: 2089187 - DNA, 15 bp, Homo sapiens
catggtggctcaaac

SEQ ID NO: 2089188 - DNA, 15 bp, Homo sapiens
atggtggctcaaact

SEQ ID NO: 2089189 - DNA, 15 bp, Homo sapiens
tggtggctcaaactt

SEQ ID NO: 2089190 - DNA, 15 bp, Homo sapiens
ggtggctcaaacttg

SEQ ID NO: 2089191 - DNA, 15 bp, Homo sapiens
gtggctcaaacttgc

SEQ ID NO: 2089192 - DNA, 15 bp, Homo sapiens
tggctcaaacttgcg

SEQ ID NO: 2089193 - DNA, 15 bp, Homo sapiens
ggctcaaacttgcga

SEQ ID NO: 2089194 - DNA, 15 bp, Homo sapiens
gctcaaacttgcgat

SEQ ID NO: 2089195 - DNA, 15 bp, Homo sapiens
ctcaaacttgcgatc

SEQ ID NO: 2089196 - DNA, 15 bp, Homo sapiens
tcaaacttgcgatcc

SEQ ID NO: 2089197 - DNA, 15 bp, Homo sapiens
caaacttgcgatccc

SEQ ID NO: 2089198 - DNA, 15 bp, Homo sapiens
aaacttgcgatccca

SEQ ID NO: 2089199 - DNA, 15 bp, Homo sapiens
aacttgcgatcccag

SEQ ID NO: 2089200 - DNA, 15 bp, Homo sapiens
acttgcgatcccagc

SEQ ID NO: 2089201 - DNA, 15 bp, Homo sapiens
cttgcgatcccagca

SEQ ID NO: 2089202 - DNA, 15 bp, Homo sapiens
ttgcgatcccagcac

SEQ ID NO: 2089203 - DNA, 15 bp, Homo sapiens
tgcgatcccagcact

SEQ ID NO: 2089204 - DNA, 15 bp, Homo sapiens
gcgatcccagcactt

SEQ ID NO: 2089205 - DNA, 15 bp, Homo sapiens
cgatcccagcacttt

SEQ ID NO: 2089206 - DNA, 15 bp, Homo sapiens
gatcccagcacttta

SEQ ID NO: 2089207 - DNA, 15 bp, Homo sapiens
atcccagcactttat

SEQ ID NO: 2089208 - DNA, 15 bp, Homo sapiens
tcccagcactttatg

SEQ ID NO: 2089209 - DNA, 15 bp, Homo sapiens
cccagcactttatgg

SEQ ID NO: 2089210 - DNA, 15 bp, Homo sapiens
ccagcactttatggg

SEQ ID NO: 2089211 - DNA, 15 bp, Homo sapiens
cagcactttatgggg

SEQ ID NO: 2089212 - DNA, 15 bp, Homo sapiens
agcactttatggggc

SEQ ID NO: 2089213 - DNA, 15 bp, Homo sapiens
gcactttatggggct

SEQ ID NO: 2089214 - DNA, 15 bp, Homo sapiens
cactttatggggctg

SEQ ID NO: 2089215 - DNA, 15 bp, Homo sapiens
actttatggggctga

SEQ ID NO: 2089216 - DNA, 15 bp, Homo sapiens
ctttatggggctgag

SEQ ID NO: 2089217 - DNA, 15 bp, Homo sapiens
tttatggggctgagg

SEQ ID NO: 2089218 - DNA, 15 bp, Homo sapiens
ttatggggctgaggt

SEQ ID NO: 2089219 - DNA, 15 bp, Homo sapiens
tatggggctgaggtg

SEQ ID NO: 2089220 - DNA, 15 bp, Homo sapiens
atggggctgaggtgg

SEQ ID NO: 2089221 - DNA, 15 bp, Homo sapiens
tggggctgaggtggg

SEQ ID NO: 2089222 - DNA, 15 bp, Homo sapiens
ggggctgaggtggga

SEQ ID NO: 2089223 - DNA, 15 bp, Homo sapiens
gggctgaggtgggag

SEQ ID NO: 2089224 - DNA, 15 bp, Homo sapiens
gctgaggtgggaggg

SEQ ID NO: 2089225 - DNA, 15 bp, Homo sapiens
ctgaggtgggagggt

SEQ ID NO: 2089226 - DNA, 15 bp, Homo sapiens
tgaggtgggagggtc

SEQ ID NO: 2089227 - DNA, 15 bp, Homo sapiens
gaggtgggagggtca

SEQ ID NO: 2089228 - DNA, 15 bp, Homo sapiens
aggtgggagggtcac

SEQ ID NO: 2089229 - DNA, 15 bp, Homo sapiens
ggtgggagggtcact

SEQ ID NO: 2089230 - DNA, 15 bp, Homo sapiens
gtgggagggtcactt

SEQ ID NO: 2089231 - DNA, 15 bp, Homo sapiens
tgggagggtcacttg

SEQ ID NO: 2089232 - DNA, 15 bp, Homo sapiens
gggagggtcacttga

SEQ ID NO: 2089233 - DNA, 15 bp, Homo sapiens
ggagggtcacttgaa

SEQ ID NO: 2089234 - DNA, 15 bp, Homo sapiens
gagggtcacttgaag

SEQ ID NO: 2089235 - DNA, 15 bp, Homo sapiens
agggtcacttgaagc

SEQ ID NO: 2089236 - DNA, 15 bp, Homo sapiens
gggtcacttgaagcc

SEQ ID NO: 2089237 - DNA, 15 bp, Homo sapiens
ggtcacttgaagccc

SEQ ID NO: 2089238 - DNA, 15 bp, Homo sapiens
gtcacttgaagccct

SEQ ID NO: 2089239 - DNA, 15 bp, Homo sapiens
tcacttgaagccctg

SEQ ID NO: 2089240 - DNA, 15 bp, Homo sapiens
cacttgaagccctga

SEQ ID NO: 2089241 - DNA, 15 bp, Homo sapiens
acttgaagccctgag

SEQ ID NO: 2089242 - DNA, 15 bp, Homo sapiens
cttgaagccctgagt

SEQ ID NO: 2089243 - DNA, 15 bp, Homo sapiens
ttgaagccctgagtt

SEQ ID NO: 2089244 - DNA, 15 bp, Homo sapiens
tgaagccctgagttt

SEQ ID NO: 2089245 - DNA, 15 bp, Homo sapiens
gaagccctgagttta

SEQ ID NO: 2089246 - DNA, 15 bp, Homo sapiens
aagccctgagtttaa

SEQ ID NO: 2089247 - DNA, 15 bp, Homo sapiens
agccctgagtttaag

SEQ ID NO: 2089248 - DNA, 15 bp, Homo sapiens
gccctgagtttaaga

SEQ ID NO: 2089249 - DNA, 15 bp, Homo sapiens
ccctgagtttaagac

SEQ ID NO: 2089250 - DNA, 15 bp, Homo sapiens
cctgagtttaagact

SEQ ID NO: 2089251 - DNA, 15 bp, Homo sapiens
ctgagtttaagacta

SEQ ID NO: 2089252 - DNA, 15 bp, Homo sapiens
tgagtttaagactag

SEQ ID NO: 2089253 - DNA, 15 bp, Homo sapiens
gagtttaagactagc

SEQ ID NO: 2089254 - DNA, 15 bp, Homo sapiens
agtttaagactagcg

SEQ ID NO: 2089255 - DNA, 15 bp, Homo sapiens
gtttaagactagcgt

SEQ ID NO: 2089256 - DNA, 15 bp, Homo sapiens
tttaagactagcgtg

SEQ ID NO: 2089257 - DNA, 15 bp, Homo sapiens
ttaagactagcgtgg

SEQ ID NO: 2089258 - DNA, 15 bp, Homo sapiens
taagactagcgtggg

SEQ ID NO: 2089259 - DNA, 15 bp, Homo sapiens
aagactagcgtgggc

SEQ ID NO: 2089260 - DNA, 15 bp, Homo sapiens
agactagcgtgggca

SEQ ID NO: 2089261 - DNA, 15 bp, Homo sapiens
gactagcgtgggcaa

SEQ ID NO: 2089262 - DNA, 15 bp, Homo sapiens
actagcgtgggcaac

SEQ ID NO: 2089263 - DNA, 15 bp, Homo sapiens
ctagcgtgggcaaca

SEQ ID NO: 2089264 - DNA, 15 bp, Homo sapiens
tagcgtgggcaacat

SEQ ID NO: 2089265 - DNA, 15 bp, Homo sapiens
agcgtgggcaacata

SEQ ID NO: 2089266 - DNA, 15 bp, Homo sapiens
gcgtgggcaacatag

SEQ ID NO: 2089267 - DNA, 15 bp, Homo sapiens
cgtgggcaacatagt

SEQ ID NO: 2089268 - DNA, 15 bp, Homo sapiens
gtgggcaacatagtg

SEQ ID NO: 2089269 - DNA, 15 bp, Homo sapiens
acatagtgagacccc

SEQ ID NO: 2089270 - DNA, 15 bp, Homo sapiens
catagtgagaccccc

SEQ ID NO: 2089271 - DNA, 15 bp, Homo sapiens
atagtgagaccccca

SEQ ID NO: 2089272 - DNA, 15 bp, Homo sapiens
tagtgagacccccat

SEQ ID NO: 2089273 - DNA, 15 bp, Homo sapiens
agtgagacccccatc

SEQ ID NO: 2089274 - DNA, 15 bp, Homo sapiens
gtgagacccccatct

SEQ ID NO: 2089275 - DNA, 15 bp, Homo sapiens
tgagacccccatctc

SEQ ID NO: 2089276 - DNA, 15 bp, Homo sapiens
gagacccccatctct

SEQ ID NO: 2089277 - DNA, 15 bp, Homo sapiens
agacccccatctcta

SEQ ID NO: 2089278 - DNA, 15 bp, Homo sapiens
gacccccatctctac

SEQ ID NO: 2089279 - DNA, 15 bp, Homo sapiens
acccccatctctaca

SEQ ID NO: 2089280 - DNA, 15 bp, Homo sapiens
ccatctctacaaaac

SEQ ID NO: 2089281 - DNA, 15 bp, Homo sapiens
catctctacaaaaca

SEQ ID NO: 2089282 - DNA, 15 bp, Homo sapiens
atctctacaaaacaa

SEQ ID NO: 2089283 - DNA, 15 bp, Homo sapiens
tctctacaaaacaaa

SEQ ID NO: 2089284 - DNA, 15 bp, Homo sapiens
ctctacaaaacaaaa

SEQ ID NO: 2089285 - DNA, 15 bp, Homo sapiens
tctacaaaacaaaac

SEQ ID NO: 2089286 - DNA, 15 bp, Homo sapiens
ctacaaaacaaaaca

SEQ ID NO: 2089287 - DNA, 15 bp, Homo sapiens
tacaaaacaaaacaa

SEQ ID NO: 2089288 - DNA, 15 bp, Homo sapiens
acaaaacaaaacaac

SEQ ID NO: 2089289 - DNA, 15 bp, Homo sapiens
caaaacaaaacaaca

SEQ ID NO: 2089290 - DNA, 15 bp, Homo sapiens
caaaacaacaacaaa

SEQ ID NO: 2089291 - DNA, 15 bp, Homo sapiens
aaacaacaacaaaac

SEQ ID NO: 2089292 - DNA, 15 bp, Homo sapiens
aacaacaacaaaact

SEQ ID NO: 2089293 - DNA, 15 bp, Homo sapiens
acaacaacaaaacta

SEQ ID NO: 2089294 - DNA, 15 bp, Homo sapiens
caacaacaaaactaa

SEQ ID NO: 2089295 - DNA, 15 bp, Homo sapiens
aacaacaaaactaag

SEQ ID NO: 2089296 - DNA, 15 bp, Homo sapiens
acaacaaaactaagc

SEQ ID NO: 2089297 - DNA, 15 bp, Homo sapiens
caacaaaactaagct

SEQ ID NO: 2089298 - DNA, 15 bp, Homo sapiens
aacaaaactaagctg

SEQ ID NO: 2089299 - DNA, 15 bp, Homo sapiens
acaaaactaagctgg

SEQ ID NO: 2089300 - DNA, 15 bp, Homo sapiens
caaaactaagctggt

SEQ ID NO: 2089301 - DNA, 15 bp, Homo sapiens
aaaactaagctggtg

SEQ ID NO: 2089302 - DNA, 15 bp, Homo sapiens
aaactaagctggtgc

SEQ ID NO: 2089303 - DNA, 15 bp, Homo sapiens
aactaagctggtgca

SEQ ID NO: 2089304 - DNA, 15 bp, Homo sapiens
actaagctggtgcat

SEQ ID NO: 2089305 - DNA, 15 bp, Homo sapiens
ctaagctggtgcatg

SEQ ID NO: 2089306 - DNA, 15 bp, Homo sapiens
taagctggtgcatgg

SEQ ID NO: 2089307 - DNA, 15 bp, Homo sapiens
aagctggtgcatggt

SEQ ID NO: 2089308 - DNA, 15 bp, Homo sapiens
agctggtgcatggtg

SEQ ID NO: 2089309 - DNA, 15 bp, Homo sapiens
gctggtgcatggtgg

SEQ ID NO: 2089310 - DNA, 15 bp, Homo sapiens
ctggtgcatggtggc

SEQ ID NO: 2089311 - DNA, 15 bp, Homo sapiens
tggtgcatggtggca

SEQ ID NO: 2089312 - DNA, 15 bp, Homo sapiens
ggtgcatggtggcat

SEQ ID NO: 2089313 - DNA, 15 bp, Homo sapiens
gtgcatggtggcatg

SEQ ID NO: 2089314 - DNA, 15 bp, Homo sapiens
tgcatggtggcatgc

SEQ ID NO: 2089315 - DNA, 15 bp, Homo sapiens
ggtggcatgcaccta

SEQ ID NO: 2089316 - DNA, 15 bp, Homo sapiens
gtggcatgcacctat

SEQ ID NO: 2089317 - DNA, 15 bp, Homo sapiens
tggcatgcacctata

SEQ ID NO: 2089318 - DNA, 15 bp, Homo sapiens
ggcatgcacctatag

SEQ ID NO: 2089319 - DNA, 15 bp, Homo sapiens
gcatgcacctatagt

SEQ ID NO: 2089320 - DNA, 15 bp, Homo sapiens
catgcacctatagtc

SEQ ID NO: 2089321 - DNA, 15 bp, Homo sapiens
atgcacctatagtcc

SEQ ID NO: 2089322 - DNA, 15 bp, Homo sapiens
tgcacctatagtcct

SEQ ID NO: 2089323 - DNA, 15 bp, Homo sapiens
gcacctatagtccta

SEQ ID NO: 2089324 - DNA, 15 bp, Homo sapiens
cacctatagtcctag

SEQ ID NO: 2089325 - DNA, 15 bp, Homo sapiens
acctatagtcctagc

SEQ ID NO: 2089326 - DNA, 15 bp, Homo sapiens
cctatagtcctagct

SEQ ID NO: 2089327 - DNA, 15 bp, Homo sapiens
ctatagtcctagcta

SEQ ID NO: 2089328 - DNA, 15 bp, Homo sapiens
tatagtcctagctac

SEQ ID NO: 2089329 - DNA, 15 bp, Homo sapiens
atagtcctagctact

SEQ ID NO: 2089330 - DNA, 15 bp, Homo sapiens
gtcctagctacttga

SEQ ID NO: 2089331 - DNA, 15 bp, Homo sapiens
tcctagctacttgag

SEQ ID NO: 2089332 - DNA, 15 bp, Homo sapiens
cctagctacttgaga

SEQ ID NO: 2089333 - DNA, 15 bp, Homo sapiens
ctagctacttgagag

SEQ ID NO: 2089334 - DNA, 15 bp, Homo sapiens
tagctacttgagagg

SEQ ID NO: 2089335 - DNA, 15 bp, Homo sapiens
cttgagaggctgagg

SEQ ID NO: 2089336 - DNA, 15 bp, Homo sapiens
ttgagaggctgaggt

SEQ ID NO: 2089337 - DNA, 15 bp, Homo sapiens
tgagaggctgaggtg

SEQ ID NO: 2089338 - DNA, 15 bp, Homo sapiens
gagaggctgaggtgg

SEQ ID NO: 2089339 - DNA, 15 bp, Homo sapiens
agaggctgaggtggg

SEQ ID NO: 2089340 - DNA, 15 bp, Homo sapiens
tgaggtgggaggata

SEQ ID NO: 2089341 - DNA, 15 bp, Homo sapiens
gaggtgggaggatat

SEQ ID NO: 2089342 - DNA, 15 bp, Homo sapiens
aggtgggaggatatc

SEQ ID NO: 2089343 - DNA, 15 bp, Homo sapiens
ggtgggaggatatct

SEQ ID NO: 2089344 - DNA, 15 bp, Homo sapiens
gtgggaggatatctt

SEQ ID NO: 2089345 - DNA, 15 bp, Homo sapiens
tgggaggatatcttg

SEQ ID NO: 2089346 - DNA, 15 bp, Homo sapiens
gggaggatatcttga

SEQ ID NO: 2089347 - DNA, 15 bp, Homo sapiens
ggaggatatcttgag

SEQ ID NO: 2089348 - DNA, 15 bp, Homo sapiens
gaggatatcttgagc

SEQ ID NO: 2089349 - DNA, 15 bp, Homo sapiens
aggatatcttgagcc

SEQ ID NO: 2089350 - DNA, 15 bp, Homo sapiens
ggatatcttgagccc

SEQ ID NO: 2089351 - DNA, 15 bp, Homo sapiens
gatatcttgagccca

SEQ ID NO: 2089352 - DNA, 15 bp, Homo sapiens
atatcttgagcccag

SEQ ID NO: 2089353 - DNA, 15 bp, Homo sapiens
tatcttgagcccagg

SEQ ID NO: 2089354 - DNA, 15 bp, Homo sapiens
atcttgagcccagga

SEQ ID NO: 2089355 - DNA, 15 bp, Homo sapiens
tcttgagcccaggag

SEQ ID NO: 2089356 - DNA, 15 bp, Homo sapiens
gagcccaggagctcg

SEQ ID NO: 2089357 - DNA, 15 bp, Homo sapiens
agcccaggagctcga

SEQ ID NO: 2089358 - DNA, 15 bp, Homo sapiens
gcccaggagctcgag

SEQ ID NO: 2089359 - DNA, 15 bp, Homo sapiens
cccaggagctcgagg

SEQ ID NO: 2089360 - DNA, 15 bp, Homo sapiens
ccaggagctcgaggc

SEQ ID NO: 2089361 - DNA, 15 bp, Homo sapiens
caggagctcgaggct

SEQ ID NO: 2089362 - DNA, 15 bp, Homo sapiens
aggagctcgaggctg

SEQ ID NO: 2089363 - DNA, 15 bp, Homo sapiens
ggagctcgaggctgc

SEQ ID NO: 2089364 - DNA, 15 bp, Homo sapiens
gagctcgaggctgca

SEQ ID NO: 2089365 - DNA, 15 bp, Homo sapiens
agctcgaggctgcag

SEQ ID NO: 2089366 - DNA, 15 bp, Homo sapiens
gctcgaggctgcagt

SEQ ID NO: 2089367 - DNA, 15 bp, Homo sapiens
ctcgaggctgcagtg

SEQ ID NO: 2089368 - DNA, 15 bp, Homo sapiens
tgcagtgagctgtgt

SEQ ID NO: 2089369 - DNA, 15 bp, Homo sapiens
gcagtgagctgtgtt

SEQ ID NO: 2089370 - DNA, 15 bp, Homo sapiens
cagtgagctgtgttt

SEQ ID NO: 2089371 - DNA, 15 bp, Homo sapiens
agtgagctgtgtttg

SEQ ID NO: 2089372 - DNA, 15 bp, Homo sapiens
gtgagctgtgtttgt

SEQ ID NO: 2089373 - DNA, 15 bp, Homo sapiens
tgagctgtgtttgtg

SEQ ID NO: 2089374 - DNA, 15 bp, Homo sapiens
gagctgtgtttgtgc

SEQ ID NO: 2089375 - DNA, 15 bp, Homo sapiens
agctgtgtttgtgcc

SEQ ID NO: 2089376 - DNA, 15 bp, Homo sapiens
gctgtgtttgtgcca

SEQ ID NO: 2089377 - DNA, 15 bp, Homo sapiens
ctgtgtttgtgccac

SEQ ID NO: 2089378 - DNA, 15 bp, Homo sapiens
tgtgtttgtgccact

SEQ ID NO: 2089379 - DNA, 15 bp, Homo sapiens
gtgtttgtgccactg

SEQ ID NO: 2089380 - DNA, 15 bp, Homo sapiens
tgtttgtgccactgt

SEQ ID NO: 2089381 - DNA, 15 bp, Homo sapiens
gtttgtgccactgta

SEQ ID NO: 2089382 - DNA, 15 bp, Homo sapiens
tttgtgccactgtac

SEQ ID NO: 2089383 - DNA, 15 bp, Homo sapiens
ttgtgccactgtact

SEQ ID NO: 2089384 - DNA, 15 bp, Homo sapiens
tgtgccactgtactc

SEQ ID NO: 2089385 - DNA, 15 bp, Homo sapiens
gtgccactgtactcc

SEQ ID NO: 2089386 - DNA, 15 bp, Homo sapiens
tgccactgtactcca

SEQ ID NO: 2089387 - DNA, 15 bp, Homo sapiens
gccactgtactccaa

SEQ ID NO: 2089388 - DNA, 15 bp, Homo sapiens
cactgtactccaacc

SEQ ID NO: 2089389 - DNA, 15 bp, Homo sapiens
actgtactccaacct

SEQ ID NO: 2089390 - DNA, 15 bp, Homo sapiens
ctgtactccaacctg

SEQ ID NO: 2089391 - DNA, 15 bp, Homo sapiens
tgtactccaacctgg

SEQ ID NO: 2089392 - DNA, 15 bp, Homo sapiens
gtactccaacctggg

SEQ ID NO: 2089393 - DNA, 15 bp, Homo sapiens
tactccaacctgggc

SEQ ID NO: 2089394 - DNA, 15 bp, Homo sapiens
actccaacctgggca

SEQ ID NO: 2089395 - DNA, 15 bp, Homo sapiens
ctccaacctgggcaa

SEQ ID NO: 2089396 - DNA, 15 bp, Homo sapiens
tccaacctgggcaac

SEQ ID NO: 2089397 - DNA, 15 bp, Homo sapiens
caacctgggcaacaa

SEQ ID NO: 2089398 - DNA, 15 bp, Homo sapiens
aacctgggcaacaaa

SEQ ID NO: 2089399 - DNA, 15 bp, Homo sapiens
acctgggcaacaaag

SEQ ID NO: 2089400 - DNA, 15 bp, Homo sapiens
gggcaacaaagtgaa

SEQ ID NO: 2089401 - DNA, 15 bp, Homo sapiens
ggcaacaaagtgaaa

SEQ ID NO: 2089402 - DNA, 15 bp, Homo sapiens
gcaacaaagtgaaat

SEQ ID NO: 2089403 - DNA, 15 bp, Homo sapiens
caacaaagtgaaatc

SEQ ID NO: 2089404 - DNA, 15 bp, Homo sapiens
aacaaagtgaaatcc

SEQ ID NO: 2089405 - DNA, 15 bp, Homo sapiens
acaaagtgaaatccc

SEQ ID NO: 2089406 - DNA, 15 bp, Homo sapiens
caaagtgaaatccca

SEQ ID NO: 2089407 - DNA, 15 bp, Homo sapiens
aaagtgaaatcccat

SEQ ID NO: 2089408 - DNA, 15 bp, Homo sapiens
aagtgaaatcccatc

SEQ ID NO: 2089409 - DNA, 15 bp, Homo sapiens
gtgaaatcccatctc

SEQ ID NO: 2089410 - DNA, 15 bp, Homo sapiens
tgaaatcccatctct

SEQ ID NO: 2089411 - DNA, 15 bp, Homo sapiens
gaaatcccatctctt

SEQ ID NO: 2089412 - DNA, 15 bp, Homo sapiens
aaatcccatctcttt

SEQ ID NO: 2089413 - DNA, 15 bp, Homo sapiens
aatcccatctctttt

SEQ ID NO: 2089414 - DNA, 15 bp, Homo sapiens
atcccatctcttttt

SEQ ID NO: 2089415 - DNA, 15 bp, Homo sapiens
tcccatctctttttt

SEQ ID NO: 2089416 - DNA, 15 bp, Homo sapiens
cccatctcttttttt

SEQ ID NO: 2089417 - DNA, 15 bp, Homo sapiens
ccatctctttttttt

SEQ ID NO: 2089418 - DNA, 15 bp, Homo sapiens
catctcttttttttt

SEQ ID NO: 2089419 - DNA, 15 bp, Homo sapiens
atctctttttttttt

SEQ ID NO: 2089420 - DNA, 15 bp, Homo sapiens
cggagtctggctctg

SEQ ID NO: 2089421 - DNA, 15 bp, Homo sapiens
ggagtctggctctgt

SEQ ID NO: 2089422 - DNA, 15 bp, Homo sapiens
gagtctggctctgtc

SEQ ID NO: 2089423 - DNA, 15 bp, Homo sapiens
agtctggctctgtcg

SEQ ID NO: 2089424 - DNA, 15 bp, Homo sapiens
gtctggctctgtcgc

SEQ ID NO: 2089425 - DNA, 15 bp, Homo sapiens
tctggctctgtcgcc

SEQ ID NO: 2089426 - DNA, 15 bp, Homo sapiens
ctggctctgtcgccc

SEQ ID NO: 2089427 - DNA, 15 bp, Homo sapiens
tggctctgtcgccca

SEQ ID NO: 2089428 - DNA, 15 bp, Homo sapiens
ggctctgtcgcccag

SEQ ID NO: 2089429 - DNA, 15 bp, Homo sapiens
cagtggtgcgatctc

SEQ ID NO: 2089430 - DNA, 15 bp, Homo sapiens
agtggtgcgatctcg

SEQ ID NO: 2089431 - DNA, 15 bp, Homo sapiens
gtggtgcgatctcgg

SEQ ID NO: 2089432 - DNA, 15 bp, Homo sapiens
tggtgcgatctcggc

SEQ ID NO: 2089433 - DNA, 15 bp, Homo sapiens
ggtgcgatctcggct

SEQ ID NO: 2089434 - DNA, 15 bp, Homo sapiens
gtgcgatctcggctc

SEQ ID NO: 2089435 - DNA, 15 bp, Homo sapiens
tgcgatctcggctca

SEQ ID NO: 2089436 - DNA, 15 bp, Homo sapiens
gcgcccgccaccgca

SEQ ID NO: 2089437 - DNA, 15 bp, Homo sapiens
cgcccgccaccgcac

SEQ ID NO: 2089438 - DNA, 15 bp, Homo sapiens
gcccgccaccgcacc

SEQ ID NO: 2089439 - DNA, 15 bp, Homo sapiens
cccgccaccgcaccc

SEQ ID NO: 2089440 - DNA, 15 bp, Homo sapiens
ccgccaccgcaccca

SEQ ID NO: 2089441 - DNA, 15 bp, Homo sapiens
cgccaccgcacccac

SEQ ID NO: 2089442 - DNA, 15 bp, Homo sapiens
gccaccgcacccacc

SEQ ID NO: 2089443 - DNA, 15 bp, Homo sapiens
ccaccgcacccacct

SEQ ID NO: 2089444 - DNA, 15 bp, Homo sapiens
caccgcacccaccta

SEQ ID NO: 2089445 - DNA, 15 bp, Homo sapiens
accgcacccacctag

SEQ ID NO: 2089446 - DNA, 15 bp, Homo sapiens
ccgcacccacctagt

SEQ ID NO: 2089447 - DNA, 15 bp, Homo sapiens
cgcacccacctagtt

SEQ ID NO: 2089448 - DNA, 15 bp, Homo sapiens
gcacccacctagttt

SEQ ID NO: 2089449 - DNA, 15 bp, Homo sapiens
cacccacctagtttt

SEQ ID NO: 2089450 - DNA, 15 bp, Homo sapiens
acccacctagttttt

SEQ ID NO: 2089451 - DNA, 15 bp, Homo sapiens
cccacctagtttttt

SEQ ID NO: 2089452 - DNA, 15 bp, Homo sapiens
ccacctagttttttg

SEQ ID NO: 2089453 - DNA, 15 bp, Homo sapiens
cacctagttttttgt

SEQ ID NO: 2089454 - DNA, 15 bp, Homo sapiens
acctagttttttgta

SEQ ID NO: 2089455 - DNA, 15 bp, Homo sapiens
cctagttttttgtat

SEQ ID NO: 2089456 - DNA, 15 bp, Homo sapiens
ctagttttttgtatt

SEQ ID NO: 2089457 - DNA, 15 bp, Homo sapiens
tagttttttgtattt

SEQ ID NO: 2089458 - DNA, 15 bp, Homo sapiens
agttttttgtatttt

SEQ ID NO: 2089459 - DNA, 15 bp, Homo sapiens
gttttttgtattttt

SEQ ID NO: 2089460 - DNA, 15 bp, Homo sapiens
tttgtatttttagtg

SEQ ID NO: 2089461 - DNA, 15 bp, Homo sapiens
ttgtatttttagtgg

SEQ ID NO: 2089462 - DNA, 15 bp, Homo sapiens
tgtatttttagtgga

SEQ ID NO: 2089463 - DNA, 15 bp, Homo sapiens
gtatttttagtggag

SEQ ID NO: 2089464 - DNA, 15 bp, Homo sapiens
tatttttagtggaga

SEQ ID NO: 2089465 - DNA, 15 bp, Homo sapiens
atttttagtggagac

SEQ ID NO: 2089466 - DNA, 15 bp, Homo sapiens
tttttagtggagacg

SEQ ID NO: 2089467 - DNA, 15 bp, Homo sapiens
ttttagtggagacgg

SEQ ID NO: 2089468 - DNA, 15 bp, Homo sapiens
tttagtggagacggg

SEQ ID NO: 2089469 - DNA, 15 bp, Homo sapiens
ttagtggagacgggg

SEQ ID NO: 2089470 - DNA, 15 bp, Homo sapiens
tagtggagacggggt

SEQ ID NO: 2089471 - DNA, 15 bp, Homo sapiens
agtggagacggggtt

SEQ ID NO: 2089472 - DNA, 15 bp, Homo sapiens
gtggagacggggttt

SEQ ID NO: 2089473 - DNA, 15 bp, Homo sapiens
tggagacggggtttc

SEQ ID NO: 2089474 - DNA, 15 bp, Homo sapiens
ggagacggggtttca

SEQ ID NO: 2089475 - DNA, 15 bp, Homo sapiens
cggggtttcactgtt

SEQ ID NO: 2089476 - DNA, 15 bp, Homo sapiens
ggggtttcactgttt

SEQ ID NO: 2089477 - DNA, 15 bp, Homo sapiens
gggtttcactgtttt

SEQ ID NO: 2089478 - DNA, 15 bp, Homo sapiens
ggtttcactgtttta

SEQ ID NO: 2089479 - DNA, 15 bp, Homo sapiens
gtttcactgttttag

SEQ ID NO: 2089480 - DNA, 15 bp, Homo sapiens
tttcactgttttagc

SEQ ID NO: 2089481 - DNA, 15 bp, Homo sapiens
ttcactgttttagcc

SEQ ID NO: 2089482 - DNA, 15 bp, Homo sapiens
tcactgttttagcca

SEQ ID NO: 2089483 - DNA, 15 bp, Homo sapiens
cactgttttagccag

SEQ ID NO: 2089484 - DNA, 15 bp, Homo sapiens
actgttttagccagg

SEQ ID NO: 2089485 - DNA, 15 bp, Homo sapiens
ctgttttagccagga

SEQ ID NO: 2089486 - DNA, 15 bp, Homo sapiens
tgttttagccaggat

SEQ ID NO: 2089487 - DNA, 15 bp, Homo sapiens
gttttagccaggatg

SEQ ID NO: 2089488 - DNA, 15 bp, Homo sapiens
ttttagccaggatgg

SEQ ID NO: 2089489 - DNA, 15 bp, Homo sapiens
tttagccaggatggt

SEQ ID NO: 2089490 - DNA, 15 bp, Homo sapiens
gccaggatggtctca

SEQ ID NO: 2089491 - DNA, 15 bp, Homo sapiens
ccaggatggtctcaa

SEQ ID NO: 2089492 - DNA, 15 bp, Homo sapiens
caggatggtctcaat

SEQ ID NO: 2089493 - DNA, 15 bp, Homo sapiens
aggatggtctcaatc

SEQ ID NO: 2089494 - DNA, 15 bp, Homo sapiens
ggatggtctcaatct

SEQ ID NO: 2089495 - DNA, 15 bp, Homo sapiens
gatggtctcaatctc

SEQ ID NO: 2089496 - DNA, 15 bp, Homo sapiens
atggtctcaatctcc

SEQ ID NO: 2089497 - DNA, 15 bp, Homo sapiens
ggtctcaatctcctg

SEQ ID NO: 2089498 - DNA, 15 bp, Homo sapiens
gtctcaatctcctga

SEQ ID NO: 2089499 - DNA, 15 bp, Homo sapiens
tctcaatctcctgac

SEQ ID NO: 2089500 - DNA, 15 bp, Homo sapiens
ctcaatctcctgacc

SEQ ID NO: 2089501 - DNA, 15 bp, Homo sapiens
tcaatctcctgacct

SEQ ID NO: 2089502 - DNA, 15 bp, Homo sapiens
caatctcctgacctc

SEQ ID NO: 2089503 - DNA, 15 bp, Homo sapiens
aatctcctgacctcg

SEQ ID NO: 2089504 - DNA, 15 bp, Homo sapiens
tcgtgatccgcccgt

SEQ ID NO: 2089505 - DNA, 15 bp, Homo sapiens
cgtgatccgcccgtc

SEQ ID NO: 2089506 - DNA, 15 bp, Homo sapiens
gtgatccgcccgtct

SEQ ID NO: 2089507 - DNA, 15 bp, Homo sapiens
tgatccgcccgtctc

SEQ ID NO: 2089508 - DNA, 15 bp, Homo sapiens
gatccgcccgtctcg

SEQ ID NO: 2089509 - DNA, 15 bp, Homo sapiens
atccgcccgtctcgg

SEQ ID NO: 2089510 - DNA, 15 bp, Homo sapiens
tccgcccgtctcggc

SEQ ID NO: 2089511 - DNA, 15 bp, Homo sapiens
ccgcccgtctcggcc

SEQ ID NO: 2089512 - DNA, 15 bp, Homo sapiens
cgcccgtctcggcct

SEQ ID NO: 2089513 - DNA, 15 bp, Homo sapiens
gcccgtctcggcctc

SEQ ID NO: 2089514 - DNA, 15 bp, Homo sapiens
cccgtctcggcctcc

SEQ ID NO: 2089515 - DNA, 15 bp, Homo sapiens
ccgtctcggcctccc

SEQ ID NO: 2089516 - DNA, 15 bp, Homo sapiens
cgtctcggcctccca

SEQ ID NO: 2089517 - DNA, 15 bp, Homo sapiens
gtctcggcctcccaa

SEQ ID NO: 2089518 - DNA, 15 bp, Homo sapiens
gtgtgagccaccgcg

SEQ ID NO: 2089519 - DNA, 15 bp, Homo sapiens
tgtgagccaccgcgc

SEQ ID NO: 2089520 - DNA, 15 bp, Homo sapiens
ccgcgcccggccaaa

SEQ ID NO: 2089521 - DNA, 15 bp, Homo sapiens
cgcgcccggccaaaa

SEQ ID NO: 2089522 - DNA, 15 bp, Homo sapiens
gcgcccggccaaaat

SEQ ID NO: 2089523 - DNA, 15 bp, Homo sapiens
cgcccggccaaaatc

SEQ ID NO: 2089524 - DNA, 15 bp, Homo sapiens
gcccggccaaaatcc

SEQ ID NO: 2089525 - DNA, 15 bp, Homo sapiens
cccggccaaaatccc

SEQ ID NO: 2089526 - DNA, 15 bp, Homo sapiens
ccggccaaaatccca

SEQ ID NO: 2089527 - DNA, 15 bp, Homo sapiens
cggccaaaatcccat

SEQ ID NO: 2089528 - DNA, 15 bp, Homo sapiens
ggccaaaatcccatc

SEQ ID NO: 2089529 - DNA, 15 bp, Homo sapiens
gccaaaatcccatct

SEQ ID NO: 2089530 - DNA, 15 bp, Homo sapiens
ccaaaatcccatctc

SEQ ID NO: 2089531 - DNA, 15 bp, Homo sapiens
caaaatcccatctct

SEQ ID NO: 2089532 - DNA, 15 bp, Homo sapiens
aaaatcccatctctt

SEQ ID NO: 2089533 - DNA, 15 bp, Homo sapiens
aaatcccatctctta

SEQ ID NO: 2089534 - DNA, 15 bp, Homo sapiens
aatcccatctcttaa

SEQ ID NO: 2089535 - DNA, 15 bp, Homo sapiens
atcccatctcttaaa

SEQ ID NO: 2089536 - DNA, 15 bp, Homo sapiens
tcccatctcttaaaa

SEQ ID NO: 2089537 - DNA, 15 bp, Homo sapiens
cccatctcttaaaaa

SEQ ID NO: 2089538 - DNA, 15 bp, Homo sapiens
cttaaaaaaaaaatt

SEQ ID NO: 2089539 - DNA, 15 bp, Homo sapiens
ttaaaaaaaaaatta

SEQ ID NO: 2089540 - DNA, 15 bp, Homo sapiens
taaaaaaaaaattac

SEQ ID NO: 2089541 - DNA, 15 bp, Homo sapiens
aaaaaaaaaattacg

SEQ ID NO: 2089542 - DNA, 15 bp, Homo sapiens
aaaaaaaaattacga

SEQ ID NO: 2089543 - DNA, 15 bp, Homo sapiens
aaaaaaaattacgaa

SEQ ID NO: 2089544 - DNA, 15 bp, Homo sapiens
aaaaaaattacgaat

SEQ ID NO: 2089545 - DNA, 15 bp, Homo sapiens
aaaaaattacgaatg

SEQ ID NO: 2089546 - DNA, 15 bp, Homo sapiens
aaaaattacgaatga

SEQ ID NO: 2089547 - DNA, 15 bp, Homo sapiens
aaaattacgaatgaa

SEQ ID NO: 2089548 - DNA, 15 bp, Homo sapiens
aaattacgaatgaac

SEQ ID NO: 2089549 - DNA, 15 bp, Homo sapiens
aattacgaatgaaca

SEQ ID NO: 2089550 - DNA, 15 bp, Homo sapiens
attacgaatgaacag

SEQ ID NO: 2089551 - DNA, 15 bp, Homo sapiens
ttacgaatgaacaga

SEQ ID NO: 2089552 - DNA, 15 bp, Homo sapiens
tacgaatgaacagat

SEQ ID NO: 2089553 - DNA, 15 bp, Homo sapiens
acgaatgaacagata

SEQ ID NO: 2089554 - DNA, 15 bp, Homo sapiens
cgaatgaacagatac

SEQ ID NO: 2089555 - DNA, 15 bp, Homo sapiens
gaatgaacagataca

SEQ ID NO: 2089556 - DNA, 15 bp, Homo sapiens
aatgaacagatacat

SEQ ID NO: 2089557 - DNA, 15 bp, Homo sapiens
tgaacagatacatag

SEQ ID NO: 2089558 - DNA, 15 bp, Homo sapiens
gaacagatacatagt

SEQ ID NO: 2089559 - DNA, 15 bp, Homo sapiens
aacagatacatagtt

SEQ ID NO: 2089560 - DNA, 15 bp, Homo sapiens
acagatacatagttt

SEQ ID NO: 2089561 - DNA, 15 bp, Homo sapiens
cagatacatagtttt

SEQ ID NO: 2089562 - DNA, 15 bp, Homo sapiens
agatacatagttttc

SEQ ID NO: 2089563 - DNA, 15 bp, Homo sapiens
atacatagttttcct

SEQ ID NO: 2089564 - DNA, 15 bp, Homo sapiens
tacatagttttcctc

SEQ ID NO: 2089565 - DNA, 15 bp, Homo sapiens
acatagttttcctca

SEQ ID NO: 2089566 - DNA, 15 bp, Homo sapiens
catagttttcctcaa

SEQ ID NO: 2089567 - DNA, 15 bp, Homo sapiens
atagttttcctcaaa

SEQ ID NO: 2089568 - DNA, 15 bp, Homo sapiens
tagttttcctcaaag

SEQ ID NO: 2089569 - DNA, 15 bp, Homo sapiens
agttttcctcaaaga

SEQ ID NO: 2089570 - DNA, 15 bp, Homo sapiens
gttttcctcaaagac

SEQ ID NO: 2089571 - DNA, 15 bp, Homo sapiens
ttttcctcaaagact

SEQ ID NO: 2089572 - DNA, 15 bp, Homo sapiens
tttcctcaaagactg

SEQ ID NO: 2089573 - DNA, 15 bp, Homo sapiens
ttcctcaaagactgg

SEQ ID NO: 2089574 - DNA, 15 bp, Homo sapiens
tcctcaaagactggc

SEQ ID NO: 2089575 - DNA, 15 bp, Homo sapiens
cctcaaagactggcc

SEQ ID NO: 2089576 - DNA, 15 bp, Homo sapiens
ctcaaagactggcca

SEQ ID NO: 2089577 - DNA, 15 bp, Homo sapiens
tcaaagactggccag

SEQ ID NO: 2089578 - DNA, 15 bp, Homo sapiens
caaagactggccaga

SEQ ID NO: 2089579 - DNA, 15 bp, Homo sapiens
aaagactggccagat

SEQ ID NO: 2089580 - DNA, 15 bp, Homo sapiens
aagactggccagatg

SEQ ID NO: 2089581 - DNA, 15 bp, Homo sapiens
agactggccagatga

SEQ ID NO: 2089582 - DNA, 15 bp, Homo sapiens
gactggccagatgaa

SEQ ID NO: 2089583 - DNA, 15 bp, Homo sapiens
actggccagatgaat

SEQ ID NO: 2089584 - DNA, 15 bp, Homo sapiens
ctggccagatgaatg

SEQ ID NO: 2089585 - DNA, 15 bp, Homo sapiens
tggccagatgaatgc

SEQ ID NO: 2089586 - DNA, 15 bp, Homo sapiens
ggccagatgaatgcg

SEQ ID NO: 2089587 - DNA, 15 bp, Homo sapiens
gccagatgaatgcgc

SEQ ID NO: 2089588 - DNA, 15 bp, Homo sapiens
ccagatgaatgcgcc

SEQ ID NO: 2089589 - DNA, 15 bp, Homo sapiens
cagatgaatgcgcca

SEQ ID NO: 2089590 - DNA, 15 bp, Homo sapiens
agatgaatgcgccac

SEQ ID NO: 2089591 - DNA, 15 bp, Homo sapiens
gatgaatgcgccaca

SEQ ID NO: 2089592 - DNA, 15 bp, Homo sapiens
atgaatgcgccacac

SEQ ID NO: 2089593 - DNA, 15 bp, Homo sapiens
tgaatgcgccacaca

SEQ ID NO: 2089594 - DNA, 15 bp, Homo sapiens
gaatgcgccacacag

SEQ ID NO: 2089595 - DNA, 15 bp, Homo sapiens
aatgcgccacacaga

SEQ ID NO: 2089596 - DNA, 15 bp, Homo sapiens
atgcgccacacagac

SEQ ID NO: 2089597 - DNA, 15 bp, Homo sapiens
tgcgccacacagacc

SEQ ID NO: 2089598 - DNA, 15 bp, Homo sapiens
gcgccacacagaccg

SEQ ID NO: 2089599 - DNA, 15 bp, Homo sapiens
cgccacacagaccga

SEQ ID NO: 2089600 - DNA, 15 bp, Homo sapiens
gccacacagaccgat

SEQ ID NO: 2089601 - DNA, 15 bp, Homo sapiens
ccacacagaccgatg

SEQ ID NO: 2089602 - DNA, 15 bp, Homo sapiens
cacacagaccgatga

SEQ ID NO: 2089603 - DNA, 15 bp, Homo sapiens
acacagaccgatgag

SEQ ID NO: 2089604 - DNA, 15 bp, Homo sapiens
cacagaccgatgagg

SEQ ID NO: 2089605 - DNA, 15 bp, Homo sapiens
acagaccgatgaggc

SEQ ID NO: 2089606 - DNA, 15 bp, Homo sapiens
cagaccgatgaggca

SEQ ID NO: 2089607 - DNA, 15 bp, Homo sapiens
agaccgatgaggcac

SEQ ID NO: 2089608 - DNA, 15 bp, Homo sapiens
gaccgatgaggcaca

SEQ ID NO: 2089609 - DNA, 15 bp, Homo sapiens
accgatgaggcacac

SEQ ID NO: 2089610 - DNA, 15 bp, Homo sapiens
ccgatgaggcacact

SEQ ID NO: 2089611 - DNA, 15 bp, Homo sapiens
cgatgaggcacactg

SEQ ID NO: 2089612 - DNA, 15 bp, Homo sapiens
gatgaggcacactgc

SEQ ID NO: 2089613 - DNA, 15 bp, Homo sapiens
atgaggcacactgca

SEQ ID NO: 2089614 - DNA, 15 bp, Homo sapiens
tgaggcacactgcaa

SEQ ID NO: 2089615 - DNA, 15 bp, Homo sapiens
gaggcacactgcaaa

SEQ ID NO: 2089616 - DNA, 15 bp, Homo sapiens
aggcacactgcaaag

SEQ ID NO: 2089617 - DNA, 15 bp, Homo sapiens
ggcacactgcaaagg

SEQ ID NO: 2089618 - DNA, 15 bp, Homo sapiens
gcacactgcaaaggg

SEQ ID NO: 2089619 - DNA, 15 bp, Homo sapiens
cacactgcaaagggg

SEQ ID NO: 2089620 - DNA, 15 bp, Homo sapiens
acactgcaaaggggc

SEQ ID NO: 2089621 - DNA, 15 bp, Homo sapiens
cactgcaaaggggcc

SEQ ID NO: 2089622 - DNA, 15 bp, Homo sapiens
actgcaaaggggccc

SEQ ID NO: 2089623 - DNA, 15 bp, Homo sapiens
ctgcaaaggggccct

SEQ ID NO: 2089624 - DNA, 15 bp, Homo sapiens
tgcaaaggggccctg

SEQ ID NO: 2089625 - DNA, 15 bp, Homo sapiens
gcaaaggggccctgt

SEQ ID NO: 2089626 - DNA, 15 bp, Homo sapiens
caaaggggccctgtg

SEQ ID NO: 2089627 - DNA, 15 bp, Homo sapiens
aaaggggccctgtgg

SEQ ID NO: 2089628 - DNA, 15 bp, Homo sapiens
aaggggccctgtggt

SEQ ID NO: 2089629 - DNA, 15 bp, Homo sapiens
aggggccctgtggtc

SEQ ID NO: 2089630 - DNA, 15 bp, Homo sapiens
ggggccctgtggtcg

SEQ ID NO: 2089631 - DNA, 15 bp, Homo sapiens
gggccctgtggtcga

SEQ ID NO: 2089632 - DNA, 15 bp, Homo sapiens
ggccctgtggtcgag

SEQ ID NO: 2089633 - DNA, 15 bp, Homo sapiens
gccctgtggtcgagg

SEQ ID NO: 2089634 - DNA, 15 bp, Homo sapiens
ccctgtggtcgaggt

SEQ ID NO: 2089635 - DNA, 15 bp, Homo sapiens
cctgtggtcgaggtt

SEQ ID NO: 2089636 - DNA, 15 bp, Homo sapiens
ctgtggtcgaggttg

SEQ ID NO: 2089637 - DNA, 15 bp, Homo sapiens
tgtggtcgaggttgc

SEQ ID NO: 2089638 - DNA, 15 bp, Homo sapiens
gtggtcgaggttgct

SEQ ID NO: 2089639 - DNA, 15 bp, Homo sapiens
tggtcgaggttgctt

SEQ ID NO: 2089640 - DNA, 15 bp, Homo sapiens
ggtcgaggttgcttg

SEQ ID NO: 2089641 - DNA, 15 bp, Homo sapiens
gtcgaggttgcttgg

SEQ ID NO: 2089642 - DNA, 15 bp, Homo sapiens
tcgaggttgcttgga

SEQ ID NO: 2089643 - DNA, 15 bp, Homo sapiens
cgaggttgcttggag

SEQ ID NO: 2089644 - DNA, 15 bp, Homo sapiens
gaggttgcttggaga

SEQ ID NO: 2089645 - DNA, 15 bp, Homo sapiens
aggttgcttggagag

SEQ ID NO: 2089646 - DNA, 15 bp, Homo sapiens
ggttgcttggagagg

SEQ ID NO: 2089647 - DNA, 15 bp, Homo sapiens
gttgcttggagaggc

SEQ ID NO: 2089648 - DNA, 15 bp, Homo sapiens
ttgcttggagaggct

SEQ ID NO: 2089649 - DNA, 15 bp, Homo sapiens
tgcttggagaggctt

SEQ ID NO: 2089650 - DNA, 15 bp, Homo sapiens
gcttggagaggcttt

SEQ ID NO: 2089651 - DNA, 15 bp, Homo sapiens
cttggagaggctttg

SEQ ID NO: 2089652 - DNA, 15 bp, Homo sapiens
ttggagaggctttgg

SEQ ID NO: 2089653 - DNA, 15 bp, Homo sapiens
tggagaggctttggg

SEQ ID NO: 2089654 - DNA, 15 bp, Homo sapiens
ggagaggctttgggg

SEQ ID NO: 2089655 - DNA, 15 bp, Homo sapiens
gagaggctttgggga

SEQ ID NO: 2089656 - DNA, 15 bp, Homo sapiens
agaggctttggggaa

SEQ ID NO: 2089657 - DNA, 15 bp, Homo sapiens
gaggctttggggaag

SEQ ID NO: 2089658 - DNA, 15 bp, Homo sapiens
aggctttggggaagc

SEQ ID NO: 2089659 - DNA, 15 bp, Homo sapiens
ggctttggggaagcg

SEQ ID NO: 2089660 - DNA, 15 bp, Homo sapiens
gctttggggaagcgc

SEQ ID NO: 2089661 - DNA, 15 bp, Homo sapiens
ctttggggaagcgca

SEQ ID NO: 2089662 - DNA, 15 bp, Homo sapiens
tttggggaagcgcaa

SEQ ID NO: 2089663 - DNA, 15 bp, Homo sapiens
ttggggaagcgcaac

SEQ ID NO: 2089664 - DNA, 15 bp, Homo sapiens
tggggaagcgcaact

SEQ ID NO: 2089665 - DNA, 15 bp, Homo sapiens
ggggaagcgcaactc

SEQ ID NO: 2089666 - DNA, 15 bp, Homo sapiens
gggaagcgcaactca

SEQ ID NO: 2089667 - DNA, 15 bp, Homo sapiens
ggaagcgcaactcat

SEQ ID NO: 2089668 - DNA, 15 bp, Homo sapiens
gaagcgcaactcatt

SEQ ID NO: 2089669 - DNA, 15 bp, Homo sapiens
aagcgcaactcattt

SEQ ID NO: 2089670 - DNA, 15 bp, Homo sapiens
agcgcaactcatttc

SEQ ID NO: 2089671 - DNA, 15 bp, Homo sapiens
gcgcaactcatttct

SEQ ID NO: 2089672 - DNA, 15 bp, Homo sapiens
cgcaactcatttctt

SEQ ID NO: 2089673 - DNA, 15 bp, Homo sapiens
gcaactcatttcttt

SEQ ID NO: 2089674 - DNA, 15 bp, Homo sapiens
caactcatttctttt

SEQ ID NO: 2089675 - DNA, 15 bp, Homo sapiens
aactcatttcttttc

SEQ ID NO: 2089676 - DNA, 15 bp, Homo sapiens
actcatttcttttcc

SEQ ID NO: 2089677 - DNA, 15 bp, Homo sapiens
ctcatttcttttccc

SEQ ID NO: 2089678 - DNA, 15 bp, Homo sapiens
tcatttcttttccct

SEQ ID NO: 2089679 - DNA, 15 bp, Homo sapiens
catttcttttccctt

SEQ ID NO: 2089680 - DNA, 15 bp, Homo sapiens
atttcttttcccttc

SEQ ID NO: 2089681 - DNA, 15 bp, Homo sapiens
tttcttttcccttct

SEQ ID NO: 2089682 - DNA, 15 bp, Homo sapiens
ttcttttcccttctg

SEQ ID NO: 2089683 - DNA, 15 bp, Homo sapiens
tcttttcccttctgc

SEQ ID NO: 2089684 - DNA, 15 bp, Homo sapiens
cttttcccttctgcc

SEQ ID NO: 2089685 - DNA, 15 bp, Homo sapiens
ttttcccttctgcca

SEQ ID NO: 2089686 - DNA, 15 bp, Homo sapiens
tttcccttctgccag

SEQ ID NO: 2089687 - DNA, 15 bp, Homo sapiens
ttcccttctgccagt

SEQ ID NO: 2089688 - DNA, 15 bp, Homo sapiens
tcccttctgccagtg

SEQ ID NO: 2089689 - DNA, 15 bp, Homo sapiens
cccttctgccagtgg

SEQ ID NO: 2089690 - DNA, 15 bp, Homo sapiens
ccttctgccagtggg

SEQ ID NO: 2089691 - DNA, 15 bp, Homo sapiens
cttctgccagtgggt

SEQ ID NO: 2089692 - DNA, 15 bp, Homo sapiens
ttctgccagtgggta

SEQ ID NO: 2089693 - DNA, 15 bp, Homo sapiens
tctgccagtgggtag

SEQ ID NO: 2089694 - DNA, 15 bp, Homo sapiens
ctgccagtgggtagg

SEQ ID NO: 2089695 - DNA, 15 bp, Homo sapiens
tgccagtgggtagga

SEQ ID NO: 2089696 - DNA, 15 bp, Homo sapiens
gccagtgggtaggat

SEQ ID NO: 2089697 - DNA, 15 bp, Homo sapiens
ccagtgggtaggatt

SEQ ID NO: 2089698 - DNA, 15 bp, Homo sapiens
cagtgggtaggattg

SEQ ID NO: 2089699 - DNA, 15 bp, Homo sapiens
agtgggtaggattgg

SEQ ID NO: 2089700 - DNA, 15 bp, Homo sapiens
gtgggtaggattgga

SEQ ID NO: 2089701 - DNA, 15 bp, Homo sapiens
tgggtaggattggag

SEQ ID NO: 2089702 - DNA, 15 bp, Homo sapiens
gggtaggattggaga

SEQ ID NO: 2089703 - DNA, 15 bp, Homo sapiens
ggtaggattggagag

SEQ ID NO: 2089704 - DNA, 15 bp, Homo sapiens
gtaggattggagaga

SEQ ID NO: 2089705 - DNA, 15 bp, Homo sapiens
taggattggagagag

SEQ ID NO: 2089706 - DNA, 15 bp, Homo sapiens
aggattggagagagg

SEQ ID NO: 2089707 - DNA, 15 bp, Homo sapiens
ggattggagagaggt

SEQ ID NO: 2089708 - DNA, 15 bp, Homo sapiens
gattggagagaggtg

SEQ ID NO: 2089709 - DNA, 15 bp, Homo sapiens
attggagagaggtgt

SEQ ID NO: 2089710 - DNA, 15 bp, Homo sapiens
ttggagagaggtgtt

SEQ ID NO: 2089711 - DNA, 15 bp, Homo sapiens
tggagagaggtgttt

SEQ ID NO: 2089712 - DNA, 15 bp, Homo sapiens
ggagagaggtgtttg

SEQ ID NO: 2089713 - DNA, 15 bp, Homo sapiens
gagagaggtgtttgg

SEQ ID NO: 2089714 - DNA, 15 bp, Homo sapiens
agagaggtgtttgga

SEQ ID NO: 2089715 - DNA, 15 bp, Homo sapiens
gagaggtgtttggac

SEQ ID NO: 2089716 - DNA, 15 bp, Homo sapiens
agaggtgtttggaca

SEQ ID NO: 2089717 - DNA, 15 bp, Homo sapiens
gaggtgtttggacag

SEQ ID NO: 2089718 - DNA, 15 bp, Homo sapiens
aggtgtttggacagg

SEQ ID NO: 2089719 - DNA, 15 bp, Homo sapiens
ggtgtttggacaggc

SEQ ID NO: 2089720 - DNA, 15 bp, Homo sapiens
gtgtttggacaggca

SEQ ID NO: 2089721 - DNA, 15 bp, Homo sapiens
tgtttggacaggcac

SEQ ID NO: 2089722 - DNA, 15 bp, Homo sapiens
gtttggacaggcaca

SEQ ID NO: 2089723 - DNA, 15 bp, Homo sapiens
tttggacaggcacac

SEQ ID NO: 2089724 - DNA, 15 bp, Homo sapiens
ttggacaggcacact

SEQ ID NO: 2089725 - DNA, 15 bp, Homo sapiens
tggacaggcacacta

SEQ ID NO: 2089726 - DNA, 15 bp, Homo sapiens
ggacaggcacactaa

SEQ ID NO: 2089727 - DNA, 15 bp, Homo sapiens
gacaggcacactaag

SEQ ID NO: 2089728 - DNA, 15 bp, Homo sapiens
acaggcacactaagg

SEQ ID NO: 2089729 - DNA, 15 bp, Homo sapiens
caggcacactaaggg

SEQ ID NO: 2089730 - DNA, 15 bp, Homo sapiens
aggcacactaagggc

SEQ ID NO: 2089731 - DNA, 15 bp, Homo sapiens
ggcacactaagggcc

SEQ ID NO: 2089732 - DNA, 15 bp, Homo sapiens
gcacactaagggccg

SEQ ID NO: 2089733 - DNA, 15 bp, Homo sapiens
cacactaagggccgc

SEQ ID NO: 2089734 - DNA, 15 bp, Homo sapiens
acactaagggccgcg

SEQ ID NO: 2089735 - DNA, 15 bp, Homo sapiens
cactaagggccgcga

SEQ ID NO: 2089736 - DNA, 15 bp, Homo sapiens
actaagggccgcgat

SEQ ID NO: 2089737 - DNA, 15 bp, Homo sapiens
ctaagggccgcgatt

SEQ ID NO: 2089738 - DNA, 15 bp, Homo sapiens
taagggccgcgattg

SEQ ID NO: 2089739 - DNA, 15 bp, Homo sapiens
aagggccgcgattgt

SEQ ID NO: 2089740 - DNA, 15 bp, Homo sapiens
agggccgcgattgtg

SEQ ID NO: 2089741 - DNA, 15 bp, Homo sapiens
gggccgcgattgtga

SEQ ID NO: 2089742 - DNA, 15 bp, Homo sapiens
ggccgcgattgtgaa

SEQ ID NO: 2089743 - DNA, 15 bp, Homo sapiens
gccgcgattgtgaac

SEQ ID NO: 2089744 - DNA, 15 bp, Homo sapiens
ccgcgattgtgaact

SEQ ID NO: 2089745 - DNA, 15 bp, Homo sapiens
cgcgattgtgaactt

SEQ ID NO: 2089746 - DNA, 15 bp, Homo sapiens
gcgattgtgaacttc

SEQ ID NO: 2089747 - DNA, 15 bp, Homo sapiens
cgattgtgaacttca

SEQ ID NO: 2089748 - DNA, 15 bp, Homo sapiens
gattgtgaacttcat

SEQ ID NO: 2089749 - DNA, 15 bp, Homo sapiens
attgtgaacttcatg

SEQ ID NO: 2089750 - DNA, 15 bp, Homo sapiens
ttgtgaacttcatgg

SEQ ID NO: 2089751 - DNA, 15 bp, Homo sapiens
tgtgaacttcatggc

SEQ ID NO: 2089752 - DNA, 15 bp, Homo sapiens
gtgaacttcatggca

SEQ ID NO: 2089753 - DNA, 15 bp, Homo sapiens
tgaacttcatggcat

SEQ ID NO: 2089754 - DNA, 15 bp, Homo sapiens
gaacttcatggcatc

SEQ ID NO: 2089755 - DNA, 15 bp, Homo sapiens
aacttcatggcatcc

SEQ ID NO: 2089756 - DNA, 15 bp, Homo sapiens
acttcatggcatcca

SEQ ID NO: 2089757 - DNA, 15 bp, Homo sapiens
cttcatggcatccat

SEQ ID NO: 2089758 - DNA, 15 bp, Homo sapiens
ttcatggcatccatt

SEQ ID NO: 2089759 - DNA, 15 bp, Homo sapiens
tcatggcatccattc

SEQ ID NO: 2089760 - DNA, 15 bp, Homo sapiens
catggcatccattca

SEQ ID NO: 2089761 - DNA, 15 bp, Homo sapiens
atggcatccattcat

SEQ ID NO: 2089762 - DNA, 15 bp, Homo sapiens
tggcatccattcatg

SEQ ID NO: 2089763 - DNA, 15 bp, Homo sapiens
ggcatccattcatgg

SEQ ID NO: 2089764 - DNA, 15 bp, Homo sapiens
gcatccattcatggg

SEQ ID NO: 2089765 - DNA, 15 bp, Homo sapiens
catccattcatgggc

SEQ ID NO: 2089766 - DNA, 15 bp, Homo sapiens
atccattcatgggca

SEQ ID NO: 2089767 - DNA, 15 bp, Homo sapiens
tccattcatgggcag

SEQ ID NO: 2089768 - DNA, 15 bp, Homo sapiens
ccattcatgggcagc

SEQ ID NO: 2089769 - DNA, 15 bp, Homo sapiens
cattcatgggcagct

SEQ ID NO: 2089770 - DNA, 15 bp, Homo sapiens
attcatgggcagctt

SEQ ID NO: 2089771 - DNA, 15 bp, Homo sapiens
ttcatgggcagctta

SEQ ID NO: 2089772 - DNA, 15 bp, Homo sapiens
tcatgggcagcttac

SEQ ID NO: 2089773 - DNA, 15 bp, Homo sapiens
catgggcagcttact

SEQ ID NO: 2089774 - DNA, 15 bp, Homo sapiens
atgggcagcttactg

SEQ ID NO: 2089775 - DNA, 15 bp, Homo sapiens
tgggcagcttactgt

SEQ ID NO: 2089776 - DNA, 15 bp, Homo sapiens
gggcagcttactgtg

SEQ ID NO: 2089777 - DNA, 15 bp, Homo sapiens
ggcagcttactgtgc

SEQ ID NO: 2089778 - DNA, 15 bp, Homo sapiens
gcagcttactgtgca

SEQ ID NO: 2089779 - DNA, 15 bp, Homo sapiens
cagcttactgtgcac

SEQ ID NO: 2089780 - DNA, 15 bp, Homo sapiens
agcttactgtgcacc

SEQ ID NO: 2089781 - DNA, 15 bp, Homo sapiens
gcttactgtgcacca

SEQ ID NO: 2089782 - DNA, 15 bp, Homo sapiens
cttactgtgcaccag

SEQ ID NO: 2089783 - DNA, 15 bp, Homo sapiens
ttactgtgcaccagg

SEQ ID NO: 2089784 - DNA, 15 bp, Homo sapiens
tactgtgcaccaggc

SEQ ID NO: 2089785 - DNA, 15 bp, Homo sapiens
actgtgcaccaggca

SEQ ID NO: 2089786 - DNA, 15 bp, Homo sapiens
ctgtgcaccaggcag

SEQ ID NO: 2089787 - DNA, 15 bp, Homo sapiens
tgtgcaccaggcagg

SEQ ID NO: 2089788 - DNA, 15 bp, Homo sapiens
gtgcaccaggcaggg

SEQ ID NO: 2089789 - DNA, 15 bp, Homo sapiens
tgcaccaggcagggt

SEQ ID NO: 2089790 - DNA, 15 bp, Homo sapiens
gcaccaggcagggtt

SEQ ID NO: 2089791 - DNA, 15 bp, Homo sapiens
caccaggcagggttc

SEQ ID NO: 2089792 - DNA, 15 bp, Homo sapiens
accaggcagggttca

SEQ ID NO: 2089793 - DNA, 15 bp, Homo sapiens
ccaggcagggttcaa

SEQ ID NO: 2089794 - DNA, 15 bp, Homo sapiens
caggcagggttcaaa

SEQ ID NO: 2089795 - DNA, 15 bp, Homo sapiens
aggcagggttcaaag

SEQ ID NO: 2089796 - DNA, 15 bp, Homo sapiens
ggcagggttcaaagc

SEQ ID NO: 2089797 - DNA, 15 bp, Homo sapiens
gcagggttcaaagca

SEQ ID NO: 2089798 - DNA, 15 bp, Homo sapiens
cagggttcaaagcac

SEQ ID NO: 2089799 - DNA, 15 bp, Homo sapiens
agggttcaaagcacc

SEQ ID NO: 2089800 - DNA, 15 bp, Homo sapiens
gggttcaaagcacct

SEQ ID NO: 2089801 - DNA, 15 bp, Homo sapiens
ggttcaaagcacctt

SEQ ID NO: 2089802 - DNA, 15 bp, Homo sapiens
gttcaaagcaccttt

SEQ ID NO: 2089803 - DNA, 15 bp, Homo sapiens
ttcaaagcacctttg

SEQ ID NO: 2089804 - DNA, 15 bp, Homo sapiens
tcaaagcacctttgt

SEQ ID NO: 2089805 - DNA, 15 bp, Homo sapiens
caaagcacctttgtg

SEQ ID NO: 2089806 - DNA, 15 bp, Homo sapiens
aaagcacctttgtga

SEQ ID NO: 2089807 - DNA, 15 bp, Homo sapiens
aagcacctttgtgaa

SEQ ID NO: 2089808 - DNA, 15 bp, Homo sapiens
agcacctttgtgaaa

SEQ ID NO: 2089809 - DNA, 15 bp, Homo sapiens
gcacctttgtgaaaa

SEQ ID NO: 2089810 - DNA, 15 bp, Homo sapiens
cacctttgtgaaaat

SEQ ID NO: 2089811 - DNA, 15 bp, Homo sapiens
acctttgtgaaaatt

SEQ ID NO: 2089812 - DNA, 15 bp, Homo sapiens
cctttgtgaaaattg

SEQ ID NO: 2089813 - DNA, 15 bp, Homo sapiens
ctttgtgaaaattgt

SEQ ID NO: 2089814 - DNA, 15 bp, Homo sapiens
tttgtgaaaattgtc

SEQ ID NO: 2089815 - DNA, 15 bp, Homo sapiens
ttgtgaaaattgtct

SEQ ID NO: 2089816 - DNA, 15 bp, Homo sapiens
tgtgaaaattgtctc

SEQ ID NO: 2089817 - DNA, 15 bp, Homo sapiens
gtgaaaattgtctca

SEQ ID NO: 2089818 - DNA, 15 bp, Homo sapiens
tgaaaattgtctcat

SEQ ID NO: 2089819 - DNA, 15 bp, Homo sapiens
gaaaattgtctcatt

SEQ ID NO: 2089820 - DNA, 15 bp, Homo sapiens
aaaattgtctcattt

SEQ ID NO: 2089821 - DNA, 15 bp, Homo sapiens
aaattgtctcattta

SEQ ID NO: 2089822 - DNA, 15 bp, Homo sapiens
aattgtctcatttag

SEQ ID NO: 2089823 - DNA, 15 bp, Homo sapiens
attgtctcatttagt

SEQ ID NO: 2089824 - DNA, 15 bp, Homo sapiens
ttgtctcatttagtc

SEQ ID NO: 2089825 - DNA, 15 bp, Homo sapiens
tgtctcatttagtcc

SEQ ID NO: 2089826 - DNA, 15 bp, Homo sapiens
gtctcatttagtccc

SEQ ID NO: 2089827 - DNA, 15 bp, Homo sapiens
tctcatttagtccct

SEQ ID NO: 2089828 - DNA, 15 bp, Homo sapiens
ctcatttagtccctg

SEQ ID NO: 2089829 - DNA, 15 bp, Homo sapiens
tcatttagtccctgc

SEQ ID NO: 2089830 - DNA, 15 bp, Homo sapiens
catttagtccctgca

SEQ ID NO: 2089831 - DNA, 15 bp, Homo sapiens
atttagtccctgcag

SEQ ID NO: 2089832 - DNA, 15 bp, Homo sapiens
tttagtccctgcaga

SEQ ID NO: 2089833 - DNA, 15 bp, Homo sapiens
ttagtccctgcagag

SEQ ID NO: 2089834 - DNA, 15 bp, Homo sapiens
tagtccctgcagagg

SEQ ID NO: 2089835 - DNA, 15 bp, Homo sapiens
agtccctgcagaggg

SEQ ID NO: 2089836 - DNA, 15 bp, Homo sapiens
gtccctgcagagggc

SEQ ID NO: 2089837 - DNA, 15 bp, Homo sapiens
tccctgcagagggcc

SEQ ID NO: 2089838 - DNA, 15 bp, Homo sapiens
ccctgcagagggccg

SEQ ID NO: 2089839 - DNA, 15 bp, Homo sapiens
cctgcagagggccgt

SEQ ID NO: 2089840 - DNA, 15 bp, Homo sapiens
ctgcagagggccgtg

SEQ ID NO: 2089841 - DNA, 15 bp, Homo sapiens
tgcagagggccgtga

SEQ ID NO: 2089842 - DNA, 15 bp, Homo sapiens
gcagagggccgtgac

SEQ ID NO: 2089843 - DNA, 15 bp, Homo sapiens
cagagggccgtgaca

SEQ ID NO: 2089844 - DNA, 15 bp, Homo sapiens
agagggccgtgacat

SEQ ID NO: 2089845 - DNA, 15 bp, Homo sapiens
gagggccgtgacata

SEQ ID NO: 2089846 - DNA, 15 bp, Homo sapiens
agggccgtgacatat

SEQ ID NO: 2089847 - DNA, 15 bp, Homo sapiens
gggccgtgacatatg

SEQ ID NO: 2089848 - DNA, 15 bp, Homo sapiens
ggccgtgacatatga

SEQ ID NO: 2089849 - DNA, 15 bp, Homo sapiens
gccgtgacatatgat

SEQ ID NO: 2089850 - DNA, 15 bp, Homo sapiens
ccgtgacatatgatt

SEQ ID NO: 2089851 - DNA, 15 bp, Homo sapiens
cgtgacatatgattt

SEQ ID NO: 2089852 - DNA, 15 bp, Homo sapiens
gtgacatatgattta

SEQ ID NO: 2089853 - DNA, 15 bp, Homo sapiens
tgacatatgatttat

SEQ ID NO: 2089854 - DNA, 15 bp, Homo sapiens
gacatatgatttatt

SEQ ID NO: 2089855 - DNA, 15 bp, Homo sapiens
acatatgatttattg

SEQ ID NO: 2089856 - DNA, 15 bp, Homo sapiens
catatgatttattgt

SEQ ID NO: 2089857 - DNA, 15 bp, Homo sapiens
atatgatttattgtc

SEQ ID NO: 2089858 - DNA, 15 bp, Homo sapiens
tatgatttattgtct

SEQ ID NO: 2089859 - DNA, 15 bp, Homo sapiens
atgatttattgtctt

SEQ ID NO: 2089860 - DNA, 15 bp, Homo sapiens
tgatttattgtcttc

SEQ ID NO: 2089861 - DNA, 15 bp, Homo sapiens
gatttattgtcttca

SEQ ID NO: 2089862 - DNA, 15 bp, Homo sapiens
atttattgtcttcag

SEQ ID NO: 2089863 - DNA, 15 bp, Homo sapiens
tttattgtcttcagt

SEQ ID NO: 2089864 - DNA, 15 bp, Homo sapiens
ttattgtcttcagtg

SEQ ID NO: 2089865 - DNA, 15 bp, Homo sapiens
tattgtcttcagtgt

SEQ ID NO: 2089866 - DNA, 15 bp, Homo sapiens
attgtcttcagtgtc

SEQ ID NO: 2089867 - DNA, 15 bp, Homo sapiens
ttgtcttcagtgtcc

SEQ ID NO: 2089868 - DNA, 15 bp, Homo sapiens
tgtcttcagtgtccg

SEQ ID NO: 2089869 - DNA, 15 bp, Homo sapiens
gtcttcagtgtccgt

SEQ ID NO: 2089870 - DNA, 15 bp, Homo sapiens
tcttcagtgtccgtt

SEQ ID NO: 2089871 - DNA, 15 bp, Homo sapiens
cttcagtgtccgtta

SEQ ID NO: 2089872 - DNA, 15 bp, Homo sapiens
ttcagtgtccgttaa

SEQ ID NO: 2089873 - DNA, 15 bp, Homo sapiens
tcagtgtccgttaag

SEQ ID NO: 2089874 - DNA, 15 bp, Homo sapiens
cagtgtccgttaagg

SEQ ID NO: 2089875 - DNA, 15 bp, Homo sapiens
agtgtccgttaagga

SEQ ID NO: 2089876 - DNA, 15 bp, Homo sapiens
gtgtccgttaaggag

SEQ ID NO: 2089877 - DNA, 15 bp, Homo sapiens
tgtccgttaaggaga

SEQ ID NO: 2089878 - DNA, 15 bp, Homo sapiens
gtccgttaaggagac

SEQ ID NO: 2089879 - DNA, 15 bp, Homo sapiens
tccgttaaggagaca

SEQ ID NO: 2089880 - DNA, 15 bp, Homo sapiens
ccgttaaggagacaa

SEQ ID NO: 2089881 - DNA, 15 bp, Homo sapiens
cgttaaggagacaag

SEQ ID NO: 2089882 - DNA, 15 bp, Homo sapiens
gttaaggagacaagc

SEQ ID NO: 2089883 - DNA, 15 bp, Homo sapiens
ttaaggagacaagct

SEQ ID NO: 2089884 - DNA, 15 bp, Homo sapiens
taaggagacaagctg

SEQ ID NO: 2089885 - DNA, 15 bp, Homo sapiens
aaggagacaagctga

SEQ ID NO: 2089886 - DNA, 15 bp, Homo sapiens
aggagacaagctgaa

SEQ ID NO: 2089887 - DNA, 15 bp, Homo sapiens
ggagacaagctgaag

SEQ ID NO: 2089888 - DNA, 15 bp, Homo sapiens
gagacaagctgaaga

SEQ ID NO: 2089889 - DNA, 15 bp, Homo sapiens
agacaagctgaagag

SEQ ID NO: 2089890 - DNA, 15 bp, Homo sapiens
gacaagctgaagaga

SEQ ID NO: 2089891 - DNA, 15 bp, Homo sapiens
acaagctgaagagag

SEQ ID NO: 2089892 - DNA, 15 bp, Homo sapiens
caagctgaagagagt

SEQ ID NO: 2089893 - DNA, 15 bp, Homo sapiens
aagctgaagagagta

SEQ ID NO: 2089894 - DNA, 15 bp, Homo sapiens
agctgaagagagtaa

SEQ ID NO: 2089895 - DNA, 15 bp, Homo sapiens
gctgaagagagtaat

SEQ ID NO: 2089896 - DNA, 15 bp, Homo sapiens
ctgaagagagtaatt

SEQ ID NO: 2089897 - DNA, 15 bp, Homo sapiens
tgaagagagtaattt

SEQ ID NO: 2089898 - DNA, 15 bp, Homo sapiens
gaagagagtaatttg

SEQ ID NO: 2089899 - DNA, 15 bp, Homo sapiens
aagagagtaatttgc

SEQ ID NO: 2089900 - DNA, 15 bp, Homo sapiens
agagagtaatttgcc

SEQ ID NO: 2089901 - DNA, 15 bp, Homo sapiens
gagagtaatttgccc

SEQ ID NO: 2089902 - DNA, 15 bp, Homo sapiens
agagtaatttgcccc

SEQ ID NO: 2089903 - DNA, 15 bp, Homo sapiens
gagtaatttgcccca

SEQ ID NO: 2089904 - DNA, 15 bp, Homo sapiens
agtaatttgccccaa

SEQ ID NO: 2089905 - DNA, 15 bp, Homo sapiens
gtaatttgccccaag

SEQ ID NO: 2089906 - DNA, 15 bp, Homo sapiens
taatttgccccaagt

SEQ ID NO: 2089907 - DNA, 15 bp, Homo sapiens
aatttgccccaagtg

SEQ ID NO: 2089908 - DNA, 15 bp, Homo sapiens
atttgccccaagtga

SEQ ID NO: 2089909 - DNA, 15 bp, Homo sapiens
tttgccccaagtgac

SEQ ID NO: 2089910 - DNA, 15 bp, Homo sapiens
ttgccccaagtgacc

SEQ ID NO: 2089911 - DNA, 15 bp, Homo sapiens
tgccccaagtgacct

SEQ ID NO: 2089912 - DNA, 15 bp, Homo sapiens
gccccaagtgacctc

SEQ ID NO: 2089913 - DNA, 15 bp, Homo sapiens
ccccaagtgacctcg

SEQ ID NO: 2089914 - DNA, 15 bp, Homo sapiens
cccaagtgacctcgc

SEQ ID NO: 2089915 - DNA, 15 bp, Homo sapiens
ccaagtgacctcgct

SEQ ID NO: 2089916 - DNA, 15 bp, Homo sapiens
caagtgacctcgcta

SEQ ID NO: 2089917 - DNA, 15 bp, Homo sapiens
aagtgacctcgctag

SEQ ID NO: 2089918 - DNA, 15 bp, Homo sapiens
agtgacctcgctagt

SEQ ID NO: 2089919 - DNA, 15 bp, Homo sapiens
gtgacctcgctagtg

SEQ ID NO: 2089920 - DNA, 15 bp, Homo sapiens
tgacctcgctagtgt

SEQ ID NO: 2089921 - DNA, 15 bp, Homo sapiens
gacctcgctagtgta

SEQ ID NO: 2089922 - DNA, 15 bp, Homo sapiens
acctcgctagtgtat

SEQ ID NO: 2089923 - DNA, 15 bp, Homo sapiens
cctcgctagtgtatg

SEQ ID NO: 2089924 - DNA, 15 bp, Homo sapiens
ctcgctagtgtatgt

SEQ ID NO: 2089925 - DNA, 15 bp, Homo sapiens
tcgctagtgtatgtg

SEQ ID NO: 2089926 - DNA, 15 bp, Homo sapiens
cgctagtgtatgtgt

SEQ ID NO: 2089927 - DNA, 15 bp, Homo sapiens
gctagtgtatgtgtg

SEQ ID NO: 2089928 - DNA, 15 bp, Homo sapiens
ctagtgtatgtgtgt

SEQ ID NO: 2089929 - DNA, 15 bp, Homo sapiens
tagtgtatgtgtgtg

SEQ ID NO: 2089930 - DNA, 15 bp, Homo sapiens
agtgtatgtgtgtgc

SEQ ID NO: 2089931 - DNA, 15 bp, Homo sapiens
gtgtatgtgtgtgcg

SEQ ID NO: 2089932 - DNA, 15 bp, Homo sapiens
tgtatgtgtgtgcgt

SEQ ID NO: 2089933 - DNA, 15 bp, Homo sapiens
gtatgtgtgtgcgtg

SEQ ID NO: 2089934 - DNA, 15 bp, Homo sapiens
tatgtgtgtgcgtgc

SEQ ID NO: 2089935 - DNA, 15 bp, Homo sapiens
atgtgtgtgcgtgca

SEQ ID NO: 2089936 - DNA, 15 bp, Homo sapiens
tgtgtgtgcgtgcat

SEQ ID NO: 2089937 - DNA, 15 bp, Homo sapiens
gtgtgtgcgtgcatg

SEQ ID NO: 2089938 - DNA, 15 bp, Homo sapiens
tgtgtgcgtgcatgt

SEQ ID NO: 2089939 - DNA, 15 bp, Homo sapiens
gtgtgcgtgcatgtg

SEQ ID NO: 2089940 - DNA, 15 bp, Homo sapiens
tgtgcgtgcatgtgt

SEQ ID NO: 2089941 - DNA, 15 bp, Homo sapiens
gtgcgtgcatgtgtg

SEQ ID NO: 2089942 - DNA, 15 bp, Homo sapiens
tgcgtgcatgtgtgc

SEQ ID NO: 2089943 - DNA, 15 bp, Homo sapiens
gcgtgcatgtgtgca

SEQ ID NO: 2089944 - DNA, 15 bp, Homo sapiens
cgtgcatgtgtgcac

SEQ ID NO: 2089945 - DNA, 15 bp, Homo sapiens
gtgcatgtgtgcacg

SEQ ID NO: 2089946 - DNA, 15 bp, Homo sapiens
tgcatgtgtgcacgt

SEQ ID NO: 2089947 - DNA, 15 bp, Homo sapiens
gcatgtgtgcacgtg

SEQ ID NO: 2089948 - DNA, 15 bp, Homo sapiens
catgtgtgcacgtgt

SEQ ID NO: 2089949 - DNA, 15 bp, Homo sapiens
atgtgtgcacgtgtg

SEQ ID NO: 2089950 - DNA, 15 bp, Homo sapiens
tgtgtgcacgtgtgt

SEQ ID NO: 2089951 - DNA, 15 bp, Homo sapiens
gtgtgcacgtgtgtg

SEQ ID NO: 2089952 - DNA, 15 bp, Homo sapiens
tgtgcacgtgtgtgt

SEQ ID NO: 2089953 - DNA, 15 bp, Homo sapiens
gtgcacgtgtgtgtg

SEQ ID NO: 2089954 - DNA, 15 bp, Homo sapiens
tgcacgtgtgtgtgt

SEQ ID NO: 2089955 - DNA, 15 bp, Homo sapiens
gcacgtgtgtgtgtg

SEQ ID NO: 2089956 - DNA, 15 bp, Homo sapiens
cacgtgtgtgtgtgt

SEQ ID NO: 2089957 - DNA, 15 bp, Homo sapiens
gtgtgtgtgtgtgaa

SEQ ID NO: 2089958 - DNA, 15 bp, Homo sapiens
tgtgtgtgtgtgaag

SEQ ID NO: 2089959 - DNA, 15 bp, Homo sapiens
gtgtgtgtgtgaagg

SEQ ID NO: 2089960 - DNA, 15 bp, Homo sapiens
tgtgtgtgtgaaggt

SEQ ID NO: 2089961 - DNA, 15 bp, Homo sapiens
gtgtgtgtgaaggtg

SEQ ID NO: 2089962 - DNA, 15 bp, Homo sapiens
tgtgtgtgaaggtgt

SEQ ID NO: 2089963 - DNA, 15 bp, Homo sapiens
gtgtgtgaaggtgtc

SEQ ID NO: 2089964 - DNA, 15 bp, Homo sapiens
tgtgtgaaggtgtct

SEQ ID NO: 2089965 - DNA, 15 bp, Homo sapiens
gtgtgaaggtgtctg

SEQ ID NO: 2089966 - DNA, 15 bp, Homo sapiens
tgtgaaggtgtctgt

SEQ ID NO: 2089967 - DNA, 15 bp, Homo sapiens
gtgaaggtgtctgtc

SEQ ID NO: 2089968 - DNA, 15 bp, Homo sapiens
tgaaggtgtctgtct

SEQ ID NO: 2089969 - DNA, 15 bp, Homo sapiens
gaaggtgtctgtctg

SEQ ID NO: 2089970 - DNA, 15 bp, Homo sapiens
aaggtgtctgtctgt

SEQ ID NO: 2089971 - DNA, 15 bp, Homo sapiens
aggtgtctgtctgtc

SEQ ID NO: 2089972 - DNA, 15 bp, Homo sapiens
ggtgtctgtctgtcc

SEQ ID NO: 2089973 - DNA, 15 bp, Homo sapiens
gtgtctgtctgtccc

SEQ ID NO: 2089974 - DNA, 15 bp, Homo sapiens
gtctgtctgtcccag

SEQ ID NO: 2089975 - DNA, 15 bp, Homo sapiens
tctgtctgtcccaga

SEQ ID NO: 2089976 - DNA, 15 bp, Homo sapiens
ctgtctgtcccagag

SEQ ID NO: 2089977 - DNA, 15 bp, Homo sapiens
tgtctgtcccagagg

SEQ ID NO: 2089978 - DNA, 15 bp, Homo sapiens
gtctgtcccagaggc

SEQ ID NO: 2089979 - DNA, 15 bp, Homo sapiens
tctgtcccagaggca

SEQ ID NO: 2089980 - DNA, 15 bp, Homo sapiens
ctgtcccagaggcag

SEQ ID NO: 2089981 - DNA, 15 bp, Homo sapiens
tgtcccagaggcaga

SEQ ID NO: 2089982 - DNA, 15 bp, Homo sapiens
gtcccagaggcagat

SEQ ID NO: 2089983 - DNA, 15 bp, Homo sapiens
tcccagaggcagatg

SEQ ID NO: 2089984 - DNA, 15 bp, Homo sapiens
cccagaggcagatgc

SEQ ID NO: 2089985 - DNA, 15 bp, Homo sapiens
ccagaggcagatgcc

SEQ ID NO: 2089986 - DNA, 15 bp, Homo sapiens
cagaggcagatgcca

SEQ ID NO: 2089987 - DNA, 15 bp, Homo sapiens
agaggcagatgccat

SEQ ID NO: 2089988 - DNA, 15 bp, Homo sapiens
gaggcagatgccatg

SEQ ID NO: 2089989 - DNA, 15 bp, Homo sapiens
aggcagatgccatga

SEQ ID NO: 2089990 - DNA, 15 bp, Homo sapiens
ggcagatgccatgag

SEQ ID NO: 2089991 - DNA, 15 bp, Homo sapiens
gcagatgccatgaga

SEQ ID NO: 2089992 - DNA, 15 bp, Homo sapiens
cagatgccatgagaa

SEQ ID NO: 2089993 - DNA, 15 bp, Homo sapiens
agatgccatgagaat

SEQ ID NO: 2089994 - DNA, 15 bp, Homo sapiens
gatgccatgagaatg

SEQ ID NO: 2089995 - DNA, 15 bp, Homo sapiens
atgccatgagaatgg

SEQ ID NO: 2089996 - DNA, 15 bp, Homo sapiens
tgccatgagaatggg

SEQ ID NO: 2089997 - DNA, 15 bp, Homo sapiens
gccatgagaatgggg

SEQ ID NO: 2089998 - DNA, 15 bp, Homo sapiens
ccatgagaatgggga

SEQ ID NO: 2089999 - DNA, 15 bp, Homo sapiens
catgagaatggggac

SEQ ID NO: 2090000 - DNA, 15 bp, Homo sapiens
atgagaatggggact

SEQ ID NO: 2090001 - DNA, 15 bp, Homo sapiens
tgagaatggggactc

SEQ ID NO: 2090002 - DNA, 15 bp, Homo sapiens
gagaatggggactct

SEQ ID NO: 2090003 - DNA, 15 bp, Homo sapiens
agaatggggactctt

SEQ ID NO: 2090004 - DNA, 15 bp, Homo sapiens
gaatggggactcttg

SEQ ID NO: 2090005 - DNA, 15 bp, Homo sapiens
aatggggactcttgc

SEQ ID NO: 2090006 - DNA, 15 bp, Homo sapiens
atggggactcttgct

SEQ ID NO: 2090007 - DNA, 15 bp, Homo sapiens
tggggactcttgctc

SEQ ID NO: 2090008 - DNA, 15 bp, Homo sapiens
ggggactcttgctcc

SEQ ID NO: 2090009 - DNA, 15 bp, Homo sapiens
gggactcttgctccc

SEQ ID NO: 2090010 - DNA, 15 bp, Homo sapiens
ggactcttgctccca

SEQ ID NO: 2090011 - DNA, 15 bp, Homo sapiens
gactcttgctcccat

SEQ ID NO: 2090012 - DNA, 15 bp, Homo sapiens
actcttgctcccatt

SEQ ID NO: 2090013 - DNA, 15 bp, Homo sapiens
ctcttgctcccattc

SEQ ID NO: 2090014 - DNA, 15 bp, Homo sapiens
tcttgctcccattcc

SEQ ID NO: 2090015 - DNA, 15 bp, Homo sapiens
cttgctcccattccc

SEQ ID NO: 2090016 - DNA, 15 bp, Homo sapiens
ttgctcccattccct

SEQ ID NO: 2090017 - DNA, 15 bp, Homo sapiens
tgctcccattccctg

SEQ ID NO: 2090018 - DNA, 15 bp, Homo sapiens
gctcccattccctgg

SEQ ID NO: 2090019 - DNA, 15 bp, Homo sapiens
ctcccattccctgga

SEQ ID NO: 2090020 - DNA, 15 bp, Homo sapiens
tcccattccctggat

SEQ ID NO: 2090021 - DNA, 15 bp, Homo sapiens
cccattccctggatc

SEQ ID NO: 2090022 - DNA, 15 bp, Homo sapiens
ccattccctggatct

SEQ ID NO: 2090023 - DNA, 15 bp, Homo sapiens
cattccctggatctg

SEQ ID NO: 2090024 - DNA, 15 bp, Homo sapiens
attccctggatctga

SEQ ID NO: 2090025 - DNA, 15 bp, Homo sapiens
ttccctggatctgag

SEQ ID NO: 2090026 - DNA, 15 bp, Homo sapiens
tccctggatctgagc

SEQ ID NO: 2090027 - DNA, 15 bp, Homo sapiens
ccctggatctgagcc

SEQ ID NO: 2090028 - DNA, 15 bp, Homo sapiens
cctggatctgagcct

SEQ ID NO: 2090029 - DNA, 15 bp, Homo sapiens
ctggatctgagcctg

SEQ ID NO: 2090030 - DNA, 15 bp, Homo sapiens
tggatctgagcctgg

SEQ ID NO: 2090031 - DNA, 15 bp, Homo sapiens
ggatctgagcctggc

SEQ ID NO: 2090032 - DNA, 15 bp, Homo sapiens
gatctgagcctggca

SEQ ID NO: 2090033 - DNA, 15 bp, Homo sapiens
atctgagcctggcat

SEQ ID NO: 2090034 - DNA, 15 bp, Homo sapiens
tctgagcctggcatg

SEQ ID NO: 2090035 - DNA, 15 bp, Homo sapiens
ctgagcctggcatgc

SEQ ID NO: 2090036 - DNA, 15 bp, Homo sapiens
tgagcctggcatgca

SEQ ID NO: 2090037 - DNA, 15 bp, Homo sapiens
gagcctggcatgcag

SEQ ID NO: 2090038 - DNA, 15 bp, Homo sapiens
agcctggcatgcagc

SEQ ID NO: 2090039 - DNA, 15 bp, Homo sapiens
gcctggcatgcagct

SEQ ID NO: 2090040 - DNA, 15 bp, Homo sapiens
cctggcatgcagctg

SEQ ID NO: 2090041 - DNA, 15 bp, Homo sapiens
ctggcatgcagctgt

SEQ ID NO: 2090042 - DNA, 15 bp, Homo sapiens
tggcatgcagctgtg

SEQ ID NO: 2090043 - DNA, 15 bp, Homo sapiens
ggcatgcagctgtgc

SEQ ID NO: 2090044 - DNA, 15 bp, Homo sapiens
gcatgcagctgtgct

SEQ ID NO: 2090045 - DNA, 15 bp, Homo sapiens
catgcagctgtgctc

SEQ ID NO: 2090046 - DNA, 15 bp, Homo sapiens
atgcagctgtgctca

SEQ ID NO: 2090047 - DNA, 15 bp, Homo sapiens
tgcagctgtgctcag

SEQ ID NO: 2090048 - DNA, 15 bp, Homo sapiens
gcagctgtgctcagg

SEQ ID NO: 2090049 - DNA, 15 bp, Homo sapiens
cagctgtgctcaggt

SEQ ID NO: 2090050 - DNA, 15 bp, Homo sapiens
agctgtgctcaggta

SEQ ID NO: 2090051 - DNA, 15 bp, Homo sapiens
gctgtgctcaggtat

SEQ ID NO: 2090052 - DNA, 15 bp, Homo sapiens
ctgtgctcaggtatg

SEQ ID NO: 2090053 - DNA, 15 bp, Homo sapiens
tgtgctcaggtatgt

SEQ ID NO: 2090054 - DNA, 15 bp, Homo sapiens
gtgctcaggtatgtg

SEQ ID NO: 2090055 - DNA, 15 bp, Homo sapiens
tgctcaggtatgtgg

SEQ ID NO: 2090056 - DNA, 15 bp, Homo sapiens
gctcaggtatgtggg

SEQ ID NO: 2090057 - DNA, 15 bp, Homo sapiens
ctcaggtatgtgggt

SEQ ID NO: 2090058 - DNA, 15 bp, Homo sapiens
tcaggtatgtgggtg

SEQ ID NO: 2090059 - DNA, 15 bp, Homo sapiens
caggtatgtgggtga

SEQ ID NO: 2090060 - DNA, 15 bp, Homo sapiens
aggtatgtgggtgag

SEQ ID NO: 2090061 - DNA, 15 bp, Homo sapiens
ggtatgtgggtgagt

SEQ ID NO: 2090062 - DNA, 15 bp, Homo sapiens
gtatgtgggtgagta

SEQ ID NO: 2090063 - DNA, 15 bp, Homo sapiens
tatgtgggtgagtaa

SEQ ID NO: 2090064 - DNA, 15 bp, Homo sapiens
atgtgggtgagtaac

SEQ ID NO: 2090065 - DNA, 15 bp, Homo sapiens
tgtgggtgagtaacg

SEQ ID NO: 2090066 - DNA, 15 bp, Homo sapiens
gtgggtgagtaacga

SEQ ID NO: 2090067 - DNA, 15 bp, Homo sapiens
tgggtgagtaacgaa

SEQ ID NO: 2090068 - DNA, 15 bp, Homo sapiens
gggtgagtaacgaag

SEQ ID NO: 2090069 - DNA, 15 bp, Homo sapiens
ggtgagtaacgaagg

SEQ ID NO: 2090070 - DNA, 15 bp, Homo sapiens
gtgagtaacgaaggc

SEQ ID NO: 2090071 - DNA, 15 bp, Homo sapiens
tgagtaacgaaggcc

SEQ ID NO: 2090072 - DNA, 15 bp, Homo sapiens
gagtaacgaaggcct

SEQ ID NO: 2090073 - DNA, 15 bp, Homo sapiens
agtaacgaaggcctg

SEQ ID NO: 2090074 - DNA, 15 bp, Homo sapiens
gtaacgaaggcctgg

SEQ ID NO: 2090075 - DNA, 15 bp, Homo sapiens
taacgaaggcctggt

SEQ ID NO: 2090076 - DNA, 15 bp, Homo sapiens
aacgaaggcctggtt

SEQ ID NO: 2090077 - DNA, 15 bp, Homo sapiens
acgaaggcctggttc

SEQ ID NO: 2090078 - DNA, 15 bp, Homo sapiens
cgaaggcctggttca

SEQ ID NO: 2090079 - DNA, 15 bp, Homo sapiens
gaaggcctggttcag

SEQ ID NO: 2090080 - DNA, 15 bp, Homo sapiens
aaggcctggttcagg

SEQ ID NO: 2090081 - DNA, 15 bp, Homo sapiens
aggcctggttcaggt

SEQ ID NO: 2090082 - DNA, 15 bp, Homo sapiens
ggcctggttcaggtc

SEQ ID NO: 2090083 - DNA, 15 bp, Homo sapiens
gcctggttcaggtcc

SEQ ID NO: 2090084 - DNA, 15 bp, Homo sapiens
cctggttcaggtcct

SEQ ID NO: 2090085 - DNA, 15 bp, Homo sapiens
ctggttcaggtcctg

SEQ ID NO: 2090086 - DNA, 15 bp, Homo sapiens
tggttcaggtcctgg

SEQ ID NO: 2090087 - DNA, 15 bp, Homo sapiens
ggttcaggtcctggg

SEQ ID NO: 2090088 - DNA, 15 bp, Homo sapiens
gttcaggtcctgggg

SEQ ID NO: 2090089 - DNA, 15 bp, Homo sapiens
ttcaggtcctggggg

SEQ ID NO: 2090090 - DNA, 15 bp, Homo sapiens
tcaggtcctgggggg

SEQ ID NO: 2090091 - DNA, 15 bp, Homo sapiens
caggtcctggggggc

SEQ ID NO: 2090092 - DNA, 15 bp, Homo sapiens
aggtcctggggggca

SEQ ID NO: 2090093 - DNA, 15 bp, Homo sapiens
ggtcctggggggcac

SEQ ID NO: 2090094 - DNA, 15 bp, Homo sapiens
gtcctggggggcaca

SEQ ID NO: 2090095 - DNA, 15 bp, Homo sapiens
tcctggggggcacac

SEQ ID NO: 2090096 - DNA, 15 bp, Homo sapiens
cctggggggcacaca

SEQ ID NO: 2090097 - DNA, 15 bp, Homo sapiens
ctggggggcacacat

SEQ ID NO: 2090098 - DNA, 15 bp, Homo sapiens
tggggggcacacatc

SEQ ID NO: 2090099 - DNA, 15 bp, Homo sapiens
ggggggcacacatcc

SEQ ID NO: 2090100 - DNA, 15 bp, Homo sapiens
acacatccaagttcc

SEQ ID NO: 2090101 - DNA, 15 bp, Homo sapiens
cacatccaagttccc

SEQ ID NO: 2090102 - DNA, 15 bp, Homo sapiens
acatccaagttcccg

SEQ ID NO: 2090103 - DNA, 15 bp, Homo sapiens
catccaagttcccgt

SEQ ID NO: 2090104 - DNA, 15 bp, Homo sapiens
atccaagttcccgta

SEQ ID NO: 2090105 - DNA, 15 bp, Homo sapiens
tccaagttcccgtat

SEQ ID NO: 2090106 - DNA, 15 bp, Homo sapiens
ccaagttcccgtatg

SEQ ID NO: 2090107 - DNA, 15 bp, Homo sapiens
caagttcccgtatgt

SEQ ID NO: 2090108 - DNA, 15 bp, Homo sapiens
aagttcccgtatgtc

SEQ ID NO: 2090109 - DNA, 15 bp, Homo sapiens
agttcccgtatgtct

SEQ ID NO: 2090110 - DNA, 15 bp, Homo sapiens
gttcccgtatgtctc

SEQ ID NO: 2090111 - DNA, 15 bp, Homo sapiens
ttcccgtatgtctct

SEQ ID NO: 2090112 - DNA, 15 bp, Homo sapiens
tcccgtatgtctctg

SEQ ID NO: 2090113 - DNA, 15 bp, Homo sapiens
cccgtatgtctctgg

SEQ ID NO: 2090114 - DNA, 15 bp, Homo sapiens
ccgtatgtctctggt

SEQ ID NO: 2090115 - DNA, 15 bp, Homo sapiens
cgtatgtctctggtc

SEQ ID NO: 2090116 - DNA, 15 bp, Homo sapiens
gtatgtctctggtcc

SEQ ID NO: 2090117 - DNA, 15 bp, Homo sapiens
tatgtctctggtcct

SEQ ID NO: 2090118 - DNA, 15 bp, Homo sapiens
atgtctctggtcctc

SEQ ID NO: 2090119 - DNA, 15 bp, Homo sapiens
cccagctggtggacg

SEQ ID NO: 2090120 - DNA, 15 bp, Homo sapiens
ccagctggtggacgt

SEQ ID NO: 2090121 - DNA, 15 bp, Homo sapiens
cagctggtggacgtg

SEQ ID NO: 2090122 - DNA, 15 bp, Homo sapiens
agctggtggacgtgg

SEQ ID NO: 2090123 - DNA, 15 bp, Homo sapiens
gctggtggacgtggg

SEQ ID NO: 2090124 - DNA, 15 bp, Homo sapiens
ctggtggacgtgggg

SEQ ID NO: 2090125 - DNA, 15 bp, Homo sapiens
tggtggacgtgggga

SEQ ID NO: 2090126 - DNA, 15 bp, Homo sapiens
ggtggacgtggggag

SEQ ID NO: 2090127 - DNA, 15 bp, Homo sapiens
gtggacgtggggaga

SEQ ID NO: 2090128 - DNA, 15 bp, Homo sapiens
tggacgtggggagag

SEQ ID NO: 2090129 - DNA, 15 bp, Homo sapiens
ggacgtggggagagg

SEQ ID NO: 2090130 - DNA, 15 bp, Homo sapiens
gacgtggggagaggc

SEQ ID NO: 2090131 - DNA, 15 bp, Homo sapiens
acgtggggagaggcc

SEQ ID NO: 2090132 - DNA, 15 bp, Homo sapiens
cgtggggagaggccc

SEQ ID NO: 2090133 - DNA, 15 bp, Homo sapiens
gtggggagaggcccc

SEQ ID NO: 2090134 - DNA, 15 bp, Homo sapiens
tggggagaggcccct

SEQ ID NO: 2090135 - DNA, 15 bp, Homo sapiens
agaggcccctcacta

SEQ ID NO: 2090136 - DNA, 15 bp, Homo sapiens
gaggcccctcactac

SEQ ID NO: 2090137 - DNA, 15 bp, Homo sapiens
aggcccctcactact

SEQ ID NO: 2090138 - DNA, 15 bp, Homo sapiens
ggcccctcactactg

SEQ ID NO: 2090139 - DNA, 15 bp, Homo sapiens
gcccctcactactgc

SEQ ID NO: 2090140 - DNA, 15 bp, Homo sapiens
cccctcactactgct

SEQ ID NO: 2090141 - DNA, 15 bp, Homo sapiens
ccctcactactgctg

SEQ ID NO: 2090142 - DNA, 15 bp, Homo sapiens
cctcactactgctgg

SEQ ID NO: 2090143 - DNA, 15 bp, Homo sapiens
ctcactactgctggg

SEQ ID NO: 2090144 - DNA, 15 bp, Homo sapiens
tcactactgctgggc

SEQ ID NO: 2090145 - DNA, 15 bp, Homo sapiens
cactactgctgggct

SEQ ID NO: 2090146 - DNA, 15 bp, Homo sapiens
actactgctgggctg

SEQ ID NO: 2090147 - DNA, 15 bp, Homo sapiens
ctactgctgggctgc

SEQ ID NO: 2090148 - DNA, 15 bp, Homo sapiens
tactgctgggctgca

SEQ ID NO: 2090149 - DNA, 15 bp, Homo sapiens
actgctgggctgcag

SEQ ID NO: 2090150 - DNA, 15 bp, Homo sapiens
ctgctgggctgcagg

SEQ ID NO: 2090151 - DNA, 15 bp, Homo sapiens
tgctgggctgcaggg

SEQ ID NO: 2090152 - DNA, 15 bp, Homo sapiens
gctgggctgcaggga

SEQ ID NO: 2090153 - DNA, 15 bp, Homo sapiens
ctgggctgcagggaa

SEQ ID NO: 2090154 - DNA, 15 bp, Homo sapiens
tgggctgcagggaag

SEQ ID NO: 2090155 - DNA, 15 bp, Homo sapiens
gggctgcagggaagg

SEQ ID NO: 2090156 - DNA, 15 bp, Homo sapiens
ggctgcagggaaggg

SEQ ID NO: 2090157 - DNA, 15 bp, Homo sapiens
gctgcagggaagggg

SEQ ID NO: 2090158 - DNA, 15 bp, Homo sapiens
ctgcagggaaggggt

SEQ ID NO: 2090159 - DNA, 15 bp, Homo sapiens
tgcagggaaggggtc

SEQ ID NO: 2090160 - DNA, 15 bp, Homo sapiens
gcagggaaggggtca

SEQ ID NO: 2090161 - DNA, 15 bp, Homo sapiens
cagggaaggggtcat

SEQ ID NO: 2090162 - DNA, 15 bp, Homo sapiens
agggaaggggtcatc

SEQ ID NO: 2090163 - DNA, 15 bp, Homo sapiens
gggaaggggtcatct

SEQ ID NO: 2090164 - DNA, 15 bp, Homo sapiens
ggaaggggtcatctt

SEQ ID NO: 2090165 - DNA, 15 bp, Homo sapiens
gaaggggtcatcttc

SEQ ID NO: 2090166 - DNA, 15 bp, Homo sapiens
aaggggtcatcttcc

SEQ ID NO: 2090167 - DNA, 15 bp, Homo sapiens
aggggtcatcttcca

SEQ ID NO: 2090168 - DNA, 15 bp, Homo sapiens
ggggtcatcttccaa

SEQ ID NO: 2090169 - DNA, 15 bp, Homo sapiens
gggtcatcttccaag

SEQ ID NO: 2090170 - DNA, 15 bp, Homo sapiens
ggtcatcttccaaga

SEQ ID NO: 2090171 - DNA, 15 bp, Homo sapiens
gtcatcttccaagac

SEQ ID NO: 2090172 - DNA, 15 bp, Homo sapiens
tcatcttccaagacc

SEQ ID NO: 2090173 - DNA, 15 bp, Homo sapiens
catcttccaagacca

SEQ ID NO: 2090174 - DNA, 15 bp, Homo sapiens
atcttccaagaccac

SEQ ID NO: 2090175 - DNA, 15 bp, Homo sapiens
tcttccaagaccacc

SEQ ID NO: 2090176 - DNA, 15 bp, Homo sapiens
cttccaagaccacca

SEQ ID NO: 2090177 - DNA, 15 bp, Homo sapiens
ttccaagaccaccat

SEQ ID NO: 2090178 - DNA, 15 bp, Homo sapiens
tccaagaccaccatc

SEQ ID NO: 2090179 - DNA, 15 bp, Homo sapiens
ccaagaccaccatct

SEQ ID NO: 2090180 - DNA, 15 bp, Homo sapiens
caagaccaccatctt

SEQ ID NO: 2090181 - DNA, 15 bp, Homo sapiens
aagaccaccatcttc

SEQ ID NO: 2090182 - DNA, 15 bp, Homo sapiens
agaccaccatcttca

SEQ ID NO: 2090183 - DNA, 15 bp, Homo sapiens
gaccaccatcttcaa

SEQ ID NO: 2090184 - DNA, 15 bp, Homo sapiens
accaccatcttcaat

SEQ ID NO: 2090185 - DNA, 15 bp, Homo sapiens
ccaccatcttcaatg

SEQ ID NO: 2090186 - DNA, 15 bp, Homo sapiens
caccatcttcaatga

SEQ ID NO: 2090187 - DNA, 15 bp, Homo sapiens
accatcttcaatgat

SEQ ID NO: 2090188 - DNA, 15 bp, Homo sapiens
ccatcttcaatgata

SEQ ID NO: 2090189 - DNA, 15 bp, Homo sapiens
catcttcaatgatag

SEQ ID NO: 2090190 - DNA, 15 bp, Homo sapiens
atcttcaatgatagg

SEQ ID NO: 2090191 - DNA, 15 bp, Homo sapiens
tcttcaatgataggc

SEQ ID NO: 2090192 - DNA, 15 bp, Homo sapiens
cttcaatgataggcc

SEQ ID NO: 2090193 - DNA, 15 bp, Homo sapiens
ttcaatgataggcct

SEQ ID NO: 2090194 - DNA, 15 bp, Homo sapiens
tcaatgataggcctc

SEQ ID NO: 2090195 - DNA, 15 bp, Homo sapiens
caatgataggcctca

SEQ ID NO: 2090196 - DNA, 15 bp, Homo sapiens
aatgataggcctcat

SEQ ID NO: 2090197 - DNA, 15 bp, Homo sapiens
atgataggcctcatg

SEQ ID NO: 2090198 - DNA, 15 bp, Homo sapiens
tgataggcctcatgg

SEQ ID NO: 2090199 - DNA, 15 bp, Homo sapiens
gataggcctcatggc

SEQ ID NO: 2090200 - DNA, 15 bp, Homo sapiens
ataggcctcatggcc

SEQ ID NO: 2090201 - DNA, 15 bp, Homo sapiens
taggcctcatggcct

SEQ ID NO: 2090202 - DNA, 15 bp, Homo sapiens
aggcctcatggcctt

SEQ ID NO: 2090203 - DNA, 15 bp, Homo sapiens
ggcctcatggccttc

SEQ ID NO: 2090204 - DNA, 15 bp, Homo sapiens
gcctcatggccttct

SEQ ID NO: 2090205 - DNA, 15 bp, Homo sapiens
cctcatggccttctt

SEQ ID NO: 2090206 - DNA, 15 bp, Homo sapiens
ctcatggccttcttc

SEQ ID NO: 2090207 - DNA, 15 bp, Homo sapiens
tcatggccttcttcc

SEQ ID NO: 2090208 - DNA, 15 bp, Homo sapiens
catggccttcttcca

SEQ ID NO: 2090209 - DNA, 15 bp, Homo sapiens
atggccttcttccat

SEQ ID NO: 2090210 - DNA, 15 bp, Homo sapiens
tggccttcttccatg

SEQ ID NO: 2090211 - DNA, 15 bp, Homo sapiens
ggccttcttccatgt

SEQ ID NO: 2090212 - DNA, 15 bp, Homo sapiens
gccttcttccatgtc

SEQ ID NO: 2090213 - DNA, 15 bp, Homo sapiens
ccttcttccatgtcc

SEQ ID NO: 2090214 - DNA, 15 bp, Homo sapiens
cttcttccatgtcca

SEQ ID NO: 2090215 - DNA, 15 bp, Homo sapiens
ttcttccatgtccag

SEQ ID NO: 2090216 - DNA, 15 bp, Homo sapiens
tcttccatgtccagg

SEQ ID NO: 2090217 - DNA, 15 bp, Homo sapiens
cttccatgtccagga

SEQ ID NO: 2090218 - DNA, 15 bp, Homo sapiens
ttccatgtccaggag

SEQ ID NO: 2090219 - DNA, 15 bp, Homo sapiens
tccatgtccaggaga

SEQ ID NO: 2090220 - DNA, 15 bp, Homo sapiens
ccatgtccaggagag

SEQ ID NO: 2090221 - DNA, 15 bp, Homo sapiens
catgtccaggagaga

SEQ ID NO: 2090222 - DNA, 15 bp, Homo sapiens
atgtccaggagagaa

SEQ ID NO: 2090223 - DNA, 15 bp, Homo sapiens
tgtccaggagagaac

SEQ ID NO: 2090224 - DNA, 15 bp, Homo sapiens
gtccaggagagaacc

SEQ ID NO: 2090225 - DNA, 15 bp, Homo sapiens
tccaggagagaacct

SEQ ID NO: 2090226 - DNA, 15 bp, Homo sapiens
ccaggagagaacctg

SEQ ID NO: 2090227 - DNA, 15 bp, Homo sapiens
caggagagaacctgg

SEQ ID NO: 2090228 - DNA, 15 bp, Homo sapiens
aggagagaacctggg

SEQ ID NO: 2090229 - DNA, 15 bp, Homo sapiens
ggagagaacctgggt

SEQ ID NO: 2090230 - DNA, 15 bp, Homo sapiens
gagagaacctgggtc

SEQ ID NO: 2090231 - DNA, 15 bp, Homo sapiens
agagaacctgggtcc

SEQ ID NO: 2090232 - DNA, 15 bp, Homo sapiens
gagaacctgggtccc

SEQ ID NO: 2090233 - DNA, 15 bp, Homo sapiens
agaacctgggtcccc

SEQ ID NO: 2090234 - DNA, 15 bp, Homo sapiens
gaacctgggtcccct

SEQ ID NO: 2090235 - DNA, 15 bp, Homo sapiens
aacctgggtcccctc

SEQ ID NO: 2090236 - DNA, 15 bp, Homo sapiens
acctgggtcccctct

SEQ ID NO: 2090237 - DNA, 15 bp, Homo sapiens
cctgggtcccctctg

SEQ ID NO: 2090238 - DNA, 15 bp, Homo sapiens
ctgggtcccctctgc

SEQ ID NO: 2090239 - DNA, 15 bp, Homo sapiens
tgggtcccctctgct

SEQ ID NO: 2090240 - DNA, 15 bp, Homo sapiens
gggtcccctctgctg

SEQ ID NO: 2090241 - DNA, 15 bp, Homo sapiens
ggtcccctctgctgt

SEQ ID NO: 2090242 - DNA, 15 bp, Homo sapiens
gtcccctctgctgtc

SEQ ID NO: 2090243 - DNA, 15 bp, Homo sapiens
tcccctctgctgtct

SEQ ID NO: 2090244 - DNA, 15 bp, Homo sapiens
cccctctgctgtctt

SEQ ID NO: 2090245 - DNA, 15 bp, Homo sapiens
ccctctgctgtcttt

SEQ ID NO: 2090246 - DNA, 15 bp, Homo sapiens
cctctgctgtcttta

SEQ ID NO: 2090247 - DNA, 15 bp, Homo sapiens
ctctgctgtctttaa

SEQ ID NO: 2090248 - DNA, 15 bp, Homo sapiens
tctgctgtctttaag

SEQ ID NO: 2090249 - DNA, 15 bp, Homo sapiens
ctgctgtctttaagt

SEQ ID NO: 2090250 - DNA, 15 bp, Homo sapiens
tgctgtctttaagtt

SEQ ID NO: 2090251 - DNA, 15 bp, Homo sapiens
gctgtctttaagttg

SEQ ID NO: 2090252 - DNA, 15 bp, Homo sapiens
ctgtctttaagttgg

SEQ ID NO: 2090253 - DNA, 15 bp, Homo sapiens
tgtctttaagttggt

SEQ ID NO: 2090254 - DNA, 15 bp, Homo sapiens
gtctttaagttggtt

SEQ ID NO: 2090255 - DNA, 15 bp, Homo sapiens
tctttaagttggttt

SEQ ID NO: 2090256 - DNA, 15 bp, Homo sapiens
ctttaagttggtttt

SEQ ID NO: 2090257 - DNA, 15 bp, Homo sapiens
tttaagttggttttc

SEQ ID NO: 2090258 - DNA, 15 bp, Homo sapiens
ttaagttggttttct

SEQ ID NO: 2090259 - DNA, 15 bp, Homo sapiens
taagttggttttcta

SEQ ID NO: 2090260 - DNA, 15 bp, Homo sapiens
aagttggttttctag

SEQ ID NO: 2090261 - DNA, 15 bp, Homo sapiens
agttggttttctaga

SEQ ID NO: 2090262 - DNA, 15 bp, Homo sapiens
gttggttttctagat

SEQ ID NO: 2090263 - DNA, 15 bp, Homo sapiens
ttggttttctagatg

SEQ ID NO: 2090264 - DNA, 15 bp, Homo sapiens
tggttttctagatgg

SEQ ID NO: 2090265 - DNA, 15 bp, Homo sapiens
ggttttctagatgga

SEQ ID NO: 2090266 - DNA, 15 bp, Homo sapiens
gttttctagatggac

SEQ ID NO: 2090267 - DNA, 15 bp, Homo sapiens
ttttctagatggact

SEQ ID NO: 2090268 - DNA, 15 bp, Homo sapiens
tttctagatggactc

SEQ ID NO: 2090269 - DNA, 15 bp, Homo sapiens
ttctagatggactca

SEQ ID NO: 2090270 - DNA, 15 bp, Homo sapiens
tctagatggactcaa

SEQ ID NO: 2090271 - DNA, 15 bp, Homo sapiens
ctagatggactcaac

SEQ ID NO: 2090272 - DNA, 15 bp, Homo sapiens
tagatggactcaacc

SEQ ID NO: 2090273 - DNA, 15 bp, Homo sapiens
agatggactcaacct

SEQ ID NO: 2090274 - DNA, 15 bp, Homo sapiens
gatggactcaacctc

SEQ ID NO: 2090275 - DNA, 15 bp, Homo sapiens
atggactcaacctcg

SEQ ID NO: 2090276 - DNA, 15 bp, Homo sapiens
tggactcaacctcgg

SEQ ID NO: 2090277 - DNA, 15 bp, Homo sapiens
ggactcaacctcggt

SEQ ID NO: 2090278 - DNA, 15 bp, Homo sapiens
gactcaacctcggtt

SEQ ID NO: 2090279 - DNA, 15 bp, Homo sapiens
actcaacctcggttg

SEQ ID NO: 2090280 - DNA, 15 bp, Homo sapiens
ctcaacctcggttgc

SEQ ID NO: 2090281 - DNA, 15 bp, Homo sapiens
tcaacctcggttgcc

SEQ ID NO: 2090282 - DNA, 15 bp, Homo sapiens
caacctcggttgcct

SEQ ID NO: 2090283 - DNA, 15 bp, Homo sapiens
aacctcggttgcctt

SEQ ID NO: 2090284 - DNA, 15 bp, Homo sapiens
acctcggttgccttg

SEQ ID NO: 2090285 - DNA, 15 bp, Homo sapiens
cctcggttgccttgt

SEQ ID NO: 2090286 - DNA, 15 bp, Homo sapiens
ctcggttgccttgtc

SEQ ID NO: 2090287 - DNA, 15 bp, Homo sapiens
tcggttgccttgtcc

SEQ ID NO: 2090288 - DNA, 15 bp, Homo sapiens
cggttgccttgtcct

SEQ ID NO: 2090289 - DNA, 15 bp, Homo sapiens
ggttgccttgtcctg

SEQ ID NO: 2090290 - DNA, 15 bp, Homo sapiens
gttgccttgtcctgc

SEQ ID NO: 2090291 - DNA, 15 bp, Homo sapiens
ttgccttgtcctgct

SEQ ID NO: 2090292 - DNA, 15 bp, Homo sapiens
tgccttgtcctgctg

SEQ ID NO: 2090293 - DNA, 15 bp, Homo sapiens
gccttgtcctgctgc

SEQ ID NO: 2090294 - DNA, 15 bp, Homo sapiens
ccttgtcctgctgct

SEQ ID NO: 2090295 - DNA, 15 bp, Homo sapiens
cttgtcctgctgctg

SEQ ID NO: 2090296 - DNA, 15 bp, Homo sapiens
ttgtcctgctgctgg

SEQ ID NO: 2090297 - DNA, 15 bp, Homo sapiens
tgtcctgctgctggg

SEQ ID NO: 2090298 - DNA, 15 bp, Homo sapiens
gtcctgctgctgggc

SEQ ID NO: 2090299 - DNA, 15 bp, Homo sapiens
tcctgctgctgggct

SEQ ID NO: 2090300 - DNA, 15 bp, Homo sapiens
cctgctgctgggctt

SEQ ID NO: 2090301 - DNA, 15 bp, Homo sapiens
ctgctgctgggcttc

SEQ ID NO: 2090302 - DNA, 15 bp, Homo sapiens
tgctgctgggcttcc

SEQ ID NO: 2090303 - DNA, 15 bp, Homo sapiens
gctgctgggcttccc

SEQ ID NO: 2090304 - DNA, 15 bp, Homo sapiens
ctgctgggcttcccc

SEQ ID NO: 2090305 - DNA, 15 bp, Homo sapiens
tgctgggcttccccc

SEQ ID NO: 2090306 - DNA, 15 bp, Homo sapiens
gctgggcttccccca

SEQ ID NO: 2090307 - DNA, 15 bp, Homo sapiens
ctgggcttcccccac

SEQ ID NO: 2090308 - DNA, 15 bp, Homo sapiens
tgggcttcccccacc

SEQ ID NO: 2090309 - DNA, 15 bp, Homo sapiens
gggcttcccccacct

SEQ ID NO: 2090310 - DNA, 15 bp, Homo sapiens
ggcttcccccaccta

SEQ ID NO: 2090311 - DNA, 15 bp, Homo sapiens
gcttcccccacctat

SEQ ID NO: 2090312 - DNA, 15 bp, Homo sapiens
cttcccccacctatg

SEQ ID NO: 2090313 - DNA, 15 bp, Homo sapiens
ttcccccacctatga

SEQ ID NO: 2090314 - DNA, 15 bp, Homo sapiens
tcccccacctatgat

SEQ ID NO: 2090315 - DNA, 15 bp, Homo sapiens
cccccacctatgatc

SEQ ID NO: 2090316 - DNA, 15 bp, Homo sapiens
ccccacctatgatcc

SEQ ID NO: 2090317 - DNA, 15 bp, Homo sapiens
cccacctatgatccc

SEQ ID NO: 2090318 - DNA, 15 bp, Homo sapiens
ccacctatgatccct

SEQ ID NO: 2090319 - DNA, 15 bp, Homo sapiens
cacctatgatccctg

SEQ ID NO: 2090320 - DNA, 15 bp, Homo sapiens
acctatgatccctgt

SEQ ID NO: 2090321 - DNA, 15 bp, Homo sapiens
cctatgatccctgtc

SEQ ID NO: 2090322 - DNA, 15 bp, Homo sapiens
ctatgatccctgtct

SEQ ID NO: 2090323 - DNA, 15 bp, Homo sapiens
tatgatccctgtctc

SEQ ID NO: 2090324 - DNA, 15 bp, Homo sapiens
atgatccctgtctca

SEQ ID NO: 2090325 - DNA, 15 bp, Homo sapiens
tgatccctgtctcaa

SEQ ID NO: 2090326 - DNA, 15 bp, Homo sapiens
gatccctgtctcaat

SEQ ID NO: 2090327 - DNA, 15 bp, Homo sapiens
atccctgtctcaata

SEQ ID NO: 2090328 - DNA, 15 bp, Homo sapiens
tccctgtctcaataa

SEQ ID NO: 2090329 - DNA, 15 bp, Homo sapiens
ccctgtctcaataaa

SEQ ID NO: 2090330 - DNA, 15 bp, Homo sapiens
cctgtctcaataaac

SEQ ID NO: 2090331 - DNA, 15 bp, Homo sapiens
ctgtctcaataaacg

SEQ ID NO: 2090332 - DNA, 15 bp, Homo sapiens
tgtctcaataaacgg

SEQ ID NO: 2090333 - DNA, 15 bp, Homo sapiens
gtctcaataaacggc

SEQ ID NO: 2090334 - DNA, 15 bp, Homo sapiens
tctcaataaacggca

SEQ ID NO: 2090335 - DNA, 15 bp, Homo sapiens
ctcaataaacggcac

SEQ ID NO: 2090336 - DNA, 15 bp, Homo sapiens
tcaataaacggcacc

SEQ ID NO: 2090337 - DNA, 15 bp, Homo sapiens
caataaacggcacct

SEQ ID NO: 2090338 - DNA, 15 bp, Homo sapiens
aataaacggcacctc

SEQ ID NO: 2090339 - DNA, 15 bp, Homo sapiens
ataaacggcacctcc

SEQ ID NO: 2090340 - DNA, 15 bp, Homo sapiens
taaacggcacctcct

SEQ ID NO: 2090341 - DNA, 15 bp, Homo sapiens
aaacggcacctcctt

SEQ ID NO: 2090342 - DNA, 15 bp, Homo sapiens
aacggcacctccttt

SEQ ID NO: 2090343 - DNA, 15 bp, Homo sapiens
acggcacctcctttt

SEQ ID NO: 2090344 - DNA, 15 bp, Homo sapiens
cggcacctccttttg

SEQ ID NO: 2090345 - DNA, 15 bp, Homo sapiens
ggcacctccttttgt

SEQ ID NO: 2090346 - DNA, 15 bp, Homo sapiens
gcacctccttttgtt

SEQ ID NO: 2090347 - DNA, 15 bp, Homo sapiens
cacctccttttgttt

SEQ ID NO: 2090348 - DNA, 15 bp, Homo sapiens
acctccttttgtttc

SEQ ID NO: 2090349 - DNA, 15 bp, Homo sapiens
cctccttttgtttcc

SEQ ID NO: 2090350 - DNA, 15 bp, Homo sapiens
ctccttttgtttccc

SEQ ID NO: 2090351 - DNA, 15 bp, Homo sapiens
tccttttgtttcccc

SEQ ID NO: 2090352 - DNA, 15 bp, Homo sapiens
ccttttgtttcccct

SEQ ID NO: 2090353 - DNA, 15 bp, Homo sapiens
cttttgtttcccctg

SEQ ID NO: 2090354 - DNA, 15 bp, Homo sapiens
ttttgtttcccctgg

SEQ ID NO: 2090355 - DNA, 15 bp, Homo sapiens
tttgtttcccctggg

SEQ ID NO: 2090356 - DNA, 15 bp, Homo sapiens
ttgtttcccctgggg

SEQ ID NO: 2090357 - DNA, 15 bp, Homo sapiens
tgtttcccctggggt

SEQ ID NO: 2090358 - DNA, 15 bp, Homo sapiens
gtttcccctggggta

SEQ ID NO: 2090359 - DNA, 15 bp, Homo sapiens
tttcccctggggtag

SEQ ID NO: 2090360 - DNA, 15 bp, Homo sapiens
ttcccctggggtaga

SEQ ID NO: 2090361 - DNA, 15 bp, Homo sapiens
tcccctggggtagag

SEQ ID NO: 2090362 - DNA, 15 bp, Homo sapiens
cccctggggtagagg

SEQ ID NO: 2090363 - DNA, 15 bp, Homo sapiens
ccctggggtagaggc

SEQ ID NO: 2090364 - DNA, 15 bp, Homo sapiens
cctggggtagaggca

SEQ ID NO: 2090365 - DNA, 15 bp, Homo sapiens
ctggggtagaggcaa

SEQ ID NO: 2090366 - DNA, 15 bp, Homo sapiens
tggggtagaggcaaa

SEQ ID NO: 2090367 - DNA, 15 bp, Homo sapiens
ggggtagaggcaaaa

SEQ ID NO: 2090368 - DNA, 15 bp, Homo sapiens
gggtagaggcaaaaa

SEQ ID NO: 2090369 - DNA, 15 bp, Homo sapiens
ggtagaggcaaaaac

SEQ ID NO: 2090370 - DNA, 15 bp, Homo sapiens
gtagaggcaaaaacc

SEQ ID NO: 2090371 - DNA, 15 bp, Homo sapiens
tagaggcaaaaacct

SEQ ID NO: 2090372 - DNA, 15 bp, Homo sapiens
agaggcaaaaacctt

SEQ ID NO: 2090373 - DNA, 15 bp, Homo sapiens
gaggcaaaaaccttc

SEQ ID NO: 2090374 - DNA, 15 bp, Homo sapiens
aggcaaaaaccttcg

SEQ ID NO: 2090375 - DNA, 15 bp, Homo sapiens
ggcaaaaaccttcgg

SEQ ID NO: 2090376 - DNA, 15 bp, Homo sapiens
gcaaaaaccttcggt

SEQ ID NO: 2090377 - DNA, 15 bp, Homo sapiens
caaaaaccttcggtc

SEQ ID NO: 2090378 - DNA, 15 bp, Homo sapiens
aaaaaccttcggtca

SEQ ID NO: 2090379 - DNA, 15 bp, Homo sapiens
aaaaccttcggtcat

SEQ ID NO: 2090380 - DNA, 15 bp, Homo sapiens
aaaccttcggtcatc

SEQ ID NO: 2090381 - DNA, 15 bp, Homo sapiens
aaccttcggtcatct

SEQ ID NO: 2090382 - DNA, 15 bp, Homo sapiens
accttcggtcatctt

SEQ ID NO: 2090383 - DNA, 15 bp, Homo sapiens
ccttcggtcatcttt

SEQ ID NO: 2090384 - DNA, 15 bp, Homo sapiens
cttcggtcatctttg

SEQ ID NO: 2090385 - DNA, 15 bp, Homo sapiens
ttcggtcatctttgc

SEQ ID NO: 2090386 - DNA, 15 bp, Homo sapiens
tcggtcatctttgcc

SEQ ID NO: 2090387 - DNA, 15 bp, Homo sapiens
cggtcatctttgcct

SEQ ID NO: 2090388 - DNA, 15 bp, Homo sapiens
ggtcatctttgcctg

SEQ ID NO: 2090389 - DNA, 15 bp, Homo sapiens
gtcatctttgcctgc

SEQ ID NO: 2090390 - DNA, 15 bp, Homo sapiens
tcatctttgcctgca

SEQ ID NO: 2090391 - DNA, 15 bp, Homo sapiens
catctttgcctgcat

SEQ ID NO: 2090392 - DNA, 15 bp, Homo sapiens
atctttgcctgcatg

SEQ ID NO: 2090393 - DNA, 15 bp, Homo sapiens
tctttgcctgcatgc

SEQ ID NO: 2090394 - DNA, 15 bp, Homo sapiens
ctttgcctgcatgct

SEQ ID NO: 2090395 - DNA, 15 bp, Homo sapiens
tttgcctgcatgctt

SEQ ID NO: 2090396 - DNA, 15 bp, Homo sapiens
ttgcctgcatgcttt

SEQ ID NO: 2090397 - DNA, 15 bp, Homo sapiens
tgcctgcatgctttt

SEQ ID NO: 2090398 - DNA, 15 bp, Homo sapiens
gcctgcatgcttttt

SEQ ID NO: 2090399 - DNA, 15 bp, Homo sapiens
cctgcatgctttttt

SEQ ID NO: 2090400 - DNA, 15 bp, Homo sapiens
ctgcatgcttttttc

SEQ ID NO: 2090401 - DNA, 15 bp, Homo sapiens
tgcatgcttttttcc

SEQ ID NO: 2090402 - DNA, 15 bp, Homo sapiens
gcatgcttttttcct

SEQ ID NO: 2090403 - DNA, 15 bp, Homo sapiens
catgcttttttcctg

SEQ ID NO: 2090404 - DNA, 15 bp, Homo sapiens
atgcttttttcctga

SEQ ID NO: 2090405 - DNA, 15 bp, Homo sapiens
tgcttttttcctgat

SEQ ID NO: 2090406 - DNA, 15 bp, Homo sapiens
gcttttttcctgata

SEQ ID NO: 2090407 - DNA, 15 bp, Homo sapiens
cttttttcctgatac

SEQ ID NO: 2090408 - DNA, 15 bp, Homo sapiens
ttttttcctgatacc

SEQ ID NO: 2090409 - DNA, 15 bp, Homo sapiens
tttttcctgataccc

SEQ ID NO: 2090410 - DNA, 15 bp, Homo sapiens
ttttcctgatacccc

SEQ ID NO: 2090411 - DNA, 15 bp, Homo sapiens
tttcctgatacccct

SEQ ID NO: 2090412 - DNA, 15 bp, Homo sapiens
ttcctgatacccctg

SEQ ID NO: 2090413 - DNA, 15 bp, Homo sapiens
tcctgatacccctgt

SEQ ID NO: 2090414 - DNA, 15 bp, Homo sapiens
cctgatacccctgta

SEQ ID NO: 2090415 - DNA, 15 bp, Homo sapiens
ctgatacccctgtat

SEQ ID NO: 2090416 - DNA, 15 bp, Homo sapiens
tgatacccctgtatc

SEQ ID NO: 2090417 - DNA, 15 bp, Homo sapiens
gatacccctgtatct

SEQ ID NO: 2090418 - DNA, 15 bp, Homo sapiens
atacccctgtatctg

SEQ ID NO: 2090419 - DNA, 15 bp, Homo sapiens
tacccctgtatctgc

SEQ ID NO: 2090420 - DNA, 15 bp, Homo sapiens
acccctgtatctgct

SEQ ID NO: 2090421 - DNA, 15 bp, Homo sapiens
cccctgtatctgctg

SEQ ID NO: 2090422 - DNA, 15 bp, Homo sapiens
ccctgtatctgctga

SEQ ID NO: 2090423 - DNA, 15 bp, Homo sapiens
cctgtatctgctgag

SEQ ID NO: 2090424 - DNA, 15 bp, Homo sapiens
ctgtatctgctgagg

SEQ ID NO: 2090425 - DNA, 15 bp, Homo sapiens
tgtatctgctgaggc

SEQ ID NO: 2090426 - DNA, 15 bp, Homo sapiens
gtatctgctgaggca

SEQ ID NO: 2090427 - DNA, 15 bp, Homo sapiens
tatctgctgaggcag

SEQ ID NO: 2090428 - DNA, 15 bp, Homo sapiens
atctgctgaggcagg

SEQ ID NO: 2090429 - DNA, 15 bp, Homo sapiens
tctgctgaggcaggg

SEQ ID NO: 2090430 - DNA, 15 bp, Homo sapiens
ctgctgaggcagggg

SEQ ID NO: 2090431 - DNA, 15 bp, Homo sapiens
tgctgaggcaggggc

SEQ ID NO: 2090432 - DNA, 15 bp, Homo sapiens
gctgaggcaggggct

SEQ ID NO: 2090433 - DNA, 15 bp, Homo sapiens
ctgaggcaggggctt

SEQ ID NO: 2090434 - DNA, 15 bp, Homo sapiens
tgaggcaggggcttt

SEQ ID NO: 2090435 - DNA, 15 bp, Homo sapiens
gaggcaggggctttc

SEQ ID NO: 2090436 - DNA, 15 bp, Homo sapiens
aggcaggggctttcc

SEQ ID NO: 2090437 - DNA, 15 bp, Homo sapiens
ggcaggggctttccc

SEQ ID NO: 2090438 - DNA, 15 bp, Homo sapiens
gcaggggctttccca

SEQ ID NO: 2090439 - DNA, 15 bp, Homo sapiens
caggggctttcccat

SEQ ID NO: 2090440 - DNA, 15 bp, Homo sapiens
aggggctttcccatc

SEQ ID NO: 2090441 - DNA, 15 bp, Homo sapiens
ggggctttcccatca

SEQ ID NO: 2090442 - DNA, 15 bp, Homo sapiens
gggctttcccatcac

SEQ ID NO: 2090443 - DNA, 15 bp, Homo sapiens
ggctttcccatcact

SEQ ID NO: 2090444 - DNA, 15 bp, Homo sapiens
gctttcccatcactg

SEQ ID NO: 2090445 - DNA, 15 bp, Homo sapiens
ctttcccatcactgt

SEQ ID NO: 2090446 - DNA, 15 bp, Homo sapiens
tttcccatcactgtc

SEQ ID NO: 2090447 - DNA, 15 bp, Homo sapiens
ttcccatcactgtca

SEQ ID NO: 2090448 - DNA, 15 bp, Homo sapiens
tcccatcactgtcac

SEQ ID NO: 2090449 - DNA, 15 bp, Homo sapiens
cccatcactgtcact

SEQ ID NO: 2090450 - DNA, 15 bp, Homo sapiens
ccatcactgtcactg

SEQ ID NO: 2090451 - DNA, 15 bp, Homo sapiens
catcactgtcactgc

SEQ ID NO: 2090452 - DNA, 15 bp, Homo sapiens
atcactgtcactgca

SEQ ID NO: 2090453 - DNA, 15 bp, Homo sapiens
tcactgtcactgcag

SEQ ID NO: 2090454 - DNA, 15 bp, Homo sapiens
cactgtcactgcagc

SEQ ID NO: 2090455 - DNA, 15 bp, Homo sapiens
actgtcactgcagcg

SEQ ID NO: 2090456 - DNA, 15 bp, Homo sapiens
ctgtcactgcagcgt

SEQ ID NO: 2090457 - DNA, 15 bp, Homo sapiens
tgtcactgcagcgtc

SEQ ID NO: 2090458 - DNA, 15 bp, Homo sapiens
gtcactgcagcgtcc

SEQ ID NO: 2090459 - DNA, 15 bp, Homo sapiens
tcactgcagcgtccc

SEQ ID NO: 2090460 - DNA, 15 bp, Homo sapiens
cactgcagcgtcccc

SEQ ID NO: 2090461 - DNA, 15 bp, Homo sapiens
actgcagcgtccccg

SEQ ID NO: 2090462 - DNA, 15 bp, Homo sapiens
ctgcagcgtccccga

SEQ ID NO: 2090463 - DNA, 15 bp, Homo sapiens
tgcagcgtccccgag

SEQ ID NO: 2090464 - DNA, 15 bp, Homo sapiens
gcagcgtccccgagg

SEQ ID NO: 2090465 - DNA, 15 bp, Homo sapiens
cagcgtccccgaggg

SEQ ID NO: 2090466 - DNA, 15 bp, Homo sapiens
agcgtccccgagggc

SEQ ID NO: 2090467 - DNA, 15 bp, Homo sapiens
gcgtccccgagggcc

SEQ ID NO: 2090468 - DNA, 15 bp, Homo sapiens
cgtccccgagggcca

SEQ ID NO: 2090469 - DNA, 15 bp, Homo sapiens
gtccccgagggccat

SEQ ID NO: 2090470 - DNA, 15 bp, Homo sapiens
tccccgagggccata

SEQ ID NO: 2090471 - DNA, 15 bp, Homo sapiens
ccccgagggccatag

SEQ ID NO: 2090472 - DNA, 15 bp, Homo sapiens
cccgagggccatagc

SEQ ID NO: 2090473 - DNA, 15 bp, Homo sapiens
ccgagggccatagca

SEQ ID NO: 2090474 - DNA, 15 bp, Homo sapiens
cgagggccatagcag

SEQ ID NO: 2090475 - DNA, 15 bp, Homo sapiens
gagggccatagcagc

SEQ ID NO: 2090476 - DNA, 15 bp, Homo sapiens
agggccatagcagcg

SEQ ID NO: 2090477 - DNA, 15 bp, Homo sapiens
gggccatagcagcgc

SEQ ID NO: 2090478 - DNA, 15 bp, Homo sapiens
ggccatagcagcgcc

SEQ ID NO: 2090479 - DNA, 15 bp, Homo sapiens
gccatagcagcgcct

SEQ ID NO: 2090480 - DNA, 15 bp, Homo sapiens
ccatagcagcgcctg

SEQ ID NO: 2090481 - DNA, 15 bp, Homo sapiens
catagcagcgcctga

SEQ ID NO: 2090482 - DNA, 15 bp, Homo sapiens
atagcagcgcctgag

SEQ ID NO: 2090483 - DNA, 15 bp, Homo sapiens
tagcagcgcctgagc

SEQ ID NO: 2090484 - DNA, 15 bp, Homo sapiens
agcagcgcctgagct

SEQ ID NO: 2090485 - DNA, 15 bp, Homo sapiens
gcagcgcctgagctc

SEQ ID NO: 2090486 - DNA, 15 bp, Homo sapiens
cagcgcctgagctcc

SEQ ID NO: 2090487 - DNA, 15 bp, Homo sapiens
agcgcctgagctcct

SEQ ID NO: 2090488 - DNA, 15 bp, Homo sapiens
gcgcctgagctcctt

SEQ ID NO: 2090489 - DNA, 15 bp, Homo sapiens
cgcctgagctccttg

SEQ ID NO: 2090490 - DNA, 15 bp, Homo sapiens
gcctgagctccttgc

SEQ ID NO: 2090491 - DNA, 15 bp, Homo sapiens
cctgagctccttgcc

SEQ ID NO: 2090492 - DNA, 15 bp, Homo sapiens
ctgagctccttgcca

SEQ ID NO: 2090493 - DNA, 15 bp, Homo sapiens
tgagctccttgccac

SEQ ID NO: 2090494 - DNA, 15 bp, Homo sapiens
gagctccttgccacc

SEQ ID NO: 2090495 - DNA, 15 bp, Homo sapiens
agctccttgccaccc

SEQ ID NO: 2090496 - DNA, 15 bp, Homo sapiens
gctccttgccacccc

SEQ ID NO: 2090497 - DNA, 15 bp, Homo sapiens
ctccttgccacccct

SEQ ID NO: 2090498 - DNA, 15 bp, Homo sapiens
tccttgccacccctt

SEQ ID NO: 2090499 - DNA, 15 bp, Homo sapiens
ccttgccaccccttc

SEQ ID NO: 2090500 - DNA, 15 bp, Homo sapiens
cttgccaccccttca

SEQ ID NO: 2090501 - DNA, 15 bp, Homo sapiens
ttgccaccccttcaa

SEQ ID NO: 2090502 - DNA, 15 bp, Homo sapiens
tgccaccccttcaac

SEQ ID NO: 2090503 - DNA, 15 bp, Homo sapiens
gccaccccttcaaca

SEQ ID NO: 2090504 - DNA, 15 bp, Homo sapiens
ccaccccttcaacac

SEQ ID NO: 2090505 - DNA, 15 bp, Homo sapiens
caccccttcaacacc

SEQ ID NO: 2090506 - DNA, 15 bp, Homo sapiens
accccttcaacacca

SEQ ID NO: 2090507 - DNA, 15 bp, Homo sapiens
ccccttcaacaccag

SEQ ID NO: 2090508 - DNA, 15 bp, Homo sapiens
cccttcaacaccagt

SEQ ID NO: 2090509 - DNA, 15 bp, Homo sapiens
ccttcaacaccagtc

SEQ ID NO: 2090510 - DNA, 15 bp, Homo sapiens
cttcaacaccagtca

SEQ ID NO: 2090511 - DNA, 15 bp, Homo sapiens
ttcaacaccagtcag

SEQ ID NO: 2090512 - DNA, 15 bp, Homo sapiens
tcaacaccagtcagg

SEQ ID NO: 2090513 - DNA, 15 bp, Homo sapiens
caacaccagtcaggt

SEQ ID NO: 2090514 - DNA, 15 bp, Homo sapiens
aacaccagtcaggtt

SEQ ID NO: 2090515 - DNA, 15 bp, Homo sapiens
acaccagtcaggtta

SEQ ID NO: 2090516 - DNA, 15 bp, Homo sapiens
caccagtcaggttac

SEQ ID NO: 2090517 - DNA, 15 bp, Homo sapiens
accagtcaggttaca

SEQ ID NO: 2090518 - DNA, 15 bp, Homo sapiens
ccagtcaggttacag

SEQ ID NO: 2090519 - DNA, 15 bp, Homo sapiens
cagtcaggttacaga

SEQ ID NO: 2090520 - DNA, 15 bp, Homo sapiens
agtcaggttacagaa

SEQ ID NO: 2090521 - DNA, 15 bp, Homo sapiens
gtcaggttacagaat

SEQ ID NO: 2090522 - DNA, 15 bp, Homo sapiens
tcaggttacagaatg

SEQ ID NO: 2090523 - DNA, 15 bp, Homo sapiens
caggttacagaatga

SEQ ID NO: 2090524 - DNA, 15 bp, Homo sapiens
aggttacagaatgaa

SEQ ID NO: 2090525 - DNA, 15 bp, Homo sapiens
ggttacagaatgaat

SEQ ID NO: 2090526 - DNA, 15 bp, Homo sapiens
gttacagaatgaatg

SEQ ID NO: 2090527 - DNA, 15 bp, Homo sapiens
ttacagaatgaatga

SEQ ID NO: 2090528 - DNA, 15 bp, Homo sapiens
tacagaatgaatgag

SEQ ID NO: 2090529 - DNA, 15 bp, Homo sapiens
acagaatgaatgagg

SEQ ID NO: 2090530 - DNA, 15 bp, Homo sapiens
cagaatgaatgaggc

SEQ ID NO: 2090531 - DNA, 15 bp, Homo sapiens
agaatgaatgaggcg

SEQ ID NO: 2090532 - DNA, 15 bp, Homo sapiens
gaatgaatgaggcgg

SEQ ID NO: 2090533 - DNA, 15 bp, Homo sapiens
aatgaatgaggcggg

SEQ ID NO: 2090534 - DNA, 15 bp, Homo sapiens
atgaatgaggcgggc

SEQ ID NO: 2090535 - DNA, 15 bp, Homo sapiens
tgaatgaggcgggcg

SEQ ID NO: 2090536 - DNA, 15 bp, Homo sapiens
gaatgaggcgggcgc

SEQ ID NO: 2090537 - DNA, 15 bp, Homo sapiens
aatgaggcgggcgcg

SEQ ID NO: 2090538 - DNA, 15 bp, Homo sapiens
atgaggcgggcgcga

SEQ ID NO: 2090539 - DNA, 15 bp, Homo sapiens
tgaggcgggcgcgac

SEQ ID NO: 2090540 - DNA, 15 bp, Homo sapiens
gaggcgggcgcgacc

SEQ ID NO: 2090541 - DNA, 15 bp, Homo sapiens
aggcgggcgcgaccc

SEQ ID NO: 2090542 - DNA, 15 bp, Homo sapiens
ggcgggcgcgacccc

SEQ ID NO: 2090543 - DNA, 15 bp, Homo sapiens
gcgggcgcgaccccc

SEQ ID NO: 2090544 - DNA, 15 bp, Homo sapiens
cgggcgcgaccccca

SEQ ID NO: 2090545 - DNA, 15 bp, Homo sapiens
gggcgcgacccccag

SEQ ID NO: 2090546 - DNA, 15 bp, Homo sapiens
ggcgcgacccccagc

SEQ ID NO: 2090547 - DNA, 15 bp, Homo sapiens
gcgcgacccccagcc

SEQ ID NO: 2090548 - DNA, 15 bp, Homo sapiens
cgcgacccccagccc

SEQ ID NO: 2090549 - DNA, 15 bp, Homo sapiens
gcgacccccagccct

SEQ ID NO: 2090550 - DNA, 15 bp, Homo sapiens
cgacccccagccctg

SEQ ID NO: 2090551 - DNA, 15 bp, Homo sapiens
gacccccagccctgg

SEQ ID NO: 2090552 - DNA, 15 bp, Homo sapiens
acccccagccctggc

SEQ ID NO: 2090553 - DNA, 15 bp, Homo sapiens
cccccagccctggcc

SEQ ID NO: 2090554 - DNA, 15 bp, Homo sapiens
ccccagccctggcct

SEQ ID NO: 2090555 - DNA, 15 bp, Homo sapiens
cccagccctggcctc

SEQ ID NO: 2090556 - DNA, 15 bp, Homo sapiens
ccagccctggcctca

SEQ ID NO: 2090557 - DNA, 15 bp, Homo sapiens
cagccctggcctcag

SEQ ID NO: 2090558 - DNA, 15 bp, Homo sapiens
agccctggcctcagg

SEQ ID NO: 2090559 - DNA, 15 bp, Homo sapiens
gccctggcctcaggc

SEQ ID NO: 2090560 - DNA, 15 bp, Homo sapiens
ccctggcctcaggct

SEQ ID NO: 2090561 - DNA, 15 bp, Homo sapiens
cctggcctcaggctc

SEQ ID NO: 2090562 - DNA, 15 bp, Homo sapiens
ctggcctcaggctct

SEQ ID NO: 2090563 - DNA, 15 bp, Homo sapiens
tggcctcaggctctt

SEQ ID NO: 2090564 - DNA, 15 bp, Homo sapiens
ggcctcaggctcttt

SEQ ID NO: 2090565 - DNA, 15 bp, Homo sapiens
gcctcaggctcttta

SEQ ID NO: 2090566 - DNA, 15 bp, Homo sapiens
cctcaggctctttag

SEQ ID NO: 2090567 - DNA, 15 bp, Homo sapiens
ctcaggctctttagc

SEQ ID NO: 2090568 - DNA, 15 bp, Homo sapiens
tcaggctctttagct

SEQ ID NO: 2090569 - DNA, 15 bp, Homo sapiens
caggctctttagctc

SEQ ID NO: 2090570 - DNA, 15 bp, Homo sapiens
aggctctttagctca

SEQ ID NO: 2090571 - DNA, 15 bp, Homo sapiens
ggctctttagctcac

SEQ ID NO: 2090572 - DNA, 15 bp, Homo sapiens
gctctttagctcacc

SEQ ID NO: 2090573 - DNA, 15 bp, Homo sapiens
ctctttagctcaccc

SEQ ID NO: 2090574 - DNA, 15 bp, Homo sapiens
tctttagctcacccc

SEQ ID NO: 2090575 - DNA, 15 bp, Homo sapiens
ctttagctcacccct

SEQ ID NO: 2090576 - DNA, 15 bp, Homo sapiens
tttagctcacccctg

SEQ ID NO: 2090577 - DNA, 15 bp, Homo sapiens
ttagctcacccctgc

SEQ ID NO: 2090578 - DNA, 15 bp, Homo sapiens
tagctcacccctgcc

SEQ ID NO: 2090579 - DNA, 15 bp, Homo sapiens
agctcacccctgcct

SEQ ID NO: 2090580 - DNA, 15 bp, Homo sapiens
gctcacccctgcctc

SEQ ID NO: 2090581 - DNA, 15 bp, Homo sapiens
ctcacccctgcctcc

SEQ ID NO: 2090582 - DNA, 15 bp, Homo sapiens
tcacccctgcctccc

SEQ ID NO: 2090583 - DNA, 15 bp, Homo sapiens
cacccctgcctccct

SEQ ID NO: 2090584 - DNA, 15 bp, Homo sapiens
acccctgcctccctc

SEQ ID NO: 2090585 - DNA, 15 bp, Homo sapiens
cccctgcctccctca

SEQ ID NO: 2090586 - DNA, 15 bp, Homo sapiens
ccctgcctccctcag

SEQ ID NO: 2090587 - DNA, 15 bp, Homo sapiens
cctgcctccctcagc

SEQ ID NO: 2090588 - DNA, 15 bp, Homo sapiens
ctgcctccctcagcc

SEQ ID NO: 2090589 - DNA, 15 bp, Homo sapiens
tgcctccctcagcca

SEQ ID NO: 2090590 - DNA, 15 bp, Homo sapiens
gcctccctcagccag

SEQ ID NO: 2090591 - DNA, 15 bp, Homo sapiens
cctccctcagccaga

SEQ ID NO: 2090592 - DNA, 15 bp, Homo sapiens
ctccctcagccagag

SEQ ID NO: 2090593 - DNA, 15 bp, Homo sapiens
tccctcagccagagc

SEQ ID NO: 2090594 - DNA, 15 bp, Homo sapiens
ccctcagccagagcc

SEQ ID NO: 2090595 - DNA, 15 bp, Homo sapiens
cctcagccagagcca

SEQ ID NO: 2090596 - DNA, 15 bp, Homo sapiens
ctcagccagagccac

SEQ ID NO: 2090597 - DNA, 15 bp, Homo sapiens
tcagccagagccaca

SEQ ID NO: 2090598 - DNA, 15 bp, Homo sapiens
cagccagagccacac

SEQ ID NO: 2090599 - DNA, 15 bp, Homo sapiens
agccagagccacaca

SEQ ID NO: 2090600 - DNA, 15 bp, Homo sapiens
gccagagccacacag

SEQ ID NO: 2090601 - DNA, 15 bp, Homo sapiens
ccagagccacacagt

SEQ ID NO: 2090602 - DNA, 15 bp, Homo sapiens
cagagccacacagtg

SEQ ID NO: 2090603 - DNA, 15 bp, Homo sapiens
agagccacacagtga

SEQ ID NO: 2090604 - DNA, 15 bp, Homo sapiens
gagccacacagtgag

SEQ ID NO: 2090605 - DNA, 15 bp, Homo sapiens
agccacacagtgagc

SEQ ID NO: 2090606 - DNA, 15 bp, Homo sapiens
gccacacagtgagcc

SEQ ID NO: 2090607 - DNA, 15 bp, Homo sapiens
ccacacagtgagcct

SEQ ID NO: 2090608 - DNA, 15 bp, Homo sapiens
cacacagtgagcctt

SEQ ID NO: 2090609 - DNA, 15 bp, Homo sapiens
acacagtgagccttg

SEQ ID NO: 2090610 - DNA, 15 bp, Homo sapiens
cacagtgagccttgg

SEQ ID NO: 2090611 - DNA, 15 bp, Homo sapiens
acagtgagccttggg

SEQ ID NO: 2090612 - DNA, 15 bp, Homo sapiens
cagtgagccttgggg

SEQ ID NO: 2090613 - DNA, 15 bp, Homo sapiens
agtgagccttgggga

SEQ ID NO: 2090614 - DNA, 15 bp, Homo sapiens
gtgagccttggggag

SEQ ID NO: 2090615 - DNA, 15 bp, Homo sapiens
tgagccttggggagc

SEQ ID NO: 2090616 - DNA, 15 bp, Homo sapiens
gagccttggggagcc

SEQ ID NO: 2090617 - DNA, 15 bp, Homo sapiens
agccttggggagccc

SEQ ID NO: 2090618 - DNA, 15 bp, Homo sapiens
gccttggggagcccc

SEQ ID NO: 2090619 - DNA, 15 bp, Homo sapiens
ccttggggagccccg

SEQ ID NO: 2090620 - DNA, 15 bp, Homo sapiens
cttggggagccccgg

SEQ ID NO: 2090621 - DNA, 15 bp, Homo sapiens
ttggggagccccggc

SEQ ID NO: 2090622 - DNA, 15 bp, Homo sapiens
tggggagccccggca

SEQ ID NO: 2090623 - DNA, 15 bp, Homo sapiens
ggggagccccggcac

SEQ ID NO: 2090624 - DNA, 15 bp, Homo sapiens
gggagccccggcacc

SEQ ID NO: 2090625 - DNA, 15 bp, Homo sapiens
ggagccccggcacca

SEQ ID NO: 2090626 - DNA, 15 bp, Homo sapiens
gagccccggcaccag

SEQ ID NO: 2090627 - DNA, 15 bp, Homo sapiens
agccccggcaccagg

SEQ ID NO: 2090628 - DNA, 15 bp, Homo sapiens
gccccggcaccaggg

SEQ ID NO: 2090629 - DNA, 15 bp, Homo sapiens
ccccggcaccagggc

SEQ ID NO: 2090630 - DNA, 15 bp, Homo sapiens
cccggcaccagggcc

SEQ ID NO: 2090631 - DNA, 15 bp, Homo sapiens
ccggcaccagggcca

SEQ ID NO: 2090632 - DNA, 15 bp, Homo sapiens
cggcaccagggccag

SEQ ID NO: 2090633 - DNA, 15 bp, Homo sapiens
ggcaccagggccagc

SEQ ID NO: 2090634 - DNA, 15 bp, Homo sapiens
gcaccagggccagcc

SEQ ID NO: 2090635 - DNA, 15 bp, Homo sapiens
caccagggccagcca

SEQ ID NO: 2090636 - DNA, 15 bp, Homo sapiens
accagggccagccag

SEQ ID NO: 2090637 - DNA, 15 bp, Homo sapiens
ccagggccagccagg

SEQ ID NO: 2090638 - DNA, 15 bp, Homo sapiens
cagggccagccaggg

SEQ ID NO: 2090639 - DNA, 15 bp, Homo sapiens
agggccagccaggga

SEQ ID NO: 2090640 - DNA, 15 bp, Homo sapiens
gggccagccagggat

SEQ ID NO: 2090641 - DNA, 15 bp, Homo sapiens
ggccagccagggatg

SEQ ID NO: 2090642 - DNA, 15 bp, Homo sapiens
gccagccagggatgt

SEQ ID NO: 2090643 - DNA, 15 bp, Homo sapiens
ccagccagggatgtc

SEQ ID NO: 2090644 - DNA, 15 bp, Homo sapiens
cagccagggatgtca

SEQ ID NO: 2090645 - DNA, 15 bp, Homo sapiens
agccagggatgtcac

SEQ ID NO: 2090646 - DNA, 15 bp, Homo sapiens
gccagggatgtcacc

SEQ ID NO: 2090647 - DNA, 15 bp, Homo sapiens
ccagggatgtcaccg

SEQ ID NO: 2090648 - DNA, 15 bp, Homo sapiens
cagggatgtcaccgg

SEQ ID NO: 2090649 - DNA, 15 bp, Homo sapiens
agggatgtcaccggc

SEQ ID NO: 2090650 - DNA, 15 bp, Homo sapiens
gggatgtcaccggct

SEQ ID NO: 2090651 - DNA, 15 bp, Homo sapiens
ggatgtcaccggctg

SEQ ID NO: 2090652 - DNA, 15 bp, Homo sapiens
gatgtcaccggctgt

SEQ ID NO: 2090653 - DNA, 15 bp, Homo sapiens
atgtcaccggctgtc

SEQ ID NO: 2090654 - DNA, 15 bp, Homo sapiens
tgtcaccggctgtcc

SEQ ID NO: 2090655 - DNA, 15 bp, Homo sapiens
gtcaccggctgtccc

SEQ ID NO: 2090656 - DNA, 15 bp, Homo sapiens
tcaccggctgtccct

SEQ ID NO: 2090657 - DNA, 15 bp, Homo sapiens
caccggctgtccctg

SEQ ID NO: 2090658 - DNA, 15 bp, Homo sapiens
accggctgtccctga

SEQ ID NO: 2090659 - DNA, 15 bp, Homo sapiens
ccggctgtccctgag

SEQ ID NO: 2090660 - DNA, 15 bp, Homo sapiens
cggctgtccctgagt

SEQ ID NO: 2090661 - DNA, 15 bp, Homo sapiens
ggctgtccctgagtt

SEQ ID NO: 2090662 - DNA, 15 bp, Homo sapiens
gctgtccctgagttt

SEQ ID NO: 2090663 - DNA, 15 bp, Homo sapiens
ctgtccctgagtttg

SEQ ID NO: 2090664 - DNA, 15 bp, Homo sapiens
tgtccctgagtttgt

SEQ ID NO: 2090665 - DNA, 15 bp, Homo sapiens
gtccctgagtttgtg

SEQ ID NO: 2090666 - DNA, 15 bp, Homo sapiens
tccctgagtttgtgc

SEQ ID NO: 2090667 - DNA, 15 bp, Homo sapiens
ccctgagtttgtgcc

SEQ ID NO: 2090668 - DNA, 15 bp, Homo sapiens
cctgagtttgtgcct

SEQ ID NO: 2090669 - DNA, 15 bp, Homo sapiens
ctgagtttgtgcctt

SEQ ID NO: 2090670 - DNA, 15 bp, Homo sapiens
tgagtttgtgccttt

SEQ ID NO: 2090671 - DNA, 15 bp, Homo sapiens
gagtttgtgcctttt

SEQ ID NO: 2090672 - DNA, 15 bp, Homo sapiens
agtttgtgccttttg

SEQ ID NO: 2090673 - DNA, 15 bp, Homo sapiens
gtttgtgccttttgg

SEQ ID NO: 2090674 - DNA, 15 bp, Homo sapiens
tttgtgccttttggg

SEQ ID NO: 2090675 - DNA, 15 bp, Homo sapiens
ttgtgccttttggga

SEQ ID NO: 2090676 - DNA, 15 bp, Homo sapiens
tgtgccttttgggaa

SEQ ID NO: 2090677 - DNA, 15 bp, Homo sapiens
gtgccttttgggaaa

SEQ ID NO: 2090678 - DNA, 15 bp, Homo sapiens
tgccttttgggaaat

SEQ ID NO: 2090679 - DNA, 15 bp, Homo sapiens
gccttttgggaaatc

SEQ ID NO: 2090680 - DNA, 15 bp, Homo sapiens
ccttttgggaaatct

SEQ ID NO: 2090681 - DNA, 15 bp, Homo sapiens
cttttgggaaatctt

SEQ ID NO: 2090682 - DNA, 15 bp, Homo sapiens
ttttgggaaatcttt

SEQ ID NO: 2090683 - DNA, 15 bp, Homo sapiens
tttgggaaatctttg

SEQ ID NO: 2090684 - DNA, 15 bp, Homo sapiens
ttgggaaatctttgt

SEQ ID NO: 2090685 - DNA, 15 bp, Homo sapiens
tgggaaatctttgtc

SEQ ID NO: 2090686 - DNA, 15 bp, Homo sapiens
gggaaatctttgtca

SEQ ID NO: 2090687 - DNA, 15 bp, Homo sapiens
ggaaatctttgtcaa

SEQ ID NO: 2090688 - DNA, 15 bp, Homo sapiens
gaaatctttgtcaat

SEQ ID NO: 2090689 - DNA, 15 bp, Homo sapiens
aaatctttgtcaatc

SEQ ID NO: 2090690 - DNA, 15 bp, Homo sapiens
aatctttgtcaatca

SEQ ID NO: 2090691 - DNA, 15 bp, Homo sapiens
atctttgtcaatcag

SEQ ID NO: 2090692 - DNA, 15 bp, Homo sapiens
tctttgtcaatcagt

SEQ ID NO: 2090693 - DNA, 15 bp, Homo sapiens
ctttgtcaatcagtt

SEQ ID NO: 2090694 - DNA, 15 bp, Homo sapiens
tttgtcaatcagtta

SEQ ID NO: 2090695 - DNA, 15 bp, Homo sapiens
ttgtcaatcagttaa

SEQ ID NO: 2090696 - DNA, 15 bp, Homo sapiens
tgtcaatcagttaaa

SEQ ID NO: 2090697 - DNA, 15 bp, Homo sapiens
gtcaatcagttaaaa

SEQ ID NO: 2090698 - DNA, 15 bp, Homo sapiens
tcaatcagttaaaag

SEQ ID NO: 2090699 - DNA, 15 bp, Homo sapiens
caatcagttaaaaga

SEQ ID NO: 2090700 - DNA, 15 bp, Homo sapiens
aatcagttaaaagat

SEQ ID NO: 2090701 - DNA, 15 bp, Homo sapiens
atcagttaaaagatg

SEQ ID NO: 2090702 - DNA, 15 bp, Homo sapiens
tcagttaaaagatgg

SEQ ID NO: 2090703 - DNA, 15 bp, Homo sapiens
cagttaaaagatggg

SEQ ID NO: 2090704 - DNA, 15 bp, Homo sapiens
agttaaaagatgggg

SEQ ID NO: 2090705 - DNA, 15 bp, Homo sapiens
gttaaaagatggggg

SEQ ID NO: 2090706 - DNA, 15 bp, Homo sapiens
ttaaaagatgggggt

SEQ ID NO: 2090707 - DNA, 15 bp, Homo sapiens
taaaagatgggggtt

SEQ ID NO: 2090708 - DNA, 15 bp, Homo sapiens
aaaagatgggggttg

SEQ ID NO: 2090709 - DNA, 15 bp, Homo sapiens
aaagatgggggttga

SEQ ID NO: 2090710 - DNA, 15 bp, Homo sapiens
aagatgggggttgat

SEQ ID NO: 2090711 - DNA, 15 bp, Homo sapiens
agatgggggttgatg

SEQ ID NO: 2090712 - DNA, 15 bp, Homo sapiens
gatgggggttgatgg

SEQ ID NO: 2090713 - DNA, 15 bp, Homo sapiens
atgggggttgatggg

SEQ ID NO: 2090714 - DNA, 15 bp, Homo sapiens
tgggggttgatggga

SEQ ID NO: 2090715 - DNA, 15 bp, Homo sapiens
gggggttgatgggag

SEQ ID NO: 2090716 - DNA, 15 bp, Homo sapiens
ggggttgatgggaga

SEQ ID NO: 2090717 - DNA, 15 bp, Homo sapiens
gggttgatgggagat

SEQ ID NO: 2090718 - DNA, 15 bp, Homo sapiens
ggttgatgggagata

SEQ ID NO: 2090719 - DNA, 15 bp, Homo sapiens
gttgatgggagataa

SEQ ID NO: 2090720 - DNA, 15 bp, Homo sapiens
ttgatgggagataac

SEQ ID NO: 2090721 - DNA, 15 bp, Homo sapiens
tgatgggagataaca

SEQ ID NO: 2090722 - DNA, 15 bp, Homo sapiens
gatgggagataacag

SEQ ID NO: 2090723 - DNA, 15 bp, Homo sapiens
atgggagataacagt

SEQ ID NO: 2090724 - DNA, 15 bp, Homo sapiens
tgggagataacagtc

SEQ ID NO: 2090725 - DNA, 15 bp, Homo sapiens
gggagataacagtca

SEQ ID NO: 2090726 - DNA, 15 bp, Homo sapiens
ggagataacagtcaa

SEQ ID NO: 2090727 - DNA, 15 bp, Homo sapiens
gagataacagtcaat

SEQ ID NO: 2090728 - DNA, 15 bp, Homo sapiens
agataacagtcaatg

SEQ ID NO: 2090729 - DNA, 15 bp, Homo sapiens
gataacagtcaatgg

SEQ ID NO: 2090730 - DNA, 15 bp, Homo sapiens
ataacagtcaatggg

SEQ ID NO: 2090731 - DNA, 15 bp, Homo sapiens
taacagtcaatgggc

SEQ ID NO: 2090732 - DNA, 15 bp, Homo sapiens
aacagtcaatgggca

SEQ ID NO: 2090733 - DNA, 15 bp, Homo sapiens
acagtcaatgggcac

SEQ ID NO: 2090734 - DNA, 15 bp, Homo sapiens
cagtcaatgggcact

SEQ ID NO: 2090735 - DNA, 15 bp, Homo sapiens
agtcaatgggcactc

SEQ ID NO: 2090736 - DNA, 15 bp, Homo sapiens
gtcaatgggcactcg

SEQ ID NO: 2090737 - DNA, 15 bp, Homo sapiens
tcaatgggcactcgt

SEQ ID NO: 2090738 - DNA, 15 bp, Homo sapiens
caatgggcactcgtt

SEQ ID NO: 2090739 - DNA, 15 bp, Homo sapiens
aatgggcactcgttg

SEQ ID NO: 2090740 - DNA, 15 bp, Homo sapiens
atgggcactcgttgt

SEQ ID NO: 2090741 - DNA, 15 bp, Homo sapiens
tgggcactcgttgtg

SEQ ID NO: 2090742 - DNA, 15 bp, Homo sapiens
gggcactcgttgtgg

SEQ ID NO: 2090743 - DNA, 15 bp, Homo sapiens
ggcactcgttgtggc

SEQ ID NO: 2090744 - DNA, 15 bp, Homo sapiens
gcactcgttgtggcc

SEQ ID NO: 2090745 - DNA, 15 bp, Homo sapiens
cactcgttgtggccg

SEQ ID NO: 2090746 - DNA, 15 bp, Homo sapiens
actcgttgtggccgg

SEQ ID NO: 2090747 - DNA, 15 bp, Homo sapiens
ctcgttgtggccgga

SEQ ID NO: 2090748 - DNA, 15 bp, Homo sapiens
tcgttgtggccggat

SEQ ID NO: 2090749 - DNA, 15 bp, Homo sapiens
cgttgtggccggata

SEQ ID NO: 2090750 - DNA, 15 bp, Homo sapiens
gttgtggccggatac

SEQ ID NO: 2090751 - DNA, 15 bp, Homo sapiens
ttgtggccggatact

SEQ ID NO: 2090752 - DNA, 15 bp, Homo sapiens
tgtggccggatactg

SEQ ID NO: 2090753 - DNA, 15 bp, Homo sapiens
gtggccggatactgt

SEQ ID NO: 2090754 - DNA, 15 bp, Homo sapiens
tggccggatactgtt

SEQ ID NO: 2090755 - DNA, 15 bp, Homo sapiens
ggccggatactgttc

SEQ ID NO: 2090756 - DNA, 15 bp, Homo sapiens
gccggatactgttcc

SEQ ID NO: 2090757 - DNA, 15 bp, Homo sapiens
ccggatactgttcca

SEQ ID NO: 2090758 - DNA, 15 bp, Homo sapiens
cggatactgttccaa

SEQ ID NO: 2090759 - DNA, 15 bp, Homo sapiens
ggatactgttccaag

SEQ ID NO: 2090760 - DNA, 15 bp, Homo sapiens
gatactgttccaagt

SEQ ID NO: 2090761 - DNA, 15 bp, Homo sapiens
atactgttccaagtg

SEQ ID NO: 2090762 - DNA, 15 bp, Homo sapiens
tactgttccaagtgt

SEQ ID NO: 2090763 - DNA, 15 bp, Homo sapiens
actgttccaagtgtt

SEQ ID NO: 2090764 - DNA, 15 bp, Homo sapiens
ctgttccaagtgttt

SEQ ID NO: 2090765 - DNA, 15 bp, Homo sapiens
tgttccaagtgttta

SEQ ID NO: 2090766 - DNA, 15 bp, Homo sapiens
gttccaagtgtttat

SEQ ID NO: 2090767 - DNA, 15 bp, Homo sapiens
ttccaagtgtttatg

SEQ ID NO: 2090768 - DNA, 15 bp, Homo sapiens
tccaagtgtttatgt

SEQ ID NO: 2090769 - DNA, 15 bp, Homo sapiens
ccaagtgtttatgtg

SEQ ID NO: 2090770 - DNA, 15 bp, Homo sapiens
caagtgtttatgtgc

SEQ ID NO: 2090771 - DNA, 15 bp, Homo sapiens
aagtgtttatgtgca

SEQ ID NO: 2090772 - DNA, 15 bp, Homo sapiens
agtgtttatgtgcat

SEQ ID NO: 2090773 - DNA, 15 bp, Homo sapiens
gtgtttatgtgcatt

SEQ ID NO: 2090774 - DNA, 15 bp, Homo sapiens
tgtttatgtgcatta

SEQ ID NO: 2090775 - DNA, 15 bp, Homo sapiens
gtttatgtgcattat

SEQ ID NO: 2090776 - DNA, 15 bp, Homo sapiens
tttatgtgcattatt

SEQ ID NO: 2090777 - DNA, 15 bp, Homo sapiens
ttatgtgcattattc

SEQ ID NO: 2090778 - DNA, 15 bp, Homo sapiens
tatgtgcattattca

SEQ ID NO: 2090779 - DNA, 15 bp, Homo sapiens
atgtgcattattcat

SEQ ID NO: 2090780 - DNA, 15 bp, Homo sapiens
tgtgcattattcatt

SEQ ID NO: 2090781 - DNA, 15 bp, Homo sapiens
gtgcattattcattt

SEQ ID NO: 2090782 - DNA, 15 bp, Homo sapiens
tgcattattcatttt

SEQ ID NO: 2090783 - DNA, 15 bp, Homo sapiens
gcattattcatttta

SEQ ID NO: 2090784 - DNA, 15 bp, Homo sapiens
cattattcattttag

SEQ ID NO: 2090785 - DNA, 15 bp, Homo sapiens
attattcattttagt

SEQ ID NO: 2090786 - DNA, 15 bp, Homo sapiens
ttattcattttagta

SEQ ID NO: 2090787 - DNA, 15 bp, Homo sapiens
tattcattttagtat

SEQ ID NO: 2090788 - DNA, 15 bp, Homo sapiens
attcattttagtatc

SEQ ID NO: 2090789 - DNA, 15 bp, Homo sapiens
ttcattttagtatct

SEQ ID NO: 2090790 - DNA, 15 bp, Homo sapiens
tcattttagtatcta

SEQ ID NO: 2090791 - DNA, 15 bp, Homo sapiens
cattttagtatctaa

SEQ ID NO: 2090792 - DNA, 15 bp, Homo sapiens
attttagtatctaaa

SEQ ID NO: 2090793 - DNA, 15 bp, Homo sapiens
ttttagtatctaaaa

SEQ ID NO: 2090794 - DNA, 15 bp, Homo sapiens
tttagtatctaaaat

SEQ ID NO: 2090795 - DNA, 15 bp, Homo sapiens
ttagtatctaaaata

SEQ ID NO: 2090796 - DNA, 15 bp, Homo sapiens
tagtatctaaaatag

SEQ ID NO: 2090797 - DNA, 15 bp, Homo sapiens
agtatctaaaatagg

SEQ ID NO: 2090798 - DNA, 15 bp, Homo sapiens
gtatctaaaataggt

SEQ ID NO: 2090799 - DNA, 15 bp, Homo sapiens
tatctaaaataggta

SEQ ID NO: 2090800 - DNA, 15 bp, Homo sapiens
atctaaaataggtac

SEQ ID NO: 2090801 - DNA, 15 bp, Homo sapiens
tctaaaataggtact

SEQ ID NO: 2090802 - DNA, 15 bp, Homo sapiens
ctaaaataggtacta

SEQ ID NO: 2090803 - DNA, 15 bp, Homo sapiens
taaaataggtactat

SEQ ID NO: 2090804 - DNA, 15 bp, Homo sapiens
aaaataggtactatt

SEQ ID NO: 2090805 - DNA, 15 bp, Homo sapiens
aaataggtactattg

SEQ ID NO: 2090806 - DNA, 15 bp, Homo sapiens
aataggtactattgt

SEQ ID NO: 2090807 - DNA, 15 bp, Homo sapiens
ataggtactattgtg

SEQ ID NO: 2090808 - DNA, 15 bp, Homo sapiens
taggtactattgtgt

SEQ ID NO: 2090809 - DNA, 15 bp, Homo sapiens
aggtactattgtgtc

SEQ ID NO: 2090810 - DNA, 15 bp, Homo sapiens
ggtactattgtgtct

SEQ ID NO: 2090811 - DNA, 15 bp, Homo sapiens
gtactattgtgtctt

SEQ ID NO: 2090812 - DNA, 15 bp, Homo sapiens
tactattgtgtctta

SEQ ID NO: 2090813 - DNA, 15 bp, Homo sapiens
actattgtgtcttat

SEQ ID NO: 2090814 - DNA, 15 bp, Homo sapiens
ctattgtgtcttatt

SEQ ID NO: 2090815 - DNA, 15 bp, Homo sapiens
tattgtgtcttattt

SEQ ID NO: 2090816 - DNA, 15 bp, Homo sapiens
attgtgtcttatttt

SEQ ID NO: 2090817 - DNA, 15 bp, Homo sapiens
ttgtgtcttatttta

SEQ ID NO: 2090818 - DNA, 15 bp, Homo sapiens
tgtgtcttattttat

SEQ ID NO: 2090819 - DNA, 15 bp, Homo sapiens
gtgtcttattttatt

SEQ ID NO: 2090820 - DNA, 15 bp, Homo sapiens
tgtcttattttattg

SEQ ID NO: 2090821 - DNA, 15 bp, Homo sapiens
gtcttattttattga

SEQ ID NO: 2090822 - DNA, 15 bp, Homo sapiens
tcttattttattgag

SEQ ID NO: 2090823 - DNA, 15 bp, Homo sapiens
cttattttattgagg

SEQ ID NO: 2090824 - DNA, 15 bp, Homo sapiens
ttattttattgaggg

SEQ ID NO: 2090825 - DNA, 15 bp, Homo sapiens
tattttattgaggga

SEQ ID NO: 2090826 - DNA, 15 bp, Homo sapiens
attttattgagggaa

SEQ ID NO: 2090827 - DNA, 15 bp, Homo sapiens
ttttattgagggaaa

SEQ ID NO: 2090828 - DNA, 15 bp, Homo sapiens
tttattgagggaaat

SEQ ID NO: 2090829 - DNA, 15 bp, Homo sapiens
ttattgagggaaatg

SEQ ID NO: 2090830 - DNA, 15 bp, Homo sapiens
tattgagggaaatgg

SEQ ID NO: 2090831 - DNA, 15 bp, Homo sapiens
attgagggaaatgga

SEQ ID NO: 2090832 - DNA, 15 bp, Homo sapiens
ttgagggaaatggat

SEQ ID NO: 2090833 - DNA, 15 bp, Homo sapiens
tgagggaaatggatg

SEQ ID NO: 2090834 - DNA, 15 bp, Homo sapiens
gagggaaatggatgc

SEQ ID NO: 2090835 - DNA, 15 bp, Homo sapiens
agggaaatggatgca

SEQ ID NO: 2090836 - DNA, 15 bp, Homo sapiens
gggaaatggatgcac

SEQ ID NO: 2090837 - DNA, 15 bp, Homo sapiens
ggaaatggatgcaca

SEQ ID NO: 2090838 - DNA, 15 bp, Homo sapiens
gaaatggatgcacag

SEQ ID NO: 2090839 - DNA, 15 bp, Homo sapiens
aaatggatgcacaga

SEQ ID NO: 2090840 - DNA, 15 bp, Homo sapiens
aatggatgcacagag

SEQ ID NO: 2090841 - DNA, 15 bp, Homo sapiens
atggatgcacagagg

SEQ ID NO: 2090842 - DNA, 15 bp, Homo sapiens
tggatgcacagaggc

SEQ ID NO: 2090843 - DNA, 15 bp, Homo sapiens
ggatgcacagaggcg

SEQ ID NO: 2090844 - DNA, 15 bp, Homo sapiens
gatgcacagaggcgg

SEQ ID NO: 2090845 - DNA, 15 bp, Homo sapiens
atgcacagaggcgga

SEQ ID NO: 2090846 - DNA, 15 bp, Homo sapiens
tgcacagaggcggaa

SEQ ID NO: 2090847 - DNA, 15 bp, Homo sapiens
gcacagaggcggaaa

SEQ ID NO: 2090848 - DNA, 15 bp, Homo sapiens
cacagaggcggaaag

SEQ ID NO: 2090849 - DNA, 15 bp, Homo sapiens
acagaggcggaaagt

SEQ ID NO: 2090850 - DNA, 15 bp, Homo sapiens
cagaggcggaaagta

SEQ ID NO: 2090851 - DNA, 15 bp, Homo sapiens
agaggcggaaagtaa

SEQ ID NO: 2090852 - DNA, 15 bp, Homo sapiens
gaggcggaaagtaac

SEQ ID NO: 2090853 - DNA, 15 bp, Homo sapiens
aggcggaaagtaact

SEQ ID NO: 2090854 - DNA, 15 bp, Homo sapiens
ggcggaaagtaactt

SEQ ID NO: 2090855 - DNA, 15 bp, Homo sapiens
gcggaaagtaacttg

SEQ ID NO: 2090856 - DNA, 15 bp, Homo sapiens
cggaaagtaacttgc

SEQ ID NO: 2090857 - DNA, 15 bp, Homo sapiens
ggaaagtaacttgcc

SEQ ID NO: 2090858 - DNA, 15 bp, Homo sapiens
gaaagtaacttgccc

SEQ ID NO: 2090859 - DNA, 15 bp, Homo sapiens
aaagtaacttgcccc

SEQ ID NO: 2090860 - DNA, 15 bp, Homo sapiens
aagtaacttgcccca

SEQ ID NO: 2090861 - DNA, 15 bp, Homo sapiens
agtaacttgccccat

SEQ ID NO: 2090862 - DNA, 15 bp, Homo sapiens
gtaacttgccccatg

SEQ ID NO: 2090863 - DNA, 15 bp, Homo sapiens
taacttgccccatgt

SEQ ID NO: 2090864 - DNA, 15 bp, Homo sapiens
aacttgccccatgtc

SEQ ID NO: 2090865 - DNA, 15 bp, Homo sapiens
acttgccccatgtca

SEQ ID NO: 2090866 - DNA, 15 bp, Homo sapiens
cttgccccatgtcac

SEQ ID NO: 2090867 - DNA, 15 bp, Homo sapiens
ttgccccatgtcaca

SEQ ID NO: 2090868 - DNA, 15 bp, Homo sapiens
tgccccatgtcacat

SEQ ID NO: 2090869 - DNA, 15 bp, Homo sapiens
gccccatgtcacata

SEQ ID NO: 2090870 - DNA, 15 bp, Homo sapiens
ccccatgtcacatag

SEQ ID NO: 2090871 - DNA, 15 bp, Homo sapiens
cccatgtcacatagc

SEQ ID NO: 2090872 - DNA, 15 bp, Homo sapiens
ccatgtcacatagct

SEQ ID NO: 2090873 - DNA, 15 bp, Homo sapiens
catgtcacatagctc

SEQ ID NO: 2090874 - DNA, 15 bp, Homo sapiens
atgtcacatagctcc

SEQ ID NO: 2090875 - DNA, 15 bp, Homo sapiens
tgtcacatagctcca

SEQ ID NO: 2090876 - DNA, 15 bp, Homo sapiens
gtcacatagctccaa

SEQ ID NO: 2090877 - DNA, 15 bp, Homo sapiens
tcacatagctccaag

SEQ ID NO: 2090878 - DNA, 15 bp, Homo sapiens
cacatagctccaagc

SEQ ID NO: 2090879 - DNA, 15 bp, Homo sapiens
acatagctccaagcg

SEQ ID NO: 2090880 - DNA, 15 bp, Homo sapiens
catagctccaagcgg

SEQ ID NO: 2090881 - DNA, 15 bp, Homo sapiens
atagctccaagcggt

SEQ ID NO: 2090882 - DNA, 15 bp, Homo sapiens
tagctccaagcggtt

SEQ ID NO: 2090883 - DNA, 15 bp, Homo sapiens
agctccaagcggttg

SEQ ID NO: 2090884 - DNA, 15 bp, Homo sapiens
gctccaagcggttga

SEQ ID NO: 2090885 - DNA, 15 bp, Homo sapiens
ctccaagcggttgaa

SEQ ID NO: 2090886 - DNA, 15 bp, Homo sapiens
tccaagcggttgaat

SEQ ID NO: 2090887 - DNA, 15 bp, Homo sapiens
ccaagcggttgaatc

SEQ ID NO: 2090888 - DNA, 15 bp, Homo sapiens
caagcggttgaatca

SEQ ID NO: 2090889 - DNA, 15 bp, Homo sapiens
aagcggttgaatcag

SEQ ID NO: 2090890 - DNA, 15 bp, Homo sapiens
agcggttgaatcagg

SEQ ID NO: 2090891 - DNA, 15 bp, Homo sapiens
gcggttgaatcagga

SEQ ID NO: 2090892 - DNA, 15 bp, Homo sapiens
cggttgaatcaggat

SEQ ID NO: 2090893 - DNA, 15 bp, Homo sapiens
ggttgaatcaggatt

SEQ ID NO: 2090894 - DNA, 15 bp, Homo sapiens
gttgaatcaggattt

SEQ ID NO: 2090895 - DNA, 15 bp, Homo sapiens
ttgaatcaggatttc

SEQ ID NO: 2090896 - DNA, 15 bp, Homo sapiens
tgaatcaggatttca

SEQ ID NO: 2090897 - DNA, 15 bp, Homo sapiens
gaatcaggatttcaa

SEQ ID NO: 2090898 - DNA, 15 bp, Homo sapiens
aatcaggatttcaag

SEQ ID NO: 2090899 - DNA, 15 bp, Homo sapiens
atcaggatttcaagt

SEQ ID NO: 2090900 - DNA, 15 bp, Homo sapiens
tcaggatttcaagtc

SEQ ID NO: 2090901 - DNA, 15 bp, Homo sapiens
caggatttcaagtct

SEQ ID NO: 2090902 - DNA, 15 bp, Homo sapiens
aggatttcaagtctg

SEQ ID NO: 2090903 - DNA, 15 bp, Homo sapiens
ggatttcaagtctgg

SEQ ID NO: 2090904 - DNA, 15 bp, Homo sapiens
gatttcaagtctggg

SEQ ID NO: 2090905 - DNA, 15 bp, Homo sapiens
atttcaagtctgggg

SEQ ID NO: 2090906 - DNA, 15 bp, Homo sapiens
tttcaagtctggggg

SEQ ID NO: 2090907 - DNA, 15 bp, Homo sapiens
ttcaagtctgggggc

SEQ ID NO: 2090908 - DNA, 15 bp, Homo sapiens
agagaaacaaaaaca

SEQ ID NO: 2090909 - DNA, 15 bp, Homo sapiens
gagaaacaaaaacaa

SEQ ID NO: 2090910 - DNA, 15 bp, Homo sapiens
agaaacaaaaacaac

SEQ ID NO: 2090911 - DNA, 15 bp, Homo sapiens
gaaacaaaaacaaca

SEQ ID NO: 2090912 - DNA, 15 bp, Homo sapiens
aaacaaaaacaacac

SEQ ID NO: 2090913 - DNA, 15 bp, Homo sapiens
aacaaaaacaacaca

SEQ ID NO: 2090914 - DNA, 15 bp, Homo sapiens
acaaaaacaacacaa

SEQ ID NO: 2090915 - DNA, 15 bp, Homo sapiens
caaaaacaacacaaa

SEQ ID NO: 2090916 - DNA, 15 bp, Homo sapiens
aaaaacaacacaaaa

SEQ ID NO: 2090917 - DNA, 15 bp, Homo sapiens
aaaacaacacaaaaa

SEQ ID NO: 2090918 - DNA, 15 bp, Homo sapiens
aaacaacacaaaaag

SEQ ID NO: 2090919 - DNA, 15 bp, Homo sapiens
aacaacacaaaaagc

SEQ ID NO: 2090920 - DNA, 15 bp, Homo sapiens
acaacacaaaaagct

SEQ ID NO: 2090921 - DNA, 15 bp, Homo sapiens
caacacaaaaagctg

SEQ ID NO: 2090922 - DNA, 15 bp, Homo sapiens
aacacaaaaagctgc

SEQ ID NO: 2090923 - DNA, 15 bp, Homo sapiens
acacaaaaagctgcg

SEQ ID NO: 2090924 - DNA, 15 bp, Homo sapiens
cacaaaaagctgcgt

SEQ ID NO: 2090925 - DNA, 15 bp, Homo sapiens
acaaaaagctgcgtt

SEQ ID NO: 2090926 - DNA, 15 bp, Homo sapiens
caaaaagctgcgttc

SEQ ID NO: 2090927 - DNA, 15 bp, Homo sapiens
aaaaagctgcgttct

SEQ ID NO: 2090928 - DNA, 15 bp, Homo sapiens
aaaagctgcgttctt

SEQ ID NO: 2090929 - DNA, 15 bp, Homo sapiens
aaagctgcgttcttg

SEQ ID NO: 2090930 - DNA, 15 bp, Homo sapiens
aagctgcgttcttga

SEQ ID NO: 2090931 - DNA, 15 bp, Homo sapiens
agctgcgttcttgac

SEQ ID NO: 2090932 - DNA, 15 bp, Homo sapiens
gctgcgttcttgact

SEQ ID NO: 2090933 - DNA, 15 bp, Homo sapiens
ctgcgttcttgactt

SEQ ID NO: 2090934 - DNA, 15 bp, Homo sapiens
tgcgttcttgacttt

SEQ ID NO: 2090935 - DNA, 15 bp, Homo sapiens
gcgttcttgactttg

SEQ ID NO: 2090936 - DNA, 15 bp, Homo sapiens
cgttcttgactttga

SEQ ID NO: 2090937 - DNA, 15 bp, Homo sapiens
gttcttgactttgaa

SEQ ID NO: 2090938 - DNA, 15 bp, Homo sapiens
ttcttgactttgaag

SEQ ID NO: 2090939 - DNA, 15 bp, Homo sapiens
tcttgactttgaagc

SEQ ID NO: 2090940 - DNA, 15 bp, Homo sapiens
cttgactttgaagcc

SEQ ID NO: 2090941 - DNA, 15 bp, Homo sapiens
ttgactttgaagcct

SEQ ID NO: 2090942 - DNA, 15 bp, Homo sapiens
tgactttgaagcctt

SEQ ID NO: 2090943 - DNA, 15 bp, Homo sapiens
gactttgaagcctta

SEQ ID NO: 2090944 - DNA, 15 bp, Homo sapiens
actttgaagccttaa

SEQ ID NO: 2090945 - DNA, 15 bp, Homo sapiens
ctttgaagccttaaa

SEQ ID NO: 2090946 - DNA, 15 bp, Homo sapiens
tttgaagccttaaag

SEQ ID NO: 2090947 - DNA, 15 bp, Homo sapiens
ttgaagccttaaagg

SEQ ID NO: 2090948 - DNA, 15 bp, Homo sapiens
tgaagccttaaaggg

SEQ ID NO: 2090949 - DNA, 15 bp, Homo sapiens
gaagccttaaagggc

SEQ ID NO: 2090950 - DNA, 15 bp, Homo sapiens
aagccttaaagggcc

SEQ ID NO: 2090951 - DNA, 15 bp, Homo sapiens
agccttaaagggccc

SEQ ID NO: 2090952 - DNA, 15 bp, Homo sapiens
gccttaaagggccca

SEQ ID NO: 2090953 - DNA, 15 bp, Homo sapiens
ccttaaagggcccag

SEQ ID NO: 2090954 - DNA, 15 bp, Homo sapiens
cttaaagggcccagg

SEQ ID NO: 2090955 - DNA, 15 bp, Homo sapiens
ttaaagggcccaggg

SEQ ID NO: 2090956 - DNA, 15 bp, Homo sapiens
taaagggcccagggg

SEQ ID NO: 2090957 - DNA, 15 bp, Homo sapiens
aaagggcccaggggc

SEQ ID NO: 2090958 - DNA, 15 bp, Homo sapiens
aagggcccaggggct

SEQ ID NO: 2090959 - DNA, 15 bp, Homo sapiens
agggcccaggggctg

SEQ ID NO: 2090960 - DNA, 15 bp, Homo sapiens
gggcccaggggctgg

SEQ ID NO: 2090961 - DNA, 15 bp, Homo sapiens
ggcccaggggctggc

SEQ ID NO: 2090962 - DNA, 15 bp, Homo sapiens
gcccaggggctggct

SEQ ID NO: 2090963 - DNA, 15 bp, Homo sapiens
ccaggggctggctcc

SEQ ID NO: 2090964 - DNA, 15 bp, Homo sapiens
caggggctggctccc

SEQ ID NO: 2090965 - DNA, 15 bp, Homo sapiens
aggggctggctccct

SEQ ID NO: 2090966 - DNA, 15 bp, Homo sapiens
ggggctggctccctg

SEQ ID NO: 2090967 - DNA, 15 bp, Homo sapiens
gggctggctccctgt

SEQ ID NO: 2090968 - DNA, 15 bp, Homo sapiens
ggctggctccctgtg

SEQ ID NO: 2090969 - DNA, 15 bp, Homo sapiens
gctggctccctgtgg

SEQ ID NO: 2090970 - DNA, 15 bp, Homo sapiens
ctggctccctgtggg

SEQ ID NO: 2090971 - DNA, 15 bp, Homo sapiens
tggctccctgtgggt

SEQ ID NO: 2090972 - DNA, 15 bp, Homo sapiens
ggctccctgtgggtg

SEQ ID NO: 2090973 - DNA, 15 bp, Homo sapiens
gctccctgtgggtgt

SEQ ID NO: 2090974 - DNA, 15 bp, Homo sapiens
ctccctgtgggtgtt

SEQ ID NO: 2090975 - DNA, 15 bp, Homo sapiens
tccctgtgggtgttg

SEQ ID NO: 2090976 - DNA, 15 bp, Homo sapiens
ccctgtgggtgttgg

SEQ ID NO: 2090977 - DNA, 15 bp, Homo sapiens
cctgtgggtgttggg

SEQ ID NO: 2090978 - DNA, 15 bp, Homo sapiens
ctgtgggtgttgggg

SEQ ID NO: 2090979 - DNA, 15 bp, Homo sapiens
tgtgggtgttggggg

SEQ ID NO: 2090980 - DNA, 15 bp, Homo sapiens
gtgggtgttgggggc

SEQ ID NO: 2090981 - DNA, 15 bp, Homo sapiens
tgggtgttgggggcg

SEQ ID NO: 2090982 - DNA, 15 bp, Homo sapiens
gggtgttgggggcga

SEQ ID NO: 2090983 - DNA, 15 bp, Homo sapiens
ggtgttgggggcgat

SEQ ID NO: 2090984 - DNA, 15 bp, Homo sapiens
gtgttgggggcgatt

SEQ ID NO: 2090985 - DNA, 15 bp, Homo sapiens
tgttgggggcgattt

SEQ ID NO: 2090986 - DNA, 15 bp, Homo sapiens
gttgggggcgatttt

SEQ ID NO: 2090987 - DNA, 15 bp, Homo sapiens
ttgggggcgattttc

SEQ ID NO: 2090988 - DNA, 15 bp, Homo sapiens
tgggggcgattttcc

SEQ ID NO: 2090989 - DNA, 15 bp, Homo sapiens
gggggcgattttcct

SEQ ID NO: 2090990 - DNA, 15 bp, Homo sapiens
ggggcgattttcctc

SEQ ID NO: 2090991 - DNA, 15 bp, Homo sapiens
gggcgattttcctcc

SEQ ID NO: 2090992 - DNA, 15 bp, Homo sapiens
ggcgattttcctccc

SEQ ID NO: 2090993 - DNA, 15 bp, Homo sapiens
gcgattttcctccca

SEQ ID NO: 2090994 - DNA, 15 bp, Homo sapiens
cgattttcctcccaa

SEQ ID NO: 2090995 - DNA, 15 bp, Homo sapiens
gattttcctcccaaa

SEQ ID NO: 2090996 - DNA, 15 bp, Homo sapiens
attttcctcccaaag

SEQ ID NO: 2090997 - DNA, 15 bp, Homo sapiens
ttttcctcccaaagc

SEQ ID NO: 2090998 - DNA, 15 bp, Homo sapiens
tttcctcccaaagcc

SEQ ID NO: 2090999 - DNA, 15 bp, Homo sapiens
ttcctcccaaagcct

SEQ ID NO: 2091000 - DNA, 15 bp, Homo sapiens
tcctcccaaagcctg

SEQ ID NO: 2091001 - DNA, 15 bp, Homo sapiens
cctcccaaagcctgc

SEQ ID NO: 2091002 - DNA, 15 bp, Homo sapiens
ctcccaaagcctgcg

SEQ ID NO: 2091003 - DNA, 15 bp, Homo sapiens
tcccaaagcctgcgt

SEQ ID NO: 2091004 - DNA, 15 bp, Homo sapiens
cccaaagcctgcgtg

SEQ ID NO: 2091005 - DNA, 15 bp, Homo sapiens
ccaaagcctgcgtga

SEQ ID NO: 2091006 - DNA, 15 bp, Homo sapiens
caaagcctgcgtgag

SEQ ID NO: 2091007 - DNA, 15 bp, Homo sapiens
aaagcctgcgtgaga

SEQ ID NO: 2091008 - DNA, 15 bp, Homo sapiens
aagcctgcgtgagat

SEQ ID NO: 2091009 - DNA, 15 bp, Homo sapiens
agcctgcgtgagata

SEQ ID NO: 2091010 - DNA, 15 bp, Homo sapiens
gcctgcgtgagatat

SEQ ID NO: 2091011 - DNA, 15 bp, Homo sapiens
cctgcgtgagatatg

SEQ ID NO: 2091012 - DNA, 15 bp, Homo sapiens
ctgcgtgagatatgg

SEQ ID NO: 2091013 - DNA, 15 bp, Homo sapiens
tgcgtgagatatgga

SEQ ID NO: 2091014 - DNA, 15 bp, Homo sapiens
gcgtgagatatggag

SEQ ID NO: 2091015 - DNA, 15 bp, Homo sapiens
cgtgagatatggaga

SEQ ID NO: 2091016 - DNA, 15 bp, Homo sapiens
gtgagatatggagac

SEQ ID NO: 2091017 - DNA, 15 bp, Homo sapiens
tgagatatggagaca

SEQ ID NO: 2091018 - DNA, 15 bp, Homo sapiens
gagatatggagacac

SEQ ID NO: 2091019 - DNA, 15 bp, Homo sapiens
agatatggagacact

SEQ ID NO: 2091020 - DNA, 15 bp, Homo sapiens
gatatggagacactc

SEQ ID NO: 2091021 - DNA, 15 bp, Homo sapiens
atatggagacactcc

SEQ ID NO: 2091022 - DNA, 15 bp, Homo sapiens
tatggagacactccg

SEQ ID NO: 2091023 - DNA, 15 bp, Homo sapiens
atggagacactccgc

SEQ ID NO: 2091024 - DNA, 15 bp, Homo sapiens
tggagacactccgcc

SEQ ID NO: 2091025 - DNA, 15 bp, Homo sapiens
ggagacactccgcct

SEQ ID NO: 2091026 - DNA, 15 bp, Homo sapiens
gagacactccgcctg

SEQ ID NO: 2091027 - DNA, 15 bp, Homo sapiens
agacactccgcctgc

SEQ ID NO: 2091028 - DNA, 15 bp, Homo sapiens
gacactccgcctgct

SEQ ID NO: 2091029 - DNA, 15 bp, Homo sapiens
acactccgcctgctc

SEQ ID NO: 2091030 - DNA, 15 bp, Homo sapiens
cactccgcctgctca

SEQ ID NO: 2091031 - DNA, 15 bp, Homo sapiens
actccgcctgctcag

SEQ ID NO: 2091032 - DNA, 15 bp, Homo sapiens
ctccgcctgctcaga

SEQ ID NO: 2091033 - DNA, 15 bp, Homo sapiens
tccgcctgctcagaa

SEQ ID NO: 2091034 - DNA, 15 bp, Homo sapiens
ccgcctgctcagaag

SEQ ID NO: 2091035 - DNA, 15 bp, Homo sapiens
cgcctgctcagaagc

SEQ ID NO: 2091036 - DNA, 15 bp, Homo sapiens
gcctgctcagaagct

SEQ ID NO: 2091037 - DNA, 15 bp, Homo sapiens
cctgctcagaagctc

SEQ ID NO: 2091038 - DNA, 15 bp, Homo sapiens
ctgctcagaagctcc

SEQ ID NO: 2091039 - DNA, 15 bp, Homo sapiens
tgctcagaagctccc

SEQ ID NO: 2091040 - DNA, 15 bp, Homo sapiens
gctcagaagctcccc

SEQ ID NO: 2091041 - DNA, 15 bp, Homo sapiens
ctcagaagctcccca

SEQ ID NO: 2091042 - DNA, 15 bp, Homo sapiens
tcagaagctccccag

SEQ ID NO: 2091043 - DNA, 15 bp, Homo sapiens
cagaagctccccagg

SEQ ID NO: 2091044 - DNA, 15 bp, Homo sapiens
agaagctccccaggt

SEQ ID NO: 2091045 - DNA, 15 bp, Homo sapiens
gaagctccccaggtc

SEQ ID NO: 2091046 - DNA, 15 bp, Homo sapiens
aagctccccaggtcc

SEQ ID NO: 2091047 - DNA, 15 bp, Homo sapiens
agctccccaggtccc

SEQ ID NO: 2091048 - DNA, 15 bp, Homo sapiens
gctccccaggtcccg

SEQ ID NO: 2091049 - DNA, 15 bp, Homo sapiens
ctccccaggtcccgg

SEQ ID NO: 2091050 - DNA, 15 bp, Homo sapiens
tccccaggtcccggg

SEQ ID NO: 2091051 - DNA, 15 bp, Homo sapiens
ccccaggtcccgggt

SEQ ID NO: 2091052 - DNA, 15 bp, Homo sapiens
cccaggtcccgggtt

SEQ ID NO: 2091053 - DNA, 15 bp, Homo sapiens
ccaggtcccgggttc

SEQ ID NO: 2091054 - DNA, 15 bp, Homo sapiens
caggtcccgggttcc

SEQ ID NO: 2091055 - DNA, 15 bp, Homo sapiens
aggtcccgggttcca

SEQ ID NO: 2091056 - DNA, 15 bp, Homo sapiens
ggtcccgggttccag

SEQ ID NO: 2091057 - DNA, 15 bp, Homo sapiens
gtcccgggttccagg

SEQ ID NO: 2091058 - DNA, 15 bp, Homo sapiens
tcccgggttccagga

SEQ ID NO: 2091059 - DNA, 15 bp, Homo sapiens
cccgggttccaggaa

SEQ ID NO: 2091060 - DNA, 15 bp, Homo sapiens
ccgggttccaggaag

SEQ ID NO: 2091061 - DNA, 15 bp, Homo sapiens
cgggttccaggaagc

SEQ ID NO: 2091062 - DNA, 15 bp, Homo sapiens
gggttccaggaagcc

SEQ ID NO: 2091063 - DNA, 15 bp, Homo sapiens
ggttccaggaagcct

SEQ ID NO: 2091064 - DNA, 15 bp, Homo sapiens
gttccaggaagcctc

SEQ ID NO: 2091065 - DNA, 15 bp, Homo sapiens
ttccaggaagcctca

SEQ ID NO: 2091066 - DNA, 15 bp, Homo sapiens
tccaggaagcctcat

SEQ ID NO: 2091067 - DNA, 15 bp, Homo sapiens
ccaggaagcctcatg

SEQ ID NO: 2091068 - DNA, 15 bp, Homo sapiens
caggaagcctcatgg

SEQ ID NO: 2091069 - DNA, 15 bp, Homo sapiens
aggaagcctcatggc

SEQ ID NO: 2091070 - DNA, 15 bp, Homo sapiens
ggaagcctcatggcc

SEQ ID NO: 2091071 - DNA, 15 bp, Homo sapiens
gaagcctcatggccc

SEQ ID NO: 2091072 - DNA, 15 bp, Homo sapiens
aagcctcatggccca

SEQ ID NO: 2091073 - DNA, 15 bp, Homo sapiens
agcctcatggcccaa

SEQ ID NO: 2091074 - DNA, 15 bp, Homo sapiens
gcctcatggcccaag

SEQ ID NO: 2091075 - DNA, 15 bp, Homo sapiens
cctcatggcccaagg

SEQ ID NO: 2091076 - DNA, 15 bp, Homo sapiens
ctcatggcccaaggc

SEQ ID NO: 2091077 - DNA, 15 bp, Homo sapiens
tcatggcccaaggcc

SEQ ID NO: 2091078 - DNA, 15 bp, Homo sapiens
catggcccaaggcct

SEQ ID NO: 2091079 - DNA, 15 bp, Homo sapiens
atggcccaaggcctg

SEQ ID NO: 2091080 - DNA, 15 bp, Homo sapiens
tggcccaaggcctgg

SEQ ID NO: 2091081 - DNA, 15 bp, Homo sapiens
ggcccaaggcctggc

SEQ ID NO: 2091082 - DNA, 15 bp, Homo sapiens
gcccaaggcctggcc

SEQ ID NO: 2091083 - DNA, 15 bp, Homo sapiens
cccaaggcctggccg

SEQ ID NO: 2091084 - DNA, 15 bp, Homo sapiens
ccaaggcctggccgt

SEQ ID NO: 2091085 - DNA, 15 bp, Homo sapiens
caaggcctggccgtc

SEQ ID NO: 2091086 - DNA, 15 bp, Homo sapiens
aaggcctggccgtct

SEQ ID NO: 2091087 - DNA, 15 bp, Homo sapiens
aggcctggccgtctt

SEQ ID NO: 2091088 - DNA, 15 bp, Homo sapiens
ggcctggccgtctta

SEQ ID NO: 2091089 - DNA, 15 bp, Homo sapiens
gcctggccgtcttaa

SEQ ID NO: 2091090 - DNA, 15 bp, Homo sapiens
cctggccgtcttaat

SEQ ID NO: 2091091 - DNA, 15 bp, Homo sapiens
ctggccgtcttaatt

SEQ ID NO: 2091092 - DNA, 15 bp, Homo sapiens
tggccgtcttaattt

SEQ ID NO: 2091093 - DNA, 15 bp, Homo sapiens
ggccgtcttaatttt

SEQ ID NO: 2091094 - DNA, 15 bp, Homo sapiens
gccgtcttaattttc

SEQ ID NO: 2091095 - DNA, 15 bp, Homo sapiens
ccgtcttaattttct

SEQ ID NO: 2091096 - DNA, 15 bp, Homo sapiens
cgtcttaattttctt

SEQ ID NO: 2091097 - DNA, 15 bp, Homo sapiens
gtcttaattttcttg

SEQ ID NO: 2091098 - DNA, 15 bp, Homo sapiens
tcttaattttcttgt

SEQ ID NO: 2091099 - DNA, 15 bp, Homo sapiens
cttaattttcttgtt

SEQ ID NO: 2091100 - DNA, 15 bp, Homo sapiens
ttaattttcttgttt

SEQ ID NO: 2091101 - DNA, 15 bp, Homo sapiens
taattttcttgtttt

SEQ ID NO: 2091102 - DNA, 15 bp, Homo sapiens
aattttcttgttttc

SEQ ID NO: 2091103 - DNA, 15 bp, Homo sapiens
attttcttgttttct

SEQ ID NO: 2091104 - DNA, 15 bp, Homo sapiens
ttttcttgttttctt

SEQ ID NO: 2091105 - DNA, 15 bp, Homo sapiens
tttcttgttttcttt

SEQ ID NO: 2091106 - DNA, 15 bp, Homo sapiens
ttcttgttttctttc

SEQ ID NO: 2091107 - DNA, 15 bp, Homo sapiens
tcttgttttctttcc

SEQ ID NO: 2091108 - DNA, 15 bp, Homo sapiens
cttgttttctttccc

SEQ ID NO: 2091109 - DNA, 15 bp, Homo sapiens
ttgttttctttccct

SEQ ID NO: 2091110 - DNA, 15 bp, Homo sapiens
tgttttctttccctc

SEQ ID NO: 2091111 - DNA, 15 bp, Homo sapiens
gttttctttccctcc

SEQ ID NO: 2091112 - DNA, 15 bp, Homo sapiens
ttttctttccctcca

SEQ ID NO: 2091113 - DNA, 15 bp, Homo sapiens
tttctttccctccac

SEQ ID NO: 2091114 - DNA, 15 bp, Homo sapiens
ttctttccctccact

SEQ ID NO: 2091115 - DNA, 15 bp, Homo sapiens
tctttccctccactc

SEQ ID NO: 2091116 - DNA, 15 bp, Homo sapiens
ctttccctccactcc

SEQ ID NO: 2091117 - DNA, 15 bp, Homo sapiens
tttccctccactcca

SEQ ID NO: 2091118 - DNA, 15 bp, Homo sapiens
ttccctccactccac

SEQ ID NO: 2091119 - DNA, 15 bp, Homo sapiens
tccctccactccact

SEQ ID NO: 2091120 - DNA, 15 bp, Homo sapiens
ccctccactccactg

SEQ ID NO: 2091121 - DNA, 15 bp, Homo sapiens
cctccactccactgt

SEQ ID NO: 2091122 - DNA, 15 bp, Homo sapiens
ctccactccactgtt

SEQ ID NO: 2091123 - DNA, 15 bp, Homo sapiens
tccactccactgttt

SEQ ID NO: 2091124 - DNA, 15 bp, Homo sapiens
ccactccactgtttc

SEQ ID NO: 2091125 - DNA, 15 bp, Homo sapiens
cactccactgtttct

SEQ ID NO: 2091126 - DNA, 15 bp, Homo sapiens
actccactgtttctt

SEQ ID NO: 2091127 - DNA, 15 bp, Homo sapiens
ctccactgtttcttc

SEQ ID NO: 2091128 - DNA, 15 bp, Homo sapiens
tccactgtttcttcc

SEQ ID NO: 2091129 - DNA, 15 bp, Homo sapiens
ccactgtttcttcct

SEQ ID NO: 2091130 - DNA, 15 bp, Homo sapiens
cactgtttcttcctg

SEQ ID NO: 2091131 - DNA, 15 bp, Homo sapiens
actgtttcttcctgt

SEQ ID NO: 2091132 - DNA, 15 bp, Homo sapiens
ctgtttcttcctgtt

SEQ ID NO: 2091133 - DNA, 15 bp, Homo sapiens
tgtttcttcctgttc

SEQ ID NO: 2091134 - DNA, 15 bp, Homo sapiens
gtttcttcctgttca

SEQ ID NO: 2091135 - DNA, 15 bp, Homo sapiens
tttcttcctgttcac

SEQ ID NO: 2091136 - DNA, 15 bp, Homo sapiens
ttcttcctgttcact

SEQ ID NO: 2091137 - DNA, 15 bp, Homo sapiens
tcttcctgttcactg

SEQ ID NO: 2091138 - DNA, 15 bp, Homo sapiens
cttcctgttcactga

SEQ ID NO: 2091139 - DNA, 15 bp, Homo sapiens
ttcctgttcactgat

SEQ ID NO: 2091140 - DNA, 15 bp, Homo sapiens
tcctgttcactgatt

SEQ ID NO: 2091141 - DNA, 15 bp, Homo sapiens
cctgttcactgattg

SEQ ID NO: 2091142 - DNA, 15 bp, Homo sapiens
ctgttcactgattgc

SEQ ID NO: 2091143 - DNA, 15 bp, Homo sapiens
tgttcactgattgcc

SEQ ID NO: 2091144 - DNA, 15 bp, Homo sapiens
gttcactgattgcct

SEQ ID NO: 2091145 - DNA, 15 bp, Homo sapiens
ttcactgattgcctg

SEQ ID NO: 2091146 - DNA, 15 bp, Homo sapiens
tcactgattgcctgt

SEQ ID NO: 2091147 - DNA, 15 bp, Homo sapiens
cactgattgcctgtg

SEQ ID NO: 2091148 - DNA, 15 bp, Homo sapiens
actgattgcctgtgc

SEQ ID NO: 2091149 - DNA, 15 bp, Homo sapiens
ctgattgcctgtgct

SEQ ID NO: 2091150 - DNA, 15 bp, Homo sapiens
tgattgcctgtgctg

SEQ ID NO: 2091151 - DNA, 15 bp, Homo sapiens
gattgcctgtgctgg

SEQ ID NO: 2091152 - DNA, 15 bp, Homo sapiens
attgcctgtgctggg

SEQ ID NO: 2091153 - DNA, 15 bp, Homo sapiens
ttgcctgtgctgggg

SEQ ID NO: 2091154 - DNA, 15 bp, Homo sapiens
tgcctgtgctgggga

SEQ ID NO: 2091155 - DNA, 15 bp, Homo sapiens
gcctgtgctggggag

SEQ ID NO: 2091156 - DNA, 15 bp, Homo sapiens
cctgtgctggggagg

SEQ ID NO: 2091157 - DNA, 15 bp, Homo sapiens
ctgtgctggggaggg

SEQ ID NO: 2091158 - DNA, 15 bp, Homo sapiens
tgtgctggggagggg

SEQ ID NO: 2091159 - DNA, 15 bp, Homo sapiens
gtgctggggaggggg

SEQ ID NO: 2091160 - DNA, 15 bp, Homo sapiens
tgctggggaggggga

SEQ ID NO: 2091161 - DNA, 15 bp, Homo sapiens
gctggggagggggaa

SEQ ID NO: 2091162 - DNA, 15 bp, Homo sapiens
ctggggagggggaag

SEQ ID NO: 2091163 - DNA, 15 bp, Homo sapiens
tggggagggggaagg

SEQ ID NO: 2091164 - DNA, 15 bp, Homo sapiens
ggggagggggaagga

SEQ ID NO: 2091165 - DNA, 15 bp, Homo sapiens
gggagggggaaggaa

SEQ ID NO: 2091166 - DNA, 15 bp, Homo sapiens
ggagggggaaggaac

SEQ ID NO: 2091167 - DNA, 15 bp, Homo sapiens
gagggggaaggaacg

SEQ ID NO: 2091168 - DNA, 15 bp, Homo sapiens
agggggaaggaacgg

SEQ ID NO: 2091169 - DNA, 15 bp, Homo sapiens
gggggaaggaacggg

SEQ ID NO: 2091170 - DNA, 15 bp, Homo sapiens
ggggaaggaacggga

SEQ ID NO: 2091171 - DNA, 15 bp, Homo sapiens
gggaaggaacgggag

SEQ ID NO: 2091172 - DNA, 15 bp, Homo sapiens
ggaaggaacgggagg

SEQ ID NO: 2091173 - DNA, 15 bp, Homo sapiens
gaaggaacgggaggg

SEQ ID NO: 2091174 - DNA, 15 bp, Homo sapiens
aaggaacgggagggg

SEQ ID NO: 2091175 - DNA, 15 bp, Homo sapiens
aggaacgggaggggc

SEQ ID NO: 2091176 - DNA, 15 bp, Homo sapiens
ggaacgggaggggcc

SEQ ID NO: 2091177 - DNA, 15 bp, Homo sapiens
gaacgggaggggcct

SEQ ID NO: 2091178 - DNA, 15 bp, Homo sapiens
aacgggaggggcctg

SEQ ID NO: 2091179 - DNA, 15 bp, Homo sapiens
acgggaggggcctga

SEQ ID NO: 2091180 - DNA, 15 bp, Homo sapiens
cgggaggggcctgac

SEQ ID NO: 2091181 - DNA, 15 bp, Homo sapiens
gggaggggcctgacc

SEQ ID NO: 2091182 - DNA, 15 bp, Homo sapiens
ggaggggcctgacct

SEQ ID NO: 2091183 - DNA, 15 bp, Homo sapiens
gaggggcctgacctt

SEQ ID NO: 2091184 - DNA, 15 bp, Homo sapiens
aggggcctgaccttg

SEQ ID NO: 2091185 - DNA, 15 bp, Homo sapiens
ggggcctgaccttgt

SEQ ID NO: 2091186 - DNA, 15 bp, Homo sapiens
gggcctgaccttgtt

SEQ ID NO: 2091187 - DNA, 15 bp, Homo sapiens
ggcctgaccttgttc

SEQ ID NO: 2091188 - DNA, 15 bp, Homo sapiens
gcctgaccttgttca

SEQ ID NO: 2091189 - DNA, 15 bp, Homo sapiens
cctgaccttgttcac

SEQ ID NO: 2091190 - DNA, 15 bp, Homo sapiens
ctgaccttgttcact

SEQ ID NO: 2091191 - DNA, 15 bp, Homo sapiens
tgaccttgttcactt

SEQ ID NO: 2091192 - DNA, 15 bp, Homo sapiens
gaccttgttcacttc

SEQ ID NO: 2091193 - DNA, 15 bp, Homo sapiens
accttgttcacttcc

SEQ ID NO: 2091194 - DNA, 15 bp, Homo sapiens
ccttgttcacttcct

SEQ ID NO: 2091195 - DNA, 15 bp, Homo sapiens
cttgttcacttcctg

SEQ ID NO: 2091196 - DNA, 15 bp, Homo sapiens
ttgttcacttcctgg

SEQ ID NO: 2091197 - DNA, 15 bp, Homo sapiens
tgttcacttcctggc

SEQ ID NO: 2091198 - DNA, 15 bp, Homo sapiens
gttcacttcctggca

SEQ ID NO: 2091199 - DNA, 15 bp, Homo sapiens
ttcacttcctggcat

SEQ ID NO: 2091200 - DNA, 15 bp, Homo sapiens
tcacttcctggcatt

SEQ ID NO: 2091201 - DNA, 15 bp, Homo sapiens
cacttcctggcattt

SEQ ID NO: 2091202 - DNA, 15 bp, Homo sapiens
acttcctggcatttt

SEQ ID NO: 2091203 - DNA, 15 bp, Homo sapiens
cttcctggcattttg

SEQ ID NO: 2091204 - DNA, 15 bp, Homo sapiens
ttcctggcattttgg

SEQ ID NO: 2091205 - DNA, 15 bp, Homo sapiens
tcctggcattttggg

SEQ ID NO: 2091206 - DNA, 15 bp, Homo sapiens
cctggcattttgggt

SEQ ID NO: 2091207 - DNA, 15 bp, Homo sapiens
ctggcattttgggtg

SEQ ID NO: 2091208 - DNA, 15 bp, Homo sapiens
tggcattttgggtga

SEQ ID NO: 2091209 - DNA, 15 bp, Homo sapiens
ggcattttgggtgaa

SEQ ID NO: 2091210 - DNA, 15 bp, Homo sapiens
gcattttgggtgaag

SEQ ID NO: 2091211 - DNA, 15 bp, Homo sapiens
cattttgggtgaagt

SEQ ID NO: 2091212 - DNA, 15 bp, Homo sapiens
attttgggtgaagtt

SEQ ID NO: 2091213 - DNA, 15 bp, Homo sapiens
ttttgggtgaagttc

SEQ ID NO: 2091214 - DNA, 15 bp, Homo sapiens
tttgggtgaagttcc

SEQ ID NO: 2091215 - DNA, 15 bp, Homo sapiens
ttgggtgaagttcct

SEQ ID NO: 2091216 - DNA, 15 bp, Homo sapiens
tgggtgaagttcctt

SEQ ID NO: 2091217 - DNA, 15 bp, Homo sapiens
gggtgaagttcctta

SEQ ID NO: 2091218 - DNA, 15 bp, Homo sapiens
ggtgaagttccttac

SEQ ID NO: 2091219 - DNA, 15 bp, Homo sapiens
gtgaagttccttaca

SEQ ID NO: 2091220 - DNA, 15 bp, Homo sapiens
tgaagttccttacac

SEQ ID NO: 2091221 - DNA, 15 bp, Homo sapiens
gaagttccttacacc

SEQ ID NO: 2091222 - DNA, 15 bp, Homo sapiens
aagttccttacacct

SEQ ID NO: 2091223 - DNA, 15 bp, Homo sapiens
agttccttacacctt

SEQ ID NO: 2091224 - DNA, 15 bp, Homo sapiens
gttccttacaccttc

SEQ ID NO: 2091225 - DNA, 15 bp, Homo sapiens
ttccttacaccttct

SEQ ID NO: 2091226 - DNA, 15 bp, Homo sapiens
tccttacaccttctc

SEQ ID NO: 2091227 - DNA, 15 bp, Homo sapiens
ccttacaccttctct

SEQ ID NO: 2091228 - DNA, 15 bp, Homo sapiens
cttacaccttctctg

SEQ ID NO: 2091229 - DNA, 15 bp, Homo sapiens
ttacaccttctctgg

SEQ ID NO: 2091230 - DNA, 15 bp, Homo sapiens
tacaccttctctgga

SEQ ID NO: 2091231 - DNA, 15 bp, Homo sapiens
acaccttctctggaa

SEQ ID NO: 2091232 - DNA, 15 bp, Homo sapiens
caccttctctggaag

SEQ ID NO: 2091233 - DNA, 15 bp, Homo sapiens
accttctctggaagc

SEQ ID NO: 2091234 - DNA, 15 bp, Homo sapiens
ccttctctggaagct

SEQ ID NO: 2091235 - DNA, 15 bp, Homo sapiens
cttctctggaagctt

SEQ ID NO: 2091236 - DNA, 15 bp, Homo sapiens
ttctctggaagcttc

SEQ ID NO: 2091237 - DNA, 15 bp, Homo sapiens
tctctggaagcttct

SEQ ID NO: 2091238 - DNA, 15 bp, Homo sapiens
ctctggaagcttcta

SEQ ID NO: 2091239 - DNA, 15 bp, Homo sapiens
tctggaagcttctag

SEQ ID NO: 2091240 - DNA, 15 bp, Homo sapiens
ctggaagcttctaga

SEQ ID NO: 2091241 - DNA, 15 bp, Homo sapiens
tggaagcttctagaa

SEQ ID NO: 2091242 - DNA, 15 bp, Homo sapiens
ggaagcttctagaag

SEQ ID NO: 2091243 - DNA, 15 bp, Homo sapiens
gaagcttctagaagg

SEQ ID NO: 2091244 - DNA, 15 bp, Homo sapiens
aagcttctagaagga

SEQ ID NO: 2091245 - DNA, 15 bp, Homo sapiens
agcttctagaaggac

SEQ ID NO: 2091246 - DNA, 15 bp, Homo sapiens
gcttctagaaggacc

SEQ ID NO: 2091247 - DNA, 15 bp, Homo sapiens
cttctagaaggaccc

SEQ ID NO: 2091248 - DNA, 15 bp, Homo sapiens
ttctagaaggaccct

SEQ ID NO: 2091249 - DNA, 15 bp, Homo sapiens
tctagaaggaccctt

SEQ ID NO: 2091250 - DNA, 15 bp, Homo sapiens
ctagaaggacccttg

SEQ ID NO: 2091251 - DNA, 15 bp, Homo sapiens
tagaaggacccttga

SEQ ID NO: 2091252 - DNA, 15 bp, Homo sapiens
agaaggacccttgag

SEQ ID NO: 2091253 - DNA, 15 bp, Homo sapiens
gaaggacccttgagg

SEQ ID NO: 2091254 - DNA, 15 bp, Homo sapiens
aaggacccttgaggc

SEQ ID NO: 2091255 - DNA, 15 bp, Homo sapiens
aggacccttgaggcg

SEQ ID NO: 2091256 - DNA, 15 bp, Homo sapiens
ggacccttgaggcgc

SEQ ID NO: 2091257 - DNA, 15 bp, Homo sapiens
gacccttgaggcgct

SEQ ID NO: 2091258 - DNA, 15 bp, Homo sapiens
acccttgaggcgctt

SEQ ID NO: 2091259 - DNA, 15 bp, Homo sapiens
cccttgaggcgcttt

SEQ ID NO: 2091260 - DNA, 15 bp, Homo sapiens
ccttgaggcgcttta

SEQ ID NO: 2091261 - DNA, 15 bp, Homo sapiens
cttgaggcgctttaa

SEQ ID NO: 2091262 - DNA, 15 bp, Homo sapiens
ttgaggcgctttaaa

SEQ ID NO: 2091263 - DNA, 15 bp, Homo sapiens
tgaggcgctttaaat

SEQ ID NO: 2091264 - DNA, 15 bp, Homo sapiens
gaggcgctttaaatc

SEQ ID NO: 2091265 - DNA, 15 bp, Homo sapiens
aggcgctttaaatct

SEQ ID NO: 2091266 - DNA, 15 bp, Homo sapiens
ggcgctttaaatctc

SEQ ID NO: 2091267 - DNA, 15 bp, Homo sapiens
gcgctttaaatctcc

SEQ ID NO: 2091268 - DNA, 15 bp, Homo sapiens
cgctttaaatctcca

SEQ ID NO: 2091269 - DNA, 15 bp, Homo sapiens
gctttaaatctccat

SEQ ID NO: 2091270 - DNA, 15 bp, Homo sapiens
ctttaaatctccatt

SEQ ID NO: 2091271 - DNA, 15 bp, Homo sapiens
tttaaatctccattc

SEQ ID NO: 2091272 - DNA, 15 bp, Homo sapiens
ttaaatctccattct

SEQ ID NO: 2091273 - DNA, 15 bp, Homo sapiens
taaatctccattctc

SEQ ID NO: 2091274 - DNA, 15 bp, Homo sapiens
aaatctccattctct

SEQ ID NO: 2091275 - DNA, 15 bp, Homo sapiens
aatctccattctctg

SEQ ID NO: 2091276 - DNA, 15 bp, Homo sapiens
atctccattctctgg

SEQ ID NO: 2091277 - DNA, 15 bp, Homo sapiens
tctccattctctggg

SEQ ID NO: 2091278 - DNA, 15 bp, Homo sapiens
ctccattctctgggt

SEQ ID NO: 2091279 - DNA, 15 bp, Homo sapiens
tccattctctgggtt

SEQ ID NO: 2091280 - DNA, 15 bp, Homo sapiens
ccattctctgggttt

SEQ ID NO: 2091281 - DNA, 15 bp, Homo sapiens
cattctctgggtttt

SEQ ID NO: 2091282 - DNA, 15 bp, Homo sapiens
attctctgggttttc

SEQ ID NO: 2091283 - DNA, 15 bp, Homo sapiens
ttctctgggttttcc

SEQ ID NO: 2091284 - DNA, 15 bp, Homo sapiens
tctctgggttttcct

SEQ ID NO: 2091285 - DNA, 15 bp, Homo sapiens
ctctgggttttcctc

SEQ ID NO: 2091286 - DNA, 15 bp, Homo sapiens
tctgggttttcctcc

SEQ ID NO: 2091287 - DNA, 15 bp, Homo sapiens
ctgggttttcctccc

SEQ ID NO: 2091288 - DNA, 15 bp, Homo sapiens
tgggttttcctccca

SEQ ID NO: 2091289 - DNA, 15 bp, Homo sapiens
gggttttcctcccac

SEQ ID NO: 2091290 - DNA, 15 bp, Homo sapiens
ggttttcctcccacc

SEQ ID NO: 2091291 - DNA, 15 bp, Homo sapiens
gttttcctcccacct

SEQ ID NO: 2091292 - DNA, 15 bp, Homo sapiens
ttttcctcccacctt

SEQ ID NO: 2091293 - DNA, 15 bp, Homo sapiens
tttcctcccaccttc

SEQ ID NO: 2091294 - DNA, 15 bp, Homo sapiens
ttcctcccaccttcc

SEQ ID NO: 2091295 - DNA, 15 bp, Homo sapiens
tcctcccaccttcct

SEQ ID NO: 2091296 - DNA, 15 bp, Homo sapiens
cctcccaccttcctg

SEQ ID NO: 2091297 - DNA, 15 bp, Homo sapiens
ctcccaccttcctgg

SEQ ID NO: 2091298 - DNA, 15 bp, Homo sapiens
tcccaccttcctggc

SEQ ID NO: 2091299 - DNA, 15 bp, Homo sapiens
cccaccttcctggct

SEQ ID NO: 2091300 - DNA, 15 bp, Homo sapiens
ccaccttcctggctg

SEQ ID NO: 2091301 - DNA, 15 bp, Homo sapiens
caccttcctggctgc

SEQ ID NO: 2091302 - DNA, 15 bp, Homo sapiens
accttcctggctgct

SEQ ID NO: 2091303 - DNA, 15 bp, Homo sapiens
ccttcctggctgctc

SEQ ID NO: 2091304 - DNA, 15 bp, Homo sapiens
cttcctggctgctct

SEQ ID NO: 2091305 - DNA, 15 bp, Homo sapiens
ttcctggctgctctg

SEQ ID NO: 2091306 - DNA, 15 bp, Homo sapiens
tcctggctgctctgt

SEQ ID NO: 2091307 - DNA, 15 bp, Homo sapiens
cctggctgctctgtc

SEQ ID NO: 2091308 - DNA, 15 bp, Homo sapiens
ctggctgctctgtct

SEQ ID NO: 2091309 - DNA, 15 bp, Homo sapiens
tggctgctctgtctt

SEQ ID NO: 2091310 - DNA, 15 bp, Homo sapiens
ggctgctctgtcttc

SEQ ID NO: 2091311 - DNA, 15 bp, Homo sapiens
gctgctctgtcttct

SEQ ID NO: 2091312 - DNA, 15 bp, Homo sapiens
ctgctctgtcttctt

SEQ ID NO: 2091313 - DNA, 15 bp, Homo sapiens
tgctctgtcttcttg

SEQ ID NO: 2091314 - DNA, 15 bp, Homo sapiens
gctctgtcttcttgc

SEQ ID NO: 2091315 - DNA, 15 bp, Homo sapiens
ctctgtcttcttgcc

SEQ ID NO: 2091316 - DNA, 15 bp, Homo sapiens
tctgtcttcttgcct

SEQ ID NO: 2091317 - DNA, 15 bp, Homo sapiens
ctgtcttcttgcctg

SEQ ID NO: 2091318 - DNA, 15 bp, Homo sapiens
tgtcttcttgcctgc

SEQ ID NO: 2091319 - DNA, 15 bp, Homo sapiens
gtcttcttgcctgct

SEQ ID NO: 2091320 - DNA, 15 bp, Homo sapiens
tcttcttgcctgctg

SEQ ID NO: 2091321 - DNA, 15 bp, Homo sapiens
cttcttgcctgctga

SEQ ID NO: 2091322 - DNA, 15 bp, Homo sapiens
ttcttgcctgctgat

SEQ ID NO: 2091323 - DNA, 15 bp, Homo sapiens
tcttgcctgctgatg

SEQ ID NO: 2091324 - DNA, 15 bp, Homo sapiens
cttgcctgctgatgc

SEQ ID NO: 2091325 - DNA, 15 bp, Homo sapiens
ttgcctgctgatgcc

SEQ ID NO: 2091326 - DNA, 15 bp, Homo sapiens
tgcctgctgatgcct

SEQ ID NO: 2091327 - DNA, 15 bp, Homo sapiens
gcctgctgatgcctc

SEQ ID NO: 2091328 - DNA, 15 bp, Homo sapiens
cctgctgatgcctcc

SEQ ID NO: 2091329 - DNA, 15 bp, Homo sapiens
ctgctgatgcctcct

SEQ ID NO: 2091330 - DNA, 15 bp, Homo sapiens
tgctgatgcctcctc

SEQ ID NO: 2091331 - DNA, 15 bp, Homo sapiens
gctgatgcctcctca

SEQ ID NO: 2091332 - DNA, 15 bp, Homo sapiens
ctgatgcctcctcat

SEQ ID NO: 2091333 - DNA, 15 bp, Homo sapiens
tgatgcctcctcatc

SEQ ID NO: 2091334 - DNA, 15 bp, Homo sapiens
gatgcctcctcatct

SEQ ID NO: 2091335 - DNA, 15 bp, Homo sapiens
atgcctcctcatctc

SEQ ID NO: 2091336 - DNA, 15 bp, Homo sapiens
tgcctcctcatctcc

SEQ ID NO: 2091337 - DNA, 15 bp, Homo sapiens
gcctcctcatctccc

SEQ ID NO: 2091338 - DNA, 15 bp, Homo sapiens
cctcctcatctccct

SEQ ID NO: 2091339 - DNA, 15 bp, Homo sapiens
ctcctcatctccctg

SEQ ID NO: 2091340 - DNA, 15 bp, Homo sapiens
tcctcatctccctgg

SEQ ID NO: 2091341 - DNA, 15 bp, Homo sapiens
cctcatctccctggc

SEQ ID NO: 2091342 - DNA, 15 bp, Homo sapiens
ctcatctccctggcc

SEQ ID NO: 2091343 - DNA, 15 bp, Homo sapiens
tcatctccctggcct

SEQ ID NO: 2091344 - DNA, 15 bp, Homo sapiens
catctccctggcctc

SEQ ID NO: 2091345 - DNA, 15 bp, Homo sapiens
atctccctggcctcc

SEQ ID NO: 2091346 - DNA, 15 bp, Homo sapiens
tctccctggcctcct

SEQ ID NO: 2091347 - DNA, 15 bp, Homo sapiens
ctccctggcctcctg

SEQ ID NO: 2091348 - DNA, 15 bp, Homo sapiens
tccctggcctcctgc

SEQ ID NO: 2091349 - DNA, 15 bp, Homo sapiens
ccctggcctcctgcc

SEQ ID NO: 2091350 - DNA, 15 bp, Homo sapiens
cctggcctcctgcct

SEQ ID NO: 2091351 - DNA, 15 bp, Homo sapiens
ctggcctcctgcctc

SEQ ID NO: 2091352 - DNA, 15 bp, Homo sapiens
tggcctcctgcctcc

SEQ ID NO: 2091353 - DNA, 15 bp, Homo sapiens
ggcctcctgcctcct

SEQ ID NO: 2091354 - DNA, 15 bp, Homo sapiens
gcctcctgcctcctg

SEQ ID NO: 2091355 - DNA, 15 bp, Homo sapiens
cctcctgcctcctgc

SEQ ID NO: 2091356 - DNA, 15 bp, Homo sapiens
ctcctgcctcctgct

SEQ ID NO: 2091357 - DNA, 15 bp, Homo sapiens
tcctgcctcctgctg

SEQ ID NO: 2091358 - DNA, 15 bp, Homo sapiens
cctgcctcctgctgg

SEQ ID NO: 2091359 - DNA, 15 bp, Homo sapiens
ctgcctcctgctggt

SEQ ID NO: 2091360 - DNA, 15 bp, Homo sapiens
tgcctcctgctggtg

SEQ ID NO: 2091361 - DNA, 15 bp, Homo sapiens
gcctcctgctggtgg

SEQ ID NO: 2091362 - DNA, 15 bp, Homo sapiens
cctcctgctggtgga

SEQ ID NO: 2091363 - DNA, 15 bp, Homo sapiens
ctcctgctggtggag

SEQ ID NO: 2091364 - DNA, 15 bp, Homo sapiens
tcctgctggtggagc

SEQ ID NO: 2091365 - DNA, 15 bp, Homo sapiens
cctgctggtggagct

SEQ ID NO: 2091366 - DNA, 15 bp, Homo sapiens
ctgctggtggagctc

SEQ ID NO: 2091367 - DNA, 15 bp, Homo sapiens
tgctggtggagctcc

SEQ ID NO: 2091368 - DNA, 15 bp, Homo sapiens
gctggtggagctcca

SEQ ID NO: 2091369 - DNA, 15 bp, Homo sapiens
ctggtggagctccag

SEQ ID NO: 2091370 - DNA, 15 bp, Homo sapiens
tggtggagctccagg

SEQ ID NO: 2091371 - DNA, 15 bp, Homo sapiens
ggtggagctccaggc

SEQ ID NO: 2091372 - DNA, 15 bp, Homo sapiens
gtggagctccaggca

SEQ ID NO: 2091373 - DNA, 15 bp, Homo sapiens
tggagctccaggcat

SEQ ID NO: 2091374 - DNA, 15 bp, Homo sapiens
ggagctccaggcatc

SEQ ID NO: 2091375 - DNA, 15 bp, Homo sapiens
gagctccaggcatcc

SEQ ID NO: 2091376 - DNA, 15 bp, Homo sapiens
agctccaggcatcct

SEQ ID NO: 2091377 - DNA, 15 bp, Homo sapiens
gctccaggcatcctt

SEQ ID NO: 2091378 - DNA, 15 bp, Homo sapiens
ctccaggcatccttt

SEQ ID NO: 2091379 - DNA, 15 bp, Homo sapiens
tccaggcatcctttc

SEQ ID NO: 2091380 - DNA, 15 bp, Homo sapiens
ccaggcatcctttct

SEQ ID NO: 2091381 - DNA, 15 bp, Homo sapiens
caggcatcctttctg

SEQ ID NO: 2091382 - DNA, 15 bp, Homo sapiens
aggcatcctttctgt

SEQ ID NO: 2091383 - DNA, 15 bp, Homo sapiens
ggcatcctttctgtg

SEQ ID NO: 2091384 - DNA, 15 bp, Homo sapiens
gcatcctttctgtgt

SEQ ID NO: 2091385 - DNA, 15 bp, Homo sapiens
catcctttctgtgtg

SEQ ID NO: 2091386 - DNA, 15 bp, Homo sapiens
atcctttctgtgtgt

SEQ ID NO: 2091387 - DNA, 15 bp, Homo sapiens
tcctttctgtgtgtc

SEQ ID NO: 2091388 - DNA, 15 bp, Homo sapiens
cctttctgtgtgtcc

SEQ ID NO: 2091389 - DNA, 15 bp, Homo sapiens
ctttctgtgtgtcct

SEQ ID NO: 2091390 - DNA, 15 bp, Homo sapiens
tttctgtgtgtcctc

SEQ ID NO: 2091391 - DNA, 15 bp, Homo sapiens
ttctgtgtgtcctca

SEQ ID NO: 2091392 - DNA, 15 bp, Homo sapiens
tctgtgtgtcctcat

SEQ ID NO: 2091393 - DNA, 15 bp, Homo sapiens
ctgtgtgtcctcatc

SEQ ID NO: 2091394 - DNA, 15 bp, Homo sapiens
tgtgtgtcctcatcc

SEQ ID NO: 2091395 - DNA, 15 bp, Homo sapiens
gtgtgtcctcatccc

SEQ ID NO: 2091396 - DNA, 15 bp, Homo sapiens
tgtgtcctcatccct

SEQ ID NO: 2091397 - DNA, 15 bp, Homo sapiens
gtgtcctcatccctc

SEQ ID NO: 2091398 - DNA, 15 bp, Homo sapiens
tgtcctcatccctca

SEQ ID NO: 2091399 - DNA, 15 bp, Homo sapiens
gtcctcatccctcat

SEQ ID NO: 2091400 - DNA, 15 bp, Homo sapiens
tcctcatccctcatc

SEQ ID NO: 2091401 - DNA, 15 bp, Homo sapiens
cctcatccctcatcc

SEQ ID NO: 2091402 - DNA, 15 bp, Homo sapiens
ctcatccctcatccc

SEQ ID NO: 2091403 - DNA, 15 bp, Homo sapiens
tcatccctcatccct

SEQ ID NO: 2091404 - DNA, 15 bp, Homo sapiens
catccctcatccctg

SEQ ID NO: 2091405 - DNA, 15 bp, Homo sapiens
atccctcatccctgg

SEQ ID NO: 2091406 - DNA, 15 bp, Homo sapiens
tccctcatccctggg

SEQ ID NO: 2091407 - DNA, 15 bp, Homo sapiens
ccctcatccctgggg

SEQ ID NO: 2091408 - DNA, 15 bp, Homo sapiens
cctcatccctggggt

SEQ ID NO: 2091409 - DNA, 15 bp, Homo sapiens
ctcatccctggggtg

SEQ ID NO: 2091410 - DNA, 15 bp, Homo sapiens
tcatccctggggtgg

SEQ ID NO: 2091411 - DNA, 15 bp, Homo sapiens
catccctggggtggg

SEQ ID NO: 2091412 - DNA, 15 bp, Homo sapiens
atccctggggtgggc

SEQ ID NO: 2091413 - DNA, 15 bp, Homo sapiens
tccctggggtgggct

SEQ ID NO: 2091414 - DNA, 15 bp, Homo sapiens
ccctggggtgggctc

SEQ ID NO: 2091415 - DNA, 15 bp, Homo sapiens
cctggggtgggctcc

SEQ ID NO: 2091416 - DNA, 15 bp, Homo sapiens
ctggggtgggctcct

SEQ ID NO: 2091417 - DNA, 15 bp, Homo sapiens
tggggtgggctcctc

SEQ ID NO: 2091418 - DNA, 15 bp, Homo sapiens
ggggtgggctcctcc

SEQ ID NO: 2091419 - DNA, 15 bp, Homo sapiens
gggtgggctcctcca

SEQ ID NO: 2091420 - DNA, 15 bp, Homo sapiens
ggtgggctcctccag

SEQ ID NO: 2091421 - DNA, 15 bp, Homo sapiens
gtgggctcctccagc

SEQ ID NO: 2091422 - DNA, 15 bp, Homo sapiens
tgggctcctccagcc

SEQ ID NO: 2091423 - DNA, 15 bp, Homo sapiens
gggctcctccagcct

SEQ ID NO: 2091424 - DNA, 15 bp, Homo sapiens
ggctcctccagcctt

SEQ ID NO: 2091425 - DNA, 15 bp, Homo sapiens
gctcctccagccttg

SEQ ID NO: 2091426 - DNA, 15 bp, Homo sapiens
ctcctccagccttgc

SEQ ID NO: 2091427 - DNA, 15 bp, Homo sapiens
tcctccagccttgcg

SEQ ID NO: 2091428 - DNA, 15 bp, Homo sapiens
cctccagccttgcgc

SEQ ID NO: 2091429 - DNA, 15 bp, Homo sapiens
ctccagccttgcgcc

SEQ ID NO: 2091430 - DNA, 15 bp, Homo sapiens
tccagccttgcgcct

SEQ ID NO: 2091431 - DNA, 15 bp, Homo sapiens
ccagccttgcgcctg

SEQ ID NO: 2091432 - DNA, 15 bp, Homo sapiens
cagccttgcgcctga

SEQ ID NO: 2091433 - DNA, 15 bp, Homo sapiens
agccttgcgcctgaa

SEQ ID NO: 2091434 - DNA, 15 bp, Homo sapiens
gccttgcgcctgaat

SEQ ID NO: 2091435 - DNA, 15 bp, Homo sapiens
ccttgcgcctgaatg

SEQ ID NO: 2091436 - DNA, 15 bp, Homo sapiens
cttgcgcctgaatgg

SEQ ID NO: 2091437 - DNA, 15 bp, Homo sapiens
ttgcgcctgaatggc

SEQ ID NO: 2091438 - DNA, 15 bp, Homo sapiens
tgcgcctgaatggca

SEQ ID NO: 2091439 - DNA, 15 bp, Homo sapiens
gcgcctgaatggcat

SEQ ID NO: 2091440 - DNA, 15 bp, Homo sapiens
cgcctgaatggcatc

SEQ ID NO: 2091441 - DNA, 15 bp, Homo sapiens
gcctgaatggcatct

SEQ ID NO: 2091442 - DNA, 15 bp, Homo sapiens
cctgaatggcatctc

SEQ ID NO: 2091443 - DNA, 15 bp, Homo sapiens
ctgaatggcatctct

SEQ ID NO: 2091444 - DNA, 15 bp, Homo sapiens
tgaatggcatctctg

SEQ ID NO: 2091445 - DNA, 15 bp, Homo sapiens
gaatggcatctctgt

SEQ ID NO: 2091446 - DNA, 15 bp, Homo sapiens
aatggcatctctgtc

SEQ ID NO: 2091447 - DNA, 15 bp, Homo sapiens
atggcatctctgtcc

SEQ ID NO: 2091448 - DNA, 15 bp, Homo sapiens
tggcatctctgtcct

SEQ ID NO: 2091449 - DNA, 15 bp, Homo sapiens
ggcatctctgtcctg

SEQ ID NO: 2091450 - DNA, 15 bp, Homo sapiens
gcatctctgtcctga

SEQ ID NO: 2091451 - DNA, 15 bp, Homo sapiens
catctctgtcctgac

SEQ ID NO: 2091452 - DNA, 15 bp, Homo sapiens
atctctgtcctgacc

SEQ ID NO: 2091453 - DNA, 15 bp, Homo sapiens
tctctgtcctgacca

SEQ ID NO: 2091454 - DNA, 15 bp, Homo sapiens
ctctgtcctgaccac

SEQ ID NO: 2091455 - DNA, 15 bp, Homo sapiens
tctgtcctgaccact

SEQ ID NO: 2091456 - DNA, 15 bp, Homo sapiens
ctgtcctgaccactc

SEQ ID NO: 2091457 - DNA, 15 bp, Homo sapiens
tgtcctgaccactcc

SEQ ID NO: 2091458 - DNA, 15 bp, Homo sapiens
gtcctgaccactccc

SEQ ID NO: 2091459 - DNA, 15 bp, Homo sapiens
tcctgaccactccca

SEQ ID NO: 2091460 - DNA, 15 bp, Homo sapiens
cctgaccactcccaa

SEQ ID NO: 2091461 - DNA, 15 bp, Homo sapiens
ctgaccactcccaaa

SEQ ID NO: 2091462 - DNA, 15 bp, Homo sapiens
tgaccactcccaaat

SEQ ID NO: 2091463 - DNA, 15 bp, Homo sapiens
gaccactcccaaatt

SEQ ID NO: 2091464 - DNA, 15 bp, Homo sapiens
accactcccaaattg

SEQ ID NO: 2091465 - DNA, 15 bp, Homo sapiens
ccactcccaaattgg

SEQ ID NO: 2091466 - DNA, 15 bp, Homo sapiens
cactcccaaattggt

SEQ ID NO: 2091467 - DNA, 15 bp, Homo sapiens
actcccaaattggta

SEQ ID NO: 2091468 - DNA, 15 bp, Homo sapiens
ctcccaaattggtat

SEQ ID NO: 2091469 - DNA, 15 bp, Homo sapiens
tcccaaattggtatc

SEQ ID NO: 2091470 - DNA, 15 bp, Homo sapiens
cccaaattggtatcc

SEQ ID NO: 2091471 - DNA, 15 bp, Homo sapiens
ccaaattggtatccc

SEQ ID NO: 2091472 - DNA, 15 bp, Homo sapiens
caaattggtatccct

SEQ ID NO: 2091473 - DNA, 15 bp, Homo sapiens
aaattggtatccctg

SEQ ID NO: 2091474 - DNA, 15 bp, Homo sapiens
aattggtatccctgg

SEQ ID NO: 2091475 - DNA, 15 bp, Homo sapiens
attggtatccctggg

SEQ ID NO: 2091476 - DNA, 15 bp, Homo sapiens
ttggtatccctgggc

SEQ ID NO: 2091477 - DNA, 15 bp, Homo sapiens
tggtatccctgggcc

SEQ ID NO: 2091478 - DNA, 15 bp, Homo sapiens
ggtatccctgggccc

SEQ ID NO: 2091479 - DNA, 15 bp, Homo sapiens
gtatccctgggccca

SEQ ID NO: 2091480 - DNA, 15 bp, Homo sapiens
tatccctgggcccag

SEQ ID NO: 2091481 - DNA, 15 bp, Homo sapiens
atccctgggcccaga

SEQ ID NO: 2091482 - DNA, 15 bp, Homo sapiens
tccctgggcccagac

SEQ ID NO: 2091483 - DNA, 15 bp, Homo sapiens
ccctgggcccagacc

SEQ ID NO: 2091484 - DNA, 15 bp, Homo sapiens
cctgggcccagacct

SEQ ID NO: 2091485 - DNA, 15 bp, Homo sapiens
ctgggcccagacctt

SEQ ID NO: 2091486 - DNA, 15 bp, Homo sapiens
tgggcccagaccttt

SEQ ID NO: 2091487 - DNA, 15 bp, Homo sapiens
gggcccagacctttc

SEQ ID NO: 2091488 - DNA, 15 bp, Homo sapiens
ggcccagacctttcc

SEQ ID NO: 2091489 - DNA, 15 bp, Homo sapiens
gcccagacctttccc

SEQ ID NO: 2091490 - DNA, 15 bp, Homo sapiens
cccagacctttcccc

SEQ ID NO: 2091491 - DNA, 15 bp, Homo sapiens
ccagacctttcccct

SEQ ID NO: 2091492 - DNA, 15 bp, Homo sapiens
cagacctttcccctg

SEQ ID NO: 2091493 - DNA, 15 bp, Homo sapiens
agacctttcccctga

SEQ ID NO: 2091494 - DNA, 15 bp, Homo sapiens
gacctttcccctgaa

SEQ ID NO: 2091495 - DNA, 15 bp, Homo sapiens
acctttcccctgaac

SEQ ID NO: 2091496 - DNA, 15 bp, Homo sapiens
cctttcccctgaacc

SEQ ID NO: 2091497 - DNA, 15 bp, Homo sapiens
ctttcccctgaaccc

SEQ ID NO: 2091498 - DNA, 15 bp, Homo sapiens
tttcccctgaacccc

SEQ ID NO: 2091499 - DNA, 15 bp, Homo sapiens
ttcccctgaacccca

SEQ ID NO: 2091500 - DNA, 15 bp, Homo sapiens
tcccctgaaccccac

SEQ ID NO: 2091501 - DNA, 15 bp, Homo sapiens
cccctgaaccccacc

SEQ ID NO: 2091502 - DNA, 15 bp, Homo sapiens
ccctgaaccccaccc

SEQ ID NO: 2091503 - DNA, 15 bp, Homo sapiens
cctgaaccccacccc

SEQ ID NO: 2091504 - DNA, 15 bp, Homo sapiens
ctgaaccccaccccc

SEQ ID NO: 2091505 - DNA, 15 bp, Homo sapiens
tgaaccccacccccg

SEQ ID NO: 2091506 - DNA, 15 bp, Homo sapiens
gaaccccacccccga

SEQ ID NO: 2091507 - DNA, 15 bp, Homo sapiens
aaccccacccccgag

SEQ ID NO: 2091508 - DNA, 15 bp, Homo sapiens
accccacccccgagt

SEQ ID NO: 2091509 - DNA, 15 bp, Homo sapiens
ccccacccccgagtg

SEQ ID NO: 2091510 - DNA, 15 bp, Homo sapiens
cccacccccgagtgt

SEQ ID NO: 2091511 - DNA, 15 bp, Homo sapiens
ccacccccgagtgtc

SEQ ID NO: 2091512 - DNA, 15 bp, Homo sapiens
cacccccgagtgtcc

SEQ ID NO: 2091513 - DNA, 15 bp, Homo sapiens
acccccgagtgtcca

SEQ ID NO: 2091514 - DNA, 15 bp, Homo sapiens
cccccgagtgtccaa

SEQ ID NO: 2091515 - DNA, 15 bp, Homo sapiens
ccccgagtgtccaac

SEQ ID NO: 2091516 - DNA, 15 bp, Homo sapiens
cccgagtgtccaaca

SEQ ID NO: 2091517 - DNA, 15 bp, Homo sapiens
ccgagtgtccaacag

SEQ ID NO: 2091518 - DNA, 15 bp, Homo sapiens
cgagtgtccaacagc

SEQ ID NO: 2091519 - DNA, 15 bp, Homo sapiens
gagtgtccaacagca

SEQ ID NO: 2091520 - DNA, 15 bp, Homo sapiens
agtgtccaacagcag

SEQ ID NO: 2091521 - DNA, 15 bp, Homo sapiens
gtgtccaacagcaga

SEQ ID NO: 2091522 - DNA, 15 bp, Homo sapiens
tgtccaacagcagag

SEQ ID NO: 2091523 - DNA, 15 bp, Homo sapiens
gtccaacagcagagt

SEQ ID NO: 2091524 - DNA, 15 bp, Homo sapiens
tccaacagcagagtc

SEQ ID NO: 2091525 - DNA, 15 bp, Homo sapiens
ccaacagcagagtcc

SEQ ID NO: 2091526 - DNA, 15 bp, Homo sapiens
caacagcagagtccg

SEQ ID NO: 2091527 - DNA, 15 bp, Homo sapiens
aacagcagagtccgt

SEQ ID NO: 2091528 - DNA, 15 bp, Homo sapiens
acagcagagtccgta

SEQ ID NO: 2091529 - DNA, 15 bp, Homo sapiens
cagcagagtccgtat

SEQ ID NO: 2091530 - DNA, 15 bp, Homo sapiens
agcagagtccgtatc

SEQ ID NO: 2091531 - DNA, 15 bp, Homo sapiens
gcagagtccgtatct

SEQ ID NO: 2091532 - DNA, 15 bp, Homo sapiens
cagagtccgtatctc

SEQ ID NO: 2091533 - DNA, 15 bp, Homo sapiens
agagtccgtatctca

SEQ ID NO: 2091534 - DNA, 15 bp, Homo sapiens
gagtccgtatctcaa

SEQ ID NO: 2091535 - DNA, 15 bp, Homo sapiens
agtccgtatctcaac

SEQ ID NO: 2091536 - DNA, 15 bp, Homo sapiens
gtccgtatctcaact

SEQ ID NO: 2091537 - DNA, 15 bp, Homo sapiens
tccgtatctcaactc

SEQ ID NO: 2091538 - DNA, 15 bp, Homo sapiens
ccgtatctcaactcg

SEQ ID NO: 2091539 - DNA, 15 bp, Homo sapiens
cgtatctcaactcgg

SEQ ID NO: 2091540 - DNA, 15 bp, Homo sapiens
gtatctcaactcggg

SEQ ID NO: 2091541 - DNA, 15 bp, Homo sapiens
tatctcaactcgggg

SEQ ID NO: 2091542 - DNA, 15 bp, Homo sapiens
atctcaactcggggt

SEQ ID NO: 2091543 - DNA, 15 bp, Homo sapiens
tctcaactcggggtc

SEQ ID NO: 2091544 - DNA, 15 bp, Homo sapiens
ctcaactcggggtca

SEQ ID NO: 2091545 - DNA, 15 bp, Homo sapiens
tcaactcggggtcaa

SEQ ID NO: 2091546 - DNA, 15 bp, Homo sapiens
caactcggggtcaaa

SEQ ID NO: 2091547 - DNA, 15 bp, Homo sapiens
aactcggggtcaaag

SEQ ID NO: 2091548 - DNA, 15 bp, Homo sapiens
actcggggtcaaagg

SEQ ID NO: 2091549 - DNA, 15 bp, Homo sapiens
ctcggggtcaaaggc

SEQ ID NO: 2091550 - DNA, 15 bp, Homo sapiens
tcggggtcaaaggca

SEQ ID NO: 2091551 - DNA, 15 bp, Homo sapiens
cggggtcaaaggcag

SEQ ID NO: 2091552 - DNA, 15 bp, Homo sapiens
ggggtcaaaggcagc

SEQ ID NO: 2091553 - DNA, 15 bp, Homo sapiens
gggtcaaaggcagct

SEQ ID NO: 2091554 - DNA, 15 bp, Homo sapiens
ggtcaaaggcagctc

SEQ ID NO: 2091555 - DNA, 15 bp, Homo sapiens
gtcaaaggcagctca

SEQ ID NO: 2091556 - DNA, 15 bp, Homo sapiens
tcaaaggcagctcac

SEQ ID NO: 2091557 - DNA, 15 bp, Homo sapiens
caaaggcagctcacg

SEQ ID NO: 2091558 - DNA, 15 bp, Homo sapiens
aaaggcagctcacgc

SEQ ID NO: 2091559 - DNA, 15 bp, Homo sapiens
aaggcagctcacgct

SEQ ID NO: 2091560 - DNA, 15 bp, Homo sapiens
aggcagctcacgctc

SEQ ID NO: 2091561 - DNA, 15 bp, Homo sapiens
ggcagctcacgctcg

SEQ ID NO: 2091562 - DNA, 15 bp, Homo sapiens
gcagctcacgctcgc

SEQ ID NO: 2091563 - DNA, 15 bp, Homo sapiens
cagctcacgctcgcc

SEQ ID NO: 2091564 - DNA, 15 bp, Homo sapiens
agctcacgctcgccc

SEQ ID NO: 2091565 - DNA, 15 bp, Homo sapiens
gctcacgctcgcccc

SEQ ID NO: 2091566 - DNA, 15 bp, Homo sapiens
ctcacgctcgccccg

SEQ ID NO: 2091567 - DNA, 15 bp, Homo sapiens
tcacgctcgccccgg

SEQ ID NO: 2091568 - DNA, 15 bp, Homo sapiens
cacgctcgccccggc

SEQ ID NO: 2091569 - DNA, 15 bp, Homo sapiens
acgctcgccccggct

SEQ ID NO: 2091570 - DNA, 15 bp, Homo sapiens
cgctcgccccggctg

SEQ ID NO: 2091571 - DNA, 15 bp, Homo sapiens
gctcgccccggctgg

SEQ ID NO: 2091572 - DNA, 15 bp, Homo sapiens
ctcgccccggctggc

SEQ ID NO: 2091573 - DNA, 15 bp, Homo sapiens
tcgccccggctggct

SEQ ID NO: 2091574 - DNA, 15 bp, Homo sapiens
cgccccggctggctc

SEQ ID NO: 2091575 - DNA, 15 bp, Homo sapiens
gccccggctggctcc

SEQ ID NO: 2091576 - DNA, 15 bp, Homo sapiens
ccccggctggctcct

SEQ ID NO: 2091577 - DNA, 15 bp, Homo sapiens
cccggctggctcctc

SEQ ID NO: 2091578 - DNA, 15 bp, Homo sapiens
ccggctggctcctca

SEQ ID NO: 2091579 - DNA, 15 bp, Homo sapiens
cggctggctcctcat

SEQ ID NO: 2091580 - DNA, 15 bp, Homo sapiens
ggctggctcctcatc

SEQ ID NO: 2091581 - DNA, 15 bp, Homo sapiens
gctggctcctcatca

SEQ ID NO: 2091582 - DNA, 15 bp, Homo sapiens
ctggctcctcatcac

SEQ ID NO: 2091583 - DNA, 15 bp, Homo sapiens
tggctcctcatcacc

SEQ ID NO: 2091584 - DNA, 15 bp, Homo sapiens
ggctcctcatcaccc

SEQ ID NO: 2091585 - DNA, 15 bp, Homo sapiens
gctcctcatcaccct

SEQ ID NO: 2091586 - DNA, 15 bp, Homo sapiens
ctcctcatcaccctc

SEQ ID NO: 2091587 - DNA, 15 bp, Homo sapiens
tcctcatcaccctcg

SEQ ID NO: 2091588 - DNA, 15 bp, Homo sapiens
cctcatcaccctcgg

SEQ ID NO: 2091589 - DNA, 15 bp, Homo sapiens
ctcatcaccctcggc

SEQ ID NO: 2091590 - DNA, 15 bp, Homo sapiens
tcatcaccctcggcc

SEQ ID NO: 2091591 - DNA, 15 bp, Homo sapiens
catcaccctcggcca

SEQ ID NO: 2091592 - DNA, 15 bp, Homo sapiens
atcaccctcggccac

SEQ ID NO: 2091593 - DNA, 15 bp, Homo sapiens
tcaccctcggccaca

SEQ ID NO: 2091594 - DNA, 15 bp, Homo sapiens
caccctcggccacac

SEQ ID NO: 2091595 - DNA, 15 bp, Homo sapiens
accctcggccacacc

SEQ ID NO: 2091596 - DNA, 15 bp, Homo sapiens
ccctcggccacacct

SEQ ID NO: 2091597 - DNA, 15 bp, Homo sapiens
cctcggccacacctg

SEQ ID NO: 2091598 - DNA, 15 bp, Homo sapiens
ctcggccacacctgt

SEQ ID NO: 2091599 - DNA, 15 bp, Homo sapiens
tcggccacacctgtg

SEQ ID NO: 2091600 - DNA, 15 bp, Homo sapiens
cggccacacctgtgg

SEQ ID NO: 2091601 - DNA, 15 bp, Homo sapiens
ggccacacctgtggc

SEQ ID NO: 2091602 - DNA, 15 bp, Homo sapiens
gccacacctgtggct

SEQ ID NO: 2091603 - DNA, 15 bp, Homo sapiens
ccacacctgtggctc

SEQ ID NO: 2091604 - DNA, 15 bp, Homo sapiens
cacacctgtggctcc

SEQ ID NO: 2091605 - DNA, 15 bp, Homo sapiens
acacctgtggctccc

SEQ ID NO: 2091606 - DNA, 15 bp, Homo sapiens
cacctgtggctccca

SEQ ID NO: 2091607 - DNA, 15 bp, Homo sapiens
acctgtggctcccac

SEQ ID NO: 2091608 - DNA, 15 bp, Homo sapiens
cctgtggctcccacc

SEQ ID NO: 2091609 - DNA, 15 bp, Homo sapiens
ctgtggctcccacca

SEQ ID NO: 2091610 - DNA, 15 bp, Homo sapiens
tgtggctcccaccag

SEQ ID NO: 2091611 - DNA, 15 bp, Homo sapiens
gtggctcccaccagc

SEQ ID NO: 2091612 - DNA, 15 bp, Homo sapiens
tggctcccaccagct

SEQ ID NO: 2091613 - DNA, 15 bp, Homo sapiens
ggctcccaccagctt

SEQ ID NO: 2091614 - DNA, 15 bp, Homo sapiens
gctcccaccagcttc

SEQ ID NO: 2091615 - DNA, 15 bp, Homo sapiens
ctcccaccagcttcc

SEQ ID NO: 2091616 - DNA, 15 bp, Homo sapiens
tcccaccagcttccc

SEQ ID NO: 2091617 - DNA, 15 bp, Homo sapiens
cccaccagcttccca

SEQ ID NO: 2091618 - DNA, 15 bp, Homo sapiens
ccaccagcttcccac

SEQ ID NO: 2091619 - DNA, 15 bp, Homo sapiens
caccagcttcccact

SEQ ID NO: 2091620 - DNA, 15 bp, Homo sapiens
accagcttcccactc

SEQ ID NO: 2091621 - DNA, 15 bp, Homo sapiens
ccagcttcccactcc

SEQ ID NO: 2091622 - DNA, 15 bp, Homo sapiens
cagcttcccactcca

SEQ ID NO: 2091623 - DNA, 15 bp, Homo sapiens
agcttcccactccat

SEQ ID NO: 2091624 - DNA, 15 bp, Homo sapiens
gcttcccactccatc

SEQ ID NO: 2091625 - DNA, 15 bp, Homo sapiens
cttcccactccatca

SEQ ID NO: 2091626 - DNA, 15 bp, Homo sapiens
ttcccactccatcat

SEQ ID NO: 2091627 - DNA, 15 bp, Homo sapiens
tcccactccatcata

SEQ ID NO: 2091628 - DNA, 15 bp, Homo sapiens
cccactccatcatag

SEQ ID NO: 2091629 - DNA, 15 bp, Homo sapiens
ccactccatcatagc

SEQ ID NO: 2091630 - DNA, 15 bp, Homo sapiens
cactccatcatagcc

SEQ ID NO: 2091631 - DNA, 15 bp, Homo sapiens
actccatcatagccc

SEQ ID NO: 2091632 - DNA, 15 bp, Homo sapiens
ctccatcatagcccc

SEQ ID NO: 2091633 - DNA, 15 bp, Homo sapiens
tccatcatagccccc

SEQ ID NO: 2091634 - DNA, 15 bp, Homo sapiens
ccatcatagcccccc

SEQ ID NO: 2091635 - DNA, 15 bp, Homo sapiens
catcatagccccccc

SEQ ID NO: 2091636 - DNA, 15 bp, Homo sapiens
atcatagccccccca

SEQ ID NO: 2091637 - DNA, 15 bp, Homo sapiens
tcatagcccccccat

SEQ ID NO: 2091638 - DNA, 15 bp, Homo sapiens
catagcccccccatc

SEQ ID NO: 2091639 - DNA, 15 bp, Homo sapiens
atagcccccccatct

SEQ ID NO: 2091640 - DNA, 15 bp, Homo sapiens
tagcccccccatctt

SEQ ID NO: 2091641 - DNA, 15 bp, Homo sapiens
agcccccccatcttc

SEQ ID NO: 2091642 - DNA, 15 bp, Homo sapiens
gcccccccatcttcc

SEQ ID NO: 2091643 - DNA, 15 bp, Homo sapiens
cccccccatcttcca

SEQ ID NO: 2091644 - DNA, 15 bp, Homo sapiens
ccccccatcttccag

SEQ ID NO: 2091645 - DNA, 15 bp, Homo sapiens
cccccatcttccagt

SEQ ID NO: 2091646 - DNA, 15 bp, Homo sapiens
ccccatcttccagtt

SEQ ID NO: 2091647 - DNA, 15 bp, Homo sapiens
cccatcttccagttg

SEQ ID NO: 2091648 - DNA, 15 bp, Homo sapiens
ccatcttccagttgc

SEQ ID NO: 2091649 - DNA, 15 bp, Homo sapiens
catcttccagttgcc

SEQ ID NO: 2091650 - DNA, 15 bp, Homo sapiens
atcttccagttgccc

SEQ ID NO: 2091651 - DNA, 15 bp, Homo sapiens
tcttccagttgcccg

SEQ ID NO: 2091652 - DNA, 15 bp, Homo sapiens
cttccagttgcccgg

SEQ ID NO: 2091653 - DNA, 15 bp, Homo sapiens
ttccagttgcccggg

SEQ ID NO: 2091654 - DNA, 15 bp, Homo sapiens
tccagttgcccgggc

SEQ ID NO: 2091655 - DNA, 15 bp, Homo sapiens
ccagttgcccgggcc

SEQ ID NO: 2091656 - DNA, 15 bp, Homo sapiens
cagttgcccgggcca

SEQ ID NO: 2091657 - DNA, 15 bp, Homo sapiens
agttgcccgggccaa

SEQ ID NO: 2091658 - DNA, 15 bp, Homo sapiens
gttgcccgggccaac

SEQ ID NO: 2091659 - DNA, 15 bp, Homo sapiens
ttgcccgggccaaca

SEQ ID NO: 2091660 - DNA, 15 bp, Homo sapiens
tgcccgggccaacat

SEQ ID NO: 2091661 - DNA, 15 bp, Homo sapiens
gcccgggccaacatc

SEQ ID NO: 2091662 - DNA, 15 bp, Homo sapiens
cccgggccaacatct

SEQ ID NO: 2091663 - DNA, 15 bp, Homo sapiens
ccgggccaacatctt

SEQ ID NO: 2091664 - DNA, 15 bp, Homo sapiens
cgggccaacatcttg

SEQ ID NO: 2091665 - DNA, 15 bp, Homo sapiens
gggccaacatcttgc

SEQ ID NO: 2091666 - DNA, 15 bp, Homo sapiens
ggccaacatcttgca

SEQ ID NO: 2091667 - DNA, 15 bp, Homo sapiens
gccaacatcttgcac

SEQ ID NO: 2091668 - DNA, 15 bp, Homo sapiens
ccaacatcttgcact

SEQ ID NO: 2091669 - DNA, 15 bp, Homo sapiens
caacatcttgcactc

SEQ ID NO: 2091670 - DNA, 15 bp, Homo sapiens
aacatcttgcactca

SEQ ID NO: 2091671 - DNA, 15 bp, Homo sapiens
acatcttgcactcag

SEQ ID NO: 2091672 - DNA, 15 bp, Homo sapiens
catcttgcactcagc

SEQ ID NO: 2091673 - DNA, 15 bp, Homo sapiens
atcttgcactcagcc

SEQ ID NO: 2091674 - DNA, 15 bp, Homo sapiens
tcttgcactcagcct

SEQ ID NO: 2091675 - DNA, 15 bp, Homo sapiens
cttgcactcagcctt

SEQ ID NO: 2091676 - DNA, 15 bp, Homo sapiens
ttgcactcagccttg

SEQ ID NO: 2091677 - DNA, 15 bp, Homo sapiens
tgcactcagccttga

SEQ ID NO: 2091678 - DNA, 15 bp, Homo sapiens
gcactcagccttgac

SEQ ID NO: 2091679 - DNA, 15 bp, Homo sapiens
cactcagccttgact

SEQ ID NO: 2091680 - DNA, 15 bp, Homo sapiens
actcagccttgactc

SEQ ID NO: 2091681 - DNA, 15 bp, Homo sapiens
ctcagccttgactct

SEQ ID NO: 2091682 - DNA, 15 bp, Homo sapiens
tcagccttgactctg

SEQ ID NO: 2091683 - DNA, 15 bp, Homo sapiens
cagccttgactctgt

SEQ ID NO: 2091684 - DNA, 15 bp, Homo sapiens
agccttgactctgtt

SEQ ID NO: 2091685 - DNA, 15 bp, Homo sapiens
gccttgactctgttc

SEQ ID NO: 2091686 - DNA, 15 bp, Homo sapiens
ccttgactctgttct

SEQ ID NO: 2091687 - DNA, 15 bp, Homo sapiens
cttgactctgttctc

SEQ ID NO: 2091688 - DNA, 15 bp, Homo sapiens
ttgactctgttctct

SEQ ID NO: 2091689 - DNA, 15 bp, Homo sapiens
tgactctgttctctc

SEQ ID NO: 2091690 - DNA, 15 bp, Homo sapiens
gactctgttctctcc

SEQ ID NO: 2091691 - DNA, 15 bp, Homo sapiens
actctgttctctcca

SEQ ID NO: 2091692 - DNA, 15 bp, Homo sapiens
ctctgttctctccac

SEQ ID NO: 2091693 - DNA, 15 bp, Homo sapiens
tctgttctctccact

SEQ ID NO: 2091694 - DNA, 15 bp, Homo sapiens
ctgttctctccactt

SEQ ID NO: 2091695 - DNA, 15 bp, Homo sapiens
tgttctctccacttc

SEQ ID NO: 2091696 - DNA, 15 bp, Homo sapiens
gttctctccacttcc

SEQ ID NO: 2091697 - DNA, 15 bp, Homo sapiens
ttctctccacttccc

SEQ ID NO: 2091698 - DNA, 15 bp, Homo sapiens
tctctccacttccct

SEQ ID NO: 2091699 - DNA, 15 bp, Homo sapiens
ctctccacttccctc

SEQ ID NO: 2091700 - DNA, 15 bp, Homo sapiens
tctccacttccctca

SEQ ID NO: 2091701 - DNA, 15 bp, Homo sapiens
ctccacttccctcag

SEQ ID NO: 2091702 - DNA, 15 bp, Homo sapiens
tccacttccctcaga

SEQ ID NO: 2091703 - DNA, 15 bp, Homo sapiens
ccacttccctcagag

SEQ ID NO: 2091704 - DNA, 15 bp, Homo sapiens
cacttccctcagaga

SEQ ID NO: 2091705 - DNA, 15 bp, Homo sapiens
acttccctcagagaa

SEQ ID NO: 2091706 - DNA, 15 bp, Homo sapiens
cttccctcagagaac

SEQ ID NO: 2091707 - DNA, 15 bp, Homo sapiens
ttccctcagagaacc

SEQ ID NO: 2091708 - DNA, 15 bp, Homo sapiens
tccctcagagaaccc

SEQ ID NO: 2091709 - DNA, 15 bp, Homo sapiens
ccctcagagaacccg

SEQ ID NO: 2091710 - DNA, 15 bp, Homo sapiens
cctcagagaacccgt

SEQ ID NO: 2091711 - DNA, 15 bp, Homo sapiens
ctcagagaacccgtc

SEQ ID NO: 2091712 - DNA, 15 bp, Homo sapiens
tcagagaacccgtca

SEQ ID NO: 2091713 - DNA, 15 bp, Homo sapiens
cagagaacccgtcag

SEQ ID NO: 2091714 - DNA, 15 bp, Homo sapiens
agagaacccgtcaga

SEQ ID NO: 2091715 - DNA, 15 bp, Homo sapiens
gagaacccgtcagaa

SEQ ID NO: 2091716 - DNA, 15 bp, Homo sapiens
agaacccgtcagaaa

SEQ ID NO: 2091717 - DNA, 15 bp, Homo sapiens
gaacccgtcagaaag

SEQ ID NO: 2091718 - DNA, 15 bp, Homo sapiens
aacccgtcagaaagt

SEQ ID NO: 2091719 - DNA, 15 bp, Homo sapiens
acccgtcagaaagtt

SEQ ID NO: 2091720 - DNA, 15 bp, Homo sapiens
cccgtcagaaagttt

SEQ ID NO: 2091721 - DNA, 15 bp, Homo sapiens
ccgtcagaaagtttt

SEQ ID NO: 2091722 - DNA, 15 bp, Homo sapiens
cgtcagaaagttttc

SEQ ID NO: 2091723 - DNA, 15 bp, Homo sapiens
gtcagaaagttttct

SEQ ID NO: 2091724 - DNA, 15 bp, Homo sapiens
tcagaaagttttcta

SEQ ID NO: 2091725 - DNA, 15 bp, Homo sapiens
cagaaagttttctag

SEQ ID NO: 2091726 - DNA, 15 bp, Homo sapiens
agaaagttttctagc

SEQ ID NO: 2091727 - DNA, 15 bp, Homo sapiens
gaaagttttctagct

SEQ ID NO: 2091728 - DNA, 15 bp, Homo sapiens
aaagttttctagctt

SEQ ID NO: 2091729 - DNA, 15 bp, Homo sapiens
aagttttctagcttc

SEQ ID NO: 2091730 - DNA, 15 bp, Homo sapiens
agttttctagcttca

SEQ ID NO: 2091731 - DNA, 15 bp, Homo sapiens
gttttctagcttcat

SEQ ID NO: 2091732 - DNA, 15 bp, Homo sapiens
ttttctagcttcatc

SEQ ID NO: 2091733 - DNA, 15 bp, Homo sapiens
tttctagcttcatca

SEQ ID NO: 2091734 - DNA, 15 bp, Homo sapiens
ttctagcttcatcat

SEQ ID NO: 2091735 - DNA, 15 bp, Homo sapiens
tctagcttcatcatc

SEQ ID NO: 2091736 - DNA, 15 bp, Homo sapiens
ctagcttcatcatct

SEQ ID NO: 2091737 - DNA, 15 bp, Homo sapiens
tagcttcatcatcta

SEQ ID NO: 2091738 - DNA, 15 bp, Homo sapiens
agcttcatcatctaa

SEQ ID NO: 2091739 - DNA, 15 bp, Homo sapiens
gcttcatcatctaaa

SEQ ID NO: 2091740 - DNA, 15 bp, Homo sapiens
cttcatcatctaaat

SEQ ID NO: 2091741 - DNA, 15 bp, Homo sapiens
ttcatcatctaaata

SEQ ID NO: 2091742 - DNA, 15 bp, Homo sapiens
tcatcatctaaatat

SEQ ID NO: 2091743 - DNA, 15 bp, Homo sapiens
catcatctaaatata

SEQ ID NO: 2091744 - DNA, 15 bp, Homo sapiens
atcatctaaatatac

SEQ ID NO: 2091745 - DNA, 15 bp, Homo sapiens
tcatctaaatatacc

SEQ ID NO: 2091746 - DNA, 15 bp, Homo sapiens
catctaaatataccc

SEQ ID NO: 2091747 - DNA, 15 bp, Homo sapiens
atctaaatataccca

SEQ ID NO: 2091748 - DNA, 15 bp, Homo sapiens
tctaaatatacccag

SEQ ID NO: 2091749 - DNA, 15 bp, Homo sapiens
ctaaatatacccaga

SEQ ID NO: 2091750 - DNA, 15 bp, Homo sapiens
taaatatacccagat

SEQ ID NO: 2091751 - DNA, 15 bp, Homo sapiens
aaatatacccagatt

SEQ ID NO: 2091752 - DNA, 15 bp, Homo sapiens
aatatacccagattc

SEQ ID NO: 2091753 - DNA, 15 bp, Homo sapiens
atatacccagattcc

SEQ ID NO: 2091754 - DNA, 15 bp, Homo sapiens
tatacccagattcca

SEQ ID NO: 2091755 - DNA, 15 bp, Homo sapiens
atacccagattccaa

SEQ ID NO: 2091756 - DNA, 15 bp, Homo sapiens
tacccagattccaac

SEQ ID NO: 2091757 - DNA, 15 bp, Homo sapiens
acccagattccaact

SEQ ID NO: 2091758 - DNA, 15 bp, Homo sapiens
cccagattccaacta

SEQ ID NO: 2091759 - DNA, 15 bp, Homo sapiens
ccagattccaactac

SEQ ID NO: 2091760 - DNA, 15 bp, Homo sapiens
cagattccaactact

SEQ ID NO: 2091761 - DNA, 15 bp, Homo sapiens
agattccaactactt

SEQ ID NO: 2091762 - DNA, 15 bp, Homo sapiens
gattccaactacttc

SEQ ID NO: 2091763 - DNA, 15 bp, Homo sapiens
attccaactacttct

SEQ ID NO: 2091764 - DNA, 15 bp, Homo sapiens
ttccaactacttctc

SEQ ID NO: 2091765 - DNA, 15 bp, Homo sapiens
tccaactacttctca

SEQ ID NO: 2091766 - DNA, 15 bp, Homo sapiens
ccaactacttctcac

SEQ ID NO: 2091767 - DNA, 15 bp, Homo sapiens
caactacttctcacc

SEQ ID NO: 2091768 - DNA, 15 bp, Homo sapiens
aactacttctcacca

SEQ ID NO: 2091769 - DNA, 15 bp, Homo sapiens
actacttctcaccac

SEQ ID NO: 2091770 - DNA, 15 bp, Homo sapiens
ctacttctcaccacg

SEQ ID NO: 2091771 - DNA, 15 bp, Homo sapiens
tacttctcaccacgc

SEQ ID NO: 2091772 - DNA, 15 bp, Homo sapiens
acttctcaccacgcc

SEQ ID NO: 2091773 - DNA, 15 bp, Homo sapiens
cttctcaccacgccc

SEQ ID NO: 2091774 - DNA, 15 bp, Homo sapiens
ttctcaccacgcccg

SEQ ID NO: 2091775 - DNA, 15 bp, Homo sapiens
tctcaccacgcccga

SEQ ID NO: 2091776 - DNA, 15 bp, Homo sapiens
ctcaccacgcccgag

SEQ ID NO: 2091777 - DNA, 15 bp, Homo sapiens
tcaccacgcccgagg

SEQ ID NO: 2091778 - DNA, 15 bp, Homo sapiens
caccacgcccgaggc

SEQ ID NO: 2091779 - DNA, 15 bp, Homo sapiens
accacgcccgaggcg

SEQ ID NO: 2091780 - DNA, 15 bp, Homo sapiens
ccacgcccgaggcgc

SEQ ID NO: 2091781 - DNA, 15 bp, Homo sapiens
cacgcccgaggcgcc

SEQ ID NO: 2091782 - DNA, 15 bp, Homo sapiens
acgcccgaggcgcca

SEQ ID NO: 2091783 - DNA, 15 bp, Homo sapiens
cgcccgaggcgccat

SEQ ID NO: 2091784 - DNA, 15 bp, Homo sapiens
gcccgaggcgccatc

SEQ ID NO: 2091785 - DNA, 15 bp, Homo sapiens
cccgaggcgccatca

SEQ ID NO: 2091786 - DNA, 15 bp, Homo sapiens
ccgaggcgccatcac

SEQ ID NO: 2091787 - DNA, 15 bp, Homo sapiens
cgaggcgccatcacc

SEQ ID NO: 2091788 - DNA, 15 bp, Homo sapiens
gaggcgccatcacct

SEQ ID NO: 2091789 - DNA, 15 bp, Homo sapiens
aggcgccatcacctc

SEQ ID NO: 2091790 - DNA, 15 bp, Homo sapiens
ggcgccatcacctct

SEQ ID NO: 2091791 - DNA, 15 bp, Homo sapiens
gcgccatcacctctg

SEQ ID NO: 2091792 - DNA, 15 bp, Homo sapiens
cgccatcacctctgg

SEQ ID NO: 2091793 - DNA, 15 bp, Homo sapiens
gccatcacctctggt

SEQ ID NO: 2091794 - DNA, 15 bp, Homo sapiens
ccatcacctctggtc

SEQ ID NO: 2091795 - DNA, 15 bp, Homo sapiens
catcacctctggtcc

SEQ ID NO: 2091796 - DNA, 15 bp, Homo sapiens
atcacctctggtcca

SEQ ID NO: 2091797 - DNA, 15 bp, Homo sapiens
tcacctctggtccaa

SEQ ID NO: 2091798 - DNA, 15 bp, Homo sapiens
cacctctggtccaag

SEQ ID NO: 2091799 - DNA, 15 bp, Homo sapiens
acctctggtccaagg

SEQ ID NO: 2091800 - DNA, 15 bp, Homo sapiens
cctctggtccaaggc

SEQ ID NO: 2091801 - DNA, 15 bp, Homo sapiens
ctctggtccaaggca

SEQ ID NO: 2091802 - DNA, 15 bp, Homo sapiens
tctggtccaaggcac

SEQ ID NO: 2091803 - DNA, 15 bp, Homo sapiens
ctggtccaaggcacc

SEQ ID NO: 2091804 - DNA, 15 bp, Homo sapiens
tggtccaaggcacca

SEQ ID NO: 2091805 - DNA, 15 bp, Homo sapiens
ggtccaaggcaccat

SEQ ID NO: 2091806 - DNA, 15 bp, Homo sapiens
gtccaaggcaccatc

SEQ ID NO: 2091807 - DNA, 15 bp, Homo sapiens
tccaaggcaccatca

SEQ ID NO: 2091808 - DNA, 15 bp, Homo sapiens
ccaaggcaccatcac

SEQ ID NO: 2091809 - DNA, 15 bp, Homo sapiens
caaggcaccatcacc

SEQ ID NO: 2091810 - DNA, 15 bp, Homo sapiens
aaggcaccatcacct

SEQ ID NO: 2091811 - DNA, 15 bp, Homo sapiens
aggcaccatcacctc

SEQ ID NO: 2091812 - DNA, 15 bp, Homo sapiens
ggcaccatcacctct

SEQ ID NO: 2091813 - DNA, 15 bp, Homo sapiens
gcaccatcacctctc

SEQ ID NO: 2091814 - DNA, 15 bp, Homo sapiens
caccatcacctctcc

SEQ ID NO: 2091815 - DNA, 15 bp, Homo sapiens
accatcacctctccc

SEQ ID NO: 2091816 - DNA, 15 bp, Homo sapiens
ccatcacctctcccc

SEQ ID NO: 2091817 - DNA, 15 bp, Homo sapiens
catcacctctccccc

SEQ ID NO: 2091818 - DNA, 15 bp, Homo sapiens
atcacctctccccca

SEQ ID NO: 2091819 - DNA, 15 bp, Homo sapiens
tcacctctcccccag

SEQ ID NO: 2091820 - DNA, 15 bp, Homo sapiens
cacctctcccccaga

SEQ ID NO: 2091821 - DNA, 15 bp, Homo sapiens
acctctcccccagat

SEQ ID NO: 2091822 - DNA, 15 bp, Homo sapiens
cctctcccccagatt

SEQ ID NO: 2091823 - DNA, 15 bp, Homo sapiens
ctctcccccagattc

SEQ ID NO: 2091824 - DNA, 15 bp, Homo sapiens
tctcccccagattcc

SEQ ID NO: 2091825 - DNA, 15 bp, Homo sapiens
ctcccccagattcct

SEQ ID NO: 2091826 - DNA, 15 bp, Homo sapiens
tcccccagattcctg

SEQ ID NO: 2091827 - DNA, 15 bp, Homo sapiens
cccccagattcctgc

SEQ ID NO: 2091828 - DNA, 15 bp, Homo sapiens
ccccagattcctgca

SEQ ID NO: 2091829 - DNA, 15 bp, Homo sapiens
cccagattcctgcat

SEQ ID NO: 2091830 - DNA, 15 bp, Homo sapiens
ccagattcctgcatc

SEQ ID NO: 2091831 - DNA, 15 bp, Homo sapiens
cagattcctgcatcc

SEQ ID NO: 2091832 - DNA, 15 bp, Homo sapiens
agattcctgcatccg

SEQ ID NO: 2091833 - DNA, 15 bp, Homo sapiens
gattcctgcatccgc

SEQ ID NO: 2091834 - DNA, 15 bp, Homo sapiens
attcctgcatccgcc

SEQ ID NO: 2091835 - DNA, 15 bp, Homo sapiens
ttcctgcatccgcct

SEQ ID NO: 2091836 - DNA, 15 bp, Homo sapiens
tcctgcatccgcctc

SEQ ID NO: 2091837 - DNA, 15 bp, Homo sapiens
cctgcatccgcctcc

SEQ ID NO: 2091838 - DNA, 15 bp, Homo sapiens
ctgcatccgcctcct

SEQ ID NO: 2091839 - DNA, 15 bp, Homo sapiens
tgcatccgcctcctc

SEQ ID NO: 2091840 - DNA, 15 bp, Homo sapiens
gcatccgcctcctca

SEQ ID NO: 2091841 - DNA, 15 bp, Homo sapiens
catccgcctcctcac

SEQ ID NO: 2091842 - DNA, 15 bp, Homo sapiens
atccgcctcctcact

SEQ ID NO: 2091843 - DNA, 15 bp, Homo sapiens
tccgcctcctcactg

SEQ ID NO: 2091844 - DNA, 15 bp, Homo sapiens
ccgcctcctcactgg

SEQ ID NO: 2091845 - DNA, 15 bp, Homo sapiens
cgcctcctcactggc

SEQ ID NO: 2091846 - DNA, 15 bp, Homo sapiens
gcctcctcactggcc

SEQ ID NO: 2091847 - DNA, 15 bp, Homo sapiens
cctcctcactggcct

SEQ ID NO: 2091848 - DNA, 15 bp, Homo sapiens
ctcctcactggcctc

SEQ ID NO: 2091849 - DNA, 15 bp, Homo sapiens
tcctcactggcctcc

SEQ ID NO: 2091850 - DNA, 15 bp, Homo sapiens
cctcactggcctccc

SEQ ID NO: 2091851 - DNA, 15 bp, Homo sapiens
ctcactggcctccct

SEQ ID NO: 2091852 - DNA, 15 bp, Homo sapiens
tcactggcctccctg

SEQ ID NO: 2091853 - DNA, 15 bp, Homo sapiens
cactggcctccctgt

SEQ ID NO: 2091854 - DNA, 15 bp, Homo sapiens
actggcctccctgtg

SEQ ID NO: 2091855 - DNA, 15 bp, Homo sapiens
ctggcctccctgtgc

SEQ ID NO: 2091856 - DNA, 15 bp, Homo sapiens
tggcctccctgtgct

SEQ ID NO: 2091857 - DNA, 15 bp, Homo sapiens
ggcctccctgtgctc

SEQ ID NO: 2091858 - DNA, 15 bp, Homo sapiens
gcctccctgtgctca

SEQ ID NO: 2091859 - DNA, 15 bp, Homo sapiens
cctccctgtgctcat

SEQ ID NO: 2091860 - DNA, 15 bp, Homo sapiens
ctccctgtgctcatc

SEQ ID NO: 2091861 - DNA, 15 bp, Homo sapiens
tccctgtgctcatcc

SEQ ID NO: 2091862 - DNA, 15 bp, Homo sapiens
ccctgtgctcatcct

SEQ ID NO: 2091863 - DNA, 15 bp, Homo sapiens
cctgtgctcatcctt

SEQ ID NO: 2091864 - DNA, 15 bp, Homo sapiens
ctgtgctcatccttg

SEQ ID NO: 2091865 - DNA, 15 bp, Homo sapiens
tgtgctcatccttgc

SEQ ID NO: 2091866 - DNA, 15 bp, Homo sapiens
gtgctcatccttgct

SEQ ID NO: 2091867 - DNA, 15 bp, Homo sapiens
tgctcatccttgctc

SEQ ID NO: 2091868 - DNA, 15 bp, Homo sapiens
gctcatccttgctcc

SEQ ID NO: 2091869 - DNA, 15 bp, Homo sapiens
ctcatccttgctccc

SEQ ID NO: 2091870 - DNA, 15 bp, Homo sapiens
tcatccttgctcccc

SEQ ID NO: 2091871 - DNA, 15 bp, Homo sapiens
catccttgctcccca

SEQ ID NO: 2091872 - DNA, 15 bp, Homo sapiens
atccttgctccccag

SEQ ID NO: 2091873 - DNA, 15 bp, Homo sapiens
tccttgctccccagt

SEQ ID NO: 2091874 - DNA, 15 bp, Homo sapiens
ccttgctccccagtg

SEQ ID NO: 2091875 - DNA, 15 bp, Homo sapiens
cttgctccccagtgg

SEQ ID NO: 2091876 - DNA, 15 bp, Homo sapiens
ttgctccccagtggg

SEQ ID NO: 2091877 - DNA, 15 bp, Homo sapiens
tgctccccagtgggg

SEQ ID NO: 2091878 - DNA, 15 bp, Homo sapiens
gctccccagtggggt

SEQ ID NO: 2091879 - DNA, 15 bp, Homo sapiens
ctccccagtggggtt

SEQ ID NO: 2091880 - DNA, 15 bp, Homo sapiens
tccccagtggggttt

SEQ ID NO: 2091881 - DNA, 15 bp, Homo sapiens
ccccagtggggtttc

SEQ ID NO: 2091882 - DNA, 15 bp, Homo sapiens
cccagtggggtttct

SEQ ID NO: 2091883 - DNA, 15 bp, Homo sapiens
ccagtggggtttctc

SEQ ID NO: 2091884 - DNA, 15 bp, Homo sapiens
cagtggggtttctca

SEQ ID NO: 2091885 - DNA, 15 bp, Homo sapiens
agtggggtttctcaa

SEQ ID NO: 2091886 - DNA, 15 bp, Homo sapiens
gtggggtttctcaat

SEQ ID NO: 2091887 - DNA, 15 bp, Homo sapiens
tggggtttctcaata

SEQ ID NO: 2091888 - DNA, 15 bp, Homo sapiens
ggggtttctcaataa

SEQ ID NO: 2091889 - DNA, 15 bp, Homo sapiens
gggtttctcaataag

SEQ ID NO: 2091890 - DNA, 15 bp, Homo sapiens
ggtttctcaataagc

SEQ ID NO: 2091891 - DNA, 15 bp, Homo sapiens
gtttctcaataagca

SEQ ID NO: 2091892 - DNA, 15 bp, Homo sapiens
tttctcaataagcag

SEQ ID NO: 2091893 - DNA, 15 bp, Homo sapiens
ttctcaataagcagc

SEQ ID NO: 2091894 - DNA, 15 bp, Homo sapiens
tctcaataagcagcc

SEQ ID NO: 2091895 - DNA, 15 bp, Homo sapiens
ctcaataagcagcca

SEQ ID NO: 2091896 - DNA, 15 bp, Homo sapiens
tcaataagcagccat

SEQ ID NO: 2091897 - DNA, 15 bp, Homo sapiens
caataagcagccatg

SEQ ID NO: 2091898 - DNA, 15 bp, Homo sapiens
aataagcagccatgg

SEQ ID NO: 2091899 - DNA, 15 bp, Homo sapiens
ataagcagccatggg

SEQ ID NO: 2091900 - DNA, 15 bp, Homo sapiens
taagcagccatggga

SEQ ID NO: 2091901 - DNA, 15 bp, Homo sapiens
aagcagccatgggag

SEQ ID NO: 2091902 - DNA, 15 bp, Homo sapiens
agcagccatgggagc

SEQ ID NO: 2091903 - DNA, 15 bp, Homo sapiens
gcagccatgggagcc

SEQ ID NO: 2091904 - DNA, 15 bp, Homo sapiens
cagccatgggagccc

SEQ ID NO: 2091905 - DNA, 15 bp, Homo sapiens
agccatgggagccca

SEQ ID NO: 2091906 - DNA, 15 bp, Homo sapiens
gccatgggagcccat

SEQ ID NO: 2091907 - DNA, 15 bp, Homo sapiens
ccatgggagcccatc

SEQ ID NO: 2091908 - DNA, 15 bp, Homo sapiens
catgggagcccatca

SEQ ID NO: 2091909 - DNA, 15 bp, Homo sapiens
atgggagcccatcaa

SEQ ID NO: 2091910 - DNA, 15 bp, Homo sapiens
tgggagcccatcaag

SEQ ID NO: 2091911 - DNA, 15 bp, Homo sapiens
gggagcccatcaaga

SEQ ID NO: 2091912 - DNA, 15 bp, Homo sapiens
ggagcccatcaagat

SEQ ID NO: 2091913 - DNA, 15 bp, Homo sapiens
gagcccatcaagatt

SEQ ID NO: 2091914 - DNA, 15 bp, Homo sapiens
agcccatcaagattg

SEQ ID NO: 2091915 - DNA, 15 bp, Homo sapiens
gcccatcaagattgc

SEQ ID NO: 2091916 - DNA, 15 bp, Homo sapiens
cccatcaagattgca

SEQ ID NO: 2091917 - DNA, 15 bp, Homo sapiens
ccatcaagattgcac

SEQ ID NO: 2091918 - DNA, 15 bp, Homo sapiens
catcaagattgcact

SEQ ID NO: 2091919 - DNA, 15 bp, Homo sapiens
atcaagattgcactt

SEQ ID NO: 2091920 - DNA, 15 bp, Homo sapiens
tcaagattgcactta

SEQ ID NO: 2091921 - DNA, 15 bp, Homo sapiens
caagattgcacttag

SEQ ID NO: 2091922 - DNA, 15 bp, Homo sapiens
aagattgcacttagc

SEQ ID NO: 2091923 - DNA, 15 bp, Homo sapiens
agattgcacttagca

SEQ ID NO: 2091924 - DNA, 15 bp, Homo sapiens
gattgcacttagcac

SEQ ID NO: 2091925 - DNA, 15 bp, Homo sapiens
attgcacttagcacc

SEQ ID NO: 2091926 - DNA, 15 bp, Homo sapiens
ttgcacttagcacct

SEQ ID NO: 2091927 - DNA, 15 bp, Homo sapiens
tgcacttagcacctc

SEQ ID NO: 2091928 - DNA, 15 bp, Homo sapiens
gcacttagcacctcc

SEQ ID NO: 2091929 - DNA, 15 bp, Homo sapiens
cacttagcacctcct

SEQ ID NO: 2091930 - DNA, 15 bp, Homo sapiens
acttagcacctcctc

SEQ ID NO: 2091931 - DNA, 15 bp, Homo sapiens
cttagcacctcctcc

SEQ ID NO: 2091932 - DNA, 15 bp, Homo sapiens
ttagcacctcctccc

SEQ ID NO: 2091933 - DNA, 15 bp, Homo sapiens
tagcacctcctcccc

SEQ ID NO: 2091934 - DNA, 15 bp, Homo sapiens
agcacctcctcccct

SEQ ID NO: 2091935 - DNA, 15 bp, Homo sapiens
gcacctcctcccctc

SEQ ID NO: 2091936 - DNA, 15 bp, Homo sapiens
cacctcctcccctca

SEQ ID NO: 2091937 - DNA, 15 bp, Homo sapiens
acctcctcccctcaa

SEQ ID NO: 2091938 - DNA, 15 bp, Homo sapiens
cctcctcccctcaaa

SEQ ID NO: 2091939 - DNA, 15 bp, Homo sapiens
ctcctcccctcaaag

SEQ ID NO: 2091940 - DNA, 15 bp, Homo sapiens
tcctcccctcaaagc

SEQ ID NO: 2091941 - DNA, 15 bp, Homo sapiens
cctcccctcaaagcc

SEQ ID NO: 2091942 - DNA, 15 bp, Homo sapiens
ctcccctcaaagccc

SEQ ID NO: 2091943 - DNA, 15 bp, Homo sapiens
tcccctcaaagccct

SEQ ID NO: 2091944 - DNA, 15 bp, Homo sapiens
cccctcaaagccctg

SEQ ID NO: 2091945 - DNA, 15 bp, Homo sapiens
ccctcaaagccctga

SEQ ID NO: 2091946 - DNA, 15 bp, Homo sapiens
cctcaaagccctgac

SEQ ID NO: 2091947 - DNA, 15 bp, Homo sapiens
ctcaaagccctgaca

SEQ ID NO: 2091948 - DNA, 15 bp, Homo sapiens
tcaaagccctgacat

SEQ ID NO: 2091949 - DNA, 15 bp, Homo sapiens
caaagccctgacatg

SEQ ID NO: 2091950 - DNA, 15 bp, Homo sapiens
aaagccctgacatgg

SEQ ID NO: 2091951 - DNA, 15 bp, Homo sapiens
aagccctgacatggc

SEQ ID NO: 2091952 - DNA, 15 bp, Homo sapiens
agccctgacatggcc

SEQ ID NO: 2091953 - DNA, 15 bp, Homo sapiens
gccctgacatggcca

SEQ ID NO: 2091954 - DNA, 15 bp, Homo sapiens
ccctgacatggccag

SEQ ID NO: 2091955 - DNA, 15 bp, Homo sapiens
cctgacatggccaga

SEQ ID NO: 2091956 - DNA, 15 bp, Homo sapiens
ctgacatggccagac

SEQ ID NO: 2091957 - DNA, 15 bp, Homo sapiens
tgacatggccagacc

SEQ ID NO: 2091958 - DNA, 15 bp, Homo sapiens
gacatggccagaccc

SEQ ID NO: 2091959 - DNA, 15 bp, Homo sapiens
acatggccagacccg

SEQ ID NO: 2091960 - DNA, 15 bp, Homo sapiens
catggccagacccgt

SEQ ID NO: 2091961 - DNA, 15 bp, Homo sapiens
atggccagacccgtc

SEQ ID NO: 2091962 - DNA, 15 bp, Homo sapiens
tggccagacccgtcc

SEQ ID NO: 2091963 - DNA, 15 bp, Homo sapiens
ggccagacccgtccc

SEQ ID NO: 2091964 - DNA, 15 bp, Homo sapiens
gccagacccgtcccc

SEQ ID NO: 2091965 - DNA, 15 bp, Homo sapiens
ccagacccgtcccct

SEQ ID NO: 2091966 - DNA, 15 bp, Homo sapiens
cagacccgtccccta

SEQ ID NO: 2091967 - DNA, 15 bp, Homo sapiens
agacccgtcccctag

SEQ ID NO: 2091968 - DNA, 15 bp, Homo sapiens
gacccgtcccctagg

SEQ ID NO: 2091969 - DNA, 15 bp, Homo sapiens
acccgtcccctagga

SEQ ID NO: 2091970 - DNA, 15 bp, Homo sapiens
cccgtcccctaggag

SEQ ID NO: 2091971 - DNA, 15 bp, Homo sapiens
ccgtcccctaggagt

SEQ ID NO: 2091972 - DNA, 15 bp, Homo sapiens
cgtcccctaggagtc

SEQ ID NO: 2091973 - DNA, 15 bp, Homo sapiens
gtcccctaggagtca

SEQ ID NO: 2091974 - DNA, 15 bp, Homo sapiens
tcccctaggagtcac

SEQ ID NO: 2091975 - DNA, 15 bp, Homo sapiens
cccctaggagtcaca

SEQ ID NO: 2091976 - DNA, 15 bp, Homo sapiens
ccctaggagtcacag

SEQ ID NO: 2091977 - DNA, 15 bp, Homo sapiens
cctaggagtcacagc

SEQ ID NO: 2091978 - DNA, 15 bp, Homo sapiens
ctaggagtcacagcc

SEQ ID NO: 2091979 - DNA, 15 bp, Homo sapiens
taggagtcacagcca

SEQ ID NO: 2091980 - DNA, 15 bp, Homo sapiens
aggagtcacagccag

SEQ ID NO: 2091981 - DNA, 15 bp, Homo sapiens
ggagtcacagccagg

SEQ ID NO: 2091982 - DNA, 15 bp, Homo sapiens
gagtcacagccaggt

SEQ ID NO: 2091983 - DNA, 15 bp, Homo sapiens
agtcacagccaggtc

SEQ ID NO: 2091984 - DNA, 15 bp, Homo sapiens
gtcacagccaggtcc

SEQ ID NO: 2091985 - DNA, 15 bp, Homo sapiens
tcacagccaggtcct

SEQ ID NO: 2091986 - DNA, 15 bp, Homo sapiens
cacagccaggtccta

SEQ ID NO: 2091987 - DNA, 15 bp, Homo sapiens
acagccaggtcctaa

SEQ ID NO: 2091988 - DNA, 15 bp, Homo sapiens
cagccaggtcctaac

SEQ ID NO: 2091989 - DNA, 15 bp, Homo sapiens
agccaggtcctaacc

SEQ ID NO: 2091990 - DNA, 15 bp, Homo sapiens
gccaggtcctaacct

SEQ ID NO: 2091991 - DNA, 15 bp, Homo sapiens
ccaggtcctaacctg

SEQ ID NO: 2091992 - DNA, 15 bp, Homo sapiens
caggtcctaacctgg

SEQ ID NO: 2091993 - DNA, 15 bp, Homo sapiens
aggtcctaacctggc

SEQ ID NO: 2091994 - DNA, 15 bp, Homo sapiens
ggtcctaacctggcc

SEQ ID NO: 2091995 - DNA, 15 bp, Homo sapiens
gtcctaacctggccc

SEQ ID NO: 2091996 - DNA, 15 bp, Homo sapiens
tcctaacctggccca

SEQ ID NO: 2091997 - DNA, 15 bp, Homo sapiens
cctaacctggcccag

SEQ ID NO: 2091998 - DNA, 15 bp, Homo sapiens
ctaacctggcccagg

SEQ ID NO: 2091999 - DNA, 15 bp, Homo sapiens
taacctggcccaggg

SEQ ID NO: 2092000 - DNA, 15 bp, Homo sapiens
aacctggcccagggc

SEQ ID NO: 2092001 - DNA, 15 bp, Homo sapiens
acctggcccagggcc

SEQ ID NO: 2092002 - DNA, 15 bp, Homo sapiens
cctggcccagggcct

SEQ ID NO: 2092003 - DNA, 15 bp, Homo sapiens
ctggcccagggcctg

SEQ ID NO: 2092004 - DNA, 15 bp, Homo sapiens
tggcccagggcctgt

SEQ ID NO: 2092005 - DNA, 15 bp, Homo sapiens
ggcccagggcctgtg

SEQ ID NO: 2092006 - DNA, 15 bp, Homo sapiens
gcccagggcctgtgc

SEQ ID NO: 2092007 - DNA, 15 bp, Homo sapiens
cccagggcctgtgcc

SEQ ID NO: 2092008 - DNA, 15 bp, Homo sapiens
ccagggcctgtgcca

SEQ ID NO: 2092009 - DNA, 15 bp, Homo sapiens
cagggcctgtgccat

SEQ ID NO: 2092010 - DNA, 15 bp, Homo sapiens
agggcctgtgccatc

SEQ ID NO: 2092011 - DNA, 15 bp, Homo sapiens
gggcctgtgccatcc

SEQ ID NO: 2092012 - DNA, 15 bp, Homo sapiens
ggcctgtgccatcca

SEQ ID NO: 2092013 - DNA, 15 bp, Homo sapiens
gcctgtgccatccac

SEQ ID NO: 2092014 - DNA, 15 bp, Homo sapiens
cctgtgccatccacc

SEQ ID NO: 2092015 - DNA, 15 bp, Homo sapiens
ctgtgccatccaccc

SEQ ID NO: 2092016 - DNA, 15 bp, Homo sapiens
tgtgccatccacccc

SEQ ID NO: 2092017 - DNA, 15 bp, Homo sapiens
gtgccatccacccct

SEQ ID NO: 2092018 - DNA, 15 bp, Homo sapiens
tgccatccacccctg

SEQ ID NO: 2092019 - DNA, 15 bp, Homo sapiens
gccatccacccctgc

SEQ ID NO: 2092020 - DNA, 15 bp, Homo sapiens
ccatccacccctgcc

SEQ ID NO: 2092021 - DNA, 15 bp, Homo sapiens
catccacccctgcca

SEQ ID NO: 2092022 - DNA, 15 bp, Homo sapiens
atccacccctgccac

SEQ ID NO: 2092023 - DNA, 15 bp, Homo sapiens
tccacccctgccact

SEQ ID NO: 2092024 - DNA, 15 bp, Homo sapiens
ccacccctgccactt

SEQ ID NO: 2092025 - DNA, 15 bp, Homo sapiens
cacccctgccacttt

SEQ ID NO: 2092026 - DNA, 15 bp, Homo sapiens
acccctgccactttt

SEQ ID NO: 2092027 - DNA, 15 bp, Homo sapiens
cccctgccacttttc

SEQ ID NO: 2092028 - DNA, 15 bp, Homo sapiens
ccctgccacttttct

SEQ ID NO: 2092029 - DNA, 15 bp, Homo sapiens
cctgccacttttctg

SEQ ID NO: 2092030 - DNA, 15 bp, Homo sapiens
ctgccacttttctgg

SEQ ID NO: 2092031 - DNA, 15 bp, Homo sapiens
tgccacttttctggc

SEQ ID NO: 2092032 - DNA, 15 bp, Homo sapiens
gccacttttctggcg

SEQ ID NO: 2092033 - DNA, 15 bp, Homo sapiens
ccacttttctggcga

SEQ ID NO: 2092034 - DNA, 15 bp, Homo sapiens
cacttttctggcgac

SEQ ID NO: 2092035 - DNA, 15 bp, Homo sapiens
acttttctggcgacg

SEQ ID NO: 2092036 - DNA, 15 bp, Homo sapiens
cttttctggcgacgt

SEQ ID NO: 2092037 - DNA, 15 bp, Homo sapiens
ttttctggcgacgtc

SEQ ID NO: 2092038 - DNA, 15 bp, Homo sapiens
tttctggcgacgtcc

SEQ ID NO: 2092039 - DNA, 15 bp, Homo sapiens
ttctggcgacgtccg

SEQ ID NO: 2092040 - DNA, 15 bp, Homo sapiens
tctggcgacgtccgc

SEQ ID NO: 2092041 - DNA, 15 bp, Homo sapiens
ctggcgacgtccgca

SEQ ID NO: 2092042 - DNA, 15 bp, Homo sapiens
tggcgacgtccgcat

SEQ ID NO: 2092043 - DNA, 15 bp, Homo sapiens
ggcgacgtccgcatt

SEQ ID NO: 2092044 - DNA, 15 bp, Homo sapiens
gcgacgtccgcattc

SEQ ID NO: 2092045 - DNA, 15 bp, Homo sapiens
cgacgtccgcattcc

SEQ ID NO: 2092046 - DNA, 15 bp, Homo sapiens
gacgtccgcattccc

SEQ ID NO: 2092047 - DNA, 15 bp, Homo sapiens
acgtccgcattccct

SEQ ID NO: 2092048 - DNA, 15 bp, Homo sapiens
cgtccgcattccctt

SEQ ID NO: 2092049 - DNA, 15 bp, Homo sapiens
gtccgcattcccttt

SEQ ID NO: 2092050 - DNA, 15 bp, Homo sapiens
tccgcattccctttt

SEQ ID NO: 2092051 - DNA, 15 bp, Homo sapiens
ccgcattcccttttc

SEQ ID NO: 2092052 - DNA, 15 bp, Homo sapiens
cgcattcccttttcc

SEQ ID NO: 2092053 - DNA, 15 bp, Homo sapiens
gcattcccttttccc

SEQ ID NO: 2092054 - DNA, 15 bp, Homo sapiens
cattcccttttccct

SEQ ID NO: 2092055 - DNA, 15 bp, Homo sapiens
attcccttttccctt

SEQ ID NO: 2092056 - DNA, 15 bp, Homo sapiens
ttcccttttcccttg

SEQ ID NO: 2092057 - DNA, 15 bp, Homo sapiens
tcccttttcccttgc

SEQ ID NO: 2092058 - DNA, 15 bp, Homo sapiens
cccttttcccttgca

SEQ ID NO: 2092059 - DNA, 15 bp, Homo sapiens
ccttttcccttgcac

SEQ ID NO: 2092060 - DNA, 15 bp, Homo sapiens
cttttcccttgcaca

SEQ ID NO: 2092061 - DNA, 15 bp, Homo sapiens
ttttcccttgcacaa

SEQ ID NO: 2092062 - DNA, 15 bp, Homo sapiens
tttcccttgcacaat

SEQ ID NO: 2092063 - DNA, 15 bp, Homo sapiens
ttcccttgcacaatg

SEQ ID NO: 2092064 - DNA, 15 bp, Homo sapiens
tcccttgcacaatgg

SEQ ID NO: 2092065 - DNA, 15 bp, Homo sapiens
cccttgcacaatggc

SEQ ID NO: 2092066 - DNA, 15 bp, Homo sapiens
ccttgcacaatggcc

SEQ ID NO: 2092067 - DNA, 15 bp, Homo sapiens
cttgcacaatggcct

SEQ ID NO: 2092068 - DNA, 15 bp, Homo sapiens
ttgcacaatggcctc

SEQ ID NO: 2092069 - DNA, 15 bp, Homo sapiens
tgcacaatggcctcc

SEQ ID NO: 2092070 - DNA, 15 bp, Homo sapiens
gcacaatggcctcct

SEQ ID NO: 2092071 - DNA, 15 bp, Homo sapiens
cacaatggcctcctg

SEQ ID NO: 2092072 - DNA, 15 bp, Homo sapiens
acaatggcctcctgg

SEQ ID NO: 2092073 - DNA, 15 bp, Homo sapiens
caatggcctcctggc

SEQ ID NO: 2092074 - DNA, 15 bp, Homo sapiens
aatggcctcctggcc

SEQ ID NO: 2092075 - DNA, 15 bp, Homo sapiens
atggcctcctggcca

SEQ ID NO: 2092076 - DNA, 15 bp, Homo sapiens
tggcctcctggccat

SEQ ID NO: 2092077 - DNA, 15 bp, Homo sapiens
ggcctcctggccatt

SEQ ID NO: 2092078 - DNA, 15 bp, Homo sapiens
gcctcctggccattc

SEQ ID NO: 2092079 - DNA, 15 bp, Homo sapiens
cctcctggccattcc

SEQ ID NO: 2092080 - DNA, 15 bp, Homo sapiens
ctcctggccattcct

SEQ ID NO: 2092081 - DNA, 15 bp, Homo sapiens
tcctggccattcctc

SEQ ID NO: 2092082 - DNA, 15 bp, Homo sapiens
cctggccattcctca

SEQ ID NO: 2092083 - DNA, 15 bp, Homo sapiens
ctggccattcctcag

SEQ ID NO: 2092084 - DNA, 15 bp, Homo sapiens
tggccattcctcagc

SEQ ID NO: 2092085 - DNA, 15 bp, Homo sapiens
ggccattcctcagcc

SEQ ID NO: 2092086 - DNA, 15 bp, Homo sapiens
gccattcctcagccc

SEQ ID NO: 2092087 - DNA, 15 bp, Homo sapiens
ccattcctcagcccc

SEQ ID NO: 2092088 - DNA, 15 bp, Homo sapiens
cattcctcagcccca

SEQ ID NO: 2092089 - DNA, 15 bp, Homo sapiens
attcctcagccccat

SEQ ID NO: 2092090 - DNA, 15 bp, Homo sapiens
ttcctcagccccatg

SEQ ID NO: 2092091 - DNA, 15 bp, Homo sapiens
tcctcagccccatgg

SEQ ID NO: 2092092 - DNA, 15 bp, Homo sapiens
cctcagccccatggg

SEQ ID NO: 2092093 - DNA, 15 bp, Homo sapiens
ctcagccccatgggc

SEQ ID NO: 2092094 - DNA, 15 bp, Homo sapiens
tcagccccatgggcc

SEQ ID NO: 2092095 - DNA, 15 bp, Homo sapiens
cagccccatgggccc

SEQ ID NO: 2092096 - DNA, 15 bp, Homo sapiens
agccccatgggccca

SEQ ID NO: 2092097 - DNA, 15 bp, Homo sapiens
gccccatgggcccaa

SEQ ID NO: 2092098 - DNA, 15 bp, Homo sapiens
ccccatgggcccaat

SEQ ID NO: 2092099 - DNA, 15 bp, Homo sapiens
cccatgggcccaatc

SEQ ID NO: 2092100 - DNA, 15 bp, Homo sapiens
ccatgggcccaatcg

SEQ ID NO: 2092101 - DNA, 15 bp, Homo sapiens
catgggcccaatcgc

SEQ ID NO: 2092102 - DNA, 15 bp, Homo sapiens
atgggcccaatcgcc

SEQ ID NO: 2092103 - DNA, 15 bp, Homo sapiens
tgggcccaatcgcct

SEQ ID NO: 2092104 - DNA, 15 bp, Homo sapiens
gggcccaatcgcctt

SEQ ID NO: 2092105 - DNA, 15 bp, Homo sapiens
ggcccaatcgcctta

SEQ ID NO: 2092106 - DNA, 15 bp, Homo sapiens
gcccaatcgccttag

SEQ ID NO: 2092107 - DNA, 15 bp, Homo sapiens
cccaatcgccttagc

SEQ ID NO: 2092108 - DNA, 15 bp, Homo sapiens
ccaatcgccttagct

SEQ ID NO: 2092109 - DNA, 15 bp, Homo sapiens
caatcgccttagctc

SEQ ID NO: 2092110 - DNA, 15 bp, Homo sapiens
aatcgccttagctct

SEQ ID NO: 2092111 - DNA, 15 bp, Homo sapiens
atcgccttagctctc

SEQ ID NO: 2092112 - DNA, 15 bp, Homo sapiens
tcgccttagctctcc

SEQ ID NO: 2092113 - DNA, 15 bp, Homo sapiens
cgccttagctctcct

SEQ ID NO: 2092114 - DNA, 15 bp, Homo sapiens
gccttagctctcctg

SEQ ID NO: 2092115 - DNA, 15 bp, Homo sapiens
ccttagctctcctga

SEQ ID NO: 2092116 - DNA, 15 bp, Homo sapiens
cttagctctcctgac

SEQ ID NO: 2092117 - DNA, 15 bp, Homo sapiens
ttagctctcctgaca

SEQ ID NO: 2092118 - DNA, 15 bp, Homo sapiens
tagctctcctgacac

SEQ ID NO: 2092119 - DNA, 15 bp, Homo sapiens
agctctcctgacaca

SEQ ID NO: 2092120 - DNA, 15 bp, Homo sapiens
gctctcctgacacaa

SEQ ID NO: 2092121 - DNA, 15 bp, Homo sapiens
ctctcctgacacaag

SEQ ID NO: 2092122 - DNA, 15 bp, Homo sapiens
tctcctgacacaagc

SEQ ID NO: 2092123 - DNA, 15 bp, Homo sapiens
ctcctgacacaagcc

SEQ ID NO: 2092124 - DNA, 15 bp, Homo sapiens
tcctgacacaagccc

SEQ ID NO: 2092125 - DNA, 15 bp, Homo sapiens
cctgacacaagccct

SEQ ID NO: 2092126 - DNA, 15 bp, Homo sapiens
ctgacacaagccctc

SEQ ID NO: 2092127 - DNA, 15 bp, Homo sapiens
tgacacaagccctct

SEQ ID NO: 2092128 - DNA, 15 bp, Homo sapiens
gacacaagccctctc

SEQ ID NO: 2092129 - DNA, 15 bp, Homo sapiens
acacaagccctctca

SEQ ID NO: 2092130 - DNA, 15 bp, Homo sapiens
cacaagccctctcat

SEQ ID NO: 2092131 - DNA, 15 bp, Homo sapiens
acaagccctctcatc

SEQ ID NO: 2092132 - DNA, 15 bp, Homo sapiens
caagccctctcatct

SEQ ID NO: 2092133 - DNA, 15 bp, Homo sapiens
aagccctctcatctc

SEQ ID NO: 2092134 - DNA, 15 bp, Homo sapiens
agccctctcatctcc

SEQ ID NO: 2092135 - DNA, 15 bp, Homo sapiens
gccctctcatctccc

SEQ ID NO: 2092136 - DNA, 15 bp, Homo sapiens
ccctctcatctcccg

SEQ ID NO: 2092137 - DNA, 15 bp, Homo sapiens
cctctcatctcccgt

SEQ ID NO: 2092138 - DNA, 15 bp, Homo sapiens
ctctcatctcccgta

SEQ ID NO: 2092139 - DNA, 15 bp, Homo sapiens
tctcatctcccgtag

SEQ ID NO: 2092140 - DNA, 15 bp, Homo sapiens
ctcatctcccgtagg

SEQ ID NO: 2092141 - DNA, 15 bp, Homo sapiens
tcatctcccgtaggt

SEQ ID NO: 2092142 - DNA, 15 bp, Homo sapiens
catctcccgtaggtc

SEQ ID NO: 2092143 - DNA, 15 bp, Homo sapiens
atctcccgtaggtct

SEQ ID NO: 2092144 - DNA, 15 bp, Homo sapiens
tctcccgtaggtctc

SEQ ID NO: 2092145 - DNA, 15 bp, Homo sapiens
ctcccgtaggtctct

SEQ ID NO: 2092146 - DNA, 15 bp, Homo sapiens
tcccgtaggtctctg

SEQ ID NO: 2092147 - DNA, 15 bp, Homo sapiens
cccgtaggtctctgt

SEQ ID NO: 2092148 - DNA, 15 bp, Homo sapiens
ccgtaggtctctgtt

SEQ ID NO: 2092149 - DNA, 15 bp, Homo sapiens
cgtaggtctctgttc

SEQ ID NO: 2092150 - DNA, 15 bp, Homo sapiens
gtaggtctctgttca

SEQ ID NO: 2092151 - DNA, 15 bp, Homo sapiens
taggtctctgttcag

SEQ ID NO: 2092152 - DNA, 15 bp, Homo sapiens
aggtctctgttcagc

SEQ ID NO: 2092153 - DNA, 15 bp, Homo sapiens
ggtctctgttcagct

SEQ ID NO: 2092154 - DNA, 15 bp, Homo sapiens
gtctctgttcagctc

SEQ ID NO: 2092155 - DNA, 15 bp, Homo sapiens
tctctgttcagctct

SEQ ID NO: 2092156 - DNA, 15 bp, Homo sapiens
ctctgttcagctctc

SEQ ID NO: 2092157 - DNA, 15 bp, Homo sapiens
tctgttcagctctca

SEQ ID NO: 2092158 - DNA, 15 bp, Homo sapiens
ctgttcagctctcac

SEQ ID NO: 2092159 - DNA, 15 bp, Homo sapiens
tgttcagctctcact

SEQ ID NO: 2092160 - DNA, 15 bp, Homo sapiens
gttcagctctcactt

SEQ ID NO: 2092161 - DNA, 15 bp, Homo sapiens
ttcagctctcacttg

SEQ ID NO: 2092162 - DNA, 15 bp, Homo sapiens
tcagctctcacttgc

SEQ ID NO: 2092163 - DNA, 15 bp, Homo sapiens
cagctctcacttgct

SEQ ID NO: 2092164 - DNA, 15 bp, Homo sapiens
agctctcacttgctc

SEQ ID NO: 2092165 - DNA, 15 bp, Homo sapiens
gctctcacttgctca

SEQ ID NO: 2092166 - DNA, 15 bp, Homo sapiens
ctctcacttgctcac

SEQ ID NO: 2092167 - DNA, 15 bp, Homo sapiens
tctcacttgctcacg

SEQ ID NO: 2092168 - DNA, 15 bp, Homo sapiens
ctcacttgctcacgg

SEQ ID NO: 2092169 - DNA, 15 bp, Homo sapiens
tcacttgctcacgga

SEQ ID NO: 2092170 - DNA, 15 bp, Homo sapiens
cacttgctcacggag

SEQ ID NO: 2092171 - DNA, 15 bp, Homo sapiens
acttgctcacggaga

SEQ ID NO: 2092172 - DNA, 15 bp, Homo sapiens
cttgctcacggagac

SEQ ID NO: 2092173 - DNA, 15 bp, Homo sapiens
ttgctcacggagacc

SEQ ID NO: 2092174 - DNA, 15 bp, Homo sapiens
tgctcacggagaccc

SEQ ID NO: 2092175 - DNA, 15 bp, Homo sapiens
gctcacggagaccct

SEQ ID NO: 2092176 - DNA, 15 bp, Homo sapiens
ctcacggagaccctc

SEQ ID NO: 2092177 - DNA, 15 bp, Homo sapiens
tcacggagaccctcc

SEQ ID NO: 2092178 - DNA, 15 bp, Homo sapiens
cacggagaccctccc

SEQ ID NO: 2092179 - DNA, 15 bp, Homo sapiens
acggagaccctcccc

SEQ ID NO: 2092180 - DNA, 15 bp, Homo sapiens
cggagaccctcccct

SEQ ID NO: 2092181 - DNA, 15 bp, Homo sapiens
ggagaccctcccctg

SEQ ID NO: 2092182 - DNA, 15 bp, Homo sapiens
gagaccctcccctga

SEQ ID NO: 2092183 - DNA, 15 bp, Homo sapiens
agaccctcccctgat

SEQ ID NO: 2092184 - DNA, 15 bp, Homo sapiens
gaccctcccctgatt

SEQ ID NO: 2092185 - DNA, 15 bp, Homo sapiens
accctcccctgattc

SEQ ID NO: 2092186 - DNA, 15 bp, Homo sapiens
ccctcccctgattcc

SEQ ID NO: 2092187 - DNA, 15 bp, Homo sapiens
cctcccctgattccg

SEQ ID NO: 2092188 - DNA, 15 bp, Homo sapiens
ctcccctgattccgt

SEQ ID NO: 2092189 - DNA, 15 bp, Homo sapiens
tcccctgattccgtt

SEQ ID NO: 2092190 - DNA, 15 bp, Homo sapiens
cccctgattccgttt

SEQ ID NO: 2092191 - DNA, 15 bp, Homo sapiens
ccctgattccgtttg

SEQ ID NO: 2092192 - DNA, 15 bp, Homo sapiens
cctgattccgtttgt

SEQ ID NO: 2092193 - DNA, 15 bp, Homo sapiens
ctgattccgtttgtg

SEQ ID NO: 2092194 - DNA, 15 bp, Homo sapiens
tgattccgtttgtgc

SEQ ID NO: 2092195 - DNA, 15 bp, Homo sapiens
gattccgtttgtgca

SEQ ID NO: 2092196 - DNA, 15 bp, Homo sapiens
attccgtttgtgcat

SEQ ID NO: 2092197 - DNA, 15 bp, Homo sapiens
ttccgtttgtgcatc

SEQ ID NO: 2092198 - DNA, 15 bp, Homo sapiens
tccgtttgtgcatca

SEQ ID NO: 2092199 - DNA, 15 bp, Homo sapiens
ccgtttgtgcatcat

SEQ ID NO: 2092200 - DNA, 15 bp, Homo sapiens
cgtttgtgcatcatg

SEQ ID NO: 2092201 - DNA, 15 bp, Homo sapiens
gtttgtgcatcatgc

SEQ ID NO: 2092202 - DNA, 15 bp, Homo sapiens
tttgtgcatcatgca

SEQ ID NO: 2092203 - DNA, 15 bp, Homo sapiens
ttgtgcatcatgcag

SEQ ID NO: 2092204 - DNA, 15 bp, Homo sapiens
tgtgcatcatgcagg

SEQ ID NO: 2092205 - DNA, 15 bp, Homo sapiens
gtgcatcatgcaggt

SEQ ID NO: 2092206 - DNA, 15 bp, Homo sapiens
tgcatcatgcaggtt

SEQ ID NO: 2092207 - DNA, 15 bp, Homo sapiens
gcatcatgcaggttc

SEQ ID NO: 2092208 - DNA, 15 bp, Homo sapiens
catcatgcaggttcc

SEQ ID NO: 2092209 - DNA, 15 bp, Homo sapiens
atcatgcaggttccc

SEQ ID NO: 2092210 - DNA, 15 bp, Homo sapiens
tcatgcaggttcccc

SEQ ID NO: 2092211 - DNA, 15 bp, Homo sapiens
catgcaggttccccc

SEQ ID NO: 2092212 - DNA, 15 bp, Homo sapiens
atgcaggttccccct

SEQ ID NO: 2092213 - DNA, 15 bp, Homo sapiens
tgcaggttccccctt

SEQ ID NO: 2092214 - DNA, 15 bp, Homo sapiens
gcaggttcccccttg

SEQ ID NO: 2092215 - DNA, 15 bp, Homo sapiens
caggttcccccttgt

SEQ ID NO: 2092216 - DNA, 15 bp, Homo sapiens
aggttcccccttgtc

SEQ ID NO: 2092217 - DNA, 15 bp, Homo sapiens
ggttcccccttgtcc

SEQ ID NO: 2092218 - DNA, 15 bp, Homo sapiens
gttcccccttgtccc

SEQ ID NO: 2092219 - DNA, 15 bp, Homo sapiens
ttcccccttgtcccc

SEQ ID NO: 2092220 - DNA, 15 bp, Homo sapiens
tcccccttgtccccc

SEQ ID NO: 2092221 - DNA, 15 bp, Homo sapiens
cccccttgtccccct

SEQ ID NO: 2092222 - DNA, 15 bp, Homo sapiens
ccccttgtccccctg

SEQ ID NO: 2092223 - DNA, 15 bp, Homo sapiens
cccttgtccccctgt

SEQ ID NO: 2092224 - DNA, 15 bp, Homo sapiens
ccttgtccccctgtg

SEQ ID NO: 2092225 - DNA, 15 bp, Homo sapiens
cttgtccccctgtgc

SEQ ID NO: 2092226 - DNA, 15 bp, Homo sapiens
ttgtccccctgtgct

SEQ ID NO: 2092227 - DNA, 15 bp, Homo sapiens
tgtccccctgtgctg

SEQ ID NO: 2092228 - DNA, 15 bp, Homo sapiens
gtccccctgtgctgc

SEQ ID NO: 2092229 - DNA, 15 bp, Homo sapiens
tccccctgtgctgcc

SEQ ID NO: 2092230 - DNA, 15 bp, Homo sapiens
ccccctgtgctgcca

SEQ ID NO: 2092231 - DNA, 15 bp, Homo sapiens
cccctgtgctgccag

SEQ ID NO: 2092232 - DNA, 15 bp, Homo sapiens
ccctgtgctgccagc

SEQ ID NO: 2092233 - DNA, 15 bp, Homo sapiens
cctgtgctgccagcc

SEQ ID NO: 2092234 - DNA, 15 bp, Homo sapiens
ctgtgctgccagccc

SEQ ID NO: 2092235 - DNA, 15 bp, Homo sapiens
tgtgctgccagccct

SEQ ID NO: 2092236 - DNA, 15 bp, Homo sapiens
gtgctgccagccctc

SEQ ID NO: 2092237 - DNA, 15 bp, Homo sapiens
tgctgccagccctcc

SEQ ID NO: 2092238 - DNA, 15 bp, Homo sapiens
gctgccagccctcct

SEQ ID NO: 2092239 - DNA, 15 bp, Homo sapiens
ctgccagccctcctt

SEQ ID NO: 2092240 - DNA, 15 bp, Homo sapiens
tgccagccctcctta

SEQ ID NO: 2092241 - DNA, 15 bp, Homo sapiens
gccagccctccttac

SEQ ID NO: 2092242 - DNA, 15 bp, Homo sapiens
ccagccctccttacc

SEQ ID NO: 2092243 - DNA, 15 bp, Homo sapiens
cagccctccttaccc

SEQ ID NO: 2092244 - DNA, 15 bp, Homo sapiens
agccctccttacccg

SEQ ID NO: 2092245 - DNA, 15 bp, Homo sapiens
gccctccttacccgc

SEQ ID NO: 2092246 - DNA, 15 bp, Homo sapiens
ccctccttacccgct

SEQ ID NO: 2092247 - DNA, 15 bp, Homo sapiens
cctccttacccgctc

SEQ ID NO: 2092248 - DNA, 15 bp, Homo sapiens
ctccttacccgctct

SEQ ID NO: 2092249 - DNA, 15 bp, Homo sapiens
tccttacccgctctg

SEQ ID NO: 2092250 - DNA, 15 bp, Homo sapiens
ccttacccgctctgc

SEQ ID NO: 2092251 - DNA, 15 bp, Homo sapiens
cttacccgctctgct

SEQ ID NO: 2092252 - DNA, 15 bp, Homo sapiens
ttacccgctctgctt

SEQ ID NO: 2092253 - DNA, 15 bp, Homo sapiens
tacccgctctgctta

SEQ ID NO: 2092254 - DNA, 15 bp, Homo sapiens
acccgctctgcttag

SEQ ID NO: 2092255 - DNA, 15 bp, Homo sapiens
cccgctctgcttaga

SEQ ID NO: 2092256 - DNA, 15 bp, Homo sapiens
ccgctctgcttagac

SEQ ID NO: 2092257 - DNA, 15 bp, Homo sapiens
cgctctgcttagacc

SEQ ID NO: 2092258 - DNA, 15 bp, Homo sapiens
gctctgcttagacct

SEQ ID NO: 2092259 - DNA, 15 bp, Homo sapiens
ctctgcttagacctg

SEQ ID NO: 2092260 - DNA, 15 bp, Homo sapiens
tctgcttagacctgt

SEQ ID NO: 2092261 - DNA, 15 bp, Homo sapiens
ctgcttagacctgtc

SEQ ID NO: 2092262 - DNA, 15 bp, Homo sapiens
tgcttagacctgtca

SEQ ID NO: 2092263 - DNA, 15 bp, Homo sapiens
gcttagacctgtcag

SEQ ID NO: 2092264 - DNA, 15 bp, Homo sapiens
cttagacctgtcagc

SEQ ID NO: 2092265 - DNA, 15 bp, Homo sapiens
ttagacctgtcagcc

SEQ ID NO: 2092266 - DNA, 15 bp, Homo sapiens
tagacctgtcagcca

SEQ ID NO: 2092267 - DNA, 15 bp, Homo sapiens
agacctgtcagccac

SEQ ID NO: 2092268 - DNA, 15 bp, Homo sapiens
gacctgtcagccact

SEQ ID NO: 2092269 - DNA, 15 bp, Homo sapiens
acctgtcagccactg

SEQ ID NO: 2092270 - DNA, 15 bp, Homo sapiens
cctgtcagccactgt

SEQ ID NO: 2092271 - DNA, 15 bp, Homo sapiens
ctgtcagccactgta

SEQ ID NO: 2092272 - DNA, 15 bp, Homo sapiens
tgtcagccactgtag

SEQ ID NO: 2092273 - DNA, 15 bp, Homo sapiens
gtcagccactgtaga

SEQ ID NO: 2092274 - DNA, 15 bp, Homo sapiens
tcagccactgtagat

SEQ ID NO: 2092275 - DNA, 15 bp, Homo sapiens
cagccactgtagata

SEQ ID NO: 2092276 - DNA, 15 bp, Homo sapiens
agccactgtagatac

SEQ ID NO: 2092277 - DNA, 15 bp, Homo sapiens
gccactgtagatacc

SEQ ID NO: 2092278 - DNA, 15 bp, Homo sapiens
ccactgtagataccc

SEQ ID NO: 2092279 - DNA, 15 bp, Homo sapiens
cactgtagataccct

SEQ ID NO: 2092280 - DNA, 15 bp, Homo sapiens
actgtagataccctg

SEQ ID NO: 2092281 - DNA, 15 bp, Homo sapiens
ctgtagataccctgg

SEQ ID NO: 2092282 - DNA, 15 bp, Homo sapiens
tgtagataccctgga

SEQ ID NO: 2092283 - DNA, 15 bp, Homo sapiens
gtagataccctggaa

SEQ ID NO: 2092284 - DNA, 15 bp, Homo sapiens
tagataccctggaac

SEQ ID NO: 2092285 - DNA, 15 bp, Homo sapiens
agataccctggaact

SEQ ID NO: 2092286 - DNA, 15 bp, Homo sapiens
gataccctggaactt

SEQ ID NO: 2092287 - DNA, 15 bp, Homo sapiens
ataccctggaacttc

SEQ ID NO: 2092288 - DNA, 15 bp, Homo sapiens
taccctggaacttcc

SEQ ID NO: 2092289 - DNA, 15 bp, Homo sapiens
accctggaacttccc

SEQ ID NO: 2092290 - DNA, 15 bp, Homo sapiens
ccctggaacttccct

SEQ ID NO: 2092291 - DNA, 15 bp, Homo sapiens
cctggaacttccctg

SEQ ID NO: 2092292 - DNA, 15 bp, Homo sapiens
ctggaacttccctgg

SEQ ID NO: 2092293 - DNA, 15 bp, Homo sapiens
tggaacttccctggg

SEQ ID NO: 2092294 - DNA, 15 bp, Homo sapiens
ggaacttccctgggt

SEQ ID NO: 2092295 - DNA, 15 bp, Homo sapiens
gaacttccctgggta

SEQ ID NO: 2092296 - DNA, 15 bp, Homo sapiens
aacttccctgggtat

SEQ ID NO: 2092297 - DNA, 15 bp, Homo sapiens
acttccctgggtatc

SEQ ID NO: 2092298 - DNA, 15 bp, Homo sapiens
cttccctgggtatca

SEQ ID NO: 2092299 - DNA, 15 bp, Homo sapiens
ttccctgggtatcat

SEQ ID NO: 2092300 - DNA, 15 bp, Homo sapiens
tccctgggtatcatg

SEQ ID NO: 2092301 - DNA, 15 bp, Homo sapiens
ccctgggtatcatgt

SEQ ID NO: 2092302 - DNA, 15 bp, Homo sapiens
cctgggtatcatgtt

SEQ ID NO: 2092303 - DNA, 15 bp, Homo sapiens
ctgggtatcatgttg

SEQ ID NO: 2092304 - DNA, 15 bp, Homo sapiens
tgggtatcatgttga

SEQ ID NO: 2092305 - DNA, 15 bp, Homo sapiens
gggtatcatgttgat

SEQ ID NO: 2092306 - DNA, 15 bp, Homo sapiens
ggtatcatgttgatt

SEQ ID NO: 2092307 - DNA, 15 bp, Homo sapiens
gtatcatgttgattg

SEQ ID NO: 2092308 - DNA, 15 bp, Homo sapiens
tatcatgttgattgt

SEQ ID NO: 2092309 - DNA, 15 bp, Homo sapiens
atcatgttgattgtt

SEQ ID NO: 2092310 - DNA, 15 bp, Homo sapiens
tcatgttgattgttt

SEQ ID NO: 2092311 - DNA, 15 bp, Homo sapiens
catgttgattgttta

SEQ ID NO: 2092312 - DNA, 15 bp, Homo sapiens
atgttgattgtttat

SEQ ID NO: 2092313 - DNA, 15 bp, Homo sapiens
tgttgattgtttatt

SEQ ID NO: 2092314 - DNA, 15 bp, Homo sapiens
gttgattgtttattg

SEQ ID NO: 2092315 - DNA, 15 bp, Homo sapiens
ttgattgtttattgt

SEQ ID NO: 2092316 - DNA, 15 bp, Homo sapiens
tgattgtttattgtc

SEQ ID NO: 2092317 - DNA, 15 bp, Homo sapiens
gattgtttattgtct

SEQ ID NO: 2092318 - DNA, 15 bp, Homo sapiens
attgtttattgtcta

SEQ ID NO: 2092319 - DNA, 15 bp, Homo sapiens
ttgtttattgtctat

SEQ ID NO: 2092320 - DNA, 15 bp, Homo sapiens
tgtttattgtctatt

SEQ ID NO: 2092321 - DNA, 15 bp, Homo sapiens
gtttattgtctattt

SEQ ID NO: 2092322 - DNA, 15 bp, Homo sapiens
tttattgtctatttc

SEQ ID NO: 2092323 - DNA, 15 bp, Homo sapiens
ttattgtctatttct

SEQ ID NO: 2092324 - DNA, 15 bp, Homo sapiens
tattgtctatttctc

SEQ ID NO: 2092325 - DNA, 15 bp, Homo sapiens
attgtctatttctcc

SEQ ID NO: 2092326 - DNA, 15 bp, Homo sapiens
ttgtctatttctccc

SEQ ID NO: 2092327 - DNA, 15 bp, Homo sapiens
tgtctatttctcccc

SEQ ID NO: 2092328 - DNA, 15 bp, Homo sapiens
gtctatttctcccca

SEQ ID NO: 2092329 - DNA, 15 bp, Homo sapiens
tctatttctccccat

SEQ ID NO: 2092330 - DNA, 15 bp, Homo sapiens
ctatttctccccatg

SEQ ID NO: 2092331 - DNA, 15 bp, Homo sapiens
tatttctccccatga

SEQ ID NO: 2092332 - DNA, 15 bp, Homo sapiens
atttctccccatgag

SEQ ID NO: 2092333 - DNA, 15 bp, Homo sapiens
tttctccccatgaga

SEQ ID NO: 2092334 - DNA, 15 bp, Homo sapiens
ttctccccatgagaa

SEQ ID NO: 2092335 - DNA, 15 bp, Homo sapiens
tctccccatgagaat

SEQ ID NO: 2092336 - DNA, 15 bp, Homo sapiens
ctccccatgagaatg

SEQ ID NO: 2092337 - DNA, 15 bp, Homo sapiens
tccccatgagaatgt

SEQ ID NO: 2092338 - DNA, 15 bp, Homo sapiens
ccccatgagaatgtc

SEQ ID NO: 2092339 - DNA, 15 bp, Homo sapiens
cccatgagaatgtcg

SEQ ID NO: 2092340 - DNA, 15 bp, Homo sapiens
ccatgagaatgtcgg

SEQ ID NO: 2092341 - DNA, 15 bp, Homo sapiens
catgagaatgtcgga

SEQ ID NO: 2092342 - DNA, 15 bp, Homo sapiens
atgagaatgtcggac

SEQ ID NO: 2092343 - DNA, 15 bp, Homo sapiens
tgagaatgtcggact

SEQ ID NO: 2092344 - DNA, 15 bp, Homo sapiens
gagaatgtcggactg

SEQ ID NO: 2092345 - DNA, 15 bp, Homo sapiens
agaatgtcggactgt

SEQ ID NO: 2092346 - DNA, 15 bp, Homo sapiens
gaatgtcggactgtg

SEQ ID NO: 2092347 - DNA, 15 bp, Homo sapiens
aatgtcggactgtga

SEQ ID NO: 2092348 - DNA, 15 bp, Homo sapiens
atgtcggactgtgag

SEQ ID NO: 2092349 - DNA, 15 bp, Homo sapiens
tgtcggactgtgagg

SEQ ID NO: 2092350 - DNA, 15 bp, Homo sapiens
gtcggactgtgaggg

SEQ ID NO: 2092351 - DNA, 15 bp, Homo sapiens
tcggactgtgagggc

SEQ ID NO: 2092352 - DNA, 15 bp, Homo sapiens
cggactgtgagggca

SEQ ID NO: 2092353 - DNA, 15 bp, Homo sapiens
ggactgtgagggcag

SEQ ID NO: 2092354 - DNA, 15 bp, Homo sapiens
gactgtgagggcagg

SEQ ID NO: 2092355 - DNA, 15 bp, Homo sapiens
actgtgagggcaggg

SEQ ID NO: 2092356 - DNA, 15 bp, Homo sapiens
ctgtgagggcaggga

SEQ ID NO: 2092357 - DNA, 15 bp, Homo sapiens
tgtgagggcagggac

SEQ ID NO: 2092358 - DNA, 15 bp, Homo sapiens
gtgagggcagggacc

SEQ ID NO: 2092359 - DNA, 15 bp, Homo sapiens
agggcagggaccttt

SEQ ID NO: 2092360 - DNA, 15 bp, Homo sapiens
gggcagggacctttg

SEQ ID NO: 2092361 - DNA, 15 bp, Homo sapiens
ggcagggacctttgt

SEQ ID NO: 2092362 - DNA, 15 bp, Homo sapiens
gcagggacctttgtg

SEQ ID NO: 2092363 - DNA, 15 bp, Homo sapiens
cagggacctttgtgt

SEQ ID NO: 2092364 - DNA, 15 bp, Homo sapiens
agggacctttgtgtt

SEQ ID NO: 2092365 - DNA, 15 bp, Homo sapiens
gggacctttgtgtta

SEQ ID NO: 2092366 - DNA, 15 bp, Homo sapiens
ggacctttgtgttat

SEQ ID NO: 2092367 - DNA, 15 bp, Homo sapiens
gacctttgtgttatt

SEQ ID NO: 2092368 - DNA, 15 bp, Homo sapiens
acctttgtgttattc

SEQ ID NO: 2092369 - DNA, 15 bp, Homo sapiens
cctttgtgttattcg

SEQ ID NO: 2092370 - DNA, 15 bp, Homo sapiens
ctttgtgttattcgt

SEQ ID NO: 2092371 - DNA, 15 bp, Homo sapiens
tttgtgttattcgtt

SEQ ID NO: 2092372 - DNA, 15 bp, Homo sapiens
ttgtgttattcgttg

SEQ ID NO: 2092373 - DNA, 15 bp, Homo sapiens
tgtgttattcgttgc

SEQ ID NO: 2092374 - DNA, 15 bp, Homo sapiens
gtgttattcgttgcc

SEQ ID NO: 2092375 - DNA, 15 bp, Homo sapiens
tgttattcgttgccg

SEQ ID NO: 2092376 - DNA, 15 bp, Homo sapiens
gttattcgttgccgt

SEQ ID NO: 2092377 - DNA, 15 bp, Homo sapiens
ttattcgttgccgtg

SEQ ID NO: 2092378 - DNA, 15 bp, Homo sapiens
tattcgttgccgtga

SEQ ID NO: 2092379 - DNA, 15 bp, Homo sapiens
attcgttgccgtgac

SEQ ID NO: 2092380 - DNA, 15 bp, Homo sapiens
ttcgttgccgtgacc

SEQ ID NO: 2092381 - DNA, 15 bp, Homo sapiens
tcgttgccgtgaccc

SEQ ID NO: 2092382 - DNA, 15 bp, Homo sapiens
cgttgccgtgaccca

SEQ ID NO: 2092383 - DNA, 15 bp, Homo sapiens
gttgccgtgacccaa

SEQ ID NO: 2092384 - DNA, 15 bp, Homo sapiens
ttgccgtgacccaag

SEQ ID NO: 2092385 - DNA, 15 bp, Homo sapiens
tgccgtgacccaagc

SEQ ID NO: 2092386 - DNA, 15 bp, Homo sapiens
gccgtgacccaagcc

SEQ ID NO: 2092387 - DNA, 15 bp, Homo sapiens
ccgtgacccaagccc

SEQ ID NO: 2092388 - DNA, 15 bp, Homo sapiens
cgtgacccaagcccc

SEQ ID NO: 2092389 - DNA, 15 bp, Homo sapiens
gtgacccaagcccct

SEQ ID NO: 2092390 - DNA, 15 bp, Homo sapiens
tgacccaagcccctg

SEQ ID NO: 2092391 - DNA, 15 bp, Homo sapiens
gacccaagcccctgg

SEQ ID NO: 2092392 - DNA, 15 bp, Homo sapiens
acccaagcccctgga

SEQ ID NO: 2092393 - DNA, 15 bp, Homo sapiens
cccaagcccctggaa

SEQ ID NO: 2092394 - DNA, 15 bp, Homo sapiens
ccaagcccctggaac

SEQ ID NO: 2092395 - DNA, 15 bp, Homo sapiens
caagcccctggaacg

SEQ ID NO: 2092396 - DNA, 15 bp, Homo sapiens
aagcccctggaacga

SEQ ID NO: 2092397 - DNA, 15 bp, Homo sapiens
agcccctggaacgat

SEQ ID NO: 2092398 - DNA, 15 bp, Homo sapiens
gcccctggaacgatg

SEQ ID NO: 2092399 - DNA, 15 bp, Homo sapiens
cccctggaacgatgc

SEQ ID NO: 2092400 - DNA, 15 bp, Homo sapiens
ccctggaacgatgcc

SEQ ID NO: 2092401 - DNA, 15 bp, Homo sapiens
cctggaacgatgcct

SEQ ID NO: 2092402 - DNA, 15 bp, Homo sapiens
ctggaacgatgccta

SEQ ID NO: 2092403 - DNA, 15 bp, Homo sapiens
tggaacgatgcctag

SEQ ID NO: 2092404 - DNA, 15 bp, Homo sapiens
ggaacgatgcctagc

SEQ ID NO: 2092405 - DNA, 15 bp, Homo sapiens
gaacgatgcctagca

SEQ ID NO: 2092406 - DNA, 15 bp, Homo sapiens
aacgatgcctagcac

SEQ ID NO: 2092407 - DNA, 15 bp, Homo sapiens
acgatgcctagcaca

SEQ ID NO: 2092408 - DNA, 15 bp, Homo sapiens
cgatgcctagcacat

SEQ ID NO: 2092409 - DNA, 15 bp, Homo sapiens
gatgcctagcacata

SEQ ID NO: 2092410 - DNA, 15 bp, Homo sapiens
atgcctagcacataa

SEQ ID NO: 2092411 - DNA, 15 bp, Homo sapiens
tgcctagcacataat

SEQ ID NO: 2092412 - DNA, 15 bp, Homo sapiens
gcctagcacataatc

SEQ ID NO: 2092413 - DNA, 15 bp, Homo sapiens
cctagcacataatcg

SEQ ID NO: 2092414 - DNA, 15 bp, Homo sapiens
ctagcacataatcgc

SEQ ID NO: 2092415 - DNA, 15 bp, Homo sapiens
tagcacataatcgca

SEQ ID NO: 2092416 - DNA, 15 bp, Homo sapiens
agcacataatcgcag

SEQ ID NO: 2092417 - DNA, 15 bp, Homo sapiens
gcacataatcgcagg

SEQ ID NO: 2092418 - DNA, 15 bp, Homo sapiens
cacataatcgcaggt

SEQ ID NO: 2092419 - DNA, 15 bp, Homo sapiens
acataatcgcaggtt

SEQ ID NO: 2092420 - DNA, 15 bp, Homo sapiens
cataatcgcaggttc

SEQ ID NO: 2092421 - DNA, 15 bp, Homo sapiens
ataatcgcaggttct

SEQ ID NO: 2092422 - DNA, 15 bp, Homo sapiens
taatcgcaggttctc

SEQ ID NO: 2092423 - DNA, 15 bp, Homo sapiens
aatcgcaggttctca

SEQ ID NO: 2092424 - DNA, 15 bp, Homo sapiens
atcgcaggttctcaa

SEQ ID NO: 2092425 - DNA, 15 bp, Homo sapiens
tcgcaggttctcaaa

SEQ ID NO: 2092426 - DNA, 15 bp, Homo sapiens
cgcaggttctcaaat

SEQ ID NO: 2092427 - DNA, 15 bp, Homo sapiens
gcaggttctcaaata

SEQ ID NO: 2092428 - DNA, 15 bp, Homo sapiens
caggttctcaaatat

SEQ ID NO: 2092429 - DNA, 15 bp, Homo sapiens
aggttctcaaatatt

SEQ ID NO: 2092430 - DNA, 15 bp, Homo sapiens
ggttctcaaatattt

SEQ ID NO: 2092431 - DNA, 15 bp, Homo sapiens
gttctcaaatattta

SEQ ID NO: 2092432 - DNA, 15 bp, Homo sapiens
ttctcaaatatttat

SEQ ID NO: 2092433 - DNA, 15 bp, Homo sapiens
tctcaaatatttatt

SEQ ID NO: 2092434 - DNA, 15 bp, Homo sapiens
ctcaaatatttattg

SEQ ID NO: 2092435 - DNA, 15 bp, Homo sapiens
caaatatttattgaa

SEQ ID NO: 2092436 - DNA, 15 bp, Homo sapiens
aaatatttattgaaa

SEQ ID NO: 2092437 - DNA, 15 bp, Homo sapiens
aatatttattgaaag

SEQ ID NO: 2092438 - DNA, 15 bp, Homo sapiens
atatttattgaaagg

SEQ ID NO: 2092439 - DNA, 15 bp, Homo sapiens
tatttattgaaagga

SEQ ID NO: 2092440 - DNA, 15 bp, Homo sapiens
atttattgaaaggat

SEQ ID NO: 2092441 - DNA, 15 bp, Homo sapiens
tttattgaaaggatg

SEQ ID NO: 2092442 - DNA, 15 bp, Homo sapiens
ttattgaaaggatgt

SEQ ID NO: 2092443 - DNA, 15 bp, Homo sapiens
tattgaaaggatgtt

SEQ ID NO: 2092444 - DNA, 15 bp, Homo sapiens
attgaaaggatgttt

SEQ ID NO: 2092445 - DNA, 15 bp, Homo sapiens
ttgaaaggatgttta

SEQ ID NO: 2092446 - DNA, 15 bp, Homo sapiens
tgaaaggatgtttaa

SEQ ID NO: 2092447 - DNA, 15 bp, Homo sapiens
gaaaggatgtttaaa

SEQ ID NO: 2092448 - DNA, 15 bp, Homo sapiens
aaaggatgtttaaaa

SEQ ID NO: 2092449 - DNA, 15 bp, Homo sapiens
aaggatgtttaaaag

SEQ ID NO: 2092450 - DNA, 15 bp, Homo sapiens
aggatgtttaaaaga

SEQ ID NO: 2092451 - DNA, 15 bp, Homo sapiens
ggatgtttaaaagac

SEQ ID NO: 2092452 - DNA, 15 bp, Homo sapiens
gatgtttaaaagaca

SEQ ID NO: 2092453 - DNA, 15 bp, Homo sapiens
atgtttaaaagacaa

SEQ ID NO: 2092454 - DNA, 15 bp, Homo sapiens
tgtttaaaagacaag

SEQ ID NO: 2092455 - DNA, 15 bp, Homo sapiens
gtttaaaagacaagg

SEQ ID NO: 2092456 - DNA, 15 bp, Homo sapiens
tttaaaagacaaggg

SEQ ID NO: 2092457 - DNA, 15 bp, Homo sapiens
ttaaaagacaagggt

SEQ ID NO: 2092458 - DNA, 15 bp, Homo sapiens
taaaagacaagggtt

SEQ ID NO: 2092459 - DNA, 15 bp, Homo sapiens
aaaagacaagggttg

SEQ ID NO: 2092460 - DNA, 15 bp, Homo sapiens
aaagacaagggttgt

SEQ ID NO: 2092461 - DNA, 15 bp, Homo sapiens
aagacaagggttgtt

SEQ ID NO: 2092462 - DNA, 15 bp, Homo sapiens
agacaagggttgttt

SEQ ID NO: 2092463 - DNA, 15 bp, Homo sapiens
gacaagggttgtttc

SEQ ID NO: 2092464 - DNA, 15 bp, Homo sapiens
acaagggttgtttca

SEQ ID NO: 2092465 - DNA, 15 bp, Homo sapiens
caagggttgtttcac

SEQ ID NO: 2092466 - DNA, 15 bp, Homo sapiens
aagggttgtttcaca

SEQ ID NO: 2092467 - DNA, 15 bp, Homo sapiens
agggttgtttcacag

SEQ ID NO: 2092468 - DNA, 15 bp, Homo sapiens
gggttgtttcacagg

SEQ ID NO: 2092469 - DNA, 15 bp, Homo sapiens
ggttgtttcacagga

SEQ ID NO: 2092470 - DNA, 15 bp, Homo sapiens
gttgtttcacaggat

SEQ ID NO: 2092471 - DNA, 15 bp, Homo sapiens
ttgtttcacaggatg

SEQ ID NO: 2092472 - DNA, 15 bp, Homo sapiens
tgtttcacaggatgg

SEQ ID NO: 2092473 - DNA, 15 bp, Homo sapiens
gtttcacaggatggt

SEQ ID NO: 2092474 - DNA, 15 bp, Homo sapiens
tttcacaggatggtt

SEQ ID NO: 2092475 - DNA, 15 bp, Homo sapiens
ttcacaggatggttc

SEQ ID NO: 2092476 - DNA, 15 bp, Homo sapiens
tcacaggatggttcg

SEQ ID NO: 2092477 - DNA, 15 bp, Homo sapiens
cacaggatggttcgt

SEQ ID NO: 2092478 - DNA, 15 bp, Homo sapiens
acaggatggttcgtg

SEQ ID NO: 2092479 - DNA, 15 bp, Homo sapiens
caggatggttcgtga

SEQ ID NO: 2092480 - DNA, 15 bp, Homo sapiens
aggatggttcgtgac

SEQ ID NO: 2092481 - DNA, 15 bp, Homo sapiens
ggatggttcgtgacc

SEQ ID NO: 2092482 - DNA, 15 bp, Homo sapiens
gatggttcgtgacca

SEQ ID NO: 2092483 - DNA, 15 bp, Homo sapiens
atggttcgtgaccag

SEQ ID NO: 2092484 - DNA, 15 bp, Homo sapiens
tggttcgtgaccagt

SEQ ID NO: 2092485 - DNA, 15 bp, Homo sapiens
ggttcgtgaccagtg

SEQ ID NO: 2092486 - DNA, 15 bp, Homo sapiens
gttcgtgaccagtgg

SEQ ID NO: 2092487 - DNA, 15 bp, Homo sapiens
ttcgtgaccagtggc

SEQ ID NO: 2092488 - DNA, 15 bp, Homo sapiens
tcgtgaccagtggca

SEQ ID NO: 2092489 - DNA, 15 bp, Homo sapiens
cgtgaccagtggcag

SEQ ID NO: 2092490 - DNA, 15 bp, Homo sapiens
gtgaccagtggcagg

SEQ ID NO: 2092491 - DNA, 15 bp, Homo sapiens
tgaccagtggcaggt

SEQ ID NO: 2092492 - DNA, 15 bp, Homo sapiens
gaccagtggcaggtt

SEQ ID NO: 2092493 - DNA, 15 bp, Homo sapiens
accagtggcaggttg

SEQ ID NO: 2092494 - DNA, 15 bp, Homo sapiens
ccagtggcaggttgt

SEQ ID NO: 2092495 - DNA, 15 bp, Homo sapiens
cagtggcaggttgtg

SEQ ID NO: 2092496 - DNA, 15 bp, Homo sapiens
agtggcaggttgtgg

SEQ ID NO: 2092497 - DNA, 15 bp, Homo sapiens
gtggcaggttgtggt

SEQ ID NO: 2092498 - DNA, 15 bp, Homo sapiens
tggcaggttgtggtc

SEQ ID NO: 2092499 - DNA, 15 bp, Homo sapiens
ggcaggttgtggtcc

SEQ ID NO: 2092500 - DNA, 15 bp, Homo sapiens
gcaggttgtggtcct

SEQ ID NO: 2092501 - DNA, 15 bp, Homo sapiens
caggttgtggtcctg

SEQ ID NO: 2092502 - DNA, 15 bp, Homo sapiens
aggttgtggtcctgt

SEQ ID NO: 2092503 - DNA, 15 bp, Homo sapiens
ggttgtggtcctgtg

SEQ ID NO: 2092504 - DNA, 15 bp, Homo sapiens
gttgtggtcctgtgc

SEQ ID NO: 2092505 - DNA, 15 bp, Homo sapiens
ttgtggtcctgtgca

SEQ ID NO: 2092506 - DNA, 15 bp, Homo sapiens
tgtggtcctgtgcag

SEQ ID NO: 2092507 - DNA, 15 bp, Homo sapiens
gtggtcctgtgcagg

SEQ ID NO: 2092508 - DNA, 15 bp, Homo sapiens
tggtcctgtgcaggg

SEQ ID NO: 2092509 - DNA, 15 bp, Homo sapiens
ggtcctgtgcagggc

SEQ ID NO: 2092510 - DNA, 15 bp, Homo sapiens
gtcctgtgcagggca

SEQ ID NO: 2092511 - DNA, 15 bp, Homo sapiens
tcctgtgcagggcaa

SEQ ID NO: 2092512 - DNA, 15 bp, Homo sapiens
cctgtgcagggcaat

SEQ ID NO: 2092513 - DNA, 15 bp, Homo sapiens
ctgtgcagggcaatg

SEQ ID NO: 2092514 - DNA, 15 bp, Homo sapiens
tgtgcagggcaatgg

SEQ ID NO: 2092515 - DNA, 15 bp, Homo sapiens
gtgcagggcaatggg

SEQ ID NO: 2092516 - DNA, 15 bp, Homo sapiens
tgcagggcaatgggg

SEQ ID NO: 2092517 - DNA, 15 bp, Homo sapiens
gcagggcaatggggc

SEQ ID NO: 2092518 - DNA, 15 bp, Homo sapiens
cagggcaatggggcc

SEQ ID NO: 2092519 - DNA, 15 bp, Homo sapiens
agggcaatggggcct

SEQ ID NO: 2092520 - DNA, 15 bp, Homo sapiens
gggcaatggggccta

SEQ ID NO: 2092521 - DNA, 15 bp, Homo sapiens
ggcaatggggcctac

SEQ ID NO: 2092522 - DNA, 15 bp, Homo sapiens
gcaatggggcctact

SEQ ID NO: 2092523 - DNA, 15 bp, Homo sapiens
caatggggcctactc

SEQ ID NO: 2092524 - DNA, 15 bp, Homo sapiens
aatggggcctactcc

SEQ ID NO: 2092525 - DNA, 15 bp, Homo sapiens
atggggcctactcct

SEQ ID NO: 2092526 - DNA, 15 bp, Homo sapiens
tggggcctactcctc

SEQ ID NO: 2092527 - DNA, 15 bp, Homo sapiens
ggggcctactcctcc

SEQ ID NO: 2092528 - DNA, 15 bp, Homo sapiens
gggcctactcctcca

SEQ ID NO: 2092529 - DNA, 15 bp, Homo sapiens
ggcctactcctccac

SEQ ID NO: 2092530 - DNA, 15 bp, Homo sapiens
gcctactcctccacc

SEQ ID NO: 2092531 - DNA, 15 bp, Homo sapiens
cctactcctccacct

SEQ ID NO: 2092532 - DNA, 15 bp, Homo sapiens
ctactcctccacctg

SEQ ID NO: 2092533 - DNA, 15 bp, Homo sapiens
tactcctccacctgc

SEQ ID NO: 2092534 - DNA, 15 bp, Homo sapiens
actcctccacctgcc

SEQ ID NO: 2092535 - DNA, 15 bp, Homo sapiens
ctcctccacctgccg

SEQ ID NO: 2092536 - DNA, 15 bp, Homo sapiens
tcctccacctgccgt

SEQ ID NO: 2092537 - DNA, 15 bp, Homo sapiens
cctccacctgccgtg

SEQ ID NO: 2092538 - DNA, 15 bp, Homo sapiens
ctccacctgccgtgg

SEQ ID NO: 2092539 - DNA, 15 bp, Homo sapiens
tccacctgccgtggc

SEQ ID NO: 2092540 - DNA, 15 bp, Homo sapiens
ccacctgccgtggcc

SEQ ID NO: 2092541 - DNA, 15 bp, Homo sapiens
cacctgccgtggccg

SEQ ID NO: 2092542 - DNA, 15 bp, Homo sapiens
acctgccgtggccgt

SEQ ID NO: 2092543 - DNA, 15 bp, Homo sapiens
cctgccgtggccgtc

SEQ ID NO: 2092544 - DNA, 15 bp, Homo sapiens
ctgccgtggccgtcg

SEQ ID NO: 2092545 - DNA, 15 bp, Homo sapiens
tgccgtggccgtcgc

SEQ ID NO: 2092546 - DNA, 15 bp, Homo sapiens
gccgtggccgtcgcc

SEQ ID NO: 2092547 - DNA, 15 bp, Homo sapiens
ccgtggccgtcgccc

SEQ ID NO: 2092548 - DNA, 15 bp, Homo sapiens
cgtggccgtcgcccc

SEQ ID NO: 2092549 - DNA, 15 bp, Homo sapiens
gtggccgtcgcccca

SEQ ID NO: 2092550 - DNA, 15 bp, Homo sapiens
tggccgtcgccccag

SEQ ID NO: 2092551 - DNA, 15 bp, Homo sapiens
ggccgtcgccccaga

SEQ ID NO: 2092552 - DNA, 15 bp, Homo sapiens
gccgtcgccccagac

SEQ ID NO: 2092553 - DNA, 15 bp, Homo sapiens
ccgtcgccccagacc

SEQ ID NO: 2092554 - DNA, 15 bp, Homo sapiens
cgtcgccccagaccg

SEQ ID NO: 2092555 - DNA, 15 bp, Homo sapiens
gtcgccccagaccga

SEQ ID NO: 2092556 - DNA, 15 bp, Homo sapiens
tcgccccagaccgag

SEQ ID NO: 2092557 - DNA, 15 bp, Homo sapiens
cgccccagaccgagc

SEQ ID NO: 2092558 - DNA, 15 bp, Homo sapiens
gccccagaccgagct

SEQ ID NO: 2092559 - DNA, 15 bp, Homo sapiens
ccccagaccgagctg

SEQ ID NO: 2092560 - DNA, 15 bp, Homo sapiens
cccagaccgagctgc

SEQ ID NO: 2092561 - DNA, 15 bp, Homo sapiens
ccagaccgagctgcc

SEQ ID NO: 2092562 - DNA, 15 bp, Homo sapiens
cagaccgagctgcca

SEQ ID NO: 2092563 - DNA, 15 bp, Homo sapiens
agaccgagctgccac

SEQ ID NO: 2092564 - DNA, 15 bp, Homo sapiens
gaccgagctgccacc

SEQ ID NO: 2092565 - DNA, 15 bp, Homo sapiens
accgagctgccaccg

SEQ ID NO: 2092566 - DNA, 15 bp, Homo sapiens
ccgagctgccaccgt

SEQ ID NO: 2092567 - DNA, 15 bp, Homo sapiens
cgagctgccaccgtt

SEQ ID NO: 2092568 - DNA, 15 bp, Homo sapiens
gagctgccaccgttg

SEQ ID NO: 2092569 - DNA, 15 bp, Homo sapiens
agctgccaccgttgt

SEQ ID NO: 2092570 - DNA, 15 bp, Homo sapiens
gctgccaccgttgtt

SEQ ID NO: 2092571 - DNA, 15 bp, Homo sapiens
ctgccaccgttgttt

SEQ ID NO: 2092572 - DNA, 15 bp, Homo sapiens
tgccaccgttgtttc

SEQ ID NO: 2092573 - DNA, 15 bp, Homo sapiens
gccaccgttgtttcc

SEQ ID NO: 2092574 - DNA, 15 bp, Homo sapiens
ccaccgttgtttccc

SEQ ID NO: 2092575 - DNA, 15 bp, Homo sapiens
caccgttgtttccca

SEQ ID NO: 2092576 - DNA, 15 bp, Homo sapiens
accgttgtttcccag

SEQ ID NO: 2092577 - DNA, 15 bp, Homo sapiens
ccgttgtttcccagt

SEQ ID NO: 2092578 - DNA, 15 bp, Homo sapiens
cgttgtttcccagtg

SEQ ID NO: 2092579 - DNA, 15 bp, Homo sapiens
gttgtttcccagtgg

SEQ ID NO: 2092580 - DNA, 15 bp, Homo sapiens
ttgtttcccagtgga

SEQ ID NO: 2092581 - DNA, 15 bp, Homo sapiens
tgtttcccagtggat

SEQ ID NO: 2092582 - DNA, 15 bp, Homo sapiens
gtttcccagtggatg

SEQ ID NO: 2092583 - DNA, 15 bp, Homo sapiens
tttcccagtggatgc

SEQ ID NO: 2092584 - DNA, 15 bp, Homo sapiens
ttcccagtggatgct

SEQ ID NO: 2092585 - DNA, 15 bp, Homo sapiens
tcccagtggatgctg

SEQ ID NO: 2092586 - DNA, 15 bp, Homo sapiens
cccagtggatgctgg

SEQ ID NO: 2092587 - DNA, 15 bp, Homo sapiens
ccagtggatgctgga

SEQ ID NO: 2092588 - DNA, 15 bp, Homo sapiens
cagtggatgctggag

SEQ ID NO: 2092589 - DNA, 15 bp, Homo sapiens
agtggatgctggagt

SEQ ID NO: 2092590 - DNA, 15 bp, Homo sapiens
gtggatgctggagtg

SEQ ID NO: 2092591 - DNA, 15 bp, Homo sapiens
tggatgctggagtgt

SEQ ID NO: 2092592 - DNA, 15 bp, Homo sapiens
ggatgctggagtgtc

SEQ ID NO: 2092593 - DNA, 15 bp, Homo sapiens
gatgctggagtgtca

SEQ ID NO: 2092594 - DNA, 15 bp, Homo sapiens
atgctggagtgtcat

SEQ ID NO: 2092595 - DNA, 15 bp, Homo sapiens
tgctggagtgtcatc

SEQ ID NO: 2092596 - DNA, 15 bp, Homo sapiens
gctggagtgtcatca

SEQ ID NO: 2092597 - DNA, 15 bp, Homo sapiens
ctggagtgtcatcat

SEQ ID NO: 2092598 - DNA, 15 bp, Homo sapiens
tggagtgtcatcatg

SEQ ID NO: 2092599 - DNA, 15 bp, Homo sapiens
ggagtgtcatcatgg

SEQ ID NO: 2092600 - DNA, 15 bp, Homo sapiens
gagtgtcatcatggg

SEQ ID NO: 2092601 - DNA, 15 bp, Homo sapiens
agtgtcatcatgggg

SEQ ID NO: 2092602 - DNA, 15 bp, Homo sapiens
gtgtcatcatggggc

SEQ ID NO: 2092603 - DNA, 15 bp, Homo sapiens
tgtcatcatggggct

SEQ ID NO: 2092604 - DNA, 15 bp, Homo sapiens
gtcatcatggggctg

SEQ ID NO: 2092605 - DNA, 15 bp, Homo sapiens
tcatcatggggctgt

SEQ ID NO: 2092606 - DNA, 15 bp, Homo sapiens
catcatggggctgtt

SEQ ID NO: 2092607 - DNA, 15 bp, Homo sapiens
atcatggggctgttt

SEQ ID NO: 2092608 - DNA, 15 bp, Homo sapiens
tcatggggctgtttg

SEQ ID NO: 2092609 - DNA, 15 bp, Homo sapiens
catggggctgtttgc

SEQ ID NO: 2092610 - DNA, 15 bp, Homo sapiens
atggggctgtttgct

SEQ ID NO: 2092611 - DNA, 15 bp, Homo sapiens
tggggctgtttgctc

SEQ ID NO: 2092612 - DNA, 15 bp, Homo sapiens
ggggctgtttgctct

SEQ ID NO: 2092613 - DNA, 15 bp, Homo sapiens
gggctgtttgctctg

SEQ ID NO: 2092614 - DNA, 15 bp, Homo sapiens
ggctgtttgctctgc

SEQ ID NO: 2092615 - DNA, 15 bp, Homo sapiens
gctgtttgctctgct

SEQ ID NO: 2092616 - DNA, 15 bp, Homo sapiens
ctgtttgctctgctg

SEQ ID NO: 2092617 - DNA, 15 bp, Homo sapiens
tgtttgctctgctga

SEQ ID NO: 2092618 - DNA, 15 bp, Homo sapiens
gtttgctctgctgat

SEQ ID NO: 2092619 - DNA, 15 bp, Homo sapiens
tttgctctgctgatt

SEQ ID NO: 2092620 - DNA, 15 bp, Homo sapiens
ttgctctgctgattt

SEQ ID NO: 2092621 - DNA, 15 bp, Homo sapiens
tgctctgctgattta

SEQ ID NO: 2092622 - DNA, 15 bp, Homo sapiens
gctctgctgatttat

SEQ ID NO: 2092623 - DNA, 15 bp, Homo sapiens
ctctgctgatttata

SEQ ID NO: 2092624 - DNA, 15 bp, Homo sapiens
tctgctgatttatac

SEQ ID NO: 2092625 - DNA, 15 bp, Homo sapiens
ctgctgatttatacc

SEQ ID NO: 2092626 - DNA, 15 bp, Homo sapiens
tgctgatttatacca

SEQ ID NO: 2092627 - DNA, 15 bp, Homo sapiens
gctgatttataccac

SEQ ID NO: 2092628 - DNA, 15 bp, Homo sapiens
ctgatttataccaca

SEQ ID NO: 2092629 - DNA, 15 bp, Homo sapiens
tgatttataccacac

SEQ ID NO: 2092630 - DNA, 15 bp, Homo sapiens
gatttataccacact

SEQ ID NO: 2092631 - DNA, 15 bp, Homo sapiens
atttataccacactg

SEQ ID NO: 2092632 - DNA, 15 bp, Homo sapiens
tttataccacactgt

SEQ ID NO: 2092633 - DNA, 15 bp, Homo sapiens
ttataccacactgtt

SEQ ID NO: 2092634 - DNA, 15 bp, Homo sapiens
tataccacactgttg

SEQ ID NO: 2092635 - DNA, 15 bp, Homo sapiens
ataccacactgttgt

SEQ ID NO: 2092636 - DNA, 15 bp, Homo sapiens
taccacactgttgtc

SEQ ID NO: 2092637 - DNA, 15 bp, Homo sapiens
accacactgttgtca

SEQ ID NO: 2092638 - DNA, 15 bp, Homo sapiens
ccacactgttgtcac

SEQ ID NO: 2092639 - DNA, 15 bp, Homo sapiens
cacactgttgtcact

SEQ ID NO: 2092640 - DNA, 15 bp, Homo sapiens
acactgttgtcactt

SEQ ID NO: 2092641 - DNA, 15 bp, Homo sapiens
cactgttgtcacttc

SEQ ID NO: 2092642 - DNA, 15 bp, Homo sapiens
actgttgtcacttct

SEQ ID NO: 2092643 - DNA, 15 bp, Homo sapiens
ctgttgtcacttctc

SEQ ID NO: 2092644 - DNA, 15 bp, Homo sapiens
tgttgtcacttctcc

SEQ ID NO: 2092645 - DNA, 15 bp, Homo sapiens
gttgtcacttctccc

SEQ ID NO: 2092646 - DNA, 15 bp, Homo sapiens
ttgtcacttctcccc

SEQ ID NO: 2092647 - DNA, 15 bp, Homo sapiens
tgtcacttctcccca

SEQ ID NO: 2092648 - DNA, 15 bp, Homo sapiens
gtcacttctccccat

SEQ ID NO: 2092649 - DNA, 15 bp, Homo sapiens
tcacttctccccatc

SEQ ID NO: 2092650 - DNA, 15 bp, Homo sapiens
cacttctccccatca

SEQ ID NO: 2092651 - DNA, 15 bp, Homo sapiens
acttctccccatcaa

SEQ ID NO: 2092652 - DNA, 15 bp, Homo sapiens
cttctccccatcaaa

SEQ ID NO: 2092653 - DNA, 15 bp, Homo sapiens
ttctccccatcaaag

SEQ ID NO: 2092654 - DNA, 15 bp, Homo sapiens
tctccccatcaaagc

SEQ ID NO: 2092655 - DNA, 15 bp, Homo sapiens
ctccccatcaaagcc

SEQ ID NO: 2092656 - DNA, 15 bp, Homo sapiens
tccccatcaaagcca

SEQ ID NO: 2092657 - DNA, 15 bp, Homo sapiens
ccccatcaaagccag

SEQ ID NO: 2092658 - DNA, 15 bp, Homo sapiens
cccatcaaagccagg

SEQ ID NO: 2092659 - DNA, 15 bp, Homo sapiens
ccatcaaagccagga

SEQ ID NO: 2092660 - DNA, 15 bp, Homo sapiens
catcaaagccaggat

SEQ ID NO: 2092661 - DNA, 15 bp, Homo sapiens
atcaaagccaggatg

SEQ ID NO: 2092662 - DNA, 15 bp, Homo sapiens
tcaaagccaggatgc

SEQ ID NO: 2092663 - DNA, 15 bp, Homo sapiens
caaagccaggatgct

SEQ ID NO: 2092664 - DNA, 15 bp, Homo sapiens
aaagccaggatgctc

SEQ ID NO: 2092665 - DNA, 15 bp, Homo sapiens
aagccaggatgctct

SEQ ID NO: 2092666 - DNA, 15 bp, Homo sapiens
agccaggatgctctt

SEQ ID NO: 2092667 - DNA, 15 bp, Homo sapiens
gccaggatgctcttt

SEQ ID NO: 2092668 - DNA, 15 bp, Homo sapiens
ccaggatgctcttta

SEQ ID NO: 2092669 - DNA, 15 bp, Homo sapiens
caggatgctctttaa

SEQ ID NO: 2092670 - DNA, 15 bp, Homo sapiens
aggatgctctttaaa

SEQ ID NO: 2092671 - DNA, 15 bp, Homo sapiens
ggatgctctttaaaa

SEQ ID NO: 2092672 - DNA, 15 bp, Homo sapiens
gatgctctttaaaac

SEQ ID NO: 2092673 - DNA, 15 bp, Homo sapiens
atgctctttaaaaca

SEQ ID NO: 2092674 - DNA, 15 bp, Homo sapiens
tgctctttaaaacat

SEQ ID NO: 2092675 - DNA, 15 bp, Homo sapiens
gctctttaaaacatg

SEQ ID NO: 2092676 - DNA, 15 bp, Homo sapiens
ctctttaaaacatgc

SEQ ID NO: 2092677 - DNA, 15 bp, Homo sapiens
tctttaaaacatgca

SEQ ID NO: 2092678 - DNA, 15 bp, Homo sapiens
ctttaaaacatgcaa

SEQ ID NO: 2092679 - DNA, 15 bp, Homo sapiens
tttaaaacatgcaaa

SEQ ID NO: 2092680 - DNA, 15 bp, Homo sapiens
ttaaaacatgcaaat

SEQ ID NO: 2092681 - DNA, 15 bp, Homo sapiens
taaaacatgcaaatt

SEQ ID NO: 2092682 - DNA, 15 bp, Homo sapiens
aaaacatgcaaattg

SEQ ID NO: 2092683 - DNA, 15 bp, Homo sapiens
aaacatgcaaattgg

SEQ ID NO: 2092684 - DNA, 15 bp, Homo sapiens
aacatgcaaattggg

SEQ ID NO: 2092685 - DNA, 15 bp, Homo sapiens
acatgcaaattgggc

SEQ ID NO: 2092686 - DNA, 15 bp, Homo sapiens
catgcaaattgggcc

SEQ ID NO: 2092687 - DNA, 15 bp, Homo sapiens
atgcaaattgggccg

SEQ ID NO: 2092688 - DNA, 15 bp, Homo sapiens
tgcaaattgggccgg

SEQ ID NO: 2092689 - DNA, 15 bp, Homo sapiens
gcaaattgggccggg

SEQ ID NO: 2092690 - DNA, 15 bp, Homo sapiens
caaattgggccgggc

SEQ ID NO: 2092691 - DNA, 15 bp, Homo sapiens
ctttgggaggccgaa

SEQ ID NO: 2092692 - DNA, 15 bp, Homo sapiens
tttgggaggccgaag

SEQ ID NO: 2092693 - DNA, 15 bp, Homo sapiens
ttgggaggccgaagt

SEQ ID NO: 2092694 - DNA, 15 bp, Homo sapiens
tgggaggccgaagtg

SEQ ID NO: 2092695 - DNA, 15 bp, Homo sapiens
gggaggccgaagtgg

SEQ ID NO: 2092696 - DNA, 15 bp, Homo sapiens
ggaggccgaagtggg

SEQ ID NO: 2092697 - DNA, 15 bp, Homo sapiens
gaggccgaagtgggt

SEQ ID NO: 2092698 - DNA, 15 bp, Homo sapiens
aggccgaagtgggtg

SEQ ID NO: 2092699 - DNA, 15 bp, Homo sapiens
ggccgaagtgggtgg

SEQ ID NO: 2092700 - DNA, 15 bp, Homo sapiens
gccgaagtgggtggg

SEQ ID NO: 2092701 - DNA, 15 bp, Homo sapiens
ccgaagtgggtgggt

SEQ ID NO: 2092702 - DNA, 15 bp, Homo sapiens
cgaagtgggtgggtc

SEQ ID NO: 2092703 - DNA, 15 bp, Homo sapiens
gaagtgggtgggtca

SEQ ID NO: 2092704 - DNA, 15 bp, Homo sapiens
aagtgggtgggtcac

SEQ ID NO: 2092705 - DNA, 15 bp, Homo sapiens
agtgggtgggtcacc

SEQ ID NO: 2092706 - DNA, 15 bp, Homo sapiens
gtgggtgggtcacct

SEQ ID NO: 2092707 - DNA, 15 bp, Homo sapiens
tgggtgggtcacctg

SEQ ID NO: 2092708 - DNA, 15 bp, Homo sapiens
gggtgggtcacctga

SEQ ID NO: 2092709 - DNA, 15 bp, Homo sapiens
ggtgggtcacctgag

SEQ ID NO: 2092710 - DNA, 15 bp, Homo sapiens
gtgggtcacctgagg

SEQ ID NO: 2092711 - DNA, 15 bp, Homo sapiens
tgggtcacctgaggt

SEQ ID NO: 2092712 - DNA, 15 bp, Homo sapiens
gggtcacctgaggtc

SEQ ID NO: 2092713 - DNA, 15 bp, Homo sapiens
ggtcacctgaggtca

SEQ ID NO: 2092714 - DNA, 15 bp, Homo sapiens
gtcacctgaggtcag

SEQ ID NO: 2092715 - DNA, 15 bp, Homo sapiens
catggtgaaacctca

SEQ ID NO: 2092716 - DNA, 15 bp, Homo sapiens
atggtgaaacctcat

SEQ ID NO: 2092717 - DNA, 15 bp, Homo sapiens
tggtgaaacctcatc

SEQ ID NO: 2092718 - DNA, 15 bp, Homo sapiens
ggtgaaacctcatct

SEQ ID NO: 2092719 - DNA, 15 bp, Homo sapiens
gtgaaacctcatctc

SEQ ID NO: 2092720 - DNA, 15 bp, Homo sapiens
tgaaacctcatctct

SEQ ID NO: 2092721 - DNA, 15 bp, Homo sapiens
aacctcatctctact

SEQ ID NO: 2092722 - DNA, 15 bp, Homo sapiens
acctcatctctacta

SEQ ID NO: 2092723 - DNA, 15 bp, Homo sapiens
cctcatctctactaa

SEQ ID NO: 2092724 - DNA, 15 bp, Homo sapiens
ctcatctctactaaa

SEQ ID NO: 2092725 - DNA, 15 bp, Homo sapiens
tcatctctactaaaa

SEQ ID NO: 2092726 - DNA, 15 bp, Homo sapiens
caggcgtggtggcat

SEQ ID NO: 2092727 - DNA, 15 bp, Homo sapiens
aggcgtggtggcatg

SEQ ID NO: 2092728 - DNA, 15 bp, Homo sapiens
ggcgtggtggcatgt

SEQ ID NO: 2092729 - DNA, 15 bp, Homo sapiens
gcgtggtggcatgtg

SEQ ID NO: 2092730 - DNA, 15 bp, Homo sapiens
cgtggtggcatgtgc

SEQ ID NO: 2092731 - DNA, 15 bp, Homo sapiens
ggcatgtgcctgtaa

SEQ ID NO: 2092732 - DNA, 15 bp, Homo sapiens
gcatgtgcctgtaat

SEQ ID NO: 2092733 - DNA, 15 bp, Homo sapiens
catgtgcctgtaatt

SEQ ID NO: 2092734 - DNA, 15 bp, Homo sapiens
atgtgcctgtaattc

SEQ ID NO: 2092735 - DNA, 15 bp, Homo sapiens
tgtgcctgtaattcc

SEQ ID NO: 2092736 - DNA, 15 bp, Homo sapiens
gtgcctgtaattcca

SEQ ID NO: 2092737 - DNA, 15 bp, Homo sapiens
tgcctgtaattccag

SEQ ID NO: 2092738 - DNA, 15 bp, Homo sapiens
gcctgtaattccagc

SEQ ID NO: 2092739 - DNA, 15 bp, Homo sapiens
tcgggaggttgaggc

SEQ ID NO: 2092740 - DNA, 15 bp, Homo sapiens
cgggaggttgaggca

SEQ ID NO: 2092741 - DNA, 15 bp, Homo sapiens
gttgaggcaggagaa

SEQ ID NO: 2092742 - DNA, 15 bp, Homo sapiens
ttgctccgtgcagga

SEQ ID NO: 2092743 - DNA, 15 bp, Homo sapiens
tgctccgtgcaggaa

SEQ ID NO: 2092744 - DNA, 15 bp, Homo sapiens
gctccgtgcaggaat

SEQ ID NO: 2092745 - DNA, 15 bp, Homo sapiens
ctccgtgcaggaatg

SEQ ID NO: 2092746 - DNA, 15 bp, Homo sapiens
tccgtgcaggaatgt

SEQ ID NO: 2092747 - DNA, 15 bp, Homo sapiens
ccgtgcaggaatgtg

SEQ ID NO: 2092748 - DNA, 15 bp, Homo sapiens
cgtgcaggaatgtgg

SEQ ID NO: 2092749 - DNA, 15 bp, Homo sapiens
gtgcaggaatgtgga

SEQ ID NO: 2092750 - DNA, 15 bp, Homo sapiens
tgcaggaatgtggag

SEQ ID NO: 2092751 - DNA, 15 bp, Homo sapiens
gcaggaatgtggagg

SEQ ID NO: 2092752 - DNA, 15 bp, Homo sapiens
caggaatgtggaggt

SEQ ID NO: 2092753 - DNA, 15 bp, Homo sapiens
aggaatgtggaggtg

SEQ ID NO: 2092754 - DNA, 15 bp, Homo sapiens
ggaatgtggaggtgt

SEQ ID NO: 2092755 - DNA, 15 bp, Homo sapiens
gaatgtggaggtgtg

SEQ ID NO: 2092756 - DNA, 15 bp, Homo sapiens
aatgtggaggtgtgg

SEQ ID NO: 2092757 - DNA, 15 bp, Homo sapiens
atgtggaggtgtggc

SEQ ID NO: 2092758 - DNA, 15 bp, Homo sapiens
tgtggaggtgtggcc

SEQ ID NO: 2092759 - DNA, 15 bp, Homo sapiens
gtggaggtgtggccc

SEQ ID NO: 2092760 - DNA, 15 bp, Homo sapiens
gaggtgtggcccata

SEQ ID NO: 2092761 - DNA, 15 bp, Homo sapiens
aggtgtggcccataa

SEQ ID NO: 2092762 - DNA, 15 bp, Homo sapiens
ggtgtggcccataag

SEQ ID NO: 2092763 - DNA, 15 bp, Homo sapiens
gtgtggcccataagc

SEQ ID NO: 2092764 - DNA, 15 bp, Homo sapiens
tgtggcccataagca

SEQ ID NO: 2092765 - DNA, 15 bp, Homo sapiens
gtggcccataagcat

SEQ ID NO: 2092766 - DNA, 15 bp, Homo sapiens
tggcccataagcatg

SEQ ID NO: 2092767 - DNA, 15 bp, Homo sapiens
ggcccataagcatgt

SEQ ID NO: 2092768 - DNA, 15 bp, Homo sapiens
gcccataagcatgtc

SEQ ID NO: 2092769 - DNA, 15 bp, Homo sapiens
cccataagcatgtca

SEQ ID NO: 2092770 - DNA, 15 bp, Homo sapiens
ccataagcatgtcat

SEQ ID NO: 2092771 - DNA, 15 bp, Homo sapiens
cataagcatgtcatt

SEQ ID NO: 2092772 - DNA, 15 bp, Homo sapiens
ataagcatgtcattc

SEQ ID NO: 2092773 - DNA, 15 bp, Homo sapiens
taagcatgtcattca

SEQ ID NO: 2092774 - DNA, 15 bp, Homo sapiens
aagcatgtcattcat

SEQ ID NO: 2092775 - DNA, 15 bp, Homo sapiens
agcatgtcattcatg

SEQ ID NO: 2092776 - DNA, 15 bp, Homo sapiens
gcatgtcattcatgc

SEQ ID NO: 2092777 - DNA, 15 bp, Homo sapiens
catgtcattcatgca

SEQ ID NO: 2092778 - DNA, 15 bp, Homo sapiens
atgtcattcatgcaa

SEQ ID NO: 2092779 - DNA, 15 bp, Homo sapiens
tgtcattcatgcaaa

SEQ ID NO: 2092780 - DNA, 15 bp, Homo sapiens
gtcattcatgcaaaa

SEQ ID NO: 2092781 - DNA, 15 bp, Homo sapiens
tcattcatgcaaaat

SEQ ID NO: 2092782 - DNA, 15 bp, Homo sapiens
cattcatgcaaaatc

SEQ ID NO: 2092783 - DNA, 15 bp, Homo sapiens
attcatgcaaaatca

SEQ ID NO: 2092784 - DNA, 15 bp, Homo sapiens
ttcatgcaaaatcat

SEQ ID NO: 2092785 - DNA, 15 bp, Homo sapiens
tcatgcaaaatcatc

SEQ ID NO: 2092786 - DNA, 15 bp, Homo sapiens
catgcaaaatcatct

SEQ ID NO: 2092787 - DNA, 15 bp, Homo sapiens
atgcaaaatcatcta

SEQ ID NO: 2092788 - DNA, 15 bp, Homo sapiens
tgcaaaatcatctac

SEQ ID NO: 2092789 - DNA, 15 bp, Homo sapiens
gcaaaatcatctaca

SEQ ID NO: 2092790 - DNA, 15 bp, Homo sapiens
caaaatcatctacat

SEQ ID NO: 2092791 - DNA, 15 bp, Homo sapiens
aaaatcatctacatg

SEQ ID NO: 2092792 - DNA, 15 bp, Homo sapiens
aaatcatctacatgc

SEQ ID NO: 2092793 - DNA, 15 bp, Homo sapiens
aatcatctacatgca

SEQ ID NO: 2092794 - DNA, 15 bp, Homo sapiens
atcatctacatgcat

SEQ ID NO: 2092795 - DNA, 15 bp, Homo sapiens
tcatctacatgcatt

SEQ ID NO: 2092796 - DNA, 15 bp, Homo sapiens
catctacatgcattc

SEQ ID NO: 2092797 - DNA, 15 bp, Homo sapiens
atctacatgcattca

SEQ ID NO: 2092798 - DNA, 15 bp, Homo sapiens
tctacatgcattcaa

SEQ ID NO: 2092799 - DNA, 15 bp, Homo sapiens
ctacatgcattcaat

SEQ ID NO: 2092800 - DNA, 15 bp, Homo sapiens
tacatgcattcaatt

SEQ ID NO: 2092801 - DNA, 15 bp, Homo sapiens
acatgcattcaatta

SEQ ID NO: 2092802 - DNA, 15 bp, Homo sapiens
catgcattcaattag

SEQ ID NO: 2092803 - DNA, 15 bp, Homo sapiens
atgcattcaattaga

SEQ ID NO: 2092804 - DNA, 15 bp, Homo sapiens
tgcattcaattagaa

SEQ ID NO: 2092805 - DNA, 15 bp, Homo sapiens
gcattcaattagaaa

SEQ ID NO: 2092806 - DNA, 15 bp, Homo sapiens
cattcaattagaaaa

SEQ ID NO: 2092807 - DNA, 15 bp, Homo sapiens
attcaattagaaaaa

SEQ ID NO: 2092808 - DNA, 15 bp, Homo sapiens
ttcaattagaaaaaa

SEQ ID NO: 2092809 - DNA, 15 bp, Homo sapiens
tcaattagaaaaaaa

SEQ ID NO: 2092810 - DNA, 15 bp, Homo sapiens
caattagaaaaaaaa

SEQ ID NO: 2092811 - DNA, 15 bp, Homo sapiens
attagaaaaaaaaag

SEQ ID NO: 2092812 - DNA, 15 bp, Homo sapiens
ttagaaaaaaaaagg

SEQ ID NO: 2092813 - DNA, 15 bp, Homo sapiens
tagaaaaaaaaagga

SEQ ID NO: 2092814 - DNA, 15 bp, Homo sapiens
aaaaaaaaggaaaac

SEQ ID NO: 2092815 - DNA, 15 bp, Homo sapiens
aaaaggaaaacagca

SEQ ID NO: 2092816 - DNA, 15 bp, Homo sapiens
aaaggaaaacagcag

SEQ ID NO: 2092817 - DNA, 15 bp, Homo sapiens
aaggaaaacagcagt

SEQ ID NO: 2092818 - DNA, 15 bp, Homo sapiens
aggaaaacagcagtg

SEQ ID NO: 2092819 - DNA, 15 bp, Homo sapiens
ggaaaacagcagtga

SEQ ID NO: 2092820 - DNA, 15 bp, Homo sapiens
gaaaacagcagtgac

SEQ ID NO: 2092821 - DNA, 15 bp, Homo sapiens
aaaacagcagtgacc

SEQ ID NO: 2092822 - DNA, 15 bp, Homo sapiens
aaacagcagtgaccc

SEQ ID NO: 2092823 - DNA, 15 bp, Homo sapiens
aacagcagtgaccct

SEQ ID NO: 2092824 - DNA, 15 bp, Homo sapiens
acagcagtgaccctc

SEQ ID NO: 2092825 - DNA, 15 bp, Homo sapiens
cagcagtgaccctca

SEQ ID NO: 2092826 - DNA, 15 bp, Homo sapiens
agcagtgaccctcat

SEQ ID NO: 2092827 - DNA, 15 bp, Homo sapiens
gcagtgaccctcata

SEQ ID NO: 2092828 - DNA, 15 bp, Homo sapiens
cagtgaccctcataa

SEQ ID NO: 2092829 - DNA, 15 bp, Homo sapiens
agtgaccctcataag

SEQ ID NO: 2092830 - DNA, 15 bp, Homo sapiens
gtgaccctcataagt

SEQ ID NO: 2092831 - DNA, 15 bp, Homo sapiens
tgaccctcataagta

SEQ ID NO: 2092832 - DNA, 15 bp, Homo sapiens
gaccctcataagtag

SEQ ID NO: 2092833 - DNA, 15 bp, Homo sapiens
accctcataagtaga

SEQ ID NO: 2092834 - DNA, 15 bp, Homo sapiens
ccctcataagtagac

SEQ ID NO: 2092835 - DNA, 15 bp, Homo sapiens
cctcataagtagact

SEQ ID NO: 2092836 - DNA, 15 bp, Homo sapiens
ctcataagtagactt

SEQ ID NO: 2092837 - DNA, 15 bp, Homo sapiens
tcataagtagacttg

SEQ ID NO: 2092838 - DNA, 15 bp, Homo sapiens
cataagtagacttgg

SEQ ID NO: 2092839 - DNA, 15 bp, Homo sapiens
ataagtagacttggt

SEQ ID NO: 2092840 - DNA, 15 bp, Homo sapiens
taagtagacttggtt

SEQ ID NO: 2092841 - DNA, 15 bp, Homo sapiens
aagtagacttggtta

SEQ ID NO: 2092842 - DNA, 15 bp, Homo sapiens
agtagacttggttag

SEQ ID NO: 2092843 - DNA, 15 bp, Homo sapiens
gtagacttggttagt

SEQ ID NO: 2092844 - DNA, 15 bp, Homo sapiens
tagacttggttagtg

SEQ ID NO: 2092845 - DNA, 15 bp, Homo sapiens
agacttggttagtgt

SEQ ID NO: 2092846 - DNA, 15 bp, Homo sapiens
gacttggttagtgtc

SEQ ID NO: 2092847 - DNA, 15 bp, Homo sapiens
acttggttagtgtca

SEQ ID NO: 2092848 - DNA, 15 bp, Homo sapiens
cttggttagtgtcaa

SEQ ID NO: 2092849 - DNA, 15 bp, Homo sapiens
ttggttagtgtcaat

SEQ ID NO: 2092850 - DNA, 15 bp, Homo sapiens
tggttagtgtcaatg

SEQ ID NO: 2092851 - DNA, 15 bp, Homo sapiens
ggttagtgtcaatgt

SEQ ID NO: 2092852 - DNA, 15 bp, Homo sapiens
gttagtgtcaatgta

SEQ ID NO: 2092853 - DNA, 15 bp, Homo sapiens
ttagtgtcaatgtag

SEQ ID NO: 2092854 - DNA, 15 bp, Homo sapiens
tagtgtcaatgtagg

SEQ ID NO: 2092855 - DNA, 15 bp, Homo sapiens
agtgtcaatgtaggg

SEQ ID NO: 2092856 - DNA, 15 bp, Homo sapiens
gtgtcaatgtaggga

SEQ ID NO: 2092857 - DNA, 15 bp, Homo sapiens
tgtcaatgtagggag

SEQ ID NO: 2092858 - DNA, 15 bp, Homo sapiens
gtcaatgtagggagt

SEQ ID NO: 2092859 - DNA, 15 bp, Homo sapiens
tcaatgtagggagtg

SEQ ID NO: 2092860 - DNA, 15 bp, Homo sapiens
caatgtagggagtga

SEQ ID NO: 2092861 - DNA, 15 bp, Homo sapiens
aatgtagggagtgag

SEQ ID NO: 2092862 - DNA, 15 bp, Homo sapiens
atgtagggagtgagt

SEQ ID NO: 2092863 - DNA, 15 bp, Homo sapiens
tgtagggagtgagtt

SEQ ID NO: 2092864 - DNA, 15 bp, Homo sapiens
gtagggagtgagttt

SEQ ID NO: 2092865 - DNA, 15 bp, Homo sapiens
tagggagtgagtttc

SEQ ID NO: 2092866 - DNA, 15 bp, Homo sapiens
agggagtgagtttct

SEQ ID NO: 2092867 - DNA, 15 bp, Homo sapiens
gggagtgagtttctt

SEQ ID NO: 2092868 - DNA, 15 bp, Homo sapiens
ggagtgagtttcttg

SEQ ID NO: 2092869 - DNA, 15 bp, Homo sapiens
gagtgagtttcttgt

SEQ ID NO: 2092870 - DNA, 15 bp, Homo sapiens
agtgagtttcttgtg

SEQ ID NO: 2092871 - DNA, 15 bp, Homo sapiens
gtgagtttcttgtga

SEQ ID NO: 2092872 - DNA, 15 bp, Homo sapiens
tgagtttcttgtgac

SEQ ID NO: 2092873 - DNA, 15 bp, Homo sapiens
gagtttcttgtgacc

SEQ ID NO: 2092874 - DNA, 15 bp, Homo sapiens
agtttcttgtgaccc

SEQ ID NO: 2092875 - DNA, 15 bp, Homo sapiens
gtttcttgtgaccct

SEQ ID NO: 2092876 - DNA, 15 bp, Homo sapiens
tttcttgtgaccctg

SEQ ID NO: 2092877 - DNA, 15 bp, Homo sapiens
ttcttgtgaccctgc

SEQ ID NO: 2092878 - DNA, 15 bp, Homo sapiens
tcttgtgaccctgct

SEQ ID NO: 2092879 - DNA, 15 bp, Homo sapiens
cttgtgaccctgctg

SEQ ID NO: 2092880 - DNA, 15 bp, Homo sapiens
ttgtgaccctgctgt

SEQ ID NO: 2092881 - DNA, 15 bp, Homo sapiens
tgtgaccctgctgtt

SEQ ID NO: 2092882 - DNA, 15 bp, Homo sapiens
gtgaccctgctgttc

SEQ ID NO: 2092883 - DNA, 15 bp, Homo sapiens
tgaccctgctgttct

SEQ ID NO: 2092884 - DNA, 15 bp, Homo sapiens
gaccctgctgttctt

SEQ ID NO: 2092885 - DNA, 15 bp, Homo sapiens
accctgctgttcttc

SEQ ID NO: 2092886 - DNA, 15 bp, Homo sapiens
ccctgctgttcttcc

SEQ ID NO: 2092887 - DNA, 15 bp, Homo sapiens
cctgctgttcttcct

SEQ ID NO: 2092888 - DNA, 15 bp, Homo sapiens
ctgctgttcttcctg

SEQ ID NO: 2092889 - DNA, 15 bp, Homo sapiens
tgctgttcttcctgg

SEQ ID NO: 2092890 - DNA, 15 bp, Homo sapiens
gctgttcttcctggg

SEQ ID NO: 2092891 - DNA, 15 bp, Homo sapiens
ctgttcttcctgggt

SEQ ID NO: 2092892 - DNA, 15 bp, Homo sapiens
tgttcttcctgggtc

SEQ ID NO: 2092893 - DNA, 15 bp, Homo sapiens
gttcttcctgggtcc

SEQ ID NO: 2092894 - DNA, 15 bp, Homo sapiens
ttcttcctgggtccc

SEQ ID NO: 2092895 - DNA, 15 bp, Homo sapiens
tcttcctgggtcccg

SEQ ID NO: 2092896 - DNA, 15 bp, Homo sapiens
cttcctgggtcccgt

SEQ ID NO: 2092897 - DNA, 15 bp, Homo sapiens
ttcctgggtcccgtg

SEQ ID NO: 2092898 - DNA, 15 bp, Homo sapiens
tcctgggtcccgtga

SEQ ID NO: 2092899 - DNA, 15 bp, Homo sapiens
cctgggtcccgtgac

SEQ ID NO: 2092900 - DNA, 15 bp, Homo sapiens
ctgggtcccgtgaca

SEQ ID NO: 2092901 - DNA, 15 bp, Homo sapiens
tgggtcccgtgacag

SEQ ID NO: 2092902 - DNA, 15 bp, Homo sapiens
gggtcccgtgacagg

SEQ ID NO: 2092903 - DNA, 15 bp, Homo sapiens
ggtcccgtgacaggg

SEQ ID NO: 2092904 - DNA, 15 bp, Homo sapiens
gtcccgtgacagggc

SEQ ID NO: 2092905 - DNA, 15 bp, Homo sapiens
tcccgtgacagggca

SEQ ID NO: 2092906 - DNA, 15 bp, Homo sapiens
cccgtgacagggcat

SEQ ID NO: 2092907 - DNA, 15 bp, Homo sapiens
ccgtgacagggcatc

SEQ ID NO: 2092908 - DNA, 15 bp, Homo sapiens
cgtgacagggcatct

SEQ ID NO: 2092909 - DNA, 15 bp, Homo sapiens
gtgacagggcatctg

SEQ ID NO: 2092910 - DNA, 15 bp, Homo sapiens
tgacagggcatctgg

SEQ ID NO: 2092911 - DNA, 15 bp, Homo sapiens
gacagggcatctgga

SEQ ID NO: 2092912 - DNA, 15 bp, Homo sapiens
acagggcatctggac

SEQ ID NO: 2092913 - DNA, 15 bp, Homo sapiens
cagggcatctggaca

SEQ ID NO: 2092914 - DNA, 15 bp, Homo sapiens
agggcatctggacag

SEQ ID NO: 2092915 - DNA, 15 bp, Homo sapiens
gggcatctggacagg

SEQ ID NO: 2092916 - DNA, 15 bp, Homo sapiens
ggcatctggacaggc

SEQ ID NO: 2092917 - DNA, 15 bp, Homo sapiens
gcatctggacaggct

SEQ ID NO: 2092918 - DNA, 15 bp, Homo sapiens
catctggacaggctg

SEQ ID NO: 2092919 - DNA, 15 bp, Homo sapiens
atctggacaggctga

SEQ ID NO: 2092920 - DNA, 15 bp, Homo sapiens
tctggacaggctgaa

SEQ ID NO: 2092921 - DNA, 15 bp, Homo sapiens
ctggacaggctgaat

SEQ ID NO: 2092922 - DNA, 15 bp, Homo sapiens
tggacaggctgaatg

SEQ ID NO: 2092923 - DNA, 15 bp, Homo sapiens
ggacaggctgaatgc

SEQ ID NO: 2092924 - DNA, 15 bp, Homo sapiens
gacaggctgaatgcg

SEQ ID NO: 2092925 - DNA, 15 bp, Homo sapiens
acaggctgaatgcga

SEQ ID NO: 2092926 - DNA, 15 bp, Homo sapiens
caggctgaatgcgat

SEQ ID NO: 2092927 - DNA, 15 bp, Homo sapiens
aggctgaatgcgatt

SEQ ID NO: 2092928 - DNA, 15 bp, Homo sapiens
ggctgaatgcgattc

SEQ ID NO: 2092929 - DNA, 15 bp, Homo sapiens
gctgaatgcgattct

SEQ ID NO: 2092930 - DNA, 15 bp, Homo sapiens
ctgaatgcgattcta

SEQ ID NO: 2092931 - DNA, 15 bp, Homo sapiens
tgaatgcgattctag

SEQ ID NO: 2092932 - DNA, 15 bp, Homo sapiens
gaatgcgattctaga

SEQ ID NO: 2092933 - DNA, 15 bp, Homo sapiens
aatgcgattctagaa

SEQ ID NO: 2092934 - DNA, 15 bp, Homo sapiens
atgcgattctagaat

SEQ ID NO: 2092935 - DNA, 15 bp, Homo sapiens
tgcgattctagaatt

SEQ ID NO: 2092936 - DNA, 15 bp, Homo sapiens
gcgattctagaatta

SEQ ID NO: 2092937 - DNA, 15 bp, Homo sapiens
cgattctagaattag

SEQ ID NO: 2092938 - DNA, 15 bp, Homo sapiens
gattctagaattaga

SEQ ID NO: 2092939 - DNA, 15 bp, Homo sapiens
attctagaattagat

SEQ ID NO: 2092940 - DNA, 15 bp, Homo sapiens
ttctagaattagatt

SEQ ID NO: 2092941 - DNA, 15 bp, Homo sapiens
tctagaattagattc

SEQ ID NO: 2092942 - DNA, 15 bp, Homo sapiens
ctagaattagattcc

SEQ ID NO: 2092943 - DNA, 15 bp, Homo sapiens
tagaattagattcct

SEQ ID NO: 2092944 - DNA, 15 bp, Homo sapiens
agaattagattccta

SEQ ID NO: 2092945 - DNA, 15 bp, Homo sapiens
gaattagattcctat

SEQ ID NO: 2092946 - DNA, 15 bp, Homo sapiens
aattagattcctatg

SEQ ID NO: 2092947 - DNA, 15 bp, Homo sapiens
attagattcctatgt

SEQ ID NO: 2092948 - DNA, 15 bp, Homo sapiens
ttagattcctatgtt

SEQ ID NO: 2092949 - DNA, 15 bp, Homo sapiens
tagattcctatgttt

SEQ ID NO: 2092950 - DNA, 15 bp, Homo sapiens
agattcctatgtttt

SEQ ID NO: 2092951 - DNA, 15 bp, Homo sapiens
gattcctatgttttt

SEQ ID NO: 2092952 - DNA, 15 bp, Homo sapiens
attcctatgttttta

SEQ ID NO: 2092953 - DNA, 15 bp, Homo sapiens
ttcctatgtttttat

SEQ ID NO: 2092954 - DNA, 15 bp, Homo sapiens
tcctatgtttttata

SEQ ID NO: 2092955 - DNA, 15 bp, Homo sapiens
cctatgtttttatat

SEQ ID NO: 2092956 - DNA, 15 bp, Homo sapiens
ctatgtttttatatg

SEQ ID NO: 2092957 - DNA, 15 bp, Homo sapiens
tatgtttttatatgt

SEQ ID NO: 2092958 - DNA, 15 bp, Homo sapiens
atgtttttatatgta

SEQ ID NO: 2092959 - DNA, 15 bp, Homo sapiens
tgtttttatatgtac

SEQ ID NO: 2092960 - DNA, 15 bp, Homo sapiens
gtttttatatgtacg

SEQ ID NO: 2092961 - DNA, 15 bp, Homo sapiens
tttttatatgtacgc

SEQ ID NO: 2092962 - DNA, 15 bp, Homo sapiens
ttttatatgtacgcc

SEQ ID NO: 2092963 - DNA, 15 bp, Homo sapiens
tttatatgtacgccc

SEQ ID NO: 2092964 - DNA, 15 bp, Homo sapiens
ttatatgtacgcccc

SEQ ID NO: 2092965 - DNA, 15 bp, Homo sapiens
tatatgtacgcccca

SEQ ID NO: 2092966 - DNA, 15 bp, Homo sapiens
atatgtacgccccag

SEQ ID NO: 2092967 - DNA, 15 bp, Homo sapiens
tatgtacgccccagt

SEQ ID NO: 2092968 - DNA, 15 bp, Homo sapiens
atgtacgccccagtc

SEQ ID NO: 2092969 - DNA, 15 bp, Homo sapiens
tgtacgccccagtct

SEQ ID NO: 2092970 - DNA, 15 bp, Homo sapiens
gtacgccccagtctc

SEQ ID NO: 2092971 - DNA, 15 bp, Homo sapiens
tacgccccagtctca

SEQ ID NO: 2092972 - DNA, 15 bp, Homo sapiens
acgccccagtctcac

SEQ ID NO: 2092973 - DNA, 15 bp, Homo sapiens
cgccccagtctcact

SEQ ID NO: 2092974 - DNA, 15 bp, Homo sapiens
gccccagtctcactt

SEQ ID NO: 2092975 - DNA, 15 bp, Homo sapiens
ccccagtctcacttg

SEQ ID NO: 2092976 - DNA, 15 bp, Homo sapiens
cccagtctcacttgc

SEQ ID NO: 2092977 - DNA, 15 bp, Homo sapiens
ccagtctcacttgcc

SEQ ID NO: 2092978 - DNA, 15 bp, Homo sapiens
cagtctcacttgcca

SEQ ID NO: 2092979 - DNA, 15 bp, Homo sapiens
agtctcacttgccag

SEQ ID NO: 2092980 - DNA, 15 bp, Homo sapiens
gtctcacttgccagt

SEQ ID NO: 2092981 - DNA, 15 bp, Homo sapiens
tctcacttgccagtg

SEQ ID NO: 2092982 - DNA, 15 bp, Homo sapiens
ctcacttgccagtgg

SEQ ID NO: 2092983 - DNA, 15 bp, Homo sapiens
tcacttgccagtggc

SEQ ID NO: 2092984 - DNA, 15 bp, Homo sapiens
cacttgccagtggct

SEQ ID NO: 2092985 - DNA, 15 bp, Homo sapiens
acttgccagtggctt

SEQ ID NO: 2092986 - DNA, 15 bp, Homo sapiens
cttgccagtggcttc

SEQ ID NO: 2092987 - DNA, 15 bp, Homo sapiens
ttgccagtggcttcc

SEQ ID NO: 2092988 - DNA, 15 bp, Homo sapiens
tgccagtggcttcct

SEQ ID NO: 2092989 - DNA, 15 bp, Homo sapiens
gccagtggcttcctc

SEQ ID NO: 2092990 - DNA, 15 bp, Homo sapiens
ccagtggcttcctct

SEQ ID NO: 2092991 - DNA, 15 bp, Homo sapiens
cagtggcttcctctg

SEQ ID NO: 2092992 - DNA, 15 bp, Homo sapiens
agtggcttcctctga

SEQ ID NO: 2092993 - DNA, 15 bp, Homo sapiens
gtggcttcctctgac

SEQ ID NO: 2092994 - DNA, 15 bp, Homo sapiens
tggcttcctctgacg

SEQ ID NO: 2092995 - DNA, 15 bp, Homo sapiens
ggcttcctctgacgc

SEQ ID NO: 2092996 - DNA, 15 bp, Homo sapiens
gcttcctctgacgct

SEQ ID NO: 2092997 - DNA, 15 bp, Homo sapiens
cttcctctgacgctt

SEQ ID NO: 2092998 - DNA, 15 bp, Homo sapiens
ttcctctgacgctta

SEQ ID NO: 2092999 - DNA, 15 bp, Homo sapiens
tcctctgacgcttag

SEQ ID NO: 2093000 - DNA, 15 bp, Homo sapiens
cctctgacgcttaga

SEQ ID NO: 2093001 - DNA, 15 bp, Homo sapiens
ctctgacgcttagaa

SEQ ID NO: 2093002 - DNA, 15 bp, Homo sapiens
tctgacgcttagaaa

SEQ ID NO: 2093003 - DNA, 15 bp, Homo sapiens
ctgacgcttagaaaa

SEQ ID NO: 2093004 - DNA, 15 bp, Homo sapiens
tgacgcttagaaaat

SEQ ID NO: 2093005 - DNA, 15 bp, Homo sapiens
gacgcttagaaaata

SEQ ID NO: 2093006 - DNA, 15 bp, Homo sapiens
acgcttagaaaataa

SEQ ID NO: 2093007 - DNA, 15 bp, Homo sapiens
cgcttagaaaataaa

SEQ ID NO: 2093008 - DNA, 15 bp, Homo sapiens
gcttagaaaataaat

SEQ ID NO: 2093009 - DNA, 15 bp, Homo sapiens
cttagaaaataaatg

SEQ ID NO: 2093010 - DNA, 15 bp, Homo sapiens
ttagaaaataaatgg

SEQ ID NO: 2093011 - DNA, 15 bp, Homo sapiens
tagaaaataaatggc

SEQ ID NO: 2093012 - DNA, 15 bp, Homo sapiens
agaaaataaatggca

SEQ ID NO: 2093013 - DNA, 15 bp, Homo sapiens
gaaaataaatggcat

SEQ ID NO: 2093014 - DNA, 15 bp, Homo sapiens
aaaataaatggcatc

SEQ ID NO: 2093015 - DNA, 15 bp, Homo sapiens
aaataaatggcatct

SEQ ID NO: 2093016 - DNA, 15 bp, Homo sapiens
aataaatggcatctg

SEQ ID NO: 2093017 - DNA, 15 bp, Homo sapiens
ataaatggcatctgc

SEQ ID NO: 2093018 - DNA, 15 bp, Homo sapiens
taaatggcatctgca

SEQ ID NO: 2093019 - DNA, 15 bp, Homo sapiens
aaatggcatctgcac

SEQ ID NO: 2093020 - DNA, 15 bp, Homo sapiens
aatggcatctgcacc

SEQ ID NO: 2093021 - DNA, 15 bp, Homo sapiens
atggcatctgcacca

SEQ ID NO: 2093022 - DNA, 15 bp, Homo sapiens
tggcatctgcaccac

SEQ ID NO: 2093023 - DNA, 15 bp, Homo sapiens
ggcatctgcaccacg

SEQ ID NO: 2093024 - DNA, 15 bp, Homo sapiens
gcatctgcaccacgt

SEQ ID NO: 2093025 - DNA, 15 bp, Homo sapiens
catctgcaccacgtc

SEQ ID NO: 2093026 - DNA, 15 bp, Homo sapiens
atctgcaccacgtca

SEQ ID NO: 2093027 - DNA, 15 bp, Homo sapiens
tctgcaccacgtcag

SEQ ID NO: 2093028 - DNA, 15 bp, Homo sapiens
ctgcaccacgtcagg

SEQ ID NO: 2093029 - DNA, 15 bp, Homo sapiens
tgcaccacgtcaggg

SEQ ID NO: 2093030 - DNA, 15 bp, Homo sapiens
gcaccacgtcaggga

SEQ ID NO: 2093031 - DNA, 15 bp, Homo sapiens
caccacgtcagggag

SEQ ID NO: 2093032 - DNA, 15 bp, Homo sapiens
accacgtcagggaga

SEQ ID NO: 2093033 - DNA, 15 bp, Homo sapiens
ccacgtcagggagaa

SEQ ID NO: 2093034 - DNA, 15 bp, Homo sapiens
cacgtcagggagaaa

SEQ ID NO: 2093035 - DNA, 15 bp, Homo sapiens
acgtcagggagaaac

SEQ ID NO: 2093036 - DNA, 15 bp, Homo sapiens
cgtcagggagaaact

SEQ ID NO: 2093037 - DNA, 15 bp, Homo sapiens
gtcagggagaaactg

SEQ ID NO: 2093038 - DNA, 15 bp, Homo sapiens
tcagggagaaactga

SEQ ID NO: 2093039 - DNA, 15 bp, Homo sapiens
cagggagaaactgac

SEQ ID NO: 2093040 - DNA, 15 bp, Homo sapiens
agggagaaactgact

SEQ ID NO: 2093041 - DNA, 15 bp, Homo sapiens
gggagaaactgactg

SEQ ID NO: 2093042 - DNA, 15 bp, Homo sapiens
ggagaaactgactgc

SEQ ID NO: 2093043 - DNA, 15 bp, Homo sapiens
gagaaactgactgct

SEQ ID NO: 2093044 - DNA, 15 bp, Homo sapiens
agaaactgactgctt

SEQ ID NO: 2093045 - DNA, 15 bp, Homo sapiens
gaaactgactgcttt

SEQ ID NO: 2093046 - DNA, 15 bp, Homo sapiens
aaactgactgctttg

SEQ ID NO: 2093047 - DNA, 15 bp, Homo sapiens
aactgactgctttgg

SEQ ID NO: 2093048 - DNA, 15 bp, Homo sapiens
actgactgctttgga

SEQ ID NO: 2093049 - DNA, 15 bp, Homo sapiens
ctgactgctttggaa

SEQ ID NO: 2093050 - DNA, 15 bp, Homo sapiens
tgactgctttggaat

SEQ ID NO: 2093051 - DNA, 15 bp, Homo sapiens
gactgctttggaatt

SEQ ID NO: 2093052 - DNA, 15 bp, Homo sapiens
actgctttggaattc

SEQ ID NO: 2093053 - DNA, 15 bp, Homo sapiens
ctgctttggaattcc

SEQ ID NO: 2093054 - DNA, 15 bp, Homo sapiens
tgctttggaattccc

SEQ ID NO: 2093055 - DNA, 15 bp, Homo sapiens
gctttggaattccca

SEQ ID NO: 2093056 - DNA, 15 bp, Homo sapiens
ctttggaattcccag

SEQ ID NO: 2093057 - DNA, 15 bp, Homo sapiens
tttggaattcccaga

SEQ ID NO: 2093058 - DNA, 15 bp, Homo sapiens
ttggaattcccagaa

SEQ ID NO: 2093059 - DNA, 15 bp, Homo sapiens
tggaattcccagaag

SEQ ID NO: 2093060 - DNA, 15 bp, Homo sapiens
ggaattcccagaagc

SEQ ID NO: 2093061 - DNA, 15 bp, Homo sapiens
gaattcccagaagct

SEQ ID NO: 2093062 - DNA, 15 bp, Homo sapiens
aattcccagaagctc

SEQ ID NO: 2093063 - DNA, 15 bp, Homo sapiens
attcccagaagctct

SEQ ID NO: 2093064 - DNA, 15 bp, Homo sapiens
ttcccagaagctctt

SEQ ID NO: 2093065 - DNA, 15 bp, Homo sapiens
tcccagaagctcttg

SEQ ID NO: 2093066 - DNA, 15 bp, Homo sapiens
cccagaagctcttgg

SEQ ID NO: 2093067 - DNA, 15 bp, Homo sapiens
ccagaagctcttgga

SEQ ID NO: 2093068 - DNA, 15 bp, Homo sapiens
cagaagctcttggaa

SEQ ID NO: 2093069 - DNA, 15 bp, Homo sapiens
agaagctcttggaag

SEQ ID NO: 2093070 - DNA, 15 bp, Homo sapiens
gaagctcttggaagg

SEQ ID NO: 2093071 - DNA, 15 bp, Homo sapiens
aagctcttggaaggg

SEQ ID NO: 2093072 - DNA, 15 bp, Homo sapiens
agctcttggaaggga

SEQ ID NO: 2093073 - DNA, 15 bp, Homo sapiens
gctcttggaagggaa

SEQ ID NO: 2093074 - DNA, 15 bp, Homo sapiens
ctcttggaagggaac

SEQ ID NO: 2093075 - DNA, 15 bp, Homo sapiens
tcttggaagggaacc

SEQ ID NO: 2093076 - DNA, 15 bp, Homo sapiens
cttggaagggaacct

SEQ ID NO: 2093077 - DNA, 15 bp, Homo sapiens
ttggaagggaacctt

SEQ ID NO: 2093078 - DNA, 15 bp, Homo sapiens
tggaagggaaccttc

SEQ ID NO: 2093079 - DNA, 15 bp, Homo sapiens
ggaagggaaccttcc

SEQ ID NO: 2093080 - DNA, 15 bp, Homo sapiens
gaagggaaccttcct

SEQ ID NO: 2093081 - DNA, 15 bp, Homo sapiens
aagggaaccttcctg

SEQ ID NO: 2093082 - DNA, 15 bp, Homo sapiens
agggaaccttcctga

SEQ ID NO: 2093083 - DNA, 15 bp, Homo sapiens
gggaaccttcctgag

SEQ ID NO: 2093084 - DNA, 15 bp, Homo sapiens
ggaaccttcctgagg

SEQ ID NO: 2093085 - DNA, 15 bp, Homo sapiens
gaaccttcctgaggg

SEQ ID NO: 2093086 - DNA, 15 bp, Homo sapiens
aaccttcctgaggga

SEQ ID NO: 2093087 - DNA, 15 bp, Homo sapiens
accttcctgagggat

SEQ ID NO: 2093088 - DNA, 15 bp, Homo sapiens
ccttcctgagggata

SEQ ID NO: 2093089 - DNA, 15 bp, Homo sapiens
cttcctgagggatat

SEQ ID NO: 2093090 - DNA, 15 bp, Homo sapiens
ttcctgagggatatt

SEQ ID NO: 2093091 - DNA, 15 bp, Homo sapiens
tcctgagggatattg

SEQ ID NO: 2093092 - DNA, 15 bp, Homo sapiens
cctgagggatattga

SEQ ID NO: 2093093 - DNA, 15 bp, Homo sapiens
ctgagggatattgaa

SEQ ID NO: 2093094 - DNA, 15 bp, Homo sapiens
tgagggatattgaag

SEQ ID NO: 2093095 - DNA, 15 bp, Homo sapiens
gagggatattgaagg

SEQ ID NO: 2093096 - DNA, 15 bp, Homo sapiens
agggatattgaagga

SEQ ID NO: 2093097 - DNA, 15 bp, Homo sapiens
gggatattgaaggag

SEQ ID NO: 2093098 - DNA, 15 bp, Homo sapiens
ggatattgaaggaga

SEQ ID NO: 2093099 - DNA, 15 bp, Homo sapiens
gatattgaaggagaa

SEQ ID NO: 2093100 - DNA, 15 bp, Homo sapiens
atattgaaggagaat

SEQ ID NO: 2093101 - DNA, 15 bp, Homo sapiens
tattgaaggagaatt

SEQ ID NO: 2093102 - DNA, 15 bp, Homo sapiens
attgaaggagaatta

SEQ ID NO: 2093103 - DNA, 15 bp, Homo sapiens
ttgaaggagaattaa

SEQ ID NO: 2093104 - DNA, 15 bp, Homo sapiens
tgaaggagaattaaa

SEQ ID NO: 2093105 - DNA, 15 bp, Homo sapiens
gaaggagaattaaag

SEQ ID NO: 2093106 - DNA, 15 bp, Homo sapiens
aaggagaattaaaga

SEQ ID NO: 2093107 - DNA, 15 bp, Homo sapiens
aggagaattaaagaa

SEQ ID NO: 2093108 - DNA, 15 bp, Homo sapiens
ggagaattaaagaat

SEQ ID NO: 2093109 - DNA, 15 bp, Homo sapiens
gagaattaaagaatt

SEQ ID NO: 2093110 - DNA, 15 bp, Homo sapiens
agaattaaagaattt

SEQ ID NO: 2093111 - DNA, 15 bp, Homo sapiens
gaattaaagaatttt

SEQ ID NO: 2093112 - DNA, 15 bp, Homo sapiens
aattaaagaattttc

SEQ ID NO: 2093113 - DNA, 15 bp, Homo sapiens
attaaagaattttct

SEQ ID NO: 2093114 - DNA, 15 bp, Homo sapiens
ttaaagaattttctc

SEQ ID NO: 2093115 - DNA, 15 bp, Homo sapiens
taaagaattttctca

SEQ ID NO: 2093116 - DNA, 15 bp, Homo sapiens
aaagaattttctcag

SEQ ID NO: 2093117 - DNA, 15 bp, Homo sapiens
aagaattttctcagt

SEQ ID NO: 2093118 - DNA, 15 bp, Homo sapiens
agaattttctcagtg

SEQ ID NO: 2093119 - DNA, 15 bp, Homo sapiens
gaattttctcagtgg

SEQ ID NO: 2093120 - DNA, 15 bp, Homo sapiens
aattttctcagtggc

SEQ ID NO: 2093121 - DNA, 15 bp, Homo sapiens
attttctcagtggct

SEQ ID NO: 2093122 - DNA, 15 bp, Homo sapiens
ttttctcagtggctg

SEQ ID NO: 2093123 - DNA, 15 bp, Homo sapiens
tttctcagtggctgg

SEQ ID NO: 2093124 - DNA, 15 bp, Homo sapiens
ttctcagtggctggc

SEQ ID NO: 2093125 - DNA, 15 bp, Homo sapiens
tctcagtggctggca

SEQ ID NO: 2093126 - DNA, 15 bp, Homo sapiens
ctcagtggctggcac

SEQ ID NO: 2093127 - DNA, 15 bp, Homo sapiens
tcagtggctggcaca

SEQ ID NO: 2093128 - DNA, 15 bp, Homo sapiens
cagtggctggcacaa

SEQ ID NO: 2093129 - DNA, 15 bp, Homo sapiens
agtggctggcacaac

SEQ ID NO: 2093130 - DNA, 15 bp, Homo sapiens
gtggctggcacaact

SEQ ID NO: 2093131 - DNA, 15 bp, Homo sapiens
tggctggcacaactt

SEQ ID NO: 2093132 - DNA, 15 bp, Homo sapiens
ggctggcacaactta

SEQ ID NO: 2093133 - DNA, 15 bp, Homo sapiens
gctggcacaacttat

SEQ ID NO: 2093134 - DNA, 15 bp, Homo sapiens
ctggcacaacttatg

SEQ ID NO: 2093135 - DNA, 15 bp, Homo sapiens
tggcacaacttatgg

SEQ ID NO: 2093136 - DNA, 15 bp, Homo sapiens
ggcacaacttatgga

SEQ ID NO: 2093137 - DNA, 15 bp, Homo sapiens
gcacaacttatggag

SEQ ID NO: 2093138 - DNA, 15 bp, Homo sapiens
cacaacttatggagt

SEQ ID NO: 2093139 - DNA, 15 bp, Homo sapiens
acaacttatggagtc

SEQ ID NO: 2093140 - DNA, 15 bp, Homo sapiens
caacttatggagtca

SEQ ID NO: 2093141 - DNA, 15 bp, Homo sapiens
aacttatggagtcaa

SEQ ID NO: 2093142 - DNA, 15 bp, Homo sapiens
acttatggagtcaat

SEQ ID NO: 2093143 - DNA, 15 bp, Homo sapiens
cttatggagtcaatg

SEQ ID NO: 2093144 - DNA, 15 bp, Homo sapiens
ttatggagtcaatgc

SEQ ID NO: 2093145 - DNA, 15 bp, Homo sapiens
tatggagtcaatgct

SEQ ID NO: 2093146 - DNA, 15 bp, Homo sapiens
atggagtcaatgctc

SEQ ID NO: 2093147 - DNA, 15 bp, Homo sapiens
tggagtcaatgctca

SEQ ID NO: 2093148 - DNA, 15 bp, Homo sapiens
ggagtcaatgctcat

SEQ ID NO: 2093149 - DNA, 15 bp, Homo sapiens
gagtcaatgctcatt

SEQ ID NO: 2093150 - DNA, 15 bp, Homo sapiens
agtcaatgctcattg

SEQ ID NO: 2093151 - DNA, 15 bp, Homo sapiens
gtcaatgctcattgg

SEQ ID NO: 2093152 - DNA, 15 bp, Homo sapiens
tcaatgctcattggc

SEQ ID NO: 2093153 - DNA, 15 bp, Homo sapiens
caatgctcattggct

SEQ ID NO: 2093154 - DNA, 15 bp, Homo sapiens
aatgctcattggctg

SEQ ID NO: 2093155 - DNA, 15 bp, Homo sapiens
atgctcattggctgt

SEQ ID NO: 2093156 - DNA, 15 bp, Homo sapiens
tgctcattggctgtg

SEQ ID NO: 2093157 - DNA, 15 bp, Homo sapiens
gctcattggctgtga

SEQ ID NO: 2093158 - DNA, 15 bp, Homo sapiens
ctcattggctgtgat

SEQ ID NO: 2093159 - DNA, 15 bp, Homo sapiens
tcattggctgtgatt

SEQ ID NO: 2093160 - DNA, 15 bp, Homo sapiens
cattggctgtgattg

SEQ ID NO: 2093161 - DNA, 15 bp, Homo sapiens
attggctgtgattgg

SEQ ID NO: 2093162 - DNA, 15 bp, Homo sapiens
ttggctgtgattggc

SEQ ID NO: 2093163 - DNA, 15 bp, Homo sapiens
tggctgtgattggct

SEQ ID NO: 2093164 - DNA, 15 bp, Homo sapiens
ggctgtgattggctg

SEQ ID NO: 2093165 - DNA, 15 bp, Homo sapiens
gctgtgattggctga

SEQ ID NO: 2093166 - DNA, 15 bp, Homo sapiens
ctgtgattggctgag

SEQ ID NO: 2093167 - DNA, 15 bp, Homo sapiens
tgtgattggctgagc

SEQ ID NO: 2093168 - DNA, 15 bp, Homo sapiens
gtgattggctgagct

SEQ ID NO: 2093169 - DNA, 15 bp, Homo sapiens
tgattggctgagctg

SEQ ID NO: 2093170 - DNA, 15 bp, Homo sapiens
gattggctgagctgg

SEQ ID NO: 2093171 - DNA, 15 bp, Homo sapiens
attggctgagctggg

SEQ ID NO: 2093172 - DNA, 15 bp, Homo sapiens
ttggctgagctggga

SEQ ID NO: 2093173 - DNA, 15 bp, Homo sapiens
tggctgagctgggat

SEQ ID NO: 2093174 - DNA, 15 bp, Homo sapiens
ggctgagctgggatc

SEQ ID NO: 2093175 - DNA, 15 bp, Homo sapiens
gctgagctgggatca

SEQ ID NO: 2093176 - DNA, 15 bp, Homo sapiens
ctgagctgggatcac

SEQ ID NO: 2093177 - DNA, 15 bp, Homo sapiens
tgagctgggatcaca

SEQ ID NO: 2093178 - DNA, 15 bp, Homo sapiens
gagctgggatcacat

SEQ ID NO: 2093179 - DNA, 15 bp, Homo sapiens
agctgggatcacatg

SEQ ID NO: 2093180 - DNA, 15 bp, Homo sapiens
gctgggatcacatgt

SEQ ID NO: 2093181 - DNA, 15 bp, Homo sapiens
ctgggatcacatgtg

SEQ ID NO: 2093182 - DNA, 15 bp, Homo sapiens
tgggatcacatgtgc

SEQ ID NO: 2093183 - DNA, 15 bp, Homo sapiens
gggatcacatgtgca

SEQ ID NO: 2093184 - DNA, 15 bp, Homo sapiens
ggatcacatgtgcat

SEQ ID NO: 2093185 - DNA, 15 bp, Homo sapiens
gatcacatgtgcatc

SEQ ID NO: 2093186 - DNA, 15 bp, Homo sapiens
atcacatgtgcatcc

SEQ ID NO: 2093187 - DNA, 15 bp, Homo sapiens
tcacatgtgcatcct

SEQ ID NO: 2093188 - DNA, 15 bp, Homo sapiens
cacatgtgcatcctt

SEQ ID NO: 2093189 - DNA, 15 bp, Homo sapiens
acatgtgcatccttg

SEQ ID NO: 2093190 - DNA, 15 bp, Homo sapiens
catgtgcatccttgg

SEQ ID NO: 2093191 - DNA, 15 bp, Homo sapiens
atgtgcatccttgga

SEQ ID NO: 2093192 - DNA, 15 bp, Homo sapiens
tgtgcatccttggac

SEQ ID NO: 2093193 - DNA, 15 bp, Homo sapiens
gtgcatccttggacc

SEQ ID NO: 2093194 - DNA, 15 bp, Homo sapiens
tgcatccttggacca

SEQ ID NO: 2093195 - DNA, 15 bp, Homo sapiens
gcatccttggaccaa

SEQ ID NO: 2093196 - DNA, 15 bp, Homo sapiens
catccttggaccaat

SEQ ID NO: 2093197 - DNA, 15 bp, Homo sapiens
atccttggaccaatt

SEQ ID NO: 2093198 - DNA, 15 bp, Homo sapiens
tccttggaccaattg

SEQ ID NO: 2093199 - DNA, 15 bp, Homo sapiens
ccttggaccaattgc

SEQ ID NO: 2093200 - DNA, 15 bp, Homo sapiens
cttggaccaattgct

SEQ ID NO: 2093201 - DNA, 15 bp, Homo sapiens
ttggaccaattgctg

SEQ ID NO: 2093202 - DNA, 15 bp, Homo sapiens
tggaccaattgctgt

SEQ ID NO: 2093203 - DNA, 15 bp, Homo sapiens
ggaccaattgctgtg

SEQ ID NO: 2093204 - DNA, 15 bp, Homo sapiens
gaccaattgctgtgg

SEQ ID NO: 2093205 - DNA, 15 bp, Homo sapiens
accaattgctgtggc

SEQ ID NO: 2093206 - DNA, 15 bp, Homo sapiens
ccaattgctgtggct

SEQ ID NO: 2093207 - DNA, 15 bp, Homo sapiens
caattgctgtggctc

SEQ ID NO: 2093208 - DNA, 15 bp, Homo sapiens
aattgctgtggctcg

SEQ ID NO: 2093209 - DNA, 15 bp, Homo sapiens
attgctgtggctcga

SEQ ID NO: 2093210 - DNA, 15 bp, Homo sapiens
ttgctgtggctcgag

SEQ ID NO: 2093211 - DNA, 15 bp, Homo sapiens
tgctgtggctcgagt

SEQ ID NO: 2093212 - DNA, 15 bp, Homo sapiens
gctgtggctcgagta

SEQ ID NO: 2093213 - DNA, 15 bp, Homo sapiens
ctgtggctcgagtaa

SEQ ID NO: 2093214 - DNA, 15 bp, Homo sapiens
tgtggctcgagtaat

SEQ ID NO: 2093215 - DNA, 15 bp, Homo sapiens
gtggctcgagtaatg

SEQ ID NO: 2093216 - DNA, 15 bp, Homo sapiens
tggctcgagtaatgg

SEQ ID NO: 2093217 - DNA, 15 bp, Homo sapiens
ggctcgagtaatgga

SEQ ID NO: 2093218 - DNA, 15 bp, Homo sapiens
gctcgagtaatggac

SEQ ID NO: 2093219 - DNA, 15 bp, Homo sapiens
ctcgagtaatggact

SEQ ID NO: 2093220 - DNA, 15 bp, Homo sapiens
tcgagtaatggactg

SEQ ID NO: 2093221 - DNA, 15 bp, Homo sapiens
cgagtaatggactgc

SEQ ID NO: 2093222 - DNA, 15 bp, Homo sapiens
gagtaatggactgct

SEQ ID NO: 2093223 - DNA, 15 bp, Homo sapiens
agtaatggactgctg

SEQ ID NO: 2093224 - DNA, 15 bp, Homo sapiens
gtaatggactgctgt

SEQ ID NO: 2093225 - DNA, 15 bp, Homo sapiens
taatggactgctgtg

SEQ ID NO: 2093226 - DNA, 15 bp, Homo sapiens
aatggactgctgtga

SEQ ID NO: 2093227 - DNA, 15 bp, Homo sapiens
atggactgctgtgat

SEQ ID NO: 2093228 - DNA, 15 bp, Homo sapiens
tggactgctgtgatt

SEQ ID NO: 2093229 - DNA, 15 bp, Homo sapiens
ggactgctgtgattg

SEQ ID NO: 2093230 - DNA, 15 bp, Homo sapiens
gactgctgtgattgg

SEQ ID NO: 2093231 - DNA, 15 bp, Homo sapiens
actgctgtgattggt

SEQ ID NO: 2093232 - DNA, 15 bp, Homo sapiens
ctgctgtgattggtc

SEQ ID NO: 2093233 - DNA, 15 bp, Homo sapiens
tgctgtgattggtca

SEQ ID NO: 2093234 - DNA, 15 bp, Homo sapiens
gctgtgattggtcag

SEQ ID NO: 2093235 - DNA, 15 bp, Homo sapiens
ctgtgattggtcagc

SEQ ID NO: 2093236 - DNA, 15 bp, Homo sapiens
tgtgattggtcagcc

SEQ ID NO: 2093237 - DNA, 15 bp, Homo sapiens
gtgattggtcagcct

SEQ ID NO: 2093238 - DNA, 15 bp, Homo sapiens
tgattggtcagcctt

SEQ ID NO: 2093239 - DNA, 15 bp, Homo sapiens
gattggtcagccttg

SEQ ID NO: 2093240 - DNA, 15 bp, Homo sapiens
attggtcagccttgg

SEQ ID NO: 2093241 - DNA, 15 bp, Homo sapiens
ttggtcagccttggg

SEQ ID NO: 2093242 - DNA, 15 bp, Homo sapiens
tggtcagccttgggt

SEQ ID NO: 2093243 - DNA, 15 bp, Homo sapiens
ggtcagccttgggtc

SEQ ID NO: 2093244 - DNA, 15 bp, Homo sapiens
gtcagccttgggtcg

SEQ ID NO: 2093245 - DNA, 15 bp, Homo sapiens
tcagccttgggtcgc

SEQ ID NO: 2093246 - DNA, 15 bp, Homo sapiens
cagccttgggtcgcc

SEQ ID NO: 2093247 - DNA, 15 bp, Homo sapiens
agccttgggtcgcct

SEQ ID NO: 2093248 - DNA, 15 bp, Homo sapiens
gccttgggtcgcctg

SEQ ID NO: 2093249 - DNA, 15 bp, Homo sapiens
ccttgggtcgcctgc

SEQ ID NO: 2093250 - DNA, 15 bp, Homo sapiens
cttgggtcgcctgcc

SEQ ID NO: 2093251 - DNA, 15 bp, Homo sapiens
ttgggtcgcctgccc

SEQ ID NO: 2093252 - DNA, 15 bp, Homo sapiens
tgggtcgcctgccca

SEQ ID NO: 2093253 - DNA, 15 bp, Homo sapiens
gggtcgcctgcccat

SEQ ID NO: 2093254 - DNA, 15 bp, Homo sapiens
ggtcgcctgcccatt

SEQ ID NO: 2093255 - DNA, 15 bp, Homo sapiens
gtcgcctgcccattt

SEQ ID NO: 2093256 - DNA, 15 bp, Homo sapiens
tcgcctgcccatttg

SEQ ID NO: 2093257 - DNA, 15 bp, Homo sapiens
cgcctgcccatttgg

SEQ ID NO: 2093258 - DNA, 15 bp, Homo sapiens
gcctgcccatttgga

SEQ ID NO: 2093259 - DNA, 15 bp, Homo sapiens
cctgcccatttggag

SEQ ID NO: 2093260 - DNA, 15 bp, Homo sapiens
ctgcccatttggagc

SEQ ID NO: 2093261 - DNA, 15 bp, Homo sapiens
tgcccatttggagcc

SEQ ID NO: 2093262 - DNA, 15 bp, Homo sapiens
gcccatttggagcca

SEQ ID NO: 2093263 - DNA, 15 bp, Homo sapiens
cccatttggagccag

SEQ ID NO: 2093264 - DNA, 15 bp, Homo sapiens
ccatttggagccagg

SEQ ID NO: 2093265 - DNA, 15 bp, Homo sapiens
catttggagccaggg

SEQ ID NO: 2093266 - DNA, 15 bp, Homo sapiens
atttggagccaggga

SEQ ID NO: 2093267 - DNA, 15 bp, Homo sapiens
tttggagccagggag

SEQ ID NO: 2093268 - DNA, 15 bp, Homo sapiens
ttggagccagggagg

SEQ ID NO: 2093269 - DNA, 15 bp, Homo sapiens
tggagccagggaggg

SEQ ID NO: 2093270 - DNA, 15 bp, Homo sapiens
ggagccagggaggga

SEQ ID NO: 2093271 - DNA, 15 bp, Homo sapiens
gagccagggagggaa

SEQ ID NO: 2093272 - DNA, 15 bp, Homo sapiens
agccagggagggaag

SEQ ID NO: 2093273 - DNA, 15 bp, Homo sapiens
gccagggagggaagt

SEQ ID NO: 2093274 - DNA, 15 bp, Homo sapiens
ccagggagggaagta

SEQ ID NO: 2093275 - DNA, 15 bp, Homo sapiens
agggagggaagtagt

SEQ ID NO: 2093276 - DNA, 15 bp, Homo sapiens
gggagggaagtagtt

SEQ ID NO: 2093277 - DNA, 15 bp, Homo sapiens
ggagggaagtagttc

SEQ ID NO: 2093278 - DNA, 15 bp, Homo sapiens
gagggaagtagttct

SEQ ID NO: 2093279 - DNA, 15 bp, Homo sapiens
agggaagtagttctt

SEQ ID NO: 2093280 - DNA, 15 bp, Homo sapiens
gggaagtagttcttg

SEQ ID NO: 2093281 - DNA, 15 bp, Homo sapiens
ggaagtagttcttgc

SEQ ID NO: 2093282 - DNA, 15 bp, Homo sapiens
gaagtagttcttgcc

SEQ ID NO: 2093283 - DNA, 15 bp, Homo sapiens
aagtagttcttgccc

SEQ ID NO: 2093284 - DNA, 15 bp, Homo sapiens
agtagttcttgccca

SEQ ID NO: 2093285 - DNA, 15 bp, Homo sapiens
gtagttcttgcccac

SEQ ID NO: 2093286 - DNA, 15 bp, Homo sapiens
tagttcttgcccaca

SEQ ID NO: 2093287 - DNA, 15 bp, Homo sapiens
agttcttgcccacag

SEQ ID NO: 2093288 - DNA, 15 bp, Homo sapiens
gttcttgcccacaga

SEQ ID NO: 2093289 - DNA, 15 bp, Homo sapiens
ttcttgcccacagag

SEQ ID NO: 2093290 - DNA, 15 bp, Homo sapiens
tcttgcccacagaga

SEQ ID NO: 2093291 - DNA, 15 bp, Homo sapiens
cttgcccacagagac

SEQ ID NO: 2093292 - DNA, 15 bp, Homo sapiens
ttgcccacagagact

SEQ ID NO: 2093293 - DNA, 15 bp, Homo sapiens
tgcccacagagactc

SEQ ID NO: 2093294 - DNA, 15 bp, Homo sapiens
gcccacagagactca

SEQ ID NO: 2093295 - DNA, 15 bp, Homo sapiens
cccacagagactcag

SEQ ID NO: 2093296 - DNA, 15 bp, Homo sapiens
ccacagagactcagg

SEQ ID NO: 2093297 - DNA, 15 bp, Homo sapiens
cacagagactcaggt

SEQ ID NO: 2093298 - DNA, 15 bp, Homo sapiens
acagagactcaggta

SEQ ID NO: 2093299 - DNA, 15 bp, Homo sapiens
cagagactcaggtag

SEQ ID NO: 2093300 - DNA, 15 bp, Homo sapiens
agagactcaggtagg

SEQ ID NO: 2093301 - DNA, 15 bp, Homo sapiens
gagactcaggtagga

SEQ ID NO: 2093302 - DNA, 15 bp, Homo sapiens
agactcaggtaggag

SEQ ID NO: 2093303 - DNA, 15 bp, Homo sapiens
gactcaggtaggagt

SEQ ID NO: 2093304 - DNA, 15 bp, Homo sapiens
actcaggtaggagta

SEQ ID NO: 2093305 - DNA, 15 bp, Homo sapiens
ctcaggtaggagtag

SEQ ID NO: 2093306 - DNA, 15 bp, Homo sapiens
tcaggtaggagtagg

SEQ ID NO: 2093307 - DNA, 15 bp, Homo sapiens
caggtaggagtaggg

SEQ ID NO: 2093308 - DNA, 15 bp, Homo sapiens
aggtaggagtagggt

SEQ ID NO: 2093309 - DNA, 15 bp, Homo sapiens
ggtaggagtagggtg

SEQ ID NO: 2093310 - DNA, 15 bp, Homo sapiens
gtaggagtagggtgg

SEQ ID NO: 2093311 - DNA, 15 bp, Homo sapiens
taggagtagggtggt

SEQ ID NO: 2093312 - DNA, 15 bp, Homo sapiens
aggagtagggtggtt

SEQ ID NO: 2093313 - DNA, 15 bp, Homo sapiens
ggagtagggtggttc

SEQ ID NO: 2093314 - DNA, 15 bp, Homo sapiens
gagtagggtggttcc

SEQ ID NO: 2093315 - DNA, 15 bp, Homo sapiens
agtagggtggttccc

SEQ ID NO: 2093316 - DNA, 15 bp, Homo sapiens
gtagggtggttccca

SEQ ID NO: 2093317 - DNA, 15 bp, Homo sapiens
tagggtggttcccaa

SEQ ID NO: 2093318 - DNA, 15 bp, Homo sapiens
agggtggttcccaaa

SEQ ID NO: 2093319 - DNA, 15 bp, Homo sapiens
gggtggttcccaaaa

SEQ ID NO: 2093320 - DNA, 15 bp, Homo sapiens
ggtggttcccaaaag

SEQ ID NO: 2093321 - DNA, 15 bp, Homo sapiens
gtggttcccaaaagg

SEQ ID NO: 2093322 - DNA, 15 bp, Homo sapiens
tggttcccaaaaggc

SEQ ID NO: 2093323 - DNA, 15 bp, Homo sapiens
ggttcccaaaaggca

SEQ ID NO: 2093324 - DNA, 15 bp, Homo sapiens
gttcccaaaaggcaa

SEQ ID NO: 2093325 - DNA, 15 bp, Homo sapiens
ttcccaaaaggcaaa

SEQ ID NO: 2093326 - DNA, 15 bp, Homo sapiens
tcccaaaaggcaaaa

SEQ ID NO: 2093327 - DNA, 15 bp, Homo sapiens
cccaaaaggcaaaaa

SEQ ID NO: 2093328 - DNA, 15 bp, Homo sapiens
ccaaaaggcaaaaag

SEQ ID NO: 2093329 - DNA, 15 bp, Homo sapiens
caaaaggcaaaaagg

SEQ ID NO: 2093330 - DNA, 15 bp, Homo sapiens
aaaaggcaaaaagga

SEQ ID NO: 2093331 - DNA, 15 bp, Homo sapiens
aaaggcaaaaaggag

SEQ ID NO: 2093332 - DNA, 15 bp, Homo sapiens
aaggcaaaaaggagg

SEQ ID NO: 2093333 - DNA, 15 bp, Homo sapiens
aggcaaaaaggaggg

SEQ ID NO: 2093334 - DNA, 15 bp, Homo sapiens
ggcaaaaaggagggg

SEQ ID NO: 2093335 - DNA, 15 bp, Homo sapiens
gcaaaaaggaggggc

SEQ ID NO: 2093336 - DNA, 15 bp, Homo sapiens
caaaaaggaggggct

SEQ ID NO: 2093337 - DNA, 15 bp, Homo sapiens
aaaaaggaggggctg

SEQ ID NO: 2093338 - DNA, 15 bp, Homo sapiens
aaaaggaggggctgt

SEQ ID NO: 2093339 - DNA, 15 bp, Homo sapiens
aaaggaggggctgtt

SEQ ID NO: 2093340 - DNA, 15 bp, Homo sapiens
aaggaggggctgttg

SEQ ID NO: 2093341 - DNA, 15 bp, Homo sapiens
aggaggggctgttgt

SEQ ID NO: 2093342 - DNA, 15 bp, Homo sapiens
ggaggggctgttgtc

SEQ ID NO: 2093343 - DNA, 15 bp, Homo sapiens
gaggggctgttgtcg

SEQ ID NO: 2093344 - DNA, 15 bp, Homo sapiens
aggggctgttgtcgg

SEQ ID NO: 2093345 - DNA, 15 bp, Homo sapiens
ggggctgttgtcggg

SEQ ID NO: 2093346 - DNA, 15 bp, Homo sapiens
gggctgttgtcgggg

SEQ ID NO: 2093347 - DNA, 15 bp, Homo sapiens
ggctgttgtcggggg

SEQ ID NO: 2093348 - DNA, 15 bp, Homo sapiens
gctgttgtcggggga

SEQ ID NO: 2093349 - DNA, 15 bp, Homo sapiens
ctgttgtcgggggaa

SEQ ID NO: 2093350 - DNA, 15 bp, Homo sapiens
tgttgtcgggggaag

SEQ ID NO: 2093351 - DNA, 15 bp, Homo sapiens
gttgtcgggggaaga

SEQ ID NO: 2093352 - DNA, 15 bp, Homo sapiens
ttgtcgggggaagag

SEQ ID NO: 2093353 - DNA, 15 bp, Homo sapiens
tgtcgggggaagagg

SEQ ID NO: 2093354 - DNA, 15 bp, Homo sapiens
gtcgggggaagaggc

SEQ ID NO: 2093355 - DNA, 15 bp, Homo sapiens
tcgggggaagaggcg

SEQ ID NO: 2093356 - DNA, 15 bp, Homo sapiens
cgggggaagaggcgg

SEQ ID NO: 2093357 - DNA, 15 bp, Homo sapiens
gggggaagaggcggc

SEQ ID NO: 2093358 - DNA, 15 bp, Homo sapiens
ggggaagaggcggcc

SEQ ID NO: 2093359 - DNA, 15 bp, Homo sapiens
gggaagaggcggcca

SEQ ID NO: 2093360 - DNA, 15 bp, Homo sapiens
ggaagaggcggccat

SEQ ID NO: 2093361 - DNA, 15 bp, Homo sapiens
gaagaggcggccata

SEQ ID NO: 2093362 - DNA, 15 bp, Homo sapiens
aagaggcggccatag

SEQ ID NO: 2093363 - DNA, 15 bp, Homo sapiens
agaggcggccatagg

SEQ ID NO: 2093364 - DNA, 15 bp, Homo sapiens
gaggcggccataggc

SEQ ID NO: 2093365 - DNA, 15 bp, Homo sapiens
aggcggccataggca

SEQ ID NO: 2093366 - DNA, 15 bp, Homo sapiens
ggcggccataggcag

SEQ ID NO: 2093367 - DNA, 15 bp, Homo sapiens
gcggccataggcagc

SEQ ID NO: 2093368 - DNA, 15 bp, Homo sapiens
cggccataggcagca

SEQ ID NO: 2093369 - DNA, 15 bp, Homo sapiens
ggccataggcagcaa

SEQ ID NO: 2093370 - DNA, 15 bp, Homo sapiens
gccataggcagcaaa

SEQ ID NO: 2093371 - DNA, 15 bp, Homo sapiens
ccataggcagcaaaa

SEQ ID NO: 2093372 - DNA, 15 bp, Homo sapiens
cataggcagcaaaaa

SEQ ID NO: 2093373 - DNA, 15 bp, Homo sapiens
ataggcagcaaaaat

SEQ ID NO: 2093374 - DNA, 15 bp, Homo sapiens
taggcagcaaaaatg

SEQ ID NO: 2093375 - DNA, 15 bp, Homo sapiens
aggcagcaaaaatgg

SEQ ID NO: 2093376 - DNA, 15 bp, Homo sapiens
ggcagcaaaaatggg

SEQ ID NO: 2093377 - DNA, 15 bp, Homo sapiens
gcagcaaaaatgggg

SEQ ID NO: 2093378 - DNA, 15 bp, Homo sapiens
cagcaaaaatggggc

SEQ ID NO: 2093379 - DNA, 15 bp, Homo sapiens
agcaaaaatggggct

SEQ ID NO: 2093380 - DNA, 15 bp, Homo sapiens
gcaaaaatggggctg

SEQ ID NO: 2093381 - DNA, 15 bp, Homo sapiens
caaaaatggggctga

SEQ ID NO: 2093382 - DNA, 15 bp, Homo sapiens
aaaaatggggctgag

SEQ ID NO: 2093383 - DNA, 15 bp, Homo sapiens
aaaatggggctgagc

SEQ ID NO: 2093384 - DNA, 15 bp, Homo sapiens
aaatggggctgagcc

SEQ ID NO: 2093385 - DNA, 15 bp, Homo sapiens
aatggggctgagccc

SEQ ID NO: 2093386 - DNA, 15 bp, Homo sapiens
atggggctgagcccc

SEQ ID NO: 2093387 - DNA, 15 bp, Homo sapiens
tggggctgagcccct

SEQ ID NO: 2093388 - DNA, 15 bp, Homo sapiens
ggggctgagcccctt

SEQ ID NO: 2093389 - DNA, 15 bp, Homo sapiens
gggctgagccccttt

SEQ ID NO: 2093390 - DNA, 15 bp, Homo sapiens
ggctgagcccctttg

SEQ ID NO: 2093391 - DNA, 15 bp, Homo sapiens
gctgagcccctttgc

SEQ ID NO: 2093392 - DNA, 15 bp, Homo sapiens
ctgagcccctttgcc

SEQ ID NO: 2093393 - DNA, 15 bp, Homo sapiens
tgagcccctttgccc

SEQ ID NO: 2093394 - DNA, 15 bp, Homo sapiens
atcagcaggatccac

SEQ ID NO: 2093395 - DNA, 15 bp, Homo sapiens
tcagcaggatccacc

SEQ ID NO: 2093396 - DNA, 15 bp, Homo sapiens
cagcaggatccacct

SEQ ID NO: 2093397 - DNA, 15 bp, Homo sapiens
agcaggatccacctc

SEQ ID NO: 2093398 - DNA, 15 bp, Homo sapiens
gcaggatccacctcg

SEQ ID NO: 2093399 - DNA, 15 bp, Homo sapiens
caggatccacctcgt

SEQ ID NO: 2093400 - DNA, 15 bp, Homo sapiens
aggatccacctcgtg

SEQ ID NO: 2093401 - DNA, 15 bp, Homo sapiens
ggatccacctcgtgg

SEQ ID NO: 2093402 - DNA, 15 bp, Homo sapiens
gatccacctcgtgga

SEQ ID NO: 2093403 - DNA, 15 bp, Homo sapiens
atccacctcgtggac

SEQ ID NO: 2093404 - DNA, 15 bp, Homo sapiens
tccacctcgtggaca

SEQ ID NO: 2093405 - DNA, 15 bp, Homo sapiens
ccacctcgtggacaa

SEQ ID NO: 2093406 - DNA, 15 bp, Homo sapiens
cacctcgtggacaag

SEQ ID NO: 2093407 - DNA, 15 bp, Homo sapiens
acctcgtggacaagt

SEQ ID NO: 2093408 - DNA, 15 bp, Homo sapiens
cctcgtggacaagtg

SEQ ID NO: 2093409 - DNA, 15 bp, Homo sapiens
ctcgtggacaagtgg

SEQ ID NO: 2093410 - DNA, 15 bp, Homo sapiens
tcgtggacaagtgga

SEQ ID NO: 2093411 - DNA, 15 bp, Homo sapiens
cgtggacaagtggaa

SEQ ID NO: 2093412 - DNA, 15 bp, Homo sapiens
gtggacaagtggaac

SEQ ID NO: 2093413 - DNA, 15 bp, Homo sapiens
tggacaagtggaacg

SEQ ID NO: 2093414 - DNA, 15 bp, Homo sapiens
ggacaagtggaacgg

SEQ ID NO: 2093415 - DNA, 15 bp, Homo sapiens
gacaagtggaacggg

SEQ ID NO: 2093416 - DNA, 15 bp, Homo sapiens
acaagtggaacgggc

SEQ ID NO: 2093417 - DNA, 15 bp, Homo sapiens
caagtggaacgggct

SEQ ID NO: 2093418 - DNA, 15 bp, Homo sapiens
aagtggaacgggctg

SEQ ID NO: 2093419 - DNA, 15 bp, Homo sapiens
agtggaacgggctga

SEQ ID NO: 2093420 - DNA, 15 bp, Homo sapiens
gtggaacgggctgag

SEQ ID NO: 2093421 - DNA, 15 bp, Homo sapiens
tggaacgggctgagc

SEQ ID NO: 2093422 - DNA, 15 bp, Homo sapiens
ggaacgggctgagca

SEQ ID NO: 2093423 - DNA, 15 bp, Homo sapiens
gaacgggctgagcaa

SEQ ID NO: 2093424 - DNA, 15 bp, Homo sapiens
aacgggctgagcaag

SEQ ID NO: 2093425 - DNA, 15 bp, Homo sapiens
acgggctgagcaagg

SEQ ID NO: 2093426 - DNA, 15 bp, Homo sapiens
cgggctgagcaaggt

SEQ ID NO: 2093427 - DNA, 15 bp, Homo sapiens
gggctgagcaaggtg

SEQ ID NO: 2093428 - DNA, 15 bp, Homo sapiens
ggctgagcaaggtga

SEQ ID NO: 2093429 - DNA, 15 bp, Homo sapiens
gctgagcaaggtgag

SEQ ID NO: 2093430 - DNA, 15 bp, Homo sapiens
ctgagcaaggtgagg

SEQ ID NO: 2093431 - DNA, 15 bp, Homo sapiens
tgagcaaggtgaggg

SEQ ID NO: 2093432 - DNA, 15 bp, Homo sapiens
gagcaaggtgagggg

SEQ ID NO: 2093433 - DNA, 15 bp, Homo sapiens
agcaaggtgaggggc

SEQ ID NO: 2093434 - DNA, 15 bp, Homo sapiens
gcaaggtgaggggcg

SEQ ID NO: 2093435 - DNA, 15 bp, Homo sapiens
caaggtgaggggcga

SEQ ID NO: 2093436 - DNA, 15 bp, Homo sapiens
aaggtgaggggcgag

SEQ ID NO: 2093437 - DNA, 15 bp, Homo sapiens
aggtgaggggcgaga

SEQ ID NO: 2093438 - DNA, 15 bp, Homo sapiens
ggtgaggggcgagag

SEQ ID NO: 2093439 - DNA, 15 bp, Homo sapiens
gtgaggggcgagagg

SEQ ID NO: 2093440 - DNA, 15 bp, Homo sapiens
tgaggggcgagaggc

SEQ ID NO: 2093441 - DNA, 15 bp, Homo sapiens
gaggggcgagaggcg

SEQ ID NO: 2093442 - DNA, 15 bp, Homo sapiens
aggggcgagaggcga

SEQ ID NO: 2093443 - DNA, 15 bp, Homo sapiens
ggggcgagaggcgag

SEQ ID NO: 2093444 - DNA, 15 bp, Homo sapiens
gggcgagaggcgagg

SEQ ID NO: 2093445 - DNA, 15 bp, Homo sapiens
ggcgagaggcgaggg

SEQ ID NO: 2093446 - DNA, 15 bp, Homo sapiens
gcgagaggcgagggc

SEQ ID NO: 2093447 - DNA, 15 bp, Homo sapiens
cgagaggcgagggcc

SEQ ID NO: 2093448 - DNA, 15 bp, Homo sapiens
gagaggcgagggccc

SEQ ID NO: 2093449 - DNA, 15 bp, Homo sapiens
agaggcgagggcccc

SEQ ID NO: 2093450 - DNA, 15 bp, Homo sapiens
gaggcgagggcccct

SEQ ID NO: 2093451 - DNA, 15 bp, Homo sapiens
aggcgagggcccctg

SEQ ID NO: 2093452 - DNA, 15 bp, Homo sapiens
ggcgagggcccctgt

SEQ ID NO: 2093453 - DNA, 15 bp, Homo sapiens
gcgagggcccctgtc

SEQ ID NO: 2093454 - DNA, 15 bp, Homo sapiens
cgagggcccctgtcg

SEQ ID NO: 2093455 - DNA, 15 bp, Homo sapiens
gagggcccctgtcgc

SEQ ID NO: 2093456 - DNA, 15 bp, Homo sapiens
agggcccctgtcgcc

SEQ ID NO: 2093457 - DNA, 15 bp, Homo sapiens
gggcccctgtcgcca

SEQ ID NO: 2093458 - DNA, 15 bp, Homo sapiens
ggcccctgtcgccag

SEQ ID NO: 2093459 - DNA, 15 bp, Homo sapiens
gcccctgtcgccagg

SEQ ID NO: 2093460 - DNA, 15 bp, Homo sapiens
cccctgtcgccaggg

SEQ ID NO: 2093461 - DNA, 15 bp, Homo sapiens
ccctgtcgccaggga

SEQ ID NO: 2093462 - DNA, 15 bp, Homo sapiens
cctgtcgccagggag

SEQ ID NO: 2093463 - DNA, 15 bp, Homo sapiens
ctgtcgccagggaga

SEQ ID NO: 2093464 - DNA, 15 bp, Homo sapiens
tgtcgccagggagag

SEQ ID NO: 2093465 - DNA, 15 bp, Homo sapiens
gtcgccagggagagg

SEQ ID NO: 2093466 - DNA, 15 bp, Homo sapiens
tcgccagggagaggg

SEQ ID NO: 2093467 - DNA, 15 bp, Homo sapiens
cgccagggagagggg

SEQ ID NO: 2093468 - DNA, 15 bp, Homo sapiens
gccagggagagggga

SEQ ID NO: 2093469 - DNA, 15 bp, Homo sapiens
ccagggagaggggag

SEQ ID NO: 2093470 - DNA, 15 bp, Homo sapiens
cagggagaggggagg

SEQ ID NO: 2093471 - DNA, 15 bp, Homo sapiens
agggagaggggaggg

SEQ ID NO: 2093472 - DNA, 15 bp, Homo sapiens
gggagaggggagggt

SEQ ID NO: 2093473 - DNA, 15 bp, Homo sapiens
ggagaggggagggtg

SEQ ID NO: 2093474 - DNA, 15 bp, Homo sapiens
gagaggggagggtgg

SEQ ID NO: 2093475 - DNA, 15 bp, Homo sapiens
agaggggagggtggg

SEQ ID NO: 2093476 - DNA, 15 bp, Homo sapiens
gaggggagggtgggc

SEQ ID NO: 2093477 - DNA, 15 bp, Homo sapiens
aggggagggtgggcc

SEQ ID NO: 2093478 - DNA, 15 bp, Homo sapiens
ggggagggtgggccc

SEQ ID NO: 2093479 - DNA, 15 bp, Homo sapiens
gggagggtgggcccg

SEQ ID NO: 2093480 - DNA, 15 bp, Homo sapiens
ggagggtgggcccgg

SEQ ID NO: 2093481 - DNA, 15 bp, Homo sapiens
gagggtgggcccggc

SEQ ID NO: 2093482 - DNA, 15 bp, Homo sapiens
agggtgggcccggcc

SEQ ID NO: 2093483 - DNA, 15 bp, Homo sapiens
gggtgggcccggcca

SEQ ID NO: 2093484 - DNA, 15 bp, Homo sapiens
ggtgggcccggccat

SEQ ID NO: 2093485 - DNA, 15 bp, Homo sapiens
gtgggcccggccatg

SEQ ID NO: 2093486 - DNA, 15 bp, Homo sapiens
tgggcccggccatgg

SEQ ID NO: 2093487 - DNA, 15 bp, Homo sapiens
gggcccggccatggc

SEQ ID NO: 2093488 - DNA, 15 bp, Homo sapiens
ggcccggccatggct

SEQ ID NO: 2093489 - DNA, 15 bp, Homo sapiens
gcccggccatggctg

SEQ ID NO: 2093490 - DNA, 15 bp, Homo sapiens
cccggccatggctgc

SEQ ID NO: 2093491 - DNA, 15 bp, Homo sapiens
ccggccatggctgct

SEQ ID NO: 2093492 - DNA, 15 bp, Homo sapiens
cggccatggctgctc

SEQ ID NO: 2093493 - DNA, 15 bp, Homo sapiens
ggccatggctgctcg

SEQ ID NO: 2093494 - DNA, 15 bp, Homo sapiens
gccatggctgctcgg

SEQ ID NO: 2093495 - DNA, 15 bp, Homo sapiens
ccatggctgctcggg

SEQ ID NO: 2093496 - DNA, 15 bp, Homo sapiens
catggctgctcggga

SEQ ID NO: 2093497 - DNA, 15 bp, Homo sapiens
atggctgctcgggag

SEQ ID NO: 2093498 - DNA, 15 bp, Homo sapiens
tggctgctcgggagt

SEQ ID NO: 2093499 - DNA, 15 bp, Homo sapiens
ggctgctcgggagtg

SEQ ID NO: 2093500 - DNA, 15 bp, Homo sapiens
gctgctcgggagtgg

SEQ ID NO: 2093501 - DNA, 15 bp, Homo sapiens
ctgctcgggagtggc

SEQ ID NO: 2093502 - DNA, 15 bp, Homo sapiens
tgctcgggagtggca

SEQ ID NO: 2093503 - DNA, 15 bp, Homo sapiens
gctcgggagtggcag

SEQ ID NO: 2093504 - DNA, 15 bp, Homo sapiens
ctcgggagtggcagg

SEQ ID NO: 2093505 - DNA, 15 bp, Homo sapiens
tcgggagtggcaggg

SEQ ID NO: 2093506 - DNA, 15 bp, Homo sapiens
cgggagtggcaggga

SEQ ID NO: 2093507 - DNA, 15 bp, Homo sapiens
gggagtggcagggac

SEQ ID NO: 2093508 - DNA, 15 bp, Homo sapiens
ggagtggcagggacc

SEQ ID NO: 2093509 - DNA, 15 bp, Homo sapiens
gagtggcagggacca

SEQ ID NO: 2093510 - DNA, 15 bp, Homo sapiens
agtggcagggaccag

SEQ ID NO: 2093511 - DNA, 15 bp, Homo sapiens
gtggcagggaccaga

SEQ ID NO: 2093512 - DNA, 15 bp, Homo sapiens
tggcagggaccagag

SEQ ID NO: 2093513 - DNA, 15 bp, Homo sapiens
ggcagggaccagaga

SEQ ID NO: 2093514 - DNA, 15 bp, Homo sapiens
gcagggaccagagag

SEQ ID NO: 2093515 - DNA, 15 bp, Homo sapiens
cagggaccagagagc

SEQ ID NO: 2093516 - DNA, 15 bp, Homo sapiens
agggaccagagagct

SEQ ID NO: 2093517 - DNA, 15 bp, Homo sapiens
gggaccagagagctc

SEQ ID NO: 2093518 - DNA, 15 bp, Homo sapiens
ggaccagagagctcc

SEQ ID NO: 2093519 - DNA, 15 bp, Homo sapiens
gaccagagagctcct

SEQ ID NO: 2093520 - DNA, 15 bp, Homo sapiens
accagagagctcctt

SEQ ID NO: 2093521 - DNA, 15 bp, Homo sapiens
ccagagagctccttc

SEQ ID NO: 2093522 - DNA, 15 bp, Homo sapiens
cagagagctccttct

SEQ ID NO: 2093523 - DNA, 15 bp, Homo sapiens
agagagctccttctt

SEQ ID NO: 2093524 - DNA, 15 bp, Homo sapiens
gagagctccttcttc

SEQ ID NO: 2093525 - DNA, 15 bp, Homo sapiens
agagctccttcttcc

SEQ ID NO: 2093526 - DNA, 15 bp, Homo sapiens
gagctccttcttcct

SEQ ID NO: 2093527 - DNA, 15 bp, Homo sapiens
agctccttcttcctt

SEQ ID NO: 2093528 - DNA, 15 bp, Homo sapiens
gctccttcttccttt

SEQ ID NO: 2093529 - DNA, 15 bp, Homo sapiens
ctccttcttcctttg

SEQ ID NO: 2093530 - DNA, 15 bp, Homo sapiens
tccttcttcctttgt

SEQ ID NO: 2093531 - DNA, 15 bp, Homo sapiens
ccttcttcctttgtc

SEQ ID NO: 2093532 - DNA, 15 bp, Homo sapiens
cttcttcctttgtcg

SEQ ID NO: 2093533 - DNA, 15 bp, Homo sapiens
ttcttcctttgtcgt

SEQ ID NO: 2093534 - DNA, 15 bp, Homo sapiens
tcttcctttgtcgtg

SEQ ID NO: 2093535 - DNA, 15 bp, Homo sapiens
cttcctttgtcgtga

SEQ ID NO: 2093536 - DNA, 15 bp, Homo sapiens
ttcctttgtcgtgaa

SEQ ID NO: 2093537 - DNA, 15 bp, Homo sapiens
tcctttgtcgtgaag

SEQ ID NO: 2093538 - DNA, 15 bp, Homo sapiens
cctttgtcgtgaaga

SEQ ID NO: 2093539 - DNA, 15 bp, Homo sapiens
ctttgtcgtgaagag

SEQ ID NO: 2093540 - DNA, 15 bp, Homo sapiens
tttgtcgtgaagagg

SEQ ID NO: 2093541 - DNA, 15 bp, Homo sapiens
ttgtcgtgaagaggg

SEQ ID NO: 2093542 - DNA, 15 bp, Homo sapiens
tgtcgtgaagagggt

SEQ ID NO: 2093543 - DNA, 15 bp, Homo sapiens
gtcgtgaagagggtg

SEQ ID NO: 2093544 - DNA, 15 bp, Homo sapiens
tcgtgaagagggtgc

SEQ ID NO: 2093545 - DNA, 15 bp, Homo sapiens
cgtgaagagggtgct

SEQ ID NO: 2093546 - DNA, 15 bp, Homo sapiens
gtgaagagggtgctg

SEQ ID NO: 2093547 - DNA, 15 bp, Homo sapiens
tgaagagggtgctgg

SEQ ID NO: 2093548 - DNA, 15 bp, Homo sapiens
gaagagggtgctggg

SEQ ID NO: 2093549 - DNA, 15 bp, Homo sapiens
agagggtgctgggag

SEQ ID NO: 2093550 - DNA, 15 bp, Homo sapiens
gagggtgctgggagg

SEQ ID NO: 2093551 - DNA, 15 bp, Homo sapiens
agggtgctgggagga

SEQ ID NO: 2093552 - DNA, 15 bp, Homo sapiens
gggtgctgggaggat

SEQ ID NO: 2093553 - DNA, 15 bp, Homo sapiens
ggtgctgggaggatg

SEQ ID NO: 2093554 - DNA, 15 bp, Homo sapiens
gtgctgggaggatga

SEQ ID NO: 2093555 - DNA, 15 bp, Homo sapiens
tgctgggaggatgaa

SEQ ID NO: 2093556 - DNA, 15 bp, Homo sapiens
gctgggaggatgaac

SEQ ID NO: 2093557 - DNA, 15 bp, Homo sapiens
ctgggaggatgaaca

SEQ ID NO: 2093558 - DNA, 15 bp, Homo sapiens
tgggaggatgaacac

SEQ ID NO: 2093559 - DNA, 15 bp, Homo sapiens
gggaggatgaacact

SEQ ID NO: 2093560 - DNA, 15 bp, Homo sapiens
ggaggatgaacactc

SEQ ID NO: 2093561 - DNA, 15 bp, Homo sapiens
gaggatgaacactct

SEQ ID NO: 2093562 - DNA, 15 bp, Homo sapiens
aggatgaacactctt

SEQ ID NO: 2093563 - DNA, 15 bp, Homo sapiens
ggatgaacactcttg

SEQ ID NO: 2093564 - DNA, 15 bp, Homo sapiens
gatgaacactcttga

SEQ ID NO: 2093565 - DNA, 15 bp, Homo sapiens
atgaacactcttgaa

SEQ ID NO: 2093566 - DNA, 15 bp, Homo sapiens
tgaacactcttgaag

SEQ ID NO: 2093567 - DNA, 15 bp, Homo sapiens
gaacactcttgaagt

SEQ ID NO: 2093568 - DNA, 15 bp, Homo sapiens
aacactcttgaagtt

SEQ ID NO: 2093569 - DNA, 15 bp, Homo sapiens
acactcttgaagttg

SEQ ID NO: 2093570 - DNA, 15 bp, Homo sapiens
cactcttgaagttgg

SEQ ID NO: 2093571 - DNA, 15 bp, Homo sapiens
actcttgaagttgga

SEQ ID NO: 2093572 - DNA, 15 bp, Homo sapiens
ctcttgaagttggag

SEQ ID NO: 2093573 - DNA, 15 bp, Homo sapiens
tcttgaagttggagg

SEQ ID NO: 2093574 - DNA, 15 bp, Homo sapiens
cttgaagttggagga

SEQ ID NO: 2093575 - DNA, 15 bp, Homo sapiens
ttgaagttggaggag

SEQ ID NO: 2093576 - DNA, 15 bp, Homo sapiens
tgaagttggaggagg

SEQ ID NO: 2093577 - DNA, 15 bp, Homo sapiens
gaagttggaggaggg

SEQ ID NO: 2093578 - DNA, 15 bp, Homo sapiens
aagttggaggaggga

SEQ ID NO: 2093579 - DNA, 15 bp, Homo sapiens
agttggaggagggat

SEQ ID NO: 2093580 - DNA, 15 bp, Homo sapiens
gttggaggagggatt

SEQ ID NO: 2093581 - DNA, 15 bp, Homo sapiens
ttggaggagggattt

SEQ ID NO: 2093582 - DNA, 15 bp, Homo sapiens
tggaggagggatttt

SEQ ID NO: 2093583 - DNA, 15 bp, Homo sapiens
ggaggagggatttta

SEQ ID NO: 2093584 - DNA, 15 bp, Homo sapiens
gaggagggattttac

SEQ ID NO: 2093585 - DNA, 15 bp, Homo sapiens
aggagggattttacc

SEQ ID NO: 2093586 - DNA, 15 bp, Homo sapiens
ggagggattttacct

SEQ ID NO: 2093587 - DNA, 15 bp, Homo sapiens
gagggattttacctc

SEQ ID NO: 2093588 - DNA, 15 bp, Homo sapiens
agggattttacctct

SEQ ID NO: 2093589 - DNA, 15 bp, Homo sapiens
gggattttacctctg

SEQ ID NO: 2093590 - DNA, 15 bp, Homo sapiens
ggattttacctctgg

SEQ ID NO: 2093591 - DNA, 15 bp, Homo sapiens
gattttacctctggt

SEQ ID NO: 2093592 - DNA, 15 bp, Homo sapiens
attttacctctggtt

SEQ ID NO: 2093593 - DNA, 15 bp, Homo sapiens
ttttacctctggtta

SEQ ID NO: 2093594 - DNA, 15 bp, Homo sapiens
tttacctctggttaa

SEQ ID NO: 2093595 - DNA, 15 bp, Homo sapiens
ttacctctggttaaa

SEQ ID NO: 2093596 - DNA, 15 bp, Homo sapiens
tacctctggttaaag

SEQ ID NO: 2093597 - DNA, 15 bp, Homo sapiens
acctctggttaaagc

SEQ ID NO: 2093598 - DNA, 15 bp, Homo sapiens
cctctggttaaagct

SEQ ID NO: 2093599 - DNA, 15 bp, Homo sapiens
ctctggttaaagctt

SEQ ID NO: 2093600 - DNA, 15 bp, Homo sapiens
tctggttaaagcttg

SEQ ID NO: 2093601 - DNA, 15 bp, Homo sapiens
ctggttaaagcttga

SEQ ID NO: 2093602 - DNA, 15 bp, Homo sapiens
tggttaaagcttgac

SEQ ID NO: 2093603 - DNA, 15 bp, Homo sapiens
ggttaaagcttgacc

SEQ ID NO: 2093604 - DNA, 15 bp, Homo sapiens
gttaaagcttgacca

SEQ ID NO: 2093605 - DNA, 15 bp, Homo sapiens
ttaaagcttgaccac

SEQ ID NO: 2093606 - DNA, 15 bp, Homo sapiens
taaagcttgaccacc

SEQ ID NO: 2093607 - DNA, 15 bp, Homo sapiens
aaagcttgaccaccc

SEQ ID NO: 2093608 - DNA, 15 bp, Homo sapiens
aagcttgaccaccca

SEQ ID NO: 2093609 - DNA, 15 bp, Homo sapiens
agcttgaccacccag

SEQ ID NO: 2093610 - DNA, 15 bp, Homo sapiens
gcttgaccacccaga

SEQ ID NO: 2093611 - DNA, 15 bp, Homo sapiens
cttgaccacccagag

SEQ ID NO: 2093612 - DNA, 15 bp, Homo sapiens
ttgaccacccagagg

SEQ ID NO: 2093613 - DNA, 15 bp, Homo sapiens
tgaccacccagaggg

SEQ ID NO: 2093614 - DNA, 15 bp, Homo sapiens
gaccacccagagggg

SEQ ID NO: 2093615 - DNA, 15 bp, Homo sapiens
accacccagaggggc

SEQ ID NO: 2093616 - DNA, 15 bp, Homo sapiens
ccacccagaggggca

SEQ ID NO: 2093617 - DNA, 15 bp, Homo sapiens
cacccagaggggcag

SEQ ID NO: 2093618 - DNA, 15 bp, Homo sapiens
acccagaggggcagg

SEQ ID NO: 2093619 - DNA, 15 bp, Homo sapiens
cccagaggggcaggt

SEQ ID NO: 2093620 - DNA, 15 bp, Homo sapiens
ccagaggggcaggtg

SEQ ID NO: 2093621 - DNA, 15 bp, Homo sapiens
cagaggggcaggtgg

SEQ ID NO: 2093622 - DNA, 15 bp, Homo sapiens
agaggggcaggtggg

SEQ ID NO: 2093623 - DNA, 15 bp, Homo sapiens
gaggggcaggtgggg

SEQ ID NO: 2093624 - DNA, 15 bp, Homo sapiens
aggggcaggtggggt

SEQ ID NO: 2093625 - DNA, 15 bp, Homo sapiens
ggggcaggtggggtt

SEQ ID NO: 2093626 - DNA, 15 bp, Homo sapiens
gggcaggtggggtta

SEQ ID NO: 2093627 - DNA, 15 bp, Homo sapiens
ggcaggtggggttag

SEQ ID NO: 2093628 - DNA, 15 bp, Homo sapiens
gcaggtggggttagt

SEQ ID NO: 2093629 - DNA, 15 bp, Homo sapiens
caggtggggttagtg

SEQ ID NO: 2093630 - DNA, 15 bp, Homo sapiens
aggtggggttagtga

SEQ ID NO: 2093631 - DNA, 15 bp, Homo sapiens
ggtggggttagtgat

SEQ ID NO: 2093632 - DNA, 15 bp, Homo sapiens
gtggggttagtgatt

SEQ ID NO: 2093633 - DNA, 15 bp, Homo sapiens
tggggttagtgattg

SEQ ID NO: 2093634 - DNA, 15 bp, Homo sapiens
ggggttagtgattgc

SEQ ID NO: 2093635 - DNA, 15 bp, Homo sapiens
gggttagtgattgct

SEQ ID NO: 2093636 - DNA, 15 bp, Homo sapiens
ggttagtgattgctt

SEQ ID NO: 2093637 - DNA, 15 bp, Homo sapiens
gttagtgattgctta

SEQ ID NO: 2093638 - DNA, 15 bp, Homo sapiens
ttagtgattgcttac

SEQ ID NO: 2093639 - DNA, 15 bp, Homo sapiens
tagtgattgcttact

SEQ ID NO: 2093640 - DNA, 15 bp, Homo sapiens
agtgattgcttactg

SEQ ID NO: 2093641 - DNA, 15 bp, Homo sapiens
gtgattgcttactga

SEQ ID NO: 2093642 - DNA, 15 bp, Homo sapiens
tgattgcttactgag

SEQ ID NO: 2093643 - DNA, 15 bp, Homo sapiens
gattgcttactgagc

SEQ ID NO: 2093644 - DNA, 15 bp, Homo sapiens
attgcttactgagct

SEQ ID NO: 2093645 - DNA, 15 bp, Homo sapiens
ttgcttactgagctt

SEQ ID NO: 2093646 - DNA, 15 bp, Homo sapiens
tgcttactgagctta

SEQ ID NO: 2093647 - DNA, 15 bp, Homo sapiens
gcttactgagcttac

SEQ ID NO: 2093648 - DNA, 15 bp, Homo sapiens
cttactgagcttact

SEQ ID NO: 2093649 - DNA, 15 bp, Homo sapiens
ttactgagcttactg

SEQ ID NO: 2093650 - DNA, 15 bp, Homo sapiens
tactgagcttactga

SEQ ID NO: 2093651 - DNA, 15 bp, Homo sapiens
actgagcttactgag

SEQ ID NO: 2093652 - DNA, 15 bp, Homo sapiens
ctgagcttactgagc

SEQ ID NO: 2093653 - DNA, 15 bp, Homo sapiens
tgagcttactgagca

SEQ ID NO: 2093654 - DNA, 15 bp, Homo sapiens
gagcttactgagcac

SEQ ID NO: 2093655 - DNA, 15 bp, Homo sapiens
agcttactgagcacc

SEQ ID NO: 2093656 - DNA, 15 bp, Homo sapiens
gcttactgagcacct

SEQ ID NO: 2093657 - DNA, 15 bp, Homo sapiens
cttactgagcacctg

SEQ ID NO: 2093658 - DNA, 15 bp, Homo sapiens
ttactgagcacctgg

SEQ ID NO: 2093659 - DNA, 15 bp, Homo sapiens
tactgagcacctggc

SEQ ID NO: 2093660 - DNA, 15 bp, Homo sapiens
actgagcacctggca

SEQ ID NO: 2093661 - DNA, 15 bp, Homo sapiens
ctgagcacctggcat

SEQ ID NO: 2093662 - DNA, 15 bp, Homo sapiens
tgagcacctggcatc

SEQ ID NO: 2093663 - DNA, 15 bp, Homo sapiens
gagcacctggcatct

SEQ ID NO: 2093664 - DNA, 15 bp, Homo sapiens
agcacctggcatctg

SEQ ID NO: 2093665 - DNA, 15 bp, Homo sapiens
gcacctggcatctgc

SEQ ID NO: 2093666 - DNA, 15 bp, Homo sapiens
cacctggcatctgct

SEQ ID NO: 2093667 - DNA, 15 bp, Homo sapiens
acctggcatctgctg

SEQ ID NO: 2093668 - DNA, 15 bp, Homo sapiens
cctggcatctgctgg

SEQ ID NO: 2093669 - DNA, 15 bp, Homo sapiens
ctggcatctgctggg

SEQ ID NO: 2093670 - DNA, 15 bp, Homo sapiens
tggcatctgctggga

SEQ ID NO: 2093671 - DNA, 15 bp, Homo sapiens
ggcatctgctgggaa

SEQ ID NO: 2093672 - DNA, 15 bp, Homo sapiens
gcatctgctgggaac

SEQ ID NO: 2093673 - DNA, 15 bp, Homo sapiens
catctgctgggaact

SEQ ID NO: 2093674 - DNA, 15 bp, Homo sapiens
atctgctgggaactg

SEQ ID NO: 2093675 - DNA, 15 bp, Homo sapiens
tctgctgggaactga

SEQ ID NO: 2093676 - DNA, 15 bp, Homo sapiens
ctgctgggaactgag

SEQ ID NO: 2093677 - DNA, 15 bp, Homo sapiens
tgctgggaactgagt

SEQ ID NO: 2093678 - DNA, 15 bp, Homo sapiens
gctgggaactgagtg

SEQ ID NO: 2093679 - DNA, 15 bp, Homo sapiens
ctgggaactgagtgc

SEQ ID NO: 2093680 - DNA, 15 bp, Homo sapiens
tgggaactgagtgct

SEQ ID NO: 2093681 - DNA, 15 bp, Homo sapiens
gggaactgagtgctt

SEQ ID NO: 2093682 - DNA, 15 bp, Homo sapiens
ggaactgagtgcttt

SEQ ID NO: 2093683 - DNA, 15 bp, Homo sapiens
gaactgagtgctttc

SEQ ID NO: 2093684 - DNA, 15 bp, Homo sapiens
aactgagtgctttct

SEQ ID NO: 2093685 - DNA, 15 bp, Homo sapiens
actgagtgctttctt

SEQ ID NO: 2093686 - DNA, 15 bp, Homo sapiens
ctgagtgctttcttc

SEQ ID NO: 2093687 - DNA, 15 bp, Homo sapiens
tgagtgctttcttcc

SEQ ID NO: 2093688 - DNA, 15 bp, Homo sapiens
gagtgctttcttcct

SEQ ID NO: 2093689 - DNA, 15 bp, Homo sapiens
agtgctttcttcctt

SEQ ID NO: 2093690 - DNA, 15 bp, Homo sapiens
gtgctttcttccttt

SEQ ID NO: 2093691 - DNA, 15 bp, Homo sapiens
tgctttcttcctttc

SEQ ID NO: 2093692 - DNA, 15 bp, Homo sapiens
gctttcttcctttcg

SEQ ID NO: 2093693 - DNA, 15 bp, Homo sapiens
ctttcttcctttcga

SEQ ID NO: 2093694 - DNA, 15 bp, Homo sapiens
tttcttcctttcgat

SEQ ID NO: 2093695 - DNA, 15 bp, Homo sapiens
ttcttcctttcgatt

SEQ ID NO: 2093696 - DNA, 15 bp, Homo sapiens
tcttcctttcgattc

SEQ ID NO: 2093697 - DNA, 15 bp, Homo sapiens
cttcctttcgattct

SEQ ID NO: 2093698 - DNA, 15 bp, Homo sapiens
ttcctttcgattctt

SEQ ID NO: 2093699 - DNA, 15 bp, Homo sapiens
tcctttcgattcttt

SEQ ID NO: 2093700 - DNA, 15 bp, Homo sapiens
cctttcgattcttta

SEQ ID NO: 2093701 - DNA, 15 bp, Homo sapiens
ctttcgattctttac

SEQ ID NO: 2093702 - DNA, 15 bp, Homo sapiens
tttcgattctttact

SEQ ID NO: 2093703 - DNA, 15 bp, Homo sapiens
ttcgattctttactt

SEQ ID NO: 2093704 - DNA, 15 bp, Homo sapiens
tcgattctttactta

SEQ ID NO: 2093705 - DNA, 15 bp, Homo sapiens
cgattctttacttac

SEQ ID NO: 2093706 - DNA, 15 bp, Homo sapiens
gattctttacttaca

SEQ ID NO: 2093707 - DNA, 15 bp, Homo sapiens
attctttacttacaa

SEQ ID NO: 2093708 - DNA, 15 bp, Homo sapiens
ttctttacttacaaa

SEQ ID NO: 2093709 - DNA, 15 bp, Homo sapiens
tctttacttacaaaa

SEQ ID NO: 2093710 - DNA, 15 bp, Homo sapiens
ctttacttacaaaaa

SEQ ID NO: 2093711 - DNA, 15 bp, Homo sapiens
tttacttacaaaaat

SEQ ID NO: 2093712 - DNA, 15 bp, Homo sapiens
ttacttacaaaaatg

SEQ ID NO: 2093713 - DNA, 15 bp, Homo sapiens
tacttacaaaaatgt

SEQ ID NO: 2093714 - DNA, 15 bp, Homo sapiens
acttacaaaaatgtt

SEQ ID NO: 2093715 - DNA, 15 bp, Homo sapiens
cttacaaaaatgttt

SEQ ID NO: 2093716 - DNA, 15 bp, Homo sapiens
ttacaaaaatgtttt

SEQ ID NO: 2093717 - DNA, 15 bp, Homo sapiens
tacaaaaatgttttg

SEQ ID NO: 2093718 - DNA, 15 bp, Homo sapiens
acaaaaatgttttga

SEQ ID NO: 2093719 - DNA, 15 bp, Homo sapiens
caaaaatgttttgaa

SEQ ID NO: 2093720 - DNA, 15 bp, Homo sapiens
aaaaatgttttgaag

SEQ ID NO: 2093721 - DNA, 15 bp, Homo sapiens
aaaatgttttgaagg

SEQ ID NO: 2093722 - DNA, 15 bp, Homo sapiens
aaatgttttgaaggc

SEQ ID NO: 2093723 - DNA, 15 bp, Homo sapiens
aatgttttgaaggcc

SEQ ID NO: 2093724 - DNA, 15 bp, Homo sapiens
atgttttgaaggccg

SEQ ID NO: 2093725 - DNA, 15 bp, Homo sapiens
tgttttgaaggccgg

SEQ ID NO: 2093726 - DNA, 15 bp, Homo sapiens
gttttgaaggccggg

SEQ ID NO: 2093727 - DNA, 15 bp, Homo sapiens
ttttgaaggccgggc

SEQ ID NO: 2093728 - DNA, 15 bp, Homo sapiens
tttgaaggccgggcg

SEQ ID NO: 2093729 - DNA, 15 bp, Homo sapiens
ttgaaggccgggcgt

SEQ ID NO: 2093730 - DNA, 15 bp, Homo sapiens
tgaaggccgggcgtg

SEQ ID NO: 2093731 - DNA, 15 bp, Homo sapiens
gaaggccgggcgtgg

SEQ ID NO: 2093732 - DNA, 15 bp, Homo sapiens
aaggccgggcgtggt

SEQ ID NO: 2093733 - DNA, 15 bp, Homo sapiens
aggccgggcgtggta

SEQ ID NO: 2093734 - DNA, 15 bp, Homo sapiens
ggccgggcgtggtag

SEQ ID NO: 2093735 - DNA, 15 bp, Homo sapiens
gccgggcgtggtagt

SEQ ID NO: 2093736 - DNA, 15 bp, Homo sapiens
ccgggcgtggtagtt

SEQ ID NO: 2093737 - DNA, 15 bp, Homo sapiens
cgggcgtggtagttc

SEQ ID NO: 2093738 - DNA, 15 bp, Homo sapiens
gggcgtggtagttca

SEQ ID NO: 2093739 - DNA, 15 bp, Homo sapiens
ggcgtggtagttcat

SEQ ID NO: 2093740 - DNA, 15 bp, Homo sapiens
gcgtggtagttcatg

SEQ ID NO: 2093741 - DNA, 15 bp, Homo sapiens
cgtggtagttcatgc

SEQ ID NO: 2093742 - DNA, 15 bp, Homo sapiens
gtggtagttcatgcc

SEQ ID NO: 2093743 - DNA, 15 bp, Homo sapiens
tggtagttcatgcct

SEQ ID NO: 2093744 - DNA, 15 bp, Homo sapiens
ggtagttcatgcctg

SEQ ID NO: 2093745 - DNA, 15 bp, Homo sapiens
gtagttcatgcctgt

SEQ ID NO: 2093746 - DNA, 15 bp, Homo sapiens
tagttcatgcctgta

SEQ ID NO: 2093747 - DNA, 15 bp, Homo sapiens
agttcatgcctgtaa

SEQ ID NO: 2093748 - DNA, 15 bp, Homo sapiens
gaggccgaggtgggg

SEQ ID NO: 2093749 - DNA, 15 bp, Homo sapiens
aggccgaggtggggg

SEQ ID NO: 2093750 - DNA, 15 bp, Homo sapiens
ggccgaggtgggggg

SEQ ID NO: 2093751 - DNA, 15 bp, Homo sapiens
gccgaggtggggggg

SEQ ID NO: 2093752 - DNA, 15 bp, Homo sapiens
ccgaggtggggggga

SEQ ID NO: 2093753 - DNA, 15 bp, Homo sapiens
cgaggtgggggggat

SEQ ID NO: 2093754 - DNA, 15 bp, Homo sapiens
gaggtgggggggatc

SEQ ID NO: 2093755 - DNA, 15 bp, Homo sapiens
aggtgggggggatca

SEQ ID NO: 2093756 - DNA, 15 bp, Homo sapiens
ggtgggggggatcac

SEQ ID NO: 2093757 - DNA, 15 bp, Homo sapiens
gtgggggggatcacc

SEQ ID NO: 2093758 - DNA, 15 bp, Homo sapiens
tgggggggatcacct

SEQ ID NO: 2093759 - DNA, 15 bp, Homo sapiens
gggggggatcacctg

SEQ ID NO: 2093760 - DNA, 15 bp, Homo sapiens
ggggggatcacctga

SEQ ID NO: 2093761 - DNA, 15 bp, Homo sapiens
gggggatcacctgag

SEQ ID NO: 2093762 - DNA, 15 bp, Homo sapiens
ggggatcacctgagg

SEQ ID NO: 2093763 - DNA, 15 bp, Homo sapiens
gggatcacctgaggt

SEQ ID NO: 2093764 - DNA, 15 bp, Homo sapiens
gttcgagaccagcca

SEQ ID NO: 2093765 - DNA, 15 bp, Homo sapiens
ttcgagaccagccag

SEQ ID NO: 2093766 - DNA, 15 bp, Homo sapiens
tcgagaccagccagg

SEQ ID NO: 2093767 - DNA, 15 bp, Homo sapiens
cgagaccagccaggc

SEQ ID NO: 2093768 - DNA, 15 bp, Homo sapiens
gagaccagccaggcc

SEQ ID NO: 2093769 - DNA, 15 bp, Homo sapiens
agaccagccaggcca

SEQ ID NO: 2093770 - DNA, 15 bp, Homo sapiens
gaccagccaggccaa

SEQ ID NO: 2093771 - DNA, 15 bp, Homo sapiens
accagccaggccaac

SEQ ID NO: 2093772 - DNA, 15 bp, Homo sapiens
ccagccaggccaaca

SEQ ID NO: 2093773 - DNA, 15 bp, Homo sapiens
cagccaggccaacat

SEQ ID NO: 2093774 - DNA, 15 bp, Homo sapiens
agccaggccaacatg

SEQ ID NO: 2093775 - DNA, 15 bp, Homo sapiens
gccaggccaacatgg

SEQ ID NO: 2093776 - DNA, 15 bp, Homo sapiens
ccaggccaacatggc

SEQ ID NO: 2093777 - DNA, 15 bp, Homo sapiens
caggccaacatggca

SEQ ID NO: 2093778 - DNA, 15 bp, Homo sapiens
aggccaacatggcaa

SEQ ID NO: 2093779 - DNA, 15 bp, Homo sapiens
acatggcaaaaccct

SEQ ID NO: 2093780 - DNA, 15 bp, Homo sapiens
catggcaaaaccctg

SEQ ID NO: 2093781 - DNA, 15 bp, Homo sapiens
atggcaaaaccctgt

SEQ ID NO: 2093782 - DNA, 15 bp, Homo sapiens
tggcaaaaccctgtc

SEQ ID NO: 2093783 - DNA, 15 bp, Homo sapiens
ggcaaaaccctgtct

SEQ ID NO: 2093784 - DNA, 15 bp, Homo sapiens
tgtctctactaaaat

SEQ ID NO: 2093785 - DNA, 15 bp, Homo sapiens
gtctctactaaaata

SEQ ID NO: 2093786 - DNA, 15 bp, Homo sapiens
tctctactaaaatac

SEQ ID NO: 2093787 - DNA, 15 bp, Homo sapiens
ctctactaaaataca

SEQ ID NO: 2093788 - DNA, 15 bp, Homo sapiens
tctactaaaatacaa

SEQ ID NO: 2093789 - DNA, 15 bp, Homo sapiens
ctactaaaatacaaa

SEQ ID NO: 2093790 - DNA, 15 bp, Homo sapiens
tactaaaatacaaaa

SEQ ID NO: 2093791 - DNA, 15 bp, Homo sapiens
actaaaatacaaaaa

SEQ ID NO: 2093792 - DNA, 15 bp, Homo sapiens
ctaaaatacaaaaaa

SEQ ID NO: 2093793 - DNA, 15 bp, Homo sapiens
taaaatacaaaaaat

SEQ ID NO: 2093794 - DNA, 15 bp, Homo sapiens
agctgggtgtggtgt

SEQ ID NO: 2093795 - DNA, 15 bp, Homo sapiens
gctgggtgtggtgtt

SEQ ID NO: 2093796 - DNA, 15 bp, Homo sapiens
ctgggtgtggtgttg

SEQ ID NO: 2093797 - DNA, 15 bp, Homo sapiens
tgggtgtggtgttgc

SEQ ID NO: 2093798 - DNA, 15 bp, Homo sapiens
gggtgtggtgttgca

SEQ ID NO: 2093799 - DNA, 15 bp, Homo sapiens
ggtgtggtgttgcat

SEQ ID NO: 2093800 - DNA, 15 bp, Homo sapiens
gtgtggtgttgcatg

SEQ ID NO: 2093801 - DNA, 15 bp, Homo sapiens
tgtggtgttgcatgc

SEQ ID NO: 2093802 - DNA, 15 bp, Homo sapiens
gtggtgttgcatgcc

SEQ ID NO: 2093803 - DNA, 15 bp, Homo sapiens
tggtgttgcatgcct

SEQ ID NO: 2093804 - DNA, 15 bp, Homo sapiens
ggtgttgcatgcctg

SEQ ID NO: 2093805 - DNA, 15 bp, Homo sapiens
gtgttgcatgcctgt

SEQ ID NO: 2093806 - DNA, 15 bp, Homo sapiens
tgttgcatgcctgta

SEQ ID NO: 2093807 - DNA, 15 bp, Homo sapiens
gttgcatgcctgtaa

SEQ ID NO: 2093808 - DNA, 15 bp, Homo sapiens
ttgcatgcctgtaat

SEQ ID NO: 2093809 - DNA, 15 bp, Homo sapiens
cagctactcatgagc

SEQ ID NO: 2093810 - DNA, 15 bp, Homo sapiens
agctactcatgagct

SEQ ID NO: 2093811 - DNA, 15 bp, Homo sapiens
gctactcatgagctg

SEQ ID NO: 2093812 - DNA, 15 bp, Homo sapiens
ctactcatgagctga

SEQ ID NO: 2093813 - DNA, 15 bp, Homo sapiens
tactcatgagctgag

SEQ ID NO: 2093814 - DNA, 15 bp, Homo sapiens
actcatgagctgagg

SEQ ID NO: 2093815 - DNA, 15 bp, Homo sapiens
ctcatgagctgaggc

SEQ ID NO: 2093816 - DNA, 15 bp, Homo sapiens
tcatgagctgaggca

SEQ ID NO: 2093817 - DNA, 15 bp, Homo sapiens
catgagctgaggcag

SEQ ID NO: 2093818 - DNA, 15 bp, Homo sapiens
atgagctgaggcagg

SEQ ID NO: 2093819 - DNA, 15 bp, Homo sapiens
tgagctgaggcagga

SEQ ID NO: 2093820 - DNA, 15 bp, Homo sapiens
gagctgaggcaggag

SEQ ID NO: 2093821 - DNA, 15 bp, Homo sapiens
tcgcttgaacacagg

SEQ ID NO: 2093822 - DNA, 15 bp, Homo sapiens
cgcttgaacacagga

SEQ ID NO: 2093823 - DNA, 15 bp, Homo sapiens
gcttgaacacaggag

SEQ ID NO: 2093824 - DNA, 15 bp, Homo sapiens
cttgaacacaggagg

SEQ ID NO: 2093825 - DNA, 15 bp, Homo sapiens
ttgaacacaggaggt

SEQ ID NO: 2093826 - DNA, 15 bp, Homo sapiens
tgaacacaggaggtg

SEQ ID NO: 2093827 - DNA, 15 bp, Homo sapiens
gaacacaggaggtga

SEQ ID NO: 2093828 - DNA, 15 bp, Homo sapiens
aacacaggaggtgaa

SEQ ID NO: 2093829 - DNA, 15 bp, Homo sapiens
acacaggaggtgaag

SEQ ID NO: 2093830 - DNA, 15 bp, Homo sapiens
cacaggaggtgaagg

SEQ ID NO: 2093831 - DNA, 15 bp, Homo sapiens
acaggaggtgaaggt

SEQ ID NO: 2093832 - DNA, 15 bp, Homo sapiens
caggaggtgaaggtt

SEQ ID NO: 2093833 - DNA, 15 bp, Homo sapiens
aggaggtgaaggttg

SEQ ID NO: 2093834 - DNA, 15 bp, Homo sapiens
ggaggtgaaggttgc

SEQ ID NO: 2093835 - DNA, 15 bp, Homo sapiens
gaggtgaaggttgca

SEQ ID NO: 2093836 - DNA, 15 bp, Homo sapiens
aggtgaaggttgcag

SEQ ID NO: 2093837 - DNA, 15 bp, Homo sapiens
ggtgaaggttgcagt

SEQ ID NO: 2093838 - DNA, 15 bp, Homo sapiens
gtgaaggttgcagtg

SEQ ID NO: 2093839 - DNA, 15 bp, Homo sapiens
tgaaggttgcagtga

SEQ ID NO: 2093840 - DNA, 15 bp, Homo sapiens
agctgagatcacgca

SEQ ID NO: 2093841 - DNA, 15 bp, Homo sapiens
gctgagatcacgcaa

SEQ ID NO: 2093842 - DNA, 15 bp, Homo sapiens
ctgagatcacgcaat

SEQ ID NO: 2093843 - DNA, 15 bp, Homo sapiens
tgagatcacgcaatt

SEQ ID NO: 2093844 - DNA, 15 bp, Homo sapiens
gagatcacgcaattt

SEQ ID NO: 2093845 - DNA, 15 bp, Homo sapiens
agatcacgcaatttc

SEQ ID NO: 2093846 - DNA, 15 bp, Homo sapiens
gatcacgcaatttca

SEQ ID NO: 2093847 - DNA, 15 bp, Homo sapiens
atcacgcaatttcac

SEQ ID NO: 2093848 - DNA, 15 bp, Homo sapiens
tcacgcaatttcact

SEQ ID NO: 2093849 - DNA, 15 bp, Homo sapiens
cacgcaatttcactt

SEQ ID NO: 2093850 - DNA, 15 bp, Homo sapiens
acgcaatttcacttc

SEQ ID NO: 2093851 - DNA, 15 bp, Homo sapiens
cgcaatttcacttca

SEQ ID NO: 2093852 - DNA, 15 bp, Homo sapiens
gcaatttcacttcag

SEQ ID NO: 2093853 - DNA, 15 bp, Homo sapiens
caatttcacttcagc

SEQ ID NO: 2093854 - DNA, 15 bp, Homo sapiens
aatttcacttcagcc

SEQ ID NO: 2093855 - DNA, 15 bp, Homo sapiens
atttcacttcagcct

SEQ ID NO: 2093856 - DNA, 15 bp, Homo sapiens
tttcacttcagcctg

SEQ ID NO: 2093857 - DNA, 15 bp, Homo sapiens
ttcacttcagcctgg

SEQ ID NO: 2093858 - DNA, 15 bp, Homo sapiens
tcacttcagcctggg

SEQ ID NO: 2093859 - DNA, 15 bp, Homo sapiens
ttcagcctgggtgag

SEQ ID NO: 2093860 - DNA, 15 bp, Homo sapiens
tcagcctgggtgaga

SEQ ID NO: 2093861 - DNA, 15 bp, Homo sapiens
cagcctgggtgagaa

SEQ ID NO: 2093862 - DNA, 15 bp, Homo sapiens
agcctgggtgagaag

SEQ ID NO: 2093863 - DNA, 15 bp, Homo sapiens
gcctgggtgagaaga

SEQ ID NO: 2093864 - DNA, 15 bp, Homo sapiens
cctgggtgagaagag

SEQ ID NO: 2093865 - DNA, 15 bp, Homo sapiens
ctgggtgagaagagt

SEQ ID NO: 2093866 - DNA, 15 bp, Homo sapiens
tgggtgagaagagtg

SEQ ID NO: 2093867 - DNA, 15 bp, Homo sapiens
gggtgagaagagtga

SEQ ID NO: 2093868 - DNA, 15 bp, Homo sapiens
ggtgagaagagtgaa

SEQ ID NO: 2093869 - DNA, 15 bp, Homo sapiens
tgagaagagtgaaac

SEQ ID NO: 2093870 - DNA, 15 bp, Homo sapiens
gagaagagtgaaact

SEQ ID NO: 2093871 - DNA, 15 bp, Homo sapiens
agaagagtgaaactc

SEQ ID NO: 2093872 - DNA, 15 bp, Homo sapiens
gaagagtgaaactcg

SEQ ID NO: 2093873 - DNA, 15 bp, Homo sapiens
aagagtgaaactcgg

SEQ ID NO: 2093874 - DNA, 15 bp, Homo sapiens
agagtgaaactcggt

SEQ ID NO: 2093875 - DNA, 15 bp, Homo sapiens
gagtgaaactcggtc

SEQ ID NO: 2093876 - DNA, 15 bp, Homo sapiens
agtgaaactcggtct

SEQ ID NO: 2093877 - DNA, 15 bp, Homo sapiens
gtgaaactcggtctc

SEQ ID NO: 2093878 - DNA, 15 bp, Homo sapiens
tgaaactcggtctcc

SEQ ID NO: 2093879 - DNA, 15 bp, Homo sapiens
gaaactcggtctcca

SEQ ID NO: 2093880 - DNA, 15 bp, Homo sapiens
aaactcggtctccaa

SEQ ID NO: 2093881 - DNA, 15 bp, Homo sapiens
aactcggtctccaaa

SEQ ID NO: 2093882 - DNA, 15 bp, Homo sapiens
actcggtctccaaaa

SEQ ID NO: 2093883 - DNA, 15 bp, Homo sapiens
ctcggtctccaaaaa

SEQ ID NO: 2093884 - DNA, 15 bp, Homo sapiens
tcggtctccaaaaaa

SEQ ID NO: 2093885 - DNA, 15 bp, Homo sapiens
cggtctccaaaaaaa

SEQ ID NO: 2093886 - DNA, 15 bp, Homo sapiens
ggtctccaaaaaaaa

SEQ ID NO: 2093887 - DNA, 15 bp, Homo sapiens
gtctccaaaaaaaag

SEQ ID NO: 2093888 - DNA, 15 bp, Homo sapiens
tctccaaaaaaaaga

SEQ ID NO: 2093889 - DNA, 15 bp, Homo sapiens
ctccaaaaaaaagag

SEQ ID NO: 2093890 - DNA, 15 bp, Homo sapiens
tccaaaaaaaagaga

SEQ ID NO: 2093891 - DNA, 15 bp, Homo sapiens
ccaaaaaaaagagaa

SEQ ID NO: 2093892 - DNA, 15 bp, Homo sapiens
caaaaaaaagagaag

SEQ ID NO: 2093893 - DNA, 15 bp, Homo sapiens
aaaaaaaagagaaga

SEQ ID NO: 2093894 - DNA, 15 bp, Homo sapiens
aaaaaaagagaagag

SEQ ID NO: 2093895 - DNA, 15 bp, Homo sapiens
aaaaaagagaagaga

SEQ ID NO: 2093896 - DNA, 15 bp, Homo sapiens
aaaaagagaagagat

SEQ ID NO: 2093897 - DNA, 15 bp, Homo sapiens
aaaagagaagagatt

SEQ ID NO: 2093898 - DNA, 15 bp, Homo sapiens
aaagagaagagattc

SEQ ID NO: 2093899 - DNA, 15 bp, Homo sapiens
aagagaagagattca

SEQ ID NO: 2093900 - DNA, 15 bp, Homo sapiens
agagaagagattcac

SEQ ID NO: 2093901 - DNA, 15 bp, Homo sapiens
gagaagagattcaca

SEQ ID NO: 2093902 - DNA, 15 bp, Homo sapiens
agaagagattcacat

SEQ ID NO: 2093903 - DNA, 15 bp, Homo sapiens
gaagagattcacatt

SEQ ID NO: 2093904 - DNA, 15 bp, Homo sapiens
aagagattcacatta

SEQ ID NO: 2093905 - DNA, 15 bp, Homo sapiens
agagattcacattac

SEQ ID NO: 2093906 - DNA, 15 bp, Homo sapiens
gagattcacattaca

SEQ ID NO: 2093907 - DNA, 15 bp, Homo sapiens
agattcacattacaa

SEQ ID NO: 2093908 - DNA, 15 bp, Homo sapiens
gattcacattacaaa

SEQ ID NO: 2093909 - DNA, 15 bp, Homo sapiens
attcacattacaaaa

SEQ ID NO: 2093910 - DNA, 15 bp, Homo sapiens
ttcacattacaaaat

SEQ ID NO: 2093911 - DNA, 15 bp, Homo sapiens
tcacattacaaaata

SEQ ID NO: 2093912 - DNA, 15 bp, Homo sapiens
cacattacaaaataa

SEQ ID NO: 2093913 - DNA, 15 bp, Homo sapiens
acattacaaaataaa

SEQ ID NO: 2093914 - DNA, 15 bp, Homo sapiens
cattacaaaataaaa

SEQ ID NO: 2093915 - DNA, 15 bp, Homo sapiens
attacaaaataaaac

SEQ ID NO: 2093916 - DNA, 15 bp, Homo sapiens
ttacaaaataaaaca

SEQ ID NO: 2093917 - DNA, 15 bp, Homo sapiens
tacaaaataaaacaa

SEQ ID NO: 2093918 - DNA, 15 bp, Homo sapiens
acaaaataaaacaag

SEQ ID NO: 2093919 - DNA, 15 bp, Homo sapiens
caaaataaaacaaga

SEQ ID NO: 2093920 - DNA, 15 bp, Homo sapiens
aaaataaaacaagag

SEQ ID NO: 2093921 - DNA, 15 bp, Homo sapiens
aaataaaacaagaga

SEQ ID NO: 2093922 - DNA, 15 bp, Homo sapiens
aataaaacaagagag

SEQ ID NO: 2093923 - DNA, 15 bp, Homo sapiens
ataaaacaagagagg

SEQ ID NO: 2093924 - DNA, 15 bp, Homo sapiens
taaaacaagagaggg

SEQ ID NO: 2093925 - DNA, 15 bp, Homo sapiens
aaaacaagagaggga

SEQ ID NO: 2093926 - DNA, 15 bp, Homo sapiens
aaacaagagagggag

SEQ ID NO: 2093927 - DNA, 15 bp, Homo sapiens
aacaagagagggaga

SEQ ID NO: 2093928 - DNA, 15 bp, Homo sapiens
acaagagagggagat

SEQ ID NO: 2093929 - DNA, 15 bp, Homo sapiens
caagagagggagata

SEQ ID NO: 2093930 - DNA, 15 bp, Homo sapiens
aagagagggagataa

SEQ ID NO: 2093931 - DNA, 15 bp, Homo sapiens
agagagggagataag

SEQ ID NO: 2093932 - DNA, 15 bp, Homo sapiens
gagagggagataagt

SEQ ID NO: 2093933 - DNA, 15 bp, Homo sapiens
agagggagataagtg

SEQ ID NO: 2093934 - DNA, 15 bp, Homo sapiens
gagggagataagtgc

SEQ ID NO: 2093935 - DNA, 15 bp, Homo sapiens
agggagataagtgcc

SEQ ID NO: 2093936 - DNA, 15 bp, Homo sapiens
gggagataagtgccc

SEQ ID NO: 2093937 - DNA, 15 bp, Homo sapiens
ggagataagtgccct

SEQ ID NO: 2093938 - DNA, 15 bp, Homo sapiens
gagataagtgccctt

SEQ ID NO: 2093939 - DNA, 15 bp, Homo sapiens
agataagtgccctta

SEQ ID NO: 2093940 - DNA, 15 bp, Homo sapiens
gataagtgcccttag

SEQ ID NO: 2093941 - DNA, 15 bp, Homo sapiens
ataagtgcccttagt

SEQ ID NO: 2093942 - DNA, 15 bp, Homo sapiens
taagtgcccttagta

SEQ ID NO: 2093943 - DNA, 15 bp, Homo sapiens
aagtgcccttagtat

SEQ ID NO: 2093944 - DNA, 15 bp, Homo sapiens
agtgcccttagtatc

SEQ ID NO: 2093945 - DNA, 15 bp, Homo sapiens
gtgcccttagtatca

SEQ ID NO: 2093946 - DNA, 15 bp, Homo sapiens
tgcccttagtatcac

SEQ ID NO: 2093947 - DNA, 15 bp, Homo sapiens
gcccttagtatcacc

SEQ ID NO: 2093948 - DNA, 15 bp, Homo sapiens
cccttagtatcacct

SEQ ID NO: 2093949 - DNA, 15 bp, Homo sapiens
ccttagtatcacctc

SEQ ID NO: 2093950 - DNA, 15 bp, Homo sapiens
cttagtatcacctcc

SEQ ID NO: 2093951 - DNA, 15 bp, Homo sapiens
ttagtatcacctccc

SEQ ID NO: 2093952 - DNA, 15 bp, Homo sapiens
tagtatcacctccca

SEQ ID NO: 2093953 - DNA, 15 bp, Homo sapiens
agtatcacctcccac

SEQ ID NO: 2093954 - DNA, 15 bp, Homo sapiens
gtatcacctcccacc

SEQ ID NO: 2093955 - DNA, 15 bp, Homo sapiens
tatcacctcccaccc

SEQ ID NO: 2093956 - DNA, 15 bp, Homo sapiens
atcacctcccacccc

SEQ ID NO: 2093957 - DNA, 15 bp, Homo sapiens
tcacctcccacccct

SEQ ID NO: 2093958 - DNA, 15 bp, Homo sapiens
cacctcccaccccta

SEQ ID NO: 2093959 - DNA, 15 bp, Homo sapiens
acctcccacccctac

SEQ ID NO: 2093960 - DNA, 15 bp, Homo sapiens
ccacccctacccctt

SEQ ID NO: 2093961 - DNA, 15 bp, Homo sapiens
cacccctaccccttg

SEQ ID NO: 2093962 - DNA, 15 bp, Homo sapiens
acccctaccccttgc

SEQ ID NO: 2093963 - DNA, 15 bp, Homo sapiens
cccctaccccttgcc

SEQ ID NO: 2093964 - DNA, 15 bp, Homo sapiens
ccctaccccttgccc

SEQ ID NO: 2093965 - DNA, 15 bp, Homo sapiens
cctaccccttgcccc

SEQ ID NO: 2093966 - DNA, 15 bp, Homo sapiens
ctaccccttgcccca

SEQ ID NO: 2093967 - DNA, 15 bp, Homo sapiens
taccccttgccccag

SEQ ID NO: 2093968 - DNA, 15 bp, Homo sapiens
accccttgccccaga

SEQ ID NO: 2093969 - DNA, 15 bp, Homo sapiens
ccccttgccccagag

SEQ ID NO: 2093970 - DNA, 15 bp, Homo sapiens
cccttgccccagagg

SEQ ID NO: 2093971 - DNA, 15 bp, Homo sapiens
ccttgccccagagga

SEQ ID NO: 2093972 - DNA, 15 bp, Homo sapiens
cttgccccagaggaa

SEQ ID NO: 2093973 - DNA, 15 bp, Homo sapiens
ttgccccagaggaaa

SEQ ID NO: 2093974 - DNA, 15 bp, Homo sapiens
tgccccagaggaaac

SEQ ID NO: 2093975 - DNA, 15 bp, Homo sapiens
gccccagaggaaacc

SEQ ID NO: 2093976 - DNA, 15 bp, Homo sapiens
ccccagaggaaaccc

SEQ ID NO: 2093977 - DNA, 15 bp, Homo sapiens
cccagaggaaaccca

SEQ ID NO: 2093978 - DNA, 15 bp, Homo sapiens
ccagaggaaacccac

SEQ ID NO: 2093979 - DNA, 15 bp, Homo sapiens
cagaggaaacccaca

SEQ ID NO: 2093980 - DNA, 15 bp, Homo sapiens
agaggaaacccacaa

SEQ ID NO: 2093981 - DNA, 15 bp, Homo sapiens
gaggaaacccacaat

SEQ ID NO: 2093982 - DNA, 15 bp, Homo sapiens
aggaaacccacaatt

SEQ ID NO: 2093983 - DNA, 15 bp, Homo sapiens
ggaaacccacaatta

SEQ ID NO: 2093984 - DNA, 15 bp, Homo sapiens
gaaacccacaattat

SEQ ID NO: 2093985 - DNA, 15 bp, Homo sapiens
aaacccacaattatc

SEQ ID NO: 2093986 - DNA, 15 bp, Homo sapiens
aacccacaattatca

SEQ ID NO: 2093987 - DNA, 15 bp, Homo sapiens
acccacaattatcag

SEQ ID NO: 2093988 - DNA, 15 bp, Homo sapiens
cccacaattatcagt

SEQ ID NO: 2093989 - DNA, 15 bp, Homo sapiens
ccacaattatcagtt

SEQ ID NO: 2093990 - DNA, 15 bp, Homo sapiens
cacaattatcagttt

SEQ ID NO: 2093991 - DNA, 15 bp, Homo sapiens
acaattatcagtttg

SEQ ID NO: 2093992 - DNA, 15 bp, Homo sapiens
caattatcagtttgg

SEQ ID NO: 2093993 - DNA, 15 bp, Homo sapiens
aattatcagtttggg

SEQ ID NO: 2093994 - DNA, 15 bp, Homo sapiens
attatcagtttggga

SEQ ID NO: 2093995 - DNA, 15 bp, Homo sapiens
ttatcagtttgggat

SEQ ID NO: 2093996 - DNA, 15 bp, Homo sapiens
tatcagtttgggata

SEQ ID NO: 2093997 - DNA, 15 bp, Homo sapiens
atcagtttgggatat

SEQ ID NO: 2093998 - DNA, 15 bp, Homo sapiens
tcagtttgggatata

SEQ ID NO: 2093999 - DNA, 15 bp, Homo sapiens
cagtttgggatatat

SEQ ID NO: 2094000 - DNA, 15 bp, Homo sapiens
agtttgggatatatt

SEQ ID NO: 2094001 - DNA, 15 bp, Homo sapiens
gtttgggatatattc

SEQ ID NO: 2094002 - DNA, 15 bp, Homo sapiens
tttgggatatattct

SEQ ID NO: 2094003 - DNA, 15 bp, Homo sapiens
ttgggatatattctt

SEQ ID NO: 2094004 - DNA, 15 bp, Homo sapiens
tgggatatattcttc

SEQ ID NO: 2094005 - DNA, 15 bp, Homo sapiens
gggatatattcttcc

SEQ ID NO: 2094006 - DNA, 15 bp, Homo sapiens
ggatatattcttccc

SEQ ID NO: 2094007 - DNA, 15 bp, Homo sapiens
gatatattcttccca

SEQ ID NO: 2094008 - DNA, 15 bp, Homo sapiens
atatattcttcccat

SEQ ID NO: 2094009 - DNA, 15 bp, Homo sapiens
tatattcttcccatc

SEQ ID NO: 2094010 - DNA, 15 bp, Homo sapiens
atattcttcccatcc

SEQ ID NO: 2094011 - DNA, 15 bp, Homo sapiens
tattcttcccatcca

SEQ ID NO: 2094012 - DNA, 15 bp, Homo sapiens
attcttcccatccat

SEQ ID NO: 2094013 - DNA, 15 bp, Homo sapiens
ttcttcccatccatt

SEQ ID NO: 2094014 - DNA, 15 bp, Homo sapiens
tcttcccatccattt

SEQ ID NO: 2094015 - DNA, 15 bp, Homo sapiens
cttcccatccatttt

SEQ ID NO: 2094016 - DNA, 15 bp, Homo sapiens
ttcccatccattttt

SEQ ID NO: 2094017 - DNA, 15 bp, Homo sapiens
tcccatccattttta

SEQ ID NO: 2094018 - DNA, 15 bp, Homo sapiens
cccatccatttttac

SEQ ID NO: 2094019 - DNA, 15 bp, Homo sapiens
ccatccatttttacc

SEQ ID NO: 2094020 - DNA, 15 bp, Homo sapiens
catccatttttaccc

SEQ ID NO: 2094021 - DNA, 15 bp, Homo sapiens
atccatttttaccca

SEQ ID NO: 2094022 - DNA, 15 bp, Homo sapiens
tccatttttacccat

SEQ ID NO: 2094023 - DNA, 15 bp, Homo sapiens
ccatttttacccatg

SEQ ID NO: 2094024 - DNA, 15 bp, Homo sapiens
catttttacccatgt

SEQ ID NO: 2094025 - DNA, 15 bp, Homo sapiens
atttttacccatgtg

SEQ ID NO: 2094026 - DNA, 15 bp, Homo sapiens
tttttacccatgtgc

SEQ ID NO: 2094027 - DNA, 15 bp, Homo sapiens
ttttacccatgtgca

SEQ ID NO: 2094028 - DNA, 15 bp, Homo sapiens
tttacccatgtgcac

SEQ ID NO: 2094029 - DNA, 15 bp, Homo sapiens
ttacccatgtgcaca

SEQ ID NO: 2094030 - DNA, 15 bp, Homo sapiens
tacccatgtgcacac

SEQ ID NO: 2094031 - DNA, 15 bp, Homo sapiens
acccatgtgcacacc

SEQ ID NO: 2094032 - DNA, 15 bp, Homo sapiens
cccatgtgcacacct

SEQ ID NO: 2094033 - DNA, 15 bp, Homo sapiens
ccatgtgcacaccta

SEQ ID NO: 2094034 - DNA, 15 bp, Homo sapiens
catgtgcacacctat

SEQ ID NO: 2094035 - DNA, 15 bp, Homo sapiens
atgtgcacacctata

SEQ ID NO: 2094036 - DNA, 15 bp, Homo sapiens
tgtgcacacctatat

SEQ ID NO: 2094037 - DNA, 15 bp, Homo sapiens
gtgcacacctatatg

SEQ ID NO: 2094038 - DNA, 15 bp, Homo sapiens
tgcacacctatatgt

SEQ ID NO: 2094039 - DNA, 15 bp, Homo sapiens
gcacacctatatgta

SEQ ID NO: 2094040 - DNA, 15 bp, Homo sapiens
cacacctatatgtac

SEQ ID NO: 2094041 - DNA, 15 bp, Homo sapiens
acacctatatgtacg

SEQ ID NO: 2094042 - DNA, 15 bp, Homo sapiens
cacctatatgtacgc

SEQ ID NO: 2094043 - DNA, 15 bp, Homo sapiens
acctatatgtacgca

SEQ ID NO: 2094044 - DNA, 15 bp, Homo sapiens
cctatatgtacgcag

SEQ ID NO: 2094045 - DNA, 15 bp, Homo sapiens
ctatatgtacgcaga

SEQ ID NO: 2094046 - DNA, 15 bp, Homo sapiens
tatatgtacgcagag

SEQ ID NO: 2094047 - DNA, 15 bp, Homo sapiens
atatgtacgcagaga

SEQ ID NO: 2094048 - DNA, 15 bp, Homo sapiens
tatgtacgcagagaa

SEQ ID NO: 2094049 - DNA, 15 bp, Homo sapiens
atgtacgcagagaaa

SEQ ID NO: 2094050 - DNA, 15 bp, Homo sapiens
tgtacgcagagaaat

SEQ ID NO: 2094051 - DNA, 15 bp, Homo sapiens
gtacgcagagaaata

SEQ ID NO: 2094052 - DNA, 15 bp, Homo sapiens
tacgcagagaaatac

SEQ ID NO: 2094053 - DNA, 15 bp, Homo sapiens
acgcagagaaatacg

SEQ ID NO: 2094054 - DNA, 15 bp, Homo sapiens
cgcagagaaatacgg

SEQ ID NO: 2094055 - DNA, 15 bp, Homo sapiens
gcagagaaatacgga

SEQ ID NO: 2094056 - DNA, 15 bp, Homo sapiens
cagagaaatacggaa

SEQ ID NO: 2094057 - DNA, 15 bp, Homo sapiens
agagaaatacggaat

SEQ ID NO: 2094058 - DNA, 15 bp, Homo sapiens
gagaaatacggaatt

SEQ ID NO: 2094059 - DNA, 15 bp, Homo sapiens
agaaatacggaattg

SEQ ID NO: 2094060 - DNA, 15 bp, Homo sapiens
gaaatacggaattgt

SEQ ID NO: 2094061 - DNA, 15 bp, Homo sapiens
aaatacggaattgtt

SEQ ID NO: 2094062 - DNA, 15 bp, Homo sapiens
aatacggaattgttt

SEQ ID NO: 2094063 - DNA, 15 bp, Homo sapiens
atacggaattgtttc

SEQ ID NO: 2094064 - DNA, 15 bp, Homo sapiens
tacggaattgtttct

SEQ ID NO: 2094065 - DNA, 15 bp, Homo sapiens
acggaattgtttctt

SEQ ID NO: 2094066 - DNA, 15 bp, Homo sapiens
cggaattgtttcttc

SEQ ID NO: 2094067 - DNA, 15 bp, Homo sapiens
attgtttcttctttg

SEQ ID NO: 2094068 - DNA, 15 bp, Homo sapiens
ttgtttcttctttga

SEQ ID NO: 2094069 - DNA, 15 bp, Homo sapiens
tgtttcttctttgaa

SEQ ID NO: 2094070 - DNA, 15 bp, Homo sapiens
gtttcttctttgaac

SEQ ID NO: 2094071 - DNA, 15 bp, Homo sapiens
tttcttctttgaaca

SEQ ID NO: 2094072 - DNA, 15 bp, Homo sapiens
ttcttctttgaacat

SEQ ID NO: 2094073 - DNA, 15 bp, Homo sapiens
tcttctttgaacatc

SEQ ID NO: 2094074 - DNA, 15 bp, Homo sapiens
cttctttgaacatca

SEQ ID NO: 2094075 - DNA, 15 bp, Homo sapiens
ttctttgaacatcat

SEQ ID NO: 2094076 - DNA, 15 bp, Homo sapiens
tctttgaacatcatg

SEQ ID NO: 2094077 - DNA, 15 bp, Homo sapiens
ctttgaacatcatga

SEQ ID NO: 2094078 - DNA, 15 bp, Homo sapiens
tttgaacatcatgaa

SEQ ID NO: 2094079 - DNA, 15 bp, Homo sapiens
ttgaacatcatgaaa

SEQ ID NO: 2094080 - DNA, 15 bp, Homo sapiens
tgaacatcatgaaat

SEQ ID NO: 2094081 - DNA, 15 bp, Homo sapiens
gaacatcatgaaatc

SEQ ID NO: 2094082 - DNA, 15 bp, Homo sapiens
aacatcatgaaatca

SEQ ID NO: 2094083 - DNA, 15 bp, Homo sapiens
acatcatgaaatcat

SEQ ID NO: 2094084 - DNA, 15 bp, Homo sapiens
catcatgaaatcata

SEQ ID NO: 2094085 - DNA, 15 bp, Homo sapiens
atcatgaaatcatac

SEQ ID NO: 2094086 - DNA, 15 bp, Homo sapiens
tcatgaaatcatact

SEQ ID NO: 2094087 - DNA, 15 bp, Homo sapiens
catgaaatcatacta

SEQ ID NO: 2094088 - DNA, 15 bp, Homo sapiens
atgaaatcatactac

SEQ ID NO: 2094089 - DNA, 15 bp, Homo sapiens
tgaaatcatactacg

SEQ ID NO: 2094090 - DNA, 15 bp, Homo sapiens
gaaatcatactacgt

SEQ ID NO: 2094091 - DNA, 15 bp, Homo sapiens
aaatcatactacgtg

SEQ ID NO: 2094092 - DNA, 15 bp, Homo sapiens
aatcatactacgtgc

SEQ ID NO: 2094093 - DNA, 15 bp, Homo sapiens
atcatactacgtgca

SEQ ID NO: 2094094 - DNA, 15 bp, Homo sapiens
tcatactacgtgcat

SEQ ID NO: 2094095 - DNA, 15 bp, Homo sapiens
catactacgtgcatt

SEQ ID NO: 2094096 - DNA, 15 bp, Homo sapiens
atactacgtgcattg

SEQ ID NO: 2094097 - DNA, 15 bp, Homo sapiens
tactacgtgcattgt

SEQ ID NO: 2094098 - DNA, 15 bp, Homo sapiens
actacgtgcattgtt

SEQ ID NO: 2094099 - DNA, 15 bp, Homo sapiens
ctacgtgcattgttt

SEQ ID NO: 2094100 - DNA, 15 bp, Homo sapiens
tacgtgcattgtttt

SEQ ID NO: 2094101 - DNA, 15 bp, Homo sapiens
acgtgcattgttttg

SEQ ID NO: 2094102 - DNA, 15 bp, Homo sapiens
cgtgcattgttttgc

SEQ ID NO: 2094103 - DNA, 15 bp, Homo sapiens
gtgcattgttttgca

SEQ ID NO: 2094104 - DNA, 15 bp, Homo sapiens
tgcattgttttgcaa

SEQ ID NO: 2094105 - DNA, 15 bp, Homo sapiens
gcattgttttgcaac

SEQ ID NO: 2094106 - DNA, 15 bp, Homo sapiens
cattgttttgcaact

SEQ ID NO: 2094107 - DNA, 15 bp, Homo sapiens
attgttttgcaactg

SEQ ID NO: 2094108 - DNA, 15 bp, Homo sapiens
ttgttttgcaactgg

SEQ ID NO: 2094109 - DNA, 15 bp, Homo sapiens
tgttttgcaactggc

SEQ ID NO: 2094110 - DNA, 15 bp, Homo sapiens
gttttgcaactggct

SEQ ID NO: 2094111 - DNA, 15 bp, Homo sapiens
ttttgcaactggctt

SEQ ID NO: 2094112 - DNA, 15 bp, Homo sapiens
tttgcaactggcttt

SEQ ID NO: 2094113 - DNA, 15 bp, Homo sapiens
ttgcaactggctttt

SEQ ID NO: 2094114 - DNA, 15 bp, Homo sapiens
tgcaactggcttttt

SEQ ID NO: 2094115 - DNA, 15 bp, Homo sapiens
gcaactggctttttt

SEQ ID NO: 2094116 - DNA, 15 bp, Homo sapiens
caactggcttttttc

SEQ ID NO: 2094117 - DNA, 15 bp, Homo sapiens
aactggcttttttca

SEQ ID NO: 2094118 - DNA, 15 bp, Homo sapiens
actggcttttttcac

SEQ ID NO: 2094119 - DNA, 15 bp, Homo sapiens
ctggcttttttcacc

SEQ ID NO: 2094120 - DNA, 15 bp, Homo sapiens
tggcttttttcacct

SEQ ID NO: 2094121 - DNA, 15 bp, Homo sapiens
ggcttttttcacctt

SEQ ID NO: 2094122 - DNA, 15 bp, Homo sapiens
gcttttttcaccttc

SEQ ID NO: 2094123 - DNA, 15 bp, Homo sapiens
cttttttcaccttcg

SEQ ID NO: 2094124 - DNA, 15 bp, Homo sapiens
ttttttcaccttcgt

SEQ ID NO: 2094125 - DNA, 15 bp, Homo sapiens
tttttcaccttcgtg

SEQ ID NO: 2094126 - DNA, 15 bp, Homo sapiens
ttttcaccttcgtga

SEQ ID NO: 2094127 - DNA, 15 bp, Homo sapiens
tttcaccttcgtgac

SEQ ID NO: 2094128 - DNA, 15 bp, Homo sapiens
ttcaccttcgtgacc

SEQ ID NO: 2094129 - DNA, 15 bp, Homo sapiens
tcaccttcgtgacct

SEQ ID NO: 2094130 - DNA, 15 bp, Homo sapiens
caccttcgtgacctt

SEQ ID NO: 2094131 - DNA, 15 bp, Homo sapiens
accttcgtgaccttt

SEQ ID NO: 2094132 - DNA, 15 bp, Homo sapiens
ccttcgtgacctttt

SEQ ID NO: 2094133 - DNA, 15 bp, Homo sapiens
cttcgtgaccttttc

SEQ ID NO: 2094134 - DNA, 15 bp, Homo sapiens
ttcgtgaccttttct

SEQ ID NO: 2094135 - DNA, 15 bp, Homo sapiens
tcgtgaccttttctc

SEQ ID NO: 2094136 - DNA, 15 bp, Homo sapiens
cgtgaccttttctca

SEQ ID NO: 2094137 - DNA, 15 bp, Homo sapiens
gtgaccttttctcaa

SEQ ID NO: 2094138 - DNA, 15 bp, Homo sapiens
tgaccttttctcaat

SEQ ID NO: 2094139 - DNA, 15 bp, Homo sapiens
gaccttttctcaata

SEQ ID NO: 2094140 - DNA, 15 bp, Homo sapiens
accttttctcaatat

SEQ ID NO: 2094141 - DNA, 15 bp, Homo sapiens
ccttttctcaatatg

SEQ ID NO: 2094142 - DNA, 15 bp, Homo sapiens
cttttctcaatatgt

SEQ ID NO: 2094143 - DNA, 15 bp, Homo sapiens
ttttctcaatatgtg

SEQ ID NO: 2094144 - DNA, 15 bp, Homo sapiens
tttctcaatatgtgt

SEQ ID NO: 2094145 - DNA, 15 bp, Homo sapiens
ttctcaatatgtgtg

SEQ ID NO: 2094146 - DNA, 15 bp, Homo sapiens
tctcaatatgtgtga

SEQ ID NO: 2094147 - DNA, 15 bp, Homo sapiens
ctcaatatgtgtgaa

SEQ ID NO: 2094148 - DNA, 15 bp, Homo sapiens
tcaatatgtgtgaaa

SEQ ID NO: 2094149 - DNA, 15 bp, Homo sapiens
caatatgtgtgaaaa

SEQ ID NO: 2094150 - DNA, 15 bp, Homo sapiens
aatatgtgtgaaaat

SEQ ID NO: 2094151 - DNA, 15 bp, Homo sapiens
atatgtgtgaaaatg

SEQ ID NO: 2094152 - DNA, 15 bp, Homo sapiens
tatgtgtgaaaatga

SEQ ID NO: 2094153 - DNA, 15 bp, Homo sapiens
atgtgtgaaaatgac

SEQ ID NO: 2094154 - DNA, 15 bp, Homo sapiens
tgtgtgaaaatgact

SEQ ID NO: 2094155 - DNA, 15 bp, Homo sapiens
gtgtgaaaatgactg

SEQ ID NO: 2094156 - DNA, 15 bp, Homo sapiens
tgtgaaaatgactgt

SEQ ID NO: 2094157 - DNA, 15 bp, Homo sapiens
gtgaaaatgactgtg

SEQ ID NO: 2094158 - DNA, 15 bp, Homo sapiens
tgaaaatgactgtgt

SEQ ID NO: 2094159 - DNA, 15 bp, Homo sapiens
gaaaatgactgtgtg

SEQ ID NO: 2094160 - DNA, 15 bp, Homo sapiens
aaaatgactgtgtga

SEQ ID NO: 2094161 - DNA, 15 bp, Homo sapiens
aaatgactgtgtgac

SEQ ID NO: 2094162 - DNA, 15 bp, Homo sapiens
aatgactgtgtgact

SEQ ID NO: 2094163 - DNA, 15 bp, Homo sapiens
atgactgtgtgactt

SEQ ID NO: 2094164 - DNA, 15 bp, Homo sapiens
tgactgtgtgacttc

SEQ ID NO: 2094165 - DNA, 15 bp, Homo sapiens
gactgtgtgacttcc

SEQ ID NO: 2094166 - DNA, 15 bp, Homo sapiens
actgtgtgacttccc

SEQ ID NO: 2094167 - DNA, 15 bp, Homo sapiens
ctgtgtgacttccca

SEQ ID NO: 2094168 - DNA, 15 bp, Homo sapiens
tgtgtgacttcccac

SEQ ID NO: 2094169 - DNA, 15 bp, Homo sapiens
gtgtgacttcccact

SEQ ID NO: 2094170 - DNA, 15 bp, Homo sapiens
tgtgacttcccactc

SEQ ID NO: 2094171 - DNA, 15 bp, Homo sapiens
gtgacttcccactcc

SEQ ID NO: 2094172 - DNA, 15 bp, Homo sapiens
tgacttcccactccc

SEQ ID NO: 2094173 - DNA, 15 bp, Homo sapiens
gacttcccactcccc

SEQ ID NO: 2094174 - DNA, 15 bp, Homo sapiens
acttcccactcccca

SEQ ID NO: 2094175 - DNA, 15 bp, Homo sapiens
cttcccactccccac

SEQ ID NO: 2094176 - DNA, 15 bp, Homo sapiens
ttcccactccccact

SEQ ID NO: 2094177 - DNA, 15 bp, Homo sapiens
tcccactccccactc

SEQ ID NO: 2094178 - DNA, 15 bp, Homo sapiens
cccactccccactcc

SEQ ID NO: 2094179 - DNA, 15 bp, Homo sapiens
ccactccccactccc

SEQ ID NO: 2094180 - DNA, 15 bp, Homo sapiens
cactccccactcccc

SEQ ID NO: 2094181 - DNA, 15 bp, Homo sapiens
actccccactccccg

SEQ ID NO: 2094182 - DNA, 15 bp, Homo sapiens
ctccccactccccgt

SEQ ID NO: 2094183 - DNA, 15 bp, Homo sapiens
tccccactccccgtg

SEQ ID NO: 2094184 - DNA, 15 bp, Homo sapiens
ccccactccccgtgg

SEQ ID NO: 2094185 - DNA, 15 bp, Homo sapiens
cccactccccgtggt

SEQ ID NO: 2094186 - DNA, 15 bp, Homo sapiens
ccactccccgtggta

SEQ ID NO: 2094187 - DNA, 15 bp, Homo sapiens
cactccccgtggtag

SEQ ID NO: 2094188 - DNA, 15 bp, Homo sapiens
actccccgtggtagt

SEQ ID NO: 2094189 - DNA, 15 bp, Homo sapiens
ctccccgtggtagtt

SEQ ID NO: 2094190 - DNA, 15 bp, Homo sapiens
tccccgtggtagtta

SEQ ID NO: 2094191 - DNA, 15 bp, Homo sapiens
ccccgtggtagttac

SEQ ID NO: 2094192 - DNA, 15 bp, Homo sapiens
cccgtggtagttact

SEQ ID NO: 2094193 - DNA, 15 bp, Homo sapiens
ccgtggtagttactg

SEQ ID NO: 2094194 - DNA, 15 bp, Homo sapiens
cgtggtagttactgc

SEQ ID NO: 2094195 - DNA, 15 bp, Homo sapiens
gtggtagttactgca

SEQ ID NO: 2094196 - DNA, 15 bp, Homo sapiens
tggtagttactgcaa

SEQ ID NO: 2094197 - DNA, 15 bp, Homo sapiens
ggtagttactgcaaa

SEQ ID NO: 2094198 - DNA, 15 bp, Homo sapiens
gtagttactgcaaag

SEQ ID NO: 2094199 - DNA, 15 bp, Homo sapiens
tagttactgcaaaga

SEQ ID NO: 2094200 - DNA, 15 bp, Homo sapiens
agttactgcaaagac

SEQ ID NO: 2094201 - DNA, 15 bp, Homo sapiens
gttactgcaaagacc

SEQ ID NO: 2094202 - DNA, 15 bp, Homo sapiens
ttactgcaaagaccc

SEQ ID NO: 2094203 - DNA, 15 bp, Homo sapiens
tactgcaaagaccct

SEQ ID NO: 2094204 - DNA, 15 bp, Homo sapiens
actgcaaagaccctg

SEQ ID NO: 2094205 - DNA, 15 bp, Homo sapiens
ctgcaaagaccctga

SEQ ID NO: 2094206 - DNA, 15 bp, Homo sapiens
gcaaagaccctgagg

SEQ ID NO: 2094207 - DNA, 15 bp, Homo sapiens
caaagaccctgaggg

SEQ ID NO: 2094208 - DNA, 15 bp, Homo sapiens
aaagaccctgagggc

SEQ ID NO: 2094209 - DNA, 15 bp, Homo sapiens
aagaccctgagggct

SEQ ID NO: 2094210 - DNA, 15 bp, Homo sapiens
agaccctgagggcta

SEQ ID NO: 2094211 - DNA, 15 bp, Homo sapiens
gaccctgagggctag

SEQ ID NO: 2094212 - DNA, 15 bp, Homo sapiens
accctgagggctagg

SEQ ID NO: 2094213 - DNA, 15 bp, Homo sapiens
ccctgagggctaggg

SEQ ID NO: 2094214 - DNA, 15 bp, Homo sapiens
cctgagggctaggga

SEQ ID NO: 2094215 - DNA, 15 bp, Homo sapiens
ctgagggctagggac

SEQ ID NO: 2094216 - DNA, 15 bp, Homo sapiens
tgagggctagggaca

SEQ ID NO: 2094217 - DNA, 15 bp, Homo sapiens
gagggctagggacaa

SEQ ID NO: 2094218 - DNA, 15 bp, Homo sapiens
agggctagggacaaa

SEQ ID NO: 2094219 - DNA, 15 bp, Homo sapiens
gggctagggacaaat

SEQ ID NO: 2094220 - DNA, 15 bp, Homo sapiens
ggctagggacaaatc

SEQ ID NO: 2094221 - DNA, 15 bp, Homo sapiens
gctagggacaaatcg

SEQ ID NO: 2094222 - DNA, 15 bp, Homo sapiens
ctagggacaaatcgt

SEQ ID NO: 2094223 - DNA, 15 bp, Homo sapiens
tagggacaaatcgta

SEQ ID NO: 2094224 - DNA, 15 bp, Homo sapiens
agggacaaatcgtac

SEQ ID NO: 2094225 - DNA, 15 bp, Homo sapiens
gggacaaatcgtacc

SEQ ID NO: 2094226 - DNA, 15 bp, Homo sapiens
ggacaaatcgtaccc

SEQ ID NO: 2094227 - DNA, 15 bp, Homo sapiens
gacaaatcgtacccc

SEQ ID NO: 2094228 - DNA, 15 bp, Homo sapiens
acaaatcgtacccca

SEQ ID NO: 2094229 - DNA, 15 bp, Homo sapiens
caaatcgtaccccaa

SEQ ID NO: 2094230 - DNA, 15 bp, Homo sapiens
aaatcgtaccccaac

SEQ ID NO: 2094231 - DNA, 15 bp, Homo sapiens
aatcgtaccccaacc

SEQ ID NO: 2094232 - DNA, 15 bp, Homo sapiens
atcgtaccccaaccg

SEQ ID NO: 2094233 - DNA, 15 bp, Homo sapiens
tcgtaccccaaccgg

SEQ ID NO: 2094234 - DNA, 15 bp, Homo sapiens
cgtaccccaaccggt

SEQ ID NO: 2094235 - DNA, 15 bp, Homo sapiens
gtaccccaaccggtg

SEQ ID NO: 2094236 - DNA, 15 bp, Homo sapiens
taccccaaccggtgc

SEQ ID NO: 2094237 - DNA, 15 bp, Homo sapiens
accccaaccggtgcc

SEQ ID NO: 2094238 - DNA, 15 bp, Homo sapiens
ccccaaccggtgccc

SEQ ID NO: 2094239 - DNA, 15 bp, Homo sapiens
cccaaccggtgccca

SEQ ID NO: 2094240 - DNA, 15 bp, Homo sapiens
ccaaccggtgcccag

SEQ ID NO: 2094241 - DNA, 15 bp, Homo sapiens
caaccggtgcccaga

SEQ ID NO: 2094242 - DNA, 15 bp, Homo sapiens
aaccggtgcccagag

SEQ ID NO: 2094243 - DNA, 15 bp, Homo sapiens
accggtgcccagagt

SEQ ID NO: 2094244 - DNA, 15 bp, Homo sapiens
ccggtgcccagagtg

SEQ ID NO: 2094245 - DNA, 15 bp, Homo sapiens
cggtgcccagagtgg

SEQ ID NO: 2094246 - DNA, 15 bp, Homo sapiens
ggtgcccagagtggc

SEQ ID NO: 2094247 - DNA, 15 bp, Homo sapiens
gtgcccagagtggca

SEQ ID NO: 2094248 - DNA, 15 bp, Homo sapiens
tgcccagagtggcaa

SEQ ID NO: 2094249 - DNA, 15 bp, Homo sapiens
gcccagagtggcaaa

SEQ ID NO: 2094250 - DNA, 15 bp, Homo sapiens
cccagagtggcaaaa

SEQ ID NO: 2094251 - DNA, 15 bp, Homo sapiens
ccagagtggcaaaaa

SEQ ID NO: 2094252 - DNA, 15 bp, Homo sapiens
cagagtggcaaaaat

SEQ ID NO: 2094253 - DNA, 15 bp, Homo sapiens
agagtggcaaaaatc

SEQ ID NO: 2094254 - DNA, 15 bp, Homo sapiens
gagtggcaaaaatca

SEQ ID NO: 2094255 - DNA, 15 bp, Homo sapiens
agtggcaaaaatcac

SEQ ID NO: 2094256 - DNA, 15 bp, Homo sapiens
gtggcaaaaatcacc

SEQ ID NO: 2094257 - DNA, 15 bp, Homo sapiens
tggcaaaaatcacca

SEQ ID NO: 2094258 - DNA, 15 bp, Homo sapiens
ggcaaaaatcaccat

SEQ ID NO: 2094259 - DNA, 15 bp, Homo sapiens
gcaaaaatcaccatc

SEQ ID NO: 2094260 - DNA, 15 bp, Homo sapiens
caaaaatcaccatct

SEQ ID NO: 2094261 - DNA, 15 bp, Homo sapiens
aaaaatcaccatctg

SEQ ID NO: 2094262 - DNA, 15 bp, Homo sapiens
aaaatcaccatctgc

SEQ ID NO: 2094263 - DNA, 15 bp, Homo sapiens
aaatcaccatctgca

SEQ ID NO: 2094264 - DNA, 15 bp, Homo sapiens
aatcaccatctgcaa

SEQ ID NO: 2094265 - DNA, 15 bp, Homo sapiens
atcaccatctgcaac

SEQ ID NO: 2094266 - DNA, 15 bp, Homo sapiens
tcaccatctgcaact

SEQ ID NO: 2094267 - DNA, 15 bp, Homo sapiens
caccatctgcaactg

SEQ ID NO: 2094268 - DNA, 15 bp, Homo sapiens
accatctgcaactgg

SEQ ID NO: 2094269 - DNA, 15 bp, Homo sapiens
ccatctgcaactggc

SEQ ID NO: 2094270 - DNA, 15 bp, Homo sapiens
catctgcaactggca

SEQ ID NO: 2094271 - DNA, 15 bp, Homo sapiens
atctgcaactggcag

SEQ ID NO: 2094272 - DNA, 15 bp, Homo sapiens
tctgcaactggcagt

SEQ ID NO: 2094273 - DNA, 15 bp, Homo sapiens
ctgcaactggcagta

SEQ ID NO: 2094274 - DNA, 15 bp, Homo sapiens
tgcaactggcagtag

SEQ ID NO: 2094275 - DNA, 15 bp, Homo sapiens
gcaactggcagtagc

SEQ ID NO: 2094276 - DNA, 15 bp, Homo sapiens
caactggcagtagcc

SEQ ID NO: 2094277 - DNA, 15 bp, Homo sapiens
aactggcagtagcca

SEQ ID NO: 2094278 - DNA, 15 bp, Homo sapiens
actggcagtagccat

SEQ ID NO: 2094279 - DNA, 15 bp, Homo sapiens
ctggcagtagccatt

SEQ ID NO: 2094280 - DNA, 15 bp, Homo sapiens
tggcagtagccattc

SEQ ID NO: 2094281 - DNA, 15 bp, Homo sapiens
ggcagtagccattca

SEQ ID NO: 2094282 - DNA, 15 bp, Homo sapiens
gcagtagccattcac

SEQ ID NO: 2094283 - DNA, 15 bp, Homo sapiens
cagtagccattcacg

SEQ ID NO: 2094284 - DNA, 15 bp, Homo sapiens
agtagccattcacga

SEQ ID NO: 2094285 - DNA, 15 bp, Homo sapiens
gtagccattcacgat

SEQ ID NO: 2094286 - DNA, 15 bp, Homo sapiens
tagccattcacgata

SEQ ID NO: 2094287 - DNA, 15 bp, Homo sapiens
agccattcacgatag

SEQ ID NO: 2094288 - DNA, 15 bp, Homo sapiens
gccattcacgataga

SEQ ID NO: 2094289 - DNA, 15 bp, Homo sapiens
ccattcacgatagat

SEQ ID NO: 2094290 - DNA, 15 bp, Homo sapiens
cattcacgatagatg

SEQ ID NO: 2094291 - DNA, 15 bp, Homo sapiens
attcacgatagatgg

SEQ ID NO: 2094292 - DNA, 15 bp, Homo sapiens
ttcacgatagatgga

SEQ ID NO: 2094293 - DNA, 15 bp, Homo sapiens
tcacgatagatggag

SEQ ID NO: 2094294 - DNA, 15 bp, Homo sapiens
cacgatagatggagt

SEQ ID NO: 2094295 - DNA, 15 bp, Homo sapiens
acgatagatggagtt

SEQ ID NO: 2094296 - DNA, 15 bp, Homo sapiens
cgatagatggagttc

SEQ ID NO: 2094297 - DNA, 15 bp, Homo sapiens
gatagatggagttca

SEQ ID NO: 2094298 - DNA, 15 bp, Homo sapiens
atagatggagttcac

SEQ ID NO: 2094299 - DNA, 15 bp, Homo sapiens
tagatggagttcaca

SEQ ID NO: 2094300 - DNA, 15 bp, Homo sapiens
agatggagttcacat

SEQ ID NO: 2094301 - DNA, 15 bp, Homo sapiens
gatggagttcacatt

SEQ ID NO: 2094302 - DNA, 15 bp, Homo sapiens
atggagttcacattc

SEQ ID NO: 2094303 - DNA, 15 bp, Homo sapiens
tggagttcacattca

SEQ ID NO: 2094304 - DNA, 15 bp, Homo sapiens
ggagttcacattcat

SEQ ID NO: 2094305 - DNA, 15 bp, Homo sapiens
gagttcacattcatt

SEQ ID NO: 2094306 - DNA, 15 bp, Homo sapiens
agttcacattcattg

SEQ ID NO: 2094307 - DNA, 15 bp, Homo sapiens
gttcacattcattgt

SEQ ID NO: 2094308 - DNA, 15 bp, Homo sapiens
ttcacattcattgtg

SEQ ID NO: 2094309 - DNA, 15 bp, Homo sapiens
tcacattcattgtgg

SEQ ID NO: 2094310 - DNA, 15 bp, Homo sapiens
cacattcattgtggc

SEQ ID NO: 2094311 - DNA, 15 bp, Homo sapiens
acattcattgtggct

SEQ ID NO: 2094312 - DNA, 15 bp, Homo sapiens
cattcattgtggctt

SEQ ID NO: 2094313 - DNA, 15 bp, Homo sapiens
attcattgtggcttg

SEQ ID NO: 2094314 - DNA, 15 bp, Homo sapiens
ttcattgtggcttgt

SEQ ID NO: 2094315 - DNA, 15 bp, Homo sapiens
tcattgtggcttgta

SEQ ID NO: 2094316 - DNA, 15 bp, Homo sapiens
cattgtggcttgtat

SEQ ID NO: 2094317 - DNA, 15 bp, Homo sapiens
attgtggcttgtata

SEQ ID NO: 2094318 - DNA, 15 bp, Homo sapiens
ttgtggcttgtatat

SEQ ID NO: 2094319 - DNA, 15 bp, Homo sapiens
tgtggcttgtatatt

SEQ ID NO: 2094320 - DNA, 15 bp, Homo sapiens
gtggcttgtatattc

SEQ ID NO: 2094321 - DNA, 15 bp, Homo sapiens
tggcttgtatattcc

SEQ ID NO: 2094322 - DNA, 15 bp, Homo sapiens
ggcttgtatattcca

SEQ ID NO: 2094323 - DNA, 15 bp, Homo sapiens
gcttgtatattccaa

SEQ ID NO: 2094324 - DNA, 15 bp, Homo sapiens
cttgtatattccaat

SEQ ID NO: 2094325 - DNA, 15 bp, Homo sapiens
ttgtatattccaata

SEQ ID NO: 2094326 - DNA, 15 bp, Homo sapiens
tgtatattccaatat

SEQ ID NO: 2094327 - DNA, 15 bp, Homo sapiens
gtatattccaatata

SEQ ID NO: 2094328 - DNA, 15 bp, Homo sapiens
tatattccaatatac

SEQ ID NO: 2094329 - DNA, 15 bp, Homo sapiens
atattccaatatact

SEQ ID NO: 2094330 - DNA, 15 bp, Homo sapiens
tattccaatatactg

SEQ ID NO: 2094331 - DNA, 15 bp, Homo sapiens
attccaatatactgt

SEQ ID NO: 2094332 - DNA, 15 bp, Homo sapiens
ttccaatatactgta

SEQ ID NO: 2094333 - DNA, 15 bp, Homo sapiens
tccaatatactgtac

SEQ ID NO: 2094334 - DNA, 15 bp, Homo sapiens
ccaatatactgtaca

SEQ ID NO: 2094335 - DNA, 15 bp, Homo sapiens
caatatactgtacat

SEQ ID NO: 2094336 - DNA, 15 bp, Homo sapiens
aatatactgtacatg

SEQ ID NO: 2094337 - DNA, 15 bp, Homo sapiens
atatactgtacatgt

SEQ ID NO: 2094338 - DNA, 15 bp, Homo sapiens
tatactgtacatgtg

SEQ ID NO: 2094339 - DNA, 15 bp, Homo sapiens
atactgtacatgtgc

SEQ ID NO: 2094340 - DNA, 15 bp, Homo sapiens
tactgtacatgtgca

SEQ ID NO: 2094341 - DNA, 15 bp, Homo sapiens
actgtacatgtgcac

SEQ ID NO: 2094342 - DNA, 15 bp, Homo sapiens
ctgtacatgtgcacg

SEQ ID NO: 2094343 - DNA, 15 bp, Homo sapiens
tgtacatgtgcacgt

SEQ ID NO: 2094344 - DNA, 15 bp, Homo sapiens
gtacatgtgcacgtg

SEQ ID NO: 2094345 - DNA, 15 bp, Homo sapiens
tacatgtgcacgtga

SEQ ID NO: 2094346 - DNA, 15 bp, Homo sapiens
acatgtgcacgtgat

SEQ ID NO: 2094347 - DNA, 15 bp, Homo sapiens
catgtgcacgtgatt

SEQ ID NO: 2094348 - DNA, 15 bp, Homo sapiens
atgtgcacgtgattt

SEQ ID NO: 2094349 - DNA, 15 bp, Homo sapiens
tgtgcacgtgatttt

SEQ ID NO: 2094350 - DNA, 15 bp, Homo sapiens
gtgcacgtgatttta

SEQ ID NO: 2094351 - DNA, 15 bp, Homo sapiens
tgcacgtgattttaa

SEQ ID NO: 2094352 - DNA, 15 bp, Homo sapiens
gcacgtgattttaaa

SEQ ID NO: 2094353 - DNA, 15 bp, Homo sapiens
cacgtgattttaaac

SEQ ID NO: 2094354 - DNA, 15 bp, Homo sapiens
acgtgattttaaaca

SEQ ID NO: 2094355 - DNA, 15 bp, Homo sapiens
cgtgattttaaacat

SEQ ID NO: 2094356 - DNA, 15 bp, Homo sapiens
gtgattttaaacatc

SEQ ID NO: 2094357 - DNA, 15 bp, Homo sapiens
attttaaacatcctc

SEQ ID NO: 2094358 - DNA, 15 bp, Homo sapiens
ttttaaacatcctca

SEQ ID NO: 2094359 - DNA, 15 bp, Homo sapiens
tttaaacatcctcat

SEQ ID NO: 2094360 - DNA, 15 bp, Homo sapiens
ttaaacatcctcatc

SEQ ID NO: 2094361 - DNA, 15 bp, Homo sapiens
taaacatcctcatca

SEQ ID NO: 2094362 - DNA, 15 bp, Homo sapiens
aaacatcctcatcat

SEQ ID NO: 2094363 - DNA, 15 bp, Homo sapiens
aacatcctcatcata

SEQ ID NO: 2094364 - DNA, 15 bp, Homo sapiens
acatcctcatcatac

SEQ ID NO: 2094365 - DNA, 15 bp, Homo sapiens
catcctcatcataca

SEQ ID NO: 2094366 - DNA, 15 bp, Homo sapiens
atcctcatcatacag

SEQ ID NO: 2094367 - DNA, 15 bp, Homo sapiens
tcctcatcatacaga

SEQ ID NO: 2094368 - DNA, 15 bp, Homo sapiens
cctcatcatacagaa

SEQ ID NO: 2094369 - DNA, 15 bp, Homo sapiens
ctcatcatacagaag

SEQ ID NO: 2094370 - DNA, 15 bp, Homo sapiens
tcatcatacagaaga

SEQ ID NO: 2094371 - DNA, 15 bp, Homo sapiens
catcatacagaagat

SEQ ID NO: 2094372 - DNA, 15 bp, Homo sapiens
atcatacagaagatt

SEQ ID NO: 2094373 - DNA, 15 bp, Homo sapiens
tcatacagaagattg

SEQ ID NO: 2094374 - DNA, 15 bp, Homo sapiens
catacagaagattgg

SEQ ID NO: 2094375 - DNA, 15 bp, Homo sapiens
atacagaagattgga

SEQ ID NO: 2094376 - DNA, 15 bp, Homo sapiens
tacagaagattggaa

SEQ ID NO: 2094377 - DNA, 15 bp, Homo sapiens
acagaagattggaaa

SEQ ID NO: 2094378 - DNA, 15 bp, Homo sapiens
cagaagattggaaag

SEQ ID NO: 2094379 - DNA, 15 bp, Homo sapiens
agaagattggaaagt

SEQ ID NO: 2094380 - DNA, 15 bp, Homo sapiens
gaagattggaaagtg

SEQ ID NO: 2094381 - DNA, 15 bp, Homo sapiens
aagattggaaagtga

SEQ ID NO: 2094382 - DNA, 15 bp, Homo sapiens
agattggaaagtgag

SEQ ID NO: 2094383 - DNA, 15 bp, Homo sapiens
gattggaaagtgagc

SEQ ID NO: 2094384 - DNA, 15 bp, Homo sapiens
attggaaagtgagca

SEQ ID NO: 2094385 - DNA, 15 bp, Homo sapiens
ttggaaagtgagcag

SEQ ID NO: 2094386 - DNA, 15 bp, Homo sapiens
tggaaagtgagcagt

SEQ ID NO: 2094387 - DNA, 15 bp, Homo sapiens
ggaaagtgagcagtt

SEQ ID NO: 2094388 - DNA, 15 bp, Homo sapiens
gaaagtgagcagttg

SEQ ID NO: 2094389 - DNA, 15 bp, Homo sapiens
aaagtgagcagttgg

SEQ ID NO: 2094390 - DNA, 15 bp, Homo sapiens
aagtgagcagttggt

SEQ ID NO: 2094391 - DNA, 15 bp, Homo sapiens
agtgagcagttggtt

SEQ ID NO: 2094392 - DNA, 15 bp, Homo sapiens
gtgagcagttggttt

SEQ ID NO: 2094393 - DNA, 15 bp, Homo sapiens
tgagcagttggtttt

SEQ ID NO: 2094394 - DNA, 15 bp, Homo sapiens
gagcagttggttttg

SEQ ID NO: 2094395 - DNA, 15 bp, Homo sapiens
agcagttggttttgt

SEQ ID NO: 2094396 - DNA, 15 bp, Homo sapiens
gcagttggttttgtc

SEQ ID NO: 2094397 - DNA, 15 bp, Homo sapiens
cagttggttttgtcg

SEQ ID NO: 2094398 - DNA, 15 bp, Homo sapiens
agttggttttgtcga

SEQ ID NO: 2094399 - DNA, 15 bp, Homo sapiens
gttggttttgtcgag

SEQ ID NO: 2094400 - DNA, 15 bp, Homo sapiens
ttggttttgtcgagt

SEQ ID NO: 2094401 - DNA, 15 bp, Homo sapiens
tggttttgtcgagtc

SEQ ID NO: 2094402 - DNA, 15 bp, Homo sapiens
ggttttgtcgagtct

SEQ ID NO: 2094403 - DNA, 15 bp, Homo sapiens
gttttgtcgagtctg

SEQ ID NO: 2094404 - DNA, 15 bp, Homo sapiens
ttttgtcgagtctgg

SEQ ID NO: 2094405 - DNA, 15 bp, Homo sapiens
tttgtcgagtctggg

SEQ ID NO: 2094406 - DNA, 15 bp, Homo sapiens
ttgtcgagtctgggt

SEQ ID NO: 2094407 - DNA, 15 bp, Homo sapiens
tgtcgagtctgggtc

SEQ ID NO: 2094408 - DNA, 15 bp, Homo sapiens
gtcgagtctgggtct

SEQ ID NO: 2094409 - DNA, 15 bp, Homo sapiens
tcgagtctgggtctc

SEQ ID NO: 2094410 - DNA, 15 bp, Homo sapiens
cgagtctgggtctcg

SEQ ID NO: 2094411 - DNA, 15 bp, Homo sapiens
gagtctgggtctcgc

SEQ ID NO: 2094412 - DNA, 15 bp, Homo sapiens
agtctgggtctcgct

SEQ ID NO: 2094413 - DNA, 15 bp, Homo sapiens
gtctgggtctcgctc

SEQ ID NO: 2094414 - DNA, 15 bp, Homo sapiens
tctgggtctcgctcc

SEQ ID NO: 2094415 - DNA, 15 bp, Homo sapiens
ctgggtctcgctccc

SEQ ID NO: 2094416 - DNA, 15 bp, Homo sapiens
tgggtctcgctcccc

SEQ ID NO: 2094417 - DNA, 15 bp, Homo sapiens
gggtctcgctcccca

SEQ ID NO: 2094418 - DNA, 15 bp, Homo sapiens
ggtctcgctccccag

SEQ ID NO: 2094419 - DNA, 15 bp, Homo sapiens
gtctcgctccccaga

SEQ ID NO: 2094420 - DNA, 15 bp, Homo sapiens
tctcgctccccagag

SEQ ID NO: 2094421 - DNA, 15 bp, Homo sapiens
ctcgctccccagagt

SEQ ID NO: 2094422 - DNA, 15 bp, Homo sapiens
tcgctccccagagtc

SEQ ID NO: 2094423 - DNA, 15 bp, Homo sapiens
cgctccccagagtca

SEQ ID NO: 2094424 - DNA, 15 bp, Homo sapiens
gctccccagagtcag

SEQ ID NO: 2094425 - DNA, 15 bp, Homo sapiens
ctccccagagtcagt

SEQ ID NO: 2094426 - DNA, 15 bp, Homo sapiens
tccccagagtcagtt

SEQ ID NO: 2094427 - DNA, 15 bp, Homo sapiens
ccccagagtcagtta

SEQ ID NO: 2094428 - DNA, 15 bp, Homo sapiens
cccagagtcagttaa

SEQ ID NO: 2094429 - DNA, 15 bp, Homo sapiens
ccagagtcagttaac

SEQ ID NO: 2094430 - DNA, 15 bp, Homo sapiens
cagagtcagttaacc

SEQ ID NO: 2094431 - DNA, 15 bp, Homo sapiens
agagtcagttaacct

SEQ ID NO: 2094432 - DNA, 15 bp, Homo sapiens
gagtcagttaacctg

SEQ ID NO: 2094433 - DNA, 15 bp, Homo sapiens
agtcagttaacctga

SEQ ID NO: 2094434 - DNA, 15 bp, Homo sapiens
gtcagttaacctgac

SEQ ID NO: 2094435 - DNA, 15 bp, Homo sapiens
tcagttaacctgaca

SEQ ID NO: 2094436 - DNA, 15 bp, Homo sapiens
cagttaacctgacag

SEQ ID NO: 2094437 - DNA, 15 bp, Homo sapiens
agttaacctgacagg

SEQ ID NO: 2094438 - DNA, 15 bp, Homo sapiens
gttaacctgacaggt

SEQ ID NO: 2094439 - DNA, 15 bp, Homo sapiens
ttaacctgacaggtt

SEQ ID NO: 2094440 - DNA, 15 bp, Homo sapiens
taacctgacaggttc

SEQ ID NO: 2094441 - DNA, 15 bp, Homo sapiens
aacctgacaggttct

SEQ ID NO: 2094442 - DNA, 15 bp, Homo sapiens
acctgacaggttctg

SEQ ID NO: 2094443 - DNA, 15 bp, Homo sapiens
cctgacaggttctgt

SEQ ID NO: 2094444 - DNA, 15 bp, Homo sapiens
ctgacaggttctgtt

SEQ ID NO: 2094445 - DNA, 15 bp, Homo sapiens
tgacaggttctgttt

SEQ ID NO: 2094446 - DNA, 15 bp, Homo sapiens
gacaggttctgtttt

SEQ ID NO: 2094447 - DNA, 15 bp, Homo sapiens
acaggttctgttttg

SEQ ID NO: 2094448 - DNA, 15 bp, Homo sapiens
caggttctgttttgg

SEQ ID NO: 2094449 - DNA, 15 bp, Homo sapiens
aggttctgttttggg

SEQ ID NO: 2094450 - DNA, 15 bp, Homo sapiens
ggttctgttttgggg

SEQ ID NO: 2094451 - DNA, 15 bp, Homo sapiens
gttctgttttggggt

SEQ ID NO: 2094452 - DNA, 15 bp, Homo sapiens
ttctgttttggggtt

SEQ ID NO: 2094453 - DNA, 15 bp, Homo sapiens
tctgttttggggttg

SEQ ID NO: 2094454 - DNA, 15 bp, Homo sapiens
ctgttttggggttgc

SEQ ID NO: 2094455 - DNA, 15 bp, Homo sapiens
tgttttggggttgcc

SEQ ID NO: 2094456 - DNA, 15 bp, Homo sapiens
gttttggggttgccc

SEQ ID NO: 2094457 - DNA, 15 bp, Homo sapiens
ttttggggttgcccg

SEQ ID NO: 2094458 - DNA, 15 bp, Homo sapiens
tttggggttgcccgg

SEQ ID NO: 2094459 - DNA, 15 bp, Homo sapiens
ttggggttgcccggt

SEQ ID NO: 2094460 - DNA, 15 bp, Homo sapiens
tggggttgcccggtg

SEQ ID NO: 2094461 - DNA, 15 bp, Homo sapiens
ggggttgcccggtgg

SEQ ID NO: 2094462 - DNA, 15 bp, Homo sapiens
gggttgcccggtggt

SEQ ID NO: 2094463 - DNA, 15 bp, Homo sapiens
ggttgcccggtggtg

SEQ ID NO: 2094464 - DNA, 15 bp, Homo sapiens
gttgcccggtggtgg

SEQ ID NO: 2094465 - DNA, 15 bp, Homo sapiens
ttgcccggtggtggc

SEQ ID NO: 2094466 - DNA, 15 bp, Homo sapiens
tgcccggtggtggcc

SEQ ID NO: 2094467 - DNA, 15 bp, Homo sapiens
gcccggtggtggcca

SEQ ID NO: 2094468 - DNA, 15 bp, Homo sapiens
cccggtggtggccac

SEQ ID NO: 2094469 - DNA, 15 bp, Homo sapiens
ccggtggtggccacc

SEQ ID NO: 2094470 - DNA, 15 bp, Homo sapiens
cggtggtggccacca

SEQ ID NO: 2094471 - DNA, 15 bp, Homo sapiens
ggtggtggccaccat

SEQ ID NO: 2094472 - DNA, 15 bp, Homo sapiens
gtggtggccaccatt

SEQ ID NO: 2094473 - DNA, 15 bp, Homo sapiens
tggtggccaccatta

SEQ ID NO: 2094474 - DNA, 15 bp, Homo sapiens
ggtggccaccattat

SEQ ID NO: 2094475 - DNA, 15 bp, Homo sapiens
gtggccaccattatg

SEQ ID NO: 2094476 - DNA, 15 bp, Homo sapiens
tggccaccattatga

SEQ ID NO: 2094477 - DNA, 15 bp, Homo sapiens
ggccaccattatgat

SEQ ID NO: 2094478 - DNA, 15 bp, Homo sapiens
gccaccattatgatt

SEQ ID NO: 2094479 - DNA, 15 bp, Homo sapiens
ccaccattatgattt

SEQ ID NO: 2094480 - DNA, 15 bp, Homo sapiens
caccattatgatttt

SEQ ID NO: 2094481 - DNA, 15 bp, Homo sapiens
accattatgatttta

SEQ ID NO: 2094482 - DNA, 15 bp, Homo sapiens
ccattatgattttaa

SEQ ID NO: 2094483 - DNA, 15 bp, Homo sapiens
cattatgattttaag

SEQ ID NO: 2094484 - DNA, 15 bp, Homo sapiens
attatgattttaagt

SEQ ID NO: 2094485 - DNA, 15 bp, Homo sapiens
ttatgattttaagta

SEQ ID NO: 2094486 - DNA, 15 bp, Homo sapiens
tatgattttaagtag

SEQ ID NO: 2094487 - DNA, 15 bp, Homo sapiens
atgattttaagtagt

SEQ ID NO: 2094488 - DNA, 15 bp, Homo sapiens
tgattttaagtagtt

SEQ ID NO: 2094489 - DNA, 15 bp, Homo sapiens
gattttaagtagttt

SEQ ID NO: 2094490 - DNA, 15 bp, Homo sapiens
attttaagtagtttg

SEQ ID NO: 2094491 - DNA, 15 bp, Homo sapiens
ttttaagtagtttgc

SEQ ID NO: 2094492 - DNA, 15 bp, Homo sapiens
tttaagtagtttgcc

SEQ ID NO: 2094493 - DNA, 15 bp, Homo sapiens
ttaagtagtttgcct

SEQ ID NO: 2094494 - DNA, 15 bp, Homo sapiens
taagtagtttgcctg

SEQ ID NO: 2094495 - DNA, 15 bp, Homo sapiens
aagtagtttgcctgt

SEQ ID NO: 2094496 - DNA, 15 bp, Homo sapiens
agtagtttgcctgtg

SEQ ID NO: 2094497 - DNA, 15 bp, Homo sapiens
gtagtttgcctgtgt

SEQ ID NO: 2094498 - DNA, 15 bp, Homo sapiens
tagtttgcctgtgtg

SEQ ID NO: 2094499 - DNA, 15 bp, Homo sapiens
agtttgcctgtgtgc

SEQ ID NO: 2094500 - DNA, 15 bp, Homo sapiens
gtttgcctgtgtgcc

SEQ ID NO: 2094501 - DNA, 15 bp, Homo sapiens
tttgcctgtgtgccg

SEQ ID NO: 2094502 - DNA, 15 bp, Homo sapiens
ttgcctgtgtgccga

SEQ ID NO: 2094503 - DNA, 15 bp, Homo sapiens
tgcctgtgtgccgat

SEQ ID NO: 2094504 - DNA, 15 bp, Homo sapiens
gcctgtgtgccgatt

SEQ ID NO: 2094505 - DNA, 15 bp, Homo sapiens
cctgtgtgccgattg

SEQ ID NO: 2094506 - DNA, 15 bp, Homo sapiens
ctgtgtgccgattgt

SEQ ID NO: 2094507 - DNA, 15 bp, Homo sapiens
tgtgtgccgattgtt

SEQ ID NO: 2094508 - DNA, 15 bp, Homo sapiens
gtgtgccgattgttt

SEQ ID NO: 2094509 - DNA, 15 bp, Homo sapiens
tgtgccgattgtttt

SEQ ID NO: 2094510 - DNA, 15 bp, Homo sapiens
gtgccgattgttttc

SEQ ID NO: 2094511 - DNA, 15 bp, Homo sapiens
tgccgattgttttca

SEQ ID NO: 2094512 - DNA, 15 bp, Homo sapiens
gccgattgttttcag

SEQ ID NO: 2094513 - DNA, 15 bp, Homo sapiens
ccgattgttttcagg

SEQ ID NO: 2094514 - DNA, 15 bp, Homo sapiens
cgattgttttcagga

SEQ ID NO: 2094515 - DNA, 15 bp, Homo sapiens
gattgttttcaggag

SEQ ID NO: 2094516 - DNA, 15 bp, Homo sapiens
attgttttcaggagg

SEQ ID NO: 2094517 - DNA, 15 bp, Homo sapiens
ttgttttcaggaggt

SEQ ID NO: 2094518 - DNA, 15 bp, Homo sapiens
tgttttcaggaggtg

SEQ ID NO: 2094519 - DNA, 15 bp, Homo sapiens
gttttcaggaggtgc

SEQ ID NO: 2094520 - DNA, 15 bp, Homo sapiens
ttttcaggaggtgcc

SEQ ID NO: 2094521 - DNA, 15 bp, Homo sapiens
tttcaggaggtgcct

SEQ ID NO: 2094522 - DNA, 15 bp, Homo sapiens
ttcaggaggtgcctg

SEQ ID NO: 2094523 - DNA, 15 bp, Homo sapiens
tcaggaggtgcctgt

SEQ ID NO: 2094524 - DNA, 15 bp, Homo sapiens
caggaggtgcctgtt

SEQ ID NO: 2094525 - DNA, 15 bp, Homo sapiens
aggaggtgcctgttg

SEQ ID NO: 2094526 - DNA, 15 bp, Homo sapiens
ggaggtgcctgttga

SEQ ID NO: 2094527 - DNA, 15 bp, Homo sapiens
gaggtgcctgttgac

SEQ ID NO: 2094528 - DNA, 15 bp, Homo sapiens
aggtgcctgttgact

SEQ ID NO: 2094529 - DNA, 15 bp, Homo sapiens
ggtgcctgttgactt

SEQ ID NO: 2094530 - DNA, 15 bp, Homo sapiens
gtgcctgttgacttc

SEQ ID NO: 2094531 - DNA, 15 bp, Homo sapiens
tgcctgttgacttcc

SEQ ID NO: 2094532 - DNA, 15 bp, Homo sapiens
gcctgttgacttccg

SEQ ID NO: 2094533 - DNA, 15 bp, Homo sapiens
cctgttgacttccgc

SEQ ID NO: 2094534 - DNA, 15 bp, Homo sapiens
ctgttgacttccgct

SEQ ID NO: 2094535 - DNA, 15 bp, Homo sapiens
tgttgacttccgctc

SEQ ID NO: 2094536 - DNA, 15 bp, Homo sapiens
gttgacttccgctct

SEQ ID NO: 2094537 - DNA, 15 bp, Homo sapiens
ttgacttccgctctg

SEQ ID NO: 2094538 - DNA, 15 bp, Homo sapiens
tgacttccgctctga

SEQ ID NO: 2094539 - DNA, 15 bp, Homo sapiens
gacttccgctctgag

SEQ ID NO: 2094540 - DNA, 15 bp, Homo sapiens
acttccgctctgagg

SEQ ID NO: 2094541 - DNA, 15 bp, Homo sapiens
cttccgctctgaggg

SEQ ID NO: 2094542 - DNA, 15 bp, Homo sapiens
ttccgctctgagggc

SEQ ID NO: 2094543 - DNA, 15 bp, Homo sapiens
tccgctctgagggct

SEQ ID NO: 2094544 - DNA, 15 bp, Homo sapiens
ccgctctgagggctg

SEQ ID NO: 2094545 - DNA, 15 bp, Homo sapiens
cgctctgagggctga

SEQ ID NO: 2094546 - DNA, 15 bp, Homo sapiens
gctctgagggctgag

SEQ ID NO: 2094547 - DNA, 15 bp, Homo sapiens
ctctgagggctgagc

SEQ ID NO: 2094548 - DNA, 15 bp, Homo sapiens
tctgagggctgagca

SEQ ID NO: 2094549 - DNA, 15 bp, Homo sapiens
ctgagggctgagcac

SEQ ID NO: 2094550 - DNA, 15 bp, Homo sapiens
tgagggctgagcaca

SEQ ID NO: 2094551 - DNA, 15 bp, Homo sapiens
gagggctgagcacag

SEQ ID NO: 2094552 - DNA, 15 bp, Homo sapiens
agggctgagcacagc

SEQ ID NO: 2094553 - DNA, 15 bp, Homo sapiens
gggctgagcacagcc

SEQ ID NO: 2094554 - DNA, 15 bp, Homo sapiens
ggctgagcacagccg

SEQ ID NO: 2094555 - DNA, 15 bp, Homo sapiens
gctgagcacagccgc

SEQ ID NO: 2094556 - DNA, 15 bp, Homo sapiens
ctgagcacagccgcg

SEQ ID NO: 2094557 - DNA, 15 bp, Homo sapiens
tgagcacagccgcgc

SEQ ID NO: 2094558 - DNA, 15 bp, Homo sapiens
gagcacagccgcgcc

SEQ ID NO: 2094559 - DNA, 15 bp, Homo sapiens
agcacagccgcgccc

SEQ ID NO: 2094560 - DNA, 15 bp, Homo sapiens
gcacagccgcgcccc

SEQ ID NO: 2094561 - DNA, 15 bp, Homo sapiens
cacagccgcgcccca

SEQ ID NO: 2094562 - DNA, 15 bp, Homo sapiens
acagccgcgccccac

SEQ ID NO: 2094563 - DNA, 15 bp, Homo sapiens
cagccgcgccccacc

SEQ ID NO: 2094564 - DNA, 15 bp, Homo sapiens
agccgcgccccacct

SEQ ID NO: 2094565 - DNA, 15 bp, Homo sapiens
gccgcgccccacctc

SEQ ID NO: 2094566 - DNA, 15 bp, Homo sapiens
ccgcgccccacctct

SEQ ID NO: 2094567 - DNA, 15 bp, Homo sapiens
cgcgccccacctctc

SEQ ID NO: 2094568 - DNA, 15 bp, Homo sapiens
gcgccccacctctca

SEQ ID NO: 2094569 - DNA, 15 bp, Homo sapiens
cgccccacctctcac

SEQ ID NO: 2094570 - DNA, 15 bp, Homo sapiens
gccccacctctcacc

SEQ ID NO: 2094571 - DNA, 15 bp, Homo sapiens
ccccacctctcacct

SEQ ID NO: 2094572 - DNA, 15 bp, Homo sapiens
cccacctctcacctc

SEQ ID NO: 2094573 - DNA, 15 bp, Homo sapiens
ccacctctcacctca

SEQ ID NO: 2094574 - DNA, 15 bp, Homo sapiens
cacctctcacctcac

SEQ ID NO: 2094575 - DNA, 15 bp, Homo sapiens
acctctcacctcacc

SEQ ID NO: 2094576 - DNA, 15 bp, Homo sapiens
cctctcacctcacct

SEQ ID NO: 2094577 - DNA, 15 bp, Homo sapiens
ctctcacctcacctg

SEQ ID NO: 2094578 - DNA, 15 bp, Homo sapiens
tctcacctcacctgc

SEQ ID NO: 2094579 - DNA, 15 bp, Homo sapiens
ctcacctcacctgct

SEQ ID NO: 2094580 - DNA, 15 bp, Homo sapiens
tcacctcacctgctc

SEQ ID NO: 2094581 - DNA, 15 bp, Homo sapiens
cacctcacctgctca

SEQ ID NO: 2094582 - DNA, 15 bp, Homo sapiens
acctcacctgctcac

SEQ ID NO: 2094583 - DNA, 15 bp, Homo sapiens
cctcacctgctcacc

SEQ ID NO: 2094584 - DNA, 15 bp, Homo sapiens
ctcacctgctcacca

SEQ ID NO: 2094585 - DNA, 15 bp, Homo sapiens
tcacctgctcaccac

SEQ ID NO: 2094586 - DNA, 15 bp, Homo sapiens
cacctgctcaccaca

SEQ ID NO: 2094587 - DNA, 15 bp, Homo sapiens
acctgctcaccacac

SEQ ID NO: 2094588 - DNA, 15 bp, Homo sapiens
cctgctcaccacact

SEQ ID NO: 2094589 - DNA, 15 bp, Homo sapiens
ctgctcaccacactt

SEQ ID NO: 2094590 - DNA, 15 bp, Homo sapiens
tgctcaccacacttc

SEQ ID NO: 2094591 - DNA, 15 bp, Homo sapiens
gctcaccacacttct

SEQ ID NO: 2094592 - DNA, 15 bp, Homo sapiens
ctcaccacacttctt

SEQ ID NO: 2094593 - DNA, 15 bp, Homo sapiens
tcaccacacttcttt

SEQ ID NO: 2094594 - DNA, 15 bp, Homo sapiens
caccacacttctttt

SEQ ID NO: 2094595 - DNA, 15 bp, Homo sapiens
accacacttcttttc

SEQ ID NO: 2094596 - DNA, 15 bp, Homo sapiens
ccacacttcttttcc

SEQ ID NO: 2094597 - DNA, 15 bp, Homo sapiens
cacacttcttttcca

SEQ ID NO: 2094598 - DNA, 15 bp, Homo sapiens
acacttcttttccag

SEQ ID NO: 2094599 - DNA, 15 bp, Homo sapiens
cacttcttttccaga

SEQ ID NO: 2094600 - DNA, 15 bp, Homo sapiens
acttcttttccagat

SEQ ID NO: 2094601 - DNA, 15 bp, Homo sapiens
cttcttttccagatt

SEQ ID NO: 2094602 - DNA, 15 bp, Homo sapiens
ttcttttccagattc

SEQ ID NO: 2094603 - DNA, 15 bp, Homo sapiens
tcttttccagattca

SEQ ID NO: 2094604 - DNA, 15 bp, Homo sapiens
cttttccagattcag

SEQ ID NO: 2094605 - DNA, 15 bp, Homo sapiens
ttttccagattcagg

SEQ ID NO: 2094606 - DNA, 15 bp, Homo sapiens
tttccagattcaggc

SEQ ID NO: 2094607 - DNA, 15 bp, Homo sapiens
ttccagattcaggct

SEQ ID NO: 2094608 - DNA, 15 bp, Homo sapiens
tccagattcaggctg

SEQ ID NO: 2094609 - DNA, 15 bp, Homo sapiens
ccagattcaggctgg

SEQ ID NO: 2094610 - DNA, 15 bp, Homo sapiens
cagattcaggctgga

SEQ ID NO: 2094611 - DNA, 15 bp, Homo sapiens
agattcaggctggaa

SEQ ID NO: 2094612 - DNA, 15 bp, Homo sapiens
gattcaggctggaaa

SEQ ID NO: 2094613 - DNA, 15 bp, Homo sapiens
attcaggctggaaat

SEQ ID NO: 2094614 - DNA, 15 bp, Homo sapiens
ttcaggctggaaatg

SEQ ID NO: 2094615 - DNA, 15 bp, Homo sapiens
tcaggctggaaatgt

SEQ ID NO: 2094616 - DNA, 15 bp, Homo sapiens
caggctggaaatgtg

SEQ ID NO: 2094617 - DNA, 15 bp, Homo sapiens
aggctggaaatgtgg

SEQ ID NO: 2094618 - DNA, 15 bp, Homo sapiens
ggctggaaatgtggg

SEQ ID NO: 2094619 - DNA, 15 bp, Homo sapiens
gctggaaatgtgggt

SEQ ID NO: 2094620 - DNA, 15 bp, Homo sapiens
ctggaaatgtgggtg

SEQ ID NO: 2094621 - DNA, 15 bp, Homo sapiens
tggaaatgtgggtga

SEQ ID NO: 2094622 - DNA, 15 bp, Homo sapiens
ggaaatgtgggtgat

SEQ ID NO: 2094623 - DNA, 15 bp, Homo sapiens
gaaatgtgggtgata

SEQ ID NO: 2094624 - DNA, 15 bp, Homo sapiens
aaatgtgggtgatag

SEQ ID NO: 2094625 - DNA, 15 bp, Homo sapiens
aatgtgggtgatagg

SEQ ID NO: 2094626 - DNA, 15 bp, Homo sapiens
atgtgggtgataggc

SEQ ID NO: 2094627 - DNA, 15 bp, Homo sapiens
tgtgggtgataggcc

SEQ ID NO: 2094628 - DNA, 15 bp, Homo sapiens
gtgggtgataggcct

SEQ ID NO: 2094629 - DNA, 15 bp, Homo sapiens
tgggtgataggccta

SEQ ID NO: 2094630 - DNA, 15 bp, Homo sapiens
gggtgataggcctat

SEQ ID NO: 2094631 - DNA, 15 bp, Homo sapiens
ggtgataggcctatt

SEQ ID NO: 2094632 - DNA, 15 bp, Homo sapiens
gtgataggcctattt

SEQ ID NO: 2094633 - DNA, 15 bp, Homo sapiens
tgataggcctatttt

SEQ ID NO: 2094634 - DNA, 15 bp, Homo sapiens
gataggcctattttg

SEQ ID NO: 2094635 - DNA, 15 bp, Homo sapiens
ataggcctattttgc

SEQ ID NO: 2094636 - DNA, 15 bp, Homo sapiens
taggcctattttgca

SEQ ID NO: 2094637 - DNA, 15 bp, Homo sapiens
aggcctattttgcag

SEQ ID NO: 2094638 - DNA, 15 bp, Homo sapiens
ggcctattttgcaga

SEQ ID NO: 2094639 - DNA, 15 bp, Homo sapiens
gcctattttgcagat

SEQ ID NO: 2094640 - DNA, 15 bp, Homo sapiens
cctattttgcagatg

SEQ ID NO: 2094641 - DNA, 15 bp, Homo sapiens
ctattttgcagatga

SEQ ID NO: 2094642 - DNA, 15 bp, Homo sapiens
tattttgcagatgaa

SEQ ID NO: 2094643 - DNA, 15 bp, Homo sapiens
attttgcagatgaaa

SEQ ID NO: 2094644 - DNA, 15 bp, Homo sapiens
ttttgcagatgaaag

SEQ ID NO: 2094645 - DNA, 15 bp, Homo sapiens
tttgcagatgaaaga

SEQ ID NO: 2094646 - DNA, 15 bp, Homo sapiens
ttgcagatgaaagaa

SEQ ID NO: 2094647 - DNA, 15 bp, Homo sapiens
tgcagatgaaagaac

SEQ ID NO: 2094648 - DNA, 15 bp, Homo sapiens
gcagatgaaagaact

SEQ ID NO: 2094649 - DNA, 15 bp, Homo sapiens
cagatgaaagaactg

SEQ ID NO: 2094650 - DNA, 15 bp, Homo sapiens
agatgaaagaactga

SEQ ID NO: 2094651 - DNA, 15 bp, Homo sapiens
gatgaaagaactgag

SEQ ID NO: 2094652 - DNA, 15 bp, Homo sapiens
atgaaagaactgagt

SEQ ID NO: 2094653 - DNA, 15 bp, Homo sapiens
tgaaagaactgagtc

SEQ ID NO: 2094654 - DNA, 15 bp, Homo sapiens
gaaagaactgagtcc

SEQ ID NO: 2094655 - DNA, 15 bp, Homo sapiens
aaagaactgagtccc

SEQ ID NO: 2094656 - DNA, 15 bp, Homo sapiens
aagaactgagtccct

SEQ ID NO: 2094657 - DNA, 15 bp, Homo sapiens
agaactgagtcccta

SEQ ID NO: 2094658 - DNA, 15 bp, Homo sapiens
gaactgagtccctag

SEQ ID NO: 2094659 - DNA, 15 bp, Homo sapiens
aactgagtccctagc

SEQ ID NO: 2094660 - DNA, 15 bp, Homo sapiens
actgagtccctagcg

SEQ ID NO: 2094661 - DNA, 15 bp, Homo sapiens
ctgagtccctagcga

SEQ ID NO: 2094662 - DNA, 15 bp, Homo sapiens
tgagtccctagcgaa

SEQ ID NO: 2094663 - DNA, 15 bp, Homo sapiens
gagtccctagcgaag

SEQ ID NO: 2094664 - DNA, 15 bp, Homo sapiens
agtccctagcgaagt

SEQ ID NO: 2094665 - DNA, 15 bp, Homo sapiens
gtccctagcgaagtt

SEQ ID NO: 2094666 - DNA, 15 bp, Homo sapiens
tccctagcgaagtta

SEQ ID NO: 2094667 - DNA, 15 bp, Homo sapiens
ccctagcgaagttac

SEQ ID NO: 2094668 - DNA, 15 bp, Homo sapiens
cctagcgaagttaca

SEQ ID NO: 2094669 - DNA, 15 bp, Homo sapiens
ctagcgaagttacac

SEQ ID NO: 2094670 - DNA, 15 bp, Homo sapiens
tagcgaagttacaca

SEQ ID NO: 2094671 - DNA, 15 bp, Homo sapiens
agcgaagttacacat

SEQ ID NO: 2094672 - DNA, 15 bp, Homo sapiens
gcgaagttacacatt

SEQ ID NO: 2094673 - DNA, 15 bp, Homo sapiens
cgaagttacacattc

SEQ ID NO: 2094674 - DNA, 15 bp, Homo sapiens
gaagttacacattca

SEQ ID NO: 2094675 - DNA, 15 bp, Homo sapiens
aagttacacattcag

SEQ ID NO: 2094676 - DNA, 15 bp, Homo sapiens
agttacacattcagg

SEQ ID NO: 2094677 - DNA, 15 bp, Homo sapiens
gttacacattcaggg

SEQ ID NO: 2094678 - DNA, 15 bp, Homo sapiens
ttacacattcagggg

SEQ ID NO: 2094679 - DNA, 15 bp, Homo sapiens
tacacattcaggggt

SEQ ID NO: 2094680 - DNA, 15 bp, Homo sapiens
acacattcaggggtc

SEQ ID NO: 2094681 - DNA, 15 bp, Homo sapiens
cacattcaggggtct

SEQ ID NO: 2094682 - DNA, 15 bp, Homo sapiens
acattcaggggtctg

SEQ ID NO: 2094683 - DNA, 15 bp, Homo sapiens
cattcaggggtctgg

SEQ ID NO: 2094684 - DNA, 15 bp, Homo sapiens
attcaggggtctggg

SEQ ID NO: 2094685 - DNA, 15 bp, Homo sapiens
ttcaggggtctggga

SEQ ID NO: 2094686 - DNA, 15 bp, Homo sapiens
tcaggggtctgggag

SEQ ID NO: 2094687 - DNA, 15 bp, Homo sapiens
caggggtctgggagg

SEQ ID NO: 2094688 - DNA, 15 bp, Homo sapiens
aggggtctgggaggg

SEQ ID NO: 2094689 - DNA, 15 bp, Homo sapiens
ggggtctgggagggg

SEQ ID NO: 2094690 - DNA, 15 bp, Homo sapiens
gggtctgggaggggg

SEQ ID NO: 2094691 - DNA, 15 bp, Homo sapiens
ggtctgggaggggga

SEQ ID NO: 2094692 - DNA, 15 bp, Homo sapiens
gtctgggagggggaa

SEQ ID NO: 2094693 - DNA, 15 bp, Homo sapiens
tctgggagggggaag

SEQ ID NO: 2094694 - DNA, 15 bp, Homo sapiens
ctgggagggggaagc

SEQ ID NO: 2094695 - DNA, 15 bp, Homo sapiens
tgggagggggaagct

SEQ ID NO: 2094696 - DNA, 15 bp, Homo sapiens
gggagggggaagctg

SEQ ID NO: 2094697 - DNA, 15 bp, Homo sapiens
ggagggggaagctgt

SEQ ID NO: 2094698 - DNA, 15 bp, Homo sapiens
gagggggaagctgtg

SEQ ID NO: 2094699 - DNA, 15 bp, Homo sapiens
agggggaagctgtgg

SEQ ID NO: 2094700 - DNA, 15 bp, Homo sapiens
gggggaagctgtggt

SEQ ID NO: 2094701 - DNA, 15 bp, Homo sapiens
ggggaagctgtggta

SEQ ID NO: 2094702 - DNA, 15 bp, Homo sapiens
gggaagctgtggtag

SEQ ID NO: 2094703 - DNA, 15 bp, Homo sapiens
ggaagctgtggtagg

SEQ ID NO: 2094704 - DNA, 15 bp, Homo sapiens
gaagctgtggtaggc

SEQ ID NO: 2094705 - DNA, 15 bp, Homo sapiens
aagctgtggtaggca

SEQ ID NO: 2094706 - DNA, 15 bp, Homo sapiens
agctgtggtaggcat

SEQ ID NO: 2094707 - DNA, 15 bp, Homo sapiens
gctgtggtaggcatt

SEQ ID NO: 2094708 - DNA, 15 bp, Homo sapiens
ctgtggtaggcattc

SEQ ID NO: 2094709 - DNA, 15 bp, Homo sapiens
tgtggtaggcattct

SEQ ID NO: 2094710 - DNA, 15 bp, Homo sapiens
gtggtaggcattctc

SEQ ID NO: 2094711 - DNA, 15 bp, Homo sapiens
tggtaggcattctct

SEQ ID NO: 2094712 - DNA, 15 bp, Homo sapiens
ggtaggcattctctc

SEQ ID NO: 2094713 - DNA, 15 bp, Homo sapiens
gtaggcattctctct

SEQ ID NO: 2094714 - DNA, 15 bp, Homo sapiens
taggcattctctctg

SEQ ID NO: 2094715 - DNA, 15 bp, Homo sapiens
aggcattctctctgt

SEQ ID NO: 2094716 - DNA, 15 bp, Homo sapiens
ggcattctctctgtg

SEQ ID NO: 2094717 - DNA, 15 bp, Homo sapiens
gcattctctctgtgt

SEQ ID NO: 2094718 - DNA, 15 bp, Homo sapiens
cattctctctgtgtg

SEQ ID NO: 2094719 - DNA, 15 bp, Homo sapiens
attctctctgtgtgt

SEQ ID NO: 2094720 - DNA, 15 bp, Homo sapiens
ttctctctgtgtgtc

SEQ ID NO: 2094721 - DNA, 15 bp, Homo sapiens
tctctctgtgtgtct

SEQ ID NO: 2094722 - DNA, 15 bp, Homo sapiens
ctctctgtgtgtcta

SEQ ID NO: 2094723 - DNA, 15 bp, Homo sapiens
tctctgtgtgtctac

SEQ ID NO: 2094724 - DNA, 15 bp, Homo sapiens
ctctgtgtgtctaca

SEQ ID NO: 2094725 - DNA, 15 bp, Homo sapiens
tctgtgtgtctacat

SEQ ID NO: 2094726 - DNA, 15 bp, Homo sapiens
ctgtgtgtctacata

SEQ ID NO: 2094727 - DNA, 15 bp, Homo sapiens
tgtgtgtctacatag

SEQ ID NO: 2094728 - DNA, 15 bp, Homo sapiens
gtgtgtctacatagc

SEQ ID NO: 2094729 - DNA, 15 bp, Homo sapiens
tgtgtctacatagcc

SEQ ID NO: 2094730 - DNA, 15 bp, Homo sapiens
gtgtctacatagcct

SEQ ID NO: 2094731 - DNA, 15 bp, Homo sapiens
tgtctacatagcctg

SEQ ID NO: 2094732 - DNA, 15 bp, Homo sapiens
gtctacatagcctgc

SEQ ID NO: 2094733 - DNA, 15 bp, Homo sapiens
tctacatagcctgcc

SEQ ID NO: 2094734 - DNA, 15 bp, Homo sapiens
ctacatagcctgccc

SEQ ID NO: 2094735 - DNA, 15 bp, Homo sapiens
tacatagcctgccct

SEQ ID NO: 2094736 - DNA, 15 bp, Homo sapiens
acatagcctgccctc

SEQ ID NO: 2094737 - DNA, 15 bp, Homo sapiens
catagcctgccctct

SEQ ID NO: 2094738 - DNA, 15 bp, Homo sapiens
atagcctgccctctt

SEQ ID NO: 2094739 - DNA, 15 bp, Homo sapiens
tagcctgccctcttc

SEQ ID NO: 2094740 - DNA, 15 bp, Homo sapiens
agcctgccctcttcc

SEQ ID NO: 2094741 - DNA, 15 bp, Homo sapiens
gcctgccctcttccc

SEQ ID NO: 2094742 - DNA, 15 bp, Homo sapiens
cctgccctcttccca

SEQ ID NO: 2094743 - DNA, 15 bp, Homo sapiens
ctgccctcttcccac

SEQ ID NO: 2094744 - DNA, 15 bp, Homo sapiens
tgccctcttcccacc

SEQ ID NO: 2094745 - DNA, 15 bp, Homo sapiens
gccctcttcccaccg

SEQ ID NO: 2094746 - DNA, 15 bp, Homo sapiens
ccctcttcccaccgt

SEQ ID NO: 2094747 - DNA, 15 bp, Homo sapiens
cctcttcccaccgtg

SEQ ID NO: 2094748 - DNA, 15 bp, Homo sapiens
ctcttcccaccgtgc

SEQ ID NO: 2094749 - DNA, 15 bp, Homo sapiens
tcttcccaccgtgcc

SEQ ID NO: 2094750 - DNA, 15 bp, Homo sapiens
cttcccaccgtgcca

SEQ ID NO: 2094751 - DNA, 15 bp, Homo sapiens
ttcccaccgtgccag

SEQ ID NO: 2094752 - DNA, 15 bp, Homo sapiens
tcccaccgtgccagt

SEQ ID NO: 2094753 - DNA, 15 bp, Homo sapiens
cccaccgtgccagta

SEQ ID NO: 2094754 - DNA, 15 bp, Homo sapiens
ccaccgtgccagtat

SEQ ID NO: 2094755 - DNA, 15 bp, Homo sapiens
caccgtgccagtatt

SEQ ID NO: 2094756 - DNA, 15 bp, Homo sapiens
accgtgccagtattg

SEQ ID NO: 2094757 - DNA, 15 bp, Homo sapiens
ccgtgccagtattgg

SEQ ID NO: 2094758 - DNA, 15 bp, Homo sapiens
cgtgccagtattggg

SEQ ID NO: 2094759 - DNA, 15 bp, Homo sapiens
gtgccagtattggga

SEQ ID NO: 2094760 - DNA, 15 bp, Homo sapiens
tgccagtattgggaa

SEQ ID NO: 2094761 - DNA, 15 bp, Homo sapiens
gccagtattgggaat

SEQ ID NO: 2094762 - DNA, 15 bp, Homo sapiens
ccagtattgggaatt

SEQ ID NO: 2094763 - DNA, 15 bp, Homo sapiens
cagtattgggaattg

SEQ ID NO: 2094764 - DNA, 15 bp, Homo sapiens
agtattgggaattga

SEQ ID NO: 2094765 - DNA, 15 bp, Homo sapiens
gtattgggaattgag

SEQ ID NO: 2094766 - DNA, 15 bp, Homo sapiens
tattgggaattgagt

SEQ ID NO: 2094767 - DNA, 15 bp, Homo sapiens
attgggaattgagtg

SEQ ID NO: 2094768 - DNA, 15 bp, Homo sapiens
ttgggaattgagtgg

SEQ ID NO: 2094769 - DNA, 15 bp, Homo sapiens
tgggaattgagtggc

SEQ ID NO: 2094770 - DNA, 15 bp, Homo sapiens
gggaattgagtggcc

SEQ ID NO: 2094771 - DNA, 15 bp, Homo sapiens
ggaattgagtggccg

SEQ ID NO: 2094772 - DNA, 15 bp, Homo sapiens
gaattgagtggccgt

SEQ ID NO: 2094773 - DNA, 15 bp, Homo sapiens
aattgagtggccgtg

SEQ ID NO: 2094774 - DNA, 15 bp, Homo sapiens
attgagtggccgtgc

SEQ ID NO: 2094775 - DNA, 15 bp, Homo sapiens
ttgagtggccgtgcg

SEQ ID NO: 2094776 - DNA, 15 bp, Homo sapiens
tgagtggccgtgcgt

SEQ ID NO: 2094777 - DNA, 15 bp, Homo sapiens
gagtggccgtgcgtg

SEQ ID NO: 2094778 - DNA, 15 bp, Homo sapiens
agtggccgtgcgtgc

SEQ ID NO: 2094779 - DNA, 15 bp, Homo sapiens
gtggccgtgcgtgca

SEQ ID NO: 2094780 - DNA, 15 bp, Homo sapiens
tggccgtgcgtgcac

SEQ ID NO: 2094781 - DNA, 15 bp, Homo sapiens
ggccgtgcgtgcacc

SEQ ID NO: 2094782 - DNA, 15 bp, Homo sapiens
gccgtgcgtgcacca

SEQ ID NO: 2094783 - DNA, 15 bp, Homo sapiens
ccgtgcgtgcaccag

SEQ ID NO: 2094784 - DNA, 15 bp, Homo sapiens
cgtgcgtgcaccagg

SEQ ID NO: 2094785 - DNA, 15 bp, Homo sapiens
gtgcgtgcaccaggg

SEQ ID NO: 2094786 - DNA, 15 bp, Homo sapiens
tgcgtgcaccagggt

SEQ ID NO: 2094787 - DNA, 15 bp, Homo sapiens
gcgtgcaccagggtg

SEQ ID NO: 2094788 - DNA, 15 bp, Homo sapiens
cgtgcaccagggtga

SEQ ID NO: 2094789 - DNA, 15 bp, Homo sapiens
gtgcaccagggtgag

SEQ ID NO: 2094790 - DNA, 15 bp, Homo sapiens
tgcaccagggtgagt

SEQ ID NO: 2094791 - DNA, 15 bp, Homo sapiens
gcaccagggtgagtt

SEQ ID NO: 2094792 - DNA, 15 bp, Homo sapiens
caccagggtgagtta

SEQ ID NO: 2094793 - DNA, 15 bp, Homo sapiens
accagggtgagttag

SEQ ID NO: 2094794 - DNA, 15 bp, Homo sapiens
ccagggtgagttagg

SEQ ID NO: 2094795 - DNA, 15 bp, Homo sapiens
cagggtgagttaggt

SEQ ID NO: 2094796 - DNA, 15 bp, Homo sapiens
agggtgagttaggtg

SEQ ID NO: 2094797 - DNA, 15 bp, Homo sapiens
gggtgagttaggtgt

SEQ ID NO: 2094798 - DNA, 15 bp, Homo sapiens
ggtgagttaggtgtg

SEQ ID NO: 2094799 - DNA, 15 bp, Homo sapiens
gtgagttaggtgtgc

SEQ ID NO: 2094800 - DNA, 15 bp, Homo sapiens
tgagttaggtgtgca

SEQ ID NO: 2094801 - DNA, 15 bp, Homo sapiens
gagttaggtgtgcag

SEQ ID NO: 2094802 - DNA, 15 bp, Homo sapiens
agttaggtgtgcagc

SEQ ID NO: 2094803 - DNA, 15 bp, Homo sapiens
gttaggtgtgcagca

SEQ ID NO: 2094804 - DNA, 15 bp, Homo sapiens
ttaggtgtgcagcac

SEQ ID NO: 2094805 - DNA, 15 bp, Homo sapiens
taggtgtgcagcacc

SEQ ID NO: 2094806 - DNA, 15 bp, Homo sapiens
aggtgtgcagcacct

SEQ ID NO: 2094807 - DNA, 15 bp, Homo sapiens
ggtgtgcagcacctg

SEQ ID NO: 2094808 - DNA, 15 bp, Homo sapiens
gtgtgcagcacctga

SEQ ID NO: 2094809 - DNA, 15 bp, Homo sapiens
tgtgcagcacctgag

SEQ ID NO: 2094810 - DNA, 15 bp, Homo sapiens
gtgcagcacctgaga

SEQ ID NO: 2094811 - DNA, 15 bp, Homo sapiens
tgcagcacctgagag

SEQ ID NO: 2094812 - DNA, 15 bp, Homo sapiens
gcagcacctgagagg

SEQ ID NO: 2094813 - DNA, 15 bp, Homo sapiens
cagcacctgagaggg

SEQ ID NO: 2094814 - DNA, 15 bp, Homo sapiens
agcacctgagagggc

SEQ ID NO: 2094815 - DNA, 15 bp, Homo sapiens
gcacctgagagggct

SEQ ID NO: 2094816 - DNA, 15 bp, Homo sapiens
cacctgagagggctt

SEQ ID NO: 2094817 - DNA, 15 bp, Homo sapiens
acctgagagggctta

SEQ ID NO: 2094818 - DNA, 15 bp, Homo sapiens
cctgagagggcttat

SEQ ID NO: 2094819 - DNA, 15 bp, Homo sapiens
ctgagagggcttatt

SEQ ID NO: 2094820 - DNA, 15 bp, Homo sapiens
tgagagggcttatta

SEQ ID NO: 2094821 - DNA, 15 bp, Homo sapiens
gagagggcttattaa

SEQ ID NO: 2094822 - DNA, 15 bp, Homo sapiens
agagggcttattaag

SEQ ID NO: 2094823 - DNA, 15 bp, Homo sapiens
gagggcttattaagg

SEQ ID NO: 2094824 - DNA, 15 bp, Homo sapiens
agggcttattaaggg

SEQ ID NO: 2094825 - DNA, 15 bp, Homo sapiens
gggcttattaagggg

SEQ ID NO: 2094826 - DNA, 15 bp, Homo sapiens
ggcttattaaggggc

SEQ ID NO: 2094827 - DNA, 15 bp, Homo sapiens
gcttattaaggggcc

SEQ ID NO: 2094828 - DNA, 15 bp, Homo sapiens
cttattaaggggcct

SEQ ID NO: 2094829 - DNA, 15 bp, Homo sapiens
ttattaaggggcctt

SEQ ID NO: 2094830 - DNA, 15 bp, Homo sapiens
tattaaggggccttg

SEQ ID NO: 2094831 - DNA, 15 bp, Homo sapiens
attaaggggccttgg

SEQ ID NO: 2094832 - DNA, 15 bp, Homo sapiens
ttaaggggccttggc

SEQ ID NO: 2094833 - DNA, 15 bp, Homo sapiens
taaggggccttggcc

SEQ ID NO: 2094834 - DNA, 15 bp, Homo sapiens
aaggggccttggccc

SEQ ID NO: 2094835 - DNA, 15 bp, Homo sapiens
aggggccttggccct

SEQ ID NO: 2094836 - DNA, 15 bp, Homo sapiens
ggggccttggcccta

SEQ ID NO: 2094837 - DNA, 15 bp, Homo sapiens
gggccttggccctac

SEQ ID NO: 2094838 - DNA, 15 bp, Homo sapiens
ggccttggccctact

SEQ ID NO: 2094839 - DNA, 15 bp, Homo sapiens
gccttggccctactg

SEQ ID NO: 2094840 - DNA, 15 bp, Homo sapiens
ccttggccctactga

SEQ ID NO: 2094841 - DNA, 15 bp, Homo sapiens
cttggccctactgag

SEQ ID NO: 2094842 - DNA, 15 bp, Homo sapiens
ttggccctactgagg

SEQ ID NO: 2094843 - DNA, 15 bp, Homo sapiens
tggccctactgaggg

SEQ ID NO: 2094844 - DNA, 15 bp, Homo sapiens
ggccctactgagggg

SEQ ID NO: 2094845 - DNA, 15 bp, Homo sapiens
gccctactgaggggt

SEQ ID NO: 2094846 - DNA, 15 bp, Homo sapiens
ccctactgaggggtc

SEQ ID NO: 2094847 - DNA, 15 bp, Homo sapiens
cctactgaggggtct

SEQ ID NO: 2094848 - DNA, 15 bp, Homo sapiens
ctactgaggggtcta

SEQ ID NO: 2094849 - DNA, 15 bp, Homo sapiens
tactgaggggtctag

SEQ ID NO: 2094850 - DNA, 15 bp, Homo sapiens
actgaggggtctagt

SEQ ID NO: 2094851 - DNA, 15 bp, Homo sapiens
ctgaggggtctagtc

SEQ ID NO: 2094852 - DNA, 15 bp, Homo sapiens
tgaggggtctagtct

SEQ ID NO: 2094853 - DNA, 15 bp, Homo sapiens
gaggggtctagtctg

SEQ ID NO: 2094854 - DNA, 15 bp, Homo sapiens
aggggtctagtctgg

SEQ ID NO: 2094855 - DNA, 15 bp, Homo sapiens
ggggtctagtctgga

SEQ ID NO: 2094856 - DNA, 15 bp, Homo sapiens
gggtctagtctggat

SEQ ID NO: 2094857 - DNA, 15 bp, Homo sapiens
ggtctagtctggatg

SEQ ID NO: 2094858 - DNA, 15 bp, Homo sapiens
gtctagtctggatgc

SEQ ID NO: 2094859 - DNA, 15 bp, Homo sapiens
tctagtctggatgct

SEQ ID NO: 2094860 - DNA, 15 bp, Homo sapiens
ctagtctggatgctt

SEQ ID NO: 2094861 - DNA, 15 bp, Homo sapiens
tagtctggatgcttc

SEQ ID NO: 2094862 - DNA, 15 bp, Homo sapiens
agtctggatgcttcc

SEQ ID NO: 2094863 - DNA, 15 bp, Homo sapiens
gtctggatgcttccc

SEQ ID NO: 2094864 - DNA, 15 bp, Homo sapiens
tctggatgcttcccc

SEQ ID NO: 2094865 - DNA, 15 bp, Homo sapiens
ctggatgcttccccc

SEQ ID NO: 2094866 - DNA, 15 bp, Homo sapiens
tggatgcttcccccc

SEQ ID NO: 2094867 - DNA, 15 bp, Homo sapiens
ggatgcttcccccca

SEQ ID NO: 2094868 - DNA, 15 bp, Homo sapiens
gatgcttccccccag

SEQ ID NO: 2094869 - DNA, 15 bp, Homo sapiens
atgcttccccccagg

SEQ ID NO: 2094870 - DNA, 15 bp, Homo sapiens
tgcttccccccaggt

SEQ ID NO: 2094871 - DNA, 15 bp, Homo sapiens
gcttccccccaggtt

SEQ ID NO: 2094872 - DNA, 15 bp, Homo sapiens
cttccccccaggttg

SEQ ID NO: 2094873 - DNA, 15 bp, Homo sapiens
ttccccccaggttga

SEQ ID NO: 2094874 - DNA, 15 bp, Homo sapiens
tccccccaggttgac

SEQ ID NO: 2094875 - DNA, 15 bp, Homo sapiens
ccccccaggttgact

SEQ ID NO: 2094876 - DNA, 15 bp, Homo sapiens
cccccaggttgactt

SEQ ID NO: 2094877 - DNA, 15 bp, Homo sapiens
ccccaggttgacttc

SEQ ID NO: 2094878 - DNA, 15 bp, Homo sapiens
cccaggttgacttct

SEQ ID NO: 2094879 - DNA, 15 bp, Homo sapiens
ccaggttgacttctg

SEQ ID NO: 2094880 - DNA, 15 bp, Homo sapiens
caggttgacttctgg

SEQ ID NO: 2094881 - DNA, 15 bp, Homo sapiens
aggttgacttctggc

SEQ ID NO: 2094882 - DNA, 15 bp, Homo sapiens
ggttgacttctggca

SEQ ID NO: 2094883 - DNA, 15 bp, Homo sapiens
gttgacttctggcat

SEQ ID NO: 2094884 - DNA, 15 bp, Homo sapiens
ttgacttctggcatt

SEQ ID NO: 2094885 - DNA, 15 bp, Homo sapiens
tgacttctggcattc

SEQ ID NO: 2094886 - DNA, 15 bp, Homo sapiens
gacttctggcattcc

SEQ ID NO: 2094887 - DNA, 15 bp, Homo sapiens
acttctggcattccg

SEQ ID NO: 2094888 - DNA, 15 bp, Homo sapiens
cttctggcattccga

SEQ ID NO: 2094889 - DNA, 15 bp, Homo sapiens
ttctggcattccgat

SEQ ID NO: 2094890 - DNA, 15 bp, Homo sapiens
tctggcattccgatc

SEQ ID NO: 2094891 - DNA, 15 bp, Homo sapiens
ctggcattccgatca

SEQ ID NO: 2094892 - DNA, 15 bp, Homo sapiens
tggcattccgatcag

SEQ ID NO: 2094893 - DNA, 15 bp, Homo sapiens
ggcattccgatcagt

SEQ ID NO: 2094894 - DNA, 15 bp, Homo sapiens
gcattccgatcagtg

SEQ ID NO: 2094895 - DNA, 15 bp, Homo sapiens
cattccgatcagtgc

SEQ ID NO: 2094896 - DNA, 15 bp, Homo sapiens
attccgatcagtgca

SEQ ID NO: 2094897 - DNA, 15 bp, Homo sapiens
ttccgatcagtgcaa

SEQ ID NO: 2094898 - DNA, 15 bp, Homo sapiens
tccgatcagtgcaac

SEQ ID NO: 2094899 - DNA, 15 bp, Homo sapiens
ccgatcagtgcaaca

SEQ ID NO: 2094900 - DNA, 15 bp, Homo sapiens
cgatcagtgcaacat

SEQ ID NO: 2094901 - DNA, 15 bp, Homo sapiens
gatcagtgcaacatg

SEQ ID NO: 2094902 - DNA, 15 bp, Homo sapiens
atcagtgcaacatga

SEQ ID NO: 2094903 - DNA, 15 bp, Homo sapiens
tcagtgcaacatgat

SEQ ID NO: 2094904 - DNA, 15 bp, Homo sapiens
cagtgcaacatgatc

SEQ ID NO: 2094905 - DNA, 15 bp, Homo sapiens
agtgcaacatgatca

SEQ ID NO: 2094906 - DNA, 15 bp, Homo sapiens
gtgcaacatgatcaa

SEQ ID NO: 2094907 - DNA, 15 bp, Homo sapiens
tgcaacatgatcaat

SEQ ID NO: 2094908 - DNA, 15 bp, Homo sapiens
gcaacatgatcaatg

SEQ ID NO: 2094909 - DNA, 15 bp, Homo sapiens
caacatgatcaatgg

SEQ ID NO: 2094910 - DNA, 15 bp, Homo sapiens
aacatgatcaatgga

SEQ ID NO: 2094911 - DNA, 15 bp, Homo sapiens
acatgatcaatggaa

SEQ ID NO: 2094912 - DNA, 15 bp, Homo sapiens
catgatcaatggaac

SEQ ID NO: 2094913 - DNA, 15 bp, Homo sapiens
atgatcaatggaact

SEQ ID NO: 2094914 - DNA, 15 bp, Homo sapiens
tgatcaatggaactt

SEQ ID NO: 2094915 - DNA, 15 bp, Homo sapiens
gatcaatggaacttc

SEQ ID NO: 2094916 - DNA, 15 bp, Homo sapiens
atcaatggaacttct

SEQ ID NO: 2094917 - DNA, 15 bp, Homo sapiens
tcaatggaacttctg

SEQ ID NO: 2094918 - DNA, 15 bp, Homo sapiens
caatggaacttctgg

SEQ ID NO: 2094919 - DNA, 15 bp, Homo sapiens
aatggaacttctggg

SEQ ID NO: 2094920 - DNA, 15 bp, Homo sapiens
atggaacttctgggc

SEQ ID NO: 2094921 - DNA, 15 bp, Homo sapiens
tggaacttctgggca

SEQ ID NO: 2094922 - DNA, 15 bp, Homo sapiens
ggaacttctgggcaa

SEQ ID NO: 2094923 - DNA, 15 bp, Homo sapiens
gaacttctgggcaaa

SEQ ID NO: 2094924 - DNA, 15 bp, Homo sapiens
aacttctgggcaaat

SEQ ID NO: 2094925 - DNA, 15 bp, Homo sapiens
acttctgggcaaatg

SEQ ID NO: 2094926 - DNA, 15 bp, Homo sapiens
cttctgggcaaatgt

SEQ ID NO: 2094927 - DNA, 15 bp, Homo sapiens
ttctgggcaaatgtg

SEQ ID NO: 2094928 - DNA, 15 bp, Homo sapiens
tctgggcaaatgtgg

SEQ ID NO: 2094929 - DNA, 15 bp, Homo sapiens
ctgggcaaatgtggc

SEQ ID NO: 2094930 - DNA, 15 bp, Homo sapiens
tgggcaaatgtggcc

SEQ ID NO: 2094931 - DNA, 15 bp, Homo sapiens
gggcaaatgtggccg

SEQ ID NO: 2094932 - DNA, 15 bp, Homo sapiens
ggcaaatgtggccgc

SEQ ID NO: 2094933 - DNA, 15 bp, Homo sapiens
gcaaatgtggccgcc

SEQ ID NO: 2094934 - DNA, 15 bp, Homo sapiens
caaatgtggccgccc

SEQ ID NO: 2094935 - DNA, 15 bp, Homo sapiens
aaatgtggccgccct

SEQ ID NO: 2094936 - DNA, 15 bp, Homo sapiens
aatgtggccgccctt

SEQ ID NO: 2094937 - DNA, 15 bp, Homo sapiens
atgtggccgcccttc

SEQ ID NO: 2094938 - DNA, 15 bp, Homo sapiens
tgtggccgcccttca

SEQ ID NO: 2094939 - DNA, 15 bp, Homo sapiens
gtggccgcccttcat

SEQ ID NO: 2094940 - DNA, 15 bp, Homo sapiens
tggccgcccttcatg

SEQ ID NO: 2094941 - DNA, 15 bp, Homo sapiens
ggccgcccttcatga

SEQ ID NO: 2094942 - DNA, 15 bp, Homo sapiens
gccgcccttcatgac

SEQ ID NO: 2094943 - DNA, 15 bp, Homo sapiens
ccgcccttcatgact

SEQ ID NO: 2094944 - DNA, 15 bp, Homo sapiens
cgcccttcatgactc

SEQ ID NO: 2094945 - DNA, 15 bp, Homo sapiens
gcccttcatgactcc

SEQ ID NO: 2094946 - DNA, 15 bp, Homo sapiens
cccttcatgactcct

SEQ ID NO: 2094947 - DNA, 15 bp, Homo sapiens
ccttcatgactcctg

SEQ ID NO: 2094948 - DNA, 15 bp, Homo sapiens
cttcatgactcctga

SEQ ID NO: 2094949 - DNA, 15 bp, Homo sapiens
ttcatgactcctgag

SEQ ID NO: 2094950 - DNA, 15 bp, Homo sapiens
tcatgactcctgagt

SEQ ID NO: 2094951 - DNA, 15 bp, Homo sapiens
catgactcctgagtc

SEQ ID NO: 2094952 - DNA, 15 bp, Homo sapiens
atgactcctgagtcc

SEQ ID NO: 2094953 - DNA, 15 bp, Homo sapiens
tgactcctgagtcct

SEQ ID NO: 2094954 - DNA, 15 bp, Homo sapiens
gactcctgagtcctc

SEQ ID NO: 2094955 - DNA, 15 bp, Homo sapiens
actcctgagtcctcg

SEQ ID NO: 2094956 - DNA, 15 bp, Homo sapiens
ctcctgagtcctcgc

SEQ ID NO: 2094957 - DNA, 15 bp, Homo sapiens
tcctgagtcctcgct

SEQ ID NO: 2094958 - DNA, 15 bp, Homo sapiens
cctgagtcctcgctg

SEQ ID NO: 2094959 - DNA, 15 bp, Homo sapiens
ctgagtcctcgctgg

SEQ ID NO: 2094960 - DNA, 15 bp, Homo sapiens
tgagtcctcgctgga

SEQ ID NO: 2094961 - DNA, 15 bp, Homo sapiens
gagtcctcgctggag

SEQ ID NO: 2094962 - DNA, 15 bp, Homo sapiens
agtcctcgctggagt

SEQ ID NO: 2094963 - DNA, 15 bp, Homo sapiens
gtcctcgctggagtt

SEQ ID NO: 2094964 - DNA, 15 bp, Homo sapiens
tcctcgctggagttc

SEQ ID NO: 2094965 - DNA, 15 bp, Homo sapiens
cctcgctggagttct

SEQ ID NO: 2094966 - DNA, 15 bp, Homo sapiens
ctcgctggagttcta

SEQ ID NO: 2094967 - DNA, 15 bp, Homo sapiens
tcgctggagttctac

SEQ ID NO: 2094968 - DNA, 15 bp, Homo sapiens
cgctggagttctaca

SEQ ID NO: 2094969 - DNA, 15 bp, Homo sapiens
gctggagttctacag

SEQ ID NO: 2094970 - DNA, 15 bp, Homo sapiens
ctggagttctacagc

SEQ ID NO: 2094971 - DNA, 15 bp, Homo sapiens
tggagttctacagcc

SEQ ID NO: 2094972 - DNA, 15 bp, Homo sapiens
ggagttctacagccc

SEQ ID NO: 2094973 - DNA, 15 bp, Homo sapiens
gagttctacagcccg

SEQ ID NO: 2094974 - DNA, 15 bp, Homo sapiens
agttctacagcccgg

SEQ ID NO: 2094975 - DNA, 15 bp, Homo sapiens
gttctacagcccgga

SEQ ID NO: 2094976 - DNA, 15 bp, Homo sapiens
ttctacagcccggag

SEQ ID NO: 2094977 - DNA, 15 bp, Homo sapiens
tctacagcccggagg

SEQ ID NO: 2094978 - DNA, 15 bp, Homo sapiens
ctacagcccggaggc

SEQ ID NO: 2094979 - DNA, 15 bp, Homo sapiens
tacagcccggaggcc

SEQ ID NO: 2094980 - DNA, 15 bp, Homo sapiens
acagcccggaggcct

SEQ ID NO: 2094981 - DNA, 15 bp, Homo sapiens
cagcccggaggcctg

SEQ ID NO: 2094982 - DNA, 15 bp, Homo sapiens
agcccggaggcctgc

SEQ ID NO: 2094983 - DNA, 15 bp, Homo sapiens
gcccggaggcctgcc

SEQ ID NO: 2094984 - DNA, 15 bp, Homo sapiens
cccggaggcctgccg

SEQ ID NO: 2094985 - DNA, 15 bp, Homo sapiens
ccggaggcctgccgg

SEQ ID NO: 2094986 - DNA, 15 bp, Homo sapiens
cggaggcctgccggt

SEQ ID NO: 2094987 - DNA, 15 bp, Homo sapiens
ggaggcctgccggta

SEQ ID NO: 2094988 - DNA, 15 bp, Homo sapiens
gaggcctgccggtaa

SEQ ID NO: 2094989 - DNA, 15 bp, Homo sapiens
aggcctgccggtaat

SEQ ID NO: 2094990 - DNA, 15 bp, Homo sapiens
ggcctgccggtaatc

SEQ ID NO: 2094991 - DNA, 15 bp, Homo sapiens
gcctgccggtaatca

SEQ ID NO: 2094992 - DNA, 15 bp, Homo sapiens
cctgccggtaatcac

SEQ ID NO: 2094993 - DNA, 15 bp, Homo sapiens
ctgccggtaatcact

SEQ ID NO: 2094994 - DNA, 15 bp, Homo sapiens
tgccggtaatcactg

SEQ ID NO: 2094995 - DNA, 15 bp, Homo sapiens
gccggtaatcactgg

SEQ ID NO: 2094996 - DNA, 15 bp, Homo sapiens
ccggtaatcactggg

SEQ ID NO: 2094997 - DNA, 15 bp, Homo sapiens
cggtaatcactggga

SEQ ID NO: 2094998 - DNA, 15 bp, Homo sapiens
ggtaatcactgggac

SEQ ID NO: 2094999 - DNA, 15 bp, Homo sapiens
gtaatcactgggact

SEQ ID NO: 2095000 - DNA, 15 bp, Homo sapiens
taatcactgggactc

SEQ ID NO: 2095001 - DNA, 15 bp, Homo sapiens
aatcactgggactcg

SEQ ID NO: 2095002 - DNA, 15 bp, Homo sapiens
atcactgggactcgg

SEQ ID NO: 2095003 - DNA, 15 bp, Homo sapiens
tcactgggactcggg

SEQ ID NO: 2095004 - DNA, 15 bp, Homo sapiens
cactgggactcgggg

SEQ ID NO: 2095005 - DNA, 15 bp, Homo sapiens
actgggactcggggc

SEQ ID NO: 2095006 - DNA, 15 bp, Homo sapiens
ctgggactcggggcc

SEQ ID NO: 2095007 - DNA, 15 bp, Homo sapiens
tgggactcggggcct

SEQ ID NO: 2095008 - DNA, 15 bp, Homo sapiens
gggactcggggcctc

SEQ ID NO: 2095009 - DNA, 15 bp, Homo sapiens
ggactcggggcctcc

SEQ ID NO: 2095010 - DNA, 15 bp, Homo sapiens
gactcggggcctcct

SEQ ID NO: 2095011 - DNA, 15 bp, Homo sapiens
actcggggcctcctg

SEQ ID NO: 2095012 - DNA, 15 bp, Homo sapiens
ctcggggcctcctgg

SEQ ID NO: 2095013 - DNA, 15 bp, Homo sapiens
tcggggcctcctggg

SEQ ID NO: 2095014 - DNA, 15 bp, Homo sapiens
cggggcctcctgggt

SEQ ID NO: 2095015 - DNA, 15 bp, Homo sapiens
ggggcctcctgggtt

SEQ ID NO: 2095016 - DNA, 15 bp, Homo sapiens
gggcctcctgggttt

SEQ ID NO: 2095017 - DNA, 15 bp, Homo sapiens
ggcctcctgggtttc

SEQ ID NO: 2095018 - DNA, 15 bp, Homo sapiens
gcctcctgggtttcc

SEQ ID NO: 2095019 - DNA, 15 bp, Homo sapiens
cctcctgggtttcct

SEQ ID NO: 2095020 - DNA, 15 bp, Homo sapiens
ctcctgggtttcctg

SEQ ID NO: 2095021 - DNA, 15 bp, Homo sapiens
tcctgggtttcctgg

SEQ ID NO: 2095022 - DNA, 15 bp, Homo sapiens
cctgggtttcctggg

SEQ ID NO: 2095023 - DNA, 15 bp, Homo sapiens
ctgggtttcctgggt

SEQ ID NO: 2095024 - DNA, 15 bp, Homo sapiens
tgggtttcctgggta

SEQ ID NO: 2095025 - DNA, 15 bp, Homo sapiens
gggtttcctgggtag

SEQ ID NO: 2095026 - DNA, 15 bp, Homo sapiens
ggtttcctgggtagc

SEQ ID NO: 2095027 - DNA, 15 bp, Homo sapiens
gtttcctgggtagct

SEQ ID NO: 2095028 - DNA, 15 bp, Homo sapiens
tttcctgggtagctc

SEQ ID NO: 2095029 - DNA, 15 bp, Homo sapiens
ttcctgggtagctca

SEQ ID NO: 2095030 - DNA, 15 bp, Homo sapiens
tcctgggtagctcat

SEQ ID NO: 2095031 - DNA, 15 bp, Homo sapiens
cctgggtagctcatg

SEQ ID NO: 2095032 - DNA, 15 bp, Homo sapiens
ctgggtagctcatgg

SEQ ID NO: 2095033 - DNA, 15 bp, Homo sapiens
tgggtagctcatggc

SEQ ID NO: 2095034 - DNA, 15 bp, Homo sapiens
gggtagctcatggcc

SEQ ID NO: 2095035 - DNA, 15 bp, Homo sapiens
ggtagctcatggcca

SEQ ID NO: 2095036 - DNA, 15 bp, Homo sapiens
gtagctcatggccaa

SEQ ID NO: 2095037 - DNA, 15 bp, Homo sapiens
tagctcatggccaaa

SEQ ID NO: 2095038 - DNA, 15 bp, Homo sapiens
agctcatggccaaat

SEQ ID NO: 2095039 - DNA, 15 bp, Homo sapiens
gctcatggccaaatt

SEQ ID NO: 2095040 - DNA, 15 bp, Homo sapiens
ctcatggccaaattc

SEQ ID NO: 2095041 - DNA, 15 bp, Homo sapiens
tcatggccaaattct

SEQ ID NO: 2095042 - DNA, 15 bp, Homo sapiens
catggccaaattctg

SEQ ID NO: 2095043 - DNA, 15 bp, Homo sapiens
atggccaaattctgt

SEQ ID NO: 2095044 - DNA, 15 bp, Homo sapiens
tggccaaattctgtg

SEQ ID NO: 2095045 - DNA, 15 bp, Homo sapiens
ggccaaattctgtgg

SEQ ID NO: 2095046 - DNA, 15 bp, Homo sapiens
gccaaattctgtggt

SEQ ID NO: 2095047 - DNA, 15 bp, Homo sapiens
ccaaattctgtggtg

SEQ ID NO: 2095048 - DNA, 15 bp, Homo sapiens
caaattctgtggtgt

SEQ ID NO: 2095049 - DNA, 15 bp, Homo sapiens
aaattctgtggtgtt

SEQ ID NO: 2095050 - DNA, 15 bp, Homo sapiens
aattctgtggtgttg

SEQ ID NO: 2095051 - DNA, 15 bp, Homo sapiens
attctgtggtgttgg

SEQ ID NO: 2095052 - DNA, 15 bp, Homo sapiens
ttctgtggtgttggc

SEQ ID NO: 2095053 - DNA, 15 bp, Homo sapiens
tctgtggtgttggct

SEQ ID NO: 2095054 - DNA, 15 bp, Homo sapiens
ctgtggtgttggctg

SEQ ID NO: 2095055 - DNA, 15 bp, Homo sapiens
tgtggtgttggctgt

SEQ ID NO: 2095056 - DNA, 15 bp, Homo sapiens
gtggtgttggctgtg

SEQ ID NO: 2095057 - DNA, 15 bp, Homo sapiens
tggtgttggctgtgc

SEQ ID NO: 2095058 - DNA, 15 bp, Homo sapiens
ggtgttggctgtgca

SEQ ID NO: 2095059 - DNA, 15 bp, Homo sapiens
gtgttggctgtgcac

SEQ ID NO: 2095060 - DNA, 15 bp, Homo sapiens
tgttggctgtgcact

SEQ ID NO: 2095061 - DNA, 15 bp, Homo sapiens
gttggctgtgcactt

SEQ ID NO: 2095062 - DNA, 15 bp, Homo sapiens
ttggctgtgcacttg

SEQ ID NO: 2095063 - DNA, 15 bp, Homo sapiens
tggctgtgcacttgg

SEQ ID NO: 2095064 - DNA, 15 bp, Homo sapiens
ggctgtgcacttgga

SEQ ID NO: 2095065 - DNA, 15 bp, Homo sapiens
gctgtgcacttggaa

SEQ ID NO: 2095066 - DNA, 15 bp, Homo sapiens
ctgtgcacttggaaa

SEQ ID NO: 2095067 - DNA, 15 bp, Homo sapiens
tgtgcacttggaaag

SEQ ID NO: 2095068 - DNA, 15 bp, Homo sapiens
gtgcacttggaaagc

SEQ ID NO: 2095069 - DNA, 15 bp, Homo sapiens
tgcacttggaaagca

SEQ ID NO: 2095070 - DNA, 15 bp, Homo sapiens
gcacttggaaagcat

SEQ ID NO: 2095071 - DNA, 15 bp, Homo sapiens
acttggaaagcattt

SEQ ID NO: 2095072 - DNA, 15 bp, Homo sapiens
cttggaaagcatttt

SEQ ID NO: 2095073 - DNA, 15 bp, Homo sapiens
ttggaaagcattttg

SEQ ID NO: 2095074 - DNA, 15 bp, Homo sapiens
tggaaagcattttga

SEQ ID NO: 2095075 - DNA, 15 bp, Homo sapiens
ggaaagcattttgac

SEQ ID NO: 2095076 - DNA, 15 bp, Homo sapiens
gaaagcattttgact

SEQ ID NO: 2095077 - DNA, 15 bp, Homo sapiens
aaagcattttgactc

SEQ ID NO: 2095078 - DNA, 15 bp, Homo sapiens
aagcattttgactca

SEQ ID NO: 2095079 - DNA, 15 bp, Homo sapiens
agcattttgactcat

SEQ ID NO: 2095080 - DNA, 15 bp, Homo sapiens
gcattttgactcatc

SEQ ID NO: 2095081 - DNA, 15 bp, Homo sapiens
cattttgactcatcg

SEQ ID NO: 2095082 - DNA, 15 bp, Homo sapiens
attttgactcatcgt

SEQ ID NO: 2095083 - DNA, 15 bp, Homo sapiens
ttttgactcatcgtg

SEQ ID NO: 2095084 - DNA, 15 bp, Homo sapiens
tttgactcatcgtgg

SEQ ID NO: 2095085 - DNA, 15 bp, Homo sapiens
ttgactcatcgtgga

SEQ ID NO: 2095086 - DNA, 15 bp, Homo sapiens
tgactcatcgtggat

SEQ ID NO: 2095087 - DNA, 15 bp, Homo sapiens
gactcatcgtggatt

SEQ ID NO: 2095088 - DNA, 15 bp, Homo sapiens
actcatcgtggattt

SEQ ID NO: 2095089 - DNA, 15 bp, Homo sapiens
ctcatcgtggatttg

SEQ ID NO: 2095090 - DNA, 15 bp, Homo sapiens
tcatcgtggatttga

SEQ ID NO: 2095091 - DNA, 15 bp, Homo sapiens
catcgtggatttgac

SEQ ID NO: 2095092 - DNA, 15 bp, Homo sapiens
atcgtggatttgact

SEQ ID NO: 2095093 - DNA, 15 bp, Homo sapiens
tcgtggatttgactc

SEQ ID NO: 2095094 - DNA, 15 bp, Homo sapiens
cgtggatttgactca

SEQ ID NO: 2095095 - DNA, 15 bp, Homo sapiens
gtggatttgactcag

SEQ ID NO: 2095096 - DNA, 15 bp, Homo sapiens
tggatttgactcagt

SEQ ID NO: 2095097 - DNA, 15 bp, Homo sapiens
ggatttgactcagta

SEQ ID NO: 2095098 - DNA, 15 bp, Homo sapiens
gatttgactcagtag

SEQ ID NO: 2095099 - DNA, 15 bp, Homo sapiens
atttgactcagtagc

SEQ ID NO: 2095100 - DNA, 15 bp, Homo sapiens
tttgactcagtagcc

SEQ ID NO: 2095101 - DNA, 15 bp, Homo sapiens
ttgactcagtagccc

SEQ ID NO: 2095102 - DNA, 15 bp, Homo sapiens
tgactcagtagccct

SEQ ID NO: 2095103 - DNA, 15 bp, Homo sapiens
gactcagtagccctt

SEQ ID NO: 2095104 - DNA, 15 bp, Homo sapiens
actcagtagcccttg

SEQ ID NO: 2095105 - DNA, 15 bp, Homo sapiens
ctcagtagcccttgg

SEQ ID NO: 2095106 - DNA, 15 bp, Homo sapiens
tcagtagcccttggc

SEQ ID NO: 2095107 - DNA, 15 bp, Homo sapiens
cagtagcccttggca

SEQ ID NO: 2095108 - DNA, 15 bp, Homo sapiens
agtagcccttggcac

SEQ ID NO: 2095109 - DNA, 15 bp, Homo sapiens
gtagcccttggcacc

SEQ ID NO: 2095110 - DNA, 15 bp, Homo sapiens
tagcccttggcacca

SEQ ID NO: 2095111 - DNA, 15 bp, Homo sapiens
agcccttggcaccag

SEQ ID NO: 2095112 - DNA, 15 bp, Homo sapiens
gcccttggcaccagc

SEQ ID NO: 2095113 - DNA, 15 bp, Homo sapiens
cccttggcaccagct

SEQ ID NO: 2095114 - DNA, 15 bp, Homo sapiens
ccttggcaccagctt

SEQ ID NO: 2095115 - DNA, 15 bp, Homo sapiens
cttggcaccagcttg

SEQ ID NO: 2095116 - DNA, 15 bp, Homo sapiens
ttggcaccagcttga

SEQ ID NO: 2095117 - DNA, 15 bp, Homo sapiens
tggcaccagcttgaa

SEQ ID NO: 2095118 - DNA, 15 bp, Homo sapiens
ggcaccagcttgaat

SEQ ID NO: 2095119 - DNA, 15 bp, Homo sapiens
gcaccagcttgaatt

SEQ ID NO: 2095120 - DNA, 15 bp, Homo sapiens
caccagcttgaattc

SEQ ID NO: 2095121 - DNA, 15 bp, Homo sapiens
accagcttgaattct

SEQ ID NO: 2095122 - DNA, 15 bp, Homo sapiens
ccagcttgaattctc

SEQ ID NO: 2095123 - DNA, 15 bp, Homo sapiens
cagcttgaattctct

SEQ ID NO: 2095124 - DNA, 15 bp, Homo sapiens
agcttgaattctctt

SEQ ID NO: 2095125 - DNA, 15 bp, Homo sapiens
gcttgaattctcttt

SEQ ID NO: 2095126 - DNA, 15 bp, Homo sapiens
cttgaattctctttg

SEQ ID NO: 2095127 - DNA, 15 bp, Homo sapiens
ttgaattctctttgg

SEQ ID NO: 2095128 - DNA, 15 bp, Homo sapiens
tgaattctctttggt

SEQ ID NO: 2095129 - DNA, 15 bp, Homo sapiens
gaattctctttggtc

SEQ ID NO: 2095130 - DNA, 15 bp, Homo sapiens
aattctctttggtca

SEQ ID NO: 2095131 - DNA, 15 bp, Homo sapiens
attctctttggtcac

SEQ ID NO: 2095132 - DNA, 15 bp, Homo sapiens
ttctctttggtcaca

SEQ ID NO: 2095133 - DNA, 15 bp, Homo sapiens
tctctttggtcacac

SEQ ID NO: 2095134 - DNA, 15 bp, Homo sapiens
ctctttggtcacacc

SEQ ID NO: 2095135 - DNA, 15 bp, Homo sapiens
tctttggtcacacca

SEQ ID NO: 2095136 - DNA, 15 bp, Homo sapiens
ctttggtcacaccac

SEQ ID NO: 2095137 - DNA, 15 bp, Homo sapiens
tttggtcacaccacc

SEQ ID NO: 2095138 - DNA, 15 bp, Homo sapiens
ttggtcacaccacca

SEQ ID NO: 2095139 - DNA, 15 bp, Homo sapiens
tggtcacaccaccaa

SEQ ID NO: 2095140 - DNA, 15 bp, Homo sapiens
ggtcacaccaccaaa

SEQ ID NO: 2095141 - DNA, 15 bp, Homo sapiens
gtcacaccaccaaaa

SEQ ID NO: 2095142 - DNA, 15 bp, Homo sapiens
tcacaccaccaaaag

SEQ ID NO: 2095143 - DNA, 15 bp, Homo sapiens
cacaccaccaaaagc

SEQ ID NO: 2095144 - DNA, 15 bp, Homo sapiens
acaccaccaaaagcc

SEQ ID NO: 2095145 - DNA, 15 bp, Homo sapiens
caccaccaaaagcca

SEQ ID NO: 2095146 - DNA, 15 bp, Homo sapiens
accaccaaaagccaa

SEQ ID NO: 2095147 - DNA, 15 bp, Homo sapiens
ccaccaaaagccaaa

SEQ ID NO: 2095148 - DNA, 15 bp, Homo sapiens
caccaaaagccaaac

SEQ ID NO: 2095149 - DNA, 15 bp, Homo sapiens
accaaaagccaaact

SEQ ID NO: 2095150 - DNA, 15 bp, Homo sapiens
ccaaaagccaaactc

SEQ ID NO: 2095151 - DNA, 15 bp, Homo sapiens
caaaagccaaactcc

SEQ ID NO: 2095152 - DNA, 15 bp, Homo sapiens
aaaagccaaactcca

SEQ ID NO: 2095153 - DNA, 15 bp, Homo sapiens
aaagccaaactccag

SEQ ID NO: 2095154 - DNA, 15 bp, Homo sapiens
aagccaaactccagc

SEQ ID NO: 2095155 - DNA, 15 bp, Homo sapiens
agccaaactccagct

SEQ ID NO: 2095156 - DNA, 15 bp, Homo sapiens
gccaaactccagctg

SEQ ID NO: 2095157 - DNA, 15 bp, Homo sapiens
ccaaactccagctgc

SEQ ID NO: 2095158 - DNA, 15 bp, Homo sapiens
caaactccagctgcc

SEQ ID NO: 2095159 - DNA, 15 bp, Homo sapiens
aaactccagctgcca

SEQ ID NO: 2095160 - DNA, 15 bp, Homo sapiens
aactccagctgccaa

SEQ ID NO: 2095161 - DNA, 15 bp, Homo sapiens
actccagctgccaat

SEQ ID NO: 2095162 - DNA, 15 bp, Homo sapiens
ctccagctgccaatg

SEQ ID NO: 2095163 - DNA, 15 bp, Homo sapiens
tccagctgccaatgc

SEQ ID NO: 2095164 - DNA, 15 bp, Homo sapiens
ccagctgccaatgcc

SEQ ID NO: 2095165 - DNA, 15 bp, Homo sapiens
cagctgccaatgcct

SEQ ID NO: 2095166 - DNA, 15 bp, Homo sapiens
agctgccaatgcctc

SEQ ID NO: 2095167 - DNA, 15 bp, Homo sapiens
gctgccaatgcctct

SEQ ID NO: 2095168 - DNA, 15 bp, Homo sapiens
ctgccaatgcctcta

SEQ ID NO: 2095169 - DNA, 15 bp, Homo sapiens
tgccaatgcctctac

SEQ ID NO: 2095170 - DNA, 15 bp, Homo sapiens
gccaatgcctctaca

SEQ ID NO: 2095171 - DNA, 15 bp, Homo sapiens
ccaatgcctctacac

SEQ ID NO: 2095172 - DNA, 15 bp, Homo sapiens
caatgcctctacaca

SEQ ID NO: 2095173 - DNA, 15 bp, Homo sapiens
aatgcctctacacag

SEQ ID NO: 2095174 - DNA, 15 bp, Homo sapiens
atgcctctacacagc

SEQ ID NO: 2095175 - DNA, 15 bp, Homo sapiens
tgcctctacacagcc

SEQ ID NO: 2095176 - DNA, 15 bp, Homo sapiens
gcctctacacagccc

SEQ ID NO: 2095177 - DNA, 15 bp, Homo sapiens
cctctacacagccca

SEQ ID NO: 2095178 - DNA, 15 bp, Homo sapiens
ctctacacagcccaa

SEQ ID NO: 2095179 - DNA, 15 bp, Homo sapiens
tctacacagcccaaa

SEQ ID NO: 2095180 - DNA, 15 bp, Homo sapiens
ctacacagcccaaag

SEQ ID NO: 2095181 - DNA, 15 bp, Homo sapiens
tacacagcccaaaga

SEQ ID NO: 2095182 - DNA, 15 bp, Homo sapiens
acacagcccaaagag

SEQ ID NO: 2095183 - DNA, 15 bp, Homo sapiens
cacagcccaaagaga

SEQ ID NO: 2095184 - DNA, 15 bp, Homo sapiens
acagcccaaagagag

SEQ ID NO: 2095185 - DNA, 15 bp, Homo sapiens
cagcccaaagagagg

SEQ ID NO: 2095186 - DNA, 15 bp, Homo sapiens
agcccaaagagaggc

SEQ ID NO: 2095187 - DNA, 15 bp, Homo sapiens
gcccaaagagaggct

SEQ ID NO: 2095188 - DNA, 15 bp, Homo sapiens
cccaaagagaggctg

SEQ ID NO: 2095189 - DNA, 15 bp, Homo sapiens
ccaaagagaggctgc

SEQ ID NO: 2095190 - DNA, 15 bp, Homo sapiens
caaagagaggctgct

SEQ ID NO: 2095191 - DNA, 15 bp, Homo sapiens
aaagagaggctgctg

SEQ ID NO: 2095192 - DNA, 15 bp, Homo sapiens
aagagaggctgctgg

SEQ ID NO: 2095193 - DNA, 15 bp, Homo sapiens
agagaggctgctggt

SEQ ID NO: 2095194 - DNA, 15 bp, Homo sapiens
gagaggctgctggtg

SEQ ID NO: 2095195 - DNA, 15 bp, Homo sapiens
agaggctgctggtgg

SEQ ID NO: 2095196 - DNA, 15 bp, Homo sapiens
gaggctgctggtggt

SEQ ID NO: 2095197 - DNA, 15 bp, Homo sapiens
aggctgctggtggtg

SEQ ID NO: 2095198 - DNA, 15 bp, Homo sapiens
ggctgctggtggtgg

SEQ ID NO: 2095199 - DNA, 15 bp, Homo sapiens
gctgctggtggtggt

SEQ ID NO: 2095200 - DNA, 15 bp, Homo sapiens
ctgctggtggtggtt

SEQ ID NO: 2095201 - DNA, 15 bp, Homo sapiens
tgctggtggtggttt

SEQ ID NO: 2095202 - DNA, 15 bp, Homo sapiens
gctggtggtggtttg

SEQ ID NO: 2095203 - DNA, 15 bp, Homo sapiens
ctggtggtggtttgc

SEQ ID NO: 2095204 - DNA, 15 bp, Homo sapiens
tggtggtggtttgca

SEQ ID NO: 2095205 - DNA, 15 bp, Homo sapiens
ggtggtggtttgcag

SEQ ID NO: 2095206 - DNA, 15 bp, Homo sapiens
gtggtggtttgcagc

SEQ ID NO: 2095207 - DNA, 15 bp, Homo sapiens
tggtggtttgcagcc

SEQ ID NO: 2095208 - DNA, 15 bp, Homo sapiens
ggtggtttgcagcca

SEQ ID NO: 2095209 - DNA, 15 bp, Homo sapiens
gtggtttgcagccag

SEQ ID NO: 2095210 - DNA, 15 bp, Homo sapiens
tggtttgcagccagg

SEQ ID NO: 2095211 - DNA, 15 bp, Homo sapiens
ggtttgcagccaggt

SEQ ID NO: 2095212 - DNA, 15 bp, Homo sapiens
gtttgcagccaggtg

SEQ ID NO: 2095213 - DNA, 15 bp, Homo sapiens
tttgcagccaggtgg

SEQ ID NO: 2095214 - DNA, 15 bp, Homo sapiens
ttgcagccaggtggt

SEQ ID NO: 2095215 - DNA, 15 bp, Homo sapiens
tgcagccaggtggtg

SEQ ID NO: 2095216 - DNA, 15 bp, Homo sapiens
gcagccaggtggtgc

SEQ ID NO: 2095217 - DNA, 15 bp, Homo sapiens
cagccaggtggtgct

SEQ ID NO: 2095218 - DNA, 15 bp, Homo sapiens
agccaggtggtgctg

SEQ ID NO: 2095219 - DNA, 15 bp, Homo sapiens
gccaggtggtgctgg

SEQ ID NO: 2095220 - DNA, 15 bp, Homo sapiens
ccaggtggtgctggg

SEQ ID NO: 2095221 - DNA, 15 bp, Homo sapiens
caggtggtgctgggc

SEQ ID NO: 2095222 - DNA, 15 bp, Homo sapiens
aggtggtgctgggct

SEQ ID NO: 2095223 - DNA, 15 bp, Homo sapiens
ggtggtgctgggctg

SEQ ID NO: 2095224 - DNA, 15 bp, Homo sapiens
gtggtgctgggctgg

SEQ ID NO: 2095225 - DNA, 15 bp, Homo sapiens
tggtgctgggctggg

SEQ ID NO: 2095226 - DNA, 15 bp, Homo sapiens
ggtgctgggctggga

SEQ ID NO: 2095227 - DNA, 15 bp, Homo sapiens
gtgctgggctgggag

SEQ ID NO: 2095228 - DNA, 15 bp, Homo sapiens
tgctgggctgggagg

SEQ ID NO: 2095229 - DNA, 15 bp, Homo sapiens
gctgggctgggagga

SEQ ID NO: 2095230 - DNA, 15 bp, Homo sapiens
ctgggctgggaggag

SEQ ID NO: 2095231 - DNA, 15 bp, Homo sapiens
tgggctgggaggagg

SEQ ID NO: 2095232 - DNA, 15 bp, Homo sapiens
gggctgggaggaggg

SEQ ID NO: 2095233 - DNA, 15 bp, Homo sapiens
ggctgggaggagggg

SEQ ID NO: 2095234 - DNA, 15 bp, Homo sapiens
gctgggaggaggggg

SEQ ID NO: 2095235 - DNA, 15 bp, Homo sapiens
ctgggaggagggggc

SEQ ID NO: 2095236 - DNA, 15 bp, Homo sapiens
tgggaggagggggca

SEQ ID NO: 2095237 - DNA, 15 bp, Homo sapiens
gggaggagggggcag

SEQ ID NO: 2095238 - DNA, 15 bp, Homo sapiens
ggaggagggggcagg

SEQ ID NO: 2095239 - DNA, 15 bp, Homo sapiens
gaggagggggcagga

SEQ ID NO: 2095240 - DNA, 15 bp, Homo sapiens
aggagggggcaggac

SEQ ID NO: 2095241 - DNA, 15 bp, Homo sapiens
ggagggggcaggaca

SEQ ID NO: 2095242 - DNA, 15 bp, Homo sapiens
gagggggcaggacat

SEQ ID NO: 2095243 - DNA, 15 bp, Homo sapiens
agggggcaggacatg

SEQ ID NO: 2095244 - DNA, 15 bp, Homo sapiens
gggggcaggacatgt

SEQ ID NO: 2095245 - DNA, 15 bp, Homo sapiens
ggggcaggacatgtc

SEQ ID NO: 2095246 - DNA, 15 bp, Homo sapiens
gggcaggacatgtca

SEQ ID NO: 2095247 - DNA, 15 bp, Homo sapiens
ggcaggacatgtcaa

SEQ ID NO: 2095248 - DNA, 15 bp, Homo sapiens
gcaggacatgtcaag

SEQ ID NO: 2095249 - DNA, 15 bp, Homo sapiens
caggacatgtcaagt

SEQ ID NO: 2095250 - DNA, 15 bp, Homo sapiens
aggacatgtcaagtc

SEQ ID NO: 2095251 - DNA, 15 bp, Homo sapiens
ggacatgtcaagtca

SEQ ID NO: 2095252 - DNA, 15 bp, Homo sapiens
gacatgtcaagtcac

SEQ ID NO: 2095253 - DNA, 15 bp, Homo sapiens
acatgtcaagtcaca

SEQ ID NO: 2095254 - DNA, 15 bp, Homo sapiens
catgtcaagtcacag

SEQ ID NO: 2095255 - DNA, 15 bp, Homo sapiens
atgtcaagtcacagg

SEQ ID NO: 2095256 - DNA, 15 bp, Homo sapiens
tgtcaagtcacaggg

SEQ ID NO: 2095257 - DNA, 15 bp, Homo sapiens
gtcaagtcacagggg

SEQ ID NO: 2095258 - DNA, 15 bp, Homo sapiens
tcaagtcacaggggg

SEQ ID NO: 2095259 - DNA, 15 bp, Homo sapiens
caagtcacagggggc

SEQ ID NO: 2095260 - DNA, 15 bp, Homo sapiens
aagtcacagggggcc

SEQ ID NO: 2095261 - DNA, 15 bp, Homo sapiens
agtcacagggggcca

SEQ ID NO: 2095262 - DNA, 15 bp, Homo sapiens
gtcacagggggccat

SEQ ID NO: 2095263 - DNA, 15 bp, Homo sapiens
tcacagggggccata

SEQ ID NO: 2095264 - DNA, 15 bp, Homo sapiens
cacagggggccataa

SEQ ID NO: 2095265 - DNA, 15 bp, Homo sapiens
acagggggccataaa

SEQ ID NO: 2095266 - DNA, 15 bp, Homo sapiens
cagggggccataaaa

SEQ ID NO: 2095267 - DNA, 15 bp, Homo sapiens
agggggccataaaat

SEQ ID NO: 2095268 - DNA, 15 bp, Homo sapiens
gggggccataaaatg

SEQ ID NO: 2095269 - DNA, 15 bp, Homo sapiens
gcagcacctgcttcc

SEQ ID NO: 2095270 - DNA, 15 bp, Homo sapiens
cagcacctgcttcct

SEQ ID NO: 2095271 - DNA, 15 bp, Homo sapiens
agcacctgcttcctt

SEQ ID NO: 2095272 - DNA, 15 bp, Homo sapiens
gcacctgcttccttt

SEQ ID NO: 2095273 - DNA, 15 bp, Homo sapiens
cacctgcttccttta

SEQ ID NO: 2095274 - DNA, 15 bp, Homo sapiens
acctgcttcctttag

SEQ ID NO: 2095275 - DNA, 15 bp, Homo sapiens
cctgcttcctttagc

SEQ ID NO: 2095276 - DNA, 15 bp, Homo sapiens
ctgcttcctttagca

SEQ ID NO: 2095277 - DNA, 15 bp, Homo sapiens
tgcttcctttagcac

SEQ ID NO: 2095278 - DNA, 15 bp, Homo sapiens
gcttcctttagcact

SEQ ID NO: 2095279 - DNA, 15 bp, Homo sapiens
cttcctttagcactg

SEQ ID NO: 2095280 - DNA, 15 bp, Homo sapiens
ttcctttagcactgg

SEQ ID NO: 2095281 - DNA, 15 bp, Homo sapiens
tcctttagcactggt

SEQ ID NO: 2095282 - DNA, 15 bp, Homo sapiens
cctttagcactggtg

SEQ ID NO: 2095283 - DNA, 15 bp, Homo sapiens
ctttagcactggtga

SEQ ID NO: 2095284 - DNA, 15 bp, Homo sapiens
tttagcactggtgaa

SEQ ID NO: 2095285 - DNA, 15 bp, Homo sapiens
ttagcactggtgaat

SEQ ID NO: 2095286 - DNA, 15 bp, Homo sapiens
tagcactggtgaatg

SEQ ID NO: 2095287 - DNA, 15 bp, Homo sapiens
agcactggtgaatga

SEQ ID NO: 2095288 - DNA, 15 bp, Homo sapiens
gcactggtgaatgat

SEQ ID NO: 2095289 - DNA, 15 bp, Homo sapiens
cactggtgaatgatt

SEQ ID NO: 2095290 - DNA, 15 bp, Homo sapiens
actggtgaatgattc

SEQ ID NO: 2095291 - DNA, 15 bp, Homo sapiens
ctggtgaatgattct

SEQ ID NO: 2095292 - DNA, 15 bp, Homo sapiens
ggtgaatgattcttc

SEQ ID NO: 2095293 - DNA, 15 bp, Homo sapiens
gtgaatgattcttcc

SEQ ID NO: 2095294 - DNA, 15 bp, Homo sapiens
tgaatgattcttcct

SEQ ID NO: 2095295 - DNA, 15 bp, Homo sapiens
gaatgattcttcctc

SEQ ID NO: 2095296 - DNA, 15 bp, Homo sapiens
aatgattcttcctct

SEQ ID NO: 2095297 - DNA, 15 bp, Homo sapiens
atgattcttcctctt

SEQ ID NO: 2095298 - DNA, 15 bp, Homo sapiens
tgattcttcctcttc

SEQ ID NO: 2095299 - DNA, 15 bp, Homo sapiens
gattcttcctcttcc

SEQ ID NO: 2095300 - DNA, 15 bp, Homo sapiens
attcttcctcttccc

SEQ ID NO: 2095301 - DNA, 15 bp, Homo sapiens
ttcttcctcttcccc

SEQ ID NO: 2095302 - DNA, 15 bp, Homo sapiens
tcttcctcttcccct

SEQ ID NO: 2095303 - DNA, 15 bp, Homo sapiens
cttcctcttcccctg

SEQ ID NO: 2095304 - DNA, 15 bp, Homo sapiens
ttcctcttcccctgt

SEQ ID NO: 2095305 - DNA, 15 bp, Homo sapiens
tcctcttcccctgtc

SEQ ID NO: 2095306 - DNA, 15 bp, Homo sapiens
cctcttcccctgtct

SEQ ID NO: 2095307 - DNA, 15 bp, Homo sapiens
ctcttcccctgtctc

SEQ ID NO: 2095308 - DNA, 15 bp, Homo sapiens
tcttcccctgtctca

SEQ ID NO: 2095309 - DNA, 15 bp, Homo sapiens
cttcccctgtctcag

SEQ ID NO: 2095310 - DNA, 15 bp, Homo sapiens
ttcccctgtctcagg

SEQ ID NO: 2095311 - DNA, 15 bp, Homo sapiens
tcccctgtctcaggg

SEQ ID NO: 2095312 - DNA, 15 bp, Homo sapiens
cccctgtctcaggga

SEQ ID NO: 2095313 - DNA, 15 bp, Homo sapiens
ccctgtctcagggaa

SEQ ID NO: 2095314 - DNA, 15 bp, Homo sapiens
cctgtctcagggaag

SEQ ID NO: 2095315 - DNA, 15 bp, Homo sapiens
ctgtctcagggaagg

SEQ ID NO: 2095316 - DNA, 15 bp, Homo sapiens
tgtctcagggaaggc

SEQ ID NO: 2095317 - DNA, 15 bp, Homo sapiens
gtctcagggaaggct

SEQ ID NO: 2095318 - DNA, 15 bp, Homo sapiens
tctcagggaaggctt

SEQ ID NO: 2095319 - DNA, 15 bp, Homo sapiens
ctcagggaaggcttg

SEQ ID NO: 2095320 - DNA, 15 bp, Homo sapiens
tcagggaaggcttgc

SEQ ID NO: 2095321 - DNA, 15 bp, Homo sapiens
cagggaaggcttgcc

SEQ ID NO: 2095322 - DNA, 15 bp, Homo sapiens
agggaaggcttgcct

SEQ ID NO: 2095323 - DNA, 15 bp, Homo sapiens
gggaaggcttgcctg

SEQ ID NO: 2095324 - DNA, 15 bp, Homo sapiens
ggaaggcttgcctgc

SEQ ID NO: 2095325 - DNA, 15 bp, Homo sapiens
gaaggcttgcctgct

SEQ ID NO: 2095326 - DNA, 15 bp, Homo sapiens
aaggcttgcctgctt

SEQ ID NO: 2095327 - DNA, 15 bp, Homo sapiens
aggcttgcctgcttc

SEQ ID NO: 2095328 - DNA, 15 bp, Homo sapiens
ggcttgcctgcttcc

SEQ ID NO: 2095329 - DNA, 15 bp, Homo sapiens
gcttgcctgcttcca

SEQ ID NO: 2095330 - DNA, 15 bp, Homo sapiens
cttgcctgcttccat

SEQ ID NO: 2095331 - DNA, 15 bp, Homo sapiens
ttgcctgcttccatg

SEQ ID NO: 2095332 - DNA, 15 bp, Homo sapiens
tgcctgcttccatgc

SEQ ID NO: 2095333 - DNA, 15 bp, Homo sapiens
gcctgcttccatgct

SEQ ID NO: 2095334 - DNA, 15 bp, Homo sapiens
cctgcttccatgctt

SEQ ID NO: 2095335 - DNA, 15 bp, Homo sapiens
gcttccatgcttgca

SEQ ID NO: 2095336 - DNA, 15 bp, Homo sapiens
cttccatgcttgcat

SEQ ID NO: 2095337 - DNA, 15 bp, Homo sapiens
ttccatgcttgcatg

SEQ ID NO: 2095338 - DNA, 15 bp, Homo sapiens
tccatgcttgcatgc

SEQ ID NO: 2095339 - DNA, 15 bp, Homo sapiens
ccatgcttgcatgct

SEQ ID NO: 2095340 - DNA, 15 bp, Homo sapiens
catgcttgcatgctg

SEQ ID NO: 2095341 - DNA, 15 bp, Homo sapiens
atgcttgcatgctgg

SEQ ID NO: 2095342 - DNA, 15 bp, Homo sapiens
tgcttgcatgctggg

SEQ ID NO: 2095343 - DNA, 15 bp, Homo sapiens
gcttgcatgctgggt

SEQ ID NO: 2095344 - DNA, 15 bp, Homo sapiens
cttgcatgctgggtg

SEQ ID NO: 2095345 - DNA, 15 bp, Homo sapiens
ttgcatgctgggtga

SEQ ID NO: 2095346 - DNA, 15 bp, Homo sapiens
tgcatgctgggtgac

SEQ ID NO: 2095347 - DNA, 15 bp, Homo sapiens
gcatgctgggtgaca

SEQ ID NO: 2095348 - DNA, 15 bp, Homo sapiens
catgctgggtgacaa

SEQ ID NO: 2095349 - DNA, 15 bp, Homo sapiens
atgctgggtgacaat

SEQ ID NO: 2095350 - DNA, 15 bp, Homo sapiens
tgctgggtgacaata

SEQ ID NO: 2095351 - DNA, 15 bp, Homo sapiens
gctgggtgacaataa

SEQ ID NO: 2095352 - DNA, 15 bp, Homo sapiens
ctgggtgacaataaa

SEQ ID NO: 2095353 - DNA, 15 bp, Homo sapiens
tgggtgacaataaag

SEQ ID NO: 2095354 - DNA, 15 bp, Homo sapiens
gggtgacaataaagc

SEQ ID NO: 2095355 - DNA, 15 bp, Homo sapiens
ggtgacaataaagca

SEQ ID NO: 2095356 - DNA, 15 bp, Homo sapiens
gtgacaataaagcat

SEQ ID NO: 2095357 - DNA, 15 bp, Homo sapiens
tgacaataaagcatt

SEQ ID NO: 2095358 - DNA, 15 bp, Homo sapiens
gacaataaagcattc

SEQ ID NO: 2095359 - DNA, 15 bp, Homo sapiens
acaataaagcattcc

SEQ ID NO: 2095360 - DNA, 15 bp, Homo sapiens
caataaagcattcct

SEQ ID NO: 2095361 - DNA, 15 bp, Homo sapiens
aataaagcattcctg

SEQ ID NO: 2095362 - DNA, 15 bp, Homo sapiens
ataaagcattcctgg

SEQ ID NO: 2095363 - DNA, 15 bp, Homo sapiens
taaagcattcctggt

SEQ ID NO: 2095364 - DNA, 15 bp, Homo sapiens
aaagcattcctggtt

SEQ ID NO: 2095365 - DNA, 15 bp, Homo sapiens
aagcattcctggttc

SEQ ID NO: 2095366 - DNA, 15 bp, Homo sapiens
agcattcctggttct

SEQ ID NO: 2095367 - DNA, 15 bp, Homo sapiens
gcattcctggttctt

SEQ ID NO: 2095368 - DNA, 15 bp, Homo sapiens
cattcctggttcttc

SEQ ID NO: 2095369 - DNA, 15 bp, Homo sapiens
attcctggttcttca

SEQ ID NO: 2095370 - DNA, 15 bp, Homo sapiens
ttcctggttcttcac

SEQ ID NO: 2095371 - DNA, 15 bp, Homo sapiens
tcctggttcttcacc

SEQ ID NO: 2095372 - DNA, 15 bp, Homo sapiens
cctggttcttcacct

SEQ ID NO: 2095373 - DNA, 15 bp, Homo sapiens
ctggttcttcacctt

SEQ ID NO: 2095374 - DNA, 15 bp, Homo sapiens
tggttcttcaccttg

SEQ ID NO: 2095375 - DNA, 15 bp, Homo sapiens
ggttcttcaccttgg

SEQ ID NO: 2095376 - DNA, 15 bp, Homo sapiens
gttcttcaccttggc

SEQ ID NO: 2095377 - DNA, 15 bp, Homo sapiens
ttcttcaccttggct

SEQ ID NO: 2095378 - DNA, 15 bp, Homo sapiens
tcttcaccttggctt

SEQ ID NO: 2095379 - DNA, 15 bp, Homo sapiens
cttcaccttggcttt

SEQ ID NO: 2095380 - DNA, 15 bp, Homo sapiens
ttcaccttggctttc

SEQ ID NO: 2095381 - DNA, 15 bp, Homo sapiens
tcaccttggctttca

SEQ ID NO: 2095382 - DNA, 15 bp, Homo sapiens
caccttggctttcag

SEQ ID NO: 2095383 - DNA, 15 bp, Homo sapiens
accttggctttcaga

SEQ ID NO: 2095384 - DNA, 15 bp, Homo sapiens
ccttggctttcagac

SEQ ID NO: 2095385 - DNA, 15 bp, Homo sapiens
cttggctttcagacc

SEQ ID NO: 2095386 - DNA, 15 bp, Homo sapiens
ttggctttcagacct

SEQ ID NO: 2095387 - DNA, 15 bp, Homo sapiens
tggctttcagacctg

SEQ ID NO: 2095388 - DNA, 15 bp, Homo sapiens
ggctttcagacctga

SEQ ID NO: 2095389 - DNA, 15 bp, Homo sapiens
gctttcagacctgaa

SEQ ID NO: 2095390 - DNA, 15 bp, Homo sapiens
ctttcagacctgaaa

SEQ ID NO: 2095391 - DNA, 15 bp, Homo sapiens
tttcagacctgaaac

SEQ ID NO: 2095392 - DNA, 15 bp, Homo sapiens
ttcagacctgaaacc

SEQ ID NO: 2095393 - DNA, 15 bp, Homo sapiens
tcagacctgaaaccc

SEQ ID NO: 2095394 - DNA, 15 bp, Homo sapiens
cagacctgaaacccg

SEQ ID NO: 2095395 - DNA, 15 bp, Homo sapiens
agacctgaaacccga

SEQ ID NO: 2095396 - DNA, 15 bp, Homo sapiens
gacctgaaacccgac

SEQ ID NO: 2095397 - DNA, 15 bp, Homo sapiens
acctgaaacccgact

SEQ ID NO: 2095398 - DNA, 15 bp, Homo sapiens
cctgaaacccgactt

SEQ ID NO: 2095399 - DNA, 15 bp, Homo sapiens
ctgaaacccgacttc

SEQ ID NO: 2095400 - DNA, 15 bp, Homo sapiens
tgaaacccgacttcc

SEQ ID NO: 2095401 - DNA, 15 bp, Homo sapiens
gaaacccgacttcct

SEQ ID NO: 2095402 - DNA, 15 bp, Homo sapiens
aaacccgacttcctt

SEQ ID NO: 2095403 - DNA, 15 bp, Homo sapiens
aacccgacttccttt

SEQ ID NO: 2095404 - DNA, 15 bp, Homo sapiens
acccgacttcctttc

SEQ ID NO: 2095405 - DNA, 15 bp, Homo sapiens
cccgacttcctttca

SEQ ID NO: 2095406 - DNA, 15 bp, Homo sapiens
ccgacttcctttcaa

SEQ ID NO: 2095407 - DNA, 15 bp, Homo sapiens
cgacttcctttcaaa

SEQ ID NO: 2095408 - DNA, 15 bp, Homo sapiens
gacttcctttcaaaa

SEQ ID NO: 2095409 - DNA, 15 bp, Homo sapiens
acttcctttcaaaat

SEQ ID NO: 2095410 - DNA, 15 bp, Homo sapiens
cttcctttcaaaatt

SEQ ID NO: 2095411 - DNA, 15 bp, Homo sapiens
ttcctttcaaaattc

SEQ ID NO: 2095412 - DNA, 15 bp, Homo sapiens
tcctttcaaaattcc

SEQ ID NO: 2095413 - DNA, 15 bp, Homo sapiens
cctttcaaaattcct

SEQ ID NO: 2095414 - DNA, 15 bp, Homo sapiens
ctttcaaaattcctg

SEQ ID NO: 2095415 - DNA, 15 bp, Homo sapiens
tttcaaaattcctgt

SEQ ID NO: 2095416 - DNA, 15 bp, Homo sapiens
ttcaaaattcctgtc

SEQ ID NO: 2095417 - DNA, 15 bp, Homo sapiens
tcaaaattcctgtcc

SEQ ID NO: 2095418 - DNA, 15 bp, Homo sapiens
caaaattcctgtcct

SEQ ID NO: 2095419 - DNA, 15 bp, Homo sapiens
aaaattcctgtcctc

SEQ ID NO: 2095420 - DNA, 15 bp, Homo sapiens
aaattcctgtcctcg

SEQ ID NO: 2095421 - DNA, 15 bp, Homo sapiens
aattcctgtcctcgg

SEQ ID NO: 2095422 - DNA, 15 bp, Homo sapiens
attcctgtcctcggg

SEQ ID NO: 2095423 - DNA, 15 bp, Homo sapiens
ttcctgtcctcgggg

SEQ ID NO: 2095424 - DNA, 15 bp, Homo sapiens
tcctgtcctcggggg

SEQ ID NO: 2095425 - DNA, 15 bp, Homo sapiens
cctgtcctcgggggg

SEQ ID NO: 2095426 - DNA, 15 bp, Homo sapiens
ctgtcctcgggggga

SEQ ID NO: 2095427 - DNA, 15 bp, Homo sapiens
tgtcctcggggggaa

SEQ ID NO: 2095428 - DNA, 15 bp, Homo sapiens
gtcctcggggggaaa

SEQ ID NO: 2095429 - DNA, 15 bp, Homo sapiens
tcctcggggggaaaa

SEQ ID NO: 2095430 - DNA, 15 bp, Homo sapiens
cctcggggggaaaag

SEQ ID NO: 2095431 - DNA, 15 bp, Homo sapiens
ctcggggggaaaagg

SEQ ID NO: 2095432 - DNA, 15 bp, Homo sapiens
tcggggggaaaaggt

SEQ ID NO: 2095433 - DNA, 15 bp, Homo sapiens
cggggggaaaaggtt

SEQ ID NO: 2095434 - DNA, 15 bp, Homo sapiens
ggggggaaaaggttt

SEQ ID NO: 2095435 - DNA, 15 bp, Homo sapiens
gggggaaaaggtttc

SEQ ID NO: 2095436 - DNA, 15 bp, Homo sapiens
ggggaaaaggtttcc

SEQ ID NO: 2095437 - DNA, 15 bp, Homo sapiens
gggaaaaggtttcca

SEQ ID NO: 2095438 - DNA, 15 bp, Homo sapiens
ggaaaaggtttccac

SEQ ID NO: 2095439 - DNA, 15 bp, Homo sapiens
gaaaaggtttccaca

SEQ ID NO: 2095440 - DNA, 15 bp, Homo sapiens
aaaaggtttccacaa

SEQ ID NO: 2095441 - DNA, 15 bp, Homo sapiens
aaaggtttccacaat

SEQ ID NO: 2095442 - DNA, 15 bp, Homo sapiens
aaggtttccacaatg

SEQ ID NO: 2095443 - DNA, 15 bp, Homo sapiens
aggtttccacaatgt

SEQ ID NO: 2095444 - DNA, 15 bp, Homo sapiens
ggtttccacaatgtg

SEQ ID NO: 2095445 - DNA, 15 bp, Homo sapiens
gtttccacaatgtga

SEQ ID NO: 2095446 - DNA, 15 bp, Homo sapiens
tttccacaatgtgag

SEQ ID NO: 2095447 - DNA, 15 bp, Homo sapiens
ttccacaatgtgaga

SEQ ID NO: 2095448 - DNA, 15 bp, Homo sapiens
tccacaatgtgagat

SEQ ID NO: 2095449 - DNA, 15 bp, Homo sapiens
ccacaatgtgagatg

SEQ ID NO: 2095450 - DNA, 15 bp, Homo sapiens
cacaatgtgagatgg

SEQ ID NO: 2095451 - DNA, 15 bp, Homo sapiens
acaatgtgagatggt

SEQ ID NO: 2095452 - DNA, 15 bp, Homo sapiens
caatgtgagatggta

SEQ ID NO: 2095453 - DNA, 15 bp, Homo sapiens
aatgtgagatggtag

SEQ ID NO: 2095454 - DNA, 15 bp, Homo sapiens
atgtgagatggtagc

SEQ ID NO: 2095455 - DNA, 15 bp, Homo sapiens
tgtgagatggtagcc

SEQ ID NO: 2095456 - DNA, 15 bp, Homo sapiens
gtgagatggtagcct

SEQ ID NO: 2095457 - DNA, 15 bp, Homo sapiens
tgagatggtagcctg

SEQ ID NO: 2095458 - DNA, 15 bp, Homo sapiens
gagatggtagcctgg

SEQ ID NO: 2095459 - DNA, 15 bp, Homo sapiens
agatggtagcctgga

SEQ ID NO: 2095460 - DNA, 15 bp, Homo sapiens
gatggtagcctggac

SEQ ID NO: 2095461 - DNA, 15 bp, Homo sapiens
atggtagcctggaca

SEQ ID NO: 2095462 - DNA, 15 bp, Homo sapiens
tggtagcctggacac

SEQ ID NO: 2095463 - DNA, 15 bp, Homo sapiens
ggtagcctggacacc

SEQ ID NO: 2095464 - DNA, 15 bp, Homo sapiens
gtagcctggacacca

SEQ ID NO: 2095465 - DNA, 15 bp, Homo sapiens
tagcctggacaccag

SEQ ID NO: 2095466 - DNA, 15 bp, Homo sapiens
agcctggacaccagc

SEQ ID NO: 2095467 - DNA, 15 bp, Homo sapiens
gcctggacaccagct

SEQ ID NO: 2095468 - DNA, 15 bp, Homo sapiens
cctggacaccagctg

SEQ ID NO: 2095469 - DNA, 15 bp, Homo sapiens
ctggacaccagctgt

SEQ ID NO: 2095470 - DNA, 15 bp, Homo sapiens
tggacaccagctgtc

SEQ ID NO: 2095471 - DNA, 15 bp, Homo sapiens
ggacaccagctgtca

SEQ ID NO: 2095472 - DNA, 15 bp, Homo sapiens
gacaccagctgtcat

SEQ ID NO: 2095473 - DNA, 15 bp, Homo sapiens
acaccagctgtcatc

SEQ ID NO: 2095474 - DNA, 15 bp, Homo sapiens
caccagctgtcatca

SEQ ID NO: 2095475 - DNA, 15 bp, Homo sapiens
accagctgtcatcat

SEQ ID NO: 2095476 - DNA, 15 bp, Homo sapiens
ccagctgtcatcatg

SEQ ID NO: 2095477 - DNA, 15 bp, Homo sapiens
cagctgtcatcatgt

SEQ ID NO: 2095478 - DNA, 15 bp, Homo sapiens
agctgtcatcatgtt

SEQ ID NO: 2095479 - DNA, 15 bp, Homo sapiens
gctgtcatcatgttg

SEQ ID NO: 2095480 - DNA, 15 bp, Homo sapiens
ctgtcatcatgttgc

SEQ ID NO: 2095481 - DNA, 15 bp, Homo sapiens
tgtcatcatgttgct

SEQ ID NO: 2095482 - DNA, 15 bp, Homo sapiens
gtcatcatgttgctg

SEQ ID NO: 2095483 - DNA, 15 bp, Homo sapiens
tcatcatgttgctgc

SEQ ID NO: 2095484 - DNA, 15 bp, Homo sapiens
catcatgttgctgct

SEQ ID NO: 2095485 - DNA, 15 bp, Homo sapiens
atcatgttgctgctc

SEQ ID NO: 2095486 - DNA, 15 bp, Homo sapiens
tcatgttgctgctct

SEQ ID NO: 2095487 - DNA, 15 bp, Homo sapiens
catgttgctgctcta

SEQ ID NO: 2095488 - DNA, 15 bp, Homo sapiens
atgttgctgctctag

SEQ ID NO: 2095489 - DNA, 15 bp, Homo sapiens
tgttgctgctctagc

SEQ ID NO: 2095490 - DNA, 15 bp, Homo sapiens
gttgctgctctagcg

SEQ ID NO: 2095491 - DNA, 15 bp, Homo sapiens
ttgctgctctagcgt

SEQ ID NO: 2095492 - DNA, 15 bp, Homo sapiens
tgctgctctagcgtt

SEQ ID NO: 2095493 - DNA, 15 bp, Homo sapiens
gctgctctagcgttt

SEQ ID NO: 2095494 - DNA, 15 bp, Homo sapiens
ctgctctagcgtttg

SEQ ID NO: 2095495 - DNA, 15 bp, Homo sapiens
tgctctagcgtttga

SEQ ID NO: 2095496 - DNA, 15 bp, Homo sapiens
gctctagcgtttgag

SEQ ID NO: 2095497 - DNA, 15 bp, Homo sapiens
ctctagcgtttgagc

SEQ ID NO: 2095498 - DNA, 15 bp, Homo sapiens
tctagcgtttgagct

SEQ ID NO: 2095499 - DNA, 15 bp, Homo sapiens
ctagcgtttgagctc

SEQ ID NO: 2095500 - DNA, 15 bp, Homo sapiens
tagcgtttgagctcc

SEQ ID NO: 2095501 - DNA, 15 bp, Homo sapiens
agcgtttgagctccc

SEQ ID NO: 2095502 - DNA, 15 bp, Homo sapiens
gcgtttgagctcccg

SEQ ID NO: 2095503 - DNA, 15 bp, Homo sapiens
cgtttgagctcccga

SEQ ID NO: 2095504 - DNA, 15 bp, Homo sapiens
gtttgagctcccgat

SEQ ID NO: 2095505 - DNA, 15 bp, Homo sapiens
tttgagctcccgatg

SEQ ID NO: 2095506 - DNA, 15 bp, Homo sapiens
ttgagctcccgatga

SEQ ID NO: 2095507 - DNA, 15 bp, Homo sapiens
tgagctcccgatgaa

SEQ ID NO: 2095508 - DNA, 15 bp, Homo sapiens
gagctcccgatgaac

SEQ ID NO: 2095509 - DNA, 15 bp, Homo sapiens
agctcccgatgaaca

SEQ ID NO: 2095510 - DNA, 15 bp, Homo sapiens
gctcccgatgaacaa

SEQ ID NO: 2095511 - DNA, 15 bp, Homo sapiens
ctcccgatgaacaat

SEQ ID NO: 2095512 - DNA, 15 bp, Homo sapiens
tcccgatgaacaatg

SEQ ID NO: 2095513 - DNA, 15 bp, Homo sapiens
cccgatgaacaatga

SEQ ID NO: 2095514 - DNA, 15 bp, Homo sapiens
ccgatgaacaatgac

SEQ ID NO: 2095515 - DNA, 15 bp, Homo sapiens
cgatgaacaatgacc

SEQ ID NO: 2095516 - DNA, 15 bp, Homo sapiens
gatgaacaatgacca

SEQ ID NO: 2095517 - DNA, 15 bp, Homo sapiens
atgaacaatgaccat

SEQ ID NO: 2095518 - DNA, 15 bp, Homo sapiens
tgaacaatgaccatt

SEQ ID NO: 2095519 - DNA, 15 bp, Homo sapiens
gaacaatgaccattg

SEQ ID NO: 2095520 - DNA, 15 bp, Homo sapiens
aacaatgaccattgg

SEQ ID NO: 2095521 - DNA, 15 bp, Homo sapiens
acaatgaccattggg

SEQ ID NO: 2095522 - DNA, 15 bp, Homo sapiens
caatgaccattgggt

SEQ ID NO: 2095523 - DNA, 15 bp, Homo sapiens
aatgaccattgggtc

SEQ ID NO: 2095524 - DNA, 15 bp, Homo sapiens
atgaccattgggtcc

SEQ ID NO: 2095525 - DNA, 15 bp, Homo sapiens
tgaccattgggtcca

SEQ ID NO: 2095526 - DNA, 15 bp, Homo sapiens
gaccattgggtccaa

SEQ ID NO: 2095527 - DNA, 15 bp, Homo sapiens
accattgggtccaac

SEQ ID NO: 2095528 - DNA, 15 bp, Homo sapiens
ccattgggtccaacc

SEQ ID NO: 2095529 - DNA, 15 bp, Homo sapiens
cattgggtccaacca

SEQ ID NO: 2095530 - DNA, 15 bp, Homo sapiens
attgggtccaaccag

SEQ ID NO: 2095531 - DNA, 15 bp, Homo sapiens
ttgggtccaaccagc

SEQ ID NO: 2095532 - DNA, 15 bp, Homo sapiens
tgggtccaaccagcc

SEQ ID NO: 2095533 - DNA, 15 bp, Homo sapiens
gggtccaaccagccc

SEQ ID NO: 2095534 - DNA, 15 bp, Homo sapiens
ggtccaaccagccct

SEQ ID NO: 2095535 - DNA, 15 bp, Homo sapiens
aggccactgctgccc

SEQ ID NO: 2095536 - DNA, 15 bp, Homo sapiens
ggccactgctgcccc

SEQ ID NO: 2095537 - DNA, 15 bp, Homo sapiens
gccactgctgccccc

SEQ ID NO: 2095538 - DNA, 15 bp, Homo sapiens
ccactgctgccccct

SEQ ID NO: 2095539 - DNA, 15 bp, Homo sapiens
cactgctgccccctc

SEQ ID NO: 2095540 - DNA, 15 bp, Homo sapiens
actgctgccccctct

SEQ ID NO: 2095541 - DNA, 15 bp, Homo sapiens
ctgctgccccctctt

SEQ ID NO: 2095542 - DNA, 15 bp, Homo sapiens
tgctgccccctcttg

SEQ ID NO: 2095543 - DNA, 15 bp, Homo sapiens
gctgccccctcttgg

SEQ ID NO: 2095544 - DNA, 15 bp, Homo sapiens
ctgccccctcttggg

SEQ ID NO: 2095545 - DNA, 15 bp, Homo sapiens
tgccccctcttgggt

SEQ ID NO: 2095546 - DNA, 15 bp, Homo sapiens
gccccctcttgggtc

SEQ ID NO: 2095547 - DNA, 15 bp, Homo sapiens
ccccctcttgggtcc

SEQ ID NO: 2095548 - DNA, 15 bp, Homo sapiens
cccctcttgggtcct

SEQ ID NO: 2095549 - DNA, 15 bp, Homo sapiens
ccctcttgggtcctg

SEQ ID NO: 2095550 - DNA, 15 bp, Homo sapiens
cctcttgggtcctgt

SEQ ID NO: 2095551 - DNA, 15 bp, Homo sapiens
ctcttgggtcctgtt

SEQ ID NO: 2095552 - DNA, 15 bp, Homo sapiens
tcttgggtcctgttc

SEQ ID NO: 2095553 - DNA, 15 bp, Homo sapiens
cttgggtcctgttct

SEQ ID NO: 2095554 - DNA, 15 bp, Homo sapiens
ttgggtcctgttctg

SEQ ID NO: 2095555 - DNA, 15 bp, Homo sapiens
tgggtcctgttctga

SEQ ID NO: 2095556 - DNA, 15 bp, Homo sapiens
gggtcctgttctgag

SEQ ID NO: 2095557 - DNA, 15 bp, Homo sapiens
ggtcctgttctgagt

SEQ ID NO: 2095558 - DNA, 15 bp, Homo sapiens
gtcctgttctgagtc

SEQ ID NO: 2095559 - DNA, 15 bp, Homo sapiens
tcctgttctgagtct

SEQ ID NO: 2095560 - DNA, 15 bp, Homo sapiens
cctgttctgagtctc

SEQ ID NO: 2095561 - DNA, 15 bp, Homo sapiens
ctgttctgagtctca

SEQ ID NO: 2095562 - DNA, 15 bp, Homo sapiens
tgttctgagtctcag

SEQ ID NO: 2095563 - DNA, 15 bp, Homo sapiens
gttctgagtctcagg

SEQ ID NO: 2095564 - DNA, 15 bp, Homo sapiens
ttctgagtctcaggc

SEQ ID NO: 2095565 - DNA, 15 bp, Homo sapiens
tctgagtctcaggcc

SEQ ID NO: 2095566 - DNA, 15 bp, Homo sapiens
ctgagtctcaggcct

SEQ ID NO: 2095567 - DNA, 15 bp, Homo sapiens
tgagtctcaggcctg

SEQ ID NO: 2095568 - DNA, 15 bp, Homo sapiens
gagtctcaggcctga

SEQ ID NO: 2095569 - DNA, 15 bp, Homo sapiens
agtctcaggcctgag

SEQ ID NO: 2095570 - DNA, 15 bp, Homo sapiens
gtctcaggcctgagt

SEQ ID NO: 2095571 - DNA, 15 bp, Homo sapiens
tctcaggcctgagtc

SEQ ID NO: 2095572 - DNA, 15 bp, Homo sapiens
ctcaggcctgagtcc

SEQ ID NO: 2095573 - DNA, 15 bp, Homo sapiens
tcaggcctgagtccc

SEQ ID NO: 2095574 - DNA, 15 bp, Homo sapiens
caggcctgagtccct

SEQ ID NO: 2095575 - DNA, 15 bp, Homo sapiens
aggcctgagtccctg

SEQ ID NO: 2095576 - DNA, 15 bp, Homo sapiens
ggcctgagtccctgg

SEQ ID NO: 2095577 - DNA, 15 bp, Homo sapiens
gcctgagtccctggg

SEQ ID NO: 2095578 - DNA, 15 bp, Homo sapiens
cctgagtccctgggg

SEQ ID NO: 2095579 - DNA, 15 bp, Homo sapiens
ctgagtccctgggga

SEQ ID NO: 2095580 - DNA, 15 bp, Homo sapiens
tgagtccctggggaa

SEQ ID NO: 2095581 - DNA, 15 bp, Homo sapiens
gagtccctggggaag

SEQ ID NO: 2095582 - DNA, 15 bp, Homo sapiens
agtccctggggaagg

SEQ ID NO: 2095583 - DNA, 15 bp, Homo sapiens
gtccctggggaaggc

SEQ ID NO: 2095584 - DNA, 15 bp, Homo sapiens
tccctggggaaggcc

SEQ ID NO: 2095585 - DNA, 15 bp, Homo sapiens
ccctggggaaggccc

SEQ ID NO: 2095586 - DNA, 15 bp, Homo sapiens
cctggggaaggcccc

SEQ ID NO: 2095587 - DNA, 15 bp, Homo sapiens
ctggggaaggcccca

SEQ ID NO: 2095588 - DNA, 15 bp, Homo sapiens
tggggaaggccccac

SEQ ID NO: 2095589 - DNA, 15 bp, Homo sapiens
ggggaaggccccaca

SEQ ID NO: 2095590 - DNA, 15 bp, Homo sapiens
gggaaggccccacac

SEQ ID NO: 2095591 - DNA, 15 bp, Homo sapiens
ggaaggccccacacc

SEQ ID NO: 2095592 - DNA, 15 bp, Homo sapiens
gaaggccccacacct

SEQ ID NO: 2095593 - DNA, 15 bp, Homo sapiens
aaggccccacacctt

SEQ ID NO: 2095594 - DNA, 15 bp, Homo sapiens
aggccccacaccttt

SEQ ID NO: 2095595 - DNA, 15 bp, Homo sapiens
ggccccacacctttg

SEQ ID NO: 2095596 - DNA, 15 bp, Homo sapiens
gccccacacctttgc

SEQ ID NO: 2095597 - DNA, 15 bp, Homo sapiens
ccccacacctttgcc

SEQ ID NO: 2095598 - DNA, 15 bp, Homo sapiens
cccacacctttgccc

SEQ ID NO: 2095599 - DNA, 15 bp, Homo sapiens
ccacacctttgccct

SEQ ID NO: 2095600 - DNA, 15 bp, Homo sapiens
cacacctttgccctg

SEQ ID NO: 2095601 - DNA, 15 bp, Homo sapiens
acacctttgccctgt

SEQ ID NO: 2095602 - DNA, 15 bp, Homo sapiens
cacctttgccctgta

SEQ ID NO: 2095603 - DNA, 15 bp, Homo sapiens
acctttgccctgtac

SEQ ID NO: 2095604 - DNA, 15 bp, Homo sapiens
cctttgccctgtacc

SEQ ID NO: 2095605 - DNA, 15 bp, Homo sapiens
ctttgccctgtacct

SEQ ID NO: 2095606 - DNA, 15 bp, Homo sapiens
tttgccctgtacctg

SEQ ID NO: 2095607 - DNA, 15 bp, Homo sapiens
ttgccctgtacctgg

SEQ ID NO: 2095608 - DNA, 15 bp, Homo sapiens
tgccctgtacctggg

SEQ ID NO: 2095609 - DNA, 15 bp, Homo sapiens
gccctgtacctgggt

SEQ ID NO: 2095610 - DNA, 15 bp, Homo sapiens
ccctgtacctgggta

SEQ ID NO: 2095611 - DNA, 15 bp, Homo sapiens
cctgtacctgggtat

SEQ ID NO: 2095612 - DNA, 15 bp, Homo sapiens
ctgtacctgggtatg

SEQ ID NO: 2095613 - DNA, 15 bp, Homo sapiens
tgtacctgggtatgg

SEQ ID NO: 2095614 - DNA, 15 bp, Homo sapiens
gtacctgggtatggg

SEQ ID NO: 2095615 - DNA, 15 bp, Homo sapiens
tacctgggtatgggg

SEQ ID NO: 2095616 - DNA, 15 bp, Homo sapiens
acctgggtatgggga

SEQ ID NO: 2095617 - DNA, 15 bp, Homo sapiens
cctgggtatggggat

SEQ ID NO: 2095618 - DNA, 15 bp, Homo sapiens
ctgggtatggggatg

SEQ ID NO: 2095619 - DNA, 15 bp, Homo sapiens
tgggtatggggatgg

SEQ ID NO: 2095620 - DNA, 15 bp, Homo sapiens
gggtatggggatggc

SEQ ID NO: 2095621 - DNA, 15 bp, Homo sapiens
ggtatggggatggcc

SEQ ID NO: 2095622 - DNA, 15 bp, Homo sapiens
gtatggggatggccc

SEQ ID NO: 2095623 - DNA, 15 bp, Homo sapiens
tatggggatggccct

SEQ ID NO: 2095624 - DNA, 15 bp, Homo sapiens
atggggatggccctg

SEQ ID NO: 2095625 - DNA, 15 bp, Homo sapiens
tggggatggccctga

SEQ ID NO: 2095626 - DNA, 15 bp, Homo sapiens
ggggatggccctgag

SEQ ID NO: 2095627 - DNA, 15 bp, Homo sapiens
gggatggccctgagg

SEQ ID NO: 2095628 - DNA, 15 bp, Homo sapiens
ggatggccctgaggg

SEQ ID NO: 2095629 - DNA, 15 bp, Homo sapiens
gatggccctgagggg

SEQ ID NO: 2095630 - DNA, 15 bp, Homo sapiens
atggccctgaggggc

SEQ ID NO: 2095631 - DNA, 15 bp, Homo sapiens
tggccctgaggggct

SEQ ID NO: 2095632 - DNA, 15 bp, Homo sapiens
ggccctgaggggctg

SEQ ID NO: 2095633 - DNA, 15 bp, Homo sapiens
gccctgaggggctgc

SEQ ID NO: 2095634 - DNA, 15 bp, Homo sapiens
ccctgaggggctgcc

SEQ ID NO: 2095635 - DNA, 15 bp, Homo sapiens
cctgaggggctgcct

SEQ ID NO: 2095636 - DNA, 15 bp, Homo sapiens
ctgaggggctgcctt

SEQ ID NO: 2095637 - DNA, 15 bp, Homo sapiens
tgaggggctgccttg

SEQ ID NO: 2095638 - DNA, 15 bp, Homo sapiens
gaggggctgccttgc

SEQ ID NO: 2095639 - DNA, 15 bp, Homo sapiens
aggggctgccttgct

SEQ ID NO: 2095640 - DNA, 15 bp, Homo sapiens
ggggctgccttgctt

SEQ ID NO: 2095641 - DNA, 15 bp, Homo sapiens
gggctgccttgcttg

SEQ ID NO: 2095642 - DNA, 15 bp, Homo sapiens
ggctgccttgcttgg

SEQ ID NO: 2095643 - DNA, 15 bp, Homo sapiens
gctgccttgcttggg

SEQ ID NO: 2095644 - DNA, 15 bp, Homo sapiens
ctgccttgcttggga

SEQ ID NO: 2095645 - DNA, 15 bp, Homo sapiens
tgccttgcttgggag

SEQ ID NO: 2095646 - DNA, 15 bp, Homo sapiens
gccttgcttgggaga

SEQ ID NO: 2095647 - DNA, 15 bp, Homo sapiens
ccttgcttgggagaa

SEQ ID NO: 2095648 - DNA, 15 bp, Homo sapiens
cttgcttgggagaag

SEQ ID NO: 2095649 - DNA, 15 bp, Homo sapiens
ttgcttgggagaagg

SEQ ID NO: 2095650 - DNA, 15 bp, Homo sapiens
tgcttgggagaaggg

SEQ ID NO: 2095651 - DNA, 15 bp, Homo sapiens
gcttgggagaagggg

SEQ ID NO: 2095652 - DNA, 15 bp, Homo sapiens
cttgggagaaggggg

SEQ ID NO: 2095653 - DNA, 15 bp, Homo sapiens
ttgggagaagggggg

SEQ ID NO: 2095654 - DNA, 15 bp, Homo sapiens
tgggagaagggggga

SEQ ID NO: 2095655 - DNA, 15 bp, Homo sapiens
gggagaaggggggaa

SEQ ID NO: 2095656 - DNA, 15 bp, Homo sapiens
ggagaaggggggaaa

SEQ ID NO: 2095657 - DNA, 15 bp, Homo sapiens
gagaaggggggaaaa

SEQ ID NO: 2095658 - DNA, 15 bp, Homo sapiens
agaaggggggaaaac

SEQ ID NO: 2095659 - DNA, 15 bp, Homo sapiens
gaaggggggaaaaca

SEQ ID NO: 2095660 - DNA, 15 bp, Homo sapiens
aaggggggaaaacag

SEQ ID NO: 2095661 - DNA, 15 bp, Homo sapiens
aggggggaaaacaga

SEQ ID NO: 2095662 - DNA, 15 bp, Homo sapiens
ggggggaaaacagat

SEQ ID NO: 2095663 - DNA, 15 bp, Homo sapiens
gggggaaaacagata

SEQ ID NO: 2095664 - DNA, 15 bp, Homo sapiens
ggggaaaacagatat

SEQ ID NO: 2095665 - DNA, 15 bp, Homo sapiens
gggaaaacagatatt

SEQ ID NO: 2095666 - DNA, 15 bp, Homo sapiens
ggaaaacagatattt

SEQ ID NO: 2095667 - DNA, 15 bp, Homo sapiens
gaaaacagatatttt

SEQ ID NO: 2095668 - DNA, 15 bp, Homo sapiens
aaaacagatattttt

SEQ ID NO: 2095669 - DNA, 15 bp, Homo sapiens
aaacagatattttta

SEQ ID NO: 2095670 - DNA, 15 bp, Homo sapiens
aacagatatttttat

SEQ ID NO: 2095671 - DNA, 15 bp, Homo sapiens
acagatatttttata

SEQ ID NO: 2095672 - DNA, 15 bp, Homo sapiens
cagatatttttatat

SEQ ID NO: 2095673 - DNA, 15 bp, Homo sapiens
agatatttttatata

SEQ ID NO: 2095674 - DNA, 15 bp, Homo sapiens
gatatttttatataa

SEQ ID NO: 2095675 - DNA, 15 bp, Homo sapiens
atatttttatataaa

SEQ ID NO: 2095676 - DNA, 15 bp, Homo sapiens
tatttttatataaat

SEQ ID NO: 2095677 - DNA, 15 bp, Homo sapiens
atttttatataaata

SEQ ID NO: 2095678 - DNA, 15 bp, Homo sapiens
tttttatataaataa

SEQ ID NO: 2095679 - DNA, 15 bp, Homo sapiens
ttttatataaataag

SEQ ID NO: 2095680 - DNA, 15 bp, Homo sapiens
tttatataaataaga

SEQ ID NO: 2095681 - DNA, 15 bp, Homo sapiens
ttatataaataagaa

SEQ ID NO: 2095682 - DNA, 15 bp, Homo sapiens
tatataaataagaaa

SEQ ID NO: 2095683 - DNA, 15 bp, Homo sapiens
atataaataagaaaa

SEQ ID NO: 2095684 - DNA, 15 bp, Homo sapiens
tataaataagaaaaa

SEQ ID NO: 2095685 - DNA, 15 bp, Homo sapiens
ataaataagaaaaag

SEQ ID NO: 2095686 - DNA, 15 bp, Homo sapiens
taaataagaaaaaga

SEQ ID NO: 2095687 - DNA, 15 bp, Homo sapiens
aaataagaaaaagac

SEQ ID NO: 2095688 - DNA, 15 bp, Homo sapiens
aataagaaaaagaca

SEQ ID NO: 2095689 - DNA, 15 bp, Homo sapiens
ataagaaaaagacag

SEQ ID NO: 2095690 - DNA, 15 bp, Homo sapiens
taagaaaaagacagc

SEQ ID NO: 2095691 - DNA, 15 bp, Homo sapiens
aagaaaaagacagcc

SEQ ID NO: 2095692 - DNA, 15 bp, Homo sapiens
agaaaaagacagccc

SEQ ID NO: 2095693 - DNA, 15 bp, Homo sapiens
gaaaaagacagcccc

SEQ ID NO: 2095694 - DNA, 15 bp, Homo sapiens
aaaaagacagcccct

SEQ ID NO: 2095695 - DNA, 15 bp, Homo sapiens
aaaagacagcccctc

SEQ ID NO: 2095696 - DNA, 15 bp, Homo sapiens
aaagacagcccctct

SEQ ID NO: 2095697 - DNA, 15 bp, Homo sapiens
aagacagcccctctg

SEQ ID NO: 2095698 - DNA, 15 bp, Homo sapiens
agacagcccctctgg

SEQ ID NO: 2095699 - DNA, 15 bp, Homo sapiens
gacagcccctctggg

SEQ ID NO: 2095700 - DNA, 15 bp, Homo sapiens
acagcccctctgggc

SEQ ID NO: 2095701 - DNA, 15 bp, Homo sapiens
cagcccctctgggca

SEQ ID NO: 2095702 - DNA, 15 bp, Homo sapiens
agcccctctgggcag

SEQ ID NO: 2095703 - DNA, 15 bp, Homo sapiens
gcccctctgggcaga

SEQ ID NO: 2095704 - DNA, 15 bp, Homo sapiens
cccctctgggcagat

SEQ ID NO: 2095705 - DNA, 15 bp, Homo sapiens
ccctctgggcagatg

SEQ ID NO: 2095706 - DNA, 15 bp, Homo sapiens
cctctgggcagatga

SEQ ID NO: 2095707 - DNA, 15 bp, Homo sapiens
ctctgggcagatgag

SEQ ID NO: 2095708 - DNA, 15 bp, Homo sapiens
tctgggcagatgagg

SEQ ID NO: 2095709 - DNA, 15 bp, Homo sapiens
ctgggcagatgaggc

SEQ ID NO: 2095710 - DNA, 15 bp, Homo sapiens
tgggcagatgaggcc

SEQ ID NO: 2095711 - DNA, 15 bp, Homo sapiens
gggcagatgaggcct

SEQ ID NO: 2095712 - DNA, 15 bp, Homo sapiens
ggcagatgaggcctg

SEQ ID NO: 2095713 - DNA, 15 bp, Homo sapiens
gcagatgaggcctgc

SEQ ID NO: 2095714 - DNA, 15 bp, Homo sapiens
cagatgaggcctgct

SEQ ID NO: 2095715 - DNA, 15 bp, Homo sapiens
agatgaggcctgctg

SEQ ID NO: 2095716 - DNA, 15 bp, Homo sapiens
gatgaggcctgctgt

SEQ ID NO: 2095717 - DNA, 15 bp, Homo sapiens
atgaggcctgctgta

SEQ ID NO: 2095718 - DNA, 15 bp, Homo sapiens
tgaggcctgctgtag

SEQ ID NO: 2095719 - DNA, 15 bp, Homo sapiens
gaggcctgctgtagg

SEQ ID NO: 2095720 - DNA, 15 bp, Homo sapiens
aggcctgctgtaggg

SEQ ID NO: 2095721 - DNA, 15 bp, Homo sapiens
ggcctgctgtagggc

SEQ ID NO: 2095722 - DNA, 15 bp, Homo sapiens
gcctgctgtagggca

SEQ ID NO: 2095723 - DNA, 15 bp, Homo sapiens
cctgctgtagggcag

SEQ ID NO: 2095724 - DNA, 15 bp, Homo sapiens
ctgctgtagggcagg

SEQ ID NO: 2095725 - DNA, 15 bp, Homo sapiens
tgctgtagggcaggg

SEQ ID NO: 2095726 - DNA, 15 bp, Homo sapiens
gctgtagggcagggg

SEQ ID NO: 2095727 - DNA, 15 bp, Homo sapiens
ctgtagggcaggggg

SEQ ID NO: 2095728 - DNA, 15 bp, Homo sapiens
tgtagggcagggggc

SEQ ID NO: 2095729 - DNA, 15 bp, Homo sapiens
gtagggcagggggct

SEQ ID NO: 2095730 - DNA, 15 bp, Homo sapiens
tagggcagggggctt

SEQ ID NO: 2095731 - DNA, 15 bp, Homo sapiens
agggcagggggcttg

SEQ ID NO: 2095732 - DNA, 15 bp, Homo sapiens
gggcagggggcttgg

SEQ ID NO: 2095733 - DNA, 15 bp, Homo sapiens
ggcagggggcttggt

SEQ ID NO: 2095734 - DNA, 15 bp, Homo sapiens
gcagggggcttggta

SEQ ID NO: 2095735 - DNA, 15 bp, Homo sapiens
cagggggcttggtaa

SEQ ID NO: 2095736 - DNA, 15 bp, Homo sapiens
agggggcttggtaaa

SEQ ID NO: 2095737 - DNA, 15 bp, Homo sapiens
gggggcttggtaaac

SEQ ID NO: 2095738 - DNA, 15 bp, Homo sapiens
ggggcttggtaaact

SEQ ID NO: 2095739 - DNA, 15 bp, Homo sapiens
gggcttggtaaactg

SEQ ID NO: 2095740 - DNA, 15 bp, Homo sapiens
ggcttggtaaactgt

SEQ ID NO: 2095741 - DNA, 15 bp, Homo sapiens
gcttggtaaactgtg

SEQ ID NO: 2095742 - DNA, 15 bp, Homo sapiens
cttggtaaactgtgt

SEQ ID NO: 2095743 - DNA, 15 bp, Homo sapiens
ttggtaaactgtgtg

SEQ ID NO: 2095744 - DNA, 15 bp, Homo sapiens
tggtaaactgtgtgt

SEQ ID NO: 2095745 - DNA, 15 bp, Homo sapiens
ggtaaactgtgtgtc

SEQ ID NO: 2095746 - DNA, 15 bp, Homo sapiens
gtaaactgtgtgtcc

SEQ ID NO: 2095747 - DNA, 15 bp, Homo sapiens
taaactgtgtgtcca

SEQ ID NO: 2095748 - DNA, 15 bp, Homo sapiens
aaactgtgtgtccac

SEQ ID NO: 2095749 - DNA, 15 bp, Homo sapiens
aactgtgtgtccact

SEQ ID NO: 2095750 - DNA, 15 bp, Homo sapiens
actgtgtgtccactg

SEQ ID NO: 2095751 - DNA, 15 bp, Homo sapiens
ctgtgtgtccactgg

SEQ ID NO: 2095752 - DNA, 15 bp, Homo sapiens
tgtgtgtccactggt

SEQ ID NO: 2095753 - DNA, 15 bp, Homo sapiens
gtgtgtccactggtc

SEQ ID NO: 2095754 - DNA, 15 bp, Homo sapiens
tgtgtccactggtct

SEQ ID NO: 2095755 - DNA, 15 bp, Homo sapiens
gtgtccactggtctg

SEQ ID NO: 2095756 - DNA, 15 bp, Homo sapiens
tgtccactggtctgt

SEQ ID NO: 2095757 - DNA, 15 bp, Homo sapiens
gtccactggtctgta

SEQ ID NO: 2095758 - DNA, 15 bp, Homo sapiens
tccactggtctgtaa

SEQ ID NO: 2095759 - DNA, 15 bp, Homo sapiens
ccactggtctgtaac

SEQ ID NO: 2095760 - DNA, 15 bp, Homo sapiens
cactggtctgtaacc

SEQ ID NO: 2095761 - DNA, 15 bp, Homo sapiens
actggtctgtaaccc

SEQ ID NO: 2095762 - DNA, 15 bp, Homo sapiens
ctggtctgtaaccct

SEQ ID NO: 2095763 - DNA, 15 bp, Homo sapiens
tggtctgtaaccctt

SEQ ID NO: 2095764 - DNA, 15 bp, Homo sapiens
ggtctgtaacccttc

SEQ ID NO: 2095765 - DNA, 15 bp, Homo sapiens
gtctgtaacccttca

SEQ ID NO: 2095766 - DNA, 15 bp, Homo sapiens
tctgtaacccttcag

SEQ ID NO: 2095767 - DNA, 15 bp, Homo sapiens
ctgtaacccttcagc

SEQ ID NO: 2095768 - DNA, 15 bp, Homo sapiens
tgtaacccttcagct

SEQ ID NO: 2095769 - DNA, 15 bp, Homo sapiens
gtaacccttcagctg

SEQ ID NO: 2095770 - DNA, 15 bp, Homo sapiens
taacccttcagctgg

SEQ ID NO: 2095771 - DNA, 15 bp, Homo sapiens
aacccttcagctggg

SEQ ID NO: 2095772 - DNA, 15 bp, Homo sapiens
acccttcagctgggt

SEQ ID NO: 2095773 - DNA, 15 bp, Homo sapiens
cccttcagctgggtc

SEQ ID NO: 2095774 - DNA, 15 bp, Homo sapiens
ccttcagctgggtcc

SEQ ID NO: 2095775 - DNA, 15 bp, Homo sapiens
cttcagctgggtcct

SEQ ID NO: 2095776 - DNA, 15 bp, Homo sapiens
ttcagctgggtcctt

SEQ ID NO: 2095777 - DNA, 15 bp, Homo sapiens
tcagctgggtccttt

SEQ ID NO: 2095778 - DNA, 15 bp, Homo sapiens
cagctgggtcctttt

SEQ ID NO: 2095779 - DNA, 15 bp, Homo sapiens
agctgggtccttttg

SEQ ID NO: 2095780 - DNA, 15 bp, Homo sapiens
gctgggtccttttgt

SEQ ID NO: 2095781 - DNA, 15 bp, Homo sapiens
ctgggtccttttgtg

SEQ ID NO: 2095782 - DNA, 15 bp, Homo sapiens
tgggtccttttgtgc

SEQ ID NO: 2095783 - DNA, 15 bp, Homo sapiens
gggtccttttgtgca

SEQ ID NO: 2095784 - DNA, 15 bp, Homo sapiens
ggtccttttgtgcag

SEQ ID NO: 2095785 - DNA, 15 bp, Homo sapiens
gtccttttgtgcagt

SEQ ID NO: 2095786 - DNA, 15 bp, Homo sapiens
tccttttgtgcagtg

SEQ ID NO: 2095787 - DNA, 15 bp, Homo sapiens
ccttttgtgcagtga

SEQ ID NO: 2095788 - DNA, 15 bp, Homo sapiens
cttttgtgcagtgaa

SEQ ID NO: 2095789 - DNA, 15 bp, Homo sapiens
ttttgtgcagtgaac

SEQ ID NO: 2095790 - DNA, 15 bp, Homo sapiens
tttgtgcagtgaaca

SEQ ID NO: 2095791 - DNA, 15 bp, Homo sapiens
ttgtgcagtgaacag

SEQ ID NO: 2095792 - DNA, 15 bp, Homo sapiens
tgtgcagtgaacagc

SEQ ID NO: 2095793 - DNA, 15 bp, Homo sapiens
gtgcagtgaacagcc

SEQ ID NO: 2095794 - DNA, 15 bp, Homo sapiens
tgcagtgaacagcct

SEQ ID NO: 2095795 - DNA, 15 bp, Homo sapiens
gcagtgaacagcctg

SEQ ID NO: 2095796 - DNA, 15 bp, Homo sapiens
cagtgaacagcctgg

SEQ ID NO: 2095797 - DNA, 15 bp, Homo sapiens
agtgaacagcctgga

SEQ ID NO: 2095798 - DNA, 15 bp, Homo sapiens
gtgaacagcctggac

SEQ ID NO: 2095799 - DNA, 15 bp, Homo sapiens
tgaacagcctggaca

SEQ ID NO: 2095800 - DNA, 15 bp, Homo sapiens
gaacagcctggacaa

SEQ ID NO: 2095801 - DNA, 15 bp, Homo sapiens
aacagcctggacaac

SEQ ID NO: 2095802 - DNA, 15 bp, Homo sapiens
acagcctggacaact

SEQ ID NO: 2095803 - DNA, 15 bp, Homo sapiens
cagcctggacaactg

SEQ ID NO: 2095804 - DNA, 15 bp, Homo sapiens
agcctggacaactgt

SEQ ID NO: 2095805 - DNA, 15 bp, Homo sapiens
gcctggacaactgtc

SEQ ID NO: 2095806 - DNA, 15 bp, Homo sapiens
cctggacaactgtcc

SEQ ID NO: 2095807 - DNA, 15 bp, Homo sapiens
ctggacaactgtcca

SEQ ID NO: 2095808 - DNA, 15 bp, Homo sapiens
tggacaactgtccag

SEQ ID NO: 2095809 - DNA, 15 bp, Homo sapiens
ggacaactgtccagg

SEQ ID NO: 2095810 - DNA, 15 bp, Homo sapiens
gacaactgtccaggt

SEQ ID NO: 2095811 - DNA, 15 bp, Homo sapiens
acaactgtccaggtg

SEQ ID NO: 2095812 - DNA, 15 bp, Homo sapiens
caactgtccaggtgg

SEQ ID NO: 2095813 - DNA, 15 bp, Homo sapiens
aactgtccaggtggc

SEQ ID NO: 2095814 - DNA, 15 bp, Homo sapiens
actgtccaggtggcc

SEQ ID NO: 2095815 - DNA, 15 bp, Homo sapiens
ctgtccaggtggccc

SEQ ID NO: 2095816 - DNA, 15 bp, Homo sapiens
tgtccaggtggccct

SEQ ID NO: 2095817 - DNA, 15 bp, Homo sapiens
gtccaggtggccctt

SEQ ID NO: 2095818 - DNA, 15 bp, Homo sapiens
tccaggtggcccttc

SEQ ID NO: 2095819 - DNA, 15 bp, Homo sapiens
ccaggtggcccttca

SEQ ID NO: 2095820 - DNA, 15 bp, Homo sapiens
caggtggcccttcag

SEQ ID NO: 2095821 - DNA, 15 bp, Homo sapiens
aggtggcccttcagg

SEQ ID NO: 2095822 - DNA, 15 bp, Homo sapiens
ggtggcccttcaggg

SEQ ID NO: 2095823 - DNA, 15 bp, Homo sapiens
gtggcccttcaggga

SEQ ID NO: 2095824 - DNA, 15 bp, Homo sapiens
tggcccttcagggat

SEQ ID NO: 2095825 - DNA, 15 bp, Homo sapiens
ggcccttcagggata

SEQ ID NO: 2095826 - DNA, 15 bp, Homo sapiens
gcccttcagggatat

SEQ ID NO: 2095827 - DNA, 15 bp, Homo sapiens
cccttcagggatatg

SEQ ID NO: 2095828 - DNA, 15 bp, Homo sapiens
ccttcagggatatgt

SEQ ID NO: 2095829 - DNA, 15 bp, Homo sapiens
cttcagggatatgtt

SEQ ID NO: 2095830 - DNA, 15 bp, Homo sapiens
ttcagggatatgttc

SEQ ID NO: 2095831 - DNA, 15 bp, Homo sapiens
tcagggatatgttcc

SEQ ID NO: 2095832 - DNA, 15 bp, Homo sapiens
cagggatatgttcct

SEQ ID NO: 2095833 - DNA, 15 bp, Homo sapiens
agggatatgttcctg

SEQ ID NO: 2095834 - DNA, 15 bp, Homo sapiens
gggatatgttcctgg

SEQ ID NO: 2095835 - DNA, 15 bp, Homo sapiens
ggatatgttcctgga

SEQ ID NO: 2095836 - DNA, 15 bp, Homo sapiens
gatatgttcctggac

SEQ ID NO: 2095837 - DNA, 15 bp, Homo sapiens
atatgttcctggacc

SEQ ID NO: 2095838 - DNA, 15 bp, Homo sapiens
tatgttcctggacct

SEQ ID NO: 2095839 - DNA, 15 bp, Homo sapiens
atgttcctggacctt

SEQ ID NO: 2095840 - DNA, 15 bp, Homo sapiens
tgttcctggaccttt

SEQ ID NO: 2095841 - DNA, 15 bp, Homo sapiens
gttcctggacctttc

SEQ ID NO: 2095842 - DNA, 15 bp, Homo sapiens
ttcctggacctttct

SEQ ID NO: 2095843 - DNA, 15 bp, Homo sapiens
tcctggacctttctt

SEQ ID NO: 2095844 - DNA, 15 bp, Homo sapiens
cctggacctttctta

SEQ ID NO: 2095845 - DNA, 15 bp, Homo sapiens
ctggacctttcttag

SEQ ID NO: 2095846 - DNA, 15 bp, Homo sapiens
tggacctttcttagc

SEQ ID NO: 2095847 - DNA, 15 bp, Homo sapiens
ggacctttcttagct

SEQ ID NO: 2095848 - DNA, 15 bp, Homo sapiens
gacctttcttagctt

SEQ ID NO: 2095849 - DNA, 15 bp, Homo sapiens
acctttcttagcttc

SEQ ID NO: 2095850 - DNA, 15 bp, Homo sapiens
cctttcttagcttct

SEQ ID NO: 2095851 - DNA, 15 bp, Homo sapiens
ctttcttagcttctc

SEQ ID NO: 2095852 - DNA, 15 bp, Homo sapiens
tttcttagcttctca

SEQ ID NO: 2095853 - DNA, 15 bp, Homo sapiens
ttcttagcttctcac

SEQ ID NO: 2095854 - DNA, 15 bp, Homo sapiens
tcttagcttctcacc

SEQ ID NO: 2095855 - DNA, 15 bp, Homo sapiens
cttagcttctcaccg

SEQ ID NO: 2095856 - DNA, 15 bp, Homo sapiens
ttagcttctcaccga

SEQ ID NO: 2095857 - DNA, 15 bp, Homo sapiens
tagcttctcaccgat

SEQ ID NO: 2095858 - DNA, 15 bp, Homo sapiens
agcttctcaccgatc

SEQ ID NO: 2095859 - DNA, 15 bp, Homo sapiens
gcttctcaccgatct

SEQ ID NO: 2095860 - DNA, 15 bp, Homo sapiens
cttctcaccgatctt

SEQ ID NO: 2095861 - DNA, 15 bp, Homo sapiens
ttctcaccgatcttt

SEQ ID NO: 2095862 - DNA, 15 bp, Homo sapiens
tctcaccgatctttc

SEQ ID NO: 2095863 - DNA, 15 bp, Homo sapiens
ctcaccgatctttct

SEQ ID NO: 2095864 - DNA, 15 bp, Homo sapiens
tcaccgatctttctt

SEQ ID NO: 2095865 - DNA, 15 bp, Homo sapiens
caccgatctttcttc

SEQ ID NO: 2095866 - DNA, 15 bp, Homo sapiens
accgatctttcttcc

SEQ ID NO: 2095867 - DNA, 15 bp, Homo sapiens
ccgatctttcttcca

SEQ ID NO: 2095868 - DNA, 15 bp, Homo sapiens
cgatctttcttccac

SEQ ID NO: 2095869 - DNA, 15 bp, Homo sapiens
gatctttcttccacg

SEQ ID NO: 2095870 - DNA, 15 bp, Homo sapiens
atctttcttccacgc

SEQ ID NO: 2095871 - DNA, 15 bp, Homo sapiens
tctttcttccacgcc

SEQ ID NO: 2095872 - DNA, 15 bp, Homo sapiens
ctttcttccacgcca

SEQ ID NO: 2095873 - DNA, 15 bp, Homo sapiens
tttcttccacgccaa

SEQ ID NO: 2095874 - DNA, 15 bp, Homo sapiens
ttcttccacgccaag

SEQ ID NO: 2095875 - DNA, 15 bp, Homo sapiens
tcttccacgccaagt

SEQ ID NO: 2095876 - DNA, 15 bp, Homo sapiens
cttccacgccaagtc

SEQ ID NO: 2095877 - DNA, 15 bp, Homo sapiens
ttccacgccaagtcc

SEQ ID NO: 2095878 - DNA, 15 bp, Homo sapiens
tccacgccaagtcca

SEQ ID NO: 2095879 - DNA, 15 bp, Homo sapiens
ccacgccaagtccat

SEQ ID NO: 2095880 - DNA, 15 bp, Homo sapiens
cacgccaagtccatg

SEQ ID NO: 2095881 - DNA, 15 bp, Homo sapiens
acgccaagtccatgt

SEQ ID NO: 2095882 - DNA, 15 bp, Homo sapiens
cgccaagtccatgtt

SEQ ID NO: 2095883 - DNA, 15 bp, Homo sapiens
gccaagtccatgttc

SEQ ID NO: 2095884 - DNA, 15 bp, Homo sapiens
ccaagtccatgttcc

SEQ ID NO: 2095885 - DNA, 15 bp, Homo sapiens
caagtccatgttcct

SEQ ID NO: 2095886 - DNA, 15 bp, Homo sapiens
aagtccatgttcctc

SEQ ID NO: 2095887 - DNA, 15 bp, Homo sapiens
agtccatgttcctca

SEQ ID NO: 2095888 - DNA, 15 bp, Homo sapiens
gtccatgttcctcag

SEQ ID NO: 2095889 - DNA, 15 bp, Homo sapiens
tccatgttcctcagt

SEQ ID NO: 2095890 - DNA, 15 bp, Homo sapiens
ccatgttcctcagtc

SEQ ID NO: 2095891 - DNA, 15 bp, Homo sapiens
catgttcctcagtca

SEQ ID NO: 2095892 - DNA, 15 bp, Homo sapiens
atgttcctcagtcaa

SEQ ID NO: 2095893 - DNA, 15 bp, Homo sapiens
tgttcctcagtcaaa

SEQ ID NO: 2095894 - DNA, 15 bp, Homo sapiens
gttcctcagtcaaac

SEQ ID NO: 2095895 - DNA, 15 bp, Homo sapiens
ttcctcagtcaaaca

SEQ ID NO: 2095896 - DNA, 15 bp, Homo sapiens
tcctcagtcaaacaa

SEQ ID NO: 2095897 - DNA, 15 bp, Homo sapiens
cctcagtcaaacaag

SEQ ID NO: 2095898 - DNA, 15 bp, Homo sapiens
ctcagtcaaacaagt

SEQ ID NO: 2095899 - DNA, 15 bp, Homo sapiens
tcagtcaaacaagtg

SEQ ID NO: 2095900 - DNA, 15 bp, Homo sapiens
cagtcaaacaagtgg

SEQ ID NO: 2095901 - DNA, 15 bp, Homo sapiens
agtcaaacaagtggc

SEQ ID NO: 2095902 - DNA, 15 bp, Homo sapiens
gtcaaacaagtggca

SEQ ID NO: 2095903 - DNA, 15 bp, Homo sapiens
tcaaacaagtggcaa

SEQ ID NO: 2095904 - DNA, 15 bp, Homo sapiens
caaacaagtggcaaa

SEQ ID NO: 2095905 - DNA, 15 bp, Homo sapiens
aaacaagtggcaaag

SEQ ID NO: 2095906 - DNA, 15 bp, Homo sapiens
aacaagtggcaaaga

SEQ ID NO: 2095907 - DNA, 15 bp, Homo sapiens
acaagtggcaaagag

SEQ ID NO: 2095908 - DNA, 15 bp, Homo sapiens
caagtggcaaagagg

SEQ ID NO: 2095909 - DNA, 15 bp, Homo sapiens
aagtggcaaagagga

SEQ ID NO: 2095910 - DNA, 15 bp, Homo sapiens
agtggcaaagaggag

SEQ ID NO: 2095911 - DNA, 15 bp, Homo sapiens
gtggcaaagaggagg

SEQ ID NO: 2095912 - DNA, 15 bp, Homo sapiens
tggcaaagaggagga

SEQ ID NO: 2095913 - DNA, 15 bp, Homo sapiens
ggcaaagaggaggag

SEQ ID NO: 2095914 - DNA, 15 bp, Homo sapiens
gcaaagaggaggagg

SEQ ID NO: 2095915 - DNA, 15 bp, Homo sapiens
caaagaggaggagga

SEQ ID NO: 2095916 - DNA, 15 bp, Homo sapiens
aaagaggaggaggag

SEQ ID NO: 2095917 - DNA, 15 bp, Homo sapiens
aagaggaggaggagg

SEQ ID NO: 2095918 - DNA, 15 bp, Homo sapiens
agaggaggaggagga

SEQ ID NO: 2095919 - DNA, 15 bp, Homo sapiens
gaggaggaggaggag

SEQ ID NO: 2095920 - DNA, 15 bp, Homo sapiens
aggaggaggaggagg

SEQ ID NO: 2095921 - DNA, 15 bp, Homo sapiens
gaggaggaggagggg

SEQ ID NO: 2095922 - DNA, 15 bp, Homo sapiens
ggaggaggaggggaa

SEQ ID NO: 2095923 - DNA, 15 bp, Homo sapiens
gaggaggaggggaag

SEQ ID NO: 2095924 - DNA, 15 bp, Homo sapiens
aggaggaggggaagg

SEQ ID NO: 2095925 - DNA, 15 bp, Homo sapiens
ggaggaggggaagga

SEQ ID NO: 2095926 - DNA, 15 bp, Homo sapiens
gaggaggggaaggag

SEQ ID NO: 2095927 - DNA, 15 bp, Homo sapiens
aggaggggaaggagg

SEQ ID NO: 2095928 - DNA, 15 bp, Homo sapiens
ggaggggaaggagga

SEQ ID NO: 2095929 - DNA, 15 bp, Homo sapiens
gaggggaaggaggag

SEQ ID NO: 2095930 - DNA, 15 bp, Homo sapiens
aggggaaggaggagg

SEQ ID NO: 2095931 - DNA, 15 bp, Homo sapiens
ggggaaggaggagga

SEQ ID NO: 2095932 - DNA, 15 bp, Homo sapiens
gggaaggaggaggaa

SEQ ID NO: 2095933 - DNA, 15 bp, Homo sapiens
ggaaggaggaggaac

SEQ ID NO: 2095934 - DNA, 15 bp, Homo sapiens
gaaggaggaggaacc

SEQ ID NO: 2095935 - DNA, 15 bp, Homo sapiens
aaggaggaggaacct

SEQ ID NO: 2095936 - DNA, 15 bp, Homo sapiens
aggaggaggaacctg

SEQ ID NO: 2095937 - DNA, 15 bp, Homo sapiens
ggaggaggaacctgc

SEQ ID NO: 2095938 - DNA, 15 bp, Homo sapiens
gaggaggaacctgct

SEQ ID NO: 2095939 - DNA, 15 bp, Homo sapiens
aggaggaacctgctt

SEQ ID NO: 2095940 - DNA, 15 bp, Homo sapiens
ggaggaacctgcttc

SEQ ID NO: 2095941 - DNA, 15 bp, Homo sapiens
gaggaacctgcttca

SEQ ID NO: 2095942 - DNA, 15 bp, Homo sapiens
aggaacctgcttcac

SEQ ID NO: 2095943 - DNA, 15 bp, Homo sapiens
ggaacctgcttcacc

SEQ ID NO: 2095944 - DNA, 15 bp, Homo sapiens
gaacctgcttcaccc

SEQ ID NO: 2095945 - DNA, 15 bp, Homo sapiens
aacctgcttcaccct

SEQ ID NO: 2095946 - DNA, 15 bp, Homo sapiens
acctgcttcaccctc

SEQ ID NO: 2095947 - DNA, 15 bp, Homo sapiens
cctgcttcaccctct

SEQ ID NO: 2095948 - DNA, 15 bp, Homo sapiens
ctgcttcaccctctg

SEQ ID NO: 2095949 - DNA, 15 bp, Homo sapiens
tgcttcaccctctgg

SEQ ID NO: 2095950 - DNA, 15 bp, Homo sapiens
gcttcaccctctggc

SEQ ID NO: 2095951 - DNA, 15 bp, Homo sapiens
cttcaccctctggca

SEQ ID NO: 2095952 - DNA, 15 bp, Homo sapiens
ttcaccctctggcac

SEQ ID NO: 2095953 - DNA, 15 bp, Homo sapiens
tcaccctctggcacc

SEQ ID NO: 2095954 - DNA, 15 bp, Homo sapiens
caccctctggcacct

SEQ ID NO: 2095955 - DNA, 15 bp, Homo sapiens
accctctggcacctg

SEQ ID NO: 2095956 - DNA, 15 bp, Homo sapiens
ccctctggcacctgc

SEQ ID NO: 2095957 - DNA, 15 bp, Homo sapiens
cctctggcacctgcg

SEQ ID NO: 2095958 - DNA, 15 bp, Homo sapiens
ctctggcacctgcgg

SEQ ID NO: 2095959 - DNA, 15 bp, Homo sapiens
tctggcacctgcggg

SEQ ID NO: 2095960 - DNA, 15 bp, Homo sapiens
ctggcacctgcgggt

SEQ ID NO: 2095961 - DNA, 15 bp, Homo sapiens
tggcacctgcgggtt

SEQ ID NO: 2095962 - DNA, 15 bp, Homo sapiens
ggcacctgcgggttt

SEQ ID NO: 2095963 - DNA, 15 bp, Homo sapiens
gcacctgcgggtttt

SEQ ID NO: 2095964 - DNA, 15 bp, Homo sapiens
cacctgcgggttttg

SEQ ID NO: 2095965 - DNA, 15 bp, Homo sapiens
acctgcgggttttgt

SEQ ID NO: 2095966 - DNA, 15 bp, Homo sapiens
cctgcgggttttgtt

SEQ ID NO: 2095967 - DNA, 15 bp, Homo sapiens
ctgcgggttttgttc

SEQ ID NO: 2095968 - DNA, 15 bp, Homo sapiens
tgcgggttttgttcc

SEQ ID NO: 2095969 - DNA, 15 bp, Homo sapiens
gcgggttttgttcca

SEQ ID NO: 2095970 - DNA, 15 bp, Homo sapiens
cgggttttgttccac

SEQ ID NO: 2095971 - DNA, 15 bp, Homo sapiens
gggttttgttccacg

SEQ ID NO: 2095972 - DNA, 15 bp, Homo sapiens
ggttttgttccacgt

SEQ ID NO: 2095973 - DNA, 15 bp, Homo sapiens
gttttgttccacgtg

SEQ ID NO: 2095974 - DNA, 15 bp, Homo sapiens
ttttgttccacgtgt

SEQ ID NO: 2095975 - DNA, 15 bp, Homo sapiens
tttgttccacgtgtc

SEQ ID NO: 2095976 - DNA, 15 bp, Homo sapiens
ttgttccacgtgtct

SEQ ID NO: 2095977 - DNA, 15 bp, Homo sapiens
tgttccacgtgtctt

SEQ ID NO: 2095978 - DNA, 15 bp, Homo sapiens
gttccacgtgtcttc

SEQ ID NO: 2095979 - DNA, 15 bp, Homo sapiens
ttccacgtgtcttcc

SEQ ID NO: 2095980 - DNA, 15 bp, Homo sapiens
tccacgtgtcttcct

SEQ ID NO: 2095981 - DNA, 15 bp, Homo sapiens
ccacgtgtcttcctt

SEQ ID NO: 2095982 - DNA, 15 bp, Homo sapiens
cacgtgtcttccttg

SEQ ID NO: 2095983 - DNA, 15 bp, Homo sapiens
acgtgtcttccttgg

SEQ ID NO: 2095984 - DNA, 15 bp, Homo sapiens
cgtgtcttccttggg

SEQ ID NO: 2095985 - DNA, 15 bp, Homo sapiens
gtgtcttccttggga

SEQ ID NO: 2095986 - DNA, 15 bp, Homo sapiens
tgtcttccttgggaa

SEQ ID NO: 2095987 - DNA, 15 bp, Homo sapiens
gtcttccttgggaaa

SEQ ID NO: 2095988 - DNA, 15 bp, Homo sapiens
tcttccttgggaaag

SEQ ID NO: 2095989 - DNA, 15 bp, Homo sapiens
cttccttgggaaaga

SEQ ID NO: 2095990 - DNA, 15 bp, Homo sapiens
ttccttgggaaagac

SEQ ID NO: 2095991 - DNA, 15 bp, Homo sapiens
tccttgggaaagaca

SEQ ID NO: 2095992 - DNA, 15 bp, Homo sapiens
ccttgggaaagacaa

SEQ ID NO: 2095993 - DNA, 15 bp, Homo sapiens
cttgggaaagacaag

SEQ ID NO: 2095994 - DNA, 15 bp, Homo sapiens
ttgggaaagacaagg

SEQ ID NO: 2095995 - DNA, 15 bp, Homo sapiens
tgggaaagacaaggg

SEQ ID NO: 2095996 - DNA, 15 bp, Homo sapiens
gggaaagacaagggg

SEQ ID NO: 2095997 - DNA, 15 bp, Homo sapiens
ggaaagacaaggggt

SEQ ID NO: 2095998 - DNA, 15 bp, Homo sapiens
gaaagacaaggggtt

SEQ ID NO: 2095999 - DNA, 15 bp, Homo sapiens
aaagacaaggggttc

SEQ ID NO: 2096000 - DNA, 15 bp, Homo sapiens
aagacaaggggttct

SEQ ID NO: 2096001 - DNA, 15 bp, Homo sapiens
agacaaggggttctt

SEQ ID NO: 2096002 - DNA, 15 bp, Homo sapiens
gacaaggggttcttt

SEQ ID NO: 2096003 - DNA, 15 bp, Homo sapiens
acaaggggttctttt

SEQ ID NO: 2096004 - DNA, 15 bp, Homo sapiens
caaggggttctttta

SEQ ID NO: 2096005 - DNA, 15 bp, Homo sapiens
aaggggttcttttac

SEQ ID NO: 2096006 - DNA, 15 bp, Homo sapiens
aggggttcttttaca

SEQ ID NO: 2096007 - DNA, 15 bp, Homo sapiens
ggggttcttttacag

SEQ ID NO: 2096008 - DNA, 15 bp, Homo sapiens
gggttcttttacagc

SEQ ID NO: 2096009 - DNA, 15 bp, Homo sapiens
ggttcttttacagcc

SEQ ID NO: 2096010 - DNA, 15 bp, Homo sapiens
gttcttttacagcct

SEQ ID NO: 2096011 - DNA, 15 bp, Homo sapiens
ttcttttacagccta

SEQ ID NO: 2096012 - DNA, 15 bp, Homo sapiens
tcttttacagcctag

SEQ ID NO: 2096013 - DNA, 15 bp, Homo sapiens
cttttacagcctagg

SEQ ID NO: 2096014 - DNA, 15 bp, Homo sapiens
ttttacagcctaggg

SEQ ID NO: 2096015 - DNA, 15 bp, Homo sapiens
tttacagcctagggg

SEQ ID NO: 2096016 - DNA, 15 bp, Homo sapiens
ttacagcctaggggt

SEQ ID NO: 2096017 - DNA, 15 bp, Homo sapiens
tacagcctaggggtg

SEQ ID NO: 2096018 - DNA, 15 bp, Homo sapiens
acagcctaggggtgg

SEQ ID NO: 2096019 - DNA, 15 bp, Homo sapiens
cagcctaggggtggt

SEQ ID NO: 2096020 - DNA, 15 bp, Homo sapiens
agcctaggggtggtt

SEQ ID NO: 2096021 - DNA, 15 bp, Homo sapiens
gcctaggggtggttt

SEQ ID NO: 2096022 - DNA, 15 bp, Homo sapiens
cctaggggtggtttc

SEQ ID NO: 2096023 - DNA, 15 bp, Homo sapiens
ctaggggtggtttcc

SEQ ID NO: 2096024 - DNA, 15 bp, Homo sapiens
taggggtggtttccc

SEQ ID NO: 2096025 - DNA, 15 bp, Homo sapiens
aggggtggtttcccc

SEQ ID NO: 2096026 - DNA, 15 bp, Homo sapiens
ggggtggtttcccct

SEQ ID NO: 2096027 - DNA, 15 bp, Homo sapiens
gggtggtttcccctt

SEQ ID NO: 2096028 - DNA, 15 bp, Homo sapiens
ggtggtttccccttt

SEQ ID NO: 2096029 - DNA, 15 bp, Homo sapiens
gtggtttcccctttc

SEQ ID NO: 2096030 - DNA, 15 bp, Homo sapiens
tggtttcccctttct

SEQ ID NO: 2096031 - DNA, 15 bp, Homo sapiens
ggtttcccctttcta

SEQ ID NO: 2096032 - DNA, 15 bp, Homo sapiens
gtttcccctttctac

SEQ ID NO: 2096033 - DNA, 15 bp, Homo sapiens
tttcccctttctact

SEQ ID NO: 2096034 - DNA, 15 bp, Homo sapiens
ttcccctttctactt

SEQ ID NO: 2096035 - DNA, 15 bp, Homo sapiens
tcccctttctacttc

SEQ ID NO: 2096036 - DNA, 15 bp, Homo sapiens
cccctttctacttct

SEQ ID NO: 2096037 - DNA, 15 bp, Homo sapiens
ccctttctacttctg

SEQ ID NO: 2096038 - DNA, 15 bp, Homo sapiens
cctttctacttctga

SEQ ID NO: 2096039 - DNA, 15 bp, Homo sapiens
ctttctacttctgag

SEQ ID NO: 2096040 - DNA, 15 bp, Homo sapiens
tttctacttctgagt

SEQ ID NO: 2096041 - DNA, 15 bp, Homo sapiens
ttctacttctgagtg

SEQ ID NO: 2096042 - DNA, 15 bp, Homo sapiens
tctacttctgagtga

SEQ ID NO: 2096043 - DNA, 15 bp, Homo sapiens
ctacttctgagtgag

SEQ ID NO: 2096044 - DNA, 15 bp, Homo sapiens
tacttctgagtgaga

SEQ ID NO: 2096045 - DNA, 15 bp, Homo sapiens
acttctgagtgagac

SEQ ID NO: 2096046 - DNA, 15 bp, Homo sapiens
cttctgagtgagacc

SEQ ID NO: 2096047 - DNA, 15 bp, Homo sapiens
ttctgagtgagacct

SEQ ID NO: 2096048 - DNA, 15 bp, Homo sapiens
tctgagtgagacctt

SEQ ID NO: 2096049 - DNA, 15 bp, Homo sapiens
ctgagtgagaccttc

SEQ ID NO: 2096050 - DNA, 15 bp, Homo sapiens
tgagtgagaccttct

SEQ ID NO: 2096051 - DNA, 15 bp, Homo sapiens
gagtgagaccttctc

SEQ ID NO: 2096052 - DNA, 15 bp, Homo sapiens
agtgagaccttctca

SEQ ID NO: 2096053 - DNA, 15 bp, Homo sapiens
gtgagaccttctcaa

SEQ ID NO: 2096054 - DNA, 15 bp, Homo sapiens
tgagaccttctcaag

SEQ ID NO: 2096055 - DNA, 15 bp, Homo sapiens
gagaccttctcaagt

SEQ ID NO: 2096056 - DNA, 15 bp, Homo sapiens
agaccttctcaagtc

SEQ ID NO: 2096057 - DNA, 15 bp, Homo sapiens
gaccttctcaagtca

SEQ ID NO: 2096058 - DNA, 15 bp, Homo sapiens
accttctcaagtcac

SEQ ID NO: 2096059 - DNA, 15 bp, Homo sapiens
ccttctcaagtcacg

SEQ ID NO: 2096060 - DNA, 15 bp, Homo sapiens
cttctcaagtcacgg

SEQ ID NO: 2096061 - DNA, 15 bp, Homo sapiens
ttctcaagtcacggc

SEQ ID NO: 2096062 - DNA, 15 bp, Homo sapiens
tctcaagtcacggct

SEQ ID NO: 2096063 - DNA, 15 bp, Homo sapiens
ctcaagtcacggctc

SEQ ID NO: 2096064 - DNA, 15 bp, Homo sapiens
tcaagtcacggctct

SEQ ID NO: 2096065 - DNA, 15 bp, Homo sapiens
caagtcacggctctt

SEQ ID NO: 2096066 - DNA, 15 bp, Homo sapiens
aagtcacggctcttt

SEQ ID NO: 2096067 - DNA, 15 bp, Homo sapiens
agtcacggctctttg

SEQ ID NO: 2096068 - DNA, 15 bp, Homo sapiens
gtcacggctctttgg

SEQ ID NO: 2096069 - DNA, 15 bp, Homo sapiens
tcacggctctttggg

SEQ ID NO: 2096070 - DNA, 15 bp, Homo sapiens
cacggctctttgggc

SEQ ID NO: 2096071 - DNA, 15 bp, Homo sapiens
acggctctttgggcc

SEQ ID NO: 2096072 - DNA, 15 bp, Homo sapiens
cggctctttgggccc

SEQ ID NO: 2096073 - DNA, 15 bp, Homo sapiens
ggctctttgggccca

SEQ ID NO: 2096074 - DNA, 15 bp, Homo sapiens
gctctttgggcccac

SEQ ID NO: 2096075 - DNA, 15 bp, Homo sapiens
ctctttgggcccaca

SEQ ID NO: 2096076 - DNA, 15 bp, Homo sapiens
tctttgggcccacat

SEQ ID NO: 2096077 - DNA, 15 bp, Homo sapiens
ctttgggcccacatg

SEQ ID NO: 2096078 - DNA, 15 bp, Homo sapiens
tttgggcccacatgg

SEQ ID NO: 2096079 - DNA, 15 bp, Homo sapiens
ttgggcccacatggc

SEQ ID NO: 2096080 - DNA, 15 bp, Homo sapiens
tgggcccacatggct

SEQ ID NO: 2096081 - DNA, 15 bp, Homo sapiens
gggcccacatggcta

SEQ ID NO: 2096082 - DNA, 15 bp, Homo sapiens
ggcccacatggctaa

SEQ ID NO: 2096083 - DNA, 15 bp, Homo sapiens
gcccacatggctaag

SEQ ID NO: 2096084 - DNA, 15 bp, Homo sapiens
cccacatggctaagg

SEQ ID NO: 2096085 - DNA, 15 bp, Homo sapiens
ccacatggctaaggt

SEQ ID NO: 2096086 - DNA, 15 bp, Homo sapiens
cacatggctaaggtc

SEQ ID NO: 2096087 - DNA, 15 bp, Homo sapiens
acatggctaaggtct

SEQ ID NO: 2096088 - DNA, 15 bp, Homo sapiens
catggctaaggtcta

SEQ ID NO: 2096089 - DNA, 15 bp, Homo sapiens
atggctaaggtctag

SEQ ID NO: 2096090 - DNA, 15 bp, Homo sapiens
tggctaaggtctagc

SEQ ID NO: 2096091 - DNA, 15 bp, Homo sapiens
ggctaaggtctagcc

SEQ ID NO: 2096092 - DNA, 15 bp, Homo sapiens
gctaaggtctagcca

SEQ ID NO: 2096093 - DNA, 15 bp, Homo sapiens
ctaaggtctagccac

SEQ ID NO: 2096094 - DNA, 15 bp, Homo sapiens
taaggtctagccacc

SEQ ID NO: 2096095 - DNA, 15 bp, Homo sapiens
aaggtctagccacct

SEQ ID NO: 2096096 - DNA, 15 bp, Homo sapiens
aggtctagccacctg

SEQ ID NO: 2096097 - DNA, 15 bp, Homo sapiens
ggtctagccacctgt

SEQ ID NO: 2096098 - DNA, 15 bp, Homo sapiens
gtctagccacctgtg

SEQ ID NO: 2096099 - DNA, 15 bp, Homo sapiens
tctagccacctgtgg

SEQ ID NO: 2096100 - DNA, 15 bp, Homo sapiens
ctagccacctgtggg

SEQ ID NO: 2096101 - DNA, 15 bp, Homo sapiens
tagccacctgtgggt

SEQ ID NO: 2096102 - DNA, 15 bp, Homo sapiens
agccacctgtgggtg

SEQ ID NO: 2096103 - DNA, 15 bp, Homo sapiens
gccacctgtgggtgt

SEQ ID NO: 2096104 - DNA, 15 bp, Homo sapiens
ccacctgtgggtgtc

SEQ ID NO: 2096105 - DNA, 15 bp, Homo sapiens
cacctgtgggtgtcc

SEQ ID NO: 2096106 - DNA, 15 bp, Homo sapiens
acctgtgggtgtcct

SEQ ID NO: 2096107 - DNA, 15 bp, Homo sapiens
cctgtgggtgtcctg

SEQ ID NO: 2096108 - DNA, 15 bp, Homo sapiens
ctgtgggtgtcctgt

SEQ ID NO: 2096109 - DNA, 15 bp, Homo sapiens
tgtgggtgtcctgtg

SEQ ID NO: 2096110 - DNA, 15 bp, Homo sapiens
gtgggtgtcctgtgc

SEQ ID NO: 2096111 - DNA, 15 bp, Homo sapiens
tgggtgtcctgtgct

SEQ ID NO: 2096112 - DNA, 15 bp, Homo sapiens
gggtgtcctgtgctg

SEQ ID NO: 2096113 - DNA, 15 bp, Homo sapiens
ggtgtcctgtgctgc

SEQ ID NO: 2096114 - DNA, 15 bp, Homo sapiens
gtgtcctgtgctgcc

SEQ ID NO: 2096115 - DNA, 15 bp, Homo sapiens
tgtcctgtgctgcct

SEQ ID NO: 2096116 - DNA, 15 bp, Homo sapiens
gtcctgtgctgcctc

SEQ ID NO: 2096117 - DNA, 15 bp, Homo sapiens
tcctgtgctgcctca

SEQ ID NO: 2096118 - DNA, 15 bp, Homo sapiens
cctgtgctgcctcag

SEQ ID NO: 2096119 - DNA, 15 bp, Homo sapiens
ctgtgctgcctcagt

SEQ ID NO: 2096120 - DNA, 15 bp, Homo sapiens
tgtgctgcctcagtg

SEQ ID NO: 2096121 - DNA, 15 bp, Homo sapiens
gtgctgcctcagtgg

SEQ ID NO: 2096122 - DNA, 15 bp, Homo sapiens
tgctgcctcagtggg

SEQ ID NO: 2096123 - DNA, 15 bp, Homo sapiens
gctgcctcagtgggt

SEQ ID NO: 2096124 - DNA, 15 bp, Homo sapiens
ctgcctcagtgggtg

SEQ ID NO: 2096125 - DNA, 15 bp, Homo sapiens
tgcctcagtgggtgg

SEQ ID NO: 2096126 - DNA, 15 bp, Homo sapiens
gcctcagtgggtggt

SEQ ID NO: 2096127 - DNA, 15 bp, Homo sapiens
cctcagtgggtggtg

SEQ ID NO: 2096128 - DNA, 15 bp, Homo sapiens
ctcagtgggtggtgt

SEQ ID NO: 2096129 - DNA, 15 bp, Homo sapiens
tcagtgggtggtgtg

SEQ ID NO: 2096130 - DNA, 15 bp, Homo sapiens
cagtgggtggtgtgg

SEQ ID NO: 2096131 - DNA, 15 bp, Homo sapiens
agtgggtggtgtggg

SEQ ID NO: 2096132 - DNA, 15 bp, Homo sapiens
gtgggtggtgtgggg

SEQ ID NO: 2096133 - DNA, 15 bp, Homo sapiens
tgggtggtgtggggg

SEQ ID NO: 2096134 - DNA, 15 bp, Homo sapiens
gggtggtgtgggggc

SEQ ID NO: 2096135 - DNA, 15 bp, Homo sapiens
ggtggtgtgggggcg

SEQ ID NO: 2096136 - DNA, 15 bp, Homo sapiens
gtggtgtgggggcgg

SEQ ID NO: 2096137 - DNA, 15 bp, Homo sapiens
tggtgtgggggcggg

SEQ ID NO: 2096138 - DNA, 15 bp, Homo sapiens
ggtgtgggggcgggg

SEQ ID NO: 2096139 - DNA, 15 bp, Homo sapiens
gtgtgggggcggggc

SEQ ID NO: 2096140 - DNA, 15 bp, Homo sapiens
tgtgggggcggggct

SEQ ID NO: 2096141 - DNA, 15 bp, Homo sapiens
gtgggggcggggctg

SEQ ID NO: 2096142 - DNA, 15 bp, Homo sapiens
tgggggcggggctga

SEQ ID NO: 2096143 - DNA, 15 bp, Homo sapiens
gggggcggggctgac

SEQ ID NO: 2096144 - DNA, 15 bp, Homo sapiens
ggggcggggctgacc

SEQ ID NO: 2096145 - DNA, 15 bp, Homo sapiens
gggcggggctgacct

SEQ ID NO: 2096146 - DNA, 15 bp, Homo sapiens
ggcggggctgacctc

SEQ ID NO: 2096147 - DNA, 15 bp, Homo sapiens
gcggggctgacctcc

SEQ ID NO: 2096148 - DNA, 15 bp, Homo sapiens
cggggctgacctccc

SEQ ID NO: 2096149 - DNA, 15 bp, Homo sapiens
ggggctgacctcccc

SEQ ID NO: 2096150 - DNA, 15 bp, Homo sapiens
gggctgacctccccc

SEQ ID NO: 2096151 - DNA, 15 bp, Homo sapiens
ggctgacctcccccg

SEQ ID NO: 2096152 - DNA, 15 bp, Homo sapiens
gctgacctcccccgc

SEQ ID NO: 2096153 - DNA, 15 bp, Homo sapiens
ctgacctcccccgcg

SEQ ID NO: 2096154 - DNA, 15 bp, Homo sapiens
tgacctcccccgcgc

SEQ ID NO: 2096155 - DNA, 15 bp, Homo sapiens
gacctcccccgcgcc

SEQ ID NO: 2096156 - DNA, 15 bp, Homo sapiens
acctcccccgcgcct

SEQ ID NO: 2096157 - DNA, 15 bp, Homo sapiens
cctcccccgcgcctg

SEQ ID NO: 2096158 - DNA, 15 bp, Homo sapiens
ctcccccgcgcctgg

SEQ ID NO: 2096159 - DNA, 15 bp, Homo sapiens
tcccccgcgcctggc

SEQ ID NO: 2096160 - DNA, 15 bp, Homo sapiens
cccccgcgcctggct

SEQ ID NO: 2096161 - DNA, 15 bp, Homo sapiens
ccccgcgcctggctc

SEQ ID NO: 2096162 - DNA, 15 bp, Homo sapiens
cccgcgcctggctca

SEQ ID NO: 2096163 - DNA, 15 bp, Homo sapiens
ccgcgcctggctcag

SEQ ID NO: 2096164 - DNA, 15 bp, Homo sapiens
cgcgcctggctcagt

SEQ ID NO: 2096165 - DNA, 15 bp, Homo sapiens
gcgcctggctcagtg

SEQ ID NO: 2096166 - DNA, 15 bp, Homo sapiens
cgcctggctcagtgc

SEQ ID NO: 2096167 - DNA, 15 bp, Homo sapiens
gcctggctcagtgca

SEQ ID NO: 2096168 - DNA, 15 bp, Homo sapiens
cctggctcagtgcag

SEQ ID NO: 2096169 - DNA, 15 bp, Homo sapiens
ctggctcagtgcagc

SEQ ID NO: 2096170 - DNA, 15 bp, Homo sapiens
tggctcagtgcagca

SEQ ID NO: 2096171 - DNA, 15 bp, Homo sapiens
ggctcagtgcagcag

SEQ ID NO: 2096172 - DNA, 15 bp, Homo sapiens
gctcagtgcagcaga

SEQ ID NO: 2096173 - DNA, 15 bp, Homo sapiens
ctcagtgcagcagac

SEQ ID NO: 2096174 - DNA, 15 bp, Homo sapiens
tcagtgcagcagacc

SEQ ID NO: 2096175 - DNA, 15 bp, Homo sapiens
cagtgcagcagaccc

SEQ ID NO: 2096176 - DNA, 15 bp, Homo sapiens
agtgcagcagaccct

SEQ ID NO: 2096177 - DNA, 15 bp, Homo sapiens
gtgcagcagaccctg

SEQ ID NO: 2096178 - DNA, 15 bp, Homo sapiens
tgcagcagaccctgg

SEQ ID NO: 2096179 - DNA, 15 bp, Homo sapiens
gcagcagaccctggc

SEQ ID NO: 2096180 - DNA, 15 bp, Homo sapiens
cagcagaccctggcc

SEQ ID NO: 2096181 - DNA, 15 bp, Homo sapiens
agcagaccctggccc

SEQ ID NO: 2096182 - DNA, 15 bp, Homo sapiens
gcagaccctggcccc

SEQ ID NO: 2096183 - DNA, 15 bp, Homo sapiens
cagaccctggcccct

SEQ ID NO: 2096184 - DNA, 15 bp, Homo sapiens
agaccctggcccctg

SEQ ID NO: 2096185 - DNA, 15 bp, Homo sapiens
gaccctggcccctgt

SEQ ID NO: 2096186 - DNA, 15 bp, Homo sapiens
accctggcccctgtg

SEQ ID NO: 2096187 - DNA, 15 bp, Homo sapiens
ccctggcccctgtgc

SEQ ID NO: 2096188 - DNA, 15 bp, Homo sapiens
cctggcccctgtgcc

SEQ ID NO: 2096189 - DNA, 15 bp, Homo sapiens
ctggcccctgtgccc

SEQ ID NO: 2096190 - DNA, 15 bp, Homo sapiens
tggcccctgtgcccg

SEQ ID NO: 2096191 - DNA, 15 bp, Homo sapiens
ggcccctgtgcccgc

SEQ ID NO: 2096192 - DNA, 15 bp, Homo sapiens
gcccctgtgcccgct

SEQ ID NO: 2096193 - DNA, 15 bp, Homo sapiens
cccctgtgcccgctc

SEQ ID NO: 2096194 - DNA, 15 bp, Homo sapiens
ccctgtgcccgctct

SEQ ID NO: 2096195 - DNA, 15 bp, Homo sapiens
cctgtgcccgctctc

SEQ ID NO: 2096196 - DNA, 15 bp, Homo sapiens
ctgtgcccgctctct

SEQ ID NO: 2096197 - DNA, 15 bp, Homo sapiens
tgtgcccgctctctg

SEQ ID NO: 2096198 - DNA, 15 bp, Homo sapiens
gtgcccgctctctgc

SEQ ID NO: 2096199 - DNA, 15 bp, Homo sapiens
tgcccgctctctgcc

SEQ ID NO: 2096200 - DNA, 15 bp, Homo sapiens
gcccgctctctgccc

SEQ ID NO: 2096201 - DNA, 15 bp, Homo sapiens
cccgctctctgccct

SEQ ID NO: 2096202 - DNA, 15 bp, Homo sapiens
ccgctctctgccctg

SEQ ID NO: 2096203 - DNA, 15 bp, Homo sapiens
cgctctctgccctga

SEQ ID NO: 2096204 - DNA, 15 bp, Homo sapiens
gctctctgccctgag

SEQ ID NO: 2096205 - DNA, 15 bp, Homo sapiens
ctctctgccctgagc

SEQ ID NO: 2096206 - DNA, 15 bp, Homo sapiens
tctctgccctgagca

SEQ ID NO: 2096207 - DNA, 15 bp, Homo sapiens
ctctgccctgagcag

SEQ ID NO: 2096208 - DNA, 15 bp, Homo sapiens
tctgccctgagcagg

SEQ ID NO: 2096209 - DNA, 15 bp, Homo sapiens
ctgccctgagcagga

SEQ ID NO: 2096210 - DNA, 15 bp, Homo sapiens
tgccctgagcaggag

SEQ ID NO: 2096211 - DNA, 15 bp, Homo sapiens
gccctgagcaggagt

SEQ ID NO: 2096212 - DNA, 15 bp, Homo sapiens
ccctgagcaggagtt

SEQ ID NO: 2096213 - DNA, 15 bp, Homo sapiens
cctgagcaggagttt

SEQ ID NO: 2096214 - DNA, 15 bp, Homo sapiens
ctgagcaggagtttg

SEQ ID NO: 2096215 - DNA, 15 bp, Homo sapiens
tgagcaggagtttga

SEQ ID NO: 2096216 - DNA, 15 bp, Homo sapiens
gagcaggagtttgat

SEQ ID NO: 2096217 - DNA, 15 bp, Homo sapiens
agcaggagtttgatt

SEQ ID NO: 2096218 - DNA, 15 bp, Homo sapiens
gcaggagtttgattt

SEQ ID NO: 2096219 - DNA, 15 bp, Homo sapiens
caggagtttgatttt

SEQ ID NO: 2096220 - DNA, 15 bp, Homo sapiens
aggagtttgattttc

SEQ ID NO: 2096221 - DNA, 15 bp, Homo sapiens
ggagtttgattttcc

SEQ ID NO: 2096222 - DNA, 15 bp, Homo sapiens
gagtttgattttcct

SEQ ID NO: 2096223 - DNA, 15 bp, Homo sapiens
agtttgattttccta

SEQ ID NO: 2096224 - DNA, 15 bp, Homo sapiens
gtttgattttcctac

SEQ ID NO: 2096225 - DNA, 15 bp, Homo sapiens
tttgattttcctacc

SEQ ID NO: 2096226 - DNA, 15 bp, Homo sapiens
ttgattttcctaccc

SEQ ID NO: 2096227 - DNA, 15 bp, Homo sapiens
tgattttcctacccc

SEQ ID NO: 2096228 - DNA, 15 bp, Homo sapiens
gattttcctaccccg

SEQ ID NO: 2096229 - DNA, 15 bp, Homo sapiens
attttcctaccccgt

SEQ ID NO: 2096230 - DNA, 15 bp, Homo sapiens
ttttcctaccccgtg

SEQ ID NO: 2096231 - DNA, 15 bp, Homo sapiens
tttcctaccccgtgg

SEQ ID NO: 2096232 - DNA, 15 bp, Homo sapiens
ttcctaccccgtggt

SEQ ID NO: 2096233 - DNA, 15 bp, Homo sapiens
tcctaccccgtggtg

SEQ ID NO: 2096234 - DNA, 15 bp, Homo sapiens
cctaccccgtggtga

SEQ ID NO: 2096235 - DNA, 15 bp, Homo sapiens
ctaccccgtggtgaa

SEQ ID NO: 2096236 - DNA, 15 bp, Homo sapiens
taccccgtggtgaag

SEQ ID NO: 2096237 - DNA, 15 bp, Homo sapiens
accccgtggtgaagc

SEQ ID NO: 2096238 - DNA, 15 bp, Homo sapiens
ccccgtggtgaagca

SEQ ID NO: 2096239 - DNA, 15 bp, Homo sapiens
cccgtggtgaagcaa

SEQ ID NO: 2096240 - DNA, 15 bp, Homo sapiens
ccgtggtgaagcaag

SEQ ID NO: 2096241 - DNA, 15 bp, Homo sapiens
cgtggtgaagcaagc

SEQ ID NO: 2096242 - DNA, 15 bp, Homo sapiens
gtggtgaagcaagca

SEQ ID NO: 2096243 - DNA, 15 bp, Homo sapiens
tggtgaagcaagcac

SEQ ID NO: 2096244 - DNA, 15 bp, Homo sapiens
ggtgaagcaagcaca

SEQ ID NO: 2096245 - DNA, 15 bp, Homo sapiens
gtgaagcaagcacag

SEQ ID NO: 2096246 - DNA, 15 bp, Homo sapiens
tgaagcaagcacagg

SEQ ID NO: 2096247 - DNA, 15 bp, Homo sapiens
gaagcaagcacaggt

SEQ ID NO: 2096248 - DNA, 15 bp, Homo sapiens
aagcaagcacaggtg

SEQ ID NO: 2096249 - DNA, 15 bp, Homo sapiens
agcaagcacaggtgg

SEQ ID NO: 2096250 - DNA, 15 bp, Homo sapiens
gcaagcacaggtggg

SEQ ID NO: 2096251 - DNA, 15 bp, Homo sapiens
caagcacaggtgggc

SEQ ID NO: 2096252 - DNA, 15 bp, Homo sapiens
aagcacaggtgggcg

SEQ ID NO: 2096253 - DNA, 15 bp, Homo sapiens
agcacaggtgggcgg

SEQ ID NO: 2096254 - DNA, 15 bp, Homo sapiens
gcacaggtgggcgga

SEQ ID NO: 2096255 - DNA, 15 bp, Homo sapiens
cacaggtgggcggag

SEQ ID NO: 2096256 - DNA, 15 bp, Homo sapiens
acaggtgggcggagg

SEQ ID NO: 2096257 - DNA, 15 bp, Homo sapiens
caggtgggcggaggt

SEQ ID NO: 2096258 - DNA, 15 bp, Homo sapiens
aggtgggcggaggtg

SEQ ID NO: 2096259 - DNA, 15 bp, Homo sapiens
ggtgggcggaggtgg

SEQ ID NO: 2096260 - DNA, 15 bp, Homo sapiens
gtgggcggaggtggg

SEQ ID NO: 2096261 - DNA, 15 bp, Homo sapiens
tgggcggaggtgggc

SEQ ID NO: 2096262 - DNA, 15 bp, Homo sapiens
gggcggaggtgggca

SEQ ID NO: 2096263 - DNA, 15 bp, Homo sapiens
gcggaggtgggcagc

SEQ ID NO: 2096264 - DNA, 15 bp, Homo sapiens
cggaggtgggcagcg

SEQ ID NO: 2096265 - DNA, 15 bp, Homo sapiens
ggaggtgggcagcgg

SEQ ID NO: 2096266 - DNA, 15 bp, Homo sapiens
gaggtgggcagcggt

SEQ ID NO: 2096267 - DNA, 15 bp, Homo sapiens
aggtgggcagcggtt

SEQ ID NO: 2096268 - DNA, 15 bp, Homo sapiens
ggtgggcagcggttt

SEQ ID NO: 2096269 - DNA, 15 bp, Homo sapiens
gtgggcagcggtttc

SEQ ID NO: 2096270 - DNA, 15 bp, Homo sapiens
tgggcagcggtttcc

SEQ ID NO: 2096271 - DNA, 15 bp, Homo sapiens
gggcagcggtttcca

SEQ ID NO: 2096272 - DNA, 15 bp, Homo sapiens
ggcagcggtttccag

SEQ ID NO: 2096273 - DNA, 15 bp, Homo sapiens
gcagcggtttccagc

SEQ ID NO: 2096274 - DNA, 15 bp, Homo sapiens
cagcggtttccagcc

SEQ ID NO: 2096275 - DNA, 15 bp, Homo sapiens
agcggtttccagccc

SEQ ID NO: 2096276 - DNA, 15 bp, Homo sapiens
gcggtttccagcccc

SEQ ID NO: 2096277 - DNA, 15 bp, Homo sapiens
cggtttccagcccca

SEQ ID NO: 2096278 - DNA, 15 bp, Homo sapiens
ggtttccagccccag

SEQ ID NO: 2096279 - DNA, 15 bp, Homo sapiens
gtttccagccccagc

SEQ ID NO: 2096280 - DNA, 15 bp, Homo sapiens
tttccagccccagcc

SEQ ID NO: 2096281 - DNA, 15 bp, Homo sapiens
ttccagccccagcca

SEQ ID NO: 2096282 - DNA, 15 bp, Homo sapiens
tccagccccagccac

SEQ ID NO: 2096283 - DNA, 15 bp, Homo sapiens
ccagccccagccacc

SEQ ID NO: 2096284 - DNA, 15 bp, Homo sapiens
cagccccagccaccg

SEQ ID NO: 2096285 - DNA, 15 bp, Homo sapiens
agccccagccaccgg

SEQ ID NO: 2096286 - DNA, 15 bp, Homo sapiens
gccccagccaccggg

SEQ ID NO: 2096287 - DNA, 15 bp, Homo sapiens
ccccagccaccgggg

SEQ ID NO: 2096288 - DNA, 15 bp, Homo sapiens
cccagccaccggggc

SEQ ID NO: 2096289 - DNA, 15 bp, Homo sapiens
ccagccaccggggca

SEQ ID NO: 2096290 - DNA, 15 bp, Homo sapiens
cagccaccggggcag

SEQ ID NO: 2096291 - DNA, 15 bp, Homo sapiens
agccaccggggcagg

SEQ ID NO: 2096292 - DNA, 15 bp, Homo sapiens
gccaccggggcaggg

SEQ ID NO: 2096293 - DNA, 15 bp, Homo sapiens
ccaccggggcaggga

SEQ ID NO: 2096294 - DNA, 15 bp, Homo sapiens
caccggggcagggag

SEQ ID NO: 2096295 - DNA, 15 bp, Homo sapiens
accggggcagggagg

SEQ ID NO: 2096296 - DNA, 15 bp, Homo sapiens
ccggggcagggaggc

SEQ ID NO: 2096297 - DNA, 15 bp, Homo sapiens
cggggcagggaggcc

SEQ ID NO: 2096298 - DNA, 15 bp, Homo sapiens
ggggcagggaggcct

SEQ ID NO: 2096299 - DNA, 15 bp, Homo sapiens
gggcagggaggcctc

SEQ ID NO: 2096300 - DNA, 15 bp, Homo sapiens
ggcagggaggcctct

SEQ ID NO: 2096301 - DNA, 15 bp, Homo sapiens
gcagggaggcctctg

SEQ ID NO: 2096302 - DNA, 15 bp, Homo sapiens
cagggaggcctctgt

SEQ ID NO: 2096303 - DNA, 15 bp, Homo sapiens
agggaggcctctgtt

SEQ ID NO: 2096304 - DNA, 15 bp, Homo sapiens
gggaggcctctgttg

SEQ ID NO: 2096305 - DNA, 15 bp, Homo sapiens
ggaggcctctgttgc

SEQ ID NO: 2096306 - DNA, 15 bp, Homo sapiens
gaggcctctgttgct

SEQ ID NO: 2096307 - DNA, 15 bp, Homo sapiens
aggcctctgttgctc

SEQ ID NO: 2096308 - DNA, 15 bp, Homo sapiens
ggcctctgttgctca

SEQ ID NO: 2096309 - DNA, 15 bp, Homo sapiens
gcctctgttgctcag

SEQ ID NO: 2096310 - DNA, 15 bp, Homo sapiens
cctctgttgctcagg

SEQ ID NO: 2096311 - DNA, 15 bp, Homo sapiens
ctctgttgctcaggg

SEQ ID NO: 2096312 - DNA, 15 bp, Homo sapiens
tctgttgctcagggc

SEQ ID NO: 2096313 - DNA, 15 bp, Homo sapiens
ctgttgctcagggca

SEQ ID NO: 2096314 - DNA, 15 bp, Homo sapiens
tgttgctcagggcaa

SEQ ID NO: 2096315 - DNA, 15 bp, Homo sapiens
gttgctcagggcaag

SEQ ID NO: 2096316 - DNA, 15 bp, Homo sapiens
ttgctcagggcaagg

SEQ ID NO: 2096317 - DNA, 15 bp, Homo sapiens
tgctcagggcaaggg

SEQ ID NO: 2096318 - DNA, 15 bp, Homo sapiens
gctcagggcaaggga

SEQ ID NO: 2096319 - DNA, 15 bp, Homo sapiens
ctcagggcaagggag

SEQ ID NO: 2096320 - DNA, 15 bp, Homo sapiens
tcagggcaagggagg

SEQ ID NO: 2096321 - DNA, 15 bp, Homo sapiens
cagggcaagggaggc

SEQ ID NO: 2096322 - DNA, 15 bp, Homo sapiens
agggcaagggaggca

SEQ ID NO: 2096323 - DNA, 15 bp, Homo sapiens
gggcaagggaggcag

SEQ ID NO: 2096324 - DNA, 15 bp, Homo sapiens
ggcaagggaggcagg

SEQ ID NO: 2096325 - DNA, 15 bp, Homo sapiens
gcaagggaggcaggg

SEQ ID NO: 2096326 - DNA, 15 bp, Homo sapiens
caagggaggcagggg

SEQ ID NO: 2096327 - DNA, 15 bp, Homo sapiens
aagggaggcaggggg

SEQ ID NO: 2096328 - DNA, 15 bp, Homo sapiens
agggaggcagggggc

SEQ ID NO: 2096329 - DNA, 15 bp, Homo sapiens
gggaggcagggggct

SEQ ID NO: 2096330 - DNA, 15 bp, Homo sapiens
ggaggcagggggctt

SEQ ID NO: 2096331 - DNA, 15 bp, Homo sapiens
gaggcagggggctta

SEQ ID NO: 2096332 - DNA, 15 bp, Homo sapiens
aggcagggggcttag

SEQ ID NO: 2096333 - DNA, 15 bp, Homo sapiens
ggcagggggcttagt

SEQ ID NO: 2096334 - DNA, 15 bp, Homo sapiens
gcagggggcttagtg

SEQ ID NO: 2096335 - DNA, 15 bp, Homo sapiens
cagggggcttagtgg

SEQ ID NO: 2096336 - DNA, 15 bp, Homo sapiens
agggggcttagtggg

SEQ ID NO: 2096337 - DNA, 15 bp, Homo sapiens
gggggcttagtggga

SEQ ID NO: 2096338 - DNA, 15 bp, Homo sapiens
ggggcttagtgggac

SEQ ID NO: 2096339 - DNA, 15 bp, Homo sapiens
gggcttagtgggacg

SEQ ID NO: 2096340 - DNA, 15 bp, Homo sapiens
ggcttagtgggacga

SEQ ID NO: 2096341 - DNA, 15 bp, Homo sapiens
gcttagtgggacgaa

SEQ ID NO: 2096342 - DNA, 15 bp, Homo sapiens
cttagtgggacgaag

SEQ ID NO: 2096343 - DNA, 15 bp, Homo sapiens
ttagtgggacgaagg

SEQ ID NO: 2096344 - DNA, 15 bp, Homo sapiens
tagtgggacgaaggc

SEQ ID NO: 2096345 - DNA, 15 bp, Homo sapiens
agtgggacgaaggct

SEQ ID NO: 2096346 - DNA, 15 bp, Homo sapiens
gtgggacgaaggctc

SEQ ID NO: 2096347 - DNA, 15 bp, Homo sapiens
tgggacgaaggctca

SEQ ID NO: 2096348 - DNA, 15 bp, Homo sapiens
gggacgaaggctcac

SEQ ID NO: 2096349 - DNA, 15 bp, Homo sapiens
ggacgaaggctcacc

SEQ ID NO: 2096350 - DNA, 15 bp, Homo sapiens
gacgaaggctcaccc

SEQ ID NO: 2096351 - DNA, 15 bp, Homo sapiens
acgaaggctcacccc

SEQ ID NO: 2096352 - DNA, 15 bp, Homo sapiens
cgaaggctcacccca

SEQ ID NO: 2096353 - DNA, 15 bp, Homo sapiens
gaaggctcaccccac

SEQ ID NO: 2096354 - DNA, 15 bp, Homo sapiens
aaggctcaccccaca

SEQ ID NO: 2096355 - DNA, 15 bp, Homo sapiens
aggctcaccccacac

SEQ ID NO: 2096356 - DNA, 15 bp, Homo sapiens
ggctcaccccacact

SEQ ID NO: 2096357 - DNA, 15 bp, Homo sapiens
gctcaccccacactc

SEQ ID NO: 2096358 - DNA, 15 bp, Homo sapiens
ctcaccccacactct

SEQ ID NO: 2096359 - DNA, 15 bp, Homo sapiens
tcaccccacactctt

SEQ ID NO: 2096360 - DNA, 15 bp, Homo sapiens
caccccacactctta

SEQ ID NO: 2096361 - DNA, 15 bp, Homo sapiens
accccacactcttat

SEQ ID NO: 2096362 - DNA, 15 bp, Homo sapiens
ccccacactcttatc

SEQ ID NO: 2096363 - DNA, 15 bp, Homo sapiens
cccacactcttatca

SEQ ID NO: 2096364 - DNA, 15 bp, Homo sapiens
ccacactcttatcat

SEQ ID NO: 2096365 - DNA, 15 bp, Homo sapiens
cacactcttatcatt

SEQ ID NO: 2096366 - DNA, 15 bp, Homo sapiens
acactcttatcatta

SEQ ID NO: 2096367 - DNA, 15 bp, Homo sapiens
cactcttatcattag

SEQ ID NO: 2096368 - DNA, 15 bp, Homo sapiens
actcttatcattagc

SEQ ID NO: 2096369 - DNA, 15 bp, Homo sapiens
ctcttatcattagca

SEQ ID NO: 2096370 - DNA, 15 bp, Homo sapiens
tcttatcattagcat

SEQ ID NO: 2096371 - DNA, 15 bp, Homo sapiens
cttatcattagcatt

SEQ ID NO: 2096372 - DNA, 15 bp, Homo sapiens
ttatcattagcatta

SEQ ID NO: 2096373 - DNA, 15 bp, Homo sapiens
tatcattagcattat

SEQ ID NO: 2096374 - DNA, 15 bp, Homo sapiens
atcattagcattatc

SEQ ID NO: 2096375 - DNA, 15 bp, Homo sapiens
tcattagcattatct

SEQ ID NO: 2096376 - DNA, 15 bp, Homo sapiens
cattagcattatctg

SEQ ID NO: 2096377 - DNA, 15 bp, Homo sapiens
attagcattatctgt

SEQ ID NO: 2096378 - DNA, 15 bp, Homo sapiens
ttagcattatctgta

SEQ ID NO: 2096379 - DNA, 15 bp, Homo sapiens
tagcattatctgtat

SEQ ID NO: 2096380 - DNA, 15 bp, Homo sapiens
agcattatctgtatt

SEQ ID NO: 2096381 - DNA, 15 bp, Homo sapiens
gcattatctgtattt

SEQ ID NO: 2096382 - DNA, 15 bp, Homo sapiens
cattatctgtatttt

SEQ ID NO: 2096383 - DNA, 15 bp, Homo sapiens
attatctgtattttt

SEQ ID NO: 2096384 - DNA, 15 bp, Homo sapiens
ttatctgtattttta

SEQ ID NO: 2096385 - DNA, 15 bp, Homo sapiens
tatctgtatttttaa

SEQ ID NO: 2096386 - DNA, 15 bp, Homo sapiens
atctgtatttttaat

SEQ ID NO: 2096387 - DNA, 15 bp, Homo sapiens
tctgtatttttaatt

SEQ ID NO: 2096388 - DNA, 15 bp, Homo sapiens
ctgtatttttaattt

SEQ ID NO: 2096389 - DNA, 15 bp, Homo sapiens
tgtatttttaatttt

SEQ ID NO: 2096390 - DNA, 15 bp, Homo sapiens
gtatttttaattttt

SEQ ID NO: 2096391 - DNA, 15 bp, Homo sapiens
tatttttaattttta

SEQ ID NO: 2096392 - DNA, 15 bp, Homo sapiens
tttttaatttttaag

SEQ ID NO: 2096393 - DNA, 15 bp, Homo sapiens
ttttaatttttaagt

SEQ ID NO: 2096394 - DNA, 15 bp, Homo sapiens
tttaatttttaagtt

SEQ ID NO: 2096395 - DNA, 15 bp, Homo sapiens
ttaatttttaagttg

SEQ ID NO: 2096396 - DNA, 15 bp, Homo sapiens
taatttttaagttga

SEQ ID NO: 2096397 - DNA, 15 bp, Homo sapiens
aatttttaagttgag

SEQ ID NO: 2096398 - DNA, 15 bp, Homo sapiens
atttttaagttgaga

SEQ ID NO: 2096399 - DNA, 15 bp, Homo sapiens
tttttaagttgagaa

SEQ ID NO: 2096400 - DNA, 15 bp, Homo sapiens
ttttaagttgagaaa

SEQ ID NO: 2096401 - DNA, 15 bp, Homo sapiens
tttaagttgagaaat

SEQ ID NO: 2096402 - DNA, 15 bp, Homo sapiens
ttaagttgagaaatt

SEQ ID NO: 2096403 - DNA, 15 bp, Homo sapiens
taagttgagaaattt

SEQ ID NO: 2096404 - DNA, 15 bp, Homo sapiens
aagttgagaaatttt

SEQ ID NO: 2096405 - DNA, 15 bp, Homo sapiens
agttgagaaattttc

SEQ ID NO: 2096406 - DNA, 15 bp, Homo sapiens
gttgagaaattttct

SEQ ID NO: 2096407 - DNA, 15 bp, Homo sapiens
ttgagaaattttcta

SEQ ID NO: 2096408 - DNA, 15 bp, Homo sapiens
tgagaaattttctac

SEQ ID NO: 2096409 - DNA, 15 bp, Homo sapiens
gagaaattttctaca

SEQ ID NO: 2096410 - DNA, 15 bp, Homo sapiens
agaaattttctacaa

SEQ ID NO: 2096411 - DNA, 15 bp, Homo sapiens
gaaattttctacaac

SEQ ID NO: 2096412 - DNA, 15 bp, Homo sapiens
aaattttctacaact

SEQ ID NO: 2096413 - DNA, 15 bp, Homo sapiens
aattttctacaactg

SEQ ID NO: 2096414 - DNA, 15 bp, Homo sapiens
attttctacaactgt

SEQ ID NO: 2096415 - DNA, 15 bp, Homo sapiens
ttttctacaactgtc

SEQ ID NO: 2096416 - DNA, 15 bp, Homo sapiens
tttctacaactgtca

SEQ ID NO: 2096417 - DNA, 15 bp, Homo sapiens
ttctacaactgtcaa

SEQ ID NO: 2096418 - DNA, 15 bp, Homo sapiens
tctacaactgtcaaa

SEQ ID NO: 2096419 - DNA, 15 bp, Homo sapiens
ctacaactgtcaaac

SEQ ID NO: 2096420 - DNA, 15 bp, Homo sapiens
tacaactgtcaaact

SEQ ID NO: 2096421 - DNA, 15 bp, Homo sapiens
acaactgtcaaacta

SEQ ID NO: 2096422 - DNA, 15 bp, Homo sapiens
caactgtcaaactag

SEQ ID NO: 2096423 - DNA, 15 bp, Homo sapiens
aactgtcaaactaga

SEQ ID NO: 2096424 - DNA, 15 bp, Homo sapiens
actgtcaaactagac

SEQ ID NO: 2096425 - DNA, 15 bp, Homo sapiens
ctgtcaaactagaca

SEQ ID NO: 2096426 - DNA, 15 bp, Homo sapiens
tgtcaaactagacaa

SEQ ID NO: 2096427 - DNA, 15 bp, Homo sapiens
gtcaaactagacaaa

SEQ ID NO: 2096428 - DNA, 15 bp, Homo sapiens
tcaaactagacaaat

SEQ ID NO: 2096429 - DNA, 15 bp, Homo sapiens
caaactagacaaatg

SEQ ID NO: 2096430 - DNA, 15 bp, Homo sapiens
aaactagacaaatga

SEQ ID NO: 2096431 - DNA, 15 bp, Homo sapiens
aactagacaaatgac

SEQ ID NO: 2096432 - DNA, 15 bp, Homo sapiens
actagacaaatgaca

SEQ ID NO: 2096433 - DNA, 15 bp, Homo sapiens
ctagacaaatgacag

SEQ ID NO: 2096434 - DNA, 15 bp, Homo sapiens
tagacaaatgacagt

SEQ ID NO: 2096435 - DNA, 15 bp, Homo sapiens
agacaaatgacagta

SEQ ID NO: 2096436 - DNA, 15 bp, Homo sapiens
gacaaatgacagtat

SEQ ID NO: 2096437 - DNA, 15 bp, Homo sapiens
acaaatgacagtatc

SEQ ID NO: 2096438 - DNA, 15 bp, Homo sapiens
caaatgacagtatcc

SEQ ID NO: 2096439 - DNA, 15 bp, Homo sapiens
aaatgacagtatcca

SEQ ID NO: 2096440 - DNA, 15 bp, Homo sapiens
aatgacagtatccag

SEQ ID NO: 2096441 - DNA, 15 bp, Homo sapiens
atgacagtatccagt

SEQ ID NO: 2096442 - DNA, 15 bp, Homo sapiens
tgacagtatccagtt

SEQ ID NO: 2096443 - DNA, 15 bp, Homo sapiens
gacagtatccagttc

SEQ ID NO: 2096444 - DNA, 15 bp, Homo sapiens
acagtatccagttcc

SEQ ID NO: 2096445 - DNA, 15 bp, Homo sapiens
cagtatccagttccc

SEQ ID NO: 2096446 - DNA, 15 bp, Homo sapiens
agtatccagttcccc

SEQ ID NO: 2096447 - DNA, 15 bp, Homo sapiens
gtatccagttcccct

SEQ ID NO: 2096448 - DNA, 15 bp, Homo sapiens
tatccagttcccctc

SEQ ID NO: 2096449 - DNA, 15 bp, Homo sapiens
atccagttcccctca

SEQ ID NO: 2096450 - DNA, 15 bp, Homo sapiens
tccagttcccctcac

SEQ ID NO: 2096451 - DNA, 15 bp, Homo sapiens
ccagttcccctcacc

SEQ ID NO: 2096452 - DNA, 15 bp, Homo sapiens
cagttcccctcaccc

SEQ ID NO: 2096453 - DNA, 15 bp, Homo sapiens
agttcccctcaccca

SEQ ID NO: 2096454 - DNA, 15 bp, Homo sapiens
gttcccctcacccag

SEQ ID NO: 2096455 - DNA, 15 bp, Homo sapiens
ttcccctcacccaga

SEQ ID NO: 2096456 - DNA, 15 bp, Homo sapiens
tcccctcacccagac

SEQ ID NO: 2096457 - DNA, 15 bp, Homo sapiens
cccctcacccagacg

SEQ ID NO: 2096458 - DNA, 15 bp, Homo sapiens
ccctcacccagacgc

SEQ ID NO: 2096459 - DNA, 15 bp, Homo sapiens
cctcacccagacgca

SEQ ID NO: 2096460 - DNA, 15 bp, Homo sapiens
ctcacccagacgcag

SEQ ID NO: 2096461 - DNA, 15 bp, Homo sapiens
tcacccagacgcagc

SEQ ID NO: 2096462 - DNA, 15 bp, Homo sapiens
cacccagacgcagcc

SEQ ID NO: 2096463 - DNA, 15 bp, Homo sapiens
acccagacgcagcca

SEQ ID NO: 2096464 - DNA, 15 bp, Homo sapiens
cccagacgcagccat

SEQ ID NO: 2096465 - DNA, 15 bp, Homo sapiens
ccagacgcagccatt

SEQ ID NO: 2096466 - DNA, 15 bp, Homo sapiens
cagacgcagccattg

SEQ ID NO: 2096467 - DNA, 15 bp, Homo sapiens
agacgcagccattgc

SEQ ID NO: 2096468 - DNA, 15 bp, Homo sapiens
gacgcagccattgct

SEQ ID NO: 2096469 - DNA, 15 bp, Homo sapiens
acgcagccattgctg

SEQ ID NO: 2096470 - DNA, 15 bp, Homo sapiens
cgcagccattgctga

SEQ ID NO: 2096471 - DNA, 15 bp, Homo sapiens
gcagccattgctgac

SEQ ID NO: 2096472 - DNA, 15 bp, Homo sapiens
cagccattgctgaca

SEQ ID NO: 2096473 - DNA, 15 bp, Homo sapiens
agccattgctgacag

SEQ ID NO: 2096474 - DNA, 15 bp, Homo sapiens
gccattgctgacagc

SEQ ID NO: 2096475 - DNA, 15 bp, Homo sapiens
ccattgctgacagct

SEQ ID NO: 2096476 - DNA, 15 bp, Homo sapiens
cattgctgacagctg

SEQ ID NO: 2096477 - DNA, 15 bp, Homo sapiens
attgctgacagctgt

SEQ ID NO: 2096478 - DNA, 15 bp, Homo sapiens
ttgctgacagctgtc

SEQ ID NO: 2096479 - DNA, 15 bp, Homo sapiens
tgctgacagctgtca

SEQ ID NO: 2096480 - DNA, 15 bp, Homo sapiens
gctgacagctgtcag

SEQ ID NO: 2096481 - DNA, 15 bp, Homo sapiens
ctgacagctgtcagt

SEQ ID NO: 2096482 - DNA, 15 bp, Homo sapiens
gacagctgtcagtgt

SEQ ID NO: 2096483 - DNA, 15 bp, Homo sapiens
acagctgtcagtgtt

SEQ ID NO: 2096484 - DNA, 15 bp, Homo sapiens
cagctgtcagtgttg

SEQ ID NO: 2096485 - DNA, 15 bp, Homo sapiens
agctgtcagtgttga

SEQ ID NO: 2096486 - DNA, 15 bp, Homo sapiens
gctgtcagtgttgaa

SEQ ID NO: 2096487 - DNA, 15 bp, Homo sapiens
ctgtcagtgttgaag

SEQ ID NO: 2096488 - DNA, 15 bp, Homo sapiens
tgtcagtgttgaaga

SEQ ID NO: 2096489 - DNA, 15 bp, Homo sapiens
gtcagtgttgaagat

SEQ ID NO: 2096490 - DNA, 15 bp, Homo sapiens
tcagtgttgaagatg

SEQ ID NO: 2096491 - DNA, 15 bp, Homo sapiens
cagtgttgaagatgg

SEQ ID NO: 2096492 - DNA, 15 bp, Homo sapiens
agtgttgaagatggc

SEQ ID NO: 2096493 - DNA, 15 bp, Homo sapiens
gtgttgaagatggcc

SEQ ID NO: 2096494 - DNA, 15 bp, Homo sapiens
tgttgaagatggcca

SEQ ID NO: 2096495 - DNA, 15 bp, Homo sapiens
gttgaagatggccag

SEQ ID NO: 2096496 - DNA, 15 bp, Homo sapiens
ttgaagatggccagc

SEQ ID NO: 2096497 - DNA, 15 bp, Homo sapiens
tgaagatggccagca

SEQ ID NO: 2096498 - DNA, 15 bp, Homo sapiens
gaagatggccagcat

SEQ ID NO: 2096499 - DNA, 15 bp, Homo sapiens
aagatggccagcatc

SEQ ID NO: 2096500 - DNA, 15 bp, Homo sapiens
agatggccagcatct

SEQ ID NO: 2096501 - DNA, 15 bp, Homo sapiens
gatggccagcatctc

SEQ ID NO: 2096502 - DNA, 15 bp, Homo sapiens
atggccagcatctca

SEQ ID NO: 2096503 - DNA, 15 bp, Homo sapiens
tggccagcatctcat

SEQ ID NO: 2096504 - DNA, 15 bp, Homo sapiens
ggccagcatctcatg

SEQ ID NO: 2096505 - DNA, 15 bp, Homo sapiens
gccagcatctcatgc

SEQ ID NO: 2096506 - DNA, 15 bp, Homo sapiens
ccagcatctcatgcc

SEQ ID NO: 2096507 - DNA, 15 bp, Homo sapiens
cagcatctcatgccc

SEQ ID NO: 2096508 - DNA, 15 bp, Homo sapiens
agcatctcatgccct

SEQ ID NO: 2096509 - DNA, 15 bp, Homo sapiens
gcatctcatgccctt

SEQ ID NO: 2096510 - DNA, 15 bp, Homo sapiens
catctcatgcccttg

SEQ ID NO: 2096511 - DNA, 15 bp, Homo sapiens
atctcatgcccttgg

SEQ ID NO: 2096512 - DNA, 15 bp, Homo sapiens
tctcatgcccttggt

SEQ ID NO: 2096513 - DNA, 15 bp, Homo sapiens
ctcatgcccttggtt

SEQ ID NO: 2096514 - DNA, 15 bp, Homo sapiens
tcatgcccttggttt

SEQ ID NO: 2096515 - DNA, 15 bp, Homo sapiens
catgcccttggtttc

SEQ ID NO: 2096516 - DNA, 15 bp, Homo sapiens
atgcccttggtttca

SEQ ID NO: 2096517 - DNA, 15 bp, Homo sapiens
tgcccttggtttcac

SEQ ID NO: 2096518 - DNA, 15 bp, Homo sapiens
gcccttggtttcact

SEQ ID NO: 2096519 - DNA, 15 bp, Homo sapiens
cccttggtttcactc

SEQ ID NO: 2096520 - DNA, 15 bp, Homo sapiens
ccttggtttcactcg

SEQ ID NO: 2096521 - DNA, 15 bp, Homo sapiens
cttggtttcactcgt

SEQ ID NO: 2096522 - DNA, 15 bp, Homo sapiens
ttggtttcactcgtt

SEQ ID NO: 2096523 - DNA, 15 bp, Homo sapiens
tggtttcactcgttc

SEQ ID NO: 2096524 - DNA, 15 bp, Homo sapiens
ggtttcactcgttcc

SEQ ID NO: 2096525 - DNA, 15 bp, Homo sapiens
gtttcactcgttccc

SEQ ID NO: 2096526 - DNA, 15 bp, Homo sapiens
tttcactcgttccct

SEQ ID NO: 2096527 - DNA, 15 bp, Homo sapiens
ttcactcgttccctg

SEQ ID NO: 2096528 - DNA, 15 bp, Homo sapiens
tcactcgttccctgg

SEQ ID NO: 2096529 - DNA, 15 bp, Homo sapiens
cactcgttccctggg

SEQ ID NO: 2096530 - DNA, 15 bp, Homo sapiens
actcgttccctgggt

SEQ ID NO: 2096531 - DNA, 15 bp, Homo sapiens
ctcgttccctgggtg

SEQ ID NO: 2096532 - DNA, 15 bp, Homo sapiens
tcgttccctgggtgg

SEQ ID NO: 2096533 - DNA, 15 bp, Homo sapiens
cgttccctgggtggc

SEQ ID NO: 2096534 - DNA, 15 bp, Homo sapiens
gttccctgggtggcc

SEQ ID NO: 2096535 - DNA, 15 bp, Homo sapiens
ttccctgggtggccc

SEQ ID NO: 2096536 - DNA, 15 bp, Homo sapiens
tccctgggtggccct

SEQ ID NO: 2096537 - DNA, 15 bp, Homo sapiens
ccctgggtggccctc

SEQ ID NO: 2096538 - DNA, 15 bp, Homo sapiens
cctgggtggccctcg

SEQ ID NO: 2096539 - DNA, 15 bp, Homo sapiens
ctgggtggccctcgt

SEQ ID NO: 2096540 - DNA, 15 bp, Homo sapiens
tgggtggccctcgtc

SEQ ID NO: 2096541 - DNA, 15 bp, Homo sapiens
gggtggccctcgtcc

SEQ ID NO: 2096542 - DNA, 15 bp, Homo sapiens
ggtggccctcgtccc

SEQ ID NO: 2096543 - DNA, 15 bp, Homo sapiens
gtggccctcgtcccc

SEQ ID NO: 2096544 - DNA, 15 bp, Homo sapiens
tggccctcgtccccc

SEQ ID NO: 2096545 - DNA, 15 bp, Homo sapiens
ggccctcgtccccct

SEQ ID NO: 2096546 - DNA, 15 bp, Homo sapiens
gccctcgtccccctc

SEQ ID NO: 2096547 - DNA, 15 bp, Homo sapiens
ccctcgtccccctcc

SEQ ID NO: 2096548 - DNA, 15 bp, Homo sapiens
cctcgtccccctccc

SEQ ID NO: 2096549 - DNA, 15 bp, Homo sapiens
ctcgtccccctcccc

SEQ ID NO: 2096550 - DNA, 15 bp, Homo sapiens
tcgtccccctcccca

SEQ ID NO: 2096551 - DNA, 15 bp, Homo sapiens
cgtccccctccccac

SEQ ID NO: 2096552 - DNA, 15 bp, Homo sapiens
gtccccctccccacg

SEQ ID NO: 2096553 - DNA, 15 bp, Homo sapiens
tccccctccccacgt

SEQ ID NO: 2096554 - DNA, 15 bp, Homo sapiens
ccccctccccacgtc

SEQ ID NO: 2096555 - DNA, 15 bp, Homo sapiens
cccctccccacgtcc

SEQ ID NO: 2096556 - DNA, 15 bp, Homo sapiens
ccctccccacgtcct

SEQ ID NO: 2096557 - DNA, 15 bp, Homo sapiens
cctccccacgtcctg

SEQ ID NO: 2096558 - DNA, 15 bp, Homo sapiens
ctccccacgtcctgc

SEQ ID NO: 2096559 - DNA, 15 bp, Homo sapiens
tccccacgtcctgcg

SEQ ID NO: 2096560 - DNA, 15 bp, Homo sapiens
ccccacgtcctgcgc

SEQ ID NO: 2096561 - DNA, 15 bp, Homo sapiens
cccacgtcctgcgcc

SEQ ID NO: 2096562 - DNA, 15 bp, Homo sapiens
ccacgtcctgcgccc

SEQ ID NO: 2096563 - DNA, 15 bp, Homo sapiens
cacgtcctgcgcccc

SEQ ID NO: 2096564 - DNA, 15 bp, Homo sapiens
acgtcctgcgccccg

SEQ ID NO: 2096565 - DNA, 15 bp, Homo sapiens
cgtcctgcgccccgc

SEQ ID NO: 2096566 - DNA, 15 bp, Homo sapiens
gtcctgcgccccgca

SEQ ID NO: 2096567 - DNA, 15 bp, Homo sapiens
tcctgcgccccgcat

SEQ ID NO: 2096568 - DNA, 15 bp, Homo sapiens
cctgcgccccgcata

SEQ ID NO: 2096569 - DNA, 15 bp, Homo sapiens
ctgcgccccgcatac

SEQ ID NO: 2096570 - DNA, 15 bp, Homo sapiens
tgcgccccgcatacc

SEQ ID NO: 2096571 - DNA, 15 bp, Homo sapiens
gcgccccgcataccc

SEQ ID NO: 2096572 - DNA, 15 bp, Homo sapiens
cgccccgcataccct

SEQ ID NO: 2096573 - DNA, 15 bp, Homo sapiens
gccccgcataccctg

SEQ ID NO: 2096574 - DNA, 15 bp, Homo sapiens
ccccgcataccctga

SEQ ID NO: 2096575 - DNA, 15 bp, Homo sapiens
cccgcataccctgag

SEQ ID NO: 2096576 - DNA, 15 bp, Homo sapiens
ccgcataccctgagc

SEQ ID NO: 2096577 - DNA, 15 bp, Homo sapiens
cgcataccctgagca

SEQ ID NO: 2096578 - DNA, 15 bp, Homo sapiens
gcataccctgagcag

SEQ ID NO: 2096579 - DNA, 15 bp, Homo sapiens
cataccctgagcagc

SEQ ID NO: 2096580 - DNA, 15 bp, Homo sapiens
ataccctgagcagcc

SEQ ID NO: 2096581 - DNA, 15 bp, Homo sapiens
taccctgagcagcca

SEQ ID NO: 2096582 - DNA, 15 bp, Homo sapiens
accctgagcagccat

SEQ ID NO: 2096583 - DNA, 15 bp, Homo sapiens
ccctgagcagccatg

SEQ ID NO: 2096584 - DNA, 15 bp, Homo sapiens
cctgagcagccatgg

SEQ ID NO: 2096585 - DNA, 15 bp, Homo sapiens
ctgagcagccatggc

SEQ ID NO: 2096586 - DNA, 15 bp, Homo sapiens
tgagcagccatggcc

SEQ ID NO: 2096587 - DNA, 15 bp, Homo sapiens
gagcagccatggcca

SEQ ID NO: 2096588 - DNA, 15 bp, Homo sapiens
agcagccatggccag

SEQ ID NO: 2096589 - DNA, 15 bp, Homo sapiens
gcagccatggccagg

SEQ ID NO: 2096590 - DNA, 15 bp, Homo sapiens
cagccatggccagga

SEQ ID NO: 2096591 - DNA, 15 bp, Homo sapiens
agccatggccaggaa

SEQ ID NO: 2096592 - DNA, 15 bp, Homo sapiens
gccatggccaggaac

SEQ ID NO: 2096593 - DNA, 15 bp, Homo sapiens
ccatggccaggaact

SEQ ID NO: 2096594 - DNA, 15 bp, Homo sapiens
catggccaggaactt

SEQ ID NO: 2096595 - DNA, 15 bp, Homo sapiens
atggccaggaacttg

SEQ ID NO: 2096596 - DNA, 15 bp, Homo sapiens
tggccaggaacttgg

SEQ ID NO: 2096597 - DNA, 15 bp, Homo sapiens
ggccaggaacttggc

SEQ ID NO: 2096598 - DNA, 15 bp, Homo sapiens
gccaggaacttggca

SEQ ID NO: 2096599 - DNA, 15 bp, Homo sapiens
ccaggaacttggcac

SEQ ID NO: 2096600 - DNA, 15 bp, Homo sapiens
caggaacttggcacg

SEQ ID NO: 2096601 - DNA, 15 bp, Homo sapiens
aggaacttggcacgt

SEQ ID NO: 2096602 - DNA, 15 bp, Homo sapiens
ggaacttggcacgtg

SEQ ID NO: 2096603 - DNA, 15 bp, Homo sapiens
gaacttggcacgtgg

SEQ ID NO: 2096604 - DNA, 15 bp, Homo sapiens
aacttggcacgtggg

SEQ ID NO: 2096605 - DNA, 15 bp, Homo sapiens
acttggcacgtgggt

SEQ ID NO: 2096606 - DNA, 15 bp, Homo sapiens
cttggcacgtgggtt

SEQ ID NO: 2096607 - DNA, 15 bp, Homo sapiens
ttggcacgtgggttt

SEQ ID NO: 2096608 - DNA, 15 bp, Homo sapiens
tggcacgtgggtttg

SEQ ID NO: 2096609 - DNA, 15 bp, Homo sapiens
ggcacgtgggtttgt

SEQ ID NO: 2096610 - DNA, 15 bp, Homo sapiens
gcacgtgggtttgtt

SEQ ID NO: 2096611 - DNA, 15 bp, Homo sapiens
cacgtgggtttgttt

SEQ ID NO: 2096612 - DNA, 15 bp, Homo sapiens
acgtgggtttgtttt

SEQ ID NO: 2096613 - DNA, 15 bp, Homo sapiens
cgtgggtttgttttt

SEQ ID NO: 2096614 - DNA, 15 bp, Homo sapiens
gtgggtttgtttttt

SEQ ID NO: 2096615 - DNA, 15 bp, Homo sapiens
tgggtttgttttttc

SEQ ID NO: 2096616 - DNA, 15 bp, Homo sapiens
gggtttgttttttct

SEQ ID NO: 2096617 - DNA, 15 bp, Homo sapiens
ggtttgttttttctg

SEQ ID NO: 2096618 - DNA, 15 bp, Homo sapiens
gtttgttttttctga

SEQ ID NO: 2096619 - DNA, 15 bp, Homo sapiens
tttgttttttctgaa

SEQ ID NO: 2096620 - DNA, 15 bp, Homo sapiens
ttgttttttctgaat

SEQ ID NO: 2096621 - DNA, 15 bp, Homo sapiens
tgttttttctgaatc

SEQ ID NO: 2096622 - DNA, 15 bp, Homo sapiens
gttttttctgaatct

SEQ ID NO: 2096623 - DNA, 15 bp, Homo sapiens
ttttttctgaatctg

SEQ ID NO: 2096624 - DNA, 15 bp, Homo sapiens
tttttctgaatctgc

SEQ ID NO: 2096625 - DNA, 15 bp, Homo sapiens
ttttctgaatctgca

SEQ ID NO: 2096626 - DNA, 15 bp, Homo sapiens
tttctgaatctgcat

SEQ ID NO: 2096627 - DNA, 15 bp, Homo sapiens
ttctgaatctgcatg

SEQ ID NO: 2096628 - DNA, 15 bp, Homo sapiens
tctgaatctgcatgt

SEQ ID NO: 2096629 - DNA, 15 bp, Homo sapiens
ctgaatctgcatgtg

SEQ ID NO: 2096630 - DNA, 15 bp, Homo sapiens
tgaatctgcatgtgc

SEQ ID NO: 2096631 - DNA, 15 bp, Homo sapiens
gaatctgcatgtgcg

SEQ ID NO: 2096632 - DNA, 15 bp, Homo sapiens
aatctgcatgtgcgc

SEQ ID NO: 2096633 - DNA, 15 bp, Homo sapiens
atctgcatgtgcgca

SEQ ID NO: 2096634 - DNA, 15 bp, Homo sapiens
tctgcatgtgcgcag

SEQ ID NO: 2096635 - DNA, 15 bp, Homo sapiens
ctgcatgtgcgcagc

SEQ ID NO: 2096636 - DNA, 15 bp, Homo sapiens
tgcatgtgcgcagcc

SEQ ID NO: 2096637 - DNA, 15 bp, Homo sapiens
gcatgtgcgcagcca

SEQ ID NO: 2096638 - DNA, 15 bp, Homo sapiens
catgtgcgcagccat

SEQ ID NO: 2096639 - DNA, 15 bp, Homo sapiens
atgtgcgcagccatg

SEQ ID NO: 2096640 - DNA, 15 bp, Homo sapiens
tgtgcgcagccatga

SEQ ID NO: 2096641 - DNA, 15 bp, Homo sapiens
gtgcgcagccatgag

SEQ ID NO: 2096642 - DNA, 15 bp, Homo sapiens
tgcgcagccatgagc

SEQ ID NO: 2096643 - DNA, 15 bp, Homo sapiens
gcgcagccatgagca

SEQ ID NO: 2096644 - DNA, 15 bp, Homo sapiens
cgcagccatgagcat

SEQ ID NO: 2096645 - DNA, 15 bp, Homo sapiens
gcagccatgagcatg

SEQ ID NO: 2096646 - DNA, 15 bp, Homo sapiens
cagccatgagcatga

SEQ ID NO: 2096647 - DNA, 15 bp, Homo sapiens
agccatgagcatgag

SEQ ID NO: 2096648 - DNA, 15 bp, Homo sapiens
gccatgagcatgagg

SEQ ID NO: 2096649 - DNA, 15 bp, Homo sapiens
ccatgagcatgaggt

SEQ ID NO: 2096650 - DNA, 15 bp, Homo sapiens
catgagcatgaggtc

SEQ ID NO: 2096651 - DNA, 15 bp, Homo sapiens
atgagcatgaggtca

SEQ ID NO: 2096652 - DNA, 15 bp, Homo sapiens
tgagcatgaggtcac

SEQ ID NO: 2096653 - DNA, 15 bp, Homo sapiens
gagcatgaggtcact

SEQ ID NO: 2096654 - DNA, 15 bp, Homo sapiens
agcatgaggtcactt

SEQ ID NO: 2096655 - DNA, 15 bp, Homo sapiens
gcatgaggtcacttt

SEQ ID NO: 2096656 - DNA, 15 bp, Homo sapiens
catgaggtcactttt

SEQ ID NO: 2096657 - DNA, 15 bp, Homo sapiens
atgaggtcacttttt

SEQ ID NO: 2096658 - DNA, 15 bp, Homo sapiens
tgaggtcactttttg

SEQ ID NO: 2096659 - DNA, 15 bp, Homo sapiens
gaggtcactttttga

SEQ ID NO: 2096660 - DNA, 15 bp, Homo sapiens
aggtcactttttgaa

SEQ ID NO: 2096661 - DNA, 15 bp, Homo sapiens
ggtcactttttgaat

SEQ ID NO: 2096662 - DNA, 15 bp, Homo sapiens
gtcactttttgaatg

SEQ ID NO: 2096663 - DNA, 15 bp, Homo sapiens
tcactttttgaatgt

SEQ ID NO: 2096664 - DNA, 15 bp, Homo sapiens
cactttttgaatgtg

SEQ ID NO: 2096665 - DNA, 15 bp, Homo sapiens
actttttgaatgtga

SEQ ID NO: 2096666 - DNA, 15 bp, Homo sapiens
ctttttgaatgtgac

SEQ ID NO: 2096667 - DNA, 15 bp, Homo sapiens
tttttgaatgtgacc

SEQ ID NO: 2096668 - DNA, 15 bp, Homo sapiens
ttttgaatgtgaccg

SEQ ID NO: 2096669 - DNA, 15 bp, Homo sapiens
tttgaatgtgaccga

SEQ ID NO: 2096670 - DNA, 15 bp, Homo sapiens
ttgaatgtgaccgaa

SEQ ID NO: 2096671 - DNA, 15 bp, Homo sapiens
tgaatgtgaccgaag

SEQ ID NO: 2096672 - DNA, 15 bp, Homo sapiens
gaatgtgaccgaagc

SEQ ID NO: 2096673 - DNA, 15 bp, Homo sapiens
aatgtgaccgaagct

SEQ ID NO: 2096674 - DNA, 15 bp, Homo sapiens
atgtgaccgaagctg

SEQ ID NO: 2096675 - DNA, 15 bp, Homo sapiens
tgtgaccgaagctgc

SEQ ID NO: 2096676 - DNA, 15 bp, Homo sapiens
gtgaccgaagctgca

SEQ ID NO: 2096677 - DNA, 15 bp, Homo sapiens
tgaccgaagctgcat

SEQ ID NO: 2096678 - DNA, 15 bp, Homo sapiens
gaccgaagctgcatc

SEQ ID NO: 2096679 - DNA, 15 bp, Homo sapiens
accgaagctgcatcc

SEQ ID NO: 2096680 - DNA, 15 bp, Homo sapiens
ccgaagctgcatcct

SEQ ID NO: 2096681 - DNA, 15 bp, Homo sapiens
cgaagctgcatcctg

SEQ ID NO: 2096682 - DNA, 15 bp, Homo sapiens
gaagctgcatcctgc

SEQ ID NO: 2096683 - DNA, 15 bp, Homo sapiens
aagctgcatcctgct

SEQ ID NO: 2096684 - DNA, 15 bp, Homo sapiens
agctgcatcctgctg

SEQ ID NO: 2096685 - DNA, 15 bp, Homo sapiens
ctgcatcctgctgcg

SEQ ID NO: 2096686 - DNA, 15 bp, Homo sapiens
tgcatcctgctgcgt

SEQ ID NO: 2096687 - DNA, 15 bp, Homo sapiens
gcatcctgctgcgtg

SEQ ID NO: 2096688 - DNA, 15 bp, Homo sapiens
catcctgctgcgtgt

SEQ ID NO: 2096689 - DNA, 15 bp, Homo sapiens
atcctgctgcgtgta

SEQ ID NO: 2096690 - DNA, 15 bp, Homo sapiens
tcctgctgcgtgtat

SEQ ID NO: 2096691 - DNA, 15 bp, Homo sapiens
cctgctgcgtgtatt

SEQ ID NO: 2096692 - DNA, 15 bp, Homo sapiens
ctgctgcgtgtattg

SEQ ID NO: 2096693 - DNA, 15 bp, Homo sapiens
tgctgcgtgtattgc

SEQ ID NO: 2096694 - DNA, 15 bp, Homo sapiens
gctgcgtgtattgct

SEQ ID NO: 2096695 - DNA, 15 bp, Homo sapiens
ctgcgtgtattgctg

SEQ ID NO: 2096696 - DNA, 15 bp, Homo sapiens
tgcgtgtattgctgt

SEQ ID NO: 2096697 - DNA, 15 bp, Homo sapiens
gcgtgtattgctgtg

SEQ ID NO: 2096698 - DNA, 15 bp, Homo sapiens
cgtgtattgctgtgt

SEQ ID NO: 2096699 - DNA, 15 bp, Homo sapiens
gtgtattgctgtgtg

SEQ ID NO: 2096700 - DNA, 15 bp, Homo sapiens
tgtattgctgtgtgg

SEQ ID NO: 2096701 - DNA, 15 bp, Homo sapiens
gtattgctgtgtggc

SEQ ID NO: 2096702 - DNA, 15 bp, Homo sapiens
tattgctgtgtggct

SEQ ID NO: 2096703 - DNA, 15 bp, Homo sapiens
attgctgtgtggctg

SEQ ID NO: 2096704 - DNA, 15 bp, Homo sapiens
ttgctgtgtggctgg

SEQ ID NO: 2096705 - DNA, 15 bp, Homo sapiens
tgctgtgtggctggc

SEQ ID NO: 2096706 - DNA, 15 bp, Homo sapiens
gctgtgtggctggct

SEQ ID NO: 2096707 - DNA, 15 bp, Homo sapiens
ctgtgtggctggctt

SEQ ID NO: 2096708 - DNA, 15 bp, Homo sapiens
tgtgtggctggcttt

SEQ ID NO: 2096709 - DNA, 15 bp, Homo sapiens
gtgtggctggctttc

SEQ ID NO: 2096710 - DNA, 15 bp, Homo sapiens
tgtggctggctttcc

SEQ ID NO: 2096711 - DNA, 15 bp, Homo sapiens
gtggctggctttcct

SEQ ID NO: 2096712 - DNA, 15 bp, Homo sapiens
tggctggctttcctc

SEQ ID NO: 2096713 - DNA, 15 bp, Homo sapiens
ggctggctttcctcc

SEQ ID NO: 2096714 - DNA, 15 bp, Homo sapiens
gctggctttcctccc

SEQ ID NO: 2096715 - DNA, 15 bp, Homo sapiens
ctggctttcctccct

SEQ ID NO: 2096716 - DNA, 15 bp, Homo sapiens
tggctttcctccctg

SEQ ID NO: 2096717 - DNA, 15 bp, Homo sapiens
ggctttcctccctgt

SEQ ID NO: 2096718 - DNA, 15 bp, Homo sapiens
gctttcctccctgtc

SEQ ID NO: 2096719 - DNA, 15 bp, Homo sapiens
ctttcctccctgtct

SEQ ID NO: 2096720 - DNA, 15 bp, Homo sapiens
tttcctccctgtctt

SEQ ID NO: 2096721 - DNA, 15 bp, Homo sapiens
ttcctccctgtcttc

SEQ ID NO: 2096722 - DNA, 15 bp, Homo sapiens
tcctccctgtcttct

SEQ ID NO: 2096723 - DNA, 15 bp, Homo sapiens
cctccctgtcttctg

SEQ ID NO: 2096724 - DNA, 15 bp, Homo sapiens
ctccctgtcttctgt

SEQ ID NO: 2096725 - DNA, 15 bp, Homo sapiens
tccctgtcttctgtt

SEQ ID NO: 2096726 - DNA, 15 bp, Homo sapiens
ccctgtcttctgttc

SEQ ID NO: 2096727 - DNA, 15 bp, Homo sapiens
cctgtcttctgttca

SEQ ID NO: 2096728 - DNA, 15 bp, Homo sapiens
ctgtcttctgttcag

SEQ ID NO: 2096729 - DNA, 15 bp, Homo sapiens
tgtcttctgttcagg

SEQ ID NO: 2096730 - DNA, 15 bp, Homo sapiens
gtcttctgttcagga

SEQ ID NO: 2096731 - DNA, 15 bp, Homo sapiens
tcttctgttcaggaa

SEQ ID NO: 2096732 - DNA, 15 bp, Homo sapiens
cttctgttcaggaat

SEQ ID NO: 2096733 - DNA, 15 bp, Homo sapiens
ttctgttcaggaata

SEQ ID NO: 2096734 - DNA, 15 bp, Homo sapiens
tctgttcaggaatac

SEQ ID NO: 2096735 - DNA, 15 bp, Homo sapiens
ctgttcaggaatact

SEQ ID NO: 2096736 - DNA, 15 bp, Homo sapiens
tgttcaggaatactg

SEQ ID NO: 2096737 - DNA, 15 bp, Homo sapiens
gttcaggaatactgt

SEQ ID NO: 2096738 - DNA, 15 bp, Homo sapiens
ttcaggaatactgtt

SEQ ID NO: 2096739 - DNA, 15 bp, Homo sapiens
tcaggaatactgttc

SEQ ID NO: 2096740 - DNA, 15 bp, Homo sapiens
caggaatactgttca

SEQ ID NO: 2096741 - DNA, 15 bp, Homo sapiens
aggaatactgttcag

SEQ ID NO: 2096742 - DNA, 15 bp, Homo sapiens
ggaatactgttcagg

SEQ ID NO: 2096743 - DNA, 15 bp, Homo sapiens
gaatactgttcaggc

SEQ ID NO: 2096744 - DNA, 15 bp, Homo sapiens
atactgttcaggctg

SEQ ID NO: 2096745 - DNA, 15 bp, Homo sapiens
tactgttcaggctga

SEQ ID NO: 2096746 - DNA, 15 bp, Homo sapiens
actgttcaggctgaa

SEQ ID NO: 2096747 - DNA, 15 bp, Homo sapiens
ctgttcaggctgaat

SEQ ID NO: 2096748 - DNA, 15 bp, Homo sapiens
tgttcaggctgaata

SEQ ID NO: 2096749 - DNA, 15 bp, Homo sapiens
gttcaggctgaatac

SEQ ID NO: 2096750 - DNA, 15 bp, Homo sapiens
ttcaggctgaatacc

SEQ ID NO: 2096751 - DNA, 15 bp, Homo sapiens
tcaggctgaataccg

SEQ ID NO: 2096752 - DNA, 15 bp, Homo sapiens
caggctgaataccgt

SEQ ID NO: 2096753 - DNA, 15 bp, Homo sapiens
aggctgaataccgtc

SEQ ID NO: 2096754 - DNA, 15 bp, Homo sapiens
ggctgaataccgtcc

SEQ ID NO: 2096755 - DNA, 15 bp, Homo sapiens
gctgaataccgtcct

SEQ ID NO: 2096756 - DNA, 15 bp, Homo sapiens
ctgaataccgtcctg

SEQ ID NO: 2096757 - DNA, 15 bp, Homo sapiens
tgaataccgtcctgt

SEQ ID NO: 2096758 - DNA, 15 bp, Homo sapiens
gaataccgtcctgtg

SEQ ID NO: 2096759 - DNA, 15 bp, Homo sapiens
aataccgtcctgtga

SEQ ID NO: 2096760 - DNA, 15 bp, Homo sapiens
ataccgtcctgtgac

SEQ ID NO: 2096761 - DNA, 15 bp, Homo sapiens
taccgtcctgtgaca

SEQ ID NO: 2096762 - DNA, 15 bp, Homo sapiens
accgtcctgtgacat

SEQ ID NO: 2096763 - DNA, 15 bp, Homo sapiens
ccgtcctgtgacatg

SEQ ID NO: 2096764 - DNA, 15 bp, Homo sapiens
cgtcctgtgacatgg

SEQ ID NO: 2096765 - DNA, 15 bp, Homo sapiens
gtcctgtgacatggg

SEQ ID NO: 2096766 - DNA, 15 bp, Homo sapiens
tcctgtgacatgggt

SEQ ID NO: 2096767 - DNA, 15 bp, Homo sapiens
cctgtgacatgggtt

SEQ ID NO: 2096768 - DNA, 15 bp, Homo sapiens
ctgtgacatgggttt

SEQ ID NO: 2096769 - DNA, 15 bp, Homo sapiens
tgtgacatgggttta

SEQ ID NO: 2096770 - DNA, 15 bp, Homo sapiens
gtgacatgggtttaa

SEQ ID NO: 2096771 - DNA, 15 bp, Homo sapiens
tgacatgggtttaaa

SEQ ID NO: 2096772 - DNA, 15 bp, Homo sapiens
gacatgggtttaaaa

SEQ ID NO: 2096773 - DNA, 15 bp, Homo sapiens
acatgggtttaaaaa

SEQ ID NO: 2096774 - DNA, 15 bp, Homo sapiens
catgggtttaaaaac

SEQ ID NO: 2096775 - DNA, 15 bp, Homo sapiens
tgggtttaaaaacac

SEQ ID NO: 2096776 - DNA, 15 bp, Homo sapiens
gggtttaaaaacaca

SEQ ID NO: 2096777 - DNA, 15 bp, Homo sapiens
ggtttaaaaacacag

SEQ ID NO: 2096778 - DNA, 15 bp, Homo sapiens
gtttaaaaacacagg

SEQ ID NO: 2096779 - DNA, 15 bp, Homo sapiens
tttaaaaacacaggc

SEQ ID NO: 2096780 - DNA, 15 bp, Homo sapiens
ttaaaaacacaggcc

SEQ ID NO: 2096781 - DNA, 15 bp, Homo sapiens
taaaaacacaggcca

SEQ ID NO: 2096782 - DNA, 15 bp, Homo sapiens
aaaaacacaggccag

SEQ ID NO: 2096783 - DNA, 15 bp, Homo sapiens
aaaacacaggccagg

SEQ ID NO: 2096784 - DNA, 15 bp, Homo sapiens
aaacacaggccaggc

SEQ ID NO: 2096785 - DNA, 15 bp, Homo sapiens
aacacaggccaggca

SEQ ID NO: 2096786 - DNA, 15 bp, Homo sapiens
acacaggccaggcat

SEQ ID NO: 2096787 - DNA, 15 bp, Homo sapiens
cacaggccaggcatg

SEQ ID NO: 2096788 - DNA, 15 bp, Homo sapiens
ggccaggcatggtgt

SEQ ID NO: 2096789 - DNA, 15 bp, Homo sapiens
gccaggcatggtgtc

SEQ ID NO: 2096790 - DNA, 15 bp, Homo sapiens
ccaggcatggtgtct

SEQ ID NO: 2096791 - DNA, 15 bp, Homo sapiens
caggcatggtgtctc

SEQ ID NO: 2096792 - DNA, 15 bp, Homo sapiens
aggcatggtgtctca

SEQ ID NO: 2096793 - DNA, 15 bp, Homo sapiens
ggcatggtgtctcac

SEQ ID NO: 2096794 - DNA, 15 bp, Homo sapiens
gcatggtgtctcacg

SEQ ID NO: 2096795 - DNA, 15 bp, Homo sapiens
catggtgtctcacgc

SEQ ID NO: 2096796 - DNA, 15 bp, Homo sapiens
atggtgtctcacgcc

SEQ ID NO: 2096797 - DNA, 15 bp, Homo sapiens
tggtgtctcacgcct

SEQ ID NO: 2096798 - DNA, 15 bp, Homo sapiens
ggtgtctcacgcctg

SEQ ID NO: 2096799 - DNA, 15 bp, Homo sapiens
gtgtctcacgcctgg

SEQ ID NO: 2096800 - DNA, 15 bp, Homo sapiens
tgtctcacgcctgga

SEQ ID NO: 2096801 - DNA, 15 bp, Homo sapiens
gtctcacgcctggaa

SEQ ID NO: 2096802 - DNA, 15 bp, Homo sapiens
tctcacgcctggaat

SEQ ID NO: 2096803 - DNA, 15 bp, Homo sapiens
ctcacgcctggaatc

SEQ ID NO: 2096804 - DNA, 15 bp, Homo sapiens
tcacgcctggaatcc

SEQ ID NO: 2096805 - DNA, 15 bp, Homo sapiens
cacgcctggaatccc

SEQ ID NO: 2096806 - DNA, 15 bp, Homo sapiens
acgcctggaatccca

SEQ ID NO: 2096807 - DNA, 15 bp, Homo sapiens
cgcctggaatcccag

SEQ ID NO: 2096808 - DNA, 15 bp, Homo sapiens
cctggaatcccagcg

SEQ ID NO: 2096809 - DNA, 15 bp, Homo sapiens
ctggaatcccagcgc

SEQ ID NO: 2096810 - DNA, 15 bp, Homo sapiens
tggaatcccagcgct

SEQ ID NO: 2096811 - DNA, 15 bp, Homo sapiens
ggaatcccagcgctt

SEQ ID NO: 2096812 - DNA, 15 bp, Homo sapiens
gaatcccagcgcttt

SEQ ID NO: 2096813 - DNA, 15 bp, Homo sapiens
gcgctttgggaggct

SEQ ID NO: 2096814 - DNA, 15 bp, Homo sapiens
cgctttgggaggctg

SEQ ID NO: 2096815 - DNA, 15 bp, Homo sapiens
gaggtgagaggatcg

SEQ ID NO: 2096816 - DNA, 15 bp, Homo sapiens
aggtgagaggatcgc

SEQ ID NO: 2096817 - DNA, 15 bp, Homo sapiens
ggtgagaggatcgcc

SEQ ID NO: 2096818 - DNA, 15 bp, Homo sapiens
gtgagaggatcgcct

SEQ ID NO: 2096819 - DNA, 15 bp, Homo sapiens
tgagaggatcgcctg

SEQ ID NO: 2096820 - DNA, 15 bp, Homo sapiens
gagaggatcgcctga

SEQ ID NO: 2096821 - DNA, 15 bp, Homo sapiens
agaggatcgcctgag

SEQ ID NO: 2096822 - DNA, 15 bp, Homo sapiens
gaggatcgcctgagc

SEQ ID NO: 2096823 - DNA, 15 bp, Homo sapiens
aggatcgcctgagcc

SEQ ID NO: 2096824 - DNA, 15 bp, Homo sapiens
ggatcgcctgagccc

SEQ ID NO: 2096825 - DNA, 15 bp, Homo sapiens
gatcgcctgagccca

SEQ ID NO: 2096826 - DNA, 15 bp, Homo sapiens
atcgcctgagcccag

SEQ ID NO: 2096827 - DNA, 15 bp, Homo sapiens
tcgcctgagcccagg

SEQ ID NO: 2096828 - DNA, 15 bp, Homo sapiens
cgcctgagcccagga

SEQ ID NO: 2096829 - DNA, 15 bp, Homo sapiens
gcctgagcccaggag

SEQ ID NO: 2096830 - DNA, 15 bp, Homo sapiens
cctgggcaacataga

SEQ ID NO: 2096831 - DNA, 15 bp, Homo sapiens
ctgggcaacatagac

SEQ ID NO: 2096832 - DNA, 15 bp, Homo sapiens
tgggcaacatagacc

SEQ ID NO: 2096833 - DNA, 15 bp, Homo sapiens
gggcaacatagacct

SEQ ID NO: 2096834 - DNA, 15 bp, Homo sapiens
ggcaacatagacctg

SEQ ID NO: 2096835 - DNA, 15 bp, Homo sapiens
gcaacatagacctga

SEQ ID NO: 2096836 - DNA, 15 bp, Homo sapiens
caacatagacctgat

SEQ ID NO: 2096837 - DNA, 15 bp, Homo sapiens
aacatagacctgatc

SEQ ID NO: 2096838 - DNA, 15 bp, Homo sapiens
acatagacctgatct

SEQ ID NO: 2096839 - DNA, 15 bp, Homo sapiens
catagacctgatctc

SEQ ID NO: 2096840 - DNA, 15 bp, Homo sapiens
atagacctgatctct

SEQ ID NO: 2096841 - DNA, 15 bp, Homo sapiens
tagacctgatctcta

SEQ ID NO: 2096842 - DNA, 15 bp, Homo sapiens
agacctgatctctac

SEQ ID NO: 2096843 - DNA, 15 bp, Homo sapiens
gacctgatctctaca

SEQ ID NO: 2096844 - DNA, 15 bp, Homo sapiens
acctgatctctacaa

SEQ ID NO: 2096845 - DNA, 15 bp, Homo sapiens
cctgatctctacaaa

SEQ ID NO: 2096846 - DNA, 15 bp, Homo sapiens
ctgatctctacaaaa

SEQ ID NO: 2096847 - DNA, 15 bp, Homo sapiens
tgatctctacaaaaa

SEQ ID NO: 2096848 - DNA, 15 bp, Homo sapiens
gatctctacaaaaaa

SEQ ID NO: 2096849 - DNA, 15 bp, Homo sapiens
ctctacaaaaaatta

SEQ ID NO: 2096850 - DNA, 15 bp, Homo sapiens
tctacaaaaaattaa

SEQ ID NO: 2096851 - DNA, 15 bp, Homo sapiens
ctacaaaaaattaaa

SEQ ID NO: 2096852 - DNA, 15 bp, Homo sapiens
tacaaaaaattaaaa

SEQ ID NO: 2096853 - DNA, 15 bp, Homo sapiens
acaaaaaattaaaaa

SEQ ID NO: 2096854 - DNA, 15 bp, Homo sapiens
caaaaaattaaaaaa

SEQ ID NO: 2096855 - DNA, 15 bp, Homo sapiens
aaaaaattaaaaaat

SEQ ID NO: 2096856 - DNA, 15 bp, Homo sapiens
aaaaattaaaaaatg

SEQ ID NO: 2096857 - DNA, 15 bp, Homo sapiens
aaaattaaaaaatga

SEQ ID NO: 2096858 - DNA, 15 bp, Homo sapiens
aaattaaaaaatgag

SEQ ID NO: 2096859 - DNA, 15 bp, Homo sapiens
aattaaaaaatgagc

SEQ ID NO: 2096860 - DNA, 15 bp, Homo sapiens
attaaaaaatgagcc

SEQ ID NO: 2096861 - DNA, 15 bp, Homo sapiens
ttaaaaaatgagccg

SEQ ID NO: 2096862 - DNA, 15 bp, Homo sapiens
taaaaaatgagccgg

SEQ ID NO: 2096863 - DNA, 15 bp, Homo sapiens
aaaaaatgagccggg

SEQ ID NO: 2096864 - DNA, 15 bp, Homo sapiens
aaaaatgagccgggc

SEQ ID NO: 2096865 - DNA, 15 bp, Homo sapiens
aaaatgagccgggcg

SEQ ID NO: 2096866 - DNA, 15 bp, Homo sapiens
aaatgagccgggcgt

SEQ ID NO: 2096867 - DNA, 15 bp, Homo sapiens
aatgagccgggcgtg

SEQ ID NO: 2096868 - DNA, 15 bp, Homo sapiens
atgagccgggcgtgg

SEQ ID NO: 2096869 - DNA, 15 bp, Homo sapiens
tgagccgggcgtggt

SEQ ID NO: 2096870 - DNA, 15 bp, Homo sapiens
gagccgggcgtggtg

SEQ ID NO: 2096871 - DNA, 15 bp, Homo sapiens
gggcgtggtggtggc

SEQ ID NO: 2096872 - DNA, 15 bp, Homo sapiens
ggcgtggtggtggca

SEQ ID NO: 2096873 - DNA, 15 bp, Homo sapiens
gcgtggtggtggcac

SEQ ID NO: 2096874 - DNA, 15 bp, Homo sapiens
cgtggtggtggcacg

SEQ ID NO: 2096875 - DNA, 15 bp, Homo sapiens
gtggtggtggcacgt

SEQ ID NO: 2096876 - DNA, 15 bp, Homo sapiens
tggtggtggcacgtg

SEQ ID NO: 2096877 - DNA, 15 bp, Homo sapiens
ggtggtggcacgtgt

SEQ ID NO: 2096878 - DNA, 15 bp, Homo sapiens
gtggtggcacgtgtc

SEQ ID NO: 2096879 - DNA, 15 bp, Homo sapiens
tggtggcacgtgtca

SEQ ID NO: 2096880 - DNA, 15 bp, Homo sapiens
ggtggcacgtgtcat

SEQ ID NO: 2096881 - DNA, 15 bp, Homo sapiens
gtggcacgtgtcatt

SEQ ID NO: 2096882 - DNA, 15 bp, Homo sapiens
tggcacgtgtcattg

SEQ ID NO: 2096883 - DNA, 15 bp, Homo sapiens
ggcacgtgtcattgt

SEQ ID NO: 2096884 - DNA, 15 bp, Homo sapiens
gcacgtgtcattgtc

SEQ ID NO: 2096885 - DNA, 15 bp, Homo sapiens
cacgtgtcattgtcc

SEQ ID NO: 2096886 - DNA, 15 bp, Homo sapiens
acgtgtcattgtccc

SEQ ID NO: 2096887 - DNA, 15 bp, Homo sapiens
cgtgtcattgtcccg

SEQ ID NO: 2096888 - DNA, 15 bp, Homo sapiens
gtgtcattgtcccgg

SEQ ID NO: 2096889 - DNA, 15 bp, Homo sapiens
tgtcattgtcccggc

SEQ ID NO: 2096890 - DNA, 15 bp, Homo sapiens
gtcattgtcccggcc

SEQ ID NO: 2096891 - DNA, 15 bp, Homo sapiens
tcattgtcccggcca

SEQ ID NO: 2096892 - DNA, 15 bp, Homo sapiens
cattgtcccggccac

SEQ ID NO: 2096893 - DNA, 15 bp, Homo sapiens
attgtcccggccact

SEQ ID NO: 2096894 - DNA, 15 bp, Homo sapiens
ttgtcccggccactt

SEQ ID NO: 2096895 - DNA, 15 bp, Homo sapiens
tgtcccggccacttg

SEQ ID NO: 2096896 - DNA, 15 bp, Homo sapiens
gtcccggccacttgg

SEQ ID NO: 2096897 - DNA, 15 bp, Homo sapiens
tcccggccacttggg

SEQ ID NO: 2096898 - DNA, 15 bp, Homo sapiens
cccggccacttggga

SEQ ID NO: 2096899 - DNA, 15 bp, Homo sapiens
ccggccacttgggag

SEQ ID NO: 2096900 - DNA, 15 bp, Homo sapiens
cggccacttgggagg

SEQ ID NO: 2096901 - DNA, 15 bp, Homo sapiens
ggccacttgggaggc

SEQ ID NO: 2096902 - DNA, 15 bp, Homo sapiens
gccacttgggaggcc

SEQ ID NO: 2096903 - DNA, 15 bp, Homo sapiens
ccacttgggaggccg

SEQ ID NO: 2096904 - DNA, 15 bp, Homo sapiens
cacttgggaggccga

SEQ ID NO: 2096905 - DNA, 15 bp, Homo sapiens
acttgggaggccgag

SEQ ID NO: 2096906 - DNA, 15 bp, Homo sapiens
aggagttcaaggccg

SEQ ID NO: 2096907 - DNA, 15 bp, Homo sapiens
ggagttcaaggccgt

SEQ ID NO: 2096908 - DNA, 15 bp, Homo sapiens
gagttcaaggccgtg

SEQ ID NO: 2096909 - DNA, 15 bp, Homo sapiens
agttcaaggccgtgg

SEQ ID NO: 2096910 - DNA, 15 bp, Homo sapiens
gttcaaggccgtggt

SEQ ID NO: 2096911 - DNA, 15 bp, Homo sapiens
ttcaaggccgtggtg

SEQ ID NO: 2096912 - DNA, 15 bp, Homo sapiens
tcaaggccgtggtga

SEQ ID NO: 2096913 - DNA, 15 bp, Homo sapiens
caaggccgtggtgag

SEQ ID NO: 2096914 - DNA, 15 bp, Homo sapiens
aaggccgtggtgagc

SEQ ID NO: 2096915 - DNA, 15 bp, Homo sapiens
aggccgtggtgagcc

SEQ ID NO: 2096916 - DNA, 15 bp, Homo sapiens
ggccgtggtgagcca

SEQ ID NO: 2096917 - DNA, 15 bp, Homo sapiens
gccgtggtgagccat

SEQ ID NO: 2096918 - DNA, 15 bp, Homo sapiens
ccgtggtgagccatg

SEQ ID NO: 2096919 - DNA, 15 bp, Homo sapiens
cgtggtgagccatga

SEQ ID NO: 2096920 - DNA, 15 bp, Homo sapiens
gtggtgagccatgat

SEQ ID NO: 2096921 - DNA, 15 bp, Homo sapiens
tggtgagccatgatg

SEQ ID NO: 2096922 - DNA, 15 bp, Homo sapiens
ggtgagccatgatgg

SEQ ID NO: 2096923 - DNA, 15 bp, Homo sapiens
gtgagccatgatggc

SEQ ID NO: 2096924 - DNA, 15 bp, Homo sapiens
tgagccatgatggca

SEQ ID NO: 2096925 - DNA, 15 bp, Homo sapiens
gagccatgatggcac

SEQ ID NO: 2096926 - DNA, 15 bp, Homo sapiens
agccatgatggcacc

SEQ ID NO: 2096927 - DNA, 15 bp, Homo sapiens
gccatgatggcacca

SEQ ID NO: 2096928 - DNA, 15 bp, Homo sapiens
ccatgatggcaccac

SEQ ID NO: 2096929 - DNA, 15 bp, Homo sapiens
catgatggcaccacc

SEQ ID NO: 2096930 - DNA, 15 bp, Homo sapiens
atgatggcaccaccg

SEQ ID NO: 2096931 - DNA, 15 bp, Homo sapiens
tgatggcaccaccgt

SEQ ID NO: 2096932 - DNA, 15 bp, Homo sapiens
gatggcaccaccgta

SEQ ID NO: 2096933 - DNA, 15 bp, Homo sapiens
atggcaccaccgtac

SEQ ID NO: 2096934 - DNA, 15 bp, Homo sapiens
tggcaccaccgtact

SEQ ID NO: 2096935 - DNA, 15 bp, Homo sapiens
ggcaccaccgtactc

SEQ ID NO: 2096936 - DNA, 15 bp, Homo sapiens
gcaccaccgtactcc

SEQ ID NO: 2096937 - DNA, 15 bp, Homo sapiens
caccaccgtactcca

SEQ ID NO: 2096938 - DNA, 15 bp, Homo sapiens
accaccgtactccag

SEQ ID NO: 2096939 - DNA, 15 bp, Homo sapiens
ccaccgtactccagc

SEQ ID NO: 2096940 - DNA, 15 bp, Homo sapiens
caccgtactccagcc

SEQ ID NO: 2096941 - DNA, 15 bp, Homo sapiens
accgtactccagcct

SEQ ID NO: 2096942 - DNA, 15 bp, Homo sapiens
ccgtactccagcctg

SEQ ID NO: 2096943 - DNA, 15 bp, Homo sapiens
cgtactccagcctgg

SEQ ID NO: 2096944 - DNA, 15 bp, Homo sapiens
cctgggcgacagaga

SEQ ID NO: 2096945 - DNA, 15 bp, Homo sapiens
ctgggcgacagagag

SEQ ID NO: 2096946 - DNA, 15 bp, Homo sapiens
tgggcgacagagaga

SEQ ID NO: 2096947 - DNA, 15 bp, Homo sapiens
gggcgacagagagag

SEQ ID NO: 2096948 - DNA, 15 bp, Homo sapiens
ggcgacagagagaga

SEQ ID NO: 2096949 - DNA, 15 bp, Homo sapiens
gcgacagagagagac

SEQ ID NO: 2096950 - DNA, 15 bp, Homo sapiens
cgacagagagagacc

SEQ ID NO: 2096951 - DNA, 15 bp, Homo sapiens
gacagagagagaccg

SEQ ID NO: 2096952 - DNA, 15 bp, Homo sapiens
acagagagagaccgt

SEQ ID NO: 2096953 - DNA, 15 bp, Homo sapiens
cagagagagaccgtc

SEQ ID NO: 2096954 - DNA, 15 bp, Homo sapiens
agagagagaccgtct

SEQ ID NO: 2096955 - DNA, 15 bp, Homo sapiens
gagagagaccgtctc

SEQ ID NO: 2096956 - DNA, 15 bp, Homo sapiens
agagagaccgtctct

SEQ ID NO: 2096957 - DNA, 15 bp, Homo sapiens
gagagaccgtctcta

SEQ ID NO: 2096958 - DNA, 15 bp, Homo sapiens
agagaccgtctctaa

SEQ ID NO: 2096959 - DNA, 15 bp, Homo sapiens
gagaccgtctctaaa

SEQ ID NO: 2096960 - DNA, 15 bp, Homo sapiens
agaccgtctctaaaa

SEQ ID NO: 2096961 - DNA, 15 bp, Homo sapiens
gaccgtctctaaaaa

SEQ ID NO: 2096962 - DNA, 15 bp, Homo sapiens
accgtctctaaaaaa

SEQ ID NO: 2096963 - DNA, 15 bp, Homo sapiens
ccgtctctaaaaaat

SEQ ID NO: 2096964 - DNA, 15 bp, Homo sapiens
cgtctctaaaaaata

SEQ ID NO: 2096965 - DNA, 15 bp, Homo sapiens
gtctctaaaaaataa

SEQ ID NO: 2096966 - DNA, 15 bp, Homo sapiens
tctctaaaaaataaa

SEQ ID NO: 2096967 - DNA, 15 bp, Homo sapiens
ctctaaaaaataaaa

SEQ ID NO: 2096968 - DNA, 15 bp, Homo sapiens
tctaaaaaataaaaa

SEQ ID NO: 2096969 - DNA, 15 bp, Homo sapiens
ctaaaaaataaaaaa

SEQ ID NO: 2096970 - DNA, 15 bp, Homo sapiens
aaataaaaaataaat

SEQ ID NO: 2096971 - DNA, 15 bp, Homo sapiens
aataaaaaataaatc

SEQ ID NO: 2096972 - DNA, 15 bp, Homo sapiens
ataaaaaataaatca

SEQ ID NO: 2096973 - DNA, 15 bp, Homo sapiens
taaaaaataaatcaa

SEQ ID NO: 2096974 - DNA, 15 bp, Homo sapiens
aaaaaataaatcaac

SEQ ID NO: 2096975 - DNA, 15 bp, Homo sapiens
aaaaataaatcaaca

SEQ ID NO: 2096976 - DNA, 15 bp, Homo sapiens
aaaataaatcaacac

SEQ ID NO: 2096977 - DNA, 15 bp, Homo sapiens
aaataaatcaacaca

SEQ ID NO: 2096978 - DNA, 15 bp, Homo sapiens
aataaatcaacacat

SEQ ID NO: 2096979 - DNA, 15 bp, Homo sapiens
ataaatcaacacata

SEQ ID NO: 2096980 - DNA, 15 bp, Homo sapiens
taaatcaacacataa

SEQ ID NO: 2096981 - DNA, 15 bp, Homo sapiens
aaatcaacacataaa

SEQ ID NO: 2096982 - DNA, 15 bp, Homo sapiens
aatcaacacataaac

SEQ ID NO: 2096983 - DNA, 15 bp, Homo sapiens
atcaacacataaaca

SEQ ID NO: 2096984 - DNA, 15 bp, Homo sapiens
tcaacacataaacat

SEQ ID NO: 2096985 - DNA, 15 bp, Homo sapiens
caacacataaacata

SEQ ID NO: 2096986 - DNA, 15 bp, Homo sapiens
aacacataaacatac

SEQ ID NO: 2096987 - DNA, 15 bp, Homo sapiens
acacataaacatacg

SEQ ID NO: 2096988 - DNA, 15 bp, Homo sapiens
cacataaacatacgt

SEQ ID NO: 2096989 - DNA, 15 bp, Homo sapiens
acataaacatacgtt

SEQ ID NO: 2096990 - DNA, 15 bp, Homo sapiens
cataaacatacgttc

SEQ ID NO: 2096991 - DNA, 15 bp, Homo sapiens
ataaacatacgttct

SEQ ID NO: 2096992 - DNA, 15 bp, Homo sapiens
taaacatacgttctc

SEQ ID NO: 2096993 - DNA, 15 bp, Homo sapiens
aaacatacgttctcc

SEQ ID NO: 2096994 - DNA, 15 bp, Homo sapiens
aacatacgttctcct

SEQ ID NO: 2096995 - DNA, 15 bp, Homo sapiens
acatacgttctcctc

SEQ ID NO: 2096996 - DNA, 15 bp, Homo sapiens
catacgttctcctcc

SEQ ID NO: 2096997 - DNA, 15 bp, Homo sapiens
atacgttctcctcct

SEQ ID NO: 2096998 - DNA, 15 bp, Homo sapiens
tacgttctcctcctg

SEQ ID NO: 2096999 - DNA, 15 bp, Homo sapiens
acgttctcctcctga

SEQ ID NO: 2097000 - DNA, 15 bp, Homo sapiens
cgttctcctcctgag

SEQ ID NO: 2097001 - DNA, 15 bp, Homo sapiens
gttctcctcctgagg

SEQ ID NO: 2097002 - DNA, 15 bp, Homo sapiens
ttctcctcctgaggg

SEQ ID NO: 2097003 - DNA, 15 bp, Homo sapiens
tctcctcctgaggga

SEQ ID NO: 2097004 - DNA, 15 bp, Homo sapiens
ctcctcctgagggac

SEQ ID NO: 2097005 - DNA, 15 bp, Homo sapiens
tcctcctgagggaca

SEQ ID NO: 2097006 - DNA, 15 bp, Homo sapiens
cctcctgagggacag

SEQ ID NO: 2097007 - DNA, 15 bp, Homo sapiens
ctcctgagggacaga

SEQ ID NO: 2097008 - DNA, 15 bp, Homo sapiens
tcctgagggacagag

SEQ ID NO: 2097009 - DNA, 15 bp, Homo sapiens
cctgagggacagagc

SEQ ID NO: 2097010 - DNA, 15 bp, Homo sapiens
ctgagggacagagct

SEQ ID NO: 2097011 - DNA, 15 bp, Homo sapiens
tgagggacagagctt

SEQ ID NO: 2097012 - DNA, 15 bp, Homo sapiens
gagggacagagcttg

SEQ ID NO: 2097013 - DNA, 15 bp, Homo sapiens
agggacagagcttgc

SEQ ID NO: 2097014 - DNA, 15 bp, Homo sapiens
gggacagagcttgcc

SEQ ID NO: 2097015 - DNA, 15 bp, Homo sapiens
ggacagagcttgccc

SEQ ID NO: 2097016 - DNA, 15 bp, Homo sapiens
gacagagcttgcccc

SEQ ID NO: 2097017 - DNA, 15 bp, Homo sapiens
acagagcttgccccg

SEQ ID NO: 2097018 - DNA, 15 bp, Homo sapiens
cagagcttgccccgg

SEQ ID NO: 2097019 - DNA, 15 bp, Homo sapiens
agagcttgccccggt

SEQ ID NO: 2097020 - DNA, 15 bp, Homo sapiens
gagcttgccccggtt

SEQ ID NO: 2097021 - DNA, 15 bp, Homo sapiens
agcttgccccggttg

SEQ ID NO: 2097022 - DNA, 15 bp, Homo sapiens
gcttgccccggttgt

SEQ ID NO: 2097023 - DNA, 15 bp, Homo sapiens
cttgccccggttgtt

SEQ ID NO: 2097024 - DNA, 15 bp, Homo sapiens
ttgccccggttgttc

SEQ ID NO: 2097025 - DNA, 15 bp, Homo sapiens
tgccccggttgttcc

SEQ ID NO: 2097026 - DNA, 15 bp, Homo sapiens
gccccggttgttcca

SEQ ID NO: 2097027 - DNA, 15 bp, Homo sapiens
ccccggttgttccat

SEQ ID NO: 2097028 - DNA, 15 bp, Homo sapiens
cccggttgttccatg

SEQ ID NO: 2097029 - DNA, 15 bp, Homo sapiens
ccggttgttccatgt

SEQ ID NO: 2097030 - DNA, 15 bp, Homo sapiens
cggttgttccatgtt

SEQ ID NO: 2097031 - DNA, 15 bp, Homo sapiens
ggttgttccatgttg

SEQ ID NO: 2097032 - DNA, 15 bp, Homo sapiens
gttgttccatgttga

SEQ ID NO: 2097033 - DNA, 15 bp, Homo sapiens
ttgttccatgttgac

SEQ ID NO: 2097034 - DNA, 15 bp, Homo sapiens
tgttccatgttgact

SEQ ID NO: 2097035 - DNA, 15 bp, Homo sapiens
gttccatgttgactg

SEQ ID NO: 2097036 - DNA, 15 bp, Homo sapiens
ttccatgttgactgt

SEQ ID NO: 2097037 - DNA, 15 bp, Homo sapiens
tccatgttgactgtg

SEQ ID NO: 2097038 - DNA, 15 bp, Homo sapiens
ccatgttgactgtgc

SEQ ID NO: 2097039 - DNA, 15 bp, Homo sapiens
catgttgactgtgct

SEQ ID NO: 2097040 - DNA, 15 bp, Homo sapiens
atgttgactgtgctg

SEQ ID NO: 2097041 - DNA, 15 bp, Homo sapiens
tgttgactgtgctgc

SEQ ID NO: 2097042 - DNA, 15 bp, Homo sapiens
gttgactgtgctgca

SEQ ID NO: 2097043 - DNA, 15 bp, Homo sapiens
ttgactgtgctgcac

SEQ ID NO: 2097044 - DNA, 15 bp, Homo sapiens
tgactgtgctgcaca

SEQ ID NO: 2097045 - DNA, 15 bp, Homo sapiens
gactgtgctgcacac

SEQ ID NO: 2097046 - DNA, 15 bp, Homo sapiens
actgtgctgcacaca

SEQ ID NO: 2097047 - DNA, 15 bp, Homo sapiens
ctgtgctgcacacag

SEQ ID NO: 2097048 - DNA, 15 bp, Homo sapiens
tgtgctgcacacagg

SEQ ID NO: 2097049 - DNA, 15 bp, Homo sapiens
gtgctgcacacaggc

SEQ ID NO: 2097050 - DNA, 15 bp, Homo sapiens
tgctgcacacaggcc

SEQ ID NO: 2097051 - DNA, 15 bp, Homo sapiens
gctgcacacaggccg

SEQ ID NO: 2097052 - DNA, 15 bp, Homo sapiens
ctgcacacaggccgc

SEQ ID NO: 2097053 - DNA, 15 bp, Homo sapiens
tgcacacaggccgcc

SEQ ID NO: 2097054 - DNA, 15 bp, Homo sapiens
gcacacaggccgccc

SEQ ID NO: 2097055 - DNA, 15 bp, Homo sapiens
cacacaggccgcccc

SEQ ID NO: 2097056 - DNA, 15 bp, Homo sapiens
acacaggccgccccc

SEQ ID NO: 2097057 - DNA, 15 bp, Homo sapiens
cacaggccgcccccc

SEQ ID NO: 2097058 - DNA, 15 bp, Homo sapiens
acaggccgcccccct

SEQ ID NO: 2097059 - DNA, 15 bp, Homo sapiens
caggccgcccccctt

SEQ ID NO: 2097060 - DNA, 15 bp, Homo sapiens
aggccgccccccttg

SEQ ID NO: 2097061 - DNA, 15 bp, Homo sapiens
ggccgccccccttgc

SEQ ID NO: 2097062 - DNA, 15 bp, Homo sapiens
gccgccccccttgct

SEQ ID NO: 2097063 - DNA, 15 bp, Homo sapiens
ccgccccccttgctc

SEQ ID NO: 2097064 - DNA, 15 bp, Homo sapiens
cgccccccttgctct

SEQ ID NO: 2097065 - DNA, 15 bp, Homo sapiens
gccccccttgctctg

SEQ ID NO: 2097066 - DNA, 15 bp, Homo sapiens
ccccccttgctctgc

SEQ ID NO: 2097067 - DNA, 15 bp, Homo sapiens
cccccttgctctgcc

SEQ ID NO: 2097068 - DNA, 15 bp, Homo sapiens
ccccttgctctgccc

SEQ ID NO: 2097069 - DNA, 15 bp, Homo sapiens
cccttgctctgcccc

SEQ ID NO: 2097070 - DNA, 15 bp, Homo sapiens
ccttgctctgcccct

SEQ ID NO: 2097071 - DNA, 15 bp, Homo sapiens
cttgctctgcccctc

SEQ ID NO: 2097072 - DNA, 15 bp, Homo sapiens
ttgctctgcccctca

SEQ ID NO: 2097073 - DNA, 15 bp, Homo sapiens
tgctctgcccctcac

SEQ ID NO: 2097074 - DNA, 15 bp, Homo sapiens
gctctgcccctcact

SEQ ID NO: 2097075 - DNA, 15 bp, Homo sapiens
ctctgcccctcactg

SEQ ID NO: 2097076 - DNA, 15 bp, Homo sapiens
tctgcccctcactgt

SEQ ID NO: 2097077 - DNA, 15 bp, Homo sapiens
ctgcccctcactgta

SEQ ID NO: 2097078 - DNA, 15 bp, Homo sapiens
gcccctcactgtatt

SEQ ID NO: 2097079 - DNA, 15 bp, Homo sapiens
cccctcactgtatta

SEQ ID NO: 2097080 - DNA, 15 bp, Homo sapiens
ccctcactgtattaa

SEQ ID NO: 2097081 - DNA, 15 bp, Homo sapiens
cctcactgtattaag

SEQ ID NO: 2097082 - DNA, 15 bp, Homo sapiens
ctcactgtattaagt

SEQ ID NO: 2097083 - DNA, 15 bp, Homo sapiens
tcactgtattaagtc

SEQ ID NO: 2097084 - DNA, 15 bp, Homo sapiens
cactgtattaagtct

SEQ ID NO: 2097085 - DNA, 15 bp, Homo sapiens
actgtattaagtctc

SEQ ID NO: 2097086 - DNA, 15 bp, Homo sapiens
ctgtattaagtctct

SEQ ID NO: 2097087 - DNA, 15 bp, Homo sapiens
tgtattaagtctctt

SEQ ID NO: 2097088 - DNA, 15 bp, Homo sapiens
gtattaagtctcttt

SEQ ID NO: 2097089 - DNA, 15 bp, Homo sapiens
tattaagtctctttg

SEQ ID NO: 2097090 - DNA, 15 bp, Homo sapiens
attaagtctctttgg

SEQ ID NO: 2097091 - DNA, 15 bp, Homo sapiens
ttaagtctctttggg

SEQ ID NO: 2097092 - DNA, 15 bp, Homo sapiens
taagtctctttgggc

SEQ ID NO: 2097093 - DNA, 15 bp, Homo sapiens
aagtctctttgggcc

SEQ ID NO: 2097094 - DNA, 15 bp, Homo sapiens
agtctctttgggcct

SEQ ID NO: 2097095 - DNA, 15 bp, Homo sapiens
gtctctttgggcctc

SEQ ID NO: 2097096 - DNA, 15 bp, Homo sapiens
tctctttgggcctca

SEQ ID NO: 2097097 - DNA, 15 bp, Homo sapiens
ctctttgggcctcag

SEQ ID NO: 2097098 - DNA, 15 bp, Homo sapiens
tctttgggcctcagt

SEQ ID NO: 2097099 - DNA, 15 bp, Homo sapiens
ctttgggcctcagtt

SEQ ID NO: 2097100 - DNA, 15 bp, Homo sapiens
tttgggcctcagttt

SEQ ID NO: 2097101 - DNA, 15 bp, Homo sapiens
ttgggcctcagtttc

SEQ ID NO: 2097102 - DNA, 15 bp, Homo sapiens
tgggcctcagtttct

SEQ ID NO: 2097103 - DNA, 15 bp, Homo sapiens
gggcctcagtttctc

SEQ ID NO: 2097104 - DNA, 15 bp, Homo sapiens
ggcctcagtttctcc

SEQ ID NO: 2097105 - DNA, 15 bp, Homo sapiens
gcctcagtttctcca

SEQ ID NO: 2097106 - DNA, 15 bp, Homo sapiens
cctcagtttctccat

SEQ ID NO: 2097107 - DNA, 15 bp, Homo sapiens
ctcagtttctccatc

SEQ ID NO: 2097108 - DNA, 15 bp, Homo sapiens
tcagtttctccatct

SEQ ID NO: 2097109 - DNA, 15 bp, Homo sapiens
cagtttctccatctc

SEQ ID NO: 2097110 - DNA, 15 bp, Homo sapiens
agtttctccatctct

SEQ ID NO: 2097111 - DNA, 15 bp, Homo sapiens
gtttctccatctcta

SEQ ID NO: 2097112 - DNA, 15 bp, Homo sapiens
tttctccatctctaa

SEQ ID NO: 2097113 - DNA, 15 bp, Homo sapiens
ttctccatctctaaa

SEQ ID NO: 2097114 - DNA, 15 bp, Homo sapiens
tctccatctctaaag

SEQ ID NO: 2097115 - DNA, 15 bp, Homo sapiens
ctccatctctaaagg

SEQ ID NO: 2097116 - DNA, 15 bp, Homo sapiens
tccatctctaaagga

SEQ ID NO: 2097117 - DNA, 15 bp, Homo sapiens
ccatctctaaaggag

SEQ ID NO: 2097118 - DNA, 15 bp, Homo sapiens
catctctaaaggagg

SEQ ID NO: 2097119 - DNA, 15 bp, Homo sapiens
atctctaaaggaggt

SEQ ID NO: 2097120 - DNA, 15 bp, Homo sapiens
tctctaaaggaggtc

SEQ ID NO: 2097121 - DNA, 15 bp, Homo sapiens
ctctaaaggaggtcg

SEQ ID NO: 2097122 - DNA, 15 bp, Homo sapiens
tctaaaggaggtcgg

SEQ ID NO: 2097123 - DNA, 15 bp, Homo sapiens
ctaaaggaggtcggg

SEQ ID NO: 2097124 - DNA, 15 bp, Homo sapiens
taaaggaggtcgggg

SEQ ID NO: 2097125 - DNA, 15 bp, Homo sapiens
aaaggaggtcgggga

SEQ ID NO: 2097126 - DNA, 15 bp, Homo sapiens
aaggaggtcggggag

SEQ ID NO: 2097127 - DNA, 15 bp, Homo sapiens
aggaggtcggggagg

SEQ ID NO: 2097128 - DNA, 15 bp, Homo sapiens
ggaggtcggggaggc

SEQ ID NO: 2097129 - DNA, 15 bp, Homo sapiens
gaggtcggggaggcc

SEQ ID NO: 2097130 - DNA, 15 bp, Homo sapiens
aggtcggggaggcca

SEQ ID NO: 2097131 - DNA, 15 bp, Homo sapiens
ggtcggggaggccag

SEQ ID NO: 2097132 - DNA, 15 bp, Homo sapiens
gtcggggaggccagg

SEQ ID NO: 2097133 - DNA, 15 bp, Homo sapiens
tcggggaggccaggc

SEQ ID NO: 2097134 - DNA, 15 bp, Homo sapiens
cggggaggccaggcg

SEQ ID NO: 2097135 - DNA, 15 bp, Homo sapiens
ggggaggccaggcgg

SEQ ID NO: 2097136 - DNA, 15 bp, Homo sapiens
gggaggccaggcggg

SEQ ID NO: 2097137 - DNA, 15 bp, Homo sapiens
ggaggccaggcgggt

SEQ ID NO: 2097138 - DNA, 15 bp, Homo sapiens
gaggccaggcgggtg

SEQ ID NO: 2097139 - DNA, 15 bp, Homo sapiens
aggccaggcgggtgt

SEQ ID NO: 2097140 - DNA, 15 bp, Homo sapiens
ggccaggcgggtgtt

SEQ ID NO: 2097141 - DNA, 15 bp, Homo sapiens
gccaggcgggtgttg

SEQ ID NO: 2097142 - DNA, 15 bp, Homo sapiens
ccaggcgggtgttga

SEQ ID NO: 2097143 - DNA, 15 bp, Homo sapiens
caggcgggtgttgag

SEQ ID NO: 2097144 - DNA, 15 bp, Homo sapiens
aggcgggtgttgagt

SEQ ID NO: 2097145 - DNA, 15 bp, Homo sapiens
ggcgggtgttgagtg

SEQ ID NO: 2097146 - DNA, 15 bp, Homo sapiens
gcgggtgttgagtga

SEQ ID NO: 2097147 - DNA, 15 bp, Homo sapiens
cgggtgttgagtgag

SEQ ID NO: 2097148 - DNA, 15 bp, Homo sapiens
gggtgttgagtgaga

SEQ ID NO: 2097149 - DNA, 15 bp, Homo sapiens
ggtgttgagtgagat

SEQ ID NO: 2097150 - DNA, 15 bp, Homo sapiens
gtgttgagtgagatg

SEQ ID NO: 2097151 - DNA, 15 bp, Homo sapiens
tgttgagtgagatga

SEQ ID NO: 2097152 - DNA, 15 bp, Homo sapiens
gttgagtgagatgaa

SEQ ID NO: 2097153 - DNA, 15 bp, Homo sapiens
ttgagtgagatgaag

SEQ ID NO: 2097154 - DNA, 15 bp, Homo sapiens
tgagtgagatgaaga

SEQ ID NO: 2097155 - DNA, 15 bp, Homo sapiens
gagtgagatgaagag

SEQ ID NO: 2097156 - DNA, 15 bp, Homo sapiens
agtgagatgaagagg

SEQ ID NO: 2097157 - DNA, 15 bp, Homo sapiens
gtgagatgaagaggc

SEQ ID NO: 2097158 - DNA, 15 bp, Homo sapiens
tgagatgaagaggcc

SEQ ID NO: 2097159 - DNA, 15 bp, Homo sapiens
gagatgaagaggccc

SEQ ID NO: 2097160 - DNA, 15 bp, Homo sapiens
agatgaagaggccct

SEQ ID NO: 2097161 - DNA, 15 bp, Homo sapiens
gatgaagaggccctt

SEQ ID NO: 2097162 - DNA, 15 bp, Homo sapiens
atgaagaggcccttg

SEQ ID NO: 2097163 - DNA, 15 bp, Homo sapiens
tgaagaggcccttgg

SEQ ID NO: 2097164 - DNA, 15 bp, Homo sapiens
gaagaggcccttgga

SEQ ID NO: 2097165 - DNA, 15 bp, Homo sapiens
aagaggcccttggag

SEQ ID NO: 2097166 - DNA, 15 bp, Homo sapiens
agaggcccttggagt

SEQ ID NO: 2097167 - DNA, 15 bp, Homo sapiens
gaggcccttggagtc

SEQ ID NO: 2097168 - DNA, 15 bp, Homo sapiens
aggcccttggagtca

SEQ ID NO: 2097169 - DNA, 15 bp, Homo sapiens
ggcccttggagtcat

SEQ ID NO: 2097170 - DNA, 15 bp, Homo sapiens
gcccttggagtcatt

SEQ ID NO: 2097171 - DNA, 15 bp, Homo sapiens
cccttggagtcattc

SEQ ID NO: 2097172 - DNA, 15 bp, Homo sapiens
ccttggagtcattcc

SEQ ID NO: 2097173 - DNA, 15 bp, Homo sapiens
cttggagtcattcca

SEQ ID NO: 2097174 - DNA, 15 bp, Homo sapiens
ttggagtcattccag

SEQ ID NO: 2097175 - DNA, 15 bp, Homo sapiens
tggagtcattccagg

SEQ ID NO: 2097176 - DNA, 15 bp, Homo sapiens
ggagtcattccagga

SEQ ID NO: 2097177 - DNA, 15 bp, Homo sapiens
gagtcattccaggag

SEQ ID NO: 2097178 - DNA, 15 bp, Homo sapiens
agtcattccaggagt

SEQ ID NO: 2097179 - DNA, 15 bp, Homo sapiens
gtcattccaggagtc

SEQ ID NO: 2097180 - DNA, 15 bp, Homo sapiens
tcattccaggagtct

SEQ ID NO: 2097181 - DNA, 15 bp, Homo sapiens
cattccaggagtcta

SEQ ID NO: 2097182 - DNA, 15 bp, Homo sapiens
attccaggagtctat

SEQ ID NO: 2097183 - DNA, 15 bp, Homo sapiens
ttccaggagtctata

SEQ ID NO: 2097184 - DNA, 15 bp, Homo sapiens
tccaggagtctatag

SEQ ID NO: 2097185 - DNA, 15 bp, Homo sapiens
ccaggagtctatagg

SEQ ID NO: 2097186 - DNA, 15 bp, Homo sapiens
caggagtctataggt

SEQ ID NO: 2097187 - DNA, 15 bp, Homo sapiens
aggagtctataggtg

SEQ ID NO: 2097188 - DNA, 15 bp, Homo sapiens
ggagtctataggtga

SEQ ID NO: 2097189 - DNA, 15 bp, Homo sapiens
gagtctataggtgac

SEQ ID NO: 2097190 - DNA, 15 bp, Homo sapiens
agtctataggtgact

SEQ ID NO: 2097191 - DNA, 15 bp, Homo sapiens
gtctataggtgactc

SEQ ID NO: 2097192 - DNA, 15 bp, Homo sapiens
tctataggtgactcc

SEQ ID NO: 2097193 - DNA, 15 bp, Homo sapiens
ctataggtgactcca

SEQ ID NO: 2097194 - DNA, 15 bp, Homo sapiens
tataggtgactccag

SEQ ID NO: 2097195 - DNA, 15 bp, Homo sapiens
ataggtgactccagt

SEQ ID NO: 2097196 - DNA, 15 bp, Homo sapiens
taggtgactccagtc

SEQ ID NO: 2097197 - DNA, 15 bp, Homo sapiens
aggtgactccagtct

SEQ ID NO: 2097198 - DNA, 15 bp, Homo sapiens
ggtgactccagtctc

SEQ ID NO: 2097199 - DNA, 15 bp, Homo sapiens
gtgactccagtctct

SEQ ID NO: 2097200 - DNA, 15 bp, Homo sapiens
tgactccagtctctt

SEQ ID NO: 2097201 - DNA, 15 bp, Homo sapiens
gactccagtctcttc

SEQ ID NO: 2097202 - DNA, 15 bp, Homo sapiens
actccagtctcttct

SEQ ID NO: 2097203 - DNA, 15 bp, Homo sapiens
ctccagtctcttctc

SEQ ID NO: 2097204 - DNA, 15 bp, Homo sapiens
tccagtctcttctca

SEQ ID NO: 2097205 - DNA, 15 bp, Homo sapiens
ccagtctcttctcac

SEQ ID NO: 2097206 - DNA, 15 bp, Homo sapiens
cagtctcttctcact

SEQ ID NO: 2097207 - DNA, 15 bp, Homo sapiens
agtctcttctcactt

SEQ ID NO: 2097208 - DNA, 15 bp, Homo sapiens
gtctcttctcacttc

SEQ ID NO: 2097209 - DNA, 15 bp, Homo sapiens
tctcttctcacttct

SEQ ID NO: 2097210 - DNA, 15 bp, Homo sapiens
ctcttctcacttctg

SEQ ID NO: 2097211 - DNA, 15 bp, Homo sapiens
tcttctcacttctga

SEQ ID NO: 2097212 - DNA, 15 bp, Homo sapiens
cttctcacttctgac

SEQ ID NO: 2097213 - DNA, 15 bp, Homo sapiens
ttctcacttctgaca

SEQ ID NO: 2097214 - DNA, 15 bp, Homo sapiens
tctcacttctgacag

SEQ ID NO: 2097215 - DNA, 15 bp, Homo sapiens
ctcacttctgacagc

SEQ ID NO: 2097216 - DNA, 15 bp, Homo sapiens
tcacttctgacagcc

SEQ ID NO: 2097217 - DNA, 15 bp, Homo sapiens
cacttctgacagcct

SEQ ID NO: 2097218 - DNA, 15 bp, Homo sapiens
acttctgacagcctg

SEQ ID NO: 2097219 - DNA, 15 bp, Homo sapiens
cttctgacagcctgg

SEQ ID NO: 2097220 - DNA, 15 bp, Homo sapiens
ttctgacagcctggt

SEQ ID NO: 2097221 - DNA, 15 bp, Homo sapiens
tctgacagcctggtg

SEQ ID NO: 2097222 - DNA, 15 bp, Homo sapiens
ctgacagcctggtgg

SEQ ID NO: 2097223 - DNA, 15 bp, Homo sapiens
tgacagcctggtggc

SEQ ID NO: 2097224 - DNA, 15 bp, Homo sapiens
gacagcctggtggcg

SEQ ID NO: 2097225 - DNA, 15 bp, Homo sapiens
acagcctggtggcgg

SEQ ID NO: 2097226 - DNA, 15 bp, Homo sapiens
cagcctggtggcggg

SEQ ID NO: 2097227 - DNA, 15 bp, Homo sapiens
agcctggtggcgggg

SEQ ID NO: 2097228 - DNA, 15 bp, Homo sapiens
gcctggtggcggggg

SEQ ID NO: 2097229 - DNA, 15 bp, Homo sapiens
cctggtggcgggggt

SEQ ID NO: 2097230 - DNA, 15 bp, Homo sapiens
ctggtggcgggggtg

SEQ ID NO: 2097231 - DNA, 15 bp, Homo sapiens
tggtggcgggggtgg

SEQ ID NO: 2097232 - DNA, 15 bp, Homo sapiens
ggtggcgggggtgga

SEQ ID NO: 2097233 - DNA, 15 bp, Homo sapiens
gtggcgggggtggag

SEQ ID NO: 2097234 - DNA, 15 bp, Homo sapiens
tggcgggggtggagt

SEQ ID NO: 2097235 - DNA, 15 bp, Homo sapiens
ggcgggggtggagtc

SEQ ID NO: 2097236 - DNA, 15 bp, Homo sapiens
gcgggggtggagtct

SEQ ID NO: 2097237 - DNA, 15 bp, Homo sapiens
cgggggtggagtctc

SEQ ID NO: 2097238 - DNA, 15 bp, Homo sapiens
gggggtggagtctct

SEQ ID NO: 2097239 - DNA, 15 bp, Homo sapiens
ggggtggagtctctg

SEQ ID NO: 2097240 - DNA, 15 bp, Homo sapiens
gggtggagtctctgc

SEQ ID NO: 2097241 - DNA, 15 bp, Homo sapiens
ggtggagtctctgct

SEQ ID NO: 2097242 - DNA, 15 bp, Homo sapiens
gtggagtctctgctg

SEQ ID NO: 2097243 - DNA, 15 bp, Homo sapiens
tggagtctctgctgg

SEQ ID NO: 2097244 - DNA, 15 bp, Homo sapiens
ggagtctctgctggg

SEQ ID NO: 2097245 - DNA, 15 bp, Homo sapiens
gagtctctgctgggg

SEQ ID NO: 2097246 - DNA, 15 bp, Homo sapiens
agtctctgctgggga

SEQ ID NO: 2097247 - DNA, 15 bp, Homo sapiens
gtctctgctggggat

SEQ ID NO: 2097248 - DNA, 15 bp, Homo sapiens
tctctgctggggatg

SEQ ID NO: 2097249 - DNA, 15 bp, Homo sapiens
ctctgctggggatgt

SEQ ID NO: 2097250 - DNA, 15 bp, Homo sapiens
tctgctggggatgtg

SEQ ID NO: 2097251 - DNA, 15 bp, Homo sapiens
ctgctggggatgtgg

SEQ ID NO: 2097252 - DNA, 15 bp, Homo sapiens
tgctggggatgtggg

SEQ ID NO: 2097253 - DNA, 15 bp, Homo sapiens
gctggggatgtgggt

SEQ ID NO: 2097254 - DNA, 15 bp, Homo sapiens
ctggggatgtgggta

SEQ ID NO: 2097255 - DNA, 15 bp, Homo sapiens
tggggatgtgggtac

SEQ ID NO: 2097256 - DNA, 15 bp, Homo sapiens
ggggatgtgggtaca

SEQ ID NO: 2097257 - DNA, 15 bp, Homo sapiens
gggatgtgggtacag

SEQ ID NO: 2097258 - DNA, 15 bp, Homo sapiens
ggatgtgggtacagg

SEQ ID NO: 2097259 - DNA, 15 bp, Homo sapiens
gatgtgggtacaggg

SEQ ID NO: 2097260 - DNA, 15 bp, Homo sapiens
atgtgggtacagggc

SEQ ID NO: 2097261 - DNA, 15 bp, Homo sapiens
tgtgggtacagggct

SEQ ID NO: 2097262 - DNA, 15 bp, Homo sapiens
gtgggtacagggctg

SEQ ID NO: 2097263 - DNA, 15 bp, Homo sapiens
tgggtacagggctgt

SEQ ID NO: 2097264 - DNA, 15 bp, Homo sapiens
gggtacagggctgtg

SEQ ID NO: 2097265 - DNA, 15 bp, Homo sapiens
ggtacagggctgtgg

SEQ ID NO: 2097266 - DNA, 15 bp, Homo sapiens
gtacagggctgtggt

SEQ ID NO: 2097267 - DNA, 15 bp, Homo sapiens
tacagggctgtggtg

SEQ ID NO: 2097268 - DNA, 15 bp, Homo sapiens
acagggctgtggtgg

SEQ ID NO: 2097269 - DNA, 15 bp, Homo sapiens
cagggctgtggtggg

SEQ ID NO: 2097270 - DNA, 15 bp, Homo sapiens
agggctgtggtgggc

SEQ ID NO: 2097271 - DNA, 15 bp, Homo sapiens
gggctgtggtgggcg

SEQ ID NO: 2097272 - DNA, 15 bp, Homo sapiens
ggctgtggtgggcgg

SEQ ID NO: 2097273 - DNA, 15 bp, Homo sapiens
gctgtggtgggcggg

SEQ ID NO: 2097274 - DNA, 15 bp, Homo sapiens
ctgtggtgggcgggg

SEQ ID NO: 2097275 - DNA, 15 bp, Homo sapiens
tgtggtgggcgggga

SEQ ID NO: 2097276 - DNA, 15 bp, Homo sapiens
gtggtgggcggggat

SEQ ID NO: 2097277 - DNA, 15 bp, Homo sapiens
tggtgggcggggatg

SEQ ID NO: 2097278 - DNA, 15 bp, Homo sapiens
ggtgggcggggatga

SEQ ID NO: 2097279 - DNA, 15 bp, Homo sapiens
gtgggcggggatgag

SEQ ID NO: 2097280 - DNA, 15 bp, Homo sapiens
tgggcggggatgagg

SEQ ID NO: 2097281 - DNA, 15 bp, Homo sapiens
gggcggggatgaggg

SEQ ID NO: 2097282 - DNA, 15 bp, Homo sapiens
ggcggggatgagggt

SEQ ID NO: 2097283 - DNA, 15 bp, Homo sapiens
gcggggatgagggtg

SEQ ID NO: 2097284 - DNA, 15 bp, Homo sapiens
cggggatgagggtgg

SEQ ID NO: 2097285 - DNA, 15 bp, Homo sapiens
ggggatgagggtggg

SEQ ID NO: 2097286 - DNA, 15 bp, Homo sapiens
gggatgagggtgggg

SEQ ID NO: 2097287 - DNA, 15 bp, Homo sapiens
ggatgagggtggggt

SEQ ID NO: 2097288 - DNA, 15 bp, Homo sapiens
gatgagggtggggtt

SEQ ID NO: 2097289 - DNA, 15 bp, Homo sapiens
atgagggtggggttt

SEQ ID NO: 2097290 - DNA, 15 bp, Homo sapiens
tgagggtggggtttg

SEQ ID NO: 2097291 - DNA, 15 bp, Homo sapiens
gagggtggggtttgg

SEQ ID NO: 2097292 - DNA, 15 bp, Homo sapiens
agggtggggtttggt

SEQ ID NO: 2097293 - DNA, 15 bp, Homo sapiens
gggtggggtttggtg

SEQ ID NO: 2097294 - DNA, 15 bp, Homo sapiens
ggtggggtttggtga

SEQ ID NO: 2097295 - DNA, 15 bp, Homo sapiens
gtggggtttggtgac

SEQ ID NO: 2097296 - DNA, 15 bp, Homo sapiens
tggggtttggtgaca

SEQ ID NO: 2097297 - DNA, 15 bp, Homo sapiens
ggggtttggtgacag

SEQ ID NO: 2097298 - DNA, 15 bp, Homo sapiens
gggtttggtgacagg

SEQ ID NO: 2097299 - DNA, 15 bp, Homo sapiens
ggtttggtgacaggg

SEQ ID NO: 2097300 - DNA, 15 bp, Homo sapiens
gtttggtgacagggc

SEQ ID NO: 2097301 - DNA, 15 bp, Homo sapiens
tttggtgacagggcg

SEQ ID NO: 2097302 - DNA, 15 bp, Homo sapiens
ttggtgacagggcgt

SEQ ID NO: 2097303 - DNA, 15 bp, Homo sapiens
tggtgacagggcgtg

SEQ ID NO: 2097304 - DNA, 15 bp, Homo sapiens
ggtgacagggcgtgg

SEQ ID NO: 2097305 - DNA, 15 bp, Homo sapiens
gtgacagggcgtggg

SEQ ID NO: 2097306 - DNA, 15 bp, Homo sapiens
tgacagggcgtgggt

SEQ ID NO: 2097307 - DNA, 15 bp, Homo sapiens
gacagggcgtgggtg

SEQ ID NO: 2097308 - DNA, 15 bp, Homo sapiens
acagggcgtgggtgg

SEQ ID NO: 2097309 - DNA, 15 bp, Homo sapiens
cagggcgtgggtggt

SEQ ID NO: 2097310 - DNA, 15 bp, Homo sapiens
agggcgtgggtggtc

SEQ ID NO: 2097311 - DNA, 15 bp, Homo sapiens
gggcgtgggtggtca

SEQ ID NO: 2097312 - DNA, 15 bp, Homo sapiens
ggcgtgggtggtcac

SEQ ID NO: 2097313 - DNA, 15 bp, Homo sapiens
gcgtgggtggtcacc

SEQ ID NO: 2097314 - DNA, 15 bp, Homo sapiens
cgtgggtggtcaccc

SEQ ID NO: 2097315 - DNA, 15 bp, Homo sapiens
gtgggtggtcaccca

SEQ ID NO: 2097316 - DNA, 15 bp, Homo sapiens
tgggtggtcacccag

SEQ ID NO: 2097317 - DNA, 15 bp, Homo sapiens
gggtggtcacccagc

SEQ ID NO: 2097318 - DNA, 15 bp, Homo sapiens
ggtggtcacccagct

SEQ ID NO: 2097319 - DNA, 15 bp, Homo sapiens
gtggtcacccagctt

SEQ ID NO: 2097320 - DNA, 15 bp, Homo sapiens
tggtcacccagcttt

SEQ ID NO: 2097321 - DNA, 15 bp, Homo sapiens
ggtcacccagctttg

SEQ ID NO: 2097322 - DNA, 15 bp, Homo sapiens
gtcacccagctttgc

SEQ ID NO: 2097323 - DNA, 15 bp, Homo sapiens
tcacccagctttgcc

SEQ ID NO: 2097324 - DNA, 15 bp, Homo sapiens
cacccagctttgcct

SEQ ID NO: 2097325 - DNA, 15 bp, Homo sapiens
acccagctttgcctt

SEQ ID NO: 2097326 - DNA, 15 bp, Homo sapiens
cccagctttgccttt

SEQ ID NO: 2097327 - DNA, 15 bp, Homo sapiens
ccagctttgcctttc

SEQ ID NO: 2097328 - DNA, 15 bp, Homo sapiens
cagctttgcctttct

SEQ ID NO: 2097329 - DNA, 15 bp, Homo sapiens
agctttgcctttctc

SEQ ID NO: 2097330 - DNA, 15 bp, Homo sapiens
gctttgcctttctcc

SEQ ID NO: 2097331 - DNA, 15 bp, Homo sapiens
ctttgcctttctcca

SEQ ID NO: 2097332 - DNA, 15 bp, Homo sapiens
tttgcctttctccac

SEQ ID NO: 2097333 - DNA, 15 bp, Homo sapiens
ttgcctttctccaca

SEQ ID NO: 2097334 - DNA, 15 bp, Homo sapiens
tgcctttctccacag

SEQ ID NO: 2097335 - DNA, 15 bp, Homo sapiens
gcctttctccacagg

SEQ ID NO: 2097336 - DNA, 15 bp, Homo sapiens
cctttctccacaggg

SEQ ID NO: 2097337 - DNA, 15 bp, Homo sapiens
ctttctccacagggt

SEQ ID NO: 2097338 - DNA, 15 bp, Homo sapiens
tttctccacagggtc

SEQ ID NO: 2097339 - DNA, 15 bp, Homo sapiens
ttctccacagggtcc

SEQ ID NO: 2097340 - DNA, 15 bp, Homo sapiens
tctccacagggtcct

SEQ ID NO: 2097341 - DNA, 15 bp, Homo sapiens
ctccacagggtcctg

SEQ ID NO: 2097342 - DNA, 15 bp, Homo sapiens
tccacagggtcctga

SEQ ID NO: 2097343 - DNA, 15 bp, Homo sapiens
ccacagggtcctgag

SEQ ID NO: 2097344 - DNA, 15 bp, Homo sapiens
cacagggtcctgagg

SEQ ID NO: 2097345 - DNA, 15 bp, Homo sapiens
acagggtcctgagga

SEQ ID NO: 2097346 - DNA, 15 bp, Homo sapiens
cagggtcctgaggac

SEQ ID NO: 2097347 - DNA, 15 bp, Homo sapiens
agggtcctgaggaca

SEQ ID NO: 2097348 - DNA, 15 bp, Homo sapiens
gggtcctgaggacac

SEQ ID NO: 2097349 - DNA, 15 bp, Homo sapiens
ggtcctgaggacacc

SEQ ID NO: 2097350 - DNA, 15 bp, Homo sapiens
gtcctgaggacaccg

SEQ ID NO: 2097351 - DNA, 15 bp, Homo sapiens
tcctgaggacaccgt

SEQ ID NO: 2097352 - DNA, 15 bp, Homo sapiens
cctgaggacaccgtg

SEQ ID NO: 2097353 - DNA, 15 bp, Homo sapiens
ctgaggacaccgtga

SEQ ID NO: 2097354 - DNA, 15 bp, Homo sapiens
tgaggacaccgtgag

SEQ ID NO: 2097355 - DNA, 15 bp, Homo sapiens
gaggacaccgtgagc

SEQ ID NO: 2097356 - DNA, 15 bp, Homo sapiens
aggacaccgtgagcc

SEQ ID NO: 2097357 - DNA, 15 bp, Homo sapiens
ggacaccgtgagcca

SEQ ID NO: 2097358 - DNA, 15 bp, Homo sapiens
gacaccgtgagccag

SEQ ID NO: 2097359 - DNA, 15 bp, Homo sapiens
acaccgtgagccagc

SEQ ID NO: 2097360 - DNA, 15 bp, Homo sapiens
caccgtgagccagcc

SEQ ID NO: 2097361 - DNA, 15 bp, Homo sapiens
accgtgagccagcca

SEQ ID NO: 2097362 - DNA, 15 bp, Homo sapiens
ccgtgagccagccag

SEQ ID NO: 2097363 - DNA, 15 bp, Homo sapiens
cgtgagccagccagg

SEQ ID NO: 2097364 - DNA, 15 bp, Homo sapiens
gtgagccagccaggc

SEQ ID NO: 2097365 - DNA, 15 bp, Homo sapiens
tgagccagccaggcc

SEQ ID NO: 2097366 - DNA, 15 bp, Homo sapiens
gagccagccaggcct

SEQ ID NO: 2097367 - DNA, 15 bp, Homo sapiens
agccagccaggcctg

SEQ ID NO: 2097368 - DNA, 15 bp, Homo sapiens
gccagccaggcctgg

SEQ ID NO: 2097369 - DNA, 15 bp, Homo sapiens
ccagccaggcctggc

SEQ ID NO: 2097370 - DNA, 15 bp, Homo sapiens
cagccaggcctggcc

SEQ ID NO: 2097371 - DNA, 15 bp, Homo sapiens
agccaggcctggccg

SEQ ID NO: 2097372 - DNA, 15 bp, Homo sapiens
gccaggcctggccgc

SEQ ID NO: 2097373 - DNA, 15 bp, Homo sapiens
ccaggcctggccgct

SEQ ID NO: 2097374 - DNA, 15 bp, Homo sapiens
caggcctggccgctg

SEQ ID NO: 2097375 - DNA, 15 bp, Homo sapiens
aggcctggccgctgg

SEQ ID NO: 2097376 - DNA, 15 bp, Homo sapiens
ggcctggccgctggg

SEQ ID NO: 2097377 - DNA, 15 bp, Homo sapiens
gcctggccgctgggc

SEQ ID NO: 2097378 - DNA, 15 bp, Homo sapiens
cctggccgctgggcc

SEQ ID NO: 2097379 - DNA, 15 bp, Homo sapiens
ctggccgctgggcct

SEQ ID NO: 2097380 - DNA, 15 bp, Homo sapiens
tggccgctgggcctg

SEQ ID NO: 2097381 - DNA, 15 bp, Homo sapiens
ggccgctgggcctga

SEQ ID NO: 2097382 - DNA, 15 bp, Homo sapiens
gccgctgggcctgac

SEQ ID NO: 2097383 - DNA, 15 bp, Homo sapiens
ccgctgggcctgacc

SEQ ID NO: 2097384 - DNA, 15 bp, Homo sapiens
cgctgggcctgaccg

SEQ ID NO: 2097385 - DNA, 15 bp, Homo sapiens
gctgggcctgaccgg

SEQ ID NO: 2097386 - DNA, 15 bp, Homo sapiens
ctgggcctgaccggc

SEQ ID NO: 2097387 - DNA, 15 bp, Homo sapiens
tgggcctgaccggcc

SEQ ID NO: 2097388 - DNA, 15 bp, Homo sapiens
gggcctgaccggccc

SEQ ID NO: 2097389 - DNA, 15 bp, Homo sapiens
ggcctgaccggcccc

SEQ ID NO: 2097390 - DNA, 15 bp, Homo sapiens
gcctgaccggccccc

SEQ ID NO: 2097391 - DNA, 15 bp, Homo sapiens
cctgaccggcccccc

SEQ ID NO: 2097392 - DNA, 15 bp, Homo sapiens
ctgaccggcccccca

SEQ ID NO: 2097393 - DNA, 15 bp, Homo sapiens
tgaccggccccccag

SEQ ID NO: 2097394 - DNA, 15 bp, Homo sapiens
gaccggccccccagc

SEQ ID NO: 2097395 - DNA, 15 bp, Homo sapiens
accggccccccagcc

SEQ ID NO: 2097396 - DNA, 15 bp, Homo sapiens
ccggccccccagccc

SEQ ID NO: 2097397 - DNA, 15 bp, Homo sapiens
cggccccccagcccc

SEQ ID NO: 2097398 - DNA, 15 bp, Homo sapiens
ggccccccagcccct

SEQ ID NO: 2097399 - DNA, 15 bp, Homo sapiens
gccccccagccccta

SEQ ID NO: 2097400 - DNA, 15 bp, Homo sapiens
ccccccagcccctac

SEQ ID NO: 2097401 - DNA, 15 bp, Homo sapiens
cccccagcccctaca

SEQ ID NO: 2097402 - DNA, 15 bp, Homo sapiens
ccccagcccctacac

SEQ ID NO: 2097403 - DNA, 15 bp, Homo sapiens
cccagcccctacacc

SEQ ID NO: 2097404 - DNA, 15 bp, Homo sapiens
ccagcccctacaccc

SEQ ID NO: 2097405 - DNA, 15 bp, Homo sapiens
cagcccctacacccc

SEQ ID NO: 2097406 - DNA, 15 bp, Homo sapiens
agcccctacaccccg

SEQ ID NO: 2097407 - DNA, 15 bp, Homo sapiens
gcccctacaccccgc

SEQ ID NO: 2097408 - DNA, 15 bp, Homo sapiens
cccctacaccccgct

SEQ ID NO: 2097409 - DNA, 15 bp, Homo sapiens
ccctacaccccgctt

SEQ ID NO: 2097410 - DNA, 15 bp, Homo sapiens
cctacaccccgcttc

SEQ ID NO: 2097411 - DNA, 15 bp, Homo sapiens
ctacaccccgcttct

SEQ ID NO: 2097412 - DNA, 15 bp, Homo sapiens
tacaccccgcttctc

SEQ ID NO: 2097413 - DNA, 15 bp, Homo sapiens
acaccccgcttctcc

SEQ ID NO: 2097414 - DNA, 15 bp, Homo sapiens
caccccgcttctccc

SEQ ID NO: 2097415 - DNA, 15 bp, Homo sapiens
accccgcttctcccg

SEQ ID NO: 2097416 - DNA, 15 bp, Homo sapiens
ccccgcttctcccgg

SEQ ID NO: 2097417 - DNA, 15 bp, Homo sapiens
ccatgtctgatcctc

SEQ ID NO: 2097418 - DNA, 15 bp, Homo sapiens
catgtctgatcctct

SEQ ID NO: 2097419 - DNA, 15 bp, Homo sapiens
atgtctgatcctctg

SEQ ID NO: 2097420 - DNA, 15 bp, Homo sapiens
tgtctgatcctctgg

SEQ ID NO: 2097421 - DNA, 15 bp, Homo sapiens
gtctgatcctctggg

SEQ ID NO: 2097422 - DNA, 15 bp, Homo sapiens
tctgatcctctggga

SEQ ID NO: 2097423 - DNA, 15 bp, Homo sapiens
ctgatcctctgggaa

SEQ ID NO: 2097424 - DNA, 15 bp, Homo sapiens
tgatcctctgggaag

SEQ ID NO: 2097425 - DNA, 15 bp, Homo sapiens
gatcctctgggaagc

SEQ ID NO: 2097426 - DNA, 15 bp, Homo sapiens
atcctctgggaagct

SEQ ID NO: 2097427 - DNA, 15 bp, Homo sapiens
tcctctgggaagctg

SEQ ID NO: 2097428 - DNA, 15 bp, Homo sapiens
cctctgggaagctga

SEQ ID NO: 2097429 - DNA, 15 bp, Homo sapiens
ctctgggaagctgag

SEQ ID NO: 2097430 - DNA, 15 bp, Homo sapiens
tctgggaagctgagg

SEQ ID NO: 2097431 - DNA, 15 bp, Homo sapiens
ctgggaagctgaggc

SEQ ID NO: 2097432 - DNA, 15 bp, Homo sapiens
tgggaagctgaggcc

SEQ ID NO: 2097433 - DNA, 15 bp, Homo sapiens
gggaagctgaggcca

SEQ ID NO: 2097434 - DNA, 15 bp, Homo sapiens
ggaagctgaggccag

SEQ ID NO: 2097435 - DNA, 15 bp, Homo sapiens
gaagctgaggccagc

SEQ ID NO: 2097436 - DNA, 15 bp, Homo sapiens
aagctgaggccagct

SEQ ID NO: 2097437 - DNA, 15 bp, Homo sapiens
agctgaggccagctt

SEQ ID NO: 2097438 - DNA, 15 bp, Homo sapiens
gctgaggccagcttt

SEQ ID NO: 2097439 - DNA, 15 bp, Homo sapiens
ctgaggccagctttg

SEQ ID NO: 2097440 - DNA, 15 bp, Homo sapiens
tgaggccagctttgg

SEQ ID NO: 2097441 - DNA, 15 bp, Homo sapiens
gaggccagctttggt

SEQ ID NO: 2097442 - DNA, 15 bp, Homo sapiens
aggccagctttggtt

SEQ ID NO: 2097443 - DNA, 15 bp, Homo sapiens
ggccagctttggtta

SEQ ID NO: 2097444 - DNA, 15 bp, Homo sapiens
gccagctttggttat

SEQ ID NO: 2097445 - DNA, 15 bp, Homo sapiens
ccagctttggttatt

SEQ ID NO: 2097446 - DNA, 15 bp, Homo sapiens
cagctttggttattt

SEQ ID NO: 2097447 - DNA, 15 bp, Homo sapiens
agctttggttatttg

SEQ ID NO: 2097448 - DNA, 15 bp, Homo sapiens
gctttggttatttga

SEQ ID NO: 2097449 - DNA, 15 bp, Homo sapiens
ctttggttatttgat

SEQ ID NO: 2097450 - DNA, 15 bp, Homo sapiens
tttggttatttgata

SEQ ID NO: 2097451 - DNA, 15 bp, Homo sapiens
ttggttatttgatag

SEQ ID NO: 2097452 - DNA, 15 bp, Homo sapiens
tggttatttgatagc

SEQ ID NO: 2097453 - DNA, 15 bp, Homo sapiens
ggttatttgatagcc

SEQ ID NO: 2097454 - DNA, 15 bp, Homo sapiens
gttatttgatagcca

SEQ ID NO: 2097455 - DNA, 15 bp, Homo sapiens
ttatttgatagccac

SEQ ID NO: 2097456 - DNA, 15 bp, Homo sapiens
tatttgatagccacg

SEQ ID NO: 2097457 - DNA, 15 bp, Homo sapiens
atttgatagccacgg

SEQ ID NO: 2097458 - DNA, 15 bp, Homo sapiens
tttgatagccacggt

SEQ ID NO: 2097459 - DNA, 15 bp, Homo sapiens
ttgatagccacggtg

SEQ ID NO: 2097460 - DNA, 15 bp, Homo sapiens
tgatagccacggtga

SEQ ID NO: 2097461 - DNA, 15 bp, Homo sapiens
gatagccacggtgag

SEQ ID NO: 2097462 - DNA, 15 bp, Homo sapiens
atagccacggtgagg

SEQ ID NO: 2097463 - DNA, 15 bp, Homo sapiens
tagccacggtgagga

SEQ ID NO: 2097464 - DNA, 15 bp, Homo sapiens
agccacggtgaggat

SEQ ID NO: 2097465 - DNA, 15 bp, Homo sapiens
gccacggtgaggatt

SEQ ID NO: 2097466 - DNA, 15 bp, Homo sapiens
ccacggtgaggattt

SEQ ID NO: 2097467 - DNA, 15 bp, Homo sapiens
cacggtgaggatttt

SEQ ID NO: 2097468 - DNA, 15 bp, Homo sapiens
acggtgaggattttg

SEQ ID NO: 2097469 - DNA, 15 bp, Homo sapiens
cggtgaggattttga

SEQ ID NO: 2097470 - DNA, 15 bp, Homo sapiens
ggtgaggattttgac

SEQ ID NO: 2097471 - DNA, 15 bp, Homo sapiens
gtgaggattttgact

SEQ ID NO: 2097472 - DNA, 15 bp, Homo sapiens
tgaggattttgactt

SEQ ID NO: 2097473 - DNA, 15 bp, Homo sapiens
gaggattttgactta

SEQ ID NO: 2097474 - DNA, 15 bp, Homo sapiens
aggattttgacttaa

SEQ ID NO: 2097475 - DNA, 15 bp, Homo sapiens
ggattttgacttaat

SEQ ID NO: 2097476 - DNA, 15 bp, Homo sapiens
gattttgacttaatc

SEQ ID NO: 2097477 - DNA, 15 bp, Homo sapiens
attttgacttaatct

SEQ ID NO: 2097478 - DNA, 15 bp, Homo sapiens
ttttgacttaatctg

SEQ ID NO: 2097479 - DNA, 15 bp, Homo sapiens
tttgacttaatctgt

SEQ ID NO: 2097480 - DNA, 15 bp, Homo sapiens
ttgacttaatctgtg

SEQ ID NO: 2097481 - DNA, 15 bp, Homo sapiens
tgacttaatctgtgt

SEQ ID NO: 2097482 - DNA, 15 bp, Homo sapiens
gacttaatctgtgta

SEQ ID NO: 2097483 - DNA, 15 bp, Homo sapiens
acttaatctgtgtat

SEQ ID NO: 2097484 - DNA, 15 bp, Homo sapiens
cttaatctgtgtatg

SEQ ID NO: 2097485 - DNA, 15 bp, Homo sapiens
ttaatctgtgtatgc

SEQ ID NO: 2097486 - DNA, 15 bp, Homo sapiens
taatctgtgtatgca

SEQ ID NO: 2097487 - DNA, 15 bp, Homo sapiens
aatctgtgtatgcaa

SEQ ID NO: 2097488 - DNA, 15 bp, Homo sapiens
atctgtgtatgcaac

SEQ ID NO: 2097489 - DNA, 15 bp, Homo sapiens
tctgtgtatgcaaca

SEQ ID NO: 2097490 - DNA, 15 bp, Homo sapiens
ctgtgtatgcaacac

SEQ ID NO: 2097491 - DNA, 15 bp, Homo sapiens
tgtgtatgcaacaca

SEQ ID NO: 2097492 - DNA, 15 bp, Homo sapiens
gtgtatgcaacacat

SEQ ID NO: 2097493 - DNA, 15 bp, Homo sapiens
tgtatgcaacacatc

SEQ ID NO: 2097494 - DNA, 15 bp, Homo sapiens
gtatgcaacacatca

SEQ ID NO: 2097495 - DNA, 15 bp, Homo sapiens
tatgcaacacatcac

SEQ ID NO: 2097496 - DNA, 15 bp, Homo sapiens
atgcaacacatcaca

SEQ ID NO: 2097497 - DNA, 15 bp, Homo sapiens
tgcaacacatcacag

SEQ ID NO: 2097498 - DNA, 15 bp, Homo sapiens
gcaacacatcacaga

SEQ ID NO: 2097499 - DNA, 15 bp, Homo sapiens
caacacatcacagac

SEQ ID NO: 2097500 - DNA, 15 bp, Homo sapiens
aacacatcacagaca

SEQ ID NO: 2097501 - DNA, 15 bp, Homo sapiens
acacatcacagacag

SEQ ID NO: 2097502 - DNA, 15 bp, Homo sapiens
cacatcacagacagt

SEQ ID NO: 2097503 - DNA, 15 bp, Homo sapiens
acatcacagacagtt

SEQ ID NO: 2097504 - DNA, 15 bp, Homo sapiens
catcacagacagttt

SEQ ID NO: 2097505 - DNA, 15 bp, Homo sapiens
atcacagacagtttt

SEQ ID NO: 2097506 - DNA, 15 bp, Homo sapiens
tcacagacagtttta

SEQ ID NO: 2097507 - DNA, 15 bp, Homo sapiens
cacagacagttttaa

SEQ ID NO: 2097508 - DNA, 15 bp, Homo sapiens
acagacagttttaac

SEQ ID NO: 2097509 - DNA, 15 bp, Homo sapiens
cagacagttttaact

SEQ ID NO: 2097510 - DNA, 15 bp, Homo sapiens
agacagttttaactc

SEQ ID NO: 2097511 - DNA, 15 bp, Homo sapiens
gacagttttaactct

SEQ ID NO: 2097512 - DNA, 15 bp, Homo sapiens
acagttttaactctt

SEQ ID NO: 2097513 - DNA, 15 bp, Homo sapiens
cagttttaactcttg

SEQ ID NO: 2097514 - DNA, 15 bp, Homo sapiens
agttttaactcttgc

SEQ ID NO: 2097515 - DNA, 15 bp, Homo sapiens
gttttaactcttgca

SEQ ID NO: 2097516 - DNA, 15 bp, Homo sapiens
ttttaactcttgcat

SEQ ID NO: 2097517 - DNA, 15 bp, Homo sapiens
tttaactcttgcatt

SEQ ID NO: 2097518 - DNA, 15 bp, Homo sapiens
ttaactcttgcattc

SEQ ID NO: 2097519 - DNA, 15 bp, Homo sapiens
taactcttgcattca

SEQ ID NO: 2097520 - DNA, 15 bp, Homo sapiens
aactcttgcattcaa

SEQ ID NO: 2097521 - DNA, 15 bp, Homo sapiens
actcttgcattcaag

SEQ ID NO: 2097522 - DNA, 15 bp, Homo sapiens
ctcttgcattcaagt

SEQ ID NO: 2097523 - DNA, 15 bp, Homo sapiens
tcttgcattcaagtc

SEQ ID NO: 2097524 - DNA, 15 bp, Homo sapiens
cttgcattcaagtct

SEQ ID NO: 2097525 - DNA, 15 bp, Homo sapiens
ttgcattcaagtcta

SEQ ID NO: 2097526 - DNA, 15 bp, Homo sapiens
tgcattcaagtctac

SEQ ID NO: 2097527 - DNA, 15 bp, Homo sapiens
gcattcaagtctacc

SEQ ID NO: 2097528 - DNA, 15 bp, Homo sapiens
cattcaagtctacct

SEQ ID NO: 2097529 - DNA, 15 bp, Homo sapiens
attcaagtctacctg

SEQ ID NO: 2097530 - DNA, 15 bp, Homo sapiens
ttcaagtctacctgc

SEQ ID NO: 2097531 - DNA, 15 bp, Homo sapiens
tcaagtctacctgct

SEQ ID NO: 2097532 - DNA, 15 bp, Homo sapiens
caagtctacctgctc

SEQ ID NO: 2097533 - DNA, 15 bp, Homo sapiens
aagtctacctgctca

SEQ ID NO: 2097534 - DNA, 15 bp, Homo sapiens
agtctacctgctcat

SEQ ID NO: 2097535 - DNA, 15 bp, Homo sapiens
gtctacctgctcata

SEQ ID NO: 2097536 - DNA, 15 bp, Homo sapiens
tctacctgctcataa

SEQ ID NO: 2097537 - DNA, 15 bp, Homo sapiens
ctacctgctcataaa

SEQ ID NO: 2097538 - DNA, 15 bp, Homo sapiens
tacctgctcataaaa

SEQ ID NO: 2097539 - DNA, 15 bp, Homo sapiens
acctgctcataaaac

SEQ ID NO: 2097540 - DNA, 15 bp, Homo sapiens
cctgctcataaaaca

SEQ ID NO: 2097541 - DNA, 15 bp, Homo sapiens
ctgctcataaaacag

SEQ ID NO: 2097542 - DNA, 15 bp, Homo sapiens
tgctcataaaacaga

SEQ ID NO: 2097543 - DNA, 15 bp, Homo sapiens
gctcataaaacagaa

SEQ ID NO: 2097544 - DNA, 15 bp, Homo sapiens
ctcataaaacagaaa

SEQ ID NO: 2097545 - DNA, 15 bp, Homo sapiens
tcataaaacagaaaa

SEQ ID NO: 2097546 - DNA, 15 bp, Homo sapiens
cataaaacagaaaaa

SEQ ID NO: 2097547 - DNA, 15 bp, Homo sapiens
ataaaacagaaaaaa

SEQ ID NO: 2097548 - DNA, 15 bp, Homo sapiens
taaaacagaaaaaaa

SEQ ID NO: 2097549 - DNA, 15 bp, Homo sapiens
aaaacagaaaaaaag

SEQ ID NO: 2097550 - DNA, 15 bp, Homo sapiens
aaacagaaaaaaaga

SEQ ID NO: 2097551 - DNA, 15 bp, Homo sapiens
aacagaaaaaaagac

SEQ ID NO: 2097552 - DNA, 15 bp, Homo sapiens
acagaaaaaaagaca

SEQ ID NO: 2097553 - DNA, 15 bp, Homo sapiens
cagaaaaaaagacag

SEQ ID NO: 2097554 - DNA, 15 bp, Homo sapiens
agaaaaaaagacagg

SEQ ID NO: 2097555 - DNA, 15 bp, Homo sapiens
gaaaaaaagacaggc

SEQ ID NO: 2097556 - DNA, 15 bp, Homo sapiens
aaaaaaagacaggcc

SEQ ID NO: 2097557 - DNA, 15 bp, Homo sapiens
aaaaaagacaggccc

SEQ ID NO: 2097558 - DNA, 15 bp, Homo sapiens
aaaaagacaggcccc

SEQ ID NO: 2097559 - DNA, 15 bp, Homo sapiens
aaaagacaggcccca

SEQ ID NO: 2097560 - DNA, 15 bp, Homo sapiens
aaagacaggccccag

SEQ ID NO: 2097561 - DNA, 15 bp, Homo sapiens
aagacaggccccaga

SEQ ID NO: 2097562 - DNA, 15 bp, Homo sapiens
agacaggccccagaa

SEQ ID NO: 2097563 - DNA, 15 bp, Homo sapiens
gacaggccccagaag

SEQ ID NO: 2097564 - DNA, 15 bp, Homo sapiens
acaggccccagaagg

SEQ ID NO: 2097565 - DNA, 15 bp, Homo sapiens
caggccccagaaggc

SEQ ID NO: 2097566 - DNA, 15 bp, Homo sapiens
aggccccagaaggca

SEQ ID NO: 2097567 - DNA, 15 bp, Homo sapiens
ggccccagaaggcat

SEQ ID NO: 2097568 - DNA, 15 bp, Homo sapiens
gccccagaaggcatt

SEQ ID NO: 2097569 - DNA, 15 bp, Homo sapiens
ccccagaaggcattc

SEQ ID NO: 2097570 - DNA, 15 bp, Homo sapiens
cccagaaggcattcg

SEQ ID NO: 2097571 - DNA, 15 bp, Homo sapiens
ccagaaggcattcgg

SEQ ID NO: 2097572 - DNA, 15 bp, Homo sapiens
cagaaggcattcggt

SEQ ID NO: 2097573 - DNA, 15 bp, Homo sapiens
agaaggcattcggtt

SEQ ID NO: 2097574 - DNA, 15 bp, Homo sapiens
gaaggcattcggttt

SEQ ID NO: 2097575 - DNA, 15 bp, Homo sapiens
aaggcattcggtttt

SEQ ID NO: 2097576 - DNA, 15 bp, Homo sapiens
aggcattcggttttt

SEQ ID NO: 2097577 - DNA, 15 bp, Homo sapiens
ggcattcggtttttt

SEQ ID NO: 2097578 - DNA, 15 bp, Homo sapiens
gcattcggttttttt

SEQ ID NO: 2097579 - DNA, 15 bp, Homo sapiens
cattcggtttttttt

SEQ ID NO: 2097580 - DNA, 15 bp, Homo sapiens
attcggttttttttt

SEQ ID NO: 2097581 - DNA, 15 bp, Homo sapiens
ttcggtttttttttt

SEQ ID NO: 2097582 - DNA, 15 bp, Homo sapiens
tcggttttttttttt

SEQ ID NO: 2097583 - DNA, 15 bp, Homo sapiens
cggtttttttttttt

SEQ ID NO: 2097584 - DNA, 15 bp, Homo sapiens
gggtctcactttgtc

SEQ ID NO: 2097585 - DNA, 15 bp, Homo sapiens
ggtctcactttgtca

SEQ ID NO: 2097586 - DNA, 15 bp, Homo sapiens
gtctcactttgtcac

SEQ ID NO: 2097587 - DNA, 15 bp, Homo sapiens
tctcactttgtcacc

SEQ ID NO: 2097588 - DNA, 15 bp, Homo sapiens
ctcactttgtcacct

SEQ ID NO: 2097589 - DNA, 15 bp, Homo sapiens
tcactttgtcaccta

SEQ ID NO: 2097590 - DNA, 15 bp, Homo sapiens
cactttgtcacctag

SEQ ID NO: 2097591 - DNA, 15 bp, Homo sapiens
actttgtcacctagg

SEQ ID NO: 2097592 - DNA, 15 bp, Homo sapiens
ctttgtcacctaggc

SEQ ID NO: 2097593 - DNA, 15 bp, Homo sapiens
tttgtcacctaggct

SEQ ID NO: 2097594 - DNA, 15 bp, Homo sapiens
ttgtcacctaggctg

SEQ ID NO: 2097595 - DNA, 15 bp, Homo sapiens
tgtcacctaggctgg

SEQ ID NO: 2097596 - DNA, 15 bp, Homo sapiens
gtcacctaggctggc

SEQ ID NO: 2097597 - DNA, 15 bp, Homo sapiens
tcacctaggctggca

SEQ ID NO: 2097598 - DNA, 15 bp, Homo sapiens
cacctaggctggcac

SEQ ID NO: 2097599 - DNA, 15 bp, Homo sapiens
acctaggctggcaca

SEQ ID NO: 2097600 - DNA, 15 bp, Homo sapiens
cctaggctggcacaa

SEQ ID NO: 2097601 - DNA, 15 bp, Homo sapiens
ctaggctggcacaat

SEQ ID NO: 2097602 - DNA, 15 bp, Homo sapiens
taggctggcacaatc

SEQ ID NO: 2097603 - DNA, 15 bp, Homo sapiens
aggctggcacaatca

SEQ ID NO: 2097604 - DNA, 15 bp, Homo sapiens
ggctggcacaatcac

SEQ ID NO: 2097605 - DNA, 15 bp, Homo sapiens
gctggcacaatcact

SEQ ID NO: 2097606 - DNA, 15 bp, Homo sapiens
ctggcacaatcactg

SEQ ID NO: 2097607 - DNA, 15 bp, Homo sapiens
tggcacaatcactgc

SEQ ID NO: 2097608 - DNA, 15 bp, Homo sapiens
ggcacaatcactgct

SEQ ID NO: 2097609 - DNA, 15 bp, Homo sapiens
gcacaatcactgctc

SEQ ID NO: 2097610 - DNA, 15 bp, Homo sapiens
cacaatcactgctca

SEQ ID NO: 2097611 - DNA, 15 bp, Homo sapiens
acaatcactgctcac

SEQ ID NO: 2097612 - DNA, 15 bp, Homo sapiens
caatcactgctcact

SEQ ID NO: 2097613 - DNA, 15 bp, Homo sapiens
aatcactgctcactg

SEQ ID NO: 2097614 - DNA, 15 bp, Homo sapiens
atcactgctcactgc

SEQ ID NO: 2097615 - DNA, 15 bp, Homo sapiens
tcactgctcactgca

SEQ ID NO: 2097616 - DNA, 15 bp, Homo sapiens
cactgctcactgcag

SEQ ID NO: 2097617 - DNA, 15 bp, Homo sapiens
actgctcactgcagc

SEQ ID NO: 2097618 - DNA, 15 bp, Homo sapiens
ctgctcactgcagcc

SEQ ID NO: 2097619 - DNA, 15 bp, Homo sapiens
tgctcactgcagcct

SEQ ID NO: 2097620 - DNA, 15 bp, Homo sapiens
cagcctcaacctccc

SEQ ID NO: 2097621 - DNA, 15 bp, Homo sapiens
agcctcaacctccca

SEQ ID NO: 2097622 - DNA, 15 bp, Homo sapiens
gcctcaacctcccag

SEQ ID NO: 2097623 - DNA, 15 bp, Homo sapiens
cctcaacctcccagg

SEQ ID NO: 2097624 - DNA, 15 bp, Homo sapiens
ctcaacctcccaggc

SEQ ID NO: 2097625 - DNA, 15 bp, Homo sapiens
tcaacctcccaggct

SEQ ID NO: 2097626 - DNA, 15 bp, Homo sapiens
caacctcccaggctc

SEQ ID NO: 2097627 - DNA, 15 bp, Homo sapiens
aacctcccaggctca

SEQ ID NO: 2097628 - DNA, 15 bp, Homo sapiens
ctcccaggctcaggc

SEQ ID NO: 2097629 - DNA, 15 bp, Homo sapiens
tcccaggctcaggcg

SEQ ID NO: 2097630 - DNA, 15 bp, Homo sapiens
cccaggctcaggcga

SEQ ID NO: 2097631 - DNA, 15 bp, Homo sapiens
ccaggctcaggcgat

SEQ ID NO: 2097632 - DNA, 15 bp, Homo sapiens
caggctcaggcgatc

SEQ ID NO: 2097633 - DNA, 15 bp, Homo sapiens
aggctcaggcgatcc

SEQ ID NO: 2097634 - DNA, 15 bp, Homo sapiens
ctctcacctcagcca

SEQ ID NO: 2097635 - DNA, 15 bp, Homo sapiens
tctcacctcagccag

SEQ ID NO: 2097636 - DNA, 15 bp, Homo sapiens
ctcacctcagccagc

SEQ ID NO: 2097637 - DNA, 15 bp, Homo sapiens
tcacctcagccagcc

SEQ ID NO: 2097638 - DNA, 15 bp, Homo sapiens
cacctcagccagcct

SEQ ID NO: 2097639 - DNA, 15 bp, Homo sapiens
acctcagccagcctc

SEQ ID NO: 2097640 - DNA, 15 bp, Homo sapiens
cctcagccagcctcc

SEQ ID NO: 2097641 - DNA, 15 bp, Homo sapiens
ctcagccagcctccc

SEQ ID NO: 2097642 - DNA, 15 bp, Homo sapiens
tcagccagcctccca

SEQ ID NO: 2097643 - DNA, 15 bp, Homo sapiens
cagccagcctcccaa

SEQ ID NO: 2097644 - DNA, 15 bp, Homo sapiens
agccagcctcccaag

SEQ ID NO: 2097645 - DNA, 15 bp, Homo sapiens
gccagcctcccaagt

SEQ ID NO: 2097646 - DNA, 15 bp, Homo sapiens
ccagcctcccaagta

SEQ ID NO: 2097647 - DNA, 15 bp, Homo sapiens
agcctcccaagtagg

SEQ ID NO: 2097648 - DNA, 15 bp, Homo sapiens
gcctcccaagtaggt

SEQ ID NO: 2097649 - DNA, 15 bp, Homo sapiens
cctcccaagtaggtg

SEQ ID NO: 2097650 - DNA, 15 bp, Homo sapiens
ctcccaagtaggtgg

SEQ ID NO: 2097651 - DNA, 15 bp, Homo sapiens
tcccaagtaggtggg

SEQ ID NO: 2097652 - DNA, 15 bp, Homo sapiens
cccaagtaggtggga

SEQ ID NO: 2097653 - DNA, 15 bp, Homo sapiens
ccaagtaggtgggat

SEQ ID NO: 2097654 - DNA, 15 bp, Homo sapiens
caagtaggtgggatt

SEQ ID NO: 2097655 - DNA, 15 bp, Homo sapiens
aagtaggtgggatta

SEQ ID NO: 2097656 - DNA, 15 bp, Homo sapiens
agtaggtgggattat

SEQ ID NO: 2097657 - DNA, 15 bp, Homo sapiens
gtaggtgggattata

SEQ ID NO: 2097658 - DNA, 15 bp, Homo sapiens
taggtgggattatag

SEQ ID NO: 2097659 - DNA, 15 bp, Homo sapiens
aggtgggattatagg

SEQ ID NO: 2097660 - DNA, 15 bp, Homo sapiens
ggtgggattataggc

SEQ ID NO: 2097661 - DNA, 15 bp, Homo sapiens
gtgggattataggcc

SEQ ID NO: 2097662 - DNA, 15 bp, Homo sapiens
tgggattataggcct

SEQ ID NO: 2097663 - DNA, 15 bp, Homo sapiens
gggattataggcctg

SEQ ID NO: 2097664 - DNA, 15 bp, Homo sapiens
ggattataggcctgt

SEQ ID NO: 2097665 - DNA, 15 bp, Homo sapiens
gattataggcctgtg

SEQ ID NO: 2097666 - DNA, 15 bp, Homo sapiens
attataggcctgtgc

SEQ ID NO: 2097667 - DNA, 15 bp, Homo sapiens
ttataggcctgtgcc

SEQ ID NO: 2097668 - DNA, 15 bp, Homo sapiens
tataggcctgtgcca

SEQ ID NO: 2097669 - DNA, 15 bp, Homo sapiens
ataggcctgtgccac

SEQ ID NO: 2097670 - DNA, 15 bp, Homo sapiens
taggcctgtgccact

SEQ ID NO: 2097671 - DNA, 15 bp, Homo sapiens
aggcctgtgccacta

SEQ ID NO: 2097672 - DNA, 15 bp, Homo sapiens
ggcctgtgccactac

SEQ ID NO: 2097673 - DNA, 15 bp, Homo sapiens
gcctgtgccactaca

SEQ ID NO: 2097674 - DNA, 15 bp, Homo sapiens
cctgtgccactacac

SEQ ID NO: 2097675 - DNA, 15 bp, Homo sapiens
ctgtgccactacacc

SEQ ID NO: 2097676 - DNA, 15 bp, Homo sapiens
tgtgccactacaccc

SEQ ID NO: 2097677 - DNA, 15 bp, Homo sapiens
gtgccactacacccg

SEQ ID NO: 2097678 - DNA, 15 bp, Homo sapiens
tgccactacacccgg

SEQ ID NO: 2097679 - DNA, 15 bp, Homo sapiens
gccactacacccggc

SEQ ID NO: 2097680 - DNA, 15 bp, Homo sapiens
ctaattttttgtata

SEQ ID NO: 2097681 - DNA, 15 bp, Homo sapiens
taattttttgtatat

SEQ ID NO: 2097682 - DNA, 15 bp, Homo sapiens
aattttttgtatatt

SEQ ID NO: 2097683 - DNA, 15 bp, Homo sapiens
attttttgtatattt

SEQ ID NO: 2097684 - DNA, 15 bp, Homo sapiens
ttttttgtatatttt

SEQ ID NO: 2097685 - DNA, 15 bp, Homo sapiens
tttttgtatattttt

SEQ ID NO: 2097686 - DNA, 15 bp, Homo sapiens
ttttgtatatttttg

SEQ ID NO: 2097687 - DNA, 15 bp, Homo sapiens
tttgtatatttttgt

SEQ ID NO: 2097688 - DNA, 15 bp, Homo sapiens
ttgtatatttttgta

SEQ ID NO: 2097689 - DNA, 15 bp, Homo sapiens
tgtatatttttgtaa

SEQ ID NO: 2097690 - DNA, 15 bp, Homo sapiens
gtatatttttgtaaa

SEQ ID NO: 2097691 - DNA, 15 bp, Homo sapiens
tatatttttgtaaag

SEQ ID NO: 2097692 - DNA, 15 bp, Homo sapiens
atatttttgtaaaga

SEQ ID NO: 2097693 - DNA, 15 bp, Homo sapiens
tatttttgtaaagat

SEQ ID NO: 2097694 - DNA, 15 bp, Homo sapiens
atttttgtaaagatg

SEQ ID NO: 2097695 - DNA, 15 bp, Homo sapiens
tttttgtaaagatgg

SEQ ID NO: 2097696 - DNA, 15 bp, Homo sapiens
ttttgtaaagatggg

SEQ ID NO: 2097697 - DNA, 15 bp, Homo sapiens
tttgtaaagatgggg

SEQ ID NO: 2097698 - DNA, 15 bp, Homo sapiens
ttgtaaagatggggt

SEQ ID NO: 2097699 - DNA, 15 bp, Homo sapiens
tgtaaagatggggtt

SEQ ID NO: 2097700 - DNA, 15 bp, Homo sapiens
gtaaagatggggttt

SEQ ID NO: 2097701 - DNA, 15 bp, Homo sapiens
taaagatggggtttc

SEQ ID NO: 2097702 - DNA, 15 bp, Homo sapiens
aaagatggggtttcg

SEQ ID NO: 2097703 - DNA, 15 bp, Homo sapiens
aagatggggtttcgc

SEQ ID NO: 2097704 - DNA, 15 bp, Homo sapiens
agatggggtttcgcc

SEQ ID NO: 2097705 - DNA, 15 bp, Homo sapiens
gatggggtttcgccg

SEQ ID NO: 2097706 - DNA, 15 bp, Homo sapiens
atggggtttcgccgt

SEQ ID NO: 2097707 - DNA, 15 bp, Homo sapiens
tggggtttcgccgtg

SEQ ID NO: 2097708 - DNA, 15 bp, Homo sapiens
ggggtttcgccgtgt

SEQ ID NO: 2097709 - DNA, 15 bp, Homo sapiens
gggtttcgccgtgtc

SEQ ID NO: 2097710 - DNA, 15 bp, Homo sapiens
ggtttcgccgtgtcg

SEQ ID NO: 2097711 - DNA, 15 bp, Homo sapiens
gtttcgccgtgtcgc

SEQ ID NO: 2097712 - DNA, 15 bp, Homo sapiens
tttcgccgtgtcgcc

SEQ ID NO: 2097713 - DNA, 15 bp, Homo sapiens
ttcgccgtgtcgccc

SEQ ID NO: 2097714 - DNA, 15 bp, Homo sapiens
tcgccgtgtcgccca

SEQ ID NO: 2097715 - DNA, 15 bp, Homo sapiens
cgccgtgtcgcccag

SEQ ID NO: 2097716 - DNA, 15 bp, Homo sapiens
gccgtgtcgcccagg

SEQ ID NO: 2097717 - DNA, 15 bp, Homo sapiens
ccgtgtcgcccaggc

SEQ ID NO: 2097718 - DNA, 15 bp, Homo sapiens
cgtgtcgcccaggct

SEQ ID NO: 2097719 - DNA, 15 bp, Homo sapiens
gtgtcgcccaggctg

SEQ ID NO: 2097720 - DNA, 15 bp, Homo sapiens
tgtcgcccaggctga

SEQ ID NO: 2097721 - DNA, 15 bp, Homo sapiens
gtcgcccaggctgat

SEQ ID NO: 2097722 - DNA, 15 bp, Homo sapiens
tcgcccaggctgatc

SEQ ID NO: 2097723 - DNA, 15 bp, Homo sapiens
cgcccaggctgatct

SEQ ID NO: 2097724 - DNA, 15 bp, Homo sapiens
cccaggctgatctcc

SEQ ID NO: 2097725 - DNA, 15 bp, Homo sapiens
ccaggctgatctcca

SEQ ID NO: 2097726 - DNA, 15 bp, Homo sapiens
caggctgatctccaa

SEQ ID NO: 2097727 - DNA, 15 bp, Homo sapiens
aggctgatctccaac

SEQ ID NO: 2097728 - DNA, 15 bp, Homo sapiens
ggctgatctccaact

SEQ ID NO: 2097729 - DNA, 15 bp, Homo sapiens
gctgatctccaactc

SEQ ID NO: 2097730 - DNA, 15 bp, Homo sapiens
ctgatctccaactcc

SEQ ID NO: 2097731 - DNA, 15 bp, Homo sapiens
tgatctccaactccc

SEQ ID NO: 2097732 - DNA, 15 bp, Homo sapiens
gatctccaactccca

SEQ ID NO: 2097733 - DNA, 15 bp, Homo sapiens
atctccaactcccag

SEQ ID NO: 2097734 - DNA, 15 bp, Homo sapiens
tctccaactcccagg

SEQ ID NO: 2097735 - DNA, 15 bp, Homo sapiens
ctccaactcccaggc

SEQ ID NO: 2097736 - DNA, 15 bp, Homo sapiens
tccaactcccaggct

SEQ ID NO: 2097737 - DNA, 15 bp, Homo sapiens
ccaactcccaggctc

SEQ ID NO: 2097738 - DNA, 15 bp, Homo sapiens
caactcccaggctca

SEQ ID NO: 2097739 - DNA, 15 bp, Homo sapiens
aactcccaggctcaa

SEQ ID NO: 2097740 - DNA, 15 bp, Homo sapiens
actcccaggctcaag

SEQ ID NO: 2097741 - DNA, 15 bp, Homo sapiens
ggctcaagcgatccg

SEQ ID NO: 2097742 - DNA, 15 bp, Homo sapiens
gctcaagcgatccgc

SEQ ID NO: 2097743 - DNA, 15 bp, Homo sapiens
ctcaagcgatccgcc

SEQ ID NO: 2097744 - DNA, 15 bp, Homo sapiens
tcaagcgatccgccc

SEQ ID NO: 2097745 - DNA, 15 bp, Homo sapiens
caagcgatccgcccg

SEQ ID NO: 2097746 - DNA, 15 bp, Homo sapiens
aagcgatccgcccgc

SEQ ID NO: 2097747 - DNA, 15 bp, Homo sapiens
agcgatccgcccgcc

SEQ ID NO: 2097748 - DNA, 15 bp, Homo sapiens
gcgatccgcccgcct

SEQ ID NO: 2097749 - DNA, 15 bp, Homo sapiens
cgatccgcccgcctc

SEQ ID NO: 2097750 - DNA, 15 bp, Homo sapiens
gcatgagccactgcc

SEQ ID NO: 2097751 - DNA, 15 bp, Homo sapiens
catgagccactgccc

SEQ ID NO: 2097752 - DNA, 15 bp, Homo sapiens
atgagccactgccct

SEQ ID NO: 2097753 - DNA, 15 bp, Homo sapiens
tgagccactgccctg

SEQ ID NO: 2097754 - DNA, 15 bp, Homo sapiens
gagccactgccctgg

SEQ ID NO: 2097755 - DNA, 15 bp, Homo sapiens
agccactgccctggc

SEQ ID NO: 2097756 - DNA, 15 bp, Homo sapiens
gccactgccctggcc

SEQ ID NO: 2097757 - DNA, 15 bp, Homo sapiens
ccactgccctggccc

SEQ ID NO: 2097758 - DNA, 15 bp, Homo sapiens
cactgccctggccct

SEQ ID NO: 2097759 - DNA, 15 bp, Homo sapiens
actgccctggccctt

SEQ ID NO: 2097760 - DNA, 15 bp, Homo sapiens
ctgccctggccctta

SEQ ID NO: 2097761 - DNA, 15 bp, Homo sapiens
tgccctggcccttaa

SEQ ID NO: 2097762 - DNA, 15 bp, Homo sapiens
gccctggcccttaag

SEQ ID NO: 2097763 - DNA, 15 bp, Homo sapiens
ccctggcccttaagt

SEQ ID NO: 2097764 - DNA, 15 bp, Homo sapiens
cctggcccttaagtc

SEQ ID NO: 2097765 - DNA, 15 bp, Homo sapiens
ctggcccttaagtca

SEQ ID NO: 2097766 - DNA, 15 bp, Homo sapiens
tggcccttaagtcat

SEQ ID NO: 2097767 - DNA, 15 bp, Homo sapiens
ggcccttaagtcatt

SEQ ID NO: 2097768 - DNA, 15 bp, Homo sapiens
gcccttaagtcattc

SEQ ID NO: 2097769 - DNA, 15 bp, Homo sapiens
cccttaagtcattct

SEQ ID NO: 2097770 - DNA, 15 bp, Homo sapiens
ccttaagtcattctt

SEQ ID NO: 2097771 - DNA, 15 bp, Homo sapiens
cttaagtcattcttg

SEQ ID NO: 2097772 - DNA, 15 bp, Homo sapiens
ttaagtcattcttgt

SEQ ID NO: 2097773 - DNA, 15 bp, Homo sapiens
taagtcattcttgtg

SEQ ID NO: 2097774 - DNA, 15 bp, Homo sapiens
aagtcattcttgtgt

SEQ ID NO: 2097775 - DNA, 15 bp, Homo sapiens
agtcattcttgtgtt

SEQ ID NO: 2097776 - DNA, 15 bp, Homo sapiens
gtcattcttgtgttt

SEQ ID NO: 2097777 - DNA, 15 bp, Homo sapiens
tcattcttgtgtttg

SEQ ID NO: 2097778 - DNA, 15 bp, Homo sapiens
cattcttgtgtttgt

SEQ ID NO: 2097779 - DNA, 15 bp, Homo sapiens
attcttgtgtttgtg

SEQ ID NO: 2097780 - DNA, 15 bp, Homo sapiens
ttcttgtgtttgtgt

SEQ ID NO: 2097781 - DNA, 15 bp, Homo sapiens
tcttgtgtttgtgtg

SEQ ID NO: 2097782 - DNA, 15 bp, Homo sapiens
cttgtgtttgtgtgt

SEQ ID NO: 2097783 - DNA, 15 bp, Homo sapiens
tttgtgtgtgtgtgg

SEQ ID NO: 2097784 - DNA, 15 bp, Homo sapiens
ttgtgtgtgtgtggg

SEQ ID NO: 2097785 - DNA, 15 bp, Homo sapiens
tgtgtgtgtgtgggg

SEQ ID NO: 2097786 - DNA, 15 bp, Homo sapiens
gtgtgtgtgtggggt

SEQ ID NO: 2097787 - DNA, 15 bp, Homo sapiens
tgtgtgtgtggggtg

SEQ ID NO: 2097788 - DNA, 15 bp, Homo sapiens
gtgtgtgtggggtgt

SEQ ID NO: 2097789 - DNA, 15 bp, Homo sapiens
tgtgtgtggggtgtg

SEQ ID NO: 2097790 - DNA, 15 bp, Homo sapiens
gtgtgtggggtgtgt

SEQ ID NO: 2097791 - DNA, 15 bp, Homo sapiens
tgtgtggggtgtgtg

SEQ ID NO: 2097792 - DNA, 15 bp, Homo sapiens
gtgtggggtgtgtgt

SEQ ID NO: 2097793 - DNA, 15 bp, Homo sapiens
tgtggggtgtgtgtg

SEQ ID NO: 2097794 - DNA, 15 bp, Homo sapiens
gtggggtgtgtgtgt

SEQ ID NO: 2097795 - DNA, 15 bp, Homo sapiens
tggggtgtgtgtgtg

SEQ ID NO: 2097796 - DNA, 15 bp, Homo sapiens
gtgtgtgtgtgttcc

SEQ ID NO: 2097797 - DNA, 15 bp, Homo sapiens
tgtgtgtgtgttccc

SEQ ID NO: 2097798 - DNA, 15 bp, Homo sapiens
gtgtgtgtgttcccg

SEQ ID NO: 2097799 - DNA, 15 bp, Homo sapiens
tgtgtgtgttcccga

SEQ ID NO: 2097800 - DNA, 15 bp, Homo sapiens
gtgtgtgttcccgag

SEQ ID NO: 2097801 - DNA, 15 bp, Homo sapiens
tgtgtgttcccgagg

SEQ ID NO: 2097802 - DNA, 15 bp, Homo sapiens
gtgtgttcccgaggg

SEQ ID NO: 2097803 - DNA, 15 bp, Homo sapiens
tgtgttcccgaggga

SEQ ID NO: 2097804 - DNA, 15 bp, Homo sapiens
gtgttcccgagggac

SEQ ID NO: 2097805 - DNA, 15 bp, Homo sapiens
tgttcccgagggact

SEQ ID NO: 2097806 - DNA, 15 bp, Homo sapiens
gttcccgagggactt

SEQ ID NO: 2097807 - DNA, 15 bp, Homo sapiens
ttcccgagggactta

SEQ ID NO: 2097808 - DNA, 15 bp, Homo sapiens
tcccgagggacttag

SEQ ID NO: 2097809 - DNA, 15 bp, Homo sapiens
cccgagggacttagc

SEQ ID NO: 2097810 - DNA, 15 bp, Homo sapiens
ccgagggacttagcc

SEQ ID NO: 2097811 - DNA, 15 bp, Homo sapiens
cgagggacttagcct

SEQ ID NO: 2097812 - DNA, 15 bp, Homo sapiens
gagggacttagcctc

SEQ ID NO: 2097813 - DNA, 15 bp, Homo sapiens
agggacttagcctcc

SEQ ID NO: 2097814 - DNA, 15 bp, Homo sapiens
gggacttagcctccc

SEQ ID NO: 2097815 - DNA, 15 bp, Homo sapiens
ggacttagcctcccg

SEQ ID NO: 2097816 - DNA, 15 bp, Homo sapiens
gacttagcctcccgt

SEQ ID NO: 2097817 - DNA, 15 bp, Homo sapiens
acttagcctcccgtg

SEQ ID NO: 2097818 - DNA, 15 bp, Homo sapiens
cttagcctcccgtgt

SEQ ID NO: 2097819 - DNA, 15 bp, Homo sapiens
ttagcctcccgtgtg

SEQ ID NO: 2097820 - DNA, 15 bp, Homo sapiens
tagcctcccgtgtgt

SEQ ID NO: 2097821 - DNA, 15 bp, Homo sapiens
agcctcccgtgtgtc

SEQ ID NO: 2097822 - DNA, 15 bp, Homo sapiens
gcctcccgtgtgtct

SEQ ID NO: 2097823 - DNA, 15 bp, Homo sapiens
cctcccgtgtgtctc

SEQ ID NO: 2097824 - DNA, 15 bp, Homo sapiens
ctcccgtgtgtctca

SEQ ID NO: 2097825 - DNA, 15 bp, Homo sapiens
tcccgtgtgtctcat

SEQ ID NO: 2097826 - DNA, 15 bp, Homo sapiens
cccgtgtgtctcatt

SEQ ID NO: 2097827 - DNA, 15 bp, Homo sapiens
ccgtgtgtctcattg

SEQ ID NO: 2097828 - DNA, 15 bp, Homo sapiens
cgtgtgtctcattgg

SEQ ID NO: 2097829 - DNA, 15 bp, Homo sapiens
gtgtgtctcattggg

SEQ ID NO: 2097830 - DNA, 15 bp, Homo sapiens
tgtgtctcattgggt

SEQ ID NO: 2097831 - DNA, 15 bp, Homo sapiens
gtgtctcattgggtg

SEQ ID NO: 2097832 - DNA, 15 bp, Homo sapiens
tgtctcattgggtga

SEQ ID NO: 2097833 - DNA, 15 bp, Homo sapiens
gtctcattgggtgaa

SEQ ID NO: 2097834 - DNA, 15 bp, Homo sapiens
tctcattgggtgaac

SEQ ID NO: 2097835 - DNA, 15 bp, Homo sapiens
ctcattgggtgaaca

SEQ ID NO: 2097836 - DNA, 15 bp, Homo sapiens
tcattgggtgaacat

SEQ ID NO: 2097837 - DNA, 15 bp, Homo sapiens
cattgggtgaacatc

SEQ ID NO: 2097838 - DNA, 15 bp, Homo sapiens
attgggtgaacatct

SEQ ID NO: 2097839 - DNA, 15 bp, Homo sapiens
ttgggtgaacatctt

SEQ ID NO: 2097840 - DNA, 15 bp, Homo sapiens
tgggtgaacatcttg

SEQ ID NO: 2097841 - DNA, 15 bp, Homo sapiens
gggtgaacatcttgc

SEQ ID NO: 2097842 - DNA, 15 bp, Homo sapiens
ggtgaacatcttgct

SEQ ID NO: 2097843 - DNA, 15 bp, Homo sapiens
gtgaacatcttgctt

SEQ ID NO: 2097844 - DNA, 15 bp, Homo sapiens
tgaacatcttgcttc

SEQ ID NO: 2097845 - DNA, 15 bp, Homo sapiens
gaacatcttgcttct

SEQ ID NO: 2097846 - DNA, 15 bp, Homo sapiens
aacatcttgcttctg

SEQ ID NO: 2097847 - DNA, 15 bp, Homo sapiens
acatcttgcttctga

SEQ ID NO: 2097848 - DNA, 15 bp, Homo sapiens
catcttgcttctgag

SEQ ID NO: 2097849 - DNA, 15 bp, Homo sapiens
atcttgcttctgagt

SEQ ID NO: 2097850 - DNA, 15 bp, Homo sapiens
tcttgcttctgagtg

SEQ ID NO: 2097851 - DNA, 15 bp, Homo sapiens
cttgcttctgagtga

SEQ ID NO: 2097852 - DNA, 15 bp, Homo sapiens
ttgcttctgagtgag

SEQ ID NO: 2097853 - DNA, 15 bp, Homo sapiens
tgcttctgagtgagg

SEQ ID NO: 2097854 - DNA, 15 bp, Homo sapiens
gcttctgagtgaggt

SEQ ID NO: 2097855 - DNA, 15 bp, Homo sapiens
cttctgagtgaggtt

SEQ ID NO: 2097856 - DNA, 15 bp, Homo sapiens
ttctgagtgaggttt

SEQ ID NO: 2097857 - DNA, 15 bp, Homo sapiens
tctgagtgaggtttg

SEQ ID NO: 2097858 - DNA, 15 bp, Homo sapiens
ctgagtgaggtttga

SEQ ID NO: 2097859 - DNA, 15 bp, Homo sapiens
tgagtgaggtttgat

SEQ ID NO: 2097860 - DNA, 15 bp, Homo sapiens
gagtgaggtttgatt

SEQ ID NO: 2097861 - DNA, 15 bp, Homo sapiens
agtgaggtttgattt

SEQ ID NO: 2097862 - DNA, 15 bp, Homo sapiens
gtgaggtttgatttt

SEQ ID NO: 2097863 - DNA, 15 bp, Homo sapiens
tgaggtttgattttt

SEQ ID NO: 2097864 - DNA, 15 bp, Homo sapiens
gaggtttgatttttt

SEQ ID NO: 2097865 - DNA, 15 bp, Homo sapiens
aggtttgattttttt

SEQ ID NO: 2097866 - DNA, 15 bp, Homo sapiens
ggtttgatttttttg

SEQ ID NO: 2097867 - DNA, 15 bp, Homo sapiens
gtttgatttttttgt

SEQ ID NO: 2097868 - DNA, 15 bp, Homo sapiens
tttgatttttttgta

SEQ ID NO: 2097869 - DNA, 15 bp, Homo sapiens
ttgatttttttgtag

SEQ ID NO: 2097870 - DNA, 15 bp, Homo sapiens
tgatttttttgtagg

SEQ ID NO: 2097871 - DNA, 15 bp, Homo sapiens
gatttttttgtaggg

SEQ ID NO: 2097872 - DNA, 15 bp, Homo sapiens
atttttttgtagggt

SEQ ID NO: 2097873 - DNA, 15 bp, Homo sapiens
tttttttgtagggtg

SEQ ID NO: 2097874 - DNA, 15 bp, Homo sapiens
ttttttgtagggtgt

SEQ ID NO: 2097875 - DNA, 15 bp, Homo sapiens
tttttgtagggtgtg

SEQ ID NO: 2097876 - DNA, 15 bp, Homo sapiens
ttttgtagggtgtgc

SEQ ID NO: 2097877 - DNA, 15 bp, Homo sapiens
tttgtagggtgtgcg

SEQ ID NO: 2097878 - DNA, 15 bp, Homo sapiens
ttgtagggtgtgcgt

SEQ ID NO: 2097879 - DNA, 15 bp, Homo sapiens
tgtagggtgtgcgtt

SEQ ID NO: 2097880 - DNA, 15 bp, Homo sapiens
gtagggtgtgcgttt

SEQ ID NO: 2097881 - DNA, 15 bp, Homo sapiens
tagggtgtgcgtttg

SEQ ID NO: 2097882 - DNA, 15 bp, Homo sapiens
agggtgtgcgtttgg

SEQ ID NO: 2097883 - DNA, 15 bp, Homo sapiens
gggtgtgcgtttgga

SEQ ID NO: 2097884 - DNA, 15 bp, Homo sapiens
ggtgtgcgtttggac

SEQ ID NO: 2097885 - DNA, 15 bp, Homo sapiens
gtgtgcgtttggaca

SEQ ID NO: 2097886 - DNA, 15 bp, Homo sapiens
tgtgcgtttggacac

SEQ ID NO: 2097887 - DNA, 15 bp, Homo sapiens
gtgcgtttggacaca

SEQ ID NO: 2097888 - DNA, 15 bp, Homo sapiens
tgcgtttggacacat

SEQ ID NO: 2097889 - DNA, 15 bp, Homo sapiens
gcgtttggacacatc

SEQ ID NO: 2097890 - DNA, 15 bp, Homo sapiens
cgtttggacacatcc

SEQ ID NO: 2097891 - DNA, 15 bp, Homo sapiens
gtttggacacatcct

SEQ ID NO: 2097892 - DNA, 15 bp, Homo sapiens
tttggacacatcctt

SEQ ID NO: 2097893 - DNA, 15 bp, Homo sapiens
ttggacacatccttg

SEQ ID NO: 2097894 - DNA, 15 bp, Homo sapiens
tggacacatccttgg

SEQ ID NO: 2097895 - DNA, 15 bp, Homo sapiens
ggacacatccttggt

SEQ ID NO: 2097896 - DNA, 15 bp, Homo sapiens
gacacatccttggtc

SEQ ID NO: 2097897 - DNA, 15 bp, Homo sapiens
acacatccttggtct

SEQ ID NO: 2097898 - DNA, 15 bp, Homo sapiens
cacatccttggtctt

SEQ ID NO: 2097899 - DNA, 15 bp, Homo sapiens
acatccttggtctta

SEQ ID NO: 2097900 - DNA, 15 bp, Homo sapiens
catccttggtcttaa

SEQ ID NO: 2097901 - DNA, 15 bp, Homo sapiens
atccttggtcttaag

SEQ ID NO: 2097902 - DNA, 15 bp, Homo sapiens
tccttggtcttaagc

SEQ ID NO: 2097903 - DNA, 15 bp, Homo sapiens
ccttggtcttaagcc

SEQ ID NO: 2097904 - DNA, 15 bp, Homo sapiens
cttggtcttaagccc

SEQ ID NO: 2097905 - DNA, 15 bp, Homo sapiens
ttggtcttaagccca

SEQ ID NO: 2097906 - DNA, 15 bp, Homo sapiens
tggtcttaagcccag

SEQ ID NO: 2097907 - DNA, 15 bp, Homo sapiens
ggtcttaagcccagc

SEQ ID NO: 2097908 - DNA, 15 bp, Homo sapiens
gtcttaagcccagcc

SEQ ID NO: 2097909 - DNA, 15 bp, Homo sapiens
tcttaagcccagcca

SEQ ID NO: 2097910 - DNA, 15 bp, Homo sapiens
cttaagcccagccaa

SEQ ID NO: 2097911 - DNA, 15 bp, Homo sapiens
ttaagcccagccaac

SEQ ID NO: 2097912 - DNA, 15 bp, Homo sapiens
taagcccagccaacg

SEQ ID NO: 2097913 - DNA, 15 bp, Homo sapiens
aagcccagccaacga

SEQ ID NO: 2097914 - DNA, 15 bp, Homo sapiens
agcccagccaacgac

SEQ ID NO: 2097915 - DNA, 15 bp, Homo sapiens
gcccagccaacgacc

SEQ ID NO: 2097916 - DNA, 15 bp, Homo sapiens
cccagccaacgacct

SEQ ID NO: 2097917 - DNA, 15 bp, Homo sapiens
ccagccaacgacctt

SEQ ID NO: 2097918 - DNA, 15 bp, Homo sapiens
cagccaacgacctta

SEQ ID NO: 2097919 - DNA, 15 bp, Homo sapiens
agccaacgaccttag

SEQ ID NO: 2097920 - DNA, 15 bp, Homo sapiens
gccaacgaccttagc

SEQ ID NO: 2097921 - DNA, 15 bp, Homo sapiens
ccaacgaccttagcc

SEQ ID NO: 2097922 - DNA, 15 bp, Homo sapiens
caacgaccttagcca

SEQ ID NO: 2097923 - DNA, 15 bp, Homo sapiens
aacgaccttagccag

SEQ ID NO: 2097924 - DNA, 15 bp, Homo sapiens
acgaccttagccagg

SEQ ID NO: 2097925 - DNA, 15 bp, Homo sapiens
cgaccttagccaggg

SEQ ID NO: 2097926 - DNA, 15 bp, Homo sapiens
gaccttagccagggc

SEQ ID NO: 2097927 - DNA, 15 bp, Homo sapiens
accttagccagggct

SEQ ID NO: 2097928 - DNA, 15 bp, Homo sapiens
ccttagccagggctc

SEQ ID NO: 2097929 - DNA, 15 bp, Homo sapiens
cttagccagggctca

SEQ ID NO: 2097930 - DNA, 15 bp, Homo sapiens
ttagccagggctcag

SEQ ID NO: 2097931 - DNA, 15 bp, Homo sapiens
tagccagggctcagg

SEQ ID NO: 2097932 - DNA, 15 bp, Homo sapiens
agccagggctcaggg

SEQ ID NO: 2097933 - DNA, 15 bp, Homo sapiens
gccagggctcaggga

SEQ ID NO: 2097934 - DNA, 15 bp, Homo sapiens
ccagggctcagggag

SEQ ID NO: 2097935 - DNA, 15 bp, Homo sapiens
cagggctcagggagg

SEQ ID NO: 2097936 - DNA, 15 bp, Homo sapiens
agggctcagggaggg

SEQ ID NO: 2097937 - DNA, 15 bp, Homo sapiens
gggctcagggaggga

SEQ ID NO: 2097938 - DNA, 15 bp, Homo sapiens
ggctcagggagggaa

SEQ ID NO: 2097939 - DNA, 15 bp, Homo sapiens
gctcagggagggaag

SEQ ID NO: 2097940 - DNA, 15 bp, Homo sapiens
ctcagggagggaagc

SEQ ID NO: 2097941 - DNA, 15 bp, Homo sapiens
tcagggagggaagca

SEQ ID NO: 2097942 - DNA, 15 bp, Homo sapiens
cagggagggaagcac

SEQ ID NO: 2097943 - DNA, 15 bp, Homo sapiens
agggagggaagcacc

SEQ ID NO: 2097944 - DNA, 15 bp, Homo sapiens
gggagggaagcaccg

SEQ ID NO: 2097945 - DNA, 15 bp, Homo sapiens
ggagggaagcaccgc

SEQ ID NO: 2097946 - DNA, 15 bp, Homo sapiens
gagggaagcaccgcc

SEQ ID NO: 2097947 - DNA, 15 bp, Homo sapiens
agggaagcaccgcct

SEQ ID NO: 2097948 - DNA, 15 bp, Homo sapiens
gggaagcaccgcctg

SEQ ID NO: 2097949 - DNA, 15 bp, Homo sapiens
ggaagcaccgcctgc

SEQ ID NO: 2097950 - DNA, 15 bp, Homo sapiens
gaagcaccgcctgcc

SEQ ID NO: 2097951 - DNA, 15 bp, Homo sapiens
aagcaccgcctgccc

SEQ ID NO: 2097952 - DNA, 15 bp, Homo sapiens
agcaccgcctgcccc

SEQ ID NO: 2097953 - DNA, 15 bp, Homo sapiens
gcaccgcctgcccca

SEQ ID NO: 2097954 - DNA, 15 bp, Homo sapiens
caccgcctgccccac

SEQ ID NO: 2097955 - DNA, 15 bp, Homo sapiens
accgcctgccccaca

SEQ ID NO: 2097956 - DNA, 15 bp, Homo sapiens
ccgcctgccccacag

SEQ ID NO: 2097957 - DNA, 15 bp, Homo sapiens
cgcctgccccacagc

SEQ ID NO: 2097958 - DNA, 15 bp, Homo sapiens
gcctgccccacagct

SEQ ID NO: 2097959 - DNA, 15 bp, Homo sapiens
cctgccccacagctg

SEQ ID NO: 2097960 - DNA, 15 bp, Homo sapiens
ctgccccacagctgg

SEQ ID NO: 2097961 - DNA, 15 bp, Homo sapiens
tgccccacagctgga

SEQ ID NO: 2097962 - DNA, 15 bp, Homo sapiens
gccccacagctggag

SEQ ID NO: 2097963 - DNA, 15 bp, Homo sapiens
ccccacagctggagg

SEQ ID NO: 2097964 - DNA, 15 bp, Homo sapiens
cccacagctggaggg

SEQ ID NO: 2097965 - DNA, 15 bp, Homo sapiens
ccacagctggagggc

SEQ ID NO: 2097966 - DNA, 15 bp, Homo sapiens
cacagctggagggct

SEQ ID NO: 2097967 - DNA, 15 bp, Homo sapiens
acagctggagggctg

SEQ ID NO: 2097968 - DNA, 15 bp, Homo sapiens
cagctggagggctgg

SEQ ID NO: 2097969 - DNA, 15 bp, Homo sapiens
agctggagggctggg

SEQ ID NO: 2097970 - DNA, 15 bp, Homo sapiens
gctggagggctgggg

SEQ ID NO: 2097971 - DNA, 15 bp, Homo sapiens
ctggagggctggggt

SEQ ID NO: 2097972 - DNA, 15 bp, Homo sapiens
tggagggctggggtt

SEQ ID NO: 2097973 - DNA, 15 bp, Homo sapiens
ggagggctggggttc

SEQ ID NO: 2097974 - DNA, 15 bp, Homo sapiens
gagggctggggttcg

SEQ ID NO: 2097975 - DNA, 15 bp, Homo sapiens
agggctggggttcgg

SEQ ID NO: 2097976 - DNA, 15 bp, Homo sapiens
gggctggggttcggg

SEQ ID NO: 2097977 - DNA, 15 bp, Homo sapiens
ggctggggttcggga

SEQ ID NO: 2097978 - DNA, 15 bp, Homo sapiens
gctggggttcgggac

SEQ ID NO: 2097979 - DNA, 15 bp, Homo sapiens
ctggggttcgggaca

SEQ ID NO: 2097980 - DNA, 15 bp, Homo sapiens
tggggttcgggacac

SEQ ID NO: 2097981 - DNA, 15 bp, Homo sapiens
ggggttcgggacacc

SEQ ID NO: 2097982 - DNA, 15 bp, Homo sapiens
gggttcgggacaccc

SEQ ID NO: 2097983 - DNA, 15 bp, Homo sapiens
ggttcgggacacccg

SEQ ID NO: 2097984 - DNA, 15 bp, Homo sapiens
gttcgggacacccgg

SEQ ID NO: 2097985 - DNA, 15 bp, Homo sapiens
ttcgggacacccggt

SEQ ID NO: 2097986 - DNA, 15 bp, Homo sapiens
tcgggacacccggtc

SEQ ID NO: 2097987 - DNA, 15 bp, Homo sapiens
cgggacacccggtcg

SEQ ID NO: 2097988 - DNA, 15 bp, Homo sapiens
gggacacccggtcga

SEQ ID NO: 2097989 - DNA, 15 bp, Homo sapiens
ggacacccggtcgag

SEQ ID NO: 2097990 - DNA, 15 bp, Homo sapiens
gacacccggtcgagc

SEQ ID NO: 2097991 - DNA, 15 bp, Homo sapiens
acacccggtcgagct

SEQ ID NO: 2097992 - DNA, 15 bp, Homo sapiens
cacccggtcgagctt

SEQ ID NO: 2097993 - DNA, 15 bp, Homo sapiens
acccggtcgagcttc

SEQ ID NO: 2097994 - DNA, 15 bp, Homo sapiens
cccggtcgagcttca

SEQ ID NO: 2097995 - DNA, 15 bp, Homo sapiens
ccggtcgagcttcag

SEQ ID NO: 2097996 - DNA, 15 bp, Homo sapiens
cggtcgagcttcagt

SEQ ID NO: 2097997 - DNA, 15 bp, Homo sapiens
ggtcgagcttcagtg

SEQ ID NO: 2097998 - DNA, 15 bp, Homo sapiens
gtcgagcttcagtgt

SEQ ID NO: 2097999 - DNA, 15 bp, Homo sapiens
tcgagcttcagtgtc

SEQ ID NO: 2098000 - DNA, 15 bp, Homo sapiens
cgagcttcagtgtct

SEQ ID NO: 2098001 - DNA, 15 bp, Homo sapiens
gagcttcagtgtctc

SEQ ID NO: 2098002 - DNA, 15 bp, Homo sapiens
agcttcagtgtctct

SEQ ID NO: 2098003 - DNA, 15 bp, Homo sapiens
gcttcagtgtctctg

SEQ ID NO: 2098004 - DNA, 15 bp, Homo sapiens
cttcagtgtctctga

SEQ ID NO: 2098005 - DNA, 15 bp, Homo sapiens
ttcagtgtctctgat

SEQ ID NO: 2098006 - DNA, 15 bp, Homo sapiens
tcagtgtctctgatt

SEQ ID NO: 2098007 - DNA, 15 bp, Homo sapiens
cagtgtctctgattc

SEQ ID NO: 2098008 - DNA, 15 bp, Homo sapiens
agtgtctctgattct

SEQ ID NO: 2098009 - DNA, 15 bp, Homo sapiens
gtgtctctgattctg

SEQ ID NO: 2098010 - DNA, 15 bp, Homo sapiens
tgtctctgattctga

SEQ ID NO: 2098011 - DNA, 15 bp, Homo sapiens
gtctctgattctgag

SEQ ID NO: 2098012 - DNA, 15 bp, Homo sapiens
tctctgattctgagc

SEQ ID NO: 2098013 - DNA, 15 bp, Homo sapiens
ctctgattctgagca

SEQ ID NO: 2098014 - DNA, 15 bp, Homo sapiens
tctgattctgagcat

SEQ ID NO: 2098015 - DNA, 15 bp, Homo sapiens
ctgattctgagcatc

SEQ ID NO: 2098016 - DNA, 15 bp, Homo sapiens
tgattctgagcatct

SEQ ID NO: 2098017 - DNA, 15 bp, Homo sapiens
gattctgagcatctt

SEQ ID NO: 2098018 - DNA, 15 bp, Homo sapiens
attctgagcatcttt

SEQ ID NO: 2098019 - DNA, 15 bp, Homo sapiens
ttctgagcatctttg

SEQ ID NO: 2098020 - DNA, 15 bp, Homo sapiens
tctgagcatctttga

SEQ ID NO: 2098021 - DNA, 15 bp, Homo sapiens
ctgagcatctttgac

SEQ ID NO: 2098022 - DNA, 15 bp, Homo sapiens
tgagcatctttgact

SEQ ID NO: 2098023 - DNA, 15 bp, Homo sapiens
gagcatctttgactc

SEQ ID NO: 2098024 - DNA, 15 bp, Homo sapiens
agcatctttgactct

SEQ ID NO: 2098025 - DNA, 15 bp, Homo sapiens
gcatctttgactctg

SEQ ID NO: 2098026 - DNA, 15 bp, Homo sapiens
catctttgactctgc

SEQ ID NO: 2098027 - DNA, 15 bp, Homo sapiens
atctttgactctgcg

SEQ ID NO: 2098028 - DNA, 15 bp, Homo sapiens
tctttgactctgcga

SEQ ID NO: 2098029 - DNA, 15 bp, Homo sapiens
ctttgactctgcgag

SEQ ID NO: 2098030 - DNA, 15 bp, Homo sapiens
tttgactctgcgaga

SEQ ID NO: 2098031 - DNA, 15 bp, Homo sapiens
ttgactctgcgagac

SEQ ID NO: 2098032 - DNA, 15 bp, Homo sapiens
tgactctgcgagact

SEQ ID NO: 2098033 - DNA, 15 bp, Homo sapiens
gactctgcgagactt

SEQ ID NO: 2098034 - DNA, 15 bp, Homo sapiens
actctgcgagacttt

SEQ ID NO: 2098035 - DNA, 15 bp, Homo sapiens
ctctgcgagactttc

SEQ ID NO: 2098036 - DNA, 15 bp, Homo sapiens
tctgcgagactttct

SEQ ID NO: 2098037 - DNA, 15 bp, Homo sapiens
ctgcgagactttctt

SEQ ID NO: 2098038 - DNA, 15 bp, Homo sapiens
tgcgagactttcttc

SEQ ID NO: 2098039 - DNA, 15 bp, Homo sapiens
gcgagactttcttct

SEQ ID NO: 2098040 - DNA, 15 bp, Homo sapiens
cgagactttcttctc

SEQ ID NO: 2098041 - DNA, 15 bp, Homo sapiens
gagactttcttctca

SEQ ID NO: 2098042 - DNA, 15 bp, Homo sapiens
agactttcttctcat

SEQ ID NO: 2098043 - DNA, 15 bp, Homo sapiens
gactttcttctcatg

SEQ ID NO: 2098044 - DNA, 15 bp, Homo sapiens
actttcttctcatgc

SEQ ID NO: 2098045 - DNA, 15 bp, Homo sapiens
ctttcttctcatgcc

SEQ ID NO: 2098046 - DNA, 15 bp, Homo sapiens
tttcttctcatgcct

SEQ ID NO: 2098047 - DNA, 15 bp, Homo sapiens
ttcttctcatgcctt

SEQ ID NO: 2098048 - DNA, 15 bp, Homo sapiens
tcttctcatgccttc

SEQ ID NO: 2098049 - DNA, 15 bp, Homo sapiens
cttctcatgccttca

SEQ ID NO: 2098050 - DNA, 15 bp, Homo sapiens
ttctcatgccttcac

SEQ ID NO: 2098051 - DNA, 15 bp, Homo sapiens
tctcatgccttcact

SEQ ID NO: 2098052 - DNA, 15 bp, Homo sapiens
ctcatgccttcactt

SEQ ID NO: 2098053 - DNA, 15 bp, Homo sapiens
tcatgccttcacttc

SEQ ID NO: 2098054 - DNA, 15 bp, Homo sapiens
catgccttcacttca

SEQ ID NO: 2098055 - DNA, 15 bp, Homo sapiens
atgccttcacttcag

SEQ ID NO: 2098056 - DNA, 15 bp, Homo sapiens
tgccttcacttcagg

SEQ ID NO: 2098057 - DNA, 15 bp, Homo sapiens
gccttcacttcaggc

SEQ ID NO: 2098058 - DNA, 15 bp, Homo sapiens
ccttcacttcaggcg

SEQ ID NO: 2098059 - DNA, 15 bp, Homo sapiens
cttcacttcaggcgc

SEQ ID NO: 2098060 - DNA, 15 bp, Homo sapiens
ttcacttcaggcgcc

SEQ ID NO: 2098061 - DNA, 15 bp, Homo sapiens
tcacttcaggcgcca

SEQ ID NO: 2098062 - DNA, 15 bp, Homo sapiens
cacttcaggcgccag

SEQ ID NO: 2098063 - DNA, 15 bp, Homo sapiens
acttcaggcgccagc

SEQ ID NO: 2098064 - DNA, 15 bp, Homo sapiens
cttcaggcgccagcc

SEQ ID NO: 2098065 - DNA, 15 bp, Homo sapiens
ttcaggcgccagccc

SEQ ID NO: 2098066 - DNA, 15 bp, Homo sapiens
tcaggcgccagcccc

SEQ ID NO: 2098067 - DNA, 15 bp, Homo sapiens
caggcgccagcccct

SEQ ID NO: 2098068 - DNA, 15 bp, Homo sapiens
aggcgccagcccctg

SEQ ID NO: 2098069 - DNA, 15 bp, Homo sapiens
ggcgccagcccctgc

SEQ ID NO: 2098070 - DNA, 15 bp, Homo sapiens
gcgccagcccctgcc

SEQ ID NO: 2098071 - DNA, 15 bp, Homo sapiens
cgccagcccctgcca

SEQ ID NO: 2098072 - DNA, 15 bp, Homo sapiens
gccagcccctgccaa

SEQ ID NO: 2098073 - DNA, 15 bp, Homo sapiens
ccagcccctgccaac

SEQ ID NO: 2098074 - DNA, 15 bp, Homo sapiens
cagcccctgccaacg

SEQ ID NO: 2098075 - DNA, 15 bp, Homo sapiens
agcccctgccaacga

SEQ ID NO: 2098076 - DNA, 15 bp, Homo sapiens
gcccctgccaacgat

SEQ ID NO: 2098077 - DNA, 15 bp, Homo sapiens
cccctgccaacgatg

SEQ ID NO: 2098078 - DNA, 15 bp, Homo sapiens
ccctgccaacgatgg

SEQ ID NO: 2098079 - DNA, 15 bp, Homo sapiens
cctgccaacgatggg

SEQ ID NO: 2098080 - DNA, 15 bp, Homo sapiens
ctgccaacgatggga

SEQ ID NO: 2098081 - DNA, 15 bp, Homo sapiens
tgccaacgatgggac

SEQ ID NO: 2098082 - DNA, 15 bp, Homo sapiens
gccaacgatgggact

SEQ ID NO: 2098083 - DNA, 15 bp, Homo sapiens
ccaacgatgggactc

SEQ ID NO: 2098084 - DNA, 15 bp, Homo sapiens
caacgatgggactcc

SEQ ID NO: 2098085 - DNA, 15 bp, Homo sapiens
aacgatgggactcca

SEQ ID NO: 2098086 - DNA, 15 bp, Homo sapiens
acgatgggactccac

SEQ ID NO: 2098087 - DNA, 15 bp, Homo sapiens
cgatgggactccact

SEQ ID NO: 2098088 - DNA, 15 bp, Homo sapiens
gatgggactccacta

SEQ ID NO: 2098089 - DNA, 15 bp, Homo sapiens
atgggactccactac

SEQ ID NO: 2098090 - DNA, 15 bp, Homo sapiens
tgggactccactact

SEQ ID NO: 2098091 - DNA, 15 bp, Homo sapiens
gggactccactactt

SEQ ID NO: 2098092 - DNA, 15 bp, Homo sapiens
ggactccactactta

SEQ ID NO: 2098093 - DNA, 15 bp, Homo sapiens
gactccactacttac

SEQ ID NO: 2098094 - DNA, 15 bp, Homo sapiens
actccactacttacc

SEQ ID NO: 2098095 - DNA, 15 bp, Homo sapiens
ctccactacttacca

SEQ ID NO: 2098096 - DNA, 15 bp, Homo sapiens
tccactacttaccat

SEQ ID NO: 2098097 - DNA, 15 bp, Homo sapiens
ccactacttaccatg

SEQ ID NO: 2098098 - DNA, 15 bp, Homo sapiens
cactacttaccatgt

SEQ ID NO: 2098099 - DNA, 15 bp, Homo sapiens
actacttaccatgtt

SEQ ID NO: 2098100 - DNA, 15 bp, Homo sapiens
ctacttaccatgttg

SEQ ID NO: 2098101 - DNA, 15 bp, Homo sapiens
tacttaccatgttga

SEQ ID NO: 2098102 - DNA, 15 bp, Homo sapiens
acttaccatgttgat

SEQ ID NO: 2098103 - DNA, 15 bp, Homo sapiens
cttaccatgttgatt

SEQ ID NO: 2098104 - DNA, 15 bp, Homo sapiens
ttaccatgttgattt

SEQ ID NO: 2098105 - DNA, 15 bp, Homo sapiens
taccatgttgattta

SEQ ID NO: 2098106 - DNA, 15 bp, Homo sapiens
accatgttgatttaa

SEQ ID NO: 2098107 - DNA, 15 bp, Homo sapiens
ccatgttgatttaat

SEQ ID NO: 2098108 - DNA, 15 bp, Homo sapiens
catgttgatttaatt

SEQ ID NO: 2098109 - DNA, 15 bp, Homo sapiens
atgttgatttaattt

SEQ ID NO: 2098110 - DNA, 15 bp, Homo sapiens
tgttgatttaatttg

SEQ ID NO: 2098111 - DNA, 15 bp, Homo sapiens
gttgatttaatttgg

SEQ ID NO: 2098112 - DNA, 15 bp, Homo sapiens
ttgatttaatttggc

SEQ ID NO: 2098113 - DNA, 15 bp, Homo sapiens
tgatttaatttggct

SEQ ID NO: 2098114 - DNA, 15 bp, Homo sapiens
gatttaatttggctt

SEQ ID NO: 2098115 - DNA, 15 bp, Homo sapiens
atttaatttggctta

SEQ ID NO: 2098116 - DNA, 15 bp, Homo sapiens
tttaatttggcttac

SEQ ID NO: 2098117 - DNA, 15 bp, Homo sapiens
ttaatttggcttact

SEQ ID NO: 2098118 - DNA, 15 bp, Homo sapiens
taatttggcttactt

SEQ ID NO: 2098119 - DNA, 15 bp, Homo sapiens
aatttggcttacttt

SEQ ID NO: 2098120 - DNA, 15 bp, Homo sapiens
atttggcttactttt

SEQ ID NO: 2098121 - DNA, 15 bp, Homo sapiens
tttggcttacttttt

SEQ ID NO: 2098122 - DNA, 15 bp, Homo sapiens
ttggcttactttttt

SEQ ID NO: 2098123 - DNA, 15 bp, Homo sapiens
tggcttacttttttt

SEQ ID NO: 2098124 - DNA, 15 bp, Homo sapiens
ggcttactttttttc

SEQ ID NO: 2098125 - DNA, 15 bp, Homo sapiens
gcttactttttttct

SEQ ID NO: 2098126 - DNA, 15 bp, Homo sapiens
cttactttttttctt

SEQ ID NO: 2098127 - DNA, 15 bp, Homo sapiens
ttactttttttctta

SEQ ID NO: 2098128 - DNA, 15 bp, Homo sapiens
tactttttttcttaa

SEQ ID NO: 2098129 - DNA, 15 bp, Homo sapiens
actttttttcttaaa

SEQ ID NO: 2098130 - DNA, 15 bp, Homo sapiens
ctttttttcttaaag

SEQ ID NO: 2098131 - DNA, 15 bp, Homo sapiens
tttttttcttaaaga

SEQ ID NO: 2098132 - DNA, 15 bp, Homo sapiens
ttttttcttaaagaa

SEQ ID NO: 2098133 - DNA, 15 bp, Homo sapiens
tttttcttaaagaat

SEQ ID NO: 2098134 - DNA, 15 bp, Homo sapiens
ttttcttaaagaatt

SEQ ID NO: 2098135 - DNA, 15 bp, Homo sapiens
tttcttaaagaattt

SEQ ID NO: 2098136 - DNA, 15 bp, Homo sapiens
ttcttaaagaatttt

SEQ ID NO: 2098137 - DNA, 15 bp, Homo sapiens
tcttaaagaatttta

SEQ ID NO: 2098138 - DNA, 15 bp, Homo sapiens
cttaaagaattttat

SEQ ID NO: 2098139 - DNA, 15 bp, Homo sapiens
ttaaagaattttatt

SEQ ID NO: 2098140 - DNA, 15 bp, Homo sapiens
taaagaattttattt

SEQ ID NO: 2098141 - DNA, 15 bp, Homo sapiens
aaagaattttatttt

SEQ ID NO: 2098142 - DNA, 15 bp, Homo sapiens
aagaattttatttta

SEQ ID NO: 2098143 - DNA, 15 bp, Homo sapiens
agaattttattttaa

SEQ ID NO: 2098144 - DNA, 15 bp, Homo sapiens
gaattttattttaaa

SEQ ID NO: 2098145 - DNA, 15 bp, Homo sapiens
aattttattttaaaa

SEQ ID NO: 2098146 - DNA, 15 bp, Homo sapiens
attttattttaaaag

SEQ ID NO: 2098147 - DNA, 15 bp, Homo sapiens
ttttattttaaaagg

SEQ ID NO: 2098148 - DNA, 15 bp, Homo sapiens
tttattttaaaagga

SEQ ID NO: 2098149 - DNA, 15 bp, Homo sapiens
ttattttaaaaggaa

SEQ ID NO: 2098150 - DNA, 15 bp, Homo sapiens
tattttaaaaggaag

SEQ ID NO: 2098151 - DNA, 15 bp, Homo sapiens
attttaaaaggaagg

SEQ ID NO: 2098152 - DNA, 15 bp, Homo sapiens
ttttaaaaggaaggc

SEQ ID NO: 2098153 - DNA, 15 bp, Homo sapiens
tttaaaaggaaggca

SEQ ID NO: 2098154 - DNA, 15 bp, Homo sapiens
ttaaaaggaaggcag

SEQ ID NO: 2098155 - DNA, 15 bp, Homo sapiens
taaaaggaaggcagt

SEQ ID NO: 2098156 - DNA, 15 bp, Homo sapiens
aaaaggaaggcagtc

SEQ ID NO: 2098157 - DNA, 15 bp, Homo sapiens
aaaggaaggcagtca

SEQ ID NO: 2098158 - DNA, 15 bp, Homo sapiens
aaggaaggcagtcat

SEQ ID NO: 2098159 - DNA, 15 bp, Homo sapiens
aggaaggcagtcata

SEQ ID NO: 2098160 - DNA, 15 bp, Homo sapiens
ggaaggcagtcatat

SEQ ID NO: 2098161 - DNA, 15 bp, Homo sapiens
gaaggcagtcatatc

SEQ ID NO: 2098162 - DNA, 15 bp, Homo sapiens
aaggcagtcatatct

SEQ ID NO: 2098163 - DNA, 15 bp, Homo sapiens
aggcagtcatatctg

SEQ ID NO: 2098164 - DNA, 15 bp, Homo sapiens
ggcagtcatatctgt

SEQ ID NO: 2098165 - DNA, 15 bp, Homo sapiens
gcagtcatatctgtg

SEQ ID NO: 2098166 - DNA, 15 bp, Homo sapiens
cagtcatatctgtga

SEQ ID NO: 2098167 - DNA, 15 bp, Homo sapiens
agtcatatctgtgaa

SEQ ID NO: 2098168 - DNA, 15 bp, Homo sapiens
gtcatatctgtgaaa

SEQ ID NO: 2098169 - DNA, 15 bp, Homo sapiens
tcatatctgtgaaat

SEQ ID NO: 2098170 - DNA, 15 bp, Homo sapiens
catatctgtgaaatt

SEQ ID NO: 2098171 - DNA, 15 bp, Homo sapiens
atatctgtgaaatta

SEQ ID NO: 2098172 - DNA, 15 bp, Homo sapiens
tatctgtgaaattat

SEQ ID NO: 2098173 - DNA, 15 bp, Homo sapiens
atctgtgaaattatg

SEQ ID NO: 2098174 - DNA, 15 bp, Homo sapiens
ctgtgaaattatggg

SEQ ID NO: 2098175 - DNA, 15 bp, Homo sapiens
tgtgaaattatgggt

SEQ ID NO: 2098176 - DNA, 15 bp, Homo sapiens
gtgaaattatgggtc

SEQ ID NO: 2098177 - DNA, 15 bp, Homo sapiens
tgaaattatgggtcc

SEQ ID NO: 2098178 - DNA, 15 bp, Homo sapiens
gaaattatgggtcct

SEQ ID NO: 2098179 - DNA, 15 bp, Homo sapiens
aaattatgggtcctt

SEQ ID NO: 2098180 - DNA, 15 bp, Homo sapiens
aattatgggtccttt

SEQ ID NO: 2098181 - DNA, 15 bp, Homo sapiens
attatgggtcctttg

SEQ ID NO: 2098182 - DNA, 15 bp, Homo sapiens
ttatgggtcctttgg

SEQ ID NO: 2098183 - DNA, 15 bp, Homo sapiens
tatgggtcctttggg

SEQ ID NO: 2098184 - DNA, 15 bp, Homo sapiens
atgggtcctttgggc

SEQ ID NO: 2098185 - DNA, 15 bp, Homo sapiens
tgggtcctttgggca

SEQ ID NO: 2098186 - DNA, 15 bp, Homo sapiens
gggtcctttgggcaa

SEQ ID NO: 2098187 - DNA, 15 bp, Homo sapiens
ggtcctttgggcaag

SEQ ID NO: 2098188 - DNA, 15 bp, Homo sapiens
gtcctttgggcaagt

SEQ ID NO: 2098189 - DNA, 15 bp, Homo sapiens
tcctttgggcaagta

SEQ ID NO: 2098190 - DNA, 15 bp, Homo sapiens
cctttgggcaagtaa

SEQ ID NO: 2098191 - DNA, 15 bp, Homo sapiens
ctttgggcaagtaat

SEQ ID NO: 2098192 - DNA, 15 bp, Homo sapiens
tttgggcaagtaata

SEQ ID NO: 2098193 - DNA, 15 bp, Homo sapiens
ttgggcaagtaatag

SEQ ID NO: 2098194 - DNA, 15 bp, Homo sapiens
tgggcaagtaatagt

SEQ ID NO: 2098195 - DNA, 15 bp, Homo sapiens
gggcaagtaatagtt

SEQ ID NO: 2098196 - DNA, 15 bp, Homo sapiens
ggcaagtaatagttt

SEQ ID NO: 2098197 - DNA, 15 bp, Homo sapiens
gcaagtaatagtttt

SEQ ID NO: 2098198 - DNA, 15 bp, Homo sapiens
caagtaatagttttc

SEQ ID NO: 2098199 - DNA, 15 bp, Homo sapiens
aagtaatagttttcc

SEQ ID NO: 2098200 - DNA, 15 bp, Homo sapiens
agtaatagttttcca

SEQ ID NO: 2098201 - DNA, 15 bp, Homo sapiens
gtaatagttttccag

SEQ ID NO: 2098202 - DNA, 15 bp, Homo sapiens
taatagttttccagt

SEQ ID NO: 2098203 - DNA, 15 bp, Homo sapiens
aatagttttccagtc

SEQ ID NO: 2098204 - DNA, 15 bp, Homo sapiens
atagttttccagtcg

SEQ ID NO: 2098205 - DNA, 15 bp, Homo sapiens
tagttttccagtcgc

SEQ ID NO: 2098206 - DNA, 15 bp, Homo sapiens
agttttccagtcgcc

SEQ ID NO: 2098207 - DNA, 15 bp, Homo sapiens
gttttccagtcgcca

SEQ ID NO: 2098208 - DNA, 15 bp, Homo sapiens
ttttccagtcgccat

SEQ ID NO: 2098209 - DNA, 15 bp, Homo sapiens
tttccagtcgccatt

SEQ ID NO: 2098210 - DNA, 15 bp, Homo sapiens
ttccagtcgccatta

SEQ ID NO: 2098211 - DNA, 15 bp, Homo sapiens
tccagtcgccattaa

SEQ ID NO: 2098212 - DNA, 15 bp, Homo sapiens
ccagtcgccattaaa

SEQ ID NO: 2098213 - DNA, 15 bp, Homo sapiens
cagtcgccattaaaa

SEQ ID NO: 2098214 - DNA, 15 bp, Homo sapiens
agtcgccattaaaat

SEQ ID NO: 2098215 - DNA, 15 bp, Homo sapiens
gtcgccattaaaata

SEQ ID NO: 2098216 - DNA, 15 bp, Homo sapiens
tcgccattaaaataa

SEQ ID NO: 2098217 - DNA, 15 bp, Homo sapiens
cgccattaaaataaa

SEQ ID NO: 2098218 - DNA, 15 bp, Homo sapiens
gccattaaaataaat

SEQ ID NO: 2098219 - DNA, 15 bp, Homo sapiens
ccattaaaataaata

SEQ ID NO: 2098220 - DNA, 15 bp, Homo sapiens
cattaaaataaatac

SEQ ID NO: 2098221 - DNA, 15 bp, Homo sapiens
attaaaataaatacc

SEQ ID NO: 2098222 - DNA, 15 bp, Homo sapiens
ttaaaataaatacct

SEQ ID NO: 2098223 - DNA, 15 bp, Homo sapiens
taaaataaataccta

SEQ ID NO: 2098224 - DNA, 15 bp, Homo sapiens
aaaataaatacctaa

SEQ ID NO: 2098225 - DNA, 15 bp, Homo sapiens
aaataaatacctaac

SEQ ID NO: 2098226 - DNA, 15 bp, Homo sapiens
aataaatacctaact

SEQ ID NO: 2098227 - DNA, 15 bp, Homo sapiens
ataaatacctaacta

SEQ ID NO: 2098228 - DNA, 15 bp, Homo sapiens
taaatacctaactat

SEQ ID NO: 2098229 - DNA, 15 bp, Homo sapiens
aaatacctaactatt

SEQ ID NO: 2098230 - DNA, 15 bp, Homo sapiens
aatacctaactatta

SEQ ID NO: 2098231 - DNA, 15 bp, Homo sapiens
atacctaactattaa

SEQ ID NO: 2098232 - DNA, 15 bp, Homo sapiens
tacctaactattaag

SEQ ID NO: 2098233 - DNA, 15 bp, Homo sapiens
acctaactattaagg

SEQ ID NO: 2098234 - DNA, 15 bp, Homo sapiens
cctaactattaagga

SEQ ID NO: 2098235 - DNA, 15 bp, Homo sapiens
ctaactattaaggac

SEQ ID NO: 2098236 - DNA, 15 bp, Homo sapiens
taactattaaggacg

SEQ ID NO: 2098237 - DNA, 15 bp, Homo sapiens
aactattaaggacgt

SEQ ID NO: 2098238 - DNA, 15 bp, Homo sapiens
actattaaggacgtt

SEQ ID NO: 2098239 - DNA, 15 bp, Homo sapiens
ctattaaggacgttc

SEQ ID NO: 2098240 - DNA, 15 bp, Homo sapiens
tattaaggacgttcc

SEQ ID NO: 2098241 - DNA, 15 bp, Homo sapiens
attaaggacgttcct

SEQ ID NO: 2098242 - DNA, 15 bp, Homo sapiens
ttaaggacgttcctc

SEQ ID NO: 2098243 - DNA, 15 bp, Homo sapiens
taaggacgttcctcc

SEQ ID NO: 2098244 - DNA, 15 bp, Homo sapiens
aaggacgttcctccc

SEQ ID NO: 2098245 - DNA, 15 bp, Homo sapiens
aggacgttcctccca

SEQ ID NO: 2098246 - DNA, 15 bp, Homo sapiens
ggacgttcctcccag

SEQ ID NO: 2098247 - DNA, 15 bp, Homo sapiens
gacgttcctcccagt

SEQ ID NO: 2098248 - DNA, 15 bp, Homo sapiens
acgttcctcccagta

SEQ ID NO: 2098249 - DNA, 15 bp, Homo sapiens
cgttcctcccagtac

SEQ ID NO: 2098250 - DNA, 15 bp, Homo sapiens
gttcctcccagtacc

SEQ ID NO: 2098251 - DNA, 15 bp, Homo sapiens
ttcctcccagtacct

SEQ ID NO: 2098252 - DNA, 15 bp, Homo sapiens
tcctcccagtacctc

SEQ ID NO: 2098253 - DNA, 15 bp, Homo sapiens
cctcccagtacctcg

SEQ ID NO: 2098254 - DNA, 15 bp, Homo sapiens
ctcccagtacctcga

SEQ ID NO: 2098255 - DNA, 15 bp, Homo sapiens
tcccagtacctcgaa

SEQ ID NO: 2098256 - DNA, 15 bp, Homo sapiens
cccagtacctcgaag

SEQ ID NO: 2098257 - DNA, 15 bp, Homo sapiens
ccagtacctcgaagc

SEQ ID NO: 2098258 - DNA, 15 bp, Homo sapiens
cagtacctcgaagca

SEQ ID NO: 2098259 - DNA, 15 bp, Homo sapiens
agtacctcgaagcag

SEQ ID NO: 2098260 - DNA, 15 bp, Homo sapiens
gtacctcgaagcagc

SEQ ID NO: 2098261 - DNA, 15 bp, Homo sapiens
tacctcgaagcagcc

SEQ ID NO: 2098262 - DNA, 15 bp, Homo sapiens
acctcgaagcagcct

SEQ ID NO: 2098263 - DNA, 15 bp, Homo sapiens
cctcgaagcagcctg

SEQ ID NO: 2098264 - DNA, 15 bp, Homo sapiens
ctcgaagcagcctgc

SEQ ID NO: 2098265 - DNA, 15 bp, Homo sapiens
tcgaagcagcctgct

SEQ ID NO: 2098266 - DNA, 15 bp, Homo sapiens
cgaagcagcctgcta

SEQ ID NO: 2098267 - DNA, 15 bp, Homo sapiens
gaagcagcctgctac

SEQ ID NO: 2098268 - DNA, 15 bp, Homo sapiens
aagcagcctgctacc

SEQ ID NO: 2098269 - DNA, 15 bp, Homo sapiens
agcagcctgctacct

SEQ ID NO: 2098270 - DNA, 15 bp, Homo sapiens
gcagcctgctacctg

SEQ ID NO: 2098271 - DNA, 15 bp, Homo sapiens
cagcctgctacctgc

SEQ ID NO: 2098272 - DNA, 15 bp, Homo sapiens
agcctgctacctgca

SEQ ID NO: 2098273 - DNA, 15 bp, Homo sapiens
gcctgctacctgcaa

SEQ ID NO: 2098274 - DNA, 15 bp, Homo sapiens
cctgctacctgcaat

SEQ ID NO: 2098275 - DNA, 15 bp, Homo sapiens
ctgctacctgcaatc

SEQ ID NO: 2098276 - DNA, 15 bp, Homo sapiens
tgctacctgcaatct

SEQ ID NO: 2098277 - DNA, 15 bp, Homo sapiens
gctacctgcaatctc

SEQ ID NO: 2098278 - DNA, 15 bp, Homo sapiens
ctacctgcaatctct

SEQ ID NO: 2098279 - DNA, 15 bp, Homo sapiens
tacctgcaatctctg

SEQ ID NO: 2098280 - DNA, 15 bp, Homo sapiens
acctgcaatctctgc

SEQ ID NO: 2098281 - DNA, 15 bp, Homo sapiens
cctgcaatctctgca

SEQ ID NO: 2098282 - DNA, 15 bp, Homo sapiens
ctgcaatctctgcac

SEQ ID NO: 2098283 - DNA, 15 bp, Homo sapiens
tgcaatctctgcacc

SEQ ID NO: 2098284 - DNA, 15 bp, Homo sapiens
gcaatctctgcacca

SEQ ID NO: 2098285 - DNA, 15 bp, Homo sapiens
caatctctgcaccat

SEQ ID NO: 2098286 - DNA, 15 bp, Homo sapiens
aatctctgcaccatc

SEQ ID NO: 2098287 - DNA, 15 bp, Homo sapiens
atctctgcaccatcc

SEQ ID NO: 2098288 - DNA, 15 bp, Homo sapiens
tctctgcaccatccc

SEQ ID NO: 2098289 - DNA, 15 bp, Homo sapiens
ctctgcaccatccca

SEQ ID NO: 2098290 - DNA, 15 bp, Homo sapiens
tctgcaccatcccat

SEQ ID NO: 2098291 - DNA, 15 bp, Homo sapiens
ctgcaccatcccatg

SEQ ID NO: 2098292 - DNA, 15 bp, Homo sapiens
tgcaccatcccatga

SEQ ID NO: 2098293 - DNA, 15 bp, Homo sapiens
gcaccatcccatgat

SEQ ID NO: 2098294 - DNA, 15 bp, Homo sapiens
caccatcccatgatt

SEQ ID NO: 2098295 - DNA, 15 bp, Homo sapiens
accatcccatgattg

SEQ ID NO: 2098296 - DNA, 15 bp, Homo sapiens
ccatcccatgattgt

SEQ ID NO: 2098297 - DNA, 15 bp, Homo sapiens
catcccatgattgtg

SEQ ID NO: 2098298 - DNA, 15 bp, Homo sapiens
atcccatgattgtgt

SEQ ID NO: 2098299 - DNA, 15 bp, Homo sapiens
tcccatgattgtgtc

SEQ ID NO: 2098300 - DNA, 15 bp, Homo sapiens
cccatgattgtgtcc

SEQ ID NO: 2098301 - DNA, 15 bp, Homo sapiens
ccatgattgtgtccc

SEQ ID NO: 2098302 - DNA, 15 bp, Homo sapiens
catgattgtgtccca

SEQ ID NO: 2098303 - DNA, 15 bp, Homo sapiens
atgattgtgtcccat

SEQ ID NO: 2098304 - DNA, 15 bp, Homo sapiens
tgattgtgtcccatg

SEQ ID NO: 2098305 - DNA, 15 bp, Homo sapiens
gattgtgtcccatgc

SEQ ID NO: 2098306 - DNA, 15 bp, Homo sapiens
attgtgtcccatgca

SEQ ID NO: 2098307 - DNA, 15 bp, Homo sapiens
ttgtgtcccatgcac

SEQ ID NO: 2098308 - DNA, 15 bp, Homo sapiens
tgtgtcccatgcacc

SEQ ID NO: 2098309 - DNA, 15 bp, Homo sapiens
gtgtcccatgcaccc

SEQ ID NO: 2098310 - DNA, 15 bp, Homo sapiens
tgtcccatgcaccct

SEQ ID NO: 2098311 - DNA, 15 bp, Homo sapiens
gtcccatgcaccctt

SEQ ID NO: 2098312 - DNA, 15 bp, Homo sapiens
tcccatgcacccttc

SEQ ID NO: 2098313 - DNA, 15 bp, Homo sapiens
cccatgcacccttct

SEQ ID NO: 2098314 - DNA, 15 bp, Homo sapiens
ccatgcacccttctt

SEQ ID NO: 2098315 - DNA, 15 bp, Homo sapiens
catgcacccttcttc

SEQ ID NO: 2098316 - DNA, 15 bp, Homo sapiens
atgcacccttcttcc

SEQ ID NO: 2098317 - DNA, 15 bp, Homo sapiens
tgcacccttcttcct

SEQ ID NO: 2098318 - DNA, 15 bp, Homo sapiens
gcacccttcttcctg

SEQ ID NO: 2098319 - DNA, 15 bp, Homo sapiens
cacccttcttcctgc

SEQ ID NO: 2098320 - DNA, 15 bp, Homo sapiens
acccttcttcctgct

SEQ ID NO: 2098321 - DNA, 15 bp, Homo sapiens
cccttcttcctgctc

SEQ ID NO: 2098322 - DNA, 15 bp, Homo sapiens
ccttcttcctgctcg

SEQ ID NO: 2098323 - DNA, 15 bp, Homo sapiens
cttcttcctgctcgg

SEQ ID NO: 2098324 - DNA, 15 bp, Homo sapiens
ttcttcctgctcggc

SEQ ID NO: 2098325 - DNA, 15 bp, Homo sapiens
tcttcctgctcggcc

SEQ ID NO: 2098326 - DNA, 15 bp, Homo sapiens
cttcctgctcggcct

SEQ ID NO: 2098327 - DNA, 15 bp, Homo sapiens
ttcctgctcggcctg

SEQ ID NO: 2098328 - DNA, 15 bp, Homo sapiens
tcctgctcggcctgc

SEQ ID NO: 2098329 - DNA, 15 bp, Homo sapiens
cctgctcggcctgca

SEQ ID NO: 2098330 - DNA, 15 bp, Homo sapiens
ctgctcggcctgcat

SEQ ID NO: 2098331 - DNA, 15 bp, Homo sapiens
tgctcggcctgcatc

SEQ ID NO: 2098332 - DNA, 15 bp, Homo sapiens
gctcggcctgcatcg

SEQ ID NO: 2098333 - DNA, 15 bp, Homo sapiens
ctcggcctgcatcgc

SEQ ID NO: 2098334 - DNA, 15 bp, Homo sapiens
tcggcctgcatcgcc

SEQ ID NO: 2098335 - DNA, 15 bp, Homo sapiens
cggcctgcatcgccc

SEQ ID NO: 2098336 - DNA, 15 bp, Homo sapiens
ggcctgcatcgcccc

SEQ ID NO: 2098337 - DNA, 15 bp, Homo sapiens
gcctgcatcgcccct

SEQ ID NO: 2098338 - DNA, 15 bp, Homo sapiens
cctgcatcgcccctg

SEQ ID NO: 2098339 - DNA, 15 bp, Homo sapiens
ctgcatcgcccctgc

SEQ ID NO: 2098340 - DNA, 15 bp, Homo sapiens
tgcatcgcccctgcg

SEQ ID NO: 2098341 - DNA, 15 bp, Homo sapiens
gcatcgcccctgcgt

SEQ ID NO: 2098342 - DNA, 15 bp, Homo sapiens
catcgcccctgcgtg

SEQ ID NO: 2098343 - DNA, 15 bp, Homo sapiens
atcgcccctgcgtgg

SEQ ID NO: 2098344 - DNA, 15 bp, Homo sapiens
tcgcccctgcgtggc

SEQ ID NO: 2098345 - DNA, 15 bp, Homo sapiens
cgcccctgcgtggcc

SEQ ID NO: 2098346 - DNA, 15 bp, Homo sapiens
gcccctgcgtggcct

SEQ ID NO: 2098347 - DNA, 15 bp, Homo sapiens
cccctgcgtggcctt

SEQ ID NO: 2098348 - DNA, 15 bp, Homo sapiens
ccctgcgtggccttt

SEQ ID NO: 2098349 - DNA, 15 bp, Homo sapiens
cctgcgtggcctttt

SEQ ID NO: 2098350 - DNA, 15 bp, Homo sapiens
ctgcgtggccttttc

SEQ ID NO: 2098351 - DNA, 15 bp, Homo sapiens
tgcgtggccttttcc

SEQ ID NO: 2098352 - DNA, 15 bp, Homo sapiens
gcgtggccttttccc

SEQ ID NO: 2098353 - DNA, 15 bp, Homo sapiens
cgtggccttttcccc

SEQ ID NO: 2098354 - DNA, 15 bp, Homo sapiens
gtggccttttccccc

SEQ ID NO: 2098355 - DNA, 15 bp, Homo sapiens
tggccttttcccccc

SEQ ID NO: 2098356 - DNA, 15 bp, Homo sapiens
ggccttttcccccct

SEQ ID NO: 2098357 - DNA, 15 bp, Homo sapiens
gccttttcccccctc

SEQ ID NO: 2098358 - DNA, 15 bp, Homo sapiens
ccttttcccccctct

SEQ ID NO: 2098359 - DNA, 15 bp, Homo sapiens
cttttcccccctctc

SEQ ID NO: 2098360 - DNA, 15 bp, Homo sapiens
ttttcccccctctct

SEQ ID NO: 2098361 - DNA, 15 bp, Homo sapiens
tttcccccctctctg

SEQ ID NO: 2098362 - DNA, 15 bp, Homo sapiens
ttcccccctctctgc

SEQ ID NO: 2098363 - DNA, 15 bp, Homo sapiens
tcccccctctctgcc

SEQ ID NO: 2098364 - DNA, 15 bp, Homo sapiens
cccccctctctgcct

SEQ ID NO: 2098365 - DNA, 15 bp, Homo sapiens
ccccctctctgcctc

SEQ ID NO: 2098366 - DNA, 15 bp, Homo sapiens
cccctctctgcctct

SEQ ID NO: 2098367 - DNA, 15 bp, Homo sapiens
ccctctctgcctctc

SEQ ID NO: 2098368 - DNA, 15 bp, Homo sapiens
cctctctgcctctct

SEQ ID NO: 2098369 - DNA, 15 bp, Homo sapiens
ctctctgcctctctc

SEQ ID NO: 2098370 - DNA, 15 bp, Homo sapiens
tctctgcctctctca

SEQ ID NO: 2098371 - DNA, 15 bp, Homo sapiens
ctctgcctctctcag

SEQ ID NO: 2098372 - DNA, 15 bp, Homo sapiens
tctgcctctctcagt

SEQ ID NO: 2098373 - DNA, 15 bp, Homo sapiens
ctgcctctctcagtc

SEQ ID NO: 2098374 - DNA, 15 bp, Homo sapiens
tgcctctctcagtct

SEQ ID NO: 2098375 - DNA, 15 bp, Homo sapiens
gcctctctcagtctt

SEQ ID NO: 2098376 - DNA, 15 bp, Homo sapiens
cctctctcagtcttc

SEQ ID NO: 2098377 - DNA, 15 bp, Homo sapiens
ctctctcagtcttcg

SEQ ID NO: 2098378 - DNA, 15 bp, Homo sapiens
tctctcagtcttcgc

SEQ ID NO: 2098379 - DNA, 15 bp, Homo sapiens
ctctcagtcttcgcc

SEQ ID NO: 2098380 - DNA, 15 bp, Homo sapiens
tctcagtcttcgcca

SEQ ID NO: 2098381 - DNA, 15 bp, Homo sapiens
ctcagtcttcgccat

SEQ ID NO: 2098382 - DNA, 15 bp, Homo sapiens
tcagtcttcgccatc

SEQ ID NO: 2098383 - DNA, 15 bp, Homo sapiens
cagtcttcgccatca

SEQ ID NO: 2098384 - DNA, 15 bp, Homo sapiens
agtcttcgccatcat

SEQ ID NO: 2098385 - DNA, 15 bp, Homo sapiens
gtcttcgccatcatc

SEQ ID NO: 2098386 - DNA, 15 bp, Homo sapiens
tcttcgccatcatca

SEQ ID NO: 2098387 - DNA, 15 bp, Homo sapiens
cttcgccatcatcaa

SEQ ID NO: 2098388 - DNA, 15 bp, Homo sapiens
ttcgccatcatcaaa

SEQ ID NO: 2098389 - DNA, 15 bp, Homo sapiens
tcgccatcatcaaag

SEQ ID NO: 2098390 - DNA, 15 bp, Homo sapiens
cgccatcatcaaagg

SEQ ID NO: 2098391 - DNA, 15 bp, Homo sapiens
gccatcatcaaaggc

SEQ ID NO: 2098392 - DNA, 15 bp, Homo sapiens
ccatcatcaaaggcg

SEQ ID NO: 2098393 - DNA, 15 bp, Homo sapiens
catcatcaaaggcgc

SEQ ID NO: 2098394 - DNA, 15 bp, Homo sapiens
atcatcaaaggcgca

SEQ ID NO: 2098395 - DNA, 15 bp, Homo sapiens
tcatcaaaggcgcaa

SEQ ID NO: 2098396 - DNA, 15 bp, Homo sapiens
catcaaaggcgcaat

SEQ ID NO: 2098397 - DNA, 15 bp, Homo sapiens
atcaaaggcgcaatt

SEQ ID NO: 2098398 - DNA, 15 bp, Homo sapiens
tcaaaggcgcaattc

SEQ ID NO: 2098399 - DNA, 15 bp, Homo sapiens
caaaggcgcaattcc

SEQ ID NO: 2098400 - DNA, 15 bp, Homo sapiens
aaaggcgcaattcca

SEQ ID NO: 2098401 - DNA, 15 bp, Homo sapiens
aaggcgcaattccag

SEQ ID NO: 2098402 - DNA, 15 bp, Homo sapiens
aggcgcaattccagc

SEQ ID NO: 2098403 - DNA, 15 bp, Homo sapiens
ggcgcaattccagcc

SEQ ID NO: 2098404 - DNA, 15 bp, Homo sapiens
gcgcaattccagcca

SEQ ID NO: 2098405 - DNA, 15 bp, Homo sapiens
cgcaattccagccat

SEQ ID NO: 2098406 - DNA, 15 bp, Homo sapiens
gcaattccagccatg

SEQ ID NO: 2098407 - DNA, 15 bp, Homo sapiens
caattccagccatgc

SEQ ID NO: 2098408 - DNA, 15 bp, Homo sapiens
aattccagccatgcc

SEQ ID NO: 2098409 - DNA, 15 bp, Homo sapiens
attccagccatgccc

SEQ ID NO: 2098410 - DNA, 15 bp, Homo sapiens
ttccagccatgccct

SEQ ID NO: 2098411 - DNA, 15 bp, Homo sapiens
tccagccatgccctc

SEQ ID NO: 2098412 - DNA, 15 bp, Homo sapiens
ccagccatgccctct

SEQ ID NO: 2098413 - DNA, 15 bp, Homo sapiens
cagccatgccctctc

SEQ ID NO: 2098414 - DNA, 15 bp, Homo sapiens
agccatgccctctcc

SEQ ID NO: 2098415 - DNA, 15 bp, Homo sapiens
gccatgccctctcct

SEQ ID NO: 2098416 - DNA, 15 bp, Homo sapiens
ccatgccctctcctc

SEQ ID NO: 2098417 - DNA, 15 bp, Homo sapiens
catgccctctcctcc

SEQ ID NO: 2098418 - DNA, 15 bp, Homo sapiens
atgccctctcctcca

SEQ ID NO: 2098419 - DNA, 15 bp, Homo sapiens
tgccctctcctccag

SEQ ID NO: 2098420 - DNA, 15 bp, Homo sapiens
ctcctccaggaagca

SEQ ID NO: 2098421 - DNA, 15 bp, Homo sapiens
tcctccaggaagcac

SEQ ID NO: 2098422 - DNA, 15 bp, Homo sapiens
cctccaggaagcacc

SEQ ID NO: 2098423 - DNA, 15 bp, Homo sapiens
ctccaggaagcaccc

SEQ ID NO: 2098424 - DNA, 15 bp, Homo sapiens
tccaggaagcacccc

SEQ ID NO: 2098425 - DNA, 15 bp, Homo sapiens
ccaggaagcacccct

SEQ ID NO: 2098426 - DNA, 15 bp, Homo sapiens
caggaagcacccctc

SEQ ID NO: 2098427 - DNA, 15 bp, Homo sapiens
aggaagcacccctcc

SEQ ID NO: 2098428 - DNA, 15 bp, Homo sapiens
ggaagcacccctccc

SEQ ID NO: 2098429 - DNA, 15 bp, Homo sapiens
gaagcacccctcccc

SEQ ID NO: 2098430 - DNA, 15 bp, Homo sapiens
gcacccctcccccat

SEQ ID NO: 2098431 - DNA, 15 bp, Homo sapiens
cacccctcccccatc

SEQ ID NO: 2098432 - DNA, 15 bp, Homo sapiens
acccctcccccatca

SEQ ID NO: 2098433 - DNA, 15 bp, Homo sapiens
cccctcccccatcac

SEQ ID NO: 2098434 - DNA, 15 bp, Homo sapiens
cctcccccatcactc

SEQ ID NO: 2098435 - DNA, 15 bp, Homo sapiens
ctcccccatcactcc

SEQ ID NO: 2098436 - DNA, 15 bp, Homo sapiens
tcccccatcactcct

SEQ ID NO: 2098437 - DNA, 15 bp, Homo sapiens
cccccatcactcctg

SEQ ID NO: 2098438 - DNA, 15 bp, Homo sapiens
ccccatcactcctgc

SEQ ID NO: 2098439 - DNA, 15 bp, Homo sapiens
cccatcactcctgct

SEQ ID NO: 2098440 - DNA, 15 bp, Homo sapiens
ccatcactcctgctt

SEQ ID NO: 2098441 - DNA, 15 bp, Homo sapiens
catcactcctgcttg

SEQ ID NO: 2098442 - DNA, 15 bp, Homo sapiens
atcactcctgcttgc

SEQ ID NO: 2098443 - DNA, 15 bp, Homo sapiens
tcactcctgcttgct

SEQ ID NO: 2098444 - DNA, 15 bp, Homo sapiens
cactcctgcttgctg

SEQ ID NO: 2098445 - DNA, 15 bp, Homo sapiens
actcctgcttgctgt

SEQ ID NO: 2098446 - DNA, 15 bp, Homo sapiens
ctcctgcttgctgtt

SEQ ID NO: 2098447 - DNA, 15 bp, Homo sapiens
tcctgcttgctgttc

SEQ ID NO: 2098448 - DNA, 15 bp, Homo sapiens
cctgcttgctgttct

SEQ ID NO: 2098449 - DNA, 15 bp, Homo sapiens
ctgcttgctgttctt

SEQ ID NO: 2098450 - DNA, 15 bp, Homo sapiens
tgcttgctgttcttc

SEQ ID NO: 2098451 - DNA, 15 bp, Homo sapiens
gcttgctgttcttcc

SEQ ID NO: 2098452 - DNA, 15 bp, Homo sapiens
cttgctgttcttccc

SEQ ID NO: 2098453 - DNA, 15 bp, Homo sapiens
ttgctgttcttccct

SEQ ID NO: 2098454 - DNA, 15 bp, Homo sapiens
tgctgttcttccctg

SEQ ID NO: 2098455 - DNA, 15 bp, Homo sapiens
gctgttcttccctgt

SEQ ID NO: 2098456 - DNA, 15 bp, Homo sapiens
ctgttcttccctgtc

SEQ ID NO: 2098457 - DNA, 15 bp, Homo sapiens
tgttcttccctgtct

SEQ ID NO: 2098458 - DNA, 15 bp, Homo sapiens
gttcttccctgtctc

SEQ ID NO: 2098459 - DNA, 15 bp, Homo sapiens
ttcttccctgtctca

SEQ ID NO: 2098460 - DNA, 15 bp, Homo sapiens
tcttccctgtctcag

SEQ ID NO: 2098461 - DNA, 15 bp, Homo sapiens
cttccctgtctcagg

SEQ ID NO: 2098462 - DNA, 15 bp, Homo sapiens
ttccctgtctcagga

SEQ ID NO: 2098463 - DNA, 15 bp, Homo sapiens
tccctgtctcaggac

SEQ ID NO: 2098464 - DNA, 15 bp, Homo sapiens
ccctgtctcaggact

SEQ ID NO: 2098465 - DNA, 15 bp, Homo sapiens
cctgtctcaggactc

SEQ ID NO: 2098466 - DNA, 15 bp, Homo sapiens
ctgtctcaggactcc

SEQ ID NO: 2098467 - DNA, 15 bp, Homo sapiens
tgtctcaggactcct

SEQ ID NO: 2098468 - DNA, 15 bp, Homo sapiens
gtctcaggactcctg

SEQ ID NO: 2098469 - DNA, 15 bp, Homo sapiens
tctcaggactcctgg

SEQ ID NO: 2098470 - DNA, 15 bp, Homo sapiens
ctcaggactcctggg

SEQ ID NO: 2098471 - DNA, 15 bp, Homo sapiens
tcaggactcctgggg

SEQ ID NO: 2098472 - DNA, 15 bp, Homo sapiens
caggactcctggggc

SEQ ID NO: 2098473 - DNA, 15 bp, Homo sapiens
aggactcctggggca

SEQ ID NO: 2098474 - DNA, 15 bp, Homo sapiens
ggactcctggggcac

SEQ ID NO: 2098475 - DNA, 15 bp, Homo sapiens
gactcctggggcact

SEQ ID NO: 2098476 - DNA, 15 bp, Homo sapiens
actcctggggcactt

SEQ ID NO: 2098477 - DNA, 15 bp, Homo sapiens
ctcctggggcacttt

SEQ ID NO: 2098478 - DNA, 15 bp, Homo sapiens
tcctggggcactttg

SEQ ID NO: 2098479 - DNA, 15 bp, Homo sapiens
cctggggcactttgt

SEQ ID NO: 2098480 - DNA, 15 bp, Homo sapiens
tggggcactttgtat

SEQ ID NO: 2098481 - DNA, 15 bp, Homo sapiens
ggggcactttgtatc

SEQ ID NO: 2098482 - DNA, 15 bp, Homo sapiens
gggcactttgtatct

SEQ ID NO: 2098483 - DNA, 15 bp, Homo sapiens
ggcactttgtatctc

SEQ ID NO: 2098484 - DNA, 15 bp, Homo sapiens
gcactttgtatctca

SEQ ID NO: 2098485 - DNA, 15 bp, Homo sapiens
cactttgtatctcag

SEQ ID NO: 2098486 - DNA, 15 bp, Homo sapiens
actttgtatctcagt

SEQ ID NO: 2098487 - DNA, 15 bp, Homo sapiens
ctttgtatctcagtt

SEQ ID NO: 2098488 - DNA, 15 bp, Homo sapiens
tttgtatctcagttg

SEQ ID NO: 2098489 - DNA, 15 bp, Homo sapiens
ttgtatctcagttga

SEQ ID NO: 2098490 - DNA, 15 bp, Homo sapiens
tgtatctcagttgat

SEQ ID NO: 2098491 - DNA, 15 bp, Homo sapiens
gtatctcagttgata

SEQ ID NO: 2098492 - DNA, 15 bp, Homo sapiens
tatctcagttgatac

SEQ ID NO: 2098493 - DNA, 15 bp, Homo sapiens
atctcagttgatact

SEQ ID NO: 2098494 - DNA, 15 bp, Homo sapiens
tctcagttgatacta

SEQ ID NO: 2098495 - DNA, 15 bp, Homo sapiens
ctcagttgatactag

SEQ ID NO: 2098496 - DNA, 15 bp, Homo sapiens
tcagttgatactaga

SEQ ID NO: 2098497 - DNA, 15 bp, Homo sapiens
cagttgatactagaa

SEQ ID NO: 2098498 - DNA, 15 bp, Homo sapiens
agttgatactagaat

SEQ ID NO: 2098499 - DNA, 15 bp, Homo sapiens
gttgatactagaatg

SEQ ID NO: 2098500 - DNA, 15 bp, Homo sapiens
ttgatactagaatgt

SEQ ID NO: 2098501 - DNA, 15 bp, Homo sapiens
tgatactagaatgtt

SEQ ID NO: 2098502 - DNA, 15 bp, Homo sapiens
gatactagaatgttc

SEQ ID NO: 2098503 - DNA, 15 bp, Homo sapiens
atactagaatgttct

SEQ ID NO: 2098504 - DNA, 15 bp, Homo sapiens
tactagaatgttcta

SEQ ID NO: 2098505 - DNA, 15 bp, Homo sapiens
actagaatgttctag

SEQ ID NO: 2098506 - DNA, 15 bp, Homo sapiens
ctagaatgttctaga

SEQ ID NO: 2098507 - DNA, 15 bp, Homo sapiens
tagaatgttctagaa

SEQ ID NO: 2098508 - DNA, 15 bp, Homo sapiens
agaatgttctagaat

SEQ ID NO: 2098509 - DNA, 15 bp, Homo sapiens
gaatgttctagaata

SEQ ID NO: 2098510 - DNA, 15 bp, Homo sapiens
aatgttctagaatac

SEQ ID NO: 2098511 - DNA, 15 bp, Homo sapiens
atgttctagaatacc

SEQ ID NO: 2098512 - DNA, 15 bp, Homo sapiens
tgttctagaatacca

SEQ ID NO: 2098513 - DNA, 15 bp, Homo sapiens
gttctagaataccag

SEQ ID NO: 2098514 - DNA, 15 bp, Homo sapiens
ttctagaataccaga

SEQ ID NO: 2098515 - DNA, 15 bp, Homo sapiens
tctagaataccagaa

SEQ ID NO: 2098516 - DNA, 15 bp, Homo sapiens
ctagaataccagaag

SEQ ID NO: 2098517 - DNA, 15 bp, Homo sapiens
tagaataccagaagt

SEQ ID NO: 2098518 - DNA, 15 bp, Homo sapiens
agaataccagaagtc

SEQ ID NO: 2098519 - DNA, 15 bp, Homo sapiens
gaataccagaagtcc

SEQ ID NO: 2098520 - DNA, 15 bp, Homo sapiens
aataccagaagtcct

SEQ ID NO: 2098521 - DNA, 15 bp, Homo sapiens
ataccagaagtcctg

SEQ ID NO: 2098522 - DNA, 15 bp, Homo sapiens
taccagaagtcctga

SEQ ID NO: 2098523 - DNA, 15 bp, Homo sapiens
accagaagtcctgac

SEQ ID NO: 2098524 - DNA, 15 bp, Homo sapiens
ccagaagtcctgaca

SEQ ID NO: 2098525 - DNA, 15 bp, Homo sapiens
cagaagtcctgacac

SEQ ID NO: 2098526 - DNA, 15 bp, Homo sapiens
agaagtcctgacacc

SEQ ID NO: 2098527 - DNA, 15 bp, Homo sapiens
gaagtcctgacacca

SEQ ID NO: 2098528 - DNA, 15 bp, Homo sapiens
aagtcctgacaccag

SEQ ID NO: 2098529 - DNA, 15 bp, Homo sapiens
agtcctgacaccagt

SEQ ID NO: 2098530 - DNA, 15 bp, Homo sapiens
gtcctgacaccagtt

SEQ ID NO: 2098531 - DNA, 15 bp, Homo sapiens
tcctgacaccagttg

SEQ ID NO: 2098532 - DNA, 15 bp, Homo sapiens
cctgacaccagttgc

SEQ ID NO: 2098533 - DNA, 15 bp, Homo sapiens
ctgacaccagttgct

SEQ ID NO: 2098534 - DNA, 15 bp, Homo sapiens
tgacaccagttgctg

SEQ ID NO: 2098535 - DNA, 15 bp, Homo sapiens
gacaccagttgctgt

SEQ ID NO: 2098536 - DNA, 15 bp, Homo sapiens
acaccagttgctgta

SEQ ID NO: 2098537 - DNA, 15 bp, Homo sapiens
caccagttgctgtaa

SEQ ID NO: 2098538 - DNA, 15 bp, Homo sapiens
accagttgctgtaac

SEQ ID NO: 2098539 - DNA, 15 bp, Homo sapiens
ccagttgctgtaacc

SEQ ID NO: 2098540 - DNA, 15 bp, Homo sapiens
cagttgctgtaaccc

SEQ ID NO: 2098541 - DNA, 15 bp, Homo sapiens
agttgctgtaacccc

SEQ ID NO: 2098542 - DNA, 15 bp, Homo sapiens
gttgctgtaacccca

SEQ ID NO: 2098543 - DNA, 15 bp, Homo sapiens
ttgctgtaaccccaa

SEQ ID NO: 2098544 - DNA, 15 bp, Homo sapiens
tgctgtaaccccaaa

SEQ ID NO: 2098545 - DNA, 15 bp, Homo sapiens
gctgtaaccccaaac

SEQ ID NO: 2098546 - DNA, 15 bp, Homo sapiens
ctgtaaccccaaact

SEQ ID NO: 2098547 - DNA, 15 bp, Homo sapiens
tgtaaccccaaactc

SEQ ID NO: 2098548 - DNA, 15 bp, Homo sapiens
gtaaccccaaactcc

SEQ ID NO: 2098549 - DNA, 15 bp, Homo sapiens
taaccccaaactcca

SEQ ID NO: 2098550 - DNA, 15 bp, Homo sapiens
aaccccaaactccaa

SEQ ID NO: 2098551 - DNA, 15 bp, Homo sapiens
accccaaactccaag

SEQ ID NO: 2098552 - DNA, 15 bp, Homo sapiens
ccccaaactccaagg

SEQ ID NO: 2098553 - DNA, 15 bp, Homo sapiens
cccaaactccaagga

SEQ ID NO: 2098554 - DNA, 15 bp, Homo sapiens
ccaaactccaaggac

SEQ ID NO: 2098555 - DNA, 15 bp, Homo sapiens
caaactccaaggacc

SEQ ID NO: 2098556 - DNA, 15 bp, Homo sapiens
aaactccaaggacct

SEQ ID NO: 2098557 - DNA, 15 bp, Homo sapiens
aactccaaggacctg

SEQ ID NO: 2098558 - DNA, 15 bp, Homo sapiens
actccaaggacctgc

SEQ ID NO: 2098559 - DNA, 15 bp, Homo sapiens
ctccaaggacctgca

SEQ ID NO: 2098560 - DNA, 15 bp, Homo sapiens
tccaaggacctgcag

SEQ ID NO: 2098561 - DNA, 15 bp, Homo sapiens
ccaaggacctgcagc

SEQ ID NO: 2098562 - DNA, 15 bp, Homo sapiens
caaggacctgcagca

SEQ ID NO: 2098563 - DNA, 15 bp, Homo sapiens
aaggacctgcagcat

SEQ ID NO: 2098564 - DNA, 15 bp, Homo sapiens
aggacctgcagcata

SEQ ID NO: 2098565 - DNA, 15 bp, Homo sapiens
ggacctgcagcataa

SEQ ID NO: 2098566 - DNA, 15 bp, Homo sapiens
gacctgcagcataaa

SEQ ID NO: 2098567 - DNA, 15 bp, Homo sapiens
acctgcagcataaac

SEQ ID NO: 2098568 - DNA, 15 bp, Homo sapiens
cctgcagcataaacc

SEQ ID NO: 2098569 - DNA, 15 bp, Homo sapiens
ctgcagcataaaccc

SEQ ID NO: 2098570 - DNA, 15 bp, Homo sapiens
tgcagcataaacccc

SEQ ID NO: 2098571 - DNA, 15 bp, Homo sapiens
gcagcataaaccccg

SEQ ID NO: 2098572 - DNA, 15 bp, Homo sapiens
cagcataaaccccgg

SEQ ID NO: 2098573 - DNA, 15 bp, Homo sapiens
agcataaaccccggt

SEQ ID NO: 2098574 - DNA, 15 bp, Homo sapiens
gcataaaccccggta

SEQ ID NO: 2098575 - DNA, 15 bp, Homo sapiens
cataaaccccggtac

SEQ ID NO: 2098576 - DNA, 15 bp, Homo sapiens
ataaaccccggtaca

SEQ ID NO: 2098577 - DNA, 15 bp, Homo sapiens
taaaccccggtacat

SEQ ID NO: 2098578 - DNA, 15 bp, Homo sapiens
aaaccccggtacatg

SEQ ID NO: 2098579 - DNA, 15 bp, Homo sapiens
aaccccggtacatgc

SEQ ID NO: 2098580 - DNA, 15 bp, Homo sapiens
accccggtacatgcc

SEQ ID NO: 2098581 - DNA, 15 bp, Homo sapiens
ccccggtacatgccc

SEQ ID NO: 2098582 - DNA, 15 bp, Homo sapiens
cccggtacatgccct

SEQ ID NO: 2098583 - DNA, 15 bp, Homo sapiens
ccggtacatgccctt

SEQ ID NO: 2098584 - DNA, 15 bp, Homo sapiens
cggtacatgcccttg

SEQ ID NO: 2098585 - DNA, 15 bp, Homo sapiens
ggtacatgcccttgt

SEQ ID NO: 2098586 - DNA, 15 bp, Homo sapiens
gtacatgcccttgtg

SEQ ID NO: 2098587 - DNA, 15 bp, Homo sapiens
tacatgcccttgtgc

SEQ ID NO: 2098588 - DNA, 15 bp, Homo sapiens
acatgcccttgtgct

SEQ ID NO: 2098589 - DNA, 15 bp, Homo sapiens
catgcccttgtgctg

SEQ ID NO: 2098590 - DNA, 15 bp, Homo sapiens
atgcccttgtgctgg

SEQ ID NO: 2098591 - DNA, 15 bp, Homo sapiens
tgcccttgtgctgga

SEQ ID NO: 2098592 - DNA, 15 bp, Homo sapiens
gcccttgtgctggaa

SEQ ID NO: 2098593 - DNA, 15 bp, Homo sapiens
cccttgtgctggaaa

SEQ ID NO: 2098594 - DNA, 15 bp, Homo sapiens
ccttgtgctggaaac

SEQ ID NO: 2098595 - DNA, 15 bp, Homo sapiens
cttgtgctggaaacg

SEQ ID NO: 2098596 - DNA, 15 bp, Homo sapiens
ttgtgctggaaacga

SEQ ID NO: 2098597 - DNA, 15 bp, Homo sapiens
tgtgctggaaacgaa

SEQ ID NO: 2098598 - DNA, 15 bp, Homo sapiens
gtgctggaaacgaat

SEQ ID NO: 2098599 - DNA, 15 bp, Homo sapiens
tgctggaaacgaata

SEQ ID NO: 2098600 - DNA, 15 bp, Homo sapiens
gctggaaacgaatat

SEQ ID NO: 2098601 - DNA, 15 bp, Homo sapiens
ctggaaacgaatatt

SEQ ID NO: 2098602 - DNA, 15 bp, Homo sapiens
tggaaacgaatattt

SEQ ID NO: 2098603 - DNA, 15 bp, Homo sapiens
ggaaacgaatatttt

SEQ ID NO: 2098604 - DNA, 15 bp, Homo sapiens
gaaacgaatattttt

SEQ ID NO: 2098605 - DNA, 15 bp, Homo sapiens
aaacgaatatttttg

SEQ ID NO: 2098606 - DNA, 15 bp, Homo sapiens
aacgaatatttttgg

SEQ ID NO: 2098607 - DNA, 15 bp, Homo sapiens
acgaatatttttggc

SEQ ID NO: 2098608 - DNA, 15 bp, Homo sapiens
cgaatatttttggcc

SEQ ID NO: 2098609 - DNA, 15 bp, Homo sapiens
gaatatttttggccg

SEQ ID NO: 2098610 - DNA, 15 bp, Homo sapiens
aatatttttggccgg

SEQ ID NO: 2098611 - DNA, 15 bp, Homo sapiens
atatttttggccggg

SEQ ID NO: 2098612 - DNA, 15 bp, Homo sapiens
tatttttggccgggg

SEQ ID NO: 2098613 - DNA, 15 bp, Homo sapiens
atttttggccggggc

SEQ ID NO: 2098614 - DNA, 15 bp, Homo sapiens
tttttggccggggcg

SEQ ID NO: 2098615 - DNA, 15 bp, Homo sapiens
ttttggccggggcgg

SEQ ID NO: 2098616 - DNA, 15 bp, Homo sapiens
tttggccggggcggt

SEQ ID NO: 2098617 - DNA, 15 bp, Homo sapiens
ttggccggggcggtt

SEQ ID NO: 2098618 - DNA, 15 bp, Homo sapiens
tggccggggcggtta

SEQ ID NO: 2098619 - DNA, 15 bp, Homo sapiens
ggccggggcggttac

SEQ ID NO: 2098620 - DNA, 15 bp, Homo sapiens
gccggggcggttact

SEQ ID NO: 2098621 - DNA, 15 bp, Homo sapiens
ccggggcggttactc

SEQ ID NO: 2098622 - DNA, 15 bp, Homo sapiens
cggggcggttactca

SEQ ID NO: 2098623 - DNA, 15 bp, Homo sapiens
ggggcggttactcac

SEQ ID NO: 2098624 - DNA, 15 bp, Homo sapiens
gggcggttactcaca

SEQ ID NO: 2098625 - DNA, 15 bp, Homo sapiens
ggcggttactcacat

SEQ ID NO: 2098626 - DNA, 15 bp, Homo sapiens
gcggttactcacatt

SEQ ID NO: 2098627 - DNA, 15 bp, Homo sapiens
cggttactcacattc

SEQ ID NO: 2098628 - DNA, 15 bp, Homo sapiens
ggttactcacattcc

SEQ ID NO: 2098629 - DNA, 15 bp, Homo sapiens
gttactcacattcct

SEQ ID NO: 2098630 - DNA, 15 bp, Homo sapiens
ttactcacattcctt

SEQ ID NO: 2098631 - DNA, 15 bp, Homo sapiens
tactcacattcctta

SEQ ID NO: 2098632 - DNA, 15 bp, Homo sapiens
actcacattccttag

SEQ ID NO: 2098633 - DNA, 15 bp, Homo sapiens
ctcacattccttagt

SEQ ID NO: 2098634 - DNA, 15 bp, Homo sapiens
tcacattccttagta

SEQ ID NO: 2098635 - DNA, 15 bp, Homo sapiens
cacattccttagtac

SEQ ID NO: 2098636 - DNA, 15 bp, Homo sapiens
acattccttagtact

SEQ ID NO: 2098637 - DNA, 15 bp, Homo sapiens
cattccttagtactc

SEQ ID NO: 2098638 - DNA, 15 bp, Homo sapiens
attccttagtactcc

SEQ ID NO: 2098639 - DNA, 15 bp, Homo sapiens
ttccttagtactcct

SEQ ID NO: 2098640 - DNA, 15 bp, Homo sapiens
tccttagtactcctt

SEQ ID NO: 2098641 - DNA, 15 bp, Homo sapiens
ccttagtactccttg

SEQ ID NO: 2098642 - DNA, 15 bp, Homo sapiens
cttagtactccttgg

SEQ ID NO: 2098643 - DNA, 15 bp, Homo sapiens
ttagtactccttggc

SEQ ID NO: 2098644 - DNA, 15 bp, Homo sapiens
tagtactccttggct

SEQ ID NO: 2098645 - DNA, 15 bp, Homo sapiens
agtactccttggctc

SEQ ID NO: 2098646 - DNA, 15 bp, Homo sapiens
gtactccttggctca

SEQ ID NO: 2098647 - DNA, 15 bp, Homo sapiens
tactccttggctcac

SEQ ID NO: 2098648 - DNA, 15 bp, Homo sapiens
actccttggctcacg

SEQ ID NO: 2098649 - DNA, 15 bp, Homo sapiens
ctccttggctcacgc

SEQ ID NO: 2098650 - DNA, 15 bp, Homo sapiens
tccttggctcacgcg

SEQ ID NO: 2098651 - DNA, 15 bp, Homo sapiens
ccttggctcacgcgg

SEQ ID NO: 2098652 - DNA, 15 bp, Homo sapiens
cttggctcacgcgga

SEQ ID NO: 2098653 - DNA, 15 bp, Homo sapiens
ttggctcacgcggac

SEQ ID NO: 2098654 - DNA, 15 bp, Homo sapiens
tggctcacgcggaca

SEQ ID NO: 2098655 - DNA, 15 bp, Homo sapiens
ggctcacgcggacac

SEQ ID NO: 2098656 - DNA, 15 bp, Homo sapiens
gctcacgcggacacc

SEQ ID NO: 2098657 - DNA, 15 bp, Homo sapiens
ctcacgcggacaccc

SEQ ID NO: 2098658 - DNA, 15 bp, Homo sapiens
tcacgcggacaccca

SEQ ID NO: 2098659 - DNA, 15 bp, Homo sapiens
cacgcggacacccat

SEQ ID NO: 2098660 - DNA, 15 bp, Homo sapiens
acgcggacacccatt

SEQ ID NO: 2098661 - DNA, 15 bp, Homo sapiens
cgcggacacccattc

SEQ ID NO: 2098662 - DNA, 15 bp, Homo sapiens
gcggacacccattct

SEQ ID NO: 2098663 - DNA, 15 bp, Homo sapiens
cggacacccattctt

SEQ ID NO: 2098664 - DNA, 15 bp, Homo sapiens
ggacacccattcttt

SEQ ID NO: 2098665 - DNA, 15 bp, Homo sapiens
gacacccattctttc

SEQ ID NO: 2098666 - DNA, 15 bp, Homo sapiens
acacccattctttca

SEQ ID NO: 2098667 - DNA, 15 bp, Homo sapiens
cacccattctttcaa

SEQ ID NO: 2098668 - DNA, 15 bp, Homo sapiens
acccattctttcaac

SEQ ID NO: 2098669 - DNA, 15 bp, Homo sapiens
cccattctttcaaca

SEQ ID NO: 2098670 - DNA, 15 bp, Homo sapiens
ccattctttcaacac

SEQ ID NO: 2098671 - DNA, 15 bp, Homo sapiens
cattctttcaacaca

SEQ ID NO: 2098672 - DNA, 15 bp, Homo sapiens
attctttcaacacat

SEQ ID NO: 2098673 - DNA, 15 bp, Homo sapiens
ttctttcaacacata

SEQ ID NO: 2098674 - DNA, 15 bp, Homo sapiens
tctttcaacacatac

SEQ ID NO: 2098675 - DNA, 15 bp, Homo sapiens
ctttcaacacatact

SEQ ID NO: 2098676 - DNA, 15 bp, Homo sapiens
tttcaacacatactt

SEQ ID NO: 2098677 - DNA, 15 bp, Homo sapiens
ttcaacacatactta

SEQ ID NO: 2098678 - DNA, 15 bp, Homo sapiens
tcaacacatacttat

SEQ ID NO: 2098679 - DNA, 15 bp, Homo sapiens
caacacatacttatc

SEQ ID NO: 2098680 - DNA, 15 bp, Homo sapiens
aacacatacttatcc

SEQ ID NO: 2098681 - DNA, 15 bp, Homo sapiens
acacatacttatcca

SEQ ID NO: 2098682 - DNA, 15 bp, Homo sapiens
cacatacttatccag

SEQ ID NO: 2098683 - DNA, 15 bp, Homo sapiens
acatacttatccagt

SEQ ID NO: 2098684 - DNA, 15 bp, Homo sapiens
catacttatccagtg

SEQ ID NO: 2098685 - DNA, 15 bp, Homo sapiens
atacttatccagtgc

SEQ ID NO: 2098686 - DNA, 15 bp, Homo sapiens
tacttatccagtgct

SEQ ID NO: 2098687 - DNA, 15 bp, Homo sapiens
acttatccagtgctc

SEQ ID NO: 2098688 - DNA, 15 bp, Homo sapiens
cttatccagtgctca

SEQ ID NO: 2098689 - DNA, 15 bp, Homo sapiens
ttatccagtgctcac

SEQ ID NO: 2098690 - DNA, 15 bp, Homo sapiens
tatccagtgctcact

SEQ ID NO: 2098691 - DNA, 15 bp, Homo sapiens
atccagtgctcacta

SEQ ID NO: 2098692 - DNA, 15 bp, Homo sapiens
tccagtgctcactac

SEQ ID NO: 2098693 - DNA, 15 bp, Homo sapiens
ccagtgctcactacg

SEQ ID NO: 2098694 - DNA, 15 bp, Homo sapiens
cagtgctcactacgc

SEQ ID NO: 2098695 - DNA, 15 bp, Homo sapiens
agtgctcactacgcg

SEQ ID NO: 2098696 - DNA, 15 bp, Homo sapiens
gtgctcactacgcgc

SEQ ID NO: 2098697 - DNA, 15 bp, Homo sapiens
tgctcactacgcgct

SEQ ID NO: 2098698 - DNA, 15 bp, Homo sapiens
gctcactacgcgcta

SEQ ID NO: 2098699 - DNA, 15 bp, Homo sapiens
ctcactacgcgctag

SEQ ID NO: 2098700 - DNA, 15 bp, Homo sapiens
tcactacgcgctagg

SEQ ID NO: 2098701 - DNA, 15 bp, Homo sapiens
cactacgcgctaggc

SEQ ID NO: 2098702 - DNA, 15 bp, Homo sapiens
actacgcgctaggca

SEQ ID NO: 2098703 - DNA, 15 bp, Homo sapiens
ctacgcgctaggcac

SEQ ID NO: 2098704 - DNA, 15 bp, Homo sapiens
tacgcgctaggcaca

SEQ ID NO: 2098705 - DNA, 15 bp, Homo sapiens
acgcgctaggcacag

SEQ ID NO: 2098706 - DNA, 15 bp, Homo sapiens
cgcgctaggcacagg

SEQ ID NO: 2098707 - DNA, 15 bp, Homo sapiens
gcgctaggcacaggg

SEQ ID NO: 2098708 - DNA, 15 bp, Homo sapiens
cgctaggcacagggg

SEQ ID NO: 2098709 - DNA, 15 bp, Homo sapiens
gctaggcacaggggg

SEQ ID NO: 2098710 - DNA, 15 bp, Homo sapiens
ctaggcacagggggt

SEQ ID NO: 2098711 - DNA, 15 bp, Homo sapiens
taggcacagggggtg

SEQ ID NO: 2098712 - DNA, 15 bp, Homo sapiens
aggcacagggggtgc

SEQ ID NO: 2098713 - DNA, 15 bp, Homo sapiens
ggcacagggggtgca

SEQ ID NO: 2098714 - DNA, 15 bp, Homo sapiens
gcacagggggtgcaa

SEQ ID NO: 2098715 - DNA, 15 bp, Homo sapiens
cacagggggtgcaat

SEQ ID NO: 2098716 - DNA, 15 bp, Homo sapiens
acagggggtgcaatt

SEQ ID NO: 2098717 - DNA, 15 bp, Homo sapiens
cagggggtgcaattg

SEQ ID NO: 2098718 - DNA, 15 bp, Homo sapiens
agggggtgcaattgt

SEQ ID NO: 2098719 - DNA, 15 bp, Homo sapiens
gggggtgcaattgtg

SEQ ID NO: 2098720 - DNA, 15 bp, Homo sapiens
ggggtgcaattgtgg

SEQ ID NO: 2098721 - DNA, 15 bp, Homo sapiens
gggtgcaattgtgga

SEQ ID NO: 2098722 - DNA, 15 bp, Homo sapiens
ggtgcaattgtggac

SEQ ID NO: 2098723 - DNA, 15 bp, Homo sapiens
gtgcaattgtggacc

SEQ ID NO: 2098724 - DNA, 15 bp, Homo sapiens
tgcaattgtggacca

SEQ ID NO: 2098725 - DNA, 15 bp, Homo sapiens
gcaattgtggaccag

SEQ ID NO: 2098726 - DNA, 15 bp, Homo sapiens
caattgtggaccaga

SEQ ID NO: 2098727 - DNA, 15 bp, Homo sapiens
aattgtggaccagac

SEQ ID NO: 2098728 - DNA, 15 bp, Homo sapiens
attgtggaccagaca

SEQ ID NO: 2098729 - DNA, 15 bp, Homo sapiens
ttgtggaccagacag

SEQ ID NO: 2098730 - DNA, 15 bp, Homo sapiens
tgtggaccagacaga

SEQ ID NO: 2098731 - DNA, 15 bp, Homo sapiens
gtggaccagacagag

SEQ ID NO: 2098732 - DNA, 15 bp, Homo sapiens
tggaccagacagagg

SEQ ID NO: 2098733 - DNA, 15 bp, Homo sapiens
ggaccagacagaggc

SEQ ID NO: 2098734 - DNA, 15 bp, Homo sapiens
gaccagacagaggcg

SEQ ID NO: 2098735 - DNA, 15 bp, Homo sapiens
accagacagaggcgg

SEQ ID NO: 2098736 - DNA, 15 bp, Homo sapiens
ccagacagaggcggc

SEQ ID NO: 2098737 - DNA, 15 bp, Homo sapiens
cagacagaggcggcc

SEQ ID NO: 2098738 - DNA, 15 bp, Homo sapiens
agacagaggcggccc

SEQ ID NO: 2098739 - DNA, 15 bp, Homo sapiens
gacagaggcggccct

SEQ ID NO: 2098740 - DNA, 15 bp, Homo sapiens
acagaggcggccctt

SEQ ID NO: 2098741 - DNA, 15 bp, Homo sapiens
cagaggcggcccttc

SEQ ID NO: 2098742 - DNA, 15 bp, Homo sapiens
agaggcggcccttcc

SEQ ID NO: 2098743 - DNA, 15 bp, Homo sapiens
gaggcggcccttcct

SEQ ID NO: 2098744 - DNA, 15 bp, Homo sapiens
aggcggcccttcctc

SEQ ID NO: 2098745 - DNA, 15 bp, Homo sapiens
ggcggcccttcctct

SEQ ID NO: 2098746 - DNA, 15 bp, Homo sapiens
gcggcccttcctctc

SEQ ID NO: 2098747 - DNA, 15 bp, Homo sapiens
cggcccttcctctca

SEQ ID NO: 2098748 - DNA, 15 bp, Homo sapiens
ggcccttcctctcaa

SEQ ID NO: 2098749 - DNA, 15 bp, Homo sapiens
gcccttcctctcaaa

SEQ ID NO: 2098750 - DNA, 15 bp, Homo sapiens
cccttcctctcaaac

SEQ ID NO: 2098751 - DNA, 15 bp, Homo sapiens
ccttcctctcaaaca

SEQ ID NO: 2098752 - DNA, 15 bp, Homo sapiens
cttcctctcaaacaa

SEQ ID NO: 2098753 - DNA, 15 bp, Homo sapiens
ttcctctcaaacaac

SEQ ID NO: 2098754 - DNA, 15 bp, Homo sapiens
tcctctcaaacaact

SEQ ID NO: 2098755 - DNA, 15 bp, Homo sapiens
cctctcaaacaactt

SEQ ID NO: 2098756 - DNA, 15 bp, Homo sapiens
ctctcaaacaacttt

SEQ ID NO: 2098757 - DNA, 15 bp, Homo sapiens
tctcaaacaacttta

SEQ ID NO: 2098758 - DNA, 15 bp, Homo sapiens
ctcaaacaactttac

SEQ ID NO: 2098759 - DNA, 15 bp, Homo sapiens
tcaaacaactttaca

SEQ ID NO: 2098760 - DNA, 15 bp, Homo sapiens
caaacaactttacag

SEQ ID NO: 2098761 - DNA, 15 bp, Homo sapiens
aaacaactttacagt

SEQ ID NO: 2098762 - DNA, 15 bp, Homo sapiens
aacaactttacagtt

SEQ ID NO: 2098763 - DNA, 15 bp, Homo sapiens
acaactttacagttc

SEQ ID NO: 2098764 - DNA, 15 bp, Homo sapiens
caactttacagttct

SEQ ID NO: 2098765 - DNA, 15 bp, Homo sapiens
aactttacagttctg

SEQ ID NO: 2098766 - DNA, 15 bp, Homo sapiens
actttacagttctgc

SEQ ID NO: 2098767 - DNA, 15 bp, Homo sapiens
ctttacagttctgcc

SEQ ID NO: 2098768 - DNA, 15 bp, Homo sapiens
tttacagttctgcca

SEQ ID NO: 2098769 - DNA, 15 bp, Homo sapiens
ttacagttctgccac

SEQ ID NO: 2098770 - DNA, 15 bp, Homo sapiens
tacagttctgccact

SEQ ID NO: 2098771 - DNA, 15 bp, Homo sapiens
acagttctgccactt

SEQ ID NO: 2098772 - DNA, 15 bp, Homo sapiens
cagttctgccactta

SEQ ID NO: 2098773 - DNA, 15 bp, Homo sapiens
agttctgccacttac

SEQ ID NO: 2098774 - DNA, 15 bp, Homo sapiens
gttctgccacttact

SEQ ID NO: 2098775 - DNA, 15 bp, Homo sapiens
ttctgccacttacta

SEQ ID NO: 2098776 - DNA, 15 bp, Homo sapiens
tctgccacttactag

SEQ ID NO: 2098777 - DNA, 15 bp, Homo sapiens
ctgccacttactagc

SEQ ID NO: 2098778 - DNA, 15 bp, Homo sapiens
acttactagctgtgg

SEQ ID NO: 2098779 - DNA, 15 bp, Homo sapiens
cttactagctgtggg

SEQ ID NO: 2098780 - DNA, 15 bp, Homo sapiens
ttactagctgtggga

SEQ ID NO: 2098781 - DNA, 15 bp, Homo sapiens
tactagctgtgggac

SEQ ID NO: 2098782 - DNA, 15 bp, Homo sapiens
actagctgtgggacc

SEQ ID NO: 2098783 - DNA, 15 bp, Homo sapiens
ctagctgtgggaccc

SEQ ID NO: 2098784 - DNA, 15 bp, Homo sapiens
tagctgtgggaccct

SEQ ID NO: 2098785 - DNA, 15 bp, Homo sapiens
agctgtgggaccctg

SEQ ID NO: 2098786 - DNA, 15 bp, Homo sapiens
gctgtgggaccctgg

SEQ ID NO: 2098787 - DNA, 15 bp, Homo sapiens
ctgtgggaccctgga

SEQ ID NO: 2098788 - DNA, 15 bp, Homo sapiens
gtgggaccctggaca

SEQ ID NO: 2098789 - DNA, 15 bp, Homo sapiens
tgggaccctggacaa

SEQ ID NO: 2098790 - DNA, 15 bp, Homo sapiens
gggaccctggacaag

SEQ ID NO: 2098791 - DNA, 15 bp, Homo sapiens
ggaccctggacaagt

SEQ ID NO: 2098792 - DNA, 15 bp, Homo sapiens
gaccctggacaagtc

SEQ ID NO: 2098793 - DNA, 15 bp, Homo sapiens
accctggacaagtca

SEQ ID NO: 2098794 - DNA, 15 bp, Homo sapiens
ccctggacaagtcac

SEQ ID NO: 2098795 - DNA, 15 bp, Homo sapiens
cctggacaagtcaca

SEQ ID NO: 2098796 - DNA, 15 bp, Homo sapiens
ctggacaagtcacac

SEQ ID NO: 2098797 - DNA, 15 bp, Homo sapiens
tggacaagtcacaca

SEQ ID NO: 2098798 - DNA, 15 bp, Homo sapiens
ggacaagtcacacag

SEQ ID NO: 2098799 - DNA, 15 bp, Homo sapiens
gacaagtcacacagc

SEQ ID NO: 2098800 - DNA, 15 bp, Homo sapiens
acaagtcacacagcc

SEQ ID NO: 2098801 - DNA, 15 bp, Homo sapiens
caagtcacacagcct

SEQ ID NO: 2098802 - DNA, 15 bp, Homo sapiens
aagtcacacagcctc

SEQ ID NO: 2098803 - DNA, 15 bp, Homo sapiens
agtcacacagcctct

SEQ ID NO: 2098804 - DNA, 15 bp, Homo sapiens
gtcacacagcctctc

SEQ ID NO: 2098805 - DNA, 15 bp, Homo sapiens
tcacacagcctctct

SEQ ID NO: 2098806 - DNA, 15 bp, Homo sapiens
cacacagcctctctg

SEQ ID NO: 2098807 - DNA, 15 bp, Homo sapiens
acacagcctctctgg

SEQ ID NO: 2098808 - DNA, 15 bp, Homo sapiens
cacagcctctctgga

SEQ ID NO: 2098809 - DNA, 15 bp, Homo sapiens
acagcctctctggag

SEQ ID NO: 2098810 - DNA, 15 bp, Homo sapiens
cagcctctctggaga

SEQ ID NO: 2098811 - DNA, 15 bp, Homo sapiens
agcctctctggagac

SEQ ID NO: 2098812 - DNA, 15 bp, Homo sapiens
gcctctctggagacc

SEQ ID NO: 2098813 - DNA, 15 bp, Homo sapiens
cctctctggagacct

SEQ ID NO: 2098814 - DNA, 15 bp, Homo sapiens
ctctctggagaccta

SEQ ID NO: 2098815 - DNA, 15 bp, Homo sapiens
tctctggagacctac

SEQ ID NO: 2098816 - DNA, 15 bp, Homo sapiens
ctctggagacctact

SEQ ID NO: 2098817 - DNA, 15 bp, Homo sapiens
tctggagacctactg

SEQ ID NO: 2098818 - DNA, 15 bp, Homo sapiens
ctggagacctactgt

SEQ ID NO: 2098819 - DNA, 15 bp, Homo sapiens
tggagacctactgtt

SEQ ID NO: 2098820 - DNA, 15 bp, Homo sapiens
ggagacctactgttc

SEQ ID NO: 2098821 - DNA, 15 bp, Homo sapiens
gagacctactgttct

SEQ ID NO: 2098822 - DNA, 15 bp, Homo sapiens
agacctactgttctc

SEQ ID NO: 2098823 - DNA, 15 bp, Homo sapiens
gacctactgttctct

SEQ ID NO: 2098824 - DNA, 15 bp, Homo sapiens
acctactgttctctc

SEQ ID NO: 2098825 - DNA, 15 bp, Homo sapiens
cctactgttctctcc

SEQ ID NO: 2098826 - DNA, 15 bp, Homo sapiens
ctactgttctctcct

SEQ ID NO: 2098827 - DNA, 15 bp, Homo sapiens
tactgttctctcctt

SEQ ID NO: 2098828 - DNA, 15 bp, Homo sapiens
actgttctctccttt

SEQ ID NO: 2098829 - DNA, 15 bp, Homo sapiens
ctgttctctccttta

SEQ ID NO: 2098830 - DNA, 15 bp, Homo sapiens
tgttctctcctttaa

SEQ ID NO: 2098831 - DNA, 15 bp, Homo sapiens
gttctctcctttaaa

SEQ ID NO: 2098832 - DNA, 15 bp, Homo sapiens
ttctctcctttaaag

SEQ ID NO: 2098833 - DNA, 15 bp, Homo sapiens
tctctcctttaaagc

SEQ ID NO: 2098834 - DNA, 15 bp, Homo sapiens
ctctcctttaaagca

SEQ ID NO: 2098835 - DNA, 15 bp, Homo sapiens
tctcctttaaagcag

SEQ ID NO: 2098836 - DNA, 15 bp, Homo sapiens
ctcctttaaagcagg

SEQ ID NO: 2098837 - DNA, 15 bp, Homo sapiens
tcctttaaagcaggt

SEQ ID NO: 2098838 - DNA, 15 bp, Homo sapiens
cctttaaagcaggtg

SEQ ID NO: 2098839 - DNA, 15 bp, Homo sapiens
ctttaaagcaggtga

SEQ ID NO: 2098840 - DNA, 15 bp, Homo sapiens
tttaaagcaggtgac

SEQ ID NO: 2098841 - DNA, 15 bp, Homo sapiens
ttaaagcaggtgact

SEQ ID NO: 2098842 - DNA, 15 bp, Homo sapiens
taaagcaggtgactc

SEQ ID NO: 2098843 - DNA, 15 bp, Homo sapiens
aaagcaggtgactca

SEQ ID NO: 2098844 - DNA, 15 bp, Homo sapiens
aagcaggtgactcag

SEQ ID NO: 2098845 - DNA, 15 bp, Homo sapiens
agcaggtgactcaga

SEQ ID NO: 2098846 - DNA, 15 bp, Homo sapiens
gcaggtgactcagat

SEQ ID NO: 2098847 - DNA, 15 bp, Homo sapiens
caggtgactcagatc

SEQ ID NO: 2098848 - DNA, 15 bp, Homo sapiens
aggtgactcagatct

SEQ ID NO: 2098849 - DNA, 15 bp, Homo sapiens
ggtgactcagatctg

SEQ ID NO: 2098850 - DNA, 15 bp, Homo sapiens
gtgactcagatctgc

SEQ ID NO: 2098851 - DNA, 15 bp, Homo sapiens
tgactcagatctgct

SEQ ID NO: 2098852 - DNA, 15 bp, Homo sapiens
gactcagatctgctt

SEQ ID NO: 2098853 - DNA, 15 bp, Homo sapiens
actcagatctgcttt

SEQ ID NO: 2098854 - DNA, 15 bp, Homo sapiens
ctcagatctgctttg

SEQ ID NO: 2098855 - DNA, 15 bp, Homo sapiens
tcagatctgctttgc

SEQ ID NO: 2098856 - DNA, 15 bp, Homo sapiens
cagatctgctttgca

SEQ ID NO: 2098857 - DNA, 15 bp, Homo sapiens
agatctgctttgcag

SEQ ID NO: 2098858 - DNA, 15 bp, Homo sapiens
gatctgctttgcagg

SEQ ID NO: 2098859 - DNA, 15 bp, Homo sapiens
atctgctttgcaggg

SEQ ID NO: 2098860 - DNA, 15 bp, Homo sapiens
tctgctttgcaggga

SEQ ID NO: 2098861 - DNA, 15 bp, Homo sapiens
ctgctttgcagggac

SEQ ID NO: 2098862 - DNA, 15 bp, Homo sapiens
tgctttgcagggacg

SEQ ID NO: 2098863 - DNA, 15 bp, Homo sapiens
gctttgcagggacgt

SEQ ID NO: 2098864 - DNA, 15 bp, Homo sapiens
ctttgcagggacgtc

SEQ ID NO: 2098865 - DNA, 15 bp, Homo sapiens
tttgcagggacgtct

SEQ ID NO: 2098866 - DNA, 15 bp, Homo sapiens
ttgcagggacgtctc

SEQ ID NO: 2098867 - DNA, 15 bp, Homo sapiens
tgcagggacgtctcc

SEQ ID NO: 2098868 - DNA, 15 bp, Homo sapiens
gcagggacgtctcct

SEQ ID NO: 2098869 - DNA, 15 bp, Homo sapiens
cagggacgtctcctg

SEQ ID NO: 2098870 - DNA, 15 bp, Homo sapiens
agggacgtctcctgc

SEQ ID NO: 2098871 - DNA, 15 bp, Homo sapiens
gggacgtctcctgct

SEQ ID NO: 2098872 - DNA, 15 bp, Homo sapiens
ggacgtctcctgctt

SEQ ID NO: 2098873 - DNA, 15 bp, Homo sapiens
gacgtctcctgcttt

SEQ ID NO: 2098874 - DNA, 15 bp, Homo sapiens
acgtctcctgctttg

SEQ ID NO: 2098875 - DNA, 15 bp, Homo sapiens
cgtctcctgctttgc

SEQ ID NO: 2098876 - DNA, 15 bp, Homo sapiens
gtctcctgctttgca

SEQ ID NO: 2098877 - DNA, 15 bp, Homo sapiens
tctcctgctttgcag

SEQ ID NO: 2098878 - DNA, 15 bp, Homo sapiens
ctcctgctttgcagc

SEQ ID NO: 2098879 - DNA, 15 bp, Homo sapiens
tcctgctttgcagcg

SEQ ID NO: 2098880 - DNA, 15 bp, Homo sapiens
cctgctttgcagcga

SEQ ID NO: 2098881 - DNA, 15 bp, Homo sapiens
ctgctttgcagcgat

SEQ ID NO: 2098882 - DNA, 15 bp, Homo sapiens
tgctttgcagcgatg

SEQ ID NO: 2098883 - DNA, 15 bp, Homo sapiens
gctttgcagcgatgt

SEQ ID NO: 2098884 - DNA, 15 bp, Homo sapiens
ctttgcagcgatgtc

SEQ ID NO: 2098885 - DNA, 15 bp, Homo sapiens
tttgcagcgatgtca

SEQ ID NO: 2098886 - DNA, 15 bp, Homo sapiens
ttgcagcgatgtcac

SEQ ID NO: 2098887 - DNA, 15 bp, Homo sapiens
tgcagcgatgtcacc

SEQ ID NO: 2098888 - DNA, 15 bp, Homo sapiens
gcagcgatgtcaccc

SEQ ID NO: 2098889 - DNA, 15 bp, Homo sapiens
cagcgatgtcaccca

SEQ ID NO: 2098890 - DNA, 15 bp, Homo sapiens
agcgatgtcacccag

SEQ ID NO: 2098891 - DNA, 15 bp, Homo sapiens
gcgatgtcacccagg

SEQ ID NO: 2098892 - DNA, 15 bp, Homo sapiens
cgatgtcacccagga

SEQ ID NO: 2098893 - DNA, 15 bp, Homo sapiens
gatgtcacccaggag

SEQ ID NO: 2098894 - DNA, 15 bp, Homo sapiens
atgtcacccaggaga

SEQ ID NO: 2098895 - DNA, 15 bp, Homo sapiens
tgtcacccaggagag

SEQ ID NO: 2098896 - DNA, 15 bp, Homo sapiens
gtcacccaggagaga

SEQ ID NO: 2098897 - DNA, 15 bp, Homo sapiens
tcacccaggagagat

SEQ ID NO: 2098898 - DNA, 15 bp, Homo sapiens
cacccaggagagatg

SEQ ID NO: 2098899 - DNA, 15 bp, Homo sapiens
acccaggagagatgg

SEQ ID NO: 2098900 - DNA, 15 bp, Homo sapiens
cccaggagagatggg

SEQ ID NO: 2098901 - DNA, 15 bp, Homo sapiens
ccaggagagatgggt

SEQ ID NO: 2098902 - DNA, 15 bp, Homo sapiens
caggagagatgggtg

SEQ ID NO: 2098903 - DNA, 15 bp, Homo sapiens
aggagagatgggtga

SEQ ID NO: 2098904 - DNA, 15 bp, Homo sapiens
ggagagatgggtgaa

SEQ ID NO: 2098905 - DNA, 15 bp, Homo sapiens
gagagatgggtgaag

SEQ ID NO: 2098906 - DNA, 15 bp, Homo sapiens
agagatgggtgaagt

SEQ ID NO: 2098907 - DNA, 15 bp, Homo sapiens
gagatgggtgaagtg

SEQ ID NO: 2098908 - DNA, 15 bp, Homo sapiens
agatgggtgaagtgg

SEQ ID NO: 2098909 - DNA, 15 bp, Homo sapiens
gatgggtgaagtgga

SEQ ID NO: 2098910 - DNA, 15 bp, Homo sapiens
atgggtgaagtggat

SEQ ID NO: 2098911 - DNA, 15 bp, Homo sapiens
tgggtgaagtggata

SEQ ID NO: 2098912 - DNA, 15 bp, Homo sapiens
gggtgaagtggatag

SEQ ID NO: 2098913 - DNA, 15 bp, Homo sapiens
ggtgaagtggatagt

SEQ ID NO: 2098914 - DNA, 15 bp, Homo sapiens
gtgaagtggatagtg

SEQ ID NO: 2098915 - DNA, 15 bp, Homo sapiens
tgaagtggatagtga

SEQ ID NO: 2098916 - DNA, 15 bp, Homo sapiens
gaagtggatagtgaa

SEQ ID NO: 2098917 - DNA, 15 bp, Homo sapiens
aagtggatagtgaat

SEQ ID NO: 2098918 - DNA, 15 bp, Homo sapiens
agtggatagtgaatg

SEQ ID NO: 2098919 - DNA, 15 bp, Homo sapiens
gtggatagtgaatgg

SEQ ID NO: 2098920 - DNA, 15 bp, Homo sapiens
tggatagtgaatgga

SEQ ID NO: 2098921 - DNA, 15 bp, Homo sapiens
ggatagtgaatggag

SEQ ID NO: 2098922 - DNA, 15 bp, Homo sapiens
gatagtgaatggagt

SEQ ID NO: 2098923 - DNA, 15 bp, Homo sapiens
atagtgaatggagtg

SEQ ID NO: 2098924 - DNA, 15 bp, Homo sapiens
tagtgaatggagtgg

SEQ ID NO: 2098925 - DNA, 15 bp, Homo sapiens
agtgaatggagtggg

SEQ ID NO: 2098926 - DNA, 15 bp, Homo sapiens
gtgaatggagtgggc

SEQ ID NO: 2098927 - DNA, 15 bp, Homo sapiens
tgaatggagtgggcc

SEQ ID NO: 2098928 - DNA, 15 bp, Homo sapiens
gaatggagtgggcca

SEQ ID NO: 2098929 - DNA, 15 bp, Homo sapiens
aatggagtgggccag

SEQ ID NO: 2098930 - DNA, 15 bp, Homo sapiens
atggagtgggccagg

SEQ ID NO: 2098931 - DNA, 15 bp, Homo sapiens
tggagtgggccaggg

SEQ ID NO: 2098932 - DNA, 15 bp, Homo sapiens
ggagtgggccagggc

SEQ ID NO: 2098933 - DNA, 15 bp, Homo sapiens
gagtgggccagggcg

SEQ ID NO: 2098934 - DNA, 15 bp, Homo sapiens
agtgggccagggcgg

SEQ ID NO: 2098935 - DNA, 15 bp, Homo sapiens
gtgggccagggcggt

SEQ ID NO: 2098936 - DNA, 15 bp, Homo sapiens
tgggccagggcggtg

SEQ ID NO: 2098937 - DNA, 15 bp, Homo sapiens
gggccagggcggtgg

SEQ ID NO: 2098938 - DNA, 15 bp, Homo sapiens
ggccagggcggtggt

SEQ ID NO: 2098939 - DNA, 15 bp, Homo sapiens
gccagggcggtggtc

SEQ ID NO: 2098940 - DNA, 15 bp, Homo sapiens
ccagggcggtggtcc

SEQ ID NO: 2098941 - DNA, 15 bp, Homo sapiens
cagggcggtggtcct

SEQ ID NO: 2098942 - DNA, 15 bp, Homo sapiens
agggcggtggtcctc

SEQ ID NO: 2098943 - DNA, 15 bp, Homo sapiens
gggcggtggtcctcg

SEQ ID NO: 2098944 - DNA, 15 bp, Homo sapiens
ggcggtggtcctcgg

SEQ ID NO: 2098945 - DNA, 15 bp, Homo sapiens
gcggtggtcctcggc

SEQ ID NO: 2098946 - DNA, 15 bp, Homo sapiens
cggtggtcctcggct

SEQ ID NO: 2098947 - DNA, 15 bp, Homo sapiens
ggtggtcctcggctg

SEQ ID NO: 2098948 - DNA, 15 bp, Homo sapiens
gtggtcctcggctga

SEQ ID NO: 2098949 - DNA, 15 bp, Homo sapiens
tggtcctcggctgaa

SEQ ID NO: 2098950 - DNA, 15 bp, Homo sapiens
ggtcctcggctgaaa

SEQ ID NO: 2098951 - DNA, 15 bp, Homo sapiens
gtcctcggctgaaaa

SEQ ID NO: 2098952 - DNA, 15 bp, Homo sapiens
tcctcggctgaaaac

SEQ ID NO: 2098953 - DNA, 15 bp, Homo sapiens
cctcggctgaaaaca

SEQ ID NO: 2098954 - DNA, 15 bp, Homo sapiens
ctcggctgaaaacaa

SEQ ID NO: 2098955 - DNA, 15 bp, Homo sapiens
tcggctgaaaacaat

SEQ ID NO: 2098956 - DNA, 15 bp, Homo sapiens
cggctgaaaacaatg

SEQ ID NO: 2098957 - DNA, 15 bp, Homo sapiens
ggctgaaaacaatgc

SEQ ID NO: 2098958 - DNA, 15 bp, Homo sapiens
gctgaaaacaatgcc

SEQ ID NO: 2098959 - DNA, 15 bp, Homo sapiens
ctgaaaacaatgcct

SEQ ID NO: 2098960 - DNA, 15 bp, Homo sapiens
tgaaaacaatgcctc

SEQ ID NO: 2098961 - DNA, 15 bp, Homo sapiens
gaaaacaatgcctct

SEQ ID NO: 2098962 - DNA, 15 bp, Homo sapiens
aaaacaatgcctctc

SEQ ID NO: 2098963 - DNA, 15 bp, Homo sapiens
aaacaatgcctctcg

SEQ ID NO: 2098964 - DNA, 15 bp, Homo sapiens
aacaatgcctctcgg

SEQ ID NO: 2098965 - DNA, 15 bp, Homo sapiens
acaatgcctctcggg

SEQ ID NO: 2098966 - DNA, 15 bp, Homo sapiens
caatgcctctcgggg

SEQ ID NO: 2098967 - DNA, 15 bp, Homo sapiens
aatgcctctcggggt

SEQ ID NO: 2098968 - DNA, 15 bp, Homo sapiens
atgcctctcggggtc

SEQ ID NO: 2098969 - DNA, 15 bp, Homo sapiens
tgcctctcggggtca

SEQ ID NO: 2098970 - DNA, 15 bp, Homo sapiens
gcctctcggggtcag

SEQ ID NO: 2098971 - DNA, 15 bp, Homo sapiens
cctctcggggtcagc

SEQ ID NO: 2098972 - DNA, 15 bp, Homo sapiens
ctctcggggtcagcg

SEQ ID NO: 2098973 - DNA, 15 bp, Homo sapiens
tctcggggtcagcgt

SEQ ID NO: 2098974 - DNA, 15 bp, Homo sapiens
ctcggggtcagcgtg

SEQ ID NO: 2098975 - DNA, 15 bp, Homo sapiens
tcggggtcagcgtgg

SEQ ID NO: 2098976 - DNA, 15 bp, Homo sapiens
cggggtcagcgtggg

SEQ ID NO: 2098977 - DNA, 15 bp, Homo sapiens
ggggtcagcgtgggg

SEQ ID NO: 2098978 - DNA, 15 bp, Homo sapiens
gggtcagcgtggggc

SEQ ID NO: 2098979 - DNA, 15 bp, Homo sapiens
ggtcagcgtggggct

SEQ ID NO: 2098980 - DNA, 15 bp, Homo sapiens
gtcagcgtggggctc

SEQ ID NO: 2098981 - DNA, 15 bp, Homo sapiens
tcagcgtggggctca

SEQ ID NO: 2098982 - DNA, 15 bp, Homo sapiens
cagcgtggggctcaa

SEQ ID NO: 2098983 - DNA, 15 bp, Homo sapiens
agcgtggggctcaag

SEQ ID NO: 2098984 - DNA, 15 bp, Homo sapiens
gcgtggggctcaaga

SEQ ID NO: 2098985 - DNA, 15 bp, Homo sapiens
cgtggggctcaagag

SEQ ID NO: 2098986 - DNA, 15 bp, Homo sapiens
gtggggctcaagagg

SEQ ID NO: 2098987 - DNA, 15 bp, Homo sapiens
tggggctcaagaggt

SEQ ID NO: 2098988 - DNA, 15 bp, Homo sapiens
ggggctcaagaggtg

SEQ ID NO: 2098989 - DNA, 15 bp, Homo sapiens
gggctcaagaggtgg

SEQ ID NO: 2098990 - DNA, 15 bp, Homo sapiens
ggctcaagaggtggc

SEQ ID NO: 2098991 - DNA, 15 bp, Homo sapiens
gctcaagaggtggcg

SEQ ID NO: 2098992 - DNA, 15 bp, Homo sapiens
ctcaagaggtggcgg

SEQ ID NO: 2098993 - DNA, 15 bp, Homo sapiens
tcaagaggtggcggc

SEQ ID NO: 2098994 - DNA, 15 bp, Homo sapiens
caagaggtggcggcc

SEQ ID NO: 2098995 - DNA, 15 bp, Homo sapiens
aagaggtggcggccc

SEQ ID NO: 2098996 - DNA, 15 bp, Homo sapiens
agaggtggcggcccc

SEQ ID NO: 2098997 - DNA, 15 bp, Homo sapiens
gaggtggcggccccg

SEQ ID NO: 2098998 - DNA, 15 bp, Homo sapiens
aggtggcggccccgt

SEQ ID NO: 2098999 - DNA, 15 bp, Homo sapiens
ggtggcggccccgtg

SEQ ID NO: 2099000 - DNA, 15 bp, Homo sapiens
gtggcggccccgtgg

SEQ ID NO: 2099001 - DNA, 15 bp, Homo sapiens
tggcggccccgtggg

SEQ ID NO: 2099002 - DNA, 15 bp, Homo sapiens
ggcggccccgtgggt

SEQ ID NO: 2099003 - DNA, 15 bp, Homo sapiens
gcggccccgtgggtg

SEQ ID NO: 2099004 - DNA, 15 bp, Homo sapiens
cggccccgtgggtgg

SEQ ID NO: 2099005 - DNA, 15 bp, Homo sapiens
ggccccgtgggtggg

SEQ ID NO: 2099006 - DNA, 15 bp, Homo sapiens
gccccgtgggtgggt

SEQ ID NO: 2099007 - DNA, 15 bp, Homo sapiens
ccccgtgggtgggtc

SEQ ID NO: 2099008 - DNA, 15 bp, Homo sapiens
cccgtgggtgggtcc

SEQ ID NO: 2099009 - DNA, 15 bp, Homo sapiens
ccgtgggtgggtcca

SEQ ID NO: 2099010 - DNA, 15 bp, Homo sapiens
cgtgggtgggtccag

SEQ ID NO: 2099011 - DNA, 15 bp, Homo sapiens
gtgggtgggtccagg

SEQ ID NO: 2099012 - DNA, 15 bp, Homo sapiens
tgggtgggtccaggg

SEQ ID NO: 2099013 - DNA, 15 bp, Homo sapiens
gggtgggtccagggc

SEQ ID NO: 2099014 - DNA, 15 bp, Homo sapiens
ggtgggtccagggcc

SEQ ID NO: 2099015 - DNA, 15 bp, Homo sapiens
gtgggtccagggcca

SEQ ID NO: 2099016 - DNA, 15 bp, Homo sapiens
tgggtccagggccag

SEQ ID NO: 2099017 - DNA, 15 bp, Homo sapiens
gggtccagggccagg

SEQ ID NO: 2099018 - DNA, 15 bp, Homo sapiens
ggtccagggccaggg

SEQ ID NO: 2099019 - DNA, 15 bp, Homo sapiens
gtccagggccaggga

SEQ ID NO: 2099020 - DNA, 15 bp, Homo sapiens
tccagggccagggac

SEQ ID NO: 2099021 - DNA, 15 bp, Homo sapiens
ccagggccagggacc

SEQ ID NO: 2099022 - DNA, 15 bp, Homo sapiens
cagggccagggaccc

SEQ ID NO: 2099023 - DNA, 15 bp, Homo sapiens
agggccagggaccct

SEQ ID NO: 2099024 - DNA, 15 bp, Homo sapiens
gggccagggaccctg

SEQ ID NO: 2099025 - DNA, 15 bp, Homo sapiens
ggccagggaccctgt

SEQ ID NO: 2099026 - DNA, 15 bp, Homo sapiens
gccagggaccctgtg

SEQ ID NO: 2099027 - DNA, 15 bp, Homo sapiens
ccagggaccctgtgt

SEQ ID NO: 2099028 - DNA, 15 bp, Homo sapiens
cagggaccctgtgtc

SEQ ID NO: 2099029 - DNA, 15 bp, Homo sapiens
agggaccctgtgtcc

SEQ ID NO: 2099030 - DNA, 15 bp, Homo sapiens
gggaccctgtgtccg

SEQ ID NO: 2099031 - DNA, 15 bp, Homo sapiens
ggaccctgtgtccga

SEQ ID NO: 2099032 - DNA, 15 bp, Homo sapiens
gaccctgtgtccgag

SEQ ID NO: 2099033 - DNA, 15 bp, Homo sapiens
accctgtgtccgagc

SEQ ID NO: 2099034 - DNA, 15 bp, Homo sapiens
ccctgtgtccgagcc

SEQ ID NO: 2099035 - DNA, 15 bp, Homo sapiens
cctgtgtccgagccc

SEQ ID NO: 2099036 - DNA, 15 bp, Homo sapiens
ctgtgtccgagcccc

SEQ ID NO: 2099037 - DNA, 15 bp, Homo sapiens
tgtgtccgagcccct

SEQ ID NO: 2099038 - DNA, 15 bp, Homo sapiens
gtgtccgagcccctg

SEQ ID NO: 2099039 - DNA, 15 bp, Homo sapiens
tgtccgagcccctgc

SEQ ID NO: 2099040 - DNA, 15 bp, Homo sapiens
gtccgagcccctgcc

SEQ ID NO: 2099041 - DNA, 15 bp, Homo sapiens
tccgagcccctgccc

SEQ ID NO: 2099042 - DNA, 15 bp, Homo sapiens
ccgagcccctgccct

SEQ ID NO: 2099043 - DNA, 15 bp, Homo sapiens
cgagcccctgccctg

SEQ ID NO: 2099044 - DNA, 15 bp, Homo sapiens
gagcccctgccctgg

SEQ ID NO: 2099045 - DNA, 15 bp, Homo sapiens
agcccctgccctgga

SEQ ID NO: 2099046 - DNA, 15 bp, Homo sapiens
gcccctgccctggag

SEQ ID NO: 2099047 - DNA, 15 bp, Homo sapiens
cccctgccctggagc

SEQ ID NO: 2099048 - DNA, 15 bp, Homo sapiens
ccctgccctggagcc

SEQ ID NO: 2099049 - DNA, 15 bp, Homo sapiens
cctgccctggagcca

SEQ ID NO: 2099050 - DNA, 15 bp, Homo sapiens
ctgccctggagccat

SEQ ID NO: 2099051 - DNA, 15 bp, Homo sapiens
tgccctggagccatc

SEQ ID NO: 2099052 - DNA, 15 bp, Homo sapiens
gccctggagccatcc

SEQ ID NO: 2099053 - DNA, 15 bp, Homo sapiens
ccctggagccatcct

SEQ ID NO: 2099054 - DNA, 15 bp, Homo sapiens
cctggagccatcctg

SEQ ID NO: 2099055 - DNA, 15 bp, Homo sapiens
ctggagccatcctgt

SEQ ID NO: 2099056 - DNA, 15 bp, Homo sapiens
tggagccatcctgtc

SEQ ID NO: 2099057 - DNA, 15 bp, Homo sapiens
ggagccatcctgtct

SEQ ID NO: 2099058 - DNA, 15 bp, Homo sapiens
gagccatcctgtctc

SEQ ID NO: 2099059 - DNA, 15 bp, Homo sapiens
agccatcctgtctca

SEQ ID NO: 2099060 - DNA, 15 bp, Homo sapiens
gccatcctgtctcac

SEQ ID NO: 2099061 - DNA, 15 bp, Homo sapiens
ccatcctgtctcacc

SEQ ID NO: 2099062 - DNA, 15 bp, Homo sapiens
catcctgtctcacct

SEQ ID NO: 2099063 - DNA, 15 bp, Homo sapiens
atcctgtctcacctg

SEQ ID NO: 2099064 - DNA, 15 bp, Homo sapiens
tcctgtctcacctga

SEQ ID NO: 2099065 - DNA, 15 bp, Homo sapiens
cctgtctcacctgaa

SEQ ID NO: 2099066 - DNA, 15 bp, Homo sapiens
ctgtctcacctgaag

SEQ ID NO: 2099067 - DNA, 15 bp, Homo sapiens
tgtctcacctgaagg

SEQ ID NO: 2099068 - DNA, 15 bp, Homo sapiens
gtctcacctgaaggc

SEQ ID NO: 2099069 - DNA, 15 bp, Homo sapiens
tctcacctgaaggct

SEQ ID NO: 2099070 - DNA, 15 bp, Homo sapiens
ctcacctgaaggctc

SEQ ID NO: 2099071 - DNA, 15 bp, Homo sapiens
tcacctgaaggctct

SEQ ID NO: 2099072 - DNA, 15 bp, Homo sapiens
cacctgaaggctctg

SEQ ID NO: 2099073 - DNA, 15 bp, Homo sapiens
acctgaaggctctgc

SEQ ID NO: 2099074 - DNA, 15 bp, Homo sapiens
cctgaaggctctgcc

SEQ ID NO: 2099075 - DNA, 15 bp, Homo sapiens
ctgaaggctctgcca

SEQ ID NO: 2099076 - DNA, 15 bp, Homo sapiens
tgaaggctctgccag

SEQ ID NO: 2099077 - DNA, 15 bp, Homo sapiens
gaaggctctgccagt

SEQ ID NO: 2099078 - DNA, 15 bp, Homo sapiens
aaggctctgccagtc

SEQ ID NO: 2099079 - DNA, 15 bp, Homo sapiens
aggctctgccagtct

SEQ ID NO: 2099080 - DNA, 15 bp, Homo sapiens
ggctctgccagtctg

SEQ ID NO: 2099081 - DNA, 15 bp, Homo sapiens
gctctgccagtctgg

SEQ ID NO: 2099082 - DNA, 15 bp, Homo sapiens
ctctgccagtctggt

SEQ ID NO: 2099083 - DNA, 15 bp, Homo sapiens
tctgccagtctggtc

SEQ ID NO: 2099084 - DNA, 15 bp, Homo sapiens
ctgccagtctggtcc

SEQ ID NO: 2099085 - DNA, 15 bp, Homo sapiens
tgccagtctggtcca

SEQ ID NO: 2099086 - DNA, 15 bp, Homo sapiens
gccagtctggtccac

SEQ ID NO: 2099087 - DNA, 15 bp, Homo sapiens
ccagtctggtccact

SEQ ID NO: 2099088 - DNA, 15 bp, Homo sapiens
cagtctggtccactg

SEQ ID NO: 2099089 - DNA, 15 bp, Homo sapiens
agtctggtccactgg

SEQ ID NO: 2099090 - DNA, 15 bp, Homo sapiens
gtctggtccactggc

SEQ ID NO: 2099091 - DNA, 15 bp, Homo sapiens
tctggtccactggcc

SEQ ID NO: 2099092 - DNA, 15 bp, Homo sapiens
ctggtccactggcct

SEQ ID NO: 2099093 - DNA, 15 bp, Homo sapiens
tggtccactggcctc

SEQ ID NO: 2099094 - DNA, 15 bp, Homo sapiens
ggtccactggcctcc

SEQ ID NO: 2099095 - DNA, 15 bp, Homo sapiens
gtccactggcctccc

SEQ ID NO: 2099096 - DNA, 15 bp, Homo sapiens
tccactggcctcccg

SEQ ID NO: 2099097 - DNA, 15 bp, Homo sapiens
ccactggcctcccgg

SEQ ID NO: 2099098 - DNA, 15 bp, Homo sapiens
cactggcctcccggc

SEQ ID NO: 2099099 - DNA, 15 bp, Homo sapiens
actggcctcccggct

SEQ ID NO: 2099100 - DNA, 15 bp, Homo sapiens
ctggcctcccggctc

SEQ ID NO: 2099101 - DNA, 15 bp, Homo sapiens
tggcctcccggctcc

SEQ ID NO: 2099102 - DNA, 15 bp, Homo sapiens
ggcctcccggctccc

SEQ ID NO: 2099103 - DNA, 15 bp, Homo sapiens
gcctcccggctccca

SEQ ID NO: 2099104 - DNA, 15 bp, Homo sapiens
cctcccggctcccac

SEQ ID NO: 2099105 - DNA, 15 bp, Homo sapiens
ctcccggctcccacg

SEQ ID NO: 2099106 - DNA, 15 bp, Homo sapiens
tcccggctcccacgc

SEQ ID NO: 2099107 - DNA, 15 bp, Homo sapiens
cccggctcccacgcg

SEQ ID NO: 2099108 - DNA, 15 bp, Homo sapiens
ccggctcccacgcgt

SEQ ID NO: 2099109 - DNA, 15 bp, Homo sapiens
cggctcccacgcgtg

SEQ ID NO: 2099110 - DNA, 15 bp, Homo sapiens
ggctcccacgcgtgt

SEQ ID NO: 2099111 - DNA, 15 bp, Homo sapiens
gctcccacgcgtgtc

SEQ ID NO: 2099112 - DNA, 15 bp, Homo sapiens
ctcccacgcgtgtcc

SEQ ID NO: 2099113 - DNA, 15 bp, Homo sapiens
tcccacgcgtgtccc

SEQ ID NO: 2099114 - DNA, 15 bp, Homo sapiens
cccacgcgtgtcccg

SEQ ID NO: 2099115 - DNA, 15 bp, Homo sapiens
ccacgcgtgtcccga

SEQ ID NO: 2099116 - DNA, 15 bp, Homo sapiens
cacgcgtgtcccgag

SEQ ID NO: 2099117 - DNA, 15 bp, Homo sapiens
acgcgtgtcccgagc

SEQ ID NO: 2099118 - DNA, 15 bp, Homo sapiens
cgcgtgtcccgagcc

SEQ ID NO: 2099119 - DNA, 15 bp, Homo sapiens
gcgtgtcccgagccg

SEQ ID NO: 2099120 - DNA, 15 bp, Homo sapiens
cgtgtcccgagccgt

SEQ ID NO: 2099121 - DNA, 15 bp, Homo sapiens
gtgtcccgagccgtc

SEQ ID NO: 2099122 - DNA, 15 bp, Homo sapiens
tgtcccgagccgtcc

SEQ ID NO: 2099123 - DNA, 15 bp, Homo sapiens
gtcccgagccgtcca

SEQ ID NO: 2099124 - DNA, 15 bp, Homo sapiens
tcccgagccgtccat

SEQ ID NO: 2099125 - DNA, 15 bp, Homo sapiens
cccgagccgtccatt

SEQ ID NO: 2099126 - DNA, 15 bp, Homo sapiens
ccgagccgtccattc

SEQ ID NO: 2099127 - DNA, 15 bp, Homo sapiens
cgagccgtccattct

SEQ ID NO: 2099128 - DNA, 15 bp, Homo sapiens
gagccgtccattctc

SEQ ID NO: 2099129 - DNA, 15 bp, Homo sapiens
agccgtccattctcc

SEQ ID NO: 2099130 - DNA, 15 bp, Homo sapiens
gccgtccattctcca

SEQ ID NO: 2099131 - DNA, 15 bp, Homo sapiens
ccgtccattctccag

SEQ ID NO: 2099132 - DNA, 15 bp, Homo sapiens
cgtccattctccagg

SEQ ID NO: 2099133 - DNA, 15 bp, Homo sapiens
gtccattctccaggt

SEQ ID NO: 2099134 - DNA, 15 bp, Homo sapiens
tccattctccaggta

SEQ ID NO: 2099135 - DNA, 15 bp, Homo sapiens
ccattctccaggtag

SEQ ID NO: 2099136 - DNA, 15 bp, Homo sapiens
cattctccaggtagc

SEQ ID NO: 2099137 - DNA, 15 bp, Homo sapiens
attctccaggtagcg

SEQ ID NO: 2099138 - DNA, 15 bp, Homo sapiens
ttctccaggtagcgg

SEQ ID NO: 2099139 - DNA, 15 bp, Homo sapiens
tctccaggtagcggc

SEQ ID NO: 2099140 - DNA, 15 bp, Homo sapiens
ctccaggtagcggcc

SEQ ID NO: 2099141 - DNA, 15 bp, Homo sapiens
tccaggtagcggccc

SEQ ID NO: 2099142 - DNA, 15 bp, Homo sapiens
ccaggtagcggccct

SEQ ID NO: 2099143 - DNA, 15 bp, Homo sapiens
caggtagcggccctg

SEQ ID NO: 2099144 - DNA, 15 bp, Homo sapiens
aggtagcggccctga

SEQ ID NO: 2099145 - DNA, 15 bp, Homo sapiens
ggtagcggccctgaa

SEQ ID NO: 2099146 - DNA, 15 bp, Homo sapiens
gtagcggccctgaaa

SEQ ID NO: 2099147 - DNA, 15 bp, Homo sapiens
tagcggccctgaaat

SEQ ID NO: 2099148 - DNA, 15 bp, Homo sapiens
agcggccctgaaatg

SEQ ID NO: 2099149 - DNA, 15 bp, Homo sapiens
gcggccctgaaatgt

SEQ ID NO: 2099150 - DNA, 15 bp, Homo sapiens
cggccctgaaatgtt

SEQ ID NO: 2099151 - DNA, 15 bp, Homo sapiens
ggccctgaaatgtta

SEQ ID NO: 2099152 - DNA, 15 bp, Homo sapiens
gccctgaaatgttaa

SEQ ID NO: 2099153 - DNA, 15 bp, Homo sapiens
ccctgaaatgttaat

SEQ ID NO: 2099154 - DNA, 15 bp, Homo sapiens
cctgaaatgttaatc

SEQ ID NO: 2099155 - DNA, 15 bp, Homo sapiens
ctgaaatgttaatct

SEQ ID NO: 2099156 - DNA, 15 bp, Homo sapiens
tgaaatgttaatctg

SEQ ID NO: 2099157 - DNA, 15 bp, Homo sapiens
gaaatgttaatctgt

SEQ ID NO: 2099158 - DNA, 15 bp, Homo sapiens
aaatgttaatctgtc

SEQ ID NO: 2099159 - DNA, 15 bp, Homo sapiens
aatgttaatctgtca

SEQ ID NO: 2099160 - DNA, 15 bp, Homo sapiens
atgttaatctgtcac

SEQ ID NO: 2099161 - DNA, 15 bp, Homo sapiens
tgttaatctgtcaca

SEQ ID NO: 2099162 - DNA, 15 bp, Homo sapiens
gttaatctgtcacaa

SEQ ID NO: 2099163 - DNA, 15 bp, Homo sapiens
ttaatctgtcacaag

SEQ ID NO: 2099164 - DNA, 15 bp, Homo sapiens
taatctgtcacaagg

SEQ ID NO: 2099165 - DNA, 15 bp, Homo sapiens
aatctgtcacaaggg

SEQ ID NO: 2099166 - DNA, 15 bp, Homo sapiens
atctgtcacaagggt

SEQ ID NO: 2099167 - DNA, 15 bp, Homo sapiens
tctgtcacaagggtc

SEQ ID NO: 2099168 - DNA, 15 bp, Homo sapiens
ctgtcacaagggtca

SEQ ID NO: 2099169 - DNA, 15 bp, Homo sapiens
tgtcacaagggtcat

SEQ ID NO: 2099170 - DNA, 15 bp, Homo sapiens
gtcacaagggtcatc

SEQ ID NO: 2099171 - DNA, 15 bp, Homo sapiens
tcacaagggtcatct

SEQ ID NO: 2099172 - DNA, 15 bp, Homo sapiens
cacaagggtcatctt

SEQ ID NO: 2099173 - DNA, 15 bp, Homo sapiens
acaagggtcatcttt

SEQ ID NO: 2099174 - DNA, 15 bp, Homo sapiens
caagggtcatctttg

SEQ ID NO: 2099175 - DNA, 15 bp, Homo sapiens
aagggtcatctttgc

SEQ ID NO: 2099176 - DNA, 15 bp, Homo sapiens
agggtcatctttgct

SEQ ID NO: 2099177 - DNA, 15 bp, Homo sapiens
gggtcatctttgctt

SEQ ID NO: 2099178 - DNA, 15 bp, Homo sapiens
ggtcatctttgcttg

SEQ ID NO: 2099179 - DNA, 15 bp, Homo sapiens
gtcatctttgcttga

SEQ ID NO: 2099180 - DNA, 15 bp, Homo sapiens
tcatctttgcttgaa

SEQ ID NO: 2099181 - DNA, 15 bp, Homo sapiens
catctttgcttgaat

SEQ ID NO: 2099182 - DNA, 15 bp, Homo sapiens
atctttgcttgaatt

SEQ ID NO: 2099183 - DNA, 15 bp, Homo sapiens
tctttgcttgaattg

SEQ ID NO: 2099184 - DNA, 15 bp, Homo sapiens
ctttgcttgaattgt

SEQ ID NO: 2099185 - DNA, 15 bp, Homo sapiens
tttgcttgaattgtg

SEQ ID NO: 2099186 - DNA, 15 bp, Homo sapiens
ttgcttgaattgtgg

SEQ ID NO: 2099187 - DNA, 15 bp, Homo sapiens
tgcttgaattgtggg

SEQ ID NO: 2099188 - DNA, 15 bp, Homo sapiens
gcttgaattgtgggt

SEQ ID NO: 2099189 - DNA, 15 bp, Homo sapiens
cttgaattgtgggtg

SEQ ID NO: 2099190 - DNA, 15 bp, Homo sapiens
ttgaattgtgggtga

SEQ ID NO: 2099191 - DNA, 15 bp, Homo sapiens
tgaattgtgggtgac

SEQ ID NO: 2099192 - DNA, 15 bp, Homo sapiens
gaattgtgggtgact

SEQ ID NO: 2099193 - DNA, 15 bp, Homo sapiens
aattgtgggtgactt

SEQ ID NO: 2099194 - DNA, 15 bp, Homo sapiens
attgtgggtgacttt

SEQ ID NO: 2099195 - DNA, 15 bp, Homo sapiens
ttgtgggtgactttt

SEQ ID NO: 2099196 - DNA, 15 bp, Homo sapiens
tgtgggtgacttttc

SEQ ID NO: 2099197 - DNA, 15 bp, Homo sapiens
gtgggtgacttttcc

SEQ ID NO: 2099198 - DNA, 15 bp, Homo sapiens
tgggtgacttttccc

SEQ ID NO: 2099199 - DNA, 15 bp, Homo sapiens
gggtgacttttcccc

SEQ ID NO: 2099200 - DNA, 15 bp, Homo sapiens
ggtgacttttcccca

SEQ ID NO: 2099201 - DNA, 15 bp, Homo sapiens
gtgacttttccccat

SEQ ID NO: 2099202 - DNA, 15 bp, Homo sapiens
tgacttttccccatc

SEQ ID NO: 2099203 - DNA, 15 bp, Homo sapiens
gacttttccccatcc

SEQ ID NO: 2099204 - DNA, 15 bp, Homo sapiens
acttttccccatcct

SEQ ID NO: 2099205 - DNA, 15 bp, Homo sapiens
cttttccccatcctg

SEQ ID NO: 2099206 - DNA, 15 bp, Homo sapiens
ttttccccatcctgg

SEQ ID NO: 2099207 - DNA, 15 bp, Homo sapiens
tttccccatcctggg

SEQ ID NO: 2099208 - DNA, 15 bp, Homo sapiens
ttccccatcctgggg

SEQ ID NO: 2099209 - DNA, 15 bp, Homo sapiens
tccccatcctggggg

SEQ ID NO: 2099210 - DNA, 15 bp, Homo sapiens
ccccatcctgggggt

SEQ ID NO: 2099211 - DNA, 15 bp, Homo sapiens
cccatcctgggggta

SEQ ID NO: 2099212 - DNA, 15 bp, Homo sapiens
ccatcctgggggtaa

SEQ ID NO: 2099213 - DNA, 15 bp, Homo sapiens
catcctgggggtaaa

SEQ ID NO: 2099214 - DNA, 15 bp, Homo sapiens
atcctgggggtaaag

SEQ ID NO: 2099215 - DNA, 15 bp, Homo sapiens
tcctgggggtaaagt

SEQ ID NO: 2099216 - DNA, 15 bp, Homo sapiens
cctgggggtaaagtc

SEQ ID NO: 2099217 - DNA, 15 bp, Homo sapiens
ctgggggtaaagtcc

SEQ ID NO: 2099218 - DNA, 15 bp, Homo sapiens
tgggggtaaagtccc

SEQ ID NO: 2099219 - DNA, 15 bp, Homo sapiens
gggggtaaagtcccc

SEQ ID NO: 2099220 - DNA, 15 bp, Homo sapiens
ggggtaaagtccccc

SEQ ID NO: 2099221 - DNA, 15 bp, Homo sapiens
gggtaaagtcccccc

SEQ ID NO: 2099222 - DNA, 15 bp, Homo sapiens
ggtaaagtccccccg

SEQ ID NO: 2099223 - DNA, 15 bp, Homo sapiens
gtaaagtccccccga

SEQ ID NO: 2099224 - DNA, 15 bp, Homo sapiens
taaagtccccccgac

SEQ ID NO: 2099225 - DNA, 15 bp, Homo sapiens
aaagtccccccgact

SEQ ID NO: 2099226 - DNA, 15 bp, Homo sapiens
aagtccccccgactt

SEQ ID NO: 2099227 - DNA, 15 bp, Homo sapiens
agtccccccgacttg

SEQ ID NO: 2099228 - DNA, 15 bp, Homo sapiens
gtccccccgacttgt

SEQ ID NO: 2099229 - DNA, 15 bp, Homo sapiens
tccccccgacttgtc

SEQ ID NO: 2099230 - DNA, 15 bp, Homo sapiens
ccccccgacttgtct

SEQ ID NO: 2099231 - DNA, 15 bp, Homo sapiens
cccccgacttgtctc

SEQ ID NO: 2099232 - DNA, 15 bp, Homo sapiens
ccccgacttgtctct

SEQ ID NO: 2099233 - DNA, 15 bp, Homo sapiens
cccgacttgtctctc

SEQ ID NO: 2099234 - DNA, 15 bp, Homo sapiens
ccgacttgtctctcc

SEQ ID NO: 2099235 - DNA, 15 bp, Homo sapiens
cgacttgtctctcca

SEQ ID NO: 2099236 - DNA, 15 bp, Homo sapiens
gacttgtctctccat

SEQ ID NO: 2099237 - DNA, 15 bp, Homo sapiens
acttgtctctccatc

SEQ ID NO: 2099238 - DNA, 15 bp, Homo sapiens
cttgtctctccatcc

SEQ ID NO: 2099239 - DNA, 15 bp, Homo sapiens
ttgtctctccatccg

SEQ ID NO: 2099240 - DNA, 15 bp, Homo sapiens
tgtctctccatccgc

SEQ ID NO: 2099241 - DNA, 15 bp, Homo sapiens
gtctctccatccgcg

SEQ ID NO: 2099242 - DNA, 15 bp, Homo sapiens
tctctccatccgcga

SEQ ID NO: 2099243 - DNA, 15 bp, Homo sapiens
ctctccatccgcgat

SEQ ID NO: 2099244 - DNA, 15 bp, Homo sapiens
tctccatccgcgatc

SEQ ID NO: 2099245 - DNA, 15 bp, Homo sapiens
ctccatccgcgatcc

SEQ ID NO: 2099246 - DNA, 15 bp, Homo sapiens
tccatccgcgatccc

SEQ ID NO: 2099247 - DNA, 15 bp, Homo sapiens
ccatccgcgatcccc

SEQ ID NO: 2099248 - DNA, 15 bp, Homo sapiens
catccgcgatcccct

SEQ ID NO: 2099249 - DNA, 15 bp, Homo sapiens
atccgcgatcccctg

SEQ ID NO: 2099250 - DNA, 15 bp, Homo sapiens
tccgcgatcccctgc

SEQ ID NO: 2099251 - DNA, 15 bp, Homo sapiens
ccgcgatcccctgca

SEQ ID NO: 2099252 - DNA, 15 bp, Homo sapiens
cgcgatcccctgcaa

SEQ ID NO: 2099253 - DNA, 15 bp, Homo sapiens
gcgatcccctgcaat

SEQ ID NO: 2099254 - DNA, 15 bp, Homo sapiens
cgatcccctgcaatc

SEQ ID NO: 2099255 - DNA, 15 bp, Homo sapiens
gatcccctgcaatct

SEQ ID NO: 2099256 - DNA, 15 bp, Homo sapiens
atcccctgcaatctg

SEQ ID NO: 2099257 - DNA, 15 bp, Homo sapiens
tcccctgcaatctgg

SEQ ID NO: 2099258 - DNA, 15 bp, Homo sapiens
cccctgcaatctggc

SEQ ID NO: 2099259 - DNA, 15 bp, Homo sapiens
ccctgcaatctggct

SEQ ID NO: 2099260 - DNA, 15 bp, Homo sapiens
cctgcaatctggctg

SEQ ID NO: 2099261 - DNA, 15 bp, Homo sapiens
ctgcaatctggctgc

SEQ ID NO: 2099262 - DNA, 15 bp, Homo sapiens
tgcaatctggctgca

SEQ ID NO: 2099263 - DNA, 15 bp, Homo sapiens
gcaatctggctgcag

SEQ ID NO: 2099264 - DNA, 15 bp, Homo sapiens
caatctggctgcagc

SEQ ID NO: 2099265 - DNA, 15 bp, Homo sapiens
aatctggctgcagca

SEQ ID NO: 2099266 - DNA, 15 bp, Homo sapiens
atctggctgcagcac

SEQ ID NO: 2099267 - DNA, 15 bp, Homo sapiens
tctggctgcagcacg

SEQ ID NO: 2099268 - DNA, 15 bp, Homo sapiens
ctggctgcagcacgc

SEQ ID NO: 2099269 - DNA, 15 bp, Homo sapiens
tggctgcagcacgcg

SEQ ID NO: 2099270 - DNA, 15 bp, Homo sapiens
ggctgcagcacgcga

SEQ ID NO: 2099271 - DNA, 15 bp, Homo sapiens
gctgcagcacgcgag

SEQ ID NO: 2099272 - DNA, 15 bp, Homo sapiens
ctgcagcacgcgaga

SEQ ID NO: 2099273 - DNA, 15 bp, Homo sapiens
tgcagcacgcgagac

SEQ ID NO: 2099274 - DNA, 15 bp, Homo sapiens
gcagcacgcgagact

SEQ ID NO: 2099275 - DNA, 15 bp, Homo sapiens
cagcacgcgagactt

SEQ ID NO: 2099276 - DNA, 15 bp, Homo sapiens
agcacgcgagacttc

SEQ ID NO: 2099277 - DNA, 15 bp, Homo sapiens
gcacgcgagacttca

SEQ ID NO: 2099278 - DNA, 15 bp, Homo sapiens
cacgcgagacttcag

SEQ ID NO: 2099279 - DNA, 15 bp, Homo sapiens
acgcgagacttcagg

SEQ ID NO: 2099280 - DNA, 15 bp, Homo sapiens
cgcgagacttcagga

SEQ ID NO: 2099281 - DNA, 15 bp, Homo sapiens
gcgagacttcaggac

SEQ ID NO: 2099282 - DNA, 15 bp, Homo sapiens
cgagacttcaggacg

SEQ ID NO: 2099283 - DNA, 15 bp, Homo sapiens
gagacttcaggacga

SEQ ID NO: 2099284 - DNA, 15 bp, Homo sapiens
agacttcaggacgat

SEQ ID NO: 2099285 - DNA, 15 bp, Homo sapiens
gacttcaggacgatt

SEQ ID NO: 2099286 - DNA, 15 bp, Homo sapiens
acttcaggacgattc

SEQ ID NO: 2099287 - DNA, 15 bp, Homo sapiens
cttcaggacgattcc

SEQ ID NO: 2099288 - DNA, 15 bp, Homo sapiens
ttcaggacgattccg

SEQ ID NO: 2099289 - DNA, 15 bp, Homo sapiens
tcaggacgattccga

SEQ ID NO: 2099290 - DNA, 15 bp, Homo sapiens
caggacgattccgag

SEQ ID NO: 2099291 - DNA, 15 bp, Homo sapiens
aggacgattccgagc

SEQ ID NO: 2099292 - DNA, 15 bp, Homo sapiens
ggacgattccgagct

SEQ ID NO: 2099293 - DNA, 15 bp, Homo sapiens
gacgattccgagctc

SEQ ID NO: 2099294 - DNA, 15 bp, Homo sapiens
acgattccgagctcg

SEQ ID NO: 2099295 - DNA, 15 bp, Homo sapiens
cgattccgagctcgg

SEQ ID NO: 2099296 - DNA, 15 bp, Homo sapiens
gattccgagctcggc

SEQ ID NO: 2099297 - DNA, 15 bp, Homo sapiens
attccgagctcggcc

SEQ ID NO: 2099298 - DNA, 15 bp, Homo sapiens
ttccgagctcggcca

SEQ ID NO: 2099299 - DNA, 15 bp, Homo sapiens
tccgagctcggccac

SEQ ID NO: 2099300 - DNA, 15 bp, Homo sapiens
ccgagctcggccact

SEQ ID NO: 2099301 - DNA, 15 bp, Homo sapiens
cgagctcggccactg

SEQ ID NO: 2099302 - DNA, 15 bp, Homo sapiens
gagctcggccactgg

SEQ ID NO: 2099303 - DNA, 15 bp, Homo sapiens
agctcggccactggg

SEQ ID NO: 2099304 - DNA, 15 bp, Homo sapiens
gctcggccactgggg

SEQ ID NO: 2099305 - DNA, 15 bp, Homo sapiens
ctcggccactggggg

SEQ ID NO: 2099306 - DNA, 15 bp, Homo sapiens
tcggccactgggggg

SEQ ID NO: 2099307 - DNA, 15 bp, Homo sapiens
cggccactggggggc

SEQ ID NO: 2099308 - DNA, 15 bp, Homo sapiens
ggccactggggggcg

SEQ ID NO: 2099309 - DNA, 15 bp, Homo sapiens
gccactggggggcga

SEQ ID NO: 2099310 - DNA, 15 bp, Homo sapiens
ccactggggggcgag

SEQ ID NO: 2099311 - DNA, 15 bp, Homo sapiens
cactggggggcgagc

SEQ ID NO: 2099312 - DNA, 15 bp, Homo sapiens
actggggggcgagct

SEQ ID NO: 2099313 - DNA, 15 bp, Homo sapiens
ctggggggcgagctg

SEQ ID NO: 2099314 - DNA, 15 bp, Homo sapiens
tggggggcgagctgt

SEQ ID NO: 2099315 - DNA, 15 bp, Homo sapiens
ggggggcgagctgtg

SEQ ID NO: 2099316 - DNA, 15 bp, Homo sapiens
gggggcgagctgtgc

SEQ ID NO: 2099317 - DNA, 15 bp, Homo sapiens
ggggcgagctgtgca

SEQ ID NO: 2099318 - DNA, 15 bp, Homo sapiens
gggcgagctgtgcac

SEQ ID NO: 2099319 - DNA, 15 bp, Homo sapiens
ggcgagctgtgcaca

SEQ ID NO: 2099320 - DNA, 15 bp, Homo sapiens
gcgagctgtgcacac

SEQ ID NO: 2099321 - DNA, 15 bp, Homo sapiens
cgagctgtgcacaca

SEQ ID NO: 2099322 - DNA, 15 bp, Homo sapiens
gagctgtgcacacag

SEQ ID NO: 2099323 - DNA, 15 bp, Homo sapiens
agctgtgcacacagg

SEQ ID NO: 2099324 - DNA, 15 bp, Homo sapiens
gctgtgcacacaggt

SEQ ID NO: 2099325 - DNA, 15 bp, Homo sapiens
ctgtgcacacaggtg

SEQ ID NO: 2099326 - DNA, 15 bp, Homo sapiens
tgtgcacacaggtgg

SEQ ID NO: 2099327 - DNA, 15 bp, Homo sapiens
gtgcacacaggtggt

SEQ ID NO: 2099328 - DNA, 15 bp, Homo sapiens
tgcacacaggtggtc

SEQ ID NO: 2099329 - DNA, 15 bp, Homo sapiens
gcacacaggtggtcc

SEQ ID NO: 2099330 - DNA, 15 bp, Homo sapiens
cacacaggtggtcca

SEQ ID NO: 2099331 - DNA, 15 bp, Homo sapiens
acacaggtggtccag

SEQ ID NO: 2099332 - DNA, 15 bp, Homo sapiens
cacaggtggtccaga

SEQ ID NO: 2099333 - DNA, 15 bp, Homo sapiens
acaggtggtccagag

SEQ ID NO: 2099334 - DNA, 15 bp, Homo sapiens
caggtggtccagagg

SEQ ID NO: 2099335 - DNA, 15 bp, Homo sapiens
aggtggtccagaggc

SEQ ID NO: 2099336 - DNA, 15 bp, Homo sapiens
ggtggtccagaggct

SEQ ID NO: 2099337 - DNA, 15 bp, Homo sapiens
gtggtccagaggctg

SEQ ID NO: 2099338 - DNA, 15 bp, Homo sapiens
tggtccagaggctgc

SEQ ID NO: 2099339 - DNA, 15 bp, Homo sapiens
ggtccagaggctgct

SEQ ID NO: 2099340 - DNA, 15 bp, Homo sapiens
gtccagaggctgctg

SEQ ID NO: 2099341 - DNA, 15 bp, Homo sapiens
tccagaggctgctgc

SEQ ID NO: 2099342 - DNA, 15 bp, Homo sapiens
ccagaggctgctgcc

SEQ ID NO: 2099343 - DNA, 15 bp, Homo sapiens
cagaggctgctgcct

SEQ ID NO: 2099344 - DNA, 15 bp, Homo sapiens
agaggctgctgcctg

SEQ ID NO: 2099345 - DNA, 15 bp, Homo sapiens
gaggctgctgcctgg

SEQ ID NO: 2099346 - DNA, 15 bp, Homo sapiens
aggctgctgcctggg

SEQ ID NO: 2099347 - DNA, 15 bp, Homo sapiens
ggctgctgcctggga

SEQ ID NO: 2099348 - DNA, 15 bp, Homo sapiens
gctgctgcctgggag

SEQ ID NO: 2099349 - DNA, 15 bp, Homo sapiens
ctgctgcctgggagg

SEQ ID NO: 2099350 - DNA, 15 bp, Homo sapiens
tgctgcctgggaggg

SEQ ID NO: 2099351 - DNA, 15 bp, Homo sapiens
gctgcctgggagggg

SEQ ID NO: 2099352 - DNA, 15 bp, Homo sapiens
ctgcctgggaggggc

SEQ ID NO: 2099353 - DNA, 15 bp, Homo sapiens
tgcctgggaggggct

SEQ ID NO: 2099354 - DNA, 15 bp, Homo sapiens
gcctgggaggggctg

SEQ ID NO: 2099355 - DNA, 15 bp, Homo sapiens
cctgggaggggctgc

SEQ ID NO: 2099356 - DNA, 15 bp, Homo sapiens
ctgggaggggctgcg

SEQ ID NO: 2099357 - DNA, 15 bp, Homo sapiens
tgggaggggctgcgg

SEQ ID NO: 2099358 - DNA, 15 bp, Homo sapiens
gggaggggctgcgga

SEQ ID NO: 2099359 - DNA, 15 bp, Homo sapiens
ggaggggctgcggat

SEQ ID NO: 2099360 - DNA, 15 bp, Homo sapiens
gaggggctgcggatc

SEQ ID NO: 2099361 - DNA, 15 bp, Homo sapiens
aggggctgcggatca

SEQ ID NO: 2099362 - DNA, 15 bp, Homo sapiens
ggggctgcggatcac

SEQ ID NO: 2099363 - DNA, 15 bp, Homo sapiens
gggctgcggatcacc

SEQ ID NO: 2099364 - DNA, 15 bp, Homo sapiens
ggctgcggatcaccc

SEQ ID NO: 2099365 - DNA, 15 bp, Homo sapiens
gctgcggatcacccg

SEQ ID NO: 2099366 - DNA, 15 bp, Homo sapiens
ctgcggatcacccgg

SEQ ID NO: 2099367 - DNA, 15 bp, Homo sapiens
tgcggatcacccggt

SEQ ID NO: 2099368 - DNA, 15 bp, Homo sapiens
gcggatcacccggtt

SEQ ID NO: 2099369 - DNA, 15 bp, Homo sapiens
cggatcacccggttc

SEQ ID NO: 2099370 - DNA, 15 bp, Homo sapiens
ggatcacccggttcc

SEQ ID NO: 2099371 - DNA, 15 bp, Homo sapiens
gatcacccggttcct

SEQ ID NO: 2099372 - DNA, 15 bp, Homo sapiens
atcacccggttcctg

SEQ ID NO: 2099373 - DNA, 15 bp, Homo sapiens
tcacccggttcctgg

SEQ ID NO: 2099374 - DNA, 15 bp, Homo sapiens
cacccggttcctgga

SEQ ID NO: 2099375 - DNA, 15 bp, Homo sapiens
acccggttcctggag

SEQ ID NO: 2099376 - DNA, 15 bp, Homo sapiens
cccggttcctggagc

SEQ ID NO: 2099377 - DNA, 15 bp, Homo sapiens
ccggttcctggagcg

SEQ ID NO: 2099378 - DNA, 15 bp, Homo sapiens
cggttcctggagcgg

SEQ ID NO: 2099379 - DNA, 15 bp, Homo sapiens
ggttcctggagcgga

SEQ ID NO: 2099380 - DNA, 15 bp, Homo sapiens
gttcctggagcggag

SEQ ID NO: 2099381 - DNA, 15 bp, Homo sapiens
ttcctggagcggagt

SEQ ID NO: 2099382 - DNA, 15 bp, Homo sapiens
tcctggagcggagtg

SEQ ID NO: 2099383 - DNA, 15 bp, Homo sapiens
cctggagcggagtgg

SEQ ID NO: 2099384 - DNA, 15 bp, Homo sapiens
ctggagcggagtgga

SEQ ID NO: 2099385 - DNA, 15 bp, Homo sapiens
tggagcggagtggat

SEQ ID NO: 2099386 - DNA, 15 bp, Homo sapiens
ggagcggagtggatt

SEQ ID NO: 2099387 - DNA, 15 bp, Homo sapiens
gagcggagtggattg

SEQ ID NO: 2099388 - DNA, 15 bp, Homo sapiens
agcggagtggattga

SEQ ID NO: 2099389 - DNA, 15 bp, Homo sapiens
gcggagtggattgat

SEQ ID NO: 2099390 - DNA, 15 bp, Homo sapiens
cggagtggattgatt

SEQ ID NO: 2099391 - DNA, 15 bp, Homo sapiens
ggagtggattgattt

SEQ ID NO: 2099392 - DNA, 15 bp, Homo sapiens
gagtggattgatttt

SEQ ID NO: 2099393 - DNA, 15 bp, Homo sapiens
agtggattgatttta

SEQ ID NO: 2099394 - DNA, 15 bp, Homo sapiens
gtggattgattttaa

SEQ ID NO: 2099395 - DNA, 15 bp, Homo sapiens
tggattgattttaaa

SEQ ID NO: 2099396 - DNA, 15 bp, Homo sapiens
ggattgattttaaac

SEQ ID NO: 2099397 - DNA, 15 bp, Homo sapiens
gattgattttaaact

SEQ ID NO: 2099398 - DNA, 15 bp, Homo sapiens
attgattttaaactg

SEQ ID NO: 2099399 - DNA, 15 bp, Homo sapiens
ttgattttaaactgg

SEQ ID NO: 2099400 - DNA, 15 bp, Homo sapiens
tgattttaaactggg

SEQ ID NO: 2099401 - DNA, 15 bp, Homo sapiens
gattttaaactgggg

SEQ ID NO: 2099402 - DNA, 15 bp, Homo sapiens
attttaaactgggga

SEQ ID NO: 2099403 - DNA, 15 bp, Homo sapiens
ttttaaactggggaa

SEQ ID NO: 2099404 - DNA, 15 bp, Homo sapiens
tttaaactggggaag

SEQ ID NO: 2099405 - DNA, 15 bp, Homo sapiens
ttaaactggggaagc

SEQ ID NO: 2099406 - DNA, 15 bp, Homo sapiens
taaactggggaagct

SEQ ID NO: 2099407 - DNA, 15 bp, Homo sapiens
aaactggggaagctg

SEQ ID NO: 2099408 - DNA, 15 bp, Homo sapiens
aactggggaagctgt

SEQ ID NO: 2099409 - DNA, 15 bp, Homo sapiens
actggggaagctgtg

SEQ ID NO: 2099410 - DNA, 15 bp, Homo sapiens
ctggggaagctgtgg

SEQ ID NO: 2099411 - DNA, 15 bp, Homo sapiens
tggggaagctgtggt

SEQ ID NO: 2099412 - DNA, 15 bp, Homo sapiens
ggggaagctgtggtc

SEQ ID NO: 2099413 - DNA, 15 bp, Homo sapiens
gggaagctgtggtcc

SEQ ID NO: 2099414 - DNA, 15 bp, Homo sapiens
ggaagctgtggtcca

SEQ ID NO: 2099415 - DNA, 15 bp, Homo sapiens
gaagctgtggtccac

SEQ ID NO: 2099416 - DNA, 15 bp, Homo sapiens
aagctgtggtccaca

SEQ ID NO: 2099417 - DNA, 15 bp, Homo sapiens
agctgtggtccacag

SEQ ID NO: 2099418 - DNA, 15 bp, Homo sapiens
gctgtggtccacagc

SEQ ID NO: 2099419 - DNA, 15 bp, Homo sapiens
ctgtggtccacagcc

SEQ ID NO: 2099420 - DNA, 15 bp, Homo sapiens
tgtggtccacagcct

SEQ ID NO: 2099421 - DNA, 15 bp, Homo sapiens
gtggtccacagcctg

SEQ ID NO: 2099422 - DNA, 15 bp, Homo sapiens
tggtccacagcctgg

SEQ ID NO: 2099423 - DNA, 15 bp, Homo sapiens
ggtccacagcctggc

SEQ ID NO: 2099424 - DNA, 15 bp, Homo sapiens
gtccacagcctggct

SEQ ID NO: 2099425 - DNA, 15 bp, Homo sapiens
tccacagcctggctt

SEQ ID NO: 2099426 - DNA, 15 bp, Homo sapiens
ccacagcctggcttc

SEQ ID NO: 2099427 - DNA, 15 bp, Homo sapiens
cacagcctggcttcg

SEQ ID NO: 2099428 - DNA, 15 bp, Homo sapiens
acagcctggcttcgg

SEQ ID NO: 2099429 - DNA, 15 bp, Homo sapiens
cagcctggcttcgga

SEQ ID NO: 2099430 - DNA, 15 bp, Homo sapiens
agcctggcttcggaa

SEQ ID NO: 2099431 - DNA, 15 bp, Homo sapiens
gcctggcttcggaaa

SEQ ID NO: 2099432 - DNA, 15 bp, Homo sapiens
cctggcttcggaaac

SEQ ID NO: 2099433 - DNA, 15 bp, Homo sapiens
ctggcttcggaaacc

SEQ ID NO: 2099434 - DNA, 15 bp, Homo sapiens
tggcttcggaaaccc

SEQ ID NO: 2099435 - DNA, 15 bp, Homo sapiens
ggcttcggaaacccg

SEQ ID NO: 2099436 - DNA, 15 bp, Homo sapiens
gcttcggaaacccgt

SEQ ID NO: 2099437 - DNA, 15 bp, Homo sapiens
cttcggaaacccgtg

SEQ ID NO: 2099438 - DNA, 15 bp, Homo sapiens
ttcggaaacccgtga

SEQ ID NO: 2099439 - DNA, 15 bp, Homo sapiens
tcggaaacccgtgac

SEQ ID NO: 2099440 - DNA, 15 bp, Homo sapiens
cggaaacccgtgacc

SEQ ID NO: 2099441 - DNA, 15 bp, Homo sapiens
ggaaacccgtgaccc

SEQ ID NO: 2099442 - DNA, 15 bp, Homo sapiens
gaaacccgtgacccc

SEQ ID NO: 2099443 - DNA, 15 bp, Homo sapiens
aaacccgtgacccct

SEQ ID NO: 2099444 - DNA, 15 bp, Homo sapiens
aacccgtgaccccta

SEQ ID NO: 2099445 - DNA, 15 bp, Homo sapiens
acccgtgacccctag

SEQ ID NO: 2099446 - DNA, 15 bp, Homo sapiens
cccgtgacccctaga

SEQ ID NO: 2099447 - DNA, 15 bp, Homo sapiens
ccgtgacccctagaa

SEQ ID NO: 2099448 - DNA, 15 bp, Homo sapiens
cgtgacccctagaaa

SEQ ID NO: 2099449 - DNA, 15 bp, Homo sapiens
gtgacccctagaaat

SEQ ID NO: 2099450 - DNA, 15 bp, Homo sapiens
tgacccctagaaatt

SEQ ID NO: 2099451 - DNA, 15 bp, Homo sapiens
gacccctagaaattg

SEQ ID NO: 2099452 - DNA, 15 bp, Homo sapiens
acccctagaaattgt

SEQ ID NO: 2099453 - DNA, 15 bp, Homo sapiens
cccctagaaattgta

SEQ ID NO: 2099454 - DNA, 15 bp, Homo sapiens
ccctagaaattgtat

SEQ ID NO: 2099455 - DNA, 15 bp, Homo sapiens
cctagaaattgtatt

SEQ ID NO: 2099456 - DNA, 15 bp, Homo sapiens
ctagaaattgtattt

SEQ ID NO: 2099457 - DNA, 15 bp, Homo sapiens
tagaaattgtatttt

SEQ ID NO: 2099458 - DNA, 15 bp, Homo sapiens
agaaattgtatttta

SEQ ID NO: 2099459 - DNA, 15 bp, Homo sapiens
gaaattgtattttac

SEQ ID NO: 2099460 - DNA, 15 bp, Homo sapiens
aaattgtattttacg

SEQ ID NO: 2099461 - DNA, 15 bp, Homo sapiens
aattgtattttacgt

SEQ ID NO: 2099462 - DNA, 15 bp, Homo sapiens
attgtattttacgtg

SEQ ID NO: 2099463 - DNA, 15 bp, Homo sapiens
ttgtattttacgtgt

SEQ ID NO: 2099464 - DNA, 15 bp, Homo sapiens
tgtattttacgtgtg

SEQ ID NO: 2099465 - DNA, 15 bp, Homo sapiens
gtattttacgtgtgt

SEQ ID NO: 2099466 - DNA, 15 bp, Homo sapiens
tattttacgtgtgtg

SEQ ID NO: 2099467 - DNA, 15 bp, Homo sapiens
attttacgtgtgtgt

SEQ ID NO: 2099468 - DNA, 15 bp, Homo sapiens
ttttacgtgtgtgtc

SEQ ID NO: 2099469 - DNA, 15 bp, Homo sapiens
tttacgtgtgtgtct

SEQ ID NO: 2099470 - DNA, 15 bp, Homo sapiens
ttacgtgtgtgtctg

SEQ ID NO: 2099471 - DNA, 15 bp, Homo sapiens
tacgtgtgtgtctgg

SEQ ID NO: 2099472 - DNA, 15 bp, Homo sapiens
acgtgtgtgtctggg

SEQ ID NO: 2099473 - DNA, 15 bp, Homo sapiens
cgtgtgtgtctgggc

SEQ ID NO: 2099474 - DNA, 15 bp, Homo sapiens
gtgtgtgtctgggcg

SEQ ID NO: 2099475 - DNA, 15 bp, Homo sapiens
tgtgtgtctgggcgt

SEQ ID NO: 2099476 - DNA, 15 bp, Homo sapiens
gtgtgtctgggcgtt

SEQ ID NO: 2099477 - DNA, 15 bp, Homo sapiens
tgtgtctgggcgttt

SEQ ID NO: 2099478 - DNA, 15 bp, Homo sapiens
gtgtctgggcgtttt

SEQ ID NO: 2099479 - DNA, 15 bp, Homo sapiens
tgtctgggcgtttta

SEQ ID NO: 2099480 - DNA, 15 bp, Homo sapiens
gtctgggcgttttat

SEQ ID NO: 2099481 - DNA, 15 bp, Homo sapiens
tctgggcgttttatt

SEQ ID NO: 2099482 - DNA, 15 bp, Homo sapiens
ctgggcgttttattc

SEQ ID NO: 2099483 - DNA, 15 bp, Homo sapiens
tgggcgttttattct

SEQ ID NO: 2099484 - DNA, 15 bp, Homo sapiens
gggcgttttattctg

SEQ ID NO: 2099485 - DNA, 15 bp, Homo sapiens
ggcgttttattctgg

SEQ ID NO: 2099486 - DNA, 15 bp, Homo sapiens
gcgttttattctggg

SEQ ID NO: 2099487 - DNA, 15 bp, Homo sapiens
cgttttattctggga

SEQ ID NO: 2099488 - DNA, 15 bp, Homo sapiens
gttttattctgggaa

SEQ ID NO: 2099489 - DNA, 15 bp, Homo sapiens
ttttattctgggaag

SEQ ID NO: 2099490 - DNA, 15 bp, Homo sapiens
tttattctgggaagc

SEQ ID NO: 2099491 - DNA, 15 bp, Homo sapiens
ttattctgggaagca

SEQ ID NO: 2099492 - DNA, 15 bp, Homo sapiens
tattctgggaagcat

SEQ ID NO: 2099493 - DNA, 15 bp, Homo sapiens
attctgggaagcatt

SEQ ID NO: 2099494 - DNA, 15 bp, Homo sapiens
ttctgggaagcattt

SEQ ID NO: 2099495 - DNA, 15 bp, Homo sapiens
tctgggaagcatttc

SEQ ID NO: 2099496 - DNA, 15 bp, Homo sapiens
ctgggaagcatttcc

SEQ ID NO: 2099497 - DNA, 15 bp, Homo sapiens
tgggaagcatttcct

SEQ ID NO: 2099498 - DNA, 15 bp, Homo sapiens
gggaagcatttcctc

SEQ ID NO: 2099499 - DNA, 15 bp, Homo sapiens
ggaagcatttcctca

SEQ ID NO: 2099500 - DNA, 15 bp, Homo sapiens
gaagcatttcctcaa

SEQ ID NO: 2099501 - DNA, 15 bp, Homo sapiens
aagcatttcctcaag

SEQ ID NO: 2099502 - DNA, 15 bp, Homo sapiens
agcatttcctcaagt

SEQ ID NO: 2099503 - DNA, 15 bp, Homo sapiens
gcatttcctcaagtc

SEQ ID NO: 2099504 - DNA, 15 bp, Homo sapiens
catttcctcaagtct

SEQ ID NO: 2099505 - DNA, 15 bp, Homo sapiens
atttcctcaagtctt

SEQ ID NO: 2099506 - DNA, 15 bp, Homo sapiens
tttcctcaagtcttc

SEQ ID NO: 2099507 - DNA, 15 bp, Homo sapiens
ttcctcaagtcttca

SEQ ID NO: 2099508 - DNA, 15 bp, Homo sapiens
tcctcaagtcttcag

SEQ ID NO: 2099509 - DNA, 15 bp, Homo sapiens
cctcaagtcttcaga

SEQ ID NO: 2099510 - DNA, 15 bp, Homo sapiens
ctcaagtcttcagat

SEQ ID NO: 2099511 - DNA, 15 bp, Homo sapiens
tcaagtcttcagatt

SEQ ID NO: 2099512 - DNA, 15 bp, Homo sapiens
caagtcttcagattt

SEQ ID NO: 2099513 - DNA, 15 bp, Homo sapiens
aagtcttcagatttt

SEQ ID NO: 2099514 - DNA, 15 bp, Homo sapiens
agtcttcagattttc

SEQ ID NO: 2099515 - DNA, 15 bp, Homo sapiens
gtcttcagattttca

SEQ ID NO: 2099516 - DNA, 15 bp, Homo sapiens
tcttcagattttcaa

SEQ ID NO: 2099517 - DNA, 15 bp, Homo sapiens
cttcagattttcaaa

SEQ ID NO: 2099518 - DNA, 15 bp, Homo sapiens
ttcagattttcaaag

SEQ ID NO: 2099519 - DNA, 15 bp, Homo sapiens
tcagattttcaaagg

SEQ ID NO: 2099520 - DNA, 15 bp, Homo sapiens
cagattttcaaaggg

SEQ ID NO: 2099521 - DNA, 15 bp, Homo sapiens
agattttcaaagggg

SEQ ID NO: 2099522 - DNA, 15 bp, Homo sapiens
gattttcaaaggggt

SEQ ID NO: 2099523 - DNA, 15 bp, Homo sapiens
attttcaaaggggtc

SEQ ID NO: 2099524 - DNA, 15 bp, Homo sapiens
ttttcaaaggggtct

SEQ ID NO: 2099525 - DNA, 15 bp, Homo sapiens
tttcaaaggggtctt

SEQ ID NO: 2099526 - DNA, 15 bp, Homo sapiens
ttcaaaggggtctta

SEQ ID NO: 2099527 - DNA, 15 bp, Homo sapiens
tcaaaggggtcttaa

SEQ ID NO: 2099528 - DNA, 15 bp, Homo sapiens
caaaggggtcttaac

SEQ ID NO: 2099529 - DNA, 15 bp, Homo sapiens
aaaggggtcttaacc

SEQ ID NO: 2099530 - DNA, 15 bp, Homo sapiens
aaggggtcttaaccc

SEQ ID NO: 2099531 - DNA, 15 bp, Homo sapiens
aggggtcttaaccct

SEQ ID NO: 2099532 - DNA, 15 bp, Homo sapiens
ggggtcttaaccctt

SEQ ID NO: 2099533 - DNA, 15 bp, Homo sapiens
gggtcttaacccttt

SEQ ID NO: 2099534 - DNA, 15 bp, Homo sapiens
ggtcttaaccctttc

SEQ ID NO: 2099535 - DNA, 15 bp, Homo sapiens
gtcttaaccctttct

SEQ ID NO: 2099536 - DNA, 15 bp, Homo sapiens
tcttaaccctttctc

SEQ ID NO: 2099537 - DNA, 15 bp, Homo sapiens
cttaaccctttctct

SEQ ID NO: 2099538 - DNA, 15 bp, Homo sapiens
ttaaccctttctctc

SEQ ID NO: 2099539 - DNA, 15 bp, Homo sapiens
taaccctttctctct

SEQ ID NO: 2099540 - DNA, 15 bp, Homo sapiens
aaccctttctctctg

SEQ ID NO: 2099541 - DNA, 15 bp, Homo sapiens
accctttctctctgg

SEQ ID NO: 2099542 - DNA, 15 bp, Homo sapiens
ccctttctctctggg

SEQ ID NO: 2099543 - DNA, 15 bp, Homo sapiens
cctttctctctgggg

SEQ ID NO: 2099544 - DNA, 15 bp, Homo sapiens
ctttctctctggggc

SEQ ID NO: 2099545 - DNA, 15 bp, Homo sapiens
tttctctctggggcc

SEQ ID NO: 2099546 - DNA, 15 bp, Homo sapiens
tctctctggggcctt

SEQ ID NO: 2099547 - DNA, 15 bp, Homo sapiens
ctctctggggccttg

SEQ ID NO: 2099548 - DNA, 15 bp, Homo sapiens
tctctggggccttgg

SEQ ID NO: 2099549 - DNA, 15 bp, Homo sapiens
ctctggggccttggg

SEQ ID NO: 2099550 - DNA, 15 bp, Homo sapiens
tctggggccttggga

SEQ ID NO: 2099551 - DNA, 15 bp, Homo sapiens
ctggggccttgggaa

SEQ ID NO: 2099552 - DNA, 15 bp, Homo sapiens
tggggccttgggaac

SEQ ID NO: 2099553 - DNA, 15 bp, Homo sapiens
ggggccttgggaaca

SEQ ID NO: 2099554 - DNA, 15 bp, Homo sapiens
gggccttgggaacaa

SEQ ID NO: 2099555 - DNA, 15 bp, Homo sapiens
ggccttgggaacaag

SEQ ID NO: 2099556 - DNA, 15 bp, Homo sapiens
gccttgggaacaaga

SEQ ID NO: 2099557 - DNA, 15 bp, Homo sapiens
ccttgggaacaagag

SEQ ID NO: 2099558 - DNA, 15 bp, Homo sapiens
cttgggaacaagagt

SEQ ID NO: 2099559 - DNA, 15 bp, Homo sapiens
ttgggaacaagagtg

SEQ ID NO: 2099560 - DNA, 15 bp, Homo sapiens
tgggaacaagagtga

SEQ ID NO: 2099561 - DNA, 15 bp, Homo sapiens
gggaacaagagtgac

SEQ ID NO: 2099562 - DNA, 15 bp, Homo sapiens
ggaacaagagtgaca

SEQ ID NO: 2099563 - DNA, 15 bp, Homo sapiens
gaacaagagtgacaa

SEQ ID NO: 2099564 - DNA, 15 bp, Homo sapiens
aacaagagtgacaac

SEQ ID NO: 2099565 - DNA, 15 bp, Homo sapiens
acaagagtgacaacc

SEQ ID NO: 2099566 - DNA, 15 bp, Homo sapiens
caagagtgacaaccc

SEQ ID NO: 2099567 - DNA, 15 bp, Homo sapiens
aagagtgacaaccct

SEQ ID NO: 2099568 - DNA, 15 bp, Homo sapiens
agagtgacaacccta

SEQ ID NO: 2099569 - DNA, 15 bp, Homo sapiens
gagtgacaaccctat

SEQ ID NO: 2099570 - DNA, 15 bp, Homo sapiens
agtgacaaccctata

SEQ ID NO: 2099571 - DNA, 15 bp, Homo sapiens
gtgacaaccctataa

SEQ ID NO: 2099572 - DNA, 15 bp, Homo sapiens
tgacaaccctataac

SEQ ID NO: 2099573 - DNA, 15 bp, Homo sapiens
gacaaccctataaca

SEQ ID NO: 2099574 - DNA, 15 bp, Homo sapiens
acaaccctataacag

SEQ ID NO: 2099575 - DNA, 15 bp, Homo sapiens
caaccctataacagg

SEQ ID NO: 2099576 - DNA, 15 bp, Homo sapiens
aaccctataacaggg

SEQ ID NO: 2099577 - DNA, 15 bp, Homo sapiens
accctataacagggc

SEQ ID NO: 2099578 - DNA, 15 bp, Homo sapiens
ccctataacagggcg

SEQ ID NO: 2099579 - DNA, 15 bp, Homo sapiens
cctataacagggcga

SEQ ID NO: 2099580 - DNA, 15 bp, Homo sapiens
ctataacagggcgac

SEQ ID NO: 2099581 - DNA, 15 bp, Homo sapiens
tataacagggcgacc

SEQ ID NO: 2099582 - DNA, 15 bp, Homo sapiens
ataacagggcgacca

SEQ ID NO: 2099583 - DNA, 15 bp, Homo sapiens
taacagggcgaccag

SEQ ID NO: 2099584 - DNA, 15 bp, Homo sapiens
aacagggcgaccagg

SEQ ID NO: 2099585 - DNA, 15 bp, Homo sapiens
acagggcgaccaggg

SEQ ID NO: 2099586 - DNA, 15 bp, Homo sapiens
cagggcgaccagggt

SEQ ID NO: 2099587 - DNA, 15 bp, Homo sapiens
agggcgaccagggtc

SEQ ID NO: 2099588 - DNA, 15 bp, Homo sapiens
gggcgaccagggtca

SEQ ID NO: 2099589 - DNA, 15 bp, Homo sapiens
ggcgaccagggtcac

SEQ ID NO: 2099590 - DNA, 15 bp, Homo sapiens
gcgaccagggtcaca

SEQ ID NO: 2099591 - DNA, 15 bp, Homo sapiens
cgaccagggtcacac

SEQ ID NO: 2099592 - DNA, 15 bp, Homo sapiens
gaccagggtcacacg

SEQ ID NO: 2099593 - DNA, 15 bp, Homo sapiens
accagggtcacacga

SEQ ID NO: 2099594 - DNA, 15 bp, Homo sapiens
ccagggtcacacgat

SEQ ID NO: 2099595 - DNA, 15 bp, Homo sapiens
cagggtcacacgatg

SEQ ID NO: 2099596 - DNA, 15 bp, Homo sapiens
agggtcacacgatgt

SEQ ID NO: 2099597 - DNA, 15 bp, Homo sapiens
gggtcacacgatgtc

SEQ ID NO: 2099598 - DNA, 15 bp, Homo sapiens
ggtcacacgatgtct

SEQ ID NO: 2099599 - DNA, 15 bp, Homo sapiens
gtcacacgatgtctg

SEQ ID NO: 2099600 - DNA, 15 bp, Homo sapiens
tcacacgatgtctgc

SEQ ID NO: 2099601 - DNA, 15 bp, Homo sapiens
cacacgatgtctgct

SEQ ID NO: 2099602 - DNA, 15 bp, Homo sapiens
acacgatgtctgctc

SEQ ID NO: 2099603 - DNA, 15 bp, Homo sapiens
cacgatgtctgctcc

SEQ ID NO: 2099604 - DNA, 15 bp, Homo sapiens
acgatgtctgctcct

SEQ ID NO: 2099605 - DNA, 15 bp, Homo sapiens
cgatgtctgctcctc

SEQ ID NO: 2099606 - DNA, 15 bp, Homo sapiens
gatgtctgctcctcc

SEQ ID NO: 2099607 - DNA, 15 bp, Homo sapiens
atgtctgctcctcct

SEQ ID NO: 2099608 - DNA, 15 bp, Homo sapiens
tgtctgctcctcctt

SEQ ID NO: 2099609 - DNA, 15 bp, Homo sapiens
gtctgctcctcctta

SEQ ID NO: 2099610 - DNA, 15 bp, Homo sapiens
tctgctcctccttag

SEQ ID NO: 2099611 - DNA, 15 bp, Homo sapiens
ctgctcctccttagc

SEQ ID NO: 2099612 - DNA, 15 bp, Homo sapiens
tgctcctccttagcg

SEQ ID NO: 2099613 - DNA, 15 bp, Homo sapiens
gctcctccttagcgt

SEQ ID NO: 2099614 - DNA, 15 bp, Homo sapiens
ctcctccttagcgtg

SEQ ID NO: 2099615 - DNA, 15 bp, Homo sapiens
tcctccttagcgtgc

SEQ ID NO: 2099616 - DNA, 15 bp, Homo sapiens
cctccttagcgtgct

SEQ ID NO: 2099617 - DNA, 15 bp, Homo sapiens
ctccttagcgtgcta

SEQ ID NO: 2099618 - DNA, 15 bp, Homo sapiens
tccttagcgtgctac

SEQ ID NO: 2099619 - DNA, 15 bp, Homo sapiens
ccttagcgtgctact

SEQ ID NO: 2099620 - DNA, 15 bp, Homo sapiens
cttagcgtgctactc

SEQ ID NO: 2099621 - DNA, 15 bp, Homo sapiens
ttagcgtgctactcc

SEQ ID NO: 2099622 - DNA, 15 bp, Homo sapiens
tagcgtgctactccc

SEQ ID NO: 2099623 - DNA, 15 bp, Homo sapiens
agcgtgctactccca

SEQ ID NO: 2099624 - DNA, 15 bp, Homo sapiens
gcgtgctactcccag

SEQ ID NO: 2099625 - DNA, 15 bp, Homo sapiens
cgtgctactcccagt

SEQ ID NO: 2099626 - DNA, 15 bp, Homo sapiens
gtgctactcccagta

SEQ ID NO: 2099627 - DNA, 15 bp, Homo sapiens
tgctactcccagtac

SEQ ID NO: 2099628 - DNA, 15 bp, Homo sapiens
gctactcccagtacc

SEQ ID NO: 2099629 - DNA, 15 bp, Homo sapiens
ctactcccagtacct

SEQ ID NO: 2099630 - DNA, 15 bp, Homo sapiens
tactcccagtacctg

SEQ ID NO: 2099631 - DNA, 15 bp, Homo sapiens
actcccagtacctgc

SEQ ID NO: 2099632 - DNA, 15 bp, Homo sapiens
ctcccagtacctgcg

SEQ ID NO: 2099633 - DNA, 15 bp, Homo sapiens
tcccagtacctgcgt

SEQ ID NO: 2099634 - DNA, 15 bp, Homo sapiens
cccagtacctgcgtg

SEQ ID NO: 2099635 - DNA, 15 bp, Homo sapiens
ccagtacctgcgtgc

SEQ ID NO: 2099636 - DNA, 15 bp, Homo sapiens
cagtacctgcgtgct

SEQ ID NO: 2099637 - DNA, 15 bp, Homo sapiens
agtacctgcgtgcta

SEQ ID NO: 2099638 - DNA, 15 bp, Homo sapiens
gtacctgcgtgctac

SEQ ID NO: 2099639 - DNA, 15 bp, Homo sapiens
tacctgcgtgctact

SEQ ID NO: 2099640 - DNA, 15 bp, Homo sapiens
acctgcgtgctactc

SEQ ID NO: 2099641 - DNA, 15 bp, Homo sapiens
cctgcgtgctactcc

SEQ ID NO: 2099642 - DNA, 15 bp, Homo sapiens
ctgcgtgctactccc

SEQ ID NO: 2099643 - DNA, 15 bp, Homo sapiens
tgcgtgctactccca

SEQ ID NO: 2099644 - DNA, 15 bp, Homo sapiens
tgcgtgctactccct

SEQ ID NO: 2099645 - DNA, 15 bp, Homo sapiens
gcgtgctactccctg

SEQ ID NO: 2099646 - DNA, 15 bp, Homo sapiens
cgtgctactccctgc

SEQ ID NO: 2099647 - DNA, 15 bp, Homo sapiens
gtgctactccctgct

SEQ ID NO: 2099648 - DNA, 15 bp, Homo sapiens
tgctactccctgctc

SEQ ID NO: 2099649 - DNA, 15 bp, Homo sapiens
gctactccctgctct

SEQ ID NO: 2099650 - DNA, 15 bp, Homo sapiens
ctactccctgctctg

SEQ ID NO: 2099651 - DNA, 15 bp, Homo sapiens
tactccctgctctgc

SEQ ID NO: 2099652 - DNA, 15 bp, Homo sapiens
actccctgctctgct

SEQ ID NO: 2099653 - DNA, 15 bp, Homo sapiens
ctccctgctctgctc

SEQ ID NO: 2099654 - DNA, 15 bp, Homo sapiens
tccctgctctgctca

SEQ ID NO: 2099655 - DNA, 15 bp, Homo sapiens
ccctgctctgctcaa

SEQ ID NO: 2099656 - DNA, 15 bp, Homo sapiens
cctgctctgctcaag

SEQ ID NO: 2099657 - DNA, 15 bp, Homo sapiens
ctgctctgctcaagt

SEQ ID NO: 2099658 - DNA, 15 bp, Homo sapiens
tgctctgctcaagtt

SEQ ID NO: 2099659 - DNA, 15 bp, Homo sapiens
gctctgctcaagttg

SEQ ID NO: 2099660 - DNA, 15 bp, Homo sapiens
ctctgctcaagttgc

SEQ ID NO: 2099661 - DNA, 15 bp, Homo sapiens
tctgctcaagttgct

SEQ ID NO: 2099662 - DNA, 15 bp, Homo sapiens
ctgctcaagttgctg

SEQ ID NO: 2099663 - DNA, 15 bp, Homo sapiens
tgctcaagttgctgg

SEQ ID NO: 2099664 - DNA, 15 bp, Homo sapiens
gctcaagttgctggg

SEQ ID NO: 2099665 - DNA, 15 bp, Homo sapiens
ctcaagttgctgggt

SEQ ID NO: 2099666 - DNA, 15 bp, Homo sapiens
tcaagttgctgggtg

SEQ ID NO: 2099667 - DNA, 15 bp, Homo sapiens
caagttgctgggtgg

SEQ ID NO: 2099668 - DNA, 15 bp, Homo sapiens
aagttgctgggtggc

SEQ ID NO: 2099669 - DNA, 15 bp, Homo sapiens
agttgctgggtggcc

SEQ ID NO: 2099670 - DNA, 15 bp, Homo sapiens
gttgctgggtggcct

SEQ ID NO: 2099671 - DNA, 15 bp, Homo sapiens
ttgctgggtggcctt

SEQ ID NO: 2099672 - DNA, 15 bp, Homo sapiens
tgctgggtggccttg

SEQ ID NO: 2099673 - DNA, 15 bp, Homo sapiens
gctgggtggccttgg

SEQ ID NO: 2099674 - DNA, 15 bp, Homo sapiens
ctgggtggccttgga

SEQ ID NO: 2099675 - DNA, 15 bp, Homo sapiens
tgggtggccttggag

SEQ ID NO: 2099676 - DNA, 15 bp, Homo sapiens
gggtggccttggagc

SEQ ID NO: 2099677 - DNA, 15 bp, Homo sapiens
ggtggccttggagca

SEQ ID NO: 2099678 - DNA, 15 bp, Homo sapiens
gtggccttggagcaa

SEQ ID NO: 2099679 - DNA, 15 bp, Homo sapiens
tggccttggagcaat

SEQ ID NO: 2099680 - DNA, 15 bp, Homo sapiens
ggccttggagcaatt

SEQ ID NO: 2099681 - DNA, 15 bp, Homo sapiens
gccttggagcaattc

SEQ ID NO: 2099682 - DNA, 15 bp, Homo sapiens
ccttggagcaattca

SEQ ID NO: 2099683 - DNA, 15 bp, Homo sapiens
cttggagcaattcat

SEQ ID NO: 2099684 - DNA, 15 bp, Homo sapiens
ttggagcaattcata

SEQ ID NO: 2099685 - DNA, 15 bp, Homo sapiens
tggagcaattcataa

SEQ ID NO: 2099686 - DNA, 15 bp, Homo sapiens
ggagcaattcataac

SEQ ID NO: 2099687 - DNA, 15 bp, Homo sapiens
gagcaattcataacc

SEQ ID NO: 2099688 - DNA, 15 bp, Homo sapiens
agcaattcataacct

SEQ ID NO: 2099689 - DNA, 15 bp, Homo sapiens
gcaattcataacctc

SEQ ID NO: 2099690 - DNA, 15 bp, Homo sapiens
caattcataacctct

SEQ ID NO: 2099691 - DNA, 15 bp, Homo sapiens
aattcataacctctc

SEQ ID NO: 2099692 - DNA, 15 bp, Homo sapiens
attcataacctctct

SEQ ID NO: 2099693 - DNA, 15 bp, Homo sapiens
ttcataacctctctg

SEQ ID NO: 2099694 - DNA, 15 bp, Homo sapiens
tcataacctctctga

SEQ ID NO: 2099695 - DNA, 15 bp, Homo sapiens
cataacctctctgag

SEQ ID NO: 2099696 - DNA, 15 bp, Homo sapiens
ataacctctctgaga

SEQ ID NO: 2099697 - DNA, 15 bp, Homo sapiens
taacctctctgagac

SEQ ID NO: 2099698 - DNA, 15 bp, Homo sapiens
aacctctctgagact

SEQ ID NO: 2099699 - DNA, 15 bp, Homo sapiens
acctctctgagactg

SEQ ID NO: 2099700 - DNA, 15 bp, Homo sapiens
cctctctgagactgc

SEQ ID NO: 2099701 - DNA, 15 bp, Homo sapiens
ctctctgagactgcc

SEQ ID NO: 2099702 - DNA, 15 bp, Homo sapiens
tctctgagactgccg

SEQ ID NO: 2099703 - DNA, 15 bp, Homo sapiens
ctctgagactgccgt

SEQ ID NO: 2099704 - DNA, 15 bp, Homo sapiens
tctgagactgccgtg

SEQ ID NO: 2099705 - DNA, 15 bp, Homo sapiens
ctgagactgccgtga

SEQ ID NO: 2099706 - DNA, 15 bp, Homo sapiens
tgagactgccgtgag

SEQ ID NO: 2099707 - DNA, 15 bp, Homo sapiens
gagactgccgtgagg

SEQ ID NO: 2099708 - DNA, 15 bp, Homo sapiens
agactgccgtgaggt

SEQ ID NO: 2099709 - DNA, 15 bp, Homo sapiens
gactgccgtgaggtg

SEQ ID NO: 2099710 - DNA, 15 bp, Homo sapiens
actgccgtgaggtgg

SEQ ID NO: 2099711 - DNA, 15 bp, Homo sapiens
ctgccgtgaggtggg

SEQ ID NO: 2099712 - DNA, 15 bp, Homo sapiens
tgccgtgaggtggga

SEQ ID NO: 2099713 - DNA, 15 bp, Homo sapiens
gccgtgaggtgggag

SEQ ID NO: 2099714 - DNA, 15 bp, Homo sapiens
ccgtgaggtgggagt

SEQ ID NO: 2099715 - DNA, 15 bp, Homo sapiens
cgtgaggtgggagtg

SEQ ID NO: 2099716 - DNA, 15 bp, Homo sapiens
gtgaggtgggagtga

SEQ ID NO: 2099717 - DNA, 15 bp, Homo sapiens
tgaggtgggagtgaa

SEQ ID NO: 2099718 - DNA, 15 bp, Homo sapiens
gaggtgggagtgaag

SEQ ID NO: 2099719 - DNA, 15 bp, Homo sapiens
aggtgggagtgaaga

SEQ ID NO: 2099720 - DNA, 15 bp, Homo sapiens
ggtgggagtgaagat

SEQ ID NO: 2099721 - DNA, 15 bp, Homo sapiens
gtgggagtgaagatt

SEQ ID NO: 2099722 - DNA, 15 bp, Homo sapiens
tgggagtgaagattg

SEQ ID NO: 2099723 - DNA, 15 bp, Homo sapiens
gggagtgaagattgc

SEQ ID NO: 2099724 - DNA, 15 bp, Homo sapiens
ggagtgaagattgct

SEQ ID NO: 2099725 - DNA, 15 bp, Homo sapiens
gagtgaagattgctg

SEQ ID NO: 2099726 - DNA, 15 bp, Homo sapiens
agtgaagattgctgt

SEQ ID NO: 2099727 - DNA, 15 bp, Homo sapiens
gtgaagattgctgtg

SEQ ID NO: 2099728 - DNA, 15 bp, Homo sapiens
tgaagattgctgtgt

SEQ ID NO: 2099729 - DNA, 15 bp, Homo sapiens
gaagattgctgtgta

SEQ ID NO: 2099730 - DNA, 15 bp, Homo sapiens
aagattgctgtgtac

SEQ ID NO: 2099731 - DNA, 15 bp, Homo sapiens
agattgctgtgtacg

SEQ ID NO: 2099732 - DNA, 15 bp, Homo sapiens
gattgctgtgtacga

SEQ ID NO: 2099733 - DNA, 15 bp, Homo sapiens
attgctgtgtacgaa

SEQ ID NO: 2099734 - DNA, 15 bp, Homo sapiens
ttgctgtgtacgaat

SEQ ID NO: 2099735 - DNA, 15 bp, Homo sapiens
tgctgtgtacgaatc

SEQ ID NO: 2099736 - DNA, 15 bp, Homo sapiens
gctgtgtacgaatct

SEQ ID NO: 2099737 - DNA, 15 bp, Homo sapiens
ctgtgtacgaatctt

SEQ ID NO: 2099738 - DNA, 15 bp, Homo sapiens
tgtgtacgaatcttt

SEQ ID NO: 2099739 - DNA, 15 bp, Homo sapiens
gtgtacgaatctttg

SEQ ID NO: 2099740 - DNA, 15 bp, Homo sapiens
tgtacgaatctttga

SEQ ID NO: 2099741 - DNA, 15 bp, Homo sapiens
gtacgaatctttgag

SEQ ID NO: 2099742 - DNA, 15 bp, Homo sapiens
tacgaatctttgaga

SEQ ID NO: 2099743 - DNA, 15 bp, Homo sapiens
acgaatctttgagaa

SEQ ID NO: 2099744 - DNA, 15 bp, Homo sapiens
cgaatctttgagaac

SEQ ID NO: 2099745 - DNA, 15 bp, Homo sapiens
gaatctttgagaacc

SEQ ID NO: 2099746 - DNA, 15 bp, Homo sapiens
aatctttgagaaccc

SEQ ID NO: 2099747 - DNA, 15 bp, Homo sapiens
atctttgagaacccc

SEQ ID NO: 2099748 - DNA, 15 bp, Homo sapiens
tctttgagaacccct

SEQ ID NO: 2099749 - DNA, 15 bp, Homo sapiens
ctttgagaacccctg

SEQ ID NO: 2099750 - DNA, 15 bp, Homo sapiens
tttgagaacccctgt

SEQ ID NO: 2099751 - DNA, 15 bp, Homo sapiens
ttgagaacccctgta

SEQ ID NO: 2099752 - DNA, 15 bp, Homo sapiens
tgagaacccctgtaa

SEQ ID NO: 2099753 - DNA, 15 bp, Homo sapiens
gagaacccctgtaag

SEQ ID NO: 2099754 - DNA, 15 bp, Homo sapiens
agaacccctgtaagg

SEQ ID NO: 2099755 - DNA, 15 bp, Homo sapiens
gaacccctgtaaggg

SEQ ID NO: 2099756 - DNA, 15 bp, Homo sapiens
aacccctgtaagggt

SEQ ID NO: 2099757 - DNA, 15 bp, Homo sapiens
acccctgtaagggtg

SEQ ID NO: 2099758 - DNA, 15 bp, Homo sapiens
cccctgtaagggtgg

SEQ ID NO: 2099759 - DNA, 15 bp, Homo sapiens
ccctgtaagggtgga

SEQ ID NO: 2099760 - DNA, 15 bp, Homo sapiens
cctgtaagggtggaa

SEQ ID NO: 2099761 - DNA, 15 bp, Homo sapiens
ctgtaagggtggaat

SEQ ID NO: 2099762 - DNA, 15 bp, Homo sapiens
tgtaagggtggaatc

SEQ ID NO: 2099763 - DNA, 15 bp, Homo sapiens
gtaagggtggaatcg

SEQ ID NO: 2099764 - DNA, 15 bp, Homo sapiens
taagggtggaatcga

SEQ ID NO: 2099765 - DNA, 15 bp, Homo sapiens
aagggtggaatcgaa

SEQ ID NO: 2099766 - DNA, 15 bp, Homo sapiens
agggtggaatcgaaa

SEQ ID NO: 2099767 - DNA, 15 bp, Homo sapiens
gggtggaatcgaaat

SEQ ID NO: 2099768 - DNA, 15 bp, Homo sapiens
ggtggaatcgaaatg

SEQ ID NO: 2099769 - DNA, 15 bp, Homo sapiens
gtggaatcgaaatgg

SEQ ID NO: 2099770 - DNA, 15 bp, Homo sapiens
tggaatcgaaatgga

SEQ ID NO: 2099771 - DNA, 15 bp, Homo sapiens
ggaatcgaaatggac

SEQ ID NO: 2099772 - DNA, 15 bp, Homo sapiens
gaatcgaaatggacg

SEQ ID NO: 2099773 - DNA, 15 bp, Homo sapiens
aatcgaaatggacgt

SEQ ID NO: 2099774 - DNA, 15 bp, Homo sapiens
atcgaaatggacgtg

SEQ ID NO: 2099775 - DNA, 15 bp, Homo sapiens
tcgaaatggacgtgt

SEQ ID NO: 2099776 - DNA, 15 bp, Homo sapiens
cgaaatggacgtgtg

SEQ ID NO: 2099777 - DNA, 15 bp, Homo sapiens
gaaatggacgtgtga

SEQ ID NO: 2099778 - DNA, 15 bp, Homo sapiens
aaatggacgtgtgag

SEQ ID NO: 2099779 - DNA, 15 bp, Homo sapiens
aatggacgtgtgagg

SEQ ID NO: 2099780 - DNA, 15 bp, Homo sapiens
atggacgtgtgaggg

SEQ ID NO: 2099781 - DNA, 15 bp, Homo sapiens
tggacgtgtgagggc

SEQ ID NO: 2099782 - DNA, 15 bp, Homo sapiens
ggacgtgtgagggct

SEQ ID NO: 2099783 - DNA, 15 bp, Homo sapiens
gacgtgtgagggctg

SEQ ID NO: 2099784 - DNA, 15 bp, Homo sapiens
acgtgtgagggctgg

SEQ ID NO: 2099785 - DNA, 15 bp, Homo sapiens
cgtgtgagggctggg

SEQ ID NO: 2099786 - DNA, 15 bp, Homo sapiens
gtgtgagggctgggc

SEQ ID NO: 2099787 - DNA, 15 bp, Homo sapiens
tgtgagggctgggcg

SEQ ID NO: 2099788 - DNA, 15 bp, Homo sapiens
gtgagggctgggcgc

SEQ ID NO: 2099789 - DNA, 15 bp, Homo sapiens
tgagggctgggcgcg

SEQ ID NO: 2099790 - DNA, 15 bp, Homo sapiens
gagggctgggcgcgg

SEQ ID NO: 2099791 - DNA, 15 bp, Homo sapiens
agggctgggcgcggg

SEQ ID NO: 2099792 - DNA, 15 bp, Homo sapiens
gggctgggcgcgggg

SEQ ID NO: 2099793 - DNA, 15 bp, Homo sapiens
ggctgggcgcggggg

SEQ ID NO: 2099794 - DNA, 15 bp, Homo sapiens
gctgggcgcgggggc

SEQ ID NO: 2099795 - DNA, 15 bp, Homo sapiens
ctgggcgcgggggct

SEQ ID NO: 2099796 - DNA, 15 bp, Homo sapiens
tgggcgcgggggctc

SEQ ID NO: 2099797 - DNA, 15 bp, Homo sapiens
gggcgcgggggctca

SEQ ID NO: 2099798 - DNA, 15 bp, Homo sapiens
ggcgcgggggctcac

SEQ ID NO: 2099799 - DNA, 15 bp, Homo sapiens
gcgcgggggctcacg

SEQ ID NO: 2099800 - DNA, 15 bp, Homo sapiens
cgcgggggctcacgc

SEQ ID NO: 2099801 - DNA, 15 bp, Homo sapiens
gcgggggctcacgcc

SEQ ID NO: 2099802 - DNA, 15 bp, Homo sapiens
cgggggctcacgcct

SEQ ID NO: 2099803 - DNA, 15 bp, Homo sapiens
gggggctcacgccta

SEQ ID NO: 2099804 - DNA, 15 bp, Homo sapiens
ggggctcacgcctat

SEQ ID NO: 2099805 - DNA, 15 bp, Homo sapiens
gggctcacgcctata

SEQ ID NO: 2099806 - DNA, 15 bp, Homo sapiens
ataatcccagcactg

SEQ ID NO: 2099807 - DNA, 15 bp, Homo sapiens
cactgtgggaggcca

SEQ ID NO: 2099808 - DNA, 15 bp, Homo sapiens
actgtgggaggccag

SEQ ID NO: 2099809 - DNA, 15 bp, Homo sapiens
ctgtgggaggccagg

SEQ ID NO: 2099810 - DNA, 15 bp, Homo sapiens
tgtgggaggccaggg

SEQ ID NO: 2099811 - DNA, 15 bp, Homo sapiens
gtgggaggccagggg

SEQ ID NO: 2099812 - DNA, 15 bp, Homo sapiens
tgggaggccaggggt

SEQ ID NO: 2099813 - DNA, 15 bp, Homo sapiens
gggaggccaggggtt

SEQ ID NO: 2099814 - DNA, 15 bp, Homo sapiens
gaggccaggggttcg

SEQ ID NO: 2099815 - DNA, 15 bp, Homo sapiens
aggccaggggttcga

SEQ ID NO: 2099816 - DNA, 15 bp, Homo sapiens
ggccaggggttcgag

SEQ ID NO: 2099817 - DNA, 15 bp, Homo sapiens
gccaggggttcgaga

SEQ ID NO: 2099818 - DNA, 15 bp, Homo sapiens
ccaggggttcgagac

SEQ ID NO: 2099819 - DNA, 15 bp, Homo sapiens
gaccagcctgggcag

SEQ ID NO: 2099820 - DNA, 15 bp, Homo sapiens
accagcctgggcagt

SEQ ID NO: 2099821 - DNA, 15 bp, Homo sapiens
ccagcctgggcagta

SEQ ID NO: 2099822 - DNA, 15 bp, Homo sapiens
cagcctgggcagtat

SEQ ID NO: 2099823 - DNA, 15 bp, Homo sapiens
agcctgggcagtatg

SEQ ID NO: 2099824 - DNA, 15 bp, Homo sapiens
gcctgggcagtatgg

SEQ ID NO: 2099825 - DNA, 15 bp, Homo sapiens
cctgggcagtatggt

SEQ ID NO: 2099826 - DNA, 15 bp, Homo sapiens
ctgggcagtatggtg

SEQ ID NO: 2099827 - DNA, 15 bp, Homo sapiens
tgggcagtatggtga

SEQ ID NO: 2099828 - DNA, 15 bp, Homo sapiens
gggcagtatggtgaa

SEQ ID NO: 2099829 - DNA, 15 bp, Homo sapiens
ggcagtatggtgaaa

SEQ ID NO: 2099830 - DNA, 15 bp, Homo sapiens
gcagtatggtgaaac

SEQ ID NO: 2099831 - DNA, 15 bp, Homo sapiens
cagtatggtgaaaca

SEQ ID NO: 2099832 - DNA, 15 bp, Homo sapiens
agtatggtgaaacac

SEQ ID NO: 2099833 - DNA, 15 bp, Homo sapiens
gtatggtgaaacacc

SEQ ID NO: 2099834 - DNA, 15 bp, Homo sapiens
tatggtgaaacaccg

SEQ ID NO: 2099835 - DNA, 15 bp, Homo sapiens
atggtgaaacaccgt

SEQ ID NO: 2099836 - DNA, 15 bp, Homo sapiens
tggtgaaacaccgtc

SEQ ID NO: 2099837 - DNA, 15 bp, Homo sapiens
ggtgaaacaccgtct

SEQ ID NO: 2099838 - DNA, 15 bp, Homo sapiens
gtgaaacaccgtctc

SEQ ID NO: 2099839 - DNA, 15 bp, Homo sapiens
tgaaacaccgtctct

SEQ ID NO: 2099840 - DNA, 15 bp, Homo sapiens
gaaacaccgtctcta

SEQ ID NO: 2099841 - DNA, 15 bp, Homo sapiens
acaccgtctctactg

SEQ ID NO: 2099842 - DNA, 15 bp, Homo sapiens
caccgtctctactga

SEQ ID NO: 2099843 - DNA, 15 bp, Homo sapiens
accgtctctactgaa

SEQ ID NO: 2099844 - DNA, 15 bp, Homo sapiens
aattagctgggtgta

SEQ ID NO: 2099845 - DNA, 15 bp, Homo sapiens
attagctgggtgtag

SEQ ID NO: 2099846 - DNA, 15 bp, Homo sapiens
ttagctgggtgtagt

SEQ ID NO: 2099847 - DNA, 15 bp, Homo sapiens
tagctgggtgtagtg

SEQ ID NO: 2099848 - DNA, 15 bp, Homo sapiens
agctgggtgtagtgg

SEQ ID NO: 2099849 - DNA, 15 bp, Homo sapiens
gctgggtgtagtggc

SEQ ID NO: 2099850 - DNA, 15 bp, Homo sapiens
ctgggtgtagtggcg

SEQ ID NO: 2099851 - DNA, 15 bp, Homo sapiens
tgggtgtagtggcgg

SEQ ID NO: 2099852 - DNA, 15 bp, Homo sapiens
gggtgtagtggcggg

SEQ ID NO: 2099853 - DNA, 15 bp, Homo sapiens
ggtgtagtggcgggc

SEQ ID NO: 2099854 - DNA, 15 bp, Homo sapiens
gtgtagtggcgggca

SEQ ID NO: 2099855 - DNA, 15 bp, Homo sapiens
tgtagtggcgggcac

SEQ ID NO: 2099856 - DNA, 15 bp, Homo sapiens
gtagtggcgggcacc

SEQ ID NO: 2099857 - DNA, 15 bp, Homo sapiens
tagtggcgggcacct

SEQ ID NO: 2099858 - DNA, 15 bp, Homo sapiens
agtggcgggcacctg

SEQ ID NO: 2099859 - DNA, 15 bp, Homo sapiens
gtaatcccagctaga

SEQ ID NO: 2099860 - DNA, 15 bp, Homo sapiens
taatcccagctagac

SEQ ID NO: 2099861 - DNA, 15 bp, Homo sapiens
aatcccagctagacg

SEQ ID NO: 2099862 - DNA, 15 bp, Homo sapiens
atcccagctagacgg

SEQ ID NO: 2099863 - DNA, 15 bp, Homo sapiens
tcccagctagacggg

SEQ ID NO: 2099864 - DNA, 15 bp, Homo sapiens
cccagctagacggga

SEQ ID NO: 2099865 - DNA, 15 bp, Homo sapiens
ccagctagacgggag

SEQ ID NO: 2099866 - DNA, 15 bp, Homo sapiens
cagctagacgggagg

SEQ ID NO: 2099867 - DNA, 15 bp, Homo sapiens
agctagacgggagga

SEQ ID NO: 2099868 - DNA, 15 bp, Homo sapiens
gctagacgggaggat

SEQ ID NO: 2099869 - DNA, 15 bp, Homo sapiens
ctagacgggaggatg

SEQ ID NO: 2099870 - DNA, 15 bp, Homo sapiens
tagacgggaggatga

SEQ ID NO: 2099871 - DNA, 15 bp, Homo sapiens
agacgggaggatgag

SEQ ID NO: 2099872 - DNA, 15 bp, Homo sapiens
gacgggaggatgagg

SEQ ID NO: 2099873 - DNA, 15 bp, Homo sapiens
acgggaggatgaggc

SEQ ID NO: 2099874 - DNA, 15 bp, Homo sapiens
cgggaggatgaggca

SEQ ID NO: 2099875 - DNA, 15 bp, Homo sapiens
gggaggatgaggcac

SEQ ID NO: 2099876 - DNA, 15 bp, Homo sapiens
ggaggatgaggcacg

SEQ ID NO: 2099877 - DNA, 15 bp, Homo sapiens
gaggatgaggcacga

SEQ ID NO: 2099878 - DNA, 15 bp, Homo sapiens
aggatgaggcacgag

SEQ ID NO: 2099879 - DNA, 15 bp, Homo sapiens
ggatgaggcacgaga

SEQ ID NO: 2099880 - DNA, 15 bp, Homo sapiens
gatgaggcacgagaa

SEQ ID NO: 2099881 - DNA, 15 bp, Homo sapiens
atgaggcacgagaat

SEQ ID NO: 2099882 - DNA, 15 bp, Homo sapiens
tgaggcacgagaatc

SEQ ID NO: 2099883 - DNA, 15 bp, Homo sapiens
gaggcacgagaatcg

SEQ ID NO: 2099884 - DNA, 15 bp, Homo sapiens
aggcacgagaatcgt

SEQ ID NO: 2099885 - DNA, 15 bp, Homo sapiens
ggcacgagaatcgtt

SEQ ID NO: 2099886 - DNA, 15 bp, Homo sapiens
gcacgagaatcgttt

SEQ ID NO: 2099887 - DNA, 15 bp, Homo sapiens
cacgagaatcgtttg

SEQ ID NO: 2099888 - DNA, 15 bp, Homo sapiens
acgagaatcgtttga

SEQ ID NO: 2099889 - DNA, 15 bp, Homo sapiens
cgagaatcgtttgaa

SEQ ID NO: 2099890 - DNA, 15 bp, Homo sapiens
aatcgtttgaaccca

SEQ ID NO: 2099891 - DNA, 15 bp, Homo sapiens
atcgtttgaacccag

SEQ ID NO: 2099892 - DNA, 15 bp, Homo sapiens
tcgtttgaacccagg

SEQ ID NO: 2099893 - DNA, 15 bp, Homo sapiens
cgtttgaacccagga

SEQ ID NO: 2099894 - DNA, 15 bp, Homo sapiens
gtttgaacccaggag

SEQ ID NO: 2099895 - DNA, 15 bp, Homo sapiens
ggaggtggaggttgt

SEQ ID NO: 2099896 - DNA, 15 bp, Homo sapiens
gaggtggaggttgta

SEQ ID NO: 2099897 - DNA, 15 bp, Homo sapiens
aggtggaggttgtag

SEQ ID NO: 2099898 - DNA, 15 bp, Homo sapiens
ggtggaggttgtagt

SEQ ID NO: 2099899 - DNA, 15 bp, Homo sapiens
gtggaggttgtagtg

SEQ ID NO: 2099900 - DNA, 15 bp, Homo sapiens
tggaggttgtagtga

SEQ ID NO: 2099901 - DNA, 15 bp, Homo sapiens
gaggttgtagtgagc

SEQ ID NO: 2099902 - DNA, 15 bp, Homo sapiens
aggttgtagtgagcc

SEQ ID NO: 2099903 - DNA, 15 bp, Homo sapiens
tgtagtgagccgaga

SEQ ID NO: 2099904 - DNA, 15 bp, Homo sapiens
gtagtgagccgagat

SEQ ID NO: 2099905 - DNA, 15 bp, Homo sapiens
tagtgagccgagatc

SEQ ID NO: 2099906 - DNA, 15 bp, Homo sapiens
tgagccgagatcatc

SEQ ID NO: 2099907 - DNA, 15 bp, Homo sapiens
gagccgagatcatcc

SEQ ID NO: 2099908 - DNA, 15 bp, Homo sapiens
agccgagatcatccc

SEQ ID NO: 2099909 - DNA, 15 bp, Homo sapiens
gccgagatcatccca

SEQ ID NO: 2099910 - DNA, 15 bp, Homo sapiens
ccgagatcatcccac

SEQ ID NO: 2099911 - DNA, 15 bp, Homo sapiens
cgagatcatcccact

SEQ ID NO: 2099912 - DNA, 15 bp, Homo sapiens
gagatcatcccactg

SEQ ID NO: 2099913 - DNA, 15 bp, Homo sapiens
agatcatcccactgc

SEQ ID NO: 2099914 - DNA, 15 bp, Homo sapiens
gatcatcccactgca

SEQ ID NO: 2099915 - DNA, 15 bp, Homo sapiens
atcatcccactgcac

SEQ ID NO: 2099916 - DNA, 15 bp, Homo sapiens
tcatcccactgcact

SEQ ID NO: 2099917 - DNA, 15 bp, Homo sapiens
catcccactgcactc

SEQ ID NO: 2099918 - DNA, 15 bp, Homo sapiens
atcccactgcactcc

SEQ ID NO: 2099919 - DNA, 15 bp, Homo sapiens
tcccactgcactcca

SEQ ID NO: 2099920 - DNA, 15 bp, Homo sapiens
gactccatctcaaag

SEQ ID NO: 2099921 - DNA, 15 bp, Homo sapiens
actccatctcaaaga

SEQ ID NO: 2099922 - DNA, 15 bp, Homo sapiens
ctccatctcaaagaa

SEQ ID NO: 2099923 - DNA, 15 bp, Homo sapiens
tccatctcaaagaaa

SEQ ID NO: 2099924 - DNA, 15 bp, Homo sapiens
ccatctcaaagaaaa

SEQ ID NO: 2099925 - DNA, 15 bp, Homo sapiens
catctcaaagaaaag

SEQ ID NO: 2099926 - DNA, 15 bp, Homo sapiens
atctcaaagaaaaga

SEQ ID NO: 2099927 - DNA, 15 bp, Homo sapiens
tctcaaagaaaagaa

SEQ ID NO: 2099928 - DNA, 15 bp, Homo sapiens
ctcaaagaaaagaaa

SEQ ID NO: 2099929 - DNA, 15 bp, Homo sapiens
tcaaagaaaagaaaa

SEQ ID NO: 2099930 - DNA, 15 bp, Homo sapiens
caaagaaaagaaaag

SEQ ID NO: 2099931 - DNA, 15 bp, Homo sapiens
gaaaagaaaagaaat

SEQ ID NO: 2099932 - DNA, 15 bp, Homo sapiens
aaaagaaaagaaatg

SEQ ID NO: 2099933 - DNA, 15 bp, Homo sapiens
aaagaaaagaaatgg

SEQ ID NO: 2099934 - DNA, 15 bp, Homo sapiens
aagaaaagaaatgga

SEQ ID NO: 2099935 - DNA, 15 bp, Homo sapiens
agaaaagaaatggat

SEQ ID NO: 2099936 - DNA, 15 bp, Homo sapiens
gaaaagaaatggatg

SEQ ID NO: 2099937 - DNA, 15 bp, Homo sapiens
aaaagaaatggatgt

SEQ ID NO: 2099938 - DNA, 15 bp, Homo sapiens
aaagaaatggatgtg

SEQ ID NO: 2099939 - DNA, 15 bp, Homo sapiens
aagaaatggatgtgt

SEQ ID NO: 2099940 - DNA, 15 bp, Homo sapiens
agaaatggatgtgtg

SEQ ID NO: 2099941 - DNA, 15 bp, Homo sapiens
gaaatggatgtgtga

SEQ ID NO: 2099942 - DNA, 15 bp, Homo sapiens
aaatggatgtgtgag

SEQ ID NO: 2099943 - DNA, 15 bp, Homo sapiens
aatggatgtgtgagc

SEQ ID NO: 2099944 - DNA, 15 bp, Homo sapiens
atggatgtgtgagca

SEQ ID NO: 2099945 - DNA, 15 bp, Homo sapiens
tggatgtgtgagcat

SEQ ID NO: 2099946 - DNA, 15 bp, Homo sapiens
ggatgtgtgagcatt

SEQ ID NO: 2099947 - DNA, 15 bp, Homo sapiens
gatgtgtgagcattc

SEQ ID NO: 2099948 - DNA, 15 bp, Homo sapiens
atgtgtgagcattct

SEQ ID NO: 2099949 - DNA, 15 bp, Homo sapiens
tgtgtgagcattctg

SEQ ID NO: 2099950 - DNA, 15 bp, Homo sapiens
gtgtgagcattctgt

SEQ ID NO: 2099951 - DNA, 15 bp, Homo sapiens
tgtgagcattctgta

SEQ ID NO: 2099952 - DNA, 15 bp, Homo sapiens
gtgagcattctgtac

SEQ ID NO: 2099953 - DNA, 15 bp, Homo sapiens
tgagcattctgtaca

SEQ ID NO: 2099954 - DNA, 15 bp, Homo sapiens
gagcattctgtacac

SEQ ID NO: 2099955 - DNA, 15 bp, Homo sapiens
agcattctgtacaca

SEQ ID NO: 2099956 - DNA, 15 bp, Homo sapiens
gcattctgtacacag

SEQ ID NO: 2099957 - DNA, 15 bp, Homo sapiens
cattctgtacacagc

SEQ ID NO: 2099958 - DNA, 15 bp, Homo sapiens
attctgtacacagcc

SEQ ID NO: 2099959 - DNA, 15 bp, Homo sapiens
ttctgtacacagcct

SEQ ID NO: 2099960 - DNA, 15 bp, Homo sapiens
tctgtacacagcctg

SEQ ID NO: 2099961 - DNA, 15 bp, Homo sapiens
ctgtacacagcctgg

SEQ ID NO: 2099962 - DNA, 15 bp, Homo sapiens
tgtacacagcctggg

SEQ ID NO: 2099963 - DNA, 15 bp, Homo sapiens
gtacacagcctggga

SEQ ID NO: 2099964 - DNA, 15 bp, Homo sapiens
tacacagcctgggac

SEQ ID NO: 2099965 - DNA, 15 bp, Homo sapiens
acacagcctgggacg

SEQ ID NO: 2099966 - DNA, 15 bp, Homo sapiens
cacagcctgggacga

SEQ ID NO: 2099967 - DNA, 15 bp, Homo sapiens
acagcctgggacgat

SEQ ID NO: 2099968 - DNA, 15 bp, Homo sapiens
cagcctgggacgatt

SEQ ID NO: 2099969 - DNA, 15 bp, Homo sapiens
agcctgggacgatta

SEQ ID NO: 2099970 - DNA, 15 bp, Homo sapiens
gcctgggacgattat

SEQ ID NO: 2099971 - DNA, 15 bp, Homo sapiens
cctgggacgattatg

SEQ ID NO: 2099972 - DNA, 15 bp, Homo sapiens
ctgggacgattatga

SEQ ID NO: 2099973 - DNA, 15 bp, Homo sapiens
tgggacgattatgaa

SEQ ID NO: 2099974 - DNA, 15 bp, Homo sapiens
gggacgattatgaaa

SEQ ID NO: 2099975 - DNA, 15 bp, Homo sapiens
ggacgattatgaaag

SEQ ID NO: 2099976 - DNA, 15 bp, Homo sapiens
gacgattatgaaagc

SEQ ID NO: 2099977 - DNA, 15 bp, Homo sapiens
acgattatgaaagct

SEQ ID NO: 2099978 - DNA, 15 bp, Homo sapiens
cgattatgaaagctc

SEQ ID NO: 2099979 - DNA, 15 bp, Homo sapiens
gattatgaaagctct

SEQ ID NO: 2099980 - DNA, 15 bp, Homo sapiens
attatgaaagctctc

SEQ ID NO: 2099981 - DNA, 15 bp, Homo sapiens
ttatgaaagctctca

SEQ ID NO: 2099982 - DNA, 15 bp, Homo sapiens
tatgaaagctctcaa

SEQ ID NO: 2099983 - DNA, 15 bp, Homo sapiens
atgaaagctctcaaa

SEQ ID NO: 2099984 - DNA, 15 bp, Homo sapiens
tgaaagctctcaaat

SEQ ID NO: 2099985 - DNA, 15 bp, Homo sapiens
gaaagctctcaaatg

SEQ ID NO: 2099986 - DNA, 15 bp, Homo sapiens
aaagctctcaaatgc

SEQ ID NO: 2099987 - DNA, 15 bp, Homo sapiens
aagctctcaaatgct

SEQ ID NO: 2099988 - DNA, 15 bp, Homo sapiens
agctctcaaatgctg

SEQ ID NO: 2099989 - DNA, 15 bp, Homo sapiens
gctctcaaatgctga

SEQ ID NO: 2099990 - DNA, 15 bp, Homo sapiens
ctctcaaatgctgag

SEQ ID NO: 2099991 - DNA, 15 bp, Homo sapiens
tctcaaatgctgagc

SEQ ID NO: 2099992 - DNA, 15 bp, Homo sapiens
ctcaaatgctgagcc

SEQ ID NO: 2099993 - DNA, 15 bp, Homo sapiens
tcaaatgctgagcct

SEQ ID NO: 2099994 - DNA, 15 bp, Homo sapiens
caaatgctgagcctc

SEQ ID NO: 2099995 - DNA, 15 bp, Homo sapiens
aaatgctgagcctcc

SEQ ID NO: 2099996 - DNA, 15 bp, Homo sapiens
aatgctgagcctcca

SEQ ID NO: 2099997 - DNA, 15 bp, Homo sapiens
atgctgagcctccag

SEQ ID NO: 2099998 - DNA, 15 bp, Homo sapiens
tgctgagcctccagc

SEQ ID NO: 2099999 - DNA, 15 bp, Homo sapiens
gctgagcctccagca

SEQ ID NO: 2100000 - DNA, 15 bp, Homo sapiens
ctgagcctccagcaa

SEQ ID NO: 2100001 - DNA, 15 bp, Homo sapiens
tgagcctccagcaaa

SEQ ID NO: 2100002 - DNA, 15 bp, Homo sapiens
gagcctccagcaaac

SEQ ID NO: 2100003 - DNA, 15 bp, Homo sapiens
agcctccagcaaaca

SEQ ID NO: 2100004 - DNA, 15 bp, Homo sapiens
gcctccagcaaacat

SEQ ID NO: 2100005 - DNA, 15 bp, Homo sapiens
cctccagcaaacatt

SEQ ID NO: 2100006 - DNA, 15 bp, Homo sapiens
ctccagcaaacattt

SEQ ID NO: 2100007 - DNA, 15 bp, Homo sapiens
tccagcaaacattta

SEQ ID NO: 2100008 - DNA, 15 bp, Homo sapiens
ccagcaaacatttat

SEQ ID NO: 2100009 - DNA, 15 bp, Homo sapiens
cagcaaacatttatc

SEQ ID NO: 2100010 - DNA, 15 bp, Homo sapiens
agcaaacatttatca

SEQ ID NO: 2100011 - DNA, 15 bp, Homo sapiens
gcaaacatttatcac

SEQ ID NO: 2100012 - DNA, 15 bp, Homo sapiens
caaacatttatcaca

SEQ ID NO: 2100013 - DNA, 15 bp, Homo sapiens
aaacatttatcacac

SEQ ID NO: 2100014 - DNA, 15 bp, Homo sapiens
aacatttatcacaca

SEQ ID NO: 2100015 - DNA, 15 bp, Homo sapiens
acatttatcacacac

SEQ ID NO: 2100016 - DNA, 15 bp, Homo sapiens
catttatcacacacc

SEQ ID NO: 2100017 - DNA, 15 bp, Homo sapiens
atttatcacacacct

SEQ ID NO: 2100018 - DNA, 15 bp, Homo sapiens
tttatcacacaccta

SEQ ID NO: 2100019 - DNA, 15 bp, Homo sapiens
ttatcacacacctac

SEQ ID NO: 2100020 - DNA, 15 bp, Homo sapiens
tatcacacacctact

SEQ ID NO: 2100021 - DNA, 15 bp, Homo sapiens
atcacacacctactg

SEQ ID NO: 2100022 - DNA, 15 bp, Homo sapiens
tcacacacctactgt

SEQ ID NO: 2100023 - DNA, 15 bp, Homo sapiens
cacacacctactgtg

SEQ ID NO: 2100024 - DNA, 15 bp, Homo sapiens
acacacctactgtgt

SEQ ID NO: 2100025 - DNA, 15 bp, Homo sapiens
cacacctactgtgtg

SEQ ID NO: 2100026 - DNA, 15 bp, Homo sapiens
acacctactgtgtgc

SEQ ID NO: 2100027 - DNA, 15 bp, Homo sapiens
cacctactgtgtgca

SEQ ID NO: 2100028 - DNA, 15 bp, Homo sapiens
acctactgtgtgcag

SEQ ID NO: 2100029 - DNA, 15 bp, Homo sapiens
cctactgtgtgcaga

SEQ ID NO: 2100030 - DNA, 15 bp, Homo sapiens
ctactgtgtgcagag

SEQ ID NO: 2100031 - DNA, 15 bp, Homo sapiens
tactgtgtgcagagc

SEQ ID NO: 2100032 - DNA, 15 bp, Homo sapiens
actgtgtgcagagca

SEQ ID NO: 2100033 - DNA, 15 bp, Homo sapiens
ctgtgtgcagagcac

SEQ ID NO: 2100034 - DNA, 15 bp, Homo sapiens
tgtgtgcagagcact

SEQ ID NO: 2100035 - DNA, 15 bp, Homo sapiens
gtgtgcagagcactt

SEQ ID NO: 2100036 - DNA, 15 bp, Homo sapiens
tgtgcagagcacttg

SEQ ID NO: 2100037 - DNA, 15 bp, Homo sapiens
gtgcagagcacttgc

SEQ ID NO: 2100038 - DNA, 15 bp, Homo sapiens
tgcagagcacttgct

SEQ ID NO: 2100039 - DNA, 15 bp, Homo sapiens
gcagagcacttgctg

SEQ ID NO: 2100040 - DNA, 15 bp, Homo sapiens
cagagcacttgctgg

SEQ ID NO: 2100041 - DNA, 15 bp, Homo sapiens
agagcacttgctggg

SEQ ID NO: 2100042 - DNA, 15 bp, Homo sapiens
gagcacttgctgggc

SEQ ID NO: 2100043 - DNA, 15 bp, Homo sapiens
agcacttgctgggct

SEQ ID NO: 2100044 - DNA, 15 bp, Homo sapiens
gcacttgctgggctc

SEQ ID NO: 2100045 - DNA, 15 bp, Homo sapiens
cacttgctgggctct

SEQ ID NO: 2100046 - DNA, 15 bp, Homo sapiens
acttgctgggctctg

SEQ ID NO: 2100047 - DNA, 15 bp, Homo sapiens
cttgctgggctctga

SEQ ID NO: 2100048 - DNA, 15 bp, Homo sapiens
ttgctgggctctgag

SEQ ID NO: 2100049 - DNA, 15 bp, Homo sapiens
tgctgggctctgaga

SEQ ID NO: 2100050 - DNA, 15 bp, Homo sapiens
gctgggctctgagag

SEQ ID NO: 2100051 - DNA, 15 bp, Homo sapiens
ctgggctctgagagg

SEQ ID NO: 2100052 - DNA, 15 bp, Homo sapiens
tgggctctgagaggg

SEQ ID NO: 2100053 - DNA, 15 bp, Homo sapiens
gggctctgagaggga

SEQ ID NO: 2100054 - DNA, 15 bp, Homo sapiens
ggctctgagagggag

SEQ ID NO: 2100055 - DNA, 15 bp, Homo sapiens
gctctgagagggagt

SEQ ID NO: 2100056 - DNA, 15 bp, Homo sapiens
ctctgagagggagtc

SEQ ID NO: 2100057 - DNA, 15 bp, Homo sapiens
tctgagagggagtca

SEQ ID NO: 2100058 - DNA, 15 bp, Homo sapiens
ctgagagggagtcaa

SEQ ID NO: 2100059 - DNA, 15 bp, Homo sapiens
tgagagggagtcaag

SEQ ID NO: 2100060 - DNA, 15 bp, Homo sapiens
gagagggagtcaagc

SEQ ID NO: 2100061 - DNA, 15 bp, Homo sapiens
agagggagtcaagct

SEQ ID NO: 2100062 - DNA, 15 bp, Homo sapiens
gagggagtcaagctc

SEQ ID NO: 2100063 - DNA, 15 bp, Homo sapiens
agggagtcaagctct

SEQ ID NO: 2100064 - DNA, 15 bp, Homo sapiens
gggagtcaagctctg

SEQ ID NO: 2100065 - DNA, 15 bp, Homo sapiens
ggagtcaagctctga

SEQ ID NO: 2100066 - DNA, 15 bp, Homo sapiens
gagtcaagctctgag

SEQ ID NO: 2100067 - DNA, 15 bp, Homo sapiens
agtcaagctctgaga

SEQ ID NO: 2100068 - DNA, 15 bp, Homo sapiens
gtcaagctctgagaa

SEQ ID NO: 2100069 - DNA, 15 bp, Homo sapiens
tcaagctctgagaag

SEQ ID NO: 2100070 - DNA, 15 bp, Homo sapiens
caagctctgagaagt

SEQ ID NO: 2100071 - DNA, 15 bp, Homo sapiens
aagctctgagaagtc

SEQ ID NO: 2100072 - DNA, 15 bp, Homo sapiens
agctctgagaagtct

SEQ ID NO: 2100073 - DNA, 15 bp, Homo sapiens
gctctgagaagtctg

SEQ ID NO: 2100074 - DNA, 15 bp, Homo sapiens
ctctgagaagtctgt

SEQ ID NO: 2100075 - DNA, 15 bp, Homo sapiens
tctgagaagtctgtg

SEQ ID NO: 2100076 - DNA, 15 bp, Homo sapiens
ctgagaagtctgtgt

SEQ ID NO: 2100077 - DNA, 15 bp, Homo sapiens
tgagaagtctgtgtc

SEQ ID NO: 2100078 - DNA, 15 bp, Homo sapiens
gagaagtctgtgtcg

SEQ ID NO: 2100079 - DNA, 15 bp, Homo sapiens
agaagtctgtgtcga

SEQ ID NO: 2100080 - DNA, 15 bp, Homo sapiens
gaagtctgtgtcgat

SEQ ID NO: 2100081 - DNA, 15 bp, Homo sapiens
aagtctgtgtcgatt

SEQ ID NO: 2100082 - DNA, 15 bp, Homo sapiens
agtctgtgtcgattt

SEQ ID NO: 2100083 - DNA, 15 bp, Homo sapiens
gtctgtgtcgatttg

SEQ ID NO: 2100084 - DNA, 15 bp, Homo sapiens
tctgtgtcgatttgt

SEQ ID NO: 2100085 - DNA, 15 bp, Homo sapiens
ctgtgtcgatttgtt

SEQ ID NO: 2100086 - DNA, 15 bp, Homo sapiens
tgtgtcgatttgttc

SEQ ID NO: 2100087 - DNA, 15 bp, Homo sapiens
gtgtcgatttgttca

SEQ ID NO: 2100088 - DNA, 15 bp, Homo sapiens
tgtcgatttgttcat

SEQ ID NO: 2100089 - DNA, 15 bp, Homo sapiens
gtcgatttgttcatt

SEQ ID NO: 2100090 - DNA, 15 bp, Homo sapiens
tcgatttgttcattc

SEQ ID NO: 2100091 - DNA, 15 bp, Homo sapiens
cgatttgttcattcc

SEQ ID NO: 2100092 - DNA, 15 bp, Homo sapiens
gatttgttcattcct

SEQ ID NO: 2100093 - DNA, 15 bp, Homo sapiens
atttgttcattcctt

SEQ ID NO: 2100094 - DNA, 15 bp, Homo sapiens
tttgttcattccttc

SEQ ID NO: 2100095 - DNA, 15 bp, Homo sapiens
ttgttcattccttca

SEQ ID NO: 2100096 - DNA, 15 bp, Homo sapiens
tgttcattccttcat

SEQ ID NO: 2100097 - DNA, 15 bp, Homo sapiens
gttcattccttcatt

SEQ ID NO: 2100098 - DNA, 15 bp, Homo sapiens
ttcattccttcattc

SEQ ID NO: 2100099 - DNA, 15 bp, Homo sapiens
tcattccttcattca

SEQ ID NO: 2100100 - DNA, 15 bp, Homo sapiens
cattccttcattcag

SEQ ID NO: 2100101 - DNA, 15 bp, Homo sapiens
attccttcattcagc

SEQ ID NO: 2100102 - DNA, 15 bp, Homo sapiens
ttccttcattcagca

SEQ ID NO: 2100103 - DNA, 15 bp, Homo sapiens
tccttcattcagcaa

SEQ ID NO: 2100104 - DNA, 15 bp, Homo sapiens
ccttcattcagcaaa

SEQ ID NO: 2100105 - DNA, 15 bp, Homo sapiens
cttcattcagcaaat

SEQ ID NO: 2100106 - DNA, 15 bp, Homo sapiens
ttcattcagcaaatg

SEQ ID NO: 2100107 - DNA, 15 bp, Homo sapiens
tcattcagcaaatgc

SEQ ID NO: 2100108 - DNA, 15 bp, Homo sapiens
cattcagcaaatgct

SEQ ID NO: 2100109 - DNA, 15 bp, Homo sapiens
attcagcaaatgctg

SEQ ID NO: 2100110 - DNA, 15 bp, Homo sapiens
ttcagcaaatgctgt

SEQ ID NO: 2100111 - DNA, 15 bp, Homo sapiens
tcagcaaatgctgtt

SEQ ID NO: 2100112 - DNA, 15 bp, Homo sapiens
cagcaaatgctgttt

SEQ ID NO: 2100113 - DNA, 15 bp, Homo sapiens
agcaaatgctgtttg

SEQ ID NO: 2100114 - DNA, 15 bp, Homo sapiens
gcaaatgctgtttgg

SEQ ID NO: 2100115 - DNA, 15 bp, Homo sapiens
caaatgctgtttggg

SEQ ID NO: 2100116 - DNA, 15 bp, Homo sapiens
aaatgctgtttgggt

SEQ ID NO: 2100117 - DNA, 15 bp, Homo sapiens
aatgctgtttgggtg

SEQ ID NO: 2100118 - DNA, 15 bp, Homo sapiens
atgctgtttgggtgc

SEQ ID NO: 2100119 - DNA, 15 bp, Homo sapiens
tgctgtttgggtgct

SEQ ID NO: 2100120 - DNA, 15 bp, Homo sapiens
gctgtttgggtgctc

SEQ ID NO: 2100121 - DNA, 15 bp, Homo sapiens
ctgtttgggtgctca

SEQ ID NO: 2100122 - DNA, 15 bp, Homo sapiens
tgtttgggtgctcac

SEQ ID NO: 2100123 - DNA, 15 bp, Homo sapiens
gtttgggtgctcact

SEQ ID NO: 2100124 - DNA, 15 bp, Homo sapiens
tttgggtgctcactg

SEQ ID NO: 2100125 - DNA, 15 bp, Homo sapiens
ttgggtgctcactgt

SEQ ID NO: 2100126 - DNA, 15 bp, Homo sapiens
tgggtgctcactgtg

SEQ ID NO: 2100127 - DNA, 15 bp, Homo sapiens
gggtgctcactgtgt

SEQ ID NO: 2100128 - DNA, 15 bp, Homo sapiens
ggtgctcactgtgtg

SEQ ID NO: 2100129 - DNA, 15 bp, Homo sapiens
gtgctcactgtgtgt

SEQ ID NO: 2100130 - DNA, 15 bp, Homo sapiens
tgctcactgtgtgtc

SEQ ID NO: 2100131 - DNA, 15 bp, Homo sapiens
gctcactgtgtgtca

SEQ ID NO: 2100132 - DNA, 15 bp, Homo sapiens
ctcactgtgtgtcac

SEQ ID NO: 2100133 - DNA, 15 bp, Homo sapiens
tcactgtgtgtcaca

SEQ ID NO: 2100134 - DNA, 15 bp, Homo sapiens
cactgtgtgtcacac

SEQ ID NO: 2100135 - DNA, 15 bp, Homo sapiens
actgtgtgtcacaca

SEQ ID NO: 2100136 - DNA, 15 bp, Homo sapiens
ctgtgtgtcacacac

SEQ ID NO: 2100137 - DNA, 15 bp, Homo sapiens
tgtgtgtcacacacc

SEQ ID NO: 2100138 - DNA, 15 bp, Homo sapiens
gtgtgtcacacaccc

SEQ ID NO: 2100139 - DNA, 15 bp, Homo sapiens
tgtgtcacacaccct

SEQ ID NO: 2100140 - DNA, 15 bp, Homo sapiens
gtgtcacacaccctc

SEQ ID NO: 2100141 - DNA, 15 bp, Homo sapiens
tgtcacacaccctca

SEQ ID NO: 2100142 - DNA, 15 bp, Homo sapiens
gtcacacaccctcat

SEQ ID NO: 2100143 - DNA, 15 bp, Homo sapiens
tcacacaccctcata

SEQ ID NO: 2100144 - DNA, 15 bp, Homo sapiens
cacacaccctcatat

SEQ ID NO: 2100145 - DNA, 15 bp, Homo sapiens
acacaccctcatatt

SEQ ID NO: 2100146 - DNA, 15 bp, Homo sapiens
cacaccctcatattt

SEQ ID NO: 2100147 - DNA, 15 bp, Homo sapiens
acaccctcatattta

SEQ ID NO: 2100148 - DNA, 15 bp, Homo sapiens
caccctcatatttat

SEQ ID NO: 2100149 - DNA, 15 bp, Homo sapiens
accctcatatttatt

SEQ ID NO: 2100150 - DNA, 15 bp, Homo sapiens
ccctcatatttattg

SEQ ID NO: 2100151 - DNA, 15 bp, Homo sapiens
cctcatatttattgc

SEQ ID NO: 2100152 - DNA, 15 bp, Homo sapiens
ctcatatttattgcg

SEQ ID NO: 2100153 - DNA, 15 bp, Homo sapiens
tcatatttattgcga

SEQ ID NO: 2100154 - DNA, 15 bp, Homo sapiens
catatttattgcgaa

SEQ ID NO: 2100155 - DNA, 15 bp, Homo sapiens
atatttattgcgaat

SEQ ID NO: 2100156 - DNA, 15 bp, Homo sapiens
tatttattgcgaatc

SEQ ID NO: 2100157 - DNA, 15 bp, Homo sapiens
atttattgcgaatcg

SEQ ID NO: 2100158 - DNA, 15 bp, Homo sapiens
tttattgcgaatcgg

SEQ ID NO: 2100159 - DNA, 15 bp, Homo sapiens
ttattgcgaatcggc

SEQ ID NO: 2100160 - DNA, 15 bp, Homo sapiens
tattgcgaatcggct

SEQ ID NO: 2100161 - DNA, 15 bp, Homo sapiens
attgcgaatcggctt

SEQ ID NO: 2100162 - DNA, 15 bp, Homo sapiens
ttgcgaatcggcttg

SEQ ID NO: 2100163 - DNA, 15 bp, Homo sapiens
tgcgaatcggcttgg

SEQ ID NO: 2100164 - DNA, 15 bp, Homo sapiens
gcgaatcggcttggg

SEQ ID NO: 2100165 - DNA, 15 bp, Homo sapiens
cgaatcggcttgggt

SEQ ID NO: 2100166 - DNA, 15 bp, Homo sapiens
gaatcggcttgggtt

SEQ ID NO: 2100167 - DNA, 15 bp, Homo sapiens
aatcggcttgggtta

SEQ ID NO: 2100168 - DNA, 15 bp, Homo sapiens
atcggcttgggttag

SEQ ID NO: 2100169 - DNA, 15 bp, Homo sapiens
tcggcttgggttagg

SEQ ID NO: 2100170 - DNA, 15 bp, Homo sapiens
cggcttgggttaggt

SEQ ID NO: 2100171 - DNA, 15 bp, Homo sapiens
ggcttgggttaggtt

SEQ ID NO: 2100172 - DNA, 15 bp, Homo sapiens
gcttgggttaggttc

SEQ ID NO: 2100173 - DNA, 15 bp, Homo sapiens
cttgggttaggttcc

SEQ ID NO: 2100174 - DNA, 15 bp, Homo sapiens
ttgggttaggttccc

SEQ ID NO: 2100175 - DNA, 15 bp, Homo sapiens
tgggttaggttcccc

SEQ ID NO: 2100176 - DNA, 15 bp, Homo sapiens
gggttaggttcccca

SEQ ID NO: 2100177 - DNA, 15 bp, Homo sapiens
ggttaggttccccag

SEQ ID NO: 2100178 - DNA, 15 bp, Homo sapiens
gttaggttccccaga

SEQ ID NO: 2100179 - DNA, 15 bp, Homo sapiens
ttaggttccccagaa

SEQ ID NO: 2100180 - DNA, 15 bp, Homo sapiens
taggttccccagaag

SEQ ID NO: 2100181 - DNA, 15 bp, Homo sapiens
aggttccccagaagc

SEQ ID NO: 2100182 - DNA, 15 bp, Homo sapiens
ggttccccagaagca

SEQ ID NO: 2100183 - DNA, 15 bp, Homo sapiens
gttccccagaagcag

SEQ ID NO: 2100184 - DNA, 15 bp, Homo sapiens
ttccccagaagcaga

SEQ ID NO: 2100185 - DNA, 15 bp, Homo sapiens
tccccagaagcagac

SEQ ID NO: 2100186 - DNA, 15 bp, Homo sapiens
ccccagaagcagaca

SEQ ID NO: 2100187 - DNA, 15 bp, Homo sapiens
cccagaagcagacac

SEQ ID NO: 2100188 - DNA, 15 bp, Homo sapiens
ccagaagcagacact

SEQ ID NO: 2100189 - DNA, 15 bp, Homo sapiens
cagaagcagacactg

SEQ ID NO: 2100190 - DNA, 15 bp, Homo sapiens
agaagcagacactga

SEQ ID NO: 2100191 - DNA, 15 bp, Homo sapiens
aagcagacactgaga

SEQ ID NO: 2100192 - DNA, 15 bp, Homo sapiens
agcagacactgagac

SEQ ID NO: 2100193 - DNA, 15 bp, Homo sapiens
gcagacactgagacc

SEQ ID NO: 2100194 - DNA, 15 bp, Homo sapiens
cagacactgagacca

SEQ ID NO: 2100195 - DNA, 15 bp, Homo sapiens
agacactgagaccaa

SEQ ID NO: 2100196 - DNA, 15 bp, Homo sapiens
gacactgagaccaag

SEQ ID NO: 2100197 - DNA, 15 bp, Homo sapiens
acactgagaccaaga

SEQ ID NO: 2100198 - DNA, 15 bp, Homo sapiens
cactgagaccaagat

SEQ ID NO: 2100199 - DNA, 15 bp, Homo sapiens
actgagaccaagatt

SEQ ID NO: 2100200 - DNA, 15 bp, Homo sapiens
ctgagaccaagattc

SEQ ID NO: 2100201 - DNA, 15 bp, Homo sapiens
tgagaccaagattcc

SEQ ID NO: 2100202 - DNA, 15 bp, Homo sapiens
gagaccaagattcct

SEQ ID NO: 2100203 - DNA, 15 bp, Homo sapiens
agaccaagattcctg

SEQ ID NO: 2100204 - DNA, 15 bp, Homo sapiens
gaccaagattcctgg

SEQ ID NO: 2100205 - DNA, 15 bp, Homo sapiens
accaagattcctggc

SEQ ID NO: 2100206 - DNA, 15 bp, Homo sapiens
ccaagattcctggcc

SEQ ID NO: 2100207 - DNA, 15 bp, Homo sapiens
caagattcctggcca

SEQ ID NO: 2100208 - DNA, 15 bp, Homo sapiens
aagattcctggccag

SEQ ID NO: 2100209 - DNA, 15 bp, Homo sapiens
agattcctggccagg

SEQ ID NO: 2100210 - DNA, 15 bp, Homo sapiens
gattcctggccaggg

SEQ ID NO: 2100211 - DNA, 15 bp, Homo sapiens
attcctggccaggga

SEQ ID NO: 2100212 - DNA, 15 bp, Homo sapiens
ttcctggccagggag

SEQ ID NO: 2100213 - DNA, 15 bp, Homo sapiens
tcctggccagggagt

SEQ ID NO: 2100214 - DNA, 15 bp, Homo sapiens
cctggccagggagtg

SEQ ID NO: 2100215 - DNA, 15 bp, Homo sapiens
ctggccagggagtgt

SEQ ID NO: 2100216 - DNA, 15 bp, Homo sapiens
tggccagggagtgtc

SEQ ID NO: 2100217 - DNA, 15 bp, Homo sapiens
ggccagggagtgtcc

SEQ ID NO: 2100218 - DNA, 15 bp, Homo sapiens
gccagggagtgtccc

SEQ ID NO: 2100219 - DNA, 15 bp, Homo sapiens
ccagggagtgtccca

SEQ ID NO: 2100220 - DNA, 15 bp, Homo sapiens
cagggagtgtcccag

SEQ ID NO: 2100221 - DNA, 15 bp, Homo sapiens
agggagtgtcccagg

SEQ ID NO: 2100222 - DNA, 15 bp, Homo sapiens
gggagtgtcccagga

SEQ ID NO: 2100223 - DNA, 15 bp, Homo sapiens
ggagtgtcccaggag

SEQ ID NO: 2100224 - DNA, 15 bp, Homo sapiens
gagtgtcccaggagg

SEQ ID NO: 2100225 - DNA, 15 bp, Homo sapiens
agtgtcccaggaggg

SEQ ID NO: 2100226 - DNA, 15 bp, Homo sapiens
gtgtcccaggagggc

SEQ ID NO: 2100227 - DNA, 15 bp, Homo sapiens
tgtcccaggagggca

SEQ ID NO: 2100228 - DNA, 15 bp, Homo sapiens
gtcccaggagggcaa

SEQ ID NO: 2100229 - DNA, 15 bp, Homo sapiens
tcccaggagggcaaa

SEQ ID NO: 2100230 - DNA, 15 bp, Homo sapiens
cccaggagggcaaag

SEQ ID NO: 2100231 - DNA, 15 bp, Homo sapiens
ccaggagggcaaagg

SEQ ID NO: 2100232 - DNA, 15 bp, Homo sapiens
caggagggcaaaggg

SEQ ID NO: 2100233 - DNA, 15 bp, Homo sapiens
aggagggcaaagggg

SEQ ID NO: 2100234 - DNA, 15 bp, Homo sapiens
ggagggcaaagggga

SEQ ID NO: 2100235 - DNA, 15 bp, Homo sapiens
gagggcaaaggggac

SEQ ID NO: 2100236 - DNA, 15 bp, Homo sapiens
agggcaaaggggact

SEQ ID NO: 2100237 - DNA, 15 bp, Homo sapiens
gggcaaaggggactc

SEQ ID NO: 2100238 - DNA, 15 bp, Homo sapiens
ggcaaaggggactct

SEQ ID NO: 2100239 - DNA, 15 bp, Homo sapiens
gcaaaggggactcta

SEQ ID NO: 2100240 - DNA, 15 bp, Homo sapiens
caaaggggactctag

SEQ ID NO: 2100241 - DNA, 15 bp, Homo sapiens
aaaggggactctagc

SEQ ID NO: 2100242 - DNA, 15 bp, Homo sapiens
aaggggactctagca

SEQ ID NO: 2100243 - DNA, 15 bp, Homo sapiens
aggggactctagcag

SEQ ID NO: 2100244 - DNA, 15 bp, Homo sapiens
ggggactctagcagc

SEQ ID NO: 2100245 - DNA, 15 bp, Homo sapiens
gggactctagcagcc

SEQ ID NO: 2100246 - DNA, 15 bp, Homo sapiens
ggactctagcagccc

SEQ ID NO: 2100247 - DNA, 15 bp, Homo sapiens
gactctagcagccca

SEQ ID NO: 2100248 - DNA, 15 bp, Homo sapiens
actctagcagcccag

SEQ ID NO: 2100249 - DNA, 15 bp, Homo sapiens
ctctagcagcccagg

SEQ ID NO: 2100250 - DNA, 15 bp, Homo sapiens
tctagcagcccaggg

SEQ ID NO: 2100251 - DNA, 15 bp, Homo sapiens
ctagcagcccagggt

SEQ ID NO: 2100252 - DNA, 15 bp, Homo sapiens
tagcagcccagggtc

SEQ ID NO: 2100253 - DNA, 15 bp, Homo sapiens
agcagcccagggtca

SEQ ID NO: 2100254 - DNA, 15 bp, Homo sapiens
gcagcccagggtcac

SEQ ID NO: 2100255 - DNA, 15 bp, Homo sapiens
cagcccagggtcacg

SEQ ID NO: 2100256 - DNA, 15 bp, Homo sapiens
agcccagggtcacgg

SEQ ID NO: 2100257 - DNA, 15 bp, Homo sapiens
gcccagggtcacgga

SEQ ID NO: 2100258 - DNA, 15 bp, Homo sapiens
cccagggtcacggac

SEQ ID NO: 2100259 - DNA, 15 bp, Homo sapiens
ccagggtcacggaca

SEQ ID NO: 2100260 - DNA, 15 bp, Homo sapiens
cagggtcacggacag

SEQ ID NO: 2100261 - DNA, 15 bp, Homo sapiens
agggtcacggacagc

SEQ ID NO: 2100262 - DNA, 15 bp, Homo sapiens
gggtcacggacagct

SEQ ID NO: 2100263 - DNA, 15 bp, Homo sapiens
ggtcacggacagctc

SEQ ID NO: 2100264 - DNA, 15 bp, Homo sapiens
gtcacggacagctct

SEQ ID NO: 2100265 - DNA, 15 bp, Homo sapiens
tcacggacagctctc

SEQ ID NO: 2100266 - DNA, 15 bp, Homo sapiens
cacggacagctctca

SEQ ID NO: 2100267 - DNA, 15 bp, Homo sapiens
acggacagctctcaa

SEQ ID NO: 2100268 - DNA, 15 bp, Homo sapiens
cggacagctctcaaa

SEQ ID NO: 2100269 - DNA, 15 bp, Homo sapiens
ggacagctctcaaag

SEQ ID NO: 2100270 - DNA, 15 bp, Homo sapiens
gacagctctcaaagg

SEQ ID NO: 2100271 - DNA, 15 bp, Homo sapiens
acagctctcaaaggc

SEQ ID NO: 2100272 - DNA, 15 bp, Homo sapiens
cagctctcaaaggca

SEQ ID NO: 2100273 - DNA, 15 bp, Homo sapiens
agctctcaaaggcag

SEQ ID NO: 2100274 - DNA, 15 bp, Homo sapiens
gctctcaaaggcaga

SEQ ID NO: 2100275 - DNA, 15 bp, Homo sapiens
ctctcaaaggcagac

SEQ ID NO: 2100276 - DNA, 15 bp, Homo sapiens
tctcaaaggcagacc

SEQ ID NO: 2100277 - DNA, 15 bp, Homo sapiens
ctcaaaggcagacca

SEQ ID NO: 2100278 - DNA, 15 bp, Homo sapiens
tcaaaggcagaccaa

SEQ ID NO: 2100279 - DNA, 15 bp, Homo sapiens
caaaggcagaccaac

SEQ ID NO: 2100280 - DNA, 15 bp, Homo sapiens
aaaggcagaccaaca

SEQ ID NO: 2100281 - DNA, 15 bp, Homo sapiens
aaggcagaccaacag

SEQ ID NO: 2100282 - DNA, 15 bp, Homo sapiens
aggcagaccaacagg

SEQ ID NO: 2100283 - DNA, 15 bp, Homo sapiens
ggcagaccaacaggt

SEQ ID NO: 2100284 - DNA, 15 bp, Homo sapiens
gcagaccaacaggtc

SEQ ID NO: 2100285 - DNA, 15 bp, Homo sapiens
cagaccaacaggtct

SEQ ID NO: 2100286 - DNA, 15 bp, Homo sapiens
agaccaacaggtctt

SEQ ID NO: 2100287 - DNA, 15 bp, Homo sapiens
gaccaacaggtcttg

SEQ ID NO: 2100288 - DNA, 15 bp, Homo sapiens
accaacaggtcttgg

SEQ ID NO: 2100289 - DNA, 15 bp, Homo sapiens
ccaacaggtcttggg

SEQ ID NO: 2100290 - DNA, 15 bp, Homo sapiens
caacaggtcttgggt

SEQ ID NO: 2100291 - DNA, 15 bp, Homo sapiens
aacaggtcttgggtt

SEQ ID NO: 2100292 - DNA, 15 bp, Homo sapiens
acaggtcttgggttt

SEQ ID NO: 2100293 - DNA, 15 bp, Homo sapiens
caggtcttgggtttt

SEQ ID NO: 2100294 - DNA, 15 bp, Homo sapiens
aggtcttgggttttg

SEQ ID NO: 2100295 - DNA, 15 bp, Homo sapiens
ggtcttgggttttgg

SEQ ID NO: 2100296 - DNA, 15 bp, Homo sapiens
gtcttgggttttgga

SEQ ID NO: 2100297 - DNA, 15 bp, Homo sapiens
tcttgggttttggat

SEQ ID NO: 2100298 - DNA, 15 bp, Homo sapiens
cttgggttttggata

SEQ ID NO: 2100299 - DNA, 15 bp, Homo sapiens
ttgggttttggatac

SEQ ID NO: 2100300 - DNA, 15 bp, Homo sapiens
tgggttttggataca

SEQ ID NO: 2100301 - DNA, 15 bp, Homo sapiens
gggttttggatacaa

SEQ ID NO: 2100302 - DNA, 15 bp, Homo sapiens
ggttttggatacaaa

SEQ ID NO: 2100303 - DNA, 15 bp, Homo sapiens
gttttggatacaaaa

SEQ ID NO: 2100304 - DNA, 15 bp, Homo sapiens
ttttggatacaaaaa

SEQ ID NO: 2100305 - DNA, 15 bp, Homo sapiens
tttggatacaaaaat

SEQ ID NO: 2100306 - DNA, 15 bp, Homo sapiens
ttggatacaaaaatg

SEQ ID NO: 2100307 - DNA, 15 bp, Homo sapiens
tggatacaaaaatgc

SEQ ID NO: 2100308 - DNA, 15 bp, Homo sapiens
ggatacaaaaatgct

SEQ ID NO: 2100309 - DNA, 15 bp, Homo sapiens
gatacaaaaatgctc

SEQ ID NO: 2100310 - DNA, 15 bp, Homo sapiens
atacaaaaatgctcc

SEQ ID NO: 2100311 - DNA, 15 bp, Homo sapiens
tacaaaaatgctcca

SEQ ID NO: 2100312 - DNA, 15 bp, Homo sapiens
acaaaaatgctccaa

SEQ ID NO: 2100313 - DNA, 15 bp, Homo sapiens
caaaaatgctccaaa

SEQ ID NO: 2100314 - DNA, 15 bp, Homo sapiens
aaaaatgctccaaaa

SEQ ID NO: 2100315 - DNA, 15 bp, Homo sapiens
aaaatgctccaaaat

SEQ ID NO: 2100316 - DNA, 15 bp, Homo sapiens
aaatgctccaaaatc

SEQ ID NO: 2100317 - DNA, 15 bp, Homo sapiens
aatgctccaaaatca

SEQ ID NO: 2100318 - DNA, 15 bp, Homo sapiens
atgctccaaaatcag

SEQ ID NO: 2100319 - DNA, 15 bp, Homo sapiens
tgctccaaaatcagg

SEQ ID NO: 2100320 - DNA, 15 bp, Homo sapiens
gctccaaaatcaggg

SEQ ID NO: 2100321 - DNA, 15 bp, Homo sapiens
ctccaaaatcagggg

SEQ ID NO: 2100322 - DNA, 15 bp, Homo sapiens
tccaaaatcaggggt

SEQ ID NO: 2100323 - DNA, 15 bp, Homo sapiens
ccaaaatcaggggtg

SEQ ID NO: 2100324 - DNA, 15 bp, Homo sapiens
caaaatcaggggtgt

SEQ ID NO: 2100325 - DNA, 15 bp, Homo sapiens
aaaatcaggggtgtg

SEQ ID NO: 2100326 - DNA, 15 bp, Homo sapiens
aaatcaggggtgtgc

SEQ ID NO: 2100327 - DNA, 15 bp, Homo sapiens
aatcaggggtgtgca

SEQ ID NO: 2100328 - DNA, 15 bp, Homo sapiens
atcaggggtgtgcaa

SEQ ID NO: 2100329 - DNA, 15 bp, Homo sapiens
tcaggggtgtgcaaa

SEQ ID NO: 2100330 - DNA, 15 bp, Homo sapiens
caggggtgtgcaaat

SEQ ID NO: 2100331 - DNA, 15 bp, Homo sapiens
aggggtgtgcaaata

SEQ ID NO: 2100332 - DNA, 15 bp, Homo sapiens
ggggtgtgcaaatac

SEQ ID NO: 2100333 - DNA, 15 bp, Homo sapiens
gggtgtgcaaataca

SEQ ID NO: 2100334 - DNA, 15 bp, Homo sapiens
ggtgtgcaaatacag

SEQ ID NO: 2100335 - DNA, 15 bp, Homo sapiens
gtgtgcaaatacagt

SEQ ID NO: 2100336 - DNA, 15 bp, Homo sapiens
tgtgcaaatacagta

SEQ ID NO: 2100337 - DNA, 15 bp, Homo sapiens
gtgcaaatacagtaa

SEQ ID NO: 2100338 - DNA, 15 bp, Homo sapiens
tgcaaatacagtaaa

SEQ ID NO: 2100339 - DNA, 15 bp, Homo sapiens
gcaaatacagtaaaa

SEQ ID NO: 2100340 - DNA, 15 bp, Homo sapiens
caaatacagtaaaaa

SEQ ID NO: 2100341 - DNA, 15 bp, Homo sapiens
aaatacagtaaaaag

SEQ ID NO: 2100342 - DNA, 15 bp, Homo sapiens
aatacagtaaaaaga

SEQ ID NO: 2100343 - DNA, 15 bp, Homo sapiens
atacagtaaaaagag

SEQ ID NO: 2100344 - DNA, 15 bp, Homo sapiens
tacagtaaaaagagg

SEQ ID NO: 2100345 - DNA, 15 bp, Homo sapiens
acagtaaaaagagga

SEQ ID NO: 2100346 - DNA, 15 bp, Homo sapiens
cagtaaaaagaggat

SEQ ID NO: 2100347 - DNA, 15 bp, Homo sapiens
agtaaaaagaggatt

SEQ ID NO: 2100348 - DNA, 15 bp, Homo sapiens
gtaaaaagaggattc

SEQ ID NO: 2100349 - DNA, 15 bp, Homo sapiens
taaaaagaggattca

SEQ ID NO: 2100350 - DNA, 15 bp, Homo sapiens
aaaaagaggattcat

SEQ ID NO: 2100351 - DNA, 15 bp, Homo sapiens
aaaagaggattcatt

SEQ ID NO: 2100352 - DNA, 15 bp, Homo sapiens
aaagaggattcattt

SEQ ID NO: 2100353 - DNA, 15 bp, Homo sapiens
aagaggattcatttg

SEQ ID NO: 2100354 - DNA, 15 bp, Homo sapiens
agaggattcatttgg

SEQ ID NO: 2100355 - DNA, 15 bp, Homo sapiens
gaggattcatttgga

SEQ ID NO: 2100356 - DNA, 15 bp, Homo sapiens
aggattcatttggat

SEQ ID NO: 2100357 - DNA, 15 bp, Homo sapiens
ggattcatttggatc

SEQ ID NO: 2100358 - DNA, 15 bp, Homo sapiens
gattcatttggatct

SEQ ID NO: 2100359 - DNA, 15 bp, Homo sapiens
attcatttggatctg

SEQ ID NO: 2100360 - DNA, 15 bp, Homo sapiens
ttcatttggatctgc

SEQ ID NO: 2100361 - DNA, 15 bp, Homo sapiens
tcatttggatctgct

SEQ ID NO: 2100362 - DNA, 15 bp, Homo sapiens
catttggatctgctt

SEQ ID NO: 2100363 - DNA, 15 bp, Homo sapiens
atttggatctgctta

SEQ ID NO: 2100364 - DNA, 15 bp, Homo sapiens
tttggatctgcttag

SEQ ID NO: 2100365 - DNA, 15 bp, Homo sapiens
ttggatctgcttaga

SEQ ID NO: 2100366 - DNA, 15 bp, Homo sapiens
tggatctgcttagaa

SEQ ID NO: 2100367 - DNA, 15 bp, Homo sapiens
ggatctgcttagaac

SEQ ID NO: 2100368 - DNA, 15 bp, Homo sapiens
gatctgcttagaaca

SEQ ID NO: 2100369 - DNA, 15 bp, Homo sapiens
atctgcttagaacac

SEQ ID NO: 2100370 - DNA, 15 bp, Homo sapiens
tctgcttagaacacc

SEQ ID NO: 2100371 - DNA, 15 bp, Homo sapiens
ctgcttagaacacca

SEQ ID NO: 2100372 - DNA, 15 bp, Homo sapiens
tgcttagaacaccaa

SEQ ID NO: 2100373 - DNA, 15 bp, Homo sapiens
gcttagaacaccaag

SEQ ID NO: 2100374 - DNA, 15 bp, Homo sapiens
cttagaacaccaagg

SEQ ID NO: 2100375 - DNA, 15 bp, Homo sapiens
ttagaacaccaaggg

SEQ ID NO: 2100376 - DNA, 15 bp, Homo sapiens
tagaacaccaagggt

SEQ ID NO: 2100377 - DNA, 15 bp, Homo sapiens
agaacaccaagggta

SEQ ID NO: 2100378 - DNA, 15 bp, Homo sapiens
gaacaccaagggtat

SEQ ID NO: 2100379 - DNA, 15 bp, Homo sapiens
aacaccaagggtatc

SEQ ID NO: 2100380 - DNA, 15 bp, Homo sapiens
acaccaagggtatcc

SEQ ID NO: 2100381 - DNA, 15 bp, Homo sapiens
caccaagggtatccg

SEQ ID NO: 2100382 - DNA, 15 bp, Homo sapiens
accaagggtatccgc

SEQ ID NO: 2100383 - DNA, 15 bp, Homo sapiens
ccaagggtatccgct

SEQ ID NO: 2100384 - DNA, 15 bp, Homo sapiens
caagggtatccgctt

SEQ ID NO: 2100385 - DNA, 15 bp, Homo sapiens
aagggtatccgcttc

SEQ ID NO: 2100386 - DNA, 15 bp, Homo sapiens
agggtatccgcttca

SEQ ID NO: 2100387 - DNA, 15 bp, Homo sapiens
gggtatccgcttcag

SEQ ID NO: 2100388 - DNA, 15 bp, Homo sapiens
ggtatccgcttcaga

SEQ ID NO: 2100389 - DNA, 15 bp, Homo sapiens
gtatccgcttcagaa

SEQ ID NO: 2100390 - DNA, 15 bp, Homo sapiens
tatccgcttcagaaa

SEQ ID NO: 2100391 - DNA, 15 bp, Homo sapiens
atccgcttcagaaat

SEQ ID NO: 2100392 - DNA, 15 bp, Homo sapiens
tccgcttcagaaata

SEQ ID NO: 2100393 - DNA, 15 bp, Homo sapiens
ccgcttcagaaatac

SEQ ID NO: 2100394 - DNA, 15 bp, Homo sapiens
cgcttcagaaataca

SEQ ID NO: 2100395 - DNA, 15 bp, Homo sapiens
gcttcagaaatacag

SEQ ID NO: 2100396 - DNA, 15 bp, Homo sapiens
cttcagaaatacaga

SEQ ID NO: 2100397 - DNA, 15 bp, Homo sapiens
ttcagaaatacagag

SEQ ID NO: 2100398 - DNA, 15 bp, Homo sapiens
tcagaaatacagagg

SEQ ID NO: 2100399 - DNA, 15 bp, Homo sapiens
cagaaatacagaggt

SEQ ID NO: 2100400 - DNA, 15 bp, Homo sapiens
agaaatacagaggtg

SEQ ID NO: 2100401 - DNA, 15 bp, Homo sapiens
gaaatacagaggtga

SEQ ID NO: 2100402 - DNA, 15 bp, Homo sapiens
aaatacagaggtgac

SEQ ID NO: 2100403 - DNA, 15 bp, Homo sapiens
aatacagaggtgacc

SEQ ID NO: 2100404 - DNA, 15 bp, Homo sapiens
atacagaggtgaccg

SEQ ID NO: 2100405 - DNA, 15 bp, Homo sapiens
tacagaggtgaccgg

SEQ ID NO: 2100406 - DNA, 15 bp, Homo sapiens
acagaggtgaccggg

SEQ ID NO: 2100407 - DNA, 15 bp, Homo sapiens
cagaggtgaccgggt

SEQ ID NO: 2100408 - DNA, 15 bp, Homo sapiens
agaggtgaccgggtg

SEQ ID NO: 2100409 - DNA, 15 bp, Homo sapiens
gaggtgaccgggtgc

SEQ ID NO: 2100410 - DNA, 15 bp, Homo sapiens
aggtgaccgggtgca

SEQ ID NO: 2100411 - DNA, 15 bp, Homo sapiens
ggtgaccgggtgcag

SEQ ID NO: 2100412 - DNA, 15 bp, Homo sapiens
gtgaccgggtgcagt

SEQ ID NO: 2100413 - DNA, 15 bp, Homo sapiens
tgaccgggtgcagtg

SEQ ID NO: 2100414 - DNA, 15 bp, Homo sapiens
gaccgggtgcagtgg

SEQ ID NO: 2100415 - DNA, 15 bp, Homo sapiens
accgggtgcagtggc

SEQ ID NO: 2100416 - DNA, 15 bp, Homo sapiens
gtgcagtggctcacc

SEQ ID NO: 2100417 - DNA, 15 bp, Homo sapiens
tgcagtggctcaccc

SEQ ID NO: 2100418 - DNA, 15 bp, Homo sapiens
gcagtggctcaccct

SEQ ID NO: 2100419 - DNA, 15 bp, Homo sapiens
cagtggctcaccctt

SEQ ID NO: 2100420 - DNA, 15 bp, Homo sapiens
agtggctcacccttg

SEQ ID NO: 2100421 - DNA, 15 bp, Homo sapiens
gtggctcacccttgg

SEQ ID NO: 2100422 - DNA, 15 bp, Homo sapiens
tggctcacccttggg

SEQ ID NO: 2100423 - DNA, 15 bp, Homo sapiens
ggctcacccttggga

SEQ ID NO: 2100424 - DNA, 15 bp, Homo sapiens
gctcacccttgggag

SEQ ID NO: 2100425 - DNA, 15 bp, Homo sapiens
ctcacccttgggagg

SEQ ID NO: 2100426 - DNA, 15 bp, Homo sapiens
tcacccttgggaggc

SEQ ID NO: 2100427 - DNA, 15 bp, Homo sapiens
cacccttgggaggcc

SEQ ID NO: 2100428 - DNA, 15 bp, Homo sapiens
acccttgggaggccg

SEQ ID NO: 2100429 - DNA, 15 bp, Homo sapiens
cccttgggaggccga

SEQ ID NO: 2100430 - DNA, 15 bp, Homo sapiens
ccttgggaggccgag

SEQ ID NO: 2100431 - DNA, 15 bp, Homo sapiens
aggccgaggtgggcg

SEQ ID NO: 2100432 - DNA, 15 bp, Homo sapiens
ggccgaggtgggcgg

SEQ ID NO: 2100433 - DNA, 15 bp, Homo sapiens
gccgaggtgggcgga

SEQ ID NO: 2100434 - DNA, 15 bp, Homo sapiens
ccgaggtgggcggat

SEQ ID NO: 2100435 - DNA, 15 bp, Homo sapiens
cgaggtgggcggatt

SEQ ID NO: 2100436 - DNA, 15 bp, Homo sapiens
gaggtgggcggattg

SEQ ID NO: 2100437 - DNA, 15 bp, Homo sapiens
aggtgggcggattgc

SEQ ID NO: 2100438 - DNA, 15 bp, Homo sapiens
ggtgggcggattgct

SEQ ID NO: 2100439 - DNA, 15 bp, Homo sapiens
gtgggcggattgctt

SEQ ID NO: 2100440 - DNA, 15 bp, Homo sapiens
tgggcggattgcttg

SEQ ID NO: 2100441 - DNA, 15 bp, Homo sapiens
gggcggattgcttga

SEQ ID NO: 2100442 - DNA, 15 bp, Homo sapiens
ggcggattgcttgag

SEQ ID NO: 2100443 - DNA, 15 bp, Homo sapiens
gcggattgcttgagg

SEQ ID NO: 2100444 - DNA, 15 bp, Homo sapiens
cggattgcttgaggt

SEQ ID NO: 2100445 - DNA, 15 bp, Homo sapiens
ggattgcttgaggtc

SEQ ID NO: 2100446 - DNA, 15 bp, Homo sapiens
gattgcttgaggtca

SEQ ID NO: 2100447 - DNA, 15 bp, Homo sapiens
attgcttgaggtcag

SEQ ID NO: 2100448 - DNA, 15 bp, Homo sapiens
ttgcttgaggtcagg

SEQ ID NO: 2100449 - DNA, 15 bp, Homo sapiens
tgcttgaggtcagga

SEQ ID NO: 2100450 - DNA, 15 bp, Homo sapiens
gcttgaggtcaggag

SEQ ID NO: 2100451 - DNA, 15 bp, Homo sapiens
catagtgaaacccca

SEQ ID NO: 2100452 - DNA, 15 bp, Homo sapiens
tgtaatcccagctgt

SEQ ID NO: 2100453 - DNA, 15 bp, Homo sapiens
gtaatcccagctgtg

SEQ ID NO: 2100454 - DNA, 15 bp, Homo sapiens
taatcccagctgtgg

SEQ ID NO: 2100455 - DNA, 15 bp, Homo sapiens
aatcccagctgtggg

SEQ ID NO: 2100456 - DNA, 15 bp, Homo sapiens
atcccagctgtggga

SEQ ID NO: 2100457 - DNA, 15 bp, Homo sapiens
tcccagctgtgggag

SEQ ID NO: 2100458 - DNA, 15 bp, Homo sapiens
cccagctgtgggagg

SEQ ID NO: 2100459 - DNA, 15 bp, Homo sapiens
ccagctgtgggaggc

SEQ ID NO: 2100460 - DNA, 15 bp, Homo sapiens
cagctgtgggaggct

SEQ ID NO: 2100461 - DNA, 15 bp, Homo sapiens
agctgtgggaggctg

SEQ ID NO: 2100462 - DNA, 15 bp, Homo sapiens
gctgtgggaggctga

SEQ ID NO: 2100463 - DNA, 15 bp, Homo sapiens
ctgtgggaggctgag

SEQ ID NO: 2100464 - DNA, 15 bp, Homo sapiens
tgtgggaggctgagc

SEQ ID NO: 2100465 - DNA, 15 bp, Homo sapiens
gtgggaggctgagcc

SEQ ID NO: 2100466 - DNA, 15 bp, Homo sapiens
tgggaggctgagcca

SEQ ID NO: 2100467 - DNA, 15 bp, Homo sapiens
gggaggctgagccac

SEQ ID NO: 2100468 - DNA, 15 bp, Homo sapiens
ggaggctgagccaca

SEQ ID NO: 2100469 - DNA, 15 bp, Homo sapiens
gaggctgagccacaa

SEQ ID NO: 2100470 - DNA, 15 bp, Homo sapiens
aggctgagccacaag

SEQ ID NO: 2100471 - DNA, 15 bp, Homo sapiens
ggctgagccacaaga

SEQ ID NO: 2100472 - DNA, 15 bp, Homo sapiens
gctgagccacaagaa

SEQ ID NO: 2100473 - DNA, 15 bp, Homo sapiens
ctgagccacaagaat

SEQ ID NO: 2100474 - DNA, 15 bp, Homo sapiens
tgagccacaagaatc

SEQ ID NO: 2100475 - DNA, 15 bp, Homo sapiens
gagccacaagaatcg

SEQ ID NO: 2100476 - DNA, 15 bp, Homo sapiens
agccacaagaatcgg

SEQ ID NO: 2100477 - DNA, 15 bp, Homo sapiens
gccacaagaatcggt

SEQ ID NO: 2100478 - DNA, 15 bp, Homo sapiens
ccacaagaatcggtt

SEQ ID NO: 2100479 - DNA, 15 bp, Homo sapiens
cacaagaatcggttg

SEQ ID NO: 2100480 - DNA, 15 bp, Homo sapiens
acaagaatcggttga

SEQ ID NO: 2100481 - DNA, 15 bp, Homo sapiens
caagaatcggttgaa

SEQ ID NO: 2100482 - DNA, 15 bp, Homo sapiens
aagaatcggttgaac

SEQ ID NO: 2100483 - DNA, 15 bp, Homo sapiens
agaatcggttgaacc

SEQ ID NO: 2100484 - DNA, 15 bp, Homo sapiens
gaatcggttgaacct

SEQ ID NO: 2100485 - DNA, 15 bp, Homo sapiens
aatcggttgaacctg

SEQ ID NO: 2100486 - DNA, 15 bp, Homo sapiens
atcggttgaacctgg

SEQ ID NO: 2100487 - DNA, 15 bp, Homo sapiens
tcggttgaacctgga

SEQ ID NO: 2100488 - DNA, 15 bp, Homo sapiens
cggttgaacctggaa

SEQ ID NO: 2100489 - DNA, 15 bp, Homo sapiens
ggttgaacctggaag

SEQ ID NO: 2100490 - DNA, 15 bp, Homo sapiens
gttgaacctggaagc

SEQ ID NO: 2100491 - DNA, 15 bp, Homo sapiens
ttgaacctggaagca

SEQ ID NO: 2100492 - DNA, 15 bp, Homo sapiens
tgaacctggaagcag

SEQ ID NO: 2100493 - DNA, 15 bp, Homo sapiens
gaacctggaagcaga

SEQ ID NO: 2100494 - DNA, 15 bp, Homo sapiens
aacctggaagcagag

SEQ ID NO: 2100495 - DNA, 15 bp, Homo sapiens
acctggaagcagagg

SEQ ID NO: 2100496 - DNA, 15 bp, Homo sapiens
cctggaagcagaggt

SEQ ID NO: 2100497 - DNA, 15 bp, Homo sapiens
ctggaagcagaggtt

SEQ ID NO: 2100498 - DNA, 15 bp, Homo sapiens
tggaagcagaggttg

SEQ ID NO: 2100499 - DNA, 15 bp, Homo sapiens
ggaagcagaggttgc

SEQ ID NO: 2100500 - DNA, 15 bp, Homo sapiens
agtgagccgagatct

SEQ ID NO: 2100501 - DNA, 15 bp, Homo sapiens
gtgagccgagatctc

SEQ ID NO: 2100502 - DNA, 15 bp, Homo sapiens
tgagccgagatctca

SEQ ID NO: 2100503 - DNA, 15 bp, Homo sapiens
gagccgagatctcac

SEQ ID NO: 2100504 - DNA, 15 bp, Homo sapiens
agccgagatctcacc

SEQ ID NO: 2100505 - DNA, 15 bp, Homo sapiens
gccgagatctcacca

SEQ ID NO: 2100506 - DNA, 15 bp, Homo sapiens
gagatctcaccactg

SEQ ID NO: 2100507 - DNA, 15 bp, Homo sapiens
agatctcaccactgc

SEQ ID NO: 2100508 - DNA, 15 bp, Homo sapiens
gatctcaccactgca

SEQ ID NO: 2100509 - DNA, 15 bp, Homo sapiens
atctcaccactgcac

SEQ ID NO: 2100510 - DNA, 15 bp, Homo sapiens
tctcaccactgcact

SEQ ID NO: 2100511 - DNA, 15 bp, Homo sapiens
ctcaccactgcactc

SEQ ID NO: 2100512 - DNA, 15 bp, Homo sapiens
tcaccactgcactct

SEQ ID NO: 2100513 - DNA, 15 bp, Homo sapiens
caccactgcactcta

SEQ ID NO: 2100514 - DNA, 15 bp, Homo sapiens
accactgcactctag

SEQ ID NO: 2100515 - DNA, 15 bp, Homo sapiens
aaaaaaaaagaagag

SEQ ID NO: 2100516 - DNA, 15 bp, Homo sapiens
aaaaaaaagaagaga

SEQ ID NO: 2100517 - DNA, 15 bp, Homo sapiens
aaaaaaagaagagaa

SEQ ID NO: 2100518 - DNA, 15 bp, Homo sapiens
aaaaaagaagagaaa

SEQ ID NO: 2100519 - DNA, 15 bp, Homo sapiens
aaaaagaagagaaaa

SEQ ID NO: 2100520 - DNA, 15 bp, Homo sapiens
aaaagaagagaaaag

SEQ ID NO: 2100521 - DNA, 15 bp, Homo sapiens
aaagaagagaaaaga

SEQ ID NO: 2100522 - DNA, 15 bp, Homo sapiens
aagaagagaaaagaa

SEQ ID NO: 2100523 - DNA, 15 bp, Homo sapiens
agaagagaaaagaaa

SEQ ID NO: 2100524 - DNA, 15 bp, Homo sapiens
gaagagaaaagaaaa

SEQ ID NO: 2100525 - DNA, 15 bp, Homo sapiens
aagagaaaagaaaag

SEQ ID NO: 2100526 - DNA, 15 bp, Homo sapiens
agagaaaagaaaaga

SEQ ID NO: 2100527 - DNA, 15 bp, Homo sapiens
gagaaaagaaaagaa

SEQ ID NO: 2100528 - DNA, 15 bp, Homo sapiens
aaagaaaagaaaaac

SEQ ID NO: 2100529 - DNA, 15 bp, Homo sapiens
aagaaaagaaaaaca

SEQ ID NO: 2100530 - DNA, 15 bp, Homo sapiens
agaaaagaaaaacaa

SEQ ID NO: 2100531 - DNA, 15 bp, Homo sapiens
gaaaagaaaaacaac

SEQ ID NO: 2100532 - DNA, 15 bp, Homo sapiens
aaaagaaaaacaaca

SEQ ID NO: 2100533 - DNA, 15 bp, Homo sapiens
aaagaaaaacaacaa

SEQ ID NO: 2100534 - DNA, 15 bp, Homo sapiens
aagaaaaacaacaac

SEQ ID NO: 2100535 - DNA, 15 bp, Homo sapiens
aaaaacaacaacaac

SEQ ID NO: 2100536 - DNA, 15 bp, Homo sapiens
acaacaacaacaaag

SEQ ID NO: 2100537 - DNA, 15 bp, Homo sapiens
caacaacaacaaagc

SEQ ID NO: 2100538 - DNA, 15 bp, Homo sapiens
aacaacaacaaagct

SEQ ID NO: 2100539 - DNA, 15 bp, Homo sapiens
acaacaacaaagctg

SEQ ID NO: 2100540 - DNA, 15 bp, Homo sapiens
caacaacaaagctgg

SEQ ID NO: 2100541 - DNA, 15 bp, Homo sapiens
aacaacaaagctgga

SEQ ID NO: 2100542 - DNA, 15 bp, Homo sapiens
acaacaaagctggac

SEQ ID NO: 2100543 - DNA, 15 bp, Homo sapiens
caacaaagctggacg

SEQ ID NO: 2100544 - DNA, 15 bp, Homo sapiens
aacaaagctggacga

SEQ ID NO: 2100545 - DNA, 15 bp, Homo sapiens
acaaagctggacgaa

SEQ ID NO: 2100546 - DNA, 15 bp, Homo sapiens
caaagctggacgaag

SEQ ID NO: 2100547 - DNA, 15 bp, Homo sapiens
aaagctggacgaagc

SEQ ID NO: 2100548 - DNA, 15 bp, Homo sapiens
aagctggacgaagct

SEQ ID NO: 2100549 - DNA, 15 bp, Homo sapiens
agctggacgaagcta

SEQ ID NO: 2100550 - DNA, 15 bp, Homo sapiens
gctggacgaagctag

SEQ ID NO: 2100551 - DNA, 15 bp, Homo sapiens
ctggacgaagctaga

SEQ ID NO: 2100552 - DNA, 15 bp, Homo sapiens
tggacgaagctagaa

SEQ ID NO: 2100553 - DNA, 15 bp, Homo sapiens
ggacgaagctagaaa

SEQ ID NO: 2100554 - DNA, 15 bp, Homo sapiens
gacgaagctagaaag

SEQ ID NO: 2100555 - DNA, 15 bp, Homo sapiens
acgaagctagaaagc

SEQ ID NO: 2100556 - DNA, 15 bp, Homo sapiens
cgaagctagaaagct

SEQ ID NO: 2100557 - DNA, 15 bp, Homo sapiens
gaagctagaaagctc

SEQ ID NO: 2100558 - DNA, 15 bp, Homo sapiens
aagctagaaagctcc

SEQ ID NO: 2100559 - DNA, 15 bp, Homo sapiens
agctagaaagctccc

SEQ ID NO: 2100560 - DNA, 15 bp, Homo sapiens
gctagaaagctccct

SEQ ID NO: 2100561 - DNA, 15 bp, Homo sapiens
ctagaaagctccctg

SEQ ID NO: 2100562 - DNA, 15 bp, Homo sapiens
tagaaagctccctgc

SEQ ID NO: 2100563 - DNA, 15 bp, Homo sapiens
agaaagctccctgcc

SEQ ID NO: 2100564 - DNA, 15 bp, Homo sapiens
gaaagctccctgccc

SEQ ID NO: 2100565 - DNA, 15 bp, Homo sapiens
aaagctccctgccct

SEQ ID NO: 2100566 - DNA, 15 bp, Homo sapiens
aagctccctgccctc

SEQ ID NO: 2100567 - DNA, 15 bp, Homo sapiens
agctccctgccctca

SEQ ID NO: 2100568 - DNA, 15 bp, Homo sapiens
gctccctgccctcac

SEQ ID NO: 2100569 - DNA, 15 bp, Homo sapiens
ctccctgccctcaca

SEQ ID NO: 2100570 - DNA, 15 bp, Homo sapiens
tccctgccctcacaa

SEQ ID NO: 2100571 - DNA, 15 bp, Homo sapiens
ccctgccctcacaaa

SEQ ID NO: 2100572 - DNA, 15 bp, Homo sapiens
cctgccctcacaaac

SEQ ID NO: 2100573 - DNA, 15 bp, Homo sapiens
ctgccctcacaaact

SEQ ID NO: 2100574 - DNA, 15 bp, Homo sapiens
tgccctcacaaactt

SEQ ID NO: 2100575 - DNA, 15 bp, Homo sapiens
gccctcacaaacttg

SEQ ID NO: 2100576 - DNA, 15 bp, Homo sapiens
ccctcacaaacttgc

SEQ ID NO: 2100577 - DNA, 15 bp, Homo sapiens
cctcacaaacttgcc

SEQ ID NO: 2100578 - DNA, 15 bp, Homo sapiens
ctcacaaacttgcct

SEQ ID NO: 2100579 - DNA, 15 bp, Homo sapiens
tcacaaacttgcctt

SEQ ID NO: 2100580 - DNA, 15 bp, Homo sapiens
cacaaacttgccttc

SEQ ID NO: 2100581 - DNA, 15 bp, Homo sapiens
acaaacttgccttct

SEQ ID NO: 2100582 - DNA, 15 bp, Homo sapiens
caaacttgccttcta

SEQ ID NO: 2100583 - DNA, 15 bp, Homo sapiens
aaacttgccttctag

SEQ ID NO: 2100584 - DNA, 15 bp, Homo sapiens
aacttgccttctagt

SEQ ID NO: 2100585 - DNA, 15 bp, Homo sapiens
acttgccttctagtg

SEQ ID NO: 2100586 - DNA, 15 bp, Homo sapiens
cttgccttctagtgg

SEQ ID NO: 2100587 - DNA, 15 bp, Homo sapiens
ttgccttctagtggg

SEQ ID NO: 2100588 - DNA, 15 bp, Homo sapiens
tgccttctagtggga

SEQ ID NO: 2100589 - DNA, 15 bp, Homo sapiens
gccttctagtgggag

SEQ ID NO: 2100590 - DNA, 15 bp, Homo sapiens
ccttctagtgggaga

SEQ ID NO: 2100591 - DNA, 15 bp, Homo sapiens
cttctagtgggagag

SEQ ID NO: 2100592 - DNA, 15 bp, Homo sapiens
ttctagtgggagaga

SEQ ID NO: 2100593 - DNA, 15 bp, Homo sapiens
tctagtgggagagac

SEQ ID NO: 2100594 - DNA, 15 bp, Homo sapiens
ctagtgggagagaca

SEQ ID NO: 2100595 - DNA, 15 bp, Homo sapiens
tagtgggagagacag

SEQ ID NO: 2100596 - DNA, 15 bp, Homo sapiens
agtgggagagacagc

SEQ ID NO: 2100597 - DNA, 15 bp, Homo sapiens
gtgggagagacagct

SEQ ID NO: 2100598 - DNA, 15 bp, Homo sapiens
tgggagagacagctg

SEQ ID NO: 2100599 - DNA, 15 bp, Homo sapiens
gggagagacagctgg

SEQ ID NO: 2100600 - DNA, 15 bp, Homo sapiens
ggagagacagctggc

SEQ ID NO: 2100601 - DNA, 15 bp, Homo sapiens
gagagacagctggcg

SEQ ID NO: 2100602 - DNA, 15 bp, Homo sapiens
agagacagctggcga

SEQ ID NO: 2100603 - DNA, 15 bp, Homo sapiens
gagacagctggcgag

SEQ ID NO: 2100604 - DNA, 15 bp, Homo sapiens
agacagctggcgagt

SEQ ID NO: 2100605 - DNA, 15 bp, Homo sapiens
gacagctggcgagta

SEQ ID NO: 2100606 - DNA, 15 bp, Homo sapiens
acagctggcgagtaa

SEQ ID NO: 2100607 - DNA, 15 bp, Homo sapiens
cagctggcgagtaaa

SEQ ID NO: 2100608 - DNA, 15 bp, Homo sapiens
agctggcgagtaaat

SEQ ID NO: 2100609 - DNA, 15 bp, Homo sapiens
gctggcgagtaaatg

SEQ ID NO: 2100610 - DNA, 15 bp, Homo sapiens
ctggcgagtaaatgc

SEQ ID NO: 2100611 - DNA, 15 bp, Homo sapiens
tggcgagtaaatgca

SEQ ID NO: 2100612 - DNA, 15 bp, Homo sapiens
ggcgagtaaatgcat

SEQ ID NO: 2100613 - DNA, 15 bp, Homo sapiens
gcgagtaaatgcatg

SEQ ID NO: 2100614 - DNA, 15 bp, Homo sapiens
cgagtaaatgcatga

SEQ ID NO: 2100615 - DNA, 15 bp, Homo sapiens
gagtaaatgcatgag

SEQ ID NO: 2100616 - DNA, 15 bp, Homo sapiens
agtaaatgcatgagt

SEQ ID NO: 2100617 - DNA, 15 bp, Homo sapiens
gtaaatgcatgagta

SEQ ID NO: 2100618 - DNA, 15 bp, Homo sapiens
taaatgcatgagtaa

SEQ ID NO: 2100619 - DNA, 15 bp, Homo sapiens
aaatgcatgagtaag

SEQ ID NO: 2100620 - DNA, 15 bp, Homo sapiens
aatgcatgagtaagg

SEQ ID NO: 2100621 - DNA, 15 bp, Homo sapiens
atgcatgagtaaggt

SEQ ID NO: 2100622 - DNA, 15 bp, Homo sapiens
tgcatgagtaaggtc

SEQ ID NO: 2100623 - DNA, 15 bp, Homo sapiens
gcatgagtaaggtca

SEQ ID NO: 2100624 - DNA, 15 bp, Homo sapiens
catgagtaaggtcac

SEQ ID NO: 2100625 - DNA, 15 bp, Homo sapiens
atgagtaaggtcacg

SEQ ID NO: 2100626 - DNA, 15 bp, Homo sapiens
tgagtaaggtcacgt

SEQ ID NO: 2100627 - DNA, 15 bp, Homo sapiens
gagtaaggtcacgta

SEQ ID NO: 2100628 - DNA, 15 bp, Homo sapiens
agtaaggtcacgtat

SEQ ID NO: 2100629 - DNA, 15 bp, Homo sapiens
gtaaggtcacgtatg

SEQ ID NO: 2100630 - DNA, 15 bp, Homo sapiens
taaggtcacgtatga

SEQ ID NO: 2100631 - DNA, 15 bp, Homo sapiens
aaggtcacgtatgag

SEQ ID NO: 2100632 - DNA, 15 bp, Homo sapiens
aggtcacgtatgagt

SEQ ID NO: 2100633 - DNA, 15 bp, Homo sapiens
ggtcacgtatgagta

SEQ ID NO: 2100634 - DNA, 15 bp, Homo sapiens
gtcacgtatgagtaa

SEQ ID NO: 2100635 - DNA, 15 bp, Homo sapiens
tcacgtatgagtaag

SEQ ID NO: 2100636 - DNA, 15 bp, Homo sapiens
cacgtatgagtaagg

SEQ ID NO: 2100637 - DNA, 15 bp, Homo sapiens
acgtatgagtaaggt

SEQ ID NO: 2100638 - DNA, 15 bp, Homo sapiens
cgtatgagtaaggtc

SEQ ID NO: 2100639 - DNA, 15 bp, Homo sapiens
gtatgagtaaggtca

SEQ ID NO: 2100640 - DNA, 15 bp, Homo sapiens
tatgagtaaggtcac

SEQ ID NO: 2100641 - DNA, 15 bp, Homo sapiens
atgagtaaggtcact

SEQ ID NO: 2100642 - DNA, 15 bp, Homo sapiens
tgagtaaggtcactc

SEQ ID NO: 2100643 - DNA, 15 bp, Homo sapiens
gagtaaggtcactca

SEQ ID NO: 2100644 - DNA, 15 bp, Homo sapiens
agtaaggtcactcat

SEQ ID NO: 2100645 - DNA, 15 bp, Homo sapiens
gtaaggtcactcata

SEQ ID NO: 2100646 - DNA, 15 bp, Homo sapiens
taaggtcactcataa

SEQ ID NO: 2100647 - DNA, 15 bp, Homo sapiens
aaggtcactcataag

SEQ ID NO: 2100648 - DNA, 15 bp, Homo sapiens
aggtcactcataagt

SEQ ID NO: 2100649 - DNA, 15 bp, Homo sapiens
ggtcactcataagta

SEQ ID NO: 2100650 - DNA, 15 bp, Homo sapiens
gtcactcataagtaa

SEQ ID NO: 2100651 - DNA, 15 bp, Homo sapiens
tcactcataagtaag

SEQ ID NO: 2100652 - DNA, 15 bp, Homo sapiens
cactcataagtaagg

SEQ ID NO: 2100653 - DNA, 15 bp, Homo sapiens
actcataagtaaggt

SEQ ID NO: 2100654 - DNA, 15 bp, Homo sapiens
ctcataagtaaggtc

SEQ ID NO: 2100655 - DNA, 15 bp, Homo sapiens
tcataagtaaggtca

SEQ ID NO: 2100656 - DNA, 15 bp, Homo sapiens
cataagtaaggtcac

SEQ ID NO: 2100657 - DNA, 15 bp, Homo sapiens
ataagtaaggtcaca

SEQ ID NO: 2100658 - DNA, 15 bp, Homo sapiens
taagtaaggtcacac

SEQ ID NO: 2100659 - DNA, 15 bp, Homo sapiens
aagtaaggtcacaca

SEQ ID NO: 2100660 - DNA, 15 bp, Homo sapiens
agtaaggtcacacat

SEQ ID NO: 2100661 - DNA, 15 bp, Homo sapiens
gtaaggtcacacatg

SEQ ID NO: 2100662 - DNA, 15 bp, Homo sapiens
taaggtcacacatga

SEQ ID NO: 2100663 - DNA, 15 bp, Homo sapiens
aaggtcacacatgag

SEQ ID NO: 2100664 - DNA, 15 bp, Homo sapiens
aggtcacacatgagt

SEQ ID NO: 2100665 - DNA, 15 bp, Homo sapiens
ggtcacacatgagta

SEQ ID NO: 2100666 - DNA, 15 bp, Homo sapiens
gtcacacatgagtaa

SEQ ID NO: 2100667 - DNA, 15 bp, Homo sapiens
tcacacatgagtaag

SEQ ID NO: 2100668 - DNA, 15 bp, Homo sapiens
cacacatgagtaagg

SEQ ID NO: 2100669 - DNA, 15 bp, Homo sapiens
acacatgagtaaggt

SEQ ID NO: 2100670 - DNA, 15 bp, Homo sapiens
cacatgagtaaggtc

SEQ ID NO: 2100671 - DNA, 15 bp, Homo sapiens
acatgagtaaggtca

SEQ ID NO: 2100672 - DNA, 15 bp, Homo sapiens
gagtaaggtcactct

SEQ ID NO: 2100673 - DNA, 15 bp, Homo sapiens
agtaaggtcactctg

SEQ ID NO: 2100674 - DNA, 15 bp, Homo sapiens
gtaaggtcactctgg

SEQ ID NO: 2100675 - DNA, 15 bp, Homo sapiens
taaggtcactctggg

SEQ ID NO: 2100676 - DNA, 15 bp, Homo sapiens
aaggtcactctggga

SEQ ID NO: 2100677 - DNA, 15 bp, Homo sapiens
aggtcactctgggaa

SEQ ID NO: 2100678 - DNA, 15 bp, Homo sapiens
ggtcactctgggaag

SEQ ID NO: 2100679 - DNA, 15 bp, Homo sapiens
gtcactctgggaagc

SEQ ID NO: 2100680 - DNA, 15 bp, Homo sapiens
tcactctgggaagca

SEQ ID NO: 2100681 - DNA, 15 bp, Homo sapiens
cactctgggaagcaa

SEQ ID NO: 2100682 - DNA, 15 bp, Homo sapiens
actctgggaagcaac

SEQ ID NO: 2100683 - DNA, 15 bp, Homo sapiens
ctctgggaagcaacg

SEQ ID NO: 2100684 - DNA, 15 bp, Homo sapiens
tctgggaagcaacga

SEQ ID NO: 2100685 - DNA, 15 bp, Homo sapiens
ctgggaagcaacgat

SEQ ID NO: 2100686 - DNA, 15 bp, Homo sapiens
tgggaagcaacgatg

SEQ ID NO: 2100687 - DNA, 15 bp, Homo sapiens
gggaagcaacgatgc

SEQ ID NO: 2100688 - DNA, 15 bp, Homo sapiens
ggaagcaacgatgcc

SEQ ID NO: 2100689 - DNA, 15 bp, Homo sapiens
gaagcaacgatgcca

SEQ ID NO: 2100690 - DNA, 15 bp, Homo sapiens
aagcaacgatgccag

SEQ ID NO: 2100691 - DNA, 15 bp, Homo sapiens
agcaacgatgccagg

SEQ ID NO: 2100692 - DNA, 15 bp, Homo sapiens
gcaacgatgccagga

SEQ ID NO: 2100693 - DNA, 15 bp, Homo sapiens
caacgatgccaggat

SEQ ID NO: 2100694 - DNA, 15 bp, Homo sapiens
aacgatgccaggata

SEQ ID NO: 2100695 - DNA, 15 bp, Homo sapiens
acgatgccaggatag

SEQ ID NO: 2100696 - DNA, 15 bp, Homo sapiens
cgatgccaggataga

SEQ ID NO: 2100697 - DNA, 15 bp, Homo sapiens
gatgccaggatagaa

SEQ ID NO: 2100698 - DNA, 15 bp, Homo sapiens
atgccaggatagaaa

SEQ ID NO: 2100699 - DNA, 15 bp, Homo sapiens
tgccaggatagaaag

SEQ ID NO: 2100700 - DNA, 15 bp, Homo sapiens
gccaggatagaaaga

SEQ ID NO: 2100701 - DNA, 15 bp, Homo sapiens
ccaggatagaaagaa

SEQ ID NO: 2100702 - DNA, 15 bp, Homo sapiens
caggatagaaagaag

SEQ ID NO: 2100703 - DNA, 15 bp, Homo sapiens
aggatagaaagaaga

SEQ ID NO: 2100704 - DNA, 15 bp, Homo sapiens
ggatagaaagaagag

SEQ ID NO: 2100705 - DNA, 15 bp, Homo sapiens
gatagaaagaagagc

SEQ ID NO: 2100706 - DNA, 15 bp, Homo sapiens
atagaaagaagagca

SEQ ID NO: 2100707 - DNA, 15 bp, Homo sapiens
tagaaagaagagcag

SEQ ID NO: 2100708 - DNA, 15 bp, Homo sapiens
agaaagaagagcagg

SEQ ID NO: 2100709 - DNA, 15 bp, Homo sapiens
gaaagaagagcaggg

SEQ ID NO: 2100710 - DNA, 15 bp, Homo sapiens
aaagaagagcagggg

SEQ ID NO: 2100711 - DNA, 15 bp, Homo sapiens
aagaagagcaggggg

SEQ ID NO: 2100712 - DNA, 15 bp, Homo sapiens
agaagagcagggggt

SEQ ID NO: 2100713 - DNA, 15 bp, Homo sapiens
gaagagcagggggtg

SEQ ID NO: 2100714 - DNA, 15 bp, Homo sapiens
aagagcagggggtgc

SEQ ID NO: 2100715 - DNA, 15 bp, Homo sapiens
agagcagggggtgca

SEQ ID NO: 2100716 - DNA, 15 bp, Homo sapiens
gagcagggggtgcac

SEQ ID NO: 2100717 - DNA, 15 bp, Homo sapiens
agcagggggtgcacc

SEQ ID NO: 2100718 - DNA, 15 bp, Homo sapiens
gcagggggtgcaccg

SEQ ID NO: 2100719 - DNA, 15 bp, Homo sapiens
cagggggtgcaccgg

SEQ ID NO: 2100720 - DNA, 15 bp, Homo sapiens
agggggtgcaccgga

SEQ ID NO: 2100721 - DNA, 15 bp, Homo sapiens
gggggtgcaccggag

SEQ ID NO: 2100722 - DNA, 15 bp, Homo sapiens
ggggtgcaccggaga

SEQ ID NO: 2100723 - DNA, 15 bp, Homo sapiens
gggtgcaccggagaa

SEQ ID NO: 2100724 - DNA, 15 bp, Homo sapiens
ggtgcaccggagaag

SEQ ID NO: 2100725 - DNA, 15 bp, Homo sapiens
gtgcaccggagaaga

SEQ ID NO: 2100726 - DNA, 15 bp, Homo sapiens
tgcaccggagaagag

SEQ ID NO: 2100727 - DNA, 15 bp, Homo sapiens
gcaccggagaagagg

SEQ ID NO: 2100728 - DNA, 15 bp, Homo sapiens
caccggagaagaggt

SEQ ID NO: 2100729 - DNA, 15 bp, Homo sapiens
accggagaagaggtg

SEQ ID NO: 2100730 - DNA, 15 bp, Homo sapiens
ccggagaagaggtgc

SEQ ID NO: 2100731 - DNA, 15 bp, Homo sapiens
cggagaagaggtgct

SEQ ID NO: 2100732 - DNA, 15 bp, Homo sapiens
ggagaagaggtgctg

SEQ ID NO: 2100733 - DNA, 15 bp, Homo sapiens
gagaagaggtgctgg

SEQ ID NO: 2100734 - DNA, 15 bp, Homo sapiens
agaagaggtgctggg

SEQ ID NO: 2100735 - DNA, 15 bp, Homo sapiens
gaagaggtgctgggc

SEQ ID NO: 2100736 - DNA, 15 bp, Homo sapiens
aagaggtgctgggca

SEQ ID NO: 2100737 - DNA, 15 bp, Homo sapiens
agaggtgctgggcag

SEQ ID NO: 2100738 - DNA, 15 bp, Homo sapiens
gaggtgctgggcagg

SEQ ID NO: 2100739 - DNA, 15 bp, Homo sapiens
aggtgctgggcaggg

SEQ ID NO: 2100740 - DNA, 15 bp, Homo sapiens
ggtgctgggcagggg

SEQ ID NO: 2100741 - DNA, 15 bp, Homo sapiens
gtgctgggcaggggg

SEQ ID NO: 2100742 - DNA, 15 bp, Homo sapiens
tgctgggcagggggg

SEQ ID NO: 2100743 - DNA, 15 bp, Homo sapiens
gctgggcaggggggc

SEQ ID NO: 2100744 - DNA, 15 bp, Homo sapiens
ctgggcaggggggct

SEQ ID NO: 2100745 - DNA, 15 bp, Homo sapiens
tgggcaggggggctg

SEQ ID NO: 2100746 - DNA, 15 bp, Homo sapiens
gggcaggggggctgc

SEQ ID NO: 2100747 - DNA, 15 bp, Homo sapiens
ggcaggggggctgct

SEQ ID NO: 2100748 - DNA, 15 bp, Homo sapiens
gcaggggggctgctt

SEQ ID NO: 2100749 - DNA, 15 bp, Homo sapiens
caggggggctgctta

SEQ ID NO: 2100750 - DNA, 15 bp, Homo sapiens
aggggggctgcttag

SEQ ID NO: 2100751 - DNA, 15 bp, Homo sapiens
ggggggctgcttaga

SEQ ID NO: 2100752 - DNA, 15 bp, Homo sapiens
gggggctgcttagat

SEQ ID NO: 2100753 - DNA, 15 bp, Homo sapiens
ggggctgcttagatg

SEQ ID NO: 2100754 - DNA, 15 bp, Homo sapiens
gggctgcttagatga

SEQ ID NO: 2100755 - DNA, 15 bp, Homo sapiens
ggctgcttagatgag

SEQ ID NO: 2100756 - DNA, 15 bp, Homo sapiens
gctgcttagatgaga

SEQ ID NO: 2100757 - DNA, 15 bp, Homo sapiens
ctgcttagatgagag

SEQ ID NO: 2100758 - DNA, 15 bp, Homo sapiens
tgcttagatgagagc

SEQ ID NO: 2100759 - DNA, 15 bp, Homo sapiens
gcttagatgagagca

SEQ ID NO: 2100760 - DNA, 15 bp, Homo sapiens
cttagatgagagcac

SEQ ID NO: 2100761 - DNA, 15 bp, Homo sapiens
ttagatgagagcaca

SEQ ID NO: 2100762 - DNA, 15 bp, Homo sapiens
tagatgagagcacat

SEQ ID NO: 2100763 - DNA, 15 bp, Homo sapiens
agatgagagcacatt

SEQ ID NO: 2100764 - DNA, 15 bp, Homo sapiens
gatgagagcacattt

SEQ ID NO: 2100765 - DNA, 15 bp, Homo sapiens
atgagagcacatttc

SEQ ID NO: 2100766 - DNA, 15 bp, Homo sapiens
tgagagcacatttcc

SEQ ID NO: 2100767 - DNA, 15 bp, Homo sapiens
gagagcacatttccg

SEQ ID NO: 2100768 - DNA, 15 bp, Homo sapiens
agagcacatttccgg

SEQ ID NO: 2100769 - DNA, 15 bp, Homo sapiens
gagcacatttccgga

SEQ ID NO: 2100770 - DNA, 15 bp, Homo sapiens
agcacatttccggaa

SEQ ID NO: 2100771 - DNA, 15 bp, Homo sapiens
gcacatttccggaag

SEQ ID NO: 2100772 - DNA, 15 bp, Homo sapiens
cacatttccggaagt

SEQ ID NO: 2100773 - DNA, 15 bp, Homo sapiens
acatttccggaagtt

SEQ ID NO: 2100774 - DNA, 15 bp, Homo sapiens
catttccggaagttt

SEQ ID NO: 2100775 - DNA, 15 bp, Homo sapiens
atttccggaagtttc

SEQ ID NO: 2100776 - DNA, 15 bp, Homo sapiens
tttccggaagtttcc

SEQ ID NO: 2100777 - DNA, 15 bp, Homo sapiens
ttccggaagtttcct

SEQ ID NO: 2100778 - DNA, 15 bp, Homo sapiens
tccggaagtttcctc

SEQ ID NO: 2100779 - DNA, 15 bp, Homo sapiens
ccggaagtttcctct

SEQ ID NO: 2100780 - DNA, 15 bp, Homo sapiens
cggaagtttcctctg

SEQ ID NO: 2100781 - DNA, 15 bp, Homo sapiens
ggaagtttcctctga

SEQ ID NO: 2100782 - DNA, 15 bp, Homo sapiens
gaagtttcctctgag

SEQ ID NO: 2100783 - DNA, 15 bp, Homo sapiens
aagtttcctctgaga

SEQ ID NO: 2100784 - DNA, 15 bp, Homo sapiens
agtttcctctgagaa

SEQ ID NO: 2100785 - DNA, 15 bp, Homo sapiens
gtttcctctgagaag

SEQ ID NO: 2100786 - DNA, 15 bp, Homo sapiens
tttcctctgagaagt

SEQ ID NO: 2100787 - DNA, 15 bp, Homo sapiens
ttcctctgagaagtg

SEQ ID NO: 2100788 - DNA, 15 bp, Homo sapiens
tcctctgagaagtgc

SEQ ID NO: 2100789 - DNA, 15 bp, Homo sapiens
cctctgagaagtgcc

SEQ ID NO: 2100790 - DNA, 15 bp, Homo sapiens
ctctgagaagtgcca

SEQ ID NO: 2100791 - DNA, 15 bp, Homo sapiens
tctgagaagtgccaa

SEQ ID NO: 2100792 - DNA, 15 bp, Homo sapiens
ctgagaagtgccaac

SEQ ID NO: 2100793 - DNA, 15 bp, Homo sapiens
tgagaagtgccaact

SEQ ID NO: 2100794 - DNA, 15 bp, Homo sapiens
gagaagtgccaactc

SEQ ID NO: 2100795 - DNA, 15 bp, Homo sapiens
agaagtgccaactcc

SEQ ID NO: 2100796 - DNA, 15 bp, Homo sapiens
gaagtgccaactcct

SEQ ID NO: 2100797 - DNA, 15 bp, Homo sapiens
aagtgccaactcctg

SEQ ID NO: 2100798 - DNA, 15 bp, Homo sapiens
agtgccaactcctga

SEQ ID NO: 2100799 - DNA, 15 bp, Homo sapiens
gtgccaactcctgaa

SEQ ID NO: 2100800 - DNA, 15 bp, Homo sapiens
tgccaactcctgaag

SEQ ID NO: 2100801 - DNA, 15 bp, Homo sapiens
gccaactcctgaagg

SEQ ID NO: 2100802 - DNA, 15 bp, Homo sapiens
ccaactcctgaaggc

SEQ ID NO: 2100803 - DNA, 15 bp, Homo sapiens
caactcctgaaggct

SEQ ID NO: 2100804 - DNA, 15 bp, Homo sapiens
aactcctgaaggctt

SEQ ID NO: 2100805 - DNA, 15 bp, Homo sapiens
actcctgaaggcttc

SEQ ID NO: 2100806 - DNA, 15 bp, Homo sapiens
ctcctgaaggcttca

SEQ ID NO: 2100807 - DNA, 15 bp, Homo sapiens
tcctgaaggcttcat

SEQ ID NO: 2100808 - DNA, 15 bp, Homo sapiens
cctgaaggcttcatg

SEQ ID NO: 2100809 - DNA, 15 bp, Homo sapiens
ctgaaggcttcatgg

SEQ ID NO: 2100810 - DNA, 15 bp, Homo sapiens
tgaaggcttcatggg

SEQ ID NO: 2100811 - DNA, 15 bp, Homo sapiens
gaaggcttcatggga

SEQ ID NO: 2100812 - DNA, 15 bp, Homo sapiens
aaggcttcatgggaa

SEQ ID NO: 2100813 - DNA, 15 bp, Homo sapiens
aggcttcatgggaat

SEQ ID NO: 2100814 - DNA, 15 bp, Homo sapiens
ggcttcatgggaatc

SEQ ID NO: 2100815 - DNA, 15 bp, Homo sapiens
gcttcatgggaatct

SEQ ID NO: 2100816 - DNA, 15 bp, Homo sapiens
cttcatgggaatctg

SEQ ID NO: 2100817 - DNA, 15 bp, Homo sapiens
ttcatgggaatctgg

SEQ ID NO: 2100818 - DNA, 15 bp, Homo sapiens
tcatgggaatctgga

SEQ ID NO: 2100819 - DNA, 15 bp, Homo sapiens
catgggaatctggag

SEQ ID NO: 2100820 - DNA, 15 bp, Homo sapiens
atgggaatctggaga

SEQ ID NO: 2100821 - DNA, 15 bp, Homo sapiens
tgggaatctggagaa

SEQ ID NO: 2100822 - DNA, 15 bp, Homo sapiens
gggaatctggagaag

SEQ ID NO: 2100823 - DNA, 15 bp, Homo sapiens
ggaatctggagaaga

SEQ ID NO: 2100824 - DNA, 15 bp, Homo sapiens
gaatctggagaagag

SEQ ID NO: 2100825 - DNA, 15 bp, Homo sapiens
aatctggagaagagc

SEQ ID NO: 2100826 - DNA, 15 bp, Homo sapiens
atctggagaagagca

SEQ ID NO: 2100827 - DNA, 15 bp, Homo sapiens
tctggagaagagcac

SEQ ID NO: 2100828 - DNA, 15 bp, Homo sapiens
ctggagaagagcact

SEQ ID NO: 2100829 - DNA, 15 bp, Homo sapiens
tggagaagagcactc

SEQ ID NO: 2100830 - DNA, 15 bp, Homo sapiens
ggagaagagcactcc

SEQ ID NO: 2100831 - DNA, 15 bp, Homo sapiens
gagaagagcactcca

SEQ ID NO: 2100832 - DNA, 15 bp, Homo sapiens
agaagagcactccag

SEQ ID NO: 2100833 - DNA, 15 bp, Homo sapiens
gaagagcactccagg

SEQ ID NO: 2100834 - DNA, 15 bp, Homo sapiens
aagagcactccagga

SEQ ID NO: 2100835 - DNA, 15 bp, Homo sapiens
agagcactccaggaa

SEQ ID NO: 2100836 - DNA, 15 bp, Homo sapiens
gagcactccaggaac

SEQ ID NO: 2100837 - DNA, 15 bp, Homo sapiens
agcactccaggaacc

SEQ ID NO: 2100838 - DNA, 15 bp, Homo sapiens
gcactccaggaaccg

SEQ ID NO: 2100839 - DNA, 15 bp, Homo sapiens
cactccaggaaccgg

SEQ ID NO: 2100840 - DNA, 15 bp, Homo sapiens
actccaggaaccggg

SEQ ID NO: 2100841 - DNA, 15 bp, Homo sapiens
ctccaggaaccggga

SEQ ID NO: 2100842 - DNA, 15 bp, Homo sapiens
tccaggaaccgggaa

SEQ ID NO: 2100843 - DNA, 15 bp, Homo sapiens
ccaggaaccgggaag

SEQ ID NO: 2100844 - DNA, 15 bp, Homo sapiens
caggaaccgggaagt

SEQ ID NO: 2100845 - DNA, 15 bp, Homo sapiens
aggaaccgggaagta

SEQ ID NO: 2100846 - DNA, 15 bp, Homo sapiens
ggaaccgggaagtac

SEQ ID NO: 2100847 - DNA, 15 bp, Homo sapiens
gaaccgggaagtaca

SEQ ID NO: 2100848 - DNA, 15 bp, Homo sapiens
aaccgggaagtacat

SEQ ID NO: 2100849 - DNA, 15 bp, Homo sapiens
accgggaagtacatg

SEQ ID NO: 2100850 - DNA, 15 bp, Homo sapiens
ccgggaagtacatgt

SEQ ID NO: 2100851 - DNA, 15 bp, Homo sapiens
cgggaagtacatgtg

SEQ ID NO: 2100852 - DNA, 15 bp, Homo sapiens
gggaagtacatgtgc

SEQ ID NO: 2100853 - DNA, 15 bp, Homo sapiens
ggaagtacatgtgca

SEQ ID NO: 2100854 - DNA, 15 bp, Homo sapiens
gaagtacatgtgcaa

SEQ ID NO: 2100855 - DNA, 15 bp, Homo sapiens
aagtacatgtgcaaa

SEQ ID NO: 2100856 - DNA, 15 bp, Homo sapiens
agtacatgtgcaaag

SEQ ID NO: 2100857 - DNA, 15 bp, Homo sapiens
gtacatgtgcaaagg

SEQ ID NO: 2100858 - DNA, 15 bp, Homo sapiens
tacatgtgcaaaggg

SEQ ID NO: 2100859 - DNA, 15 bp, Homo sapiens
acatgtgcaaagggc

SEQ ID NO: 2100860 - DNA, 15 bp, Homo sapiens
catgtgcaaagggcc

SEQ ID NO: 2100861 - DNA, 15 bp, Homo sapiens
atgtgcaaagggcct

SEQ ID NO: 2100862 - DNA, 15 bp, Homo sapiens
tgtgcaaagggcctg

SEQ ID NO: 2100863 - DNA, 15 bp, Homo sapiens
gtgcaaagggcctgg

SEQ ID NO: 2100864 - DNA, 15 bp, Homo sapiens
caaagggcctggggt

SEQ ID NO: 2100865 - DNA, 15 bp, Homo sapiens
aaagggcctggggta

SEQ ID NO: 2100866 - DNA, 15 bp, Homo sapiens
aagggcctggggtag

SEQ ID NO: 2100867 - DNA, 15 bp, Homo sapiens
agggcctggggtagc

SEQ ID NO: 2100868 - DNA, 15 bp, Homo sapiens
gggcctggggtagca

SEQ ID NO: 2100869 - DNA, 15 bp, Homo sapiens
ggcctggggtagcaa

SEQ ID NO: 2100870 - DNA, 15 bp, Homo sapiens
gcctggggtagcaac

SEQ ID NO: 2100871 - DNA, 15 bp, Homo sapiens
cctggggtagcaaca

SEQ ID NO: 2100872 - DNA, 15 bp, Homo sapiens
ctggggtagcaacac

SEQ ID NO: 2100873 - DNA, 15 bp, Homo sapiens
tggggtagcaacacg

SEQ ID NO: 2100874 - DNA, 15 bp, Homo sapiens
ggggtagcaacacgc

SEQ ID NO: 2100875 - DNA, 15 bp, Homo sapiens
gggtagcaacacgca

SEQ ID NO: 2100876 - DNA, 15 bp, Homo sapiens
ggtagcaacacgcag

SEQ ID NO: 2100877 - DNA, 15 bp, Homo sapiens
gtagcaacacgcaga

SEQ ID NO: 2100878 - DNA, 15 bp, Homo sapiens
tagcaacacgcagaa

SEQ ID NO: 2100879 - DNA, 15 bp, Homo sapiens
agcaacacgcagaac

SEQ ID NO: 2100880 - DNA, 15 bp, Homo sapiens
gcaacacgcagaaca

SEQ ID NO: 2100881 - DNA, 15 bp, Homo sapiens
caacacgcagaacag

SEQ ID NO: 2100882 - DNA, 15 bp, Homo sapiens
aacacgcagaacaga

SEQ ID NO: 2100883 - DNA, 15 bp, Homo sapiens
acacgcagaacagaa

SEQ ID NO: 2100884 - DNA, 15 bp, Homo sapiens
cacgcagaacagaaa

SEQ ID NO: 2100885 - DNA, 15 bp, Homo sapiens
acgcagaacagaaac

SEQ ID NO: 2100886 - DNA, 15 bp, Homo sapiens
cgcagaacagaaacg

SEQ ID NO: 2100887 - DNA, 15 bp, Homo sapiens
gcagaacagaaacgg

SEQ ID NO: 2100888 - DNA, 15 bp, Homo sapiens
cagaacagaaacggt

SEQ ID NO: 2100889 - DNA, 15 bp, Homo sapiens
agaacagaaacggtg

SEQ ID NO: 2100890 - DNA, 15 bp, Homo sapiens
gaacagaaacggtgc

SEQ ID NO: 2100891 - DNA, 15 bp, Homo sapiens
aacagaaacggtgcg

SEQ ID NO: 2100892 - DNA, 15 bp, Homo sapiens
acagaaacggtgcgc

SEQ ID NO: 2100893 - DNA, 15 bp, Homo sapiens
cagaaacggtgcgct

SEQ ID NO: 2100894 - DNA, 15 bp, Homo sapiens
agaaacggtgcgctg

SEQ ID NO: 2100895 - DNA, 15 bp, Homo sapiens
gaaacggtgcgctgt

SEQ ID NO: 2100896 - DNA, 15 bp, Homo sapiens
aaacggtgcgctgtg

SEQ ID NO: 2100897 - DNA, 15 bp, Homo sapiens
aacggtgcgctgtgg

SEQ ID NO: 2100898 - DNA, 15 bp, Homo sapiens
acggtgcgctgtggc

SEQ ID NO: 2100899 - DNA, 15 bp, Homo sapiens
cggtgcgctgtggct

SEQ ID NO: 2100900 - DNA, 15 bp, Homo sapiens
ggtgcgctgtggctg

SEQ ID NO: 2100901 - DNA, 15 bp, Homo sapiens
gtgcgctgtggctgg

SEQ ID NO: 2100902 - DNA, 15 bp, Homo sapiens
tgcgctgtggctgga

SEQ ID NO: 2100903 - DNA, 15 bp, Homo sapiens
gcgctgtggctggag

SEQ ID NO: 2100904 - DNA, 15 bp, Homo sapiens
cgctgtggctggagc

SEQ ID NO: 2100905 - DNA, 15 bp, Homo sapiens
gctgtggctggagcc

SEQ ID NO: 2100906 - DNA, 15 bp, Homo sapiens
ctgtggctggagccc

SEQ ID NO: 2100907 - DNA, 15 bp, Homo sapiens
tgtggctggagccca

SEQ ID NO: 2100908 - DNA, 15 bp, Homo sapiens
gtggctggagcccag

SEQ ID NO: 2100909 - DNA, 15 bp, Homo sapiens
tggctggagcccaga

SEQ ID NO: 2100910 - DNA, 15 bp, Homo sapiens
ggctggagcccagag

SEQ ID NO: 2100911 - DNA, 15 bp, Homo sapiens
gctggagcccagaga

SEQ ID NO: 2100912 - DNA, 15 bp, Homo sapiens
ctggagcccagagag

SEQ ID NO: 2100913 - DNA, 15 bp, Homo sapiens
tggagcccagagagt

SEQ ID NO: 2100914 - DNA, 15 bp, Homo sapiens
ggagcccagagagtg

SEQ ID NO: 2100915 - DNA, 15 bp, Homo sapiens
gagcccagagagtgg

SEQ ID NO: 2100916 - DNA, 15 bp, Homo sapiens
agcccagagagtggg

SEQ ID NO: 2100917 - DNA, 15 bp, Homo sapiens
gcccagagagtggga

SEQ ID NO: 2100918 - DNA, 15 bp, Homo sapiens
cccagagagtgggac

SEQ ID NO: 2100919 - DNA, 15 bp, Homo sapiens
ccagagagtgggact

SEQ ID NO: 2100920 - DNA, 15 bp, Homo sapiens
cagagagtgggactg

SEQ ID NO: 2100921 - DNA, 15 bp, Homo sapiens
agagagtgggactga

SEQ ID NO: 2100922 - DNA, 15 bp, Homo sapiens
gagagtgggactgag

SEQ ID NO: 2100923 - DNA, 15 bp, Homo sapiens
agagtgggactgagt

SEQ ID NO: 2100924 - DNA, 15 bp, Homo sapiens
gagtgggactgagtg

SEQ ID NO: 2100925 - DNA, 15 bp, Homo sapiens
agtgggactgagtgg

SEQ ID NO: 2100926 - DNA, 15 bp, Homo sapiens
gtgggactgagtggg

SEQ ID NO: 2100927 - DNA, 15 bp, Homo sapiens
tgaagctgagggtaa

SEQ ID NO: 2100928 - DNA, 15 bp, Homo sapiens
gaagctgagggtaat

SEQ ID NO: 2100929 - DNA, 15 bp, Homo sapiens
aagctgagggtaata

SEQ ID NO: 2100930 - DNA, 15 bp, Homo sapiens
agctgagggtaatag

SEQ ID NO: 2100931 - DNA, 15 bp, Homo sapiens
gctgagggtaatagc

SEQ ID NO: 2100932 - DNA, 15 bp, Homo sapiens
ctgagggtaatagca

SEQ ID NO: 2100933 - DNA, 15 bp, Homo sapiens
tgagggtaatagcac

SEQ ID NO: 2100934 - DNA, 15 bp, Homo sapiens
gagggtaatagcact

SEQ ID NO: 2100935 - DNA, 15 bp, Homo sapiens
agggtaatagcactg

SEQ ID NO: 2100936 - DNA, 15 bp, Homo sapiens
gggtaatagcactgg

SEQ ID NO: 2100937 - DNA, 15 bp, Homo sapiens
ggtaatagcactgga

SEQ ID NO: 2100938 - DNA, 15 bp, Homo sapiens
gtaatagcactggag

SEQ ID NO: 2100939 - DNA, 15 bp, Homo sapiens
taatagcactggaga

SEQ ID NO: 2100940 - DNA, 15 bp, Homo sapiens
aatagcactggagag

SEQ ID NO: 2100941 - DNA, 15 bp, Homo sapiens
atagcactggagagt

SEQ ID NO: 2100942 - DNA, 15 bp, Homo sapiens
tagcactggagagtt

SEQ ID NO: 2100943 - DNA, 15 bp, Homo sapiens
agcactggagagttg

SEQ ID NO: 2100944 - DNA, 15 bp, Homo sapiens
gcactggagagttgg

SEQ ID NO: 2100945 - DNA, 15 bp, Homo sapiens
cactggagagttggg

SEQ ID NO: 2100946 - DNA, 15 bp, Homo sapiens
actggagagttgggc

SEQ ID NO: 2100947 - DNA, 15 bp, Homo sapiens
ctggagagttgggca

SEQ ID NO: 2100948 - DNA, 15 bp, Homo sapiens
tggagagttgggcat

SEQ ID NO: 2100949 - DNA, 15 bp, Homo sapiens
ggagagttgggcatg

SEQ ID NO: 2100950 - DNA, 15 bp, Homo sapiens
gagagttgggcatga

SEQ ID NO: 2100951 - DNA, 15 bp, Homo sapiens
agagttgggcatgat

SEQ ID NO: 2100952 - DNA, 15 bp, Homo sapiens
gagttgggcatgatg

SEQ ID NO: 2100953 - DNA, 15 bp, Homo sapiens
agttgggcatgatga

SEQ ID NO: 2100954 - DNA, 15 bp, Homo sapiens
gttgggcatgatgag

SEQ ID NO: 2100955 - DNA, 15 bp, Homo sapiens
ttgggcatgatgaga

SEQ ID NO: 2100956 - DNA, 15 bp, Homo sapiens
tgggcatgatgagac

SEQ ID NO: 2100957 - DNA, 15 bp, Homo sapiens
gggcatgatgagact

SEQ ID NO: 2100958 - DNA, 15 bp, Homo sapiens
ggcatgatgagactt

SEQ ID NO: 2100959 - DNA, 15 bp, Homo sapiens
gcatgatgagacttc

SEQ ID NO: 2100960 - DNA, 15 bp, Homo sapiens
catgatgagacttca

SEQ ID NO: 2100961 - DNA, 15 bp, Homo sapiens
atgatgagacttcaa

SEQ ID NO: 2100962 - DNA, 15 bp, Homo sapiens
tgatgagacttcaat

SEQ ID NO: 2100963 - DNA, 15 bp, Homo sapiens
gatgagacttcaatg

SEQ ID NO: 2100964 - DNA, 15 bp, Homo sapiens
atgagacttcaatga

SEQ ID NO: 2100965 - DNA, 15 bp, Homo sapiens
tgagacttcaatgat

SEQ ID NO: 2100966 - DNA, 15 bp, Homo sapiens
gagacttcaatgatg

SEQ ID NO: 2100967 - DNA, 15 bp, Homo sapiens
agacttcaatgatgt

SEQ ID NO: 2100968 - DNA, 15 bp, Homo sapiens
gacttcaatgatgta

SEQ ID NO: 2100969 - DNA, 15 bp, Homo sapiens
acttcaatgatgtaa

SEQ ID NO: 2100970 - DNA, 15 bp, Homo sapiens
cttcaatgatgtaat

SEQ ID NO: 2100971 - DNA, 15 bp, Homo sapiens
ttcaatgatgtaatc

SEQ ID NO: 2100972 - DNA, 15 bp, Homo sapiens
tcaatgatgtaatct

SEQ ID NO: 2100973 - DNA, 15 bp, Homo sapiens
caatgatgtaatctt

SEQ ID NO: 2100974 - DNA, 15 bp, Homo sapiens
aatgatgtaatcttt

SEQ ID NO: 2100975 - DNA, 15 bp, Homo sapiens
atgatgtaatctttt

SEQ ID NO: 2100976 - DNA, 15 bp, Homo sapiens
tgatgtaatctttta

SEQ ID NO: 2100977 - DNA, 15 bp, Homo sapiens
gatgtaatcttttat

SEQ ID NO: 2100978 - DNA, 15 bp, Homo sapiens
tgtaatcttttataa

SEQ ID NO: 2100979 - DNA, 15 bp, Homo sapiens
gtaatcttttataag

SEQ ID NO: 2100980 - DNA, 15 bp, Homo sapiens
taatcttttataaga

SEQ ID NO: 2100981 - DNA, 15 bp, Homo sapiens
aatcttttataagat

SEQ ID NO: 2100982 - DNA, 15 bp, Homo sapiens
atcttttataagatt

SEQ ID NO: 2100983 - DNA, 15 bp, Homo sapiens
tcttttataagattt

SEQ ID NO: 2100984 - DNA, 15 bp, Homo sapiens
cttttataagatttt

SEQ ID NO: 2100985 - DNA, 15 bp, Homo sapiens
ttttataagattttt

SEQ ID NO: 2100986 - DNA, 15 bp, Homo sapiens
tttataagattttta

SEQ ID NO: 2100987 - DNA, 15 bp, Homo sapiens
ttataagatttttaa

SEQ ID NO: 2100988 - DNA, 15 bp, Homo sapiens
tataagatttttaaa

SEQ ID NO: 2100989 - DNA, 15 bp, Homo sapiens
ataagatttttaaag

SEQ ID NO: 2100990 - DNA, 15 bp, Homo sapiens
taagatttttaaaga

SEQ ID NO: 2100991 - DNA, 15 bp, Homo sapiens
aagatttttaaagaa

SEQ ID NO: 2100992 - DNA, 15 bp, Homo sapiens
agatttttaaagaaa

SEQ ID NO: 2100993 - DNA, 15 bp, Homo sapiens
gatttttaaagaaat

SEQ ID NO: 2100994 - DNA, 15 bp, Homo sapiens
tttttaaagaaatga

SEQ ID NO: 2100995 - DNA, 15 bp, Homo sapiens
ttttaaagaaatgaa

SEQ ID NO: 2100996 - DNA, 15 bp, Homo sapiens
tttaaagaaatgaaa

SEQ ID NO: 2100997 - DNA, 15 bp, Homo sapiens
ttaaagaaatgaaat

SEQ ID NO: 2100998 - DNA, 15 bp, Homo sapiens
taaagaaatgaaata

SEQ ID NO: 2100999 - DNA, 15 bp, Homo sapiens
aaagaaatgaaataa

SEQ ID NO: 2101000 - DNA, 15 bp, Homo sapiens
aagaaatgaaataaa

SEQ ID NO: 2101001 - DNA, 15 bp, Homo sapiens
agaaatgaaataaat

SEQ ID NO: 2101002 - DNA, 15 bp, Homo sapiens
gaaatgaaataaatg

SEQ ID NO: 2101003 - DNA, 15 bp, Homo sapiens
aaatgaaataaatgt

SEQ ID NO: 2101004 - DNA, 15 bp, Homo sapiens
aatgaaataaatgtc

SEQ ID NO: 2101005 - DNA, 15 bp, Homo sapiens
atgaaataaatgtca

SEQ ID NO: 2101006 - DNA, 15 bp, Homo sapiens
tgaaataaatgtcaa

SEQ ID NO: 2101007 - DNA, 15 bp, Homo sapiens
gaaataaatgtcaac

SEQ ID NO: 2101008 - DNA, 15 bp, Homo sapiens
aaataaatgtcaaca

SEQ ID NO: 2101009 - DNA, 15 bp, Homo sapiens
aataaatgtcaacaa

SEQ ID NO: 2101010 - DNA, 15 bp, Homo sapiens
ataaatgtcaacaat

SEQ ID NO: 2101011 - DNA, 15 bp, Homo sapiens
taaatgtcaacaata

SEQ ID NO: 2101012 - DNA, 15 bp, Homo sapiens
aaatgtcaacaataa

SEQ ID NO: 2101013 - DNA, 15 bp, Homo sapiens
aatgtcaacaataac

SEQ ID NO: 2101014 - DNA, 15 bp, Homo sapiens
atgtcaacaataaca

SEQ ID NO: 2101015 - DNA, 15 bp, Homo sapiens
tgtcaacaataacag

SEQ ID NO: 2101016 - DNA, 15 bp, Homo sapiens
gtcaacaataacaga

SEQ ID NO: 2101017 - DNA, 15 bp, Homo sapiens
tcaacaataacagaa

SEQ ID NO: 2101018 - DNA, 15 bp, Homo sapiens
caacaataacagaag

SEQ ID NO: 2101019 - DNA, 15 bp, Homo sapiens
aacaataacagaaga

SEQ ID NO: 2101020 - DNA, 15 bp, Homo sapiens
acaataacagaagaa

SEQ ID NO: 2101021 - DNA, 15 bp, Homo sapiens
caataacagaagaaa

SEQ ID NO: 2101022 - DNA, 15 bp, Homo sapiens
aataacagaagaaaa

SEQ ID NO: 2101023 - DNA, 15 bp, Homo sapiens
ataacagaagaaaat

SEQ ID NO: 2101024 - DNA, 15 bp, Homo sapiens
taacagaagaaaatt

SEQ ID NO: 2101025 - DNA, 15 bp, Homo sapiens
aacagaagaaaattg

SEQ ID NO: 2101026 - DNA, 15 bp, Homo sapiens
acagaagaaaattga

SEQ ID NO: 2101027 - DNA, 15 bp, Homo sapiens
cagaagaaaattgaa

SEQ ID NO: 2101028 - DNA, 15 bp, Homo sapiens
agaagaaaattgaag

SEQ ID NO: 2101029 - DNA, 15 bp, Homo sapiens
gaagaaaattgaaga

SEQ ID NO: 2101030 - DNA, 15 bp, Homo sapiens
aagaaaattgaagat

SEQ ID NO: 2101031 - DNA, 15 bp, Homo sapiens
agaaaattgaagatt

SEQ ID NO: 2101032 - DNA, 15 bp, Homo sapiens
gaaaattgaagatta

SEQ ID NO: 2101033 - DNA, 15 bp, Homo sapiens
aaaattgaagattat

SEQ ID NO: 2101034 - DNA, 15 bp, Homo sapiens
aaattgaagattata

SEQ ID NO: 2101035 - DNA, 15 bp, Homo sapiens
aattgaagattatag

SEQ ID NO: 2101036 - DNA, 15 bp, Homo sapiens
attgaagattatagt

SEQ ID NO: 2101037 - DNA, 15 bp, Homo sapiens
ttgaagattatagta

SEQ ID NO: 2101038 - DNA, 15 bp, Homo sapiens
tgaagattatagtaa

SEQ ID NO: 2101039 - DNA, 15 bp, Homo sapiens
gaagattatagtaag

SEQ ID NO: 2101040 - DNA, 15 bp, Homo sapiens
aagattatagtaagc

SEQ ID NO: 2101041 - DNA, 15 bp, Homo sapiens
agattatagtaagca

SEQ ID NO: 2101042 - DNA, 15 bp, Homo sapiens
gattatagtaagcaa

SEQ ID NO: 2101043 - DNA, 15 bp, Homo sapiens
attatagtaagcaac

SEQ ID NO: 2101044 - DNA, 15 bp, Homo sapiens
ttatagtaagcaact

SEQ ID NO: 2101045 - DNA, 15 bp, Homo sapiens
tatagtaagcaactg

SEQ ID NO: 2101046 - DNA, 15 bp, Homo sapiens
atagtaagcaactga

SEQ ID NO: 2101047 - DNA, 15 bp, Homo sapiens
tagtaagcaactgag

SEQ ID NO: 2101048 - DNA, 15 bp, Homo sapiens
agtaagcaactgaga

SEQ ID NO: 2101049 - DNA, 15 bp, Homo sapiens
gtaagcaactgagac

SEQ ID NO: 2101050 - DNA, 15 bp, Homo sapiens
taagcaactgagaca

SEQ ID NO: 2101051 - DNA, 15 bp, Homo sapiens
aagcaactgagacaa

SEQ ID NO: 2101052 - DNA, 15 bp, Homo sapiens
agcaactgagacaac

SEQ ID NO: 2101053 - DNA, 15 bp, Homo sapiens
gcaactgagacaact

SEQ ID NO: 2101054 - DNA, 15 bp, Homo sapiens
caactgagacaacta

SEQ ID NO: 2101055 - DNA, 15 bp, Homo sapiens
aactgagacaactaa

SEQ ID NO: 2101056 - DNA, 15 bp, Homo sapiens
actgagacaactaaa

SEQ ID NO: 2101057 - DNA, 15 bp, Homo sapiens
ctgagacaactaaag

SEQ ID NO: 2101058 - DNA, 15 bp, Homo sapiens
tgagacaactaaagt

SEQ ID NO: 2101059 - DNA, 15 bp, Homo sapiens
gagacaactaaagta

SEQ ID NO: 2101060 - DNA, 15 bp, Homo sapiens
agacaactaaagtat

SEQ ID NO: 2101061 - DNA, 15 bp, Homo sapiens
gacaactaaagtatt

SEQ ID NO: 2101062 - DNA, 15 bp, Homo sapiens
acaactaaagtattc

SEQ ID NO: 2101063 - DNA, 15 bp, Homo sapiens
caactaaagtattct

SEQ ID NO: 2101064 - DNA, 15 bp, Homo sapiens
aactaaagtattcta

SEQ ID NO: 2101065 - DNA, 15 bp, Homo sapiens
actaaagtattctag

SEQ ID NO: 2101066 - DNA, 15 bp, Homo sapiens
ctaaagtattctaga

SEQ ID NO: 2101067 - DNA, 15 bp, Homo sapiens
taaagtattctagaa

SEQ ID NO: 2101068 - DNA, 15 bp, Homo sapiens
aaagtattctagaac

SEQ ID NO: 2101069 - DNA, 15 bp, Homo sapiens
aagtattctagaacc

SEQ ID NO: 2101070 - DNA, 15 bp, Homo sapiens
agtattctagaacca

SEQ ID NO: 2101071 - DNA, 15 bp, Homo sapiens
gtattctagaaccaa

SEQ ID NO: 2101072 - DNA, 15 bp, Homo sapiens
tattctagaaccaac

SEQ ID NO: 2101073 - DNA, 15 bp, Homo sapiens
attctagaaccaact

SEQ ID NO: 2101074 - DNA, 15 bp, Homo sapiens
ttctagaaccaactg

SEQ ID NO: 2101075 - DNA, 15 bp, Homo sapiens
tctagaaccaactgt

SEQ ID NO: 2101076 - DNA, 15 bp, Homo sapiens
ctagaaccaactgtt

SEQ ID NO: 2101077 - DNA, 15 bp, Homo sapiens
tagaaccaactgttg

SEQ ID NO: 2101078 - DNA, 15 bp, Homo sapiens
agaaccaactgttga

SEQ ID NO: 2101079 - DNA, 15 bp, Homo sapiens
gaaccaactgttgaa

SEQ ID NO: 2101080 - DNA, 15 bp, Homo sapiens
aaccaactgttgaat

SEQ ID NO: 2101081 - DNA, 15 bp, Homo sapiens
accaactgttgaatc

SEQ ID NO: 2101082 - DNA, 15 bp, Homo sapiens
ccaactgttgaatct

SEQ ID NO: 2101083 - DNA, 15 bp, Homo sapiens
caactgttgaatctc

SEQ ID NO: 2101084 - DNA, 15 bp, Homo sapiens
aactgttgaatctcc

SEQ ID NO: 2101085 - DNA, 15 bp, Homo sapiens
actgttgaatctccc

SEQ ID NO: 2101086 - DNA, 15 bp, Homo sapiens
ctgttgaatctcccc

SEQ ID NO: 2101087 - DNA, 15 bp, Homo sapiens
tgttgaatctcccca

SEQ ID NO: 2101088 - DNA, 15 bp, Homo sapiens
gttgaatctccccag

SEQ ID NO: 2101089 - DNA, 15 bp, Homo sapiens
ttgaatctccccagg

SEQ ID NO: 2101090 - DNA, 15 bp, Homo sapiens
tgaatctccccaggt

SEQ ID NO: 2101091 - DNA, 15 bp, Homo sapiens
gaatctccccaggtt

SEQ ID NO: 2101092 - DNA, 15 bp, Homo sapiens
aatctccccaggtta

SEQ ID NO: 2101093 - DNA, 15 bp, Homo sapiens
atctccccaggttat

SEQ ID NO: 2101094 - DNA, 15 bp, Homo sapiens
tctccccaggttatc

SEQ ID NO: 2101095 - DNA, 15 bp, Homo sapiens
ctccccaggttatct

SEQ ID NO: 2101096 - DNA, 15 bp, Homo sapiens
tccccaggttatctg

SEQ ID NO: 2101097 - DNA, 15 bp, Homo sapiens
ccccaggttatctgg

SEQ ID NO: 2101098 - DNA, 15 bp, Homo sapiens
cccaggttatctggt

SEQ ID NO: 2101099 - DNA, 15 bp, Homo sapiens
ccaggttatctggtg

SEQ ID NO: 2101100 - DNA, 15 bp, Homo sapiens
caggttatctggtgc

SEQ ID NO: 2101101 - DNA, 15 bp, Homo sapiens
aggttatctggtgct

SEQ ID NO: 2101102 - DNA, 15 bp, Homo sapiens
ggttatctggtgcta

SEQ ID NO: 2101103 - DNA, 15 bp, Homo sapiens
gttatctggtgctat

SEQ ID NO: 2101104 - DNA, 15 bp, Homo sapiens
ttatctggtgctatt

SEQ ID NO: 2101105 - DNA, 15 bp, Homo sapiens
tatctggtgctatta

SEQ ID NO: 2101106 - DNA, 15 bp, Homo sapiens
atctggtgctattaa

SEQ ID NO: 2101107 - DNA, 15 bp, Homo sapiens
tctggtgctattaaa

SEQ ID NO: 2101108 - DNA, 15 bp, Homo sapiens
ctggtgctattaaat

SEQ ID NO: 2101109 - DNA, 15 bp, Homo sapiens
tggtgctattaaatt

SEQ ID NO: 2101110 - DNA, 15 bp, Homo sapiens
ggtgctattaaattg

SEQ ID NO: 2101111 - DNA, 15 bp, Homo sapiens
gtgctattaaattgc

SEQ ID NO: 2101112 - DNA, 15 bp, Homo sapiens
tgctattaaattgca

SEQ ID NO: 2101113 - DNA, 15 bp, Homo sapiens
gctattaaattgcat

SEQ ID NO: 2101114 - DNA, 15 bp, Homo sapiens
ctattaaattgcata

SEQ ID NO: 2101115 - DNA, 15 bp, Homo sapiens
tattaaattgcataa

SEQ ID NO: 2101116 - DNA, 15 bp, Homo sapiens
attaaattgcataac

SEQ ID NO: 2101117 - DNA, 15 bp, Homo sapiens
ttaaattgcataacc

SEQ ID NO: 2101118 - DNA, 15 bp, Homo sapiens
taaattgcataacct

SEQ ID NO: 2101119 - DNA, 15 bp, Homo sapiens
aaattgcataaccta

SEQ ID NO: 2101120 - DNA, 15 bp, Homo sapiens
aattgcataacctag

SEQ ID NO: 2101121 - DNA, 15 bp, Homo sapiens
attgcataacctagt

SEQ ID NO: 2101122 - DNA, 15 bp, Homo sapiens
ttgcataacctagta

SEQ ID NO: 2101123 - DNA, 15 bp, Homo sapiens
tgcataacctagtat

SEQ ID NO: 2101124 - DNA, 15 bp, Homo sapiens
gcataacctagtatc

SEQ ID NO: 2101125 - DNA, 15 bp, Homo sapiens
cataacctagtatca

SEQ ID NO: 2101126 - DNA, 15 bp, Homo sapiens
ataacctagtatcat

SEQ ID NO: 2101127 - DNA, 15 bp, Homo sapiens
taacctagtatcata

SEQ ID NO: 2101128 - DNA, 15 bp, Homo sapiens
aacctagtatcataa

SEQ ID NO: 2101129 - DNA, 15 bp, Homo sapiens
acctagtatcataag

SEQ ID NO: 2101130 - DNA, 15 bp, Homo sapiens
cctagtatcataaga

SEQ ID NO: 2101131 - DNA, 15 bp, Homo sapiens
ctagtatcataagaa

SEQ ID NO: 2101132 - DNA, 15 bp, Homo sapiens
tagtatcataagaac

SEQ ID NO: 2101133 - DNA, 15 bp, Homo sapiens
agtatcataagaacg

SEQ ID NO: 2101134 - DNA, 15 bp, Homo sapiens
gtatcataagaacgt

SEQ ID NO: 2101135 - DNA, 15 bp, Homo sapiens
tatcataagaacgtt

SEQ ID NO: 2101136 - DNA, 15 bp, Homo sapiens
atcataagaacgttg

SEQ ID NO: 2101137 - DNA, 15 bp, Homo sapiens
tcataagaacgttgt

SEQ ID NO: 2101138 - DNA, 15 bp, Homo sapiens
cataagaacgttgta

SEQ ID NO: 2101139 - DNA, 15 bp, Homo sapiens
ataagaacgttgtac

SEQ ID NO: 2101140 - DNA, 15 bp, Homo sapiens
taagaacgttgtact

SEQ ID NO: 2101141 - DNA, 15 bp, Homo sapiens
aagaacgttgtactc

SEQ ID NO: 2101142 - DNA, 15 bp, Homo sapiens
agaacgttgtactca

SEQ ID NO: 2101143 - DNA, 15 bp, Homo sapiens
gaacgttgtactcaa

SEQ ID NO: 2101144 - DNA, 15 bp, Homo sapiens
aacgttgtactcaag

SEQ ID NO: 2101145 - DNA, 15 bp, Homo sapiens
acgttgtactcaagg

SEQ ID NO: 2101146 - DNA, 15 bp, Homo sapiens
cgttgtactcaaggt

SEQ ID NO: 2101147 - DNA, 15 bp, Homo sapiens
gttgtactcaaggtc

SEQ ID NO: 2101148 - DNA, 15 bp, Homo sapiens
ttgtactcaaggtcc

SEQ ID NO: 2101149 - DNA, 15 bp, Homo sapiens
tgtactcaaggtcca

SEQ ID NO: 2101150 - DNA, 15 bp, Homo sapiens
gtactcaaggtccat

SEQ ID NO: 2101151 - DNA, 15 bp, Homo sapiens
tactcaaggtccatt

SEQ ID NO: 2101152 - DNA, 15 bp, Homo sapiens
actcaaggtccattt

SEQ ID NO: 2101153 - DNA, 15 bp, Homo sapiens
ctcaaggtccatttt

SEQ ID NO: 2101154 - DNA, 15 bp, Homo sapiens
tcaaggtccattttc

SEQ ID NO: 2101155 - DNA, 15 bp, Homo sapiens
caaggtccattttcc

SEQ ID NO: 2101156 - DNA, 15 bp, Homo sapiens
aaggtccattttcca

SEQ ID NO: 2101157 - DNA, 15 bp, Homo sapiens
aggtccattttccaa

SEQ ID NO: 2101158 - DNA, 15 bp, Homo sapiens
ggtccattttccaaa

SEQ ID NO: 2101159 - DNA, 15 bp, Homo sapiens
gtccattttccaaag

SEQ ID NO: 2101160 - DNA, 15 bp, Homo sapiens
tccattttccaaagg

SEQ ID NO: 2101161 - DNA, 15 bp, Homo sapiens
ccattttccaaaggt

SEQ ID NO: 2101162 - DNA, 15 bp, Homo sapiens
cattttccaaaggtt

SEQ ID NO: 2101163 - DNA, 15 bp, Homo sapiens
attttccaaaggtta

SEQ ID NO: 2101164 - DNA, 15 bp, Homo sapiens
ttttccaaaggttat

SEQ ID NO: 2101165 - DNA, 15 bp, Homo sapiens
tttccaaaggttatt

SEQ ID NO: 2101166 - DNA, 15 bp, Homo sapiens
ttccaaaggttatta

SEQ ID NO: 2101167 - DNA, 15 bp, Homo sapiens
tccaaaggttattaa

SEQ ID NO: 2101168 - DNA, 15 bp, Homo sapiens
ccaaaggttattaaa

SEQ ID NO: 2101169 - DNA, 15 bp, Homo sapiens
caaaggttattaaag

SEQ ID NO: 2101170 - DNA, 15 bp, Homo sapiens
aaaggttattaaagt

SEQ ID NO: 2101171 - DNA, 15 bp, Homo sapiens
aaggttattaaagta

SEQ ID NO: 2101172 - DNA, 15 bp, Homo sapiens
aggttattaaagtac

SEQ ID NO: 2101173 - DNA, 15 bp, Homo sapiens
ggttattaaagtact

SEQ ID NO: 2101174 - DNA, 15 bp, Homo sapiens
gttattaaagtactt

SEQ ID NO: 2101175 - DNA, 15 bp, Homo sapiens
ttattaaagtacttc

SEQ ID NO: 2101176 - DNA, 15 bp, Homo sapiens
tattaaagtacttct

SEQ ID NO: 2101177 - DNA, 15 bp, Homo sapiens
attaaagtacttctt

SEQ ID NO: 2101178 - DNA, 15 bp, Homo sapiens
ttaaagtacttcttg

SEQ ID NO: 2101179 - DNA, 15 bp, Homo sapiens
taaagtacttcttga

SEQ ID NO: 2101180 - DNA, 15 bp, Homo sapiens
aaagtacttcttgat

SEQ ID NO: 2101181 - DNA, 15 bp, Homo sapiens
aagtacttcttgatg

SEQ ID NO: 2101182 - DNA, 15 bp, Homo sapiens
agtacttcttgatgt

SEQ ID NO: 2101183 - DNA, 15 bp, Homo sapiens
gtacttcttgatgtg

SEQ ID NO: 2101184 - DNA, 15 bp, Homo sapiens
tacttcttgatgtgg

SEQ ID NO: 2101185 - DNA, 15 bp, Homo sapiens
acttcttgatgtggg

SEQ ID NO: 2101186 - DNA, 15 bp, Homo sapiens
cttcttgatgtgggg

SEQ ID NO: 2101187 - DNA, 15 bp, Homo sapiens
ttcttgatgtgggga

SEQ ID NO: 2101188 - DNA, 15 bp, Homo sapiens
tcttgatgtggggaa

SEQ ID NO: 2101189 - DNA, 15 bp, Homo sapiens
cttgatgtggggaaa

SEQ ID NO: 2101190 - DNA, 15 bp, Homo sapiens
ttgatgtggggaaag

SEQ ID NO: 2101191 - DNA, 15 bp, Homo sapiens
tgatgtggggaaagg

SEQ ID NO: 2101192 - DNA, 15 bp, Homo sapiens
gatgtggggaaaggg

SEQ ID NO: 2101193 - DNA, 15 bp, Homo sapiens
atgtggggaaagggc

SEQ ID NO: 2101194 - DNA, 15 bp, Homo sapiens
tgtggggaaagggca

SEQ ID NO: 2101195 - DNA, 15 bp, Homo sapiens
gtggggaaagggcaa

SEQ ID NO: 2101196 - DNA, 15 bp, Homo sapiens
tggggaaagggcaat

SEQ ID NO: 2101197 - DNA, 15 bp, Homo sapiens
ggggaaagggcaatg

SEQ ID NO: 2101198 - DNA, 15 bp, Homo sapiens
gggaaagggcaatga

SEQ ID NO: 2101199 - DNA, 15 bp, Homo sapiens
ggaaagggcaatgac

SEQ ID NO: 2101200 - DNA, 15 bp, Homo sapiens
gaaagggcaatgacc

SEQ ID NO: 2101201 - DNA, 15 bp, Homo sapiens
aaagggcaatgacca

SEQ ID NO: 2101202 - DNA, 15 bp, Homo sapiens
aagggcaatgaccag

SEQ ID NO: 2101203 - DNA, 15 bp, Homo sapiens
agggcaatgaccagg

SEQ ID NO: 2101204 - DNA, 15 bp, Homo sapiens
gggcaatgaccaggt

SEQ ID NO: 2101205 - DNA, 15 bp, Homo sapiens
ggcaatgaccaggtt

SEQ ID NO: 2101206 - DNA, 15 bp, Homo sapiens
gcaatgaccaggtta

SEQ ID NO: 2101207 - DNA, 15 bp, Homo sapiens
caatgaccaggttat

SEQ ID NO: 2101208 - DNA, 15 bp, Homo sapiens
aatgaccaggttata

SEQ ID NO: 2101209 - DNA, 15 bp, Homo sapiens
atgaccaggttatag

SEQ ID NO: 2101210 - DNA, 15 bp, Homo sapiens
tgaccaggttatagg

SEQ ID NO: 2101211 - DNA, 15 bp, Homo sapiens
gaccaggttataggg

SEQ ID NO: 2101212 - DNA, 15 bp, Homo sapiens
accaggttatagggt

SEQ ID NO: 2101213 - DNA, 15 bp, Homo sapiens
ccaggttatagggta

SEQ ID NO: 2101214 - DNA, 15 bp, Homo sapiens
caggttatagggtag

SEQ ID NO: 2101215 - DNA, 15 bp, Homo sapiens
aggttatagggtaga

SEQ ID NO: 2101216 - DNA, 15 bp, Homo sapiens
ggttatagggtagag

SEQ ID NO: 2101217 - DNA, 15 bp, Homo sapiens
gttatagggtagagc

SEQ ID NO: 2101218 - DNA, 15 bp, Homo sapiens
ttatagggtagagct

SEQ ID NO: 2101219 - DNA, 15 bp, Homo sapiens
tatagggtagagctg

SEQ ID NO: 2101220 - DNA, 15 bp, Homo sapiens
atagggtagagctgg

SEQ ID NO: 2101221 - DNA, 15 bp, Homo sapiens
tagggtagagctggt

SEQ ID NO: 2101222 - DNA, 15 bp, Homo sapiens
agggtagagctggtt

SEQ ID NO: 2101223 - DNA, 15 bp, Homo sapiens
gggtagagctggttt

SEQ ID NO: 2101224 - DNA, 15 bp, Homo sapiens
ggtagagctggttta

SEQ ID NO: 2101225 - DNA, 15 bp, Homo sapiens
gtagagctggtttac

SEQ ID NO: 2101226 - DNA, 15 bp, Homo sapiens
tagagctggtttact

SEQ ID NO: 2101227 - DNA, 15 bp, Homo sapiens
agagctggtttacta

SEQ ID NO: 2101228 - DNA, 15 bp, Homo sapiens
gagctggtttactaa

SEQ ID NO: 2101229 - DNA, 15 bp, Homo sapiens
agctggtttactaag

SEQ ID NO: 2101230 - DNA, 15 bp, Homo sapiens
gctggtttactaagc

SEQ ID NO: 2101231 - DNA, 15 bp, Homo sapiens
ctggtttactaagct

SEQ ID NO: 2101232 - DNA, 15 bp, Homo sapiens
tggtttactaagctt

SEQ ID NO: 2101233 - DNA, 15 bp, Homo sapiens
ggtttactaagcttt

SEQ ID NO: 2101234 - DNA, 15 bp, Homo sapiens
gtttactaagctttg

SEQ ID NO: 2101235 - DNA, 15 bp, Homo sapiens
tttactaagctttgt

SEQ ID NO: 2101236 - DNA, 15 bp, Homo sapiens
ttactaagctttgtt

SEQ ID NO: 2101237 - DNA, 15 bp, Homo sapiens
tactaagctttgttc

SEQ ID NO: 2101238 - DNA, 15 bp, Homo sapiens
actaagctttgttcc

SEQ ID NO: 2101239 - DNA, 15 bp, Homo sapiens
ctaagctttgttcca

SEQ ID NO: 2101240 - DNA, 15 bp, Homo sapiens
taagctttgttccaa

SEQ ID NO: 2101241 - DNA, 15 bp, Homo sapiens
aagctttgttccaac

SEQ ID NO: 2101242 - DNA, 15 bp, Homo sapiens
agctttgttccaact

SEQ ID NO: 2101243 - DNA, 15 bp, Homo sapiens
gctttgttccaactt

SEQ ID NO: 2101244 - DNA, 15 bp, Homo sapiens
ctttgttccaacttg

SEQ ID NO: 2101245 - DNA, 15 bp, Homo sapiens
tttgttccaacttga

SEQ ID NO: 2101246 - DNA, 15 bp, Homo sapiens
ttgttccaacttgac

SEQ ID NO: 2101247 - DNA, 15 bp, Homo sapiens
tgttccaacttgact

SEQ ID NO: 2101248 - DNA, 15 bp, Homo sapiens
gttccaacttgactt

SEQ ID NO: 2101249 - DNA, 15 bp, Homo sapiens
ttccaacttgacttg

SEQ ID NO: 2101250 - DNA, 15 bp, Homo sapiens
tccaacttgacttgc

SEQ ID NO: 2101251 - DNA, 15 bp, Homo sapiens
ccaacttgacttgcc

SEQ ID NO: 2101252 - DNA, 15 bp, Homo sapiens
caacttgacttgccc

SEQ ID NO: 2101253 - DNA, 15 bp, Homo sapiens
aacttgacttgccct

SEQ ID NO: 2101254 - DNA, 15 bp, Homo sapiens
acttgacttgccctc

SEQ ID NO: 2101255 - DNA, 15 bp, Homo sapiens
cttgacttgccctcc

SEQ ID NO: 2101256 - DNA, 15 bp, Homo sapiens
ttgacttgccctcct

SEQ ID NO: 2101257 - DNA, 15 bp, Homo sapiens
tgacttgccctcctt

SEQ ID NO: 2101258 - DNA, 15 bp, Homo sapiens
gacttgccctcctta

SEQ ID NO: 2101259 - DNA, 15 bp, Homo sapiens
acttgccctccttaa

SEQ ID NO: 2101260 - DNA, 15 bp, Homo sapiens
cttgccctccttaac

SEQ ID NO: 2101261 - DNA, 15 bp, Homo sapiens
ttgccctccttaaca

SEQ ID NO: 2101262 - DNA, 15 bp, Homo sapiens
tgccctccttaacac

SEQ ID NO: 2101263 - DNA, 15 bp, Homo sapiens
gccctccttaacact

SEQ ID NO: 2101264 - DNA, 15 bp, Homo sapiens
ccctccttaacacta

SEQ ID NO: 2101265 - DNA, 15 bp, Homo sapiens
cctccttaacactat

SEQ ID NO: 2101266 - DNA, 15 bp, Homo sapiens
ctccttaacactatc

SEQ ID NO: 2101267 - DNA, 15 bp, Homo sapiens
tccttaacactatca

SEQ ID NO: 2101268 - DNA, 15 bp, Homo sapiens
ccttaacactatcac

SEQ ID NO: 2101269 - DNA, 15 bp, Homo sapiens
cttaacactatcact

SEQ ID NO: 2101270 - DNA, 15 bp, Homo sapiens
ttaacactatcactt

SEQ ID NO: 2101271 - DNA, 15 bp, Homo sapiens
taacactatcactta

SEQ ID NO: 2101272 - DNA, 15 bp, Homo sapiens
aacactatcacttat

SEQ ID NO: 2101273 - DNA, 15 bp, Homo sapiens
acactatcacttata

SEQ ID NO: 2101274 - DNA, 15 bp, Homo sapiens
cactatcacttatag

SEQ ID NO: 2101275 - DNA, 15 bp, Homo sapiens
actatcacttatagt

SEQ ID NO: 2101276 - DNA, 15 bp, Homo sapiens
ctatcacttatagtg

SEQ ID NO: 2101277 - DNA, 15 bp, Homo sapiens
tatcacttatagtgt

SEQ ID NO: 2101278 - DNA, 15 bp, Homo sapiens
atcacttatagtgtt

SEQ ID NO: 2101279 - DNA, 15 bp, Homo sapiens
tcacttatagtgtta

SEQ ID NO: 2101280 - DNA, 15 bp, Homo sapiens
cacttatagtgttaa

SEQ ID NO: 2101281 - DNA, 15 bp, Homo sapiens
acttatagtgttaac

SEQ ID NO: 2101282 - DNA, 15 bp, Homo sapiens
cttatagtgttaaca

SEQ ID NO: 2101283 - DNA, 15 bp, Homo sapiens
ttatagtgttaacac

SEQ ID NO: 2101284 - DNA, 15 bp, Homo sapiens
tatagtgttaacact

SEQ ID NO: 2101285 - DNA, 15 bp, Homo sapiens
atagtgttaacacta

SEQ ID NO: 2101286 - DNA, 15 bp, Homo sapiens
tagtgttaacactaa

SEQ ID NO: 2101287 - DNA, 15 bp, Homo sapiens
agtgttaacactaac

SEQ ID NO: 2101288 - DNA, 15 bp, Homo sapiens
gtgttaacactaaca

SEQ ID NO: 2101289 - DNA, 15 bp, Homo sapiens
tgttaacactaacac

SEQ ID NO: 2101290 - DNA, 15 bp, Homo sapiens
gttaacactaacaca

SEQ ID NO: 2101291 - DNA, 15 bp, Homo sapiens
ttaacactaacacat

SEQ ID NO: 2101292 - DNA, 15 bp, Homo sapiens
taacactaacacata

SEQ ID NO: 2101293 - DNA, 15 bp, Homo sapiens
aacactaacacataa

SEQ ID NO: 2101294 - DNA, 15 bp, Homo sapiens
acactaacacataaa

SEQ ID NO: 2101295 - DNA, 15 bp, Homo sapiens
cactaacacataaat

SEQ ID NO: 2101296 - DNA, 15 bp, Homo sapiens
actaacacataaatc

SEQ ID NO: 2101297 - DNA, 15 bp, Homo sapiens
ctaacacataaatcc

SEQ ID NO: 2101298 - DNA, 15 bp, Homo sapiens
taacacataaatcct

SEQ ID NO: 2101299 - DNA, 15 bp, Homo sapiens
aacacataaatcctt

SEQ ID NO: 2101300 - DNA, 15 bp, Homo sapiens
acacataaatccttc

SEQ ID NO: 2101301 - DNA, 15 bp, Homo sapiens
cacataaatccttct

SEQ ID NO: 2101302 - DNA, 15 bp, Homo sapiens
acataaatccttctt

SEQ ID NO: 2101303 - DNA, 15 bp, Homo sapiens
cataaatccttcttc

SEQ ID NO: 2101304 - DNA, 15 bp, Homo sapiens
ataaatccttcttct

SEQ ID NO: 2101305 - DNA, 15 bp, Homo sapiens
taaatccttcttctt

SEQ ID NO: 2101306 - DNA, 15 bp, Homo sapiens
aaatccttcttcttt

SEQ ID NO: 2101307 - DNA, 15 bp, Homo sapiens
aatccttcttctttg

SEQ ID NO: 2101308 - DNA, 15 bp, Homo sapiens
atccttcttctttga

SEQ ID NO: 2101309 - DNA, 15 bp, Homo sapiens
tccttcttctttgac

SEQ ID NO: 2101310 - DNA, 15 bp, Homo sapiens
ccttcttctttgact

SEQ ID NO: 2101311 - DNA, 15 bp, Homo sapiens
cttcttctttgactg

SEQ ID NO: 2101312 - DNA, 15 bp, Homo sapiens
ttcttctttgactgc

SEQ ID NO: 2101313 - DNA, 15 bp, Homo sapiens
tcttctttgactgcc

SEQ ID NO: 2101314 - DNA, 15 bp, Homo sapiens
cttctttgactgccg

SEQ ID NO: 2101315 - DNA, 15 bp, Homo sapiens
ttctttgactgccgg

SEQ ID NO: 2101316 - DNA, 15 bp, Homo sapiens
tctttgactgccgga

SEQ ID NO: 2101317 - DNA, 15 bp, Homo sapiens
ctttgactgccggaa

SEQ ID NO: 2101318 - DNA, 15 bp, Homo sapiens
tttgactgccggaag

SEQ ID NO: 2101319 - DNA, 15 bp, Homo sapiens
ttgactgccggaagt

SEQ ID NO: 2101320 - DNA, 15 bp, Homo sapiens
tgactgccggaagtt

SEQ ID NO: 2101321 - DNA, 15 bp, Homo sapiens
gactgccggaagttc

SEQ ID NO: 2101322 - DNA, 15 bp, Homo sapiens
actgccggaagttcc

SEQ ID NO: 2101323 - DNA, 15 bp, Homo sapiens
ctgccggaagttcca

SEQ ID NO: 2101324 - DNA, 15 bp, Homo sapiens
tgccggaagttccat

SEQ ID NO: 2101325 - DNA, 15 bp, Homo sapiens
gccggaagttccatc

SEQ ID NO: 2101326 - DNA, 15 bp, Homo sapiens
ccggaagttccatct

SEQ ID NO: 2101327 - DNA, 15 bp, Homo sapiens
cggaagttccatcta

SEQ ID NO: 2101328 - DNA, 15 bp, Homo sapiens
ggaagttccatctag

SEQ ID NO: 2101329 - DNA, 15 bp, Homo sapiens
gaagttccatctagt

SEQ ID NO: 2101330 - DNA, 15 bp, Homo sapiens
aagttccatctagtc

SEQ ID NO: 2101331 - DNA, 15 bp, Homo sapiens
agttccatctagtcc

SEQ ID NO: 2101332 - DNA, 15 bp, Homo sapiens
gttccatctagtccc

SEQ ID NO: 2101333 - DNA, 15 bp, Homo sapiens
ttccatctagtccct

SEQ ID NO: 2101334 - DNA, 15 bp, Homo sapiens
tccatctagtcccta

SEQ ID NO: 2101335 - DNA, 15 bp, Homo sapiens
ccatctagtccctat

SEQ ID NO: 2101336 - DNA, 15 bp, Homo sapiens
catctagtccctatt

SEQ ID NO: 2101337 - DNA, 15 bp, Homo sapiens
atctagtccctattt

SEQ ID NO: 2101338 - DNA, 15 bp, Homo sapiens
tctagtccctatttc

SEQ ID NO: 2101339 - DNA, 15 bp, Homo sapiens
ctagtccctatttcc

SEQ ID NO: 2101340 - DNA, 15 bp, Homo sapiens
tagtccctatttcca

SEQ ID NO: 2101341 - DNA, 15 bp, Homo sapiens
agtccctatttccat

SEQ ID NO: 2101342 - DNA, 15 bp, Homo sapiens
gtccctatttccatt

SEQ ID NO: 2101343 - DNA, 15 bp, Homo sapiens
tccctatttccattt

SEQ ID NO: 2101344 - DNA, 15 bp, Homo sapiens
ccctatttccatttt

SEQ ID NO: 2101345 - DNA, 15 bp, Homo sapiens
cctatttccattttg

SEQ ID NO: 2101346 - DNA, 15 bp, Homo sapiens
ctatttccattttga

SEQ ID NO: 2101347 - DNA, 15 bp, Homo sapiens
tatttccattttgac

SEQ ID NO: 2101348 - DNA, 15 bp, Homo sapiens
atttccattttgact

SEQ ID NO: 2101349 - DNA, 15 bp, Homo sapiens
tttccattttgactt

SEQ ID NO: 2101350 - DNA, 15 bp, Homo sapiens
ttccattttgacttt

SEQ ID NO: 2101351 - DNA, 15 bp, Homo sapiens
tccattttgactttc

SEQ ID NO: 2101352 - DNA, 15 bp, Homo sapiens
ccattttgactttct

SEQ ID NO: 2101353 - DNA, 15 bp, Homo sapiens
cattttgactttctc

SEQ ID NO: 2101354 - DNA, 15 bp, Homo sapiens
attttgactttctct

SEQ ID NO: 2101355 - DNA, 15 bp, Homo sapiens
ttttgactttctcta

SEQ ID NO: 2101356 - DNA, 15 bp, Homo sapiens
tttgactttctctag

SEQ ID NO: 2101357 - DNA, 15 bp, Homo sapiens
ttgactttctctagt

SEQ ID NO: 2101358 - DNA, 15 bp, Homo sapiens
tgactttctctagtg

SEQ ID NO: 2101359 - DNA, 15 bp, Homo sapiens
gactttctctagtgt

SEQ ID NO: 2101360 - DNA, 15 bp, Homo sapiens
actttctctagtgtc

SEQ ID NO: 2101361 - DNA, 15 bp, Homo sapiens
ctttctctagtgtct

SEQ ID NO: 2101362 - DNA, 15 bp, Homo sapiens
tttctctagtgtctt

SEQ ID NO: 2101363 - DNA, 15 bp, Homo sapiens
ttctctagtgtcttt

SEQ ID NO: 2101364 - DNA, 15 bp, Homo sapiens
tctctagtgtcttta

SEQ ID NO: 2101365 - DNA, 15 bp, Homo sapiens
ctctagtgtctttaa

SEQ ID NO: 2101366 - DNA, 15 bp, Homo sapiens
tctagtgtctttaat

SEQ ID NO: 2101367 - DNA, 15 bp, Homo sapiens
ctagtgtctttaatc

SEQ ID NO: 2101368 - DNA, 15 bp, Homo sapiens
tagtgtctttaatca

SEQ ID NO: 2101369 - DNA, 15 bp, Homo sapiens
agtgtctttaatcat

SEQ ID NO: 2101370 - DNA, 15 bp, Homo sapiens
gtgtctttaatcatt

SEQ ID NO: 2101371 - DNA, 15 bp, Homo sapiens
tgtctttaatcattc

SEQ ID NO: 2101372 - DNA, 15 bp, Homo sapiens
gtctttaatcattcc

SEQ ID NO: 2101373 - DNA, 15 bp, Homo sapiens
tctttaatcattcca

SEQ ID NO: 2101374 - DNA, 15 bp, Homo sapiens
ctttaatcattccat

SEQ ID NO: 2101375 - DNA, 15 bp, Homo sapiens
tttaatcattccata

SEQ ID NO: 2101376 - DNA, 15 bp, Homo sapiens
ttaatcattccatag

SEQ ID NO: 2101377 - DNA, 15 bp, Homo sapiens
taatcattccatagg

SEQ ID NO: 2101378 - DNA, 15 bp, Homo sapiens
aatcattccataggt

SEQ ID NO: 2101379 - DNA, 15 bp, Homo sapiens
atcattccataggtg

SEQ ID NO: 2101380 - DNA, 15 bp, Homo sapiens
tcattccataggtgc

SEQ ID NO: 2101381 - DNA, 15 bp, Homo sapiens
cattccataggtgcc

SEQ ID NO: 2101382 - DNA, 15 bp, Homo sapiens
attccataggtgccc

SEQ ID NO: 2101383 - DNA, 15 bp, Homo sapiens
ttccataggtgccca

SEQ ID NO: 2101384 - DNA, 15 bp, Homo sapiens
tccataggtgcccat

SEQ ID NO: 2101385 - DNA, 15 bp, Homo sapiens
ccataggtgcccata

SEQ ID NO: 2101386 - DNA, 15 bp, Homo sapiens
cataggtgcccatag

SEQ ID NO: 2101387 - DNA, 15 bp, Homo sapiens
ataggtgcccatagt

SEQ ID NO: 2101388 - DNA, 15 bp, Homo sapiens
taggtgcccatagtg

SEQ ID NO: 2101389 - DNA, 15 bp, Homo sapiens
aggtgcccatagtgg

SEQ ID NO: 2101390 - DNA, 15 bp, Homo sapiens
ggtgcccatagtggg

SEQ ID NO: 2101391 - DNA, 15 bp, Homo sapiens
gtgcccatagtggga

SEQ ID NO: 2101392 - DNA, 15 bp, Homo sapiens
tgcccatagtgggag

SEQ ID NO: 2101393 - DNA, 15 bp, Homo sapiens
gcccatagtgggaga

SEQ ID NO: 2101394 - DNA, 15 bp, Homo sapiens
cccatagtgggagaa

SEQ ID NO: 2101395 - DNA, 15 bp, Homo sapiens
ccatagtgggagaag

SEQ ID NO: 2101396 - DNA, 15 bp, Homo sapiens
catagtgggagaagg

SEQ ID NO: 2101397 - DNA, 15 bp, Homo sapiens
atagtgggagaaggt

SEQ ID NO: 2101398 - DNA, 15 bp, Homo sapiens
tagtgggagaaggtg

SEQ ID NO: 2101399 - DNA, 15 bp, Homo sapiens
agtgggagaaggtga

SEQ ID NO: 2101400 - DNA, 15 bp, Homo sapiens
gtgggagaaggtgag

SEQ ID NO: 2101401 - DNA, 15 bp, Homo sapiens
tgggagaaggtgaga

SEQ ID NO: 2101402 - DNA, 15 bp, Homo sapiens
gggagaaggtgagac

SEQ ID NO: 2101403 - DNA, 15 bp, Homo sapiens
ggagaaggtgagacc

SEQ ID NO: 2101404 - DNA, 15 bp, Homo sapiens
gagaaggtgagacca

SEQ ID NO: 2101405 - DNA, 15 bp, Homo sapiens
agaaggtgagaccag

SEQ ID NO: 2101406 - DNA, 15 bp, Homo sapiens
gaaggtgagaccagc

SEQ ID NO: 2101407 - DNA, 15 bp, Homo sapiens
aaggtgagaccagcc

SEQ ID NO: 2101408 - DNA, 15 bp, Homo sapiens
aggtgagaccagcca

SEQ ID NO: 2101409 - DNA, 15 bp, Homo sapiens
ggtgagaccagccac

SEQ ID NO: 2101410 - DNA, 15 bp, Homo sapiens
gtgagaccagccaca

SEQ ID NO: 2101411 - DNA, 15 bp, Homo sapiens
tgagaccagccacag

SEQ ID NO: 2101412 - DNA, 15 bp, Homo sapiens
gagaccagccacagt

SEQ ID NO: 2101413 - DNA, 15 bp, Homo sapiens
agaccagccacagta

SEQ ID NO: 2101414 - DNA, 15 bp, Homo sapiens
gaccagccacagtaa

SEQ ID NO: 2101415 - DNA, 15 bp, Homo sapiens
accagccacagtaat

SEQ ID NO: 2101416 - DNA, 15 bp, Homo sapiens
ccagccacagtaata

SEQ ID NO: 2101417 - DNA, 15 bp, Homo sapiens
cagccacagtaatag

SEQ ID NO: 2101418 - DNA, 15 bp, Homo sapiens
agccacagtaatagt

SEQ ID NO: 2101419 - DNA, 15 bp, Homo sapiens
gccacagtaatagtg

SEQ ID NO: 2101420 - DNA, 15 bp, Homo sapiens
ccacagtaatagtga

SEQ ID NO: 2101421 - DNA, 15 bp, Homo sapiens
cacagtaatagtgac

SEQ ID NO: 2101422 - DNA, 15 bp, Homo sapiens
acagtaatagtgaca

SEQ ID NO: 2101423 - DNA, 15 bp, Homo sapiens
cagtaatagtgacac

SEQ ID NO: 2101424 - DNA, 15 bp, Homo sapiens
agtaatagtgacact

SEQ ID NO: 2101425 - DNA, 15 bp, Homo sapiens
gtaatagtgacactg

SEQ ID NO: 2101426 - DNA, 15 bp, Homo sapiens
taatagtgacactga

SEQ ID NO: 2101427 - DNA, 15 bp, Homo sapiens
aatagtgacactgat

SEQ ID NO: 2101428 - DNA, 15 bp, Homo sapiens
atagtgacactgata

SEQ ID NO: 2101429 - DNA, 15 bp, Homo sapiens
tagtgacactgataa

SEQ ID NO: 2101430 - DNA, 15 bp, Homo sapiens
agtgacactgataat

SEQ ID NO: 2101431 - DNA, 15 bp, Homo sapiens
gtgacactgataatg

SEQ ID NO: 2101432 - DNA, 15 bp, Homo sapiens
tgacactgataatgt

SEQ ID NO: 2101433 - DNA, 15 bp, Homo sapiens
gacactgataatgtg

SEQ ID NO: 2101434 - DNA, 15 bp, Homo sapiens
acactgataatgtga

SEQ ID NO: 2101435 - DNA, 15 bp, Homo sapiens
cactgataatgtgaa

SEQ ID NO: 2101436 - DNA, 15 bp, Homo sapiens
actgataatgtgaag

SEQ ID NO: 2101437 - DNA, 15 bp, Homo sapiens
ctgataatgtgaagg

SEQ ID NO: 2101438 - DNA, 15 bp, Homo sapiens
tgataatgtgaaggt

SEQ ID NO: 2101439 - DNA, 15 bp, Homo sapiens
gataatgtgaaggtc

SEQ ID NO: 2101440 - DNA, 15 bp, Homo sapiens
ataatgtgaaggtca

SEQ ID NO: 2101441 - DNA, 15 bp, Homo sapiens
taatgtgaaggtcac

SEQ ID NO: 2101442 - DNA, 15 bp, Homo sapiens
aatgtgaaggtcacc

SEQ ID NO: 2101443 - DNA, 15 bp, Homo sapiens
atgtgaaggtcacca

SEQ ID NO: 2101444 - DNA, 15 bp, Homo sapiens
tgtgaaggtcaccat

SEQ ID NO: 2101445 - DNA, 15 bp, Homo sapiens
gtgaaggtcaccatt

SEQ ID NO: 2101446 - DNA, 15 bp, Homo sapiens
tgaaggtcaccattt

SEQ ID NO: 2101447 - DNA, 15 bp, Homo sapiens
gaaggtcaccatttg

SEQ ID NO: 2101448 - DNA, 15 bp, Homo sapiens
aaggtcaccatttgc

SEQ ID NO: 2101449 - DNA, 15 bp, Homo sapiens
aggtcaccatttgca

SEQ ID NO: 2101450 - DNA, 15 bp, Homo sapiens
ggtcaccatttgcag

SEQ ID NO: 2101451 - DNA, 15 bp, Homo sapiens
gtcaccatttgcagc

SEQ ID NO: 2101452 - DNA, 15 bp, Homo sapiens
tcaccatttgcagca

SEQ ID NO: 2101453 - DNA, 15 bp, Homo sapiens
caccatttgcagcat

SEQ ID NO: 2101454 - DNA, 15 bp, Homo sapiens
accatttgcagcata

SEQ ID NO: 2101455 - DNA, 15 bp, Homo sapiens
ccatttgcagcataa

SEQ ID NO: 2101456 - DNA, 15 bp, Homo sapiens
catttgcagcataaa

SEQ ID NO: 2101457 - DNA, 15 bp, Homo sapiens
atttgcagcataaag

SEQ ID NO: 2101458 - DNA, 15 bp, Homo sapiens
tttgcagcataaaga

SEQ ID NO: 2101459 - DNA, 15 bp, Homo sapiens
ttgcagcataaagaa

SEQ ID NO: 2101460 - DNA, 15 bp, Homo sapiens
tgcagcataaagaaa

SEQ ID NO: 2101461 - DNA, 15 bp, Homo sapiens
gcagcataaagaaat

SEQ ID NO: 2101462 - DNA, 15 bp, Homo sapiens
cagcataaagaaatg

SEQ ID NO: 2101463 - DNA, 15 bp, Homo sapiens
agcataaagaaatgt

SEQ ID NO: 2101464 - DNA, 15 bp, Homo sapiens
gcataaagaaatgtt

SEQ ID NO: 2101465 - DNA, 15 bp, Homo sapiens
cataaagaaatgttt

SEQ ID NO: 2101466 - DNA, 15 bp, Homo sapiens
ataaagaaatgtttc

SEQ ID NO: 2101467 - DNA, 15 bp, Homo sapiens
taaagaaatgtttct

SEQ ID NO: 2101468 - DNA, 15 bp, Homo sapiens
aaagaaatgtttctc

SEQ ID NO: 2101469 - DNA, 15 bp, Homo sapiens
aagaaatgtttctct

SEQ ID NO: 2101470 - DNA, 15 bp, Homo sapiens
agaaatgtttctctg

SEQ ID NO: 2101471 - DNA, 15 bp, Homo sapiens
gaaatgtttctctgt

SEQ ID NO: 2101472 - DNA, 15 bp, Homo sapiens
aaatgtttctctgtg

SEQ ID NO: 2101473 - DNA, 15 bp, Homo sapiens
aatgtttctctgtgt

SEQ ID NO: 2101474 - DNA, 15 bp, Homo sapiens
atgtttctctgtgtt

SEQ ID NO: 2101475 - DNA, 15 bp, Homo sapiens
tgtttctctgtgttc

SEQ ID NO: 2101476 - DNA, 15 bp, Homo sapiens
gtttctctgtgttca

SEQ ID NO: 2101477 - DNA, 15 bp, Homo sapiens
tttctctgtgttcat

SEQ ID NO: 2101478 - DNA, 15 bp, Homo sapiens
ttctctgtgttcatg

SEQ ID NO: 2101479 - DNA, 15 bp, Homo sapiens
tctctgtgttcatgc

SEQ ID NO: 2101480 - DNA, 15 bp, Homo sapiens
ctctgtgttcatgcg

SEQ ID NO: 2101481 - DNA, 15 bp, Homo sapiens
tctgtgttcatgcgt

SEQ ID NO: 2101482 - DNA, 15 bp, Homo sapiens
ctgtgttcatgcgtg

SEQ ID NO: 2101483 - DNA, 15 bp, Homo sapiens
tgtgttcatgcgtgt

SEQ ID NO: 2101484 - DNA, 15 bp, Homo sapiens
gtgttcatgcgtgtg

SEQ ID NO: 2101485 - DNA, 15 bp, Homo sapiens
tgttcatgcgtgtga

SEQ ID NO: 2101486 - DNA, 15 bp, Homo sapiens
gttcatgcgtgtgac

SEQ ID NO: 2101487 - DNA, 15 bp, Homo sapiens
ttcatgcgtgtgacc

SEQ ID NO: 2101488 - DNA, 15 bp, Homo sapiens
tcatgcgtgtgacct

SEQ ID NO: 2101489 - DNA, 15 bp, Homo sapiens
catgcgtgtgacctt

SEQ ID NO: 2101490 - DNA, 15 bp, Homo sapiens
atgcgtgtgacctta

SEQ ID NO: 2101491 - DNA, 15 bp, Homo sapiens
tgcgtgtgaccttaa

SEQ ID NO: 2101492 - DNA, 15 bp, Homo sapiens
gcgtgtgaccttaaa

SEQ ID NO: 2101493 - DNA, 15 bp, Homo sapiens
cgtgtgaccttaaat

SEQ ID NO: 2101494 - DNA, 15 bp, Homo sapiens
gtgtgaccttaaatt

SEQ ID NO: 2101495 - DNA, 15 bp, Homo sapiens
tgtgaccttaaattt

SEQ ID NO: 2101496 - DNA, 15 bp, Homo sapiens
gtgaccttaaattta

SEQ ID NO: 2101497 - DNA, 15 bp, Homo sapiens
tgaccttaaatttac

SEQ ID NO: 2101498 - DNA, 15 bp, Homo sapiens
gaccttaaatttact

SEQ ID NO: 2101499 - DNA, 15 bp, Homo sapiens
accttaaatttactt

SEQ ID NO: 2101500 - DNA, 15 bp, Homo sapiens
ccttaaatttactta

SEQ ID NO: 2101501 - DNA, 15 bp, Homo sapiens
cttaaatttacttaa

SEQ ID NO: 2101502 - DNA, 15 bp, Homo sapiens
ttaaatttacttaag

SEQ ID NO: 2101503 - DNA, 15 bp, Homo sapiens
taaatttacttaaga

SEQ ID NO: 2101504 - DNA, 15 bp, Homo sapiens
atttacttaagaaag

SEQ ID NO: 2101505 - DNA, 15 bp, Homo sapiens
tttacttaagaaagc

SEQ ID NO: 2101506 - DNA, 15 bp, Homo sapiens
ttacttaagaaagcc

SEQ ID NO: 2101507 - DNA, 15 bp, Homo sapiens
tacttaagaaagcca

SEQ ID NO: 2101508 - DNA, 15 bp, Homo sapiens
acttaagaaagccag

SEQ ID NO: 2101509 - DNA, 15 bp, Homo sapiens
cttaagaaagccagg

SEQ ID NO: 2101510 - DNA, 15 bp, Homo sapiens
ttaagaaagccaggg

SEQ ID NO: 2101511 - DNA, 15 bp, Homo sapiens
taagaaagccagggg

SEQ ID NO: 2101512 - DNA, 15 bp, Homo sapiens
aagaaagccagggga

SEQ ID NO: 2101513 - DNA, 15 bp, Homo sapiens
agaaagccaggggac

SEQ ID NO: 2101514 - DNA, 15 bp, Homo sapiens
gaaagccaggggaca

SEQ ID NO: 2101515 - DNA, 15 bp, Homo sapiens
aaagccaggggacat

SEQ ID NO: 2101516 - DNA, 15 bp, Homo sapiens
aagccaggggacatc

SEQ ID NO: 2101517 - DNA, 15 bp, Homo sapiens
agccaggggacatcc

SEQ ID NO: 2101518 - DNA, 15 bp, Homo sapiens
gccaggggacatcca

SEQ ID NO: 2101519 - DNA, 15 bp, Homo sapiens
ccaggggacatccaa

SEQ ID NO: 2101520 - DNA, 15 bp, Homo sapiens
caggggacatccaaa

SEQ ID NO: 2101521 - DNA, 15 bp, Homo sapiens
aggggacatccaaaa

SEQ ID NO: 2101522 - DNA, 15 bp, Homo sapiens
ggggacatccaaaaa

SEQ ID NO: 2101523 - DNA, 15 bp, Homo sapiens
gggacatccaaaaag

SEQ ID NO: 2101524 - DNA, 15 bp, Homo sapiens
ggacatccaaaaaga

SEQ ID NO: 2101525 - DNA, 15 bp, Homo sapiens
gacatccaaaaagaa

SEQ ID NO: 2101526 - DNA, 15 bp, Homo sapiens
acatccaaaaagaag

SEQ ID NO: 2101527 - DNA, 15 bp, Homo sapiens
catccaaaaagaagg

SEQ ID NO: 2101528 - DNA, 15 bp, Homo sapiens
atccaaaaagaagga

SEQ ID NO: 2101529 - DNA, 15 bp, Homo sapiens
tccaaaaagaaggaa

SEQ ID NO: 2101530 - DNA, 15 bp, Homo sapiens
ccaaaaagaaggaaa

SEQ ID NO: 2101531 - DNA, 15 bp, Homo sapiens
caaaaagaaggaaaa

SEQ ID NO: 2101532 - DNA, 15 bp, Homo sapiens
aaaaagaaggaaaac

SEQ ID NO: 2101533 - DNA, 15 bp, Homo sapiens
aaaagaaggaaaaca

SEQ ID NO: 2101534 - DNA, 15 bp, Homo sapiens
aaagaaggaaaacag

SEQ ID NO: 2101535 - DNA, 15 bp, Homo sapiens
aagaaggaaaacagt

SEQ ID NO: 2101536 - DNA, 15 bp, Homo sapiens
agaaggaaaacagta

SEQ ID NO: 2101537 - DNA, 15 bp, Homo sapiens
gaaggaaaacagtac

SEQ ID NO: 2101538 - DNA, 15 bp, Homo sapiens
aaggaaaacagtaca

SEQ ID NO: 2101539 - DNA, 15 bp, Homo sapiens
aggaaaacagtacaa

SEQ ID NO: 2101540 - DNA, 15 bp, Homo sapiens
ggaaaacagtacaaa

SEQ ID NO: 2101541 - DNA, 15 bp, Homo sapiens
gaaaacagtacaaaa

SEQ ID NO: 2101542 - DNA, 15 bp, Homo sapiens
aaaacagtacaaaag

SEQ ID NO: 2101543 - DNA, 15 bp, Homo sapiens
aaacagtacaaaagg

SEQ ID NO: 2101544 - DNA, 15 bp, Homo sapiens
aacagtacaaaagga

SEQ ID NO: 2101545 - DNA, 15 bp, Homo sapiens
acagtacaaaaggaa

SEQ ID NO: 2101546 - DNA, 15 bp, Homo sapiens
cagtacaaaaggaat

SEQ ID NO: 2101547 - DNA, 15 bp, Homo sapiens
agtacaaaaggaatt

SEQ ID NO: 2101548 - DNA, 15 bp, Homo sapiens
gtacaaaaggaattt

SEQ ID NO: 2101549 - DNA, 15 bp, Homo sapiens
tacaaaaggaatttg

SEQ ID NO: 2101550 - DNA, 15 bp, Homo sapiens
acaaaaggaatttga

SEQ ID NO: 2101551 - DNA, 15 bp, Homo sapiens
caaaaggaatttgag

SEQ ID NO: 2101552 - DNA, 15 bp, Homo sapiens
aaaaggaatttgagt

SEQ ID NO: 2101553 - DNA, 15 bp, Homo sapiens
aaaggaatttgagtt

SEQ ID NO: 2101554 - DNA, 15 bp, Homo sapiens
aaggaatttgagtta

SEQ ID NO: 2101555 - DNA, 15 bp, Homo sapiens
aggaatttgagttac

SEQ ID NO: 2101556 - DNA, 15 bp, Homo sapiens
ggaatttgagttacc

SEQ ID NO: 2101557 - DNA, 15 bp, Homo sapiens
gaatttgagttacct

SEQ ID NO: 2101558 - DNA, 15 bp, Homo sapiens
aatttgagttacctg

SEQ ID NO: 2101559 - DNA, 15 bp, Homo sapiens
atttgagttacctgt

SEQ ID NO: 2101560 - DNA, 15 bp, Homo sapiens
tttgagttacctgtt

SEQ ID NO: 2101561 - DNA, 15 bp, Homo sapiens
ttgagttacctgttt

SEQ ID NO: 2101562 - DNA, 15 bp, Homo sapiens
tgagttacctgtttg

SEQ ID NO: 2101563 - DNA, 15 bp, Homo sapiens
gagttacctgtttgt

SEQ ID NO: 2101564 - DNA, 15 bp, Homo sapiens
agttacctgtttgtt

SEQ ID NO: 2101565 - DNA, 15 bp, Homo sapiens
gttacctgtttgtta

SEQ ID NO: 2101566 - DNA, 15 bp, Homo sapiens
ttacctgtttgttac

SEQ ID NO: 2101567 - DNA, 15 bp, Homo sapiens
tacctgtttgttacc

SEQ ID NO: 2101568 - DNA, 15 bp, Homo sapiens
acctgtttgttacct

SEQ ID NO: 2101569 - DNA, 15 bp, Homo sapiens
cctgtttgttacctg

SEQ ID NO: 2101570 - DNA, 15 bp, Homo sapiens
ctgtttgttacctgt

SEQ ID NO: 2101571 - DNA, 15 bp, Homo sapiens
tgtttgttacctgtg

SEQ ID NO: 2101572 - DNA, 15 bp, Homo sapiens
gtttgttacctgtgc

SEQ ID NO: 2101573 - DNA, 15 bp, Homo sapiens
tttgttacctgtgct

SEQ ID NO: 2101574 - DNA, 15 bp, Homo sapiens
ttgttacctgtgctt

SEQ ID NO: 2101575 - DNA, 15 bp, Homo sapiens
tgttacctgtgcttg

SEQ ID NO: 2101576 - DNA, 15 bp, Homo sapiens
gttacctgtgcttga

SEQ ID NO: 2101577 - DNA, 15 bp, Homo sapiens
ttacctgtgcttgaa

SEQ ID NO: 2101578 - DNA, 15 bp, Homo sapiens
tacctgtgcttgaaa

SEQ ID NO: 2101579 - DNA, 15 bp, Homo sapiens
acctgtgcttgaaat

SEQ ID NO: 2101580 - DNA, 15 bp, Homo sapiens
cctgtgcttgaaatg

SEQ ID NO: 2101581 - DNA, 15 bp, Homo sapiens
ctgtgcttgaaatgt

SEQ ID NO: 2101582 - DNA, 15 bp, Homo sapiens
tgtgcttgaaatgtt

SEQ ID NO: 2101583 - DNA, 15 bp, Homo sapiens
gtgcttgaaatgtta

SEQ ID NO: 2101584 - DNA, 15 bp, Homo sapiens
tgcttgaaatgttac

SEQ ID NO: 2101585 - DNA, 15 bp, Homo sapiens
gcttgaaatgttacc

SEQ ID NO: 2101586 - DNA, 15 bp, Homo sapiens
cttgaaatgttaccc

SEQ ID NO: 2101587 - DNA, 15 bp, Homo sapiens
ttgaaatgttaccct

SEQ ID NO: 2101588 - DNA, 15 bp, Homo sapiens
tgaaatgttaccctt

SEQ ID NO: 2101589 - DNA, 15 bp, Homo sapiens
gaaatgttacccttg

SEQ ID NO: 2101590 - DNA, 15 bp, Homo sapiens
aaatgttacccttgg

SEQ ID NO: 2101591 - DNA, 15 bp, Homo sapiens
aatgttacccttggt

SEQ ID NO: 2101592 - DNA, 15 bp, Homo sapiens
atgttacccttggta

SEQ ID NO: 2101593 - DNA, 15 bp, Homo sapiens
tgttacccttggtat

SEQ ID NO: 2101594 - DNA, 15 bp, Homo sapiens
gttacccttggtatc

SEQ ID NO: 2101595 - DNA, 15 bp, Homo sapiens
ttacccttggtatca

SEQ ID NO: 2101596 - DNA, 15 bp, Homo sapiens
tacccttggtatcag

SEQ ID NO: 2101597 - DNA, 15 bp, Homo sapiens
acccttggtatcaga

SEQ ID NO: 2101598 - DNA, 15 bp, Homo sapiens
cccttggtatcagat

SEQ ID NO: 2101599 - DNA, 15 bp, Homo sapiens
ccttggtatcagatg

SEQ ID NO: 2101600 - DNA, 15 bp, Homo sapiens
cttggtatcagatgg

SEQ ID NO: 2101601 - DNA, 15 bp, Homo sapiens
ttggtatcagatgga

SEQ ID NO: 2101602 - DNA, 15 bp, Homo sapiens
tggtatcagatggaa

SEQ ID NO: 2101603 - DNA, 15 bp, Homo sapiens
ggtatcagatggaaa

SEQ ID NO: 2101604 - DNA, 15 bp, Homo sapiens
gtatcagatggaaag

SEQ ID NO: 2101605 - DNA, 15 bp, Homo sapiens
tatcagatggaaaga

SEQ ID NO: 2101606 - DNA, 15 bp, Homo sapiens
atcagatggaaagaa

SEQ ID NO: 2101607 - DNA, 15 bp, Homo sapiens
tcagatggaaagaaa

SEQ ID NO: 2101608 - DNA, 15 bp, Homo sapiens
cagatggaaagaaac

SEQ ID NO: 2101609 - DNA, 15 bp, Homo sapiens
agatggaaagaaaca

SEQ ID NO: 2101610 - DNA, 15 bp, Homo sapiens
gatggaaagaaacat

SEQ ID NO: 2101611 - DNA, 15 bp, Homo sapiens
atggaaagaaacata

SEQ ID NO: 2101612 - DNA, 15 bp, Homo sapiens
tggaaagaaacatag

SEQ ID NO: 2101613 - DNA, 15 bp, Homo sapiens
ggaaagaaacatagg

SEQ ID NO: 2101614 - DNA, 15 bp, Homo sapiens
gaaagaaacatagga

SEQ ID NO: 2101615 - DNA, 15 bp, Homo sapiens
aaagaaacataggaa

SEQ ID NO: 2101616 - DNA, 15 bp, Homo sapiens
aagaaacataggaag

SEQ ID NO: 2101617 - DNA, 15 bp, Homo sapiens
agaaacataggaagg

SEQ ID NO: 2101618 - DNA, 15 bp, Homo sapiens
gaaacataggaaggc

SEQ ID NO: 2101619 - DNA, 15 bp, Homo sapiens
aaacataggaaggca

SEQ ID NO: 2101620 - DNA, 15 bp, Homo sapiens
aacataggaaggcaa

SEQ ID NO: 2101621 - DNA, 15 bp, Homo sapiens
acataggaaggcaat

SEQ ID NO: 2101622 - DNA, 15 bp, Homo sapiens
cataggaaggcaatg

SEQ ID NO: 2101623 - DNA, 15 bp, Homo sapiens
ataggaaggcaatga

SEQ ID NO: 2101624 - DNA, 15 bp, Homo sapiens
taggaaggcaatgat

SEQ ID NO: 2101625 - DNA, 15 bp, Homo sapiens
aggaaggcaatgata

SEQ ID NO: 2101626 - DNA, 15 bp, Homo sapiens
ggaaggcaatgataa

SEQ ID NO: 2101627 - DNA, 15 bp, Homo sapiens
gaaggcaatgataac

SEQ ID NO: 2101628 - DNA, 15 bp, Homo sapiens
aaggcaatgataact

SEQ ID NO: 2101629 - DNA, 15 bp, Homo sapiens
aggcaatgataactg

SEQ ID NO: 2101630 - DNA, 15 bp, Homo sapiens
ggcaatgataactgt

SEQ ID NO: 2101631 - DNA, 15 bp, Homo sapiens
gcaatgataactgtc

SEQ ID NO: 2101632 - DNA, 15 bp, Homo sapiens
caatgataactgtca

SEQ ID NO: 2101633 - DNA, 15 bp, Homo sapiens
aatgataactgtcat

SEQ ID NO: 2101634 - DNA, 15 bp, Homo sapiens
atgataactgtcata

SEQ ID NO: 2101635 - DNA, 15 bp, Homo sapiens
tgataactgtcatag

SEQ ID NO: 2101636 - DNA, 15 bp, Homo sapiens
gataactgtcatagt

SEQ ID NO: 2101637 - DNA, 15 bp, Homo sapiens
ataactgtcatagtg

SEQ ID NO: 2101638 - DNA, 15 bp, Homo sapiens
taactgtcatagtga

SEQ ID NO: 2101639 - DNA, 15 bp, Homo sapiens
aactgtcatagtgat

SEQ ID NO: 2101640 - DNA, 15 bp, Homo sapiens
actgtcatagtgata

SEQ ID NO: 2101641 - DNA, 15 bp, Homo sapiens
ctgtcatagtgataa

SEQ ID NO: 2101642 - DNA, 15 bp, Homo sapiens
tgtcatagtgataac

SEQ ID NO: 2101643 - DNA, 15 bp, Homo sapiens
gtcatagtgataact

SEQ ID NO: 2101644 - DNA, 15 bp, Homo sapiens
tcatagtgataactg

SEQ ID NO: 2101645 - DNA, 15 bp, Homo sapiens
catagtgataactgt

SEQ ID NO: 2101646 - DNA, 15 bp, Homo sapiens
atagtgataactgtc

SEQ ID NO: 2101647 - DNA, 15 bp, Homo sapiens
tagtgataactgtca

SEQ ID NO: 2101648 - DNA, 15 bp, Homo sapiens
agtgataactgtcat

SEQ ID NO: 2101649 - DNA, 15 bp, Homo sapiens
gtgataactgtcatc

SEQ ID NO: 2101650 - DNA, 15 bp, Homo sapiens
tgataactgtcatca

SEQ ID NO: 2101651 - DNA, 15 bp, Homo sapiens
gataactgtcatcac

SEQ ID NO: 2101652 - DNA, 15 bp, Homo sapiens
ataactgtcatcact

SEQ ID NO: 2101653 - DNA, 15 bp, Homo sapiens
taactgtcatcacta

SEQ ID NO: 2101654 - DNA, 15 bp, Homo sapiens
aactgtcatcactat

SEQ ID NO: 2101655 - DNA, 15 bp, Homo sapiens
actgtcatcactata

SEQ ID NO: 2101656 - DNA, 15 bp, Homo sapiens
ctgtcatcactatag

SEQ ID NO: 2101657 - DNA, 15 bp, Homo sapiens
tgtcatcactataga

SEQ ID NO: 2101658 - DNA, 15 bp, Homo sapiens
gtcatcactatagac

SEQ ID NO: 2101659 - DNA, 15 bp, Homo sapiens
tcatcactatagact

SEQ ID NO: 2101660 - DNA, 15 bp, Homo sapiens
catcactatagactg

SEQ ID NO: 2101661 - DNA, 15 bp, Homo sapiens
atcactatagactgg

SEQ ID NO: 2101662 - DNA, 15 bp, Homo sapiens
tcactatagactggt

SEQ ID NO: 2101663 - DNA, 15 bp, Homo sapiens
cactatagactggtt

SEQ ID NO: 2101664 - DNA, 15 bp, Homo sapiens
actatagactggttg

SEQ ID NO: 2101665 - DNA, 15 bp, Homo sapiens
ctatagactggttgt

SEQ ID NO: 2101666 - DNA, 15 bp, Homo sapiens
tatagactggttgtg

SEQ ID NO: 2101667 - DNA, 15 bp, Homo sapiens
atagactggttgtga

SEQ ID NO: 2101668 - DNA, 15 bp, Homo sapiens
tagactggttgtgat

SEQ ID NO: 2101669 - DNA, 15 bp, Homo sapiens
agactggttgtgata

SEQ ID NO: 2101670 - DNA, 15 bp, Homo sapiens
gactggttgtgatat

SEQ ID NO: 2101671 - DNA, 15 bp, Homo sapiens
actggttgtgatatt

SEQ ID NO: 2101672 - DNA, 15 bp, Homo sapiens
ctggttgtgatattc

SEQ ID NO: 2101673 - DNA, 15 bp, Homo sapiens
tggttgtgatattct

SEQ ID NO: 2101674 - DNA, 15 bp, Homo sapiens
ggttgtgatattctg

SEQ ID NO: 2101675 - DNA, 15 bp, Homo sapiens
gttgtgatattctgt

SEQ ID NO: 2101676 - DNA, 15 bp, Homo sapiens
ttgtgatattctgtg

SEQ ID NO: 2101677 - DNA, 15 bp, Homo sapiens
tgtgatattctgtgg

SEQ ID NO: 2101678 - DNA, 15 bp, Homo sapiens
gtgatattctgtggc

SEQ ID NO: 2101679 - DNA, 15 bp, Homo sapiens
tgatattctgtggct

SEQ ID NO: 2101680 - DNA, 15 bp, Homo sapiens
gatattctgtggctg

SEQ ID NO: 2101681 - DNA, 15 bp, Homo sapiens
atattctgtggctgc

SEQ ID NO: 2101682 - DNA, 15 bp, Homo sapiens
tattctgtggctgct

SEQ ID NO: 2101683 - DNA, 15 bp, Homo sapiens
attctgtggctgctt

SEQ ID NO: 2101684 - DNA, 15 bp, Homo sapiens
ttctgtggctgcttt

SEQ ID NO: 2101685 - DNA, 15 bp, Homo sapiens
tctgtggctgctttg

SEQ ID NO: 2101686 - DNA, 15 bp, Homo sapiens
ctgtggctgctttgt

SEQ ID NO: 2101687 - DNA, 15 bp, Homo sapiens
tgtggctgctttgtg

SEQ ID NO: 2101688 - DNA, 15 bp, Homo sapiens
gtggctgctttgtgg

SEQ ID NO: 2101689 - DNA, 15 bp, Homo sapiens
tggctgctttgtggg

SEQ ID NO: 2101690 - DNA, 15 bp, Homo sapiens
ggctgctttgtgggg

SEQ ID NO: 2101691 - DNA, 15 bp, Homo sapiens
gctgctttgtggggt

SEQ ID NO: 2101692 - DNA, 15 bp, Homo sapiens
ctgctttgtggggtt

SEQ ID NO: 2101693 - DNA, 15 bp, Homo sapiens
tgctttgtggggttt

SEQ ID NO: 2101694 - DNA, 15 bp, Homo sapiens
gctttgtggggtttt

SEQ ID NO: 2101695 - DNA, 15 bp, Homo sapiens
ctttgtggggttttt

SEQ ID NO: 2101696 - DNA, 15 bp, Homo sapiens
tttgtggggtttttt

SEQ ID NO: 2101697 - DNA, 15 bp, Homo sapiens
ttgtggggttttttt

SEQ ID NO: 2101698 - DNA, 15 bp, Homo sapiens
tgtggggtttttttg

SEQ ID NO: 2101699 - DNA, 15 bp, Homo sapiens
gtggggtttttttgt

SEQ ID NO: 2101700 - DNA, 15 bp, Homo sapiens
tggggtttttttgtt

SEQ ID NO: 2101701 - DNA, 15 bp, Homo sapiens
ggggtttttttgttt

SEQ ID NO: 2101702 - DNA, 15 bp, Homo sapiens
gggtttttttgtttt

SEQ ID NO: 2101703 - DNA, 15 bp, Homo sapiens
ggtttttttgttttg

SEQ ID NO: 2101704 - DNA, 15 bp, Homo sapiens
gtttttttgttttga

SEQ ID NO: 2101705 - DNA, 15 bp, Homo sapiens
tttttttgttttgat

SEQ ID NO: 2101706 - DNA, 15 bp, Homo sapiens
ttttttgttttgata

SEQ ID NO: 2101707 - DNA, 15 bp, Homo sapiens
tttttgttttgatat

SEQ ID NO: 2101708 - DNA, 15 bp, Homo sapiens
ttttgttttgatatt

SEQ ID NO: 2101709 - DNA, 15 bp, Homo sapiens
tttgttttgatattt

SEQ ID NO: 2101710 - DNA, 15 bp, Homo sapiens
ttgttttgatatttt

SEQ ID NO: 2101711 - DNA, 15 bp, Homo sapiens
tgttttgatatttta

SEQ ID NO: 2101712 - DNA, 15 bp, Homo sapiens
gttttgatattttat

SEQ ID NO: 2101713 - DNA, 15 bp, Homo sapiens
ttttgatattttatt

SEQ ID NO: 2101714 - DNA, 15 bp, Homo sapiens
tttgatattttattt

SEQ ID NO: 2101715 - DNA, 15 bp, Homo sapiens
ttgatattttatttt

SEQ ID NO: 2101716 - DNA, 15 bp, Homo sapiens
tgatattttatttta

SEQ ID NO: 2101717 - DNA, 15 bp, Homo sapiens
gatattttattttat

SEQ ID NO: 2101718 - DNA, 15 bp, Homo sapiens
atattttattttatt

SEQ ID NO: 2101719 - DNA, 15 bp, Homo sapiens
tattttattttattc

SEQ ID NO: 2101720 - DNA, 15 bp, Homo sapiens
attttattttattcc

SEQ ID NO: 2101721 - DNA, 15 bp, Homo sapiens
ttttattttattcca

SEQ ID NO: 2101722 - DNA, 15 bp, Homo sapiens
tttattttattccaa

SEQ ID NO: 2101723 - DNA, 15 bp, Homo sapiens
ttattttattccaat

SEQ ID NO: 2101724 - DNA, 15 bp, Homo sapiens
tattttattccaatc

SEQ ID NO: 2101725 - DNA, 15 bp, Homo sapiens
attttattccaatct

SEQ ID NO: 2101726 - DNA, 15 bp, Homo sapiens
ttttattccaatctt

SEQ ID NO: 2101727 - DNA, 15 bp, Homo sapiens
tttattccaatcttt

SEQ ID NO: 2101728 - DNA, 15 bp, Homo sapiens
ttattccaatctttt

SEQ ID NO: 2101729 - DNA, 15 bp, Homo sapiens
tattccaatcttttc

SEQ ID NO: 2101730 - DNA, 15 bp, Homo sapiens
attccaatcttttca

SEQ ID NO: 2101731 - DNA, 15 bp, Homo sapiens
ttccaatcttttcac

SEQ ID NO: 2101732 - DNA, 15 bp, Homo sapiens
tccaatcttttcaca

SEQ ID NO: 2101733 - DNA, 15 bp, Homo sapiens
ccaatcttttcacag

SEQ ID NO: 2101734 - DNA, 15 bp, Homo sapiens
caatcttttcacaga

SEQ ID NO: 2101735 - DNA, 15 bp, Homo sapiens
aatcttttcacagag

SEQ ID NO: 2101736 - DNA, 15 bp, Homo sapiens
atcttttcacagaga

SEQ ID NO: 2101737 - DNA, 15 bp, Homo sapiens
tcttttcacagagat

SEQ ID NO: 2101738 - DNA, 15 bp, Homo sapiens
cttttcacagagata

SEQ ID NO: 2101739 - DNA, 15 bp, Homo sapiens
ttttcacagagatat

SEQ ID NO: 2101740 - DNA, 15 bp, Homo sapiens
tttcacagagatatt

SEQ ID NO: 2101741 - DNA, 15 bp, Homo sapiens
ttcacagagatattt

SEQ ID NO: 2101742 - DNA, 15 bp, Homo sapiens
tcacagagatatttt

SEQ ID NO: 2101743 - DNA, 15 bp, Homo sapiens
cacagagatattttt

SEQ ID NO: 2101744 - DNA, 15 bp, Homo sapiens
acagagatatttttg

SEQ ID NO: 2101745 - DNA, 15 bp, Homo sapiens
cagagatatttttga

SEQ ID NO: 2101746 - DNA, 15 bp, Homo sapiens
agagatatttttgag

SEQ ID NO: 2101747 - DNA, 15 bp, Homo sapiens
gagatatttttgagt

SEQ ID NO: 2101748 - DNA, 15 bp, Homo sapiens
agatatttttgagtg

SEQ ID NO: 2101749 - DNA, 15 bp, Homo sapiens
gatatttttgagtgt

SEQ ID NO: 2101750 - DNA, 15 bp, Homo sapiens
atatttttgagtgtt

SEQ ID NO: 2101751 - DNA, 15 bp, Homo sapiens
tatttttgagtgttg

SEQ ID NO: 2101752 - DNA, 15 bp, Homo sapiens
atttttgagtgttgt

SEQ ID NO: 2101753 - DNA, 15 bp, Homo sapiens
tttttgagtgttgtc

SEQ ID NO: 2101754 - DNA, 15 bp, Homo sapiens
ttttgagtgttgtct

SEQ ID NO: 2101755 - DNA, 15 bp, Homo sapiens
tttgagtgttgtctt

SEQ ID NO: 2101756 - DNA, 15 bp, Homo sapiens
ttgagtgttgtcttg

SEQ ID NO: 2101757 - DNA, 15 bp, Homo sapiens
tgagtgttgtcttgt

SEQ ID NO: 2101758 - DNA, 15 bp, Homo sapiens
gagtgttgtcttgtt

SEQ ID NO: 2101759 - DNA, 15 bp, Homo sapiens
agtgttgtcttgttt

SEQ ID NO: 2101760 - DNA, 15 bp, Homo sapiens
gtgttgtcttgttta

SEQ ID NO: 2101761 - DNA, 15 bp, Homo sapiens
tgttgtcttgtttag

SEQ ID NO: 2101762 - DNA, 15 bp, Homo sapiens
gttgtcttgtttagg

SEQ ID NO: 2101763 - DNA, 15 bp, Homo sapiens
ttgtcttgtttagga

SEQ ID NO: 2101764 - DNA, 15 bp, Homo sapiens
tgtcttgtttaggat

SEQ ID NO: 2101765 - DNA, 15 bp, Homo sapiens
gtcttgtttaggatt

SEQ ID NO: 2101766 - DNA, 15 bp, Homo sapiens
tcttgtttaggattt

SEQ ID NO: 2101767 - DNA, 15 bp, Homo sapiens
cttgtttaggatttt

SEQ ID NO: 2101768 - DNA, 15 bp, Homo sapiens
ttgtttaggatttta

SEQ ID NO: 2101769 - DNA, 15 bp, Homo sapiens
tgtttaggattttat

SEQ ID NO: 2101770 - DNA, 15 bp, Homo sapiens
gtttaggattttatt

SEQ ID NO: 2101771 - DNA, 15 bp, Homo sapiens
tttaggattttatta

SEQ ID NO: 2101772 - DNA, 15 bp, Homo sapiens
ttaggattttattat

SEQ ID NO: 2101773 - DNA, 15 bp, Homo sapiens
taggattttattatt

SEQ ID NO: 2101774 - DNA, 15 bp, Homo sapiens
aggattttattattg

SEQ ID NO: 2101775 - DNA, 15 bp, Homo sapiens
ggattttattattgc

SEQ ID NO: 2101776 - DNA, 15 bp, Homo sapiens
gattttattattgct

SEQ ID NO: 2101777 - DNA, 15 bp, Homo sapiens
attttattattgctg

SEQ ID NO: 2101778 - DNA, 15 bp, Homo sapiens
ttttattattgctgc

SEQ ID NO: 2101779 - DNA, 15 bp, Homo sapiens
tttattattgctgct

SEQ ID NO: 2101780 - DNA, 15 bp, Homo sapiens
ttattattgctgctc

SEQ ID NO: 2101781 - DNA, 15 bp, Homo sapiens
tattattgctgctct

SEQ ID NO: 2101782 - DNA, 15 bp, Homo sapiens
attattgctgctctt

SEQ ID NO: 2101783 - DNA, 15 bp, Homo sapiens
ttattgctgctcttg

SEQ ID NO: 2101784 - DNA, 15 bp, Homo sapiens
tattgctgctcttgt

SEQ ID NO: 2101785 - DNA, 15 bp, Homo sapiens
attgctgctcttgtc

SEQ ID NO: 2101786 - DNA, 15 bp, Homo sapiens
ttgctgctcttgtca

SEQ ID NO: 2101787 - DNA, 15 bp, Homo sapiens
tgctgctcttgtcat

SEQ ID NO: 2101788 - DNA, 15 bp, Homo sapiens
gctgctcttgtcatt

SEQ ID NO: 2101789 - DNA, 15 bp, Homo sapiens
ctgctcttgtcattc

SEQ ID NO: 2101790 - DNA, 15 bp, Homo sapiens
tgctcttgtcattct

SEQ ID NO: 2101791 - DNA, 15 bp, Homo sapiens
gctcttgtcattctg

SEQ ID NO: 2101792 - DNA, 15 bp, Homo sapiens
ctcttgtcattctgt

SEQ ID NO: 2101793 - DNA, 15 bp, Homo sapiens
tcttgtcattctgtg

SEQ ID NO: 2101794 - DNA, 15 bp, Homo sapiens
cttgtcattctgtgc

SEQ ID NO: 2101795 - DNA, 15 bp, Homo sapiens
ttgtcattctgtgca

SEQ ID NO: 2101796 - DNA, 15 bp, Homo sapiens
tgtcattctgtgcat

SEQ ID NO: 2101797 - DNA, 15 bp, Homo sapiens
gtcattctgtgcatt

SEQ ID NO: 2101798 - DNA, 15 bp, Homo sapiens
tcattctgtgcattt

SEQ ID NO: 2101799 - DNA, 15 bp, Homo sapiens
cattctgtgcatttt

SEQ ID NO: 2101800 - DNA, 15 bp, Homo sapiens
attctgtgcattttt

SEQ ID NO: 2101801 - DNA, 15 bp, Homo sapiens
ttctgtgcatttttt

SEQ ID NO: 2101802 - DNA, 15 bp, Homo sapiens
tctgtgcattttttg

SEQ ID NO: 2101803 - DNA, 15 bp, Homo sapiens
ctgtgcattttttgt

SEQ ID NO: 2101804 - DNA, 15 bp, Homo sapiens
tgtgcattttttgtt

SEQ ID NO: 2101805 - DNA, 15 bp, Homo sapiens
gtgcattttttgttg

SEQ ID NO: 2101806 - DNA, 15 bp, Homo sapiens
tgcattttttgttga

SEQ ID NO: 2101807 - DNA, 15 bp, Homo sapiens
gcattttttgttgaa

SEQ ID NO: 2101808 - DNA, 15 bp, Homo sapiens
cattttttgttgaaa

SEQ ID NO: 2101809 - DNA, 15 bp, Homo sapiens
attttttgttgaaaa

SEQ ID NO: 2101810 - DNA, 15 bp, Homo sapiens
ttttttgttgaaaat

SEQ ID NO: 2101811 - DNA, 15 bp, Homo sapiens
tttttgttgaaaatt

SEQ ID NO: 2101812 - DNA, 15 bp, Homo sapiens
ttttgttgaaaattt

SEQ ID NO: 2101813 - DNA, 15 bp, Homo sapiens
tttgttgaaaatttc

SEQ ID NO: 2101814 - DNA, 15 bp, Homo sapiens
ttgttgaaaatttca

SEQ ID NO: 2101815 - DNA, 15 bp, Homo sapiens
tgttgaaaatttcag

SEQ ID NO: 2101816 - DNA, 15 bp, Homo sapiens
gttgaaaatttcaga

SEQ ID NO: 2101817 - DNA, 15 bp, Homo sapiens
ttgaaaatttcagag

SEQ ID NO: 2101818 - DNA, 15 bp, Homo sapiens
tgaaaatttcagagt

SEQ ID NO: 2101819 - DNA, 15 bp, Homo sapiens
gaaaatttcagagtt

SEQ ID NO: 2101820 - DNA, 15 bp, Homo sapiens
aaaatttcagagttt

SEQ ID NO: 2101821 - DNA, 15 bp, Homo sapiens
aaatttcagagttta

SEQ ID NO: 2101822 - DNA, 15 bp, Homo sapiens
aatttcagagtttat

SEQ ID NO: 2101823 - DNA, 15 bp, Homo sapiens
atttcagagtttata

SEQ ID NO: 2101824 - DNA, 15 bp, Homo sapiens
tttcagagtttatag

SEQ ID NO: 2101825 - DNA, 15 bp, Homo sapiens
ttcagagtttatagg

SEQ ID NO: 2101826 - DNA, 15 bp, Homo sapiens
tcagagtttataggg

SEQ ID NO: 2101827 - DNA, 15 bp, Homo sapiens
cagagtttatagggt

SEQ ID NO: 2101828 - DNA, 15 bp, Homo sapiens
agagtttatagggtg

SEQ ID NO: 2101829 - DNA, 15 bp, Homo sapiens
gagtttatagggtga

SEQ ID NO: 2101830 - DNA, 15 bp, Homo sapiens
agtttatagggtgag

SEQ ID NO: 2101831 - DNA, 15 bp, Homo sapiens
gtttatagggtgaga

SEQ ID NO: 2101832 - DNA, 15 bp, Homo sapiens
tttatagggtgagag

SEQ ID NO: 2101833 - DNA, 15 bp, Homo sapiens
ttatagggtgagaga

SEQ ID NO: 2101834 - DNA, 15 bp, Homo sapiens
tatagggtgagagag

SEQ ID NO: 2101835 - DNA, 15 bp, Homo sapiens
atagggtgagagagc

SEQ ID NO: 2101836 - DNA, 15 bp, Homo sapiens
tagggtgagagagct

SEQ ID NO: 2101837 - DNA, 15 bp, Homo sapiens
agggtgagagagcta

SEQ ID NO: 2101838 - DNA, 15 bp, Homo sapiens
gggtgagagagctat

SEQ ID NO: 2101839 - DNA, 15 bp, Homo sapiens
ggtgagagagctatt

SEQ ID NO: 2101840 - DNA, 15 bp, Homo sapiens
gtgagagagctattt

SEQ ID NO: 2101841 - DNA, 15 bp, Homo sapiens
tgagagagctatttt

SEQ ID NO: 2101842 - DNA, 15 bp, Homo sapiens
gagagagctatttta

SEQ ID NO: 2101843 - DNA, 15 bp, Homo sapiens
agagagctattttat

SEQ ID NO: 2101844 - DNA, 15 bp, Homo sapiens
gagagctattttatt

SEQ ID NO: 2101845 - DNA, 15 bp, Homo sapiens
agagctattttattt

SEQ ID NO: 2101846 - DNA, 15 bp, Homo sapiens
gagctattttatttc

SEQ ID NO: 2101847 - DNA, 15 bp, Homo sapiens
agctattttatttct

SEQ ID NO: 2101848 - DNA, 15 bp, Homo sapiens
gctattttatttctg

SEQ ID NO: 2101849 - DNA, 15 bp, Homo sapiens
ctattttatttctga

SEQ ID NO: 2101850 - DNA, 15 bp, Homo sapiens
tattttatttctgat

SEQ ID NO: 2101851 - DNA, 15 bp, Homo sapiens
attttatttctgata

SEQ ID NO: 2101852 - DNA, 15 bp, Homo sapiens
ttttatttctgataa

SEQ ID NO: 2101853 - DNA, 15 bp, Homo sapiens
tttatttctgataaa

SEQ ID NO: 2101854 - DNA, 15 bp, Homo sapiens
ttatttctgataaag

SEQ ID NO: 2101855 - DNA, 15 bp, Homo sapiens
tatttctgataaagc

SEQ ID NO: 2101856 - DNA, 15 bp, Homo sapiens
atttctgataaagca

SEQ ID NO: 2101857 - DNA, 15 bp, Homo sapiens
tttctgataaagcag

SEQ ID NO: 2101858 - DNA, 15 bp, Homo sapiens
ttctgataaagcagc

SEQ ID NO: 2101859 - DNA, 15 bp, Homo sapiens
tctgataaagcagct

SEQ ID NO: 2101860 - DNA, 15 bp, Homo sapiens
ctgataaagcagctt

SEQ ID NO: 2101861 - DNA, 15 bp, Homo sapiens
tgataaagcagcttc

SEQ ID NO: 2101862 - DNA, 15 bp, Homo sapiens
gataaagcagcttct

SEQ ID NO: 2101863 - DNA, 15 bp, Homo sapiens
ataaagcagcttcta

SEQ ID NO: 2101864 - DNA, 15 bp, Homo sapiens
taaagcagcttctaa

SEQ ID NO: 2101865 - DNA, 15 bp, Homo sapiens
aaagcagcttctaag

SEQ ID NO: 2101866 - DNA, 15 bp, Homo sapiens
aagcagcttctaagt

SEQ ID NO: 2101867 - DNA, 15 bp, Homo sapiens
agcagcttctaagtg

SEQ ID NO: 2101868 - DNA, 15 bp, Homo sapiens
gcagcttctaagtga

SEQ ID NO: 2101869 - DNA, 15 bp, Homo sapiens
cagcttctaagtgaa

SEQ ID NO: 2101870 - DNA, 15 bp, Homo sapiens
agcttctaagtgaaa

SEQ ID NO: 2101871 - DNA, 15 bp, Homo sapiens
gcttctaagtgaaaa

SEQ ID NO: 2101872 - DNA, 15 bp, Homo sapiens
cttctaagtgaaaac

SEQ ID NO: 2101873 - DNA, 15 bp, Homo sapiens
ttctaagtgaaaaca

SEQ ID NO: 2101874 - DNA, 15 bp, Homo sapiens
tctaagtgaaaacaa

SEQ ID NO: 2101875 - DNA, 15 bp, Homo sapiens
ctaagtgaaaacaat

SEQ ID NO: 2101876 - DNA, 15 bp, Homo sapiens
taagtgaaaacaata

SEQ ID NO: 2101877 - DNA, 15 bp, Homo sapiens
aagtgaaaacaatat

SEQ ID NO: 2101878 - DNA, 15 bp, Homo sapiens
agtgaaaacaatatt

SEQ ID NO: 2101879 - DNA, 15 bp, Homo sapiens
gtgaaaacaatattc

SEQ ID NO: 2101880 - DNA, 15 bp, Homo sapiens
tgaaaacaatattct

SEQ ID NO: 2101881 - DNA, 15 bp, Homo sapiens
gaaaacaatattctg

SEQ ID NO: 2101882 - DNA, 15 bp, Homo sapiens
aaaacaatattctgt

SEQ ID NO: 2101883 - DNA, 15 bp, Homo sapiens
aaacaatattctgta

SEQ ID NO: 2101884 - DNA, 15 bp, Homo sapiens
aacaatattctgtaa

SEQ ID NO: 2101885 - DNA, 15 bp, Homo sapiens
acaatattctgtaaa

SEQ ID NO: 2101886 - DNA, 15 bp, Homo sapiens
caatattctgtaaaa

SEQ ID NO: 2101887 - DNA, 15 bp, Homo sapiens
aatattctgtaaaag

SEQ ID NO: 2101888 - DNA, 15 bp, Homo sapiens
atattctgtaaaagt

SEQ ID NO: 2101889 - DNA, 15 bp, Homo sapiens
tattctgtaaaagtc

SEQ ID NO: 2101890 - DNA, 15 bp, Homo sapiens
attctgtaaaagtca

SEQ ID NO: 2101891 - DNA, 15 bp, Homo sapiens
ttctgtaaaagtcag

SEQ ID NO: 2101892 - DNA, 15 bp, Homo sapiens
tctgtaaaagtcaga

SEQ ID NO: 2101893 - DNA, 15 bp, Homo sapiens
ctgtaaaagtcagaa

SEQ ID NO: 2101894 - DNA, 15 bp, Homo sapiens
tgtaaaagtcagaag

SEQ ID NO: 2101895 - DNA, 15 bp, Homo sapiens
gtaaaagtcagaagt

SEQ ID NO: 2101896 - DNA, 15 bp, Homo sapiens
taaaagtcagaagtt

SEQ ID NO: 2101897 - DNA, 15 bp, Homo sapiens
aaaagtcagaagttt

SEQ ID NO: 2101898 - DNA, 15 bp, Homo sapiens
aaagtcagaagtttt

SEQ ID NO: 2101899 - DNA, 15 bp, Homo sapiens
aagtcagaagtttta

SEQ ID NO: 2101900 - DNA, 15 bp, Homo sapiens
agtcagaagttttac

SEQ ID NO: 2101901 - DNA, 15 bp, Homo sapiens
gtcagaagttttaca

SEQ ID NO: 2101902 - DNA, 15 bp, Homo sapiens
tcagaagttttacat

SEQ ID NO: 2101903 - DNA, 15 bp, Homo sapiens
cagaagttttacatt

SEQ ID NO: 2101904 - DNA, 15 bp, Homo sapiens
agaagttttacattc

SEQ ID NO: 2101905 - DNA, 15 bp, Homo sapiens
gaagttttacattct

SEQ ID NO: 2101906 - DNA, 15 bp, Homo sapiens
aagttttacattcta

SEQ ID NO: 2101907 - DNA, 15 bp, Homo sapiens
ttttacattctactc

SEQ ID NO: 2101908 - DNA, 15 bp, Homo sapiens
tttacattctactca

SEQ ID NO: 2101909 - DNA, 15 bp, Homo sapiens
ttacattctactcaa

SEQ ID NO: 2101910 - DNA, 15 bp, Homo sapiens
tacattctactcaac

SEQ ID NO: 2101911 - DNA, 15 bp, Homo sapiens
acattctactcaaca

SEQ ID NO: 2101912 - DNA, 15 bp, Homo sapiens
cattctactcaacaa

SEQ ID NO: 2101913 - DNA, 15 bp, Homo sapiens
attctactcaacaac

SEQ ID NO: 2101914 - DNA, 15 bp, Homo sapiens
ttctactcaacaacc

SEQ ID NO: 2101915 - DNA, 15 bp, Homo sapiens
tctactcaacaacct

SEQ ID NO: 2101916 - DNA, 15 bp, Homo sapiens
ctactcaacaaccta

SEQ ID NO: 2101917 - DNA, 15 bp, Homo sapiens
tactcaacaacctac

SEQ ID NO: 2101918 - DNA, 15 bp, Homo sapiens
actcaacaacctact

SEQ ID NO: 2101919 - DNA, 15 bp, Homo sapiens
ctcaacaacctactg

SEQ ID NO: 2101920 - DNA, 15 bp, Homo sapiens
tcaacaacctactgt

SEQ ID NO: 2101921 - DNA, 15 bp, Homo sapiens
caacaacctactgtt

SEQ ID NO: 2101922 - DNA, 15 bp, Homo sapiens
aacaacctactgtta

SEQ ID NO: 2101923 - DNA, 15 bp, Homo sapiens
acaacctactgttag

SEQ ID NO: 2101924 - DNA, 15 bp, Homo sapiens
caacctactgttagt

SEQ ID NO: 2101925 - DNA, 15 bp, Homo sapiens
aacctactgttagtt

SEQ ID NO: 2101926 - DNA, 15 bp, Homo sapiens
acctactgttagttt

SEQ ID NO: 2101927 - DNA, 15 bp, Homo sapiens
cctactgttagtttg

SEQ ID NO: 2101928 - DNA, 15 bp, Homo sapiens
ctactgttagtttgt

SEQ ID NO: 2101929 - DNA, 15 bp, Homo sapiens
tactgttagtttgtg

SEQ ID NO: 2101930 - DNA, 15 bp, Homo sapiens
actgttagtttgtgt

SEQ ID NO: 2101931 - DNA, 15 bp, Homo sapiens
ctgttagtttgtgta

SEQ ID NO: 2101932 - DNA, 15 bp, Homo sapiens
tgttagtttgtgtat

SEQ ID NO: 2101933 - DNA, 15 bp, Homo sapiens
gttagtttgtgtatt

SEQ ID NO: 2101934 - DNA, 15 bp, Homo sapiens
ttagtttgtgtatta

SEQ ID NO: 2101935 - DNA, 15 bp, Homo sapiens
tagtttgtgtattag

SEQ ID NO: 2101936 - DNA, 15 bp, Homo sapiens
agtttgtgtattagg

SEQ ID NO: 2101937 - DNA, 15 bp, Homo sapiens
gtttgtgtattaggg

SEQ ID NO: 2101938 - DNA, 15 bp, Homo sapiens
tttgtgtattagggt

SEQ ID NO: 2101939 - DNA, 15 bp, Homo sapiens
ttgtgtattagggtt

SEQ ID NO: 2101940 - DNA, 15 bp, Homo sapiens
tgtgtattagggttc

SEQ ID NO: 2101941 - DNA, 15 bp, Homo sapiens
gtgtattagggttct

SEQ ID NO: 2101942 - DNA, 15 bp, Homo sapiens
tgtattagggttctc

SEQ ID NO: 2101943 - DNA, 15 bp, Homo sapiens
gtattagggttctcc

SEQ ID NO: 2101944 - DNA, 15 bp, Homo sapiens
tattagggttctcca

SEQ ID NO: 2101945 - DNA, 15 bp, Homo sapiens
attagggttctccag

SEQ ID NO: 2101946 - DNA, 15 bp, Homo sapiens
ttagggttctccaga

SEQ ID NO: 2101947 - DNA, 15 bp, Homo sapiens
tagggttctccagag

SEQ ID NO: 2101948 - DNA, 15 bp, Homo sapiens
agggttctccagagg

SEQ ID NO: 2101949 - DNA, 15 bp, Homo sapiens
gggttctccagaggg

SEQ ID NO: 2101950 - DNA, 15 bp, Homo sapiens
ggttctccagaggga

SEQ ID NO: 2101951 - DNA, 15 bp, Homo sapiens
gttctccagagggac

SEQ ID NO: 2101952 - DNA, 15 bp, Homo sapiens
ttctccagagggaca

SEQ ID NO: 2101953 - DNA, 15 bp, Homo sapiens
tctccagagggacag

SEQ ID NO: 2101954 - DNA, 15 bp, Homo sapiens
ctccagagggacaga

SEQ ID NO: 2101955 - DNA, 15 bp, Homo sapiens
tccagagggacagaa

SEQ ID NO: 2101956 - DNA, 15 bp, Homo sapiens
ccagagggacagaac

SEQ ID NO: 2101957 - DNA, 15 bp, Homo sapiens
cagagggacagaact

SEQ ID NO: 2101958 - DNA, 15 bp, Homo sapiens
agagggacagaacta

SEQ ID NO: 2101959 - DNA, 15 bp, Homo sapiens
gagggacagaactaa

SEQ ID NO: 2101960 - DNA, 15 bp, Homo sapiens
agggacagaactaat

SEQ ID NO: 2101961 - DNA, 15 bp, Homo sapiens
gggacagaactaata

SEQ ID NO: 2101962 - DNA, 15 bp, Homo sapiens
ggacagaactaatag

SEQ ID NO: 2101963 - DNA, 15 bp, Homo sapiens
gacagaactaataga

SEQ ID NO: 2101964 - DNA, 15 bp, Homo sapiens
acagaactaatagaa

SEQ ID NO: 2101965 - DNA, 15 bp, Homo sapiens
cagaactaatagaat

SEQ ID NO: 2101966 - DNA, 15 bp, Homo sapiens
agaactaatagaata

SEQ ID NO: 2101967 - DNA, 15 bp, Homo sapiens
gaactaatagaatag

SEQ ID NO: 2101968 - DNA, 15 bp, Homo sapiens
aactaatagaataga

SEQ ID NO: 2101969 - DNA, 15 bp, Homo sapiens
actaatagaatagat

SEQ ID NO: 2101970 - DNA, 15 bp, Homo sapiens
ctaatagaatagatg

SEQ ID NO: 2101971 - DNA, 15 bp, Homo sapiens
taatagaatagatgt

SEQ ID NO: 2101972 - DNA, 15 bp, Homo sapiens
aatagaatagatgta

SEQ ID NO: 2101973 - DNA, 15 bp, Homo sapiens
atagaatagatgtat

SEQ ID NO: 2101974 - DNA, 15 bp, Homo sapiens
tagaatagatgtata

SEQ ID NO: 2101975 - DNA, 15 bp, Homo sapiens
agaatagatgtatat

SEQ ID NO: 2101976 - DNA, 15 bp, Homo sapiens
gaatagatgtatata

SEQ ID NO: 2101977 - DNA, 15 bp, Homo sapiens
aatagatgtatatat

SEQ ID NO: 2101978 - DNA, 15 bp, Homo sapiens
atagatgtatatatg

SEQ ID NO: 2101979 - DNA, 15 bp, Homo sapiens
tagatgtatatatga

SEQ ID NO: 2101980 - DNA, 15 bp, Homo sapiens
agatgtatatatgaa

SEQ ID NO: 2101981 - DNA, 15 bp, Homo sapiens
gatgtatatatgaag

SEQ ID NO: 2101982 - DNA, 15 bp, Homo sapiens
atgtatatatgaagg

SEQ ID NO: 2101983 - DNA, 15 bp, Homo sapiens
tgtatatatgaaggg

SEQ ID NO: 2101984 - DNA, 15 bp, Homo sapiens
gtatatatgaagggg

SEQ ID NO: 2101985 - DNA, 15 bp, Homo sapiens
tatatatgaagggga

SEQ ID NO: 2101986 - DNA, 15 bp, Homo sapiens
atatatgaaggggag

SEQ ID NO: 2101987 - DNA, 15 bp, Homo sapiens
tatatgaaggggagc

SEQ ID NO: 2101988 - DNA, 15 bp, Homo sapiens
atatgaaggggagct

SEQ ID NO: 2101989 - DNA, 15 bp, Homo sapiens
tatgaaggggagctt

SEQ ID NO: 2101990 - DNA, 15 bp, Homo sapiens
atgaaggggagctta

SEQ ID NO: 2101991 - DNA, 15 bp, Homo sapiens
tgaaggggagcttat

SEQ ID NO: 2101992 - DNA, 15 bp, Homo sapiens
gaaggggagcttatt

SEQ ID NO: 2101993 - DNA, 15 bp, Homo sapiens
aaggggagcttattg

SEQ ID NO: 2101994 - DNA, 15 bp, Homo sapiens
aggggagcttattga

SEQ ID NO: 2101995 - DNA, 15 bp, Homo sapiens
ggggagcttattgag

SEQ ID NO: 2101996 - DNA, 15 bp, Homo sapiens
gggagcttattgagg

SEQ ID NO: 2101997 - DNA, 15 bp, Homo sapiens
ggagcttattgagga

SEQ ID NO: 2101998 - DNA, 15 bp, Homo sapiens
gagcttattgaggag

SEQ ID NO: 2101999 - DNA, 15 bp, Homo sapiens
agcttattgaggagt

SEQ ID NO: 2102000 - DNA, 15 bp, Homo sapiens
gcttattgaggagta

SEQ ID NO: 2102001 - DNA, 15 bp, Homo sapiens
cttattgaggagtat

SEQ ID NO: 2102002 - DNA, 15 bp, Homo sapiens
ttattgaggagtatc

SEQ ID NO: 2102003 - DNA, 15 bp, Homo sapiens
tattgaggagtatcg

SEQ ID NO: 2102004 - DNA, 15 bp, Homo sapiens
attgaggagtatcga

SEQ ID NO: 2102005 - DNA, 15 bp, Homo sapiens
ttgaggagtatcgac

SEQ ID NO: 2102006 - DNA, 15 bp, Homo sapiens
tgaggagtatcgact

SEQ ID NO: 2102007 - DNA, 15 bp, Homo sapiens
gaggagtatcgactt

SEQ ID NO: 2102008 - DNA, 15 bp, Homo sapiens
aggagtatcgacttg

SEQ ID NO: 2102009 - DNA, 15 bp, Homo sapiens
ggagtatcgacttgc

SEQ ID NO: 2102010 - DNA, 15 bp, Homo sapiens
gagtatcgacttgca

SEQ ID NO: 2102011 - DNA, 15 bp, Homo sapiens
agtatcgacttgcat

SEQ ID NO: 2102012 - DNA, 15 bp, Homo sapiens
gtatcgacttgcatg

SEQ ID NO: 2102013 - DNA, 15 bp, Homo sapiens
tatcgacttgcatga

SEQ ID NO: 2102014 - DNA, 15 bp, Homo sapiens
atcgacttgcatgat

SEQ ID NO: 2102015 - DNA, 15 bp, Homo sapiens
tcgacttgcatgatg

SEQ ID NO: 2102016 - DNA, 15 bp, Homo sapiens
cgacttgcatgatgg

SEQ ID NO: 2102017 - DNA, 15 bp, Homo sapiens
gacttgcatgatggt

SEQ ID NO: 2102018 - DNA, 15 bp, Homo sapiens
acttgcatgatggta

SEQ ID NO: 2102019 - DNA, 15 bp, Homo sapiens
cttgcatgatggtaa

SEQ ID NO: 2102020 - DNA, 15 bp, Homo sapiens
ttgcatgatggtaag

SEQ ID NO: 2102021 - DNA, 15 bp, Homo sapiens
tgcatgatggtaagg

SEQ ID NO: 2102022 - DNA, 15 bp, Homo sapiens
gcatgatggtaaggt

SEQ ID NO: 2102023 - DNA, 15 bp, Homo sapiens
catgatggtaaggtg

SEQ ID NO: 2102024 - DNA, 15 bp, Homo sapiens
atgatggtaaggtga

SEQ ID NO: 2102025 - DNA, 15 bp, Homo sapiens
tgatggtaaggtgaa

SEQ ID NO: 2102026 - DNA, 15 bp, Homo sapiens
gatggtaaggtgaag

SEQ ID NO: 2102027 - DNA, 15 bp, Homo sapiens
atggtaaggtgaagt

SEQ ID NO: 2102028 - DNA, 15 bp, Homo sapiens
tggtaaggtgaagtc

SEQ ID NO: 2102029 - DNA, 15 bp, Homo sapiens
ggtaaggtgaagtcc

SEQ ID NO: 2102030 - DNA, 15 bp, Homo sapiens
gtaaggtgaagtccc

SEQ ID NO: 2102031 - DNA, 15 bp, Homo sapiens
taaggtgaagtccca

SEQ ID NO: 2102032 - DNA, 15 bp, Homo sapiens
aaggtgaagtcccac

SEQ ID NO: 2102033 - DNA, 15 bp, Homo sapiens
aggtgaagtcccaca

SEQ ID NO: 2102034 - DNA, 15 bp, Homo sapiens
ggtgaagtcccacaa

SEQ ID NO: 2102035 - DNA, 15 bp, Homo sapiens
gtgaagtcccacaat

SEQ ID NO: 2102036 - DNA, 15 bp, Homo sapiens
tgaagtcccacaata

SEQ ID NO: 2102037 - DNA, 15 bp, Homo sapiens
gaagtcccacaatag

SEQ ID NO: 2102038 - DNA, 15 bp, Homo sapiens
aagtcccacaatagg

SEQ ID NO: 2102039 - DNA, 15 bp, Homo sapiens
agtcccacaataggc

SEQ ID NO: 2102040 - DNA, 15 bp, Homo sapiens
gtcccacaataggct

SEQ ID NO: 2102041 - DNA, 15 bp, Homo sapiens
tcccacaataggctg

SEQ ID NO: 2102042 - DNA, 15 bp, Homo sapiens
cccacaataggctgt

SEQ ID NO: 2102043 - DNA, 15 bp, Homo sapiens
ccacaataggctgtc

SEQ ID NO: 2102044 - DNA, 15 bp, Homo sapiens
cacaataggctgtct

SEQ ID NO: 2102045 - DNA, 15 bp, Homo sapiens
acaataggctgtctg

SEQ ID NO: 2102046 - DNA, 15 bp, Homo sapiens
caataggctgtctgc

SEQ ID NO: 2102047 - DNA, 15 bp, Homo sapiens
aataggctgtctgca

SEQ ID NO: 2102048 - DNA, 15 bp, Homo sapiens
ataggctgtctgcaa

SEQ ID NO: 2102049 - DNA, 15 bp, Homo sapiens
taggctgtctgcaag

SEQ ID NO: 2102050 - DNA, 15 bp, Homo sapiens
aggctgtctgcaagc

SEQ ID NO: 2102051 - DNA, 15 bp, Homo sapiens
ggctgtctgcaagct

SEQ ID NO: 2102052 - DNA, 15 bp, Homo sapiens
gctgtctgcaagctg

SEQ ID NO: 2102053 - DNA, 15 bp, Homo sapiens
ctgtctgcaagctga

SEQ ID NO: 2102054 - DNA, 15 bp, Homo sapiens
tgtctgcaagctgag

SEQ ID NO: 2102055 - DNA, 15 bp, Homo sapiens
gtctgcaagctgagg

SEQ ID NO: 2102056 - DNA, 15 bp, Homo sapiens
tctgcaagctgagga

SEQ ID NO: 2102057 - DNA, 15 bp, Homo sapiens
ctgcaagctgaggag

SEQ ID NO: 2102058 - DNA, 15 bp, Homo sapiens
tgcaagctgaggagc

SEQ ID NO: 2102059 - DNA, 15 bp, Homo sapiens
gcaagctgaggagca

SEQ ID NO: 2102060 - DNA, 15 bp, Homo sapiens
caagctgaggagcaa

SEQ ID NO: 2102061 - DNA, 15 bp, Homo sapiens
aagctgaggagcaag

SEQ ID NO: 2102062 - DNA, 15 bp, Homo sapiens
agctgaggagcaagg

SEQ ID NO: 2102063 - DNA, 15 bp, Homo sapiens
gctgaggagcaagga

SEQ ID NO: 2102064 - DNA, 15 bp, Homo sapiens
ctgaggagcaaggaa

SEQ ID NO: 2102065 - DNA, 15 bp, Homo sapiens
tgaggagcaaggaag

SEQ ID NO: 2102066 - DNA, 15 bp, Homo sapiens
gaggagcaaggaagc

SEQ ID NO: 2102067 - DNA, 15 bp, Homo sapiens
aggagcaaggaagcc

SEQ ID NO: 2102068 - DNA, 15 bp, Homo sapiens
ggagcaaggaagcca

SEQ ID NO: 2102069 - DNA, 15 bp, Homo sapiens
gagcaaggaagccag

SEQ ID NO: 2102070 - DNA, 15 bp, Homo sapiens
agcaaggaagccagt

SEQ ID NO: 2102071 - DNA, 15 bp, Homo sapiens
gcaaggaagccagtc

SEQ ID NO: 2102072 - DNA, 15 bp, Homo sapiens
caaggaagccagtcc

SEQ ID NO: 2102073 - DNA, 15 bp, Homo sapiens
aaggaagccagtcca

SEQ ID NO: 2102074 - DNA, 15 bp, Homo sapiens
aggaagccagtccaa

SEQ ID NO: 2102075 - DNA, 15 bp, Homo sapiens
ggaagccagtccaag

SEQ ID NO: 2102076 - DNA, 15 bp, Homo sapiens
gaagccagtccaagt

SEQ ID NO: 2102077 - DNA, 15 bp, Homo sapiens
aagccagtccaagtc

SEQ ID NO: 2102078 - DNA, 15 bp, Homo sapiens
agccagtccaagtct

SEQ ID NO: 2102079 - DNA, 15 bp, Homo sapiens
gccagtccaagtctc

SEQ ID NO: 2102080 - DNA, 15 bp, Homo sapiens
ccagtccaagtctca

SEQ ID NO: 2102081 - DNA, 15 bp, Homo sapiens
cagtccaagtctcaa

SEQ ID NO: 2102082 - DNA, 15 bp, Homo sapiens
agtccaagtctcaaa

SEQ ID NO: 2102083 - DNA, 15 bp, Homo sapiens
gtccaagtctcaaaa

SEQ ID NO: 2102084 - DNA, 15 bp, Homo sapiens
tccaagtctcaaaac

SEQ ID NO: 2102085 - DNA, 15 bp, Homo sapiens
ccaagtctcaaaacc

SEQ ID NO: 2102086 - DNA, 15 bp, Homo sapiens
caagtctcaaaacct

SEQ ID NO: 2102087 - DNA, 15 bp, Homo sapiens
aagtctcaaaacctc

SEQ ID NO: 2102088 - DNA, 15 bp, Homo sapiens
agtctcaaaacctca

SEQ ID NO: 2102089 - DNA, 15 bp, Homo sapiens
gtctcaaaacctcaa

SEQ ID NO: 2102090 - DNA, 15 bp, Homo sapiens
tctcaaaacctcaaa

SEQ ID NO: 2102091 - DNA, 15 bp, Homo sapiens
ctcaaaacctcaaaa

SEQ ID NO: 2102092 - DNA, 15 bp, Homo sapiens
tcaaaacctcaaaag

SEQ ID NO: 2102093 - DNA, 15 bp, Homo sapiens
caaaacctcaaaagt

SEQ ID NO: 2102094 - DNA, 15 bp, Homo sapiens
aaaacctcaaaagta

SEQ ID NO: 2102095 - DNA, 15 bp, Homo sapiens
aaacctcaaaagtag

SEQ ID NO: 2102096 - DNA, 15 bp, Homo sapiens
aacctcaaaagtagg

SEQ ID NO: 2102097 - DNA, 15 bp, Homo sapiens
acctcaaaagtaggg

SEQ ID NO: 2102098 - DNA, 15 bp, Homo sapiens
cctcaaaagtaggga

SEQ ID NO: 2102099 - DNA, 15 bp, Homo sapiens
ctcaaaagtagggaa

SEQ ID NO: 2102100 - DNA, 15 bp, Homo sapiens
tcaaaagtagggaat

SEQ ID NO: 2102101 - DNA, 15 bp, Homo sapiens
caaaagtagggaatc

SEQ ID NO: 2102102 - DNA, 15 bp, Homo sapiens
aaaagtagggaatcc

SEQ ID NO: 2102103 - DNA, 15 bp, Homo sapiens
aaagtagggaatcca

SEQ ID NO: 2102104 - DNA, 15 bp, Homo sapiens
aagtagggaatccaa

SEQ ID NO: 2102105 - DNA, 15 bp, Homo sapiens
agtagggaatccaac

SEQ ID NO: 2102106 - DNA, 15 bp, Homo sapiens
gtagggaatccaaca

SEQ ID NO: 2102107 - DNA, 15 bp, Homo sapiens
tagggaatccaacaa

SEQ ID NO: 2102108 - DNA, 15 bp, Homo sapiens
agggaatccaacaaa

SEQ ID NO: 2102109 - DNA, 15 bp, Homo sapiens
gggaatccaacaaat

SEQ ID NO: 2102110 - DNA, 15 bp, Homo sapiens
ggaatccaacaaatg

SEQ ID NO: 2102111 - DNA, 15 bp, Homo sapiens
gaatccaacaaatgc

SEQ ID NO: 2102112 - DNA, 15 bp, Homo sapiens
aatccaacaaatgcg

SEQ ID NO: 2102113 - DNA, 15 bp, Homo sapiens
atccaacaaatgcgg

SEQ ID NO: 2102114 - DNA, 15 bp, Homo sapiens
tccaacaaatgcggc

SEQ ID NO: 2102115 - DNA, 15 bp, Homo sapiens
ccaacaaatgcggcc

SEQ ID NO: 2102116 - DNA, 15 bp, Homo sapiens
caacaaatgcggcct

SEQ ID NO: 2102117 - DNA, 15 bp, Homo sapiens
aacaaatgcggcctt

SEQ ID NO: 2102118 - DNA, 15 bp, Homo sapiens
acaaatgcggccttc

SEQ ID NO: 2102119 - DNA, 15 bp, Homo sapiens
caaatgcggccttca

SEQ ID NO: 2102120 - DNA, 15 bp, Homo sapiens
aaatgcggccttcag

SEQ ID NO: 2102121 - DNA, 15 bp, Homo sapiens
aatgcggccttcagt

SEQ ID NO: 2102122 - DNA, 15 bp, Homo sapiens
atgcggccttcagtc

SEQ ID NO: 2102123 - DNA, 15 bp, Homo sapiens
tgcggccttcagtct

SEQ ID NO: 2102124 - DNA, 15 bp, Homo sapiens
gcggccttcagtctg

SEQ ID NO: 2102125 - DNA, 15 bp, Homo sapiens
cggccttcagtctgt

SEQ ID NO: 2102126 - DNA, 15 bp, Homo sapiens
ggccttcagtctgtg

SEQ ID NO: 2102127 - DNA, 15 bp, Homo sapiens
gccttcagtctgtgg

SEQ ID NO: 2102128 - DNA, 15 bp, Homo sapiens
ccttcagtctgtggc

SEQ ID NO: 2102129 - DNA, 15 bp, Homo sapiens
cttcagtctgtggcc

SEQ ID NO: 2102130 - DNA, 15 bp, Homo sapiens
ttcagtctgtggcca

SEQ ID NO: 2102131 - DNA, 15 bp, Homo sapiens
tcagtctgtggccaa

SEQ ID NO: 2102132 - DNA, 15 bp, Homo sapiens
cagtctgtggccaaa

SEQ ID NO: 2102133 - DNA, 15 bp, Homo sapiens
agtctgtggccaaaa

SEQ ID NO: 2102134 - DNA, 15 bp, Homo sapiens
gtctgtggccaaaag

SEQ ID NO: 2102135 - DNA, 15 bp, Homo sapiens
tctgtggccaaaagc

SEQ ID NO: 2102136 - DNA, 15 bp, Homo sapiens
ctgtggccaaaagcc

SEQ ID NO: 2102137 - DNA, 15 bp, Homo sapiens
tgtggccaaaagcct

SEQ ID NO: 2102138 - DNA, 15 bp, Homo sapiens
gtggccaaaagcctg

SEQ ID NO: 2102139 - DNA, 15 bp, Homo sapiens
tggccaaaagcctga

SEQ ID NO: 2102140 - DNA, 15 bp, Homo sapiens
ggccaaaagcctgag

SEQ ID NO: 2102141 - DNA, 15 bp, Homo sapiens
gccaaaagcctgaga

SEQ ID NO: 2102142 - DNA, 15 bp, Homo sapiens
ccaaaagcctgagag

SEQ ID NO: 2102143 - DNA, 15 bp, Homo sapiens
caaaagcctgagagc

SEQ ID NO: 2102144 - DNA, 15 bp, Homo sapiens
aaaagcctgagagcc

SEQ ID NO: 2102145 - DNA, 15 bp, Homo sapiens
aaagcctgagagccc

SEQ ID NO: 2102146 - DNA, 15 bp, Homo sapiens
aagcctgagagccct

SEQ ID NO: 2102147 - DNA, 15 bp, Homo sapiens
agcctgagagccctt

SEQ ID NO: 2102148 - DNA, 15 bp, Homo sapiens
gcctgagagcccttg

SEQ ID NO: 2102149 - DNA, 15 bp, Homo sapiens
cctgagagcccttgg

SEQ ID NO: 2102150 - DNA, 15 bp, Homo sapiens
ctgagagcccttggc

SEQ ID NO: 2102151 - DNA, 15 bp, Homo sapiens
tgagagcccttggca

SEQ ID NO: 2102152 - DNA, 15 bp, Homo sapiens
gagagcccttggcaa

SEQ ID NO: 2102153 - DNA, 15 bp, Homo sapiens
agagcccttggcaaa

SEQ ID NO: 2102154 - DNA, 15 bp, Homo sapiens
gagcccttggcaaac

SEQ ID NO: 2102155 - DNA, 15 bp, Homo sapiens
agcccttggcaaacc

SEQ ID NO: 2102156 - DNA, 15 bp, Homo sapiens
gcccttggcaaacct

SEQ ID NO: 2102157 - DNA, 15 bp, Homo sapiens
cccttggcaaacctc

SEQ ID NO: 2102158 - DNA, 15 bp, Homo sapiens
ccttggcaaacctct

SEQ ID NO: 2102159 - DNA, 15 bp, Homo sapiens
cttggcaaacctctg

SEQ ID NO: 2102160 - DNA, 15 bp, Homo sapiens
ttggcaaacctctgg

SEQ ID NO: 2102161 - DNA, 15 bp, Homo sapiens
tggcaaacctctggt

SEQ ID NO: 2102162 - DNA, 15 bp, Homo sapiens
ggcaaacctctggtg

SEQ ID NO: 2102163 - DNA, 15 bp, Homo sapiens
gcaaacctctggtgt

SEQ ID NO: 2102164 - DNA, 15 bp, Homo sapiens
caaacctctggtgta

SEQ ID NO: 2102165 - DNA, 15 bp, Homo sapiens
aaacctctggtgtaa

SEQ ID NO: 2102166 - DNA, 15 bp, Homo sapiens
aacctctggtgtaaa

SEQ ID NO: 2102167 - DNA, 15 bp, Homo sapiens
acctctggtgtaaat

SEQ ID NO: 2102168 - DNA, 15 bp, Homo sapiens
cctctggtgtaaatc

SEQ ID NO: 2102169 - DNA, 15 bp, Homo sapiens
ctctggtgtaaatcc

SEQ ID NO: 2102170 - DNA, 15 bp, Homo sapiens
tctggtgtaaatcca

SEQ ID NO: 2102171 - DNA, 15 bp, Homo sapiens
ctggtgtaaatccaa

SEQ ID NO: 2102172 - DNA, 15 bp, Homo sapiens
tggtgtaaatccaag

SEQ ID NO: 2102173 - DNA, 15 bp, Homo sapiens
ggtgtaaatccaaga

SEQ ID NO: 2102174 - DNA, 15 bp, Homo sapiens
gtgtaaatccaagag

SEQ ID NO: 2102175 - DNA, 15 bp, Homo sapiens
tgtaaatccaagagt

SEQ ID NO: 2102176 - DNA, 15 bp, Homo sapiens
gtaaatccaagagtt

SEQ ID NO: 2102177 - DNA, 15 bp, Homo sapiens
taaatccaagagttc

SEQ ID NO: 2102178 - DNA, 15 bp, Homo sapiens
aaatccaagagttca

SEQ ID NO: 2102179 - DNA, 15 bp, Homo sapiens
aatccaagagttcaa

SEQ ID NO: 2102180 - DNA, 15 bp, Homo sapiens
atccaagagttcaaa

SEQ ID NO: 2102181 - DNA, 15 bp, Homo sapiens
tccaagagttcaaaa

SEQ ID NO: 2102182 - DNA, 15 bp, Homo sapiens
ccaagagttcaaaag

SEQ ID NO: 2102183 - DNA, 15 bp, Homo sapiens
caagagttcaaaagc

SEQ ID NO: 2102184 - DNA, 15 bp, Homo sapiens
aagagttcaaaagct

SEQ ID NO: 2102185 - DNA, 15 bp, Homo sapiens
agagttcaaaagctg

SEQ ID NO: 2102186 - DNA, 15 bp, Homo sapiens
gagttcaaaagctga

SEQ ID NO: 2102187 - DNA, 15 bp, Homo sapiens
agttcaaaagctgaa

SEQ ID NO: 2102188 - DNA, 15 bp, Homo sapiens
gttcaaaagctgaag

SEQ ID NO: 2102189 - DNA, 15 bp, Homo sapiens
ttcaaaagctgaaga

SEQ ID NO: 2102190 - DNA, 15 bp, Homo sapiens
tcaaaagctgaagaa

SEQ ID NO: 2102191 - DNA, 15 bp, Homo sapiens
caaaagctgaagaac

SEQ ID NO: 2102192 - DNA, 15 bp, Homo sapiens
aaaagctgaagaact

SEQ ID NO: 2102193 - DNA, 15 bp, Homo sapiens
aaagctgaagaactt

SEQ ID NO: 2102194 - DNA, 15 bp, Homo sapiens
aagctgaagaacttg

SEQ ID NO: 2102195 - DNA, 15 bp, Homo sapiens
agctgaagaacttgg

SEQ ID NO: 2102196 - DNA, 15 bp, Homo sapiens
gctgaagaacttgga

SEQ ID NO: 2102197 - DNA, 15 bp, Homo sapiens
ctgaagaacttggag

SEQ ID NO: 2102198 - DNA, 15 bp, Homo sapiens
tgaagaacttggagt

SEQ ID NO: 2102199 - DNA, 15 bp, Homo sapiens
gaagaacttggagtc

SEQ ID NO: 2102200 - DNA, 15 bp, Homo sapiens
agaacttggagtcta

SEQ ID NO: 2102201 - DNA, 15 bp, Homo sapiens
gaacttggagtctaa

SEQ ID NO: 2102202 - DNA, 15 bp, Homo sapiens
aacttggagtctaat

SEQ ID NO: 2102203 - DNA, 15 bp, Homo sapiens
acttggagtctaatg

SEQ ID NO: 2102204 - DNA, 15 bp, Homo sapiens
cttggagtctaatgt

SEQ ID NO: 2102205 - DNA, 15 bp, Homo sapiens
ttggagtctaatgtt

SEQ ID NO: 2102206 - DNA, 15 bp, Homo sapiens
tggagtctaatgttc

SEQ ID NO: 2102207 - DNA, 15 bp, Homo sapiens
ggagtctaatgttca

SEQ ID NO: 2102208 - DNA, 15 bp, Homo sapiens
gagtctaatgttcaa

SEQ ID NO: 2102209 - DNA, 15 bp, Homo sapiens
agtctaatgttcaag

SEQ ID NO: 2102210 - DNA, 15 bp, Homo sapiens
gtctaatgttcaagg

SEQ ID NO: 2102211 - DNA, 15 bp, Homo sapiens
tctaatgttcaaggc

SEQ ID NO: 2102212 - DNA, 15 bp, Homo sapiens
ctaatgttcaaggca

SEQ ID NO: 2102213 - DNA, 15 bp, Homo sapiens
taatgttcaaggcag

SEQ ID NO: 2102214 - DNA, 15 bp, Homo sapiens
aatgttcaaggcagg

SEQ ID NO: 2102215 - DNA, 15 bp, Homo sapiens
atgttcaaggcagga

SEQ ID NO: 2102216 - DNA, 15 bp, Homo sapiens
tgttcaaggcaggaa

SEQ ID NO: 2102217 - DNA, 15 bp, Homo sapiens
gttcaaggcaggaag

SEQ ID NO: 2102218 - DNA, 15 bp, Homo sapiens
ttcaaggcaggaagc

SEQ ID NO: 2102219 - DNA, 15 bp, Homo sapiens
tcaaggcaggaagca

SEQ ID NO: 2102220 - DNA, 15 bp, Homo sapiens
caaggcaggaagcat

SEQ ID NO: 2102221 - DNA, 15 bp, Homo sapiens
aaggcaggaagcatc

SEQ ID NO: 2102222 - DNA, 15 bp, Homo sapiens
aggcaggaagcatcc

SEQ ID NO: 2102223 - DNA, 15 bp, Homo sapiens
gcaggaagcatccag

SEQ ID NO: 2102224 - DNA, 15 bp, Homo sapiens
caggaagcatccagc

SEQ ID NO: 2102225 - DNA, 15 bp, Homo sapiens
aggaagcatccagca

SEQ ID NO: 2102226 - DNA, 15 bp, Homo sapiens
ggaagcatccagcag

SEQ ID NO: 2102227 - DNA, 15 bp, Homo sapiens
gaagcatccagcagg

SEQ ID NO: 2102228 - DNA, 15 bp, Homo sapiens
aagcatccagcaggg

SEQ ID NO: 2102229 - DNA, 15 bp, Homo sapiens
agcatccagcaggga

SEQ ID NO: 2102230 - DNA, 15 bp, Homo sapiens
gcatccagcagggaa

SEQ ID NO: 2102231 - DNA, 15 bp, Homo sapiens
catccagcagggaag

SEQ ID NO: 2102232 - DNA, 15 bp, Homo sapiens
atccagcagggaaga

SEQ ID NO: 2102233 - DNA, 15 bp, Homo sapiens
tccagcagggaagaa

SEQ ID NO: 2102234 - DNA, 15 bp, Homo sapiens
ccagcagggaagaaa

SEQ ID NO: 2102235 - DNA, 15 bp, Homo sapiens
cagcagggaagaaag

SEQ ID NO: 2102236 - DNA, 15 bp, Homo sapiens
agcagggaagaaaga

SEQ ID NO: 2102237 - DNA, 15 bp, Homo sapiens
gcagggaagaaagat

SEQ ID NO: 2102238 - DNA, 15 bp, Homo sapiens
cagggaagaaagatg

SEQ ID NO: 2102239 - DNA, 15 bp, Homo sapiens
agggaagaaagatga

SEQ ID NO: 2102240 - DNA, 15 bp, Homo sapiens
gggaagaaagatgaa

SEQ ID NO: 2102241 - DNA, 15 bp, Homo sapiens
ggaagaaagatgaag

SEQ ID NO: 2102242 - DNA, 15 bp, Homo sapiens
gaagaaagatgaagg

SEQ ID NO: 2102243 - DNA, 15 bp, Homo sapiens
aagaaagatgaaggc

SEQ ID NO: 2102244 - DNA, 15 bp, Homo sapiens
agaaagatgaaggcc

SEQ ID NO: 2102245 - DNA, 15 bp, Homo sapiens
gaaagatgaaggcca

SEQ ID NO: 2102246 - DNA, 15 bp, Homo sapiens
aaagatgaaggccag

SEQ ID NO: 2102247 - DNA, 15 bp, Homo sapiens
aagatgaaggccaga

SEQ ID NO: 2102248 - DNA, 15 bp, Homo sapiens
agatgaaggccagaa

SEQ ID NO: 2102249 - DNA, 15 bp, Homo sapiens
gatgaaggccagaag

SEQ ID NO: 2102250 - DNA, 15 bp, Homo sapiens
atgaaggccagaaga

SEQ ID NO: 2102251 - DNA, 15 bp, Homo sapiens
tgaaggccagaagac

SEQ ID NO: 2102252 - DNA, 15 bp, Homo sapiens
gaaggccagaagact

SEQ ID NO: 2102253 - DNA, 15 bp, Homo sapiens
aaggccagaagactg

SEQ ID NO: 2102254 - DNA, 15 bp, Homo sapiens
aggccagaagactga

SEQ ID NO: 2102255 - DNA, 15 bp, Homo sapiens
ggccagaagactgag

SEQ ID NO: 2102256 - DNA, 15 bp, Homo sapiens
gccagaagactgagc

SEQ ID NO: 2102257 - DNA, 15 bp, Homo sapiens
ccagaagactgagca

SEQ ID NO: 2102258 - DNA, 15 bp, Homo sapiens
cagaagactgagcaa

SEQ ID NO: 2102259 - DNA, 15 bp, Homo sapiens
agaagactgagcaag

SEQ ID NO: 2102260 - DNA, 15 bp, Homo sapiens
gaagactgagcaagt

SEQ ID NO: 2102261 - DNA, 15 bp, Homo sapiens
aagactgagcaagtt

SEQ ID NO: 2102262 - DNA, 15 bp, Homo sapiens
agactgagcaagttg

SEQ ID NO: 2102263 - DNA, 15 bp, Homo sapiens
gactgagcaagttgg

SEQ ID NO: 2102264 - DNA, 15 bp, Homo sapiens
actgagcaagttggc

SEQ ID NO: 2102265 - DNA, 15 bp, Homo sapiens
ctgagcaagttggct

SEQ ID NO: 2102266 - DNA, 15 bp, Homo sapiens
tgagcaagttggctt

SEQ ID NO: 2102267 - DNA, 15 bp, Homo sapiens
gagcaagttggcttc

SEQ ID NO: 2102268 - DNA, 15 bp, Homo sapiens
agcaagttggcttct

SEQ ID NO: 2102269 - DNA, 15 bp, Homo sapiens
gcaagttggcttctt

SEQ ID NO: 2102270 - DNA, 15 bp, Homo sapiens
caagttggcttcttc

SEQ ID NO: 2102271 - DNA, 15 bp, Homo sapiens
aagttggcttcttcc

SEQ ID NO: 2102272 - DNA, 15 bp, Homo sapiens
agttggcttcttcca

SEQ ID NO: 2102273 - DNA, 15 bp, Homo sapiens
gttggcttcttccac

SEQ ID NO: 2102274 - DNA, 15 bp, Homo sapiens
ttggcttcttccacc

SEQ ID NO: 2102275 - DNA, 15 bp, Homo sapiens
tggcttcttccacct

SEQ ID NO: 2102276 - DNA, 15 bp, Homo sapiens
ggcttcttccacctt

SEQ ID NO: 2102277 - DNA, 15 bp, Homo sapiens
gcttcttccaccttc

SEQ ID NO: 2102278 - DNA, 15 bp, Homo sapiens
cttcttccaccttct

SEQ ID NO: 2102279 - DNA, 15 bp, Homo sapiens
ttcttccaccttctt

SEQ ID NO: 2102280 - DNA, 15 bp, Homo sapiens
tcttccaccttcttc

SEQ ID NO: 2102281 - DNA, 15 bp, Homo sapiens
cttccaccttcttct

SEQ ID NO: 2102282 - DNA, 15 bp, Homo sapiens
ttccaccttcttctg

SEQ ID NO: 2102283 - DNA, 15 bp, Homo sapiens
tccaccttcttctgc

SEQ ID NO: 2102284 - DNA, 15 bp, Homo sapiens
ccaccttcttctgcc

SEQ ID NO: 2102285 - DNA, 15 bp, Homo sapiens
caccttcttctgcct

SEQ ID NO: 2102286 - DNA, 15 bp, Homo sapiens
accttcttctgcctg

SEQ ID NO: 2102287 - DNA, 15 bp, Homo sapiens
ccttcttctgcctgc

SEQ ID NO: 2102288 - DNA, 15 bp, Homo sapiens
cttcttctgcctgct

SEQ ID NO: 2102289 - DNA, 15 bp, Homo sapiens
ttcttctgcctgctt

SEQ ID NO: 2102290 - DNA, 15 bp, Homo sapiens
tcttctgcctgcttt

SEQ ID NO: 2102291 - DNA, 15 bp, Homo sapiens
cttctgcctgcttta

SEQ ID NO: 2102292 - DNA, 15 bp, Homo sapiens
ttctgcctgctttat

SEQ ID NO: 2102293 - DNA, 15 bp, Homo sapiens
tctgcctgctttatt

SEQ ID NO: 2102294 - DNA, 15 bp, Homo sapiens
ctgcctgctttattc

SEQ ID NO: 2102295 - DNA, 15 bp, Homo sapiens
tgcctgctttattct

SEQ ID NO: 2102296 - DNA, 15 bp, Homo sapiens
gcctgctttattcta

SEQ ID NO: 2102297 - DNA, 15 bp, Homo sapiens
cctgctttattctag

SEQ ID NO: 2102298 - DNA, 15 bp, Homo sapiens
ctgctttattctagc

SEQ ID NO: 2102299 - DNA, 15 bp, Homo sapiens
tgctttattctagcc

SEQ ID NO: 2102300 - DNA, 15 bp, Homo sapiens
gctttattctagcca

SEQ ID NO: 2102301 - DNA, 15 bp, Homo sapiens
ctttattctagccag

SEQ ID NO: 2102302 - DNA, 15 bp, Homo sapiens
tttattctagccagg

SEQ ID NO: 2102303 - DNA, 15 bp, Homo sapiens
ttattctagccaggc

SEQ ID NO: 2102304 - DNA, 15 bp, Homo sapiens
tattctagccaggct

SEQ ID NO: 2102305 - DNA, 15 bp, Homo sapiens
attctagccaggctg

SEQ ID NO: 2102306 - DNA, 15 bp, Homo sapiens
ttctagccaggctgg

SEQ ID NO: 2102307 - DNA, 15 bp, Homo sapiens
tctagccaggctggc

SEQ ID NO: 2102308 - DNA, 15 bp, Homo sapiens
ctagccaggctggca

SEQ ID NO: 2102309 - DNA, 15 bp, Homo sapiens
tagccaggctggcag

SEQ ID NO: 2102310 - DNA, 15 bp, Homo sapiens
agccaggctggcagt

SEQ ID NO: 2102311 - DNA, 15 bp, Homo sapiens
gccaggctggcagtt

SEQ ID NO: 2102312 - DNA, 15 bp, Homo sapiens
ccaggctggcagttt

SEQ ID NO: 2102313 - DNA, 15 bp, Homo sapiens
caggctggcagttta

SEQ ID NO: 2102314 - DNA, 15 bp, Homo sapiens
aggctggcagtttat

SEQ ID NO: 2102315 - DNA, 15 bp, Homo sapiens
ggctggcagtttatt

SEQ ID NO: 2102316 - DNA, 15 bp, Homo sapiens
gctggcagtttattg

SEQ ID NO: 2102317 - DNA, 15 bp, Homo sapiens
ctggcagtttattgt

SEQ ID NO: 2102318 - DNA, 15 bp, Homo sapiens
tggcagtttattgta

SEQ ID NO: 2102319 - DNA, 15 bp, Homo sapiens
ggcagtttattgtat

SEQ ID NO: 2102320 - DNA, 15 bp, Homo sapiens
gcagtttattgtatg

SEQ ID NO: 2102321 - DNA, 15 bp, Homo sapiens
cagtttattgtatgg

SEQ ID NO: 2102322 - DNA, 15 bp, Homo sapiens
agtttattgtatggt

SEQ ID NO: 2102323 - DNA, 15 bp, Homo sapiens
gtttattgtatggtg

SEQ ID NO: 2102324 - DNA, 15 bp, Homo sapiens
tttattgtatggtgc

SEQ ID NO: 2102325 - DNA, 15 bp, Homo sapiens
ttattgtatggtgcc

SEQ ID NO: 2102326 - DNA, 15 bp, Homo sapiens
tattgtatggtgccc

SEQ ID NO: 2102327 - DNA, 15 bp, Homo sapiens
attgtatggtgccca

SEQ ID NO: 2102328 - DNA, 15 bp, Homo sapiens
ttgtatggtgcccac

SEQ ID NO: 2102329 - DNA, 15 bp, Homo sapiens
tgtatggtgcccacc

SEQ ID NO: 2102330 - DNA, 15 bp, Homo sapiens
gtatggtgcccaccc

SEQ ID NO: 2102331 - DNA, 15 bp, Homo sapiens
tatggtgcccaccca

SEQ ID NO: 2102332 - DNA, 15 bp, Homo sapiens
atggtgcccacccaa

SEQ ID NO: 2102333 - DNA, 15 bp, Homo sapiens
tggtgcccacccaaa

SEQ ID NO: 2102334 - DNA, 15 bp, Homo sapiens
ggtgcccacccaaat

SEQ ID NO: 2102335 - DNA, 15 bp, Homo sapiens
gtgcccacccaaatt

SEQ ID NO: 2102336 - DNA, 15 bp, Homo sapiens
tgcccacccaaattg

SEQ ID NO: 2102337 - DNA, 15 bp, Homo sapiens
gcccacccaaattga

SEQ ID NO: 2102338 - DNA, 15 bp, Homo sapiens
cccacccaaattgag

SEQ ID NO: 2102339 - DNA, 15 bp, Homo sapiens
ccacccaaattgagg

SEQ ID NO: 2102340 - DNA, 15 bp, Homo sapiens
cacccaaattgaggg

SEQ ID NO: 2102341 - DNA, 15 bp, Homo sapiens
acccaaattgagggt

SEQ ID NO: 2102342 - DNA, 15 bp, Homo sapiens
cccaaattgagggtg

SEQ ID NO: 2102343 - DNA, 15 bp, Homo sapiens
aaattgagggtgggt

SEQ ID NO: 2102344 - DNA, 15 bp, Homo sapiens
aattgagggtgggtc

SEQ ID NO: 2102345 - DNA, 15 bp, Homo sapiens
attgagggtgggtct

SEQ ID NO: 2102346 - DNA, 15 bp, Homo sapiens
ttgagggtgggtctg

SEQ ID NO: 2102347 - DNA, 15 bp, Homo sapiens
tgagggtgggtctgc

SEQ ID NO: 2102348 - DNA, 15 bp, Homo sapiens
gagggtgggtctgcc

SEQ ID NO: 2102349 - DNA, 15 bp, Homo sapiens
agggtgggtctgccc

SEQ ID NO: 2102350 - DNA, 15 bp, Homo sapiens
gggtgggtctgcccc

SEQ ID NO: 2102351 - DNA, 15 bp, Homo sapiens
ggtgggtctgcccct

SEQ ID NO: 2102352 - DNA, 15 bp, Homo sapiens
gtgggtctgcccctc

SEQ ID NO: 2102353 - DNA, 15 bp, Homo sapiens
tgggtctgcccctcc

SEQ ID NO: 2102354 - DNA, 15 bp, Homo sapiens
gggtctgcccctccc

SEQ ID NO: 2102355 - DNA, 15 bp, Homo sapiens
ggtctgcccctccca

SEQ ID NO: 2102356 - DNA, 15 bp, Homo sapiens
gtctgcccctcccag

SEQ ID NO: 2102357 - DNA, 15 bp, Homo sapiens
tctgcccctcccagt

SEQ ID NO: 2102358 - DNA, 15 bp, Homo sapiens
ctgcccctcccagtc

SEQ ID NO: 2102359 - DNA, 15 bp, Homo sapiens
tgcccctcccagtcc

SEQ ID NO: 2102360 - DNA, 15 bp, Homo sapiens
gcccctcccagtcca

SEQ ID NO: 2102361 - DNA, 15 bp, Homo sapiens
cccctcccagtccac

SEQ ID NO: 2102362 - DNA, 15 bp, Homo sapiens
ccctcccagtccact

SEQ ID NO: 2102363 - DNA, 15 bp, Homo sapiens
cctcccagtccactg

SEQ ID NO: 2102364 - DNA, 15 bp, Homo sapiens
ctcccagtccactga

SEQ ID NO: 2102365 - DNA, 15 bp, Homo sapiens
tcccagtccactgac

SEQ ID NO: 2102366 - DNA, 15 bp, Homo sapiens
cccagtccactgact

SEQ ID NO: 2102367 - DNA, 15 bp, Homo sapiens
ccagtccactgactc

SEQ ID NO: 2102368 - DNA, 15 bp, Homo sapiens
cagtccactgactca

SEQ ID NO: 2102369 - DNA, 15 bp, Homo sapiens
agtccactgactcag

SEQ ID NO: 2102370 - DNA, 15 bp, Homo sapiens
gtccactgactcaga

SEQ ID NO: 2102371 - DNA, 15 bp, Homo sapiens
tccactgactcagat

SEQ ID NO: 2102372 - DNA, 15 bp, Homo sapiens
ccactgactcagatg

SEQ ID NO: 2102373 - DNA, 15 bp, Homo sapiens
cactgactcagatgt

SEQ ID NO: 2102374 - DNA, 15 bp, Homo sapiens
actgactcagatgtt

SEQ ID NO: 2102375 - DNA, 15 bp, Homo sapiens
ctgactcagatgtta

SEQ ID NO: 2102376 - DNA, 15 bp, Homo sapiens
tgactcagatgttag

SEQ ID NO: 2102377 - DNA, 15 bp, Homo sapiens
gactcagatgttagt

SEQ ID NO: 2102378 - DNA, 15 bp, Homo sapiens
actcagatgttagtc

SEQ ID NO: 2102379 - DNA, 15 bp, Homo sapiens
ctcagatgttagtct

SEQ ID NO: 2102380 - DNA, 15 bp, Homo sapiens
tcagatgttagtctc

SEQ ID NO: 2102381 - DNA, 15 bp, Homo sapiens
cagatgttagtctcc

SEQ ID NO: 2102382 - DNA, 15 bp, Homo sapiens
agatgttagtctcct

SEQ ID NO: 2102383 - DNA, 15 bp, Homo sapiens
gatgttagtctcctt

SEQ ID NO: 2102384 - DNA, 15 bp, Homo sapiens
atgttagtctccttt

SEQ ID NO: 2102385 - DNA, 15 bp, Homo sapiens
tgttagtctcctttg

SEQ ID NO: 2102386 - DNA, 15 bp, Homo sapiens
gttagtctcctttgg

SEQ ID NO: 2102387 - DNA, 15 bp, Homo sapiens
ttagtctcctttggc

SEQ ID NO: 2102388 - DNA, 15 bp, Homo sapiens
tagtctcctttggca

SEQ ID NO: 2102389 - DNA, 15 bp, Homo sapiens
agtctcctttggcaa

SEQ ID NO: 2102390 - DNA, 15 bp, Homo sapiens
gtctcctttggcaac

SEQ ID NO: 2102391 - DNA, 15 bp, Homo sapiens
ctcctttggcaacac

SEQ ID NO: 2102392 - DNA, 15 bp, Homo sapiens
tcctttggcaacaca

SEQ ID NO: 2102393 - DNA, 15 bp, Homo sapiens
cctttggcaacacac

SEQ ID NO: 2102394 - DNA, 15 bp, Homo sapiens
ctttggcaacacact

SEQ ID NO: 2102395 - DNA, 15 bp, Homo sapiens
tttggcaacacactc

SEQ ID NO: 2102396 - DNA, 15 bp, Homo sapiens
ttggcaacacactca

SEQ ID NO: 2102397 - DNA, 15 bp, Homo sapiens
tggcaacacactcac

SEQ ID NO: 2102398 - DNA, 15 bp, Homo sapiens
ggcaacacactcaca

SEQ ID NO: 2102399 - DNA, 15 bp, Homo sapiens
gcaacacactcacag

SEQ ID NO: 2102400 - DNA, 15 bp, Homo sapiens
caacacactcacaga

SEQ ID NO: 2102401 - DNA, 15 bp, Homo sapiens
aacacactcacagac

SEQ ID NO: 2102402 - DNA, 15 bp, Homo sapiens
acacactcacagaca

SEQ ID NO: 2102403 - DNA, 15 bp, Homo sapiens
cacactcacagacac

SEQ ID NO: 2102404 - DNA, 15 bp, Homo sapiens
acactcacagacaca

SEQ ID NO: 2102405 - DNA, 15 bp, Homo sapiens
cactcacagacacac

SEQ ID NO: 2102406 - DNA, 15 bp, Homo sapiens
actcacagacacacc

SEQ ID NO: 2102407 - DNA, 15 bp, Homo sapiens
ctcacagacacaccc

SEQ ID NO: 2102408 - DNA, 15 bp, Homo sapiens
tcacagacacaccca

SEQ ID NO: 2102409 - DNA, 15 bp, Homo sapiens
cacagacacacccag

SEQ ID NO: 2102410 - DNA, 15 bp, Homo sapiens
acagacacacccagg

SEQ ID NO: 2102411 - DNA, 15 bp, Homo sapiens
cagacacacccagga

SEQ ID NO: 2102412 - DNA, 15 bp, Homo sapiens
agacacacccaggag

SEQ ID NO: 2102413 - DNA, 15 bp, Homo sapiens
gacacacccaggagc

SEQ ID NO: 2102414 - DNA, 15 bp, Homo sapiens
acacacccaggagca

SEQ ID NO: 2102415 - DNA, 15 bp, Homo sapiens
cacacccaggagcaa

SEQ ID NO: 2102416 - DNA, 15 bp, Homo sapiens
acacccaggagcaat

SEQ ID NO: 2102417 - DNA, 15 bp, Homo sapiens
cacccaggagcaata

SEQ ID NO: 2102418 - DNA, 15 bp, Homo sapiens
acccaggagcaatat

SEQ ID NO: 2102419 - DNA, 15 bp, Homo sapiens
cccaggagcaatatg

SEQ ID NO: 2102420 - DNA, 15 bp, Homo sapiens
ccaggagcaatatgt

SEQ ID NO: 2102421 - DNA, 15 bp, Homo sapiens
caggagcaatatgtg

SEQ ID NO: 2102422 - DNA, 15 bp, Homo sapiens
aggagcaatatgtgc

SEQ ID NO: 2102423 - DNA, 15 bp, Homo sapiens
ggagcaatatgtgca

SEQ ID NO: 2102424 - DNA, 15 bp, Homo sapiens
gagcaatatgtgcat

SEQ ID NO: 2102425 - DNA, 15 bp, Homo sapiens
agcaatatgtgcatc

SEQ ID NO: 2102426 - DNA, 15 bp, Homo sapiens
gcaatatgtgcatcc

SEQ ID NO: 2102427 - DNA, 15 bp, Homo sapiens
caatatgtgcatcct

SEQ ID NO: 2102428 - DNA, 15 bp, Homo sapiens
aatatgtgcatcctt

SEQ ID NO: 2102429 - DNA, 15 bp, Homo sapiens
atatgtgcatccttc

SEQ ID NO: 2102430 - DNA, 15 bp, Homo sapiens
tatgtgcatccttca

SEQ ID NO: 2102431 - DNA, 15 bp, Homo sapiens
atgtgcatccttcaa

SEQ ID NO: 2102432 - DNA, 15 bp, Homo sapiens
tgtgcatccttcaat

SEQ ID NO: 2102433 - DNA, 15 bp, Homo sapiens
gtgcatccttcaatc

SEQ ID NO: 2102434 - DNA, 15 bp, Homo sapiens
tgcatccttcaatcc

SEQ ID NO: 2102435 - DNA, 15 bp, Homo sapiens
gcatccttcaatcca

SEQ ID NO: 2102436 - DNA, 15 bp, Homo sapiens
catccttcaatccaa

SEQ ID NO: 2102437 - DNA, 15 bp, Homo sapiens
atcaagttgacactt

SEQ ID NO: 2102438 - DNA, 15 bp, Homo sapiens
tcaagttgacactta

SEQ ID NO: 2102439 - DNA, 15 bp, Homo sapiens
caagttgacacttaa

SEQ ID NO: 2102440 - DNA, 15 bp, Homo sapiens
aagttgacacttaat

SEQ ID NO: 2102441 - DNA, 15 bp, Homo sapiens
agttgacacttaata

SEQ ID NO: 2102442 - DNA, 15 bp, Homo sapiens
gttgacacttaatat

SEQ ID NO: 2102443 - DNA, 15 bp, Homo sapiens
ttgacacttaatatt

SEQ ID NO: 2102444 - DNA, 15 bp, Homo sapiens
tgacacttaatatta

SEQ ID NO: 2102445 - DNA, 15 bp, Homo sapiens
gacacttaatattaa

SEQ ID NO: 2102446 - DNA, 15 bp, Homo sapiens
acacttaatattaac

SEQ ID NO: 2102447 - DNA, 15 bp, Homo sapiens
cacttaatattaacc

SEQ ID NO: 2102448 - DNA, 15 bp, Homo sapiens
acttaatattaacca

SEQ ID NO: 2102449 - DNA, 15 bp, Homo sapiens
cttaatattaaccat

SEQ ID NO: 2102450 - DNA, 15 bp, Homo sapiens
ttaatattaaccatc

SEQ ID NO: 2102451 - DNA, 15 bp, Homo sapiens
taatattaaccatca

SEQ ID NO: 2102452 - DNA, 15 bp, Homo sapiens
aatattaaccatcac

SEQ ID NO: 2102453 - DNA, 15 bp, Homo sapiens
atattaaccatcact

SEQ ID NO: 2102454 - DNA, 15 bp, Homo sapiens
tattaaccatcactg

SEQ ID NO: 2102455 - DNA, 15 bp, Homo sapiens
attaaccatcactgt

SEQ ID NO: 2102456 - DNA, 15 bp, Homo sapiens
ttaaccatcactgtt

SEQ ID NO: 2102457 - DNA, 15 bp, Homo sapiens
taaccatcactgttt

SEQ ID NO: 2102458 - DNA, 15 bp, Homo sapiens
aaccatcactgtttg

SEQ ID NO: 2102459 - DNA, 15 bp, Homo sapiens
accatcactgtttgc

SEQ ID NO: 2102460 - DNA, 15 bp, Homo sapiens
ccatcactgtttgcc

SEQ ID NO: 2102461 - DNA, 15 bp, Homo sapiens
catcactgtttgcca

SEQ ID NO: 2102462 - DNA, 15 bp, Homo sapiens
atcactgtttgccaa

SEQ ID NO: 2102463 - DNA, 15 bp, Homo sapiens
tcactgtttgccaag

SEQ ID NO: 2102464 - DNA, 15 bp, Homo sapiens
cactgtttgccaagt

SEQ ID NO: 2102465 - DNA, 15 bp, Homo sapiens
actgtttgccaagta

SEQ ID NO: 2102466 - DNA, 15 bp, Homo sapiens
ctgtttgccaagtat

SEQ ID NO: 2102467 - DNA, 15 bp, Homo sapiens
tgtttgccaagtatt

SEQ ID NO: 2102468 - DNA, 15 bp, Homo sapiens
gtttgccaagtattg

SEQ ID NO: 2102469 - DNA, 15 bp, Homo sapiens
tttgccaagtattgg

SEQ ID NO: 2102470 - DNA, 15 bp, Homo sapiens
ttgccaagtattggg

SEQ ID NO: 2102471 - DNA, 15 bp, Homo sapiens
tgccaagtattgggg

SEQ ID NO: 2102472 - DNA, 15 bp, Homo sapiens
gccaagtattgggga

SEQ ID NO: 2102473 - DNA, 15 bp, Homo sapiens
ccaagtattggggag

SEQ ID NO: 2102474 - DNA, 15 bp, Homo sapiens
caagtattggggagc

SEQ ID NO: 2102475 - DNA, 15 bp, Homo sapiens
aagtattggggagcc

SEQ ID NO: 2102476 - DNA, 15 bp, Homo sapiens
agtattggggagcca

SEQ ID NO: 2102477 - DNA, 15 bp, Homo sapiens
gtattggggagccat

SEQ ID NO: 2102478 - DNA, 15 bp, Homo sapiens
tattggggagccatc

SEQ ID NO: 2102479 - DNA, 15 bp, Homo sapiens
attggggagccatct

SEQ ID NO: 2102480 - DNA, 15 bp, Homo sapiens
ttggggagccatcta

SEQ ID NO: 2102481 - DNA, 15 bp, Homo sapiens
tggggagccatctaa

SEQ ID NO: 2102482 - DNA, 15 bp, Homo sapiens
ggggagccatctaag

SEQ ID NO: 2102483 - DNA, 15 bp, Homo sapiens
gggagccatctaagt

SEQ ID NO: 2102484 - DNA, 15 bp, Homo sapiens
ggagccatctaagtt

SEQ ID NO: 2102485 - DNA, 15 bp, Homo sapiens
gagccatctaagttt

SEQ ID NO: 2102486 - DNA, 15 bp, Homo sapiens
agccatctaagtttt

SEQ ID NO: 2102487 - DNA, 15 bp, Homo sapiens
gccatctaagttttt

SEQ ID NO: 2102488 - DNA, 15 bp, Homo sapiens
ccatctaagttttta

SEQ ID NO: 2102489 - DNA, 15 bp, Homo sapiens
catctaagtttttag

SEQ ID NO: 2102490 - DNA, 15 bp, Homo sapiens
atctaagtttttagt

SEQ ID NO: 2102491 - DNA, 15 bp, Homo sapiens
tctaagtttttagta

SEQ ID NO: 2102492 - DNA, 15 bp, Homo sapiens
ctaagtttttagtat

SEQ ID NO: 2102493 - DNA, 15 bp, Homo sapiens
taagtttttagtatt

SEQ ID NO: 2102494 - DNA, 15 bp, Homo sapiens
aagtttttagtatta

SEQ ID NO: 2102495 - DNA, 15 bp, Homo sapiens
agtttttagtattat

SEQ ID NO: 2102496 - DNA, 15 bp, Homo sapiens
gtttttagtattatt

SEQ ID NO: 2102497 - DNA, 15 bp, Homo sapiens
tttttagtattattc

SEQ ID NO: 2102498 - DNA, 15 bp, Homo sapiens
ttttagtattattcc

SEQ ID NO: 2102499 - DNA, 15 bp, Homo sapiens
tttagtattattcct

SEQ ID NO: 2102500 - DNA, 15 bp, Homo sapiens
ttagtattattcctt

SEQ ID NO: 2102501 - DNA, 15 bp, Homo sapiens
tagtattattccttt

SEQ ID NO: 2102502 - DNA, 15 bp, Homo sapiens
agtattattccttta

SEQ ID NO: 2102503 - DNA, 15 bp, Homo sapiens
gtattattcctttag

SEQ ID NO: 2102504 - DNA, 15 bp, Homo sapiens
tattattcctttaga

SEQ ID NO: 2102505 - DNA, 15 bp, Homo sapiens
attattcctttagaa

SEQ ID NO: 2102506 - DNA, 15 bp, Homo sapiens
ttattcctttagaaa

SEQ ID NO: 2102507 - DNA, 15 bp, Homo sapiens
tattcctttagaaat

SEQ ID NO: 2102508 - DNA, 15 bp, Homo sapiens
attcctttagaaatg

SEQ ID NO: 2102509 - DNA, 15 bp, Homo sapiens
ttcctttagaaatgg

SEQ ID NO: 2102510 - DNA, 15 bp, Homo sapiens
tcctttagaaatgga

SEQ ID NO: 2102511 - DNA, 15 bp, Homo sapiens
cctttagaaatggaa

SEQ ID NO: 2102512 - DNA, 15 bp, Homo sapiens
ctttagaaatggaaa

SEQ ID NO: 2102513 - DNA, 15 bp, Homo sapiens
tttagaaatggaaaa

SEQ ID NO: 2102514 - DNA, 15 bp, Homo sapiens
ttagaaatggaaaaa

SEQ ID NO: 2102515 - DNA, 15 bp, Homo sapiens
tagaaatggaaaaat

SEQ ID NO: 2102516 - DNA, 15 bp, Homo sapiens
agaaatggaaaaatg

SEQ ID NO: 2102517 - DNA, 15 bp, Homo sapiens
gaaatggaaaaatgc

SEQ ID NO: 2102518 - DNA, 15 bp, Homo sapiens
aaatggaaaaatgcc

SEQ ID NO: 2102519 - DNA, 15 bp, Homo sapiens
aatggaaaaatgccc

SEQ ID NO: 2102520 - DNA, 15 bp, Homo sapiens
atggaaaaatgccct

SEQ ID NO: 2102521 - DNA, 15 bp, Homo sapiens
tggaaaaatgccctg

SEQ ID NO: 2102522 - DNA, 15 bp, Homo sapiens
ggaaaaatgccctgt

SEQ ID NO: 2102523 - DNA, 15 bp, Homo sapiens
gaaaaatgccctgtt

SEQ ID NO: 2102524 - DNA, 15 bp, Homo sapiens
aaaaatgccctgttt

SEQ ID NO: 2102525 - DNA, 15 bp, Homo sapiens
aaaatgccctgtttt

SEQ ID NO: 2102526 - DNA, 15 bp, Homo sapiens
aaatgccctgttttc

SEQ ID NO: 2102527 - DNA, 15 bp, Homo sapiens
aatgccctgttttct

SEQ ID NO: 2102528 - DNA, 15 bp, Homo sapiens
atgccctgttttctg

SEQ ID NO: 2102529 - DNA, 15 bp, Homo sapiens
tgccctgttttctgc

SEQ ID NO: 2102530 - DNA, 15 bp, Homo sapiens
gccctgttttctgca

SEQ ID NO: 2102531 - DNA, 15 bp, Homo sapiens
ccctgttttctgcat

SEQ ID NO: 2102532 - DNA, 15 bp, Homo sapiens
cctgttttctgcatg

SEQ ID NO: 2102533 - DNA, 15 bp, Homo sapiens
ctgttttctgcatgg

SEQ ID NO: 2102534 - DNA, 15 bp, Homo sapiens
tgttttctgcatggc

SEQ ID NO: 2102535 - DNA, 15 bp, Homo sapiens
gttttctgcatggct

SEQ ID NO: 2102536 - DNA, 15 bp, Homo sapiens
ttttctgcatggcta

SEQ ID NO: 2102537 - DNA, 15 bp, Homo sapiens
tttctgcatggctaa

SEQ ID NO: 2102538 - DNA, 15 bp, Homo sapiens
ttctgcatggctaaa

SEQ ID NO: 2102539 - DNA, 15 bp, Homo sapiens
tctgcatggctaaat

SEQ ID NO: 2102540 - DNA, 15 bp, Homo sapiens
ctgcatggctaaatg

SEQ ID NO: 2102541 - DNA, 15 bp, Homo sapiens
tgcatggctaaatgt

SEQ ID NO: 2102542 - DNA, 15 bp, Homo sapiens
gcatggctaaatgtt

SEQ ID NO: 2102543 - DNA, 15 bp, Homo sapiens
catggctaaatgtta

SEQ ID NO: 2102544 - DNA, 15 bp, Homo sapiens
atggctaaatgttat

SEQ ID NO: 2102545 - DNA, 15 bp, Homo sapiens
tggctaaatgttata

SEQ ID NO: 2102546 - DNA, 15 bp, Homo sapiens
ggctaaatgttataa

SEQ ID NO: 2102547 - DNA, 15 bp, Homo sapiens
gctaaatgttataat

SEQ ID NO: 2102548 - DNA, 15 bp, Homo sapiens
ctaaatgttataatt

SEQ ID NO: 2102549 - DNA, 15 bp, Homo sapiens
taaatgttataattt

SEQ ID NO: 2102550 - DNA, 15 bp, Homo sapiens
aaatgttataatttc

SEQ ID NO: 2102551 - DNA, 15 bp, Homo sapiens
aatgttataatttca

SEQ ID NO: 2102552 - DNA, 15 bp, Homo sapiens
atgttataatttcac

SEQ ID NO: 2102553 - DNA, 15 bp, Homo sapiens
tgttataatttcact

SEQ ID NO: 2102554 - DNA, 15 bp, Homo sapiens
gttataatttcactc

SEQ ID NO: 2102555 - DNA, 15 bp, Homo sapiens
ttataatttcactca

SEQ ID NO: 2102556 - DNA, 15 bp, Homo sapiens
tataatttcactcaa

SEQ ID NO: 2102557 - DNA, 15 bp, Homo sapiens
ataatttcactcaaa

SEQ ID NO: 2102558 - DNA, 15 bp, Homo sapiens
taatttcactcaaag

SEQ ID NO: 2102559 - DNA, 15 bp, Homo sapiens
aatttcactcaaagt

SEQ ID NO: 2102560 - DNA, 15 bp, Homo sapiens
atttcactcaaagtt

SEQ ID NO: 2102561 - DNA, 15 bp, Homo sapiens
tttcactcaaagttc

SEQ ID NO: 2102562 - DNA, 15 bp, Homo sapiens
ttcactcaaagttca

SEQ ID NO: 2102563 - DNA, 15 bp, Homo sapiens
tcactcaaagttcac

SEQ ID NO: 2102564 - DNA, 15 bp, Homo sapiens
cactcaaagttcact

SEQ ID NO: 2102565 - DNA, 15 bp, Homo sapiens
actcaaagttcactt

SEQ ID NO: 2102566 - DNA, 15 bp, Homo sapiens
ctcaaagttcacttt

SEQ ID NO: 2102567 - DNA, 15 bp, Homo sapiens
tcaaagttcactttt

SEQ ID NO: 2102568 - DNA, 15 bp, Homo sapiens
caaagttcacttttg

SEQ ID NO: 2102569 - DNA, 15 bp, Homo sapiens
aaagttcacttttgt

SEQ ID NO: 2102570 - DNA, 15 bp, Homo sapiens
aagttcacttttgtt

SEQ ID NO: 2102571 - DNA, 15 bp, Homo sapiens
agttcacttttgttt

SEQ ID NO: 2102572 - DNA, 15 bp, Homo sapiens
gttcacttttgttta

SEQ ID NO: 2102573 - DNA, 15 bp, Homo sapiens
ttcacttttgtttag

SEQ ID NO: 2102574 - DNA, 15 bp, Homo sapiens
tcacttttgtttagg

SEQ ID NO: 2102575 - DNA, 15 bp, Homo sapiens
cacttttgtttagga

SEQ ID NO: 2102576 - DNA, 15 bp, Homo sapiens
acttttgtttaggaa

SEQ ID NO: 2102577 - DNA, 15 bp, Homo sapiens
cttttgtttaggaag

SEQ ID NO: 2102578 - DNA, 15 bp, Homo sapiens
ttttgtttaggaagt

SEQ ID NO: 2102579 - DNA, 15 bp, Homo sapiens
tttgtttaggaagtt

SEQ ID NO: 2102580 - DNA, 15 bp, Homo sapiens
ttgtttaggaagttt

SEQ ID NO: 2102581 - DNA, 15 bp, Homo sapiens
tgtttaggaagtttg

SEQ ID NO: 2102582 - DNA, 15 bp, Homo sapiens
gtttaggaagtttgg

SEQ ID NO: 2102583 - DNA, 15 bp, Homo sapiens
tttaggaagtttggt

SEQ ID NO: 2102584 - DNA, 15 bp, Homo sapiens
ttaggaagtttggtg

SEQ ID NO: 2102585 - DNA, 15 bp, Homo sapiens
taggaagtttggtgg

SEQ ID NO: 2102586 - DNA, 15 bp, Homo sapiens
aggaagtttggtggc

SEQ ID NO: 2102587 - DNA, 15 bp, Homo sapiens
ggaagtttggtggct

SEQ ID NO: 2102588 - DNA, 15 bp, Homo sapiens
gaagtttggtggctt

SEQ ID NO: 2102589 - DNA, 15 bp, Homo sapiens
aagtttggtggcttg

SEQ ID NO: 2102590 - DNA, 15 bp, Homo sapiens
agtttggtggcttgt

SEQ ID NO: 2102591 - DNA, 15 bp, Homo sapiens
gtttggtggcttgtt

SEQ ID NO: 2102592 - DNA, 15 bp, Homo sapiens
tttggtggcttgttt

SEQ ID NO: 2102593 - DNA, 15 bp, Homo sapiens
ttggtggcttgttta

SEQ ID NO: 2102594 - DNA, 15 bp, Homo sapiens
tggtggcttgtttac

SEQ ID NO: 2102595 - DNA, 15 bp, Homo sapiens
ggtggcttgtttaca

SEQ ID NO: 2102596 - DNA, 15 bp, Homo sapiens
gtggcttgtttacag

SEQ ID NO: 2102597 - DNA, 15 bp, Homo sapiens
tggcttgtttacagt

SEQ ID NO: 2102598 - DNA, 15 bp, Homo sapiens
ggcttgtttacagtt

SEQ ID NO: 2102599 - DNA, 15 bp, Homo sapiens
gcttgtttacagtta

SEQ ID NO: 2102600 - DNA, 15 bp, Homo sapiens
cttgtttacagttaa

SEQ ID NO: 2102601 - DNA, 15 bp, Homo sapiens
ttgtttacagttaaa

SEQ ID NO: 2102602 - DNA, 15 bp, Homo sapiens
tgtttacagttaaaa

SEQ ID NO: 2102603 - DNA, 15 bp, Homo sapiens
gtttacagttaaaaa

SEQ ID NO: 2102604 - DNA, 15 bp, Homo sapiens
tttacagttaaaaaa

SEQ ID NO: 2102605 - DNA, 15 bp, Homo sapiens
ttacagttaaaaaaa

SEQ ID NO: 2102606 - DNA, 15 bp, Homo sapiens
tacagttaaaaaaac

SEQ ID NO: 2102607 - DNA, 15 bp, Homo sapiens
acagttaaaaaaaca

SEQ ID NO: 2102608 - DNA, 15 bp, Homo sapiens
cagttaaaaaaacaa

SEQ ID NO: 2102609 - DNA, 15 bp, Homo sapiens
agttaaaaaaacaac

SEQ ID NO: 2102610 - DNA, 15 bp, Homo sapiens
gttaaaaaaacaaca

SEQ ID NO: 2102611 - DNA, 15 bp, Homo sapiens
ttaaaaaaacaacaa

SEQ ID NO: 2102612 - DNA, 15 bp, Homo sapiens
taaaaaaacaacaac

SEQ ID NO: 2102613 - DNA, 15 bp, Homo sapiens
aaaaaaacaacaaca

SEQ ID NO: 2102614 - DNA, 15 bp, Homo sapiens
aaaaaacaacaacaa

SEQ ID NO: 2102615 - DNA, 15 bp, Homo sapiens
aaaaacaacaacaac

SEQ ID NO: 2102616 - DNA, 15 bp, Homo sapiens
caacaacaaaaacag

SEQ ID NO: 2102617 - DNA, 15 bp, Homo sapiens
aacaacaaaaacagt

SEQ ID NO: 2102618 - DNA, 15 bp, Homo sapiens
acaacaaaaacagta

SEQ ID NO: 2102619 - DNA, 15 bp, Homo sapiens
caacaaaaacagtag

SEQ ID NO: 2102620 - DNA, 15 bp, Homo sapiens
aacaaaaacagtagt

SEQ ID NO: 2102621 - DNA, 15 bp, Homo sapiens
acaaaaacagtagtt

SEQ ID NO: 2102622 - DNA, 15 bp, Homo sapiens
caaaaacagtagttt

SEQ ID NO: 2102623 - DNA, 15 bp, Homo sapiens
aaaaacagtagtttc

SEQ ID NO: 2102624 - DNA, 15 bp, Homo sapiens
aaaacagtagtttca

SEQ ID NO: 2102625 - DNA, 15 bp, Homo sapiens
aaacagtagtttcac

SEQ ID NO: 2102626 - DNA, 15 bp, Homo sapiens
aacagtagtttcact

SEQ ID NO: 2102627 - DNA, 15 bp, Homo sapiens
acagtagtttcactg

SEQ ID NO: 2102628 - DNA, 15 bp, Homo sapiens
cagtagtttcactga

SEQ ID NO: 2102629 - DNA, 15 bp, Homo sapiens
agtagtttcactgaa

SEQ ID NO: 2102630 - DNA, 15 bp, Homo sapiens
gtagtttcactgaaa

SEQ ID NO: 2102631 - DNA, 15 bp, Homo sapiens
tagtttcactgaaag

SEQ ID NO: 2102632 - DNA, 15 bp, Homo sapiens
agtttcactgaaagt

SEQ ID NO: 2102633 - DNA, 15 bp, Homo sapiens
gtttcactgaaagtt

SEQ ID NO: 2102634 - DNA, 15 bp, Homo sapiens
tttcactgaaagttt

SEQ ID NO: 2102635 - DNA, 15 bp, Homo sapiens
ttcactgaaagtttt

SEQ ID NO: 2102636 - DNA, 15 bp, Homo sapiens
tcactgaaagttttt

SEQ ID NO: 2102637 - DNA, 15 bp, Homo sapiens
cactgaaagtttttc

SEQ ID NO: 2102638 - DNA, 15 bp, Homo sapiens
actgaaagtttttcc

SEQ ID NO: 2102639 - DNA, 15 bp, Homo sapiens
ctgaaagtttttccc

SEQ ID NO: 2102640 - DNA, 15 bp, Homo sapiens
tgaaagtttttcccc

SEQ ID NO: 2102641 - DNA, 15 bp, Homo sapiens
gaaagtttttccccc

SEQ ID NO: 2102642 - DNA, 15 bp, Homo sapiens
aaagtttttcccccc

SEQ ID NO: 2102643 - DNA, 15 bp, Homo sapiens
aagtttttcccccca

SEQ ID NO: 2102644 - DNA, 15 bp, Homo sapiens
agtttttccccccaa

SEQ ID NO: 2102645 - DNA, 15 bp, Homo sapiens
gtttttccccccaat

SEQ ID NO: 2102646 - DNA, 15 bp, Homo sapiens
tttttccccccaatt

SEQ ID NO: 2102647 - DNA, 15 bp, Homo sapiens
ttttccccccaattc

SEQ ID NO: 2102648 - DNA, 15 bp, Homo sapiens
tttccccccaattcc

SEQ ID NO: 2102649 - DNA, 15 bp, Homo sapiens
ttccccccaattcct

SEQ ID NO: 2102650 - DNA, 15 bp, Homo sapiens
tccccccaattcctg

SEQ ID NO: 2102651 - DNA, 15 bp, Homo sapiens
ccccccaattcctgg

SEQ ID NO: 2102652 - DNA, 15 bp, Homo sapiens
cccccaattcctggt

SEQ ID NO: 2102653 - DNA, 15 bp, Homo sapiens
ccccaattcctggtc

SEQ ID NO: 2102654 - DNA, 15 bp, Homo sapiens
cccaattcctggtct

SEQ ID NO: 2102655 - DNA, 15 bp, Homo sapiens
ccaattcctggtctt

SEQ ID NO: 2102656 - DNA, 15 bp, Homo sapiens
caattcctggtcttt

SEQ ID NO: 2102657 - DNA, 15 bp, Homo sapiens
aattcctggtctttt

SEQ ID NO: 2102658 - DNA, 15 bp, Homo sapiens
attcctggtcttttc

SEQ ID NO: 2102659 - DNA, 15 bp, Homo sapiens
ttcctggtcttttct

SEQ ID NO: 2102660 - DNA, 15 bp, Homo sapiens
tcctggtcttttcta

SEQ ID NO: 2102661 - DNA, 15 bp, Homo sapiens
cctggtcttttctat

SEQ ID NO: 2102662 - DNA, 15 bp, Homo sapiens
ctggtcttttctatc

SEQ ID NO: 2102663 - DNA, 15 bp, Homo sapiens
tggtcttttctatca

SEQ ID NO: 2102664 - DNA, 15 bp, Homo sapiens
ggtcttttctatcac

SEQ ID NO: 2102665 - DNA, 15 bp, Homo sapiens
gtcttttctatcaca

SEQ ID NO: 2102666 - DNA, 15 bp, Homo sapiens
tcttttctatcacac

SEQ ID NO: 2102667 - DNA, 15 bp, Homo sapiens
cttttctatcacaca

SEQ ID NO: 2102668 - DNA, 15 bp, Homo sapiens
ttttctatcacacat

SEQ ID NO: 2102669 - DNA, 15 bp, Homo sapiens
tttctatcacacatg

SEQ ID NO: 2102670 - DNA, 15 bp, Homo sapiens
ttctatcacacatgt

SEQ ID NO: 2102671 - DNA, 15 bp, Homo sapiens
tctatcacacatgtt

SEQ ID NO: 2102672 - DNA, 15 bp, Homo sapiens
ctatcacacatgttt

SEQ ID NO: 2102673 - DNA, 15 bp, Homo sapiens
tatcacacatgtttc

SEQ ID NO: 2102674 - DNA, 15 bp, Homo sapiens
atcacacatgtttcc

SEQ ID NO: 2102675 - DNA, 15 bp, Homo sapiens
tcacacatgtttcct

SEQ ID NO: 2102676 - DNA, 15 bp, Homo sapiens
cacacatgtttcctt

SEQ ID NO: 2102677 - DNA, 15 bp, Homo sapiens
acacatgtttccttt

SEQ ID NO: 2102678 - DNA, 15 bp, Homo sapiens
cacatgtttccttta

SEQ ID NO: 2102679 - DNA, 15 bp, Homo sapiens
acatgtttcctttat

SEQ ID NO: 2102680 - DNA, 15 bp, Homo sapiens
catgtttcctttatc

SEQ ID NO: 2102681 - DNA, 15 bp, Homo sapiens
atgtttcctttatca

SEQ ID NO: 2102682 - DNA, 15 bp, Homo sapiens
tgtttcctttatcat

SEQ ID NO: 2102683 - DNA, 15 bp, Homo sapiens
gtttcctttatcatt

SEQ ID NO: 2102684 - DNA, 15 bp, Homo sapiens
tttcctttatcatta

SEQ ID NO: 2102685 - DNA, 15 bp, Homo sapiens
ttcctttatcattaa

SEQ ID NO: 2102686 - DNA, 15 bp, Homo sapiens
tcctttatcattaaa

SEQ ID NO: 2102687 - DNA, 15 bp, Homo sapiens
cctttatcattaaaa

SEQ ID NO: 2102688 - DNA, 15 bp, Homo sapiens
ctttatcattaaaat

SEQ ID NO: 2102689 - DNA, 15 bp, Homo sapiens
tttatcattaaaatc

SEQ ID NO: 2102690 - DNA, 15 bp, Homo sapiens
ttatcattaaaatca

SEQ ID NO: 2102691 - DNA, 15 bp, Homo sapiens
tatcattaaaatcag

SEQ ID NO: 2102692 - DNA, 15 bp, Homo sapiens
atcattaaaatcaga

SEQ ID NO: 2102693 - DNA, 15 bp, Homo sapiens
tcattaaaatcagaa

SEQ ID NO: 2102694 - DNA, 15 bp, Homo sapiens
cattaaaatcagaat

SEQ ID NO: 2102695 - DNA, 15 bp, Homo sapiens
attaaaatcagaatt

SEQ ID NO: 2102696 - DNA, 15 bp, Homo sapiens
ttaaaatcagaattc

SEQ ID NO: 2102697 - DNA, 15 bp, Homo sapiens
taaaatcagaattct

SEQ ID NO: 2102698 - DNA, 15 bp, Homo sapiens
aaaatcagaattcta

SEQ ID NO: 2102699 - DNA, 15 bp, Homo sapiens
aaatcagaattctaa

SEQ ID NO: 2102700 - DNA, 15 bp, Homo sapiens
aatcagaattctaaa

SEQ ID NO: 2102701 - DNA, 15 bp, Homo sapiens
atcagaattctaaat

SEQ ID NO: 2102702 - DNA, 15 bp, Homo sapiens
tcagaattctaaatt

SEQ ID NO: 2102703 - DNA, 15 bp, Homo sapiens
cagaattctaaattt

SEQ ID NO: 2102704 - DNA, 15 bp, Homo sapiens
agaattctaaatttc

SEQ ID NO: 2102705 - DNA, 15 bp, Homo sapiens
gaattctaaatttca

SEQ ID NO: 2102706 - DNA, 15 bp, Homo sapiens
aattctaaatttcac

SEQ ID NO: 2102707 - DNA, 15 bp, Homo sapiens
attctaaatttcaca

SEQ ID NO: 2102708 - DNA, 15 bp, Homo sapiens
ttctaaatttcacaa

SEQ ID NO: 2102709 - DNA, 15 bp, Homo sapiens
tctaaatttcacaac

SEQ ID NO: 2102710 - DNA, 15 bp, Homo sapiens
ctaaatttcacaact

SEQ ID NO: 2102711 - DNA, 15 bp, Homo sapiens
taaatttcacaactc

SEQ ID NO: 2102712 - DNA, 15 bp, Homo sapiens
aaatttcacaactct

SEQ ID NO: 2102713 - DNA, 15 bp, Homo sapiens
aatttcacaactctc

SEQ ID NO: 2102714 - DNA, 15 bp, Homo sapiens
atttcacaactctct

SEQ ID NO: 2102715 - DNA, 15 bp, Homo sapiens
tttcacaactctctc

SEQ ID NO: 2102716 - DNA, 15 bp, Homo sapiens
ttcacaactctctcc

SEQ ID NO: 2102717 - DNA, 15 bp, Homo sapiens
tcacaactctctcca

SEQ ID NO: 2102718 - DNA, 15 bp, Homo sapiens
cacaactctctccac

SEQ ID NO: 2102719 - DNA, 15 bp, Homo sapiens
acaactctctccacc

SEQ ID NO: 2102720 - DNA, 15 bp, Homo sapiens
caactctctccacct

SEQ ID NO: 2102721 - DNA, 15 bp, Homo sapiens
aactctctccacctc

SEQ ID NO: 2102722 - DNA, 15 bp, Homo sapiens
actctctccacctct

SEQ ID NO: 2102723 - DNA, 15 bp, Homo sapiens
ctctctccacctctt

SEQ ID NO: 2102724 - DNA, 15 bp, Homo sapiens
tctctccacctcttc

SEQ ID NO: 2102725 - DNA, 15 bp, Homo sapiens
ctctccacctcttct

SEQ ID NO: 2102726 - DNA, 15 bp, Homo sapiens
tctccacctcttcta

SEQ ID NO: 2102727 - DNA, 15 bp, Homo sapiens
ctccacctcttctaa

SEQ ID NO: 2102728 - DNA, 15 bp, Homo sapiens
tccacctcttctaat

SEQ ID NO: 2102729 - DNA, 15 bp, Homo sapiens
ccacctcttctaatt

SEQ ID NO: 2102730 - DNA, 15 bp, Homo sapiens
cacctcttctaattg

SEQ ID NO: 2102731 - DNA, 15 bp, Homo sapiens
acctcttctaattgg

SEQ ID NO: 2102732 - DNA, 15 bp, Homo sapiens
cctcttctaattggg

SEQ ID NO: 2102733 - DNA, 15 bp, Homo sapiens
ctcttctaattggga

SEQ ID NO: 2102734 - DNA, 15 bp, Homo sapiens
tcttctaattgggac

SEQ ID NO: 2102735 - DNA, 15 bp, Homo sapiens
cttctaattgggaca

SEQ ID NO: 2102736 - DNA, 15 bp, Homo sapiens
ttctaattgggacac

SEQ ID NO: 2102737 - DNA, 15 bp, Homo sapiens
tctaattgggacaca

SEQ ID NO: 2102738 - DNA, 15 bp, Homo sapiens
ctaattgggacacat

SEQ ID NO: 2102739 - DNA, 15 bp, Homo sapiens
taattgggacacatc

SEQ ID NO: 2102740 - DNA, 15 bp, Homo sapiens
aattgggacacatct

SEQ ID NO: 2102741 - DNA, 15 bp, Homo sapiens
attgggacacatctc

SEQ ID NO: 2102742 - DNA, 15 bp, Homo sapiens
ttgggacacatctct

SEQ ID NO: 2102743 - DNA, 15 bp, Homo sapiens
tgggacacatctctt

SEQ ID NO: 2102744 - DNA, 15 bp, Homo sapiens
gggacacatctcttt

SEQ ID NO: 2102745 - DNA, 15 bp, Homo sapiens
ggacacatctcttta

SEQ ID NO: 2102746 - DNA, 15 bp, Homo sapiens
gacacatctctttat

SEQ ID NO: 2102747 - DNA, 15 bp, Homo sapiens
acacatctctttata

SEQ ID NO: 2102748 - DNA, 15 bp, Homo sapiens
cacatctctttataa

SEQ ID NO: 2102749 - DNA, 15 bp, Homo sapiens
acatctctttataaa

SEQ ID NO: 2102750 - DNA, 15 bp, Homo sapiens
catctctttataaag

SEQ ID NO: 2102751 - DNA, 15 bp, Homo sapiens
atctctttataaagc

SEQ ID NO: 2102752 - DNA, 15 bp, Homo sapiens
tctctttataaagct

SEQ ID NO: 2102753 - DNA, 15 bp, Homo sapiens
ctctttataaagcta

SEQ ID NO: 2102754 - DNA, 15 bp, Homo sapiens
tctttataaagctaa

SEQ ID NO: 2102755 - DNA, 15 bp, Homo sapiens
ctttataaagctaat

SEQ ID NO: 2102756 - DNA, 15 bp, Homo sapiens
tttataaagctaata

SEQ ID NO: 2102757 - DNA, 15 bp, Homo sapiens
ttataaagctaatat

SEQ ID NO: 2102758 - DNA, 15 bp, Homo sapiens
tataaagctaatatc

SEQ ID NO: 2102759 - DNA, 15 bp, Homo sapiens
ataaagctaatatca

SEQ ID NO: 2102760 - DNA, 15 bp, Homo sapiens
taaagctaatatcag

SEQ ID NO: 2102761 - DNA, 15 bp, Homo sapiens
aaagctaatatcaga

SEQ ID NO: 2102762 - DNA, 15 bp, Homo sapiens
aagctaatatcagaa

SEQ ID NO: 2102763 - DNA, 15 bp, Homo sapiens
agctaatatcagaat

SEQ ID NO: 2102764 - DNA, 15 bp, Homo sapiens
gctaatatcagaatc

SEQ ID NO: 2102765 - DNA, 15 bp, Homo sapiens
ctaatatcagaatcc

SEQ ID NO: 2102766 - DNA, 15 bp, Homo sapiens
taatatcagaatcct

SEQ ID NO: 2102767 - DNA, 15 bp, Homo sapiens
aatatcagaatcctc

SEQ ID NO: 2102768 - DNA, 15 bp, Homo sapiens
atatcagaatcctca

SEQ ID NO: 2102769 - DNA, 15 bp, Homo sapiens
tatcagaatcctcaa

SEQ ID NO: 2102770 - DNA, 15 bp, Homo sapiens
atcagaatcctcaat

SEQ ID NO: 2102771 - DNA, 15 bp, Homo sapiens
tcagaatcctcaatt

SEQ ID NO: 2102772 - DNA, 15 bp, Homo sapiens
cagaatcctcaattg

SEQ ID NO: 2102773 - DNA, 15 bp, Homo sapiens
agaatcctcaattgg

SEQ ID NO: 2102774 - DNA, 15 bp, Homo sapiens
gaatcctcaattggc

SEQ ID NO: 2102775 - DNA, 15 bp, Homo sapiens
aatcctcaattggcc

SEQ ID NO: 2102776 - DNA, 15 bp, Homo sapiens
atcctcaattggcct

SEQ ID NO: 2102777 - DNA, 15 bp, Homo sapiens
tcctcaattggcctc

SEQ ID NO: 2102778 - DNA, 15 bp, Homo sapiens
cctcaattggcctca

SEQ ID NO: 2102779 - DNA, 15 bp, Homo sapiens
ctcaattggcctcat

SEQ ID NO: 2102780 - DNA, 15 bp, Homo sapiens
tcaattggcctcatc

SEQ ID NO: 2102781 - DNA, 15 bp, Homo sapiens
caattggcctcatcc

SEQ ID NO: 2102782 - DNA, 15 bp, Homo sapiens
aattggcctcatcct

SEQ ID NO: 2102783 - DNA, 15 bp, Homo sapiens
attggcctcatcctt

SEQ ID NO: 2102784 - DNA, 15 bp, Homo sapiens
ttggcctcatccttt

SEQ ID NO: 2102785 - DNA, 15 bp, Homo sapiens
tggcctcatcctttc

SEQ ID NO: 2102786 - DNA, 15 bp, Homo sapiens
ggcctcatcctttcc

SEQ ID NO: 2102787 - DNA, 15 bp, Homo sapiens
gcctcatcctttcca

SEQ ID NO: 2102788 - DNA, 15 bp, Homo sapiens
cctcatcctttccag

SEQ ID NO: 2102789 - DNA, 15 bp, Homo sapiens
ctcatcctttccagc

SEQ ID NO: 2102790 - DNA, 15 bp, Homo sapiens
tcatcctttccagca

SEQ ID NO: 2102791 - DNA, 15 bp, Homo sapiens
catcctttccagcat

SEQ ID NO: 2102792 - DNA, 15 bp, Homo sapiens
atcctttccagcata

SEQ ID NO: 2102793 - DNA, 15 bp, Homo sapiens
tcctttccagcataa

SEQ ID NO: 2102794 - DNA, 15 bp, Homo sapiens
cctttccagcataaa

SEQ ID NO: 2102795 - DNA, 15 bp, Homo sapiens
ctttccagcataaat

SEQ ID NO: 2102796 - DNA, 15 bp, Homo sapiens
tttccagcataaata

SEQ ID NO: 2102797 - DNA, 15 bp, Homo sapiens
ttccagcataaatag

SEQ ID NO: 2102798 - DNA, 15 bp, Homo sapiens
tccagcataaatagc

SEQ ID NO: 2102799 - DNA, 15 bp, Homo sapiens
ccagcataaatagcc

SEQ ID NO: 2102800 - DNA, 15 bp, Homo sapiens
cagcataaatagcca

SEQ ID NO: 2102801 - DNA, 15 bp, Homo sapiens
agcataaatagccat

SEQ ID NO: 2102802 - DNA, 15 bp, Homo sapiens
gcataaatagccata

SEQ ID NO: 2102803 - DNA, 15 bp, Homo sapiens
cataaatagccatat

SEQ ID NO: 2102804 - DNA, 15 bp, Homo sapiens
ataaatagccatatt

SEQ ID NO: 2102805 - DNA, 15 bp, Homo sapiens
taaatagccatattt

SEQ ID NO: 2102806 - DNA, 15 bp, Homo sapiens
aaatagccatatttt

SEQ ID NO: 2102807 - DNA, 15 bp, Homo sapiens
aatagccatatttta

SEQ ID NO: 2102808 - DNA, 15 bp, Homo sapiens
atagccatattttat

SEQ ID NO: 2102809 - DNA, 15 bp, Homo sapiens
tagccatattttata

SEQ ID NO: 2102810 - DNA, 15 bp, Homo sapiens
agccatattttatat

SEQ ID NO: 2102811 - DNA, 15 bp, Homo sapiens
gccatattttatata

SEQ ID NO: 2102812 - DNA, 15 bp, Homo sapiens
ccatattttatatat

SEQ ID NO: 2102813 - DNA, 15 bp, Homo sapiens
catattttatatatg

SEQ ID NO: 2102814 - DNA, 15 bp, Homo sapiens
atattttatatatgt

SEQ ID NO: 2102815 - DNA, 15 bp, Homo sapiens
attttatatatgtat

SEQ ID NO: 2102816 - DNA, 15 bp, Homo sapiens
ttttatatatgtatg

SEQ ID NO: 2102817 - DNA, 15 bp, Homo sapiens
tttatatatgtatgt

SEQ ID NO: 2102818 - DNA, 15 bp, Homo sapiens
ttatatatgtatgta

SEQ ID NO: 2102819 - DNA, 15 bp, Homo sapiens
tatatatgtatgtac

SEQ ID NO: 2102820 - DNA, 15 bp, Homo sapiens
atatatgtatgtaca

SEQ ID NO: 2102821 - DNA, 15 bp, Homo sapiens
tatatgtatgtacat

SEQ ID NO: 2102822 - DNA, 15 bp, Homo sapiens
atatgtatgtacatg

SEQ ID NO: 2102823 - DNA, 15 bp, Homo sapiens
tatgtatgtacatga

SEQ ID NO: 2102824 - DNA, 15 bp, Homo sapiens
atgtatgtacatgat

SEQ ID NO: 2102825 - DNA, 15 bp, Homo sapiens
tgtatgtacatgatt

SEQ ID NO: 2102826 - DNA, 15 bp, Homo sapiens
gtatgtacatgatta

SEQ ID NO: 2102827 - DNA, 15 bp, Homo sapiens
tatgtacatgattat

SEQ ID NO: 2102828 - DNA, 15 bp, Homo sapiens
atgtacatgattata

SEQ ID NO: 2102829 - DNA, 15 bp, Homo sapiens
tgtacatgattatac

SEQ ID NO: 2102830 - DNA, 15 bp, Homo sapiens
gtacatgattatact

SEQ ID NO: 2102831 - DNA, 15 bp, Homo sapiens
tacatgattatacta

SEQ ID NO: 2102832 - DNA, 15 bp, Homo sapiens
acatgattatactac

SEQ ID NO: 2102833 - DNA, 15 bp, Homo sapiens
catgattatactact

SEQ ID NO: 2102834 - DNA, 15 bp, Homo sapiens
atgattatactactt

SEQ ID NO: 2102835 - DNA, 15 bp, Homo sapiens
tgattatactacttg

SEQ ID NO: 2102836 - DNA, 15 bp, Homo sapiens
gattatactacttgc

SEQ ID NO: 2102837 - DNA, 15 bp, Homo sapiens
attatactacttgca

SEQ ID NO: 2102838 - DNA, 15 bp, Homo sapiens
ttatactacttgcag

SEQ ID NO: 2102839 - DNA, 15 bp, Homo sapiens
tatactacttgcagt

SEQ ID NO: 2102840 - DNA, 15 bp, Homo sapiens
atactacttgcagtg

SEQ ID NO: 2102841 - DNA, 15 bp, Homo sapiens
tactacttgcagtgt

SEQ ID NO: 2102842 - DNA, 15 bp, Homo sapiens
actacttgcagtgtc

SEQ ID NO: 2102843 - DNA, 15 bp, Homo sapiens
ctacttgcagtgtct

SEQ ID NO: 2102844 - DNA, 15 bp, Homo sapiens
tacttgcagtgtctc

SEQ ID NO: 2102845 - DNA, 15 bp, Homo sapiens
acttgcagtgtctct

SEQ ID NO: 2102846 - DNA, 15 bp, Homo sapiens
cttgcagtgtctctt

SEQ ID NO: 2102847 - DNA, 15 bp, Homo sapiens
ttgcagtgtctcttt

SEQ ID NO: 2102848 - DNA, 15 bp, Homo sapiens
tgcagtgtctcttta

SEQ ID NO: 2102849 - DNA, 15 bp, Homo sapiens
gcagtgtctctttaa

SEQ ID NO: 2102850 - DNA, 15 bp, Homo sapiens
cagtgtctctttaaa

SEQ ID NO: 2102851 - DNA, 15 bp, Homo sapiens
agtgtctctttaaat

SEQ ID NO: 2102852 - DNA, 15 bp, Homo sapiens
gtgtctctttaaatt

SEQ ID NO: 2102853 - DNA, 15 bp, Homo sapiens
tgtctctttaaattg

SEQ ID NO: 2102854 - DNA, 15 bp, Homo sapiens
gtctctttaaattgt

SEQ ID NO: 2102855 - DNA, 15 bp, Homo sapiens
tctctttaaattgtt

SEQ ID NO: 2102856 - DNA, 15 bp, Homo sapiens
ctctttaaattgtta

SEQ ID NO: 2102857 - DNA, 15 bp, Homo sapiens
tctttaaattgttaa

SEQ ID NO: 2102858 - DNA, 15 bp, Homo sapiens
ctttaaattgttaat

SEQ ID NO: 2102859 - DNA, 15 bp, Homo sapiens
tttaaattgttaatg

SEQ ID NO: 2102860 - DNA, 15 bp, Homo sapiens
ttaaattgttaatgt

SEQ ID NO: 2102861 - DNA, 15 bp, Homo sapiens
taaattgttaatgtc

SEQ ID NO: 2102862 - DNA, 15 bp, Homo sapiens
aaattgttaatgtca

SEQ ID NO: 2102863 - DNA, 15 bp, Homo sapiens
aattgttaatgtcag

SEQ ID NO: 2102864 - DNA, 15 bp, Homo sapiens
attgttaatgtcagc

SEQ ID NO: 2102865 - DNA, 15 bp, Homo sapiens
ttgttaatgtcagct

SEQ ID NO: 2102866 - DNA, 15 bp, Homo sapiens
tgttaatgtcagctt

SEQ ID NO: 2102867 - DNA, 15 bp, Homo sapiens
gttaatgtcagctta

SEQ ID NO: 2102868 - DNA, 15 bp, Homo sapiens
ttaatgtcagcttat

SEQ ID NO: 2102869 - DNA, 15 bp, Homo sapiens
taatgtcagcttatt

SEQ ID NO: 2102870 - DNA, 15 bp, Homo sapiens
aatgtcagcttattc

SEQ ID NO: 2102871 - DNA, 15 bp, Homo sapiens
atgtcagcttattct

SEQ ID NO: 2102872 - DNA, 15 bp, Homo sapiens
tgtcagcttattctc

SEQ ID NO: 2102873 - DNA, 15 bp, Homo sapiens
gtcagcttattctca

SEQ ID NO: 2102874 - DNA, 15 bp, Homo sapiens
tcagcttattctcaa

SEQ ID NO: 2102875 - DNA, 15 bp, Homo sapiens
cagcttattctcaat

SEQ ID NO: 2102876 - DNA, 15 bp, Homo sapiens
agcttattctcaatc

SEQ ID NO: 2102877 - DNA, 15 bp, Homo sapiens
gcttattctcaatca

SEQ ID NO: 2102878 - DNA, 15 bp, Homo sapiens
cttattctcaatcaa

SEQ ID NO: 2102879 - DNA, 15 bp, Homo sapiens
ttattctcaatcaat

SEQ ID NO: 2102880 - DNA, 15 bp, Homo sapiens
tattctcaatcaatt

SEQ ID NO: 2102881 - DNA, 15 bp, Homo sapiens
attctcaatcaatta

SEQ ID NO: 2102882 - DNA, 15 bp, Homo sapiens
ttctcaatcaattac

SEQ ID NO: 2102883 - DNA, 15 bp, Homo sapiens
tctcaatcaattaca

SEQ ID NO: 2102884 - DNA, 15 bp, Homo sapiens
ctcaatcaattacaa

SEQ ID NO: 2102885 - DNA, 15 bp, Homo sapiens
tcaatcaattacaat

SEQ ID NO: 2102886 - DNA, 15 bp, Homo sapiens
caatcaattacaatg

SEQ ID NO: 2102887 - DNA, 15 bp, Homo sapiens
aatcaattacaatgg

SEQ ID NO: 2102888 - DNA, 15 bp, Homo sapiens
atcaattacaatgga

SEQ ID NO: 2102889 - DNA, 15 bp, Homo sapiens
tcaattacaatggat

SEQ ID NO: 2102890 - DNA, 15 bp, Homo sapiens
caattacaatggata

SEQ ID NO: 2102891 - DNA, 15 bp, Homo sapiens
aattacaatggatat

SEQ ID NO: 2102892 - DNA, 15 bp, Homo sapiens
attacaatggatata

SEQ ID NO: 2102893 - DNA, 15 bp, Homo sapiens
ttacaatggatatac

SEQ ID NO: 2102894 - DNA, 15 bp, Homo sapiens
tacaatggatataca

SEQ ID NO: 2102895 - DNA, 15 bp, Homo sapiens
acaatggatatacat

SEQ ID NO: 2102896 - DNA, 15 bp, Homo sapiens
caatggatatacatt

SEQ ID NO: 2102897 - DNA, 15 bp, Homo sapiens
aatggatatacattt

SEQ ID NO: 2102898 - DNA, 15 bp, Homo sapiens
atggatatacatttg

SEQ ID NO: 2102899 - DNA, 15 bp, Homo sapiens
tggatatacatttgt

SEQ ID NO: 2102900 - DNA, 15 bp, Homo sapiens
ggatatacatttgtg

SEQ ID NO: 2102901 - DNA, 15 bp, Homo sapiens
gatatacatttgtgt

SEQ ID NO: 2102902 - DNA, 15 bp, Homo sapiens
atatacatttgtgtc

SEQ ID NO: 2102903 - DNA, 15 bp, Homo sapiens
tatacatttgtgtcc

SEQ ID NO: 2102904 - DNA, 15 bp, Homo sapiens
atacatttgtgtcct

SEQ ID NO: 2102905 - DNA, 15 bp, Homo sapiens
tacatttgtgtccta

SEQ ID NO: 2102906 - DNA, 15 bp, Homo sapiens
acatttgtgtcctag

SEQ ID NO: 2102907 - DNA, 15 bp, Homo sapiens
catttgtgtcctagg

SEQ ID NO: 2102908 - DNA, 15 bp, Homo sapiens
atttgtgtcctaggt

SEQ ID NO: 2102909 - DNA, 15 bp, Homo sapiens
tttgtgtcctaggta

SEQ ID NO: 2102910 - DNA, 15 bp, Homo sapiens
ttgtgtcctaggtat

SEQ ID NO: 2102911 - DNA, 15 bp, Homo sapiens
tgtgtcctaggtata

SEQ ID NO: 2102912 - DNA, 15 bp, Homo sapiens
gtgtcctaggtatat

SEQ ID NO: 2102913 - DNA, 15 bp, Homo sapiens
tgtcctaggtatatg

SEQ ID NO: 2102914 - DNA, 15 bp, Homo sapiens
gtcctaggtatatgc

SEQ ID NO: 2102915 - DNA, 15 bp, Homo sapiens
tcctaggtatatgct

SEQ ID NO: 2102916 - DNA, 15 bp, Homo sapiens
cctaggtatatgctc

SEQ ID NO: 2102917 - DNA, 15 bp, Homo sapiens
ctaggtatatgctca

SEQ ID NO: 2102918 - DNA, 15 bp, Homo sapiens
taggtatatgctcat

SEQ ID NO: 2102919 - DNA, 15 bp, Homo sapiens
aggtatatgctcatg

SEQ ID NO: 2102920 - DNA, 15 bp, Homo sapiens
ggtatatgctcatga

SEQ ID NO: 2102921 - DNA, 15 bp, Homo sapiens
gtatatgctcatgaa

SEQ ID NO: 2102922 - DNA, 15 bp, Homo sapiens
tatatgctcatgaat

SEQ ID NO: 2102923 - DNA, 15 bp, Homo sapiens
atatgctcatgaatc

SEQ ID NO: 2102924 - DNA, 15 bp, Homo sapiens
tatgctcatgaatct

SEQ ID NO: 2102925 - DNA, 15 bp, Homo sapiens
atgctcatgaatcta

SEQ ID NO: 2102926 - DNA, 15 bp, Homo sapiens
tgctcatgaatctaa

SEQ ID NO: 2102927 - DNA, 15 bp, Homo sapiens
gctcatgaatctaaa

SEQ ID NO: 2102928 - DNA, 15 bp, Homo sapiens
ctcatgaatctaaac

SEQ ID NO: 2102929 - DNA, 15 bp, Homo sapiens
tcatgaatctaaact

SEQ ID NO: 2102930 - DNA, 15 bp, Homo sapiens
catgaatctaaactc

SEQ ID NO: 2102931 - DNA, 15 bp, Homo sapiens
atgaatctaaactca

SEQ ID NO: 2102932 - DNA, 15 bp, Homo sapiens
tgaatctaaactcac

SEQ ID NO: 2102933 - DNA, 15 bp, Homo sapiens
gaatctaaactcaca

SEQ ID NO: 2102934 - DNA, 15 bp, Homo sapiens
aatctaaactcacaa

SEQ ID NO: 2102935 - DNA, 15 bp, Homo sapiens
atctaaactcacaaa

SEQ ID NO: 2102936 - DNA, 15 bp, Homo sapiens
tctaaactcacaaac

SEQ ID NO: 2102937 - DNA, 15 bp, Homo sapiens
ctaaactcacaaaca

SEQ ID NO: 2102938 - DNA, 15 bp, Homo sapiens
taaactcacaaacag

SEQ ID NO: 2102939 - DNA, 15 bp, Homo sapiens
aaactcacaaacagg

SEQ ID NO: 2102940 - DNA, 15 bp, Homo sapiens
aactcacaaacaggc

SEQ ID NO: 2102941 - DNA, 15 bp, Homo sapiens
actcacaaacaggcc

SEQ ID NO: 2102942 - DNA, 15 bp, Homo sapiens
ctcacaaacaggcca

SEQ ID NO: 2102943 - DNA, 15 bp, Homo sapiens
tcacaaacaggccaa

SEQ ID NO: 2102944 - DNA, 15 bp, Homo sapiens
cacaaacaggccaaa

SEQ ID NO: 2102945 - DNA, 15 bp, Homo sapiens
acaaacaggccaaag

SEQ ID NO: 2102946 - DNA, 15 bp, Homo sapiens
caaacaggccaaagc

SEQ ID NO: 2102947 - DNA, 15 bp, Homo sapiens
aaacaggccaaagct

SEQ ID NO: 2102948 - DNA, 15 bp, Homo sapiens
aacaggccaaagctt

SEQ ID NO: 2102949 - DNA, 15 bp, Homo sapiens
acaggccaaagcttt

SEQ ID NO: 2102950 - DNA, 15 bp, Homo sapiens
caggccaaagctttg

SEQ ID NO: 2102951 - DNA, 15 bp, Homo sapiens
aggccaaagctttgg

SEQ ID NO: 2102952 - DNA, 15 bp, Homo sapiens
ggccaaagctttgga

SEQ ID NO: 2102953 - DNA, 15 bp, Homo sapiens
gccaaagctttggaa

SEQ ID NO: 2102954 - DNA, 15 bp, Homo sapiens
ccaaagctttggaac

SEQ ID NO: 2102955 - DNA, 15 bp, Homo sapiens
caaagctttggaaca

SEQ ID NO: 2102956 - DNA, 15 bp, Homo sapiens
aaagctttggaacat

SEQ ID NO: 2102957 - DNA, 15 bp, Homo sapiens
aagctttggaacatc

SEQ ID NO: 2102958 - DNA, 15 bp, Homo sapiens
agctttggaacatct

SEQ ID NO: 2102959 - DNA, 15 bp, Homo sapiens
gctttggaacatctg

SEQ ID NO: 2102960 - DNA, 15 bp, Homo sapiens
ctttggaacatctgc

SEQ ID NO: 2102961 - DNA, 15 bp, Homo sapiens
tttggaacatctgca

SEQ ID NO: 2102962 - DNA, 15 bp, Homo sapiens
ttggaacatctgcat

SEQ ID NO: 2102963 - DNA, 15 bp, Homo sapiens
tggaacatctgcata

SEQ ID NO: 2102964 - DNA, 15 bp, Homo sapiens
ggaacatctgcataa

SEQ ID NO: 2102965 - DNA, 15 bp, Homo sapiens
gaacatctgcataaa

SEQ ID NO: 2102966 - DNA, 15 bp, Homo sapiens
aacatctgcataaag

SEQ ID NO: 2102967 - DNA, 15 bp, Homo sapiens
acatctgcataaagt

SEQ ID NO: 2102968 - DNA, 15 bp, Homo sapiens
catctgcataaagta

SEQ ID NO: 2102969 - DNA, 15 bp, Homo sapiens
atctgcataaagtat

SEQ ID NO: 2102970 - DNA, 15 bp, Homo sapiens
tctgcataaagtatc

SEQ ID NO: 2102971 - DNA, 15 bp, Homo sapiens
ctgcataaagtatcc

SEQ ID NO: 2102972 - DNA, 15 bp, Homo sapiens
tgcataaagtatcct

SEQ ID NO: 2102973 - DNA, 15 bp, Homo sapiens
gcataaagtatcctg

SEQ ID NO: 2102974 - DNA, 15 bp, Homo sapiens
cataaagtatcctgt

SEQ ID NO: 2102975 - DNA, 15 bp, Homo sapiens
ataaagtatcctgtt

SEQ ID NO: 2102976 - DNA, 15 bp, Homo sapiens
taaagtatcctgttt

SEQ ID NO: 2102977 - DNA, 15 bp, Homo sapiens
aaagtatcctgtttc

SEQ ID NO: 2102978 - DNA, 15 bp, Homo sapiens
aagtatcctgtttct

SEQ ID NO: 2102979 - DNA, 15 bp, Homo sapiens
agtatcctgtttctt

SEQ ID NO: 2102980 - DNA, 15 bp, Homo sapiens
gtatcctgtttctta

SEQ ID NO: 2102981 - DNA, 15 bp, Homo sapiens
tatcctgtttcttat

SEQ ID NO: 2102982 - DNA, 15 bp, Homo sapiens
atcctgtttcttatt

SEQ ID NO: 2102983 - DNA, 15 bp, Homo sapiens
tcctgtttcttattt

SEQ ID NO: 2102984 - DNA, 15 bp, Homo sapiens
cctgtttcttatttg

SEQ ID NO: 2102985 - DNA, 15 bp, Homo sapiens
ctgtttcttatttgt

SEQ ID NO: 2102986 - DNA, 15 bp, Homo sapiens
tgtttcttatttgta

SEQ ID NO: 2102987 - DNA, 15 bp, Homo sapiens
gtttcttatttgtat

SEQ ID NO: 2102988 - DNA, 15 bp, Homo sapiens
tttcttatttgtatt

SEQ ID NO: 2102989 - DNA, 15 bp, Homo sapiens
ttcttatttgtatta

SEQ ID NO: 2102990 - DNA, 15 bp, Homo sapiens
tcttatttgtattat

SEQ ID NO: 2102991 - DNA, 15 bp, Homo sapiens
cttatttgtattatt

SEQ ID NO: 2102992 - DNA, 15 bp, Homo sapiens
ttatttgtattatta

SEQ ID NO: 2102993 - DNA, 15 bp, Homo sapiens
tatttgtattattac

SEQ ID NO: 2102994 - DNA, 15 bp, Homo sapiens
atttgtattattact

SEQ ID NO: 2102995 - DNA, 15 bp, Homo sapiens
tttgtattattacta

SEQ ID NO: 2102996 - DNA, 15 bp, Homo sapiens
ttgtattattactaa

SEQ ID NO: 2102997 - DNA, 15 bp, Homo sapiens
tgtattattactaaa

SEQ ID NO: 2102998 - DNA, 15 bp, Homo sapiens
gtattattactaaag

SEQ ID NO: 2102999 - DNA, 15 bp, Homo sapiens
tattattactaaagt

SEQ ID NO: 2103000 - DNA, 15 bp, Homo sapiens
attattactaaagtc

SEQ ID NO: 2103001 - DNA, 15 bp, Homo sapiens
ttattactaaagtca

SEQ ID NO: 2103002 - DNA, 15 bp, Homo sapiens
tattactaaagtcat

SEQ ID NO: 2103003 - DNA, 15 bp, Homo sapiens
attactaaagtcata

SEQ ID NO: 2103004 - DNA, 15 bp, Homo sapiens
ttactaaagtcatat

SEQ ID NO: 2103005 - DNA, 15 bp, Homo sapiens
tactaaagtcatatg

SEQ ID NO: 2103006 - DNA, 15 bp, Homo sapiens
actaaagtcatatgt

SEQ ID NO: 2103007 - DNA, 15 bp, Homo sapiens
ctaaagtcatatgtt

SEQ ID NO: 2103008 - DNA, 15 bp, Homo sapiens
taaagtcatatgttt

SEQ ID NO: 2103009 - DNA, 15 bp, Homo sapiens
aaagtcatatgtttt

SEQ ID NO: 2103010 - DNA, 15 bp, Homo sapiens
aagtcatatgtttta

SEQ ID NO: 2103011 - DNA, 15 bp, Homo sapiens
agtcatatgttttat

SEQ ID NO: 2103012 - DNA, 15 bp, Homo sapiens
gtcatatgttttatc

SEQ ID NO: 2103013 - DNA, 15 bp, Homo sapiens
tcatatgttttatct

SEQ ID NO: 2103014 - DNA, 15 bp, Homo sapiens
catatgttttatctt

SEQ ID NO: 2103015 - DNA, 15 bp, Homo sapiens
atatgttttatcttt

SEQ ID NO: 2103016 - DNA, 15 bp, Homo sapiens
tatgttttatcttta

SEQ ID NO: 2103017 - DNA, 15 bp, Homo sapiens
atgttttatctttat

SEQ ID NO: 2103018 - DNA, 15 bp, Homo sapiens
tgttttatctttata

SEQ ID NO: 2103019 - DNA, 15 bp, Homo sapiens
gttttatctttatag

SEQ ID NO: 2103020 - DNA, 15 bp, Homo sapiens
ttttatctttatagc

SEQ ID NO: 2103021 - DNA, 15 bp, Homo sapiens
tttatctttatagcc

SEQ ID NO: 2103022 - DNA, 15 bp, Homo sapiens
ttatctttatagcct

SEQ ID NO: 2103023 - DNA, 15 bp, Homo sapiens
tatctttatagccta

SEQ ID NO: 2103024 - DNA, 15 bp, Homo sapiens
atctttatagcctaa

SEQ ID NO: 2103025 - DNA, 15 bp, Homo sapiens
tctttatagcctaac

SEQ ID NO: 2103026 - DNA, 15 bp, Homo sapiens
ctttatagcctaact

SEQ ID NO: 2103027 - DNA, 15 bp, Homo sapiens
tttatagcctaactg

SEQ ID NO: 2103028 - DNA, 15 bp, Homo sapiens
ttatagcctaactgt

SEQ ID NO: 2103029 - DNA, 15 bp, Homo sapiens
tatagcctaactgtc

SEQ ID NO: 2103030 - DNA, 15 bp, Homo sapiens
atagcctaactgtcc

SEQ ID NO: 2103031 - DNA, 15 bp, Homo sapiens
tagcctaactgtccc

SEQ ID NO: 2103032 - DNA, 15 bp, Homo sapiens
agcctaactgtcccc

SEQ ID NO: 2103033 - DNA, 15 bp, Homo sapiens
gcctaactgtcccct

SEQ ID NO: 2103034 - DNA, 15 bp, Homo sapiens
cctaactgtcccctt

SEQ ID NO: 2103035 - DNA, 15 bp, Homo sapiens
ctaactgtccccttg

SEQ ID NO: 2103036 - DNA, 15 bp, Homo sapiens
taactgtccccttgg

SEQ ID NO: 2103037 - DNA, 15 bp, Homo sapiens
aactgtccccttggg

SEQ ID NO: 2103038 - DNA, 15 bp, Homo sapiens
actgtccccttgggt

SEQ ID NO: 2103039 - DNA, 15 bp, Homo sapiens
ctgtccccttgggtg

SEQ ID NO: 2103040 - DNA, 15 bp, Homo sapiens
tgtccccttgggtgt

SEQ ID NO: 2103041 - DNA, 15 bp, Homo sapiens
gtccccttgggtgtt

SEQ ID NO: 2103042 - DNA, 15 bp, Homo sapiens
tccccttgggtgttt

SEQ ID NO: 2103043 - DNA, 15 bp, Homo sapiens
ccccttgggtgtttg

SEQ ID NO: 2103044 - DNA, 15 bp, Homo sapiens
cccttgggtgtttga

SEQ ID NO: 2103045 - DNA, 15 bp, Homo sapiens
ccttgggtgtttgaa

SEQ ID NO: 2103046 - DNA, 15 bp, Homo sapiens
cttgggtgtttgaag

SEQ ID NO: 2103047 - DNA, 15 bp, Homo sapiens
ttgggtgtttgaaga

SEQ ID NO: 2103048 - DNA, 15 bp, Homo sapiens
tgggtgtttgaagac

SEQ ID NO: 2103049 - DNA, 15 bp, Homo sapiens
gggtgtttgaagacc

SEQ ID NO: 2103050 - DNA, 15 bp, Homo sapiens
ggtgtttgaagacct

SEQ ID NO: 2103051 - DNA, 15 bp, Homo sapiens
gtgtttgaagaccta

SEQ ID NO: 2103052 - DNA, 15 bp, Homo sapiens
tgtttgaagacctag

SEQ ID NO: 2103053 - DNA, 15 bp, Homo sapiens
gtttgaagacctagg

SEQ ID NO: 2103054 - DNA, 15 bp, Homo sapiens
tttgaagacctaggt

SEQ ID NO: 2103055 - DNA, 15 bp, Homo sapiens
ttgaagacctaggtg

SEQ ID NO: 2103056 - DNA, 15 bp, Homo sapiens
tgaagacctaggtga

SEQ ID NO: 2103057 - DNA, 15 bp, Homo sapiens
gaagacctaggtgat

SEQ ID NO: 2103058 - DNA, 15 bp, Homo sapiens
aagacctaggtgata

SEQ ID NO: 2103059 - DNA, 15 bp, Homo sapiens
agacctaggtgatat

SEQ ID NO: 2103060 - DNA, 15 bp, Homo sapiens
gacctaggtgatatg

SEQ ID NO: 2103061 - DNA, 15 bp, Homo sapiens
acctaggtgatatgc

SEQ ID NO: 2103062 - DNA, 15 bp, Homo sapiens
cctaggtgatatgcc

SEQ ID NO: 2103063 - DNA, 15 bp, Homo sapiens
ctaggtgatatgccc

SEQ ID NO: 2103064 - DNA, 15 bp, Homo sapiens
taggtgatatgccca

SEQ ID NO: 2103065 - DNA, 15 bp, Homo sapiens
aggtgatatgcccat

SEQ ID NO: 2103066 - DNA, 15 bp, Homo sapiens
tgatatgcccatttg

SEQ ID NO: 2103067 - DNA, 15 bp, Homo sapiens
gatatgcccatttgt

SEQ ID NO: 2103068 - DNA, 15 bp, Homo sapiens
atatgcccatttgtg

SEQ ID NO: 2103069 - DNA, 15 bp, Homo sapiens
tatgcccatttgtga

SEQ ID NO: 2103070 - DNA, 15 bp, Homo sapiens
atgcccatttgtgat

SEQ ID NO: 2103071 - DNA, 15 bp, Homo sapiens
tgcccatttgtgata

SEQ ID NO: 2103072 - DNA, 15 bp, Homo sapiens
gcccatttgtgatat

SEQ ID NO: 2103073 - DNA, 15 bp, Homo sapiens
cccatttgtgatatg

SEQ ID NO: 2103074 - DNA, 15 bp, Homo sapiens
ccatttgtgatatgc

SEQ ID NO: 2103075 - DNA, 15 bp, Homo sapiens
catttgtgatatgct

SEQ ID NO: 2103076 - DNA, 15 bp, Homo sapiens
atttgtgatatgctc

SEQ ID NO: 2103077 - DNA, 15 bp, Homo sapiens
tttgtgatatgctct

SEQ ID NO: 2103078 - DNA, 15 bp, Homo sapiens
ttgtgatatgctctc

SEQ ID NO: 2103079 - DNA, 15 bp, Homo sapiens
tgtgatatgctctcc

SEQ ID NO: 2103080 - DNA, 15 bp, Homo sapiens
gtgatatgctctcca

SEQ ID NO: 2103081 - DNA, 15 bp, Homo sapiens
tgatatgctctccag

SEQ ID NO: 2103082 - DNA, 15 bp, Homo sapiens
gatatgctctccaga

SEQ ID NO: 2103083 - DNA, 15 bp, Homo sapiens
atatgctctccagaa

SEQ ID NO: 2103084 - DNA, 15 bp, Homo sapiens
tatgctctccagaaa

SEQ ID NO: 2103085 - DNA, 15 bp, Homo sapiens
atgctctccagaaac

SEQ ID NO: 2103086 - DNA, 15 bp, Homo sapiens
tgctctccagaaaca

SEQ ID NO: 2103087 - DNA, 15 bp, Homo sapiens
gctctccagaaacag

SEQ ID NO: 2103088 - DNA, 15 bp, Homo sapiens
ctctccagaaacaga

SEQ ID NO: 2103089 - DNA, 15 bp, Homo sapiens
tctccagaaacagaa

SEQ ID NO: 2103090 - DNA, 15 bp, Homo sapiens
ctccagaaacagaag

SEQ ID NO: 2103091 - DNA, 15 bp, Homo sapiens
tccagaaacagaagg

SEQ ID NO: 2103092 - DNA, 15 bp, Homo sapiens
ccagaaacagaaggg

SEQ ID NO: 2103093 - DNA, 15 bp, Homo sapiens
cagaaacagaagggt

SEQ ID NO: 2103094 - DNA, 15 bp, Homo sapiens
agaaacagaagggtt

SEQ ID NO: 2103095 - DNA, 15 bp, Homo sapiens
gaaacagaagggtta

SEQ ID NO: 2103096 - DNA, 15 bp, Homo sapiens
aaacagaagggttaa

SEQ ID NO: 2103097 - DNA, 15 bp, Homo sapiens
aacagaagggttaag

SEQ ID NO: 2103098 - DNA, 15 bp, Homo sapiens
acagaagggttaaga

SEQ ID NO: 2103099 - DNA, 15 bp, Homo sapiens
cagaagggttaagat

SEQ ID NO: 2103100 - DNA, 15 bp, Homo sapiens
agaagggttaagatt

SEQ ID NO: 2103101 - DNA, 15 bp, Homo sapiens
gaagggttaagatta

SEQ ID NO: 2103102 - DNA, 15 bp, Homo sapiens
aagggttaagattac

SEQ ID NO: 2103103 - DNA, 15 bp, Homo sapiens
agggttaagattact

SEQ ID NO: 2103104 - DNA, 15 bp, Homo sapiens
gggttaagattactg

SEQ ID NO: 2103105 - DNA, 15 bp, Homo sapiens
ggttaagattactgt

SEQ ID NO: 2103106 - DNA, 15 bp, Homo sapiens
gttaagattactgta

SEQ ID NO: 2103107 - DNA, 15 bp, Homo sapiens
ttaagattactgtaa

SEQ ID NO: 2103108 - DNA, 15 bp, Homo sapiens
taagattactgtaag

SEQ ID NO: 2103109 - DNA, 15 bp, Homo sapiens
aagattactgtaagc

SEQ ID NO: 2103110 - DNA, 15 bp, Homo sapiens
agattactgtaagct

SEQ ID NO: 2103111 - DNA, 15 bp, Homo sapiens
gattactgtaagctt

SEQ ID NO: 2103112 - DNA, 15 bp, Homo sapiens
attactgtaagcttc

SEQ ID NO: 2103113 - DNA, 15 bp, Homo sapiens
ttactgtaagcttca

SEQ ID NO: 2103114 - DNA, 15 bp, Homo sapiens
tactgtaagcttcag

SEQ ID NO: 2103115 - DNA, 15 bp, Homo sapiens
actgtaagcttcaga

SEQ ID NO: 2103116 - DNA, 15 bp, Homo sapiens
ctgtaagcttcagag

SEQ ID NO: 2103117 - DNA, 15 bp, Homo sapiens
tgtaagcttcagaga

SEQ ID NO: 2103118 - DNA, 15 bp, Homo sapiens
gtaagcttcagagat

SEQ ID NO: 2103119 - DNA, 15 bp, Homo sapiens
taagcttcagagata

SEQ ID NO: 2103120 - DNA, 15 bp, Homo sapiens
aagcttcagagatat

SEQ ID NO: 2103121 - DNA, 15 bp, Homo sapiens
agcttcagagatata

SEQ ID NO: 2103122 - DNA, 15 bp, Homo sapiens
gcttcagagatatag

SEQ ID NO: 2103123 - DNA, 15 bp, Homo sapiens
cttcagagatatagt

SEQ ID NO: 2103124 - DNA, 15 bp, Homo sapiens
ttcagagatatagtg

SEQ ID NO: 2103125 - DNA, 15 bp, Homo sapiens
tcagagatatagtgg

SEQ ID NO: 2103126 - DNA, 15 bp, Homo sapiens
cagagatatagtggg

SEQ ID NO: 2103127 - DNA, 15 bp, Homo sapiens
agagatatagtgggt

SEQ ID NO: 2103128 - DNA, 15 bp, Homo sapiens
gagatatagtgggtt

SEQ ID NO: 2103129 - DNA, 15 bp, Homo sapiens
agatatagtgggttt

SEQ ID NO: 2103130 - DNA, 15 bp, Homo sapiens
gatatagtgggtttg

SEQ ID NO: 2103131 - DNA, 15 bp, Homo sapiens
atatagtgggtttgt

SEQ ID NO: 2103132 - DNA, 15 bp, Homo sapiens
tatagtgggtttgtt

SEQ ID NO: 2103133 - DNA, 15 bp, Homo sapiens
atagtgggtttgttc

SEQ ID NO: 2103134 - DNA, 15 bp, Homo sapiens
tagtgggtttgttct

SEQ ID NO: 2103135 - DNA, 15 bp, Homo sapiens
agtgggtttgttctt

SEQ ID NO: 2103136 - DNA, 15 bp, Homo sapiens
gtgggtttgttcttt

SEQ ID NO: 2103137 - DNA, 15 bp, Homo sapiens
tgggtttgttctttg

SEQ ID NO: 2103138 - DNA, 15 bp, Homo sapiens
gggtttgttctttgg

SEQ ID NO: 2103139 - DNA, 15 bp, Homo sapiens
ggtttgttctttgga

SEQ ID NO: 2103140 - DNA, 15 bp, Homo sapiens
gtttgttctttggaa

SEQ ID NO: 2103141 - DNA, 15 bp, Homo sapiens
tttgttctttggaat

SEQ ID NO: 2103142 - DNA, 15 bp, Homo sapiens
ttgttctttggaatt

SEQ ID NO: 2103143 - DNA, 15 bp, Homo sapiens
tgttctttggaattt

SEQ ID NO: 2103144 - DNA, 15 bp, Homo sapiens
gttctttggaatttg

SEQ ID NO: 2103145 - DNA, 15 bp, Homo sapiens
ttctttggaatttgg

SEQ ID NO: 2103146 - DNA, 15 bp, Homo sapiens
tctttggaatttggg

SEQ ID NO: 2103147 - DNA, 15 bp, Homo sapiens
ctttggaatttgggg

SEQ ID NO: 2103148 - DNA, 15 bp, Homo sapiens
tttggaatttgggga

SEQ ID NO: 2103149 - DNA, 15 bp, Homo sapiens
ttggaatttggggaa

SEQ ID NO: 2103150 - DNA, 15 bp, Homo sapiens
tggaatttggggaaa

SEQ ID NO: 2103151 - DNA, 15 bp, Homo sapiens
ggaatttggggaaat

SEQ ID NO: 2103152 - DNA, 15 bp, Homo sapiens
gaatttggggaaata

SEQ ID NO: 2103153 - DNA, 15 bp, Homo sapiens
aatttggggaaatag

SEQ ID NO: 2103154 - DNA, 15 bp, Homo sapiens
atttggggaaataga

SEQ ID NO: 2103155 - DNA, 15 bp, Homo sapiens
tttggggaaatagaa

SEQ ID NO: 2103156 - DNA, 15 bp, Homo sapiens
ttggggaaatagaaa

SEQ ID NO: 2103157 - DNA, 15 bp, Homo sapiens
tggggaaatagaaaa

SEQ ID NO: 2103158 - DNA, 15 bp, Homo sapiens
ggggaaatagaaaac

SEQ ID NO: 2103159 - DNA, 15 bp, Homo sapiens
gggaaatagaaaact

SEQ ID NO: 2103160 - DNA, 15 bp, Homo sapiens
ggaaatagaaaactc

SEQ ID NO: 2103161 - DNA, 15 bp, Homo sapiens
gaaatagaaaactct

SEQ ID NO: 2103162 - DNA, 15 bp, Homo sapiens
aaatagaaaactctt

SEQ ID NO: 2103163 - DNA, 15 bp, Homo sapiens
aatagaaaactctta

SEQ ID NO: 2103164 - DNA, 15 bp, Homo sapiens
atagaaaactcttat

SEQ ID NO: 2103165 - DNA, 15 bp, Homo sapiens
tagaaaactcttata

SEQ ID NO: 2103166 - DNA, 15 bp, Homo sapiens
agaaaactcttatat

SEQ ID NO: 2103167 - DNA, 15 bp, Homo sapiens
gaaaactcttatatt

SEQ ID NO: 2103168 - DNA, 15 bp, Homo sapiens
aaaactcttatattt

SEQ ID NO: 2103169 - DNA, 15 bp, Homo sapiens
aaactcttatatttc

SEQ ID NO: 2103170 - DNA, 15 bp, Homo sapiens
aactcttatatttca

SEQ ID NO: 2103171 - DNA, 15 bp, Homo sapiens
actcttatatttcat

SEQ ID NO: 2103172 - DNA, 15 bp, Homo sapiens
ctcttatatttcatt

SEQ ID NO: 2103173 - DNA, 15 bp, Homo sapiens
tcttatatttcatta

SEQ ID NO: 2103174 - DNA, 15 bp, Homo sapiens
cttatatttcattaa

SEQ ID NO: 2103175 - DNA, 15 bp, Homo sapiens
ttatatttcattaaa

SEQ ID NO: 2103176 - DNA, 15 bp, Homo sapiens
tatatttcattaaaa

SEQ ID NO: 2103177 - DNA, 15 bp, Homo sapiens
atatttcattaaaag

SEQ ID NO: 2103178 - DNA, 15 bp, Homo sapiens
tatttcattaaaagg

SEQ ID NO: 2103179 - DNA, 15 bp, Homo sapiens
atttcattaaaaggt

SEQ ID NO: 2103180 - DNA, 15 bp, Homo sapiens
tttcattaaaaggta

SEQ ID NO: 2103181 - DNA, 15 bp, Homo sapiens
ttcattaaaaggtac

SEQ ID NO: 2103182 - DNA, 15 bp, Homo sapiens
tcattaaaaggtact

SEQ ID NO: 2103183 - DNA, 15 bp, Homo sapiens
cattaaaaggtactc

SEQ ID NO: 2103184 - DNA, 15 bp, Homo sapiens
attaaaaggtactca

SEQ ID NO: 2103185 - DNA, 15 bp, Homo sapiens
ttaaaaggtactcag

SEQ ID NO: 2103186 - DNA, 15 bp, Homo sapiens
taaaaggtactcaga

SEQ ID NO: 2103187 - DNA, 15 bp, Homo sapiens
aaaaggtactcagaa

SEQ ID NO: 2103188 - DNA, 15 bp, Homo sapiens
aaaggtactcagaaa

SEQ ID NO: 2103189 - DNA, 15 bp, Homo sapiens
aaggtactcagaaat

SEQ ID NO: 2103190 - DNA, 15 bp, Homo sapiens
aggtactcagaaata

SEQ ID NO: 2103191 - DNA, 15 bp, Homo sapiens
ggtactcagaaatat

SEQ ID NO: 2103192 - DNA, 15 bp, Homo sapiens
gtactcagaaatatt

SEQ ID NO: 2103193 - DNA, 15 bp, Homo sapiens
tactcagaaatattt

SEQ ID NO: 2103194 - DNA, 15 bp, Homo sapiens
actcagaaatatttt

SEQ ID NO: 2103195 - DNA, 15 bp, Homo sapiens
ctcagaaatattttc

SEQ ID NO: 2103196 - DNA, 15 bp, Homo sapiens
tcagaaatattttct

SEQ ID NO: 2103197 - DNA, 15 bp, Homo sapiens
cagaaatattttctg

SEQ ID NO: 2103198 - DNA, 15 bp, Homo sapiens
agaaatattttctgc

SEQ ID NO: 2103199 - DNA, 15 bp, Homo sapiens
gaaatattttctgct

SEQ ID NO: 2103200 - DNA, 15 bp, Homo sapiens
aaatattttctgctg

SEQ ID NO: 2103201 - DNA, 15 bp, Homo sapiens
aatattttctgctgg

SEQ ID NO: 2103202 - DNA, 15 bp, Homo sapiens
atattttctgctggt

SEQ ID NO: 2103203 - DNA, 15 bp, Homo sapiens
tattttctgctggtt

SEQ ID NO: 2103204 - DNA, 15 bp, Homo sapiens
attttctgctggttg

SEQ ID NO: 2103205 - DNA, 15 bp, Homo sapiens
ttttctgctggttgg

SEQ ID NO: 2103206 - DNA, 15 bp, Homo sapiens
tttctgctggttggt

SEQ ID NO: 2103207 - DNA, 15 bp, Homo sapiens
ttctgctggttggtt

SEQ ID NO: 2103208 - DNA, 15 bp, Homo sapiens
tctgctggttggttg

SEQ ID NO: 2103209 - DNA, 15 bp, Homo sapiens
ctgctggttggttga

SEQ ID NO: 2103210 - DNA, 15 bp, Homo sapiens
tgctggttggttgat

SEQ ID NO: 2103211 - DNA, 15 bp, Homo sapiens
gctggttggttgatg

SEQ ID NO: 2103212 - DNA, 15 bp, Homo sapiens
ctggttggttgatga

SEQ ID NO: 2103213 - DNA, 15 bp, Homo sapiens
tggttggttgatgat

SEQ ID NO: 2103214 - DNA, 15 bp, Homo sapiens
ggttggttgatgatt

SEQ ID NO: 2103215 - DNA, 15 bp, Homo sapiens
gttggttgatgattc

SEQ ID NO: 2103216 - DNA, 15 bp, Homo sapiens
ttggttgatgattct

SEQ ID NO: 2103217 - DNA, 15 bp, Homo sapiens
tggttgatgattctt

SEQ ID NO: 2103218 - DNA, 15 bp, Homo sapiens
ggttgatgattctta

SEQ ID NO: 2103219 - DNA, 15 bp, Homo sapiens
gttgatgattcttag

SEQ ID NO: 2103220 - DNA, 15 bp, Homo sapiens
ttgatgattcttaga

SEQ ID NO: 2103221 - DNA, 15 bp, Homo sapiens
tgatgattcttagag

SEQ ID NO: 2103222 - DNA, 15 bp, Homo sapiens
gatgattcttagagc

SEQ ID NO: 2103223 - DNA, 15 bp, Homo sapiens
atgattcttagagct

SEQ ID NO: 2103224 - DNA, 15 bp, Homo sapiens
tgattcttagagctt

SEQ ID NO: 2103225 - DNA, 15 bp, Homo sapiens
gattcttagagctta

SEQ ID NO: 2103226 - DNA, 15 bp, Homo sapiens
attcttagagcttaa

SEQ ID NO: 2103227 - DNA, 15 bp, Homo sapiens
ttcttagagcttaat

SEQ ID NO: 2103228 - DNA, 15 bp, Homo sapiens
tcttagagcttaatg

SEQ ID NO: 2103229 - DNA, 15 bp, Homo sapiens
cttagagcttaatgg

SEQ ID NO: 2103230 - DNA, 15 bp, Homo sapiens
ttagagcttaatggt

SEQ ID NO: 2103231 - DNA, 15 bp, Homo sapiens
tagagcttaatggta

SEQ ID NO: 2103232 - DNA, 15 bp, Homo sapiens
agagcttaatggtat

SEQ ID NO: 2103233 - DNA, 15 bp, Homo sapiens
gagcttaatggtatt

SEQ ID NO: 2103234 - DNA, 15 bp, Homo sapiens
agcttaatggtattc

SEQ ID NO: 2103235 - DNA, 15 bp, Homo sapiens
gcttaatggtattcc

SEQ ID NO: 2103236 - DNA, 15 bp, Homo sapiens
cttaatggtattcct

SEQ ID NO: 2103237 - DNA, 15 bp, Homo sapiens
ttaatggtattcctt

SEQ ID NO: 2103238 - DNA, 15 bp, Homo sapiens
taatggtattccttc

SEQ ID NO: 2103239 - DNA, 15 bp, Homo sapiens
aatggtattccttcc

SEQ ID NO: 2103240 - DNA, 15 bp, Homo sapiens
atggtattccttcct

SEQ ID NO: 2103241 - DNA, 15 bp, Homo sapiens
tggtattccttcctg

SEQ ID NO: 2103242 - DNA, 15 bp, Homo sapiens
ggtattccttcctgt

SEQ ID NO: 2103243 - DNA, 15 bp, Homo sapiens
gtattccttcctgtt

SEQ ID NO: 2103244 - DNA, 15 bp, Homo sapiens
tattccttcctgttc

SEQ ID NO: 2103245 - DNA, 15 bp, Homo sapiens
attccttcctgttcc

SEQ ID NO: 2103246 - DNA, 15 bp, Homo sapiens
ttccttcctgttccc

SEQ ID NO: 2103247 - DNA, 15 bp, Homo sapiens
tccttcctgttccct

SEQ ID NO: 2103248 - DNA, 15 bp, Homo sapiens
ccttcctgttccctc

SEQ ID NO: 2103249 - DNA, 15 bp, Homo sapiens
cttcctgttccctcc

SEQ ID NO: 2103250 - DNA, 15 bp, Homo sapiens
ttcctgttccctcct

SEQ ID NO: 2103251 - DNA, 15 bp, Homo sapiens
tcctgttccctcctc

SEQ ID NO: 2103252 - DNA, 15 bp, Homo sapiens
cctgttccctcctcc

SEQ ID NO: 2103253 - DNA, 15 bp, Homo sapiens
ctgttccctcctcct

SEQ ID NO: 2103254 - DNA, 15 bp, Homo sapiens
tgttccctcctcctc

SEQ ID NO: 2103255 - DNA, 15 bp, Homo sapiens
gttccctcctcctcc

SEQ ID NO: 2103256 - DNA, 15 bp, Homo sapiens
ttccctcctcctcct

SEQ ID NO: 2103257 - DNA, 15 bp, Homo sapiens
tccctcctcctcctt

SEQ ID NO: 2103258 - DNA, 15 bp, Homo sapiens
ccctcctcctccttc

SEQ ID NO: 2103259 - DNA, 15 bp, Homo sapiens
cctcctcctccttca

SEQ ID NO: 2103260 - DNA, 15 bp, Homo sapiens
ctcctcctccttcat

SEQ ID NO: 2103261 - DNA, 15 bp, Homo sapiens
tcctcctccttcatc

SEQ ID NO: 2103262 - DNA, 15 bp, Homo sapiens
cctcctccttcatca

SEQ ID NO: 2103263 - DNA, 15 bp, Homo sapiens
ctcctccttcatcaa

SEQ ID NO: 2103264 - DNA, 15 bp, Homo sapiens
tcctccttcatcaag

SEQ ID NO: 2103265 - DNA, 15 bp, Homo sapiens
cctccttcatcaagt

SEQ ID NO: 2103266 - DNA, 15 bp, Homo sapiens
ctccttcatcaagtt

SEQ ID NO: 2103267 - DNA, 15 bp, Homo sapiens
tccttcatcaagttc

SEQ ID NO: 2103268 - DNA, 15 bp, Homo sapiens
ccttcatcaagttct

SEQ ID NO: 2103269 - DNA, 15 bp, Homo sapiens
cttcatcaagttcta

SEQ ID NO: 2103270 - DNA, 15 bp, Homo sapiens
ttcatcaagttctag

SEQ ID NO: 2103271 - DNA, 15 bp, Homo sapiens
tcatcaagttctaga

SEQ ID NO: 2103272 - DNA, 15 bp, Homo sapiens
catcaagttctagag

SEQ ID NO: 2103273 - DNA, 15 bp, Homo sapiens
atcaagttctagaga

SEQ ID NO: 2103274 - DNA, 15 bp, Homo sapiens
tcaagttctagagaa

SEQ ID NO: 2103275 - DNA, 15 bp, Homo sapiens
caagttctagagaag

SEQ ID NO: 2103276 - DNA, 15 bp, Homo sapiens
aagttctagagaaga

SEQ ID NO: 2103277 - DNA, 15 bp, Homo sapiens
agttctagagaagaa

SEQ ID NO: 2103278 - DNA, 15 bp, Homo sapiens
gttctagagaagaat

SEQ ID NO: 2103279 - DNA, 15 bp, Homo sapiens
ttctagagaagaata

SEQ ID NO: 2103280 - DNA, 15 bp, Homo sapiens
tctagagaagaatat

SEQ ID NO: 2103281 - DNA, 15 bp, Homo sapiens
ctagagaagaatatg

SEQ ID NO: 2103282 - DNA, 15 bp, Homo sapiens
tagagaagaatatgt

SEQ ID NO: 2103283 - DNA, 15 bp, Homo sapiens
agagaagaatatgtc

SEQ ID NO: 2103284 - DNA, 15 bp, Homo sapiens
gagaagaatatgtct

SEQ ID NO: 2103285 - DNA, 15 bp, Homo sapiens
agaagaatatgtctc

SEQ ID NO: 2103286 - DNA, 15 bp, Homo sapiens
gaagaatatgtctcc

SEQ ID NO: 2103287 - DNA, 15 bp, Homo sapiens
aagaatatgtctcct

SEQ ID NO: 2103288 - DNA, 15 bp, Homo sapiens
agaatatgtctcctt

SEQ ID NO: 2103289 - DNA, 15 bp, Homo sapiens
gaatatgtctccttt

SEQ ID NO: 2103290 - DNA, 15 bp, Homo sapiens
aatatgtctcctttc

SEQ ID NO: 2103291 - DNA, 15 bp, Homo sapiens
atatgtctcctttct

SEQ ID NO: 2103292 - DNA, 15 bp, Homo sapiens
tatgtctcctttctc

SEQ ID NO: 2103293 - DNA, 15 bp, Homo sapiens
atgtctcctttctct

SEQ ID NO: 2103294 - DNA, 15 bp, Homo sapiens
tgtctcctttctcta

SEQ ID NO: 2103295 - DNA, 15 bp, Homo sapiens
gtctcctttctctaa

SEQ ID NO: 2103296 - DNA, 15 bp, Homo sapiens
tctcctttctctaaa

SEQ ID NO: 2103297 - DNA, 15 bp, Homo sapiens
ctcctttctctaaac

SEQ ID NO: 2103298 - DNA, 15 bp, Homo sapiens
tcctttctctaaact

SEQ ID NO: 2103299 - DNA, 15 bp, Homo sapiens
cctttctctaaactt

SEQ ID NO: 2103300 - DNA, 15 bp, Homo sapiens
ctttctctaaacttt

SEQ ID NO: 2103301 - DNA, 15 bp, Homo sapiens
tttctctaaactttc

SEQ ID NO: 2103302 - DNA, 15 bp, Homo sapiens
ttctctaaactttct

SEQ ID NO: 2103303 - DNA, 15 bp, Homo sapiens
tctctaaactttcta

SEQ ID NO: 2103304 - DNA, 15 bp, Homo sapiens
ctctaaactttctag

SEQ ID NO: 2103305 - DNA, 15 bp, Homo sapiens
tctaaactttctaga

SEQ ID NO: 2103306 - DNA, 15 bp, Homo sapiens
ctaaactttctagac

SEQ ID NO: 2103307 - DNA, 15 bp, Homo sapiens
taaactttctagact

SEQ ID NO: 2103308 - DNA, 15 bp, Homo sapiens
aaactttctagactc

SEQ ID NO: 2103309 - DNA, 15 bp, Homo sapiens
aactttctagactcc

SEQ ID NO: 2103310 - DNA, 15 bp, Homo sapiens
actttctagactcct

SEQ ID NO: 2103311 - DNA, 15 bp, Homo sapiens
ctttctagactcctg

SEQ ID NO: 2103312 - DNA, 15 bp, Homo sapiens
tttctagactcctga

SEQ ID NO: 2103313 - DNA, 15 bp, Homo sapiens
ttctagactcctgaa

SEQ ID NO: 2103314 - DNA, 15 bp, Homo sapiens
tctagactcctgaac

SEQ ID NO: 2103315 - DNA, 15 bp, Homo sapiens
ctagactcctgaact

SEQ ID NO: 2103316 - DNA, 15 bp, Homo sapiens
tagactcctgaactt

SEQ ID NO: 2103317 - DNA, 15 bp, Homo sapiens
agactcctgaacttt

SEQ ID NO: 2103318 - DNA, 15 bp, Homo sapiens
gactcctgaactttt

SEQ ID NO: 2103319 - DNA, 15 bp, Homo sapiens
actcctgaactttta

SEQ ID NO: 2103320 - DNA, 15 bp, Homo sapiens
ctcctgaacttttat

SEQ ID NO: 2103321 - DNA, 15 bp, Homo sapiens
tcctgaacttttatc

SEQ ID NO: 2103322 - DNA, 15 bp, Homo sapiens
cctgaacttttatct

SEQ ID NO: 2103323 - DNA, 15 bp, Homo sapiens
ctgaacttttatcta

SEQ ID NO: 2103324 - DNA, 15 bp, Homo sapiens
tgaacttttatctac

SEQ ID NO: 2103325 - DNA, 15 bp, Homo sapiens
gaacttttatctacc

SEQ ID NO: 2103326 - DNA, 15 bp, Homo sapiens
aacttttatctacca

SEQ ID NO: 2103327 - DNA, 15 bp, Homo sapiens
acttttatctaccaa

SEQ ID NO: 2103328 - DNA, 15 bp, Homo sapiens
cttttatctaccaag

SEQ ID NO: 2103329 - DNA, 15 bp, Homo sapiens
ttttatctaccaagc

SEQ ID NO: 2103330 - DNA, 15 bp, Homo sapiens
tttatctaccaagcc

SEQ ID NO: 2103331 - DNA, 15 bp, Homo sapiens
ttatctaccaagccc

SEQ ID NO: 2103332 - DNA, 15 bp, Homo sapiens
tatctaccaagccct

SEQ ID NO: 2103333 - DNA, 15 bp, Homo sapiens
atctaccaagcccta

SEQ ID NO: 2103334 - DNA, 15 bp, Homo sapiens
tctaccaagccctag

SEQ ID NO: 2103335 - DNA, 15 bp, Homo sapiens
ctaccaagccctagc

SEQ ID NO: 2103336 - DNA, 15 bp, Homo sapiens
taccaagccctagca

SEQ ID NO: 2103337 - DNA, 15 bp, Homo sapiens
accaagccctagcat

SEQ ID NO: 2103338 - DNA, 15 bp, Homo sapiens
ccaagccctagcatg

SEQ ID NO: 2103339 - DNA, 15 bp, Homo sapiens
caagccctagcatgc

SEQ ID NO: 2103340 - DNA, 15 bp, Homo sapiens
aagccctagcatgcc

SEQ ID NO: 2103341 - DNA, 15 bp, Homo sapiens
agccctagcatgcca

SEQ ID NO: 2103342 - DNA, 15 bp, Homo sapiens
gccctagcatgccac

SEQ ID NO: 2103343 - DNA, 15 bp, Homo sapiens
ccctagcatgccaca

SEQ ID NO: 2103344 - DNA, 15 bp, Homo sapiens
cctagcatgccacat

SEQ ID NO: 2103345 - DNA, 15 bp, Homo sapiens
ctagcatgccacatt

SEQ ID NO: 2103346 - DNA, 15 bp, Homo sapiens
tagcatgccacatta

SEQ ID NO: 2103347 - DNA, 15 bp, Homo sapiens
agcatgccacattaa

SEQ ID NO: 2103348 - DNA, 15 bp, Homo sapiens
gcatgccacattaat

SEQ ID NO: 2103349 - DNA, 15 bp, Homo sapiens
catgccacattaata

SEQ ID NO: 2103350 - DNA, 15 bp, Homo sapiens
atgccacattaatac

SEQ ID NO: 2103351 - DNA, 15 bp, Homo sapiens
tgccacattaataca

SEQ ID NO: 2103352 - DNA, 15 bp, Homo sapiens
gccacattaatacag

SEQ ID NO: 2103353 - DNA, 15 bp, Homo sapiens
ccacattaatacaga

SEQ ID NO: 2103354 - DNA, 15 bp, Homo sapiens
cacattaatacagaa

SEQ ID NO: 2103355 - DNA, 15 bp, Homo sapiens
acattaatacagaaa

SEQ ID NO: 2103356 - DNA, 15 bp, Homo sapiens
cattaatacagaaat

SEQ ID NO: 2103357 - DNA, 15 bp, Homo sapiens
attaatacagaaatc

SEQ ID NO: 2103358 - DNA, 15 bp, Homo sapiens
ttaatacagaaatca

SEQ ID NO: 2103359 - DNA, 15 bp, Homo sapiens
taatacagaaatcag

SEQ ID NO: 2103360 - DNA, 15 bp, Homo sapiens
aatacagaaatcagt

SEQ ID NO: 2103361 - DNA, 15 bp, Homo sapiens
atacagaaatcagta

SEQ ID NO: 2103362 - DNA, 15 bp, Homo sapiens
tacagaaatcagtac

SEQ ID NO: 2103363 - DNA, 15 bp, Homo sapiens
acagaaatcagtacc

SEQ ID NO: 2103364 - DNA, 15 bp, Homo sapiens
cagaaatcagtacct

SEQ ID NO: 2103365 - DNA, 15 bp, Homo sapiens
agaaatcagtacctg

SEQ ID NO: 2103366 - DNA, 15 bp, Homo sapiens
gaaatcagtacctga

SEQ ID NO: 2103367 - DNA, 15 bp, Homo sapiens
aaatcagtacctgag

SEQ ID NO: 2103368 - DNA, 15 bp, Homo sapiens
aatcagtacctgagt

SEQ ID NO: 2103369 - DNA, 15 bp, Homo sapiens
atcagtacctgagtg

SEQ ID NO: 2103370 - DNA, 15 bp, Homo sapiens
tcagtacctgagtgg

SEQ ID NO: 2103371 - DNA, 15 bp, Homo sapiens
cagtacctgagtggc

SEQ ID NO: 2103372 - DNA, 15 bp, Homo sapiens
agtacctgagtggca

SEQ ID NO: 2103373 - DNA, 15 bp, Homo sapiens
gtacctgagtggcaa

SEQ ID NO: 2103374 - DNA, 15 bp, Homo sapiens
tacctgagtggcaat

SEQ ID NO: 2103375 - DNA, 15 bp, Homo sapiens
acctgagtggcaatc

SEQ ID NO: 2103376 - DNA, 15 bp, Homo sapiens
cctgagtggcaatcg

SEQ ID NO: 2103377 - DNA, 15 bp, Homo sapiens
ctgagtggcaatcgt

SEQ ID NO: 2103378 - DNA, 15 bp, Homo sapiens
tgagtggcaatcgtg

SEQ ID NO: 2103379 - DNA, 15 bp, Homo sapiens
gagtggcaatcgtgc

SEQ ID NO: 2103380 - DNA, 15 bp, Homo sapiens
agtggcaatcgtgca

SEQ ID NO: 2103381 - DNA, 15 bp, Homo sapiens
gtggcaatcgtgcat

SEQ ID NO: 2103382 - DNA, 15 bp, Homo sapiens
tggcaatcgtgcata

SEQ ID NO: 2103383 - DNA, 15 bp, Homo sapiens
ggcaatcgtgcatag

SEQ ID NO: 2103384 - DNA, 15 bp, Homo sapiens
gcaatcgtgcatagc

SEQ ID NO: 2103385 - DNA, 15 bp, Homo sapiens
caatcgtgcatagcc

SEQ ID NO: 2103386 - DNA, 15 bp, Homo sapiens
aatcgtgcatagcca

SEQ ID NO: 2103387 - DNA, 15 bp, Homo sapiens
atcgtgcatagccat

SEQ ID NO: 2103388 - DNA, 15 bp, Homo sapiens
tcgtgcatagccatt

SEQ ID NO: 2103389 - DNA, 15 bp, Homo sapiens
cgtgcatagccattg

SEQ ID NO: 2103390 - DNA, 15 bp, Homo sapiens
gtgcatagccattgt

SEQ ID NO: 2103391 - DNA, 15 bp, Homo sapiens
tgcatagccattgtc

SEQ ID NO: 2103392 - DNA, 15 bp, Homo sapiens
gcatagccattgtcg

SEQ ID NO: 2103393 - DNA, 15 bp, Homo sapiens
catagccattgtcga

SEQ ID NO: 2103394 - DNA, 15 bp, Homo sapiens
atagccattgtcgac

SEQ ID NO: 2103395 - DNA, 15 bp, Homo sapiens
tagccattgtcgaca

SEQ ID NO: 2103396 - DNA, 15 bp, Homo sapiens
agccattgtcgacaa

SEQ ID NO: 2103397 - DNA, 15 bp, Homo sapiens
gccattgtcgacaaa

SEQ ID NO: 2103398 - DNA, 15 bp, Homo sapiens
ccattgtcgacaaaa

SEQ ID NO: 2103399 - DNA, 15 bp, Homo sapiens
cattgtcgacaaaaa

SEQ ID NO: 2103400 - DNA, 15 bp, Homo sapiens
attgtcgacaaaaag

SEQ ID NO: 2103401 - DNA, 15 bp, Homo sapiens
ttgtcgacaaaaaga

SEQ ID NO: 2103402 - DNA, 15 bp, Homo sapiens
tgtcgacaaaaagag

SEQ ID NO: 2103403 - DNA, 15 bp, Homo sapiens
gtcgacaaaaagagt

SEQ ID NO: 2103404 - DNA, 15 bp, Homo sapiens
tcgacaaaaagagtc

SEQ ID NO: 2103405 - DNA, 15 bp, Homo sapiens
cgacaaaaagagtca

SEQ ID NO: 2103406 - DNA, 15 bp, Homo sapiens
gacaaaaagagtcaa

SEQ ID NO: 2103407 - DNA, 15 bp, Homo sapiens
acaaaaagagtcaaa

SEQ ID NO: 2103408 - DNA, 15 bp, Homo sapiens
caaaaagagtcaaac

SEQ ID NO: 2103409 - DNA, 15 bp, Homo sapiens
aaaaagagtcaaact

SEQ ID NO: 2103410 - DNA, 15 bp, Homo sapiens
aaaagagtcaaactc

SEQ ID NO: 2103411 - DNA, 15 bp, Homo sapiens
aaagagtcaaactct

SEQ ID NO: 2103412 - DNA, 15 bp, Homo sapiens
aagagtcaaactctg

SEQ ID NO: 2103413 - DNA, 15 bp, Homo sapiens
agagtcaaactctgt

SEQ ID NO: 2103414 - DNA, 15 bp, Homo sapiens
gagtcaaactctgta

SEQ ID NO: 2103415 - DNA, 15 bp, Homo sapiens
agtcaaactctgtaa

SEQ ID NO: 2103416 - DNA, 15 bp, Homo sapiens
gtcaaactctgtaaa

SEQ ID NO: 2103417 - DNA, 15 bp, Homo sapiens
tcaaactctgtaaaa

SEQ ID NO: 2103418 - DNA, 15 bp, Homo sapiens
caaactctgtaaaat

SEQ ID NO: 2103419 - DNA, 15 bp, Homo sapiens
aaactctgtaaaata

SEQ ID NO: 2103420 - DNA, 15 bp, Homo sapiens
aactctgtaaaatat

SEQ ID NO: 2103421 - DNA, 15 bp, Homo sapiens
actctgtaaaatatt

SEQ ID NO: 2103422 - DNA, 15 bp, Homo sapiens
ctctgtaaaatattt

SEQ ID NO: 2103423 - DNA, 15 bp, Homo sapiens
tctgtaaaatatttg

SEQ ID NO: 2103424 - DNA, 15 bp, Homo sapiens
ctgtaaaatatttga

SEQ ID NO: 2103425 - DNA, 15 bp, Homo sapiens
tgtaaaatatttgaa

SEQ ID NO: 2103426 - DNA, 15 bp, Homo sapiens
gtaaaatatttgaag

SEQ ID NO: 2103427 - DNA, 15 bp, Homo sapiens
taaaatatttgaaga

SEQ ID NO: 2103428 - DNA, 15 bp, Homo sapiens
aaaatatttgaagag

SEQ ID NO: 2103429 - DNA, 15 bp, Homo sapiens
aaatatttgaagaga

SEQ ID NO: 2103430 - DNA, 15 bp, Homo sapiens
aatatttgaagagat

SEQ ID NO: 2103431 - DNA, 15 bp, Homo sapiens
atatttgaagagatt

SEQ ID NO: 2103432 - DNA, 15 bp, Homo sapiens
tatttgaagagattt

SEQ ID NO: 2103433 - DNA, 15 bp, Homo sapiens
atttgaagagattta

SEQ ID NO: 2103434 - DNA, 15 bp, Homo sapiens
tttgaagagatttat

SEQ ID NO: 2103435 - DNA, 15 bp, Homo sapiens
ttgaagagatttatt

SEQ ID NO: 2103436 - DNA, 15 bp, Homo sapiens
tgaagagatttattc

SEQ ID NO: 2103437 - DNA, 15 bp, Homo sapiens
gaagagatttattct

SEQ ID NO: 2103438 - DNA, 15 bp, Homo sapiens
aagagatttattctg

SEQ ID NO: 2103439 - DNA, 15 bp, Homo sapiens
agagatttattctga

SEQ ID NO: 2103440 - DNA, 15 bp, Homo sapiens
gagatttattctgag

SEQ ID NO: 2103441 - DNA, 15 bp, Homo sapiens
agatttattctgagc

SEQ ID NO: 2103442 - DNA, 15 bp, Homo sapiens
gatttattctgagcc

SEQ ID NO: 2103443 - DNA, 15 bp, Homo sapiens
atttattctgagcca

SEQ ID NO: 2103444 - DNA, 15 bp, Homo sapiens
tttattctgagccaa

SEQ ID NO: 2103445 - DNA, 15 bp, Homo sapiens
ttattctgagccaaa

SEQ ID NO: 2103446 - DNA, 15 bp, Homo sapiens
tattctgagccaaat

SEQ ID NO: 2103447 - DNA, 15 bp, Homo sapiens
attctgagccaaata

SEQ ID NO: 2103448 - DNA, 15 bp, Homo sapiens
ttctgagccaaatat

SEQ ID NO: 2103449 - DNA, 15 bp, Homo sapiens
tctgagccaaatatg

SEQ ID NO: 2103450 - DNA, 15 bp, Homo sapiens
ctgagccaaatatga

SEQ ID NO: 2103451 - DNA, 15 bp, Homo sapiens
tgagccaaatatgag

SEQ ID NO: 2103452 - DNA, 15 bp, Homo sapiens
gagccaaatatgagt

SEQ ID NO: 2103453 - DNA, 15 bp, Homo sapiens
agccaaatatgagtg

SEQ ID NO: 2103454 - DNA, 15 bp, Homo sapiens
gccaaatatgagtga

SEQ ID NO: 2103455 - DNA, 15 bp, Homo sapiens
ccaaatatgagtgac

SEQ ID NO: 2103456 - DNA, 15 bp, Homo sapiens
caaatatgagtgacc

SEQ ID NO: 2103457 - DNA, 15 bp, Homo sapiens
aaatatgagtgacca

SEQ ID NO: 2103458 - DNA, 15 bp, Homo sapiens
aatatgagtgaccat

SEQ ID NO: 2103459 - DNA, 15 bp, Homo sapiens
atatgagtgaccatg

SEQ ID NO: 2103460 - DNA, 15 bp, Homo sapiens
tatgagtgaccatgg

SEQ ID NO: 2103461 - DNA, 15 bp, Homo sapiens
atgagtgaccatggc

SEQ ID NO: 2103462 - DNA, 15 bp, Homo sapiens
tgagtgaccatggcc

SEQ ID NO: 2103463 - DNA, 15 bp, Homo sapiens
gagtgaccatggccc

SEQ ID NO: 2103464 - DNA, 15 bp, Homo sapiens
agtgaccatggccca

SEQ ID NO: 2103465 - DNA, 15 bp, Homo sapiens
gtgaccatggcccat

SEQ ID NO: 2103466 - DNA, 15 bp, Homo sapiens
tgaccatggcccatg

SEQ ID NO: 2103467 - DNA, 15 bp, Homo sapiens
gaccatggcccatga

SEQ ID NO: 2103468 - DNA, 15 bp, Homo sapiens
accatggcccatgac

SEQ ID NO: 2103469 - DNA, 15 bp, Homo sapiens
ccatggcccatgaca

SEQ ID NO: 2103470 - DNA, 15 bp, Homo sapiens
catggcccatgacac

SEQ ID NO: 2103471 - DNA, 15 bp, Homo sapiens
atggcccatgacaca

SEQ ID NO: 2103472 - DNA, 15 bp, Homo sapiens
tggcccatgacacag

SEQ ID NO: 2103473 - DNA, 15 bp, Homo sapiens
ggcccatgacacagc

SEQ ID NO: 2103474 - DNA, 15 bp, Homo sapiens
gcccatgacacagcc

SEQ ID NO: 2103475 - DNA, 15 bp, Homo sapiens
cccatgacacagccc

SEQ ID NO: 2103476 - DNA, 15 bp, Homo sapiens
ccatgacacagccct

SEQ ID NO: 2103477 - DNA, 15 bp, Homo sapiens
catgacacagccctc

SEQ ID NO: 2103478 - DNA, 15 bp, Homo sapiens
atgacacagccctca

SEQ ID NO: 2103479 - DNA, 15 bp, Homo sapiens
tgacacagccctcag

SEQ ID NO: 2103480 - DNA, 15 bp, Homo sapiens
gacacagccctcagg

SEQ ID NO: 2103481 - DNA, 15 bp, Homo sapiens
acacagccctcagga

SEQ ID NO: 2103482 - DNA, 15 bp, Homo sapiens
cacagccctcaggag

SEQ ID NO: 2103483 - DNA, 15 bp, Homo sapiens
acagccctcaggagg

SEQ ID NO: 2103484 - DNA, 15 bp, Homo sapiens
cagccctcaggaggt

SEQ ID NO: 2103485 - DNA, 15 bp, Homo sapiens
agccctcaggaggtc

SEQ ID NO: 2103486 - DNA, 15 bp, Homo sapiens
gccctcaggaggtcc

SEQ ID NO: 2103487 - DNA, 15 bp, Homo sapiens
ccctcaggaggtcct

SEQ ID NO: 2103488 - DNA, 15 bp, Homo sapiens
cctcaggaggtcctg

SEQ ID NO: 2103489 - DNA, 15 bp, Homo sapiens
ctcaggaggtcctga

SEQ ID NO: 2103490 - DNA, 15 bp, Homo sapiens
tcaggaggtcctgag

SEQ ID NO: 2103491 - DNA, 15 bp, Homo sapiens
caggaggtcctgaga

SEQ ID NO: 2103492 - DNA, 15 bp, Homo sapiens
aggaggtcctgagaa

SEQ ID NO: 2103493 - DNA, 15 bp, Homo sapiens
ggaggtcctgagaac

SEQ ID NO: 2103494 - DNA, 15 bp, Homo sapiens
gaggtcctgagaaca

SEQ ID NO: 2103495 - DNA, 15 bp, Homo sapiens
aggtcctgagaacat

SEQ ID NO: 2103496 - DNA, 15 bp, Homo sapiens
ggtcctgagaacatg

SEQ ID NO: 2103497 - DNA, 15 bp, Homo sapiens
gtcctgagaacatgt

SEQ ID NO: 2103498 - DNA, 15 bp, Homo sapiens
tcctgagaacatgtg

SEQ ID NO: 2103499 - DNA, 15 bp, Homo sapiens
cctgagaacatgtgc

SEQ ID NO: 2103500 - DNA, 15 bp, Homo sapiens
ctgagaacatgtgcc

SEQ ID NO: 2103501 - DNA, 15 bp, Homo sapiens
tgagaacatgtgccc

SEQ ID NO: 2103502 - DNA, 15 bp, Homo sapiens
gagaacatgtgccca

SEQ ID NO: 2103503 - DNA, 15 bp, Homo sapiens
agaacatgtgcccaa

SEQ ID NO: 2103504 - DNA, 15 bp, Homo sapiens
gaacatgtgcccaag

SEQ ID NO: 2103505 - DNA, 15 bp, Homo sapiens
aacatgtgcccaagg

SEQ ID NO: 2103506 - DNA, 15 bp, Homo sapiens
acatgtgcccaaggt

SEQ ID NO: 2103507 - DNA, 15 bp, Homo sapiens
catgtgcccaaggtg

SEQ ID NO: 2103508 - DNA, 15 bp, Homo sapiens
atgtgcccaaggtgg

SEQ ID NO: 2103509 - DNA, 15 bp, Homo sapiens
tgtgcccaaggtggt

SEQ ID NO: 2103510 - DNA, 15 bp, Homo sapiens
gtgcccaaggtggtt

SEQ ID NO: 2103511 - DNA, 15 bp, Homo sapiens
tgcccaaggtggttg

SEQ ID NO: 2103512 - DNA, 15 bp, Homo sapiens
gcccaaggtggttgg

SEQ ID NO: 2103513 - DNA, 15 bp, Homo sapiens
cccaaggtggttggg

SEQ ID NO: 2103514 - DNA, 15 bp, Homo sapiens
ccaaggtggttgggg

SEQ ID NO: 2103515 - DNA, 15 bp, Homo sapiens
caaggtggttggggt

SEQ ID NO: 2103516 - DNA, 15 bp, Homo sapiens
aaggtggttggggta

SEQ ID NO: 2103517 - DNA, 15 bp, Homo sapiens
aggtggttggggtac

SEQ ID NO: 2103518 - DNA, 15 bp, Homo sapiens
ggtggttggggtaca

SEQ ID NO: 2103519 - DNA, 15 bp, Homo sapiens
gtggttggggtacaa

SEQ ID NO: 2103520 - DNA, 15 bp, Homo sapiens
tggttggggtacaac

SEQ ID NO: 2103521 - DNA, 15 bp, Homo sapiens
ggttggggtacaact

SEQ ID NO: 2103522 - DNA, 15 bp, Homo sapiens
gttggggtacaactt

SEQ ID NO: 2103523 - DNA, 15 bp, Homo sapiens
ttggggtacaactta

SEQ ID NO: 2103524 - DNA, 15 bp, Homo sapiens
tggggtacaacttat

SEQ ID NO: 2103525 - DNA, 15 bp, Homo sapiens
ggggtacaacttatt

SEQ ID NO: 2103526 - DNA, 15 bp, Homo sapiens
gggtacaacttattt

SEQ ID NO: 2103527 - DNA, 15 bp, Homo sapiens
ggtacaacttatttt

SEQ ID NO: 2103528 - DNA, 15 bp, Homo sapiens
gtacaacttatttta

SEQ ID NO: 2103529 - DNA, 15 bp, Homo sapiens
tacaacttattttat

SEQ ID NO: 2103530 - DNA, 15 bp, Homo sapiens
acaacttattttata

SEQ ID NO: 2103531 - DNA, 15 bp, Homo sapiens
caacttattttatac

SEQ ID NO: 2103532 - DNA, 15 bp, Homo sapiens
aacttattttataca

SEQ ID NO: 2103533 - DNA, 15 bp, Homo sapiens
acttattttatacat

SEQ ID NO: 2103534 - DNA, 15 bp, Homo sapiens
cttattttatacatt

SEQ ID NO: 2103535 - DNA, 15 bp, Homo sapiens
ttattttatacattt

SEQ ID NO: 2103536 - DNA, 15 bp, Homo sapiens
tattttatacatttt

SEQ ID NO: 2103537 - DNA, 15 bp, Homo sapiens
attttatacatttta

SEQ ID NO: 2103538 - DNA, 15 bp, Homo sapiens
ttttatacattttaa

SEQ ID NO: 2103539 - DNA, 15 bp, Homo sapiens
tttatacattttaag

SEQ ID NO: 2103540 - DNA, 15 bp, Homo sapiens
ttatacattttaaga

SEQ ID NO: 2103541 - DNA, 15 bp, Homo sapiens
tatacattttaagaa

SEQ ID NO: 2103542 - DNA, 15 bp, Homo sapiens
atacattttaagaag

SEQ ID NO: 2103543 - DNA, 15 bp, Homo sapiens
tacattttaagaagg

SEQ ID NO: 2103544 - DNA, 15 bp, Homo sapiens
acattttaagaaggc

SEQ ID NO: 2103545 - DNA, 15 bp, Homo sapiens
cattttaagaaggca

SEQ ID NO: 2103546 - DNA, 15 bp, Homo sapiens
attttaagaaggcat

SEQ ID NO: 2103547 - DNA, 15 bp, Homo sapiens
ttttaagaaggcatg

SEQ ID NO: 2103548 - DNA, 15 bp, Homo sapiens
tttaagaaggcatga

SEQ ID NO: 2103549 - DNA, 15 bp, Homo sapiens
ttaagaaggcatgag

SEQ ID NO: 2103550 - DNA, 15 bp, Homo sapiens
taagaaggcatgaga

SEQ ID NO: 2103551 - DNA, 15 bp, Homo sapiens
aagaaggcatgagac

SEQ ID NO: 2103552 - DNA, 15 bp, Homo sapiens
agaaggcatgagaca

SEQ ID NO: 2103553 - DNA, 15 bp, Homo sapiens
gaaggcatgagacat

SEQ ID NO: 2103554 - DNA, 15 bp, Homo sapiens
aaggcatgagacatc

SEQ ID NO: 2103555 - DNA, 15 bp, Homo sapiens
aggcatgagacatca

SEQ ID NO: 2103556 - DNA, 15 bp, Homo sapiens
ggcatgagacatcaa

SEQ ID NO: 2103557 - DNA, 15 bp, Homo sapiens
gcatgagacatcaat

SEQ ID NO: 2103558 - DNA, 15 bp, Homo sapiens
catgagacatcaatc

SEQ ID NO: 2103559 - DNA, 15 bp, Homo sapiens
atgagacatcaatca

SEQ ID NO: 2103560 - DNA, 15 bp, Homo sapiens
tgagacatcaatcaa

SEQ ID NO: 2103561 - DNA, 15 bp, Homo sapiens
gagacatcaatcaaa

SEQ ID NO: 2103562 - DNA, 15 bp, Homo sapiens
agacatcaatcaaat

SEQ ID NO: 2103563 - DNA, 15 bp, Homo sapiens
gacatcaatcaaata

SEQ ID NO: 2103564 - DNA, 15 bp, Homo sapiens
acatcaatcaaatac

SEQ ID NO: 2103565 - DNA, 15 bp, Homo sapiens
catcaatcaaataca

SEQ ID NO: 2103566 - DNA, 15 bp, Homo sapiens
atcaatcaaatacat

SEQ ID NO: 2103567 - DNA, 15 bp, Homo sapiens
tcaatcaaatacatt

SEQ ID NO: 2103568 - DNA, 15 bp, Homo sapiens
caatcaaatacattt

SEQ ID NO: 2103569 - DNA, 15 bp, Homo sapiens
aatcaaatacattta

SEQ ID NO: 2103570 - DNA, 15 bp, Homo sapiens
atcaaatacatttaa

SEQ ID NO: 2103571 - DNA, 15 bp, Homo sapiens
tcaaatacatttaag

SEQ ID NO: 2103572 - DNA, 15 bp, Homo sapiens
caaatacatttaaga

SEQ ID NO: 2103573 - DNA, 15 bp, Homo sapiens
aaatacatttaagaa

SEQ ID NO: 2103574 - DNA, 15 bp, Homo sapiens
aatacatttaagaaa

SEQ ID NO: 2103575 - DNA, 15 bp, Homo sapiens
atacatttaagaaat

SEQ ID NO: 2103576 - DNA, 15 bp, Homo sapiens
tacatttaagaaata

SEQ ID NO: 2103577 - DNA, 15 bp, Homo sapiens
acatttaagaaatac

SEQ ID NO: 2103578 - DNA, 15 bp, Homo sapiens
catttaagaaataca

SEQ ID NO: 2103579 - DNA, 15 bp, Homo sapiens
atttaagaaatacat

SEQ ID NO: 2103580 - DNA, 15 bp, Homo sapiens
tttaagaaatacatt

SEQ ID NO: 2103581 - DNA, 15 bp, Homo sapiens
ttaagaaatacattg

SEQ ID NO: 2103582 - DNA, 15 bp, Homo sapiens
taagaaatacattgg

SEQ ID NO: 2103583 - DNA, 15 bp, Homo sapiens
aagaaatacattggt

SEQ ID NO: 2103584 - DNA, 15 bp, Homo sapiens
agaaatacattggtt

SEQ ID NO: 2103585 - DNA, 15 bp, Homo sapiens
gaaatacattggttt

SEQ ID NO: 2103586 - DNA, 15 bp, Homo sapiens
aaatacattggtttg

SEQ ID NO: 2103587 - DNA, 15 bp, Homo sapiens
aatacattggtttgg

SEQ ID NO: 2103588 - DNA, 15 bp, Homo sapiens
atacattggtttggt

SEQ ID NO: 2103589 - DNA, 15 bp, Homo sapiens
tacattggtttggtc

SEQ ID NO: 2103590 - DNA, 15 bp, Homo sapiens
acattggtttggtcc

SEQ ID NO: 2103591 - DNA, 15 bp, Homo sapiens
cattggtttggtcca

SEQ ID NO: 2103592 - DNA, 15 bp, Homo sapiens
attggtttggtccag

SEQ ID NO: 2103593 - DNA, 15 bp, Homo sapiens
ttggtttggtccaga

SEQ ID NO: 2103594 - DNA, 15 bp, Homo sapiens
tggtttggtccagaa

SEQ ID NO: 2103595 - DNA, 15 bp, Homo sapiens
ggtttggtccagaaa

SEQ ID NO: 2103596 - DNA, 15 bp, Homo sapiens
gtttggtccagaaag

SEQ ID NO: 2103597 - DNA, 15 bp, Homo sapiens
tttggtccagaaagg

SEQ ID NO: 2103598 - DNA, 15 bp, Homo sapiens
ttggtccagaaaggt

SEQ ID NO: 2103599 - DNA, 15 bp, Homo sapiens
tggtccagaaaggtg

SEQ ID NO: 2103600 - DNA, 15 bp, Homo sapiens
ggtccagaaaggtgg

SEQ ID NO: 2103601 - DNA, 15 bp, Homo sapiens
gtccagaaaggtggg

SEQ ID NO: 2103602 - DNA, 15 bp, Homo sapiens
tccagaaaggtggga

SEQ ID NO: 2103603 - DNA, 15 bp, Homo sapiens
ccagaaaggtgggac

SEQ ID NO: 2103604 - DNA, 15 bp, Homo sapiens
cagaaaggtgggaca

SEQ ID NO: 2103605 - DNA, 15 bp, Homo sapiens
agaaaggtgggacaa

SEQ ID NO: 2103606 - DNA, 15 bp, Homo sapiens
gaaaggtgggacaat

SEQ ID NO: 2103607 - DNA, 15 bp, Homo sapiens
aaaggtgggacaatt

SEQ ID NO: 2103608 - DNA, 15 bp, Homo sapiens
aaggtgggacaattc

SEQ ID NO: 2103609 - DNA, 15 bp, Homo sapiens
aggtgggacaattca

SEQ ID NO: 2103610 - DNA, 15 bp, Homo sapiens
ggtgggacaattcaa

SEQ ID NO: 2103611 - DNA, 15 bp, Homo sapiens
gtgggacaattcaaa

SEQ ID NO: 2103612 - DNA, 15 bp, Homo sapiens
tgggacaattcaaag

SEQ ID NO: 2103613 - DNA, 15 bp, Homo sapiens
gggacaattcaaagc

SEQ ID NO: 2103614 - DNA, 15 bp, Homo sapiens
ggacaattcaaagcc

SEQ ID NO: 2103615 - DNA, 15 bp, Homo sapiens
gacaattcaaagcca

SEQ ID NO: 2103616 - DNA, 15 bp, Homo sapiens
acaattcaaagccat

SEQ ID NO: 2103617 - DNA, 15 bp, Homo sapiens
caattcaaagccatg

SEQ ID NO: 2103618 - DNA, 15 bp, Homo sapiens
aattcaaagccatgg

SEQ ID NO: 2103619 - DNA, 15 bp, Homo sapiens
attcaaagccatggt

SEQ ID NO: 2103620 - DNA, 15 bp, Homo sapiens
ttcaaagccatggtg

SEQ ID NO: 2103621 - DNA, 15 bp, Homo sapiens
tcaaagccatggtgg

SEQ ID NO: 2103622 - DNA, 15 bp, Homo sapiens
caaagccatggtggg

SEQ ID NO: 2103623 - DNA, 15 bp, Homo sapiens
aaagccatggtgggg

SEQ ID NO: 2103624 - DNA, 15 bp, Homo sapiens
aagccatggtgggga

SEQ ID NO: 2103625 - DNA, 15 bp, Homo sapiens
agccatggtggggat

SEQ ID NO: 2103626 - DNA, 15 bp, Homo sapiens
gccatggtggggatt

SEQ ID NO: 2103627 - DNA, 15 bp, Homo sapiens
ccatggtggggattc

SEQ ID NO: 2103628 - DNA, 15 bp, Homo sapiens
catggtggggattcc

SEQ ID NO: 2103629 - DNA, 15 bp, Homo sapiens
atggtggggattcca

SEQ ID NO: 2103630 - DNA, 15 bp, Homo sapiens
tggtggggattccag

SEQ ID NO: 2103631 - DNA, 15 bp, Homo sapiens
ggtggggattccagg

SEQ ID NO: 2103632 - DNA, 15 bp, Homo sapiens
gtggggattccaggc

SEQ ID NO: 2103633 - DNA, 15 bp, Homo sapiens
tggggattccaggct

SEQ ID NO: 2103634 - DNA, 15 bp, Homo sapiens
ggggattccaggcta

SEQ ID NO: 2103635 - DNA, 15 bp, Homo sapiens
gggattccaggctat

SEQ ID NO: 2103636 - DNA, 15 bp, Homo sapiens
ggattccaggctata

SEQ ID NO: 2103637 - DNA, 15 bp, Homo sapiens
gattccaggctatag

SEQ ID NO: 2103638 - DNA, 15 bp, Homo sapiens
attccaggctataga

SEQ ID NO: 2103639 - DNA, 15 bp, Homo sapiens
ttccaggctatagat

SEQ ID NO: 2103640 - DNA, 15 bp, Homo sapiens
tccaggctatagata

SEQ ID NO: 2103641 - DNA, 15 bp, Homo sapiens
ccaggctatagataa

SEQ ID NO: 2103642 - DNA, 15 bp, Homo sapiens
caggctatagataaa

SEQ ID NO: 2103643 - DNA, 15 bp, Homo sapiens
aggctatagataaat

SEQ ID NO: 2103644 - DNA, 15 bp, Homo sapiens
ggctatagataaatt

SEQ ID NO: 2103645 - DNA, 15 bp, Homo sapiens
gctatagataaattt

SEQ ID NO: 2103646 - DNA, 15 bp, Homo sapiens
ctatagataaattta

SEQ ID NO: 2103647 - DNA, 15 bp, Homo sapiens
tatagataaatttaa

SEQ ID NO: 2103648 - DNA, 15 bp, Homo sapiens
atagataaatttaaa

SEQ ID NO: 2103649 - DNA, 15 bp, Homo sapiens
tagataaatttaaac

SEQ ID NO: 2103650 - DNA, 15 bp, Homo sapiens
agataaatttaaaca

SEQ ID NO: 2103651 - DNA, 15 bp, Homo sapiens
gataaatttaaacat

SEQ ID NO: 2103652 - DNA, 15 bp, Homo sapiens
ataaatttaaacatt

SEQ ID NO: 2103653 - DNA, 15 bp, Homo sapiens
taaatttaaacattt

SEQ ID NO: 2103654 - DNA, 15 bp, Homo sapiens
aaatttaaacatttt

SEQ ID NO: 2103655 - DNA, 15 bp, Homo sapiens
aatttaaacattttc

SEQ ID NO: 2103656 - DNA, 15 bp, Homo sapiens
atttaaacattttct

SEQ ID NO: 2103657 - DNA, 15 bp, Homo sapiens
tttaaacattttctg

SEQ ID NO: 2103658 - DNA, 15 bp, Homo sapiens
ttaaacattttctgg

SEQ ID NO: 2103659 - DNA, 15 bp, Homo sapiens
taaacattttctggt

SEQ ID NO: 2103660 - DNA, 15 bp, Homo sapiens
aaacattttctggtt

SEQ ID NO: 2103661 - DNA, 15 bp, Homo sapiens
aacattttctggttg

SEQ ID NO: 2103662 - DNA, 15 bp, Homo sapiens
acattttctggttga

SEQ ID NO: 2103663 - DNA, 15 bp, Homo sapiens
cattttctggttgac

SEQ ID NO: 2103664 - DNA, 15 bp, Homo sapiens
attttctggttgaca

SEQ ID NO: 2103665 - DNA, 15 bp, Homo sapiens
ttttctggttgacaa

SEQ ID NO: 2103666 - DNA, 15 bp, Homo sapiens
tttctggttgacaat

SEQ ID NO: 2103667 - DNA, 15 bp, Homo sapiens
ttctggttgacaatt

SEQ ID NO: 2103668 - DNA, 15 bp, Homo sapiens
tctggttgacaattg

SEQ ID NO: 2103669 - DNA, 15 bp, Homo sapiens
ctggttgacaattgg

SEQ ID NO: 2103670 - DNA, 15 bp, Homo sapiens
tggttgacaattggt

SEQ ID NO: 2103671 - DNA, 15 bp, Homo sapiens
ggttgacaattggtt

SEQ ID NO: 2103672 - DNA, 15 bp, Homo sapiens
gttgacaattggttg

SEQ ID NO: 2103673 - DNA, 15 bp, Homo sapiens
ttgacaattggttga

SEQ ID NO: 2103674 - DNA, 15 bp, Homo sapiens
tgacaattggttgag

SEQ ID NO: 2103675 - DNA, 15 bp, Homo sapiens
gacaattggttgagt

SEQ ID NO: 2103676 - DNA, 15 bp, Homo sapiens
acaattggttgagtt

SEQ ID NO: 2103677 - DNA, 15 bp, Homo sapiens
caattggttgagttt

SEQ ID NO: 2103678 - DNA, 15 bp, Homo sapiens
aattggttgagttta

SEQ ID NO: 2103679 - DNA, 15 bp, Homo sapiens
attggttgagtttat

SEQ ID NO: 2103680 - DNA, 15 bp, Homo sapiens
ttggttgagtttatc

SEQ ID NO: 2103681 - DNA, 15 bp, Homo sapiens
tggttgagtttatct

SEQ ID NO: 2103682 - DNA, 15 bp, Homo sapiens
ggttgagtttatcta

SEQ ID NO: 2103683 - DNA, 15 bp, Homo sapiens
gttgagtttatctaa

SEQ ID NO: 2103684 - DNA, 15 bp, Homo sapiens
ttgagtttatctaag

SEQ ID NO: 2103685 - DNA, 15 bp, Homo sapiens
tgagtttatctaagg

SEQ ID NO: 2103686 - DNA, 15 bp, Homo sapiens
gagtttatctaagga

SEQ ID NO: 2103687 - DNA, 15 bp, Homo sapiens
agtttatctaaggac

SEQ ID NO: 2103688 - DNA, 15 bp, Homo sapiens
gtttatctaaggacc

SEQ ID NO: 2103689 - DNA, 15 bp, Homo sapiens
tttatctaaggacct

SEQ ID NO: 2103690 - DNA, 15 bp, Homo sapiens
ttatctaaggacctg

SEQ ID NO: 2103691 - DNA, 15 bp, Homo sapiens
tatctaaggacctgg

SEQ ID NO: 2103692 - DNA, 15 bp, Homo sapiens
atctaaggacctggg

SEQ ID NO: 2103693 - DNA, 15 bp, Homo sapiens
tctaaggacctggga

SEQ ID NO: 2103694 - DNA, 15 bp, Homo sapiens
ctaaggacctgggat

SEQ ID NO: 2103695 - DNA, 15 bp, Homo sapiens
taaggacctgggatt

SEQ ID NO: 2103696 - DNA, 15 bp, Homo sapiens
aaggacctgggatta

SEQ ID NO: 2103697 - DNA, 15 bp, Homo sapiens
aggacctgggattat

SEQ ID NO: 2103698 - DNA, 15 bp, Homo sapiens
ggacctgggattata

SEQ ID NO: 2103699 - DNA, 15 bp, Homo sapiens
gacctgggattatag

SEQ ID NO: 2103700 - DNA, 15 bp, Homo sapiens
acctgggattataga

SEQ ID NO: 2103701 - DNA, 15 bp, Homo sapiens
cctgggattatagaa

SEQ ID NO: 2103702 - DNA, 15 bp, Homo sapiens
ctgggattatagaaa

SEQ ID NO: 2103703 - DNA, 15 bp, Homo sapiens
tgggattatagaaag

SEQ ID NO: 2103704 - DNA, 15 bp, Homo sapiens
gggattatagaaagg

SEQ ID NO: 2103705 - DNA, 15 bp, Homo sapiens
ggattatagaaagga

SEQ ID NO: 2103706 - DNA, 15 bp, Homo sapiens
gattatagaaaggaa

SEQ ID NO: 2103707 - DNA, 15 bp, Homo sapiens
attatagaaaggaaa

SEQ ID NO: 2103708 - DNA, 15 bp, Homo sapiens
ttatagaaaggaaat

SEQ ID NO: 2103709 - DNA, 15 bp, Homo sapiens
tatagaaaggaaatg

SEQ ID NO: 2103710 - DNA, 15 bp, Homo sapiens
atagaaaggaaatgt

SEQ ID NO: 2103711 - DNA, 15 bp, Homo sapiens
tagaaaggaaatgtt

SEQ ID NO: 2103712 - DNA, 15 bp, Homo sapiens
agaaaggaaatgttc

SEQ ID NO: 2103713 - DNA, 15 bp, Homo sapiens
gaaaggaaatgttca

SEQ ID NO: 2103714 - DNA, 15 bp, Homo sapiens
aaaggaaatgttcag

SEQ ID NO: 2103715 - DNA, 15 bp, Homo sapiens
aaggaaatgttcagg

SEQ ID NO: 2103716 - DNA, 15 bp, Homo sapiens
aggaaatgttcaggt

SEQ ID NO: 2103717 - DNA, 15 bp, Homo sapiens
ggaaatgttcaggtt

SEQ ID NO: 2103718 - DNA, 15 bp, Homo sapiens
gaaatgttcaggtta

SEQ ID NO: 2103719 - DNA, 15 bp, Homo sapiens
aaatgttcaggttaa

SEQ ID NO: 2103720 - DNA, 15 bp, Homo sapiens
aatgttcaggttaag

SEQ ID NO: 2103721 - DNA, 15 bp, Homo sapiens
atgttcaggttaaga

SEQ ID NO: 2103722 - DNA, 15 bp, Homo sapiens
tgttcaggttaagat

SEQ ID NO: 2103723 - DNA, 15 bp, Homo sapiens
gttcaggttaagata

SEQ ID NO: 2103724 - DNA, 15 bp, Homo sapiens
ttcaggttaagataa

SEQ ID NO: 2103725 - DNA, 15 bp, Homo sapiens
tcaggttaagataaa

SEQ ID NO: 2103726 - DNA, 15 bp, Homo sapiens
caggttaagataaaa

SEQ ID NO: 2103727 - DNA, 15 bp, Homo sapiens
aggttaagataaaag

SEQ ID NO: 2103728 - DNA, 15 bp, Homo sapiens
ggttaagataaaaga

SEQ ID NO: 2103729 - DNA, 15 bp, Homo sapiens
gttaagataaaagat

SEQ ID NO: 2103730 - DNA, 15 bp, Homo sapiens
ttaagataaaagatt

SEQ ID NO: 2103731 - DNA, 15 bp, Homo sapiens
taagataaaagattg

SEQ ID NO: 2103732 - DNA, 15 bp, Homo sapiens
aagataaaagattgt

SEQ ID NO: 2103733 - DNA, 15 bp, Homo sapiens
agataaaagattgtg

SEQ ID NO: 2103734 - DNA, 15 bp, Homo sapiens
gataaaagattgtgg

SEQ ID NO: 2103735 - DNA, 15 bp, Homo sapiens
ataaaagattgtgga

SEQ ID NO: 2103736 - DNA, 15 bp, Homo sapiens
taaaagattgtggag

SEQ ID NO: 2103737 - DNA, 15 bp, Homo sapiens
aaaagattgtggaga

SEQ ID NO: 2103738 - DNA, 15 bp, Homo sapiens
aaagattgtggagac

SEQ ID NO: 2103739 - DNA, 15 bp, Homo sapiens
aagattgtggagacc

SEQ ID NO: 2103740 - DNA, 15 bp, Homo sapiens
agattgtggagacca

SEQ ID NO: 2103741 - DNA, 15 bp, Homo sapiens
gattgtggagaccaa

SEQ ID NO: 2103742 - DNA, 15 bp, Homo sapiens
attgtggagaccaag

SEQ ID NO: 2103743 - DNA, 15 bp, Homo sapiens
ttgtggagaccaagg

SEQ ID NO: 2103744 - DNA, 15 bp, Homo sapiens
tgtggagaccaaggt

SEQ ID NO: 2103745 - DNA, 15 bp, Homo sapiens
gtggagaccaaggtt

SEQ ID NO: 2103746 - DNA, 15 bp, Homo sapiens
tggagaccaaggttc

SEQ ID NO: 2103747 - DNA, 15 bp, Homo sapiens
ggagaccaaggttct

SEQ ID NO: 2103748 - DNA, 15 bp, Homo sapiens
gagaccaaggttctt

SEQ ID NO: 2103749 - DNA, 15 bp, Homo sapiens
agaccaaggttcttt

SEQ ID NO: 2103750 - DNA, 15 bp, Homo sapiens
gaccaaggttctttt

SEQ ID NO: 2103751 - DNA, 15 bp, Homo sapiens
accaaggttcttttg

SEQ ID NO: 2103752 - DNA, 15 bp, Homo sapiens
ccaaggttcttttga

SEQ ID NO: 2103753 - DNA, 15 bp, Homo sapiens
caaggttcttttgaa

SEQ ID NO: 2103754 - DNA, 15 bp, Homo sapiens
aaggttcttttgaag

SEQ ID NO: 2103755 - DNA, 15 bp, Homo sapiens
aggttcttttgaagt

SEQ ID NO: 2103756 - DNA, 15 bp, Homo sapiens
ggttcttttgaagtc

SEQ ID NO: 2103757 - DNA, 15 bp, Homo sapiens
gttcttttgaagtct

SEQ ID NO: 2103758 - DNA, 15 bp, Homo sapiens
ttcttttgaagtcta

SEQ ID NO: 2103759 - DNA, 15 bp, Homo sapiens
tcttttgaagtctaa

SEQ ID NO: 2103760 - DNA, 15 bp, Homo sapiens
cttttgaagtctaat

SEQ ID NO: 2103761 - DNA, 15 bp, Homo sapiens
ttttgaagtctaata

SEQ ID NO: 2103762 - DNA, 15 bp, Homo sapiens
tttgaagtctaatag

SEQ ID NO: 2103763 - DNA, 15 bp, Homo sapiens
ttgaagtctaatagt

SEQ ID NO: 2103764 - DNA, 15 bp, Homo sapiens
tgaagtctaatagtg

SEQ ID NO: 2103765 - DNA, 15 bp, Homo sapiens
gaagtctaatagtgg

SEQ ID NO: 2103766 - DNA, 15 bp, Homo sapiens
aagtctaatagtggc

SEQ ID NO: 2103767 - DNA, 15 bp, Homo sapiens
agtctaatagtggct

SEQ ID NO: 2103768 - DNA, 15 bp, Homo sapiens
gtctaatagtggctg

SEQ ID NO: 2103769 - DNA, 15 bp, Homo sapiens
tctaatagtggctgc

SEQ ID NO: 2103770 - DNA, 15 bp, Homo sapiens
ctaatagtggctgcc

SEQ ID NO: 2103771 - DNA, 15 bp, Homo sapiens
taatagtggctgccc

SEQ ID NO: 2103772 - DNA, 15 bp, Homo sapiens
aatagtggctgccct

SEQ ID NO: 2103773 - DNA, 15 bp, Homo sapiens
atagtggctgccctt

SEQ ID NO: 2103774 - DNA, 15 bp, Homo sapiens
tagtggctgccctta

SEQ ID NO: 2103775 - DNA, 15 bp, Homo sapiens
agtggctgcccttag

SEQ ID NO: 2103776 - DNA, 15 bp, Homo sapiens
gtggctgcccttaga

SEQ ID NO: 2103777 - DNA, 15 bp, Homo sapiens
tggctgcccttagag

SEQ ID NO: 2103778 - DNA, 15 bp, Homo sapiens
ggctgcccttagaga

SEQ ID NO: 2103779 - DNA, 15 bp, Homo sapiens
gctgcccttagagac

SEQ ID NO: 2103780 - DNA, 15 bp, Homo sapiens
ctgcccttagagaca

SEQ ID NO: 2103781 - DNA, 15 bp, Homo sapiens
tgcccttagagacaa

SEQ ID NO: 2103782 - DNA, 15 bp, Homo sapiens
gcccttagagacaat

SEQ ID NO: 2103783 - DNA, 15 bp, Homo sapiens
cccttagagacaata

SEQ ID NO: 2103784 - DNA, 15 bp, Homo sapiens
ccttagagacaatag

SEQ ID NO: 2103785 - DNA, 15 bp, Homo sapiens
cttagagacaataga

SEQ ID NO: 2103786 - DNA, 15 bp, Homo sapiens
ttagagacaatagat

SEQ ID NO: 2103787 - DNA, 15 bp, Homo sapiens
tagagacaatagatg

SEQ ID NO: 2103788 - DNA, 15 bp, Homo sapiens
agagacaatagatga

SEQ ID NO: 2103789 - DNA, 15 bp, Homo sapiens
gagacaatagatgac

SEQ ID NO: 2103790 - DNA, 15 bp, Homo sapiens
agacaatagatgaca

SEQ ID NO: 2103791 - DNA, 15 bp, Homo sapiens
gacaatagatgacaa

SEQ ID NO: 2103792 - DNA, 15 bp, Homo sapiens
acaatagatgacaaa

SEQ ID NO: 2103793 - DNA, 15 bp, Homo sapiens
caatagatgacaaat

SEQ ID NO: 2103794 - DNA, 15 bp, Homo sapiens
aatagatgacaaatg

SEQ ID NO: 2103795 - DNA, 15 bp, Homo sapiens
atagatgacaaatgt

SEQ ID NO: 2103796 - DNA, 15 bp, Homo sapiens
tagatgacaaatgtt

SEQ ID NO: 2103797 - DNA, 15 bp, Homo sapiens
agatgacaaatgttt

SEQ ID NO: 2103798 - DNA, 15 bp, Homo sapiens
gatgacaaatgtttc

SEQ ID NO: 2103799 - DNA, 15 bp, Homo sapiens
atgacaaatgtttcc

SEQ ID NO: 2103800 - DNA, 15 bp, Homo sapiens
tgacaaatgtttcct

SEQ ID NO: 2103801 - DNA, 15 bp, Homo sapiens
gacaaatgtttccta

SEQ ID NO: 2103802 - DNA, 15 bp, Homo sapiens
acaaatgtttcctat

SEQ ID NO: 2103803 - DNA, 15 bp, Homo sapiens
caaatgtttcctatt

SEQ ID NO: 2103804 - DNA, 15 bp, Homo sapiens
aaatgtttcctattc

SEQ ID NO: 2103805 - DNA, 15 bp, Homo sapiens
aatgtttcctattca

SEQ ID NO: 2103806 - DNA, 15 bp, Homo sapiens
atgtttcctattcag

SEQ ID NO: 2103807 - DNA, 15 bp, Homo sapiens
cctctttgtacctct

SEQ ID NO: 2103808 - DNA, 15 bp, Homo sapiens
ctctttgtacctctg

SEQ ID NO: 2103809 - DNA, 15 bp, Homo sapiens
tctttgtacctctgg

SEQ ID NO: 2103810 - DNA, 15 bp, Homo sapiens
ctttgtacctctggt

SEQ ID NO: 2103811 - DNA, 15 bp, Homo sapiens
tttgtacctctggta

SEQ ID NO: 2103812 - DNA, 15 bp, Homo sapiens
ttgtacctctggtag

SEQ ID NO: 2103813 - DNA, 15 bp, Homo sapiens
tgtacctctggtaga

SEQ ID NO: 2103814 - DNA, 15 bp, Homo sapiens
gtacctctggtagaa

SEQ ID NO: 2103815 - DNA, 15 bp, Homo sapiens
tacctctggtagaat

SEQ ID NO: 2103816 - DNA, 15 bp, Homo sapiens
acctctggtagaatt

SEQ ID NO: 2103817 - DNA, 15 bp, Homo sapiens
cctctggtagaattt

SEQ ID NO: 2103818 - DNA, 15 bp, Homo sapiens
ctctggtagaatttg

SEQ ID NO: 2103819 - DNA, 15 bp, Homo sapiens
tctggtagaatttgg

SEQ ID NO: 2103820 - DNA, 15 bp, Homo sapiens
ctggtagaatttggc

SEQ ID NO: 2103821 - DNA, 15 bp, Homo sapiens
tggtagaatttggct

SEQ ID NO: 2103822 - DNA, 15 bp, Homo sapiens
ggtagaatttggctg

SEQ ID NO: 2103823 - DNA, 15 bp, Homo sapiens
gtagaatttggctgc

SEQ ID NO: 2103824 - DNA, 15 bp, Homo sapiens
tagaatttggctgcg

SEQ ID NO: 2103825 - DNA, 15 bp, Homo sapiens
agaatttggctgcga

SEQ ID NO: 2103826 - DNA, 15 bp, Homo sapiens
gaatttggctgcgaa

SEQ ID NO: 2103827 - DNA, 15 bp, Homo sapiens
aatttggctgcgaat

SEQ ID NO: 2103828 - DNA, 15 bp, Homo sapiens
atttggctgcgaatc

SEQ ID NO: 2103829 - DNA, 15 bp, Homo sapiens
tttggctgcgaatcc

SEQ ID NO: 2103830 - DNA, 15 bp, Homo sapiens
ttggctgcgaatcca

SEQ ID NO: 2103831 - DNA, 15 bp, Homo sapiens
tggctgcgaatccat

SEQ ID NO: 2103832 - DNA, 15 bp, Homo sapiens
ggctgcgaatccatc

SEQ ID NO: 2103833 - DNA, 15 bp, Homo sapiens
gctgcgaatccatct

SEQ ID NO: 2103834 - DNA, 15 bp, Homo sapiens
ctgcgaatccatctg

SEQ ID NO: 2103835 - DNA, 15 bp, Homo sapiens
tgcgaatccatctgg

SEQ ID NO: 2103836 - DNA, 15 bp, Homo sapiens
gcgaatccatctggt

SEQ ID NO: 2103837 - DNA, 15 bp, Homo sapiens
cgaatccatctggtc

SEQ ID NO: 2103838 - DNA, 15 bp, Homo sapiens
gaatccatctggtcc

SEQ ID NO: 2103839 - DNA, 15 bp, Homo sapiens
aatccatctggtcct

SEQ ID NO: 2103840 - DNA, 15 bp, Homo sapiens
atccatctggtcctg

SEQ ID NO: 2103841 - DNA, 15 bp, Homo sapiens
tccatctggtcctgg

SEQ ID NO: 2103842 - DNA, 15 bp, Homo sapiens
ccatctggtcctggg

SEQ ID NO: 2103843 - DNA, 15 bp, Homo sapiens
catctggtcctgggc

SEQ ID NO: 2103844 - DNA, 15 bp, Homo sapiens
atctggtcctgggct

SEQ ID NO: 2103845 - DNA, 15 bp, Homo sapiens
tctggtcctgggcta

SEQ ID NO: 2103846 - DNA, 15 bp, Homo sapiens
ctggtcctgggctat

SEQ ID NO: 2103847 - DNA, 15 bp, Homo sapiens
tggtcctgggctatt

SEQ ID NO: 2103848 - DNA, 15 bp, Homo sapiens
ggtcctgggctattt

SEQ ID NO: 2103849 - DNA, 15 bp, Homo sapiens
gtcctgggctatttt

SEQ ID NO: 2103850 - DNA, 15 bp, Homo sapiens
tcctgggctattttt

SEQ ID NO: 2103851 - DNA, 15 bp, Homo sapiens
cctgggctatttttg

SEQ ID NO: 2103852 - DNA, 15 bp, Homo sapiens
ctgggctatttttgg

SEQ ID NO: 2103853 - DNA, 15 bp, Homo sapiens
tgggctatttttggt

SEQ ID NO: 2103854 - DNA, 15 bp, Homo sapiens
gggctatttttggtt

SEQ ID NO: 2103855 - DNA, 15 bp, Homo sapiens
ggctatttttggttg

SEQ ID NO: 2103856 - DNA, 15 bp, Homo sapiens
gctatttttggttgg

SEQ ID NO: 2103857 - DNA, 15 bp, Homo sapiens
ctatttttggttggt

SEQ ID NO: 2103858 - DNA, 15 bp, Homo sapiens
tatttttggttggta

SEQ ID NO: 2103859 - DNA, 15 bp, Homo sapiens
atttttggttggtag

SEQ ID NO: 2103860 - DNA, 15 bp, Homo sapiens
tttttggttggtagg

SEQ ID NO: 2103861 - DNA, 15 bp, Homo sapiens
ttttggttggtaggc

SEQ ID NO: 2103862 - DNA, 15 bp, Homo sapiens
tttggttggtaggct

SEQ ID NO: 2103863 - DNA, 15 bp, Homo sapiens
ttggttggtaggcta

SEQ ID NO: 2103864 - DNA, 15 bp, Homo sapiens
tggttggtaggctat

SEQ ID NO: 2103865 - DNA, 15 bp, Homo sapiens
ggttggtaggctatt

SEQ ID NO: 2103866 - DNA, 15 bp, Homo sapiens
gttggtaggctatta

SEQ ID NO: 2103867 - DNA, 15 bp, Homo sapiens
ttggtaggctattaa

SEQ ID NO: 2103868 - DNA, 15 bp, Homo sapiens
tggtaggctattaat

SEQ ID NO: 2103869 - DNA, 15 bp, Homo sapiens
ggtaggctattaatt

SEQ ID NO: 2103870 - DNA, 15 bp, Homo sapiens
gtaggctattaatta

SEQ ID NO: 2103871 - DNA, 15 bp, Homo sapiens
taggctattaattac

SEQ ID NO: 2103872 - DNA, 15 bp, Homo sapiens
aggctattaattact

SEQ ID NO: 2103873 - DNA, 15 bp, Homo sapiens
ggctattaattactg

SEQ ID NO: 2103874 - DNA, 15 bp, Homo sapiens
gctattaattactgc

SEQ ID NO: 2103875 - DNA, 15 bp, Homo sapiens
ctattaattactgcc

SEQ ID NO: 2103876 - DNA, 15 bp, Homo sapiens
tattaattactgcct

SEQ ID NO: 2103877 - DNA, 15 bp, Homo sapiens
attaattactgcctc

SEQ ID NO: 2103878 - DNA, 15 bp, Homo sapiens
ttaattactgcctca

SEQ ID NO: 2103879 - DNA, 15 bp, Homo sapiens
taattactgcctcaa

SEQ ID NO: 2103880 - DNA, 15 bp, Homo sapiens
aattactgcctcaat

SEQ ID NO: 2103881 - DNA, 15 bp, Homo sapiens
attactgcctcaatt

SEQ ID NO: 2103882 - DNA, 15 bp, Homo sapiens
ttactgcctcaattt

SEQ ID NO: 2103883 - DNA, 15 bp, Homo sapiens
tactgcctcaatttt

SEQ ID NO: 2103884 - DNA, 15 bp, Homo sapiens
actgcctcaatttta

SEQ ID NO: 2103885 - DNA, 15 bp, Homo sapiens
ctgcctcaattttag

SEQ ID NO: 2103886 - DNA, 15 bp, Homo sapiens
tgcctcaattttaga

SEQ ID NO: 2103887 - DNA, 15 bp, Homo sapiens
cctcaattttagaac

SEQ ID NO: 2103888 - DNA, 15 bp, Homo sapiens
ctcaattttagaact

SEQ ID NO: 2103889 - DNA, 15 bp, Homo sapiens
tcaattttagaactt

SEQ ID NO: 2103890 - DNA, 15 bp, Homo sapiens
caattttagaacttg

SEQ ID NO: 2103891 - DNA, 15 bp, Homo sapiens
aattttagaacttgt

SEQ ID NO: 2103892 - DNA, 15 bp, Homo sapiens
attttagaacttgtt

SEQ ID NO: 2103893 - DNA, 15 bp, Homo sapiens
ttttagaacttgtta

SEQ ID NO: 2103894 - DNA, 15 bp, Homo sapiens
tttagaacttgttat

SEQ ID NO: 2103895 - DNA, 15 bp, Homo sapiens
ttagaacttgttatt

SEQ ID NO: 2103896 - DNA, 15 bp, Homo sapiens
tagaacttgttattt

SEQ ID NO: 2103897 - DNA, 15 bp, Homo sapiens
agaacttgttatttg

SEQ ID NO: 2103898 - DNA, 15 bp, Homo sapiens
gaacttgttatttgt

SEQ ID NO: 2103899 - DNA, 15 bp, Homo sapiens
aacttgttatttgtt

SEQ ID NO: 2103900 - DNA, 15 bp, Homo sapiens
acttgttatttgttt

SEQ ID NO: 2103901 - DNA, 15 bp, Homo sapiens
cttgttatttgttta

SEQ ID NO: 2103902 - DNA, 15 bp, Homo sapiens
ttgttatttgtttat

SEQ ID NO: 2103903 - DNA, 15 bp, Homo sapiens
tgttatttgtttatt

SEQ ID NO: 2103904 - DNA, 15 bp, Homo sapiens
gttatttgtttattc

SEQ ID NO: 2103905 - DNA, 15 bp, Homo sapiens
ttatttgtttattca

SEQ ID NO: 2103906 - DNA, 15 bp, Homo sapiens
tatttgtttattcag

SEQ ID NO: 2103907 - DNA, 15 bp, Homo sapiens
atttgtttattcagg

SEQ ID NO: 2103908 - DNA, 15 bp, Homo sapiens
tttgtttattcaggg

SEQ ID NO: 2103909 - DNA, 15 bp, Homo sapiens
ttgtttattcaggga

SEQ ID NO: 2103910 - DNA, 15 bp, Homo sapiens
tgtttattcagggat

SEQ ID NO: 2103911 - DNA, 15 bp, Homo sapiens
gtttattcagggatt

SEQ ID NO: 2103912 - DNA, 15 bp, Homo sapiens
tttattcagggattt

SEQ ID NO: 2103913 - DNA, 15 bp, Homo sapiens
ttattcagggatttg

SEQ ID NO: 2103914 - DNA, 15 bp, Homo sapiens
tattcagggatttga

SEQ ID NO: 2103915 - DNA, 15 bp, Homo sapiens
attcagggatttgat

SEQ ID NO: 2103916 - DNA, 15 bp, Homo sapiens
ttcagggatttgatg

SEQ ID NO: 2103917 - DNA, 15 bp, Homo sapiens
tcagggatttgatgt

SEQ ID NO: 2103918 - DNA, 15 bp, Homo sapiens
cagggatttgatgtc

SEQ ID NO: 2103919 - DNA, 15 bp, Homo sapiens
agggatttgatgtct

SEQ ID NO: 2103920 - DNA, 15 bp, Homo sapiens
gggatttgatgtctt

SEQ ID NO: 2103921 - DNA, 15 bp, Homo sapiens
ggatttgatgtcttc

SEQ ID NO: 2103922 - DNA, 15 bp, Homo sapiens
gatttgatgtcttct

SEQ ID NO: 2103923 - DNA, 15 bp, Homo sapiens
atttgatgtcttctt

SEQ ID NO: 2103924 - DNA, 15 bp, Homo sapiens
tttgatgtcttcttg

SEQ ID NO: 2103925 - DNA, 15 bp, Homo sapiens
ttgatgtcttcttgc

SEQ ID NO: 2103926 - DNA, 15 bp, Homo sapiens
tgatgtcttcttgct

SEQ ID NO: 2103927 - DNA, 15 bp, Homo sapiens
gatgtcttcttgctt

SEQ ID NO: 2103928 - DNA, 15 bp, Homo sapiens
atgtcttcttgcttc

SEQ ID NO: 2103929 - DNA, 15 bp, Homo sapiens
tgtcttcttgcttca

SEQ ID NO: 2103930 - DNA, 15 bp, Homo sapiens
gtcttcttgcttcag

SEQ ID NO: 2103931 - DNA, 15 bp, Homo sapiens
tcttcttgcttcagt

SEQ ID NO: 2103932 - DNA, 15 bp, Homo sapiens
cttcttgcttcagtc

SEQ ID NO: 2103933 - DNA, 15 bp, Homo sapiens
ttcttgcttcagtct

SEQ ID NO: 2103934 - DNA, 15 bp, Homo sapiens
tcttgcttcagtctt

SEQ ID NO: 2103935 - DNA, 15 bp, Homo sapiens
cttgcttcagtcttg

SEQ ID NO: 2103936 - DNA, 15 bp, Homo sapiens
ttgcttcagtcttga

SEQ ID NO: 2103937 - DNA, 15 bp, Homo sapiens
tgcttcagtcttgag

SEQ ID NO: 2103938 - DNA, 15 bp, Homo sapiens
gcttcagtcttgaga

SEQ ID NO: 2103939 - DNA, 15 bp, Homo sapiens
cttcagtcttgagag

SEQ ID NO: 2103940 - DNA, 15 bp, Homo sapiens
ttcagtcttgagagg

SEQ ID NO: 2103941 - DNA, 15 bp, Homo sapiens
tcagtcttgagaggg

SEQ ID NO: 2103942 - DNA, 15 bp, Homo sapiens
cagtcttgagagggt

SEQ ID NO: 2103943 - DNA, 15 bp, Homo sapiens
agtcttgagagggtg

SEQ ID NO: 2103944 - DNA, 15 bp, Homo sapiens
gtcttgagagggtgc

SEQ ID NO: 2103945 - DNA, 15 bp, Homo sapiens
tcttgagagggtgca

SEQ ID NO: 2103946 - DNA, 15 bp, Homo sapiens
cttgagagggtgcat

SEQ ID NO: 2103947 - DNA, 15 bp, Homo sapiens
ttgagagggtgcatg

SEQ ID NO: 2103948 - DNA, 15 bp, Homo sapiens
tgagagggtgcatgt

SEQ ID NO: 2103949 - DNA, 15 bp, Homo sapiens
gagagggtgcatgtg

SEQ ID NO: 2103950 - DNA, 15 bp, Homo sapiens
agagggtgcatgtgt

SEQ ID NO: 2103951 - DNA, 15 bp, Homo sapiens
gagggtgcatgtgtc

SEQ ID NO: 2103952 - DNA, 15 bp, Homo sapiens
agggtgcatgtgtcc

SEQ ID NO: 2103953 - DNA, 15 bp, Homo sapiens
gggtgcatgtgtcca

SEQ ID NO: 2103954 - DNA, 15 bp, Homo sapiens
ggtgcatgtgtccag

SEQ ID NO: 2103955 - DNA, 15 bp, Homo sapiens
gtgcatgtgtccagg

SEQ ID NO: 2103956 - DNA, 15 bp, Homo sapiens
tgcatgtgtccagga

SEQ ID NO: 2103957 - DNA, 15 bp, Homo sapiens
gcatgtgtccaggaa

SEQ ID NO: 2103958 - DNA, 15 bp, Homo sapiens
catgtgtccaggaat

SEQ ID NO: 2103959 - DNA, 15 bp, Homo sapiens
atgtgtccaggaatt

SEQ ID NO: 2103960 - DNA, 15 bp, Homo sapiens
tgtgtccaggaattt

SEQ ID NO: 2103961 - DNA, 15 bp, Homo sapiens
gtgtccaggaattta

SEQ ID NO: 2103962 - DNA, 15 bp, Homo sapiens
tgtccaggaatttat

SEQ ID NO: 2103963 - DNA, 15 bp, Homo sapiens
gtccaggaatttatc

SEQ ID NO: 2103964 - DNA, 15 bp, Homo sapiens
tccaggaatttatct

SEQ ID NO: 2103965 - DNA, 15 bp, Homo sapiens
ccaggaatttatcta

SEQ ID NO: 2103966 - DNA, 15 bp, Homo sapiens
caggaatttatctat

SEQ ID NO: 2103967 - DNA, 15 bp, Homo sapiens
aggaatttatctatt

SEQ ID NO: 2103968 - DNA, 15 bp, Homo sapiens
ggaatttatctattt

SEQ ID NO: 2103969 - DNA, 15 bp, Homo sapiens
gaatttatctatttc

SEQ ID NO: 2103970 - DNA, 15 bp, Homo sapiens
aatttatctatttct

SEQ ID NO: 2103971 - DNA, 15 bp, Homo sapiens
atttatctatttctt

SEQ ID NO: 2103972 - DNA, 15 bp, Homo sapiens
tttatctatttcttc

SEQ ID NO: 2103973 - DNA, 15 bp, Homo sapiens
ttatctatttcttct

SEQ ID NO: 2103974 - DNA, 15 bp, Homo sapiens
tatctatttcttcta

SEQ ID NO: 2103975 - DNA, 15 bp, Homo sapiens
atctatttcttctag

SEQ ID NO: 2103976 - DNA, 15 bp, Homo sapiens
tctatttcttctaga

SEQ ID NO: 2103977 - DNA, 15 bp, Homo sapiens
ctatttcttctagat

SEQ ID NO: 2103978 - DNA, 15 bp, Homo sapiens
tatttcttctagatt

SEQ ID NO: 2103979 - DNA, 15 bp, Homo sapiens
atttcttctagattt

SEQ ID NO: 2103980 - DNA, 15 bp, Homo sapiens
tttcttctagatttt

SEQ ID NO: 2103981 - DNA, 15 bp, Homo sapiens
ttcttctagattttc

SEQ ID NO: 2103982 - DNA, 15 bp, Homo sapiens
tcttctagattttct

SEQ ID NO: 2103983 - DNA, 15 bp, Homo sapiens
cttctagattttcta

SEQ ID NO: 2103984 - DNA, 15 bp, Homo sapiens
ttctagattttctaa

SEQ ID NO: 2103985 - DNA, 15 bp, Homo sapiens
tctagattttctaat

SEQ ID NO: 2103986 - DNA, 15 bp, Homo sapiens
ctagattttctaatt

SEQ ID NO: 2103987 - DNA, 15 bp, Homo sapiens
tagattttctaattt

SEQ ID NO: 2103988 - DNA, 15 bp, Homo sapiens
agattttctaattta

SEQ ID NO: 2103989 - DNA, 15 bp, Homo sapiens
gattttctaatttat

SEQ ID NO: 2103990 - DNA, 15 bp, Homo sapiens
attttctaatttatt

SEQ ID NO: 2103991 - DNA, 15 bp, Homo sapiens
ttttctaatttattt

SEQ ID NO: 2103992 - DNA, 15 bp, Homo sapiens
tttctaatttatttg

SEQ ID NO: 2103993 - DNA, 15 bp, Homo sapiens
ttctaatttatttgc

SEQ ID NO: 2103994 - DNA, 15 bp, Homo sapiens
tctaatttatttgca

SEQ ID NO: 2103995 - DNA, 15 bp, Homo sapiens
ctaatttatttgcat

SEQ ID NO: 2103996 - DNA, 15 bp, Homo sapiens
taatttatttgcata

SEQ ID NO: 2103997 - DNA, 15 bp, Homo sapiens
aatttatttgcatag

SEQ ID NO: 2103998 - DNA, 15 bp, Homo sapiens
atttatttgcataga

SEQ ID NO: 2103999 - DNA, 15 bp, Homo sapiens
tttatttgcatagag

SEQ ID NO: 2104000 - DNA, 15 bp, Homo sapiens
ttatttgcatagagg

SEQ ID NO: 2104001 - DNA, 15 bp, Homo sapiens
tatttgcatagaggt

SEQ ID NO: 2104002 - DNA, 15 bp, Homo sapiens
atttgcatagaggtg

SEQ ID NO: 2104003 - DNA, 15 bp, Homo sapiens
tttgcatagaggtgt

SEQ ID NO: 2104004 - DNA, 15 bp, Homo sapiens
ttgcatagaggtgtt

SEQ ID NO: 2104005 - DNA, 15 bp, Homo sapiens
tgcatagaggtgttt

SEQ ID NO: 2104006 - DNA, 15 bp, Homo sapiens
gcatagaggtgttta

SEQ ID NO: 2104007 - DNA, 15 bp, Homo sapiens
catagaggtgtttat

SEQ ID NO: 2104008 - DNA, 15 bp, Homo sapiens
atagaggtgtttata

SEQ ID NO: 2104009 - DNA, 15 bp, Homo sapiens
tagaggtgtttatag

SEQ ID NO: 2104010 - DNA, 15 bp, Homo sapiens
agaggtgtttatagt

SEQ ID NO: 2104011 - DNA, 15 bp, Homo sapiens
gaggtgtttatagta

SEQ ID NO: 2104012 - DNA, 15 bp, Homo sapiens
aggtgtttatagtat

SEQ ID NO: 2104013 - DNA, 15 bp, Homo sapiens
ggtgtttatagtatt

SEQ ID NO: 2104014 - DNA, 15 bp, Homo sapiens
gtgtttatagtattc

SEQ ID NO: 2104015 - DNA, 15 bp, Homo sapiens
tgtttatagtattct

SEQ ID NO: 2104016 - DNA, 15 bp, Homo sapiens
gtttatagtattctc

SEQ ID NO: 2104017 - DNA, 15 bp, Homo sapiens
tttatagtattctct

SEQ ID NO: 2104018 - DNA, 15 bp, Homo sapiens
ttatagtattctctg

SEQ ID NO: 2104019 - DNA, 15 bp, Homo sapiens
tatagtattctctga

SEQ ID NO: 2104020 - DNA, 15 bp, Homo sapiens
atagtattctctgat

SEQ ID NO: 2104021 - DNA, 15 bp, Homo sapiens
tagtattctctgatg

SEQ ID NO: 2104022 - DNA, 15 bp, Homo sapiens
agtattctctgatgg

SEQ ID NO: 2104023 - DNA, 15 bp, Homo sapiens
gtattctctgatggt

SEQ ID NO: 2104024 - DNA, 15 bp, Homo sapiens
tattctctgatggta

SEQ ID NO: 2104025 - DNA, 15 bp, Homo sapiens
attctctgatggtag

SEQ ID NO: 2104026 - DNA, 15 bp, Homo sapiens
ttctctgatggtagt

SEQ ID NO: 2104027 - DNA, 15 bp, Homo sapiens
tctctgatggtagtt

SEQ ID NO: 2104028 - DNA, 15 bp, Homo sapiens
ctctgatggtagttg

SEQ ID NO: 2104029 - DNA, 15 bp, Homo sapiens
tctgatggtagttgg

SEQ ID NO: 2104030 - DNA, 15 bp, Homo sapiens
ctgatggtagttggt

SEQ ID NO: 2104031 - DNA, 15 bp, Homo sapiens
tgatggtagttggta

SEQ ID NO: 2104032 - DNA, 15 bp, Homo sapiens
gatggtagttggtat

SEQ ID NO: 2104033 - DNA, 15 bp, Homo sapiens
atggtagttggtatt

SEQ ID NO: 2104034 - DNA, 15 bp, Homo sapiens
tggtagttggtattt

SEQ ID NO: 2104035 - DNA, 15 bp, Homo sapiens
ggtagttggtatttc

SEQ ID NO: 2104036 - DNA, 15 bp, Homo sapiens
gtagttggtatttct

SEQ ID NO: 2104037 - DNA, 15 bp, Homo sapiens
tagttggtatttctg

SEQ ID NO: 2104038 - DNA, 15 bp, Homo sapiens
agttggtatttctgt

SEQ ID NO: 2104039 - DNA, 15 bp, Homo sapiens
gttggtatttctgtg

SEQ ID NO: 2104040 - DNA, 15 bp, Homo sapiens
ttggtatttctgtgg

SEQ ID NO: 2104041 - DNA, 15 bp, Homo sapiens
tggtatttctgtggg

SEQ ID NO: 2104042 - DNA, 15 bp, Homo sapiens
ggtatttctgtggga

SEQ ID NO: 2104043 - DNA, 15 bp, Homo sapiens
gtatttctgtgggat

SEQ ID NO: 2104044 - DNA, 15 bp, Homo sapiens
tatttctgtgggatc

SEQ ID NO: 2104045 - DNA, 15 bp, Homo sapiens
atttctgtgggatca

SEQ ID NO: 2104046 - DNA, 15 bp, Homo sapiens
tttctgtgggatcag

SEQ ID NO: 2104047 - DNA, 15 bp, Homo sapiens
ttctgtgggatcagt

SEQ ID NO: 2104048 - DNA, 15 bp, Homo sapiens
tctgtgggatcagtg

SEQ ID NO: 2104049 - DNA, 15 bp, Homo sapiens
ctgtgggatcagtgg

SEQ ID NO: 2104050 - DNA, 15 bp, Homo sapiens
tgtgggatcagtggt

SEQ ID NO: 2104051 - DNA, 15 bp, Homo sapiens
gtgggatcagtggtg

SEQ ID NO: 2104052 - DNA, 15 bp, Homo sapiens
tgggatcagtggtga

SEQ ID NO: 2104053 - DNA, 15 bp, Homo sapiens
gggatcagtggtgat

SEQ ID NO: 2104054 - DNA, 15 bp, Homo sapiens
ggatcagtggtgata

SEQ ID NO: 2104055 - DNA, 15 bp, Homo sapiens
gatcagtggtgatat

SEQ ID NO: 2104056 - DNA, 15 bp, Homo sapiens
atcagtggtgatatc

SEQ ID NO: 2104057 - DNA, 15 bp, Homo sapiens
tcagtggtgatatcc

SEQ ID NO: 2104058 - DNA, 15 bp, Homo sapiens
cagtggtgatatccc

SEQ ID NO: 2104059 - DNA, 15 bp, Homo sapiens
agtggtgatatcccc

SEQ ID NO: 2104060 - DNA, 15 bp, Homo sapiens
gtggtgatatcccct

SEQ ID NO: 2104061 - DNA, 15 bp, Homo sapiens
tggtgatatcccctt

SEQ ID NO: 2104062 - DNA, 15 bp, Homo sapiens
ggtgatatccccttt

SEQ ID NO: 2104063 - DNA, 15 bp, Homo sapiens
gtgatatccccttta

SEQ ID NO: 2104064 - DNA, 15 bp, Homo sapiens
tgatatcccctttat

SEQ ID NO: 2104065 - DNA, 15 bp, Homo sapiens
gatatcccctttatt

SEQ ID NO: 2104066 - DNA, 15 bp, Homo sapiens
atatcccctttatta

SEQ ID NO: 2104067 - DNA, 15 bp, Homo sapiens
tatcccctttattat

SEQ ID NO: 2104068 - DNA, 15 bp, Homo sapiens
atcccctttattatt

SEQ ID NO: 2104069 - DNA, 15 bp, Homo sapiens
tcccctttattattt

SEQ ID NO: 2104070 - DNA, 15 bp, Homo sapiens
cccctttattatttt

SEQ ID NO: 2104071 - DNA, 15 bp, Homo sapiens
ccctttattattttt

SEQ ID NO: 2104072 - DNA, 15 bp, Homo sapiens
cctttattatttttt

SEQ ID NO: 2104073 - DNA, 15 bp, Homo sapiens
ctttattatttttta

SEQ ID NO: 2104074 - DNA, 15 bp, Homo sapiens
tttattattttttat

SEQ ID NO: 2104075 - DNA, 15 bp, Homo sapiens
ttattattttttatt

SEQ ID NO: 2104076 - DNA, 15 bp, Homo sapiens
tattattttttattg

SEQ ID NO: 2104077 - DNA, 15 bp, Homo sapiens
attattttttattgt

SEQ ID NO: 2104078 - DNA, 15 bp, Homo sapiens
ttattttttattgtg

SEQ ID NO: 2104079 - DNA, 15 bp, Homo sapiens
tattttttattgtgc

SEQ ID NO: 2104080 - DNA, 15 bp, Homo sapiens
attttttattgtgcc

SEQ ID NO: 2104081 - DNA, 15 bp, Homo sapiens
ttttttattgtgcct

SEQ ID NO: 2104082 - DNA, 15 bp, Homo sapiens
tttttattgtgccta

SEQ ID NO: 2104083 - DNA, 15 bp, Homo sapiens
ttttattgtgcctat

SEQ ID NO: 2104084 - DNA, 15 bp, Homo sapiens
tttattgtgcctatt

SEQ ID NO: 2104085 - DNA, 15 bp, Homo sapiens
ttattgtgcctattt

SEQ ID NO: 2104086 - DNA, 15 bp, Homo sapiens
tattgtgcctatttg

SEQ ID NO: 2104087 - DNA, 15 bp, Homo sapiens
attgtgcctatttga

SEQ ID NO: 2104088 - DNA, 15 bp, Homo sapiens
ttgtgcctatttgat

SEQ ID NO: 2104089 - DNA, 15 bp, Homo sapiens
tgtgcctatttgatt

SEQ ID NO: 2104090 - DNA, 15 bp, Homo sapiens
gtgcctatttgattc

SEQ ID NO: 2104091 - DNA, 15 bp, Homo sapiens
tgcctatttgattct

SEQ ID NO: 2104092 - DNA, 15 bp, Homo sapiens
gcctatttgattctt

SEQ ID NO: 2104093 - DNA, 15 bp, Homo sapiens
cctatttgattcttc

SEQ ID NO: 2104094 - DNA, 15 bp, Homo sapiens
ctatttgattcttct

SEQ ID NO: 2104095 - DNA, 15 bp, Homo sapiens
tatttgattcttctc

SEQ ID NO: 2104096 - DNA, 15 bp, Homo sapiens
atttgattcttctct

SEQ ID NO: 2104097 - DNA, 15 bp, Homo sapiens
tttgattcttctctc

SEQ ID NO: 2104098 - DNA, 15 bp, Homo sapiens
ttgattcttctctct

SEQ ID NO: 2104099 - DNA, 15 bp, Homo sapiens
tgattcttctctctt

SEQ ID NO: 2104100 - DNA, 15 bp, Homo sapiens
gattcttctctcttt

SEQ ID NO: 2104101 - DNA, 15 bp, Homo sapiens
attcttctctctttt

SEQ ID NO: 2104102 - DNA, 15 bp, Homo sapiens
ttcttctctcttttc

SEQ ID NO: 2104103 - DNA, 15 bp, Homo sapiens
tcttctctcttttct

SEQ ID NO: 2104104 - DNA, 15 bp, Homo sapiens
cttctctcttttctt

SEQ ID NO: 2104105 - DNA, 15 bp, Homo sapiens
ttctctcttttctta

SEQ ID NO: 2104106 - DNA, 15 bp, Homo sapiens
tctctcttttcttat

SEQ ID NO: 2104107 - DNA, 15 bp, Homo sapiens
ctctcttttcttatt

SEQ ID NO: 2104108 - DNA, 15 bp, Homo sapiens
tctcttttcttattt

SEQ ID NO: 2104109 - DNA, 15 bp, Homo sapiens
ctcttttcttatttg

SEQ ID NO: 2104110 - DNA, 15 bp, Homo sapiens
tcttttcttatttgt

SEQ ID NO: 2104111 - DNA, 15 bp, Homo sapiens
cttttcttatttgtc

SEQ ID NO: 2104112 - DNA, 15 bp, Homo sapiens
ttttcttatttgtct

SEQ ID NO: 2104113 - DNA, 15 bp, Homo sapiens
tttcttatttgtctt

SEQ ID NO: 2104114 - DNA, 15 bp, Homo sapiens
ttcttatttgtctta

SEQ ID NO: 2104115 - DNA, 15 bp, Homo sapiens
tcttatttgtcttac

SEQ ID NO: 2104116 - DNA, 15 bp, Homo sapiens
cttatttgtcttact

SEQ ID NO: 2104117 - DNA, 15 bp, Homo sapiens
ttatttgtcttacta

SEQ ID NO: 2104118 - DNA, 15 bp, Homo sapiens
tatttgtcttactag

SEQ ID NO: 2104119 - DNA, 15 bp, Homo sapiens
atttgtcttactagt

SEQ ID NO: 2104120 - DNA, 15 bp, Homo sapiens
tttgtcttactagtg

SEQ ID NO: 2104121 - DNA, 15 bp, Homo sapiens
ttgtcttactagtgg

SEQ ID NO: 2104122 - DNA, 15 bp, Homo sapiens
tgtcttactagtggt

SEQ ID NO: 2104123 - DNA, 15 bp, Homo sapiens
gtcttactagtggtc

SEQ ID NO: 2104124 - DNA, 15 bp, Homo sapiens
tcttactagtggtct

SEQ ID NO: 2104125 - DNA, 15 bp, Homo sapiens
cttactagtggtcta

SEQ ID NO: 2104126 - DNA, 15 bp, Homo sapiens
ttactagtggtctat

SEQ ID NO: 2104127 - DNA, 15 bp, Homo sapiens
tactagtggtctatg

SEQ ID NO: 2104128 - DNA, 15 bp, Homo sapiens
actagtggtctatgt

SEQ ID NO: 2104129 - DNA, 15 bp, Homo sapiens
ctagtggtctatgta

SEQ ID NO: 2104130 - DNA, 15 bp, Homo sapiens
tagtggtctatgtat

SEQ ID NO: 2104131 - DNA, 15 bp, Homo sapiens
agtggtctatgtatt

SEQ ID NO: 2104132 - DNA, 15 bp, Homo sapiens
gtggtctatgtattt

SEQ ID NO: 2104133 - DNA, 15 bp, Homo sapiens
tggtctatgtatttt

SEQ ID NO: 2104134 - DNA, 15 bp, Homo sapiens
ggtctatgtattttg

SEQ ID NO: 2104135 - DNA, 15 bp, Homo sapiens
gtctatgtattttgt

SEQ ID NO: 2104136 - DNA, 15 bp, Homo sapiens
tctatgtattttgtt

SEQ ID NO: 2104137 - DNA, 15 bp, Homo sapiens
ctatgtattttgtta

SEQ ID NO: 2104138 - DNA, 15 bp, Homo sapiens
tatgtattttgttaa

SEQ ID NO: 2104139 - DNA, 15 bp, Homo sapiens
atgtattttgttaaa

SEQ ID NO: 2104140 - DNA, 15 bp, Homo sapiens
tgtattttgttaaaa

SEQ ID NO: 2104141 - DNA, 15 bp, Homo sapiens
gtattttgttaaaat

SEQ ID NO: 2104142 - DNA, 15 bp, Homo sapiens
tattttgttaaaatt

SEQ ID NO: 2104143 - DNA, 15 bp, Homo sapiens
attttgttaaaattt

SEQ ID NO: 2104144 - DNA, 15 bp, Homo sapiens
ttttgttaaaatttc

SEQ ID NO: 2104145 - DNA, 15 bp, Homo sapiens
tttgttaaaatttcc

SEQ ID NO: 2104146 - DNA, 15 bp, Homo sapiens
ttgttaaaatttcca

SEQ ID NO: 2104147 - DNA, 15 bp, Homo sapiens
tgttaaaatttccaa

SEQ ID NO: 2104148 - DNA, 15 bp, Homo sapiens
gttaaaatttccaaa

SEQ ID NO: 2104149 - DNA, 15 bp, Homo sapiens
ttaaaatttccaaaa

SEQ ID NO: 2104150 - DNA, 15 bp, Homo sapiens
taaaatttccaaaaa

SEQ ID NO: 2104151 - DNA, 15 bp, Homo sapiens
aaaatttccaaaaaa

SEQ ID NO: 2104152 - DNA, 15 bp, Homo sapiens
aaatttccaaaaaac

SEQ ID NO: 2104153 - DNA, 15 bp, Homo sapiens
aatttccaaaaaact

SEQ ID NO: 2104154 - DNA, 15 bp, Homo sapiens
atttccaaaaaacta

SEQ ID NO: 2104155 - DNA, 15 bp, Homo sapiens
tttccaaaaaactag

SEQ ID NO: 2104156 - DNA, 15 bp, Homo sapiens
ttccaaaaaactagc

SEQ ID NO: 2104157 - DNA, 15 bp, Homo sapiens
tccaaaaaactagct

SEQ ID NO: 2104158 - DNA, 15 bp, Homo sapiens
ccaaaaaactagctc

SEQ ID NO: 2104159 - DNA, 15 bp, Homo sapiens
caaaaaactagctcc

SEQ ID NO: 2104160 - DNA, 15 bp, Homo sapiens
aaaaaactagctcct

SEQ ID NO: 2104161 - DNA, 15 bp, Homo sapiens
aaaaactagctcctg

SEQ ID NO: 2104162 - DNA, 15 bp, Homo sapiens
aaaactagctcctga

SEQ ID NO: 2104163 - DNA, 15 bp, Homo sapiens
aaactagctcctgaa

SEQ ID NO: 2104164 - DNA, 15 bp, Homo sapiens
aactagctcctgaat

SEQ ID NO: 2104165 - DNA, 15 bp, Homo sapiens
actagctcctgaatt

SEQ ID NO: 2104166 - DNA, 15 bp, Homo sapiens
ctagctcctgaattc

SEQ ID NO: 2104167 - DNA, 15 bp, Homo sapiens
tagctcctgaattca

SEQ ID NO: 2104168 - DNA, 15 bp, Homo sapiens
agctcctgaattcat

SEQ ID NO: 2104169 - DNA, 15 bp, Homo sapiens
gctcctgaattcatt

SEQ ID NO: 2104170 - DNA, 15 bp, Homo sapiens
ctcctgaattcatta

SEQ ID NO: 2104171 - DNA, 15 bp, Homo sapiens
tcctgaattcattaa

SEQ ID NO: 2104172 - DNA, 15 bp, Homo sapiens
cctgaattcattaat

SEQ ID NO: 2104173 - DNA, 15 bp, Homo sapiens
ctgaattcattaatt

SEQ ID NO: 2104174 - DNA, 15 bp, Homo sapiens
tgaattcattaattt

SEQ ID NO: 2104175 - DNA, 15 bp, Homo sapiens
gaattcattaatttt

SEQ ID NO: 2104176 - DNA, 15 bp, Homo sapiens
aattcattaattttt

SEQ ID NO: 2104177 - DNA, 15 bp, Homo sapiens
attcattaatttttt

SEQ ID NO: 2104178 - DNA, 15 bp, Homo sapiens
ttcattaattttttg

SEQ ID NO: 2104179 - DNA, 15 bp, Homo sapiens
tcattaattttttga

SEQ ID NO: 2104180 - DNA, 15 bp, Homo sapiens
cattaattttttgaa

SEQ ID NO: 2104181 - DNA, 15 bp, Homo sapiens
attaattttttgaaa

SEQ ID NO: 2104182 - DNA, 15 bp, Homo sapiens
ttaattttttgaaag

SEQ ID NO: 2104183 - DNA, 15 bp, Homo sapiens
taattttttgaaagg

SEQ ID NO: 2104184 - DNA, 15 bp, Homo sapiens
aattttttgaaaggt

SEQ ID NO: 2104185 - DNA, 15 bp, Homo sapiens
attttttgaaaggtt

SEQ ID NO: 2104186 - DNA, 15 bp, Homo sapiens
ttttttgaaaggttt

SEQ ID NO: 2104187 - DNA, 15 bp, Homo sapiens
tttttgaaaggtttt

SEQ ID NO: 2104188 - DNA, 15 bp, Homo sapiens
ttttgaaaggttttt

SEQ ID NO: 2104189 - DNA, 15 bp, Homo sapiens
tttgaaaggtttttt

SEQ ID NO: 2104190 - DNA, 15 bp, Homo sapiens
ttgaaaggtttttta

SEQ ID NO: 2104191 - DNA, 15 bp, Homo sapiens
tgaaaggttttttat

SEQ ID NO: 2104192 - DNA, 15 bp, Homo sapiens
gaaaggttttttatg

SEQ ID NO: 2104193 - DNA, 15 bp, Homo sapiens
aaaggttttttatgt

SEQ ID NO: 2104194 - DNA, 15 bp, Homo sapiens
aaggttttttatgtc

SEQ ID NO: 2104195 - DNA, 15 bp, Homo sapiens
aggttttttatgtcc

SEQ ID NO: 2104196 - DNA, 15 bp, Homo sapiens
ggttttttatgtccc

SEQ ID NO: 2104197 - DNA, 15 bp, Homo sapiens
gttttttatgtccct

SEQ ID NO: 2104198 - DNA, 15 bp, Homo sapiens
ttttttatgtcccta

SEQ ID NO: 2104199 - DNA, 15 bp, Homo sapiens
tttttatgtccctat

SEQ ID NO: 2104200 - DNA, 15 bp, Homo sapiens
ttttatgtccctatc

SEQ ID NO: 2104201 - DNA, 15 bp, Homo sapiens
tttatgtccctatct

SEQ ID NO: 2104202 - DNA, 15 bp, Homo sapiens
ttatgtccctatctc

SEQ ID NO: 2104203 - DNA, 15 bp, Homo sapiens
tatgtccctatctcc

SEQ ID NO: 2104204 - DNA, 15 bp, Homo sapiens
atgtccctatctcct

SEQ ID NO: 2104205 - DNA, 15 bp, Homo sapiens
tgtccctatctcctt

SEQ ID NO: 2104206 - DNA, 15 bp, Homo sapiens
gtccctatctccttc

SEQ ID NO: 2104207 - DNA, 15 bp, Homo sapiens
tccctatctccttca

SEQ ID NO: 2104208 - DNA, 15 bp, Homo sapiens
ccctatctccttcag

SEQ ID NO: 2104209 - DNA, 15 bp, Homo sapiens
cctatctccttcagt

SEQ ID NO: 2104210 - DNA, 15 bp, Homo sapiens
ctatctccttcagtt

SEQ ID NO: 2104211 - DNA, 15 bp, Homo sapiens
tatctccttcagttc

SEQ ID NO: 2104212 - DNA, 15 bp, Homo sapiens
atctccttcagttct

SEQ ID NO: 2104213 - DNA, 15 bp, Homo sapiens
tctccttcagttcta

SEQ ID NO: 2104214 - DNA, 15 bp, Homo sapiens
ctccttcagttctac

SEQ ID NO: 2104215 - DNA, 15 bp, Homo sapiens
tccttcagttctact

SEQ ID NO: 2104216 - DNA, 15 bp, Homo sapiens
ccttcagttctactc

SEQ ID NO: 2104217 - DNA, 15 bp, Homo sapiens
cttcagttctactct

SEQ ID NO: 2104218 - DNA, 15 bp, Homo sapiens
ttcagttctactctg

SEQ ID NO: 2104219 - DNA, 15 bp, Homo sapiens
tcagttctactctga

SEQ ID NO: 2104220 - DNA, 15 bp, Homo sapiens
cagttctactctgat

SEQ ID NO: 2104221 - DNA, 15 bp, Homo sapiens
agttctactctgatc

SEQ ID NO: 2104222 - DNA, 15 bp, Homo sapiens
gttctactctgatct

SEQ ID NO: 2104223 - DNA, 15 bp, Homo sapiens
ttctactctgatctt

SEQ ID NO: 2104224 - DNA, 15 bp, Homo sapiens
tctactctgatctta

SEQ ID NO: 2104225 - DNA, 15 bp, Homo sapiens
ctactctgatcttag

SEQ ID NO: 2104226 - DNA, 15 bp, Homo sapiens
tactctgatcttagt

SEQ ID NO: 2104227 - DNA, 15 bp, Homo sapiens
actctgatcttagtt

SEQ ID NO: 2104228 - DNA, 15 bp, Homo sapiens
ctctgatcttagtta

SEQ ID NO: 2104229 - DNA, 15 bp, Homo sapiens
tctgatcttagttat

SEQ ID NO: 2104230 - DNA, 15 bp, Homo sapiens
ctgatcttagttatt

SEQ ID NO: 2104231 - DNA, 15 bp, Homo sapiens
tgatcttagttattt

SEQ ID NO: 2104232 - DNA, 15 bp, Homo sapiens
gatcttagttatttc

SEQ ID NO: 2104233 - DNA, 15 bp, Homo sapiens
atcttagttatttct

SEQ ID NO: 2104234 - DNA, 15 bp, Homo sapiens
tcttagttatttctt

SEQ ID NO: 2104235 - DNA, 15 bp, Homo sapiens
cttagttatttcttg

SEQ ID NO: 2104236 - DNA, 15 bp, Homo sapiens
ttagttatttcttgc

SEQ ID NO: 2104237 - DNA, 15 bp, Homo sapiens
tagttatttcttgcc

SEQ ID NO: 2104238 - DNA, 15 bp, Homo sapiens
agttatttcttgcct

SEQ ID NO: 2104239 - DNA, 15 bp, Homo sapiens
gttatttcttgcctt

SEQ ID NO: 2104240 - DNA, 15 bp, Homo sapiens
ttatttcttgccttc

SEQ ID NO: 2104241 - DNA, 15 bp, Homo sapiens
tatttcttgccttct

SEQ ID NO: 2104242 - DNA, 15 bp, Homo sapiens
atttcttgccttctg

SEQ ID NO: 2104243 - DNA, 15 bp, Homo sapiens
tttcttgccttctgc

SEQ ID NO: 2104244 - DNA, 15 bp, Homo sapiens
ttcttgccttctgct

SEQ ID NO: 2104245 - DNA, 15 bp, Homo sapiens
tcttgccttctgcta

SEQ ID NO: 2104246 - DNA, 15 bp, Homo sapiens
cttgccttctgctag

SEQ ID NO: 2104247 - DNA, 15 bp, Homo sapiens
ttgccttctgctagc

SEQ ID NO: 2104248 - DNA, 15 bp, Homo sapiens
tgccttctgctagct

SEQ ID NO: 2104249 - DNA, 15 bp, Homo sapiens
gccttctgctagctt

SEQ ID NO: 2104250 - DNA, 15 bp, Homo sapiens
ccttctgctagcttt

SEQ ID NO: 2104251 - DNA, 15 bp, Homo sapiens
cttctgctagctttt

SEQ ID NO: 2104252 - DNA, 15 bp, Homo sapiens
ttctgctagcttttg

SEQ ID NO: 2104253 - DNA, 15 bp, Homo sapiens
tctgctagcttttga

SEQ ID NO: 2104254 - DNA, 15 bp, Homo sapiens
ctgctagcttttgaa

SEQ ID NO: 2104255 - DNA, 15 bp, Homo sapiens
tgctagcttttgaat

SEQ ID NO: 2104256 - DNA, 15 bp, Homo sapiens
gctagcttttgaatt

SEQ ID NO: 2104257 - DNA, 15 bp, Homo sapiens
ctagcttttgaattt

SEQ ID NO: 2104258 - DNA, 15 bp, Homo sapiens
tagcttttgaatttg

SEQ ID NO: 2104259 - DNA, 15 bp, Homo sapiens
agcttttgaatttgt

SEQ ID NO: 2104260 - DNA, 15 bp, Homo sapiens
gcttttgaatttgtt

SEQ ID NO: 2104261 - DNA, 15 bp, Homo sapiens
cttttgaatttgttt

SEQ ID NO: 2104262 - DNA, 15 bp, Homo sapiens
ttttgaatttgtttg

SEQ ID NO: 2104263 - DNA, 15 bp, Homo sapiens
tttgaatttgtttgc

SEQ ID NO: 2104264 - DNA, 15 bp, Homo sapiens
ttgaatttgtttgct

SEQ ID NO: 2104265 - DNA, 15 bp, Homo sapiens
tgaatttgtttgctc

SEQ ID NO: 2104266 - DNA, 15 bp, Homo sapiens
gaatttgtttgctct

SEQ ID NO: 2104267 - DNA, 15 bp, Homo sapiens
aatttgtttgctctt

SEQ ID NO: 2104268 - DNA, 15 bp, Homo sapiens
atttgtttgctcttg

SEQ ID NO: 2104269 - DNA, 15 bp, Homo sapiens
tttgtttgctcttgc

SEQ ID NO: 2104270 - DNA, 15 bp, Homo sapiens
ttgtttgctcttgct

SEQ ID NO: 2104271 - DNA, 15 bp, Homo sapiens
tgtttgctcttgctt

SEQ ID NO: 2104272 - DNA, 15 bp, Homo sapiens
gtttgctcttgcttc

SEQ ID NO: 2104273 - DNA, 15 bp, Homo sapiens
tttgctcttgcttct

SEQ ID NO: 2104274 - DNA, 15 bp, Homo sapiens
ttgctcttgcttctc

SEQ ID NO: 2104275 - DNA, 15 bp, Homo sapiens
tgctcttgcttctct

SEQ ID NO: 2104276 - DNA, 15 bp, Homo sapiens
gctcttgcttctcta

SEQ ID NO: 2104277 - DNA, 15 bp, Homo sapiens
ctcttgcttctctag

SEQ ID NO: 2104278 - DNA, 15 bp, Homo sapiens
tcttgcttctctagt

SEQ ID NO: 2104279 - DNA, 15 bp, Homo sapiens
cttgcttctctagtt

SEQ ID NO: 2104280 - DNA, 15 bp, Homo sapiens
ttgcttctctagttc

SEQ ID NO: 2104281 - DNA, 15 bp, Homo sapiens
tgcttctctagttct

SEQ ID NO: 2104282 - DNA, 15 bp, Homo sapiens
gcttctctagttctt

SEQ ID NO: 2104283 - DNA, 15 bp, Homo sapiens
cttctctagttcttt

SEQ ID NO: 2104284 - DNA, 15 bp, Homo sapiens
ttctctagttctttt

SEQ ID NO: 2104285 - DNA, 15 bp, Homo sapiens
tctctagttctttta

SEQ ID NO: 2104286 - DNA, 15 bp, Homo sapiens
ctctagttcttttaa

SEQ ID NO: 2104287 - DNA, 15 bp, Homo sapiens
tctagttcttttaat

SEQ ID NO: 2104288 - DNA, 15 bp, Homo sapiens
ctagttcttttaatt

SEQ ID NO: 2104289 - DNA, 15 bp, Homo sapiens
tagttcttttaattg

SEQ ID NO: 2104290 - DNA, 15 bp, Homo sapiens
agttcttttaattgt

SEQ ID NO: 2104291 - DNA, 15 bp, Homo sapiens
gttcttttaattgtg

SEQ ID NO: 2104292 - DNA, 15 bp, Homo sapiens
ttcttttaattgtga

SEQ ID NO: 2104293 - DNA, 15 bp, Homo sapiens
tcttttaattgtgat

SEQ ID NO: 2104294 - DNA, 15 bp, Homo sapiens
cttttaattgtgatg

SEQ ID NO: 2104295 - DNA, 15 bp, Homo sapiens
ttttaattgtgatgt

SEQ ID NO: 2104296 - DNA, 15 bp, Homo sapiens
tttaattgtgatgtt

SEQ ID NO: 2104297 - DNA, 15 bp, Homo sapiens
ttaattgtgatgtta

SEQ ID NO: 2104298 - DNA, 15 bp, Homo sapiens
taattgtgatgttag

SEQ ID NO: 2104299 - DNA, 15 bp, Homo sapiens
aattgtgatgttaga

SEQ ID NO: 2104300 - DNA, 15 bp, Homo sapiens
attgtgatgttagag

SEQ ID NO: 2104301 - DNA, 15 bp, Homo sapiens
ttgtgatgttagagt

SEQ ID NO: 2104302 - DNA, 15 bp, Homo sapiens
tgtgatgttagagta

SEQ ID NO: 2104303 - DNA, 15 bp, Homo sapiens
gtgatgttagagtat

SEQ ID NO: 2104304 - DNA, 15 bp, Homo sapiens
tgatgttagagtatt

SEQ ID NO: 2104305 - DNA, 15 bp, Homo sapiens
gatgttagagtattg

SEQ ID NO: 2104306 - DNA, 15 bp, Homo sapiens
atgttagagtattga

SEQ ID NO: 2104307 - DNA, 15 bp, Homo sapiens
tgttagagtattgat

SEQ ID NO: 2104308 - DNA, 15 bp, Homo sapiens
gttagagtattgatt

SEQ ID NO: 2104309 - DNA, 15 bp, Homo sapiens
ttagagtattgattt

SEQ ID NO: 2104310 - DNA, 15 bp, Homo sapiens
tagagtattgatttt

SEQ ID NO: 2104311 - DNA, 15 bp, Homo sapiens
agagtattgatttta

SEQ ID NO: 2104312 - DNA, 15 bp, Homo sapiens
gagtattgattttaa

SEQ ID NO: 2104313 - DNA, 15 bp, Homo sapiens
agtattgattttaaa

SEQ ID NO: 2104314 - DNA, 15 bp, Homo sapiens
gtattgattttaaat

SEQ ID NO: 2104315 - DNA, 15 bp, Homo sapiens
tattgattttaaatc

SEQ ID NO: 2104316 - DNA, 15 bp, Homo sapiens
attgattttaaatct

SEQ ID NO: 2104317 - DNA, 15 bp, Homo sapiens
ttgattttaaatctt

SEQ ID NO: 2104318 - DNA, 15 bp, Homo sapiens
tgattttaaatcttt

SEQ ID NO: 2104319 - DNA, 15 bp, Homo sapiens
gattttaaatctttc

SEQ ID NO: 2104320 - DNA, 15 bp, Homo sapiens
attttaaatctttcc

SEQ ID NO: 2104321 - DNA, 15 bp, Homo sapiens
ttttaaatctttcct

SEQ ID NO: 2104322 - DNA, 15 bp, Homo sapiens
tttaaatctttcctg

SEQ ID NO: 2104323 - DNA, 15 bp, Homo sapiens
ttaaatctttcctgc

SEQ ID NO: 2104324 - DNA, 15 bp, Homo sapiens
taaatctttcctgct

SEQ ID NO: 2104325 - DNA, 15 bp, Homo sapiens
aaatctttcctgctt

SEQ ID NO: 2104326 - DNA, 15 bp, Homo sapiens
aatctttcctgcttt

SEQ ID NO: 2104327 - DNA, 15 bp, Homo sapiens
atctttcctgctttc

SEQ ID NO: 2104328 - DNA, 15 bp, Homo sapiens
tctttcctgctttct

SEQ ID NO: 2104329 - DNA, 15 bp, Homo sapiens
ctttcctgctttctg

SEQ ID NO: 2104330 - DNA, 15 bp, Homo sapiens
tttcctgctttctga

SEQ ID NO: 2104331 - DNA, 15 bp, Homo sapiens
ttcctgctttctgat

SEQ ID NO: 2104332 - DNA, 15 bp, Homo sapiens
tcctgctttctgatg

SEQ ID NO: 2104333 - DNA, 15 bp, Homo sapiens
cctgctttctgatgt

SEQ ID NO: 2104334 - DNA, 15 bp, Homo sapiens
ctgctttctgatgtg

SEQ ID NO: 2104335 - DNA, 15 bp, Homo sapiens
tgctttctgatgtga

SEQ ID NO: 2104336 - DNA, 15 bp, Homo sapiens
gctttctgatgtgag

SEQ ID NO: 2104337 - DNA, 15 bp, Homo sapiens
ctttctgatgtgagc

SEQ ID NO: 2104338 - DNA, 15 bp, Homo sapiens
tttctgatgtgagca

SEQ ID NO: 2104339 - DNA, 15 bp, Homo sapiens
ttctgatgtgagcat

SEQ ID NO: 2104340 - DNA, 15 bp, Homo sapiens
tctgatgtgagcatt

SEQ ID NO: 2104341 - DNA, 15 bp, Homo sapiens
ctgatgtgagcattt

SEQ ID NO: 2104342 - DNA, 15 bp, Homo sapiens
tgatgtgagcatttc

SEQ ID NO: 2104343 - DNA, 15 bp, Homo sapiens
gatgtgagcatttca

SEQ ID NO: 2104344 - DNA, 15 bp, Homo sapiens
atgtgagcatttcat

SEQ ID NO: 2104345 - DNA, 15 bp, Homo sapiens
tgtgagcatttcatg

SEQ ID NO: 2104346 - DNA, 15 bp, Homo sapiens
gtgagcatttcatgc

SEQ ID NO: 2104347 - DNA, 15 bp, Homo sapiens
tgagcatttcatgct

SEQ ID NO: 2104348 - DNA, 15 bp, Homo sapiens
gagcatttcatgcta

SEQ ID NO: 2104349 - DNA, 15 bp, Homo sapiens
agcatttcatgctat

SEQ ID NO: 2104350 - DNA, 15 bp, Homo sapiens
gcatttcatgctata

SEQ ID NO: 2104351 - DNA, 15 bp, Homo sapiens
catttcatgctataa

SEQ ID NO: 2104352 - DNA, 15 bp, Homo sapiens
atttcatgctataaa

SEQ ID NO: 2104353 - DNA, 15 bp, Homo sapiens
tttcatgctataaat

SEQ ID NO: 2104354 - DNA, 15 bp, Homo sapiens
ttcatgctataaatt

SEQ ID NO: 2104355 - DNA, 15 bp, Homo sapiens
tcatgctataaattt

SEQ ID NO: 2104356 - DNA, 15 bp, Homo sapiens
catgctataaatttt

SEQ ID NO: 2104357 - DNA, 15 bp, Homo sapiens
atgctataaattttc

SEQ ID NO: 2104358 - DNA, 15 bp, Homo sapiens
tgctataaattttcc

SEQ ID NO: 2104359 - DNA, 15 bp, Homo sapiens
gctataaattttcct

SEQ ID NO: 2104360 - DNA, 15 bp, Homo sapiens
ctataaattttcctc

SEQ ID NO: 2104361 - DNA, 15 bp, Homo sapiens
tataaattttcctct

SEQ ID NO: 2104362 - DNA, 15 bp, Homo sapiens
ataaattttcctctt

SEQ ID NO: 2104363 - DNA, 15 bp, Homo sapiens
taaattttcctctta

SEQ ID NO: 2104364 - DNA, 15 bp, Homo sapiens
aaattttcctcttaa

SEQ ID NO: 2104365 - DNA, 15 bp, Homo sapiens
aattttcctcttaac

SEQ ID NO: 2104366 - DNA, 15 bp, Homo sapiens
attttcctcttaaca

SEQ ID NO: 2104367 - DNA, 15 bp, Homo sapiens
ttttcctcttaacac

SEQ ID NO: 2104368 - DNA, 15 bp, Homo sapiens
tttcctcttaacact

SEQ ID NO: 2104369 - DNA, 15 bp, Homo sapiens
ttcctcttaacactg

SEQ ID NO: 2104370 - DNA, 15 bp, Homo sapiens
tcctcttaacactgc

SEQ ID NO: 2104371 - DNA, 15 bp, Homo sapiens
cctcttaacactgct

SEQ ID NO: 2104372 - DNA, 15 bp, Homo sapiens
ctcttaacactgctt

SEQ ID NO: 2104373 - DNA, 15 bp, Homo sapiens
tcttaacactgcttt

SEQ ID NO: 2104374 - DNA, 15 bp, Homo sapiens
cttaacactgcttta

SEQ ID NO: 2104375 - DNA, 15 bp, Homo sapiens
ttaacactgctttag

SEQ ID NO: 2104376 - DNA, 15 bp, Homo sapiens
taacactgctttagc

SEQ ID NO: 2104377 - DNA, 15 bp, Homo sapiens
aacactgctttagct

SEQ ID NO: 2104378 - DNA, 15 bp, Homo sapiens
acactgctttagctg

SEQ ID NO: 2104379 - DNA, 15 bp, Homo sapiens
cactgctttagctgt

SEQ ID NO: 2104380 - DNA, 15 bp, Homo sapiens
actgctttagctgtg

SEQ ID NO: 2104381 - DNA, 15 bp, Homo sapiens
ctgctttagctgtgt

SEQ ID NO: 2104382 - DNA, 15 bp, Homo sapiens
tgctttagctgtgtc

SEQ ID NO: 2104383 - DNA, 15 bp, Homo sapiens
gctttagctgtgtcc

SEQ ID NO: 2104384 - DNA, 15 bp, Homo sapiens
ctttagctgtgtccc

SEQ ID NO: 2104385 - DNA, 15 bp, Homo sapiens
tttagctgtgtccca

SEQ ID NO: 2104386 - DNA, 15 bp, Homo sapiens
ttagctgtgtcccag

SEQ ID NO: 2104387 - DNA, 15 bp, Homo sapiens
tagctgtgtcccaga

SEQ ID NO: 2104388 - DNA, 15 bp, Homo sapiens
agctgtgtcccagag

SEQ ID NO: 2104389 - DNA, 15 bp, Homo sapiens
gctgtgtcccagaga

SEQ ID NO: 2104390 - DNA, 15 bp, Homo sapiens
ctgtgtcccagagat

SEQ ID NO: 2104391 - DNA, 15 bp, Homo sapiens
tgtgtcccagagatt

SEQ ID NO: 2104392 - DNA, 15 bp, Homo sapiens
gtgtcccagagattc

SEQ ID NO: 2104393 - DNA, 15 bp, Homo sapiens
tgtcccagagattca

SEQ ID NO: 2104394 - DNA, 15 bp, Homo sapiens
gtcccagagattcag

SEQ ID NO: 2104395 - DNA, 15 bp, Homo sapiens
tcccagagattcagg

SEQ ID NO: 2104396 - DNA, 15 bp, Homo sapiens
cccagagattcaggt

SEQ ID NO: 2104397 - DNA, 15 bp, Homo sapiens
ccagagattcaggta

SEQ ID NO: 2104398 - DNA, 15 bp, Homo sapiens
cagagattcaggtac

SEQ ID NO: 2104399 - DNA, 15 bp, Homo sapiens
agagattcaggtaca

SEQ ID NO: 2104400 - DNA, 15 bp, Homo sapiens
gagattcaggtacat

SEQ ID NO: 2104401 - DNA, 15 bp, Homo sapiens
agattcaggtacatt

SEQ ID NO: 2104402 - DNA, 15 bp, Homo sapiens
gattcaggtacattg

SEQ ID NO: 2104403 - DNA, 15 bp, Homo sapiens
attcaggtacattgt

SEQ ID NO: 2104404 - DNA, 15 bp, Homo sapiens
ttcaggtacattgtc

SEQ ID NO: 2104405 - DNA, 15 bp, Homo sapiens
tcaggtacattgtct

SEQ ID NO: 2104406 - DNA, 15 bp, Homo sapiens
caggtacattgtctc

SEQ ID NO: 2104407 - DNA, 15 bp, Homo sapiens
aggtacattgtctct

SEQ ID NO: 2104408 - DNA, 15 bp, Homo sapiens
ggtacattgtctctt

SEQ ID NO: 2104409 - DNA, 15 bp, Homo sapiens
gtacattgtctcttt

SEQ ID NO: 2104410 - DNA, 15 bp, Homo sapiens
tacattgtctctttt

SEQ ID NO: 2104411 - DNA, 15 bp, Homo sapiens
acattgtctcttttt

SEQ ID NO: 2104412 - DNA, 15 bp, Homo sapiens
cattgtctctttttt

SEQ ID NO: 2104413 - DNA, 15 bp, Homo sapiens
attgtctcttttttc

SEQ ID NO: 2104414 - DNA, 15 bp, Homo sapiens
ttgtctcttttttct

SEQ ID NO: 2104415 - DNA, 15 bp, Homo sapiens
tgtctcttttttctc

SEQ ID NO: 2104416 - DNA, 15 bp, Homo sapiens
gtctcttttttctca

SEQ ID NO: 2104417 - DNA, 15 bp, Homo sapiens
tctcttttttctcat

SEQ ID NO: 2104418 - DNA, 15 bp, Homo sapiens
ctcttttttctcatt

SEQ ID NO: 2104419 - DNA, 15 bp, Homo sapiens
tcttttttctcattt

SEQ ID NO: 2104420 - DNA, 15 bp, Homo sapiens
cttttttctcatttt

SEQ ID NO: 2104421 - DNA, 15 bp, Homo sapiens
ttttttctcattttc

SEQ ID NO: 2104422 - DNA, 15 bp, Homo sapiens
tttttctcattttca

SEQ ID NO: 2104423 - DNA, 15 bp, Homo sapiens
ttttctcattttcaa

SEQ ID NO: 2104424 - DNA, 15 bp, Homo sapiens
tttctcattttcaaa

SEQ ID NO: 2104425 - DNA, 15 bp, Homo sapiens
ttctcattttcaaag

SEQ ID NO: 2104426 - DNA, 15 bp, Homo sapiens
tctcattttcaaaga

SEQ ID NO: 2104427 - DNA, 15 bp, Homo sapiens
ctcattttcaaagaa

SEQ ID NO: 2104428 - DNA, 15 bp, Homo sapiens
tcattttcaaagaac

SEQ ID NO: 2104429 - DNA, 15 bp, Homo sapiens
cattttcaaagaact

SEQ ID NO: 2104430 - DNA, 15 bp, Homo sapiens
attttcaaagaactt

SEQ ID NO: 2104431 - DNA, 15 bp, Homo sapiens
ttttcaaagaactta

SEQ ID NO: 2104432 - DNA, 15 bp, Homo sapiens
tttcaaagaacttat

SEQ ID NO: 2104433 - DNA, 15 bp, Homo sapiens
ttcaaagaacttatt

SEQ ID NO: 2104434 - DNA, 15 bp, Homo sapiens
tcaaagaacttattt

SEQ ID NO: 2104435 - DNA, 15 bp, Homo sapiens
caaagaacttattta

SEQ ID NO: 2104436 - DNA, 15 bp, Homo sapiens
aaagaacttatttat

SEQ ID NO: 2104437 - DNA, 15 bp, Homo sapiens
aagaacttatttatt

SEQ ID NO: 2104438 - DNA, 15 bp, Homo sapiens
agaacttatttattt

SEQ ID NO: 2104439 - DNA, 15 bp, Homo sapiens
gaacttatttatttc

SEQ ID NO: 2104440 - DNA, 15 bp, Homo sapiens
aacttatttatttct

SEQ ID NO: 2104441 - DNA, 15 bp, Homo sapiens
acttatttatttctt

SEQ ID NO: 2104442 - DNA, 15 bp, Homo sapiens
cttatttatttcttc

SEQ ID NO: 2104443 - DNA, 15 bp, Homo sapiens
ttatttatttcttcc

SEQ ID NO: 2104444 - DNA, 15 bp, Homo sapiens
tatttatttcttcct

SEQ ID NO: 2104445 - DNA, 15 bp, Homo sapiens
atttatttcttcctt

SEQ ID NO: 2104446 - DNA, 15 bp, Homo sapiens
tttatttcttcctta

SEQ ID NO: 2104447 - DNA, 15 bp, Homo sapiens
ttatttcttccttaa

SEQ ID NO: 2104448 - DNA, 15 bp, Homo sapiens
tatttcttccttaac

SEQ ID NO: 2104449 - DNA, 15 bp, Homo sapiens
atttcttccttaact

SEQ ID NO: 2104450 - DNA, 15 bp, Homo sapiens
tttcttccttaactt

SEQ ID NO: 2104451 - DNA, 15 bp, Homo sapiens
ttcttccttaacttc

SEQ ID NO: 2104452 - DNA, 15 bp, Homo sapiens
tcttccttaacttca

SEQ ID NO: 2104453 - DNA, 15 bp, Homo sapiens
cttccttaacttcat

SEQ ID NO: 2104454 - DNA, 15 bp, Homo sapiens
ttccttaacttcatt

SEQ ID NO: 2104455 - DNA, 15 bp, Homo sapiens
tccttaacttcatta

SEQ ID NO: 2104456 - DNA, 15 bp, Homo sapiens
ccttaacttcattat

SEQ ID NO: 2104457 - DNA, 15 bp, Homo sapiens
cttaacttcattatt

SEQ ID NO: 2104458 - DNA, 15 bp, Homo sapiens
ttaacttcattattt

SEQ ID NO: 2104459 - DNA, 15 bp, Homo sapiens
taacttcattattta

SEQ ID NO: 2104460 - DNA, 15 bp, Homo sapiens
aacttcattatttac

SEQ ID NO: 2104461 - DNA, 15 bp, Homo sapiens
acttcattatttacc

SEQ ID NO: 2104462 - DNA, 15 bp, Homo sapiens
cttcattatttacct

SEQ ID NO: 2104463 - DNA, 15 bp, Homo sapiens
ttcattatttaccta

SEQ ID NO: 2104464 - DNA, 15 bp, Homo sapiens
tcattatttacctag

SEQ ID NO: 2104465 - DNA, 15 bp, Homo sapiens
cattatttacctagt

SEQ ID NO: 2104466 - DNA, 15 bp, Homo sapiens
attatttacctagta

SEQ ID NO: 2104467 - DNA, 15 bp, Homo sapiens
ttatttacctagtag

SEQ ID NO: 2104468 - DNA, 15 bp, Homo sapiens
tatttacctagtagt

SEQ ID NO: 2104469 - DNA, 15 bp, Homo sapiens
atttacctagtagtc

SEQ ID NO: 2104470 - DNA, 15 bp, Homo sapiens
tttacctagtagtca

SEQ ID NO: 2104471 - DNA, 15 bp, Homo sapiens
ttacctagtagtcat

SEQ ID NO: 2104472 - DNA, 15 bp, Homo sapiens
tacctagtagtcatt

SEQ ID NO: 2104473 - DNA, 15 bp, Homo sapiens
acctagtagtcattc

SEQ ID NO: 2104474 - DNA, 15 bp, Homo sapiens
cctagtagtcattca

SEQ ID NO: 2104475 - DNA, 15 bp, Homo sapiens
ctagtagtcattcaa

SEQ ID NO: 2104476 - DNA, 15 bp, Homo sapiens
tagtagtcattcaag

SEQ ID NO: 2104477 - DNA, 15 bp, Homo sapiens
agtagtcattcaaga

SEQ ID NO: 2104478 - DNA, 15 bp, Homo sapiens
gtagtcattcaagag

SEQ ID NO: 2104479 - DNA, 15 bp, Homo sapiens
tagtcattcaagaga

SEQ ID NO: 2104480 - DNA, 15 bp, Homo sapiens
agtcattcaagagaa

SEQ ID NO: 2104481 - DNA, 15 bp, Homo sapiens
gtcattcaagagaag

SEQ ID NO: 2104482 - DNA, 15 bp, Homo sapiens
tcattcaagagaagg

SEQ ID NO: 2104483 - DNA, 15 bp, Homo sapiens
cattcaagagaaggt

SEQ ID NO: 2104484 - DNA, 15 bp, Homo sapiens
attcaagagaaggtt

SEQ ID NO: 2104485 - DNA, 15 bp, Homo sapiens
ttcaagagaaggttg

SEQ ID NO: 2104486 - DNA, 15 bp, Homo sapiens
tcaagagaaggttgt

SEQ ID NO: 2104487 - DNA, 15 bp, Homo sapiens
caagagaaggttgtt

SEQ ID NO: 2104488 - DNA, 15 bp, Homo sapiens
aagagaaggttgttc

SEQ ID NO: 2104489 - DNA, 15 bp, Homo sapiens
agagaaggttgttca

SEQ ID NO: 2104490 - DNA, 15 bp, Homo sapiens
gagaaggttgttcag

SEQ ID NO: 2104491 - DNA, 15 bp, Homo sapiens
agaaggttgttcagt

SEQ ID NO: 2104492 - DNA, 15 bp, Homo sapiens
gaaggttgttcagtt

SEQ ID NO: 2104493 - DNA, 15 bp, Homo sapiens
aaggttgttcagttt

SEQ ID NO: 2104494 - DNA, 15 bp, Homo sapiens
aggttgttcagtttc

SEQ ID NO: 2104495 - DNA, 15 bp, Homo sapiens
ggttgttcagtttcc

SEQ ID NO: 2104496 - DNA, 15 bp, Homo sapiens
gttgttcagtttcca

SEQ ID NO: 2104497 - DNA, 15 bp, Homo sapiens
ttgttcagtttccat

SEQ ID NO: 2104498 - DNA, 15 bp, Homo sapiens
tgttcagtttccatg

SEQ ID NO: 2104499 - DNA, 15 bp, Homo sapiens
gttcagtttccatgt

SEQ ID NO: 2104500 - DNA, 15 bp, Homo sapiens
ttcagtttccatgta

SEQ ID NO: 2104501 - DNA, 15 bp, Homo sapiens
tcagtttccatgtag

SEQ ID NO: 2104502 - DNA, 15 bp, Homo sapiens
cagtttccatgtagt

SEQ ID NO: 2104503 - DNA, 15 bp, Homo sapiens
agtttccatgtagtt

SEQ ID NO: 2104504 - DNA, 15 bp, Homo sapiens
gtttccatgtagttg

SEQ ID NO: 2104505 - DNA, 15 bp, Homo sapiens
tttccatgtagttgt

SEQ ID NO: 2104506 - DNA, 15 bp, Homo sapiens
ttccatgtagttgtg

SEQ ID NO: 2104507 - DNA, 15 bp, Homo sapiens
tccatgtagttgtgt

SEQ ID NO: 2104508 - DNA, 15 bp, Homo sapiens
ccatgtagttgtgtg

SEQ ID NO: 2104509 - DNA, 15 bp, Homo sapiens
catgtagttgtgtgg

SEQ ID NO: 2104510 - DNA, 15 bp, Homo sapiens
atgtagttgtgtgga

SEQ ID NO: 2104511 - DNA, 15 bp, Homo sapiens
tgtagttgtgtggat

SEQ ID NO: 2104512 - DNA, 15 bp, Homo sapiens
gtagttgtgtggatt

SEQ ID NO: 2104513 - DNA, 15 bp, Homo sapiens
tagttgtgtggattt

SEQ ID NO: 2104514 - DNA, 15 bp, Homo sapiens
agttgtgtggatttg

SEQ ID NO: 2104515 - DNA, 15 bp, Homo sapiens
gttgtgtggatttga

SEQ ID NO: 2104516 - DNA, 15 bp, Homo sapiens
ttgtgtggatttgaa

SEQ ID NO: 2104517 - DNA, 15 bp, Homo sapiens
tgtgtggatttgaac

SEQ ID NO: 2104518 - DNA, 15 bp, Homo sapiens
gtgtggatttgaacg

SEQ ID NO: 2104519 - DNA, 15 bp, Homo sapiens
tgtggatttgaacga

SEQ ID NO: 2104520 - DNA, 15 bp, Homo sapiens
gtggatttgaacgag

SEQ ID NO: 2104521 - DNA, 15 bp, Homo sapiens
tggatttgaacgagt

SEQ ID NO: 2104522 - DNA, 15 bp, Homo sapiens
ggatttgaacgagtt

SEQ ID NO: 2104523 - DNA, 15 bp, Homo sapiens
gatttgaacgagttt

SEQ ID NO: 2104524 - DNA, 15 bp, Homo sapiens
atttgaacgagtttc

SEQ ID NO: 2104525 - DNA, 15 bp, Homo sapiens
tttgaacgagtttct

SEQ ID NO: 2104526 - DNA, 15 bp, Homo sapiens
ttgaacgagtttctg

SEQ ID NO: 2104527 - DNA, 15 bp, Homo sapiens
tgaacgagtttctga

SEQ ID NO: 2104528 - DNA, 15 bp, Homo sapiens
gaacgagtttctgaa

SEQ ID NO: 2104529 - DNA, 15 bp, Homo sapiens
aacgagtttctgaat

SEQ ID NO: 2104530 - DNA, 15 bp, Homo sapiens
acgagtttctgaatc

SEQ ID NO: 2104531 - DNA, 15 bp, Homo sapiens
cgagtttctgaatcc

SEQ ID NO: 2104532 - DNA, 15 bp, Homo sapiens
gagtttctgaatcct

SEQ ID NO: 2104533 - DNA, 15 bp, Homo sapiens
agtttctgaatcctg

SEQ ID NO: 2104534 - DNA, 15 bp, Homo sapiens
gtttctgaatcctga

SEQ ID NO: 2104535 - DNA, 15 bp, Homo sapiens
tttctgaatcctgag

SEQ ID NO: 2104536 - DNA, 15 bp, Homo sapiens
ttctgaatcctgagt

SEQ ID NO: 2104537 - DNA, 15 bp, Homo sapiens
tctgaatcctgagtt

SEQ ID NO: 2104538 - DNA, 15 bp, Homo sapiens
ctgaatcctgagttc

SEQ ID NO: 2104539 - DNA, 15 bp, Homo sapiens
tgaatcctgagttct

SEQ ID NO: 2104540 - DNA, 15 bp, Homo sapiens
gaatcctgagttcta

SEQ ID NO: 2104541 - DNA, 15 bp, Homo sapiens
aatcctgagttctaa

SEQ ID NO: 2104542 - DNA, 15 bp, Homo sapiens
atcctgagttctaat

SEQ ID NO: 2104543 - DNA, 15 bp, Homo sapiens
tcctgagttctaatt

SEQ ID NO: 2104544 - DNA, 15 bp, Homo sapiens
cctgagttctaattt

SEQ ID NO: 2104545 - DNA, 15 bp, Homo sapiens
ctgagttctaatttg

SEQ ID NO: 2104546 - DNA, 15 bp, Homo sapiens
tgagttctaatttga

SEQ ID NO: 2104547 - DNA, 15 bp, Homo sapiens
gagttctaatttgat

SEQ ID NO: 2104548 - DNA, 15 bp, Homo sapiens
agttctaatttgatt

SEQ ID NO: 2104549 - DNA, 15 bp, Homo sapiens
gttctaatttgattg

SEQ ID NO: 2104550 - DNA, 15 bp, Homo sapiens
ttctaatttgattgc

SEQ ID NO: 2104551 - DNA, 15 bp, Homo sapiens
tctaatttgattgca

SEQ ID NO: 2104552 - DNA, 15 bp, Homo sapiens
ctaatttgattgcac

SEQ ID NO: 2104553 - DNA, 15 bp, Homo sapiens
taatttgattgcact

SEQ ID NO: 2104554 - DNA, 15 bp, Homo sapiens
aatttgattgcactg

SEQ ID NO: 2104555 - DNA, 15 bp, Homo sapiens
atttgattgcactgt

SEQ ID NO: 2104556 - DNA, 15 bp, Homo sapiens
tttgattgcactgtg

SEQ ID NO: 2104557 - DNA, 15 bp, Homo sapiens
ttgattgcactgtgg

SEQ ID NO: 2104558 - DNA, 15 bp, Homo sapiens
tgattgcactgtggt

SEQ ID NO: 2104559 - DNA, 15 bp, Homo sapiens
gattgcactgtggtc

SEQ ID NO: 2104560 - DNA, 15 bp, Homo sapiens
attgcactgtggtct

SEQ ID NO: 2104561 - DNA, 15 bp, Homo sapiens
ttgcactgtggtctg

SEQ ID NO: 2104562 - DNA, 15 bp, Homo sapiens
tgcactgtggtctga

SEQ ID NO: 2104563 - DNA, 15 bp, Homo sapiens
gcactgtggtctgag

SEQ ID NO: 2104564 - DNA, 15 bp, Homo sapiens
cactgtggtctgaga

SEQ ID NO: 2104565 - DNA, 15 bp, Homo sapiens
actgtggtctgagag

SEQ ID NO: 2104566 - DNA, 15 bp, Homo sapiens
ctgtggtctgagaga

SEQ ID NO: 2104567 - DNA, 15 bp, Homo sapiens
tgtggtctgagagac

SEQ ID NO: 2104568 - DNA, 15 bp, Homo sapiens
gtggtctgagagact

SEQ ID NO: 2104569 - DNA, 15 bp, Homo sapiens
tggtctgagagactg

SEQ ID NO: 2104570 - DNA, 15 bp, Homo sapiens
ggtctgagagactgt

SEQ ID NO: 2104571 - DNA, 15 bp, Homo sapiens
gtctgagagactgtt

SEQ ID NO: 2104572 - DNA, 15 bp, Homo sapiens
tctgagagactgtta

SEQ ID NO: 2104573 - DNA, 15 bp, Homo sapiens
ctgagagactgttat

SEQ ID NO: 2104574 - DNA, 15 bp, Homo sapiens
tgagagactgttatg

SEQ ID NO: 2104575 - DNA, 15 bp, Homo sapiens
gagagactgttatga

SEQ ID NO: 2104576 - DNA, 15 bp, Homo sapiens
agagactgttatgat

SEQ ID NO: 2104577 - DNA, 15 bp, Homo sapiens
gagactgttatgata

SEQ ID NO: 2104578 - DNA, 15 bp, Homo sapiens
agactgttatgatat

SEQ ID NO: 2104579 - DNA, 15 bp, Homo sapiens
gactgttatgatatc

SEQ ID NO: 2104580 - DNA, 15 bp, Homo sapiens
actgttatgatatct

SEQ ID NO: 2104581 - DNA, 15 bp, Homo sapiens
ctgttatgatatctg

SEQ ID NO: 2104582 - DNA, 15 bp, Homo sapiens
tgttatgatatctgt

SEQ ID NO: 2104583 - DNA, 15 bp, Homo sapiens
gttatgatatctgtt

SEQ ID NO: 2104584 - DNA, 15 bp, Homo sapiens
ttatgatatctgttc

SEQ ID NO: 2104585 - DNA, 15 bp, Homo sapiens
tatgatatctgttct

SEQ ID NO: 2104586 - DNA, 15 bp, Homo sapiens
atgatatctgttctt

SEQ ID NO: 2104587 - DNA, 15 bp, Homo sapiens
tgatatctgttcttt

SEQ ID NO: 2104588 - DNA, 15 bp, Homo sapiens
gatatctgttctttt

SEQ ID NO: 2104589 - DNA, 15 bp, Homo sapiens
atatctgttcttttg

SEQ ID NO: 2104590 - DNA, 15 bp, Homo sapiens
tatctgttcttttgc

SEQ ID NO: 2104591 - DNA, 15 bp, Homo sapiens
atctgttcttttgcg

SEQ ID NO: 2104592 - DNA, 15 bp, Homo sapiens
tctgttcttttgcgt

SEQ ID NO: 2104593 - DNA, 15 bp, Homo sapiens
ctgttcttttgcgtt

SEQ ID NO: 2104594 - DNA, 15 bp, Homo sapiens
tgttcttttgcgttt

SEQ ID NO: 2104595 - DNA, 15 bp, Homo sapiens
gttcttttgcgtttg

SEQ ID NO: 2104596 - DNA, 15 bp, Homo sapiens
ttcttttgcgtttgc

SEQ ID NO: 2104597 - DNA, 15 bp, Homo sapiens
tcttttgcgtttgct

SEQ ID NO: 2104598 - DNA, 15 bp, Homo sapiens
cttttgcgtttgctg

SEQ ID NO: 2104599 - DNA, 15 bp, Homo sapiens
ttttgcgtttgctga

SEQ ID NO: 2104600 - DNA, 15 bp, Homo sapiens
tttgcgtttgctgag

SEQ ID NO: 2104601 - DNA, 15 bp, Homo sapiens
ttgcgtttgctgagg

SEQ ID NO: 2104602 - DNA, 15 bp, Homo sapiens
tgcgtttgctgagga

SEQ ID NO: 2104603 - DNA, 15 bp, Homo sapiens
gcgtttgctgaggag

SEQ ID NO: 2104604 - DNA, 15 bp, Homo sapiens
cgtttgctgaggagt

SEQ ID NO: 2104605 - DNA, 15 bp, Homo sapiens
gtttgctgaggagtg

SEQ ID NO: 2104606 - DNA, 15 bp, Homo sapiens
tttgctgaggagtgt

SEQ ID NO: 2104607 - DNA, 15 bp, Homo sapiens
ttgctgaggagtgtt

SEQ ID NO: 2104608 - DNA, 15 bp, Homo sapiens
tgctgaggagtgttt

SEQ ID NO: 2104609 - DNA, 15 bp, Homo sapiens
gctgaggagtgtttt

SEQ ID NO: 2104610 - DNA, 15 bp, Homo sapiens
ctgaggagtgtttta

SEQ ID NO: 2104611 - DNA, 15 bp, Homo sapiens
tgaggagtgttttac

SEQ ID NO: 2104612 - DNA, 15 bp, Homo sapiens
gaggagtgttttact

SEQ ID NO: 2104613 - DNA, 15 bp, Homo sapiens
aggagtgttttactt

SEQ ID NO: 2104614 - DNA, 15 bp, Homo sapiens
ggagtgttttacttc

SEQ ID NO: 2104615 - DNA, 15 bp, Homo sapiens
gagtgttttacttcc

SEQ ID NO: 2104616 - DNA, 15 bp, Homo sapiens
agtgttttacttcca

SEQ ID NO: 2104617 - DNA, 15 bp, Homo sapiens
gtgttttacttccaa

SEQ ID NO: 2104618 - DNA, 15 bp, Homo sapiens
tgttttacttccaac

SEQ ID NO: 2104619 - DNA, 15 bp, Homo sapiens
gttttacttccaact

SEQ ID NO: 2104620 - DNA, 15 bp, Homo sapiens
ttttacttccaacta

SEQ ID NO: 2104621 - DNA, 15 bp, Homo sapiens
tttacttccaactat

SEQ ID NO: 2104622 - DNA, 15 bp, Homo sapiens
ttacttccaactatg

SEQ ID NO: 2104623 - DNA, 15 bp, Homo sapiens
tacttccaactatgt

SEQ ID NO: 2104624 - DNA, 15 bp, Homo sapiens
acttccaactatgtg

SEQ ID NO: 2104625 - DNA, 15 bp, Homo sapiens
cttccaactatgtgg

SEQ ID NO: 2104626 - DNA, 15 bp, Homo sapiens
ttccaactatgtggt

SEQ ID NO: 2104627 - DNA, 15 bp, Homo sapiens
tccaactatgtggtc

SEQ ID NO: 2104628 - DNA, 15 bp, Homo sapiens
ccaactatgtggtca

SEQ ID NO: 2104629 - DNA, 15 bp, Homo sapiens
caactatgtggtcaa

SEQ ID NO: 2104630 - DNA, 15 bp, Homo sapiens
aactatgtggtcaac

SEQ ID NO: 2104631 - DNA, 15 bp, Homo sapiens
actatgtggtcaact

SEQ ID NO: 2104632 - DNA, 15 bp, Homo sapiens
ctatgtggtcaactt

SEQ ID NO: 2104633 - DNA, 15 bp, Homo sapiens
tatgtggtcaacttt

SEQ ID NO: 2104634 - DNA, 15 bp, Homo sapiens
atgtggtcaacttta

SEQ ID NO: 2104635 - DNA, 15 bp, Homo sapiens
tgtggtcaactttag

SEQ ID NO: 2104636 - DNA, 15 bp, Homo sapiens
gtggtcaactttaga

SEQ ID NO: 2104637 - DNA, 15 bp, Homo sapiens
tggtcaactttagaa

SEQ ID NO: 2104638 - DNA, 15 bp, Homo sapiens
ggtcaactttagaat

SEQ ID NO: 2104639 - DNA, 15 bp, Homo sapiens
gtcaactttagaata

SEQ ID NO: 2104640 - DNA, 15 bp, Homo sapiens
tcaactttagaataa

SEQ ID NO: 2104641 - DNA, 15 bp, Homo sapiens
caactttagaataag

SEQ ID NO: 2104642 - DNA, 15 bp, Homo sapiens
aactttagaataagt

SEQ ID NO: 2104643 - DNA, 15 bp, Homo sapiens
actttagaataagtg

SEQ ID NO: 2104644 - DNA, 15 bp, Homo sapiens
ctttagaataagtgc

SEQ ID NO: 2104645 - DNA, 15 bp, Homo sapiens
tttagaataagtgcc

SEQ ID NO: 2104646 - DNA, 15 bp, Homo sapiens
ttagaataagtgcca

SEQ ID NO: 2104647 - DNA, 15 bp, Homo sapiens
tagaataagtgccat

SEQ ID NO: 2104648 - DNA, 15 bp, Homo sapiens
agaataagtgccatg

SEQ ID NO: 2104649 - DNA, 15 bp, Homo sapiens
gaataagtgccatgt

SEQ ID NO: 2104650 - DNA, 15 bp, Homo sapiens
aataagtgccatgtg

SEQ ID NO: 2104651 - DNA, 15 bp, Homo sapiens
ataagtgccatgtgg

SEQ ID NO: 2104652 - DNA, 15 bp, Homo sapiens
taagtgccatgtggt

SEQ ID NO: 2104653 - DNA, 15 bp, Homo sapiens
aagtgccatgtggtg

SEQ ID NO: 2104654 - DNA, 15 bp, Homo sapiens
agtgccatgtggtgc

SEQ ID NO: 2104655 - DNA, 15 bp, Homo sapiens
gtgccatgtggtgct

SEQ ID NO: 2104656 - DNA, 15 bp, Homo sapiens
tgccatgtggtgctg

SEQ ID NO: 2104657 - DNA, 15 bp, Homo sapiens
gccatgtggtgctga

SEQ ID NO: 2104658 - DNA, 15 bp, Homo sapiens
ccatgtggtgctgag

SEQ ID NO: 2104659 - DNA, 15 bp, Homo sapiens
catgtggtgctgaga

SEQ ID NO: 2104660 - DNA, 15 bp, Homo sapiens
atgtggtgctgagaa

SEQ ID NO: 2104661 - DNA, 15 bp, Homo sapiens
tgtggtgctgagaag

SEQ ID NO: 2104662 - DNA, 15 bp, Homo sapiens
gtggtgctgagaaga

SEQ ID NO: 2104663 - DNA, 15 bp, Homo sapiens
tggtgctgagaagaa

SEQ ID NO: 2104664 - DNA, 15 bp, Homo sapiens
ggtgctgagaagaac

SEQ ID NO: 2104665 - DNA, 15 bp, Homo sapiens
gtgctgagaagaaca

SEQ ID NO: 2104666 - DNA, 15 bp, Homo sapiens
tgctgagaagaacat

SEQ ID NO: 2104667 - DNA, 15 bp, Homo sapiens
gctgagaagaacata

SEQ ID NO: 2104668 - DNA, 15 bp, Homo sapiens
ctgagaagaacatat

SEQ ID NO: 2104669 - DNA, 15 bp, Homo sapiens
tgagaagaacatata

SEQ ID NO: 2104670 - DNA, 15 bp, Homo sapiens
gagaagaacatatat

SEQ ID NO: 2104671 - DNA, 15 bp, Homo sapiens
agaagaacatatatt

SEQ ID NO: 2104672 - DNA, 15 bp, Homo sapiens
gaagaacatatattc

SEQ ID NO: 2104673 - DNA, 15 bp, Homo sapiens
aagaacatatattct

SEQ ID NO: 2104674 - DNA, 15 bp, Homo sapiens
agaacatatattctg

SEQ ID NO: 2104675 - DNA, 15 bp, Homo sapiens
gaacatatattctgt

SEQ ID NO: 2104676 - DNA, 15 bp, Homo sapiens
aacatatattctgtt

SEQ ID NO: 2104677 - DNA, 15 bp, Homo sapiens
acatatattctgttg

SEQ ID NO: 2104678 - DNA, 15 bp, Homo sapiens
catatattctgttga

SEQ ID NO: 2104679 - DNA, 15 bp, Homo sapiens
atatattctgttgat

SEQ ID NO: 2104680 - DNA, 15 bp, Homo sapiens
tatattctgttgatt

SEQ ID NO: 2104681 - DNA, 15 bp, Homo sapiens
atattctgttgattt

SEQ ID NO: 2104682 - DNA, 15 bp, Homo sapiens
tattctgttgatttt

SEQ ID NO: 2104683 - DNA, 15 bp, Homo sapiens
attctgttgattttt

SEQ ID NO: 2104684 - DNA, 15 bp, Homo sapiens
ttctgttgatttttg

SEQ ID NO: 2104685 - DNA, 15 bp, Homo sapiens
tctgttgatttttgt

SEQ ID NO: 2104686 - DNA, 15 bp, Homo sapiens
ctgttgatttttgtt

SEQ ID NO: 2104687 - DNA, 15 bp, Homo sapiens
tgttgatttttgttg

SEQ ID NO: 2104688 - DNA, 15 bp, Homo sapiens
gttgatttttgttgg

SEQ ID NO: 2104689 - DNA, 15 bp, Homo sapiens
ttgatttttgttgga

SEQ ID NO: 2104690 - DNA, 15 bp, Homo sapiens
tgatttttgttggag

SEQ ID NO: 2104691 - DNA, 15 bp, Homo sapiens
gatttttgttggaga

SEQ ID NO: 2104692 - DNA, 15 bp, Homo sapiens
atttttgttggagag

SEQ ID NO: 2104693 - DNA, 15 bp, Homo sapiens
tttttgttggagagt

SEQ ID NO: 2104694 - DNA, 15 bp, Homo sapiens
ttttgttggagagtt

SEQ ID NO: 2104695 - DNA, 15 bp, Homo sapiens
tttgttggagagttc

SEQ ID NO: 2104696 - DNA, 15 bp, Homo sapiens
ttgttggagagttct

SEQ ID NO: 2104697 - DNA, 15 bp, Homo sapiens
tgttggagagttctg

SEQ ID NO: 2104698 - DNA, 15 bp, Homo sapiens
gttggagagttctgt

SEQ ID NO: 2104699 - DNA, 15 bp, Homo sapiens
ttggagagttctgta

SEQ ID NO: 2104700 - DNA, 15 bp, Homo sapiens
tggagagttctgtag

SEQ ID NO: 2104701 - DNA, 15 bp, Homo sapiens
ggagagttctgtaga

SEQ ID NO: 2104702 - DNA, 15 bp, Homo sapiens
gagagttctgtagag

SEQ ID NO: 2104703 - DNA, 15 bp, Homo sapiens
agagttctgtagagg

SEQ ID NO: 2104704 - DNA, 15 bp, Homo sapiens
gagttctgtagaggt

SEQ ID NO: 2104705 - DNA, 15 bp, Homo sapiens
agttctgtagaggtc

SEQ ID NO: 2104706 - DNA, 15 bp, Homo sapiens
gttctgtagaggtct

SEQ ID NO: 2104707 - DNA, 15 bp, Homo sapiens
ttctgtagaggtcta

SEQ ID NO: 2104708 - DNA, 15 bp, Homo sapiens
tctgtagaggtctat

SEQ ID NO: 2104709 - DNA, 15 bp, Homo sapiens
ctgtagaggtctatt

SEQ ID NO: 2104710 - DNA, 15 bp, Homo sapiens
tgtagaggtctatta

SEQ ID NO: 2104711 - DNA, 15 bp, Homo sapiens
gtagaggtctattag

SEQ ID NO: 2104712 - DNA, 15 bp, Homo sapiens
tagaggtctattagt

SEQ ID NO: 2104713 - DNA, 15 bp, Homo sapiens
agaggtctattagtt

SEQ ID NO: 2104714 - DNA, 15 bp, Homo sapiens
gaggtctattagttc

SEQ ID NO: 2104715 - DNA, 15 bp, Homo sapiens
aggtctattagttct

SEQ ID NO: 2104716 - DNA, 15 bp, Homo sapiens
ggtctattagttctg

SEQ ID NO: 2104717 - DNA, 15 bp, Homo sapiens
gtctattagttctgc

SEQ ID NO: 2104718 - DNA, 15 bp, Homo sapiens
tctattagttctgct

SEQ ID NO: 2104719 - DNA, 15 bp, Homo sapiens
ctattagttctgctt

SEQ ID NO: 2104720 - DNA, 15 bp, Homo sapiens
tattagttctgcttg

SEQ ID NO: 2104721 - DNA, 15 bp, Homo sapiens
attagttctgcttgg

SEQ ID NO: 2104722 - DNA, 15 bp, Homo sapiens
ttagttctgcttggt

SEQ ID NO: 2104723 - DNA, 15 bp, Homo sapiens
tagttctgcttggtc

SEQ ID NO: 2104724 - DNA, 15 bp, Homo sapiens
agttctgcttggtcc

SEQ ID NO: 2104725 - DNA, 15 bp, Homo sapiens
gttctgcttggtcca

SEQ ID NO: 2104726 - DNA, 15 bp, Homo sapiens
ttctgcttggtccaa

SEQ ID NO: 2104727 - DNA, 15 bp, Homo sapiens
tctgcttggtccaaa

SEQ ID NO: 2104728 - DNA, 15 bp, Homo sapiens
ctgcttggtccaaag

SEQ ID NO: 2104729 - DNA, 15 bp, Homo sapiens
tgcttggtccaaagc

SEQ ID NO: 2104730 - DNA, 15 bp, Homo sapiens
gcttggtccaaagct

SEQ ID NO: 2104731 - DNA, 15 bp, Homo sapiens
cttggtccaaagctg

SEQ ID NO: 2104732 - DNA, 15 bp, Homo sapiens
ttggtccaaagctga

SEQ ID NO: 2104733 - DNA, 15 bp, Homo sapiens
tggtccaaagctgag

SEQ ID NO: 2104734 - DNA, 15 bp, Homo sapiens
ggtccaaagctgagt

SEQ ID NO: 2104735 - DNA, 15 bp, Homo sapiens
gtccaaagctgagtt

SEQ ID NO: 2104736 - DNA, 15 bp, Homo sapiens
tccaaagctgagttc

SEQ ID NO: 2104737 - DNA, 15 bp, Homo sapiens
ccaaagctgagttca

SEQ ID NO: 2104738 - DNA, 15 bp, Homo sapiens
caaagctgagttcaa

SEQ ID NO: 2104739 - DNA, 15 bp, Homo sapiens
aaagctgagttcaag

SEQ ID NO: 2104740 - DNA, 15 bp, Homo sapiens
aagctgagttcaagt

SEQ ID NO: 2104741 - DNA, 15 bp, Homo sapiens
agctgagttcaagtc

SEQ ID NO: 2104742 - DNA, 15 bp, Homo sapiens
gctgagttcaagtcc

SEQ ID NO: 2104743 - DNA, 15 bp, Homo sapiens
ctgagttcaagtcct

SEQ ID NO: 2104744 - DNA, 15 bp, Homo sapiens
tgagttcaagtcctg

SEQ ID NO: 2104745 - DNA, 15 bp, Homo sapiens
gagttcaagtcctga

SEQ ID NO: 2104746 - DNA, 15 bp, Homo sapiens
agttcaagtcctgaa

SEQ ID NO: 2104747 - DNA, 15 bp, Homo sapiens
gttcaagtcctgaat

SEQ ID NO: 2104748 - DNA, 15 bp, Homo sapiens
ttcaagtcctgaata

SEQ ID NO: 2104749 - DNA, 15 bp, Homo sapiens
tcaagtcctgaatat

SEQ ID NO: 2104750 - DNA, 15 bp, Homo sapiens
caagtcctgaatatc

SEQ ID NO: 2104751 - DNA, 15 bp, Homo sapiens
aagtcctgaatatcc

SEQ ID NO: 2104752 - DNA, 15 bp, Homo sapiens
agtcctgaatatcct

SEQ ID NO: 2104753 - DNA, 15 bp, Homo sapiens
gtcctgaatatcctt

SEQ ID NO: 2104754 - DNA, 15 bp, Homo sapiens
tcctgaatatccttg

SEQ ID NO: 2104755 - DNA, 15 bp, Homo sapiens
cctgaatatccttgt

SEQ ID NO: 2104756 - DNA, 15 bp, Homo sapiens
ctgaatatccttgtt

SEQ ID NO: 2104757 - DNA, 15 bp, Homo sapiens
tgaatatccttgtta

SEQ ID NO: 2104758 - DNA, 15 bp, Homo sapiens
gaatatccttgttaa

SEQ ID NO: 2104759 - DNA, 15 bp, Homo sapiens
aatatccttgttaat

SEQ ID NO: 2104760 - DNA, 15 bp, Homo sapiens
atatccttgttaatt

SEQ ID NO: 2104761 - DNA, 15 bp, Homo sapiens
tatccttgttaattt

SEQ ID NO: 2104762 - DNA, 15 bp, Homo sapiens
atccttgttaatttt

SEQ ID NO: 2104763 - DNA, 15 bp, Homo sapiens
tccttgttaattttc

SEQ ID NO: 2104764 - DNA, 15 bp, Homo sapiens
ccttgttaattttct

SEQ ID NO: 2104765 - DNA, 15 bp, Homo sapiens
cttgttaattttctg

SEQ ID NO: 2104766 - DNA, 15 bp, Homo sapiens
ttgttaattttctgt

SEQ ID NO: 2104767 - DNA, 15 bp, Homo sapiens
tgttaattttctgtc

SEQ ID NO: 2104768 - DNA, 15 bp, Homo sapiens
gttaattttctgtct

SEQ ID NO: 2104769 - DNA, 15 bp, Homo sapiens
ttaattttctgtctc

SEQ ID NO: 2104770 - DNA, 15 bp, Homo sapiens
taattttctgtctca

SEQ ID NO: 2104771 - DNA, 15 bp, Homo sapiens
aattttctgtctcat

SEQ ID NO: 2104772 - DNA, 15 bp, Homo sapiens
attttctgtctcatt

SEQ ID NO: 2104773 - DNA, 15 bp, Homo sapiens
ttttctgtctcattg

SEQ ID NO: 2104774 - DNA, 15 bp, Homo sapiens
tttctgtctcattga

SEQ ID NO: 2104775 - DNA, 15 bp, Homo sapiens
ttctgtctcattgat

SEQ ID NO: 2104776 - DNA, 15 bp, Homo sapiens
tctgtctcattgatc

SEQ ID NO: 2104777 - DNA, 15 bp, Homo sapiens
ctgtctcattgatct

SEQ ID NO: 2104778 - DNA, 15 bp, Homo sapiens
tgtctcattgatctg

SEQ ID NO: 2104779 - DNA, 15 bp, Homo sapiens
gtctcattgatctgt

SEQ ID NO: 2104780 - DNA, 15 bp, Homo sapiens
tctcattgatctgtt

SEQ ID NO: 2104781 - DNA, 15 bp, Homo sapiens
ctcattgatctgttt

SEQ ID NO: 2104782 - DNA, 15 bp, Homo sapiens
tcattgatctgttta

SEQ ID NO: 2104783 - DNA, 15 bp, Homo sapiens
cattgatctgtttaa

SEQ ID NO: 2104784 - DNA, 15 bp, Homo sapiens
attgatctgtttaat

SEQ ID NO: 2104785 - DNA, 15 bp, Homo sapiens
ttgatctgtttaata

SEQ ID NO: 2104786 - DNA, 15 bp, Homo sapiens
tgatctgtttaatat

SEQ ID NO: 2104787 - DNA, 15 bp, Homo sapiens
gatctgtttaatatt

SEQ ID NO: 2104788 - DNA, 15 bp, Homo sapiens
atctgtttaatattg

SEQ ID NO: 2104789 - DNA, 15 bp, Homo sapiens
tctgtttaatattga

SEQ ID NO: 2104790 - DNA, 15 bp, Homo sapiens
ctgtttaatattgac

SEQ ID NO: 2104791 - DNA, 15 bp, Homo sapiens
tgtttaatattgaca

SEQ ID NO: 2104792 - DNA, 15 bp, Homo sapiens
gtttaatattgacag

SEQ ID NO: 2104793 - DNA, 15 bp, Homo sapiens
tttaatattgacagt

SEQ ID NO: 2104794 - DNA, 15 bp, Homo sapiens
ttaatattgacagtg

SEQ ID NO: 2104795 - DNA, 15 bp, Homo sapiens
taatattgacagtgg

SEQ ID NO: 2104796 - DNA, 15 bp, Homo sapiens
aatattgacagtggg

SEQ ID NO: 2104797 - DNA, 15 bp, Homo sapiens
atattgacagtgggg

SEQ ID NO: 2104798 - DNA, 15 bp, Homo sapiens
tattgacagtggggt

SEQ ID NO: 2104799 - DNA, 15 bp, Homo sapiens
attgacagtggggtg

SEQ ID NO: 2104800 - DNA, 15 bp, Homo sapiens
ttgacagtggggtgt

SEQ ID NO: 2104801 - DNA, 15 bp, Homo sapiens
tgacagtggggtgtt

SEQ ID NO: 2104802 - DNA, 15 bp, Homo sapiens
gacagtggggtgtta

SEQ ID NO: 2104803 - DNA, 15 bp, Homo sapiens
acagtggggtgttaa

SEQ ID NO: 2104804 - DNA, 15 bp, Homo sapiens
cagtggggtgttaaa

SEQ ID NO: 2104805 - DNA, 15 bp, Homo sapiens
agtggggtgttaaaa

SEQ ID NO: 2104806 - DNA, 15 bp, Homo sapiens
gtggggtgttaaaat

SEQ ID NO: 2104807 - DNA, 15 bp, Homo sapiens
tggggtgttaaaatc

SEQ ID NO: 2104808 - DNA, 15 bp, Homo sapiens
ggggtgttaaaatct

SEQ ID NO: 2104809 - DNA, 15 bp, Homo sapiens
gggtgttaaaatctc

SEQ ID NO: 2104810 - DNA, 15 bp, Homo sapiens
ggtgttaaaatctcc

SEQ ID NO: 2104811 - DNA, 15 bp, Homo sapiens
gtgttaaaatctccc

SEQ ID NO: 2104812 - DNA, 15 bp, Homo sapiens
tgttaaaatctccca

SEQ ID NO: 2104813 - DNA, 15 bp, Homo sapiens
gttaaaatctcccac

SEQ ID NO: 2104814 - DNA, 15 bp, Homo sapiens
ttaaaatctcccact

SEQ ID NO: 2104815 - DNA, 15 bp, Homo sapiens
taaaatctcccacta

SEQ ID NO: 2104816 - DNA, 15 bp, Homo sapiens
aaaatctcccactat

SEQ ID NO: 2104817 - DNA, 15 bp, Homo sapiens
aaatctcccactatt

SEQ ID NO: 2104818 - DNA, 15 bp, Homo sapiens
aatctcccactatta

SEQ ID NO: 2104819 - DNA, 15 bp, Homo sapiens
atctcccactattat

SEQ ID NO: 2104820 - DNA, 15 bp, Homo sapiens
tctcccactattatc

SEQ ID NO: 2104821 - DNA, 15 bp, Homo sapiens
ctcccactattatca

SEQ ID NO: 2104822 - DNA, 15 bp, Homo sapiens
tcccactattatcat

SEQ ID NO: 2104823 - DNA, 15 bp, Homo sapiens
cccactattatcatg

SEQ ID NO: 2104824 - DNA, 15 bp, Homo sapiens
ccactattatcatgt

SEQ ID NO: 2104825 - DNA, 15 bp, Homo sapiens
cactattatcatgtg

SEQ ID NO: 2104826 - DNA, 15 bp, Homo sapiens
actattatcatgtgg

SEQ ID NO: 2104827 - DNA, 15 bp, Homo sapiens
ctattatcatgtggg

SEQ ID NO: 2104828 - DNA, 15 bp, Homo sapiens
tattatcatgtggga

SEQ ID NO: 2104829 - DNA, 15 bp, Homo sapiens
attatcatgtgggag

SEQ ID NO: 2104830 - DNA, 15 bp, Homo sapiens
ttatcatgtgggagt

SEQ ID NO: 2104831 - DNA, 15 bp, Homo sapiens
tatcatgtgggagtc

SEQ ID NO: 2104832 - DNA, 15 bp, Homo sapiens
atcatgtgggagtct

SEQ ID NO: 2104833 - DNA, 15 bp, Homo sapiens
tcatgtgggagtcta

SEQ ID NO: 2104834 - DNA, 15 bp, Homo sapiens
catgtgggagtctaa

SEQ ID NO: 2104835 - DNA, 15 bp, Homo sapiens
atgtgggagtctaag

SEQ ID NO: 2104836 - DNA, 15 bp, Homo sapiens
tgtgggagtctaagt

SEQ ID NO: 2104837 - DNA, 15 bp, Homo sapiens
gtgggagtctaagtc

SEQ ID NO: 2104838 - DNA, 15 bp, Homo sapiens
tgggagtctaagtct

SEQ ID NO: 2104839 - DNA, 15 bp, Homo sapiens
gggagtctaagtctc

SEQ ID NO: 2104840 - DNA, 15 bp, Homo sapiens
ggagtctaagtctct

SEQ ID NO: 2104841 - DNA, 15 bp, Homo sapiens
gagtctaagtctctt

SEQ ID NO: 2104842 - DNA, 15 bp, Homo sapiens
agtctaagtctcttt

SEQ ID NO: 2104843 - DNA, 15 bp, Homo sapiens
gtctaagtctctttg

SEQ ID NO: 2104844 - DNA, 15 bp, Homo sapiens
tctaagtctctttgt

SEQ ID NO: 2104845 - DNA, 15 bp, Homo sapiens
ctaagtctctttgtg

SEQ ID NO: 2104846 - DNA, 15 bp, Homo sapiens
taagtctctttgtgg

SEQ ID NO: 2104847 - DNA, 15 bp, Homo sapiens
aagtctctttgtggg

SEQ ID NO: 2104848 - DNA, 15 bp, Homo sapiens
agtctctttgtgggt

SEQ ID NO: 2104849 - DNA, 15 bp, Homo sapiens
gtctctttgtgggtc

SEQ ID NO: 2104850 - DNA, 15 bp, Homo sapiens
tctctttgtgggtct

SEQ ID NO: 2104851 - DNA, 15 bp, Homo sapiens
ctctttgtgggtctg

SEQ ID NO: 2104852 - DNA, 15 bp, Homo sapiens
tctttgtgggtctgt

SEQ ID NO: 2104853 - DNA, 15 bp, Homo sapiens
ctttgtgggtctgta

SEQ ID NO: 2104854 - DNA, 15 bp, Homo sapiens
tttgtgggtctgtaa

SEQ ID NO: 2104855 - DNA, 15 bp, Homo sapiens
ttgtgggtctgtaag

SEQ ID NO: 2104856 - DNA, 15 bp, Homo sapiens
tgtgggtctgtaaga

SEQ ID NO: 2104857 - DNA, 15 bp, Homo sapiens
gtgggtctgtaagaa

SEQ ID NO: 2104858 - DNA, 15 bp, Homo sapiens
tgggtctgtaagaac

SEQ ID NO: 2104859 - DNA, 15 bp, Homo sapiens
gggtctgtaagaact

SEQ ID NO: 2104860 - DNA, 15 bp, Homo sapiens
ggtctgtaagaactt

SEQ ID NO: 2104861 - DNA, 15 bp, Homo sapiens
gtctgtaagaacttg

SEQ ID NO: 2104862 - DNA, 15 bp, Homo sapiens
tctgtaagaacttgt

SEQ ID NO: 2104863 - DNA, 15 bp, Homo sapiens
ctgtaagaacttgtt

SEQ ID NO: 2104864 - DNA, 15 bp, Homo sapiens
tgtaagaacttgttt

SEQ ID NO: 2104865 - DNA, 15 bp, Homo sapiens
gtaagaacttgtttt

SEQ ID NO: 2104866 - DNA, 15 bp, Homo sapiens
taagaacttgtttta

SEQ ID NO: 2104867 - DNA, 15 bp, Homo sapiens
aagaacttgttttat

SEQ ID NO: 2104868 - DNA, 15 bp, Homo sapiens
agaacttgttttatg

SEQ ID NO: 2104869 - DNA, 15 bp, Homo sapiens
gaacttgttttatga

SEQ ID NO: 2104870 - DNA, 15 bp, Homo sapiens
aacttgttttatgaa

SEQ ID NO: 2104871 - DNA, 15 bp, Homo sapiens
acttgttttatgaat

SEQ ID NO: 2104872 - DNA, 15 bp, Homo sapiens
cttgttttatgaatc

SEQ ID NO: 2104873 - DNA, 15 bp, Homo sapiens
ttgttttatgaatct

SEQ ID NO: 2104874 - DNA, 15 bp, Homo sapiens
tgttttatgaatctg

SEQ ID NO: 2104875 - DNA, 15 bp, Homo sapiens
gttttatgaatctgg

SEQ ID NO: 2104876 - DNA, 15 bp, Homo sapiens
ttttatgaatctggg

SEQ ID NO: 2104877 - DNA, 15 bp, Homo sapiens
tttatgaatctgggt

SEQ ID NO: 2104878 - DNA, 15 bp, Homo sapiens
ttatgaatctgggtg

SEQ ID NO: 2104879 - DNA, 15 bp, Homo sapiens
tatgaatctgggtgc

SEQ ID NO: 2104880 - DNA, 15 bp, Homo sapiens
atgaatctgggtgct

SEQ ID NO: 2104881 - DNA, 15 bp, Homo sapiens
tgaatctgggtgctc

SEQ ID NO: 2104882 - DNA, 15 bp, Homo sapiens
gaatctgggtgctcc

SEQ ID NO: 2104883 - DNA, 15 bp, Homo sapiens
aatctgggtgctcct

SEQ ID NO: 2104884 - DNA, 15 bp, Homo sapiens
atctgggtgctcctg

SEQ ID NO: 2104885 - DNA, 15 bp, Homo sapiens
tctgggtgctcctgt

SEQ ID NO: 2104886 - DNA, 15 bp, Homo sapiens
ctgggtgctcctgta

SEQ ID NO: 2104887 - DNA, 15 bp, Homo sapiens
tgggtgctcctgtat

SEQ ID NO: 2104888 - DNA, 15 bp, Homo sapiens
gggtgctcctgtatt

SEQ ID NO: 2104889 - DNA, 15 bp, Homo sapiens
ggtgctcctgtattg

SEQ ID NO: 2104890 - DNA, 15 bp, Homo sapiens
gtgctcctgtattgg

SEQ ID NO: 2104891 - DNA, 15 bp, Homo sapiens
tgctcctgtattggg

SEQ ID NO: 2104892 - DNA, 15 bp, Homo sapiens
gctcctgtattgggt

SEQ ID NO: 2104893 - DNA, 15 bp, Homo sapiens
ctcctgtattgggtg

SEQ ID NO: 2104894 - DNA, 15 bp, Homo sapiens
tcctgtattgggtgc

SEQ ID NO: 2104895 - DNA, 15 bp, Homo sapiens
cctgtattgggtgca

SEQ ID NO: 2104896 - DNA, 15 bp, Homo sapiens
ctgtattgggtgcat

SEQ ID NO: 2104897 - DNA, 15 bp, Homo sapiens
tgtattgggtgcata

SEQ ID NO: 2104898 - DNA, 15 bp, Homo sapiens
gtattgggtgcatat

SEQ ID NO: 2104899 - DNA, 15 bp, Homo sapiens
tattgggtgcatata

SEQ ID NO: 2104900 - DNA, 15 bp, Homo sapiens
attgggtgcatatat

SEQ ID NO: 2104901 - DNA, 15 bp, Homo sapiens
ttgggtgcatatata

SEQ ID NO: 2104902 - DNA, 15 bp, Homo sapiens
tgggtgcatatatat

SEQ ID NO: 2104903 - DNA, 15 bp, Homo sapiens
gggtgcatatatatt

SEQ ID NO: 2104904 - DNA, 15 bp, Homo sapiens
ggtgcatatatattt

SEQ ID NO: 2104905 - DNA, 15 bp, Homo sapiens
gtgcatatatatttg

SEQ ID NO: 2104906 - DNA, 15 bp, Homo sapiens
tgcatatatatttgg

SEQ ID NO: 2104907 - DNA, 15 bp, Homo sapiens
gcatatatatttggg

SEQ ID NO: 2104908 - DNA, 15 bp, Homo sapiens
catatatatttggga

SEQ ID NO: 2104909 - DNA, 15 bp, Homo sapiens
atatatatttgggat

SEQ ID NO: 2104910 - DNA, 15 bp, Homo sapiens
tatatatttgggata

SEQ ID NO: 2104911 - DNA, 15 bp, Homo sapiens
atatatttgggataa

SEQ ID NO: 2104912 - DNA, 15 bp, Homo sapiens
tatatttgggataat

SEQ ID NO: 2104913 - DNA, 15 bp, Homo sapiens
atatttgggataatt

SEQ ID NO: 2104914 - DNA, 15 bp, Homo sapiens
tatttgggataatta

SEQ ID NO: 2104915 - DNA, 15 bp, Homo sapiens
atttgggataattag

SEQ ID NO: 2104916 - DNA, 15 bp, Homo sapiens
tttgggataattagc

SEQ ID NO: 2104917 - DNA, 15 bp, Homo sapiens
ttgggataattagct

SEQ ID NO: 2104918 - DNA, 15 bp, Homo sapiens
tgggataattagctc

SEQ ID NO: 2104919 - DNA, 15 bp, Homo sapiens
gggataattagctct

SEQ ID NO: 2104920 - DNA, 15 bp, Homo sapiens
ggataattagctctt

SEQ ID NO: 2104921 - DNA, 15 bp, Homo sapiens
gataattagctcttc

SEQ ID NO: 2104922 - DNA, 15 bp, Homo sapiens
ataattagctcttct

SEQ ID NO: 2104923 - DNA, 15 bp, Homo sapiens
taattagctcttctc

SEQ ID NO: 2104924 - DNA, 15 bp, Homo sapiens
aattagctcttctcg

SEQ ID NO: 2104925 - DNA, 15 bp, Homo sapiens
attagctcttctcgt

SEQ ID NO: 2104926 - DNA, 15 bp, Homo sapiens
ttagctcttctcgtt

SEQ ID NO: 2104927 - DNA, 15 bp, Homo sapiens
tagctcttctcgttg

SEQ ID NO: 2104928 - DNA, 15 bp, Homo sapiens
agctcttctcgttga

SEQ ID NO: 2104929 - DNA, 15 bp, Homo sapiens
gctcttctcgttgaa

SEQ ID NO: 2104930 - DNA, 15 bp, Homo sapiens
ctcttctcgttgaat

SEQ ID NO: 2104931 - DNA, 15 bp, Homo sapiens
tcttctcgttgaatt

SEQ ID NO: 2104932 - DNA, 15 bp, Homo sapiens
cttctcgttgaattg

SEQ ID NO: 2104933 - DNA, 15 bp, Homo sapiens
ttctcgttgaattga

SEQ ID NO: 2104934 - DNA, 15 bp, Homo sapiens
tctcgttgaattgat

SEQ ID NO: 2104935 - DNA, 15 bp, Homo sapiens
ctcgttgaattgatc

SEQ ID NO: 2104936 - DNA, 15 bp, Homo sapiens
tcgttgaattgatcc

SEQ ID NO: 2104937 - DNA, 15 bp, Homo sapiens
cgttgaattgatccc

SEQ ID NO: 2104938 - DNA, 15 bp, Homo sapiens
gttgaattgatccct

SEQ ID NO: 2104939 - DNA, 15 bp, Homo sapiens
ttgaattgatccctt

SEQ ID NO: 2104940 - DNA, 15 bp, Homo sapiens
tgaattgatcccttt

SEQ ID NO: 2104941 - DNA, 15 bp, Homo sapiens
gaattgatcccttta

SEQ ID NO: 2104942 - DNA, 15 bp, Homo sapiens
aattgatccctttac

SEQ ID NO: 2104943 - DNA, 15 bp, Homo sapiens
attgatccctttacc

SEQ ID NO: 2104944 - DNA, 15 bp, Homo sapiens
ttgatccctttacca

SEQ ID NO: 2104945 - DNA, 15 bp, Homo sapiens
tgatccctttaccat

SEQ ID NO: 2104946 - DNA, 15 bp, Homo sapiens
gatccctttaccatt

SEQ ID NO: 2104947 - DNA, 15 bp, Homo sapiens
atccctttaccatta

SEQ ID NO: 2104948 - DNA, 15 bp, Homo sapiens
tccctttaccattat

SEQ ID NO: 2104949 - DNA, 15 bp, Homo sapiens
ccctttaccattatg

SEQ ID NO: 2104950 - DNA, 15 bp, Homo sapiens
cctttaccattatgt

SEQ ID NO: 2104951 - DNA, 15 bp, Homo sapiens
ctttaccattatgta

SEQ ID NO: 2104952 - DNA, 15 bp, Homo sapiens
tttaccattatgtat

SEQ ID NO: 2104953 - DNA, 15 bp, Homo sapiens
ttaccattatgtatg

SEQ ID NO: 2104954 - DNA, 15 bp, Homo sapiens
taccattatgtatgt

SEQ ID NO: 2104955 - DNA, 15 bp, Homo sapiens
accattatgtatgtc

SEQ ID NO: 2104956 - DNA, 15 bp, Homo sapiens
ccattatgtatgtcc

SEQ ID NO: 2104957 - DNA, 15 bp, Homo sapiens
cattatgtatgtcct

SEQ ID NO: 2104958 - DNA, 15 bp, Homo sapiens
attatgtatgtcctt

SEQ ID NO: 2104959 - DNA, 15 bp, Homo sapiens
ttatgtatgtccttc

SEQ ID NO: 2104960 - DNA, 15 bp, Homo sapiens
tatgtatgtccttct

SEQ ID NO: 2104961 - DNA, 15 bp, Homo sapiens
atgtatgtccttctt

SEQ ID NO: 2104962 - DNA, 15 bp, Homo sapiens
tgtatgtccttcttt

SEQ ID NO: 2104963 - DNA, 15 bp, Homo sapiens
gtatgtccttctttg

SEQ ID NO: 2104964 - DNA, 15 bp, Homo sapiens
tatgtccttctttgt

SEQ ID NO: 2104965 - DNA, 15 bp, Homo sapiens
atgtccttctttgtc

SEQ ID NO: 2104966 - DNA, 15 bp, Homo sapiens
tgtccttctttgtct

SEQ ID NO: 2104967 - DNA, 15 bp, Homo sapiens
gtccttctttgtctc

SEQ ID NO: 2104968 - DNA, 15 bp, Homo sapiens
tccttctttgtctct

SEQ ID NO: 2104969 - DNA, 15 bp, Homo sapiens
ccttctttgtctctt

SEQ ID NO: 2104970 - DNA, 15 bp, Homo sapiens
cttctttgtctcttt

SEQ ID NO: 2104971 - DNA, 15 bp, Homo sapiens
ttctttgtctctttt

SEQ ID NO: 2104972 - DNA, 15 bp, Homo sapiens
tctttgtctcttttg

SEQ ID NO: 2104973 - DNA, 15 bp, Homo sapiens
ctttgtctcttttga

SEQ ID NO: 2104974 - DNA, 15 bp, Homo sapiens
tttgtctcttttgat

SEQ ID NO: 2104975 - DNA, 15 bp, Homo sapiens
ttgtctcttttgata

SEQ ID NO: 2104976 - DNA, 15 bp, Homo sapiens
tgtctcttttgatat

SEQ ID NO: 2104977 - DNA, 15 bp, Homo sapiens
gtctcttttgatatt

SEQ ID NO: 2104978 - DNA, 15 bp, Homo sapiens
tctcttttgatattt

SEQ ID NO: 2104979 - DNA, 15 bp, Homo sapiens
ctcttttgatatttg

SEQ ID NO: 2104980 - DNA, 15 bp, Homo sapiens
tcttttgatatttgt

SEQ ID NO: 2104981 - DNA, 15 bp, Homo sapiens
cttttgatatttgtt

SEQ ID NO: 2104982 - DNA, 15 bp, Homo sapiens
ttttgatatttgttg

SEQ ID NO: 2104983 - DNA, 15 bp, Homo sapiens
tttgatatttgttga

SEQ ID NO: 2104984 - DNA, 15 bp, Homo sapiens
ttgatatttgttgat

SEQ ID NO: 2104985 - DNA, 15 bp, Homo sapiens
tgatatttgttgatt

SEQ ID NO: 2104986 - DNA, 15 bp, Homo sapiens
gatatttgttgattt

SEQ ID NO: 2104987 - DNA, 15 bp, Homo sapiens
atatttgttgattta

SEQ ID NO: 2104988 - DNA, 15 bp, Homo sapiens
tatttgttgatttaa

SEQ ID NO: 2104989 - DNA, 15 bp, Homo sapiens
atttgttgatttaaa

SEQ ID NO: 2104990 - DNA, 15 bp, Homo sapiens
tttgttgatttaaat

SEQ ID NO: 2104991 - DNA, 15 bp, Homo sapiens
ttgttgatttaaatt

SEQ ID NO: 2104992 - DNA, 15 bp, Homo sapiens
tgttgatttaaattc

SEQ ID NO: 2104993 - DNA, 15 bp, Homo sapiens
gttgatttaaattct

SEQ ID NO: 2104994 - DNA, 15 bp, Homo sapiens
ttgatttaaattctg

SEQ ID NO: 2104995 - DNA, 15 bp, Homo sapiens
tgatttaaattctgt

SEQ ID NO: 2104996 - DNA, 15 bp, Homo sapiens
gatttaaattctgtt

SEQ ID NO: 2104997 - DNA, 15 bp, Homo sapiens
atttaaattctgttt

SEQ ID NO: 2104998 - DNA, 15 bp, Homo sapiens
tttaaattctgtttt

SEQ ID NO: 2104999 - DNA, 15 bp, Homo sapiens
ttaaattctgtttta

SEQ ID NO: 2105000 - DNA, 15 bp, Homo sapiens
taaattctgttttat

SEQ ID NO: 2105001 - DNA, 15 bp, Homo sapiens
aaattctgttttatc

SEQ ID NO: 2105002 - DNA, 15 bp, Homo sapiens
aattctgttttatca

SEQ ID NO: 2105003 - DNA, 15 bp, Homo sapiens
attctgttttatcag

SEQ ID NO: 2105004 - DNA, 15 bp, Homo sapiens
ttctgttttatcaga

SEQ ID NO: 2105005 - DNA, 15 bp, Homo sapiens
tctgttttatcagag

SEQ ID NO: 2105006 - DNA, 15 bp, Homo sapiens
ctgttttatcagagg

SEQ ID NO: 2105007 - DNA, 15 bp, Homo sapiens
tgttttatcagaggc

SEQ ID NO: 2105008 - DNA, 15 bp, Homo sapiens
gttttatcagaggct

SEQ ID NO: 2105009 - DNA, 15 bp, Homo sapiens
ttttatcagaggcta

SEQ ID NO: 2105010 - DNA, 15 bp, Homo sapiens
tttatcagaggctag

SEQ ID NO: 2105011 - DNA, 15 bp, Homo sapiens
ttatcagaggctagg

SEQ ID NO: 2105012 - DNA, 15 bp, Homo sapiens
tatcagaggctagga

SEQ ID NO: 2105013 - DNA, 15 bp, Homo sapiens
atcagaggctaggat

SEQ ID NO: 2105014 - DNA, 15 bp, Homo sapiens
tcagaggctaggatt

SEQ ID NO: 2105015 - DNA, 15 bp, Homo sapiens
cagaggctaggattg

SEQ ID NO: 2105016 - DNA, 15 bp, Homo sapiens
agaggctaggattgc

SEQ ID NO: 2105017 - DNA, 15 bp, Homo sapiens
gaggctaggattgca

SEQ ID NO: 2105018 - DNA, 15 bp, Homo sapiens
aggctaggattgcaa

SEQ ID NO: 2105019 - DNA, 15 bp, Homo sapiens
ggctaggattgcaac

SEQ ID NO: 2105020 - DNA, 15 bp, Homo sapiens
gctaggattgcaacc

SEQ ID NO: 2105021 - DNA, 15 bp, Homo sapiens
ctaggattgcaaccc

SEQ ID NO: 2105022 - DNA, 15 bp, Homo sapiens
taggattgcaaccca

SEQ ID NO: 2105023 - DNA, 15 bp, Homo sapiens
aggattgcaacccat

SEQ ID NO: 2105024 - DNA, 15 bp, Homo sapiens
ggattgcaacccatg

SEQ ID NO: 2105025 - DNA, 15 bp, Homo sapiens
gattgcaacccatgg

SEQ ID NO: 2105026 - DNA, 15 bp, Homo sapiens
attgcaacccatggt

SEQ ID NO: 2105027 - DNA, 15 bp, Homo sapiens
ttgcaacccatggtt

SEQ ID NO: 2105028 - DNA, 15 bp, Homo sapiens
tgcaacccatggttt

SEQ ID NO: 2105029 - DNA, 15 bp, Homo sapiens
gcaacccatggtttt

SEQ ID NO: 2105030 - DNA, 15 bp, Homo sapiens
caacccatggttttc

SEQ ID NO: 2105031 - DNA, 15 bp, Homo sapiens
aacccatggttttct

SEQ ID NO: 2105032 - DNA, 15 bp, Homo sapiens
acccatggttttctt

SEQ ID NO: 2105033 - DNA, 15 bp, Homo sapiens
cccatggttttcttt

SEQ ID NO: 2105034 - DNA, 15 bp, Homo sapiens
ccatggttttctttt

SEQ ID NO: 2105035 - DNA, 15 bp, Homo sapiens
catggttttcttttt

SEQ ID NO: 2105036 - DNA, 15 bp, Homo sapiens
atggttttctttttt

SEQ ID NO: 2105037 - DNA, 15 bp, Homo sapiens
tggttttcttttttt

SEQ ID NO: 2105038 - DNA, 15 bp, Homo sapiens
ggttttctttttttg

SEQ ID NO: 2105039 - DNA, 15 bp, Homo sapiens
gttttctttttttgt

SEQ ID NO: 2105040 - DNA, 15 bp, Homo sapiens
tttctttttttgttt

SEQ ID NO: 2105041 - DNA, 15 bp, Homo sapiens
ttctttttttgtttg

SEQ ID NO: 2105042 - DNA, 15 bp, Homo sapiens
tctttttttgtttgt

SEQ ID NO: 2105043 - DNA, 15 bp, Homo sapiens
ttttgtttgtttttt

SEQ ID NO: 2105044 - DNA, 15 bp, Homo sapiens
ttgtttgttttttgt

SEQ ID NO: 2105045 - DNA, 15 bp, Homo sapiens
tgtttgttttttgtt

SEQ ID NO: 2105046 - DNA, 15 bp, Homo sapiens
gtttgttttttgttt

SEQ ID NO: 2105047 - DNA, 15 bp, Homo sapiens
ttgttttttgttttg

SEQ ID NO: 2105048 - DNA, 15 bp, Homo sapiens
tgttttttgttttgt

SEQ ID NO: 2105049 - DNA, 15 bp, Homo sapiens
gttttttgttttgtt

SEQ ID NO: 2105050 - DNA, 15 bp, Homo sapiens
tttgttttgttttct

SEQ ID NO: 2105051 - DNA, 15 bp, Homo sapiens
ttgttttgttttcta

SEQ ID NO: 2105052 - DNA, 15 bp, Homo sapiens
tgttttgttttctat

SEQ ID NO: 2105053 - DNA, 15 bp, Homo sapiens
gttttgttttctatt

SEQ ID NO: 2105054 - DNA, 15 bp, Homo sapiens
ttttgttttctattt

SEQ ID NO: 2105055 - DNA, 15 bp, Homo sapiens
tttgttttctatttt

SEQ ID NO: 2105056 - DNA, 15 bp, Homo sapiens
ttgttttctattttc

SEQ ID NO: 2105057 - DNA, 15 bp, Homo sapiens
tgttttctattttct

SEQ ID NO: 2105058 - DNA, 15 bp, Homo sapiens
gttttctattttctt

SEQ ID NO: 2105059 - DNA, 15 bp, Homo sapiens
ttttctattttcttg

SEQ ID NO: 2105060 - DNA, 15 bp, Homo sapiens
tttctattttcttgg

SEQ ID NO: 2105061 - DNA, 15 bp, Homo sapiens
ttctattttcttggt

SEQ ID NO: 2105062 - DNA, 15 bp, Homo sapiens
tctattttcttggta

SEQ ID NO: 2105063 - DNA, 15 bp, Homo sapiens
ctattttcttggtaa

SEQ ID NO: 2105064 - DNA, 15 bp, Homo sapiens
tattttcttggtaaa

SEQ ID NO: 2105065 - DNA, 15 bp, Homo sapiens
attttcttggtaaat

SEQ ID NO: 2105066 - DNA, 15 bp, Homo sapiens
ttttcttggtaaata

SEQ ID NO: 2105067 - DNA, 15 bp, Homo sapiens
tttcttggtaaatat

SEQ ID NO: 2105068 - DNA, 15 bp, Homo sapiens
ttcttggtaaatatt

SEQ ID NO: 2105069 - DNA, 15 bp, Homo sapiens
tcttggtaaatattc

SEQ ID NO: 2105070 - DNA, 15 bp, Homo sapiens
cttggtaaatattcc

SEQ ID NO: 2105071 - DNA, 15 bp, Homo sapiens
ttggtaaatattcct

SEQ ID NO: 2105072 - DNA, 15 bp, Homo sapiens
tggtaaatattcctc

SEQ ID NO: 2105073 - DNA, 15 bp, Homo sapiens
ggtaaatattcctcc

SEQ ID NO: 2105074 - DNA, 15 bp, Homo sapiens
gtaaatattcctcca

SEQ ID NO: 2105075 - DNA, 15 bp, Homo sapiens
taaatattcctccat

SEQ ID NO: 2105076 - DNA, 15 bp, Homo sapiens
aaatattcctccatc

SEQ ID NO: 2105077 - DNA, 15 bp, Homo sapiens
aatattcctccatcc

SEQ ID NO: 2105078 - DNA, 15 bp, Homo sapiens
atattcctccatccc

SEQ ID NO: 2105079 - DNA, 15 bp, Homo sapiens
ttcctccatcccttt

SEQ ID NO: 2105080 - DNA, 15 bp, Homo sapiens
tcctccatcccttta

SEQ ID NO: 2105081 - DNA, 15 bp, Homo sapiens
cctccatccctttat

SEQ ID NO: 2105082 - DNA, 15 bp, Homo sapiens
ctccatccctttatt

SEQ ID NO: 2105083 - DNA, 15 bp, Homo sapiens
tccatccctttattt

SEQ ID NO: 2105084 - DNA, 15 bp, Homo sapiens
ccatccctttatttt

SEQ ID NO: 2105085 - DNA, 15 bp, Homo sapiens
catccctttattttg

SEQ ID NO: 2105086 - DNA, 15 bp, Homo sapiens
atccctttattttga

SEQ ID NO: 2105087 - DNA, 15 bp, Homo sapiens
tccctttattttgag

SEQ ID NO: 2105088 - DNA, 15 bp, Homo sapiens
ccctttattttgagc

SEQ ID NO: 2105089 - DNA, 15 bp, Homo sapiens
cctttattttgagcc

SEQ ID NO: 2105090 - DNA, 15 bp, Homo sapiens
ctttattttgagcct

SEQ ID NO: 2105091 - DNA, 15 bp, Homo sapiens
tttattttgagccta

SEQ ID NO: 2105092 - DNA, 15 bp, Homo sapiens
ttattttgagcctat

SEQ ID NO: 2105093 - DNA, 15 bp, Homo sapiens
tattttgagcctatg

SEQ ID NO: 2105094 - DNA, 15 bp, Homo sapiens
attttgagcctatgt

SEQ ID NO: 2105095 - DNA, 15 bp, Homo sapiens
ttttgagcctatgtg

SEQ ID NO: 2105096 - DNA, 15 bp, Homo sapiens
tttgagcctatgtgt

SEQ ID NO: 2105097 - DNA, 15 bp, Homo sapiens
ttgagcctatgtgtg

SEQ ID NO: 2105098 - DNA, 15 bp, Homo sapiens
tgagcctatgtgtgt

SEQ ID NO: 2105099 - DNA, 15 bp, Homo sapiens
gagcctatgtgtgtc

SEQ ID NO: 2105100 - DNA, 15 bp, Homo sapiens
agcctatgtgtgtct

SEQ ID NO: 2105101 - DNA, 15 bp, Homo sapiens
gcctatgtgtgtctt

SEQ ID NO: 2105102 - DNA, 15 bp, Homo sapiens
cctatgtgtgtcttt

SEQ ID NO: 2105103 - DNA, 15 bp, Homo sapiens
ctatgtgtgtctttg

SEQ ID NO: 2105104 - DNA, 15 bp, Homo sapiens
tatgtgtgtctttgc

SEQ ID NO: 2105105 - DNA, 15 bp, Homo sapiens
atgtgtgtctttgca

SEQ ID NO: 2105106 - DNA, 15 bp, Homo sapiens
tgtgtgtctttgcac

SEQ ID NO: 2105107 - DNA, 15 bp, Homo sapiens
gtgtgtctttgcaca

SEQ ID NO: 2105108 - DNA, 15 bp, Homo sapiens
tgtgtctttgcacat

SEQ ID NO: 2105109 - DNA, 15 bp, Homo sapiens
gtgtctttgcacatg

SEQ ID NO: 2105110 - DNA, 15 bp, Homo sapiens
tgtctttgcacatga

SEQ ID NO: 2105111 - DNA, 15 bp, Homo sapiens
gtctttgcacatgag

SEQ ID NO: 2105112 - DNA, 15 bp, Homo sapiens
tctttgcacatgaga

SEQ ID NO: 2105113 - DNA, 15 bp, Homo sapiens
ctttgcacatgagat

SEQ ID NO: 2105114 - DNA, 15 bp, Homo sapiens
tttgcacatgagatg

SEQ ID NO: 2105115 - DNA, 15 bp, Homo sapiens
ttgcacatgagatgg

SEQ ID NO: 2105116 - DNA, 15 bp, Homo sapiens
tgcacatgagatggg

SEQ ID NO: 2105117 - DNA, 15 bp, Homo sapiens
gcacatgagatgggt

SEQ ID NO: 2105118 - DNA, 15 bp, Homo sapiens
cacatgagatgggtc

SEQ ID NO: 2105119 - DNA, 15 bp, Homo sapiens
acatgagatgggtct

SEQ ID NO: 2105120 - DNA, 15 bp, Homo sapiens
catgagatgggtctc

SEQ ID NO: 2105121 - DNA, 15 bp, Homo sapiens
atgagatgggtctcc

SEQ ID NO: 2105122 - DNA, 15 bp, Homo sapiens
tgagatgggtctcct

SEQ ID NO: 2105123 - DNA, 15 bp, Homo sapiens
gagatgggtctcctg

SEQ ID NO: 2105124 - DNA, 15 bp, Homo sapiens
agatgggtctcctga

SEQ ID NO: 2105125 - DNA, 15 bp, Homo sapiens
gatgggtctcctgaa

SEQ ID NO: 2105126 - DNA, 15 bp, Homo sapiens
atgggtctcctgaat

SEQ ID NO: 2105127 - DNA, 15 bp, Homo sapiens
tgggtctcctgaata

SEQ ID NO: 2105128 - DNA, 15 bp, Homo sapiens
gggtctcctgaatac

SEQ ID NO: 2105129 - DNA, 15 bp, Homo sapiens
ggtctcctgaataca

SEQ ID NO: 2105130 - DNA, 15 bp, Homo sapiens
gtctcctgaatacag

SEQ ID NO: 2105131 - DNA, 15 bp, Homo sapiens
tctcctgaatacagc

SEQ ID NO: 2105132 - DNA, 15 bp, Homo sapiens
ctcctgaatacagca

SEQ ID NO: 2105133 - DNA, 15 bp, Homo sapiens
tcctgaatacagcac

SEQ ID NO: 2105134 - DNA, 15 bp, Homo sapiens
cctgaatacagcaca

SEQ ID NO: 2105135 - DNA, 15 bp, Homo sapiens
ctgaatacagcacac

SEQ ID NO: 2105136 - DNA, 15 bp, Homo sapiens
tgaatacagcacact

SEQ ID NO: 2105137 - DNA, 15 bp, Homo sapiens
gaatacagcacactg

SEQ ID NO: 2105138 - DNA, 15 bp, Homo sapiens
aatacagcacactga

SEQ ID NO: 2105139 - DNA, 15 bp, Homo sapiens
atacagcacactgat

SEQ ID NO: 2105140 - DNA, 15 bp, Homo sapiens
tacagcacactgatg

SEQ ID NO: 2105141 - DNA, 15 bp, Homo sapiens
acagcacactgatgg

SEQ ID NO: 2105142 - DNA, 15 bp, Homo sapiens
cagcacactgatggc

SEQ ID NO: 2105143 - DNA, 15 bp, Homo sapiens
agcacactgatggct

SEQ ID NO: 2105144 - DNA, 15 bp, Homo sapiens
gcacactgatggctt

SEQ ID NO: 2105145 - DNA, 15 bp, Homo sapiens
cacactgatggcttt

SEQ ID NO: 2105146 - DNA, 15 bp, Homo sapiens
acactgatggctttt

SEQ ID NO: 2105147 - DNA, 15 bp, Homo sapiens
cactgatggcttttg

SEQ ID NO: 2105148 - DNA, 15 bp, Homo sapiens
actgatggcttttga

SEQ ID NO: 2105149 - DNA, 15 bp, Homo sapiens
ctgatggcttttgac

SEQ ID NO: 2105150 - DNA, 15 bp, Homo sapiens
tgatggcttttgact

SEQ ID NO: 2105151 - DNA, 15 bp, Homo sapiens
gatggcttttgactc

SEQ ID NO: 2105152 - DNA, 15 bp, Homo sapiens
atggcttttgactct

SEQ ID NO: 2105153 - DNA, 15 bp, Homo sapiens
tggcttttgactctt

SEQ ID NO: 2105154 - DNA, 15 bp, Homo sapiens
ggcttttgactcttt

SEQ ID NO: 2105155 - DNA, 15 bp, Homo sapiens
gcttttgactcttta

SEQ ID NO: 2105156 - DNA, 15 bp, Homo sapiens
cttttgactctttat

SEQ ID NO: 2105157 - DNA, 15 bp, Homo sapiens
ttttgactctttatc

SEQ ID NO: 2105158 - DNA, 15 bp, Homo sapiens
tttgactctttatcc

SEQ ID NO: 2105159 - DNA, 15 bp, Homo sapiens
ttgactctttatcca

SEQ ID NO: 2105160 - DNA, 15 bp, Homo sapiens
tgactctttatccaa

SEQ ID NO: 2105161 - DNA, 15 bp, Homo sapiens
gactctttatccaat

SEQ ID NO: 2105162 - DNA, 15 bp, Homo sapiens
actctttatccaatt

SEQ ID NO: 2105163 - DNA, 15 bp, Homo sapiens
ctctttatccaattt

SEQ ID NO: 2105164 - DNA, 15 bp, Homo sapiens
tctttatccaatttg

SEQ ID NO: 2105165 - DNA, 15 bp, Homo sapiens
ctttatccaatttgt

SEQ ID NO: 2105166 - DNA, 15 bp, Homo sapiens
tttatccaatttgtt

SEQ ID NO: 2105167 - DNA, 15 bp, Homo sapiens
ttatccaatttgtta

SEQ ID NO: 2105168 - DNA, 15 bp, Homo sapiens
tatccaatttgttag

SEQ ID NO: 2105169 - DNA, 15 bp, Homo sapiens
atccaatttgttagt

SEQ ID NO: 2105170 - DNA, 15 bp, Homo sapiens
tccaatttgttagtc

SEQ ID NO: 2105171 - DNA, 15 bp, Homo sapiens
ccaatttgttagtct

SEQ ID NO: 2105172 - DNA, 15 bp, Homo sapiens
caatttgttagtcta

SEQ ID NO: 2105173 - DNA, 15 bp, Homo sapiens
aatttgttagtctat

SEQ ID NO: 2105174 - DNA, 15 bp, Homo sapiens
atttgttagtctatg

SEQ ID NO: 2105175 - DNA, 15 bp, Homo sapiens
tttgttagtctatgt

SEQ ID NO: 2105176 - DNA, 15 bp, Homo sapiens
ttgttagtctatgtc

SEQ ID NO: 2105177 - DNA, 15 bp, Homo sapiens
tgttagtctatgtct

SEQ ID NO: 2105178 - DNA, 15 bp, Homo sapiens
gttagtctatgtctt

SEQ ID NO: 2105179 - DNA, 15 bp, Homo sapiens
ttagtctatgtcttt

SEQ ID NO: 2105180 - DNA, 15 bp, Homo sapiens
tagtctatgtctttt

SEQ ID NO: 2105181 - DNA, 15 bp, Homo sapiens
agtctatgtctttta

SEQ ID NO: 2105182 - DNA, 15 bp, Homo sapiens
gtctatgtcttttaa

SEQ ID NO: 2105183 - DNA, 15 bp, Homo sapiens
tctatgtcttttaat

SEQ ID NO: 2105184 - DNA, 15 bp, Homo sapiens
ctatgtcttttaatt

SEQ ID NO: 2105185 - DNA, 15 bp, Homo sapiens
tatgtcttttaattg

SEQ ID NO: 2105186 - DNA, 15 bp, Homo sapiens
atgtcttttaattgg

SEQ ID NO: 2105187 - DNA, 15 bp, Homo sapiens
tgtcttttaattggg

SEQ ID NO: 2105188 - DNA, 15 bp, Homo sapiens
gtcttttaattgggg

SEQ ID NO: 2105189 - DNA, 15 bp, Homo sapiens
tcttttaattggggc

SEQ ID NO: 2105190 - DNA, 15 bp, Homo sapiens
cttttaattggggca

SEQ ID NO: 2105191 - DNA, 15 bp, Homo sapiens
ttttaattggggcac

SEQ ID NO: 2105192 - DNA, 15 bp, Homo sapiens
tttaattggggcact

SEQ ID NO: 2105193 - DNA, 15 bp, Homo sapiens
ttaattggggcactt

SEQ ID NO: 2105194 - DNA, 15 bp, Homo sapiens
taattggggcactta

SEQ ID NO: 2105195 - DNA, 15 bp, Homo sapiens
aattggggcacttag

SEQ ID NO: 2105196 - DNA, 15 bp, Homo sapiens
attggggcacttagc

SEQ ID NO: 2105197 - DNA, 15 bp, Homo sapiens
ttggggcacttagcc

SEQ ID NO: 2105198 - DNA, 15 bp, Homo sapiens
tggggcacttagcct

SEQ ID NO: 2105199 - DNA, 15 bp, Homo sapiens
ggggcacttagcctg

SEQ ID NO: 2105200 - DNA, 15 bp, Homo sapiens
gggcacttagcctgt

SEQ ID NO: 2105201 - DNA, 15 bp, Homo sapiens
ggcacttagcctgtt

SEQ ID NO: 2105202 - DNA, 15 bp, Homo sapiens
gcacttagcctgttt

SEQ ID NO: 2105203 - DNA, 15 bp, Homo sapiens
cacttagcctgttta

SEQ ID NO: 2105204 - DNA, 15 bp, Homo sapiens
acttagcctgtttac

SEQ ID NO: 2105205 - DNA, 15 bp, Homo sapiens
cttagcctgtttaca

SEQ ID NO: 2105206 - DNA, 15 bp, Homo sapiens
ttagcctgtttacat

SEQ ID NO: 2105207 - DNA, 15 bp, Homo sapiens
tagcctgtttacatt

SEQ ID NO: 2105208 - DNA, 15 bp, Homo sapiens
agcctgtttacattt

SEQ ID NO: 2105209 - DNA, 15 bp, Homo sapiens
gcctgtttacattta

SEQ ID NO: 2105210 - DNA, 15 bp, Homo sapiens
cctgtttacatttaa

SEQ ID NO: 2105211 - DNA, 15 bp, Homo sapiens
ctgtttacatttaag

SEQ ID NO: 2105212 - DNA, 15 bp, Homo sapiens
tgtttacatttaagg

SEQ ID NO: 2105213 - DNA, 15 bp, Homo sapiens
gtttacatttaaggt

SEQ ID NO: 2105214 - DNA, 15 bp, Homo sapiens
tttacatttaaggtt

SEQ ID NO: 2105215 - DNA, 15 bp, Homo sapiens
ttacatttaaggtta

SEQ ID NO: 2105216 - DNA, 15 bp, Homo sapiens
tacatttaaggttaa

SEQ ID NO: 2105217 - DNA, 15 bp, Homo sapiens
acatttaaggttaat

SEQ ID NO: 2105218 - DNA, 15 bp, Homo sapiens
catttaaggttaata

SEQ ID NO: 2105219 - DNA, 15 bp, Homo sapiens
atttaaggttaatat

SEQ ID NO: 2105220 - DNA, 15 bp, Homo sapiens
tttaaggttaatatt

SEQ ID NO: 2105221 - DNA, 15 bp, Homo sapiens
ttaaggttaatattg

SEQ ID NO: 2105222 - DNA, 15 bp, Homo sapiens
taaggttaatattgt

SEQ ID NO: 2105223 - DNA, 15 bp, Homo sapiens
aaggttaatattgtt

SEQ ID NO: 2105224 - DNA, 15 bp, Homo sapiens
aggttaatattgtta

SEQ ID NO: 2105225 - DNA, 15 bp, Homo sapiens
ggttaatattgttat

SEQ ID NO: 2105226 - DNA, 15 bp, Homo sapiens
gttaatattgttata

SEQ ID NO: 2105227 - DNA, 15 bp, Homo sapiens
ttaatattgttatat

SEQ ID NO: 2105228 - DNA, 15 bp, Homo sapiens
taatattgttatatg

SEQ ID NO: 2105229 - DNA, 15 bp, Homo sapiens
aatattgttatatgt

SEQ ID NO: 2105230 - DNA, 15 bp, Homo sapiens
atattgttatatgtg

SEQ ID NO: 2105231 - DNA, 15 bp, Homo sapiens
tattgttatatgtga

SEQ ID NO: 2105232 - DNA, 15 bp, Homo sapiens
attgttatatgtgaa

SEQ ID NO: 2105233 - DNA, 15 bp, Homo sapiens
ttgttatatgtgaat

SEQ ID NO: 2105234 - DNA, 15 bp, Homo sapiens
tgttatatgtgaatt

SEQ ID NO: 2105235 - DNA, 15 bp, Homo sapiens
gttatatgtgaattt

SEQ ID NO: 2105236 - DNA, 15 bp, Homo sapiens
ttatatgtgaatttg

SEQ ID NO: 2105237 - DNA, 15 bp, Homo sapiens
tatatgtgaatttga

SEQ ID NO: 2105238 - DNA, 15 bp, Homo sapiens
atatgtgaatttgat

SEQ ID NO: 2105239 - DNA, 15 bp, Homo sapiens
tatgtgaatttgatc

SEQ ID NO: 2105240 - DNA, 15 bp, Homo sapiens
atgtgaatttgatcc

SEQ ID NO: 2105241 - DNA, 15 bp, Homo sapiens
tgtgaatttgatcct

SEQ ID NO: 2105242 - DNA, 15 bp, Homo sapiens
gtgaatttgatcctg

SEQ ID NO: 2105243 - DNA, 15 bp, Homo sapiens
tgaatttgatcctgt

SEQ ID NO: 2105244 - DNA, 15 bp, Homo sapiens
gaatttgatcctgtc

SEQ ID NO: 2105245 - DNA, 15 bp, Homo sapiens
aatttgatcctgtca

SEQ ID NO: 2105246 - DNA, 15 bp, Homo sapiens
atttgatcctgtcat

SEQ ID NO: 2105247 - DNA, 15 bp, Homo sapiens
tttgatcctgtcatc

SEQ ID NO: 2105248 - DNA, 15 bp, Homo sapiens
ttgatcctgtcatca

SEQ ID NO: 2105249 - DNA, 15 bp, Homo sapiens
tgatcctgtcatcat

SEQ ID NO: 2105250 - DNA, 15 bp, Homo sapiens
gatcctgtcatcatg

SEQ ID NO: 2105251 - DNA, 15 bp, Homo sapiens
atcctgtcatcatga

SEQ ID NO: 2105252 - DNA, 15 bp, Homo sapiens
tcctgtcatcatgat

SEQ ID NO: 2105253 - DNA, 15 bp, Homo sapiens
cctgtcatcatgatg

SEQ ID NO: 2105254 - DNA, 15 bp, Homo sapiens
ctgtcatcatgatgc

SEQ ID NO: 2105255 - DNA, 15 bp, Homo sapiens
tgtcatcatgatgcc

SEQ ID NO: 2105256 - DNA, 15 bp, Homo sapiens
gtcatcatgatgcca

SEQ ID NO: 2105257 - DNA, 15 bp, Homo sapiens
tcatcatgatgccag

SEQ ID NO: 2105258 - DNA, 15 bp, Homo sapiens
catcatgatgccagc

SEQ ID NO: 2105259 - DNA, 15 bp, Homo sapiens
atcatgatgccagct

SEQ ID NO: 2105260 - DNA, 15 bp, Homo sapiens
tcatgatgccagcta

SEQ ID NO: 2105261 - DNA, 15 bp, Homo sapiens
catgatgccagctag

SEQ ID NO: 2105262 - DNA, 15 bp, Homo sapiens
atgatgccagctagt

SEQ ID NO: 2105263 - DNA, 15 bp, Homo sapiens
tgatgccagctagtt

SEQ ID NO: 2105264 - DNA, 15 bp, Homo sapiens
gatgccagctagtta

SEQ ID NO: 2105265 - DNA, 15 bp, Homo sapiens
atgccagctagttat

SEQ ID NO: 2105266 - DNA, 15 bp, Homo sapiens
tgccagctagttatt

SEQ ID NO: 2105267 - DNA, 15 bp, Homo sapiens
gccagctagttattt

SEQ ID NO: 2105268 - DNA, 15 bp, Homo sapiens
ccagctagttatttt

SEQ ID NO: 2105269 - DNA, 15 bp, Homo sapiens
cagctagttattttg

SEQ ID NO: 2105270 - DNA, 15 bp, Homo sapiens
agctagttattttgc

SEQ ID NO: 2105271 - DNA, 15 bp, Homo sapiens
gctagttattttgca

SEQ ID NO: 2105272 - DNA, 15 bp, Homo sapiens
ctagttattttgcac

SEQ ID NO: 2105273 - DNA, 15 bp, Homo sapiens
tagttattttgcaca

SEQ ID NO: 2105274 - DNA, 15 bp, Homo sapiens
agttattttgcacat

SEQ ID NO: 2105275 - DNA, 15 bp, Homo sapiens
gttattttgcacatt

SEQ ID NO: 2105276 - DNA, 15 bp, Homo sapiens
ttattttgcacatta

SEQ ID NO: 2105277 - DNA, 15 bp, Homo sapiens
tattttgcacattag

SEQ ID NO: 2105278 - DNA, 15 bp, Homo sapiens
attttgcacattagt

SEQ ID NO: 2105279 - DNA, 15 bp, Homo sapiens
ttttgcacattagtt

SEQ ID NO: 2105280 - DNA, 15 bp, Homo sapiens
tttgcacattagttg

SEQ ID NO: 2105281 - DNA, 15 bp, Homo sapiens
ttgcacattagttga

SEQ ID NO: 2105282 - DNA, 15 bp, Homo sapiens
tgcacattagttgat

SEQ ID NO: 2105283 - DNA, 15 bp, Homo sapiens
gcacattagttgatg

SEQ ID NO: 2105284 - DNA, 15 bp, Homo sapiens
cacattagttgatgc

SEQ ID NO: 2105285 - DNA, 15 bp, Homo sapiens
acattagttgatgca

SEQ ID NO: 2105286 - DNA, 15 bp, Homo sapiens
cattagttgatgcag

SEQ ID NO: 2105287 - DNA, 15 bp, Homo sapiens
attagttgatgcagt

SEQ ID NO: 2105288 - DNA, 15 bp, Homo sapiens
ttagttgatgcagtt

SEQ ID NO: 2105289 - DNA, 15 bp, Homo sapiens
tagttgatgcagttt

SEQ ID NO: 2105290 - DNA, 15 bp, Homo sapiens
agttgatgcagtttc

SEQ ID NO: 2105291 - DNA, 15 bp, Homo sapiens
gttgatgcagtttct

SEQ ID NO: 2105292 - DNA, 15 bp, Homo sapiens
ttgatgcagtttctt

SEQ ID NO: 2105293 - DNA, 15 bp, Homo sapiens
tgatgcagtttcttc

SEQ ID NO: 2105294 - DNA, 15 bp, Homo sapiens
gatgcagtttcttca

SEQ ID NO: 2105295 - DNA, 15 bp, Homo sapiens
atgcagtttcttcat

SEQ ID NO: 2105296 - DNA, 15 bp, Homo sapiens
tgcagtttcttcata

SEQ ID NO: 2105297 - DNA, 15 bp, Homo sapiens
gcagtttcttcatag

SEQ ID NO: 2105298 - DNA, 15 bp, Homo sapiens
cagtttcttcatagt

SEQ ID NO: 2105299 - DNA, 15 bp, Homo sapiens
agtttcttcatagtg

SEQ ID NO: 2105300 - DNA, 15 bp, Homo sapiens
gtttcttcatagtgt

SEQ ID NO: 2105301 - DNA, 15 bp, Homo sapiens
tttcttcatagtgtt

SEQ ID NO: 2105302 - DNA, 15 bp, Homo sapiens
ttcttcatagtgttg

SEQ ID NO: 2105303 - DNA, 15 bp, Homo sapiens
tcttcatagtgttgt

SEQ ID NO: 2105304 - DNA, 15 bp, Homo sapiens
cttcatagtgttgtt

SEQ ID NO: 2105305 - DNA, 15 bp, Homo sapiens
ttcatagtgttgttg

SEQ ID NO: 2105306 - DNA, 15 bp, Homo sapiens
tcatagtgttgttgg

SEQ ID NO: 2105307 - DNA, 15 bp, Homo sapiens
catagtgttgttggt

SEQ ID NO: 2105308 - DNA, 15 bp, Homo sapiens
atagtgttgttggtc

SEQ ID NO: 2105309 - DNA, 15 bp, Homo sapiens
tagtgttgttggtct

SEQ ID NO: 2105310 - DNA, 15 bp, Homo sapiens
agtgttgttggtctt

SEQ ID NO: 2105311 - DNA, 15 bp, Homo sapiens
gtgttgttggtcttt

SEQ ID NO: 2105312 - DNA, 15 bp, Homo sapiens
tgttgttggtcttta

SEQ ID NO: 2105313 - DNA, 15 bp, Homo sapiens
gttgttggtctttat

SEQ ID NO: 2105314 - DNA, 15 bp, Homo sapiens
ttgttggtctttata

SEQ ID NO: 2105315 - DNA, 15 bp, Homo sapiens
tgttggtctttatat

SEQ ID NO: 2105316 - DNA, 15 bp, Homo sapiens
gttggtctttatatt

SEQ ID NO: 2105317 - DNA, 15 bp, Homo sapiens
ttggtctttatattt

SEQ ID NO: 2105318 - DNA, 15 bp, Homo sapiens
tggtctttatatttt

SEQ ID NO: 2105319 - DNA, 15 bp, Homo sapiens
ggtctttatattttg

SEQ ID NO: 2105320 - DNA, 15 bp, Homo sapiens
gtctttatattttgg

SEQ ID NO: 2105321 - DNA, 15 bp, Homo sapiens
tctttatattttggt

SEQ ID NO: 2105322 - DNA, 15 bp, Homo sapiens
ctttatattttggta

SEQ ID NO: 2105323 - DNA, 15 bp, Homo sapiens
tttatattttggtat

SEQ ID NO: 2105324 - DNA, 15 bp, Homo sapiens
ttatattttggtatg

SEQ ID NO: 2105325 - DNA, 15 bp, Homo sapiens
tatattttggtatgt

SEQ ID NO: 2105326 - DNA, 15 bp, Homo sapiens
atattttggtatgtt

SEQ ID NO: 2105327 - DNA, 15 bp, Homo sapiens
tattttggtatgttt

SEQ ID NO: 2105328 - DNA, 15 bp, Homo sapiens
attttggtatgtttt

SEQ ID NO: 2105329 - DNA, 15 bp, Homo sapiens
ttttggtatgttttt

SEQ ID NO: 2105330 - DNA, 15 bp, Homo sapiens
tttggtatgttttta

SEQ ID NO: 2105331 - DNA, 15 bp, Homo sapiens
ttggtatgtttttac

SEQ ID NO: 2105332 - DNA, 15 bp, Homo sapiens
tggtatgtttttaca

SEQ ID NO: 2105333 - DNA, 15 bp, Homo sapiens
ggtatgtttttacag

SEQ ID NO: 2105334 - DNA, 15 bp, Homo sapiens
gtatgtttttacagt

SEQ ID NO: 2105335 - DNA, 15 bp, Homo sapiens
tatgtttttacagtg

SEQ ID NO: 2105336 - DNA, 15 bp, Homo sapiens
atgtttttacagtga

SEQ ID NO: 2105337 - DNA, 15 bp, Homo sapiens
tgtttttacagtgac

SEQ ID NO: 2105338 - DNA, 15 bp, Homo sapiens
gtttttacagtgact

SEQ ID NO: 2105339 - DNA, 15 bp, Homo sapiens
tttttacagtgactg

SEQ ID NO: 2105340 - DNA, 15 bp, Homo sapiens
ttttacagtgactgg

SEQ ID NO: 2105341 - DNA, 15 bp, Homo sapiens
tttacagtgactggt

SEQ ID NO: 2105342 - DNA, 15 bp, Homo sapiens
ttacagtgactggta

SEQ ID NO: 2105343 - DNA, 15 bp, Homo sapiens
tacagtgactggtac

SEQ ID NO: 2105344 - DNA, 15 bp, Homo sapiens
acagtgactggtacc

SEQ ID NO: 2105345 - DNA, 15 bp, Homo sapiens
cagtgactggtaccc

SEQ ID NO: 2105346 - DNA, 15 bp, Homo sapiens
agtgactggtaccca

SEQ ID NO: 2105347 - DNA, 15 bp, Homo sapiens
gtgactggtacccat

SEQ ID NO: 2105348 - DNA, 15 bp, Homo sapiens
tgactggtacccatt

SEQ ID NO: 2105349 - DNA, 15 bp, Homo sapiens
gactggtacccattt

SEQ ID NO: 2105350 - DNA, 15 bp, Homo sapiens
actggtacccatttt

SEQ ID NO: 2105351 - DNA, 15 bp, Homo sapiens
ctggtacccattttt

SEQ ID NO: 2105352 - DNA, 15 bp, Homo sapiens
tggtacccatttttc

SEQ ID NO: 2105353 - DNA, 15 bp, Homo sapiens
ggtacccatttttcc

SEQ ID NO: 2105354 - DNA, 15 bp, Homo sapiens
gtacccatttttcct

SEQ ID NO: 2105355 - DNA, 15 bp, Homo sapiens
tacccatttttcctt

SEQ ID NO: 2105356 - DNA, 15 bp, Homo sapiens
acccatttttccttt

SEQ ID NO: 2105357 - DNA, 15 bp, Homo sapiens
cccatttttcctttc

SEQ ID NO: 2105358 - DNA, 15 bp, Homo sapiens
ccatttttcctttcc

SEQ ID NO: 2105359 - DNA, 15 bp, Homo sapiens
catttttcctttcca

SEQ ID NO: 2105360 - DNA, 15 bp, Homo sapiens
atttttcctttccat

SEQ ID NO: 2105361 - DNA, 15 bp, Homo sapiens
tttttcctttccata

SEQ ID NO: 2105362 - DNA, 15 bp, Homo sapiens
ttttcctttccatat

SEQ ID NO: 2105363 - DNA, 15 bp, Homo sapiens
tttcctttccatatt

SEQ ID NO: 2105364 - DNA, 15 bp, Homo sapiens
ttcctttccatattt

SEQ ID NO: 2105365 - DNA, 15 bp, Homo sapiens
tcctttccatattta

SEQ ID NO: 2105366 - DNA, 15 bp, Homo sapiens
cctttccatatttag

SEQ ID NO: 2105367 - DNA, 15 bp, Homo sapiens
ctttccatatttagt

SEQ ID NO: 2105368 - DNA, 15 bp, Homo sapiens
tttccatatttagtg

SEQ ID NO: 2105369 - DNA, 15 bp, Homo sapiens
ttccatatttagtgc

SEQ ID NO: 2105370 - DNA, 15 bp, Homo sapiens
tccatatttagtgct

SEQ ID NO: 2105371 - DNA, 15 bp, Homo sapiens
ccatatttagtgctt

SEQ ID NO: 2105372 - DNA, 15 bp, Homo sapiens
catatttagtgcttt

SEQ ID NO: 2105373 - DNA, 15 bp, Homo sapiens
atatttagtgctttt

SEQ ID NO: 2105374 - DNA, 15 bp, Homo sapiens
tatttagtgcttttt

SEQ ID NO: 2105375 - DNA, 15 bp, Homo sapiens
atttagtgctttttt

SEQ ID NO: 2105376 - DNA, 15 bp, Homo sapiens
tttagtgcttttttc

SEQ ID NO: 2105377 - DNA, 15 bp, Homo sapiens
ttagtgcttttttca

SEQ ID NO: 2105378 - DNA, 15 bp, Homo sapiens
tagtgcttttttcag

SEQ ID NO: 2105379 - DNA, 15 bp, Homo sapiens
agtgcttttttcagg

SEQ ID NO: 2105380 - DNA, 15 bp, Homo sapiens
gtgcttttttcagga

SEQ ID NO: 2105381 - DNA, 15 bp, Homo sapiens
tgcttttttcaggag

SEQ ID NO: 2105382 - DNA, 15 bp, Homo sapiens
gcttttttcaggagc

SEQ ID NO: 2105383 - DNA, 15 bp, Homo sapiens
cttttttcaggagct

SEQ ID NO: 2105384 - DNA, 15 bp, Homo sapiens
ttttttcaggagctc

SEQ ID NO: 2105385 - DNA, 15 bp, Homo sapiens
tttttcaggagctct

SEQ ID NO: 2105386 - DNA, 15 bp, Homo sapiens
ttttcaggagctctt

SEQ ID NO: 2105387 - DNA, 15 bp, Homo sapiens
tttcaggagctcttg

SEQ ID NO: 2105388 - DNA, 15 bp, Homo sapiens
ttcaggagctcttgt

SEQ ID NO: 2105389 - DNA, 15 bp, Homo sapiens
tcaggagctcttgta

SEQ ID NO: 2105390 - DNA, 15 bp, Homo sapiens
caggagctcttgtaa

SEQ ID NO: 2105391 - DNA, 15 bp, Homo sapiens
aggagctcttgtaag

SEQ ID NO: 2105392 - DNA, 15 bp, Homo sapiens
ggagctcttgtaagg

SEQ ID NO: 2105393 - DNA, 15 bp, Homo sapiens
gagctcttgtaaggc

SEQ ID NO: 2105394 - DNA, 15 bp, Homo sapiens
agctcttgtaaggca

SEQ ID NO: 2105395 - DNA, 15 bp, Homo sapiens
gctcttgtaaggcag

SEQ ID NO: 2105396 - DNA, 15 bp, Homo sapiens
ctcttgtaaggcagg

SEQ ID NO: 2105397 - DNA, 15 bp, Homo sapiens
tcttgtaaggcaggc

SEQ ID NO: 2105398 - DNA, 15 bp, Homo sapiens
cttgtaaggcaggcc

SEQ ID NO: 2105399 - DNA, 15 bp, Homo sapiens
ttgtaaggcaggcct

SEQ ID NO: 2105400 - DNA, 15 bp, Homo sapiens
tgtaaggcaggcctg

SEQ ID NO: 2105401 - DNA, 15 bp, Homo sapiens
gtaaggcaggcctgg

SEQ ID NO: 2105402 - DNA, 15 bp, Homo sapiens
taaggcaggcctggt

SEQ ID NO: 2105403 - DNA, 15 bp, Homo sapiens
aaggcaggcctggtg

SEQ ID NO: 2105404 - DNA, 15 bp, Homo sapiens
aggcaggcctggtgg

SEQ ID NO: 2105405 - DNA, 15 bp, Homo sapiens
ggcaggcctggtggt

SEQ ID NO: 2105406 - DNA, 15 bp, Homo sapiens
gcaggcctggtggtg

SEQ ID NO: 2105407 - DNA, 15 bp, Homo sapiens
caggcctggtggtga

SEQ ID NO: 2105408 - DNA, 15 bp, Homo sapiens
aggcctggtggtgac

SEQ ID NO: 2105409 - DNA, 15 bp, Homo sapiens
ggcctggtggtgaca

SEQ ID NO: 2105410 - DNA, 15 bp, Homo sapiens
gcctggtggtgacaa

SEQ ID NO: 2105411 - DNA, 15 bp, Homo sapiens
cctggtggtgacaaa

SEQ ID NO: 2105412 - DNA, 15 bp, Homo sapiens
ctggtggtgacaaaa

SEQ ID NO: 2105413 - DNA, 15 bp, Homo sapiens
tggtggtgacaaaat

SEQ ID NO: 2105414 - DNA, 15 bp, Homo sapiens
ggtggtgacaaaatc

SEQ ID NO: 2105415 - DNA, 15 bp, Homo sapiens
gtggtgacaaaatcc

SEQ ID NO: 2105416 - DNA, 15 bp, Homo sapiens
tggtgacaaaatccc

SEQ ID NO: 2105417 - DNA, 15 bp, Homo sapiens
ggtgacaaaatccct

SEQ ID NO: 2105418 - DNA, 15 bp, Homo sapiens
gtgacaaaatccctc

SEQ ID NO: 2105419 - DNA, 15 bp, Homo sapiens
tgacaaaatccctca

SEQ ID NO: 2105420 - DNA, 15 bp, Homo sapiens
gacaaaatccctcag

SEQ ID NO: 2105421 - DNA, 15 bp, Homo sapiens
acaaaatccctcagc

SEQ ID NO: 2105422 - DNA, 15 bp, Homo sapiens
caaaatccctcagca

SEQ ID NO: 2105423 - DNA, 15 bp, Homo sapiens
aaaatccctcagcat

SEQ ID NO: 2105424 - DNA, 15 bp, Homo sapiens
aaatccctcagcatt

SEQ ID NO: 2105425 - DNA, 15 bp, Homo sapiens
aatccctcagcattt

SEQ ID NO: 2105426 - DNA, 15 bp, Homo sapiens
atccctcagcatttg

SEQ ID NO: 2105427 - DNA, 15 bp, Homo sapiens
tccctcagcatttgc

SEQ ID NO: 2105428 - DNA, 15 bp, Homo sapiens
ccctcagcatttgct

SEQ ID NO: 2105429 - DNA, 15 bp, Homo sapiens
cctcagcatttgctt

SEQ ID NO: 2105430 - DNA, 15 bp, Homo sapiens
ctcagcatttgcttg

SEQ ID NO: 2105431 - DNA, 15 bp, Homo sapiens
tcagcatttgcttgt

SEQ ID NO: 2105432 - DNA, 15 bp, Homo sapiens
cagcatttgcttgtc

SEQ ID NO: 2105433 - DNA, 15 bp, Homo sapiens
agcatttgcttgtct

SEQ ID NO: 2105434 - DNA, 15 bp, Homo sapiens
gcatttgcttgtctg

SEQ ID NO: 2105435 - DNA, 15 bp, Homo sapiens
catttgcttgtctgt

SEQ ID NO: 2105436 - DNA, 15 bp, Homo sapiens
atttgcttgtctgta

SEQ ID NO: 2105437 - DNA, 15 bp, Homo sapiens
tttgcttgtctgtag

SEQ ID NO: 2105438 - DNA, 15 bp, Homo sapiens
ttgcttgtctgtaga

SEQ ID NO: 2105439 - DNA, 15 bp, Homo sapiens
tgcttgtctgtagag

SEQ ID NO: 2105440 - DNA, 15 bp, Homo sapiens
gcttgtctgtagaga

SEQ ID NO: 2105441 - DNA, 15 bp, Homo sapiens
cttgtctgtagagaa

SEQ ID NO: 2105442 - DNA, 15 bp, Homo sapiens
ttgtctgtagagaat

SEQ ID NO: 2105443 - DNA, 15 bp, Homo sapiens
tgtctgtagagaatt

SEQ ID NO: 2105444 - DNA, 15 bp, Homo sapiens
gtctgtagagaattt

SEQ ID NO: 2105445 - DNA, 15 bp, Homo sapiens
tctgtagagaatttt

SEQ ID NO: 2105446 - DNA, 15 bp, Homo sapiens
ctgtagagaatttta

SEQ ID NO: 2105447 - DNA, 15 bp, Homo sapiens
tgtagagaattttat

SEQ ID NO: 2105448 - DNA, 15 bp, Homo sapiens
gtagagaattttatt

SEQ ID NO: 2105449 - DNA, 15 bp, Homo sapiens
tagagaattttattt

SEQ ID NO: 2105450 - DNA, 15 bp, Homo sapiens
agagaattttatttc

SEQ ID NO: 2105451 - DNA, 15 bp, Homo sapiens
gagaattttatttct

SEQ ID NO: 2105452 - DNA, 15 bp, Homo sapiens
agaattttatttctc

SEQ ID NO: 2105453 - DNA, 15 bp, Homo sapiens
gaattttatttctcc

SEQ ID NO: 2105454 - DNA, 15 bp, Homo sapiens
aattttatttctcct

SEQ ID NO: 2105455 - DNA, 15 bp, Homo sapiens
attttatttctcctt

SEQ ID NO: 2105456 - DNA, 15 bp, Homo sapiens
ttttatttctccttc

SEQ ID NO: 2105457 - DNA, 15 bp, Homo sapiens
tttatttctccttcg

SEQ ID NO: 2105458 - DNA, 15 bp, Homo sapiens
ttatttctccttcgc

SEQ ID NO: 2105459 - DNA, 15 bp, Homo sapiens
tatttctccttcgct

SEQ ID NO: 2105460 - DNA, 15 bp, Homo sapiens
atttctccttcgctt

SEQ ID NO: 2105461 - DNA, 15 bp, Homo sapiens
tttctccttcgctta

SEQ ID NO: 2105462 - DNA, 15 bp, Homo sapiens
ttctccttcgcttat

SEQ ID NO: 2105463 - DNA, 15 bp, Homo sapiens
tctccttcgcttatg

SEQ ID NO: 2105464 - DNA, 15 bp, Homo sapiens
ctccttcgcttatga

SEQ ID NO: 2105465 - DNA, 15 bp, Homo sapiens
tccttcgcttatgaa

SEQ ID NO: 2105466 - DNA, 15 bp, Homo sapiens
ccttcgcttatgaag

SEQ ID NO: 2105467 - DNA, 15 bp, Homo sapiens
cttcgcttatgaagc

SEQ ID NO: 2105468 - DNA, 15 bp, Homo sapiens
ttcgcttatgaagct

SEQ ID NO: 2105469 - DNA, 15 bp, Homo sapiens
tcgcttatgaagctt

SEQ ID NO: 2105470 - DNA, 15 bp, Homo sapiens
cgcttatgaagctta

SEQ ID NO: 2105471 - DNA, 15 bp, Homo sapiens
gcttatgaagcttag

SEQ ID NO: 2105472 - DNA, 15 bp, Homo sapiens
cttatgaagcttagt

SEQ ID NO: 2105473 - DNA, 15 bp, Homo sapiens
ttatgaagcttagtt

SEQ ID NO: 2105474 - DNA, 15 bp, Homo sapiens
tatgaagcttagttt

SEQ ID NO: 2105475 - DNA, 15 bp, Homo sapiens
atgaagcttagtttt

SEQ ID NO: 2105476 - DNA, 15 bp, Homo sapiens
tgaagcttagtttta

SEQ ID NO: 2105477 - DNA, 15 bp, Homo sapiens
gaagcttagttttag

SEQ ID NO: 2105478 - DNA, 15 bp, Homo sapiens
aagcttagttttagc

SEQ ID NO: 2105479 - DNA, 15 bp, Homo sapiens
agcttagttttagct

SEQ ID NO: 2105480 - DNA, 15 bp, Homo sapiens
gcttagttttagctg

SEQ ID NO: 2105481 - DNA, 15 bp, Homo sapiens
cttagttttagctgg

SEQ ID NO: 2105482 - DNA, 15 bp, Homo sapiens
ttagttttagctgga

SEQ ID NO: 2105483 - DNA, 15 bp, Homo sapiens
tagttttagctggat

SEQ ID NO: 2105484 - DNA, 15 bp, Homo sapiens
agttttagctggata

SEQ ID NO: 2105485 - DNA, 15 bp, Homo sapiens
gttttagctggatat

SEQ ID NO: 2105486 - DNA, 15 bp, Homo sapiens
ttttagctggatatg

SEQ ID NO: 2105487 - DNA, 15 bp, Homo sapiens
tttagctggatatga

SEQ ID NO: 2105488 - DNA, 15 bp, Homo sapiens
ttagctggatatgaa

SEQ ID NO: 2105489 - DNA, 15 bp, Homo sapiens
tagctggatatgaaa

SEQ ID NO: 2105490 - DNA, 15 bp, Homo sapiens
agctggatatgaaat

SEQ ID NO: 2105491 - DNA, 15 bp, Homo sapiens
gctggatatgaaatt

SEQ ID NO: 2105492 - DNA, 15 bp, Homo sapiens
ctggatatgaaattc

SEQ ID NO: 2105493 - DNA, 15 bp, Homo sapiens
tggatatgaaattct

SEQ ID NO: 2105494 - DNA, 15 bp, Homo sapiens
ggatatgaaattctg

SEQ ID NO: 2105495 - DNA, 15 bp, Homo sapiens
gatatgaaattctgg

SEQ ID NO: 2105496 - DNA, 15 bp, Homo sapiens
atatgaaattctggg

SEQ ID NO: 2105497 - DNA, 15 bp, Homo sapiens
tatgaaattctgggt

SEQ ID NO: 2105498 - DNA, 15 bp, Homo sapiens
atgaaattctgggtt

SEQ ID NO: 2105499 - DNA, 15 bp, Homo sapiens
tgaaattctgggttg

SEQ ID NO: 2105500 - DNA, 15 bp, Homo sapiens
gaaattctgggttga

SEQ ID NO: 2105501 - DNA, 15 bp, Homo sapiens
aaattctgggttgaa

SEQ ID NO: 2105502 - DNA, 15 bp, Homo sapiens
aattctgggttgaaa

SEQ ID NO: 2105503 - DNA, 15 bp, Homo sapiens
attctgggttgaaaa

SEQ ID NO: 2105504 - DNA, 15 bp, Homo sapiens
ttctgggttgaaaat

SEQ ID NO: 2105505 - DNA, 15 bp, Homo sapiens
tctgggttgaaaatt

SEQ ID NO: 2105506 - DNA, 15 bp, Homo sapiens
ctgggttgaaaatta

SEQ ID NO: 2105507 - DNA, 15 bp, Homo sapiens
tgggttgaaaattat

SEQ ID NO: 2105508 - DNA, 15 bp, Homo sapiens
gggttgaaaattatt

SEQ ID NO: 2105509 - DNA, 15 bp, Homo sapiens
ggttgaaaattattt

SEQ ID NO: 2105510 - DNA, 15 bp, Homo sapiens
gttgaaaattatttg

SEQ ID NO: 2105511 - DNA, 15 bp, Homo sapiens
ttgaaaattatttgc

SEQ ID NO: 2105512 - DNA, 15 bp, Homo sapiens
tgaaaattatttgct

SEQ ID NO: 2105513 - DNA, 15 bp, Homo sapiens
gaaaattatttgctt

SEQ ID NO: 2105514 - DNA, 15 bp, Homo sapiens
aaaattatttgcttt

SEQ ID NO: 2105515 - DNA, 15 bp, Homo sapiens
aaattatttgcttta

SEQ ID NO: 2105516 - DNA, 15 bp, Homo sapiens
aattatttgctttaa

SEQ ID NO: 2105517 - DNA, 15 bp, Homo sapiens
attatttgctttaag

SEQ ID NO: 2105518 - DNA, 15 bp, Homo sapiens
ttatttgctttaaga

SEQ ID NO: 2105519 - DNA, 15 bp, Homo sapiens
tatttgctttaagaa

SEQ ID NO: 2105520 - DNA, 15 bp, Homo sapiens
atttgctttaagaat

SEQ ID NO: 2105521 - DNA, 15 bp, Homo sapiens
tttgctttaagaatg

SEQ ID NO: 2105522 - DNA, 15 bp, Homo sapiens
ttgctttaagaatgt

SEQ ID NO: 2105523 - DNA, 15 bp, Homo sapiens
tgctttaagaatgtt

SEQ ID NO: 2105524 - DNA, 15 bp, Homo sapiens
gctttaagaatgttg

SEQ ID NO: 2105525 - DNA, 15 bp, Homo sapiens
ctttaagaatgttgg

SEQ ID NO: 2105526 - DNA, 15 bp, Homo sapiens
tttaagaatgttgga

SEQ ID NO: 2105527 - DNA, 15 bp, Homo sapiens
ttaagaatgttggat

SEQ ID NO: 2105528 - DNA, 15 bp, Homo sapiens
taagaatgttggata

SEQ ID NO: 2105529 - DNA, 15 bp, Homo sapiens
aagaatgttggatat

SEQ ID NO: 2105530 - DNA, 15 bp, Homo sapiens
agaatgttggatatt

SEQ ID NO: 2105531 - DNA, 15 bp, Homo sapiens
gaatgttggatattg

SEQ ID NO: 2105532 - DNA, 15 bp, Homo sapiens
aatgttggatattgg

SEQ ID NO: 2105533 - DNA, 15 bp, Homo sapiens
atgttggatattggc

SEQ ID NO: 2105534 - DNA, 15 bp, Homo sapiens
tgttggatattggcc

SEQ ID NO: 2105535 - DNA, 15 bp, Homo sapiens
gttggatattggccc

SEQ ID NO: 2105536 - DNA, 15 bp, Homo sapiens
ttggatattggcccc

SEQ ID NO: 2105537 - DNA, 15 bp, Homo sapiens
tggatattggccccc

SEQ ID NO: 2105538 - DNA, 15 bp, Homo sapiens
ggatattggcccccg

SEQ ID NO: 2105539 - DNA, 15 bp, Homo sapiens
gatattggcccccgc

SEQ ID NO: 2105540 - DNA, 15 bp, Homo sapiens
atattggcccccgct

SEQ ID NO: 2105541 - DNA, 15 bp, Homo sapiens
tattggcccccgctc

SEQ ID NO: 2105542 - DNA, 15 bp, Homo sapiens
attggcccccgctct

SEQ ID NO: 2105543 - DNA, 15 bp, Homo sapiens
ttggcccccgctctc

SEQ ID NO: 2105544 - DNA, 15 bp, Homo sapiens
tggcccccgctctct

SEQ ID NO: 2105545 - DNA, 15 bp, Homo sapiens
ggcccccgctctctt

SEQ ID NO: 2105546 - DNA, 15 bp, Homo sapiens
gcccccgctctcttc

SEQ ID NO: 2105547 - DNA, 15 bp, Homo sapiens
cccccgctctcttct

SEQ ID NO: 2105548 - DNA, 15 bp, Homo sapiens
ccccgctctcttctg

SEQ ID NO: 2105549 - DNA, 15 bp, Homo sapiens
cccgctctcttctgg

SEQ ID NO: 2105550 - DNA, 15 bp, Homo sapiens
ccgctctcttctggc

SEQ ID NO: 2105551 - DNA, 15 bp, Homo sapiens
cgctctcttctggct

SEQ ID NO: 2105552 - DNA, 15 bp, Homo sapiens
gctctcttctggctt

SEQ ID NO: 2105553 - DNA, 15 bp, Homo sapiens
ctctcttctggcttg

SEQ ID NO: 2105554 - DNA, 15 bp, Homo sapiens
tctcttctggcttgt

SEQ ID NO: 2105555 - DNA, 15 bp, Homo sapiens
ctcttctggcttgta

SEQ ID NO: 2105556 - DNA, 15 bp, Homo sapiens
tcttctggcttgtag

SEQ ID NO: 2105557 - DNA, 15 bp, Homo sapiens
cttctggcttgtagg

SEQ ID NO: 2105558 - DNA, 15 bp, Homo sapiens
ttctggcttgtaggg

SEQ ID NO: 2105559 - DNA, 15 bp, Homo sapiens
tctggcttgtagggt

SEQ ID NO: 2105560 - DNA, 15 bp, Homo sapiens
ctggcttgtagggta

SEQ ID NO: 2105561 - DNA, 15 bp, Homo sapiens
tggcttgtagggtat

SEQ ID NO: 2105562 - DNA, 15 bp, Homo sapiens
ggcttgtagggtatg

SEQ ID NO: 2105563 - DNA, 15 bp, Homo sapiens
gcttgtagggtatgt

SEQ ID NO: 2105564 - DNA, 15 bp, Homo sapiens
cttgtagggtatgta

SEQ ID NO: 2105565 - DNA, 15 bp, Homo sapiens
ttgtagggtatgtac

SEQ ID NO: 2105566 - DNA, 15 bp, Homo sapiens
tgtagggtatgtaca

SEQ ID NO: 2105567 - DNA, 15 bp, Homo sapiens
gtagggtatgtacag

SEQ ID NO: 2105568 - DNA, 15 bp, Homo sapiens
tagggtatgtacaga

SEQ ID NO: 2105569 - DNA, 15 bp, Homo sapiens
agggtatgtacagaa

SEQ ID NO: 2105570 - DNA, 15 bp, Homo sapiens
gggtatgtacagaaa

SEQ ID NO: 2105571 - DNA, 15 bp, Homo sapiens
ggtatgtacagaaag

SEQ ID NO: 2105572 - DNA, 15 bp, Homo sapiens
gtatgtacagaaaga

SEQ ID NO: 2105573 - DNA, 15 bp, Homo sapiens
tatgtacagaaagat

SEQ ID NO: 2105574 - DNA, 15 bp, Homo sapiens
atgtacagaaagatc

SEQ ID NO: 2105575 - DNA, 15 bp, Homo sapiens
tgtacagaaagatcc

SEQ ID NO: 2105576 - DNA, 15 bp, Homo sapiens
gtacagaaagatcca

SEQ ID NO: 2105577 - DNA, 15 bp, Homo sapiens
tacagaaagatccac

SEQ ID NO: 2105578 - DNA, 15 bp, Homo sapiens
acagaaagatccact

SEQ ID NO: 2105579 - DNA, 15 bp, Homo sapiens
cagaaagatccactg

SEQ ID NO: 2105580 - DNA, 15 bp, Homo sapiens
agaaagatccactgt

SEQ ID NO: 2105581 - DNA, 15 bp, Homo sapiens
gaaagatccactgtt

SEQ ID NO: 2105582 - DNA, 15 bp, Homo sapiens
aaagatccactgtta

SEQ ID NO: 2105583 - DNA, 15 bp, Homo sapiens
aagatccactgttag

SEQ ID NO: 2105584 - DNA, 15 bp, Homo sapiens
agatccactgttagt

SEQ ID NO: 2105585 - DNA, 15 bp, Homo sapiens
gatccactgttagtc

SEQ ID NO: 2105586 - DNA, 15 bp, Homo sapiens
atccactgttagtct

SEQ ID NO: 2105587 - DNA, 15 bp, Homo sapiens
tccactgttagtctg

SEQ ID NO: 2105588 - DNA, 15 bp, Homo sapiens
ccactgttagtctga

SEQ ID NO: 2105589 - DNA, 15 bp, Homo sapiens
cactgttagtctgat

SEQ ID NO: 2105590 - DNA, 15 bp, Homo sapiens
actgttagtctgatg

SEQ ID NO: 2105591 - DNA, 15 bp, Homo sapiens
ctgttagtctgatgg

SEQ ID NO: 2105592 - DNA, 15 bp, Homo sapiens
tgttagtctgatgga

SEQ ID NO: 2105593 - DNA, 15 bp, Homo sapiens
gttagtctgatggac

SEQ ID NO: 2105594 - DNA, 15 bp, Homo sapiens
ttagtctgatggact

SEQ ID NO: 2105595 - DNA, 15 bp, Homo sapiens
tagtctgatggactt

SEQ ID NO: 2105596 - DNA, 15 bp, Homo sapiens
agtctgatggacttc

SEQ ID NO: 2105597 - DNA, 15 bp, Homo sapiens
gtctgatggacttcc

SEQ ID NO: 2105598 - DNA, 15 bp, Homo sapiens
tctgatggacttcct

SEQ ID NO: 2105599 - DNA, 15 bp, Homo sapiens
ctgatggacttcctt

SEQ ID NO: 2105600 - DNA, 15 bp, Homo sapiens
tgatggacttccttt

SEQ ID NO: 2105601 - DNA, 15 bp, Homo sapiens
gatggacttcctttt

SEQ ID NO: 2105602 - DNA, 15 bp, Homo sapiens
atggacttccttttg

SEQ ID NO: 2105603 - DNA, 15 bp, Homo sapiens
tggacttccttttgt

SEQ ID NO: 2105604 - DNA, 15 bp, Homo sapiens
ggacttccttttgta

SEQ ID NO: 2105605 - DNA, 15 bp, Homo sapiens
gacttccttttgtaa

SEQ ID NO: 2105606 - DNA, 15 bp, Homo sapiens
acttccttttgtaag

SEQ ID NO: 2105607 - DNA, 15 bp, Homo sapiens
cttccttttgtaagt

SEQ ID NO: 2105608 - DNA, 15 bp, Homo sapiens
ttccttttgtaagta

SEQ ID NO: 2105609 - DNA, 15 bp, Homo sapiens
tccttttgtaagtaa

SEQ ID NO: 2105610 - DNA, 15 bp, Homo sapiens
ccttttgtaagtaac

SEQ ID NO: 2105611 - DNA, 15 bp, Homo sapiens
cttttgtaagtaacc

SEQ ID NO: 2105612 - DNA, 15 bp, Homo sapiens
ttttgtaagtaacct

SEQ ID NO: 2105613 - DNA, 15 bp, Homo sapiens
tttgtaagtaacctg

SEQ ID NO: 2105614 - DNA, 15 bp, Homo sapiens
ttgtaagtaacctga

SEQ ID NO: 2105615 - DNA, 15 bp, Homo sapiens
tgtaagtaacctgac

SEQ ID NO: 2105616 - DNA, 15 bp, Homo sapiens
gtaagtaacctgacc

SEQ ID NO: 2105617 - DNA, 15 bp, Homo sapiens
taagtaacctgacct

SEQ ID NO: 2105618 - DNA, 15 bp, Homo sapiens
aagtaacctgacctt

SEQ ID NO: 2105619 - DNA, 15 bp, Homo sapiens
agtaacctgaccttt

SEQ ID NO: 2105620 - DNA, 15 bp, Homo sapiens
gtaacctgacctttc

SEQ ID NO: 2105621 - DNA, 15 bp, Homo sapiens
taacctgacctttct

SEQ ID NO: 2105622 - DNA, 15 bp, Homo sapiens
aacctgacctttctc

SEQ ID NO: 2105623 - DNA, 15 bp, Homo sapiens
acctgacctttctct

SEQ ID NO: 2105624 - DNA, 15 bp, Homo sapiens
cctgacctttctctc

SEQ ID NO: 2105625 - DNA, 15 bp, Homo sapiens
ctgacctttctctct

SEQ ID NO: 2105626 - DNA, 15 bp, Homo sapiens
tgacctttctctctg

SEQ ID NO: 2105627 - DNA, 15 bp, Homo sapiens
gacctttctctctgg

SEQ ID NO: 2105628 - DNA, 15 bp, Homo sapiens
acctttctctctggc

SEQ ID NO: 2105629 - DNA, 15 bp, Homo sapiens
cctttctctctggct

SEQ ID NO: 2105630 - DNA, 15 bp, Homo sapiens
ctttctctctggctg

SEQ ID NO: 2105631 - DNA, 15 bp, Homo sapiens
tttctctctggctgc

SEQ ID NO: 2105632 - DNA, 15 bp, Homo sapiens
ttctctctggctgcc

SEQ ID NO: 2105633 - DNA, 15 bp, Homo sapiens
tctctctggctgccc

SEQ ID NO: 2105634 - DNA, 15 bp, Homo sapiens
ctctctggctgccct

SEQ ID NO: 2105635 - DNA, 15 bp, Homo sapiens
tctctggctgccctt

SEQ ID NO: 2105636 - DNA, 15 bp, Homo sapiens
ctctggctgccctta

SEQ ID NO: 2105637 - DNA, 15 bp, Homo sapiens
tctggctgcccttaa

SEQ ID NO: 2105638 - DNA, 15 bp, Homo sapiens
ctggctgcccttaac

SEQ ID NO: 2105639 - DNA, 15 bp, Homo sapiens
tggctgcccttaaca

SEQ ID NO: 2105640 - DNA, 15 bp, Homo sapiens
ggctgcccttaacat

SEQ ID NO: 2105641 - DNA, 15 bp, Homo sapiens
gctgcccttaacatt

SEQ ID NO: 2105642 - DNA, 15 bp, Homo sapiens
ctgcccttaacattt

SEQ ID NO: 2105643 - DNA, 15 bp, Homo sapiens
tgcccttaacatttt

SEQ ID NO: 2105644 - DNA, 15 bp, Homo sapiens
gcccttaacattttt

SEQ ID NO: 2105645 - DNA, 15 bp, Homo sapiens
cccttaacatttttt

SEQ ID NO: 2105646 - DNA, 15 bp, Homo sapiens
ccttaacattttttt

SEQ ID NO: 2105647 - DNA, 15 bp, Homo sapiens
cttaacatttttttc

SEQ ID NO: 2105648 - DNA, 15 bp, Homo sapiens
ttaacatttttttct

SEQ ID NO: 2105649 - DNA, 15 bp, Homo sapiens
taacatttttttctt

SEQ ID NO: 2105650 - DNA, 15 bp, Homo sapiens
aacatttttttcttc

SEQ ID NO: 2105651 - DNA, 15 bp, Homo sapiens
acatttttttcttca

SEQ ID NO: 2105652 - DNA, 15 bp, Homo sapiens
catttttttcttcat

SEQ ID NO: 2105653 - DNA, 15 bp, Homo sapiens
atttttttcttcatt

SEQ ID NO: 2105654 - DNA, 15 bp, Homo sapiens
tttttttcttcattt

SEQ ID NO: 2105655 - DNA, 15 bp, Homo sapiens
ttttttcttcatttc

SEQ ID NO: 2105656 - DNA, 15 bp, Homo sapiens
tttttcttcatttca

SEQ ID NO: 2105657 - DNA, 15 bp, Homo sapiens
ttttcttcatttcaa

SEQ ID NO: 2105658 - DNA, 15 bp, Homo sapiens
tttcttcatttcaac

SEQ ID NO: 2105659 - DNA, 15 bp, Homo sapiens
ttcttcatttcaacc

SEQ ID NO: 2105660 - DNA, 15 bp, Homo sapiens
tcttcatttcaacct

SEQ ID NO: 2105661 - DNA, 15 bp, Homo sapiens
cttcatttcaacctt

SEQ ID NO: 2105662 - DNA, 15 bp, Homo sapiens
ttcatttcaaccttg

SEQ ID NO: 2105663 - DNA, 15 bp, Homo sapiens
tcatttcaaccttgg

SEQ ID NO: 2105664 - DNA, 15 bp, Homo sapiens
catttcaaccttggt

SEQ ID NO: 2105665 - DNA, 15 bp, Homo sapiens
atttcaaccttggtg

SEQ ID NO: 2105666 - DNA, 15 bp, Homo sapiens
tttcaaccttggtga

SEQ ID NO: 2105667 - DNA, 15 bp, Homo sapiens
ttcaaccttggtgaa

SEQ ID NO: 2105668 - DNA, 15 bp, Homo sapiens
tcaaccttggtgaat

SEQ ID NO: 2105669 - DNA, 15 bp, Homo sapiens
caaccttggtgaatc

SEQ ID NO: 2105670 - DNA, 15 bp, Homo sapiens
aaccttggtgaatct

SEQ ID NO: 2105671 - DNA, 15 bp, Homo sapiens
accttggtgaatctg

SEQ ID NO: 2105672 - DNA, 15 bp, Homo sapiens
ccttggtgaatctga

SEQ ID NO: 2105673 - DNA, 15 bp, Homo sapiens
cttggtgaatctgat

SEQ ID NO: 2105674 - DNA, 15 bp, Homo sapiens
ttggtgaatctgatg

SEQ ID NO: 2105675 - DNA, 15 bp, Homo sapiens
tggtgaatctgatga

SEQ ID NO: 2105676 - DNA, 15 bp, Homo sapiens
ggtgaatctgatgat

SEQ ID NO: 2105677 - DNA, 15 bp, Homo sapiens
gtgaatctgatgatt

SEQ ID NO: 2105678 - DNA, 15 bp, Homo sapiens
tgaatctgatgatta

SEQ ID NO: 2105679 - DNA, 15 bp, Homo sapiens
gaatctgatgattat

SEQ ID NO: 2105680 - DNA, 15 bp, Homo sapiens
aatctgatgattatg

SEQ ID NO: 2105681 - DNA, 15 bp, Homo sapiens
atctgatgattatgt

SEQ ID NO: 2105682 - DNA, 15 bp, Homo sapiens
tctgatgattatgtg

SEQ ID NO: 2105683 - DNA, 15 bp, Homo sapiens
ctgatgattatgtgt

SEQ ID NO: 2105684 - DNA, 15 bp, Homo sapiens
tgatgattatgtgtc

SEQ ID NO: 2105685 - DNA, 15 bp, Homo sapiens
gatgattatgtgtcg

SEQ ID NO: 2105686 - DNA, 15 bp, Homo sapiens
atgattatgtgtcgt

SEQ ID NO: 2105687 - DNA, 15 bp, Homo sapiens
tgattatgtgtcgta

SEQ ID NO: 2105688 - DNA, 15 bp, Homo sapiens
gattatgtgtcgtaa

SEQ ID NO: 2105689 - DNA, 15 bp, Homo sapiens
attatgtgtcgtaag

SEQ ID NO: 2105690 - DNA, 15 bp, Homo sapiens
ttatgtgtcgtaagg

SEQ ID NO: 2105691 - DNA, 15 bp, Homo sapiens
tatgtgtcgtaaggt

SEQ ID NO: 2105692 - DNA, 15 bp, Homo sapiens
atgtgtcgtaaggtt

SEQ ID NO: 2105693 - DNA, 15 bp, Homo sapiens
tgtgtcgtaaggttg

SEQ ID NO: 2105694 - DNA, 15 bp, Homo sapiens
gtgtcgtaaggttgc

SEQ ID NO: 2105695 - DNA, 15 bp, Homo sapiens
tgtcgtaaggttgct

SEQ ID NO: 2105696 - DNA, 15 bp, Homo sapiens
gtcgtaaggttgctc

SEQ ID NO: 2105697 - DNA, 15 bp, Homo sapiens
tcgtaaggttgctct

SEQ ID NO: 2105698 - DNA, 15 bp, Homo sapiens
cgtaaggttgctctt

SEQ ID NO: 2105699 - DNA, 15 bp, Homo sapiens
gtaaggttgctcttc

SEQ ID NO: 2105700 - DNA, 15 bp, Homo sapiens
taaggttgctcttct

SEQ ID NO: 2105701 - DNA, 15 bp, Homo sapiens
aaggttgctcttctc

SEQ ID NO: 2105702 - DNA, 15 bp, Homo sapiens
aggttgctcttctcg

SEQ ID NO: 2105703 - DNA, 15 bp, Homo sapiens
ggttgctcttctcga

SEQ ID NO: 2105704 - DNA, 15 bp, Homo sapiens
gttgctcttctcgag

SEQ ID NO: 2105705 - DNA, 15 bp, Homo sapiens
ttgctcttctcgagg

SEQ ID NO: 2105706 - DNA, 15 bp, Homo sapiens
tgctcttctcgagga

SEQ ID NO: 2105707 - DNA, 15 bp, Homo sapiens
gctcttctcgaggag

SEQ ID NO: 2105708 - DNA, 15 bp, Homo sapiens
ctcttctcgaggagt

SEQ ID NO: 2105709 - DNA, 15 bp, Homo sapiens
tcttctcgaggagta

SEQ ID NO: 2105710 - DNA, 15 bp, Homo sapiens
cttctcgaggagtat

SEQ ID NO: 2105711 - DNA, 15 bp, Homo sapiens
ttctcgaggagtatc

SEQ ID NO: 2105712 - DNA, 15 bp, Homo sapiens
tctcgaggagtatca

SEQ ID NO: 2105713 - DNA, 15 bp, Homo sapiens
ctcgaggagtatcag

SEQ ID NO: 2105714 - DNA, 15 bp, Homo sapiens
tcgaggagtatcagc

SEQ ID NO: 2105715 - DNA, 15 bp, Homo sapiens
cgaggagtatcagcc

SEQ ID NO: 2105716 - DNA, 15 bp, Homo sapiens
gaggagtatcagcca

SEQ ID NO: 2105717 - DNA, 15 bp, Homo sapiens
aggagtatcagccag

SEQ ID NO: 2105718 - DNA, 15 bp, Homo sapiens
ggagtatcagccagt

SEQ ID NO: 2105719 - DNA, 15 bp, Homo sapiens
gagtatcagccagtc

SEQ ID NO: 2105720 - DNA, 15 bp, Homo sapiens
agtatcagccagtct

SEQ ID NO: 2105721 - DNA, 15 bp, Homo sapiens
gtatcagccagtctg

SEQ ID NO: 2105722 - DNA, 15 bp, Homo sapiens
tatcagccagtctgg

SEQ ID NO: 2105723 - DNA, 15 bp, Homo sapiens
atcagccagtctggt

SEQ ID NO: 2105724 - DNA, 15 bp, Homo sapiens
tcagccagtctggta

SEQ ID NO: 2105725 - DNA, 15 bp, Homo sapiens
cagccagtctggtag

SEQ ID NO: 2105726 - DNA, 15 bp, Homo sapiens
agccagtctggtaga

SEQ ID NO: 2105727 - DNA, 15 bp, Homo sapiens
gccagtctggtagaa

SEQ ID NO: 2105728 - DNA, 15 bp, Homo sapiens
ccagtctggtagaat

SEQ ID NO: 2105729 - DNA, 15 bp, Homo sapiens
cagtctggtagaatg

SEQ ID NO: 2105730 - DNA, 15 bp, Homo sapiens
agtctggtagaatga

SEQ ID NO: 2105731 - DNA, 15 bp, Homo sapiens
gtctggtagaatgaa

SEQ ID NO: 2105732 - DNA, 15 bp, Homo sapiens
tctggtagaatgaat

SEQ ID NO: 2105733 - DNA, 15 bp, Homo sapiens
ctggtagaatgaata

SEQ ID NO: 2105734 - DNA, 15 bp, Homo sapiens
tggtagaatgaataa

SEQ ID NO: 2105735 - DNA, 15 bp, Homo sapiens
ggtagaatgaataaa

SEQ ID NO: 2105736 - DNA, 15 bp, Homo sapiens
gtagaatgaataaaa

SEQ ID NO: 2105737 - DNA, 15 bp, Homo sapiens
tagaatgaataaaag

SEQ ID NO: 2105738 - DNA, 15 bp, Homo sapiens
agaatgaataaaagc

SEQ ID NO: 2105739 - DNA, 15 bp, Homo sapiens
gaatgaataaaagcc

SEQ ID NO: 2105740 - DNA, 15 bp, Homo sapiens
aatgaataaaagcca

SEQ ID NO: 2105741 - DNA, 15 bp, Homo sapiens
atgaataaaagccac

SEQ ID NO: 2105742 - DNA, 15 bp, Homo sapiens
tgaataaaagccact

SEQ ID NO: 2105743 - DNA, 15 bp, Homo sapiens
gaataaaagccacta

SEQ ID NO: 2105744 - DNA, 15 bp, Homo sapiens
aataaaagccactat

SEQ ID NO: 2105745 - DNA, 15 bp, Homo sapiens
ataaaagccactata

SEQ ID NO: 2105746 - DNA, 15 bp, Homo sapiens
taaaagccactataa

SEQ ID NO: 2105747 - DNA, 15 bp, Homo sapiens
aaaagccactataag

SEQ ID NO: 2105748 - DNA, 15 bp, Homo sapiens
aaagccactataagg

SEQ ID NO: 2105749 - DNA, 15 bp, Homo sapiens
aagccactataaggt

SEQ ID NO: 2105750 - DNA, 15 bp, Homo sapiens
agccactataaggtc

SEQ ID NO: 2105751 - DNA, 15 bp, Homo sapiens
gccactataaggtct

SEQ ID NO: 2105752 - DNA, 15 bp, Homo sapiens
ccactataaggtctg

SEQ ID NO: 2105753 - DNA, 15 bp, Homo sapiens
cactataaggtctgt

SEQ ID NO: 2105754 - DNA, 15 bp, Homo sapiens
actataaggtctgtt

SEQ ID NO: 2105755 - DNA, 15 bp, Homo sapiens
ctataaggtctgttt

SEQ ID NO: 2105756 - DNA, 15 bp, Homo sapiens
tataaggtctgttta

SEQ ID NO: 2105757 - DNA, 15 bp, Homo sapiens
ataaggtctgtttac

SEQ ID NO: 2105758 - DNA, 15 bp, Homo sapiens
taaggtctgtttacc

SEQ ID NO: 2105759 - DNA, 15 bp, Homo sapiens
aaggtctgtttaccc

SEQ ID NO: 2105760 - DNA, 15 bp, Homo sapiens
aggtctgtttaccct

SEQ ID NO: 2105761 - DNA, 15 bp, Homo sapiens
ggtctgtttaccctg

SEQ ID NO: 2105762 - DNA, 15 bp, Homo sapiens
gtctgtttaccctga

SEQ ID NO: 2105763 - DNA, 15 bp, Homo sapiens
tctgtttaccctgag

SEQ ID NO: 2105764 - DNA, 15 bp, Homo sapiens
ctgtttaccctgaga

SEQ ID NO: 2105765 - DNA, 15 bp, Homo sapiens
tgtttaccctgagaa

SEQ ID NO: 2105766 - DNA, 15 bp, Homo sapiens
gtttaccctgagaag

SEQ ID NO: 2105767 - DNA, 15 bp, Homo sapiens
tttaccctgagaagg

SEQ ID NO: 2105768 - DNA, 15 bp, Homo sapiens
ttaccctgagaaggg

SEQ ID NO: 2105769 - DNA, 15 bp, Homo sapiens
taccctgagaagggg

SEQ ID NO: 2105770 - DNA, 15 bp, Homo sapiens
accctgagaagggga

SEQ ID NO: 2105771 - DNA, 15 bp, Homo sapiens
ccctgagaaggggac

SEQ ID NO: 2105772 - DNA, 15 bp, Homo sapiens
cctgagaaggggact

SEQ ID NO: 2105773 - DNA, 15 bp, Homo sapiens
ctgagaaggggactg

SEQ ID NO: 2105774 - DNA, 15 bp, Homo sapiens
tgagaaggggactgc

SEQ ID NO: 2105775 - DNA, 15 bp, Homo sapiens
gagaaggggactgcc

SEQ ID NO: 2105776 - DNA, 15 bp, Homo sapiens
agaaggggactgccc

SEQ ID NO: 2105777 - DNA, 15 bp, Homo sapiens
gaaggggactgccca

SEQ ID NO: 2105778 - DNA, 15 bp, Homo sapiens
aaggggactgcccaa

SEQ ID NO: 2105779 - DNA, 15 bp, Homo sapiens
aggggactgcccaac

SEQ ID NO: 2105780 - DNA, 15 bp, Homo sapiens
ggggactgcccaact

SEQ ID NO: 2105781 - DNA, 15 bp, Homo sapiens
gggactgcccaactc

SEQ ID NO: 2105782 - DNA, 15 bp, Homo sapiens
ggactgcccaactct

SEQ ID NO: 2105783 - DNA, 15 bp, Homo sapiens
gactgcccaactctc

SEQ ID NO: 2105784 - DNA, 15 bp, Homo sapiens
actgcccaactctcc

SEQ ID NO: 2105785 - DNA, 15 bp, Homo sapiens
ctgcccaactctccc

SEQ ID NO: 2105786 - DNA, 15 bp, Homo sapiens
tgcccaactctccct

SEQ ID NO: 2105787 - DNA, 15 bp, Homo sapiens
gcccaactctcccta

SEQ ID NO: 2105788 - DNA, 15 bp, Homo sapiens
cccaactctccctat

SEQ ID NO: 2105789 - DNA, 15 bp, Homo sapiens
ccaactctccctata

SEQ ID NO: 2105790 - DNA, 15 bp, Homo sapiens
caactctccctataa

SEQ ID NO: 2105791 - DNA, 15 bp, Homo sapiens
aactctccctataaa

SEQ ID NO: 2105792 - DNA, 15 bp, Homo sapiens
actctccctataaaa

SEQ ID NO: 2105793 - DNA, 15 bp, Homo sapiens
ctctccctataaaat

SEQ ID NO: 2105794 - DNA, 15 bp, Homo sapiens
tctccctataaaatg

SEQ ID NO: 2105795 - DNA, 15 bp, Homo sapiens
ctccctataaaatgc

SEQ ID NO: 2105796 - DNA, 15 bp, Homo sapiens
tccctataaaatgcc

SEQ ID NO: 2105797 - DNA, 15 bp, Homo sapiens
ccctataaaatgcca

SEQ ID NO: 2105798 - DNA, 15 bp, Homo sapiens
cctataaaatgccaa

SEQ ID NO: 2105799 - DNA, 15 bp, Homo sapiens
ctataaaatgccaag

SEQ ID NO: 2105800 - DNA, 15 bp, Homo sapiens
tataaaatgccaagt

SEQ ID NO: 2105801 - DNA, 15 bp, Homo sapiens
ataaaatgccaagtg

SEQ ID NO: 2105802 - DNA, 15 bp, Homo sapiens
taaaatgccaagtgg

SEQ ID NO: 2105803 - DNA, 15 bp, Homo sapiens
aaaatgccaagtggc

SEQ ID NO: 2105804 - DNA, 15 bp, Homo sapiens
aaatgccaagtggcg

SEQ ID NO: 2105805 - DNA, 15 bp, Homo sapiens
aatgccaagtggcgc

SEQ ID NO: 2105806 - DNA, 15 bp, Homo sapiens
atgccaagtggcgca

SEQ ID NO: 2105807 - DNA, 15 bp, Homo sapiens
tgccaagtggcgcac

SEQ ID NO: 2105808 - DNA, 15 bp, Homo sapiens
gccaagtggcgcacc

SEQ ID NO: 2105809 - DNA, 15 bp, Homo sapiens
ccaagtggcgcaccc

SEQ ID NO: 2105810 - DNA, 15 bp, Homo sapiens
caagtggcgcaccct

SEQ ID NO: 2105811 - DNA, 15 bp, Homo sapiens
aagtggcgcacccta

SEQ ID NO: 2105812 - DNA, 15 bp, Homo sapiens
agtggcgcaccctac

SEQ ID NO: 2105813 - DNA, 15 bp, Homo sapiens
gtggcgcaccctaca

SEQ ID NO: 2105814 - DNA, 15 bp, Homo sapiens
tggcgcaccctacat

SEQ ID NO: 2105815 - DNA, 15 bp, Homo sapiens
ggcgcaccctacatg

SEQ ID NO: 2105816 - DNA, 15 bp, Homo sapiens
gcgcaccctacatga

SEQ ID NO: 2105817 - DNA, 15 bp, Homo sapiens
cgcaccctacatgaa

SEQ ID NO: 2105818 - DNA, 15 bp, Homo sapiens
gcaccctacatgaag

SEQ ID NO: 2105819 - DNA, 15 bp, Homo sapiens
caccctacatgaagc

SEQ ID NO: 2105820 - DNA, 15 bp, Homo sapiens
accctacatgaagca

SEQ ID NO: 2105821 - DNA, 15 bp, Homo sapiens
ccctacatgaagcag

SEQ ID NO: 2105822 - DNA, 15 bp, Homo sapiens
cctacatgaagcagc

SEQ ID NO: 2105823 - DNA, 15 bp, Homo sapiens
ctacatgaagcagct

SEQ ID NO: 2105824 - DNA, 15 bp, Homo sapiens
tacatgaagcagctg

SEQ ID NO: 2105825 - DNA, 15 bp, Homo sapiens
acatgaagcagctga

SEQ ID NO: 2105826 - DNA, 15 bp, Homo sapiens
catgaagcagctgat

SEQ ID NO: 2105827 - DNA, 15 bp, Homo sapiens
atgaagcagctgata

SEQ ID NO: 2105828 - DNA, 15 bp, Homo sapiens
tgaagcagctgatat

SEQ ID NO: 2105829 - DNA, 15 bp, Homo sapiens
gaagcagctgatatg

SEQ ID NO: 2105830 - DNA, 15 bp, Homo sapiens
aagcagctgatatgc

SEQ ID NO: 2105831 - DNA, 15 bp, Homo sapiens
agcagctgatatgct

SEQ ID NO: 2105832 - DNA, 15 bp, Homo sapiens
gcagctgatatgctt

SEQ ID NO: 2105833 - DNA, 15 bp, Homo sapiens
cagctgatatgcttc

SEQ ID NO: 2105834 - DNA, 15 bp, Homo sapiens
agctgatatgcttca

SEQ ID NO: 2105835 - DNA, 15 bp, Homo sapiens
gctgatatgcttcat

SEQ ID NO: 2105836 - DNA, 15 bp, Homo sapiens
ctgatatgcttcata

SEQ ID NO: 2105837 - DNA, 15 bp, Homo sapiens
tgatatgcttcatat

SEQ ID NO: 2105838 - DNA, 15 bp, Homo sapiens
gatatgcttcatatg

SEQ ID NO: 2105839 - DNA, 15 bp, Homo sapiens
atatgcttcatatgc

SEQ ID NO: 2105840 - DNA, 15 bp, Homo sapiens
tatgcttcatatgca

SEQ ID NO: 2105841 - DNA, 15 bp, Homo sapiens
atgcttcatatgcaa

SEQ ID NO: 2105842 - DNA, 15 bp, Homo sapiens
tgcttcatatgcaag

SEQ ID NO: 2105843 - DNA, 15 bp, Homo sapiens
gcttcatatgcaagt

SEQ ID NO: 2105844 - DNA, 15 bp, Homo sapiens
cttcatatgcaagtc

SEQ ID NO: 2105845 - DNA, 15 bp, Homo sapiens
ttcatatgcaagtca

SEQ ID NO: 2105846 - DNA, 15 bp, Homo sapiens
tcatatgcaagtcat

SEQ ID NO: 2105847 - DNA, 15 bp, Homo sapiens
catatgcaagtcatg

SEQ ID NO: 2105848 - DNA, 15 bp, Homo sapiens
atatgcaagtcatgt

SEQ ID NO: 2105849 - DNA, 15 bp, Homo sapiens
tatgcaagtcatgtt

SEQ ID NO: 2105850 - DNA, 15 bp, Homo sapiens
atgcaagtcatgttg

SEQ ID NO: 2105851 - DNA, 15 bp, Homo sapiens
tgcaagtcatgttgg

SEQ ID NO: 2105852 - DNA, 15 bp, Homo sapiens
gcaagtcatgttgga

SEQ ID NO: 2105853 - DNA, 15 bp, Homo sapiens
caagtcatgttggac

SEQ ID NO: 2105854 - DNA, 15 bp, Homo sapiens
aagtcatgttggact

SEQ ID NO: 2105855 - DNA, 15 bp, Homo sapiens
agtcatgttggactg

SEQ ID NO: 2105856 - DNA, 15 bp, Homo sapiens
gtcatgttggactgg

SEQ ID NO: 2105857 - DNA, 15 bp, Homo sapiens
tcatgttggactggc

SEQ ID NO: 2105858 - DNA, 15 bp, Homo sapiens
catgttggactggct

SEQ ID NO: 2105859 - DNA, 15 bp, Homo sapiens
atgttggactggctt

SEQ ID NO: 2105860 - DNA, 15 bp, Homo sapiens
tgttggactggcttt

SEQ ID NO: 2105861 - DNA, 15 bp, Homo sapiens
gttggactggcttta

SEQ ID NO: 2105862 - DNA, 15 bp, Homo sapiens
ttggactggctttac

SEQ ID NO: 2105863 - DNA, 15 bp, Homo sapiens
tggactggctttacc

SEQ ID NO: 2105864 - DNA, 15 bp, Homo sapiens
ggactggctttacca

SEQ ID NO: 2105865 - DNA, 15 bp, Homo sapiens
gactggctttaccat

SEQ ID NO: 2105866 - DNA, 15 bp, Homo sapiens
actggctttaccatg

SEQ ID NO: 2105867 - DNA, 15 bp, Homo sapiens
ctggctttaccatga

SEQ ID NO: 2105868 - DNA, 15 bp, Homo sapiens
tggctttaccatgat

SEQ ID NO: 2105869 - DNA, 15 bp, Homo sapiens
ggctttaccatgata

SEQ ID NO: 2105870 - DNA, 15 bp, Homo sapiens
gctttaccatgatat

SEQ ID NO: 2105871 - DNA, 15 bp, Homo sapiens
ctttaccatgatatt

SEQ ID NO: 2105872 - DNA, 15 bp, Homo sapiens
tttaccatgatattc

SEQ ID NO: 2105873 - DNA, 15 bp, Homo sapiens
ttaccatgatattcg

SEQ ID NO: 2105874 - DNA, 15 bp, Homo sapiens
taccatgatattcgc

SEQ ID NO: 2105875 - DNA, 15 bp, Homo sapiens
accatgatattcgcc

SEQ ID NO: 2105876 - DNA, 15 bp, Homo sapiens
ccatgatattcgccc

SEQ ID NO: 2105877 - DNA, 15 bp, Homo sapiens
catgatattcgccca

SEQ ID NO: 2105878 - DNA, 15 bp, Homo sapiens
atgatattcgcccac

SEQ ID NO: 2105879 - DNA, 15 bp, Homo sapiens
tgatattcgcccact

SEQ ID NO: 2105880 - DNA, 15 bp, Homo sapiens
gatattcgcccactg

SEQ ID NO: 2105881 - DNA, 15 bp, Homo sapiens
atattcgcccactga

SEQ ID NO: 2105882 - DNA, 15 bp, Homo sapiens
tattcgcccactgaa

SEQ ID NO: 2105883 - DNA, 15 bp, Homo sapiens
attcgcccactgaat

SEQ ID NO: 2105884 - DNA, 15 bp, Homo sapiens
ttcgcccactgaata

SEQ ID NO: 2105885 - DNA, 15 bp, Homo sapiens
tcgcccactgaatat

SEQ ID NO: 2105886 - DNA, 15 bp, Homo sapiens
cgcccactgaatatg

SEQ ID NO: 2105887 - DNA, 15 bp, Homo sapiens
gcccactgaatatgc

SEQ ID NO: 2105888 - DNA, 15 bp, Homo sapiens
cccactgaatatgcc

SEQ ID NO: 2105889 - DNA, 15 bp, Homo sapiens
ccactgaatatgccc

SEQ ID NO: 2105890 - DNA, 15 bp, Homo sapiens
cactgaatatgccca

SEQ ID NO: 2105891 - DNA, 15 bp, Homo sapiens
actgaatatgcccat

SEQ ID NO: 2105892 - DNA, 15 bp, Homo sapiens
ctgaatatgcccatt

SEQ ID NO: 2105893 - DNA, 15 bp, Homo sapiens
tgaatatgcccatta

SEQ ID NO: 2105894 - DNA, 15 bp, Homo sapiens
gaatatgcccattac

SEQ ID NO: 2105895 - DNA, 15 bp, Homo sapiens
aatatgcccattacc

SEQ ID NO: 2105896 - DNA, 15 bp, Homo sapiens
atatgcccattaccc

SEQ ID NO: 2105897 - DNA, 15 bp, Homo sapiens
tatgcccattaccca

SEQ ID NO: 2105898 - DNA, 15 bp, Homo sapiens
atgcccattacccag

SEQ ID NO: 2105899 - DNA, 15 bp, Homo sapiens
tgcccattacccaga

SEQ ID NO: 2105900 - DNA, 15 bp, Homo sapiens
gcccattacccagac

SEQ ID NO: 2105901 - DNA, 15 bp, Homo sapiens
cccattacccagacc

SEQ ID NO: 2105902 - DNA, 15 bp, Homo sapiens
ccattacccagacca

SEQ ID NO: 2105903 - DNA, 15 bp, Homo sapiens
cattacccagaccat

SEQ ID NO: 2105904 - DNA, 15 bp, Homo sapiens
attacccagaccatg

SEQ ID NO: 2105905 - DNA, 15 bp, Homo sapiens
ttacccagaccatgg

SEQ ID NO: 2105906 - DNA, 15 bp, Homo sapiens
tacccagaccatggt

SEQ ID NO: 2105907 - DNA, 15 bp, Homo sapiens
acccagaccatggta

SEQ ID NO: 2105908 - DNA, 15 bp, Homo sapiens
cccagaccatggtaa

SEQ ID NO: 2105909 - DNA, 15 bp, Homo sapiens
ccagaccatggtaaa

SEQ ID NO: 2105910 - DNA, 15 bp, Homo sapiens
cagaccatggtaaat

SEQ ID NO: 2105911 - DNA, 15 bp, Homo sapiens
agaccatggtaaatg

SEQ ID NO: 2105912 - DNA, 15 bp, Homo sapiens
gaccatggtaaatgc

SEQ ID NO: 2105913 - DNA, 15 bp, Homo sapiens
accatggtaaatgct

SEQ ID NO: 2105914 - DNA, 15 bp, Homo sapiens
ccatggtaaatgcta

SEQ ID NO: 2105915 - DNA, 15 bp, Homo sapiens
catggtaaatgctac

SEQ ID NO: 2105916 - DNA, 15 bp, Homo sapiens
atggtaaatgctacg

SEQ ID NO: 2105917 - DNA, 15 bp, Homo sapiens
tggtaaatgctacgg

SEQ ID NO: 2105918 - DNA, 15 bp, Homo sapiens
ggtaaatgctacggt

SEQ ID NO: 2105919 - DNA, 15 bp, Homo sapiens
gtaaatgctacggtt

SEQ ID NO: 2105920 - DNA, 15 bp, Homo sapiens
taaatgctacggttc

SEQ ID NO: 2105921 - DNA, 15 bp, Homo sapiens
aaatgctacggttca

SEQ ID NO: 2105922 - DNA, 15 bp, Homo sapiens
aatgctacggttcaa

SEQ ID NO: 2105923 - DNA, 15 bp, Homo sapiens
atgctacggttcaaa

SEQ ID NO: 2105924 - DNA, 15 bp, Homo sapiens
tgctacggttcaaag

SEQ ID NO: 2105925 - DNA, 15 bp, Homo sapiens
gctacggttcaaagg

SEQ ID NO: 2105926 - DNA, 15 bp, Homo sapiens
ctacggttcaaaggg

SEQ ID NO: 2105927 - DNA, 15 bp, Homo sapiens
tacggttcaaaggga

SEQ ID NO: 2105928 - DNA, 15 bp, Homo sapiens
acggttcaaagggac

SEQ ID NO: 2105929 - DNA, 15 bp, Homo sapiens
cggttcaaagggacc

SEQ ID NO: 2105930 - DNA, 15 bp, Homo sapiens
ggttcaaagggaccc

SEQ ID NO: 2105931 - DNA, 15 bp, Homo sapiens
gttcaaagggaccct

SEQ ID NO: 2105932 - DNA, 15 bp, Homo sapiens
ttcaaagggaccctt

SEQ ID NO: 2105933 - DNA, 15 bp, Homo sapiens
tcaaagggacccttc

SEQ ID NO: 2105934 - DNA, 15 bp, Homo sapiens
caaagggacccttct

SEQ ID NO: 2105935 - DNA, 15 bp, Homo sapiens
aaagggacccttcta

SEQ ID NO: 2105936 - DNA, 15 bp, Homo sapiens
aagggacccttctac

SEQ ID NO: 2105937 - DNA, 15 bp, Homo sapiens
agggacccttctaca

SEQ ID NO: 2105938 - DNA, 15 bp, Homo sapiens
gggacccttctacat

SEQ ID NO: 2105939 - DNA, 15 bp, Homo sapiens
ggacccttctacatg

SEQ ID NO: 2105940 - DNA, 15 bp, Homo sapiens
gacccttctacatgg

SEQ ID NO: 2105941 - DNA, 15 bp, Homo sapiens
acccttctacatggg

SEQ ID NO: 2105942 - DNA, 15 bp, Homo sapiens
cccttctacatgggt

SEQ ID NO: 2105943 - DNA, 15 bp, Homo sapiens
ccttctacatgggta

SEQ ID NO: 2105944 - DNA, 15 bp, Homo sapiens
cttctacatgggtat

SEQ ID NO: 2105945 - DNA, 15 bp, Homo sapiens
ttctacatgggtatc

SEQ ID NO: 2105946 - DNA, 15 bp, Homo sapiens
tctacatgggtatcc

SEQ ID NO: 2105947 - DNA, 15 bp, Homo sapiens
ctacatgggtatcct

SEQ ID NO: 2105948 - DNA, 15 bp, Homo sapiens
tacatgggtatcctg

SEQ ID NO: 2105949 - DNA, 15 bp, Homo sapiens
acatgggtatcctgg

SEQ ID NO: 2105950 - DNA, 15 bp, Homo sapiens
catgggtatcctggg

SEQ ID NO: 2105951 - DNA, 15 bp, Homo sapiens
atgggtatcctgggt

SEQ ID NO: 2105952 - DNA, 15 bp, Homo sapiens
tgggtatcctgggtg

SEQ ID NO: 2105953 - DNA, 15 bp, Homo sapiens
gggtatcctgggtgc

SEQ ID NO: 2105954 - DNA, 15 bp, Homo sapiens
ggtatcctgggtgcc

SEQ ID NO: 2105955 - DNA, 15 bp, Homo sapiens
gtatcctgggtgcca

SEQ ID NO: 2105956 - DNA, 15 bp, Homo sapiens
tatcctgggtgccat

SEQ ID NO: 2105957 - DNA, 15 bp, Homo sapiens
atcctgggtgccatt

SEQ ID NO: 2105958 - DNA, 15 bp, Homo sapiens
tcctgggtgccatta

SEQ ID NO: 2105959 - DNA, 15 bp, Homo sapiens
cctgggtgccattac

SEQ ID NO: 2105960 - DNA, 15 bp, Homo sapiens
ctgggtgccattact

SEQ ID NO: 2105961 - DNA, 15 bp, Homo sapiens
tgggtgccattactc

SEQ ID NO: 2105962 - DNA, 15 bp, Homo sapiens
gggtgccattactcc

SEQ ID NO: 2105963 - DNA, 15 bp, Homo sapiens
ggtgccattactcct

SEQ ID NO: 2105964 - DNA, 15 bp, Homo sapiens
gtgccattactccta

SEQ ID NO: 2105965 - DNA, 15 bp, Homo sapiens
tgccattactcctac

SEQ ID NO: 2105966 - DNA, 15 bp, Homo sapiens
gccattactcctaca

SEQ ID NO: 2105967 - DNA, 15 bp, Homo sapiens
ccattactcctacag

SEQ ID NO: 2105968 - DNA, 15 bp, Homo sapiens
cattactcctacaga

SEQ ID NO: 2105969 - DNA, 15 bp, Homo sapiens
attactcctacagaa

SEQ ID NO: 2105970 - DNA, 15 bp, Homo sapiens
ttactcctacagaat

SEQ ID NO: 2105971 - DNA, 15 bp, Homo sapiens
tactcctacagaatc

SEQ ID NO: 2105972 - DNA, 15 bp, Homo sapiens
actcctacagaatca

SEQ ID NO: 2105973 - DNA, 15 bp, Homo sapiens
ctcctacagaatcaa

SEQ ID NO: 2105974 - DNA, 15 bp, Homo sapiens
tcctacagaatcaaa

SEQ ID NO: 2105975 - DNA, 15 bp, Homo sapiens
cctacagaatcaaac

SEQ ID NO: 2105976 - DNA, 15 bp, Homo sapiens
ctacagaatcaaaca

SEQ ID NO: 2105977 - DNA, 15 bp, Homo sapiens
tacagaatcaaacaa

SEQ ID NO: 2105978 - DNA, 15 bp, Homo sapiens
acagaatcaaacaat

SEQ ID NO: 2105979 - DNA, 15 bp, Homo sapiens
cagaatcaaacaatg

SEQ ID NO: 2105980 - DNA, 15 bp, Homo sapiens
agaatcaaacaatgg

SEQ ID NO: 2105981 - DNA, 15 bp, Homo sapiens
gaatcaaacaatggt

SEQ ID NO: 2105982 - DNA, 15 bp, Homo sapiens
aatcaaacaatggtt

SEQ ID NO: 2105983 - DNA, 15 bp, Homo sapiens
atcaaacaatggttc

SEQ ID NO: 2105984 - DNA, 15 bp, Homo sapiens
tcaaacaatggttca

SEQ ID NO: 2105985 - DNA, 15 bp, Homo sapiens
caaacaatggttcaa

SEQ ID NO: 2105986 - DNA, 15 bp, Homo sapiens
aaacaatggttcaag

SEQ ID NO: 2105987 - DNA, 15 bp, Homo sapiens
aacaatggttcaaga

SEQ ID NO: 2105988 - DNA, 15 bp, Homo sapiens
acaatggttcaagaa

SEQ ID NO: 2105989 - DNA, 15 bp, Homo sapiens
caatggttcaagaag

SEQ ID NO: 2105990 - DNA, 15 bp, Homo sapiens
aatggttcaagaagc

SEQ ID NO: 2105991 - DNA, 15 bp, Homo sapiens
atggttcaagaagcc

SEQ ID NO: 2105992 - DNA, 15 bp, Homo sapiens
tggttcaagaagcct

SEQ ID NO: 2105993 - DNA, 15 bp, Homo sapiens
ggttcaagaagcctt

SEQ ID NO: 2105994 - DNA, 15 bp, Homo sapiens
gttcaagaagcctta

SEQ ID NO: 2105995 - DNA, 15 bp, Homo sapiens
ttcaagaagccttat

SEQ ID NO: 2105996 - DNA, 15 bp, Homo sapiens
tcaagaagccttatc

SEQ ID NO: 2105997 - DNA, 15 bp, Homo sapiens
caagaagccttatca

SEQ ID NO: 2105998 - DNA, 15 bp, Homo sapiens
aagaagccttatcaa

SEQ ID NO: 2105999 - DNA, 15 bp, Homo sapiens
agaagccttatcaaa

SEQ ID NO: 2106000 - DNA, 15 bp, Homo sapiens
gaagccttatcaaat

SEQ ID NO: 2106001 - DNA, 15 bp, Homo sapiens
aagccttatcaaata

SEQ ID NO: 2106002 - DNA, 15 bp, Homo sapiens
agccttatcaaatat

SEQ ID NO: 2106003 - DNA, 15 bp, Homo sapiens
gccttatcaaatatg

SEQ ID NO: 2106004 - DNA, 15 bp, Homo sapiens
ccttatcaaatatgc

SEQ ID NO: 2106005 - DNA, 15 bp, Homo sapiens
cttatcaaatatgct

SEQ ID NO: 2106006 - DNA, 15 bp, Homo sapiens
ttatcaaatatgctg

SEQ ID NO: 2106007 - DNA, 15 bp, Homo sapiens
tatcaaatatgctgt

SEQ ID NO: 2106008 - DNA, 15 bp, Homo sapiens
atcaaatatgctgtt

SEQ ID NO: 2106009 - DNA, 15 bp, Homo sapiens
tcaaatatgctgttg

SEQ ID NO: 2106010 - DNA, 15 bp, Homo sapiens
caaatatgctgttgc

SEQ ID NO: 2106011 - DNA, 15 bp, Homo sapiens
aaatatgctgttgca

SEQ ID NO: 2106012 - DNA, 15 bp, Homo sapiens
aatatgctgttgcag

SEQ ID NO: 2106013 - DNA, 15 bp, Homo sapiens
atatgctgttgcagc

SEQ ID NO: 2106014 - DNA, 15 bp, Homo sapiens
tatgctgttgcagct

SEQ ID NO: 2106015 - DNA, 15 bp, Homo sapiens
atgctgttgcagctt

SEQ ID NO: 2106016 - DNA, 15 bp, Homo sapiens
tgctgttgcagcttt

SEQ ID NO: 2106017 - DNA, 15 bp, Homo sapiens
gctgttgcagctttt

SEQ ID NO: 2106018 - DNA, 15 bp, Homo sapiens
ctgttgcagcttttc

SEQ ID NO: 2106019 - DNA, 15 bp, Homo sapiens
tgttgcagcttttcc

SEQ ID NO: 2106020 - DNA, 15 bp, Homo sapiens
gttgcagcttttcct

SEQ ID NO: 2106021 - DNA, 15 bp, Homo sapiens
ttgcagcttttcctc

SEQ ID NO: 2106022 - DNA, 15 bp, Homo sapiens
tgcagcttttcctca

SEQ ID NO: 2106023 - DNA, 15 bp, Homo sapiens
gcagcttttcctcat

SEQ ID NO: 2106024 - DNA, 15 bp, Homo sapiens
cagcttttcctcatg

SEQ ID NO: 2106025 - DNA, 15 bp, Homo sapiens
agcttttcctcatga

SEQ ID NO: 2106026 - DNA, 15 bp, Homo sapiens
gcttttcctcatgag

SEQ ID NO: 2106027 - DNA, 15 bp, Homo sapiens
cttttcctcatgagt

SEQ ID NO: 2106028 - DNA, 15 bp, Homo sapiens
ttttcctcatgagtc

SEQ ID NO: 2106029 - DNA, 15 bp, Homo sapiens
tttcctcatgagtct

SEQ ID NO: 2106030 - DNA, 15 bp, Homo sapiens
ttcctcatgagtctt

SEQ ID NO: 2106031 - DNA, 15 bp, Homo sapiens
tcctcatgagtctta

SEQ ID NO: 2106032 - DNA, 15 bp, Homo sapiens
cctcatgagtcttac

SEQ ID NO: 2106033 - DNA, 15 bp, Homo sapiens
ctcatgagtcttaca

SEQ ID NO: 2106034 - DNA, 15 bp, Homo sapiens
tcatgagtcttacag

SEQ ID NO: 2106035 - DNA, 15 bp, Homo sapiens
catgagtcttacagg

SEQ ID NO: 2106036 - DNA, 15 bp, Homo sapiens
atgagtcttacaggt

SEQ ID NO: 2106037 - DNA, 15 bp, Homo sapiens
tgagtcttacaggtg

SEQ ID NO: 2106038 - DNA, 15 bp, Homo sapiens
gagtcttacaggtgc

SEQ ID NO: 2106039 - DNA, 15 bp, Homo sapiens
agtcttacaggtgct

SEQ ID NO: 2106040 - DNA, 15 bp, Homo sapiens
gtcttacaggtgcta

SEQ ID NO: 2106041 - DNA, 15 bp, Homo sapiens
tcttacaggtgctaa

SEQ ID NO: 2106042 - DNA, 15 bp, Homo sapiens
cttacaggtgctaat

SEQ ID NO: 2106043 - DNA, 15 bp, Homo sapiens
ttacaggtgctaata

SEQ ID NO: 2106044 - DNA, 15 bp, Homo sapiens
tacaggtgctaataa

SEQ ID NO: 2106045 - DNA, 15 bp, Homo sapiens
acaggtgctaataaa

SEQ ID NO: 2106046 - DNA, 15 bp, Homo sapiens
caggtgctaataaaa

SEQ ID NO: 2106047 - DNA, 15 bp, Homo sapiens
aggtgctaataaaac

SEQ ID NO: 2106048 - DNA, 15 bp, Homo sapiens
ggtgctaataaaaca

SEQ ID NO: 2106049 - DNA, 15 bp, Homo sapiens
gtgctaataaaacat

SEQ ID NO: 2106050 - DNA, 15 bp, Homo sapiens
tgctaataaaacata

SEQ ID NO: 2106051 - DNA, 15 bp, Homo sapiens
gctaataaaacataa

SEQ ID NO: 2106052 - DNA, 15 bp, Homo sapiens
ctaataaaacataag

SEQ ID NO: 2106053 - DNA, 15 bp, Homo sapiens
taataaaacataagg

SEQ ID NO: 2106054 - DNA, 15 bp, Homo sapiens
aataaaacataagga

SEQ ID NO: 2106055 - DNA, 15 bp, Homo sapiens
ataaaacataaggat

SEQ ID NO: 2106056 - DNA, 15 bp, Homo sapiens
taaaacataaggata

SEQ ID NO: 2106057 - DNA, 15 bp, Homo sapiens
aaaacataaggataa

SEQ ID NO: 2106058 - DNA, 15 bp, Homo sapiens
aaacataaggataat

SEQ ID NO: 2106059 - DNA, 15 bp, Homo sapiens
aacataaggataatt

SEQ ID NO: 2106060 - DNA, 15 bp, Homo sapiens
acataaggataatta

SEQ ID NO: 2106061 - DNA, 15 bp, Homo sapiens
cataaggataattaa

SEQ ID NO: 2106062 - DNA, 15 bp, Homo sapiens
ataaggataattaac

SEQ ID NO: 2106063 - DNA, 15 bp, Homo sapiens
taaggataattaacc

SEQ ID NO: 2106064 - DNA, 15 bp, Homo sapiens
aaggataattaacca

SEQ ID NO: 2106065 - DNA, 15 bp, Homo sapiens
aggataattaaccaa

SEQ ID NO: 2106066 - DNA, 15 bp, Homo sapiens
ggataattaaccaaa

SEQ ID NO: 2106067 - DNA, 15 bp, Homo sapiens
gataattaaccaaaa

SEQ ID NO: 2106068 - DNA, 15 bp, Homo sapiens
ataattaaccaaaaa

SEQ ID NO: 2106069 - DNA, 15 bp, Homo sapiens
taattaaccaaaaaa

SEQ ID NO: 2106070 - DNA, 15 bp, Homo sapiens
aattaaccaaaaaaa

SEQ ID NO: 2106071 - DNA, 15 bp, Homo sapiens
attaaccaaaaaaaa

SEQ ID NO: 2106072 - DNA, 15 bp, Homo sapiens
ttaaccaaaaaaaat

SEQ ID NO: 2106073 - DNA, 15 bp, Homo sapiens
taaccaaaaaaaatg

SEQ ID NO: 2106074 - DNA, 15 bp, Homo sapiens
aaccaaaaaaaatga

SEQ ID NO: 2106075 - DNA, 15 bp, Homo sapiens
accaaaaaaaatgag

SEQ ID NO: 2106076 - DNA, 15 bp, Homo sapiens
ccaaaaaaaatgaga

SEQ ID NO: 2106077 - DNA, 15 bp, Homo sapiens
caaaaaaaatgagaa

SEQ ID NO: 2106078 - DNA, 15 bp, Homo sapiens
aaaaaaaatgagaaa

SEQ ID NO: 2106079 - DNA, 15 bp, Homo sapiens
aaaaaaatgagaaag

SEQ ID NO: 2106080 - DNA, 15 bp, Homo sapiens
aaaaaatgagaaagg

SEQ ID NO: 2106081 - DNA, 15 bp, Homo sapiens
aaaaatgagaaaggc

SEQ ID NO: 2106082 - DNA, 15 bp, Homo sapiens
aaaatgagaaaggca

SEQ ID NO: 2106083 - DNA, 15 bp, Homo sapiens
aaatgagaaaggcaa

SEQ ID NO: 2106084 - DNA, 15 bp, Homo sapiens
aatgagaaaggcaaa

SEQ ID NO: 2106085 - DNA, 15 bp, Homo sapiens
atgagaaaggcaaaa

SEQ ID NO: 2106086 - DNA, 15 bp, Homo sapiens
tgagaaaggcaaaag

SEQ ID NO: 2106087 - DNA, 15 bp, Homo sapiens
gagaaaggcaaaagg

SEQ ID NO: 2106088 - DNA, 15 bp, Homo sapiens
agaaaggcaaaaggg

SEQ ID NO: 2106089 - DNA, 15 bp, Homo sapiens
gaaaggcaaaagggg

SEQ ID NO: 2106090 - DNA, 15 bp, Homo sapiens
aaaggcaaaagggga

SEQ ID NO: 2106091 - DNA, 15 bp, Homo sapiens
aaggcaaaaggggag

SEQ ID NO: 2106092 - DNA, 15 bp, Homo sapiens
aggcaaaaggggagt

SEQ ID NO: 2106093 - DNA, 15 bp, Homo sapiens
ggcaaaaggggagtc

SEQ ID NO: 2106094 - DNA, 15 bp, Homo sapiens
gcaaaaggggagtca

SEQ ID NO: 2106095 - DNA, 15 bp, Homo sapiens
caaaaggggagtcaa

SEQ ID NO: 2106096 - DNA, 15 bp, Homo sapiens
aaaaggggagtcaaa

SEQ ID NO: 2106097 - DNA, 15 bp, Homo sapiens
aaaggggagtcaaag

SEQ ID NO: 2106098 - DNA, 15 bp, Homo sapiens
aaggggagtcaaagg

SEQ ID NO: 2106099 - DNA, 15 bp, Homo sapiens
aggggagtcaaagga

SEQ ID NO: 2106100 - DNA, 15 bp, Homo sapiens
ggggagtcaaaggac

SEQ ID NO: 2106101 - DNA, 15 bp, Homo sapiens
gggagtcaaaggact

SEQ ID NO: 2106102 - DNA, 15 bp, Homo sapiens
ggagtcaaaggactc

SEQ ID NO: 2106103 - DNA, 15 bp, Homo sapiens
gagtcaaaggactca

SEQ ID NO: 2106104 - DNA, 15 bp, Homo sapiens
agtcaaaggactcat

SEQ ID NO: 2106105 - DNA, 15 bp, Homo sapiens
gtcaaaggactcatc

SEQ ID NO: 2106106 - DNA, 15 bp, Homo sapiens
tcaaaggactcatct

SEQ ID NO: 2106107 - DNA, 15 bp, Homo sapiens
caaaggactcatctt

SEQ ID NO: 2106108 - DNA, 15 bp, Homo sapiens
aaaggactcatctta

SEQ ID NO: 2106109 - DNA, 15 bp, Homo sapiens
aaggactcatcttag

SEQ ID NO: 2106110 - DNA, 15 bp, Homo sapiens
aggactcatcttaga

SEQ ID NO: 2106111 - DNA, 15 bp, Homo sapiens
ggactcatcttagaa

SEQ ID NO: 2106112 - DNA, 15 bp, Homo sapiens
gactcatcttagaag

SEQ ID NO: 2106113 - DNA, 15 bp, Homo sapiens
actcatcttagaagg

SEQ ID NO: 2106114 - DNA, 15 bp, Homo sapiens
ctcatcttagaaggg

SEQ ID NO: 2106115 - DNA, 15 bp, Homo sapiens
tcatcttagaagggt

SEQ ID NO: 2106116 - DNA, 15 bp, Homo sapiens
catcttagaagggta

SEQ ID NO: 2106117 - DNA, 15 bp, Homo sapiens
atcttagaagggtag

SEQ ID NO: 2106118 - DNA, 15 bp, Homo sapiens
tcttagaagggtaga

SEQ ID NO: 2106119 - DNA, 15 bp, Homo sapiens
cttagaagggtagaa

SEQ ID NO: 2106120 - DNA, 15 bp, Homo sapiens
ttagaagggtagaaa

SEQ ID NO: 2106121 - DNA, 15 bp, Homo sapiens
tagaagggtagaaat

SEQ ID NO: 2106122 - DNA, 15 bp, Homo sapiens
agaagggtagaaatc

SEQ ID NO: 2106123 - DNA, 15 bp, Homo sapiens
gaagggtagaaatct

SEQ ID NO: 2106124 - DNA, 15 bp, Homo sapiens
aagggtagaaatctt

SEQ ID NO: 2106125 - DNA, 15 bp, Homo sapiens
agggtagaaatcttt

SEQ ID NO: 2106126 - DNA, 15 bp, Homo sapiens
gggtagaaatcttta

SEQ ID NO: 2106127 - DNA, 15 bp, Homo sapiens
ggtagaaatctttag

SEQ ID NO: 2106128 - DNA, 15 bp, Homo sapiens
gtagaaatctttaga

SEQ ID NO: 2106129 - DNA, 15 bp, Homo sapiens
tagaaatctttagat

SEQ ID NO: 2106130 - DNA, 15 bp, Homo sapiens
agaaatctttagatg

SEQ ID NO: 2106131 - DNA, 15 bp, Homo sapiens
gaaatctttagatgg

SEQ ID NO: 2106132 - DNA, 15 bp, Homo sapiens
aaatctttagatggt

SEQ ID NO: 2106133 - DNA, 15 bp, Homo sapiens
aatctttagatggtt

SEQ ID NO: 2106134 - DNA, 15 bp, Homo sapiens
atctttagatggtta

SEQ ID NO: 2106135 - DNA, 15 bp, Homo sapiens
tctttagatggttat

SEQ ID NO: 2106136 - DNA, 15 bp, Homo sapiens
ctttagatggttatt

SEQ ID NO: 2106137 - DNA, 15 bp, Homo sapiens
tttagatggttatta

SEQ ID NO: 2106138 - DNA, 15 bp, Homo sapiens
ttagatggttattaa

SEQ ID NO: 2106139 - DNA, 15 bp, Homo sapiens
tagatggttattaag

SEQ ID NO: 2106140 - DNA, 15 bp, Homo sapiens
agatggttattaaga

SEQ ID NO: 2106141 - DNA, 15 bp, Homo sapiens
gatggttattaagaa

SEQ ID NO: 2106142 - DNA, 15 bp, Homo sapiens
atggttattaagaaa

SEQ ID NO: 2106143 - DNA, 15 bp, Homo sapiens
tggttattaagaaat

SEQ ID NO: 2106144 - DNA, 15 bp, Homo sapiens
ggttattaagaaatg

SEQ ID NO: 2106145 - DNA, 15 bp, Homo sapiens
gttattaagaaatga

SEQ ID NO: 2106146 - DNA, 15 bp, Homo sapiens
ttattaagaaatgaa

SEQ ID NO: 2106147 - DNA, 15 bp, Homo sapiens
tattaagaaatgaaa

SEQ ID NO: 2106148 - DNA, 15 bp, Homo sapiens
attaagaaatgaaat

SEQ ID NO: 2106149 - DNA, 15 bp, Homo sapiens
ttaagaaatgaaata

SEQ ID NO: 2106150 - DNA, 15 bp, Homo sapiens
taagaaatgaaatag

SEQ ID NO: 2106151 - DNA, 15 bp, Homo sapiens
aagaaatgaaatagc

SEQ ID NO: 2106152 - DNA, 15 bp, Homo sapiens
agaaatgaaatagcc

SEQ ID NO: 2106153 - DNA, 15 bp, Homo sapiens
gaaatgaaatagcca

SEQ ID NO: 2106154 - DNA, 15 bp, Homo sapiens
aaatgaaatagccag

SEQ ID NO: 2106155 - DNA, 15 bp, Homo sapiens
aatgaaatagccagg

SEQ ID NO: 2106156 - DNA, 15 bp, Homo sapiens
atgaaatagccaggc

SEQ ID NO: 2106157 - DNA, 15 bp, Homo sapiens
tgaaatagccaggca

SEQ ID NO: 2106158 - DNA, 15 bp, Homo sapiens
gaaatagccaggcac

SEQ ID NO: 2106159 - DNA, 15 bp, Homo sapiens
aaatagccaggcaca

SEQ ID NO: 2106160 - DNA, 15 bp, Homo sapiens
aatagccaggcacag

SEQ ID NO: 2106161 - DNA, 15 bp, Homo sapiens
atagccaggcacagg

SEQ ID NO: 2106162 - DNA, 15 bp, Homo sapiens
tagccaggcacaggg

SEQ ID NO: 2106163 - DNA, 15 bp, Homo sapiens
agccaggcacagggc

SEQ ID NO: 2106164 - DNA, 15 bp, Homo sapiens
gccaggcacagggct

SEQ ID NO: 2106165 - DNA, 15 bp, Homo sapiens
ccaggcacagggctc

SEQ ID NO: 2106166 - DNA, 15 bp, Homo sapiens
caggcacagggctca

SEQ ID NO: 2106167 - DNA, 15 bp, Homo sapiens
aggcacagggctcat

SEQ ID NO: 2106168 - DNA, 15 bp, Homo sapiens
ggcacagggctcatt

SEQ ID NO: 2106169 - DNA, 15 bp, Homo sapiens
gcacagggctcattc

SEQ ID NO: 2106170 - DNA, 15 bp, Homo sapiens
cacagggctcattcc

SEQ ID NO: 2106171 - DNA, 15 bp, Homo sapiens
acagggctcattcct

SEQ ID NO: 2106172 - DNA, 15 bp, Homo sapiens
cagggctcattccta

SEQ ID NO: 2106173 - DNA, 15 bp, Homo sapiens
agggctcattcctat

SEQ ID NO: 2106174 - DNA, 15 bp, Homo sapiens
gggctcattcctata

SEQ ID NO: 2106175 - DNA, 15 bp, Homo sapiens
ggctcattcctataa

SEQ ID NO: 2106176 - DNA, 15 bp, Homo sapiens
gctcattcctataat

SEQ ID NO: 2106177 - DNA, 15 bp, Homo sapiens
ctcattcctataatc

SEQ ID NO: 2106178 - DNA, 15 bp, Homo sapiens
tcattcctataatcc

SEQ ID NO: 2106179 - DNA, 15 bp, Homo sapiens
cattcctataatccc

SEQ ID NO: 2106180 - DNA, 15 bp, Homo sapiens
attcctataatccca

SEQ ID NO: 2106181 - DNA, 15 bp, Homo sapiens
ttcctataatcccag

SEQ ID NO: 2106182 - DNA, 15 bp, Homo sapiens
tcctataatcccagc

SEQ ID NO: 2106183 - DNA, 15 bp, Homo sapiens
cccagcactttgggt

SEQ ID NO: 2106184 - DNA, 15 bp, Homo sapiens
ccagcactttgggtg

SEQ ID NO: 2106185 - DNA, 15 bp, Homo sapiens
cagcactttgggtga

SEQ ID NO: 2106186 - DNA, 15 bp, Homo sapiens
agcactttgggtgac

SEQ ID NO: 2106187 - DNA, 15 bp, Homo sapiens
gcactttgggtgacc

SEQ ID NO: 2106188 - DNA, 15 bp, Homo sapiens
cactttgggtgaccg

SEQ ID NO: 2106189 - DNA, 15 bp, Homo sapiens
actttgggtgaccga

SEQ ID NO: 2106190 - DNA, 15 bp, Homo sapiens
ctttgggtgaccgag

SEQ ID NO: 2106191 - DNA, 15 bp, Homo sapiens
tttgggtgaccgagg

SEQ ID NO: 2106192 - DNA, 15 bp, Homo sapiens
ttgggtgaccgaggc

SEQ ID NO: 2106193 - DNA, 15 bp, Homo sapiens
tgggtgaccgaggca

SEQ ID NO: 2106194 - DNA, 15 bp, Homo sapiens
gggtgaccgaggcag

SEQ ID NO: 2106195 - DNA, 15 bp, Homo sapiens
ggtgaccgaggcagg

SEQ ID NO: 2106196 - DNA, 15 bp, Homo sapiens
gtgaccgaggcaggc

SEQ ID NO: 2106197 - DNA, 15 bp, Homo sapiens
tgaccgaggcaggca

SEQ ID NO: 2106198 - DNA, 15 bp, Homo sapiens
gaccgaggcaggcag

SEQ ID NO: 2106199 - DNA, 15 bp, Homo sapiens
accgaggcaggcaga

SEQ ID NO: 2106200 - DNA, 15 bp, Homo sapiens
ctggccaacatggtc

SEQ ID NO: 2106201 - DNA, 15 bp, Homo sapiens
tggccaacatggtca

SEQ ID NO: 2106202 - DNA, 15 bp, Homo sapiens
ggccaacatggtcaa

SEQ ID NO: 2106203 - DNA, 15 bp, Homo sapiens
gccaacatggtcaaa

SEQ ID NO: 2106204 - DNA, 15 bp, Homo sapiens
ccaacatggtcaaac

SEQ ID NO: 2106205 - DNA, 15 bp, Homo sapiens
caacatggtcaaacc

SEQ ID NO: 2106206 - DNA, 15 bp, Homo sapiens
aacatggtcaaaccc

SEQ ID NO: 2106207 - DNA, 15 bp, Homo sapiens
acatggtcaaacccc

SEQ ID NO: 2106208 - DNA, 15 bp, Homo sapiens
catggtcaaacccca

SEQ ID NO: 2106209 - DNA, 15 bp, Homo sapiens
atggtcaaaccccat

SEQ ID NO: 2106210 - DNA, 15 bp, Homo sapiens
tggtcaaaccccatc

SEQ ID NO: 2106211 - DNA, 15 bp, Homo sapiens
ggtcaaaccccatct

SEQ ID NO: 2106212 - DNA, 15 bp, Homo sapiens
gtcaaaccccatctt

SEQ ID NO: 2106213 - DNA, 15 bp, Homo sapiens
tcaaaccccatcttt

SEQ ID NO: 2106214 - DNA, 15 bp, Homo sapiens
caaaccccatcttta

SEQ ID NO: 2106215 - DNA, 15 bp, Homo sapiens
aaaccccatctttat

SEQ ID NO: 2106216 - DNA, 15 bp, Homo sapiens
aaccccatctttatg

SEQ ID NO: 2106217 - DNA, 15 bp, Homo sapiens
accccatctttatga

SEQ ID NO: 2106218 - DNA, 15 bp, Homo sapiens
ccccatctttatgaa

SEQ ID NO: 2106219 - DNA, 15 bp, Homo sapiens
cccatctttatgaaa

SEQ ID NO: 2106220 - DNA, 15 bp, Homo sapiens
ccatctttatgaaaa

SEQ ID NO: 2106221 - DNA, 15 bp, Homo sapiens
catctttatgaaaaa

SEQ ID NO: 2106222 - DNA, 15 bp, Homo sapiens
atctttatgaaaaat

SEQ ID NO: 2106223 - DNA, 15 bp, Homo sapiens
tctttatgaaaaata

SEQ ID NO: 2106224 - DNA, 15 bp, Homo sapiens
ctttatgaaaaatac

SEQ ID NO: 2106225 - DNA, 15 bp, Homo sapiens
tttatgaaaaataca

SEQ ID NO: 2106226 - DNA, 15 bp, Homo sapiens
ttatgaaaaatacaa

SEQ ID NO: 2106227 - DNA, 15 bp, Homo sapiens
atgaaaaatacaaaa

SEQ ID NO: 2106228 - DNA, 15 bp, Homo sapiens
tgaaaaatacaaaaa

SEQ ID NO: 2106229 - DNA, 15 bp, Homo sapiens
acaaaaattagccga

SEQ ID NO: 2106230 - DNA, 15 bp, Homo sapiens
caaaaattagccgaa

SEQ ID NO: 2106231 - DNA, 15 bp, Homo sapiens
aaaaattagccgaat

SEQ ID NO: 2106232 - DNA, 15 bp, Homo sapiens
aaaattagccgaatg

SEQ ID NO: 2106233 - DNA, 15 bp, Homo sapiens
aaattagccgaatgt

SEQ ID NO: 2106234 - DNA, 15 bp, Homo sapiens
aattagccgaatgtg

SEQ ID NO: 2106235 - DNA, 15 bp, Homo sapiens
attagccgaatgtgg

SEQ ID NO: 2106236 - DNA, 15 bp, Homo sapiens
ttagccgaatgtggt

SEQ ID NO: 2106237 - DNA, 15 bp, Homo sapiens
tagccgaatgtggtg

SEQ ID NO: 2106238 - DNA, 15 bp, Homo sapiens
agccgaatgtggtgg

SEQ ID NO: 2106239 - DNA, 15 bp, Homo sapiens
gccgaatgtggtggc

SEQ ID NO: 2106240 - DNA, 15 bp, Homo sapiens
ccgaatgtggtggca

SEQ ID NO: 2106241 - DNA, 15 bp, Homo sapiens
cgaatgtggtggcat

SEQ ID NO: 2106242 - DNA, 15 bp, Homo sapiens
gaatgtggtggcatg

SEQ ID NO: 2106243 - DNA, 15 bp, Homo sapiens
aatgtggtggcatgt

SEQ ID NO: 2106244 - DNA, 15 bp, Homo sapiens
atgtggtggcatgtg

SEQ ID NO: 2106245 - DNA, 15 bp, Homo sapiens
ggcatgtgcctgtaa

SEQ ID NO: 2106246 - DNA, 15 bp, Homo sapiens
gcatgtgcctgtaag

SEQ ID NO: 2106247 - DNA, 15 bp, Homo sapiens
catgtgcctgtaaga

SEQ ID NO: 2106248 - DNA, 15 bp, Homo sapiens
atgtgcctgtaagag

SEQ ID NO: 2106249 - DNA, 15 bp, Homo sapiens
tgtgcctgtaagagt

SEQ ID NO: 2106250 - DNA, 15 bp, Homo sapiens
gtgcctgtaagagta

SEQ ID NO: 2106251 - DNA, 15 bp, Homo sapiens
tgcctgtaagagtat

SEQ ID NO: 2106252 - DNA, 15 bp, Homo sapiens
gcctgtaagagtatg

SEQ ID NO: 2106253 - DNA, 15 bp, Homo sapiens
cctgtaagagtatga

SEQ ID NO: 2106254 - DNA, 15 bp, Homo sapiens
ctgtaagagtatgaa

SEQ ID NO: 2106255 - DNA, 15 bp, Homo sapiens
tgtaagagtatgaat

SEQ ID NO: 2106256 - DNA, 15 bp, Homo sapiens
gtaagagtatgaatt

SEQ ID NO: 2106257 - DNA, 15 bp, Homo sapiens
taagagtatgaattc

SEQ ID NO: 2106258 - DNA, 15 bp, Homo sapiens
aagagtatgaattcc

SEQ ID NO: 2106259 - DNA, 15 bp, Homo sapiens
agagtatgaattccc

SEQ ID NO: 2106260 - DNA, 15 bp, Homo sapiens
gagtatgaattcccc

SEQ ID NO: 2106261 - DNA, 15 bp, Homo sapiens
agtatgaattcccct

SEQ ID NO: 2106262 - DNA, 15 bp, Homo sapiens
gtatgaattcccctg

SEQ ID NO: 2106263 - DNA, 15 bp, Homo sapiens
tatgaattcccctgg

SEQ ID NO: 2106264 - DNA, 15 bp, Homo sapiens
atgaattcccctgga

SEQ ID NO: 2106265 - DNA, 15 bp, Homo sapiens
tgaattcccctggag

SEQ ID NO: 2106266 - DNA, 15 bp, Homo sapiens
gaattcccctggagt

SEQ ID NO: 2106267 - DNA, 15 bp, Homo sapiens
aattcccctggagtc

SEQ ID NO: 2106268 - DNA, 15 bp, Homo sapiens
attcccctggagtct

SEQ ID NO: 2106269 - DNA, 15 bp, Homo sapiens
ttcccctggagtctg

SEQ ID NO: 2106270 - DNA, 15 bp, Homo sapiens
tcccctggagtctgt

SEQ ID NO: 2106271 - DNA, 15 bp, Homo sapiens
cccctggagtctgtg

SEQ ID NO: 2106272 - DNA, 15 bp, Homo sapiens
ccctggagtctgtgg

SEQ ID NO: 2106273 - DNA, 15 bp, Homo sapiens
cctggagtctgtggt

SEQ ID NO: 2106274 - DNA, 15 bp, Homo sapiens
ctggagtctgtggtt

SEQ ID NO: 2106275 - DNA, 15 bp, Homo sapiens
tggagtctgtggttt

SEQ ID NO: 2106276 - DNA, 15 bp, Homo sapiens
ggagtctgtggtttc

SEQ ID NO: 2106277 - DNA, 15 bp, Homo sapiens
gagtctgtggtttcc

SEQ ID NO: 2106278 - DNA, 15 bp, Homo sapiens
agtctgtggtttcca

SEQ ID NO: 2106279 - DNA, 15 bp, Homo sapiens
gtctgtggtttccaa

SEQ ID NO: 2106280 - DNA, 15 bp, Homo sapiens
tctgtggtttccaag

SEQ ID NO: 2106281 - DNA, 15 bp, Homo sapiens
ctgtggtttccaagg

SEQ ID NO: 2106282 - DNA, 15 bp, Homo sapiens
tgtggtttccaaggg

SEQ ID NO: 2106283 - DNA, 15 bp, Homo sapiens
gtggtttccaagggc

SEQ ID NO: 2106284 - DNA, 15 bp, Homo sapiens
tggtttccaagggct

SEQ ID NO: 2106285 - DNA, 15 bp, Homo sapiens
ggtttccaagggctc

SEQ ID NO: 2106286 - DNA, 15 bp, Homo sapiens
gtttccaagggctct

SEQ ID NO: 2106287 - DNA, 15 bp, Homo sapiens
tttccaagggctcta

SEQ ID NO: 2106288 - DNA, 15 bp, Homo sapiens
ttccaagggctctat

SEQ ID NO: 2106289 - DNA, 15 bp, Homo sapiens
tccaagggctctatg

SEQ ID NO: 2106290 - DNA, 15 bp, Homo sapiens
ccaagggctctatgc

SEQ ID NO: 2106291 - DNA, 15 bp, Homo sapiens
caagggctctatgca

SEQ ID NO: 2106292 - DNA, 15 bp, Homo sapiens
aagggctctatgcac

SEQ ID NO: 2106293 - DNA, 15 bp, Homo sapiens
agggctctatgcact

SEQ ID NO: 2106294 - DNA, 15 bp, Homo sapiens
gggctctatgcactc

SEQ ID NO: 2106295 - DNA, 15 bp, Homo sapiens
ggctctatgcactca

SEQ ID NO: 2106296 - DNA, 15 bp, Homo sapiens
gctctatgcactcat

SEQ ID NO: 2106297 - DNA, 15 bp, Homo sapiens
ctctatgcactcatg

SEQ ID NO: 2106298 - DNA, 15 bp, Homo sapiens
tctatgcactcatgc

SEQ ID NO: 2106299 - DNA, 15 bp, Homo sapiens
ctatgcactcatgct

SEQ ID NO: 2106300 - DNA, 15 bp, Homo sapiens
tatgcactcatgcta

SEQ ID NO: 2106301 - DNA, 15 bp, Homo sapiens
atgcactcatgctag

SEQ ID NO: 2106302 - DNA, 15 bp, Homo sapiens
tgcactcatgctagc

SEQ ID NO: 2106303 - DNA, 15 bp, Homo sapiens
gcactcatgctagcc

SEQ ID NO: 2106304 - DNA, 15 bp, Homo sapiens
cactcatgctagccc

SEQ ID NO: 2106305 - DNA, 15 bp, Homo sapiens
actcatgctagccca

SEQ ID NO: 2106306 - DNA, 15 bp, Homo sapiens
ctcatgctagcccac

SEQ ID NO: 2106307 - DNA, 15 bp, Homo sapiens
tcatgctagcccaca

SEQ ID NO: 2106308 - DNA, 15 bp, Homo sapiens
catgctagcccacac

SEQ ID NO: 2106309 - DNA, 15 bp, Homo sapiens
atgctagcccacact

SEQ ID NO: 2106310 - DNA, 15 bp, Homo sapiens
tgctagcccacactt

SEQ ID NO: 2106311 - DNA, 15 bp, Homo sapiens
gctagcccacacttg

SEQ ID NO: 2106312 - DNA, 15 bp, Homo sapiens
ctagcccacacttgg

SEQ ID NO: 2106313 - DNA, 15 bp, Homo sapiens
tagcccacacttggc

SEQ ID NO: 2106314 - DNA, 15 bp, Homo sapiens
agcccacacttggcc

SEQ ID NO: 2106315 - DNA, 15 bp, Homo sapiens
gcccacacttggcct

SEQ ID NO: 2106316 - DNA, 15 bp, Homo sapiens
cccacacttggcctt

SEQ ID NO: 2106317 - DNA, 15 bp, Homo sapiens
ccacacttggccttt

SEQ ID NO: 2106318 - DNA, 15 bp, Homo sapiens
cacacttggccttta

SEQ ID NO: 2106319 - DNA, 15 bp, Homo sapiens
acacttggcctttag

SEQ ID NO: 2106320 - DNA, 15 bp, Homo sapiens
cacttggcctttaga

SEQ ID NO: 2106321 - DNA, 15 bp, Homo sapiens
acttggcctttagat

SEQ ID NO: 2106322 - DNA, 15 bp, Homo sapiens
cttggcctttagatg

SEQ ID NO: 2106323 - DNA, 15 bp, Homo sapiens
ttggcctttagatgt

SEQ ID NO: 2106324 - DNA, 15 bp, Homo sapiens
tggcctttagatgtt

SEQ ID NO: 2106325 - DNA, 15 bp, Homo sapiens
ggcctttagatgttt

SEQ ID NO: 2106326 - DNA, 15 bp, Homo sapiens
gcctttagatgttta

SEQ ID NO: 2106327 - DNA, 15 bp, Homo sapiens
cctttagatgtttaa

SEQ ID NO: 2106328 - DNA, 15 bp, Homo sapiens
ctttagatgtttaac

SEQ ID NO: 2106329 - DNA, 15 bp, Homo sapiens
tttagatgtttaact

SEQ ID NO: 2106330 - DNA, 15 bp, Homo sapiens
ttagatgtttaactt

SEQ ID NO: 2106331 - DNA, 15 bp, Homo sapiens
tagatgtttaacttt

SEQ ID NO: 2106332 - DNA, 15 bp, Homo sapiens
agatgtttaactttt

SEQ ID NO: 2106333 - DNA, 15 bp, Homo sapiens
gatgtttaactttta

SEQ ID NO: 2106334 - DNA, 15 bp, Homo sapiens
atgtttaacttttaa

SEQ ID NO: 2106335 - DNA, 15 bp, Homo sapiens
tgtttaacttttaat

SEQ ID NO: 2106336 - DNA, 15 bp, Homo sapiens
gtttaacttttaatc

SEQ ID NO: 2106337 - DNA, 15 bp, Homo sapiens
tttaacttttaatcg

SEQ ID NO: 2106338 - DNA, 15 bp, Homo sapiens
ttaacttttaatcga

SEQ ID NO: 2106339 - DNA, 15 bp, Homo sapiens
taacttttaatcgaa

SEQ ID NO: 2106340 - DNA, 15 bp, Homo sapiens
aacttttaatcgaat

SEQ ID NO: 2106341 - DNA, 15 bp, Homo sapiens
acttttaatcgaatt

SEQ ID NO: 2106342 - DNA, 15 bp, Homo sapiens
cttttaatcgaattc

SEQ ID NO: 2106343 - DNA, 15 bp, Homo sapiens
ttttaatcgaattcc

SEQ ID NO: 2106344 - DNA, 15 bp, Homo sapiens
tttaatcgaattcct

SEQ ID NO: 2106345 - DNA, 15 bp, Homo sapiens
ttaatcgaattcctc

SEQ ID NO: 2106346 - DNA, 15 bp, Homo sapiens
taatcgaattcctca

SEQ ID NO: 2106347 - DNA, 15 bp, Homo sapiens
aatcgaattcctcat

SEQ ID NO: 2106348 - DNA, 15 bp, Homo sapiens
atcgaattcctcata

SEQ ID NO: 2106349 - DNA, 15 bp, Homo sapiens
tcgaattcctcatac

SEQ ID NO: 2106350 - DNA, 15 bp, Homo sapiens
cgaattcctcatact

SEQ ID NO: 2106351 - DNA, 15 bp, Homo sapiens
gaattcctcatactt

SEQ ID NO: 2106352 - DNA, 15 bp, Homo sapiens
aattcctcatacttg

SEQ ID NO: 2106353 - DNA, 15 bp, Homo sapiens
attcctcatacttgc

SEQ ID NO: 2106354 - DNA, 15 bp, Homo sapiens
ttcctcatacttgct

SEQ ID NO: 2106355 - DNA, 15 bp, Homo sapiens
tcctcatacttgctt

SEQ ID NO: 2106356 - DNA, 15 bp, Homo sapiens
cctcatacttgctta

SEQ ID NO: 2106357 - DNA, 15 bp, Homo sapiens
ctcatacttgcttat

SEQ ID NO: 2106358 - DNA, 15 bp, Homo sapiens
tcatacttgcttata

SEQ ID NO: 2106359 - DNA, 15 bp, Homo sapiens
catacttgcttatat

SEQ ID NO: 2106360 - DNA, 15 bp, Homo sapiens
atacttgcttatatg

SEQ ID NO: 2106361 - DNA, 15 bp, Homo sapiens
tacttgcttatatgg

SEQ ID NO: 2106362 - DNA, 15 bp, Homo sapiens
acttgcttatatgga

SEQ ID NO: 2106363 - DNA, 15 bp, Homo sapiens
cttgcttatatggag

SEQ ID NO: 2106364 - DNA, 15 bp, Homo sapiens
ttgcttatatggagg

SEQ ID NO: 2106365 - DNA, 15 bp, Homo sapiens
tgcttatatggaggc

SEQ ID NO: 2106366 - DNA, 15 bp, Homo sapiens
gcttatatggaggcc

SEQ ID NO: 2106367 - DNA, 15 bp, Homo sapiens
cttatatggaggcct

SEQ ID NO: 2106368 - DNA, 15 bp, Homo sapiens
ttatatggaggcctt

SEQ ID NO: 2106369 - DNA, 15 bp, Homo sapiens
tatatggaggcctta

SEQ ID NO: 2106370 - DNA, 15 bp, Homo sapiens
atatggaggccttat

SEQ ID NO: 2106371 - DNA, 15 bp, Homo sapiens
tatggaggccttatc

SEQ ID NO: 2106372 - DNA, 15 bp, Homo sapiens
atggaggccttatct

SEQ ID NO: 2106373 - DNA, 15 bp, Homo sapiens
tggaggccttatctt

SEQ ID NO: 2106374 - DNA, 15 bp, Homo sapiens
ggaggccttatcttc

SEQ ID NO: 2106375 - DNA, 15 bp, Homo sapiens
gaggccttatcttcc

SEQ ID NO: 2106376 - DNA, 15 bp, Homo sapiens
aggccttatcttccc

SEQ ID NO: 2106377 - DNA, 15 bp, Homo sapiens
ggccttatcttccca

SEQ ID NO: 2106378 - DNA, 15 bp, Homo sapiens
gccttatcttcccat

SEQ ID NO: 2106379 - DNA, 15 bp, Homo sapiens
ccttatcttcccatt

SEQ ID NO: 2106380 - DNA, 15 bp, Homo sapiens
cttatcttcccattg

SEQ ID NO: 2106381 - DNA, 15 bp, Homo sapiens
ttatcttcccattga

SEQ ID NO: 2106382 - DNA, 15 bp, Homo sapiens
tatcttcccattgac

SEQ ID NO: 2106383 - DNA, 15 bp, Homo sapiens
atcttcccattgaca

SEQ ID NO: 2106384 - DNA, 15 bp, Homo sapiens
tcttcccattgacac

SEQ ID NO: 2106385 - DNA, 15 bp, Homo sapiens
cttcccattgacaca

SEQ ID NO: 2106386 - DNA, 15 bp, Homo sapiens
ttcccattgacacag

SEQ ID NO: 2106387 - DNA, 15 bp, Homo sapiens
tcccattgacacagg

SEQ ID NO: 2106388 - DNA, 15 bp, Homo sapiens
cccattgacacaggt

SEQ ID NO: 2106389 - DNA, 15 bp, Homo sapiens
ccattgacacaggtg

SEQ ID NO: 2106390 - DNA, 15 bp, Homo sapiens
cattgacacaggtga

SEQ ID NO: 2106391 - DNA, 15 bp, Homo sapiens
attgacacaggtgag

SEQ ID NO: 2106392 - DNA, 15 bp, Homo sapiens
ttgacacaggtgagc

SEQ ID NO: 2106393 - DNA, 15 bp, Homo sapiens
tgacacaggtgagcc

SEQ ID NO: 2106394 - DNA, 15 bp, Homo sapiens
gacacaggtgagcca

SEQ ID NO: 2106395 - DNA, 15 bp, Homo sapiens
acacaggtgagccag

SEQ ID NO: 2106396 - DNA, 15 bp, Homo sapiens
cacaggtgagccagt

SEQ ID NO: 2106397 - DNA, 15 bp, Homo sapiens
acaggtgagccagtg

SEQ ID NO: 2106398 - DNA, 15 bp, Homo sapiens
caggtgagccagtgt

SEQ ID NO: 2106399 - DNA, 15 bp, Homo sapiens
aggtgagccagtgtt

SEQ ID NO: 2106400 - DNA, 15 bp, Homo sapiens
ggtgagccagtgttc

SEQ ID NO: 2106401 - DNA, 15 bp, Homo sapiens
gtgagccagtgttca

SEQ ID NO: 2106402 - DNA, 15 bp, Homo sapiens
tgagccagtgttcat

SEQ ID NO: 2106403 - DNA, 15 bp, Homo sapiens
gagccagtgttcatg

SEQ ID NO: 2106404 - DNA, 15 bp, Homo sapiens
agccagtgttcatgt

SEQ ID NO: 2106405 - DNA, 15 bp, Homo sapiens
gccagtgttcatgtt

SEQ ID NO: 2106406 - DNA, 15 bp, Homo sapiens
ccagtgttcatgttc

SEQ ID NO: 2106407 - DNA, 15 bp, Homo sapiens
cagtgttcatgttct

SEQ ID NO: 2106408 - DNA, 15 bp, Homo sapiens
agtgttcatgttctg

SEQ ID NO: 2106409 - DNA, 15 bp, Homo sapiens
gtgttcatgttctgt

SEQ ID NO: 2106410 - DNA, 15 bp, Homo sapiens
tgttcatgttctgtc

SEQ ID NO: 2106411 - DNA, 15 bp, Homo sapiens
gttcatgttctgtct

SEQ ID NO: 2106412 - DNA, 15 bp, Homo sapiens
ttcatgttctgtctt

SEQ ID NO: 2106413 - DNA, 15 bp, Homo sapiens
tcatgttctgtcttt

SEQ ID NO: 2106414 - DNA, 15 bp, Homo sapiens
catgttctgtctttt

SEQ ID NO: 2106415 - DNA, 15 bp, Homo sapiens
atgttctgtcttttc

SEQ ID NO: 2106416 - DNA, 15 bp, Homo sapiens
tgttctgtcttttct

SEQ ID NO: 2106417 - DNA, 15 bp, Homo sapiens
gttctgtcttttctt

SEQ ID NO: 2106418 - DNA, 15 bp, Homo sapiens
ttctgtcttttcttg

SEQ ID NO: 2106419 - DNA, 15 bp, Homo sapiens
tctgtcttttcttga

SEQ ID NO: 2106420 - DNA, 15 bp, Homo sapiens
ctgtcttttcttgaa

SEQ ID NO: 2106421 - DNA, 15 bp, Homo sapiens
tgtcttttcttgaaa

SEQ ID NO: 2106422 - DNA, 15 bp, Homo sapiens
gtcttttcttgaaaa

SEQ ID NO: 2106423 - DNA, 15 bp, Homo sapiens
tcttttcttgaaaaa

SEQ ID NO: 2106424 - DNA, 15 bp, Homo sapiens
cttttcttgaaaaag

SEQ ID NO: 2106425 - DNA, 15 bp, Homo sapiens
ttttcttgaaaaagt

SEQ ID NO: 2106426 - DNA, 15 bp, Homo sapiens
tttcttgaaaaagtc

SEQ ID NO: 2106427 - DNA, 15 bp, Homo sapiens
ttcttgaaaaagtcc

SEQ ID NO: 2106428 - DNA, 15 bp, Homo sapiens
tcttgaaaaagtcca

SEQ ID NO: 2106429 - DNA, 15 bp, Homo sapiens
cttgaaaaagtccat

SEQ ID NO: 2106430 - DNA, 15 bp, Homo sapiens
ttgaaaaagtccatc

SEQ ID NO: 2106431 - DNA, 15 bp, Homo sapiens
tgaaaaagtccatct

SEQ ID NO: 2106432 - DNA, 15 bp, Homo sapiens
gaaaaagtccatctt

SEQ ID NO: 2106433 - DNA, 15 bp, Homo sapiens
aaaaagtccatcttt

SEQ ID NO: 2106434 - DNA, 15 bp, Homo sapiens
aaaagtccatctttc

SEQ ID NO: 2106435 - DNA, 15 bp, Homo sapiens
aaagtccatctttcc

SEQ ID NO: 2106436 - DNA, 15 bp, Homo sapiens
aagtccatctttcct

SEQ ID NO: 2106437 - DNA, 15 bp, Homo sapiens
agtccatctttcctt

SEQ ID NO: 2106438 - DNA, 15 bp, Homo sapiens
gtccatctttcctta

SEQ ID NO: 2106439 - DNA, 15 bp, Homo sapiens
tccatctttccttag

SEQ ID NO: 2106440 - DNA, 15 bp, Homo sapiens
ccatctttccttaga

SEQ ID NO: 2106441 - DNA, 15 bp, Homo sapiens
catctttccttagag

SEQ ID NO: 2106442 - DNA, 15 bp, Homo sapiens
atctttccttagagt

SEQ ID NO: 2106443 - DNA, 15 bp, Homo sapiens
tctttccttagagtt

SEQ ID NO: 2106444 - DNA, 15 bp, Homo sapiens
ctttccttagagttc

SEQ ID NO: 2106445 - DNA, 15 bp, Homo sapiens
tttccttagagttca

SEQ ID NO: 2106446 - DNA, 15 bp, Homo sapiens
ttccttagagttcag

SEQ ID NO: 2106447 - DNA, 15 bp, Homo sapiens
tccttagagttcagg

SEQ ID NO: 2106448 - DNA, 15 bp, Homo sapiens
ccttagagttcaggc

SEQ ID NO: 2106449 - DNA, 15 bp, Homo sapiens
cttagagttcaggct

SEQ ID NO: 2106450 - DNA, 15 bp, Homo sapiens
ttagagttcaggcta

SEQ ID NO: 2106451 - DNA, 15 bp, Homo sapiens
tagagttcaggctag

SEQ ID NO: 2106452 - DNA, 15 bp, Homo sapiens
agagttcaggctagt

SEQ ID NO: 2106453 - DNA, 15 bp, Homo sapiens
gagttcaggctagtt

SEQ ID NO: 2106454 - DNA, 15 bp, Homo sapiens
agttcaggctagtta

SEQ ID NO: 2106455 - DNA, 15 bp, Homo sapiens
gttcaggctagttag

SEQ ID NO: 2106456 - DNA, 15 bp, Homo sapiens
ttcaggctagttagt

SEQ ID NO: 2106457 - DNA, 15 bp, Homo sapiens
tcaggctagttagtt

SEQ ID NO: 2106458 - DNA, 15 bp, Homo sapiens
caggctagttagttg

SEQ ID NO: 2106459 - DNA, 15 bp, Homo sapiens
aggctagttagttgc

SEQ ID NO: 2106460 - DNA, 15 bp, Homo sapiens
ggctagttagttgcc

SEQ ID NO: 2106461 - DNA, 15 bp, Homo sapiens
gctagttagttgccc

SEQ ID NO: 2106462 - DNA, 15 bp, Homo sapiens
ctagttagttgccct

SEQ ID NO: 2106463 - DNA, 15 bp, Homo sapiens
tagttagttgccctg

SEQ ID NO: 2106464 - DNA, 15 bp, Homo sapiens
agttagttgccctgc

SEQ ID NO: 2106465 - DNA, 15 bp, Homo sapiens
gttagttgccctgca

SEQ ID NO: 2106466 - DNA, 15 bp, Homo sapiens
ttagttgccctgcac

SEQ ID NO: 2106467 - DNA, 15 bp, Homo sapiens
tagttgccctgcacc

SEQ ID NO: 2106468 - DNA, 15 bp, Homo sapiens
agttgccctgcaccc

SEQ ID NO: 2106469 - DNA, 15 bp, Homo sapiens
gttgccctgcaccct

SEQ ID NO: 2106470 - DNA, 15 bp, Homo sapiens
ttgccctgcaccctc

SEQ ID NO: 2106471 - DNA, 15 bp, Homo sapiens
tgccctgcaccctca

SEQ ID NO: 2106472 - DNA, 15 bp, Homo sapiens
gccctgcaccctcag

SEQ ID NO: 2106473 - DNA, 15 bp, Homo sapiens
ccctgcaccctcagc

SEQ ID NO: 2106474 - DNA, 15 bp, Homo sapiens
cctgcaccctcagct

SEQ ID NO: 2106475 - DNA, 15 bp, Homo sapiens
ctgcaccctcagctc

SEQ ID NO: 2106476 - DNA, 15 bp, Homo sapiens
tgcaccctcagctct

SEQ ID NO: 2106477 - DNA, 15 bp, Homo sapiens
gcaccctcagctctt

SEQ ID NO: 2106478 - DNA, 15 bp, Homo sapiens
caccctcagctcttc

SEQ ID NO: 2106479 - DNA, 15 bp, Homo sapiens
accctcagctcttca

SEQ ID NO: 2106480 - DNA, 15 bp, Homo sapiens
ccctcagctcttcaa

SEQ ID NO: 2106481 - DNA, 15 bp, Homo sapiens
cctcagctcttcaat

SEQ ID NO: 2106482 - DNA, 15 bp, Homo sapiens
ctcagctcttcaata

SEQ ID NO: 2106483 - DNA, 15 bp, Homo sapiens
tcagctcttcaataa

SEQ ID NO: 2106484 - DNA, 15 bp, Homo sapiens
cagctcttcaataaa

SEQ ID NO: 2106485 - DNA, 15 bp, Homo sapiens
agctcttcaataaat

SEQ ID NO: 2106486 - DNA, 15 bp, Homo sapiens
gctcttcaataaatt

SEQ ID NO: 2106487 - DNA, 15 bp, Homo sapiens
ctcttcaataaattc

SEQ ID NO: 2106488 - DNA, 15 bp, Homo sapiens
tcttcaataaattca

SEQ ID NO: 2106489 - DNA, 15 bp, Homo sapiens
cttcaataaattcaa

SEQ ID NO: 2106490 - DNA, 15 bp, Homo sapiens
ttcaataaattcaag

SEQ ID NO: 2106491 - DNA, 15 bp, Homo sapiens
tcaataaattcaagg

SEQ ID NO: 2106492 - DNA, 15 bp, Homo sapiens
caataaattcaaggt

SEQ ID NO: 2106493 - DNA, 15 bp, Homo sapiens
aataaattcaaggtt

SEQ ID NO: 2106494 - DNA, 15 bp, Homo sapiens
ataaattcaaggttt

SEQ ID NO: 2106495 - DNA, 15 bp, Homo sapiens
taaattcaaggtttg

SEQ ID NO: 2106496 - DNA, 15 bp, Homo sapiens
aaattcaaggtttgt

SEQ ID NO: 2106497 - DNA, 15 bp, Homo sapiens
aattcaaggtttgtt

SEQ ID NO: 2106498 - DNA, 15 bp, Homo sapiens
attcaaggtttgttt

SEQ ID NO: 2106499 - DNA, 15 bp, Homo sapiens
ttcaaggtttgtttt

SEQ ID NO: 2106500 - DNA, 15 bp, Homo sapiens
tcaaggtttgttttg

SEQ ID NO: 2106501 - DNA, 15 bp, Homo sapiens
caaggtttgttttga

SEQ ID NO: 2106502 - DNA, 15 bp, Homo sapiens
aaggtttgttttgat

SEQ ID NO: 2106503 - DNA, 15 bp, Homo sapiens
aggtttgttttgatt

SEQ ID NO: 2106504 - DNA, 15 bp, Homo sapiens
ggtttgttttgattt

SEQ ID NO: 2106505 - DNA, 15 bp, Homo sapiens
gtttgttttgatttt

SEQ ID NO: 2106506 - DNA, 15 bp, Homo sapiens
tttgttttgattttt

SEQ ID NO: 2106507 - DNA, 15 bp, Homo sapiens
ttgttttgatttttt

SEQ ID NO: 2106508 - DNA, 15 bp, Homo sapiens
gttttgatttttttg

SEQ ID NO: 2106509 - DNA, 15 bp, Homo sapiens
ttttgatttttttga

SEQ ID NO: 2106510 - DNA, 15 bp, Homo sapiens
tttgatttttttgag

SEQ ID NO: 2106511 - DNA, 15 bp, Homo sapiens
ttgatttttttgaga

SEQ ID NO: 2106512 - DNA, 15 bp, Homo sapiens
tgatttttttgagac

SEQ ID NO: 2106513 - DNA, 15 bp, Homo sapiens
gatttttttgagaca

SEQ ID NO: 2106514 - DNA, 15 bp, Homo sapiens
ctcactctgtcacct

SEQ ID NO: 2106515 - DNA, 15 bp, Homo sapiens
tcactctgtcaccta

SEQ ID NO: 2106516 - DNA, 15 bp, Homo sapiens
cactctgtcacctag

SEQ ID NO: 2106517 - DNA, 15 bp, Homo sapiens
actctgtcacctagg

SEQ ID NO: 2106518 - DNA, 15 bp, Homo sapiens
ctctgtcacctaggc

SEQ ID NO: 2106519 - DNA, 15 bp, Homo sapiens
tctgtcacctaggct

SEQ ID NO: 2106520 - DNA, 15 bp, Homo sapiens
tgtcacctaggctgg

SEQ ID NO: 2106521 - DNA, 15 bp, Homo sapiens
gtcacctaggctgga

SEQ ID NO: 2106522 - DNA, 15 bp, Homo sapiens
tcacctaggctggag

SEQ ID NO: 2106523 - DNA, 15 bp, Homo sapiens
cacctaggctggagt

SEQ ID NO: 2106524 - DNA, 15 bp, Homo sapiens
acctaggctggagtg

SEQ ID NO: 2106525 - DNA, 15 bp, Homo sapiens
cctaggctggagtgc

SEQ ID NO: 2106526 - DNA, 15 bp, Homo sapiens
ctaggctggagtgca

SEQ ID NO: 2106527 - DNA, 15 bp, Homo sapiens
taggctggagtgcaa

SEQ ID NO: 2106528 - DNA, 15 bp, Homo sapiens
ggagtgcaatggcat

SEQ ID NO: 2106529 - DNA, 15 bp, Homo sapiens
gagtgcaatggcatg

SEQ ID NO: 2106530 - DNA, 15 bp, Homo sapiens
agtgcaatggcatga

SEQ ID NO: 2106531 - DNA, 15 bp, Homo sapiens
gatcttggctcacca

SEQ ID NO: 2106532 - DNA, 15 bp, Homo sapiens
ggctcaccacaactg

SEQ ID NO: 2106533 - DNA, 15 bp, Homo sapiens
gctcaccacaactgc

SEQ ID NO: 2106534 - DNA, 15 bp, Homo sapiens
ctcaccacaactgca

SEQ ID NO: 2106535 - DNA, 15 bp, Homo sapiens
tcaccacaactgcag

SEQ ID NO: 2106536 - DNA, 15 bp, Homo sapiens
caccacaactgcagc

SEQ ID NO: 2106537 - DNA, 15 bp, Homo sapiens
accacaactgcagcc

SEQ ID NO: 2106538 - DNA, 15 bp, Homo sapiens
ccacaactgcagcct

SEQ ID NO: 2106539 - DNA, 15 bp, Homo sapiens
cacaactgcagcctc

SEQ ID NO: 2106540 - DNA, 15 bp, Homo sapiens
acaactgcagcctcc

SEQ ID NO: 2106541 - DNA, 15 bp, Homo sapiens
caactgcagcctccc

SEQ ID NO: 2106542 - DNA, 15 bp, Homo sapiens
aactgcagcctccca

SEQ ID NO: 2106543 - DNA, 15 bp, Homo sapiens
actgcagcctcccag

SEQ ID NO: 2106544 - DNA, 15 bp, Homo sapiens
ctgcagcctcccagg

SEQ ID NO: 2106545 - DNA, 15 bp, Homo sapiens
tgcagcctcccaggt

SEQ ID NO: 2106546 - DNA, 15 bp, Homo sapiens
gcagcctcccaggtt

SEQ ID NO: 2106547 - DNA, 15 bp, Homo sapiens
cagcctcccaggttc

SEQ ID NO: 2106548 - DNA, 15 bp, Homo sapiens
agcctcccaggttca

SEQ ID NO: 2106549 - DNA, 15 bp, Homo sapiens
caagcaattctccta

SEQ ID NO: 2106550 - DNA, 15 bp, Homo sapiens
aagcaattctcctac

SEQ ID NO: 2106551 - DNA, 15 bp, Homo sapiens
agcaattctcctacc

SEQ ID NO: 2106552 - DNA, 15 bp, Homo sapiens
gcaattctcctacct

SEQ ID NO: 2106553 - DNA, 15 bp, Homo sapiens
caattctcctacctc

SEQ ID NO: 2106554 - DNA, 15 bp, Homo sapiens
aattctcctacctca

SEQ ID NO: 2106555 - DNA, 15 bp, Homo sapiens
attctcctacctcag

SEQ ID NO: 2106556 - DNA, 15 bp, Homo sapiens
ttctcctacctcagc

SEQ ID NO: 2106557 - DNA, 15 bp, Homo sapiens
tctcctacctcagcc

SEQ ID NO: 2106558 - DNA, 15 bp, Homo sapiens
ctcctacctcagcct

SEQ ID NO: 2106559 - DNA, 15 bp, Homo sapiens
tcctacctcagcctc

SEQ ID NO: 2106560 - DNA, 15 bp, Homo sapiens
cctacctcagcctcc

SEQ ID NO: 2106561 - DNA, 15 bp, Homo sapiens
ctacctcagcctcct

SEQ ID NO: 2106562 - DNA, 15 bp, Homo sapiens
tacctcagcctcctg

SEQ ID NO: 2106563 - DNA, 15 bp, Homo sapiens
cagcctcctgagtaa

SEQ ID NO: 2106564 - DNA, 15 bp, Homo sapiens
agcctcctgagtaac

SEQ ID NO: 2106565 - DNA, 15 bp, Homo sapiens
gcctcctgagtaact

SEQ ID NO: 2106566 - DNA, 15 bp, Homo sapiens
cctcctgagtaactg

SEQ ID NO: 2106567 - DNA, 15 bp, Homo sapiens
ctcctgagtaactgg

SEQ ID NO: 2106568 - DNA, 15 bp, Homo sapiens
tcctgagtaactggg

SEQ ID NO: 2106569 - DNA, 15 bp, Homo sapiens
cctgagtaactggga

SEQ ID NO: 2106570 - DNA, 15 bp, Homo sapiens
ctgagtaactgggac

SEQ ID NO: 2106571 - DNA, 15 bp, Homo sapiens
tgagtaactgggact

SEQ ID NO: 2106572 - DNA, 15 bp, Homo sapiens
actgggactacaggc

SEQ ID NO: 2106573 - DNA, 15 bp, Homo sapiens
gcacatgccaccaca

SEQ ID NO: 2106574 - DNA, 15 bp, Homo sapiens
cacatgccaccacac

SEQ ID NO: 2106575 - DNA, 15 bp, Homo sapiens
acatgccaccacacc

SEQ ID NO: 2106576 - DNA, 15 bp, Homo sapiens
catgccaccacaccc

SEQ ID NO: 2106577 - DNA, 15 bp, Homo sapiens
atgccaccacaccca

SEQ ID NO: 2106578 - DNA, 15 bp, Homo sapiens
tgccaccacacccaa

SEQ ID NO: 2106579 - DNA, 15 bp, Homo sapiens
gccaccacacccaac

SEQ ID NO: 2106580 - DNA, 15 bp, Homo sapiens
ccaccacacccaact

SEQ ID NO: 2106581 - DNA, 15 bp, Homo sapiens
caccacacccaacta

SEQ ID NO: 2106582 - DNA, 15 bp, Homo sapiens
accacacccaactaa

SEQ ID NO: 2106583 - DNA, 15 bp, Homo sapiens
ccacacccaactaat

SEQ ID NO: 2106584 - DNA, 15 bp, Homo sapiens
cacacccaactaatt

SEQ ID NO: 2106585 - DNA, 15 bp, Homo sapiens
acacccaactaattt

SEQ ID NO: 2106586 - DNA, 15 bp, Homo sapiens
cacccaactaatttt

SEQ ID NO: 2106587 - DNA, 15 bp, Homo sapiens
acccaactaattttt

SEQ ID NO: 2106588 - DNA, 15 bp, Homo sapiens
cccaactaatttttg

SEQ ID NO: 2106589 - DNA, 15 bp, Homo sapiens
ccaactaatttttgt

SEQ ID NO: 2106590 - DNA, 15 bp, Homo sapiens
caactaatttttgta

SEQ ID NO: 2106591 - DNA, 15 bp, Homo sapiens
aactaatttttgtat

SEQ ID NO: 2106592 - DNA, 15 bp, Homo sapiens
actaatttttgtatt

SEQ ID NO: 2106593 - DNA, 15 bp, Homo sapiens
tttttagtagagata

SEQ ID NO: 2106594 - DNA, 15 bp, Homo sapiens
ttttagtagagatag

SEQ ID NO: 2106595 - DNA, 15 bp, Homo sapiens
tttagtagagatagg

SEQ ID NO: 2106596 - DNA, 15 bp, Homo sapiens
ttagtagagatagga

SEQ ID NO: 2106597 - DNA, 15 bp, Homo sapiens
tagtagagataggat

SEQ ID NO: 2106598 - DNA, 15 bp, Homo sapiens
agtagagataggatt

SEQ ID NO: 2106599 - DNA, 15 bp, Homo sapiens
gtagagataggattt

SEQ ID NO: 2106600 - DNA, 15 bp, Homo sapiens
tagagataggatttc

SEQ ID NO: 2106601 - DNA, 15 bp, Homo sapiens
agagataggatttca

SEQ ID NO: 2106602 - DNA, 15 bp, Homo sapiens
gagataggatttcac

SEQ ID NO: 2106603 - DNA, 15 bp, Homo sapiens
agataggatttcacc

SEQ ID NO: 2106604 - DNA, 15 bp, Homo sapiens
gataggatttcacca

SEQ ID NO: 2106605 - DNA, 15 bp, Homo sapiens
ataggatttcaccat

SEQ ID NO: 2106606 - DNA, 15 bp, Homo sapiens
taggatttcaccatg

SEQ ID NO: 2106607 - DNA, 15 bp, Homo sapiens
aggatttcaccatgc

SEQ ID NO: 2106608 - DNA, 15 bp, Homo sapiens
ggatttcaccatgct

SEQ ID NO: 2106609 - DNA, 15 bp, Homo sapiens
gatttcaccatgctg

SEQ ID NO: 2106610 - DNA, 15 bp, Homo sapiens
atttcaccatgctgg

SEQ ID NO: 2106611 - DNA, 15 bp, Homo sapiens
tttcaccatgctggc

SEQ ID NO: 2106612 - DNA, 15 bp, Homo sapiens
ttcaccatgctggcc

SEQ ID NO: 2106613 - DNA, 15 bp, Homo sapiens
tcaccatgctggcca

SEQ ID NO: 2106614 - DNA, 15 bp, Homo sapiens
caccatgctggccag

SEQ ID NO: 2106615 - DNA, 15 bp, Homo sapiens
accatgctggccagg

SEQ ID NO: 2106616 - DNA, 15 bp, Homo sapiens
ccatgctggccaggc

SEQ ID NO: 2106617 - DNA, 15 bp, Homo sapiens
catgctggccaggct

SEQ ID NO: 2106618 - DNA, 15 bp, Homo sapiens
ctggccaggctggtc

SEQ ID NO: 2106619 - DNA, 15 bp, Homo sapiens
ggtcttgaactccta

SEQ ID NO: 2106620 - DNA, 15 bp, Homo sapiens
gtcttgaactcctag

SEQ ID NO: 2106621 - DNA, 15 bp, Homo sapiens
tcttgaactcctaga

SEQ ID NO: 2106622 - DNA, 15 bp, Homo sapiens
cttgaactcctagac

SEQ ID NO: 2106623 - DNA, 15 bp, Homo sapiens
ttgaactcctagacc

SEQ ID NO: 2106624 - DNA, 15 bp, Homo sapiens
tgaactcctagacct

SEQ ID NO: 2106625 - DNA, 15 bp, Homo sapiens
gaactcctagacctc

SEQ ID NO: 2106626 - DNA, 15 bp, Homo sapiens
aactcctagacctca

SEQ ID NO: 2106627 - DNA, 15 bp, Homo sapiens
actcctagacctcag

SEQ ID NO: 2106628 - DNA, 15 bp, Homo sapiens
ctcctagacctcagg

SEQ ID NO: 2106629 - DNA, 15 bp, Homo sapiens
tcctagacctcaggt

SEQ ID NO: 2106630 - DNA, 15 bp, Homo sapiens
cctagacctcaggtg

SEQ ID NO: 2106631 - DNA, 15 bp, Homo sapiens
ctagacctcaggtga

SEQ ID NO: 2106632 - DNA, 15 bp, Homo sapiens
tagacctcaggtgat

SEQ ID NO: 2106633 - DNA, 15 bp, Homo sapiens
agacctcaggtgatc

SEQ ID NO: 2106634 - DNA, 15 bp, Homo sapiens
ctcaggtgatctgcc

SEQ ID NO: 2106635 - DNA, 15 bp, Homo sapiens
tgatctgcccacctt

SEQ ID NO: 2106636 - DNA, 15 bp, Homo sapiens
gatctgcccaccttg

SEQ ID NO: 2106637 - DNA, 15 bp, Homo sapiens
atctgcccaccttgg

SEQ ID NO: 2106638 - DNA, 15 bp, Homo sapiens
tctgcccaccttggc

SEQ ID NO: 2106639 - DNA, 15 bp, Homo sapiens
ctgcccaccttggcc

SEQ ID NO: 2106640 - DNA, 15 bp, Homo sapiens
tgcccaccttggcca

SEQ ID NO: 2106641 - DNA, 15 bp, Homo sapiens
gcccaccttggccac

SEQ ID NO: 2106642 - DNA, 15 bp, Homo sapiens
cccaccttggccacc

SEQ ID NO: 2106643 - DNA, 15 bp, Homo sapiens
ccaccttggccaccc

SEQ ID NO: 2106644 - DNA, 15 bp, Homo sapiens
caccttggccaccca

SEQ ID NO: 2106645 - DNA, 15 bp, Homo sapiens
accttggccacccaa

SEQ ID NO: 2106646 - DNA, 15 bp, Homo sapiens
ccttggccacccaaa

SEQ ID NO: 2106647 - DNA, 15 bp, Homo sapiens
cttggccacccaaag

SEQ ID NO: 2106648 - DNA, 15 bp, Homo sapiens
ttggccacccaaagt

SEQ ID NO: 2106649 - DNA, 15 bp, Homo sapiens
tggccacccaaagtg

SEQ ID NO: 2106650 - DNA, 15 bp, Homo sapiens
ggccacccaaagtgc

SEQ ID NO: 2106651 - DNA, 15 bp, Homo sapiens
gccacccaaagtgct

SEQ ID NO: 2106652 - DNA, 15 bp, Homo sapiens
ccacccaaagtgcta

SEQ ID NO: 2106653 - DNA, 15 bp, Homo sapiens
cacccaaagtgctag

SEQ ID NO: 2106654 - DNA, 15 bp, Homo sapiens
acccaaagtgctagg

SEQ ID NO: 2106655 - DNA, 15 bp, Homo sapiens
accatgcctggcctc

SEQ ID NO: 2106656 - DNA, 15 bp, Homo sapiens
ccatgcctggcctca

SEQ ID NO: 2106657 - DNA, 15 bp, Homo sapiens
catgcctggcctcaa

SEQ ID NO: 2106658 - DNA, 15 bp, Homo sapiens
atgcctggcctcaag

SEQ ID NO: 2106659 - DNA, 15 bp, Homo sapiens
tgcctggcctcaagt

SEQ ID NO: 2106660 - DNA, 15 bp, Homo sapiens
gcctggcctcaagtt

SEQ ID NO: 2106661 - DNA, 15 bp, Homo sapiens
cctggcctcaagtta

SEQ ID NO: 2106662 - DNA, 15 bp, Homo sapiens
ctggcctcaagttat

SEQ ID NO: 2106663 - DNA, 15 bp, Homo sapiens
tggcctcaagttatg

SEQ ID NO: 2106664 - DNA, 15 bp, Homo sapiens
ggcctcaagttatga

SEQ ID NO: 2106665 - DNA, 15 bp, Homo sapiens
gcctcaagttatgat

SEQ ID NO: 2106666 - DNA, 15 bp, Homo sapiens
cctcaagttatgatt

SEQ ID NO: 2106667 - DNA, 15 bp, Homo sapiens
ctcaagttatgattt

SEQ ID NO: 2106668 - DNA, 15 bp, Homo sapiens
tcaagttatgatttt

SEQ ID NO: 2106669 - DNA, 15 bp, Homo sapiens
caagttatgattttt

SEQ ID NO: 2106670 - DNA, 15 bp, Homo sapiens
aagttatgatttttt

SEQ ID NO: 2106671 - DNA, 15 bp, Homo sapiens
agttatgatttttta

SEQ ID NO: 2106672 - DNA, 15 bp, Homo sapiens
gttatgattttttag

SEQ ID NO: 2106673 - DNA, 15 bp, Homo sapiens
ttatgattttttagt

SEQ ID NO: 2106674 - DNA, 15 bp, Homo sapiens
tatgattttttagtt

SEQ ID NO: 2106675 - DNA, 15 bp, Homo sapiens
atgattttttagttt

SEQ ID NO: 2106676 - DNA, 15 bp, Homo sapiens
tgattttttagttta

SEQ ID NO: 2106677 - DNA, 15 bp, Homo sapiens
gattttttagtttat

SEQ ID NO: 2106678 - DNA, 15 bp, Homo sapiens
attttttagtttatc

SEQ ID NO: 2106679 - DNA, 15 bp, Homo sapiens
ttttttagtttatcg

SEQ ID NO: 2106680 - DNA, 15 bp, Homo sapiens
tttttagtttatcgg

SEQ ID NO: 2106681 - DNA, 15 bp, Homo sapiens
ttttagtttatcggt

SEQ ID NO: 2106682 - DNA, 15 bp, Homo sapiens
tttagtttatcggta

SEQ ID NO: 2106683 - DNA, 15 bp, Homo sapiens
ttagtttatcggtat

SEQ ID NO: 2106684 - DNA, 15 bp, Homo sapiens
tagtttatcggtatt

SEQ ID NO: 2106685 - DNA, 15 bp, Homo sapiens
agtttatcggtattt

SEQ ID NO: 2106686 - DNA, 15 bp, Homo sapiens
gtttatcggtatttt

SEQ ID NO: 2106687 - DNA, 15 bp, Homo sapiens
tttatcggtattttt

SEQ ID NO: 2106688 - DNA, 15 bp, Homo sapiens
ttatcggtatttttc

SEQ ID NO: 2106689 - DNA, 15 bp, Homo sapiens
tatcggtatttttct

SEQ ID NO: 2106690 - DNA, 15 bp, Homo sapiens
atcggtatttttctt

SEQ ID NO: 2106691 - DNA, 15 bp, Homo sapiens
tcggtatttttctta

SEQ ID NO: 2106692 - DNA, 15 bp, Homo sapiens
cggtatttttcttat

SEQ ID NO: 2106693 - DNA, 15 bp, Homo sapiens
ggtatttttcttatt

SEQ ID NO: 2106694 - DNA, 15 bp, Homo sapiens
gtatttttcttattg

SEQ ID NO: 2106695 - DNA, 15 bp, Homo sapiens
tatttttcttattgt

SEQ ID NO: 2106696 - DNA, 15 bp, Homo sapiens
atttttcttattgtt

SEQ ID NO: 2106697 - DNA, 15 bp, Homo sapiens
tttttcttattgtta

SEQ ID NO: 2106698 - DNA, 15 bp, Homo sapiens
ttttcttattgttat

SEQ ID NO: 2106699 - DNA, 15 bp, Homo sapiens
tttcttattgttatg

SEQ ID NO: 2106700 - DNA, 15 bp, Homo sapiens
ttcttattgttatgt

SEQ ID NO: 2106701 - DNA, 15 bp, Homo sapiens
tcttattgttatgtg

SEQ ID NO: 2106702 - DNA, 15 bp, Homo sapiens
cttattgttatgtgg

SEQ ID NO: 2106703 - DNA, 15 bp, Homo sapiens
ttattgttatgtgga

SEQ ID NO: 2106704 - DNA, 15 bp, Homo sapiens
tattgttatgtggag

SEQ ID NO: 2106705 - DNA, 15 bp, Homo sapiens
attgttatgtggagg

SEQ ID NO: 2106706 - DNA, 15 bp, Homo sapiens
ttgttatgtggagga

SEQ ID NO: 2106707 - DNA, 15 bp, Homo sapiens
tgttatgtggaggac

SEQ ID NO: 2106708 - DNA, 15 bp, Homo sapiens
gttatgtggaggaca

SEQ ID NO: 2106709 - DNA, 15 bp, Homo sapiens
ttatgtggaggacac

SEQ ID NO: 2106710 - DNA, 15 bp, Homo sapiens
tatgtggaggacact

SEQ ID NO: 2106711 - DNA, 15 bp, Homo sapiens
atgtggaggacactg

SEQ ID NO: 2106712 - DNA, 15 bp, Homo sapiens
tgtggaggacactgc

SEQ ID NO: 2106713 - DNA, 15 bp, Homo sapiens
gtggaggacactgcg

SEQ ID NO: 2106714 - DNA, 15 bp, Homo sapiens
tggaggacactgcgt

SEQ ID NO: 2106715 - DNA, 15 bp, Homo sapiens
ggaggacactgcgtt

SEQ ID NO: 2106716 - DNA, 15 bp, Homo sapiens
gaggacactgcgttt

SEQ ID NO: 2106717 - DNA, 15 bp, Homo sapiens
aggacactgcgtttg

SEQ ID NO: 2106718 - DNA, 15 bp, Homo sapiens
ggacactgcgtttgc

SEQ ID NO: 2106719 - DNA, 15 bp, Homo sapiens
gacactgcgtttgcc

SEQ ID NO: 2106720 - DNA, 15 bp, Homo sapiens
acactgcgtttgcca

SEQ ID NO: 2106721 - DNA, 15 bp, Homo sapiens
cactgcgtttgccag

SEQ ID NO: 2106722 - DNA, 15 bp, Homo sapiens
actgcgtttgccagg

SEQ ID NO: 2106723 - DNA, 15 bp, Homo sapiens
ctgcgtttgccaggt

SEQ ID NO: 2106724 - DNA, 15 bp, Homo sapiens
tgcgtttgccaggtt

SEQ ID NO: 2106725 - DNA, 15 bp, Homo sapiens
gcgtttgccaggttt

SEQ ID NO: 2106726 - DNA, 15 bp, Homo sapiens
cgtttgccaggtttt

SEQ ID NO: 2106727 - DNA, 15 bp, Homo sapiens
gtttgccaggttttt

SEQ ID NO: 2106728 - DNA, 15 bp, Homo sapiens
tttgccaggtttttt

SEQ ID NO: 2106729 - DNA, 15 bp, Homo sapiens
ttgccaggttttttg

SEQ ID NO: 2106730 - DNA, 15 bp, Homo sapiens
tgccaggttttttgt

SEQ ID NO: 2106731 - DNA, 15 bp, Homo sapiens
gccaggttttttgtt

SEQ ID NO: 2106732 - DNA, 15 bp, Homo sapiens
ccaggttttttgttt

SEQ ID NO: 2106733 - DNA, 15 bp, Homo sapiens
caggttttttgtttt

SEQ ID NO: 2106734 - DNA, 15 bp, Homo sapiens
aggttttttgttttt

SEQ ID NO: 2106735 - DNA, 15 bp, Homo sapiens
ggttttttgtttttg

SEQ ID NO: 2106736 - DNA, 15 bp, Homo sapiens
tgtttttgttttttg

SEQ ID NO: 2106737 - DNA, 15 bp, Homo sapiens
gtttttgttttttga

SEQ ID NO: 2106738 - DNA, 15 bp, Homo sapiens
tttttgttttttgag

SEQ ID NO: 2106739 - DNA, 15 bp, Homo sapiens
ttttgttttttgaga

SEQ ID NO: 2106740 - DNA, 15 bp, Homo sapiens
tttgttttttgagat

SEQ ID NO: 2106741 - DNA, 15 bp, Homo sapiens
ttgttttttgagatg

SEQ ID NO: 2106742 - DNA, 15 bp, Homo sapiens
tgttttttgagatgg

SEQ ID NO: 2106743 - DNA, 15 bp, Homo sapiens
gttttttgagatgga

SEQ ID NO: 2106744 - DNA, 15 bp, Homo sapiens
ttttgagatggagta

SEQ ID NO: 2106745 - DNA, 15 bp, Homo sapiens
tttgagatggagtat

SEQ ID NO: 2106746 - DNA, 15 bp, Homo sapiens
ttgagatggagtatt

SEQ ID NO: 2106747 - DNA, 15 bp, Homo sapiens
tgagatggagtattg

SEQ ID NO: 2106748 - DNA, 15 bp, Homo sapiens
gagatggagtattgc

SEQ ID NO: 2106749 - DNA, 15 bp, Homo sapiens
agatggagtattgct

SEQ ID NO: 2106750 - DNA, 15 bp, Homo sapiens
gatggagtattgctc

SEQ ID NO: 2106751 - DNA, 15 bp, Homo sapiens
atggagtattgctct

SEQ ID NO: 2106752 - DNA, 15 bp, Homo sapiens
tggagtattgctctg

SEQ ID NO: 2106753 - DNA, 15 bp, Homo sapiens
ggagtattgctctgt

SEQ ID NO: 2106754 - DNA, 15 bp, Homo sapiens
gagtattgctctgtc

SEQ ID NO: 2106755 - DNA, 15 bp, Homo sapiens
agtattgctctgtcg

SEQ ID NO: 2106756 - DNA, 15 bp, Homo sapiens
gtattgctctgtcgc

SEQ ID NO: 2106757 - DNA, 15 bp, Homo sapiens
tattgctctgtcgcc

SEQ ID NO: 2106758 - DNA, 15 bp, Homo sapiens
attgctctgtcgccc

SEQ ID NO: 2106759 - DNA, 15 bp, Homo sapiens
cgcccaggctggagg

SEQ ID NO: 2106760 - DNA, 15 bp, Homo sapiens
gcccaggctggagga

SEQ ID NO: 2106761 - DNA, 15 bp, Homo sapiens
cccaggctggaggac

SEQ ID NO: 2106762 - DNA, 15 bp, Homo sapiens
ccaggctggaggaca

SEQ ID NO: 2106763 - DNA, 15 bp, Homo sapiens
caggctggaggacag

SEQ ID NO: 2106764 - DNA, 15 bp, Homo sapiens
aggctggaggacagt

SEQ ID NO: 2106765 - DNA, 15 bp, Homo sapiens
ggctggaggacagtg

SEQ ID NO: 2106766 - DNA, 15 bp, Homo sapiens
gctggaggacagtga

SEQ ID NO: 2106767 - DNA, 15 bp, Homo sapiens
ctggaggacagtgat

SEQ ID NO: 2106768 - DNA, 15 bp, Homo sapiens
tggaggacagtgatg

SEQ ID NO: 2106769 - DNA, 15 bp, Homo sapiens
ggaggacagtgatgc

SEQ ID NO: 2106770 - DNA, 15 bp, Homo sapiens
gaggacagtgatgcg

SEQ ID NO: 2106771 - DNA, 15 bp, Homo sapiens
aggacagtgatgcga

SEQ ID NO: 2106772 - DNA, 15 bp, Homo sapiens
ggacagtgatgcgat

SEQ ID NO: 2106773 - DNA, 15 bp, Homo sapiens
gacagtgatgcgatc

SEQ ID NO: 2106774 - DNA, 15 bp, Homo sapiens
acagtgatgcgatct

SEQ ID NO: 2106775 - DNA, 15 bp, Homo sapiens
cagtgatgcgatctt

SEQ ID NO: 2106776 - DNA, 15 bp, Homo sapiens
agtgatgcgatcttg

SEQ ID NO: 2106777 - DNA, 15 bp, Homo sapiens
gtgatgcgatcttgg

SEQ ID NO: 2106778 - DNA, 15 bp, Homo sapiens
tgatgcgatcttggc

SEQ ID NO: 2106779 - DNA, 15 bp, Homo sapiens
gatgcgatcttggct

SEQ ID NO: 2106780 - DNA, 15 bp, Homo sapiens
atgcgatcttggctc

SEQ ID NO: 2106781 - DNA, 15 bp, Homo sapiens
tgcgatcttggctcg

SEQ ID NO: 2106782 - DNA, 15 bp, Homo sapiens
gcgatcttggctcgc

SEQ ID NO: 2106783 - DNA, 15 bp, Homo sapiens
cgatcttggctcgct

SEQ ID NO: 2106784 - DNA, 15 bp, Homo sapiens
gatcttggctcgctg

SEQ ID NO: 2106785 - DNA, 15 bp, Homo sapiens
atcttggctcgctgc

SEQ ID NO: 2106786 - DNA, 15 bp, Homo sapiens
tcttggctcgctgca

SEQ ID NO: 2106787 - DNA, 15 bp, Homo sapiens
cttggctcgctgcaa

SEQ ID NO: 2106788 - DNA, 15 bp, Homo sapiens
ttggctcgctgcaat

SEQ ID NO: 2106789 - DNA, 15 bp, Homo sapiens
tggctcgctgcaatc

SEQ ID NO: 2106790 - DNA, 15 bp, Homo sapiens
ggctcgctgcaatct

SEQ ID NO: 2106791 - DNA, 15 bp, Homo sapiens
gctcgctgcaatctc

SEQ ID NO: 2106792 - DNA, 15 bp, Homo sapiens
ctcgctgcaatctct

SEQ ID NO: 2106793 - DNA, 15 bp, Homo sapiens
tcgctgcaatctctg

SEQ ID NO: 2106794 - DNA, 15 bp, Homo sapiens
cgctgcaatctctgc

SEQ ID NO: 2106795 - DNA, 15 bp, Homo sapiens
gctgcaatctctgcc

SEQ ID NO: 2106796 - DNA, 15 bp, Homo sapiens
ctgcaatctctgcct

SEQ ID NO: 2106797 - DNA, 15 bp, Homo sapiens
tgcaatctctgcctc

SEQ ID NO: 2106798 - DNA, 15 bp, Homo sapiens
gcaatctctgcctcc

SEQ ID NO: 2106799 - DNA, 15 bp, Homo sapiens
caatctctgcctccc

SEQ ID NO: 2106800 - DNA, 15 bp, Homo sapiens
aatctctgcctccca

SEQ ID NO: 2106801 - DNA, 15 bp, Homo sapiens
atctctgcctcccag

SEQ ID NO: 2106802 - DNA, 15 bp, Homo sapiens
tctctgcctcccagg

SEQ ID NO: 2106803 - DNA, 15 bp, Homo sapiens
ctcccaggttcaaat

SEQ ID NO: 2106804 - DNA, 15 bp, Homo sapiens
tcccaggttcaaatg

SEQ ID NO: 2106805 - DNA, 15 bp, Homo sapiens
cccaggttcaaatga

SEQ ID NO: 2106806 - DNA, 15 bp, Homo sapiens
ccaggttcaaatgat

SEQ ID NO: 2106807 - DNA, 15 bp, Homo sapiens
caggttcaaatgatt

SEQ ID NO: 2106808 - DNA, 15 bp, Homo sapiens
aggttcaaatgattc

SEQ ID NO: 2106809 - DNA, 15 bp, Homo sapiens
ggttcaaatgattct

SEQ ID NO: 2106810 - DNA, 15 bp, Homo sapiens
gttcaaatgattctc

SEQ ID NO: 2106811 - DNA, 15 bp, Homo sapiens
ttcaaatgattctcc

SEQ ID NO: 2106812 - DNA, 15 bp, Homo sapiens
tcaaatgattctcct

SEQ ID NO: 2106813 - DNA, 15 bp, Homo sapiens
caaatgattctcctg

SEQ ID NO: 2106814 - DNA, 15 bp, Homo sapiens
tgggattacagttgc

SEQ ID NO: 2106815 - DNA, 15 bp, Homo sapiens
gggattacagttgca

SEQ ID NO: 2106816 - DNA, 15 bp, Homo sapiens
ggattacagttgcat

SEQ ID NO: 2106817 - DNA, 15 bp, Homo sapiens
gattacagttgcatg

SEQ ID NO: 2106818 - DNA, 15 bp, Homo sapiens
attacagttgcatga

SEQ ID NO: 2106819 - DNA, 15 bp, Homo sapiens
ttacagttgcatgac

SEQ ID NO: 2106820 - DNA, 15 bp, Homo sapiens
tacagttgcatgaca

SEQ ID NO: 2106821 - DNA, 15 bp, Homo sapiens
acagttgcatgacac

SEQ ID NO: 2106822 - DNA, 15 bp, Homo sapiens
cagttgcatgacacc

SEQ ID NO: 2106823 - DNA, 15 bp, Homo sapiens
agttgcatgacacca

SEQ ID NO: 2106824 - DNA, 15 bp, Homo sapiens
gttgcatgacaccac

SEQ ID NO: 2106825 - DNA, 15 bp, Homo sapiens
ttgcatgacaccaca

SEQ ID NO: 2106826 - DNA, 15 bp, Homo sapiens
tgcatgacaccacac

SEQ ID NO: 2106827 - DNA, 15 bp, Homo sapiens
gcatgacaccacacc

SEQ ID NO: 2106828 - DNA, 15 bp, Homo sapiens
catgacaccacacct

SEQ ID NO: 2106829 - DNA, 15 bp, Homo sapiens
atgacaccacacctg

SEQ ID NO: 2106830 - DNA, 15 bp, Homo sapiens
tgacaccacacctgg

SEQ ID NO: 2106831 - DNA, 15 bp, Homo sapiens
gacaccacacctggc

SEQ ID NO: 2106832 - DNA, 15 bp, Homo sapiens
acaccacacctggct

SEQ ID NO: 2106833 - DNA, 15 bp, Homo sapiens
tatttttagtagagt

SEQ ID NO: 2106834 - DNA, 15 bp, Homo sapiens
atttttagtagagtc

SEQ ID NO: 2106835 - DNA, 15 bp, Homo sapiens
tttttagtagagtca

SEQ ID NO: 2106836 - DNA, 15 bp, Homo sapiens
ttttagtagagtcag

SEQ ID NO: 2106837 - DNA, 15 bp, Homo sapiens
tttagtagagtcaga

SEQ ID NO: 2106838 - DNA, 15 bp, Homo sapiens
ttagtagagtcagag

SEQ ID NO: 2106839 - DNA, 15 bp, Homo sapiens
tagtagagtcagagt

SEQ ID NO: 2106840 - DNA, 15 bp, Homo sapiens
agtagagtcagagtt

SEQ ID NO: 2106841 - DNA, 15 bp, Homo sapiens
gtagagtcagagttt

SEQ ID NO: 2106842 - DNA, 15 bp, Homo sapiens
tagagtcagagtttc

SEQ ID NO: 2106843 - DNA, 15 bp, Homo sapiens
agagtcagagtttca

SEQ ID NO: 2106844 - DNA, 15 bp, Homo sapiens
gagtcagagtttcac

SEQ ID NO: 2106845 - DNA, 15 bp, Homo sapiens
agtcagagtttcacc

SEQ ID NO: 2106846 - DNA, 15 bp, Homo sapiens
gtcagagtttcaccg

SEQ ID NO: 2106847 - DNA, 15 bp, Homo sapiens
tcagagtttcaccgt

SEQ ID NO: 2106848 - DNA, 15 bp, Homo sapiens
cagagtttcaccgtg

SEQ ID NO: 2106849 - DNA, 15 bp, Homo sapiens
agagtttcaccgtgt

SEQ ID NO: 2106850 - DNA, 15 bp, Homo sapiens
gagtttcaccgtgtt

SEQ ID NO: 2106851 - DNA, 15 bp, Homo sapiens
agtttcaccgtgttg

SEQ ID NO: 2106852 - DNA, 15 bp, Homo sapiens
gtgttggtcaggctg

SEQ ID NO: 2106853 - DNA, 15 bp, Homo sapiens
tgttggtcaggctga

SEQ ID NO: 2106854 - DNA, 15 bp, Homo sapiens
gttggtcaggctgat

SEQ ID NO: 2106855 - DNA, 15 bp, Homo sapiens
ttggtcaggctgatc

SEQ ID NO: 2106856 - DNA, 15 bp, Homo sapiens
tggtcaggctgatct

SEQ ID NO: 2106857 - DNA, 15 bp, Homo sapiens
ggtcaggctgatctc

SEQ ID NO: 2106858 - DNA, 15 bp, Homo sapiens
gtcaggctgatctca

SEQ ID NO: 2106859 - DNA, 15 bp, Homo sapiens
tcaggctgatctcaa

SEQ ID NO: 2106860 - DNA, 15 bp, Homo sapiens
ctgatctcaaactcc

SEQ ID NO: 2106861 - DNA, 15 bp, Homo sapiens
atctcaaactcctga

SEQ ID NO: 2106862 - DNA, 15 bp, Homo sapiens
cttggcctcccaaaa

SEQ ID NO: 2106863 - DNA, 15 bp, Homo sapiens
ttggcctcccaaaat

SEQ ID NO: 2106864 - DNA, 15 bp, Homo sapiens
tggcctcccaaaatg

SEQ ID NO: 2106865 - DNA, 15 bp, Homo sapiens
ggcctcccaaaatgc

SEQ ID NO: 2106866 - DNA, 15 bp, Homo sapiens
gcctcccaaaatgct

SEQ ID NO: 2106867 - DNA, 15 bp, Homo sapiens
cctcccaaaatgctg

SEQ ID NO: 2106868 - DNA, 15 bp, Homo sapiens
ctcccaaaatgctgg

SEQ ID NO: 2106869 - DNA, 15 bp, Homo sapiens
tcccaaaatgctggg

SEQ ID NO: 2106870 - DNA, 15 bp, Homo sapiens
cccaaaatgctggga

SEQ ID NO: 2106871 - DNA, 15 bp, Homo sapiens
ccaaaatgctgggat

SEQ ID NO: 2106872 - DNA, 15 bp, Homo sapiens
caaaatgctgggatt

SEQ ID NO: 2106873 - DNA, 15 bp, Homo sapiens
aaaatgctgggatta

SEQ ID NO: 2106874 - DNA, 15 bp, Homo sapiens
aaatgctgggattac

SEQ ID NO: 2106875 - DNA, 15 bp, Homo sapiens
aatgctgggattaca

SEQ ID NO: 2106876 - DNA, 15 bp, Homo sapiens
atgctgggattacag

SEQ ID NO: 2106877 - DNA, 15 bp, Homo sapiens
gcatgagccaccacg

SEQ ID NO: 2106878 - DNA, 15 bp, Homo sapiens
catgagccaccacgc

SEQ ID NO: 2106879 - DNA, 15 bp, Homo sapiens
atgagccaccacgcc

SEQ ID NO: 2106880 - DNA, 15 bp, Homo sapiens
caccacgcccggctg

SEQ ID NO: 2106881 - DNA, 15 bp, Homo sapiens
accacgcccggctgc

SEQ ID NO: 2106882 - DNA, 15 bp, Homo sapiens
ccacgcccggctgcc

SEQ ID NO: 2106883 - DNA, 15 bp, Homo sapiens
cacgcccggctgcct

SEQ ID NO: 2106884 - DNA, 15 bp, Homo sapiens
acgcccggctgcctt

SEQ ID NO: 2106885 - DNA, 15 bp, Homo sapiens
cgcccggctgccttt

SEQ ID NO: 2106886 - DNA, 15 bp, Homo sapiens
gcccggctgcctttg

SEQ ID NO: 2106887 - DNA, 15 bp, Homo sapiens
cccggctgcctttgc

SEQ ID NO: 2106888 - DNA, 15 bp, Homo sapiens
ccggctgcctttgcc

SEQ ID NO: 2106889 - DNA, 15 bp, Homo sapiens
cggctgcctttgcca

SEQ ID NO: 2106890 - DNA, 15 bp, Homo sapiens
ggctgcctttgccag

SEQ ID NO: 2106891 - DNA, 15 bp, Homo sapiens
gctgcctttgccagt

SEQ ID NO: 2106892 - DNA, 15 bp, Homo sapiens
ctgcctttgccagtt

SEQ ID NO: 2106893 - DNA, 15 bp, Homo sapiens
tgcctttgccagttt

SEQ ID NO: 2106894 - DNA, 15 bp, Homo sapiens
gcctttgccagtttt

SEQ ID NO: 2106895 - DNA, 15 bp, Homo sapiens
cctttgccagttttc

SEQ ID NO: 2106896 - DNA, 15 bp, Homo sapiens
ctttgccagttttct

SEQ ID NO: 2106897 - DNA, 15 bp, Homo sapiens
tttgccagttttcta

SEQ ID NO: 2106898 - DNA, 15 bp, Homo sapiens
ttgccagttttctac

SEQ ID NO: 2106899 - DNA, 15 bp, Homo sapiens
tgccagttttctaca

SEQ ID NO: 2106900 - DNA, 15 bp, Homo sapiens
gccagttttctacat

SEQ ID NO: 2106901 - DNA, 15 bp, Homo sapiens
ccagttttctacatc

SEQ ID NO: 2106902 - DNA, 15 bp, Homo sapiens
cagttttctacatcc

SEQ ID NO: 2106903 - DNA, 15 bp, Homo sapiens
agttttctacatcct

SEQ ID NO: 2106904 - DNA, 15 bp, Homo sapiens
gttttctacatccta

SEQ ID NO: 2106905 - DNA, 15 bp, Homo sapiens
ttttctacatcctat

SEQ ID NO: 2106906 - DNA, 15 bp, Homo sapiens
tttctacatcctatg

SEQ ID NO: 2106907 - DNA, 15 bp, Homo sapiens
ttctacatcctatgt

SEQ ID NO: 2106908 - DNA, 15 bp, Homo sapiens
tctacatcctatgtg

SEQ ID NO: 2106909 - DNA, 15 bp, Homo sapiens
ctacatcctatgtgg

SEQ ID NO: 2106910 - DNA, 15 bp, Homo sapiens
tacatcctatgtgga

SEQ ID NO: 2106911 - DNA, 15 bp, Homo sapiens
acatcctatgtggaa

SEQ ID NO: 2106912 - DNA, 15 bp, Homo sapiens
catcctatgtggaac

SEQ ID NO: 2106913 - DNA, 15 bp, Homo sapiens
atcctatgtggaacc

SEQ ID NO: 2106914 - DNA, 15 bp, Homo sapiens
tcctatgtggaaccc

SEQ ID NO: 2106915 - DNA, 15 bp, Homo sapiens
cctatgtggaaccca

SEQ ID NO: 2106916 - DNA, 15 bp, Homo sapiens
ctatgtggaacccag

SEQ ID NO: 2106917 - DNA, 15 bp, Homo sapiens
tatgtggaacccaga

SEQ ID NO: 2106918 - DNA, 15 bp, Homo sapiens
atgtggaacccagaa

SEQ ID NO: 2106919 - DNA, 15 bp, Homo sapiens
tgtggaacccagaaa

SEQ ID NO: 2106920 - DNA, 15 bp, Homo sapiens
gtggaacccagaaat

SEQ ID NO: 2106921 - DNA, 15 bp, Homo sapiens
tggaacccagaaatc

SEQ ID NO: 2106922 - DNA, 15 bp, Homo sapiens
ggaacccagaaatcc

SEQ ID NO: 2106923 - DNA, 15 bp, Homo sapiens
gaacccagaaatccc

SEQ ID NO: 2106924 - DNA, 15 bp, Homo sapiens
aacccagaaatccct

SEQ ID NO: 2106925 - DNA, 15 bp, Homo sapiens
acccagaaatccctg

SEQ ID NO: 2106926 - DNA, 15 bp, Homo sapiens
cccagaaatccctga

SEQ ID NO: 2106927 - DNA, 15 bp, Homo sapiens
ccagaaatccctgat

SEQ ID NO: 2106928 - DNA, 15 bp, Homo sapiens
cagaaatccctgatg

SEQ ID NO: 2106929 - DNA, 15 bp, Homo sapiens
agaaatccctgatgt

SEQ ID NO: 2106930 - DNA, 15 bp, Homo sapiens
gaaatccctgatgtc

SEQ ID NO: 2106931 - DNA, 15 bp, Homo sapiens
aaatccctgatgtcc

SEQ ID NO: 2106932 - DNA, 15 bp, Homo sapiens
aatccctgatgtcca

SEQ ID NO: 2106933 - DNA, 15 bp, Homo sapiens
atccctgatgtccat

SEQ ID NO: 2106934 - DNA, 15 bp, Homo sapiens
tccctgatgtccatt

SEQ ID NO: 2106935 - DNA, 15 bp, Homo sapiens
ccctgatgtccattt

SEQ ID NO: 2106936 - DNA, 15 bp, Homo sapiens
cctgatgtccatttg

SEQ ID NO: 2106937 - DNA, 15 bp, Homo sapiens
ctgatgtccatttgt

SEQ ID NO: 2106938 - DNA, 15 bp, Homo sapiens
tgatgtccatttgtg

SEQ ID NO: 2106939 - DNA, 15 bp, Homo sapiens
gatgtccatttgtgt

SEQ ID NO: 2106940 - DNA, 15 bp, Homo sapiens
atgtccatttgtgtt

SEQ ID NO: 2106941 - DNA, 15 bp, Homo sapiens
tgtccatttgtgttg

SEQ ID NO: 2106942 - DNA, 15 bp, Homo sapiens
gtccatttgtgttgt

SEQ ID NO: 2106943 - DNA, 15 bp, Homo sapiens
tccatttgtgttgta

SEQ ID NO: 2106944 - DNA, 15 bp, Homo sapiens
ccatttgtgttgtag

SEQ ID NO: 2106945 - DNA, 15 bp, Homo sapiens
catttgtgttgtagt

SEQ ID NO: 2106946 - DNA, 15 bp, Homo sapiens
atttgtgttgtagtt

SEQ ID NO: 2106947 - DNA, 15 bp, Homo sapiens
tttgtgttgtagtta

SEQ ID NO: 2106948 - DNA, 15 bp, Homo sapiens
ttgtgttgtagttat

SEQ ID NO: 2106949 - DNA, 15 bp, Homo sapiens
tgtgttgtagttatc

SEQ ID NO: 2106950 - DNA, 15 bp, Homo sapiens
gtgttgtagttatct

SEQ ID NO: 2106951 - DNA, 15 bp, Homo sapiens
tgttgtagttatcta

SEQ ID NO: 2106952 - DNA, 15 bp, Homo sapiens
gttgtagttatctag

SEQ ID NO: 2106953 - DNA, 15 bp, Homo sapiens
ttgtagttatctagt

SEQ ID NO: 2106954 - DNA, 15 bp, Homo sapiens
tgtagttatctagtt

SEQ ID NO: 2106955 - DNA, 15 bp, Homo sapiens
gtagttatctagttt

SEQ ID NO: 2106956 - DNA, 15 bp, Homo sapiens
tagttatctagtttt

SEQ ID NO: 2106957 - DNA, 15 bp, Homo sapiens
agttatctagttttt

SEQ ID NO: 2106958 - DNA, 15 bp, Homo sapiens
gttatctagtttttt

SEQ ID NO: 2106959 - DNA, 15 bp, Homo sapiens
ttatctagttttttt

SEQ ID NO: 2106960 - DNA, 15 bp, Homo sapiens
tatctagtttttttt

SEQ ID NO: 2106961 - DNA, 15 bp, Homo sapiens
atctagttttttttc

SEQ ID NO: 2106962 - DNA, 15 bp, Homo sapiens
tctagttttttttct

SEQ ID NO: 2106963 - DNA, 15 bp, Homo sapiens
ctagttttttttcta

SEQ ID NO: 2106964 - DNA, 15 bp, Homo sapiens
tagttttttttctag

SEQ ID NO: 2106965 - DNA, 15 bp, Homo sapiens
agttttttttctagt

SEQ ID NO: 2106966 - DNA, 15 bp, Homo sapiens
gttttttttctagtt

SEQ ID NO: 2106967 - DNA, 15 bp, Homo sapiens
ttttttttctagttg

SEQ ID NO: 2106968 - DNA, 15 bp, Homo sapiens
tttttttctagttgt

SEQ ID NO: 2106969 - DNA, 15 bp, Homo sapiens
ttttttctagttgtt

SEQ ID NO: 2106970 - DNA, 15 bp, Homo sapiens
tttttctagttgtta

SEQ ID NO: 2106971 - DNA, 15 bp, Homo sapiens
ttttctagttgttac

SEQ ID NO: 2106972 - DNA, 15 bp, Homo sapiens
tttctagttgttaca

SEQ ID NO: 2106973 - DNA, 15 bp, Homo sapiens
ttctagttgttacag

SEQ ID NO: 2106974 - DNA, 15 bp, Homo sapiens
tctagttgttacagt

SEQ ID NO: 2106975 - DNA, 15 bp, Homo sapiens
ctagttgttacagtg

SEQ ID NO: 2106976 - DNA, 15 bp, Homo sapiens
tagttgttacagtgg

SEQ ID NO: 2106977 - DNA, 15 bp, Homo sapiens
agttgttacagtggg

SEQ ID NO: 2106978 - DNA, 15 bp, Homo sapiens
gttgttacagtggga

SEQ ID NO: 2106979 - DNA, 15 bp, Homo sapiens
ttgttacagtgggaa

SEQ ID NO: 2106980 - DNA, 15 bp, Homo sapiens
tgttacagtgggaat

SEQ ID NO: 2106981 - DNA, 15 bp, Homo sapiens
gttacagtgggaata

SEQ ID NO: 2106982 - DNA, 15 bp, Homo sapiens
ttacagtgggaataa

SEQ ID NO: 2106983 - DNA, 15 bp, Homo sapiens
tacagtgggaataat

SEQ ID NO: 2106984 - DNA, 15 bp, Homo sapiens
acagtgggaataatg

SEQ ID NO: 2106985 - DNA, 15 bp, Homo sapiens
cagtgggaataatgg

SEQ ID NO: 2106986 - DNA, 15 bp, Homo sapiens
agtgggaataatggt

SEQ ID NO: 2106987 - DNA, 15 bp, Homo sapiens
gtgggaataatggtc

SEQ ID NO: 2106988 - DNA, 15 bp, Homo sapiens
tgggaataatggtct

SEQ ID NO: 2106989 - DNA, 15 bp, Homo sapiens
gggaataatggtctt

SEQ ID NO: 2106990 - DNA, 15 bp, Homo sapiens
ggaataatggtcttt

SEQ ID NO: 2106991 - DNA, 15 bp, Homo sapiens
gaataatggtctttc

SEQ ID NO: 2106992 - DNA, 15 bp, Homo sapiens
aataatggtctttca

SEQ ID NO: 2106993 - DNA, 15 bp, Homo sapiens
ataatggtctttcac

SEQ ID NO: 2106994 - DNA, 15 bp, Homo sapiens
taatggtctttcact

SEQ ID NO: 2106995 - DNA, 15 bp, Homo sapiens
aatggtctttcacta

SEQ ID NO: 2106996 - DNA, 15 bp, Homo sapiens
atggtctttcactat

SEQ ID NO: 2106997 - DNA, 15 bp, Homo sapiens
tggtctttcactatc

SEQ ID NO: 2106998 - DNA, 15 bp, Homo sapiens
ggtctttcactatct

SEQ ID NO: 2106999 - DNA, 15 bp, Homo sapiens
gtctttcactatctt

SEQ ID NO: 2107000 - DNA, 15 bp, Homo sapiens
tctttcactatcttc

SEQ ID NO: 2107001 - DNA, 15 bp, Homo sapiens
ctttcactatcttct

SEQ ID NO: 2107002 - DNA, 15 bp, Homo sapiens
tttcactatcttcta

SEQ ID NO: 2107003 - DNA, 15 bp, Homo sapiens
ttcactatcttctac

SEQ ID NO: 2107004 - DNA, 15 bp, Homo sapiens
tcactatcttctaca

SEQ ID NO: 2107005 - DNA, 15 bp, Homo sapiens
cactatcttctacat

SEQ ID NO: 2107006 - DNA, 15 bp, Homo sapiens
actatcttctacatt

SEQ ID NO: 2107007 - DNA, 15 bp, Homo sapiens
ctatcttctacattc

SEQ ID NO: 2107008 - DNA, 15 bp, Homo sapiens
tatcttctacattct

SEQ ID NO: 2107009 - DNA, 15 bp, Homo sapiens
atcttctacattctg

SEQ ID NO: 2107010 - DNA, 15 bp, Homo sapiens
tcttctacattctga

SEQ ID NO: 2107011 - DNA, 15 bp, Homo sapiens
cttctacattctgac

SEQ ID NO: 2107012 - DNA, 15 bp, Homo sapiens
ttctacattctgacc

SEQ ID NO: 2107013 - DNA, 15 bp, Homo sapiens
tctacattctgaccc

SEQ ID NO: 2107014 - DNA, 15 bp, Homo sapiens
ctacattctgaccca

SEQ ID NO: 2107015 - DNA, 15 bp, Homo sapiens
tacattctgacccaa

SEQ ID NO: 2107016 - DNA, 15 bp, Homo sapiens
acattctgacccaaa

SEQ ID NO: 2107017 - DNA, 15 bp, Homo sapiens
cattctgacccaaag

SEQ ID NO: 2107018 - DNA, 15 bp, Homo sapiens
attctgacccaaagc

SEQ ID NO: 2107019 - DNA, 15 bp, Homo sapiens
ttctgacccaaagcc

SEQ ID NO: 2107020 - DNA, 15 bp, Homo sapiens
tctgacccaaagcca

SEQ ID NO: 2107021 - DNA, 15 bp, Homo sapiens
ctgacccaaagccaa

SEQ ID NO: 2107022 - DNA, 15 bp, Homo sapiens
tgacccaaagccaaa

SEQ ID NO: 2107023 - DNA, 15 bp, Homo sapiens
gacccaaagccaaat

SEQ ID NO: 2107024 - DNA, 15 bp, Homo sapiens
acccaaagccaaatg

SEQ ID NO: 2107025 - DNA, 15 bp, Homo sapiens
cccaaagccaaatgt

SEQ ID NO: 2107026 - DNA, 15 bp, Homo sapiens
ccaaagccaaatgtc

SEQ ID NO: 2107027 - DNA, 15 bp, Homo sapiens
caaagccaaatgtca

SEQ ID NO: 2107028 - DNA, 15 bp, Homo sapiens
aaagccaaatgtcat

SEQ ID NO: 2107029 - DNA, 15 bp, Homo sapiens
aagccaaatgtcata

SEQ ID NO: 2107030 - DNA, 15 bp, Homo sapiens
agccaaatgtcataa

SEQ ID NO: 2107031 - DNA, 15 bp, Homo sapiens
gccaaatgtcataat

SEQ ID NO: 2107032 - DNA, 15 bp, Homo sapiens
ccaaatgtcataata

SEQ ID NO: 2107033 - DNA, 15 bp, Homo sapiens
caaatgtcataataa

SEQ ID NO: 2107034 - DNA, 15 bp, Homo sapiens
aaatgtcataataac

SEQ ID NO: 2107035 - DNA, 15 bp, Homo sapiens
aatgtcataataacc

SEQ ID NO: 2107036 - DNA, 15 bp, Homo sapiens
atgtcataataacct

SEQ ID NO: 2107037 - DNA, 15 bp, Homo sapiens
tgtcataataacctt

SEQ ID NO: 2107038 - DNA, 15 bp, Homo sapiens
gtcataataaccttt

SEQ ID NO: 2107039 - DNA, 15 bp, Homo sapiens
tcataataacctttc

SEQ ID NO: 2107040 - DNA, 15 bp, Homo sapiens
cataataacctttct

SEQ ID NO: 2107041 - DNA, 15 bp, Homo sapiens
ataataacctttctg

SEQ ID NO: 2107042 - DNA, 15 bp, Homo sapiens
taataacctttctga

SEQ ID NO: 2107043 - DNA, 15 bp, Homo sapiens
aataacctttctgaa

SEQ ID NO: 2107044 - DNA, 15 bp, Homo sapiens
ataacctttctgaaa

SEQ ID NO: 2107045 - DNA, 15 bp, Homo sapiens
taacctttctgaaac

SEQ ID NO: 2107046 - DNA, 15 bp, Homo sapiens
aacctttctgaaaca

SEQ ID NO: 2107047 - DNA, 15 bp, Homo sapiens
acctttctgaaacat

SEQ ID NO: 2107048 - DNA, 15 bp, Homo sapiens
cctttctgaaacata

SEQ ID NO: 2107049 - DNA, 15 bp, Homo sapiens
ctttctgaaacataa

SEQ ID NO: 2107050 - DNA, 15 bp, Homo sapiens
tttctgaaacataaa

SEQ ID NO: 2107051 - DNA, 15 bp, Homo sapiens
ttctgaaacataaat

SEQ ID NO: 2107052 - DNA, 15 bp, Homo sapiens
tctgaaacataaatt

SEQ ID NO: 2107053 - DNA, 15 bp, Homo sapiens
ctgaaacataaattg

SEQ ID NO: 2107054 - DNA, 15 bp, Homo sapiens
tgaaacataaattgg

SEQ ID NO: 2107055 - DNA, 15 bp, Homo sapiens
gaaacataaattgga

SEQ ID NO: 2107056 - DNA, 15 bp, Homo sapiens
aaacataaattggat

SEQ ID NO: 2107057 - DNA, 15 bp, Homo sapiens
aacataaattggatc

SEQ ID NO: 2107058 - DNA, 15 bp, Homo sapiens
acataaattggatca

SEQ ID NO: 2107059 - DNA, 15 bp, Homo sapiens
cataaattggatcat

SEQ ID NO: 2107060 - DNA, 15 bp, Homo sapiens
ataaattggatcata

SEQ ID NO: 2107061 - DNA, 15 bp, Homo sapiens
taaattggatcataa

SEQ ID NO: 2107062 - DNA, 15 bp, Homo sapiens
aaattggatcataac

SEQ ID NO: 2107063 - DNA, 15 bp, Homo sapiens
aattggatcataaca

SEQ ID NO: 2107064 - DNA, 15 bp, Homo sapiens
attggatcataacac

SEQ ID NO: 2107065 - DNA, 15 bp, Homo sapiens
ttggatcataacact

SEQ ID NO: 2107066 - DNA, 15 bp, Homo sapiens
tggatcataacactc

SEQ ID NO: 2107067 - DNA, 15 bp, Homo sapiens
ggatcataacactcc

SEQ ID NO: 2107068 - DNA, 15 bp, Homo sapiens
gatcataacactcct

SEQ ID NO: 2107069 - DNA, 15 bp, Homo sapiens
atcataacactcctt

SEQ ID NO: 2107070 - DNA, 15 bp, Homo sapiens
tcataacactccttt

SEQ ID NO: 2107071 - DNA, 15 bp, Homo sapiens
cataacactcctttg

SEQ ID NO: 2107072 - DNA, 15 bp, Homo sapiens
ataacactcctttgc

SEQ ID NO: 2107073 - DNA, 15 bp, Homo sapiens
taacactcctttgct

SEQ ID NO: 2107074 - DNA, 15 bp, Homo sapiens
aacactcctttgctt

SEQ ID NO: 2107075 - DNA, 15 bp, Homo sapiens
acactcctttgcttt

SEQ ID NO: 2107076 - DNA, 15 bp, Homo sapiens
cactcctttgctttc

SEQ ID NO: 2107077 - DNA, 15 bp, Homo sapiens
actcctttgctttct

SEQ ID NO: 2107078 - DNA, 15 bp, Homo sapiens
ctcctttgctttcta

SEQ ID NO: 2107079 - DNA, 15 bp, Homo sapiens
tcctttgctttctat

SEQ ID NO: 2107080 - DNA, 15 bp, Homo sapiens
cctttgctttctatc

SEQ ID NO: 2107081 - DNA, 15 bp, Homo sapiens
ctttgctttctatcc

SEQ ID NO: 2107082 - DNA, 15 bp, Homo sapiens
tttgctttctatcct

SEQ ID NO: 2107083 - DNA, 15 bp, Homo sapiens
ttgctttctatcctt

SEQ ID NO: 2107084 - DNA, 15 bp, Homo sapiens
tgctttctatccttc

SEQ ID NO: 2107085 - DNA, 15 bp, Homo sapiens
gctttctatccttca

SEQ ID NO: 2107086 - DNA, 15 bp, Homo sapiens
ctttctatccttcag

SEQ ID NO: 2107087 - DNA, 15 bp, Homo sapiens
tttctatccttcagt

SEQ ID NO: 2107088 - DNA, 15 bp, Homo sapiens
ttctatccttcagtg

SEQ ID NO: 2107089 - DNA, 15 bp, Homo sapiens
tctatccttcagtgg

SEQ ID NO: 2107090 - DNA, 15 bp, Homo sapiens
ctatccttcagtggt

SEQ ID NO: 2107091 - DNA, 15 bp, Homo sapiens
tatccttcagtggtt

SEQ ID NO: 2107092 - DNA, 15 bp, Homo sapiens
atccttcagtggttt

SEQ ID NO: 2107093 - DNA, 15 bp, Homo sapiens
tccttcagtggtttc

SEQ ID NO: 2107094 - DNA, 15 bp, Homo sapiens
ccttcagtggtttct

SEQ ID NO: 2107095 - DNA, 15 bp, Homo sapiens
cttcagtggtttcta

SEQ ID NO: 2107096 - DNA, 15 bp, Homo sapiens
ttcagtggtttctaa

SEQ ID NO: 2107097 - DNA, 15 bp, Homo sapiens
tcagtggtttctaat

SEQ ID NO: 2107098 - DNA, 15 bp, Homo sapiens
cagtggtttctaatc

SEQ ID NO: 2107099 - DNA, 15 bp, Homo sapiens
agtggtttctaatca

SEQ ID NO: 2107100 - DNA, 15 bp, Homo sapiens
gtggtttctaatcat

SEQ ID NO: 2107101 - DNA, 15 bp, Homo sapiens
tggtttctaatcata

SEQ ID NO: 2107102 - DNA, 15 bp, Homo sapiens
ggtttctaatcatac

SEQ ID NO: 2107103 - DNA, 15 bp, Homo sapiens
gtttctaatcataca

SEQ ID NO: 2107104 - DNA, 15 bp, Homo sapiens
tttctaatcatacat

SEQ ID NO: 2107105 - DNA, 15 bp, Homo sapiens
ttctaatcatacatc

SEQ ID NO: 2107106 - DNA, 15 bp, Homo sapiens
tctaatcatacatca

SEQ ID NO: 2107107 - DNA, 15 bp, Homo sapiens
ctaatcatacatcaa

SEQ ID NO: 2107108 - DNA, 15 bp, Homo sapiens
taatcatacatcaaa

SEQ ID NO: 2107109 - DNA, 15 bp, Homo sapiens
aatcatacatcaaac

SEQ ID NO: 2107110 - DNA, 15 bp, Homo sapiens
atcatacatcaaact

SEQ ID NO: 2107111 - DNA, 15 bp, Homo sapiens
tcatacatcaaactt

SEQ ID NO: 2107112 - DNA, 15 bp, Homo sapiens
catacatcaaacttt

SEQ ID NO: 2107113 - DNA, 15 bp, Homo sapiens
atacatcaaacttta

SEQ ID NO: 2107114 - DNA, 15 bp, Homo sapiens
tacatcaaactttaa

SEQ ID NO: 2107115 - DNA, 15 bp, Homo sapiens
acatcaaactttaaa

SEQ ID NO: 2107116 - DNA, 15 bp, Homo sapiens
catcaaactttaaaa

SEQ ID NO: 2107117 - DNA, 15 bp, Homo sapiens
atcaaactttaaaaa

SEQ ID NO: 2107118 - DNA, 15 bp, Homo sapiens
tcaaactttaaaaat

SEQ ID NO: 2107119 - DNA, 15 bp, Homo sapiens
caaactttaaaaata

SEQ ID NO: 2107120 - DNA, 15 bp, Homo sapiens
aaactttaaaaataa

SEQ ID NO: 2107121 - DNA, 15 bp, Homo sapiens
aactttaaaaataat

SEQ ID NO: 2107122 - DNA, 15 bp, Homo sapiens
actttaaaaataata

SEQ ID NO: 2107123 - DNA, 15 bp, Homo sapiens
ctttaaaaataataa

SEQ ID NO: 2107124 - DNA, 15 bp, Homo sapiens
tttaaaaataataaa

SEQ ID NO: 2107125 - DNA, 15 bp, Homo sapiens
ttaaaaataataaaa

SEQ ID NO: 2107126 - DNA, 15 bp, Homo sapiens
taaaaataataaaat

SEQ ID NO: 2107127 - DNA, 15 bp, Homo sapiens
aaaaataataaaatt

SEQ ID NO: 2107128 - DNA, 15 bp, Homo sapiens
aaaataataaaattc

SEQ ID NO: 2107129 - DNA, 15 bp, Homo sapiens
aaataataaaattca

SEQ ID NO: 2107130 - DNA, 15 bp, Homo sapiens
aataataaaattcaa

SEQ ID NO: 2107131 - DNA, 15 bp, Homo sapiens
ataataaaattcaaa

SEQ ID NO: 2107132 - DNA, 15 bp, Homo sapiens
taataaaattcaaaa

SEQ ID NO: 2107133 - DNA, 15 bp, Homo sapiens
aataaaattcaaaat

SEQ ID NO: 2107134 - DNA, 15 bp, Homo sapiens
ataaaattcaaaatt

SEQ ID NO: 2107135 - DNA, 15 bp, Homo sapiens
taaaattcaaaattt

SEQ ID NO: 2107136 - DNA, 15 bp, Homo sapiens
aaaattcaaaatttt

SEQ ID NO: 2107137 - DNA, 15 bp, Homo sapiens
aaattcaaaattttt

SEQ ID NO: 2107138 - DNA, 15 bp, Homo sapiens
aattcaaaatttttc

SEQ ID NO: 2107139 - DNA, 15 bp, Homo sapiens
attcaaaatttttct

SEQ ID NO: 2107140 - DNA, 15 bp, Homo sapiens
ttcaaaatttttctt

SEQ ID NO: 2107141 - DNA, 15 bp, Homo sapiens
tcaaaatttttcttt

SEQ ID NO: 2107142 - DNA, 15 bp, Homo sapiens
caaaatttttctttt

SEQ ID NO: 2107143 - DNA, 15 bp, Homo sapiens
aaaatttttcttttg

SEQ ID NO: 2107144 - DNA, 15 bp, Homo sapiens
aaatttttcttttgc

SEQ ID NO: 2107145 - DNA, 15 bp, Homo sapiens
aatttttcttttgct

SEQ ID NO: 2107146 - DNA, 15 bp, Homo sapiens
atttttcttttgctt

SEQ ID NO: 2107147 - DNA, 15 bp, Homo sapiens
tttttcttttgcttg

SEQ ID NO: 2107148 - DNA, 15 bp, Homo sapiens
ttttcttttgcttgt

SEQ ID NO: 2107149 - DNA, 15 bp, Homo sapiens
tttcttttgcttgta

SEQ ID NO: 2107150 - DNA, 15 bp, Homo sapiens
ttcttttgcttgtaa

SEQ ID NO: 2107151 - DNA, 15 bp, Homo sapiens
tcttttgcttgtaat

SEQ ID NO: 2107152 - DNA, 15 bp, Homo sapiens
cttttgcttgtaata

SEQ ID NO: 2107153 - DNA, 15 bp, Homo sapiens
ttttgcttgtaatat

SEQ ID NO: 2107154 - DNA, 15 bp, Homo sapiens
tttgcttgtaatatc

SEQ ID NO: 2107155 - DNA, 15 bp, Homo sapiens
ttgcttgtaatatcc

SEQ ID NO: 2107156 - DNA, 15 bp, Homo sapiens
tgcttgtaatatcct

SEQ ID NO: 2107157 - DNA, 15 bp, Homo sapiens
gcttgtaatatcctg

SEQ ID NO: 2107158 - DNA, 15 bp, Homo sapiens
cttgtaatatcctgc

SEQ ID NO: 2107159 - DNA, 15 bp, Homo sapiens
ttgtaatatcctgca

SEQ ID NO: 2107160 - DNA, 15 bp, Homo sapiens
tgtaatatcctgcat

SEQ ID NO: 2107161 - DNA, 15 bp, Homo sapiens
gtaatatcctgcatg

SEQ ID NO: 2107162 - DNA, 15 bp, Homo sapiens
taatatcctgcatga

SEQ ID NO: 2107163 - DNA, 15 bp, Homo sapiens
aatatcctgcatgat

SEQ ID NO: 2107164 - DNA, 15 bp, Homo sapiens
atatcctgcatgatc

SEQ ID NO: 2107165 - DNA, 15 bp, Homo sapiens
tatcctgcatgatct

SEQ ID NO: 2107166 - DNA, 15 bp, Homo sapiens
atcctgcatgatctt

SEQ ID NO: 2107167 - DNA, 15 bp, Homo sapiens
tcctgcatgatcttg

SEQ ID NO: 2107168 - DNA, 15 bp, Homo sapiens
cctgcatgatcttgg

SEQ ID NO: 2107169 - DNA, 15 bp, Homo sapiens
ctgcatgatcttggg

SEQ ID NO: 2107170 - DNA, 15 bp, Homo sapiens
tgcatgatcttgggt

SEQ ID NO: 2107171 - DNA, 15 bp, Homo sapiens
gcatgatcttgggtc

SEQ ID NO: 2107172 - DNA, 15 bp, Homo sapiens
catgatcttgggtct

SEQ ID NO: 2107173 - DNA, 15 bp, Homo sapiens
atgatcttgggtctt

SEQ ID NO: 2107174 - DNA, 15 bp, Homo sapiens
tgatcttgggtcttt

SEQ ID NO: 2107175 - DNA, 15 bp, Homo sapiens
gatcttgggtctttt

SEQ ID NO: 2107176 - DNA, 15 bp, Homo sapiens
atcttgggtcttttt

SEQ ID NO: 2107177 - DNA, 15 bp, Homo sapiens
tcttgggtctttttg

SEQ ID NO: 2107178 - DNA, 15 bp, Homo sapiens
cttgggtctttttgc

SEQ ID NO: 2107179 - DNA, 15 bp, Homo sapiens
ttgggtctttttgct

SEQ ID NO: 2107180 - DNA, 15 bp, Homo sapiens
tgggtctttttgctg

SEQ ID NO: 2107181 - DNA, 15 bp, Homo sapiens
gggtctttttgctgt

SEQ ID NO: 2107182 - DNA, 15 bp, Homo sapiens
ggtctttttgctgtc

SEQ ID NO: 2107183 - DNA, 15 bp, Homo sapiens
gtctttttgctgtct

SEQ ID NO: 2107184 - DNA, 15 bp, Homo sapiens
tctttttgctgtctt

SEQ ID NO: 2107185 - DNA, 15 bp, Homo sapiens
ctttttgctgtcttt

SEQ ID NO: 2107186 - DNA, 15 bp, Homo sapiens
tttttgctgtctttt

SEQ ID NO: 2107187 - DNA, 15 bp, Homo sapiens
ttttgctgtcttttt

SEQ ID NO: 2107188 - DNA, 15 bp, Homo sapiens
tttgctgtctttttt

SEQ ID NO: 2107189 - DNA, 15 bp, Homo sapiens
ttgctgtcttttttt

SEQ ID NO: 2107190 - DNA, 15 bp, Homo sapiens
tgctgtctttttttt

SEQ ID NO: 2107191 - DNA, 15 bp, Homo sapiens
gctgtcttttttttc

SEQ ID NO: 2107192 - DNA, 15 bp, Homo sapiens
ctgtcttttttttct

SEQ ID NO: 2107193 - DNA, 15 bp, Homo sapiens
tgtcttttttttcta

SEQ ID NO: 2107194 - DNA, 15 bp, Homo sapiens
gtcttttttttctat

SEQ ID NO: 2107195 - DNA, 15 bp, Homo sapiens
tcttttttttctatc

SEQ ID NO: 2107196 - DNA, 15 bp, Homo sapiens
cttttttttctatct

SEQ ID NO: 2107197 - DNA, 15 bp, Homo sapiens
ttttttttctatctt

SEQ ID NO: 2107198 - DNA, 15 bp, Homo sapiens
tttttttctatcttt

SEQ ID NO: 2107199 - DNA, 15 bp, Homo sapiens
ttttttctatctttt

SEQ ID NO: 2107200 - DNA, 15 bp, Homo sapiens
tttttctatcttttc

SEQ ID NO: 2107201 - DNA, 15 bp, Homo sapiens
ttttctatcttttca

SEQ ID NO: 2107202 - DNA, 15 bp, Homo sapiens
tttctatcttttcaa

SEQ ID NO: 2107203 - DNA, 15 bp, Homo sapiens
ttctatcttttcaaa

SEQ ID NO: 2107204 - DNA, 15 bp, Homo sapiens
tctatcttttcaaac

SEQ ID NO: 2107205 - DNA, 15 bp, Homo sapiens
ctatcttttcaaaca

SEQ ID NO: 2107206 - DNA, 15 bp, Homo sapiens
tatcttttcaaacac

SEQ ID NO: 2107207 - DNA, 15 bp, Homo sapiens
atcttttcaaacaca

SEQ ID NO: 2107208 - DNA, 15 bp, Homo sapiens
tcttttcaaacacat

SEQ ID NO: 2107209 - DNA, 15 bp, Homo sapiens
cttttcaaacacatc

SEQ ID NO: 2107210 - DNA, 15 bp, Homo sapiens
ttttcaaacacatct

SEQ ID NO: 2107211 - DNA, 15 bp, Homo sapiens
tttcaaacacatctc

SEQ ID NO: 2107212 - DNA, 15 bp, Homo sapiens
ttcaaacacatctca

SEQ ID NO: 2107213 - DNA, 15 bp, Homo sapiens
tcaaacacatctcat

SEQ ID NO: 2107214 - DNA, 15 bp, Homo sapiens
caaacacatctcatg

SEQ ID NO: 2107215 - DNA, 15 bp, Homo sapiens
aaacacatctcatgc

SEQ ID NO: 2107216 - DNA, 15 bp, Homo sapiens
aacacatctcatgcc

SEQ ID NO: 2107217 - DNA, 15 bp, Homo sapiens
acacatctcatgcca

SEQ ID NO: 2107218 - DNA, 15 bp, Homo sapiens
cacatctcatgccat

SEQ ID NO: 2107219 - DNA, 15 bp, Homo sapiens
acatctcatgccatt

SEQ ID NO: 2107220 - DNA, 15 bp, Homo sapiens
catctcatgccattc

SEQ ID NO: 2107221 - DNA, 15 bp, Homo sapiens
atctcatgccattct

SEQ ID NO: 2107222 - DNA, 15 bp, Homo sapiens
tctcatgccattctc

SEQ ID NO: 2107223 - DNA, 15 bp, Homo sapiens
ctcatgccattctcc

SEQ ID NO: 2107224 - DNA, 15 bp, Homo sapiens
catgccattctcctt

SEQ ID NO: 2107225 - DNA, 15 bp, Homo sapiens
atgccattctcctta

SEQ ID NO: 2107226 - DNA, 15 bp, Homo sapiens
tgccattctccttat

SEQ ID NO: 2107227 - DNA, 15 bp, Homo sapiens
gccattctccttatt

SEQ ID NO: 2107228 - DNA, 15 bp, Homo sapiens
ccattctccttattt

SEQ ID NO: 2107229 - DNA, 15 bp, Homo sapiens
cattctccttatttt

SEQ ID NO: 2107230 - DNA, 15 bp, Homo sapiens
attctccttattttc

SEQ ID NO: 2107231 - DNA, 15 bp, Homo sapiens
ttctccttattttct

SEQ ID NO: 2107232 - DNA, 15 bp, Homo sapiens
tctccttattttcta

SEQ ID NO: 2107233 - DNA, 15 bp, Homo sapiens
ctccttattttctat

SEQ ID NO: 2107234 - DNA, 15 bp, Homo sapiens
tccttattttctata

SEQ ID NO: 2107235 - DNA, 15 bp, Homo sapiens
ccttattttctatac

SEQ ID NO: 2107236 - DNA, 15 bp, Homo sapiens
cttattttctatact

SEQ ID NO: 2107237 - DNA, 15 bp, Homo sapiens
ttattttctatactc

SEQ ID NO: 2107238 - DNA, 15 bp, Homo sapiens
tattttctatactcc

SEQ ID NO: 2107239 - DNA, 15 bp, Homo sapiens
attttctatactcca

SEQ ID NO: 2107240 - DNA, 15 bp, Homo sapiens
ttttctatactccag

SEQ ID NO: 2107241 - DNA, 15 bp, Homo sapiens
tttctatactccagc

SEQ ID NO: 2107242 - DNA, 15 bp, Homo sapiens
ttctatactccagcc

SEQ ID NO: 2107243 - DNA, 15 bp, Homo sapiens
tctatactccagcca

SEQ ID NO: 2107244 - DNA, 15 bp, Homo sapiens
ctatactccagccaa

SEQ ID NO: 2107245 - DNA, 15 bp, Homo sapiens
tatactccagccaag

SEQ ID NO: 2107246 - DNA, 15 bp, Homo sapiens
atactccagccaagg

SEQ ID NO: 2107247 - DNA, 15 bp, Homo sapiens
tactccagccaagga

SEQ ID NO: 2107248 - DNA, 15 bp, Homo sapiens
actccagccaaggag

SEQ ID NO: 2107249 - DNA, 15 bp, Homo sapiens
ctccagccaaggagt

SEQ ID NO: 2107250 - DNA, 15 bp, Homo sapiens
tccagccaaggagtt

SEQ ID NO: 2107251 - DNA, 15 bp, Homo sapiens
ccagccaaggagttg

SEQ ID NO: 2107252 - DNA, 15 bp, Homo sapiens
cagccaaggagttgg

SEQ ID NO: 2107253 - DNA, 15 bp, Homo sapiens
agccaaggagttggc

SEQ ID NO: 2107254 - DNA, 15 bp, Homo sapiens
gccaaggagttggca

SEQ ID NO: 2107255 - DNA, 15 bp, Homo sapiens
ccaaggagttggcaa

SEQ ID NO: 2107256 - DNA, 15 bp, Homo sapiens
caaggagttggcaat

SEQ ID NO: 2107257 - DNA, 15 bp, Homo sapiens
aaggagttggcaatc

SEQ ID NO: 2107258 - DNA, 15 bp, Homo sapiens
aggagttggcaatct

SEQ ID NO: 2107259 - DNA, 15 bp, Homo sapiens
ggagttggcaatctt

SEQ ID NO: 2107260 - DNA, 15 bp, Homo sapiens
gagttggcaatcttt

SEQ ID NO: 2107261 - DNA, 15 bp, Homo sapiens
agttggcaatctttt

SEQ ID NO: 2107262 - DNA, 15 bp, Homo sapiens
gttggcaatcttttc

SEQ ID NO: 2107263 - DNA, 15 bp, Homo sapiens
ttggcaatcttttct

SEQ ID NO: 2107264 - DNA, 15 bp, Homo sapiens
tggcaatcttttctt

SEQ ID NO: 2107265 - DNA, 15 bp, Homo sapiens
ggcaatcttttctta

SEQ ID NO: 2107266 - DNA, 15 bp, Homo sapiens
gcaatcttttcttat

SEQ ID NO: 2107267 - DNA, 15 bp, Homo sapiens
caatcttttcttata

SEQ ID NO: 2107268 - DNA, 15 bp, Homo sapiens
aatcttttcttataa

SEQ ID NO: 2107269 - DNA, 15 bp, Homo sapiens
atcttttcttataaa

SEQ ID NO: 2107270 - DNA, 15 bp, Homo sapiens
tcttttcttataaag

SEQ ID NO: 2107271 - DNA, 15 bp, Homo sapiens
cttttcttataaagg

SEQ ID NO: 2107272 - DNA, 15 bp, Homo sapiens
ttttcttataaaggg

SEQ ID NO: 2107273 - DNA, 15 bp, Homo sapiens
tttcttataaagggc

SEQ ID NO: 2107274 - DNA, 15 bp, Homo sapiens
ttcttataaagggcc

SEQ ID NO: 2107275 - DNA, 15 bp, Homo sapiens
tcttataaagggcct

SEQ ID NO: 2107276 - DNA, 15 bp, Homo sapiens
cttataaagggcctg

SEQ ID NO: 2107277 - DNA, 15 bp, Homo sapiens
ttataaagggcctga

SEQ ID NO: 2107278 - DNA, 15 bp, Homo sapiens
tataaagggcctgat

SEQ ID NO: 2107279 - DNA, 15 bp, Homo sapiens
ataaagggcctgata

SEQ ID NO: 2107280 - DNA, 15 bp, Homo sapiens
taaagggcctgatac

SEQ ID NO: 2107281 - DNA, 15 bp, Homo sapiens
aaagggcctgatact

SEQ ID NO: 2107282 - DNA, 15 bp, Homo sapiens
aagggcctgatactc

SEQ ID NO: 2107283 - DNA, 15 bp, Homo sapiens
agggcctgatactca

SEQ ID NO: 2107284 - DNA, 15 bp, Homo sapiens
gggcctgatactcat

SEQ ID NO: 2107285 - DNA, 15 bp, Homo sapiens
ggcctgatactcatt

SEQ ID NO: 2107286 - DNA, 15 bp, Homo sapiens
gcctgatactcatta

SEQ ID NO: 2107287 - DNA, 15 bp, Homo sapiens
cctgatactcattat

SEQ ID NO: 2107288 - DNA, 15 bp, Homo sapiens
ctgatactcattatt

SEQ ID NO: 2107289 - DNA, 15 bp, Homo sapiens
tgatactcattattt

SEQ ID NO: 2107290 - DNA, 15 bp, Homo sapiens
gatactcattatttt

SEQ ID NO: 2107291 - DNA, 15 bp, Homo sapiens
atactcattatttta

SEQ ID NO: 2107292 - DNA, 15 bp, Homo sapiens
tactcattattttag

SEQ ID NO: 2107293 - DNA, 15 bp, Homo sapiens
actcattattttagg

SEQ ID NO: 2107294 - DNA, 15 bp, Homo sapiens
ctcattattttaggc

SEQ ID NO: 2107295 - DNA, 15 bp, Homo sapiens
tcattattttaggct

SEQ ID NO: 2107296 - DNA, 15 bp, Homo sapiens
cattattttaggctt

SEQ ID NO: 2107297 - DNA, 15 bp, Homo sapiens
attattttaggcttt

SEQ ID NO: 2107298 - DNA, 15 bp, Homo sapiens
ttattttaggctttt

SEQ ID NO: 2107299 - DNA, 15 bp, Homo sapiens
tattttaggcttttg

SEQ ID NO: 2107300 - DNA, 15 bp, Homo sapiens
attttaggcttttgg

SEQ ID NO: 2107301 - DNA, 15 bp, Homo sapiens
ttttaggcttttggg

SEQ ID NO: 2107302 - DNA, 15 bp, Homo sapiens
tttaggcttttgggc

SEQ ID NO: 2107303 - DNA, 15 bp, Homo sapiens
ttaggcttttgggcc

SEQ ID NO: 2107304 - DNA, 15 bp, Homo sapiens
taggcttttgggcca

SEQ ID NO: 2107305 - DNA, 15 bp, Homo sapiens
aggcttttgggccac

SEQ ID NO: 2107306 - DNA, 15 bp, Homo sapiens
ggcttttgggccaca

SEQ ID NO: 2107307 - DNA, 15 bp, Homo sapiens
gcttttgggccacat

SEQ ID NO: 2107308 - DNA, 15 bp, Homo sapiens
cttttgggccacatg

SEQ ID NO: 2107309 - DNA, 15 bp, Homo sapiens
ttttgggccacatgg

SEQ ID NO: 2107310 - DNA, 15 bp, Homo sapiens
tttgggccacatggt

SEQ ID NO: 2107311 - DNA, 15 bp, Homo sapiens
ttgggccacatggtc

SEQ ID NO: 2107312 - DNA, 15 bp, Homo sapiens
tgggccacatggtct

SEQ ID NO: 2107313 - DNA, 15 bp, Homo sapiens
gggccacatggtctc

SEQ ID NO: 2107314 - DNA, 15 bp, Homo sapiens
ggccacatggtctct

SEQ ID NO: 2107315 - DNA, 15 bp, Homo sapiens
gccacatggtctctg

SEQ ID NO: 2107316 - DNA, 15 bp, Homo sapiens
ccacatggtctctgt

SEQ ID NO: 2107317 - DNA, 15 bp, Homo sapiens
cacatggtctctgtt

SEQ ID NO: 2107318 - DNA, 15 bp, Homo sapiens
acatggtctctgttg

SEQ ID NO: 2107319 - DNA, 15 bp, Homo sapiens
catggtctctgttgc

SEQ ID NO: 2107320 - DNA, 15 bp, Homo sapiens
atggtctctgttgca

SEQ ID NO: 2107321 - DNA, 15 bp, Homo sapiens
tggtctctgttgcaa

SEQ ID NO: 2107322 - DNA, 15 bp, Homo sapiens
ggtctctgttgcaac

SEQ ID NO: 2107323 - DNA, 15 bp, Homo sapiens
gtctctgttgcaact

SEQ ID NO: 2107324 - DNA, 15 bp, Homo sapiens
tctctgttgcaacta

SEQ ID NO: 2107325 - DNA, 15 bp, Homo sapiens
ctctgttgcaactac

SEQ ID NO: 2107326 - DNA, 15 bp, Homo sapiens
tctgttgcaactaca

SEQ ID NO: 2107327 - DNA, 15 bp, Homo sapiens
ctgttgcaactacaa

SEQ ID NO: 2107328 - DNA, 15 bp, Homo sapiens
tgttgcaactacaac

SEQ ID NO: 2107329 - DNA, 15 bp, Homo sapiens
gttgcaactacaact

SEQ ID NO: 2107330 - DNA, 15 bp, Homo sapiens
ttgcaactacaactc

SEQ ID NO: 2107331 - DNA, 15 bp, Homo sapiens
tgcaactacaactct

SEQ ID NO: 2107332 - DNA, 15 bp, Homo sapiens
gcaactacaactctt

SEQ ID NO: 2107333 - DNA, 15 bp, Homo sapiens
caactacaactcttc

SEQ ID NO: 2107334 - DNA, 15 bp, Homo sapiens
aactacaactcttct

SEQ ID NO: 2107335 - DNA, 15 bp, Homo sapiens
actacaactcttctg

SEQ ID NO: 2107336 - DNA, 15 bp, Homo sapiens
ctacaactcttctgt

SEQ ID NO: 2107337 - DNA, 15 bp, Homo sapiens
tacaactcttctgtt

SEQ ID NO: 2107338 - DNA, 15 bp, Homo sapiens
acaactcttctgttg

SEQ ID NO: 2107339 - DNA, 15 bp, Homo sapiens
caactcttctgttga

SEQ ID NO: 2107340 - DNA, 15 bp, Homo sapiens
aactcttctgttgaa

SEQ ID NO: 2107341 - DNA, 15 bp, Homo sapiens
actcttctgttgaag

SEQ ID NO: 2107342 - DNA, 15 bp, Homo sapiens
ctcttctgttgaagc

SEQ ID NO: 2107343 - DNA, 15 bp, Homo sapiens
tcttctgttgaagca

SEQ ID NO: 2107344 - DNA, 15 bp, Homo sapiens
cttctgttgaagcac

SEQ ID NO: 2107345 - DNA, 15 bp, Homo sapiens
ttctgttgaagcacg

SEQ ID NO: 2107346 - DNA, 15 bp, Homo sapiens
tctgttgaagcacga

SEQ ID NO: 2107347 - DNA, 15 bp, Homo sapiens
ctgttgaagcacgaa

SEQ ID NO: 2107348 - DNA, 15 bp, Homo sapiens
tgttgaagcacgaag

SEQ ID NO: 2107349 - DNA, 15 bp, Homo sapiens
gttgaagcacgaagc

SEQ ID NO: 2107350 - DNA, 15 bp, Homo sapiens
ttgaagcacgaagca

SEQ ID NO: 2107351 - DNA, 15 bp, Homo sapiens
tgaagcacgaagcag

SEQ ID NO: 2107352 - DNA, 15 bp, Homo sapiens
gaagcacgaagcagc

SEQ ID NO: 2107353 - DNA, 15 bp, Homo sapiens
aagcacgaagcagct

SEQ ID NO: 2107354 - DNA, 15 bp, Homo sapiens
agcacgaagcagcta

SEQ ID NO: 2107355 - DNA, 15 bp, Homo sapiens
gcacgaagcagctat

SEQ ID NO: 2107356 - DNA, 15 bp, Homo sapiens
cacgaagcagctata

SEQ ID NO: 2107357 - DNA, 15 bp, Homo sapiens
acgaagcagctatag

SEQ ID NO: 2107358 - DNA, 15 bp, Homo sapiens
cgaagcagctataga

SEQ ID NO: 2107359 - DNA, 15 bp, Homo sapiens
gaagcagctatagac

SEQ ID NO: 2107360 - DNA, 15 bp, Homo sapiens
aagcagctatagaca

SEQ ID NO: 2107361 - DNA, 15 bp, Homo sapiens
agcagctatagacaa

SEQ ID NO: 2107362 - DNA, 15 bp, Homo sapiens
gcagctatagacaat

SEQ ID NO: 2107363 - DNA, 15 bp, Homo sapiens
cagctatagacaata

SEQ ID NO: 2107364 - DNA, 15 bp, Homo sapiens
agctatagacaatat

SEQ ID NO: 2107365 - DNA, 15 bp, Homo sapiens
gctatagacaatata

SEQ ID NO: 2107366 - DNA, 15 bp, Homo sapiens
ctatagacaatatat

SEQ ID NO: 2107367 - DNA, 15 bp, Homo sapiens
tatagacaatatata

SEQ ID NO: 2107368 - DNA, 15 bp, Homo sapiens
atagacaatatataa

SEQ ID NO: 2107369 - DNA, 15 bp, Homo sapiens
tagacaatatataaa

SEQ ID NO: 2107370 - DNA, 15 bp, Homo sapiens
agacaatatataaat

SEQ ID NO: 2107371 - DNA, 15 bp, Homo sapiens
gacaatatataaatg

SEQ ID NO: 2107372 - DNA, 15 bp, Homo sapiens
acaatatataaatgc

SEQ ID NO: 2107373 - DNA, 15 bp, Homo sapiens
caatatataaatgca

SEQ ID NO: 2107374 - DNA, 15 bp, Homo sapiens
aatatataaatgcat

SEQ ID NO: 2107375 - DNA, 15 bp, Homo sapiens
atatataaatgcatt

SEQ ID NO: 2107376 - DNA, 15 bp, Homo sapiens
tatataaatgcatta

SEQ ID NO: 2107377 - DNA, 15 bp, Homo sapiens
atataaatgcattag

SEQ ID NO: 2107378 - DNA, 15 bp, Homo sapiens
tataaatgcattagc

SEQ ID NO: 2107379 - DNA, 15 bp, Homo sapiens
ataaatgcattagct

SEQ ID NO: 2107380 - DNA, 15 bp, Homo sapiens
taaatgcattagctt

SEQ ID NO: 2107381 - DNA, 15 bp, Homo sapiens
aaatgcattagcttt

SEQ ID NO: 2107382 - DNA, 15 bp, Homo sapiens
aatgcattagctttg

SEQ ID NO: 2107383 - DNA, 15 bp, Homo sapiens
atgcattagctttgc

SEQ ID NO: 2107384 - DNA, 15 bp, Homo sapiens
tgcattagctttgct

SEQ ID NO: 2107385 - DNA, 15 bp, Homo sapiens
gcattagctttgctg

SEQ ID NO: 2107386 - DNA, 15 bp, Homo sapiens
cattagctttgctgt

SEQ ID NO: 2107387 - DNA, 15 bp, Homo sapiens
attagctttgctgta

SEQ ID NO: 2107388 - DNA, 15 bp, Homo sapiens
ttagctttgctgtat

SEQ ID NO: 2107389 - DNA, 15 bp, Homo sapiens
tagctttgctgtatt

SEQ ID NO: 2107390 - DNA, 15 bp, Homo sapiens
agctttgctgtattc

SEQ ID NO: 2107391 - DNA, 15 bp, Homo sapiens
gctttgctgtattcc

SEQ ID NO: 2107392 - DNA, 15 bp, Homo sapiens
ctttgctgtattcca

SEQ ID NO: 2107393 - DNA, 15 bp, Homo sapiens
tttgctgtattccaa

SEQ ID NO: 2107394 - DNA, 15 bp, Homo sapiens
ttgctgtattccaat

SEQ ID NO: 2107395 - DNA, 15 bp, Homo sapiens
tgctgtattccaata

SEQ ID NO: 2107396 - DNA, 15 bp, Homo sapiens
gctgtattccaataa

SEQ ID NO: 2107397 - DNA, 15 bp, Homo sapiens
ctgtattccaataaa

SEQ ID NO: 2107398 - DNA, 15 bp, Homo sapiens
tgtattccaataaaa

SEQ ID NO: 2107399 - DNA, 15 bp, Homo sapiens
gtattccaataaaac

SEQ ID NO: 2107400 - DNA, 15 bp, Homo sapiens
tattccaataaaact

SEQ ID NO: 2107401 - DNA, 15 bp, Homo sapiens
attccaataaaactt

SEQ ID NO: 2107402 - DNA, 15 bp, Homo sapiens
ttccaataaaacttt

SEQ ID NO: 2107403 - DNA, 15 bp, Homo sapiens
tccaataaaacttta

SEQ ID NO: 2107404 - DNA, 15 bp, Homo sapiens
ccaataaaactttat

SEQ ID NO: 2107405 - DNA, 15 bp, Homo sapiens
caataaaactttatt

SEQ ID NO: 2107406 - DNA, 15 bp, Homo sapiens
aataaaactttatta

SEQ ID NO: 2107407 - DNA, 15 bp, Homo sapiens
ataaaactttattaa

SEQ ID NO: 2107408 - DNA, 15 bp, Homo sapiens
taaaactttattaat

SEQ ID NO: 2107409 - DNA, 15 bp, Homo sapiens
aaaactttattaatg

SEQ ID NO: 2107410 - DNA, 15 bp, Homo sapiens
aaactttattaatgg

SEQ ID NO: 2107411 - DNA, 15 bp, Homo sapiens
aactttattaatgga

SEQ ID NO: 2107412 - DNA, 15 bp, Homo sapiens
actttattaatggac

SEQ ID NO: 2107413 - DNA, 15 bp, Homo sapiens
ctttattaatggaca

SEQ ID NO: 2107414 - DNA, 15 bp, Homo sapiens
tttattaatggacat

SEQ ID NO: 2107415 - DNA, 15 bp, Homo sapiens
ttattaatggacatt

SEQ ID NO: 2107416 - DNA, 15 bp, Homo sapiens
tattaatggacattg

SEQ ID NO: 2107417 - DNA, 15 bp, Homo sapiens
attaatggacattga

SEQ ID NO: 2107418 - DNA, 15 bp, Homo sapiens
ttaatggacattgaa

SEQ ID NO: 2107419 - DNA, 15 bp, Homo sapiens
taatggacattgaaa

SEQ ID NO: 2107420 - DNA, 15 bp, Homo sapiens
aatggacattgaaat

SEQ ID NO: 2107421 - DNA, 15 bp, Homo sapiens
atggacattgaaatt

SEQ ID NO: 2107422 - DNA, 15 bp, Homo sapiens
tggacattgaaattt

SEQ ID NO: 2107423 - DNA, 15 bp, Homo sapiens
ggacattgaaatttg

SEQ ID NO: 2107424 - DNA, 15 bp, Homo sapiens
gacattgaaatttga

SEQ ID NO: 2107425 - DNA, 15 bp, Homo sapiens
acattgaaatttgaa

SEQ ID NO: 2107426 - DNA, 15 bp, Homo sapiens
cattgaaatttgaat

SEQ ID NO: 2107427 - DNA, 15 bp, Homo sapiens
attgaaatttgaatt

SEQ ID NO: 2107428 - DNA, 15 bp, Homo sapiens
ttgaaatttgaattt

SEQ ID NO: 2107429 - DNA, 15 bp, Homo sapiens
tgaaatttgaattta

SEQ ID NO: 2107430 - DNA, 15 bp, Homo sapiens
gaaatttgaatttaa

SEQ ID NO: 2107431 - DNA, 15 bp, Homo sapiens
aaatttgaatttaat

SEQ ID NO: 2107432 - DNA, 15 bp, Homo sapiens
aatttgaatttaata

SEQ ID NO: 2107433 - DNA, 15 bp, Homo sapiens
atttgaatttaatat

SEQ ID NO: 2107434 - DNA, 15 bp, Homo sapiens
tttgaatttaatata

SEQ ID NO: 2107435 - DNA, 15 bp, Homo sapiens
ttgaatttaatatat

SEQ ID NO: 2107436 - DNA, 15 bp, Homo sapiens
tgaatttaatatatt

SEQ ID NO: 2107437 - DNA, 15 bp, Homo sapiens
gaatttaatatattt

SEQ ID NO: 2107438 - DNA, 15 bp, Homo sapiens
atttaatatattttt

SEQ ID NO: 2107439 - DNA, 15 bp, Homo sapiens
tttaatatatttttt

SEQ ID NO: 2107440 - DNA, 15 bp, Homo sapiens
ttaatatattttttg

SEQ ID NO: 2107441 - DNA, 15 bp, Homo sapiens
taatatattttttgt

SEQ ID NO: 2107442 - DNA, 15 bp, Homo sapiens
aatatattttttgtt

SEQ ID NO: 2107443 - DNA, 15 bp, Homo sapiens
atatattttttgttt

SEQ ID NO: 2107444 - DNA, 15 bp, Homo sapiens
tatattttttgtttg

SEQ ID NO: 2107445 - DNA, 15 bp, Homo sapiens
atattttttgtttgt

SEQ ID NO: 2107446 - DNA, 15 bp, Homo sapiens
tattttttgtttgtc

SEQ ID NO: 2107447 - DNA, 15 bp, Homo sapiens
attttttgtttgtca

SEQ ID NO: 2107448 - DNA, 15 bp, Homo sapiens
ttttttgtttgtcat

SEQ ID NO: 2107449 - DNA, 15 bp, Homo sapiens
tttttgtttgtcatg

SEQ ID NO: 2107450 - DNA, 15 bp, Homo sapiens
ttttgtttgtcatga

SEQ ID NO: 2107451 - DNA, 15 bp, Homo sapiens
tttgtttgtcatgaa

SEQ ID NO: 2107452 - DNA, 15 bp, Homo sapiens
ttgtttgtcatgaaa

SEQ ID NO: 2107453 - DNA, 15 bp, Homo sapiens
tgtttgtcatgaaat

SEQ ID NO: 2107454 - DNA, 15 bp, Homo sapiens
gtttgtcatgaaata

SEQ ID NO: 2107455 - DNA, 15 bp, Homo sapiens
tttgtcatgaaatat

SEQ ID NO: 2107456 - DNA, 15 bp, Homo sapiens
ttgtcatgaaatatt

SEQ ID NO: 2107457 - DNA, 15 bp, Homo sapiens
tgtcatgaaatattc

SEQ ID NO: 2107458 - DNA, 15 bp, Homo sapiens
gtcatgaaatattct

SEQ ID NO: 2107459 - DNA, 15 bp, Homo sapiens
tcatgaaatattcta

SEQ ID NO: 2107460 - DNA, 15 bp, Homo sapiens
catgaaatattctat

SEQ ID NO: 2107461 - DNA, 15 bp, Homo sapiens
atgaaatattctata

SEQ ID NO: 2107462 - DNA, 15 bp, Homo sapiens
tgaaatattctataa

SEQ ID NO: 2107463 - DNA, 15 bp, Homo sapiens
gaaatattctataat

SEQ ID NO: 2107464 - DNA, 15 bp, Homo sapiens
aaatattctataatt

SEQ ID NO: 2107465 - DNA, 15 bp, Homo sapiens
aatattctataattt

SEQ ID NO: 2107466 - DNA, 15 bp, Homo sapiens
atattctataatttt

SEQ ID NO: 2107467 - DNA, 15 bp, Homo sapiens
tattctataattttt

SEQ ID NO: 2107468 - DNA, 15 bp, Homo sapiens
attctataatttttt

SEQ ID NO: 2107469 - DNA, 15 bp, Homo sapiens
ttctataattttttt

SEQ ID NO: 2107470 - DNA, 15 bp, Homo sapiens
tctataatttttttc

SEQ ID NO: 2107471 - DNA, 15 bp, Homo sapiens
ctataatttttttct

SEQ ID NO: 2107472 - DNA, 15 bp, Homo sapiens
tataatttttttctt

SEQ ID NO: 2107473 - DNA, 15 bp, Homo sapiens
ataatttttttcttc

SEQ ID NO: 2107474 - DNA, 15 bp, Homo sapiens
taatttttttcttcc

SEQ ID NO: 2107475 - DNA, 15 bp, Homo sapiens
aatttttttcttcca

SEQ ID NO: 2107476 - DNA, 15 bp, Homo sapiens
atttttttcttccaa

SEQ ID NO: 2107477 - DNA, 15 bp, Homo sapiens
tttttttcttccaac

SEQ ID NO: 2107478 - DNA, 15 bp, Homo sapiens
ttttttcttccaacc

SEQ ID NO: 2107479 - DNA, 15 bp, Homo sapiens
tttttcttccaacca

SEQ ID NO: 2107480 - DNA, 15 bp, Homo sapiens
ttttcttccaaccat

SEQ ID NO: 2107481 - DNA, 15 bp, Homo sapiens
tttcttccaaccatt

SEQ ID NO: 2107482 - DNA, 15 bp, Homo sapiens
ttcttccaaccattt

SEQ ID NO: 2107483 - DNA, 15 bp, Homo sapiens
tcttccaaccattta

SEQ ID NO: 2107484 - DNA, 15 bp, Homo sapiens
cttccaaccatttaa

SEQ ID NO: 2107485 - DNA, 15 bp, Homo sapiens
caagtgcttttttaa

SEQ ID NO: 2107486 - DNA, 15 bp, Homo sapiens
aagtgcttttttaat

SEQ ID NO: 2107487 - DNA, 15 bp, Homo sapiens
agtgcttttttaata

SEQ ID NO: 2107488 - DNA, 15 bp, Homo sapiens
gtgcttttttaatac

SEQ ID NO: 2107489 - DNA, 15 bp, Homo sapiens
tgcttttttaataca

SEQ ID NO: 2107490 - DNA, 15 bp, Homo sapiens
gcttttttaatacat

SEQ ID NO: 2107491 - DNA, 15 bp, Homo sapiens
cttttttaatacatt

SEQ ID NO: 2107492 - DNA, 15 bp, Homo sapiens
ttttttaatacattg

SEQ ID NO: 2107493 - DNA, 15 bp, Homo sapiens
tttttaatacattga

SEQ ID NO: 2107494 - DNA, 15 bp, Homo sapiens
ttttaatacattgat

SEQ ID NO: 2107495 - DNA, 15 bp, Homo sapiens
tttaatacattgata

SEQ ID NO: 2107496 - DNA, 15 bp, Homo sapiens
ttaatacattgatac

SEQ ID NO: 2107497 - DNA, 15 bp, Homo sapiens
taatacattgatacc

SEQ ID NO: 2107498 - DNA, 15 bp, Homo sapiens
aatacattgatacca

SEQ ID NO: 2107499 - DNA, 15 bp, Homo sapiens
atacattgataccaa

SEQ ID NO: 2107500 - DNA, 15 bp, Homo sapiens
tacattgataccaaa

SEQ ID NO: 2107501 - DNA, 15 bp, Homo sapiens
acattgataccaaat

SEQ ID NO: 2107502 - DNA, 15 bp, Homo sapiens
cattgataccaaatc

SEQ ID NO: 2107503 - DNA, 15 bp, Homo sapiens
attgataccaaatct

SEQ ID NO: 2107504 - DNA, 15 bp, Homo sapiens
ttgataccaaatctc

SEQ ID NO: 2107505 - DNA, 15 bp, Homo sapiens
tgataccaaatctct

SEQ ID NO: 2107506 - DNA, 15 bp, Homo sapiens
gataccaaatctctc

SEQ ID NO: 2107507 - DNA, 15 bp, Homo sapiens
ataccaaatctctcc

SEQ ID NO: 2107508 - DNA, 15 bp, Homo sapiens
taccaaatctctcct

SEQ ID NO: 2107509 - DNA, 15 bp, Homo sapiens
accaaatctctcctg

SEQ ID NO: 2107510 - DNA, 15 bp, Homo sapiens
ccaaatctctcctgc

SEQ ID NO: 2107511 - DNA, 15 bp, Homo sapiens
caaatctctcctgct

SEQ ID NO: 2107512 - DNA, 15 bp, Homo sapiens
aaatctctcctgctc

SEQ ID NO: 2107513 - DNA, 15 bp, Homo sapiens
aatctctcctgctct

SEQ ID NO: 2107514 - DNA, 15 bp, Homo sapiens
atctctcctgctctc

SEQ ID NO: 2107515 - DNA, 15 bp, Homo sapiens
tctctcctgctctca

SEQ ID NO: 2107516 - DNA, 15 bp, Homo sapiens
ctctcctgctctcaa

SEQ ID NO: 2107517 - DNA, 15 bp, Homo sapiens
tctcctgctctcaaa

SEQ ID NO: 2107518 - DNA, 15 bp, Homo sapiens
ctcctgctctcaaaa

SEQ ID NO: 2107519 - DNA, 15 bp, Homo sapiens
tcctgctctcaaaaa

SEQ ID NO: 2107520 - DNA, 15 bp, Homo sapiens
cctgctctcaaaaaa

SEQ ID NO: 2107521 - DNA, 15 bp, Homo sapiens
ctgctctcaaaaaaa

SEQ ID NO: 2107522 - DNA, 15 bp, Homo sapiens
tgctctcaaaaaaaa

SEQ ID NO: 2107523 - DNA, 15 bp, Homo sapiens
gctctcaaaaaaaaa

SEQ ID NO: 2107524 - DNA, 15 bp, Homo sapiens
ctcaaaaaaaaaagc

SEQ ID NO: 2107525 - DNA, 15 bp, Homo sapiens
tcaaaaaaaaaagcc

SEQ ID NO: 2107526 - DNA, 15 bp, Homo sapiens
caaaaaaaaaagccc

SEQ ID NO: 2107527 - DNA, 15 bp, Homo sapiens
aaaaaaaaaagccca

SEQ ID NO: 2107528 - DNA, 15 bp, Homo sapiens
aaaaaaaaagcccaa

SEQ ID NO: 2107529 - DNA, 15 bp, Homo sapiens
aaaaaaaagcccaag

SEQ ID NO: 2107530 - DNA, 15 bp, Homo sapiens
aaaaaaagcccaagg

SEQ ID NO: 2107531 - DNA, 15 bp, Homo sapiens
aaaaaagcccaaggc

SEQ ID NO: 2107532 - DNA, 15 bp, Homo sapiens
aaaaagcccaaggca

SEQ ID NO: 2107533 - DNA, 15 bp, Homo sapiens
aaaagcccaaggcaa

SEQ ID NO: 2107534 - DNA, 15 bp, Homo sapiens
aaagcccaaggcaaa

SEQ ID NO: 2107535 - DNA, 15 bp, Homo sapiens
aagcccaaggcaaaa

SEQ ID NO: 2107536 - DNA, 15 bp, Homo sapiens
agcccaaggcaaaaa

SEQ ID NO: 2107537 - DNA, 15 bp, Homo sapiens
gcccaaggcaaaaat

SEQ ID NO: 2107538 - DNA, 15 bp, Homo sapiens
cccaaggcaaaaatt

SEQ ID NO: 2107539 - DNA, 15 bp, Homo sapiens
ccaaggcaaaaattt

SEQ ID NO: 2107540 - DNA, 15 bp, Homo sapiens
caaggcaaaaatttt

SEQ ID NO: 2107541 - DNA, 15 bp, Homo sapiens
aaggcaaaaattttt

SEQ ID NO: 2107542 - DNA, 15 bp, Homo sapiens
aggcaaaaatttttg

SEQ ID NO: 2107543 - DNA, 15 bp, Homo sapiens
ggcaaaaatttttga

SEQ ID NO: 2107544 - DNA, 15 bp, Homo sapiens
gcaaaaatttttgat

SEQ ID NO: 2107545 - DNA, 15 bp, Homo sapiens
caaaaatttttgatt

SEQ ID NO: 2107546 - DNA, 15 bp, Homo sapiens
aaaaatttttgatta

SEQ ID NO: 2107547 - DNA, 15 bp, Homo sapiens
aaaatttttgattag

SEQ ID NO: 2107548 - DNA, 15 bp, Homo sapiens
aaatttttgattagc

SEQ ID NO: 2107549 - DNA, 15 bp, Homo sapiens
aatttttgattagcc

SEQ ID NO: 2107550 - DNA, 15 bp, Homo sapiens
atttttgattagcct

SEQ ID NO: 2107551 - DNA, 15 bp, Homo sapiens
tttttgattagcctg

SEQ ID NO: 2107552 - DNA, 15 bp, Homo sapiens
ttttgattagcctgt

SEQ ID NO: 2107553 - DNA, 15 bp, Homo sapiens
tttgattagcctgta

SEQ ID NO: 2107554 - DNA, 15 bp, Homo sapiens
ttgattagcctgtat

SEQ ID NO: 2107555 - DNA, 15 bp, Homo sapiens
tgattagcctgtatc

SEQ ID NO: 2107556 - DNA, 15 bp, Homo sapiens
gattagcctgtatcc

SEQ ID NO: 2107557 - DNA, 15 bp, Homo sapiens
attagcctgtatccg

SEQ ID NO: 2107558 - DNA, 15 bp, Homo sapiens
ttagcctgtatccgc

SEQ ID NO: 2107559 - DNA, 15 bp, Homo sapiens
tagcctgtatccgca

SEQ ID NO: 2107560 - DNA, 15 bp, Homo sapiens
agcctgtatccgcaa

SEQ ID NO: 2107561 - DNA, 15 bp, Homo sapiens
gcctgtatccgcaaa

SEQ ID NO: 2107562 - DNA, 15 bp, Homo sapiens
cctgtatccgcaaat

SEQ ID NO: 2107563 - DNA, 15 bp, Homo sapiens
ctgtatccgcaaatt

SEQ ID NO: 2107564 - DNA, 15 bp, Homo sapiens
tgtatccgcaaattc

SEQ ID NO: 2107565 - DNA, 15 bp, Homo sapiens
gtatccgcaaattca

SEQ ID NO: 2107566 - DNA, 15 bp, Homo sapiens
tatccgcaaattcat

SEQ ID NO: 2107567 - DNA, 15 bp, Homo sapiens
atccgcaaattcata

SEQ ID NO: 2107568 - DNA, 15 bp, Homo sapiens
tccgcaaattcatag

SEQ ID NO: 2107569 - DNA, 15 bp, Homo sapiens
ccgcaaattcatagt

SEQ ID NO: 2107570 - DNA, 15 bp, Homo sapiens
cgcaaattcatagtg

SEQ ID NO: 2107571 - DNA, 15 bp, Homo sapiens
gcaaattcatagtgc

SEQ ID NO: 2107572 - DNA, 15 bp, Homo sapiens
caaattcatagtgca

SEQ ID NO: 2107573 - DNA, 15 bp, Homo sapiens
aaattcatagtgcat

SEQ ID NO: 2107574 - DNA, 15 bp, Homo sapiens
aattcatagtgcatg

SEQ ID NO: 2107575 - DNA, 15 bp, Homo sapiens
attcatagtgcatgg

SEQ ID NO: 2107576 - DNA, 15 bp, Homo sapiens
ttcatagtgcatggc

SEQ ID NO: 2107577 - DNA, 15 bp, Homo sapiens
tcatagtgcatggca

SEQ ID NO: 2107578 - DNA, 15 bp, Homo sapiens
catagtgcatggcat

SEQ ID NO: 2107579 - DNA, 15 bp, Homo sapiens
atagtgcatggcatg

SEQ ID NO: 2107580 - DNA, 15 bp, Homo sapiens
tagtgcatggcatga

SEQ ID NO: 2107581 - DNA, 15 bp, Homo sapiens
agtgcatggcatgat

SEQ ID NO: 2107582 - DNA, 15 bp, Homo sapiens
gtgcatggcatgatg

SEQ ID NO: 2107583 - DNA, 15 bp, Homo sapiens
tgcatggcatgatgg

SEQ ID NO: 2107584 - DNA, 15 bp, Homo sapiens
gcatggcatgatggg

SEQ ID NO: 2107585 - DNA, 15 bp, Homo sapiens
catggcatgatgggt

SEQ ID NO: 2107586 - DNA, 15 bp, Homo sapiens
atggcatgatgggta

SEQ ID NO: 2107587 - DNA, 15 bp, Homo sapiens
tggcatgatgggtac

SEQ ID NO: 2107588 - DNA, 15 bp, Homo sapiens
ggcatgatgggtact

SEQ ID NO: 2107589 - DNA, 15 bp, Homo sapiens
gcatgatgggtactc

SEQ ID NO: 2107590 - DNA, 15 bp, Homo sapiens
catgatgggtactct

SEQ ID NO: 2107591 - DNA, 15 bp, Homo sapiens
atgatgggtactcta

SEQ ID NO: 2107592 - DNA, 15 bp, Homo sapiens
tgatgggtactctac

SEQ ID NO: 2107593 - DNA, 15 bp, Homo sapiens
gatgggtactctaca

SEQ ID NO: 2107594 - DNA, 15 bp, Homo sapiens
atgggtactctacat

SEQ ID NO: 2107595 - DNA, 15 bp, Homo sapiens
tgggtactctacatc

SEQ ID NO: 2107596 - DNA, 15 bp, Homo sapiens
gggtactctacatcc

SEQ ID NO: 2107597 - DNA, 15 bp, Homo sapiens
ggtactctacatccc

SEQ ID NO: 2107598 - DNA, 15 bp, Homo sapiens
gtactctacatccct

SEQ ID NO: 2107599 - DNA, 15 bp, Homo sapiens
tactctacatccctc

SEQ ID NO: 2107600 - DNA, 15 bp, Homo sapiens
actctacatccctcc

SEQ ID NO: 2107601 - DNA, 15 bp, Homo sapiens
ctctacatccctcct

SEQ ID NO: 2107602 - DNA, 15 bp, Homo sapiens
tctacatccctcctc

SEQ ID NO: 2107603 - DNA, 15 bp, Homo sapiens
ctacatccctcctcc

SEQ ID NO: 2107604 - DNA, 15 bp, Homo sapiens
tacatccctcctcct

SEQ ID NO: 2107605 - DNA, 15 bp, Homo sapiens
acatccctcctccta

SEQ ID NO: 2107606 - DNA, 15 bp, Homo sapiens
catccctcctcctat

SEQ ID NO: 2107607 - DNA, 15 bp, Homo sapiens
atccctcctcctatt

SEQ ID NO: 2107608 - DNA, 15 bp, Homo sapiens
tccctcctcctattg

SEQ ID NO: 2107609 - DNA, 15 bp, Homo sapiens
ccctcctcctattgc

SEQ ID NO: 2107610 - DNA, 15 bp, Homo sapiens
cctcctcctattgca

SEQ ID NO: 2107611 - DNA, 15 bp, Homo sapiens
ctcctcctattgcac

SEQ ID NO: 2107612 - DNA, 15 bp, Homo sapiens
tcctcctattgcact

SEQ ID NO: 2107613 - DNA, 15 bp, Homo sapiens
cctcctattgcactc

SEQ ID NO: 2107614 - DNA, 15 bp, Homo sapiens
ctcctattgcactca

SEQ ID NO: 2107615 - DNA, 15 bp, Homo sapiens
tcctattgcactcac

SEQ ID NO: 2107616 - DNA, 15 bp, Homo sapiens
cctattgcactcact

SEQ ID NO: 2107617 - DNA, 15 bp, Homo sapiens
ctattgcactcactg

SEQ ID NO: 2107618 - DNA, 15 bp, Homo sapiens
tattgcactcactgt

SEQ ID NO: 2107619 - DNA, 15 bp, Homo sapiens
attgcactcactgtg

SEQ ID NO: 2107620 - DNA, 15 bp, Homo sapiens
ttgcactcactgtgc

SEQ ID NO: 2107621 - DNA, 15 bp, Homo sapiens
tgcactcactgtgcc

SEQ ID NO: 2107622 - DNA, 15 bp, Homo sapiens
gcactcactgtgccc

SEQ ID NO: 2107623 - DNA, 15 bp, Homo sapiens
cactcactgtgccca

SEQ ID NO: 2107624 - DNA, 15 bp, Homo sapiens
actcactgtgcccag

SEQ ID NO: 2107625 - DNA, 15 bp, Homo sapiens
ctcactgtgcccaga

SEQ ID NO: 2107626 - DNA, 15 bp, Homo sapiens
tcactgtgcccagat

SEQ ID NO: 2107627 - DNA, 15 bp, Homo sapiens
cactgtgcccagatg

SEQ ID NO: 2107628 - DNA, 15 bp, Homo sapiens
actgtgcccagatga

SEQ ID NO: 2107629 - DNA, 15 bp, Homo sapiens
ctgtgcccagatgaa

SEQ ID NO: 2107630 - DNA, 15 bp, Homo sapiens
tgtgcccagatgaac

SEQ ID NO: 2107631 - DNA, 15 bp, Homo sapiens
gtgcccagatgaacc

SEQ ID NO: 2107632 - DNA, 15 bp, Homo sapiens
tgcccagatgaacct

SEQ ID NO: 2107633 - DNA, 15 bp, Homo sapiens
gcccagatgaaccta

SEQ ID NO: 2107634 - DNA, 15 bp, Homo sapiens
cccagatgaacctaa

SEQ ID NO: 2107635 - DNA, 15 bp, Homo sapiens
ccagatgaacctaaa

SEQ ID NO: 2107636 - DNA, 15 bp, Homo sapiens
cagatgaacctaaag

SEQ ID NO: 2107637 - DNA, 15 bp, Homo sapiens
agatgaacctaaagt

SEQ ID NO: 2107638 - DNA, 15 bp, Homo sapiens
gatgaacctaaagtc

SEQ ID NO: 2107639 - DNA, 15 bp, Homo sapiens
atgaacctaaagtca

SEQ ID NO: 2107640 - DNA, 15 bp, Homo sapiens
tgaacctaaagtcac

SEQ ID NO: 2107641 - DNA, 15 bp, Homo sapiens
gaacctaaagtcacc

SEQ ID NO: 2107642 - DNA, 15 bp, Homo sapiens
aacctaaagtcacca

SEQ ID NO: 2107643 - DNA, 15 bp, Homo sapiens
acctaaagtcaccag

SEQ ID NO: 2107644 - DNA, 15 bp, Homo sapiens
cctaaagtcaccagt

SEQ ID NO: 2107645 - DNA, 15 bp, Homo sapiens
ctaaagtcaccagta

SEQ ID NO: 2107646 - DNA, 15 bp, Homo sapiens
taaagtcaccagtaa

SEQ ID NO: 2107647 - DNA, 15 bp, Homo sapiens
aaagtcaccagtaat

SEQ ID NO: 2107648 - DNA, 15 bp, Homo sapiens
aagtcaccagtaata

SEQ ID NO: 2107649 - DNA, 15 bp, Homo sapiens
agtcaccagtaatag

SEQ ID NO: 2107650 - DNA, 15 bp, Homo sapiens
gtcaccagtaatagt

SEQ ID NO: 2107651 - DNA, 15 bp, Homo sapiens
tcaccagtaatagtg

SEQ ID NO: 2107652 - DNA, 15 bp, Homo sapiens
caccagtaatagtgc

SEQ ID NO: 2107653 - DNA, 15 bp, Homo sapiens
accagtaatagtgct

SEQ ID NO: 2107654 - DNA, 15 bp, Homo sapiens
ccagtaatagtgcta

SEQ ID NO: 2107655 - DNA, 15 bp, Homo sapiens
cagtaatagtgctaa

SEQ ID NO: 2107656 - DNA, 15 bp, Homo sapiens
agtaatagtgctaat

SEQ ID NO: 2107657 - DNA, 15 bp, Homo sapiens
gtaatagtgctaatg

SEQ ID NO: 2107658 - DNA, 15 bp, Homo sapiens
taatagtgctaatgt

SEQ ID NO: 2107659 - DNA, 15 bp, Homo sapiens
aatagtgctaatgta

SEQ ID NO: 2107660 - DNA, 15 bp, Homo sapiens
atagtgctaatgtag

SEQ ID NO: 2107661 - DNA, 15 bp, Homo sapiens
tagtgctaatgtagt

SEQ ID NO: 2107662 - DNA, 15 bp, Homo sapiens
agtgctaatgtagta

SEQ ID NO: 2107663 - DNA, 15 bp, Homo sapiens
gtgctaatgtagtaa

SEQ ID NO: 2107664 - DNA, 15 bp, Homo sapiens
tgctaatgtagtaat

SEQ ID NO: 2107665 - DNA, 15 bp, Homo sapiens
gctaatgtagtaatg

SEQ ID NO: 2107666 - DNA, 15 bp, Homo sapiens
ctaatgtagtaatgg

SEQ ID NO: 2107667 - DNA, 15 bp, Homo sapiens
taatgtagtaatggg

SEQ ID NO: 2107668 - DNA, 15 bp, Homo sapiens
aatgtagtaatgggc

SEQ ID NO: 2107669 - DNA, 15 bp, Homo sapiens
atgtagtaatgggcc

SEQ ID NO: 2107670 - DNA, 15 bp, Homo sapiens
tgtagtaatgggccc

SEQ ID NO: 2107671 - DNA, 15 bp, Homo sapiens
gtagtaatgggccca

SEQ ID NO: 2107672 - DNA, 15 bp, Homo sapiens
tagtaatgggcccaa

SEQ ID NO: 2107673 - DNA, 15 bp, Homo sapiens
agtaatgggcccaag

SEQ ID NO: 2107674 - DNA, 15 bp, Homo sapiens
gtaatgggcccaagc

SEQ ID NO: 2107675 - DNA, 15 bp, Homo sapiens
taatgggcccaagct

SEQ ID NO: 2107676 - DNA, 15 bp, Homo sapiens
aatgggcccaagctt

SEQ ID NO: 2107677 - DNA, 15 bp, Homo sapiens
aagaaggaaaattag

SEQ ID NO: 2107678 - DNA, 15 bp, Homo sapiens
agaaggaaaattagt

SEQ ID NO: 2107679 - DNA, 15 bp, Homo sapiens
gaaggaaaattagta

SEQ ID NO: 2107680 - DNA, 15 bp, Homo sapiens
aaggaaaattagtat

SEQ ID NO: 2107681 - DNA, 15 bp, Homo sapiens
aggaaaattagtatt

SEQ ID NO: 2107682 - DNA, 15 bp, Homo sapiens
ggaaaattagtattc

SEQ ID NO: 2107683 - DNA, 15 bp, Homo sapiens
gaaaattagtattca

SEQ ID NO: 2107684 - DNA, 15 bp, Homo sapiens
aaaattagtattcag

SEQ ID NO: 2107685 - DNA, 15 bp, Homo sapiens
aaattagtattcagt

SEQ ID NO: 2107686 - DNA, 15 bp, Homo sapiens
aattagtattcagta

SEQ ID NO: 2107687 - DNA, 15 bp, Homo sapiens
attagtattcagtat

SEQ ID NO: 2107688 - DNA, 15 bp, Homo sapiens
ttagtattcagtatt

SEQ ID NO: 2107689 - DNA, 15 bp, Homo sapiens
tagtattcagtattt

SEQ ID NO: 2107690 - DNA, 15 bp, Homo sapiens
agtattcagtattta

SEQ ID NO: 2107691 - DNA, 15 bp, Homo sapiens
gtattcagtatttaa

SEQ ID NO: 2107692 - DNA, 15 bp, Homo sapiens
tattcagtatttaaa

SEQ ID NO: 2107693 - DNA, 15 bp, Homo sapiens
attcagtatttaaat

SEQ ID NO: 2107694 - DNA, 15 bp, Homo sapiens
ttcagtatttaaatg

SEQ ID NO: 2107695 - DNA, 15 bp, Homo sapiens
tcagtatttaaatgt

SEQ ID NO: 2107696 - DNA, 15 bp, Homo sapiens
cagtatttaaatgtg

SEQ ID NO: 2107697 - DNA, 15 bp, Homo sapiens
agtatttaaatgtgg

SEQ ID NO: 2107698 - DNA, 15 bp, Homo sapiens
gtatttaaatgtggg

SEQ ID NO: 2107699 - DNA, 15 bp, Homo sapiens
tatttaaatgtggga

SEQ ID NO: 2107700 - DNA, 15 bp, Homo sapiens
atttaaatgtgggaa

SEQ ID NO: 2107701 - DNA, 15 bp, Homo sapiens
tttaaatgtgggaaa

SEQ ID NO: 2107702 - DNA, 15 bp, Homo sapiens
ttaaatgtgggaaag

SEQ ID NO: 2107703 - DNA, 15 bp, Homo sapiens
taaatgtgggaaaga

SEQ ID NO: 2107704 - DNA, 15 bp, Homo sapiens
aaatgtgggaaagag

SEQ ID NO: 2107705 - DNA, 15 bp, Homo sapiens
aatgtgggaaagagg

SEQ ID NO: 2107706 - DNA, 15 bp, Homo sapiens
atgtgggaaagagga

SEQ ID NO: 2107707 - DNA, 15 bp, Homo sapiens
tgtgggaaagaggaa

SEQ ID NO: 2107708 - DNA, 15 bp, Homo sapiens
gtgggaaagaggaag

SEQ ID NO: 2107709 - DNA, 15 bp, Homo sapiens
tgggaaagaggaaga

SEQ ID NO: 2107710 - DNA, 15 bp, Homo sapiens
gggaaagaggaagaa

SEQ ID NO: 2107711 - DNA, 15 bp, Homo sapiens
ggaaagaggaagaat

SEQ ID NO: 2107712 - DNA, 15 bp, Homo sapiens
gaaagaggaagaata

SEQ ID NO: 2107713 - DNA, 15 bp, Homo sapiens
aaagaggaagaatat

SEQ ID NO: 2107714 - DNA, 15 bp, Homo sapiens
aagaggaagaatatg

SEQ ID NO: 2107715 - DNA, 15 bp, Homo sapiens
agaggaagaatatgg

SEQ ID NO: 2107716 - DNA, 15 bp, Homo sapiens
gaggaagaatatgga

SEQ ID NO: 2107717 - DNA, 15 bp, Homo sapiens
aggaagaatatggaa

SEQ ID NO: 2107718 - DNA, 15 bp, Homo sapiens
ggaagaatatggaaa

SEQ ID NO: 2107719 - DNA, 15 bp, Homo sapiens
gaagaatatggaaat

SEQ ID NO: 2107720 - DNA, 15 bp, Homo sapiens
aagaatatggaaatt

SEQ ID NO: 2107721 - DNA, 15 bp, Homo sapiens
agaatatggaaatta

SEQ ID NO: 2107722 - DNA, 15 bp, Homo sapiens
gaatatggaaattat

SEQ ID NO: 2107723 - DNA, 15 bp, Homo sapiens
aatatggaaattatc

SEQ ID NO: 2107724 - DNA, 15 bp, Homo sapiens
atatggaaattatca

SEQ ID NO: 2107725 - DNA, 15 bp, Homo sapiens
tatggaaattatcaa

SEQ ID NO: 2107726 - DNA, 15 bp, Homo sapiens
atggaaattatcaat

SEQ ID NO: 2107727 - DNA, 15 bp, Homo sapiens
tggaaattatcaatt

SEQ ID NO: 2107728 - DNA, 15 bp, Homo sapiens
ggaaattatcaattt

SEQ ID NO: 2107729 - DNA, 15 bp, Homo sapiens
gaaattatcaatttt

SEQ ID NO: 2107730 - DNA, 15 bp, Homo sapiens
aaattatcaatttta

SEQ ID NO: 2107731 - DNA, 15 bp, Homo sapiens
aattatcaattttat

SEQ ID NO: 2107732 - DNA, 15 bp, Homo sapiens
attatcaattttata

SEQ ID NO: 2107733 - DNA, 15 bp, Homo sapiens
ttatcaattttataa

SEQ ID NO: 2107734 - DNA, 15 bp, Homo sapiens
tatcaattttataat

SEQ ID NO: 2107735 - DNA, 15 bp, Homo sapiens
atcaattttataata

SEQ ID NO: 2107736 - DNA, 15 bp, Homo sapiens
tcaattttataatac

SEQ ID NO: 2107737 - DNA, 15 bp, Homo sapiens
caattttataatacc

SEQ ID NO: 2107738 - DNA, 15 bp, Homo sapiens
aattttataatacct

SEQ ID NO: 2107739 - DNA, 15 bp, Homo sapiens
attttataataccta

SEQ ID NO: 2107740 - DNA, 15 bp, Homo sapiens
ttttataatacctat

SEQ ID NO: 2107741 - DNA, 15 bp, Homo sapiens
tttataatacctata

SEQ ID NO: 2107742 - DNA, 15 bp, Homo sapiens
ttataatacctatac

SEQ ID NO: 2107743 - DNA, 15 bp, Homo sapiens
tataatacctataca

SEQ ID NO: 2107744 - DNA, 15 bp, Homo sapiens
ataatacctatacat

SEQ ID NO: 2107745 - DNA, 15 bp, Homo sapiens
taatacctatacata

SEQ ID NO: 2107746 - DNA, 15 bp, Homo sapiens
aatacctatacatat

SEQ ID NO: 2107747 - DNA, 15 bp, Homo sapiens
atacctatacatatt

SEQ ID NO: 2107748 - DNA, 15 bp, Homo sapiens
tacctatacatattc

SEQ ID NO: 2107749 - DNA, 15 bp, Homo sapiens
acctatacatattct

SEQ ID NO: 2107750 - DNA, 15 bp, Homo sapiens
cctatacatattctt

SEQ ID NO: 2107751 - DNA, 15 bp, Homo sapiens
ctatacatattctta

SEQ ID NO: 2107752 - DNA, 15 bp, Homo sapiens
tatacatattcttac

SEQ ID NO: 2107753 - DNA, 15 bp, Homo sapiens
atacatattcttacc

SEQ ID NO: 2107754 - DNA, 15 bp, Homo sapiens
tacatattcttacct

SEQ ID NO: 2107755 - DNA, 15 bp, Homo sapiens
acatattcttacctg

SEQ ID NO: 2107756 - DNA, 15 bp, Homo sapiens
catattcttacctgc

SEQ ID NO: 2107757 - DNA, 15 bp, Homo sapiens
atattcttacctgca

SEQ ID NO: 2107758 - DNA, 15 bp, Homo sapiens
tattcttacctgcat

SEQ ID NO: 2107759 - DNA, 15 bp, Homo sapiens
attcttacctgcatt

SEQ ID NO: 2107760 - DNA, 15 bp, Homo sapiens
ttcttacctgcatta

SEQ ID NO: 2107761 - DNA, 15 bp, Homo sapiens
tcttacctgcattaa

SEQ ID NO: 2107762 - DNA, 15 bp, Homo sapiens
cttacctgcattaat

SEQ ID NO: 2107763 - DNA, 15 bp, Homo sapiens
ttacctgcattaatg

SEQ ID NO: 2107764 - DNA, 15 bp, Homo sapiens
tacctgcattaatgt

SEQ ID NO: 2107765 - DNA, 15 bp, Homo sapiens
acctgcattaatgtg

SEQ ID NO: 2107766 - DNA, 15 bp, Homo sapiens
cctgcattaatgtga

SEQ ID NO: 2107767 - DNA, 15 bp, Homo sapiens
ctgcattaatgtgaa

SEQ ID NO: 2107768 - DNA, 15 bp, Homo sapiens
tgcattaatgtgaat

SEQ ID NO: 2107769 - DNA, 15 bp, Homo sapiens
gcattaatgtgaata

SEQ ID NO: 2107770 - DNA, 15 bp, Homo sapiens
cattaatgtgaatag

SEQ ID NO: 2107771 - DNA, 15 bp, Homo sapiens
attaatgtgaataga

SEQ ID NO: 2107772 - DNA, 15 bp, Homo sapiens
ttaatgtgaatagac

SEQ ID NO: 2107773 - DNA, 15 bp, Homo sapiens
taatgtgaatagaca

SEQ ID NO: 2107774 - DNA, 15 bp, Homo sapiens
aatgtgaatagacat

SEQ ID NO: 2107775 - DNA, 15 bp, Homo sapiens
atgtgaatagacatc

SEQ ID NO: 2107776 - DNA, 15 bp, Homo sapiens
tgtgaatagacatca

SEQ ID NO: 2107777 - DNA, 15 bp, Homo sapiens
gtgaatagacatcaa

SEQ ID NO: 2107778 - DNA, 15 bp, Homo sapiens
tgaatagacatcaat

SEQ ID NO: 2107779 - DNA, 15 bp, Homo sapiens
gaatagacatcaatg

SEQ ID NO: 2107780 - DNA, 15 bp, Homo sapiens
aatagacatcaatga

SEQ ID NO: 2107781 - DNA, 15 bp, Homo sapiens
atagacatcaatgat

SEQ ID NO: 2107782 - DNA, 15 bp, Homo sapiens
tagacatcaatgata

SEQ ID NO: 2107783 - DNA, 15 bp, Homo sapiens
agacatcaatgataa

SEQ ID NO: 2107784 - DNA, 15 bp, Homo sapiens
gacatcaatgataaa

SEQ ID NO: 2107785 - DNA, 15 bp, Homo sapiens
acatcaatgataaac

SEQ ID NO: 2107786 - DNA, 15 bp, Homo sapiens
catcaatgataaaca

SEQ ID NO: 2107787 - DNA, 15 bp, Homo sapiens
atcaatgataaacag

SEQ ID NO: 2107788 - DNA, 15 bp, Homo sapiens
tcaatgataaacaga

SEQ ID NO: 2107789 - DNA, 15 bp, Homo sapiens
caatgataaacagaa

SEQ ID NO: 2107790 - DNA, 15 bp, Homo sapiens
aatgataaacagaat

SEQ ID NO: 2107791 - DNA, 15 bp, Homo sapiens
atgataaacagaata

SEQ ID NO: 2107792 - DNA, 15 bp, Homo sapiens
tgataaacagaataa

SEQ ID NO: 2107793 - DNA, 15 bp, Homo sapiens
gataaacagaataat

SEQ ID NO: 2107794 - DNA, 15 bp, Homo sapiens
ataaacagaataatg

SEQ ID NO: 2107795 - DNA, 15 bp, Homo sapiens
taaacagaataatgc

SEQ ID NO: 2107796 - DNA, 15 bp, Homo sapiens
aaacagaataatgcc

SEQ ID NO: 2107797 - DNA, 15 bp, Homo sapiens
aacagaataatgccc

SEQ ID NO: 2107798 - DNA, 15 bp, Homo sapiens
acagaataatgcccc

SEQ ID NO: 2107799 - DNA, 15 bp, Homo sapiens
cagaataatgcccca

SEQ ID NO: 2107800 - DNA, 15 bp, Homo sapiens
agaataatgccccat

SEQ ID NO: 2107801 - DNA, 15 bp, Homo sapiens
gaataatgccccata

SEQ ID NO: 2107802 - DNA, 15 bp, Homo sapiens
aataatgccccataa

SEQ ID NO: 2107803 - DNA, 15 bp, Homo sapiens
ataatgccccataaa

SEQ ID NO: 2107804 - DNA, 15 bp, Homo sapiens
taatgccccataaag

SEQ ID NO: 2107805 - DNA, 15 bp, Homo sapiens
aatgccccataaaga

SEQ ID NO: 2107806 - DNA, 15 bp, Homo sapiens
atgccccataaagat

SEQ ID NO: 2107807 - DNA, 15 bp, Homo sapiens
tgccccataaagatg

SEQ ID NO: 2107808 - DNA, 15 bp, Homo sapiens
gccccataaagatgt

SEQ ID NO: 2107809 - DNA, 15 bp, Homo sapiens
ccccataaagatgtc

SEQ ID NO: 2107810 - DNA, 15 bp, Homo sapiens
cccataaagatgtct

SEQ ID NO: 2107811 - DNA, 15 bp, Homo sapiens
ccataaagatgtcta

SEQ ID NO: 2107812 - DNA, 15 bp, Homo sapiens
cataaagatgtctac

SEQ ID NO: 2107813 - DNA, 15 bp, Homo sapiens
ataaagatgtctaca

SEQ ID NO: 2107814 - DNA, 15 bp, Homo sapiens
taaagatgtctacac

SEQ ID NO: 2107815 - DNA, 15 bp, Homo sapiens
aaagatgtctacact

SEQ ID NO: 2107816 - DNA, 15 bp, Homo sapiens
aagatgtctacactg

SEQ ID NO: 2107817 - DNA, 15 bp, Homo sapiens
agatgtctacactgt

SEQ ID NO: 2107818 - DNA, 15 bp, Homo sapiens
gatgtctacactgta

SEQ ID NO: 2107819 - DNA, 15 bp, Homo sapiens
atgtctacactgtaa

SEQ ID NO: 2107820 - DNA, 15 bp, Homo sapiens
tgtctacactgtaat

SEQ ID NO: 2107821 - DNA, 15 bp, Homo sapiens
gtctacactgtaatc

SEQ ID NO: 2107822 - DNA, 15 bp, Homo sapiens
tctacactgtaatct

SEQ ID NO: 2107823 - DNA, 15 bp, Homo sapiens
ctacactgtaatctc

SEQ ID NO: 2107824 - DNA, 15 bp, Homo sapiens
tacactgtaatctcc

SEQ ID NO: 2107825 - DNA, 15 bp, Homo sapiens
acactgtaatctcca

SEQ ID NO: 2107826 - DNA, 15 bp, Homo sapiens
cactgtaatctccaa

SEQ ID NO: 2107827 - DNA, 15 bp, Homo sapiens
actgtaatctccaaa

SEQ ID NO: 2107828 - DNA, 15 bp, Homo sapiens
ctgtaatctccaaaa

SEQ ID NO: 2107829 - DNA, 15 bp, Homo sapiens
tgtaatctccaaaac

SEQ ID NO: 2107830 - DNA, 15 bp, Homo sapiens
gtaatctccaaaact

SEQ ID NO: 2107831 - DNA, 15 bp, Homo sapiens
taatctccaaaactt

SEQ ID NO: 2107832 - DNA, 15 bp, Homo sapiens
aatctccaaaactta

SEQ ID NO: 2107833 - DNA, 15 bp, Homo sapiens
atctccaaaacttat

SEQ ID NO: 2107834 - DNA, 15 bp, Homo sapiens
tctccaaaacttata

SEQ ID NO: 2107835 - DNA, 15 bp, Homo sapiens
ctccaaaacttataa

SEQ ID NO: 2107836 - DNA, 15 bp, Homo sapiens
tccaaaacttataac

SEQ ID NO: 2107837 - DNA, 15 bp, Homo sapiens
ccaaaacttataact

SEQ ID NO: 2107838 - DNA, 15 bp, Homo sapiens
caaaacttataacta

SEQ ID NO: 2107839 - DNA, 15 bp, Homo sapiens
aaaacttataactat

SEQ ID NO: 2107840 - DNA, 15 bp, Homo sapiens
aaacttataactata

SEQ ID NO: 2107841 - DNA, 15 bp, Homo sapiens
aacttataactatac

SEQ ID NO: 2107842 - DNA, 15 bp, Homo sapiens
acttataactatact

SEQ ID NO: 2107843 - DNA, 15 bp, Homo sapiens
cttataactatacta

SEQ ID NO: 2107844 - DNA, 15 bp, Homo sapiens
ttataactatactat

SEQ ID NO: 2107845 - DNA, 15 bp, Homo sapiens
tataactatactata

SEQ ID NO: 2107846 - DNA, 15 bp, Homo sapiens
ataactatactatat

SEQ ID NO: 2107847 - DNA, 15 bp, Homo sapiens
taactatactatatc

SEQ ID NO: 2107848 - DNA, 15 bp, Homo sapiens
aactatactatatca

SEQ ID NO: 2107849 - DNA, 15 bp, Homo sapiens
actatactatatcac

SEQ ID NO: 2107850 - DNA, 15 bp, Homo sapiens
ctatactatatcaca

SEQ ID NO: 2107851 - DNA, 15 bp, Homo sapiens
tatactatatcacat

SEQ ID NO: 2107852 - DNA, 15 bp, Homo sapiens
atactatatcacatg

SEQ ID NO: 2107853 - DNA, 15 bp, Homo sapiens
tactatatcacatgg

SEQ ID NO: 2107854 - DNA, 15 bp, Homo sapiens
actatatcacatggc

SEQ ID NO: 2107855 - DNA, 15 bp, Homo sapiens
ctatatcacatggca

SEQ ID NO: 2107856 - DNA, 15 bp, Homo sapiens
tatatcacatggcaa

SEQ ID NO: 2107857 - DNA, 15 bp, Homo sapiens
atatcacatggcaag

SEQ ID NO: 2107858 - DNA, 15 bp, Homo sapiens
tatcacatggcaaga

SEQ ID NO: 2107859 - DNA, 15 bp, Homo sapiens
atcacatggcaagag

SEQ ID NO: 2107860 - DNA, 15 bp, Homo sapiens
tcacatggcaagagg

SEQ ID NO: 2107861 - DNA, 15 bp, Homo sapiens
cacatggcaagaggg

SEQ ID NO: 2107862 - DNA, 15 bp, Homo sapiens
acatggcaagaggga

SEQ ID NO: 2107863 - DNA, 15 bp, Homo sapiens
catggcaagagggaa

SEQ ID NO: 2107864 - DNA, 15 bp, Homo sapiens
atggcaagagggaat

SEQ ID NO: 2107865 - DNA, 15 bp, Homo sapiens
tggcaagagggaatt

SEQ ID NO: 2107866 - DNA, 15 bp, Homo sapiens
ggcaagagggaatta

SEQ ID NO: 2107867 - DNA, 15 bp, Homo sapiens
gcaagagggaattaa

SEQ ID NO: 2107868 - DNA, 15 bp, Homo sapiens
caagagggaattaag

SEQ ID NO: 2107869 - DNA, 15 bp, Homo sapiens
aagagggaattaagg

SEQ ID NO: 2107870 - DNA, 15 bp, Homo sapiens
agagggaattaaggt

SEQ ID NO: 2107871 - DNA, 15 bp, Homo sapiens
gagggaattaaggtt

SEQ ID NO: 2107872 - DNA, 15 bp, Homo sapiens
agggaattaaggtta

SEQ ID NO: 2107873 - DNA, 15 bp, Homo sapiens
gggaattaaggttac

SEQ ID NO: 2107874 - DNA, 15 bp, Homo sapiens
ggaattaaggttact

SEQ ID NO: 2107875 - DNA, 15 bp, Homo sapiens
gaattaaggttacta

SEQ ID NO: 2107876 - DNA, 15 bp, Homo sapiens
aattaaggttactaa

SEQ ID NO: 2107877 - DNA, 15 bp, Homo sapiens
attaaggttactaat

SEQ ID NO: 2107878 - DNA, 15 bp, Homo sapiens
ttaaggttactaatc

SEQ ID NO: 2107879 - DNA, 15 bp, Homo sapiens
taaggttactaatca

SEQ ID NO: 2107880 - DNA, 15 bp, Homo sapiens
aaggttactaatcag

SEQ ID NO: 2107881 - DNA, 15 bp, Homo sapiens
aggttactaatcagc

SEQ ID NO: 2107882 - DNA, 15 bp, Homo sapiens
ggttactaatcagct

SEQ ID NO: 2107883 - DNA, 15 bp, Homo sapiens
gttactaatcagctg

SEQ ID NO: 2107884 - DNA, 15 bp, Homo sapiens
ttactaatcagctga

SEQ ID NO: 2107885 - DNA, 15 bp, Homo sapiens
tactaatcagctgac

SEQ ID NO: 2107886 - DNA, 15 bp, Homo sapiens
actaatcagctgacc

SEQ ID NO: 2107887 - DNA, 15 bp, Homo sapiens
ctaatcagctgacct

SEQ ID NO: 2107888 - DNA, 15 bp, Homo sapiens
taatcagctgacctt

SEQ ID NO: 2107889 - DNA, 15 bp, Homo sapiens
aatcagctgaccttg

SEQ ID NO: 2107890 - DNA, 15 bp, Homo sapiens
atcagctgaccttga

SEQ ID NO: 2107891 - DNA, 15 bp, Homo sapiens
tcagctgaccttgag

SEQ ID NO: 2107892 - DNA, 15 bp, Homo sapiens
cagctgaccttgaga

SEQ ID NO: 2107893 - DNA, 15 bp, Homo sapiens
agctgaccttgagat

SEQ ID NO: 2107894 - DNA, 15 bp, Homo sapiens
gctgaccttgagatg

SEQ ID NO: 2107895 - DNA, 15 bp, Homo sapiens
ctgaccttgagatgg

SEQ ID NO: 2107896 - DNA, 15 bp, Homo sapiens
tgaccttgagatggg

SEQ ID NO: 2107897 - DNA, 15 bp, Homo sapiens
gaccttgagatggga

SEQ ID NO: 2107898 - DNA, 15 bp, Homo sapiens
accttgagatgggag

SEQ ID NO: 2107899 - DNA, 15 bp, Homo sapiens
ccttgagatgggaga

SEQ ID NO: 2107900 - DNA, 15 bp, Homo sapiens
cttgagatgggagat

SEQ ID NO: 2107901 - DNA, 15 bp, Homo sapiens
ttgagatgggagatt

SEQ ID NO: 2107902 - DNA, 15 bp, Homo sapiens
tgagatgggagattc

SEQ ID NO: 2107903 - DNA, 15 bp, Homo sapiens
gagatgggagattct

SEQ ID NO: 2107904 - DNA, 15 bp, Homo sapiens
agatgggagattctc

SEQ ID NO: 2107905 - DNA, 15 bp, Homo sapiens
gatgggagattctcc

SEQ ID NO: 2107906 - DNA, 15 bp, Homo sapiens
atgggagattctcct

SEQ ID NO: 2107907 - DNA, 15 bp, Homo sapiens
tgggagattctcctg

SEQ ID NO: 2107908 - DNA, 15 bp, Homo sapiens
gggagattctcctgg

SEQ ID NO: 2107909 - DNA, 15 bp, Homo sapiens
ggagattctcctggt

SEQ ID NO: 2107910 - DNA, 15 bp, Homo sapiens
gagattctcctggtt

SEQ ID NO: 2107911 - DNA, 15 bp, Homo sapiens
agattctcctggttt

SEQ ID NO: 2107912 - DNA, 15 bp, Homo sapiens
gattctcctggtttg

SEQ ID NO: 2107913 - DNA, 15 bp, Homo sapiens
attctcctggtttgt

SEQ ID NO: 2107914 - DNA, 15 bp, Homo sapiens
ttctcctggtttgta

SEQ ID NO: 2107915 - DNA, 15 bp, Homo sapiens
tctcctggtttgtat

SEQ ID NO: 2107916 - DNA, 15 bp, Homo sapiens
ctcctggtttgtatg

SEQ ID NO: 2107917 - DNA, 15 bp, Homo sapiens
tcctggtttgtatgg

SEQ ID NO: 2107918 - DNA, 15 bp, Homo sapiens
cctggtttgtatggg

SEQ ID NO: 2107919 - DNA, 15 bp, Homo sapiens
ctggtttgtatgggt

SEQ ID NO: 2107920 - DNA, 15 bp, Homo sapiens
tggtttgtatgggtg

SEQ ID NO: 2107921 - DNA, 15 bp, Homo sapiens
ggtttgtatgggtgg

SEQ ID NO: 2107922 - DNA, 15 bp, Homo sapiens
gtttgtatgggtggg

SEQ ID NO: 2107923 - DNA, 15 bp, Homo sapiens
tttgtatgggtgggc

SEQ ID NO: 2107924 - DNA, 15 bp, Homo sapiens
ttgtatgggtgggcc

SEQ ID NO: 2107925 - DNA, 15 bp, Homo sapiens
tgtatgggtgggccc

SEQ ID NO: 2107926 - DNA, 15 bp, Homo sapiens
gtatgggtgggccca

SEQ ID NO: 2107927 - DNA, 15 bp, Homo sapiens
tatgggtgggcccaa

SEQ ID NO: 2107928 - DNA, 15 bp, Homo sapiens
atgggtgggcccaat

SEQ ID NO: 2107929 - DNA, 15 bp, Homo sapiens
tgggtgggcccaatg

SEQ ID NO: 2107930 - DNA, 15 bp, Homo sapiens
gggtgggcccaatgt

SEQ ID NO: 2107931 - DNA, 15 bp, Homo sapiens
ggtgggcccaatgta

SEQ ID NO: 2107932 - DNA, 15 bp, Homo sapiens
gtgggcccaatgtaa

SEQ ID NO: 2107933 - DNA, 15 bp, Homo sapiens
tgggcccaatgtaat

SEQ ID NO: 2107934 - DNA, 15 bp, Homo sapiens
gggcccaatgtaatc

SEQ ID NO: 2107935 - DNA, 15 bp, Homo sapiens
ggcccaatgtaatca

SEQ ID NO: 2107936 - DNA, 15 bp, Homo sapiens
gcccaatgtaatcac

SEQ ID NO: 2107937 - DNA, 15 bp, Homo sapiens
cccaatgtaatcaca

SEQ ID NO: 2107938 - DNA, 15 bp, Homo sapiens
ccaatgtaatcacag

SEQ ID NO: 2107939 - DNA, 15 bp, Homo sapiens
caatgtaatcacagg

SEQ ID NO: 2107940 - DNA, 15 bp, Homo sapiens
aatgtaatcacaggg

SEQ ID NO: 2107941 - DNA, 15 bp, Homo sapiens
atgtaatcacagggt

SEQ ID NO: 2107942 - DNA, 15 bp, Homo sapiens
tgtaatcacagggtc

SEQ ID NO: 2107943 - DNA, 15 bp, Homo sapiens
gtaatcacagggtcc

SEQ ID NO: 2107944 - DNA, 15 bp, Homo sapiens
taatcacagggtcct

SEQ ID NO: 2107945 - DNA, 15 bp, Homo sapiens
aatcacagggtcctt

SEQ ID NO: 2107946 - DNA, 15 bp, Homo sapiens
atcacagggtcctta

SEQ ID NO: 2107947 - DNA, 15 bp, Homo sapiens
tcacagggtccttat

SEQ ID NO: 2107948 - DNA, 15 bp, Homo sapiens
cacagggtccttata

SEQ ID NO: 2107949 - DNA, 15 bp, Homo sapiens
acagggtccttataa

SEQ ID NO: 2107950 - DNA, 15 bp, Homo sapiens
cagggtccttataaa

SEQ ID NO: 2107951 - DNA, 15 bp, Homo sapiens
agggtccttataaat

SEQ ID NO: 2107952 - DNA, 15 bp, Homo sapiens
gggtccttataaatg

SEQ ID NO: 2107953 - DNA, 15 bp, Homo sapiens
ggtccttataaatgg

SEQ ID NO: 2107954 - DNA, 15 bp, Homo sapiens
gtccttataaatgga

SEQ ID NO: 2107955 - DNA, 15 bp, Homo sapiens
tccttataaatggaa

SEQ ID NO: 2107956 - DNA, 15 bp, Homo sapiens
ccttataaatggaaa

SEQ ID NO: 2107957 - DNA, 15 bp, Homo sapiens
cttataaatggaaaa

SEQ ID NO: 2107958 - DNA, 15 bp, Homo sapiens
ttataaatggaaaag

SEQ ID NO: 2107959 - DNA, 15 bp, Homo sapiens
tataaatggaaaagg

SEQ ID NO: 2107960 - DNA, 15 bp, Homo sapiens
ataaatggaaaaggc

SEQ ID NO: 2107961 - DNA, 15 bp, Homo sapiens
taaatggaaaaggca

SEQ ID NO: 2107962 - DNA, 15 bp, Homo sapiens
aaatggaaaaggcag

SEQ ID NO: 2107963 - DNA, 15 bp, Homo sapiens
aatggaaaaggcaga

SEQ ID NO: 2107964 - DNA, 15 bp, Homo sapiens
atggaaaaggcagac

SEQ ID NO: 2107965 - DNA, 15 bp, Homo sapiens
tggaaaaggcagaca

SEQ ID NO: 2107966 - DNA, 15 bp, Homo sapiens
ggaaaaggcagacag

SEQ ID NO: 2107967 - DNA, 15 bp, Homo sapiens
gaaaaggcagacagg

SEQ ID NO: 2107968 - DNA, 15 bp, Homo sapiens
aaaaggcagacagga

SEQ ID NO: 2107969 - DNA, 15 bp, Homo sapiens
aaaggcagacaggag

SEQ ID NO: 2107970 - DNA, 15 bp, Homo sapiens
aaggcagacaggaga

SEQ ID NO: 2107971 - DNA, 15 bp, Homo sapiens
aggcagacaggagat

SEQ ID NO: 2107972 - DNA, 15 bp, Homo sapiens
ggcagacaggagatt

SEQ ID NO: 2107973 - DNA, 15 bp, Homo sapiens
gcagacaggagattc

SEQ ID NO: 2107974 - DNA, 15 bp, Homo sapiens
cagacaggagattca

SEQ ID NO: 2107975 - DNA, 15 bp, Homo sapiens
agacaggagattcag

SEQ ID NO: 2107976 - DNA, 15 bp, Homo sapiens
gacaggagattcagt

SEQ ID NO: 2107977 - DNA, 15 bp, Homo sapiens
acaggagattcagtg

SEQ ID NO: 2107978 - DNA, 15 bp, Homo sapiens
caggagattcagtgt

SEQ ID NO: 2107979 - DNA, 15 bp, Homo sapiens
aggagattcagtgtc

SEQ ID NO: 2107980 - DNA, 15 bp, Homo sapiens
ggagattcagtgtca

SEQ ID NO: 2107981 - DNA, 15 bp, Homo sapiens
gagattcagtgtcag

SEQ ID NO: 2107982 - DNA, 15 bp, Homo sapiens
agattcagtgtcaga

SEQ ID NO: 2107983 - DNA, 15 bp, Homo sapiens
gattcagtgtcagac

SEQ ID NO: 2107984 - DNA, 15 bp, Homo sapiens
attcagtgtcagact

SEQ ID NO: 2107985 - DNA, 15 bp, Homo sapiens
ttcagtgtcagactg

SEQ ID NO: 2107986 - DNA, 15 bp, Homo sapiens
tcagtgtcagactga

SEQ ID NO: 2107987 - DNA, 15 bp, Homo sapiens
cagtgtcagactgat

SEQ ID NO: 2107988 - DNA, 15 bp, Homo sapiens
agtgtcagactgata

SEQ ID NO: 2107989 - DNA, 15 bp, Homo sapiens
gtgtcagactgatac

SEQ ID NO: 2107990 - DNA, 15 bp, Homo sapiens
tgtcagactgataca

SEQ ID NO: 2107991 - DNA, 15 bp, Homo sapiens
gtcagactgatacaa

SEQ ID NO: 2107992 - DNA, 15 bp, Homo sapiens
tcagactgatacaat

SEQ ID NO: 2107993 - DNA, 15 bp, Homo sapiens
cagactgatacaatg

SEQ ID NO: 2107994 - DNA, 15 bp, Homo sapiens
agactgatacaatga

SEQ ID NO: 2107995 - DNA, 15 bp, Homo sapiens
gactgatacaatgag

SEQ ID NO: 2107996 - DNA, 15 bp, Homo sapiens
actgatacaatgagg

SEQ ID NO: 2107997 - DNA, 15 bp, Homo sapiens
ctgatacaatgaggg

SEQ ID NO: 2107998 - DNA, 15 bp, Homo sapiens
tgatacaatgaggga

SEQ ID NO: 2107999 - DNA, 15 bp, Homo sapiens
gatacaatgagggaa

SEQ ID NO: 2108000 - DNA, 15 bp, Homo sapiens
atacaatgagggaaa

SEQ ID NO: 2108001 - DNA, 15 bp, Homo sapiens
tacaatgagggaaag

SEQ ID NO: 2108002 - DNA, 15 bp, Homo sapiens
acaatgagggaaaga

SEQ ID NO: 2108003 - DNA, 15 bp, Homo sapiens
caatgagggaaagac

SEQ ID NO: 2108004 - DNA, 15 bp, Homo sapiens
aatgagggaaagact

SEQ ID NO: 2108005 - DNA, 15 bp, Homo sapiens
atgagggaaagacta

SEQ ID NO: 2108006 - DNA, 15 bp, Homo sapiens
tgagggaaagactac

SEQ ID NO: 2108007 - DNA, 15 bp, Homo sapiens
gagggaaagactacc

SEQ ID NO: 2108008 - DNA, 15 bp, Homo sapiens
agggaaagactacca

SEQ ID NO: 2108009 - DNA, 15 bp, Homo sapiens
gggaaagactaccag

SEQ ID NO: 2108010 - DNA, 15 bp, Homo sapiens
ggaaagactaccagc

SEQ ID NO: 2108011 - DNA, 15 bp, Homo sapiens
gaaagactaccagca

SEQ ID NO: 2108012 - DNA, 15 bp, Homo sapiens
aaagactaccagcag

SEQ ID NO: 2108013 - DNA, 15 bp, Homo sapiens
aagactaccagcagt

SEQ ID NO: 2108014 - DNA, 15 bp, Homo sapiens
agactaccagcagtt

SEQ ID NO: 2108015 - DNA, 15 bp, Homo sapiens
gactaccagcagttg

SEQ ID NO: 2108016 - DNA, 15 bp, Homo sapiens
actaccagcagttga

SEQ ID NO: 2108017 - DNA, 15 bp, Homo sapiens
ctaccagcagttgat

SEQ ID NO: 2108018 - DNA, 15 bp, Homo sapiens
taccagcagttgatg

SEQ ID NO: 2108019 - DNA, 15 bp, Homo sapiens
accagcagttgatgg

SEQ ID NO: 2108020 - DNA, 15 bp, Homo sapiens
ccagcagttgatggc

SEQ ID NO: 2108021 - DNA, 15 bp, Homo sapiens
cagcagttgatggct

SEQ ID NO: 2108022 - DNA, 15 bp, Homo sapiens
agcagttgatggctt

SEQ ID NO: 2108023 - DNA, 15 bp, Homo sapiens
gcagttgatggcttt

SEQ ID NO: 2108024 - DNA, 15 bp, Homo sapiens
cagttgatggctttg

SEQ ID NO: 2108025 - DNA, 15 bp, Homo sapiens
agttgatggctttga

SEQ ID NO: 2108026 - DNA, 15 bp, Homo sapiens
gttgatggctttgaa

SEQ ID NO: 2108027 - DNA, 15 bp, Homo sapiens
ttgatggctttgaag

SEQ ID NO: 2108028 - DNA, 15 bp, Homo sapiens
tgatggctttgaaga

SEQ ID NO: 2108029 - DNA, 15 bp, Homo sapiens
gatggctttgaagat

SEQ ID NO: 2108030 - DNA, 15 bp, Homo sapiens
atggctttgaagata

SEQ ID NO: 2108031 - DNA, 15 bp, Homo sapiens
tggctttgaagatag

SEQ ID NO: 2108032 - DNA, 15 bp, Homo sapiens
ggctttgaagataga

SEQ ID NO: 2108033 - DNA, 15 bp, Homo sapiens
gctttgaagatagaa

SEQ ID NO: 2108034 - DNA, 15 bp, Homo sapiens
ctttgaagatagaag

SEQ ID NO: 2108035 - DNA, 15 bp, Homo sapiens
tttgaagatagaaga

SEQ ID NO: 2108036 - DNA, 15 bp, Homo sapiens
ttgaagatagaagaa

SEQ ID NO: 2108037 - DNA, 15 bp, Homo sapiens
tgaagatagaagaag

SEQ ID NO: 2108038 - DNA, 15 bp, Homo sapiens
gaagatagaagaagg

SEQ ID NO: 2108039 - DNA, 15 bp, Homo sapiens
aagatagaagaaggg

SEQ ID NO: 2108040 - DNA, 15 bp, Homo sapiens
agatagaagaagggg

SEQ ID NO: 2108041 - DNA, 15 bp, Homo sapiens
gatagaagaaggggg

SEQ ID NO: 2108042 - DNA, 15 bp, Homo sapiens
atagaagaagggggc

SEQ ID NO: 2108043 - DNA, 15 bp, Homo sapiens
tagaagaagggggcc

SEQ ID NO: 2108044 - DNA, 15 bp, Homo sapiens
agaagaagggggcca

SEQ ID NO: 2108045 - DNA, 15 bp, Homo sapiens
gaagaagggggccat

SEQ ID NO: 2108046 - DNA, 15 bp, Homo sapiens
aagaagggggccatg

SEQ ID NO: 2108047 - DNA, 15 bp, Homo sapiens
agaagggggccatga

SEQ ID NO: 2108048 - DNA, 15 bp, Homo sapiens
gaagggggccatgag

SEQ ID NO: 2108049 - DNA, 15 bp, Homo sapiens
aagggggccatgagc

SEQ ID NO: 2108050 - DNA, 15 bp, Homo sapiens
agggggccatgagcc

SEQ ID NO: 2108051 - DNA, 15 bp, Homo sapiens
gggggccatgagcca

SEQ ID NO: 2108052 - DNA, 15 bp, Homo sapiens
ggggccatgagccaa

SEQ ID NO: 2108053 - DNA, 15 bp, Homo sapiens
gggccatgagccaag

SEQ ID NO: 2108054 - DNA, 15 bp, Homo sapiens
ggccatgagccaaga

SEQ ID NO: 2108055 - DNA, 15 bp, Homo sapiens
gccatgagccaagaa

SEQ ID NO: 2108056 - DNA, 15 bp, Homo sapiens
ccatgagccaagaaa

SEQ ID NO: 2108057 - DNA, 15 bp, Homo sapiens
catgagccaagaaat

SEQ ID NO: 2108058 - DNA, 15 bp, Homo sapiens
atgagccaagaaatg

SEQ ID NO: 2108059 - DNA, 15 bp, Homo sapiens
tgagccaagaaatgt

SEQ ID NO: 2108060 - DNA, 15 bp, Homo sapiens
gagccaagaaatgtg

SEQ ID NO: 2108061 - DNA, 15 bp, Homo sapiens
agccaagaaatgtga

SEQ ID NO: 2108062 - DNA, 15 bp, Homo sapiens
gccaagaaatgtgag

SEQ ID NO: 2108063 - DNA, 15 bp, Homo sapiens
ccaagaaatgtgagt

SEQ ID NO: 2108064 - DNA, 15 bp, Homo sapiens
caagaaatgtgagta

SEQ ID NO: 2108065 - DNA, 15 bp, Homo sapiens
aagaaatgtgagtag

SEQ ID NO: 2108066 - DNA, 15 bp, Homo sapiens
agaaatgtgagtagc

SEQ ID NO: 2108067 - DNA, 15 bp, Homo sapiens
gaaatgtgagtagcc

SEQ ID NO: 2108068 - DNA, 15 bp, Homo sapiens
aaatgtgagtagcct

SEQ ID NO: 2108069 - DNA, 15 bp, Homo sapiens
aatgtgagtagcctc

SEQ ID NO: 2108070 - DNA, 15 bp, Homo sapiens
atgtgagtagcctct

SEQ ID NO: 2108071 - DNA, 15 bp, Homo sapiens
tgtgagtagcctcta

SEQ ID NO: 2108072 - DNA, 15 bp, Homo sapiens
gtgagtagcctctag

SEQ ID NO: 2108073 - DNA, 15 bp, Homo sapiens
tgagtagcctctaga

SEQ ID NO: 2108074 - DNA, 15 bp, Homo sapiens
gagtagcctctagaa

SEQ ID NO: 2108075 - DNA, 15 bp, Homo sapiens
agtagcctctagaag

SEQ ID NO: 2108076 - DNA, 15 bp, Homo sapiens
gtagcctctagaagc

SEQ ID NO: 2108077 - DNA, 15 bp, Homo sapiens
tagcctctagaagct

SEQ ID NO: 2108078 - DNA, 15 bp, Homo sapiens
agcctctagaagctg

SEQ ID NO: 2108079 - DNA, 15 bp, Homo sapiens
gcctctagaagctga

SEQ ID NO: 2108080 - DNA, 15 bp, Homo sapiens
cctctagaagctgaa

SEQ ID NO: 2108081 - DNA, 15 bp, Homo sapiens
ctctagaagctgaaa

SEQ ID NO: 2108082 - DNA, 15 bp, Homo sapiens
tctagaagctgaaaa

SEQ ID NO: 2108083 - DNA, 15 bp, Homo sapiens
ctagaagctgaaaaa

SEQ ID NO: 2108084 - DNA, 15 bp, Homo sapiens
tagaagctgaaaaag

SEQ ID NO: 2108085 - DNA, 15 bp, Homo sapiens
agaagctgaaaaagg

SEQ ID NO: 2108086 - DNA, 15 bp, Homo sapiens
gaagctgaaaaaggc

SEQ ID NO: 2108087 - DNA, 15 bp, Homo sapiens
aagctgaaaaaggca

SEQ ID NO: 2108088 - DNA, 15 bp, Homo sapiens
agctgaaaaaggcaa

SEQ ID NO: 2108089 - DNA, 15 bp, Homo sapiens
gctgaaaaaggcaag

SEQ ID NO: 2108090 - DNA, 15 bp, Homo sapiens
ctgaaaaaggcaaga

SEQ ID NO: 2108091 - DNA, 15 bp, Homo sapiens
tgaaaaaggcaagaa

SEQ ID NO: 2108092 - DNA, 15 bp, Homo sapiens
gaaaaaggcaagaaa

SEQ ID NO: 2108093 - DNA, 15 bp, Homo sapiens
aaaaaggcaagaaaa

SEQ ID NO: 2108094 - DNA, 15 bp, Homo sapiens
aaaaggcaagaaaac

SEQ ID NO: 2108095 - DNA, 15 bp, Homo sapiens
aaaggcaagaaaacg

SEQ ID NO: 2108096 - DNA, 15 bp, Homo sapiens
aaggcaagaaaacgg

SEQ ID NO: 2108097 - DNA, 15 bp, Homo sapiens
aggcaagaaaacgga

SEQ ID NO: 2108098 - DNA, 15 bp, Homo sapiens
ggcaagaaaacggat

SEQ ID NO: 2108099 - DNA, 15 bp, Homo sapiens
gcaagaaaacggatt

SEQ ID NO: 2108100 - DNA, 15 bp, Homo sapiens
caagaaaacggattc

SEQ ID NO: 2108101 - DNA, 15 bp, Homo sapiens
aagaaaacggattct

SEQ ID NO: 2108102 - DNA, 15 bp, Homo sapiens
agaaaacggattctt

SEQ ID NO: 2108103 - DNA, 15 bp, Homo sapiens
gaaaacggattcttc

SEQ ID NO: 2108104 - DNA, 15 bp, Homo sapiens
aaaacggattcttcc

SEQ ID NO: 2108105 - DNA, 15 bp, Homo sapiens
aaacggattcttccc

SEQ ID NO: 2108106 - DNA, 15 bp, Homo sapiens
aacggattcttccct

SEQ ID NO: 2108107 - DNA, 15 bp, Homo sapiens
acggattcttcccta

SEQ ID NO: 2108108 - DNA, 15 bp, Homo sapiens
cggattcttccctag

SEQ ID NO: 2108109 - DNA, 15 bp, Homo sapiens
ggattcttccctaga

SEQ ID NO: 2108110 - DNA, 15 bp, Homo sapiens
gattcttccctagaa

SEQ ID NO: 2108111 - DNA, 15 bp, Homo sapiens
attcttccctagaat

SEQ ID NO: 2108112 - DNA, 15 bp, Homo sapiens
ttcttccctagaatc

SEQ ID NO: 2108113 - DNA, 15 bp, Homo sapiens
tcttccctagaatct

SEQ ID NO: 2108114 - DNA, 15 bp, Homo sapiens
cttccctagaatctc

SEQ ID NO: 2108115 - DNA, 15 bp, Homo sapiens
ttccctagaatctcc

SEQ ID NO: 2108116 - DNA, 15 bp, Homo sapiens
tccctagaatctcca

SEQ ID NO: 2108117 - DNA, 15 bp, Homo sapiens
ccctagaatctccag

SEQ ID NO: 2108118 - DNA, 15 bp, Homo sapiens
cctagaatctccaga

SEQ ID NO: 2108119 - DNA, 15 bp, Homo sapiens
ctagaatctccagaa

SEQ ID NO: 2108120 - DNA, 15 bp, Homo sapiens
tagaatctccagaaa

SEQ ID NO: 2108121 - DNA, 15 bp, Homo sapiens
agaatctccagaaat

SEQ ID NO: 2108122 - DNA, 15 bp, Homo sapiens
gaatctccagaaatg

SEQ ID NO: 2108123 - DNA, 15 bp, Homo sapiens
aatctccagaaatgc

SEQ ID NO: 2108124 - DNA, 15 bp, Homo sapiens
atctccagaaatgca

SEQ ID NO: 2108125 - DNA, 15 bp, Homo sapiens
tctccagaaatgcag

SEQ ID NO: 2108126 - DNA, 15 bp, Homo sapiens
ctccagaaatgcagc

SEQ ID NO: 2108127 - DNA, 15 bp, Homo sapiens
tccagaaatgcagcc

SEQ ID NO: 2108128 - DNA, 15 bp, Homo sapiens
ccagaaatgcagccc

SEQ ID NO: 2108129 - DNA, 15 bp, Homo sapiens
cagaaatgcagccct

SEQ ID NO: 2108130 - DNA, 15 bp, Homo sapiens
agaaatgcagccctg

SEQ ID NO: 2108131 - DNA, 15 bp, Homo sapiens
gaaatgcagccctgc

SEQ ID NO: 2108132 - DNA, 15 bp, Homo sapiens
aaatgcagccctgcc

SEQ ID NO: 2108133 - DNA, 15 bp, Homo sapiens
aatgcagccctgcca

SEQ ID NO: 2108134 - DNA, 15 bp, Homo sapiens
atgcagccctgccaa

SEQ ID NO: 2108135 - DNA, 15 bp, Homo sapiens
tgcagccctgccaac

SEQ ID NO: 2108136 - DNA, 15 bp, Homo sapiens
gcagccctgccaaca

SEQ ID NO: 2108137 - DNA, 15 bp, Homo sapiens
cagccctgccaacat

SEQ ID NO: 2108138 - DNA, 15 bp, Homo sapiens
agccctgccaacatg

SEQ ID NO: 2108139 - DNA, 15 bp, Homo sapiens
gccctgccaacatgg

SEQ ID NO: 2108140 - DNA, 15 bp, Homo sapiens
ccctgccaacatggt

SEQ ID NO: 2108141 - DNA, 15 bp, Homo sapiens
cctgccaacatggtg

SEQ ID NO: 2108142 - DNA, 15 bp, Homo sapiens
ctgccaacatggtga

SEQ ID NO: 2108143 - DNA, 15 bp, Homo sapiens
tgccaacatggtgat

SEQ ID NO: 2108144 - DNA, 15 bp, Homo sapiens
gccaacatggtgatt

SEQ ID NO: 2108145 - DNA, 15 bp, Homo sapiens
ccaacatggtgattt

SEQ ID NO: 2108146 - DNA, 15 bp, Homo sapiens
caacatggtgatttt

SEQ ID NO: 2108147 - DNA, 15 bp, Homo sapiens
aacatggtgatttta

SEQ ID NO: 2108148 - DNA, 15 bp, Homo sapiens
acatggtgattttaa

SEQ ID NO: 2108149 - DNA, 15 bp, Homo sapiens
catggtgattttaac

SEQ ID NO: 2108150 - DNA, 15 bp, Homo sapiens
atggtgattttaact

SEQ ID NO: 2108151 - DNA, 15 bp, Homo sapiens
tggtgattttaactc

SEQ ID NO: 2108152 - DNA, 15 bp, Homo sapiens
ggtgattttaactca

SEQ ID NO: 2108153 - DNA, 15 bp, Homo sapiens
gtgattttaactcaa

SEQ ID NO: 2108154 - DNA, 15 bp, Homo sapiens
tgattttaactcaat

SEQ ID NO: 2108155 - DNA, 15 bp, Homo sapiens
gattttaactcaatg

SEQ ID NO: 2108156 - DNA, 15 bp, Homo sapiens
attttaactcaatga

SEQ ID NO: 2108157 - DNA, 15 bp, Homo sapiens
ttttaactcaatgag

SEQ ID NO: 2108158 - DNA, 15 bp, Homo sapiens
tttaactcaatgaga

SEQ ID NO: 2108159 - DNA, 15 bp, Homo sapiens
ttaactcaatgagat

SEQ ID NO: 2108160 - DNA, 15 bp, Homo sapiens
taactcaatgagatg

SEQ ID NO: 2108161 - DNA, 15 bp, Homo sapiens
aactcaatgagatgc

SEQ ID NO: 2108162 - DNA, 15 bp, Homo sapiens
actcaatgagatgca

SEQ ID NO: 2108163 - DNA, 15 bp, Homo sapiens
ctcaatgagatgcat

SEQ ID NO: 2108164 - DNA, 15 bp, Homo sapiens
tcaatgagatgcatt

SEQ ID NO: 2108165 - DNA, 15 bp, Homo sapiens
caatgagatgcattt

SEQ ID NO: 2108166 - DNA, 15 bp, Homo sapiens
aatgagatgcatttt

SEQ ID NO: 2108167 - DNA, 15 bp, Homo sapiens
atgagatgcatttta

SEQ ID NO: 2108168 - DNA, 15 bp, Homo sapiens
tgagatgcattttag

SEQ ID NO: 2108169 - DNA, 15 bp, Homo sapiens
gagatgcattttaga

SEQ ID NO: 2108170 - DNA, 15 bp, Homo sapiens
agatgcattttagac

SEQ ID NO: 2108171 - DNA, 15 bp, Homo sapiens
gatgcattttagact

SEQ ID NO: 2108172 - DNA, 15 bp, Homo sapiens
atgcattttagactt

SEQ ID NO: 2108173 - DNA, 15 bp, Homo sapiens
tgcattttagacttc

SEQ ID NO: 2108174 - DNA, 15 bp, Homo sapiens
gcattttagacttct

SEQ ID NO: 2108175 - DNA, 15 bp, Homo sapiens
cattttagacttctg

SEQ ID NO: 2108176 - DNA, 15 bp, Homo sapiens
attttagacttctga

SEQ ID NO: 2108177 - DNA, 15 bp, Homo sapiens
ttttagacttctgac

SEQ ID NO: 2108178 - DNA, 15 bp, Homo sapiens
tttagacttctgaca

SEQ ID NO: 2108179 - DNA, 15 bp, Homo sapiens
ttagacttctgacat

SEQ ID NO: 2108180 - DNA, 15 bp, Homo sapiens
tagacttctgacatc

SEQ ID NO: 2108181 - DNA, 15 bp, Homo sapiens
agacttctgacatct

SEQ ID NO: 2108182 - DNA, 15 bp, Homo sapiens
gacttctgacatcta

SEQ ID NO: 2108183 - DNA, 15 bp, Homo sapiens
acttctgacatctag

SEQ ID NO: 2108184 - DNA, 15 bp, Homo sapiens
cttctgacatctaga

SEQ ID NO: 2108185 - DNA, 15 bp, Homo sapiens
ttctgacatctagaa

SEQ ID NO: 2108186 - DNA, 15 bp, Homo sapiens
tctgacatctagaat

SEQ ID NO: 2108187 - DNA, 15 bp, Homo sapiens
ctgacatctagaatt

SEQ ID NO: 2108188 - DNA, 15 bp, Homo sapiens
tgacatctagaattg

SEQ ID NO: 2108189 - DNA, 15 bp, Homo sapiens
gacatctagaattgt

SEQ ID NO: 2108190 - DNA, 15 bp, Homo sapiens
acatctagaattgtg

SEQ ID NO: 2108191 - DNA, 15 bp, Homo sapiens
catctagaattgtgt

SEQ ID NO: 2108192 - DNA, 15 bp, Homo sapiens
atctagaattgtgtt

SEQ ID NO: 2108193 - DNA, 15 bp, Homo sapiens
tctagaattgtgtta

SEQ ID NO: 2108194 - DNA, 15 bp, Homo sapiens
ctagaattgtgttat

SEQ ID NO: 2108195 - DNA, 15 bp, Homo sapiens
tagaattgtgttatt

SEQ ID NO: 2108196 - DNA, 15 bp, Homo sapiens
agaattgtgttattt

SEQ ID NO: 2108197 - DNA, 15 bp, Homo sapiens
gaattgtgttatttt

SEQ ID NO: 2108198 - DNA, 15 bp, Homo sapiens
aattgtgttattttc

SEQ ID NO: 2108199 - DNA, 15 bp, Homo sapiens
attgtgttattttca

SEQ ID NO: 2108200 - DNA, 15 bp, Homo sapiens
ttgtgttattttcag

SEQ ID NO: 2108201 - DNA, 15 bp, Homo sapiens
tgtgttattttcagc

SEQ ID NO: 2108202 - DNA, 15 bp, Homo sapiens
gtgttattttcagcc

SEQ ID NO: 2108203 - DNA, 15 bp, Homo sapiens
tgttattttcagccc

SEQ ID NO: 2108204 - DNA, 15 bp, Homo sapiens
gttattttcagccct

SEQ ID NO: 2108205 - DNA, 15 bp, Homo sapiens
ttattttcagccctc

SEQ ID NO: 2108206 - DNA, 15 bp, Homo sapiens
tattttcagccctca

SEQ ID NO: 2108207 - DNA, 15 bp, Homo sapiens
attttcagccctcaa

SEQ ID NO: 2108208 - DNA, 15 bp, Homo sapiens
ttttcagccctcaag

SEQ ID NO: 2108209 - DNA, 15 bp, Homo sapiens
tttcagccctcaagt

SEQ ID NO: 2108210 - DNA, 15 bp, Homo sapiens
ttcagccctcaagtt

SEQ ID NO: 2108211 - DNA, 15 bp, Homo sapiens
tcagccctcaagttt

SEQ ID NO: 2108212 - DNA, 15 bp, Homo sapiens
cagccctcaagtttg

SEQ ID NO: 2108213 - DNA, 15 bp, Homo sapiens
agccctcaagtttgt

SEQ ID NO: 2108214 - DNA, 15 bp, Homo sapiens
gccctcaagtttgtg

SEQ ID NO: 2108215 - DNA, 15 bp, Homo sapiens
ccctcaagtttgtgg

SEQ ID NO: 2108216 - DNA, 15 bp, Homo sapiens
cctcaagtttgtggt

SEQ ID NO: 2108217 - DNA, 15 bp, Homo sapiens
ctcaagtttgtggta

SEQ ID NO: 2108218 - DNA, 15 bp, Homo sapiens
tcaagtttgtggtaa

SEQ ID NO: 2108219 - DNA, 15 bp, Homo sapiens
caagtttgtggtaat

SEQ ID NO: 2108220 - DNA, 15 bp, Homo sapiens
aatttgttacagcag

SEQ ID NO: 2108221 - DNA, 15 bp, Homo sapiens
atttgttacagcagc

SEQ ID NO: 2108222 - DNA, 15 bp, Homo sapiens
tttgttacagcagca

SEQ ID NO: 2108223 - DNA, 15 bp, Homo sapiens
ttgttacagcagcat

SEQ ID NO: 2108224 - DNA, 15 bp, Homo sapiens
tgttacagcagcatt

SEQ ID NO: 2108225 - DNA, 15 bp, Homo sapiens
gttacagcagcatta

SEQ ID NO: 2108226 - DNA, 15 bp, Homo sapiens
ttacagcagcattaa

SEQ ID NO: 2108227 - DNA, 15 bp, Homo sapiens
tacagcagcattaag

SEQ ID NO: 2108228 - DNA, 15 bp, Homo sapiens
acagcagcattaaga

SEQ ID NO: 2108229 - DNA, 15 bp, Homo sapiens
cagcagcattaagaa

SEQ ID NO: 2108230 - DNA, 15 bp, Homo sapiens
agcagcattaagaaa

SEQ ID NO: 2108231 - DNA, 15 bp, Homo sapiens
gcagcattaagaaaa

SEQ ID NO: 2108232 - DNA, 15 bp, Homo sapiens
cagcattaagaaaat

SEQ ID NO: 2108233 - DNA, 15 bp, Homo sapiens
agcattaagaaaatg

SEQ ID NO: 2108234 - DNA, 15 bp, Homo sapiens
gcattaagaaaatgt

SEQ ID NO: 2108235 - DNA, 15 bp, Homo sapiens
cattaagaaaatgta

SEQ ID NO: 2108236 - DNA, 15 bp, Homo sapiens
attaagaaaatgtac

SEQ ID NO: 2108237 - DNA, 15 bp, Homo sapiens
ttaagaaaatgtaca

SEQ ID NO: 2108238 - DNA, 15 bp, Homo sapiens
taagaaaatgtacaa

SEQ ID NO: 2108239 - DNA, 15 bp, Homo sapiens
aagaaaatgtacaat

SEQ ID NO: 2108240 - DNA, 15 bp, Homo sapiens
agaaaatgtacaatg

SEQ ID NO: 2108241 - DNA, 15 bp, Homo sapiens
gaaaatgtacaatga

SEQ ID NO: 2108242 - DNA, 15 bp, Homo sapiens
aaaatgtacaatgac

SEQ ID NO: 2108243 - DNA, 15 bp, Homo sapiens
aaatgtacaatgacc

SEQ ID NO: 2108244 - DNA, 15 bp, Homo sapiens
aatgtacaatgacca

SEQ ID NO: 2108245 - DNA, 15 bp, Homo sapiens
atgtacaatgaccat

SEQ ID NO: 2108246 - DNA, 15 bp, Homo sapiens
tgtacaatgaccatg

SEQ ID NO: 2108247 - DNA, 15 bp, Homo sapiens
gtacaatgaccatgt

SEQ ID NO: 2108248 - DNA, 15 bp, Homo sapiens
tacaatgaccatgtg

SEQ ID NO: 2108249 - DNA, 15 bp, Homo sapiens
acaatgaccatgtgc

SEQ ID NO: 2108250 - DNA, 15 bp, Homo sapiens
caatgaccatgtgca

SEQ ID NO: 2108251 - DNA, 15 bp, Homo sapiens
aatgaccatgtgcag

SEQ ID NO: 2108252 - DNA, 15 bp, Homo sapiens
atgaccatgtgcagt

SEQ ID NO: 2108253 - DNA, 15 bp, Homo sapiens
tgaccatgtgcagtg

SEQ ID NO: 2108254 - DNA, 15 bp, Homo sapiens
gaccatgtgcagtgc

SEQ ID NO: 2108255 - DNA, 15 bp, Homo sapiens
accatgtgcagtgcc

SEQ ID NO: 2108256 - DNA, 15 bp, Homo sapiens
ccatgtgcagtgcct

SEQ ID NO: 2108257 - DNA, 15 bp, Homo sapiens
catgtgcagtgcctc

SEQ ID NO: 2108258 - DNA, 15 bp, Homo sapiens
atgtgcagtgcctca

SEQ ID NO: 2108259 - DNA, 15 bp, Homo sapiens
tgtgcagtgcctcat

SEQ ID NO: 2108260 - DNA, 15 bp, Homo sapiens
gtgcagtgcctcatg

SEQ ID NO: 2108261 - DNA, 15 bp, Homo sapiens
tgcagtgcctcatgc

SEQ ID NO: 2108262 - DNA, 15 bp, Homo sapiens
gcagtgcctcatgct

SEQ ID NO: 2108263 - DNA, 15 bp, Homo sapiens
cagtgcctcatgctt

SEQ ID NO: 2108264 - DNA, 15 bp, Homo sapiens
agtgcctcatgcttg

SEQ ID NO: 2108265 - DNA, 15 bp, Homo sapiens
gtgcctcatgcttgt

SEQ ID NO: 2108266 - DNA, 15 bp, Homo sapiens
tgcctcatgcttgta

SEQ ID NO: 2108267 - DNA, 15 bp, Homo sapiens
gcctcatgcttgtaa

SEQ ID NO: 2108268 - DNA, 15 bp, Homo sapiens
cctcatgcttgtaat

SEQ ID NO: 2108269 - DNA, 15 bp, Homo sapiens
caaggtgggtggatc

SEQ ID NO: 2108270 - DNA, 15 bp, Homo sapiens
aaggtgggtggatcg

SEQ ID NO: 2108271 - DNA, 15 bp, Homo sapiens
aggtgggtggatcgc

SEQ ID NO: 2108272 - DNA, 15 bp, Homo sapiens
ggtgggtggatcgct

SEQ ID NO: 2108273 - DNA, 15 bp, Homo sapiens
gtgggtggatcgctt

SEQ ID NO: 2108274 - DNA, 15 bp, Homo sapiens
tgggtggatcgcttg

SEQ ID NO: 2108275 - DNA, 15 bp, Homo sapiens
gggtggatcgcttga

SEQ ID NO: 2108276 - DNA, 15 bp, Homo sapiens
ggtggatcgcttgag

SEQ ID NO: 2108277 - DNA, 15 bp, Homo sapiens
gtggatcgcttgagt

SEQ ID NO: 2108278 - DNA, 15 bp, Homo sapiens
tggatcgcttgagtc

SEQ ID NO: 2108279 - DNA, 15 bp, Homo sapiens
atcgcttgagtccaa

SEQ ID NO: 2108280 - DNA, 15 bp, Homo sapiens
tcgcttgagtccaag

SEQ ID NO: 2108281 - DNA, 15 bp, Homo sapiens
cgcttgagtccaaga

SEQ ID NO: 2108282 - DNA, 15 bp, Homo sapiens
cttgagtccaagagt

SEQ ID NO: 2108283 - DNA, 15 bp, Homo sapiens
ttgagtccaagagtt

SEQ ID NO: 2108284 - DNA, 15 bp, Homo sapiens
tgagtccaagagttc

SEQ ID NO: 2108285 - DNA, 15 bp, Homo sapiens
gagtccaagagttcg

SEQ ID NO: 2108286 - DNA, 15 bp, Homo sapiens
agtccaagagttcga

SEQ ID NO: 2108287 - DNA, 15 bp, Homo sapiens
gtccaagagttcgag

SEQ ID NO: 2108288 - DNA, 15 bp, Homo sapiens
tccaagagttcgaga

SEQ ID NO: 2108289 - DNA, 15 bp, Homo sapiens
ccaagagttcgagac

SEQ ID NO: 2108290 - DNA, 15 bp, Homo sapiens
gagaccagcctggga

SEQ ID NO: 2108291 - DNA, 15 bp, Homo sapiens
agaccagcctgggaa

SEQ ID NO: 2108292 - DNA, 15 bp, Homo sapiens
gaccagcctgggaaa

SEQ ID NO: 2108293 - DNA, 15 bp, Homo sapiens
accagcctgggaaac

SEQ ID NO: 2108294 - DNA, 15 bp, Homo sapiens
ccagcctgggaaaca

SEQ ID NO: 2108295 - DNA, 15 bp, Homo sapiens
cagcctgggaaacat

SEQ ID NO: 2108296 - DNA, 15 bp, Homo sapiens
agcctgggaaacatg

SEQ ID NO: 2108297 - DNA, 15 bp, Homo sapiens
gcctgggaaacatgg

SEQ ID NO: 2108298 - DNA, 15 bp, Homo sapiens
cctgggaaacatggt

SEQ ID NO: 2108299 - DNA, 15 bp, Homo sapiens
ctgggaaacatggtg

SEQ ID NO: 2108300 - DNA, 15 bp, Homo sapiens
tgggaaacatggtga

SEQ ID NO: 2108301 - DNA, 15 bp, Homo sapiens
gggaaacatggtgaa

SEQ ID NO: 2108302 - DNA, 15 bp, Homo sapiens
ggaaacatggtgaaa

SEQ ID NO: 2108303 - DNA, 15 bp, Homo sapiens
gaaacatggtgaaac

SEQ ID NO: 2108304 - DNA, 15 bp, Homo sapiens
aaacatggtgaaacc

SEQ ID NO: 2108305 - DNA, 15 bp, Homo sapiens
aaccttgtctctaca

SEQ ID NO: 2108306 - DNA, 15 bp, Homo sapiens
cttgtctctacaaaa

SEQ ID NO: 2108307 - DNA, 15 bp, Homo sapiens
ttgtctctacaaaaa

SEQ ID NO: 2108308 - DNA, 15 bp, Homo sapiens
tgtctctacaaaaac

SEQ ID NO: 2108309 - DNA, 15 bp, Homo sapiens
gtctctacaaaaaca

SEQ ID NO: 2108310 - DNA, 15 bp, Homo sapiens
tctctacaaaaacac

SEQ ID NO: 2108311 - DNA, 15 bp, Homo sapiens
ctctacaaaaacaca

SEQ ID NO: 2108312 - DNA, 15 bp, Homo sapiens
tctacaaaaacacaa

SEQ ID NO: 2108313 - DNA, 15 bp, Homo sapiens
ctacaaaaacacaaa

SEQ ID NO: 2108314 - DNA, 15 bp, Homo sapiens
tacaaaaacacaaaa

SEQ ID NO: 2108315 - DNA, 15 bp, Homo sapiens
aaaaacacaaaaatt

SEQ ID NO: 2108316 - DNA, 15 bp, Homo sapiens
cacaaaaattagcct

SEQ ID NO: 2108317 - DNA, 15 bp, Homo sapiens
acaaaaattagcctg

SEQ ID NO: 2108318 - DNA, 15 bp, Homo sapiens
caaaaattagcctgg

SEQ ID NO: 2108319 - DNA, 15 bp, Homo sapiens
aaaaattagcctggt

SEQ ID NO: 2108320 - DNA, 15 bp, Homo sapiens
attagcctggtgtgg

SEQ ID NO: 2108321 - DNA, 15 bp, Homo sapiens
ttagcctggtgtggt

SEQ ID NO: 2108322 - DNA, 15 bp, Homo sapiens
tagcctggtgtggtt

SEQ ID NO: 2108323 - DNA, 15 bp, Homo sapiens
agcctggtgtggttg

SEQ ID NO: 2108324 - DNA, 15 bp, Homo sapiens
gcctggtgtggttgt

SEQ ID NO: 2108325 - DNA, 15 bp, Homo sapiens
cctggtgtggttgtg

SEQ ID NO: 2108326 - DNA, 15 bp, Homo sapiens
ctggtgtggttgtgt

SEQ ID NO: 2108327 - DNA, 15 bp, Homo sapiens
tggtgtggttgtgtg

SEQ ID NO: 2108328 - DNA, 15 bp, Homo sapiens
ggtgtggttgtgtgg

SEQ ID NO: 2108329 - DNA, 15 bp, Homo sapiens
gtgtggttgtgtgga

SEQ ID NO: 2108330 - DNA, 15 bp, Homo sapiens
tgtggttgtgtggac

SEQ ID NO: 2108331 - DNA, 15 bp, Homo sapiens
gtggttgtgtggacc

SEQ ID NO: 2108332 - DNA, 15 bp, Homo sapiens
tggttgtgtggacct

SEQ ID NO: 2108333 - DNA, 15 bp, Homo sapiens
ggttgtgtggacctg

SEQ ID NO: 2108334 - DNA, 15 bp, Homo sapiens
gttgtgtggacctgt

SEQ ID NO: 2108335 - DNA, 15 bp, Homo sapiens
ttgtgtggacctgta

SEQ ID NO: 2108336 - DNA, 15 bp, Homo sapiens
tgtgtggacctgtag

SEQ ID NO: 2108337 - DNA, 15 bp, Homo sapiens
gtgtggacctgtagt

SEQ ID NO: 2108338 - DNA, 15 bp, Homo sapiens
tgtggacctgtagtc

SEQ ID NO: 2108339 - DNA, 15 bp, Homo sapiens
gtggacctgtagtcc

SEQ ID NO: 2108340 - DNA, 15 bp, Homo sapiens
tggacctgtagtccc

SEQ ID NO: 2108341 - DNA, 15 bp, Homo sapiens
ggacctgtagtccca

SEQ ID NO: 2108342 - DNA, 15 bp, Homo sapiens
gacctgtagtcccag

SEQ ID NO: 2108343 - DNA, 15 bp, Homo sapiens
agtcccagctactct

SEQ ID NO: 2108344 - DNA, 15 bp, Homo sapiens
gtcccagctactctg

SEQ ID NO: 2108345 - DNA, 15 bp, Homo sapiens
tctggaggctgaggt

SEQ ID NO: 2108346 - DNA, 15 bp, Homo sapiens
ctggaggctgaggtg

SEQ ID NO: 2108347 - DNA, 15 bp, Homo sapiens
tggaggctgaggtgg

SEQ ID NO: 2108348 - DNA, 15 bp, Homo sapiens
tgaggtgggaggatg

SEQ ID NO: 2108349 - DNA, 15 bp, Homo sapiens
gaggtgggaggatgg

SEQ ID NO: 2108350 - DNA, 15 bp, Homo sapiens
tactgggacgggtgc

SEQ ID NO: 2108351 - DNA, 15 bp, Homo sapiens
actgggacgggtgcg

SEQ ID NO: 2108352 - DNA, 15 bp, Homo sapiens
ctgggacgggtgcgg

SEQ ID NO: 2108353 - DNA, 15 bp, Homo sapiens
tgggacgggtgcggc

SEQ ID NO: 2108354 - DNA, 15 bp, Homo sapiens
gggacgggtgcggcg

SEQ ID NO: 2108355 - DNA, 15 bp, Homo sapiens
ggacgggtgcggcgg

SEQ ID NO: 2108356 - DNA, 15 bp, Homo sapiens
gacgggtgcggcggc

SEQ ID NO: 2108357 - DNA, 15 bp, Homo sapiens
acgggtgcggcggct

SEQ ID NO: 2108358 - DNA, 15 bp, Homo sapiens
cgggtgcggcggctc

SEQ ID NO: 2108359 - DNA, 15 bp, Homo sapiens
gggtgcggcggctca

SEQ ID NO: 2108360 - DNA, 15 bp, Homo sapiens
ggtgcggcggctcac

SEQ ID NO: 2108361 - DNA, 15 bp, Homo sapiens
gtgcggcggctcaca

SEQ ID NO: 2108362 - DNA, 15 bp, Homo sapiens
tgcggcggctcacac

SEQ ID NO: 2108363 - DNA, 15 bp, Homo sapiens
gcggcggctcacacc

SEQ ID NO: 2108364 - DNA, 15 bp, Homo sapiens
cggcggctcacacct

SEQ ID NO: 2108365 - DNA, 15 bp, Homo sapiens
ggcggctcacacctg

SEQ ID NO: 2108366 - DNA, 15 bp, Homo sapiens
gcggctcacacctgt

SEQ ID NO: 2108367 - DNA, 15 bp, Homo sapiens
cggctcacacctgta

SEQ ID NO: 2108368 - DNA, 15 bp, Homo sapiens
cacctgtaatcctag

SEQ ID NO: 2108369 - DNA, 15 bp, Homo sapiens
acctgtaatcctagc

SEQ ID NO: 2108370 - DNA, 15 bp, Homo sapiens
tgtaatcctagcacc

SEQ ID NO: 2108371 - DNA, 15 bp, Homo sapiens
gtaatcctagcacct

SEQ ID NO: 2108372 - DNA, 15 bp, Homo sapiens
taatcctagcacctt

SEQ ID NO: 2108373 - DNA, 15 bp, Homo sapiens
aatcctagcaccttg

SEQ ID NO: 2108374 - DNA, 15 bp, Homo sapiens
atcctagcaccttgg

SEQ ID NO: 2108375 - DNA, 15 bp, Homo sapiens
tcctagcaccttggg

SEQ ID NO: 2108376 - DNA, 15 bp, Homo sapiens
cctagcaccttggga

SEQ ID NO: 2108377 - DNA, 15 bp, Homo sapiens
ctagcaccttgggag

SEQ ID NO: 2108378 - DNA, 15 bp, Homo sapiens
tagcaccttgggagg

SEQ ID NO: 2108379 - DNA, 15 bp, Homo sapiens
gcaccttgggaggcc

SEQ ID NO: 2108380 - DNA, 15 bp, Homo sapiens
caccttgggaggcca

SEQ ID NO: 2108381 - DNA, 15 bp, Homo sapiens
accttgggaggccaa

SEQ ID NO: 2108382 - DNA, 15 bp, Homo sapiens
ccttgggaggccaag

SEQ ID NO: 2108383 - DNA, 15 bp, Homo sapiens
tgggaggccaaggct

SEQ ID NO: 2108384 - DNA, 15 bp, Homo sapiens
gggaggccaaggctg

SEQ ID NO: 2108385 - DNA, 15 bp, Homo sapiens
ggaggccaaggctgg

SEQ ID NO: 2108386 - DNA, 15 bp, Homo sapiens
gaggccaaggctggt

SEQ ID NO: 2108387 - DNA, 15 bp, Homo sapiens
aggccaaggctggtg

SEQ ID NO: 2108388 - DNA, 15 bp, Homo sapiens
ggccaaggctggtgg

SEQ ID NO: 2108389 - DNA, 15 bp, Homo sapiens
gccaaggctggtgga

SEQ ID NO: 2108390 - DNA, 15 bp, Homo sapiens
ccaaggctggtggat

SEQ ID NO: 2108391 - DNA, 15 bp, Homo sapiens
caaggctggtggatc

SEQ ID NO: 2108392 - DNA, 15 bp, Homo sapiens
aaggctggtggatca

SEQ ID NO: 2108393 - DNA, 15 bp, Homo sapiens
ggctggtggatcacc

SEQ ID NO: 2108394 - DNA, 15 bp, Homo sapiens
gctggtggatcacct

SEQ ID NO: 2108395 - DNA, 15 bp, Homo sapiens
ctggtggatcacctg

SEQ ID NO: 2108396 - DNA, 15 bp, Homo sapiens
tggtggatcacctga

SEQ ID NO: 2108397 - DNA, 15 bp, Homo sapiens
caagactagcctggc

SEQ ID NO: 2108398 - DNA, 15 bp, Homo sapiens
aagactagcctggcc

SEQ ID NO: 2108399 - DNA, 15 bp, Homo sapiens
tagcctggccaacat

SEQ ID NO: 2108400 - DNA, 15 bp, Homo sapiens
acatggtgaaaccca

SEQ ID NO: 2108401 - DNA, 15 bp, Homo sapiens
catggtgaaacccag

SEQ ID NO: 2108402 - DNA, 15 bp, Homo sapiens
aacccagtctctact

SEQ ID NO: 2108403 - DNA, 15 bp, Homo sapiens
acccagtctctacta

SEQ ID NO: 2108404 - DNA, 15 bp, Homo sapiens
cccagtctctactaa

SEQ ID NO: 2108405 - DNA, 15 bp, Homo sapiens
ccagtctctactaaa

SEQ ID NO: 2108406 - DNA, 15 bp, Homo sapiens
cagtctctactaaaa

SEQ ID NO: 2108407 - DNA, 15 bp, Homo sapiens
agtctctactaaaat

SEQ ID NO: 2108408 - DNA, 15 bp, Homo sapiens
gtctctactaaaata

SEQ ID NO: 2108409 - DNA, 15 bp, Homo sapiens
tctctactaaaatac

SEQ ID NO: 2108410 - DNA, 15 bp, Homo sapiens
ctctactaaaataca

SEQ ID NO: 2108411 - DNA, 15 bp, Homo sapiens
tctactaaaatacaa

SEQ ID NO: 2108412 - DNA, 15 bp, Homo sapiens
ctactaaaatacaaa

SEQ ID NO: 2108413 - DNA, 15 bp, Homo sapiens
tactaaaatacaaaa

SEQ ID NO: 2108414 - DNA, 15 bp, Homo sapiens
actaaaatacaaaag

SEQ ID NO: 2108415 - DNA, 15 bp, Homo sapiens
ctaaaatacaaaagt

SEQ ID NO: 2108416 - DNA, 15 bp, Homo sapiens
taaaatacaaaagtt

SEQ ID NO: 2108417 - DNA, 15 bp, Homo sapiens
aaaatacaaaagtta

SEQ ID NO: 2108418 - DNA, 15 bp, Homo sapiens
aaatacaaaagttag

SEQ ID NO: 2108419 - DNA, 15 bp, Homo sapiens
aatacaaaagttagc

SEQ ID NO: 2108420 - DNA, 15 bp, Homo sapiens
atacaaaagttagcc

SEQ ID NO: 2108421 - DNA, 15 bp, Homo sapiens
tacaaaagttagccg

SEQ ID NO: 2108422 - DNA, 15 bp, Homo sapiens
acaaaagttagccgg

SEQ ID NO: 2108423 - DNA, 15 bp, Homo sapiens
caaaagttagccggg

SEQ ID NO: 2108424 - DNA, 15 bp, Homo sapiens
aaaagttagccgggc

SEQ ID NO: 2108425 - DNA, 15 bp, Homo sapiens
aaagttagccgggca

SEQ ID NO: 2108426 - DNA, 15 bp, Homo sapiens
aagttagccgggcat

SEQ ID NO: 2108427 - DNA, 15 bp, Homo sapiens
agttagccgggcatg

SEQ ID NO: 2108428 - DNA, 15 bp, Homo sapiens
gttagccgggcatga

SEQ ID NO: 2108429 - DNA, 15 bp, Homo sapiens
ttagccgggcatgat

SEQ ID NO: 2108430 - DNA, 15 bp, Homo sapiens
tagccgggcatgatg

SEQ ID NO: 2108431 - DNA, 15 bp, Homo sapiens
agccgggcatgatgg

SEQ ID NO: 2108432 - DNA, 15 bp, Homo sapiens
gccgggcatgatggc

SEQ ID NO: 2108433 - DNA, 15 bp, Homo sapiens
ccgggcatgatggcg

SEQ ID NO: 2108434 - DNA, 15 bp, Homo sapiens
cgggcatgatggcgg

SEQ ID NO: 2108435 - DNA, 15 bp, Homo sapiens
gggcatgatggcggg

SEQ ID NO: 2108436 - DNA, 15 bp, Homo sapiens
ggcatgatggcgggt

SEQ ID NO: 2108437 - DNA, 15 bp, Homo sapiens
gcatgatggcgggtg

SEQ ID NO: 2108438 - DNA, 15 bp, Homo sapiens
catgatggcgggtgc

SEQ ID NO: 2108439 - DNA, 15 bp, Homo sapiens
atgatggcgggtgcc

SEQ ID NO: 2108440 - DNA, 15 bp, Homo sapiens
tgatggcgggtgcct

SEQ ID NO: 2108441 - DNA, 15 bp, Homo sapiens
gatggcgggtgcctg

SEQ ID NO: 2108442 - DNA, 15 bp, Homo sapiens
atggcgggtgcctgt

SEQ ID NO: 2108443 - DNA, 15 bp, Homo sapiens
tggcgggtgcctgta

SEQ ID NO: 2108444 - DNA, 15 bp, Homo sapiens
ggcgggtgcctgtaa

SEQ ID NO: 2108445 - DNA, 15 bp, Homo sapiens
gcgggtgcctgtaat

SEQ ID NO: 2108446 - DNA, 15 bp, Homo sapiens
cgggtgcctgtaatg

SEQ ID NO: 2108447 - DNA, 15 bp, Homo sapiens
gggtgcctgtaatgc

SEQ ID NO: 2108448 - DNA, 15 bp, Homo sapiens
ggtgcctgtaatgcc

SEQ ID NO: 2108449 - DNA, 15 bp, Homo sapiens
gtgcctgtaatgcca

SEQ ID NO: 2108450 - DNA, 15 bp, Homo sapiens
tgcctgtaatgccag

SEQ ID NO: 2108451 - DNA, 15 bp, Homo sapiens
cctgtaatgccagct

SEQ ID NO: 2108452 - DNA, 15 bp, Homo sapiens
ctgtaatgccagctg

SEQ ID NO: 2108453 - DNA, 15 bp, Homo sapiens
tgtaatgccagctgt

SEQ ID NO: 2108454 - DNA, 15 bp, Homo sapiens
gtaatgccagctgtt

SEQ ID NO: 2108455 - DNA, 15 bp, Homo sapiens
taatgccagctgttc

SEQ ID NO: 2108456 - DNA, 15 bp, Homo sapiens
aatgccagctgttct

SEQ ID NO: 2108457 - DNA, 15 bp, Homo sapiens
atgccagctgttctg

SEQ ID NO: 2108458 - DNA, 15 bp, Homo sapiens
tgccagctgttctgg

SEQ ID NO: 2108459 - DNA, 15 bp, Homo sapiens
gccagctgttctgga

SEQ ID NO: 2108460 - DNA, 15 bp, Homo sapiens
ccagctgttctggag

SEQ ID NO: 2108461 - DNA, 15 bp, Homo sapiens
cagctgttctggagg

SEQ ID NO: 2108462 - DNA, 15 bp, Homo sapiens
agctgttctggaggc

SEQ ID NO: 2108463 - DNA, 15 bp, Homo sapiens
gctgttctggaggct

SEQ ID NO: 2108464 - DNA, 15 bp, Homo sapiens
ctgttctggaggctg

SEQ ID NO: 2108465 - DNA, 15 bp, Homo sapiens
tgttctggaggctgg

SEQ ID NO: 2108466 - DNA, 15 bp, Homo sapiens
gttctggaggctggg

SEQ ID NO: 2108467 - DNA, 15 bp, Homo sapiens
ttctggaggctggga

SEQ ID NO: 2108468 - DNA, 15 bp, Homo sapiens
tctggaggctgggac

SEQ ID NO: 2108469 - DNA, 15 bp, Homo sapiens
ctggaggctgggacg

SEQ ID NO: 2108470 - DNA, 15 bp, Homo sapiens
tggaggctgggacgg

SEQ ID NO: 2108471 - DNA, 15 bp, Homo sapiens
ggaggctgggacggg

SEQ ID NO: 2108472 - DNA, 15 bp, Homo sapiens
gaggctgggacggga

SEQ ID NO: 2108473 - DNA, 15 bp, Homo sapiens
aggctgggacgggag

SEQ ID NO: 2108474 - DNA, 15 bp, Homo sapiens
ggctgggacgggaga

SEQ ID NO: 2108475 - DNA, 15 bp, Homo sapiens
gctgggacgggagaa

SEQ ID NO: 2108476 - DNA, 15 bp, Homo sapiens
ctgggacgggagaat

SEQ ID NO: 2108477 - DNA, 15 bp, Homo sapiens
tgggacgggagaatc

SEQ ID NO: 2108478 - DNA, 15 bp, Homo sapiens
gggacgggagaatca

SEQ ID NO: 2108479 - DNA, 15 bp, Homo sapiens
ggacgggagaatcac

SEQ ID NO: 2108480 - DNA, 15 bp, Homo sapiens
gacgggagaatcact

SEQ ID NO: 2108481 - DNA, 15 bp, Homo sapiens
acgggagaatcactt

SEQ ID NO: 2108482 - DNA, 15 bp, Homo sapiens
cgggagaatcacttg

SEQ ID NO: 2108483 - DNA, 15 bp, Homo sapiens
cttgaacctgggaga

SEQ ID NO: 2108484 - DNA, 15 bp, Homo sapiens
ttgaacctgggagac

SEQ ID NO: 2108485 - DNA, 15 bp, Homo sapiens
tgaacctgggagaca

SEQ ID NO: 2108486 - DNA, 15 bp, Homo sapiens
gaacctgggagacag

SEQ ID NO: 2108487 - DNA, 15 bp, Homo sapiens
aacctgggagacagt

SEQ ID NO: 2108488 - DNA, 15 bp, Homo sapiens
acctgggagacagtg

SEQ ID NO: 2108489 - DNA, 15 bp, Homo sapiens
cctgggagacagtgg

SEQ ID NO: 2108490 - DNA, 15 bp, Homo sapiens
ctgggagacagtggc

SEQ ID NO: 2108491 - DNA, 15 bp, Homo sapiens
tgggagacagtggct

SEQ ID NO: 2108492 - DNA, 15 bp, Homo sapiens
gggagacagtggctg

SEQ ID NO: 2108493 - DNA, 15 bp, Homo sapiens
ggagacagtggctgc

SEQ ID NO: 2108494 - DNA, 15 bp, Homo sapiens
gagacagtggctgca

SEQ ID NO: 2108495 - DNA, 15 bp, Homo sapiens
agacagtggctgcag

SEQ ID NO: 2108496 - DNA, 15 bp, Homo sapiens
gacagtggctgcagt

SEQ ID NO: 2108497 - DNA, 15 bp, Homo sapiens
cagtggctgcagtga

SEQ ID NO: 2108498 - DNA, 15 bp, Homo sapiens
agtggctgcagtgag

SEQ ID NO: 2108499 - DNA, 15 bp, Homo sapiens
gtggctgcagtgagc

SEQ ID NO: 2108500 - DNA, 15 bp, Homo sapiens
tggctgcagtgagcc

SEQ ID NO: 2108501 - DNA, 15 bp, Homo sapiens
gctgcagtgagccga

SEQ ID NO: 2108502 - DNA, 15 bp, Homo sapiens
ctgcagtgagccgag

SEQ ID NO: 2108503 - DNA, 15 bp, Homo sapiens
ctccagcctgggtgg

SEQ ID NO: 2108504 - DNA, 15 bp, Homo sapiens
tccagcctgggtggc

SEQ ID NO: 2108505 - DNA, 15 bp, Homo sapiens
ccagcctgggtggct

SEQ ID NO: 2108506 - DNA, 15 bp, Homo sapiens
cagcctgggtggctg

SEQ ID NO: 2108507 - DNA, 15 bp, Homo sapiens
agcctgggtggctga

SEQ ID NO: 2108508 - DNA, 15 bp, Homo sapiens
gcctgggtggctgag

SEQ ID NO: 2108509 - DNA, 15 bp, Homo sapiens
cctgggtggctgagc

SEQ ID NO: 2108510 - DNA, 15 bp, Homo sapiens
ctgggtggctgagca

SEQ ID NO: 2108511 - DNA, 15 bp, Homo sapiens
tgggtggctgagcaa

SEQ ID NO: 2108512 - DNA, 15 bp, Homo sapiens
gggtggctgagcaag

SEQ ID NO: 2108513 - DNA, 15 bp, Homo sapiens
ggtggctgagcaaga

SEQ ID NO: 2108514 - DNA, 15 bp, Homo sapiens
gtggctgagcaagac

SEQ ID NO: 2108515 - DNA, 15 bp, Homo sapiens
tggctgagcaagaca

SEQ ID NO: 2108516 - DNA, 15 bp, Homo sapiens
ggctgagcaagacac

SEQ ID NO: 2108517 - DNA, 15 bp, Homo sapiens
gctgagcaagacact

SEQ ID NO: 2108518 - DNA, 15 bp, Homo sapiens
ctgagcaagacactg

SEQ ID NO: 2108519 - DNA, 15 bp, Homo sapiens
tgagcaagacactgt

SEQ ID NO: 2108520 - DNA, 15 bp, Homo sapiens
gagcaagacactgtc

SEQ ID NO: 2108521 - DNA, 15 bp, Homo sapiens
agcaagacactgtct

SEQ ID NO: 2108522 - DNA, 15 bp, Homo sapiens
gcaagacactgtcta

SEQ ID NO: 2108523 - DNA, 15 bp, Homo sapiens
caagacactgtctaa

SEQ ID NO: 2108524 - DNA, 15 bp, Homo sapiens
aagacactgtctaaa

SEQ ID NO: 2108525 - DNA, 15 bp, Homo sapiens
agacactgtctaaaa

SEQ ID NO: 2108526 - DNA, 15 bp, Homo sapiens
gacactgtctaaaaa

SEQ ID NO: 2108527 - DNA, 15 bp, Homo sapiens
acactgtctaaaaaa

SEQ ID NO: 2108528 - DNA, 15 bp, Homo sapiens
cactgtctaaaaaaa

SEQ ID NO: 2108529 - DNA, 15 bp, Homo sapiens
actgtctaaaaaaaa

SEQ ID NO: 2108530 - DNA, 15 bp, Homo sapiens
ctgtctaaaaaaaaa

SEQ ID NO: 2108531 - DNA, 15 bp, Homo sapiens
tgtctaaaaaaaaaa

SEQ ID NO: 2108532 - DNA, 15 bp, Homo sapiens
aaaaaaaaagttcat

SEQ ID NO: 2108533 - DNA, 15 bp, Homo sapiens
aaaaaaaagttcata

SEQ ID NO: 2108534 - DNA, 15 bp, Homo sapiens
aaaaaaagttcatat

SEQ ID NO: 2108535 - DNA, 15 bp, Homo sapiens
aaaaaagttcatata

SEQ ID NO: 2108536 - DNA, 15 bp, Homo sapiens
aaaaagttcatatac

SEQ ID NO: 2108537 - DNA, 15 bp, Homo sapiens
aaaagttcatatact

SEQ ID NO: 2108538 - DNA, 15 bp, Homo sapiens
aaagttcatatactg

SEQ ID NO: 2108539 - DNA, 15 bp, Homo sapiens
aagttcatatactga

SEQ ID NO: 2108540 - DNA, 15 bp, Homo sapiens
agttcatatactgaa

SEQ ID NO: 2108541 - DNA, 15 bp, Homo sapiens
gttcatatactgaat

SEQ ID NO: 2108542 - DNA, 15 bp, Homo sapiens
ttcatatactgaata

SEQ ID NO: 2108543 - DNA, 15 bp, Homo sapiens
tcatatactgaataa

SEQ ID NO: 2108544 - DNA, 15 bp, Homo sapiens
catatactgaataac

SEQ ID NO: 2108545 - DNA, 15 bp, Homo sapiens
atatactgaataacc

SEQ ID NO: 2108546 - DNA, 15 bp, Homo sapiens
tatactgaataacca

SEQ ID NO: 2108547 - DNA, 15 bp, Homo sapiens
atactgaataaccat

SEQ ID NO: 2108548 - DNA, 15 bp, Homo sapiens
tactgaataaccatc

SEQ ID NO: 2108549 - DNA, 15 bp, Homo sapiens
actgaataaccatct

SEQ ID NO: 2108550 - DNA, 15 bp, Homo sapiens
ctgaataaccatctg

SEQ ID NO: 2108551 - DNA, 15 bp, Homo sapiens
tgaataaccatctgg

SEQ ID NO: 2108552 - DNA, 15 bp, Homo sapiens
gaataaccatctggg

SEQ ID NO: 2108553 - DNA, 15 bp, Homo sapiens
aataaccatctgggc

SEQ ID NO: 2108554 - DNA, 15 bp, Homo sapiens
ataaccatctgggcc

SEQ ID NO: 2108555 - DNA, 15 bp, Homo sapiens
taaccatctgggccc

SEQ ID NO: 2108556 - DNA, 15 bp, Homo sapiens
aaccatctgggccca

SEQ ID NO: 2108557 - DNA, 15 bp, Homo sapiens
accatctgggcccat

SEQ ID NO: 2108558 - DNA, 15 bp, Homo sapiens
ccatctgggcccata

SEQ ID NO: 2108559 - DNA, 15 bp, Homo sapiens
catctgggcccataa

SEQ ID NO: 2108560 - DNA, 15 bp, Homo sapiens
atctgggcccataac

SEQ ID NO: 2108561 - DNA, 15 bp, Homo sapiens
tctgggcccataaca

SEQ ID NO: 2108562 - DNA, 15 bp, Homo sapiens
ctgggcccataacag

SEQ ID NO: 2108563 - DNA, 15 bp, Homo sapiens
tgggcccataacagc

SEQ ID NO: 2108564 - DNA, 15 bp, Homo sapiens
gggcccataacagct

SEQ ID NO: 2108565 - DNA, 15 bp, Homo sapiens
ggcccataacagctt

SEQ ID NO: 2108566 - DNA, 15 bp, Homo sapiens
gcccataacagctta

SEQ ID NO: 2108567 - DNA, 15 bp, Homo sapiens
cccataacagcttaa

SEQ ID NO: 2108568 - DNA, 15 bp, Homo sapiens
ccataacagcttaag

SEQ ID NO: 2108569 - DNA, 15 bp, Homo sapiens
cataacagcttaaga

SEQ ID NO: 2108570 - DNA, 15 bp, Homo sapiens
ataacagcttaagac

SEQ ID NO: 2108571 - DNA, 15 bp, Homo sapiens
taacagcttaagact

SEQ ID NO: 2108572 - DNA, 15 bp, Homo sapiens
aacagcttaagactt

SEQ ID NO: 2108573 - DNA, 15 bp, Homo sapiens
acagcttaagacttt

SEQ ID NO: 2108574 - DNA, 15 bp, Homo sapiens
cagcttaagactttc

SEQ ID NO: 2108575 - DNA, 15 bp, Homo sapiens
agcttaagactttct

SEQ ID NO: 2108576 - DNA, 15 bp, Homo sapiens
gcttaagactttctg

SEQ ID NO: 2108577 - DNA, 15 bp, Homo sapiens
cttaagactttctgg

SEQ ID NO: 2108578 - DNA, 15 bp, Homo sapiens
ttaagactttctgga

SEQ ID NO: 2108579 - DNA, 15 bp, Homo sapiens
taagactttctggag

SEQ ID NO: 2108580 - DNA, 15 bp, Homo sapiens
aagactttctggaga

SEQ ID NO: 2108581 - DNA, 15 bp, Homo sapiens
agactttctggagaa

SEQ ID NO: 2108582 - DNA, 15 bp, Homo sapiens
gactttctggagaaa

SEQ ID NO: 2108583 - DNA, 15 bp, Homo sapiens
actttctggagaaaa

SEQ ID NO: 2108584 - DNA, 15 bp, Homo sapiens
ctttctggagaaaaa

SEQ ID NO: 2108585 - DNA, 15 bp, Homo sapiens
tttctggagaaaaaa

SEQ ID NO: 2108586 - DNA, 15 bp, Homo sapiens
ttctggagaaaaaaa

SEQ ID NO: 2108587 - DNA, 15 bp, Homo sapiens
tctggagaaaaaaaa

SEQ ID NO: 2108588 - DNA, 15 bp, Homo sapiens
ctggagaaaaaaaaa

SEQ ID NO: 2108589 - DNA, 15 bp, Homo sapiens
tggagaaaaaaaaaa

SEQ ID NO: 2108590 - DNA, 15 bp, Homo sapiens
ggagaaaaaaaaaaa

SEQ ID NO: 2108591 - DNA, 15 bp, Homo sapiens
gagaaaaaaaaaaaa

SEQ ID NO: 2108592 - DNA, 15 bp, Homo sapiens
gaaaaaaaaaaaaac

SEQ ID NO: 2108593 - DNA, 15 bp, Homo sapiens
aaaaaaaaaaaacca

SEQ ID NO: 2108594 - DNA, 15 bp, Homo sapiens
aaaaaaaaaaaccag

SEQ ID NO: 2108595 - DNA, 15 bp, Homo sapiens
aaaaaaaaaaccagt

SEQ ID NO: 2108596 - DNA, 15 bp, Homo sapiens
aaaaaaaaaccagtt

SEQ ID NO: 2108597 - DNA, 15 bp, Homo sapiens
aaaaaaaaccagttt

SEQ ID NO: 2108598 - DNA, 15 bp, Homo sapiens
aaaaaaaccagtttc

SEQ ID NO: 2108599 - DNA, 15 bp, Homo sapiens
aaaaaaccagtttcc

SEQ ID NO: 2108600 - DNA, 15 bp, Homo sapiens
aaaaaccagtttcca

SEQ ID NO: 2108601 - DNA, 15 bp, Homo sapiens
aaaaccagtttccag

SEQ ID NO: 2108602 - DNA, 15 bp, Homo sapiens
aaaccagtttccagt

SEQ ID NO: 2108603 - DNA, 15 bp, Homo sapiens
aaccagtttccagtt

SEQ ID NO: 2108604 - DNA, 15 bp, Homo sapiens
accagtttccagttt

SEQ ID NO: 2108605 - DNA, 15 bp, Homo sapiens
ccagtttccagttta

SEQ ID NO: 2108606 - DNA, 15 bp, Homo sapiens
cagtttccagtttaa

SEQ ID NO: 2108607 - DNA, 15 bp, Homo sapiens
agtttccagtttaat

SEQ ID NO: 2108608 - DNA, 15 bp, Homo sapiens
gtttccagtttaatt

SEQ ID NO: 2108609 - DNA, 15 bp, Homo sapiens
tttccagtttaattt

SEQ ID NO: 2108610 - DNA, 15 bp, Homo sapiens
ttccagtttaatttc

SEQ ID NO: 2108611 - DNA, 15 bp, Homo sapiens
tccagtttaatttcc

SEQ ID NO: 2108612 - DNA, 15 bp, Homo sapiens
ccagtttaatttcca

SEQ ID NO: 2108613 - DNA, 15 bp, Homo sapiens
cagtttaatttccaa

SEQ ID NO: 2108614 - DNA, 15 bp, Homo sapiens
agtttaatttccaac

SEQ ID NO: 2108615 - DNA, 15 bp, Homo sapiens
gtttaatttccaaca

SEQ ID NO: 2108616 - DNA, 15 bp, Homo sapiens
tttaatttccaacaa

SEQ ID NO: 2108617 - DNA, 15 bp, Homo sapiens
ttaatttccaacaaa

SEQ ID NO: 2108618 - DNA, 15 bp, Homo sapiens
taatttccaacaaag

SEQ ID NO: 2108619 - DNA, 15 bp, Homo sapiens
aatttccaacaaagc

SEQ ID NO: 2108620 - DNA, 15 bp, Homo sapiens
atttccaacaaagca

SEQ ID NO: 2108621 - DNA, 15 bp, Homo sapiens
tttccaacaaagcag

SEQ ID NO: 2108622 - DNA, 15 bp, Homo sapiens
ttccaacaaagcagt

SEQ ID NO: 2108623 - DNA, 15 bp, Homo sapiens
tccaacaaagcagta

SEQ ID NO: 2108624 - DNA, 15 bp, Homo sapiens
ccaacaaagcagtag

SEQ ID NO: 2108625 - DNA, 15 bp, Homo sapiens
caacaaagcagtagg

SEQ ID NO: 2108626 - DNA, 15 bp, Homo sapiens
aacaaagcagtagga

SEQ ID NO: 2108627 - DNA, 15 bp, Homo sapiens
acaaagcagtaggaa

SEQ ID NO: 2108628 - DNA, 15 bp, Homo sapiens
caaagcagtaggaac

SEQ ID NO: 2108629 - DNA, 15 bp, Homo sapiens
aaagcagtaggaact

SEQ ID NO: 2108630 - DNA, 15 bp, Homo sapiens
aagcagtaggaactc

SEQ ID NO: 2108631 - DNA, 15 bp, Homo sapiens
agcagtaggaactct

SEQ ID NO: 2108632 - DNA, 15 bp, Homo sapiens
gcagtaggaactctt

SEQ ID NO: 2108633 - DNA, 15 bp, Homo sapiens
cagtaggaactcttg

SEQ ID NO: 2108634 - DNA, 15 bp, Homo sapiens
agtaggaactcttgc

SEQ ID NO: 2108635 - DNA, 15 bp, Homo sapiens
gtaggaactcttgcc

SEQ ID NO: 2108636 - DNA, 15 bp, Homo sapiens
taggaactcttgcct

SEQ ID NO: 2108637 - DNA, 15 bp, Homo sapiens
aggaactcttgccta

SEQ ID NO: 2108638 - DNA, 15 bp, Homo sapiens
ggaactcttgcctat

SEQ ID NO: 2108639 - DNA, 15 bp, Homo sapiens
gaactcttgcctata

SEQ ID NO: 2108640 - DNA, 15 bp, Homo sapiens
aactcttgcctatag

SEQ ID NO: 2108641 - DNA, 15 bp, Homo sapiens
actcttgcctataga

SEQ ID NO: 2108642 - DNA, 15 bp, Homo sapiens
ctcttgcctatagaa

SEQ ID NO: 2108643 - DNA, 15 bp, Homo sapiens
tcttgcctatagaat

SEQ ID NO: 2108644 - DNA, 15 bp, Homo sapiens
cttgcctatagaata

SEQ ID NO: 2108645 - DNA, 15 bp, Homo sapiens
ttgcctatagaatac

SEQ ID NO: 2108646 - DNA, 15 bp, Homo sapiens
tgcctatagaatact

SEQ ID NO: 2108647 - DNA, 15 bp, Homo sapiens
gcctatagaatactg

SEQ ID NO: 2108648 - DNA, 15 bp, Homo sapiens
cctatagaatactgt

SEQ ID NO: 2108649 - DNA, 15 bp, Homo sapiens
ctatagaatactgtg

SEQ ID NO: 2108650 - DNA, 15 bp, Homo sapiens
tatagaatactgtgc

SEQ ID NO: 2108651 - DNA, 15 bp, Homo sapiens
atagaatactgtgct

SEQ ID NO: 2108652 - DNA, 15 bp, Homo sapiens
tagaatactgtgctg

SEQ ID NO: 2108653 - DNA, 15 bp, Homo sapiens
agaatactgtgctgg

SEQ ID NO: 2108654 - DNA, 15 bp, Homo sapiens
gaatactgtgctggg

SEQ ID NO: 2108655 - DNA, 15 bp, Homo sapiens
aatactgtgctgggg

SEQ ID NO: 2108656 - DNA, 15 bp, Homo sapiens
atactgtgctggggg

SEQ ID NO: 2108657 - DNA, 15 bp, Homo sapiens
tactgtgctgggggc

SEQ ID NO: 2108658 - DNA, 15 bp, Homo sapiens
actgtgctgggggct

SEQ ID NO: 2108659 - DNA, 15 bp, Homo sapiens
ctgtgctgggggctg

SEQ ID NO: 2108660 - DNA, 15 bp, Homo sapiens
tgtgctgggggctgg

SEQ ID NO: 2108661 - DNA, 15 bp, Homo sapiens
gtgctgggggctggg

SEQ ID NO: 2108662 - DNA, 15 bp, Homo sapiens
tgctgggggctgggc

SEQ ID NO: 2108663 - DNA, 15 bp, Homo sapiens
gctgggggctgggca

SEQ ID NO: 2108664 - DNA, 15 bp, Homo sapiens
ctgggggctgggcac

SEQ ID NO: 2108665 - DNA, 15 bp, Homo sapiens
tgggggctgggcacg

SEQ ID NO: 2108666 - DNA, 15 bp, Homo sapiens
gggggctgggcacgg

SEQ ID NO: 2108667 - DNA, 15 bp, Homo sapiens
ggggctgggcacggc

SEQ ID NO: 2108668 - DNA, 15 bp, Homo sapiens
gggctgggcacggcg

SEQ ID NO: 2108669 - DNA, 15 bp, Homo sapiens
ggctgggcacggcga

SEQ ID NO: 2108670 - DNA, 15 bp, Homo sapiens
gctgggcacggcgac

SEQ ID NO: 2108671 - DNA, 15 bp, Homo sapiens
ctgggcacggcgact

SEQ ID NO: 2108672 - DNA, 15 bp, Homo sapiens
tgggcacggcgactt

SEQ ID NO: 2108673 - DNA, 15 bp, Homo sapiens
gggcacggcgactta

SEQ ID NO: 2108674 - DNA, 15 bp, Homo sapiens
ggcacggcgacttat

SEQ ID NO: 2108675 - DNA, 15 bp, Homo sapiens
gcacggcgacttatg

SEQ ID NO: 2108676 - DNA, 15 bp, Homo sapiens
cacggcgacttatgc

SEQ ID NO: 2108677 - DNA, 15 bp, Homo sapiens
acggcgacttatgcc

SEQ ID NO: 2108678 - DNA, 15 bp, Homo sapiens
cggcgacttatgccc

SEQ ID NO: 2108679 - DNA, 15 bp, Homo sapiens
ggcgacttatgcccg

SEQ ID NO: 2108680 - DNA, 15 bp, Homo sapiens
gcgacttatgcccgt

SEQ ID NO: 2108681 - DNA, 15 bp, Homo sapiens
cgacttatgcccgta

SEQ ID NO: 2108682 - DNA, 15 bp, Homo sapiens
gacttatgcccgtaa

SEQ ID NO: 2108683 - DNA, 15 bp, Homo sapiens
acttatgcccgtaat

SEQ ID NO: 2108684 - DNA, 15 bp, Homo sapiens
cttatgcccgtaatc

SEQ ID NO: 2108685 - DNA, 15 bp, Homo sapiens
ttatgcccgtaatcc

SEQ ID NO: 2108686 - DNA, 15 bp, Homo sapiens
tatgcccgtaatccc

SEQ ID NO: 2108687 - DNA, 15 bp, Homo sapiens
atgcccgtaatccca

SEQ ID NO: 2108688 - DNA, 15 bp, Homo sapiens
tgcccgtaatcccag

SEQ ID NO: 2108689 - DNA, 15 bp, Homo sapiens
gaggtcaggagttaa

SEQ ID NO: 2108690 - DNA, 15 bp, Homo sapiens
aggtcaggagttaag

SEQ ID NO: 2108691 - DNA, 15 bp, Homo sapiens
ggtcaggagttaaga

SEQ ID NO: 2108692 - DNA, 15 bp, Homo sapiens
gtcaggagttaagag

SEQ ID NO: 2108693 - DNA, 15 bp, Homo sapiens
tcaggagttaagaga

SEQ ID NO: 2108694 - DNA, 15 bp, Homo sapiens
caggagttaagagac

SEQ ID NO: 2108695 - DNA, 15 bp, Homo sapiens
aggagttaagagact

SEQ ID NO: 2108696 - DNA, 15 bp, Homo sapiens
ggagttaagagacta

SEQ ID NO: 2108697 - DNA, 15 bp, Homo sapiens
gagttaagagactag

SEQ ID NO: 2108698 - DNA, 15 bp, Homo sapiens
agttaagagactagc

SEQ ID NO: 2108699 - DNA, 15 bp, Homo sapiens
gttaagagactagcc

SEQ ID NO: 2108700 - DNA, 15 bp, Homo sapiens
ttaagagactagcct

SEQ ID NO: 2108701 - DNA, 15 bp, Homo sapiens
taagagactagcctg

SEQ ID NO: 2108702 - DNA, 15 bp, Homo sapiens
aagagactagcctgg

SEQ ID NO: 2108703 - DNA, 15 bp, Homo sapiens
agagactagcctggc

SEQ ID NO: 2108704 - DNA, 15 bp, Homo sapiens
actagcctggccaaa

SEQ ID NO: 2108705 - DNA, 15 bp, Homo sapiens
ctagcctggccaaaa

SEQ ID NO: 2108706 - DNA, 15 bp, Homo sapiens
tagcctggccaaaat

SEQ ID NO: 2108707 - DNA, 15 bp, Homo sapiens
agcctggccaaaatg

SEQ ID NO: 2108708 - DNA, 15 bp, Homo sapiens
gcctggccaaaatgg

SEQ ID NO: 2108709 - DNA, 15 bp, Homo sapiens
cctggccaaaatggt

SEQ ID NO: 2108710 - DNA, 15 bp, Homo sapiens
ctggccaaaatggtg

SEQ ID NO: 2108711 - DNA, 15 bp, Homo sapiens
tggccaaaatggtga

SEQ ID NO: 2108712 - DNA, 15 bp, Homo sapiens
ggccaaaatggtgaa

SEQ ID NO: 2108713 - DNA, 15 bp, Homo sapiens
gccaaaatggtgaaa

SEQ ID NO: 2108714 - DNA, 15 bp, Homo sapiens
ccaaaatggtgaaac

SEQ ID NO: 2108715 - DNA, 15 bp, Homo sapiens
caaaatggtgaaacc

SEQ ID NO: 2108716 - DNA, 15 bp, Homo sapiens
aaatggtgaaaccct

SEQ ID NO: 2108717 - DNA, 15 bp, Homo sapiens
aatggtgaaaccctc

SEQ ID NO: 2108718 - DNA, 15 bp, Homo sapiens
atggtgaaaccctct

SEQ ID NO: 2108719 - DNA, 15 bp, Homo sapiens
tggtgaaaccctctc

SEQ ID NO: 2108720 - DNA, 15 bp, Homo sapiens
ggtgaaaccctctct

SEQ ID NO: 2108721 - DNA, 15 bp, Homo sapiens
gtgaaaccctctctc

SEQ ID NO: 2108722 - DNA, 15 bp, Homo sapiens
tgaaaccctctctct

SEQ ID NO: 2108723 - DNA, 15 bp, Homo sapiens
gaaaccctctctcta

SEQ ID NO: 2108724 - DNA, 15 bp, Homo sapiens
aaaccctctctctac

SEQ ID NO: 2108725 - DNA, 15 bp, Homo sapiens
aaccctctctctact

SEQ ID NO: 2108726 - DNA, 15 bp, Homo sapiens
accctctctctacta

SEQ ID NO: 2108727 - DNA, 15 bp, Homo sapiens
ccctctctctactaa

SEQ ID NO: 2108728 - DNA, 15 bp, Homo sapiens
cctctctctactaaa

SEQ ID NO: 2108729 - DNA, 15 bp, Homo sapiens
ctctctctactaaat

SEQ ID NO: 2108730 - DNA, 15 bp, Homo sapiens
tctctctactaaatt

SEQ ID NO: 2108731 - DNA, 15 bp, Homo sapiens
ctctctactaaatta

SEQ ID NO: 2108732 - DNA, 15 bp, Homo sapiens
tctctactaaattaa

SEQ ID NO: 2108733 - DNA, 15 bp, Homo sapiens
ctctactaaattaaa

SEQ ID NO: 2108734 - DNA, 15 bp, Homo sapiens
tctactaaattaaat

SEQ ID NO: 2108735 - DNA, 15 bp, Homo sapiens
ctactaaattaaata

SEQ ID NO: 2108736 - DNA, 15 bp, Homo sapiens
tactaaattaaatac

SEQ ID NO: 2108737 - DNA, 15 bp, Homo sapiens
actaaattaaataca

SEQ ID NO: 2108738 - DNA, 15 bp, Homo sapiens
ctaaattaaatacaa

SEQ ID NO: 2108739 - DNA, 15 bp, Homo sapiens
taaattaaatacaaa

SEQ ID NO: 2108740 - DNA, 15 bp, Homo sapiens
aaattaaatacaaaa

SEQ ID NO: 2108741 - DNA, 15 bp, Homo sapiens
aattaaatacaaaaa

SEQ ID NO: 2108742 - DNA, 15 bp, Homo sapiens
attaaatacaaaaat

SEQ ID NO: 2108743 - DNA, 15 bp, Homo sapiens
ttaaatacaaaaatt

SEQ ID NO: 2108744 - DNA, 15 bp, Homo sapiens
taaatacaaaaatta

SEQ ID NO: 2108745 - DNA, 15 bp, Homo sapiens
tacaaaaattagcct

SEQ ID NO: 2108746 - DNA, 15 bp, Homo sapiens
caaaaattagcctgc

SEQ ID NO: 2108747 - DNA, 15 bp, Homo sapiens
aaaaattagcctgct

SEQ ID NO: 2108748 - DNA, 15 bp, Homo sapiens
aaaattagcctgctg

SEQ ID NO: 2108749 - DNA, 15 bp, Homo sapiens
aaattagcctgctgt

SEQ ID NO: 2108750 - DNA, 15 bp, Homo sapiens
aattagcctgctgtc

SEQ ID NO: 2108751 - DNA, 15 bp, Homo sapiens
attagcctgctgtcg

SEQ ID NO: 2108752 - DNA, 15 bp, Homo sapiens
ttagcctgctgtcgt

SEQ ID NO: 2108753 - DNA, 15 bp, Homo sapiens
tagcctgctgtcgta

SEQ ID NO: 2108754 - DNA, 15 bp, Homo sapiens
agcctgctgtcgtac

SEQ ID NO: 2108755 - DNA, 15 bp, Homo sapiens
gcctgctgtcgtact

SEQ ID NO: 2108756 - DNA, 15 bp, Homo sapiens
cctgctgtcgtacta

SEQ ID NO: 2108757 - DNA, 15 bp, Homo sapiens
ctgctgtcgtactac

SEQ ID NO: 2108758 - DNA, 15 bp, Homo sapiens
tgctgtcgtactaca

SEQ ID NO: 2108759 - DNA, 15 bp, Homo sapiens
gctgtcgtactacac

SEQ ID NO: 2108760 - DNA, 15 bp, Homo sapiens
ctgtcgtactacacg

SEQ ID NO: 2108761 - DNA, 15 bp, Homo sapiens
tgtcgtactacacgc

SEQ ID NO: 2108762 - DNA, 15 bp, Homo sapiens
gtcgtactacacgcc

SEQ ID NO: 2108763 - DNA, 15 bp, Homo sapiens
tcgtactacacgcct

SEQ ID NO: 2108764 - DNA, 15 bp, Homo sapiens
cgtactacacgcctt

SEQ ID NO: 2108765 - DNA, 15 bp, Homo sapiens
gtactacacgccttt

SEQ ID NO: 2108766 - DNA, 15 bp, Homo sapiens
tactacacgccttta

SEQ ID NO: 2108767 - DNA, 15 bp, Homo sapiens
actacacgcctttaa

SEQ ID NO: 2108768 - DNA, 15 bp, Homo sapiens
ctacacgcctttaat

SEQ ID NO: 2108769 - DNA, 15 bp, Homo sapiens
tacacgcctttaatc

SEQ ID NO: 2108770 - DNA, 15 bp, Homo sapiens
acacgcctttaatcc

SEQ ID NO: 2108771 - DNA, 15 bp, Homo sapiens
cacgcctttaatccc

SEQ ID NO: 2108772 - DNA, 15 bp, Homo sapiens
acgcctttaatccca

SEQ ID NO: 2108773 - DNA, 15 bp, Homo sapiens
cgcctttaatcccag

SEQ ID NO: 2108774 - DNA, 15 bp, Homo sapiens
gcctttaatcccagc

SEQ ID NO: 2108775 - DNA, 15 bp, Homo sapiens
cctttaatcccagct

SEQ ID NO: 2108776 - DNA, 15 bp, Homo sapiens
ctttaatcccagcta

SEQ ID NO: 2108777 - DNA, 15 bp, Homo sapiens
tttaatcccagctat

SEQ ID NO: 2108778 - DNA, 15 bp, Homo sapiens
ttaatcccagctatt

SEQ ID NO: 2108779 - DNA, 15 bp, Homo sapiens
aatcccagctattcg

SEQ ID NO: 2108780 - DNA, 15 bp, Homo sapiens
atcccagctattcgg

SEQ ID NO: 2108781 - DNA, 15 bp, Homo sapiens
tcccagctattcggg

SEQ ID NO: 2108782 - DNA, 15 bp, Homo sapiens
cccagctattcggga

SEQ ID NO: 2108783 - DNA, 15 bp, Homo sapiens
ccagctattcgggag

SEQ ID NO: 2108784 - DNA, 15 bp, Homo sapiens
cagctattcgggagg

SEQ ID NO: 2108785 - DNA, 15 bp, Homo sapiens
agctattcgggaggc

SEQ ID NO: 2108786 - DNA, 15 bp, Homo sapiens
gctattcgggaggct

SEQ ID NO: 2108787 - DNA, 15 bp, Homo sapiens
ctattcgggaggctg

SEQ ID NO: 2108788 - DNA, 15 bp, Homo sapiens
tattcgggaggctga

SEQ ID NO: 2108789 - DNA, 15 bp, Homo sapiens
attcgggaggctgag

SEQ ID NO: 2108790 - DNA, 15 bp, Homo sapiens
ttcgggaggctgagg

SEQ ID NO: 2108791 - DNA, 15 bp, Homo sapiens
gggaggctgaggcac

SEQ ID NO: 2108792 - DNA, 15 bp, Homo sapiens
aggctgaggcacaat

SEQ ID NO: 2108793 - DNA, 15 bp, Homo sapiens
ggctgaggcacaatt

SEQ ID NO: 2108794 - DNA, 15 bp, Homo sapiens
gctgaggcacaattg

SEQ ID NO: 2108795 - DNA, 15 bp, Homo sapiens
ctgaggcacaattgc

SEQ ID NO: 2108796 - DNA, 15 bp, Homo sapiens
tgaggcacaattgct

SEQ ID NO: 2108797 - DNA, 15 bp, Homo sapiens
gaggcacaattgctt

SEQ ID NO: 2108798 - DNA, 15 bp, Homo sapiens
aggcacaattgcttg

SEQ ID NO: 2108799 - DNA, 15 bp, Homo sapiens
ggcacaattgcttga

SEQ ID NO: 2108800 - DNA, 15 bp, Homo sapiens
gcacaattgcttgaa

SEQ ID NO: 2108801 - DNA, 15 bp, Homo sapiens
cacaattgcttgaac

SEQ ID NO: 2108802 - DNA, 15 bp, Homo sapiens
acaattgcttgaacc

SEQ ID NO: 2108803 - DNA, 15 bp, Homo sapiens
caattgcttgaacct

SEQ ID NO: 2108804 - DNA, 15 bp, Homo sapiens
aattgcttgaacctg

SEQ ID NO: 2108805 - DNA, 15 bp, Homo sapiens
attgcttgaacctgg

SEQ ID NO: 2108806 - DNA, 15 bp, Homo sapiens
ttgcttgaacctggg

SEQ ID NO: 2108807 - DNA, 15 bp, Homo sapiens
tgcttgaacctgggt

SEQ ID NO: 2108808 - DNA, 15 bp, Homo sapiens
gcttgaacctgggtg

SEQ ID NO: 2108809 - DNA, 15 bp, Homo sapiens
cttgaacctgggtgg

SEQ ID NO: 2108810 - DNA, 15 bp, Homo sapiens
ttgaacctgggtggc

SEQ ID NO: 2108811 - DNA, 15 bp, Homo sapiens
tgaacctgggtggca

SEQ ID NO: 2108812 - DNA, 15 bp, Homo sapiens
gaacctgggtggcag

SEQ ID NO: 2108813 - DNA, 15 bp, Homo sapiens
aacctgggtggcaga

SEQ ID NO: 2108814 - DNA, 15 bp, Homo sapiens
acctgggtggcagag

SEQ ID NO: 2108815 - DNA, 15 bp, Homo sapiens
cctgggtggcagagg

SEQ ID NO: 2108816 - DNA, 15 bp, Homo sapiens
ctgggtggcagaggt

SEQ ID NO: 2108817 - DNA, 15 bp, Homo sapiens
tgggtggcagaggtt

SEQ ID NO: 2108818 - DNA, 15 bp, Homo sapiens
gggtggcagaggttg

SEQ ID NO: 2108819 - DNA, 15 bp, Homo sapiens
ttgcagtgagccgat

SEQ ID NO: 2108820 - DNA, 15 bp, Homo sapiens
tgcagtgagccgatc

SEQ ID NO: 2108821 - DNA, 15 bp, Homo sapiens
gcagtgagccgatca

SEQ ID NO: 2108822 - DNA, 15 bp, Homo sapiens
cagtgagccgatcac

SEQ ID NO: 2108823 - DNA, 15 bp, Homo sapiens
agtgagccgatcaca

SEQ ID NO: 2108824 - DNA, 15 bp, Homo sapiens
gtgagccgatcacac

SEQ ID NO: 2108825 - DNA, 15 bp, Homo sapiens
tgagccgatcacacc

SEQ ID NO: 2108826 - DNA, 15 bp, Homo sapiens
gagccgatcacacca

SEQ ID NO: 2108827 - DNA, 15 bp, Homo sapiens
agccgatcacaccac

SEQ ID NO: 2108828 - DNA, 15 bp, Homo sapiens
gccgatcacaccacc

SEQ ID NO: 2108829 - DNA, 15 bp, Homo sapiens
ccgatcacaccaccg

SEQ ID NO: 2108830 - DNA, 15 bp, Homo sapiens
cgatcacaccaccgc

SEQ ID NO: 2108831 - DNA, 15 bp, Homo sapiens
gatcacaccaccgca

SEQ ID NO: 2108832 - DNA, 15 bp, Homo sapiens
atcacaccaccgcac

SEQ ID NO: 2108833 - DNA, 15 bp, Homo sapiens
tcacaccaccgcact

SEQ ID NO: 2108834 - DNA, 15 bp, Homo sapiens
cacaccaccgcactc

SEQ ID NO: 2108835 - DNA, 15 bp, Homo sapiens
acaccaccgcactcc

SEQ ID NO: 2108836 - DNA, 15 bp, Homo sapiens
caccaccgcactcca

SEQ ID NO: 2108837 - DNA, 15 bp, Homo sapiens
accaccgcactccag

SEQ ID NO: 2108838 - DNA, 15 bp, Homo sapiens
cactccagcctggag

SEQ ID NO: 2108839 - DNA, 15 bp, Homo sapiens
actccagcctggaga

SEQ ID NO: 2108840 - DNA, 15 bp, Homo sapiens
ctccagcctggagac

SEQ ID NO: 2108841 - DNA, 15 bp, Homo sapiens
tccagcctggagaca

SEQ ID NO: 2108842 - DNA, 15 bp, Homo sapiens
ccagcctggagacag

SEQ ID NO: 2108843 - DNA, 15 bp, Homo sapiens
cagcctggagacaga

SEQ ID NO: 2108844 - DNA, 15 bp, Homo sapiens
agcctggagacagag

SEQ ID NO: 2108845 - DNA, 15 bp, Homo sapiens
gcctggagacagagc

SEQ ID NO: 2108846 - DNA, 15 bp, Homo sapiens
cctggagacagagcg

SEQ ID NO: 2108847 - DNA, 15 bp, Homo sapiens
ctggagacagagcga

SEQ ID NO: 2108848 - DNA, 15 bp, Homo sapiens
tggagacagagcgag

SEQ ID NO: 2108849 - DNA, 15 bp, Homo sapiens
ggagacagagcgaga

SEQ ID NO: 2108850 - DNA, 15 bp, Homo sapiens
gagacagagcgagac

SEQ ID NO: 2108851 - DNA, 15 bp, Homo sapiens
agacagagcgagact

SEQ ID NO: 2108852 - DNA, 15 bp, Homo sapiens
aaaaaaaaaaatact

SEQ ID NO: 2108853 - DNA, 15 bp, Homo sapiens
aaaaaaaaaatactg

SEQ ID NO: 2108854 - DNA, 15 bp, Homo sapiens
aaaaaaaaatactgt

SEQ ID NO: 2108855 - DNA, 15 bp, Homo sapiens
aaaaaaaatactgtg

SEQ ID NO: 2108856 - DNA, 15 bp, Homo sapiens
aaaaaaatactgtgc

SEQ ID NO: 2108857 - DNA, 15 bp, Homo sapiens
aaaaaatactgtgct

SEQ ID NO: 2108858 - DNA, 15 bp, Homo sapiens
aaaaatactgtgctg

SEQ ID NO: 2108859 - DNA, 15 bp, Homo sapiens
aaaatactgtgctgg

SEQ ID NO: 2108860 - DNA, 15 bp, Homo sapiens
aaatactgtgctggt

SEQ ID NO: 2108861 - DNA, 15 bp, Homo sapiens
aatactgtgctggtt

SEQ ID NO: 2108862 - DNA, 15 bp, Homo sapiens
atactgtgctggttc

SEQ ID NO: 2108863 - DNA, 15 bp, Homo sapiens
tactgtgctggttca

SEQ ID NO: 2108864 - DNA, 15 bp, Homo sapiens
actgtgctggttcat

SEQ ID NO: 2108865 - DNA, 15 bp, Homo sapiens
ctgtgctggttcatt

SEQ ID NO: 2108866 - DNA, 15 bp, Homo sapiens
tgtgctggttcattt

SEQ ID NO: 2108867 - DNA, 15 bp, Homo sapiens
gtgctggttcatttg

SEQ ID NO: 2108868 - DNA, 15 bp, Homo sapiens
tgctggttcatttgc

SEQ ID NO: 2108869 - DNA, 15 bp, Homo sapiens
gctggttcatttgcc

SEQ ID NO: 2108870 - DNA, 15 bp, Homo sapiens
ctggttcatttgcct

SEQ ID NO: 2108871 - DNA, 15 bp, Homo sapiens
tggttcatttgccta

SEQ ID NO: 2108872 - DNA, 15 bp, Homo sapiens
ggttcatttgcctat

SEQ ID NO: 2108873 - DNA, 15 bp, Homo sapiens
gttcatttgcctata

SEQ ID NO: 2108874 - DNA, 15 bp, Homo sapiens
ttcatttgcctataa

SEQ ID NO: 2108875 - DNA, 15 bp, Homo sapiens
tcatttgcctataaa

SEQ ID NO: 2108876 - DNA, 15 bp, Homo sapiens
catttgcctataaag

SEQ ID NO: 2108877 - DNA, 15 bp, Homo sapiens
atttgcctataaagt

SEQ ID NO: 2108878 - DNA, 15 bp, Homo sapiens
tttgcctataaagtc

SEQ ID NO: 2108879 - DNA, 15 bp, Homo sapiens
ttgcctataaagtca

SEQ ID NO: 2108880 - DNA, 15 bp, Homo sapiens
tgcctataaagtcac

SEQ ID NO: 2108881 - DNA, 15 bp, Homo sapiens
gcctataaagtcacc

SEQ ID NO: 2108882 - DNA, 15 bp, Homo sapiens
cctataaagtcacca

SEQ ID NO: 2108883 - DNA, 15 bp, Homo sapiens
ctataaagtcaccaa

SEQ ID NO: 2108884 - DNA, 15 bp, Homo sapiens
tataaagtcaccaat

SEQ ID NO: 2108885 - DNA, 15 bp, Homo sapiens
ataaagtcaccaatc

SEQ ID NO: 2108886 - DNA, 15 bp, Homo sapiens
taaagtcaccaatct

SEQ ID NO: 2108887 - DNA, 15 bp, Homo sapiens
aaagtcaccaatcta

SEQ ID NO: 2108888 - DNA, 15 bp, Homo sapiens
aagtcaccaatctaa

SEQ ID NO: 2108889 - DNA, 15 bp, Homo sapiens
agtcaccaatctaat

SEQ ID NO: 2108890 - DNA, 15 bp, Homo sapiens
gtcaccaatctaatg

SEQ ID NO: 2108891 - DNA, 15 bp, Homo sapiens
tcaccaatctaatgt

SEQ ID NO: 2108892 - DNA, 15 bp, Homo sapiens
caccaatctaatgtt

SEQ ID NO: 2108893 - DNA, 15 bp, Homo sapiens
accaatctaatgttt

SEQ ID NO: 2108894 - DNA, 15 bp, Homo sapiens
ccaatctaatgtttg

SEQ ID NO: 2108895 - DNA, 15 bp, Homo sapiens
caatctaatgtttgg

SEQ ID NO: 2108896 - DNA, 15 bp, Homo sapiens
aatctaatgtttggg

SEQ ID NO: 2108897 - DNA, 15 bp, Homo sapiens
atctaatgtttgggt

SEQ ID NO: 2108898 - DNA, 15 bp, Homo sapiens
tctaatgtttgggta

SEQ ID NO: 2108899 - DNA, 15 bp, Homo sapiens
ctaatgtttgggtat

SEQ ID NO: 2108900 - DNA, 15 bp, Homo sapiens
taatgtttgggtatt

SEQ ID NO: 2108901 - DNA, 15 bp, Homo sapiens
aatgtttgggtattt

SEQ ID NO: 2108902 - DNA, 15 bp, Homo sapiens
atgtttgggtatttg

SEQ ID NO: 2108903 - DNA, 15 bp, Homo sapiens
tgtttgggtatttga

SEQ ID NO: 2108904 - DNA, 15 bp, Homo sapiens
gtttgggtatttgat

SEQ ID NO: 2108905 - DNA, 15 bp, Homo sapiens
tttgggtatttgatc

SEQ ID NO: 2108906 - DNA, 15 bp, Homo sapiens
ttgggtatttgatca

SEQ ID NO: 2108907 - DNA, 15 bp, Homo sapiens
tgggtatttgatcat

SEQ ID NO: 2108908 - DNA, 15 bp, Homo sapiens
gggtatttgatcatt

SEQ ID NO: 2108909 - DNA, 15 bp, Homo sapiens
ggtatttgatcattc

SEQ ID NO: 2108910 - DNA, 15 bp, Homo sapiens
gtatttgatcattca

SEQ ID NO: 2108911 - DNA, 15 bp, Homo sapiens
tatttgatcattcag

SEQ ID NO: 2108912 - DNA, 15 bp, Homo sapiens
atttgatcattcaga

SEQ ID NO: 2108913 - DNA, 15 bp, Homo sapiens
tttgatcattcagaa

SEQ ID NO: 2108914 - DNA, 15 bp, Homo sapiens
ttgatcattcagaat

SEQ ID NO: 2108915 - DNA, 15 bp, Homo sapiens
tgatcattcagaatt

SEQ ID NO: 2108916 - DNA, 15 bp, Homo sapiens
gatcattcagaattc

SEQ ID NO: 2108917 - DNA, 15 bp, Homo sapiens
atcattcagaattct

SEQ ID NO: 2108918 - DNA, 15 bp, Homo sapiens
tcattcagaattcta

SEQ ID NO: 2108919 - DNA, 15 bp, Homo sapiens
cattcagaattctag

SEQ ID NO: 2108920 - DNA, 15 bp, Homo sapiens
attcagaattctaga

SEQ ID NO: 2108921 - DNA, 15 bp, Homo sapiens
ttcagaattctagaa

SEQ ID NO: 2108922 - DNA, 15 bp, Homo sapiens
tcagaattctagaaa

SEQ ID NO: 2108923 - DNA, 15 bp, Homo sapiens
cagaattctagaaac

SEQ ID NO: 2108924 - DNA, 15 bp, Homo sapiens
agaattctagaaaca

SEQ ID NO: 2108925 - DNA, 15 bp, Homo sapiens
gaattctagaaacac

SEQ ID NO: 2108926 - DNA, 15 bp, Homo sapiens
aattctagaaacact

SEQ ID NO: 2108927 - DNA, 15 bp, Homo sapiens
attctagaaacactg

SEQ ID NO: 2108928 - DNA, 15 bp, Homo sapiens
ttctagaaacactga

SEQ ID NO: 2108929 - DNA, 15 bp, Homo sapiens
tctagaaacactgaa

SEQ ID NO: 2108930 - DNA, 15 bp, Homo sapiens
ctagaaacactgaag

SEQ ID NO: 2108931 - DNA, 15 bp, Homo sapiens
tagaaacactgaaga

SEQ ID NO: 2108932 - DNA, 15 bp, Homo sapiens
agaaacactgaagat

SEQ ID NO: 2108933 - DNA, 15 bp, Homo sapiens
gaaacactgaagatc

SEQ ID NO: 2108934 - DNA, 15 bp, Homo sapiens
aaacactgaagatcc

SEQ ID NO: 2108935 - DNA, 15 bp, Homo sapiens
aacactgaagatccc

SEQ ID NO: 2108936 - DNA, 15 bp, Homo sapiens
acactgaagatccct

SEQ ID NO: 2108937 - DNA, 15 bp, Homo sapiens
cactgaagatccctt

SEQ ID NO: 2108938 - DNA, 15 bp, Homo sapiens
actgaagatcccttc

SEQ ID NO: 2108939 - DNA, 15 bp, Homo sapiens
ctgaagatcccttca

SEQ ID NO: 2108940 - DNA, 15 bp, Homo sapiens
tgaagatcccttcac

SEQ ID NO: 2108941 - DNA, 15 bp, Homo sapiens
gaagatcccttcacc

SEQ ID NO: 2108942 - DNA, 15 bp, Homo sapiens
aagatcccttcacct

SEQ ID NO: 2108943 - DNA, 15 bp, Homo sapiens
agatcccttcaccta

SEQ ID NO: 2108944 - DNA, 15 bp, Homo sapiens
gatcccttcacctac

SEQ ID NO: 2108945 - DNA, 15 bp, Homo sapiens
atcccttcacctact

SEQ ID NO: 2108946 - DNA, 15 bp, Homo sapiens
tcccttcacctactc

SEQ ID NO: 2108947 - DNA, 15 bp, Homo sapiens
cccttcacctactca

SEQ ID NO: 2108948 - DNA, 15 bp, Homo sapiens
ccttcacctactcag

SEQ ID NO: 2108949 - DNA, 15 bp, Homo sapiens
cttcacctactcagg

SEQ ID NO: 2108950 - DNA, 15 bp, Homo sapiens
ttcacctactcaggg

SEQ ID NO: 2108951 - DNA, 15 bp, Homo sapiens
tcacctactcagggt

SEQ ID NO: 2108952 - DNA, 15 bp, Homo sapiens
cacctactcagggtc

SEQ ID NO: 2108953 - DNA, 15 bp, Homo sapiens
acctactcagggtct

SEQ ID NO: 2108954 - DNA, 15 bp, Homo sapiens
cctactcagggtctg

SEQ ID NO: 2108955 - DNA, 15 bp, Homo sapiens
ctactcagggtctgg

SEQ ID NO: 2108956 - DNA, 15 bp, Homo sapiens
tactcagggtctggg

SEQ ID NO: 2108957 - DNA, 15 bp, Homo sapiens
actcagggtctgggc

SEQ ID NO: 2108958 - DNA, 15 bp, Homo sapiens
ctcagggtctgggcc

SEQ ID NO: 2108959 - DNA, 15 bp, Homo sapiens
tcagggtctgggcct

SEQ ID NO: 2108960 - DNA, 15 bp, Homo sapiens
cagggtctgggcctc

SEQ ID NO: 2108961 - DNA, 15 bp, Homo sapiens
agggtctgggcctct

SEQ ID NO: 2108962 - DNA, 15 bp, Homo sapiens
gggtctgggcctctt

SEQ ID NO: 2108963 - DNA, 15 bp, Homo sapiens
ggtctgggcctcttt

SEQ ID NO: 2108964 - DNA, 15 bp, Homo sapiens
gtctgggcctctttc

SEQ ID NO: 2108965 - DNA, 15 bp, Homo sapiens
tctgggcctctttca

SEQ ID NO: 2108966 - DNA, 15 bp, Homo sapiens
ctgggcctctttcat

SEQ ID NO: 2108967 - DNA, 15 bp, Homo sapiens
tgggcctctttcatg

SEQ ID NO: 2108968 - DNA, 15 bp, Homo sapiens
gggcctctttcatga

SEQ ID NO: 2108969 - DNA, 15 bp, Homo sapiens
ggcctctttcatgaa

SEQ ID NO: 2108970 - DNA, 15 bp, Homo sapiens
gcctctttcatgaat

SEQ ID NO: 2108971 - DNA, 15 bp, Homo sapiens
cctctttcatgaatg

SEQ ID NO: 2108972 - DNA, 15 bp, Homo sapiens
ctctttcatgaatgc

SEQ ID NO: 2108973 - DNA, 15 bp, Homo sapiens
tctttcatgaatgct

SEQ ID NO: 2108974 - DNA, 15 bp, Homo sapiens
ctttcatgaatgctt

SEQ ID NO: 2108975 - DNA, 15 bp, Homo sapiens
tttcatgaatgctta

SEQ ID NO: 2108976 - DNA, 15 bp, Homo sapiens
ttcatgaatgcttaa

SEQ ID NO: 2108977 - DNA, 15 bp, Homo sapiens
tcatgaatgcttaat

SEQ ID NO: 2108978 - DNA, 15 bp, Homo sapiens
catgaatgcttaatt

SEQ ID NO: 2108979 - DNA, 15 bp, Homo sapiens
atgaatgcttaattc

SEQ ID NO: 2108980 - DNA, 15 bp, Homo sapiens
tgaatgcttaattcc

SEQ ID NO: 2108981 - DNA, 15 bp, Homo sapiens
gaatgcttaattccc

SEQ ID NO: 2108982 - DNA, 15 bp, Homo sapiens
aatgcttaattccca

SEQ ID NO: 2108983 - DNA, 15 bp, Homo sapiens
atgcttaattcccac

SEQ ID NO: 2108984 - DNA, 15 bp, Homo sapiens
tgcttaattcccaca

SEQ ID NO: 2108985 - DNA, 15 bp, Homo sapiens
gcttaattcccacag

SEQ ID NO: 2108986 - DNA, 15 bp, Homo sapiens
cttaattcccacagc

SEQ ID NO: 2108987 - DNA, 15 bp, Homo sapiens
ttaattcccacagcc

SEQ ID NO: 2108988 - DNA, 15 bp, Homo sapiens
taattcccacagcct

SEQ ID NO: 2108989 - DNA, 15 bp, Homo sapiens
aattcccacagcctt

SEQ ID NO: 2108990 - DNA, 15 bp, Homo sapiens
attcccacagcctta

SEQ ID NO: 2108991 - DNA, 15 bp, Homo sapiens
ttcccacagccttac

SEQ ID NO: 2108992 - DNA, 15 bp, Homo sapiens
tcccacagccttaca

SEQ ID NO: 2108993 - DNA, 15 bp, Homo sapiens
cccacagccttacag

SEQ ID NO: 2108994 - DNA, 15 bp, Homo sapiens
ccacagccttacagt

SEQ ID NO: 2108995 - DNA, 15 bp, Homo sapiens
cacagccttacagtt

SEQ ID NO: 2108996 - DNA, 15 bp, Homo sapiens
acagccttacagttt

SEQ ID NO: 2108997 - DNA, 15 bp, Homo sapiens
cagccttacagttta

SEQ ID NO: 2108998 - DNA, 15 bp, Homo sapiens
agccttacagtttat

SEQ ID NO: 2108999 - DNA, 15 bp, Homo sapiens
gccttacagtttata

SEQ ID NO: 2109000 - DNA, 15 bp, Homo sapiens
ccttacagtttatac

SEQ ID NO: 2109001 - DNA, 15 bp, Homo sapiens
cttacagtttatacc

SEQ ID NO: 2109002 - DNA, 15 bp, Homo sapiens
ttacagtttataccc

SEQ ID NO: 2109003 - DNA, 15 bp, Homo sapiens
tacagtttataccct

SEQ ID NO: 2109004 - DNA, 15 bp, Homo sapiens
acagtttataccctt

SEQ ID NO: 2109005 - DNA, 15 bp, Homo sapiens
cagtttatacccttc

SEQ ID NO: 2109006 - DNA, 15 bp, Homo sapiens
agtttatacccttct

SEQ ID NO: 2109007 - DNA, 15 bp, Homo sapiens
gtttatacccttctc

SEQ ID NO: 2109008 - DNA, 15 bp, Homo sapiens
tttatacccttctcc

SEQ ID NO: 2109009 - DNA, 15 bp, Homo sapiens
ttatacccttctcct

SEQ ID NO: 2109010 - DNA, 15 bp, Homo sapiens
tatacccttctcctc

SEQ ID NO: 2109011 - DNA, 15 bp, Homo sapiens
atacccttctcctct

SEQ ID NO: 2109012 - DNA, 15 bp, Homo sapiens
tacccttctcctctc

SEQ ID NO: 2109013 - DNA, 15 bp, Homo sapiens
cccttctcctctccc

SEQ ID NO: 2109014 - DNA, 15 bp, Homo sapiens
ccttctcctctccca

SEQ ID NO: 2109015 - DNA, 15 bp, Homo sapiens
cttctcctctcccac

SEQ ID NO: 2109016 - DNA, 15 bp, Homo sapiens
ttctcctctcccact

SEQ ID NO: 2109017 - DNA, 15 bp, Homo sapiens
tctcctctcccactt

SEQ ID NO: 2109018 - DNA, 15 bp, Homo sapiens
ctcctctcccacttt

SEQ ID NO: 2109019 - DNA, 15 bp, Homo sapiens
tcctctcccactttt

SEQ ID NO: 2109020 - DNA, 15 bp, Homo sapiens
cctctcccacttttg

SEQ ID NO: 2109021 - DNA, 15 bp, Homo sapiens
ctctcccacttttga

SEQ ID NO: 2109022 - DNA, 15 bp, Homo sapiens
tctcccacttttgat

SEQ ID NO: 2109023 - DNA, 15 bp, Homo sapiens
ctcccacttttgatc

SEQ ID NO: 2109024 - DNA, 15 bp, Homo sapiens
tcccacttttgatcc

SEQ ID NO: 2109025 - DNA, 15 bp, Homo sapiens
ccacttttgatcctc

SEQ ID NO: 2109026 - DNA, 15 bp, Homo sapiens
cacttttgatcctca

SEQ ID NO: 2109027 - DNA, 15 bp, Homo sapiens
acttttgatcctcaa

SEQ ID NO: 2109028 - DNA, 15 bp, Homo sapiens
cttttgatcctcaag

SEQ ID NO: 2109029 - DNA, 15 bp, Homo sapiens
ttttgatcctcaagt

SEQ ID NO: 2109030 - DNA, 15 bp, Homo sapiens
tttgatcctcaagtt

SEQ ID NO: 2109031 - DNA, 15 bp, Homo sapiens
ttgatcctcaagttt

SEQ ID NO: 2109032 - DNA, 15 bp, Homo sapiens
tgatcctcaagtttt

SEQ ID NO: 2109033 - DNA, 15 bp, Homo sapiens
gatcctcaagttttt

SEQ ID NO: 2109034 - DNA, 15 bp, Homo sapiens
atcctcaagtttttt

SEQ ID NO: 2109035 - DNA, 15 bp, Homo sapiens
tcctcaagttttttg

SEQ ID NO: 2109036 - DNA, 15 bp, Homo sapiens
cctcaagttttttgc

SEQ ID NO: 2109037 - DNA, 15 bp, Homo sapiens
ctcaagttttttgct

SEQ ID NO: 2109038 - DNA, 15 bp, Homo sapiens
tcaagttttttgctt

SEQ ID NO: 2109039 - DNA, 15 bp, Homo sapiens
caagttttttgcttc

SEQ ID NO: 2109040 - DNA, 15 bp, Homo sapiens
aagttttttgcttct

SEQ ID NO: 2109041 - DNA, 15 bp, Homo sapiens
agttttttgcttctc

SEQ ID NO: 2109042 - DNA, 15 bp, Homo sapiens
gttttttgcttctca

SEQ ID NO: 2109043 - DNA, 15 bp, Homo sapiens
ttttttgcttctcac

SEQ ID NO: 2109044 - DNA, 15 bp, Homo sapiens
tttttgcttctcaca

SEQ ID NO: 2109045 - DNA, 15 bp, Homo sapiens
ttttgcttctcacat

SEQ ID NO: 2109046 - DNA, 15 bp, Homo sapiens
tttgcttctcacatt

SEQ ID NO: 2109047 - DNA, 15 bp, Homo sapiens
ttgcttctcacattt

SEQ ID NO: 2109048 - DNA, 15 bp, Homo sapiens
tgcttctcacatttt

SEQ ID NO: 2109049 - DNA, 15 bp, Homo sapiens
gcttctcacattttt

SEQ ID NO: 2109050 - DNA, 15 bp, Homo sapiens
cttctcacatttttt

SEQ ID NO: 2109051 - DNA, 15 bp, Homo sapiens
ttctcacatttttta

SEQ ID NO: 2109052 - DNA, 15 bp, Homo sapiens
tctcacattttttac

SEQ ID NO: 2109053 - DNA, 15 bp, Homo sapiens
ctcacattttttact

SEQ ID NO: 2109054 - DNA, 15 bp, Homo sapiens
tcacattttttactg

SEQ ID NO: 2109055 - DNA, 15 bp, Homo sapiens
cacattttttactgg

SEQ ID NO: 2109056 - DNA, 15 bp, Homo sapiens
acattttttactggg

SEQ ID NO: 2109057 - DNA, 15 bp, Homo sapiens
cattttttactgggt

SEQ ID NO: 2109058 - DNA, 15 bp, Homo sapiens
attttttactgggtt

SEQ ID NO: 2109059 - DNA, 15 bp, Homo sapiens
ttttttactgggttt

SEQ ID NO: 2109060 - DNA, 15 bp, Homo sapiens
tttttactgggtttg

SEQ ID NO: 2109061 - DNA, 15 bp, Homo sapiens
ttttactgggtttgt

SEQ ID NO: 2109062 - DNA, 15 bp, Homo sapiens
tttactgggtttgtg

SEQ ID NO: 2109063 - DNA, 15 bp, Homo sapiens
ttactgggtttgtgc

SEQ ID NO: 2109064 - DNA, 15 bp, Homo sapiens
tactgggtttgtgct

SEQ ID NO: 2109065 - DNA, 15 bp, Homo sapiens
actgggtttgtgctt

SEQ ID NO: 2109066 - DNA, 15 bp, Homo sapiens
ctgggtttgtgcttc

SEQ ID NO: 2109067 - DNA, 15 bp, Homo sapiens
tgggtttgtgcttct

SEQ ID NO: 2109068 - DNA, 15 bp, Homo sapiens
gggtttgtgcttctc

SEQ ID NO: 2109069 - DNA, 15 bp, Homo sapiens
ggtttgtgcttctca

SEQ ID NO: 2109070 - DNA, 15 bp, Homo sapiens
gtttgtgcttctcag

SEQ ID NO: 2109071 - DNA, 15 bp, Homo sapiens
tttgtgcttctcagt

SEQ ID NO: 2109072 - DNA, 15 bp, Homo sapiens
ttgtgcttctcagta

SEQ ID NO: 2109073 - DNA, 15 bp, Homo sapiens
tgtgcttctcagtat

SEQ ID NO: 2109074 - DNA, 15 bp, Homo sapiens
gtgcttctcagtatc

SEQ ID NO: 2109075 - DNA, 15 bp, Homo sapiens
tgcttctcagtatcc

SEQ ID NO: 2109076 - DNA, 15 bp, Homo sapiens
gcttctcagtatcct

SEQ ID NO: 2109077 - DNA, 15 bp, Homo sapiens
cttctcagtatcctt

SEQ ID NO: 2109078 - DNA, 15 bp, Homo sapiens
ttctcagtatccttg

SEQ ID NO: 2109079 - DNA, 15 bp, Homo sapiens
tctcagtatccttga

SEQ ID NO: 2109080 - DNA, 15 bp, Homo sapiens
ctcagtatccttgac

SEQ ID NO: 2109081 - DNA, 15 bp, Homo sapiens
tcagtatccttgacc

SEQ ID NO: 2109082 - DNA, 15 bp, Homo sapiens
cagtatccttgacca

SEQ ID NO: 2109083 - DNA, 15 bp, Homo sapiens
agtatccttgaccaa

SEQ ID NO: 2109084 - DNA, 15 bp, Homo sapiens
gtatccttgaccaaa

SEQ ID NO: 2109085 - DNA, 15 bp, Homo sapiens
tatccttgaccaaag

SEQ ID NO: 2109086 - DNA, 15 bp, Homo sapiens
atccttgaccaaagc

SEQ ID NO: 2109087 - DNA, 15 bp, Homo sapiens
tccttgaccaaagca

SEQ ID NO: 2109088 - DNA, 15 bp, Homo sapiens
ccttgaccaaagcaa

SEQ ID NO: 2109089 - DNA, 15 bp, Homo sapiens
cttgaccaaagcaac

SEQ ID NO: 2109090 - DNA, 15 bp, Homo sapiens
ttgaccaaagcaact

SEQ ID NO: 2109091 - DNA, 15 bp, Homo sapiens
tgaccaaagcaactg

SEQ ID NO: 2109092 - DNA, 15 bp, Homo sapiens
gaccaaagcaactga

SEQ ID NO: 2109093 - DNA, 15 bp, Homo sapiens
accaaagcaactgat

SEQ ID NO: 2109094 - DNA, 15 bp, Homo sapiens
ccaaagcaactgatg

SEQ ID NO: 2109095 - DNA, 15 bp, Homo sapiens
caaagcaactgatgc

SEQ ID NO: 2109096 - DNA, 15 bp, Homo sapiens
aaagcaactgatgct

SEQ ID NO: 2109097 - DNA, 15 bp, Homo sapiens
aagcaactgatgctg

SEQ ID NO: 2109098 - DNA, 15 bp, Homo sapiens
agcaactgatgctgt

SEQ ID NO: 2109099 - DNA, 15 bp, Homo sapiens
gcaactgatgctgta

SEQ ID NO: 2109100 - DNA, 15 bp, Homo sapiens
caactgatgctgtaa

SEQ ID NO: 2109101 - DNA, 15 bp, Homo sapiens
aactgatgctgtaag

SEQ ID NO: 2109102 - DNA, 15 bp, Homo sapiens
actgatgctgtaaga

SEQ ID NO: 2109103 - DNA, 15 bp, Homo sapiens
ctgatgctgtaagaa

SEQ ID NO: 2109104 - DNA, 15 bp, Homo sapiens
tgatgctgtaagaaa

SEQ ID NO: 2109105 - DNA, 15 bp, Homo sapiens
gatgctgtaagaaat

SEQ ID NO: 2109106 - DNA, 15 bp, Homo sapiens
atgctgtaagaaatg

SEQ ID NO: 2109107 - DNA, 15 bp, Homo sapiens
tgctgtaagaaatga

SEQ ID NO: 2109108 - DNA, 15 bp, Homo sapiens
gctgtaagaaatgag

SEQ ID NO: 2109109 - DNA, 15 bp, Homo sapiens
ctgtaagaaatgaga

SEQ ID NO: 2109110 - DNA, 15 bp, Homo sapiens
tgtaagaaatgagac

SEQ ID NO: 2109111 - DNA, 15 bp, Homo sapiens
gtaagaaatgagact

SEQ ID NO: 2109112 - DNA, 15 bp, Homo sapiens
taagaaatgagactt

SEQ ID NO: 2109113 - DNA, 15 bp, Homo sapiens
aagaaatgagacttc

SEQ ID NO: 2109114 - DNA, 15 bp, Homo sapiens
agaaatgagacttca

SEQ ID NO: 2109115 - DNA, 15 bp, Homo sapiens
gaaatgagacttcaa

SEQ ID NO: 2109116 - DNA, 15 bp, Homo sapiens
aaatgagacttcaaa

SEQ ID NO: 2109117 - DNA, 15 bp, Homo sapiens
aatgagacttcaaac

SEQ ID NO: 2109118 - DNA, 15 bp, Homo sapiens
atgagacttcaaacc

SEQ ID NO: 2109119 - DNA, 15 bp, Homo sapiens
tgagacttcaaacca

SEQ ID NO: 2109120 - DNA, 15 bp, Homo sapiens
gagacttcaaaccat

SEQ ID NO: 2109121 - DNA, 15 bp, Homo sapiens
agacttcaaaccatt

SEQ ID NO: 2109122 - DNA, 15 bp, Homo sapiens
gacttcaaaccattt

SEQ ID NO: 2109123 - DNA, 15 bp, Homo sapiens
acttcaaaccattta

SEQ ID NO: 2109124 - DNA, 15 bp, Homo sapiens
cttcaaaccatttac

SEQ ID NO: 2109125 - DNA, 15 bp, Homo sapiens
ttcaaaccatttacc

SEQ ID NO: 2109126 - DNA, 15 bp, Homo sapiens
tcaaaccatttaccc

SEQ ID NO: 2109127 - DNA, 15 bp, Homo sapiens
caaaccatttaccca

SEQ ID NO: 2109128 - DNA, 15 bp, Homo sapiens
aaaccatttacccac

SEQ ID NO: 2109129 - DNA, 15 bp, Homo sapiens
aaccatttacccaca

SEQ ID NO: 2109130 - DNA, 15 bp, Homo sapiens
accatttacccacac

SEQ ID NO: 2109131 - DNA, 15 bp, Homo sapiens
ccatttacccacact

SEQ ID NO: 2109132 - DNA, 15 bp, Homo sapiens
catttacccacactg

SEQ ID NO: 2109133 - DNA, 15 bp, Homo sapiens
atttacccacactgg

SEQ ID NO: 2109134 - DNA, 15 bp, Homo sapiens
tttacccacactggg

SEQ ID NO: 2109135 - DNA, 15 bp, Homo sapiens
ttacccacactgggt

SEQ ID NO: 2109136 - DNA, 15 bp, Homo sapiens
tacccacactgggtg

SEQ ID NO: 2109137 - DNA, 15 bp, Homo sapiens
acccacactgggtga

SEQ ID NO: 2109138 - DNA, 15 bp, Homo sapiens
cccacactgggtgat

SEQ ID NO: 2109139 - DNA, 15 bp, Homo sapiens
ccacactgggtgatt

SEQ ID NO: 2109140 - DNA, 15 bp, Homo sapiens
cacactgggtgatta

SEQ ID NO: 2109141 - DNA, 15 bp, Homo sapiens
acactgggtgattaa

SEQ ID NO: 2109142 - DNA, 15 bp, Homo sapiens
cactgggtgattaag

SEQ ID NO: 2109143 - DNA, 15 bp, Homo sapiens
actgggtgattaagg

SEQ ID NO: 2109144 - DNA, 15 bp, Homo sapiens
ctgggtgattaaggt

SEQ ID NO: 2109145 - DNA, 15 bp, Homo sapiens
tgggtgattaaggta

SEQ ID NO: 2109146 - DNA, 15 bp, Homo sapiens
gggtgattaaggtag

SEQ ID NO: 2109147 - DNA, 15 bp, Homo sapiens
ggtgattaaggtagt

SEQ ID NO: 2109148 - DNA, 15 bp, Homo sapiens
gtgattaaggtagtt

SEQ ID NO: 2109149 - DNA, 15 bp, Homo sapiens
tgattaaggtagttt

SEQ ID NO: 2109150 - DNA, 15 bp, Homo sapiens
gattaaggtagttta

SEQ ID NO: 2109151 - DNA, 15 bp, Homo sapiens
attaaggtagtttaa

SEQ ID NO: 2109152 - DNA, 15 bp, Homo sapiens
ttaaggtagtttaaa

SEQ ID NO: 2109153 - DNA, 15 bp, Homo sapiens
taaggtagtttaaaa

SEQ ID NO: 2109154 - DNA, 15 bp, Homo sapiens
aaggtagtttaaaaa

SEQ ID NO: 2109155 - DNA, 15 bp, Homo sapiens
aggtagtttaaaaaa

SEQ ID NO: 2109156 - DNA, 15 bp, Homo sapiens
ggtagtttaaaaaaa

SEQ ID NO: 2109157 - DNA, 15 bp, Homo sapiens
gtagtttaaaaaaag

SEQ ID NO: 2109158 - DNA, 15 bp, Homo sapiens
tagtttaaaaaaaga

SEQ ID NO: 2109159 - DNA, 15 bp, Homo sapiens
agtttaaaaaaagaa

SEQ ID NO: 2109160 - DNA, 15 bp, Homo sapiens
gtttaaaaaaagaaa

SEQ ID NO: 2109161 - DNA, 15 bp, Homo sapiens
ttaaaaaaagaaatg

SEQ ID NO: 2109162 - DNA, 15 bp, Homo sapiens
taaaaaaagaaatga

SEQ ID NO: 2109163 - DNA, 15 bp, Homo sapiens
aaaaaaagaaatgag

SEQ ID NO: 2109164 - DNA, 15 bp, Homo sapiens
aaaaaagaaatgagg

SEQ ID NO: 2109165 - DNA, 15 bp, Homo sapiens
aaaaagaaatgaggc

SEQ ID NO: 2109166 - DNA, 15 bp, Homo sapiens
aaaagaaatgaggcc

SEQ ID NO: 2109167 - DNA, 15 bp, Homo sapiens
aaagaaatgaggcca

SEQ ID NO: 2109168 - DNA, 15 bp, Homo sapiens
aagaaatgaggccag

SEQ ID NO: 2109169 - DNA, 15 bp, Homo sapiens
agaaatgaggccagg

SEQ ID NO: 2109170 - DNA, 15 bp, Homo sapiens
gaaatgaggccaggc

SEQ ID NO: 2109171 - DNA, 15 bp, Homo sapiens
aaatgaggccaggca

SEQ ID NO: 2109172 - DNA, 15 bp, Homo sapiens
aatgaggccaggcac

SEQ ID NO: 2109173 - DNA, 15 bp, Homo sapiens
atgaggccaggcacg

SEQ ID NO: 2109174 - DNA, 15 bp, Homo sapiens
tgaggccaggcacgg

SEQ ID NO: 2109175 - DNA, 15 bp, Homo sapiens
aggcacggtggctcc

SEQ ID NO: 2109176 - DNA, 15 bp, Homo sapiens
ggcacggtggctccc

SEQ ID NO: 2109177 - DNA, 15 bp, Homo sapiens
gcacggtggctcccg

SEQ ID NO: 2109178 - DNA, 15 bp, Homo sapiens
cacggtggctcccgc

SEQ ID NO: 2109179 - DNA, 15 bp, Homo sapiens
acggtggctcccgcc

SEQ ID NO: 2109180 - DNA, 15 bp, Homo sapiens
cggtggctcccgcct

SEQ ID NO: 2109181 - DNA, 15 bp, Homo sapiens
ggtggctcccgcctg

SEQ ID NO: 2109182 - DNA, 15 bp, Homo sapiens
gtggctcccgcctgt

SEQ ID NO: 2109183 - DNA, 15 bp, Homo sapiens
tggctcccgcctgta

SEQ ID NO: 2109184 - DNA, 15 bp, Homo sapiens
gaggccgaggcaggt

SEQ ID NO: 2109185 - DNA, 15 bp, Homo sapiens
ggccgaggcaggtgt

SEQ ID NO: 2109186 - DNA, 15 bp, Homo sapiens
gccgaggcaggtgtt

SEQ ID NO: 2109187 - DNA, 15 bp, Homo sapiens
ccgaggcaggtgttt

SEQ ID NO: 2109188 - DNA, 15 bp, Homo sapiens
cgaggcaggtgtttc

SEQ ID NO: 2109189 - DNA, 15 bp, Homo sapiens
gaggcaggtgtttca

SEQ ID NO: 2109190 - DNA, 15 bp, Homo sapiens
aggcaggtgtttcac

SEQ ID NO: 2109191 - DNA, 15 bp, Homo sapiens
ggcaggtgtttcact

SEQ ID NO: 2109192 - DNA, 15 bp, Homo sapiens
gcaggtgtttcactt

SEQ ID NO: 2109193 - DNA, 15 bp, Homo sapiens
caggtgtttcacttt

SEQ ID NO: 2109194 - DNA, 15 bp, Homo sapiens
aggtgtttcacttta

SEQ ID NO: 2109195 - DNA, 15 bp, Homo sapiens
ggtgtttcactttaa

SEQ ID NO: 2109196 - DNA, 15 bp, Homo sapiens
gtgtttcactttaag

SEQ ID NO: 2109197 - DNA, 15 bp, Homo sapiens
tgtttcactttaagt

SEQ ID NO: 2109198 - DNA, 15 bp, Homo sapiens
gtttcactttaagtc

SEQ ID NO: 2109199 - DNA, 15 bp, Homo sapiens
tttcactttaagtca

SEQ ID NO: 2109200 - DNA, 15 bp, Homo sapiens
ttcactttaagtcag

SEQ ID NO: 2109201 - DNA, 15 bp, Homo sapiens
tcactttaagtcagg

SEQ ID NO: 2109202 - DNA, 15 bp, Homo sapiens
cactttaagtcagga

SEQ ID NO: 2109203 - DNA, 15 bp, Homo sapiens
actttaagtcaggag

SEQ ID NO: 2109204 - DNA, 15 bp, Homo sapiens
ctttaagtcaggagt

SEQ ID NO: 2109205 - DNA, 15 bp, Homo sapiens
tttaagtcaggagtt

SEQ ID NO: 2109206 - DNA, 15 bp, Homo sapiens
ttaagtcaggagttc

SEQ ID NO: 2109207 - DNA, 15 bp, Homo sapiens
taagtcaggagttcg

SEQ ID NO: 2109208 - DNA, 15 bp, Homo sapiens
aagtcaggagttcgt

SEQ ID NO: 2109209 - DNA, 15 bp, Homo sapiens
agtcaggagttcgtg

SEQ ID NO: 2109210 - DNA, 15 bp, Homo sapiens
catggcaaaaccccg

SEQ ID NO: 2109211 - DNA, 15 bp, Homo sapiens
atggcaaaaccccgt

SEQ ID NO: 2109212 - DNA, 15 bp, Homo sapiens
tggcaaaaccccgtc

SEQ ID NO: 2109213 - DNA, 15 bp, Homo sapiens
ggcaaaaccccgtct

SEQ ID NO: 2109214 - DNA, 15 bp, Homo sapiens
gcaaaaccccgtctc

SEQ ID NO: 2109215 - DNA, 15 bp, Homo sapiens
caaaaccccgtctct

SEQ ID NO: 2109216 - DNA, 15 bp, Homo sapiens
actaaaaatacaacc

SEQ ID NO: 2109217 - DNA, 15 bp, Homo sapiens
ctaaaaatacaacca

SEQ ID NO: 2109218 - DNA, 15 bp, Homo sapiens
taaaaatacaaccat

SEQ ID NO: 2109219 - DNA, 15 bp, Homo sapiens
aaaaatacaaccatt

SEQ ID NO: 2109220 - DNA, 15 bp, Homo sapiens
aaaatacaaccatta

SEQ ID NO: 2109221 - DNA, 15 bp, Homo sapiens
aaatacaaccattag

SEQ ID NO: 2109222 - DNA, 15 bp, Homo sapiens
aatacaaccattagc

SEQ ID NO: 2109223 - DNA, 15 bp, Homo sapiens
atacaaccattagcc

SEQ ID NO: 2109224 - DNA, 15 bp, Homo sapiens
tacaaccattagcca

SEQ ID NO: 2109225 - DNA, 15 bp, Homo sapiens
acaaccattagccag

SEQ ID NO: 2109226 - DNA, 15 bp, Homo sapiens
caaccattagccagg

SEQ ID NO: 2109227 - DNA, 15 bp, Homo sapiens
aaccattagccaggc

SEQ ID NO: 2109228 - DNA, 15 bp, Homo sapiens
accattagccaggca

SEQ ID NO: 2109229 - DNA, 15 bp, Homo sapiens
ccattagccaggcat

SEQ ID NO: 2109230 - DNA, 15 bp, Homo sapiens
catggtggctcatga

SEQ ID NO: 2109231 - DNA, 15 bp, Homo sapiens
atggtggctcatgac

SEQ ID NO: 2109232 - DNA, 15 bp, Homo sapiens
tggtggctcatgact

SEQ ID NO: 2109233 - DNA, 15 bp, Homo sapiens
ggtggctcatgactg

SEQ ID NO: 2109234 - DNA, 15 bp, Homo sapiens
gtggctcatgactgt

SEQ ID NO: 2109235 - DNA, 15 bp, Homo sapiens
tggctcatgactgta

SEQ ID NO: 2109236 - DNA, 15 bp, Homo sapiens
ggctcatgactgtaa

SEQ ID NO: 2109237 - DNA, 15 bp, Homo sapiens
gctcatgactgtaat

SEQ ID NO: 2109238 - DNA, 15 bp, Homo sapiens
ctcatgactgtaatc

SEQ ID NO: 2109239 - DNA, 15 bp, Homo sapiens
tcatgactgtaatcc

SEQ ID NO: 2109240 - DNA, 15 bp, Homo sapiens
aatcccagctactgg

SEQ ID NO: 2109241 - DNA, 15 bp, Homo sapiens
atcccagctactggt

SEQ ID NO: 2109242 - DNA, 15 bp, Homo sapiens
tcccagctactggtg

SEQ ID NO: 2109243 - DNA, 15 bp, Homo sapiens
cccagctactggtga

SEQ ID NO: 2109244 - DNA, 15 bp, Homo sapiens
ccagctactggtgag

SEQ ID NO: 2109245 - DNA, 15 bp, Homo sapiens
cagctactggtgagg

SEQ ID NO: 2109246 - DNA, 15 bp, Homo sapiens
agctactggtgaggc

SEQ ID NO: 2109247 - DNA, 15 bp, Homo sapiens
gctactggtgaggct

SEQ ID NO: 2109248 - DNA, 15 bp, Homo sapiens
ctactggtgaggctg

SEQ ID NO: 2109249 - DNA, 15 bp, Homo sapiens
tactggtgaggctga

SEQ ID NO: 2109250 - DNA, 15 bp, Homo sapiens
actggtgaggctgag

SEQ ID NO: 2109251 - DNA, 15 bp, Homo sapiens
ctggtgaggctgagg

SEQ ID NO: 2109252 - DNA, 15 bp, Homo sapiens
tggtgaggctgaggc

SEQ ID NO: 2109253 - DNA, 15 bp, Homo sapiens
ggtgaggctgaggca

SEQ ID NO: 2109254 - DNA, 15 bp, Homo sapiens
gtgaggctgaggcag

SEQ ID NO: 2109255 - DNA, 15 bp, Homo sapiens
aggaggcagaggtta

SEQ ID NO: 2109256 - DNA, 15 bp, Homo sapiens
ggttacagtgagcca

SEQ ID NO: 2109257 - DNA, 15 bp, Homo sapiens
gttacagtgagccaa

SEQ ID NO: 2109258 - DNA, 15 bp, Homo sapiens
ttacagtgagccaag

SEQ ID NO: 2109259 - DNA, 15 bp, Homo sapiens
tacagtgagccaaga

SEQ ID NO: 2109260 - DNA, 15 bp, Homo sapiens
acagtgagccaagat

SEQ ID NO: 2109261 - DNA, 15 bp, Homo sapiens
atggcaccactgcac

SEQ ID NO: 2109262 - DNA, 15 bp, Homo sapiens
tggcaccactgcact

SEQ ID NO: 2109263 - DNA, 15 bp, Homo sapiens
ggcaccactgcactc

SEQ ID NO: 2109264 - DNA, 15 bp, Homo sapiens
agcctgggcaacaaa

SEQ ID NO: 2109265 - DNA, 15 bp, Homo sapiens
gcctgggcaacaaag

SEQ ID NO: 2109266 - DNA, 15 bp, Homo sapiens
cctgggcaacaaagc

SEQ ID NO: 2109267 - DNA, 15 bp, Homo sapiens
ctgggcaacaaagcg

SEQ ID NO: 2109268 - DNA, 15 bp, Homo sapiens
tgggcaacaaagcga

SEQ ID NO: 2109269 - DNA, 15 bp, Homo sapiens
gggcaacaaagcgag

SEQ ID NO: 2109270 - DNA, 15 bp, Homo sapiens
gcaacaaagcgagac

SEQ ID NO: 2109271 - DNA, 15 bp, Homo sapiens
caacaaagcgagact

SEQ ID NO: 2109272 - DNA, 15 bp, Homo sapiens
aacaaagcgagactc

SEQ ID NO: 2109273 - DNA, 15 bp, Homo sapiens
aaagcgagactccat

SEQ ID NO: 2109274 - DNA, 15 bp, Homo sapiens
aagcgagactccatc

SEQ ID NO: 2109275 - DNA, 15 bp, Homo sapiens
cgagactccatctcc

SEQ ID NO: 2109276 - DNA, 15 bp, Homo sapiens
ccatctccaaaaaat

SEQ ID NO: 2109277 - DNA, 15 bp, Homo sapiens
catctccaaaaaata

SEQ ID NO: 2109278 - DNA, 15 bp, Homo sapiens
atctccaaaaaataa

SEQ ID NO: 2109279 - DNA, 15 bp, Homo sapiens
tctccaaaaaataaa

SEQ ID NO: 2109280 - DNA, 15 bp, Homo sapiens
ctccaaaaaataaat

SEQ ID NO: 2109281 - DNA, 15 bp, Homo sapiens
tccaaaaaataaatt

SEQ ID NO: 2109282 - DNA, 15 bp, Homo sapiens
ccaaaaaataaatta

SEQ ID NO: 2109283 - DNA, 15 bp, Homo sapiens
caaaaaataaattaa

SEQ ID NO: 2109284 - DNA, 15 bp, Homo sapiens
aaaaaataaattaat

SEQ ID NO: 2109285 - DNA, 15 bp, Homo sapiens
aaaaataaattaatt

SEQ ID NO: 2109286 - DNA, 15 bp, Homo sapiens
aaaataaattaattt

SEQ ID NO: 2109287 - DNA, 15 bp, Homo sapiens
aaataaattaattta

SEQ ID NO: 2109288 - DNA, 15 bp, Homo sapiens
taaattaatttatta

SEQ ID NO: 2109289 - DNA, 15 bp, Homo sapiens
aaattaatttattaa

SEQ ID NO: 2109290 - DNA, 15 bp, Homo sapiens
aattaatttattaat

SEQ ID NO: 2109291 - DNA, 15 bp, Homo sapiens
attaatttattaatt

SEQ ID NO: 2109292 - DNA, 15 bp, Homo sapiens
ttaatttattaattt

SEQ ID NO: 2109293 - DNA, 15 bp, Homo sapiens
taatttattaattta

SEQ ID NO: 2109294 - DNA, 15 bp, Homo sapiens
aatttattaatttaa

SEQ ID NO: 2109295 - DNA, 15 bp, Homo sapiens
atttattaatttaaa

SEQ ID NO: 2109296 - DNA, 15 bp, Homo sapiens
tttattaatttaaaa

SEQ ID NO: 2109297 - DNA, 15 bp, Homo sapiens
ttattaatttaaaaa

SEQ ID NO: 2109298 - DNA, 15 bp, Homo sapiens
tattaatttaaaaag

SEQ ID NO: 2109299 - DNA, 15 bp, Homo sapiens
attaatttaaaaaga

SEQ ID NO: 2109300 - DNA, 15 bp, Homo sapiens
ttaatttaaaaagaa

SEQ ID NO: 2109301 - DNA, 15 bp, Homo sapiens
taatttaaaaagaaa

SEQ ID NO: 2109302 - DNA, 15 bp, Homo sapiens
aaagaaaaagaaaaa

SEQ ID NO: 2109303 - DNA, 15 bp, Homo sapiens
aagaaaaagaaaaaa

SEQ ID NO: 2109304 - DNA, 15 bp, Homo sapiens
agaaaaagaaaaaag

SEQ ID NO: 2109305 - DNA, 15 bp, Homo sapiens
gaaaaagaaaaaaga

SEQ ID NO: 2109306 - DNA, 15 bp, Homo sapiens
aaagaaaaaagaaat

SEQ ID NO: 2109307 - DNA, 15 bp, Homo sapiens
aagaaaaaagaaatg

SEQ ID NO: 2109308 - DNA, 15 bp, Homo sapiens
agaaaaaagaaatga

SEQ ID NO: 2109309 - DNA, 15 bp, Homo sapiens
gaaaaaagaaatgaa

SEQ ID NO: 2109310 - DNA, 15 bp, Homo sapiens
aaaaaagaaatgaag

SEQ ID NO: 2109311 - DNA, 15 bp, Homo sapiens
aaaaagaaatgaaga

SEQ ID NO: 2109312 - DNA, 15 bp, Homo sapiens
aaaagaaatgaagaa

SEQ ID NO: 2109313 - DNA, 15 bp, Homo sapiens
aaagaaatgaagaac

SEQ ID NO: 2109314 - DNA, 15 bp, Homo sapiens
aagaaatgaagaact

SEQ ID NO: 2109315 - DNA, 15 bp, Homo sapiens
agaaatgaagaactt

SEQ ID NO: 2109316 - DNA, 15 bp, Homo sapiens
gaaatgaagaactta

SEQ ID NO: 2109317 - DNA, 15 bp, Homo sapiens
aaatgaagaacttac

SEQ ID NO: 2109318 - DNA, 15 bp, Homo sapiens
aatgaagaacttacg

SEQ ID NO: 2109319 - DNA, 15 bp, Homo sapiens
atgaagaacttacgg

SEQ ID NO: 2109320 - DNA, 15 bp, Homo sapiens
tgaagaacttacggt

SEQ ID NO: 2109321 - DNA, 15 bp, Homo sapiens
gaagaacttacggta

SEQ ID NO: 2109322 - DNA, 15 bp, Homo sapiens
aagaacttacggtaa

SEQ ID NO: 2109323 - DNA, 15 bp, Homo sapiens
agaacttacggtaat

SEQ ID NO: 2109324 - DNA, 15 bp, Homo sapiens
gaacttacggtaatt

SEQ ID NO: 2109325 - DNA, 15 bp, Homo sapiens
aacttacggtaatta

SEQ ID NO: 2109326 - DNA, 15 bp, Homo sapiens
acttacggtaattag

SEQ ID NO: 2109327 - DNA, 15 bp, Homo sapiens
cttacggtaattagt

SEQ ID NO: 2109328 - DNA, 15 bp, Homo sapiens
ttacggtaattagtg

SEQ ID NO: 2109329 - DNA, 15 bp, Homo sapiens
tacggtaattagtgt

SEQ ID NO: 2109330 - DNA, 15 bp, Homo sapiens
acggtaattagtgtg

SEQ ID NO: 2109331 - DNA, 15 bp, Homo sapiens
cggtaattagtgtgg

SEQ ID NO: 2109332 - DNA, 15 bp, Homo sapiens
ggtaattagtgtggt

SEQ ID NO: 2109333 - DNA, 15 bp, Homo sapiens
gtaattagtgtggtt

SEQ ID NO: 2109334 - DNA, 15 bp, Homo sapiens
taattagtgtggtta

SEQ ID NO: 2109335 - DNA, 15 bp, Homo sapiens
aattagtgtggttag

SEQ ID NO: 2109336 - DNA, 15 bp, Homo sapiens
attagtgtggttagg

SEQ ID NO: 2109337 - DNA, 15 bp, Homo sapiens
ttagtgtggttaggg

SEQ ID NO: 2109338 - DNA, 15 bp, Homo sapiens
tagtgtggttaggga

SEQ ID NO: 2109339 - DNA, 15 bp, Homo sapiens
agtgtggttagggac

SEQ ID NO: 2109340 - DNA, 15 bp, Homo sapiens
gtgtggttagggaca

SEQ ID NO: 2109341 - DNA, 15 bp, Homo sapiens
tgtggttagggacag

SEQ ID NO: 2109342 - DNA, 15 bp, Homo sapiens
gtggttagggacagt

SEQ ID NO: 2109343 - DNA, 15 bp, Homo sapiens
tggttagggacagtg

SEQ ID NO: 2109344 - DNA, 15 bp, Homo sapiens
ggttagggacagtga

SEQ ID NO: 2109345 - DNA, 15 bp, Homo sapiens
gttagggacagtgag

SEQ ID NO: 2109346 - DNA, 15 bp, Homo sapiens
ttagggacagtgagt

SEQ ID NO: 2109347 - DNA, 15 bp, Homo sapiens
tagggacagtgagtt

SEQ ID NO: 2109348 - DNA, 15 bp, Homo sapiens
agggacagtgagtta

SEQ ID NO: 2109349 - DNA, 15 bp, Homo sapiens
gggacagtgagttag

SEQ ID NO: 2109350 - DNA, 15 bp, Homo sapiens
ggacagtgagttaga

SEQ ID NO: 2109351 - DNA, 15 bp, Homo sapiens
gacagtgagttagaa

SEQ ID NO: 2109352 - DNA, 15 bp, Homo sapiens
acagtgagttagaaa

SEQ ID NO: 2109353 - DNA, 15 bp, Homo sapiens
cagtgagttagaaat

SEQ ID NO: 2109354 - DNA, 15 bp, Homo sapiens
agtgagttagaaatt

SEQ ID NO: 2109355 - DNA, 15 bp, Homo sapiens
gtgagttagaaattg

SEQ ID NO: 2109356 - DNA, 15 bp, Homo sapiens
tgagttagaaattgt

SEQ ID NO: 2109357 - DNA, 15 bp, Homo sapiens
gagttagaaattgtc

SEQ ID NO: 2109358 - DNA, 15 bp, Homo sapiens
agttagaaattgtca

SEQ ID NO: 2109359 - DNA, 15 bp, Homo sapiens
gttagaaattgtcac

SEQ ID NO: 2109360 - DNA, 15 bp, Homo sapiens
ttagaaattgtcaca

SEQ ID NO: 2109361 - DNA, 15 bp, Homo sapiens
tagaaattgtcacat

SEQ ID NO: 2109362 - DNA, 15 bp, Homo sapiens
agaaattgtcacatc

SEQ ID NO: 2109363 - DNA, 15 bp, Homo sapiens
gaaattgtcacatca

SEQ ID NO: 2109364 - DNA, 15 bp, Homo sapiens
aaattgtcacatcaa

SEQ ID NO: 2109365 - DNA, 15 bp, Homo sapiens
aattgtcacatcaaa

SEQ ID NO: 2109366 - DNA, 15 bp, Homo sapiens
attgtcacatcaaaa

SEQ ID NO: 2109367 - DNA, 15 bp, Homo sapiens
ttgtcacatcaaaat

SEQ ID NO: 2109368 - DNA, 15 bp, Homo sapiens
tgtcacatcaaaata

SEQ ID NO: 2109369 - DNA, 15 bp, Homo sapiens
gtcacatcaaaatac

SEQ ID NO: 2109370 - DNA, 15 bp, Homo sapiens
tcacatcaaaataca

SEQ ID NO: 2109371 - DNA, 15 bp, Homo sapiens
cacatcaaaatacaa

SEQ ID NO: 2109372 - DNA, 15 bp, Homo sapiens
acatcaaaatacaaa

SEQ ID NO: 2109373 - DNA, 15 bp, Homo sapiens
catcaaaatacaaag

SEQ ID NO: 2109374 - DNA, 15 bp, Homo sapiens
atcaaaatacaaagt

SEQ ID NO: 2109375 - DNA, 15 bp, Homo sapiens
tcaaaatacaaagtt

SEQ ID NO: 2109376 - DNA, 15 bp, Homo sapiens
caaaatacaaagttt

SEQ ID NO: 2109377 - DNA, 15 bp, Homo sapiens
aaaatacaaagtttt

SEQ ID NO: 2109378 - DNA, 15 bp, Homo sapiens
aaatacaaagttttc

SEQ ID NO: 2109379 - DNA, 15 bp, Homo sapiens
aatacaaagttttca

SEQ ID NO: 2109380 - DNA, 15 bp, Homo sapiens
atacaaagttttcaa

SEQ ID NO: 2109381 - DNA, 15 bp, Homo sapiens
tacaaagttttcaaa

SEQ ID NO: 2109382 - DNA, 15 bp, Homo sapiens
acaaagttttcaaaa

SEQ ID NO: 2109383 - DNA, 15 bp, Homo sapiens
caaagttttcaaaac

SEQ ID NO: 2109384 - DNA, 15 bp, Homo sapiens
aaagttttcaaaaca

SEQ ID NO: 2109385 - DNA, 15 bp, Homo sapiens
aagttttcaaaacag

SEQ ID NO: 2109386 - DNA, 15 bp, Homo sapiens
agttttcaaaacagt

SEQ ID NO: 2109387 - DNA, 15 bp, Homo sapiens
gttttcaaaacagta

SEQ ID NO: 2109388 - DNA, 15 bp, Homo sapiens
ttttcaaaacagtat

SEQ ID NO: 2109389 - DNA, 15 bp, Homo sapiens
tttcaaaacagtata

SEQ ID NO: 2109390 - DNA, 15 bp, Homo sapiens
ttcaaaacagtatat

SEQ ID NO: 2109391 - DNA, 15 bp, Homo sapiens
tcaaaacagtatatt

SEQ ID NO: 2109392 - DNA, 15 bp, Homo sapiens
caaaacagtatattt

SEQ ID NO: 2109393 - DNA, 15 bp, Homo sapiens
aaaacagtatatttt

SEQ ID NO: 2109394 - DNA, 15 bp, Homo sapiens
aaacagtatatttta

SEQ ID NO: 2109395 - DNA, 15 bp, Homo sapiens
aacagtatattttat

SEQ ID NO: 2109396 - DNA, 15 bp, Homo sapiens
acagtatattttatt

SEQ ID NO: 2109397 - DNA, 15 bp, Homo sapiens
cagtatattttattt

SEQ ID NO: 2109398 - DNA, 15 bp, Homo sapiens
agtatattttatttt

SEQ ID NO: 2109399 - DNA, 15 bp, Homo sapiens
gtatattttatttta

SEQ ID NO: 2109400 - DNA, 15 bp, Homo sapiens
tatattttattttac

SEQ ID NO: 2109401 - DNA, 15 bp, Homo sapiens
atattttattttaca

SEQ ID NO: 2109402 - DNA, 15 bp, Homo sapiens
tattttattttacaa

SEQ ID NO: 2109403 - DNA, 15 bp, Homo sapiens
attttattttacaat

SEQ ID NO: 2109404 - DNA, 15 bp, Homo sapiens
ttttattttacaata

SEQ ID NO: 2109405 - DNA, 15 bp, Homo sapiens
tttattttacaatag

SEQ ID NO: 2109406 - DNA, 15 bp, Homo sapiens
ttattttacaatagc

SEQ ID NO: 2109407 - DNA, 15 bp, Homo sapiens
tattttacaatagca

SEQ ID NO: 2109408 - DNA, 15 bp, Homo sapiens
attttacaatagcaa

SEQ ID NO: 2109409 - DNA, 15 bp, Homo sapiens
ttttacaatagcaac

SEQ ID NO: 2109410 - DNA, 15 bp, Homo sapiens
tttacaatagcaacc

SEQ ID NO: 2109411 - DNA, 15 bp, Homo sapiens
ttacaatagcaacca

SEQ ID NO: 2109412 - DNA, 15 bp, Homo sapiens
tacaatagcaaccaa

SEQ ID NO: 2109413 - DNA, 15 bp, Homo sapiens
acaatagcaaccaac

SEQ ID NO: 2109414 - DNA, 15 bp, Homo sapiens
caatagcaaccaact

SEQ ID NO: 2109415 - DNA, 15 bp, Homo sapiens
aatagcaaccaactc

SEQ ID NO: 2109416 - DNA, 15 bp, Homo sapiens
atagcaaccaactcc

SEQ ID NO: 2109417 - DNA, 15 bp, Homo sapiens
tagcaaccaactccc

SEQ ID NO: 2109418 - DNA, 15 bp, Homo sapiens
agcaaccaactcccc

SEQ ID NO: 2109419 - DNA, 15 bp, Homo sapiens
gcaaccaactcccca

SEQ ID NO: 2109420 - DNA, 15 bp, Homo sapiens
caaccaactccccag

SEQ ID NO: 2109421 - DNA, 15 bp, Homo sapiens
aaccaactccccagt

SEQ ID NO: 2109422 - DNA, 15 bp, Homo sapiens
accaactccccagtt

SEQ ID NO: 2109423 - DNA, 15 bp, Homo sapiens
ccaactccccagttt

SEQ ID NO: 2109424 - DNA, 15 bp, Homo sapiens
caactccccagtttg

SEQ ID NO: 2109425 - DNA, 15 bp, Homo sapiens
aactccccagtttgt

SEQ ID NO: 2109426 - DNA, 15 bp, Homo sapiens
actccccagtttgtt

SEQ ID NO: 2109427 - DNA, 15 bp, Homo sapiens
ctccccagtttgttt

SEQ ID NO: 2109428 - DNA, 15 bp, Homo sapiens
tccccagtttgtttc

SEQ ID NO: 2109429 - DNA, 15 bp, Homo sapiens
ccccagtttgtttca

SEQ ID NO: 2109430 - DNA, 15 bp, Homo sapiens
cccagtttgtttcaa

SEQ ID NO: 2109431 - DNA, 15 bp, Homo sapiens
ccagtttgtttcaat

SEQ ID NO: 2109432 - DNA, 15 bp, Homo sapiens
cagtttgtttcaatt

SEQ ID NO: 2109433 - DNA, 15 bp, Homo sapiens
agtttgtttcaattg

SEQ ID NO: 2109434 - DNA, 15 bp, Homo sapiens
gtttgtttcaattgt

SEQ ID NO: 2109435 - DNA, 15 bp, Homo sapiens
tttgtttcaattgtg

SEQ ID NO: 2109436 - DNA, 15 bp, Homo sapiens
ttgtttcaattgtga

SEQ ID NO: 2109437 - DNA, 15 bp, Homo sapiens
tgtttcaattgtgac

SEQ ID NO: 2109438 - DNA, 15 bp, Homo sapiens
gtttcaattgtgaca

SEQ ID NO: 2109439 - DNA, 15 bp, Homo sapiens
tttcaattgtgacat

SEQ ID NO: 2109440 - DNA, 15 bp, Homo sapiens
ttcaattgtgacatc

SEQ ID NO: 2109441 - DNA, 15 bp, Homo sapiens
tcaattgtgacatct

SEQ ID NO: 2109442 - DNA, 15 bp, Homo sapiens
caattgtgacatcta

SEQ ID NO: 2109443 - DNA, 15 bp, Homo sapiens
aattgtgacatctag

SEQ ID NO: 2109444 - DNA, 15 bp, Homo sapiens
attgtgacatctaga

SEQ ID NO: 2109445 - DNA, 15 bp, Homo sapiens
ttgtgacatctagat

SEQ ID NO: 2109446 - DNA, 15 bp, Homo sapiens
tgtgacatctagatg

SEQ ID NO: 2109447 - DNA, 15 bp, Homo sapiens
gtgacatctagatgg

SEQ ID NO: 2109448 - DNA, 15 bp, Homo sapiens
tgacatctagatggc

SEQ ID NO: 2109449 - DNA, 15 bp, Homo sapiens
gacatctagatggct

SEQ ID NO: 2109450 - DNA, 15 bp, Homo sapiens
acatctagatggctt

SEQ ID NO: 2109451 - DNA, 15 bp, Homo sapiens
catctagatggctta

SEQ ID NO: 2109452 - DNA, 15 bp, Homo sapiens
atctagatggcttaa

SEQ ID NO: 2109453 - DNA, 15 bp, Homo sapiens
tctagatggcttaag

SEQ ID NO: 2109454 - DNA, 15 bp, Homo sapiens
ctagatggcttaaga

SEQ ID NO: 2109455 - DNA, 15 bp, Homo sapiens
tagatggcttaagat

SEQ ID NO: 2109456 - DNA, 15 bp, Homo sapiens
agatggcttaagatt

SEQ ID NO: 2109457 - DNA, 15 bp, Homo sapiens
gatggcttaagatta

SEQ ID NO: 2109458 - DNA, 15 bp, Homo sapiens
atggcttaagattac

SEQ ID NO: 2109459 - DNA, 15 bp, Homo sapiens
tggcttaagattact

SEQ ID NO: 2109460 - DNA, 15 bp, Homo sapiens
ggcttaagattactt

SEQ ID NO: 2109461 - DNA, 15 bp, Homo sapiens
gcttaagattacttt

SEQ ID NO: 2109462 - DNA, 15 bp, Homo sapiens
cttaagattactttc

SEQ ID NO: 2109463 - DNA, 15 bp, Homo sapiens
ttaagattactttct

SEQ ID NO: 2109464 - DNA, 15 bp, Homo sapiens
taagattactttctg

SEQ ID NO: 2109465 - DNA, 15 bp, Homo sapiens
aagattactttctgg

SEQ ID NO: 2109466 - DNA, 15 bp, Homo sapiens
agattactttctggt

SEQ ID NO: 2109467 - DNA, 15 bp, Homo sapiens
gattactttctggtg

SEQ ID NO: 2109468 - DNA, 15 bp, Homo sapiens
attactttctggtgg

SEQ ID NO: 2109469 - DNA, 15 bp, Homo sapiens
ttactttctggtggt

SEQ ID NO: 2109470 - DNA, 15 bp, Homo sapiens
tactttctggtggtc

SEQ ID NO: 2109471 - DNA, 15 bp, Homo sapiens
actttctggtggtca

SEQ ID NO: 2109472 - DNA, 15 bp, Homo sapiens
ctttctggtggtcac

SEQ ID NO: 2109473 - DNA, 15 bp, Homo sapiens
tttctggtggtcacc

SEQ ID NO: 2109474 - DNA, 15 bp, Homo sapiens
ttctggtggtcaccc

SEQ ID NO: 2109475 - DNA, 15 bp, Homo sapiens
tctggtggtcaccca

SEQ ID NO: 2109476 - DNA, 15 bp, Homo sapiens
ctggtggtcacccat

SEQ ID NO: 2109477 - DNA, 15 bp, Homo sapiens
tggtggtcacccatg

SEQ ID NO: 2109478 - DNA, 15 bp, Homo sapiens
ggtggtcacccatgc

SEQ ID NO: 2109479 - DNA, 15 bp, Homo sapiens
gtggtcacccatgct

SEQ ID NO: 2109480 - DNA, 15 bp, Homo sapiens
tggtcacccatgctg

SEQ ID NO: 2109481 - DNA, 15 bp, Homo sapiens
ggtcacccatgctga

SEQ ID NO: 2109482 - DNA, 15 bp, Homo sapiens
gtcacccatgctgaa

SEQ ID NO: 2109483 - DNA, 15 bp, Homo sapiens
tcacccatgctgaac

SEQ ID NO: 2109484 - DNA, 15 bp, Homo sapiens
cacccatgctgaaca

SEQ ID NO: 2109485 - DNA, 15 bp, Homo sapiens
acccatgctgaacaa

SEQ ID NO: 2109486 - DNA, 15 bp, Homo sapiens
cccatgctgaacaat

SEQ ID NO: 2109487 - DNA, 15 bp, Homo sapiens
ccatgctgaacaata

SEQ ID NO: 2109488 - DNA, 15 bp, Homo sapiens
catgctgaacaatat

SEQ ID NO: 2109489 - DNA, 15 bp, Homo sapiens
atgctgaacaatatt

SEQ ID NO: 2109490 - DNA, 15 bp, Homo sapiens
tgctgaacaatattt

SEQ ID NO: 2109491 - DNA, 15 bp, Homo sapiens
gctgaacaatatttt

SEQ ID NO: 2109492 - DNA, 15 bp, Homo sapiens
ctgaacaatattttt

SEQ ID NO: 2109493 - DNA, 15 bp, Homo sapiens
tgaacaatatttttc

SEQ ID NO: 2109494 - DNA, 15 bp, Homo sapiens
gaacaatatttttca

SEQ ID NO: 2109495 - DNA, 15 bp, Homo sapiens
aacaatatttttcaa

SEQ ID NO: 2109496 - DNA, 15 bp, Homo sapiens
acaatatttttcaat

SEQ ID NO: 2109497 - DNA, 15 bp, Homo sapiens
caatatttttcaatc

SEQ ID NO: 2109498 - DNA, 15 bp, Homo sapiens
aatatttttcaatct

SEQ ID NO: 2109499 - DNA, 15 bp, Homo sapiens
atatttttcaatctt

SEQ ID NO: 2109500 - DNA, 15 bp, Homo sapiens
tatttttcaatcttc

SEQ ID NO: 2109501 - DNA, 15 bp, Homo sapiens
atttttcaatcttcc

SEQ ID NO: 2109502 - DNA, 15 bp, Homo sapiens
tttttcaatcttcca

SEQ ID NO: 2109503 - DNA, 15 bp, Homo sapiens
ttttcaatcttccaa

SEQ ID NO: 2109504 - DNA, 15 bp, Homo sapiens
tttcaatcttccaaa

SEQ ID NO: 2109505 - DNA, 15 bp, Homo sapiens
ttcaatcttccaaac

SEQ ID NO: 2109506 - DNA, 15 bp, Homo sapiens
tcaatcttccaaaca

SEQ ID NO: 2109507 - DNA, 15 bp, Homo sapiens
caatcttccaaacag

SEQ ID NO: 2109508 - DNA, 15 bp, Homo sapiens
aatcttccaaacagc

SEQ ID NO: 2109509 - DNA, 15 bp, Homo sapiens
atcttccaaacagca

SEQ ID NO: 2109510 - DNA, 15 bp, Homo sapiens
tcttccaaacagcaa

SEQ ID NO: 2109511 - DNA, 15 bp, Homo sapiens
cttccaaacagcaaa

SEQ ID NO: 2109512 - DNA, 15 bp, Homo sapiens
ttccaaacagcaaag

SEQ ID NO: 2109513 - DNA, 15 bp, Homo sapiens
tccaaacagcaaaga

SEQ ID NO: 2109514 - DNA, 15 bp, Homo sapiens
ccaaacagcaaagac

SEQ ID NO: 2109515 - DNA, 15 bp, Homo sapiens
caaacagcaaagact

SEQ ID NO: 2109516 - DNA, 15 bp, Homo sapiens
aaacagcaaagactc

SEQ ID NO: 2109517 - DNA, 15 bp, Homo sapiens
aacagcaaagactca

SEQ ID NO: 2109518 - DNA, 15 bp, Homo sapiens
acagcaaagactcaa

SEQ ID NO: 2109519 - DNA, 15 bp, Homo sapiens
cagcaaagactcaaa

SEQ ID NO: 2109520 - DNA, 15 bp, Homo sapiens
agcaaagactcaaaa

SEQ ID NO: 2109521 - DNA, 15 bp, Homo sapiens
gcaaagactcaaaag

SEQ ID NO: 2109522 - DNA, 15 bp, Homo sapiens
caaagactcaaaaga

SEQ ID NO: 2109523 - DNA, 15 bp, Homo sapiens
aaagactcaaaagag

SEQ ID NO: 2109524 - DNA, 15 bp, Homo sapiens
aagactcaaaagaga

SEQ ID NO: 2109525 - DNA, 15 bp, Homo sapiens
agactcaaaagagat

SEQ ID NO: 2109526 - DNA, 15 bp, Homo sapiens
gactcaaaagagatt

SEQ ID NO: 2109527 - DNA, 15 bp, Homo sapiens
actcaaaagagattc

SEQ ID NO: 2109528 - DNA, 15 bp, Homo sapiens
ctcaaaagagattct

SEQ ID NO: 2109529 - DNA, 15 bp, Homo sapiens
tcaaaagagattctg

SEQ ID NO: 2109530 - DNA, 15 bp, Homo sapiens
caaaagagattctgc

SEQ ID NO: 2109531 - DNA, 15 bp, Homo sapiens
aaaagagattctgca

SEQ ID NO: 2109532 - DNA, 15 bp, Homo sapiens
aaagagattctgcat

SEQ ID NO: 2109533 - DNA, 15 bp, Homo sapiens
aagagattctgcatt

SEQ ID NO: 2109534 - DNA, 15 bp, Homo sapiens
agagattctgcattt

SEQ ID NO: 2109535 - DNA, 15 bp, Homo sapiens
gagattctgcatttc

SEQ ID NO: 2109536 - DNA, 15 bp, Homo sapiens
agattctgcatttca

SEQ ID NO: 2109537 - DNA, 15 bp, Homo sapiens
gattctgcatttcac

SEQ ID NO: 2109538 - DNA, 15 bp, Homo sapiens
attctgcatttcaca

SEQ ID NO: 2109539 - DNA, 15 bp, Homo sapiens
ttctgcatttcacat

SEQ ID NO: 2109540 - DNA, 15 bp, Homo sapiens
tctgcatttcacatc

SEQ ID NO: 2109541 - DNA, 15 bp, Homo sapiens
ctgcatttcacatca

SEQ ID NO: 2109542 - DNA, 15 bp, Homo sapiens
tgcatttcacatcag

SEQ ID NO: 2109543 - DNA, 15 bp, Homo sapiens
gcatttcacatcagt

SEQ ID NO: 2109544 - DNA, 15 bp, Homo sapiens
catttcacatcagtt

SEQ ID NO: 2109545 - DNA, 15 bp, Homo sapiens
atttcacatcagttc

SEQ ID NO: 2109546 - DNA, 15 bp, Homo sapiens
tttcacatcagttca

SEQ ID NO: 2109547 - DNA, 15 bp, Homo sapiens
ttcacatcagttcac

SEQ ID NO: 2109548 - DNA, 15 bp, Homo sapiens
tcacatcagttcaca

SEQ ID NO: 2109549 - DNA, 15 bp, Homo sapiens
cacatcagttcacaa

SEQ ID NO: 2109550 - DNA, 15 bp, Homo sapiens
acatcagttcacaag

SEQ ID NO: 2109551 - DNA, 15 bp, Homo sapiens
catcagttcacaagt

SEQ ID NO: 2109552 - DNA, 15 bp, Homo sapiens
atcagttcacaagtt

SEQ ID NO: 2109553 - DNA, 15 bp, Homo sapiens
tcagttcacaagttc

SEQ ID NO: 2109554 - DNA, 15 bp, Homo sapiens
cagttcacaagttca

SEQ ID NO: 2109555 - DNA, 15 bp, Homo sapiens
agttcacaagttcaa

SEQ ID NO: 2109556 - DNA, 15 bp, Homo sapiens
gttcacaagttcaag

SEQ ID NO: 2109557 - DNA, 15 bp, Homo sapiens
ttcacaagttcaaga

SEQ ID NO: 2109558 - DNA, 15 bp, Homo sapiens
tcacaagttcaagag

SEQ ID NO: 2109559 - DNA, 15 bp, Homo sapiens
cacaagttcaagagt

SEQ ID NO: 2109560 - DNA, 15 bp, Homo sapiens
acaagttcaagagtc

SEQ ID NO: 2109561 - DNA, 15 bp, Homo sapiens
caagttcaagagtct

SEQ ID NO: 2109562 - DNA, 15 bp, Homo sapiens
aagttcaagagtctt

SEQ ID NO: 2109563 - DNA, 15 bp, Homo sapiens
agttcaagagtcttc

SEQ ID NO: 2109564 - DNA, 15 bp, Homo sapiens
gttcaagagtcttcc

SEQ ID NO: 2109565 - DNA, 15 bp, Homo sapiens
ttcaagagtcttcca

SEQ ID NO: 2109566 - DNA, 15 bp, Homo sapiens
tcaagagtcttccat

SEQ ID NO: 2109567 - DNA, 15 bp, Homo sapiens
caagagtcttccatt

SEQ ID NO: 2109568 - DNA, 15 bp, Homo sapiens
aagagtcttccattt

SEQ ID NO: 2109569 - DNA, 15 bp, Homo sapiens
agagtcttccattta

SEQ ID NO: 2109570 - DNA, 15 bp, Homo sapiens
gagtcttccatttat

SEQ ID NO: 2109571 - DNA, 15 bp, Homo sapiens
agtcttccatttatc

SEQ ID NO: 2109572 - DNA, 15 bp, Homo sapiens
gtcttccatttatct

SEQ ID NO: 2109573 - DNA, 15 bp, Homo sapiens
tcttccatttatctt

SEQ ID NO: 2109574 - DNA, 15 bp, Homo sapiens
cttccatttatctta

SEQ ID NO: 2109575 - DNA, 15 bp, Homo sapiens
ttccatttatcttag

SEQ ID NO: 2109576 - DNA, 15 bp, Homo sapiens
tccatttatcttagc

SEQ ID NO: 2109577 - DNA, 15 bp, Homo sapiens
ccatttatcttagct

SEQ ID NO: 2109578 - DNA, 15 bp, Homo sapiens
catttatcttagctt

SEQ ID NO: 2109579 - DNA, 15 bp, Homo sapiens
atttatcttagcttt

SEQ ID NO: 2109580 - DNA, 15 bp, Homo sapiens
tttatcttagctttt

SEQ ID NO: 2109581 - DNA, 15 bp, Homo sapiens
ttatcttagcttttg

SEQ ID NO: 2109582 - DNA, 15 bp, Homo sapiens
tatcttagcttttgg

SEQ ID NO: 2109583 - DNA, 15 bp, Homo sapiens
atcttagcttttgga

SEQ ID NO: 2109584 - DNA, 15 bp, Homo sapiens
tcttagcttttggaa

SEQ ID NO: 2109585 - DNA, 15 bp, Homo sapiens
cttagcttttggaat

SEQ ID NO: 2109586 - DNA, 15 bp, Homo sapiens
ttagcttttggaata

SEQ ID NO: 2109587 - DNA, 15 bp, Homo sapiens
tagcttttggaataa

SEQ ID NO: 2109588 - DNA, 15 bp, Homo sapiens
agcttttggaataaa

SEQ ID NO: 2109589 - DNA, 15 bp, Homo sapiens
gcttttggaataaat

SEQ ID NO: 2109590 - DNA, 15 bp, Homo sapiens
cttttggaataaatt

SEQ ID NO: 2109591 - DNA, 15 bp, Homo sapiens
ttttggaataaatta

SEQ ID NO: 2109592 - DNA, 15 bp, Homo sapiens
tttggaataaattat

SEQ ID NO: 2109593 - DNA, 15 bp, Homo sapiens
ttggaataaattatc

SEQ ID NO: 2109594 - DNA, 15 bp, Homo sapiens
tggaataaattatct

SEQ ID NO: 2109595 - DNA, 15 bp, Homo sapiens
ggaataaattatctt

SEQ ID NO: 2109596 - DNA, 15 bp, Homo sapiens
gaataaattatcttt

SEQ ID NO: 2109597 - DNA, 15 bp, Homo sapiens
aataaattatctttg

SEQ ID NO: 2109598 - DNA, 15 bp, Homo sapiens
ataaattatctttga

SEQ ID NO: 2109599 - DNA, 15 bp, Homo sapiens
taaattatctttgag

SEQ ID NO: 2109600 - DNA, 15 bp, Homo sapiens
aaattatctttgagg

SEQ ID NO: 2109601 - DNA, 15 bp, Homo sapiens
aattatctttgaggt

SEQ ID NO: 2109602 - DNA, 15 bp, Homo sapiens
attatctttgaggta

SEQ ID NO: 2109603 - DNA, 15 bp, Homo sapiens
ttatctttgaggtag

SEQ ID NO: 2109604 - DNA, 15 bp, Homo sapiens
tatctttgaggtaga

SEQ ID NO: 2109605 - DNA, 15 bp, Homo sapiens
atctttgaggtagaa

SEQ ID NO: 2109606 - DNA, 15 bp, Homo sapiens
tctttgaggtagaag

SEQ ID NO: 2109607 - DNA, 15 bp, Homo sapiens
ctttgaggtagaagg

SEQ ID NO: 2109608 - DNA, 15 bp, Homo sapiens
tttgaggtagaagga

SEQ ID NO: 2109609 - DNA, 15 bp, Homo sapiens
ttgaggtagaaggac

SEQ ID NO: 2109610 - DNA, 15 bp, Homo sapiens
tgaggtagaaggaca

SEQ ID NO: 2109611 - DNA, 15 bp, Homo sapiens
gaggtagaaggacaa

SEQ ID NO: 2109612 - DNA, 15 bp, Homo sapiens
aggtagaaggacaat

SEQ ID NO: 2109613 - DNA, 15 bp, Homo sapiens
ggtagaaggacaatg

SEQ ID NO: 2109614 - DNA, 15 bp, Homo sapiens
gtagaaggacaatga

SEQ ID NO: 2109615 - DNA, 15 bp, Homo sapiens
tagaaggacaatgac

SEQ ID NO: 2109616 - DNA, 15 bp, Homo sapiens
agaaggacaatgacg

SEQ ID NO: 2109617 - DNA, 15 bp, Homo sapiens
gaaggacaatgacga

SEQ ID NO: 2109618 - DNA, 15 bp, Homo sapiens
aaggacaatgacgaa

SEQ ID NO: 2109619 - DNA, 15 bp, Homo sapiens
aggacaatgacgaag

SEQ ID NO: 2109620 - DNA, 15 bp, Homo sapiens
ggacaatgacgaagc

SEQ ID NO: 2109621 - DNA, 15 bp, Homo sapiens
gacaatgacgaagcc

SEQ ID NO: 2109622 - DNA, 15 bp, Homo sapiens
acaatgacgaagcca

SEQ ID NO: 2109623 - DNA, 15 bp, Homo sapiens
caatgacgaagccac

SEQ ID NO: 2109624 - DNA, 15 bp, Homo sapiens
aatgacgaagccact

SEQ ID NO: 2109625 - DNA, 15 bp, Homo sapiens
atgacgaagccactt

SEQ ID NO: 2109626 - DNA, 15 bp, Homo sapiens
tgacgaagccactta

SEQ ID NO: 2109627 - DNA, 15 bp, Homo sapiens
gacgaagccacttaa

SEQ ID NO: 2109628 - DNA, 15 bp, Homo sapiens
acgaagccacttaat

SEQ ID NO: 2109629 - DNA, 15 bp, Homo sapiens
cgaagccacttaatt

SEQ ID NO: 2109630 - DNA, 15 bp, Homo sapiens
gaagccacttaattc

SEQ ID NO: 2109631 - DNA, 15 bp, Homo sapiens
aagccacttaattcc

SEQ ID NO: 2109632 - DNA, 15 bp, Homo sapiens
agccacttaattcct

SEQ ID NO: 2109633 - DNA, 15 bp, Homo sapiens
gccacttaattcctt

SEQ ID NO: 2109634 - DNA, 15 bp, Homo sapiens
ccacttaattccttg

SEQ ID NO: 2109635 - DNA, 15 bp, Homo sapiens
cacttaattccttgt

SEQ ID NO: 2109636 - DNA, 15 bp, Homo sapiens
acttaattccttgtg

SEQ ID NO: 2109637 - DNA, 15 bp, Homo sapiens
cttaattccttgtgt

SEQ ID NO: 2109638 - DNA, 15 bp, Homo sapiens
ttaattccttgtgtc

SEQ ID NO: 2109639 - DNA, 15 bp, Homo sapiens
taattccttgtgtct

SEQ ID NO: 2109640 - DNA, 15 bp, Homo sapiens
aattccttgtgtctg

SEQ ID NO: 2109641 - DNA, 15 bp, Homo sapiens
attccttgtgtctgc

SEQ ID NO: 2109642 - DNA, 15 bp, Homo sapiens
ttccttgtgtctgca

SEQ ID NO: 2109643 - DNA, 15 bp, Homo sapiens
tccttgtgtctgcat

SEQ ID NO: 2109644 - DNA, 15 bp, Homo sapiens
ccttgtgtctgcata

SEQ ID NO: 2109645 - DNA, 15 bp, Homo sapiens
cttgtgtctgcataa

SEQ ID NO: 2109646 - DNA, 15 bp, Homo sapiens
ttgtgtctgcataaa

SEQ ID NO: 2109647 - DNA, 15 bp, Homo sapiens
tgtgtctgcataaaa

SEQ ID NO: 2109648 - DNA, 15 bp, Homo sapiens
gtgtctgcataaaag

SEQ ID NO: 2109649 - DNA, 15 bp, Homo sapiens
tgtctgcataaaagc

SEQ ID NO: 2109650 - DNA, 15 bp, Homo sapiens
gtctgcataaaagca

SEQ ID NO: 2109651 - DNA, 15 bp, Homo sapiens
tctgcataaaagcag

SEQ ID NO: 2109652 - DNA, 15 bp, Homo sapiens
ctgcataaaagcaga

SEQ ID NO: 2109653 - DNA, 15 bp, Homo sapiens
tgcataaaagcagat

SEQ ID NO: 2109654 - DNA, 15 bp, Homo sapiens
gcataaaagcagatt

SEQ ID NO: 2109655 - DNA, 15 bp, Homo sapiens
cataaaagcagattt

SEQ ID NO: 2109656 - DNA, 15 bp, Homo sapiens
ataaaagcagattta

SEQ ID NO: 2109657 - DNA, 15 bp, Homo sapiens
taaaagcagatttat

SEQ ID NO: 2109658 - DNA, 15 bp, Homo sapiens
aaaagcagatttatt

SEQ ID NO: 2109659 - DNA, 15 bp, Homo sapiens
aaagcagatttattc

SEQ ID NO: 2109660 - DNA, 15 bp, Homo sapiens
aagcagatttattca

SEQ ID NO: 2109661 - DNA, 15 bp, Homo sapiens
agcagatttattcat

SEQ ID NO: 2109662 - DNA, 15 bp, Homo sapiens
gcagatttattcatc

SEQ ID NO: 2109663 - DNA, 15 bp, Homo sapiens
cagatttattcatca

SEQ ID NO: 2109664 - DNA, 15 bp, Homo sapiens
agatttattcatcac

SEQ ID NO: 2109665 - DNA, 15 bp, Homo sapiens
gatttattcatcaca

SEQ ID NO: 2109666 - DNA, 15 bp, Homo sapiens
atttattcatcacaa

SEQ ID NO: 2109667 - DNA, 15 bp, Homo sapiens
tttattcatcacaac

SEQ ID NO: 2109668 - DNA, 15 bp, Homo sapiens
ttattcatcacaact

SEQ ID NO: 2109669 - DNA, 15 bp, Homo sapiens
tattcatcacaactt

SEQ ID NO: 2109670 - DNA, 15 bp, Homo sapiens
attcatcacaacttc

SEQ ID NO: 2109671 - DNA, 15 bp, Homo sapiens
ttcatcacaacttca

SEQ ID NO: 2109672 - DNA, 15 bp, Homo sapiens
tcatcacaacttcat

SEQ ID NO: 2109673 - DNA, 15 bp, Homo sapiens
catcacaacttcatt

SEQ ID NO: 2109674 - DNA, 15 bp, Homo sapiens
atcacaacttcattt

SEQ ID NO: 2109675 - DNA, 15 bp, Homo sapiens
tcacaacttcattta

SEQ ID NO: 2109676 - DNA, 15 bp, Homo sapiens
cacaacttcatttat

SEQ ID NO: 2109677 - DNA, 15 bp, Homo sapiens
acaacttcatttatg

SEQ ID NO: 2109678 - DNA, 15 bp, Homo sapiens
caacttcatttatgt

SEQ ID NO: 2109679 - DNA, 15 bp, Homo sapiens
aacttcatttatgtg

SEQ ID NO: 2109680 - DNA, 15 bp, Homo sapiens
acttcatttatgtga

SEQ ID NO: 2109681 - DNA, 15 bp, Homo sapiens
cttcatttatgtgaa

SEQ ID NO: 2109682 - DNA, 15 bp, Homo sapiens
ttcatttatgtgaat

SEQ ID NO: 2109683 - DNA, 15 bp, Homo sapiens
tcatttatgtgaata

SEQ ID NO: 2109684 - DNA, 15 bp, Homo sapiens
catttatgtgaataa

SEQ ID NO: 2109685 - DNA, 15 bp, Homo sapiens
atttatgtgaataaa

SEQ ID NO: 2109686 - DNA, 15 bp, Homo sapiens
tttatgtgaataaag

SEQ ID NO: 2109687 - DNA, 15 bp, Homo sapiens
ttatgtgaataaagc

SEQ ID NO: 2109688 - DNA, 15 bp, Homo sapiens
tatgtgaataaagca

SEQ ID NO: 2109689 - DNA, 15 bp, Homo sapiens
atgtgaataaagcag

SEQ ID NO: 2109690 - DNA, 15 bp, Homo sapiens
tgtgaataaagcaga

SEQ ID NO: 2109691 - DNA, 15 bp, Homo sapiens
gtgaataaagcagat

SEQ ID NO: 2109692 - DNA, 15 bp, Homo sapiens
tgaataaagcagatg

SEQ ID NO: 2109693 - DNA, 15 bp, Homo sapiens
gaataaagcagatga

SEQ ID NO: 2109694 - DNA, 15 bp, Homo sapiens
aataaagcagatgat

SEQ ID NO: 2109695 - DNA, 15 bp, Homo sapiens
ataaagcagatgatg

SEQ ID NO: 2109696 - DNA, 15 bp, Homo sapiens
taaagcagatgatga

SEQ ID NO: 2109697 - DNA, 15 bp, Homo sapiens
aaagcagatgatgat

SEQ ID NO: 2109698 - DNA, 15 bp, Homo sapiens
aagcagatgatgata

SEQ ID NO: 2109699 - DNA, 15 bp, Homo sapiens
agcagatgatgataa

SEQ ID NO: 2109700 - DNA, 15 bp, Homo sapiens
gcagatgatgataaa

SEQ ID NO: 2109701 - DNA, 15 bp, Homo sapiens
cagatgatgataaaa

SEQ ID NO: 2109702 - DNA, 15 bp, Homo sapiens
agatgatgataaaat

SEQ ID NO: 2109703 - DNA, 15 bp, Homo sapiens
gatgatgataaaatg

SEQ ID NO: 2109704 - DNA, 15 bp, Homo sapiens
atgatgataaaatgt

SEQ ID NO: 2109705 - DNA, 15 bp, Homo sapiens
tgatgataaaatgtt

SEQ ID NO: 2109706 - DNA, 15 bp, Homo sapiens
gatgataaaatgttc

SEQ ID NO: 2109707 - DNA, 15 bp, Homo sapiens
atgataaaatgttct

SEQ ID NO: 2109708 - DNA, 15 bp, Homo sapiens
tgataaaatgttctc

SEQ ID NO: 2109709 - DNA, 15 bp, Homo sapiens
gataaaatgttctct

SEQ ID NO: 2109710 - DNA, 15 bp, Homo sapiens
ataaaatgttctctt

SEQ ID NO: 2109711 - DNA, 15 bp, Homo sapiens
taaaatgttctctta

SEQ ID NO: 2109712 - DNA, 15 bp, Homo sapiens
aaaatgttctcttat

SEQ ID NO: 2109713 - DNA, 15 bp, Homo sapiens
aaatgttctcttatt

SEQ ID NO: 2109714 - DNA, 15 bp, Homo sapiens
aatgttctcttattc

SEQ ID NO: 2109715 - DNA, 15 bp, Homo sapiens
atgttctcttattct

SEQ ID NO: 2109716 - DNA, 15 bp, Homo sapiens
tgttctcttattctt

SEQ ID NO: 2109717 - DNA, 15 bp, Homo sapiens
gttctcttattcttg

SEQ ID NO: 2109718 - DNA, 15 bp, Homo sapiens
ttctcttattcttgt

SEQ ID NO: 2109719 - DNA, 15 bp, Homo sapiens
tctcttattcttgtt

SEQ ID NO: 2109720 - DNA, 15 bp, Homo sapiens
ctcttattcttgttt

SEQ ID NO: 2109721 - DNA, 15 bp, Homo sapiens
tcttattcttgttta

SEQ ID NO: 2109722 - DNA, 15 bp, Homo sapiens
cttattcttgtttaa

SEQ ID NO: 2109723 - DNA, 15 bp, Homo sapiens
ttattcttgtttaat

SEQ ID NO: 2109724 - DNA, 15 bp, Homo sapiens
tattcttgtttaatc

SEQ ID NO: 2109725 - DNA, 15 bp, Homo sapiens
attcttgtttaatca

SEQ ID NO: 2109726 - DNA, 15 bp, Homo sapiens
ttcttgtttaatcag

SEQ ID NO: 2109727 - DNA, 15 bp, Homo sapiens
tcttgtttaatcagt

SEQ ID NO: 2109728 - DNA, 15 bp, Homo sapiens
cttgtttaatcagta

SEQ ID NO: 2109729 - DNA, 15 bp, Homo sapiens
ttgtttaatcagtag

SEQ ID NO: 2109730 - DNA, 15 bp, Homo sapiens
tgtttaatcagtagt

SEQ ID NO: 2109731 - DNA, 15 bp, Homo sapiens
gtttaatcagtagtg

SEQ ID NO: 2109732 - DNA, 15 bp, Homo sapiens
tttaatcagtagtgg

SEQ ID NO: 2109733 - DNA, 15 bp, Homo sapiens
ttaatcagtagtggt

SEQ ID NO: 2109734 - DNA, 15 bp, Homo sapiens
taatcagtagtggta

SEQ ID NO: 2109735 - DNA, 15 bp, Homo sapiens
aatcagtagtggtag

SEQ ID NO: 2109736 - DNA, 15 bp, Homo sapiens
atcagtagtggtagt

SEQ ID NO: 2109737 - DNA, 15 bp, Homo sapiens
tcagtagtggtagtg

SEQ ID NO: 2109738 - DNA, 15 bp, Homo sapiens
cagtagtggtagtga

SEQ ID NO: 2109739 - DNA, 15 bp, Homo sapiens
agtagtggtagtgat

SEQ ID NO: 2109740 - DNA, 15 bp, Homo sapiens
gtagtggtagtgatg

SEQ ID NO: 2109741 - DNA, 15 bp, Homo sapiens
tagtggtagtgatgc

SEQ ID NO: 2109742 - DNA, 15 bp, Homo sapiens
agtggtagtgatgcc

SEQ ID NO: 2109743 - DNA, 15 bp, Homo sapiens
gtggtagtgatgcca

SEQ ID NO: 2109744 - DNA, 15 bp, Homo sapiens
tggtagtgatgccag

SEQ ID NO: 2109745 - DNA, 15 bp, Homo sapiens
ggtagtgatgccaga

SEQ ID NO: 2109746 - DNA, 15 bp, Homo sapiens
gtagtgatgccagaa

SEQ ID NO: 2109747 - DNA, 15 bp, Homo sapiens
tagtgatgccagaaa

SEQ ID NO: 2109748 - DNA, 15 bp, Homo sapiens
agtgatgccagaaac

SEQ ID NO: 2109749 - DNA, 15 bp, Homo sapiens
gtgatgccagaaact

SEQ ID NO: 2109750 - DNA, 15 bp, Homo sapiens
tgatgccagaaactg

SEQ ID NO: 2109751 - DNA, 15 bp, Homo sapiens
gatgccagaaactgt

SEQ ID NO: 2109752 - DNA, 15 bp, Homo sapiens
atgccagaaactgtg

SEQ ID NO: 2109753 - DNA, 15 bp, Homo sapiens
tgccagaaactgtga

SEQ ID NO: 2109754 - DNA, 15 bp, Homo sapiens
gccagaaactgtgaa

SEQ ID NO: 2109755 - DNA, 15 bp, Homo sapiens
ccagaaactgtgaaa

SEQ ID NO: 2109756 - DNA, 15 bp, Homo sapiens
cagaaactgtgaaag

SEQ ID NO: 2109757 - DNA, 15 bp, Homo sapiens
agaaactgtgaaagg

SEQ ID NO: 2109758 - DNA, 15 bp, Homo sapiens
gaaactgtgaaagga

SEQ ID NO: 2109759 - DNA, 15 bp, Homo sapiens
aaactgtgaaaggaa

SEQ ID NO: 2109760 - DNA, 15 bp, Homo sapiens
aactgtgaaaggaag

SEQ ID NO: 2109761 - DNA, 15 bp, Homo sapiens
actgtgaaaggaagg

SEQ ID NO: 2109762 - DNA, 15 bp, Homo sapiens
ctgtgaaaggaaggc

SEQ ID NO: 2109763 - DNA, 15 bp, Homo sapiens
tgtgaaaggaaggct

SEQ ID NO: 2109764 - DNA, 15 bp, Homo sapiens
gtgaaaggaaggctt

SEQ ID NO: 2109765 - DNA, 15 bp, Homo sapiens
tgaaaggaaggcttt

SEQ ID NO: 2109766 - DNA, 15 bp, Homo sapiens
gaaaggaaggctttt

SEQ ID NO: 2109767 - DNA, 15 bp, Homo sapiens
aaaggaaggctttta

SEQ ID NO: 2109768 - DNA, 15 bp, Homo sapiens
aaggaaggcttttag

SEQ ID NO: 2109769 - DNA, 15 bp, Homo sapiens
aggaaggcttttagt

SEQ ID NO: 2109770 - DNA, 15 bp, Homo sapiens
ggaaggcttttagtt

SEQ ID NO: 2109771 - DNA, 15 bp, Homo sapiens
gaaggcttttagtta

SEQ ID NO: 2109772 - DNA, 15 bp, Homo sapiens
aaggcttttagttac

SEQ ID NO: 2109773 - DNA, 15 bp, Homo sapiens
aggcttttagttact

SEQ ID NO: 2109774 - DNA, 15 bp, Homo sapiens
ggcttttagttactt

SEQ ID NO: 2109775 - DNA, 15 bp, Homo sapiens
gcttttagttacttt

SEQ ID NO: 2109776 - DNA, 15 bp, Homo sapiens
cttttagttactttc

SEQ ID NO: 2109777 - DNA, 15 bp, Homo sapiens
ttttagttactttct

SEQ ID NO: 2109778 - DNA, 15 bp, Homo sapiens
tttagttactttctt

SEQ ID NO: 2109779 - DNA, 15 bp, Homo sapiens
ttagttactttcttc

SEQ ID NO: 2109780 - DNA, 15 bp, Homo sapiens
tagttactttcttct

SEQ ID NO: 2109781 - DNA, 15 bp, Homo sapiens
agttactttcttctt

SEQ ID NO: 2109782 - DNA, 15 bp, Homo sapiens
gttactttcttcttt

SEQ ID NO: 2109783 - DNA, 15 bp, Homo sapiens
ttactttcttctttc

SEQ ID NO: 2109784 - DNA, 15 bp, Homo sapiens
tactttcttctttcc

SEQ ID NO: 2109785 - DNA, 15 bp, Homo sapiens
actttcttctttcca

SEQ ID NO: 2109786 - DNA, 15 bp, Homo sapiens
ctttcttctttccat

SEQ ID NO: 2109787 - DNA, 15 bp, Homo sapiens
tttcttctttccatt

SEQ ID NO: 2109788 - DNA, 15 bp, Homo sapiens
ttcttctttccattt

SEQ ID NO: 2109789 - DNA, 15 bp, Homo sapiens
tcttctttccatttt

SEQ ID NO: 2109790 - DNA, 15 bp, Homo sapiens
cttctttccattttc

SEQ ID NO: 2109791 - DNA, 15 bp, Homo sapiens
ttctttccattttcc

SEQ ID NO: 2109792 - DNA, 15 bp, Homo sapiens
tctttccattttcca

SEQ ID NO: 2109793 - DNA, 15 bp, Homo sapiens
ctttccattttccaa

SEQ ID NO: 2109794 - DNA, 15 bp, Homo sapiens
tttccattttccaat

SEQ ID NO: 2109795 - DNA, 15 bp, Homo sapiens
ttccattttccaata

SEQ ID NO: 2109796 - DNA, 15 bp, Homo sapiens
tccattttccaataa

SEQ ID NO: 2109797 - DNA, 15 bp, Homo sapiens
ccattttccaataat

SEQ ID NO: 2109798 - DNA, 15 bp, Homo sapiens
cattttccaataatc

SEQ ID NO: 2109799 - DNA, 15 bp, Homo sapiens
attttccaataatcc

SEQ ID NO: 2109800 - DNA, 15 bp, Homo sapiens
ttttccaataatcca

SEQ ID NO: 2109801 - DNA, 15 bp, Homo sapiens
tttccaataatccat

SEQ ID NO: 2109802 - DNA, 15 bp, Homo sapiens
ttccaataatccatt

SEQ ID NO: 2109803 - DNA, 15 bp, Homo sapiens
tccaataatccattc

SEQ ID NO: 2109804 - DNA, 15 bp, Homo sapiens
ccaataatccattcc

SEQ ID NO: 2109805 - DNA, 15 bp, Homo sapiens
caataatccattccc

SEQ ID NO: 2109806 - DNA, 15 bp, Homo sapiens
aataatccattcccc

SEQ ID NO: 2109807 - DNA, 15 bp, Homo sapiens
ataatccattcccca

SEQ ID NO: 2109808 - DNA, 15 bp, Homo sapiens
taatccattccccat

SEQ ID NO: 2109809 - DNA, 15 bp, Homo sapiens
aatccattccccatc

SEQ ID NO: 2109810 - DNA, 15 bp, Homo sapiens
atccattccccatcc

SEQ ID NO: 2109811 - DNA, 15 bp, Homo sapiens
tccattccccatccc

SEQ ID NO: 2109812 - DNA, 15 bp, Homo sapiens
ccattccccatcccc

SEQ ID NO: 2109813 - DNA, 15 bp, Homo sapiens
cattccccatcccca

SEQ ID NO: 2109814 - DNA, 15 bp, Homo sapiens
attccccatccccag

SEQ ID NO: 2109815 - DNA, 15 bp, Homo sapiens
ttccccatccccagc

SEQ ID NO: 2109816 - DNA, 15 bp, Homo sapiens
tccccatccccagct

SEQ ID NO: 2109817 - DNA, 15 bp, Homo sapiens
ccccatccccagctg

SEQ ID NO: 2109818 - DNA, 15 bp, Homo sapiens
cccatccccagctga

SEQ ID NO: 2109819 - DNA, 15 bp, Homo sapiens
ccatccccagctgaa

SEQ ID NO: 2109820 - DNA, 15 bp, Homo sapiens
catccccagctgaag

SEQ ID NO: 2109821 - DNA, 15 bp, Homo sapiens
atccccagctgaaga

SEQ ID NO: 2109822 - DNA, 15 bp, Homo sapiens
tccccagctgaagaa

SEQ ID NO: 2109823 - DNA, 15 bp, Homo sapiens
ccccagctgaagaaa

SEQ ID NO: 2109824 - DNA, 15 bp, Homo sapiens
cccagctgaagaaag

SEQ ID NO: 2109825 - DNA, 15 bp, Homo sapiens
ccagctgaagaaagg

SEQ ID NO: 2109826 - DNA, 15 bp, Homo sapiens
cagctgaagaaaggg

SEQ ID NO: 2109827 - DNA, 15 bp, Homo sapiens
agctgaagaaagggg

SEQ ID NO: 2109828 - DNA, 15 bp, Homo sapiens
gctgaagaaaggggt

SEQ ID NO: 2109829 - DNA, 15 bp, Homo sapiens
ctgaagaaaggggtg

SEQ ID NO: 2109830 - DNA, 15 bp, Homo sapiens
tgaagaaaggggtgt

SEQ ID NO: 2109831 - DNA, 15 bp, Homo sapiens
gaagaaaggggtgtt

SEQ ID NO: 2109832 - DNA, 15 bp, Homo sapiens
aagaaaggggtgtta

SEQ ID NO: 2109833 - DNA, 15 bp, Homo sapiens
agaaaggggtgttac

SEQ ID NO: 2109834 - DNA, 15 bp, Homo sapiens
gaaaggggtgttact

SEQ ID NO: 2109835 - DNA, 15 bp, Homo sapiens
aaaggggtgttactg

SEQ ID NO: 2109836 - DNA, 15 bp, Homo sapiens
aaggggtgttactga

SEQ ID NO: 2109837 - DNA, 15 bp, Homo sapiens
aggggtgttactgag

SEQ ID NO: 2109838 - DNA, 15 bp, Homo sapiens
ggggtgttactgagt

SEQ ID NO: 2109839 - DNA, 15 bp, Homo sapiens
gggtgttactgagtc

SEQ ID NO: 2109840 - DNA, 15 bp, Homo sapiens
ggtgttactgagtcc

SEQ ID NO: 2109841 - DNA, 15 bp, Homo sapiens
gtgttactgagtcca

SEQ ID NO: 2109842 - DNA, 15 bp, Homo sapiens
tgttactgagtccag

SEQ ID NO: 2109843 - DNA, 15 bp, Homo sapiens
gttactgagtccagc

SEQ ID NO: 2109844 - DNA, 15 bp, Homo sapiens
ttactgagtccagct

SEQ ID NO: 2109845 - DNA, 15 bp, Homo sapiens
tactgagtccagctg

SEQ ID NO: 2109846 - DNA, 15 bp, Homo sapiens
actgagtccagctga

SEQ ID NO: 2109847 - DNA, 15 bp, Homo sapiens
ctgagtccagctgat

SEQ ID NO: 2109848 - DNA, 15 bp, Homo sapiens
tgagtccagctgata

SEQ ID NO: 2109849 - DNA, 15 bp, Homo sapiens
gagtccagctgatac

SEQ ID NO: 2109850 - DNA, 15 bp, Homo sapiens
agtccagctgatacc

SEQ ID NO: 2109851 - DNA, 15 bp, Homo sapiens
gtccagctgatacca

SEQ ID NO: 2109852 - DNA, 15 bp, Homo sapiens
tccagctgataccac

SEQ ID NO: 2109853 - DNA, 15 bp, Homo sapiens
ccagctgataccaca

SEQ ID NO: 2109854 - DNA, 15 bp, Homo sapiens
cagctgataccacac

SEQ ID NO: 2109855 - DNA, 15 bp, Homo sapiens
agctgataccacaca

SEQ ID NO: 2109856 - DNA, 15 bp, Homo sapiens
gctgataccacacat

SEQ ID NO: 2109857 - DNA, 15 bp, Homo sapiens
ctgataccacacatt

SEQ ID NO: 2109858 - DNA, 15 bp, Homo sapiens
tgataccacacattg

SEQ ID NO: 2109859 - DNA, 15 bp, Homo sapiens
gataccacacattga

SEQ ID NO: 2109860 - DNA, 15 bp, Homo sapiens
ataccacacattgaa

SEQ ID NO: 2109861 - DNA, 15 bp, Homo sapiens
taccacacattgaaa

SEQ ID NO: 2109862 - DNA, 15 bp, Homo sapiens
accacacattgaaag

SEQ ID NO: 2109863 - DNA, 15 bp, Homo sapiens
ccacacattgaaagg

SEQ ID NO: 2109864 - DNA, 15 bp, Homo sapiens
cacacattgaaaggt

SEQ ID NO: 2109865 - DNA, 15 bp, Homo sapiens
acacattgaaaggta

SEQ ID NO: 2109866 - DNA, 15 bp, Homo sapiens
cacattgaaaggtaa

SEQ ID NO: 2109867 - DNA, 15 bp, Homo sapiens
acattgaaaggtaaa

SEQ ID NO: 2109868 - DNA, 15 bp, Homo sapiens
cattgaaaggtaaac

SEQ ID NO: 2109869 - DNA, 15 bp, Homo sapiens
attgaaaggtaaaca

SEQ ID NO: 2109870 - DNA, 15 bp, Homo sapiens
ttgaaaggtaaacat

SEQ ID NO: 2109871 - DNA, 15 bp, Homo sapiens
tgaaaggtaaacatt

SEQ ID NO: 2109872 - DNA, 15 bp, Homo sapiens
gaaaggtaaacatta

SEQ ID NO: 2109873 - DNA, 15 bp, Homo sapiens
aaaggtaaacattaa

SEQ ID NO: 2109874 - DNA, 15 bp, Homo sapiens
aaggtaaacattaat

SEQ ID NO: 2109875 - DNA, 15 bp, Homo sapiens
aggtaaacattaata

SEQ ID NO: 2109876 - DNA, 15 bp, Homo sapiens
ggtaaacattaatat

SEQ ID NO: 2109877 - DNA, 15 bp, Homo sapiens
gtaaacattaatatt

SEQ ID NO: 2109878 - DNA, 15 bp, Homo sapiens
taaacattaatattt

SEQ ID NO: 2109879 - DNA, 15 bp, Homo sapiens
aaacattaatatttc

SEQ ID NO: 2109880 - DNA, 15 bp, Homo sapiens
aacattaatatttca

SEQ ID NO: 2109881 - DNA, 15 bp, Homo sapiens
acattaatatttcaa

SEQ ID NO: 2109882 - DNA, 15 bp, Homo sapiens
cattaatatttcaaa

SEQ ID NO: 2109883 - DNA, 15 bp, Homo sapiens
attaatatttcaaat

SEQ ID NO: 2109884 - DNA, 15 bp, Homo sapiens
ttaatatttcaaatc

SEQ ID NO: 2109885 - DNA, 15 bp, Homo sapiens
taatatttcaaatct

SEQ ID NO: 2109886 - DNA, 15 bp, Homo sapiens
aatatttcaaatctg

SEQ ID NO: 2109887 - DNA, 15 bp, Homo sapiens
atatttcaaatctga

SEQ ID NO: 2109888 - DNA, 15 bp, Homo sapiens
tatttcaaatctgat

SEQ ID NO: 2109889 - DNA, 15 bp, Homo sapiens
atttcaaatctgatg

SEQ ID NO: 2109890 - DNA, 15 bp, Homo sapiens
tttcaaatctgatgt

SEQ ID NO: 2109891 - DNA, 15 bp, Homo sapiens
ttcaaatctgatgtc

SEQ ID NO: 2109892 - DNA, 15 bp, Homo sapiens
tcaaatctgatgtct

SEQ ID NO: 2109893 - DNA, 15 bp, Homo sapiens
caaatctgatgtcta

SEQ ID NO: 2109894 - DNA, 15 bp, Homo sapiens
aaatctgatgtctaa

SEQ ID NO: 2109895 - DNA, 15 bp, Homo sapiens
aatctgatgtctaac

SEQ ID NO: 2109896 - DNA, 15 bp, Homo sapiens
atctgatgtctaact

SEQ ID NO: 2109897 - DNA, 15 bp, Homo sapiens
tctgatgtctaacta

SEQ ID NO: 2109898 - DNA, 15 bp, Homo sapiens
ctgatgtctaactaa

SEQ ID NO: 2109899 - DNA, 15 bp, Homo sapiens
tgatgtctaactaaa

SEQ ID NO: 2109900 - DNA, 15 bp, Homo sapiens
gatgtctaactaaaa

SEQ ID NO: 2109901 - DNA, 15 bp, Homo sapiens
atgtctaactaaaaa

SEQ ID NO: 2109902 - DNA, 15 bp, Homo sapiens
tgtctaactaaaaat

SEQ ID NO: 2109903 - DNA, 15 bp, Homo sapiens
gtctaactaaaaatg

SEQ ID NO: 2109904 - DNA, 15 bp, Homo sapiens
taagataatcttatg

SEQ ID NO: 2109905 - DNA, 15 bp, Homo sapiens
aagataatcttatga

SEQ ID NO: 2109906 - DNA, 15 bp, Homo sapiens
agataatcttatgac

SEQ ID NO: 2109907 - DNA, 15 bp, Homo sapiens
gataatcttatgaca

SEQ ID NO: 2109908 - DNA, 15 bp, Homo sapiens
ataatcttatgacaa

SEQ ID NO: 2109909 - DNA, 15 bp, Homo sapiens
taatcttatgacaag

SEQ ID NO: 2109910 - DNA, 15 bp, Homo sapiens
aatcttatgacaaga

SEQ ID NO: 2109911 - DNA, 15 bp, Homo sapiens
atcttatgacaagaa

SEQ ID NO: 2109912 - DNA, 15 bp, Homo sapiens
tcttatgacaagaag

SEQ ID NO: 2109913 - DNA, 15 bp, Homo sapiens
cttatgacaagaagg

SEQ ID NO: 2109914 - DNA, 15 bp, Homo sapiens
ttatgacaagaaggg

SEQ ID NO: 2109915 - DNA, 15 bp, Homo sapiens
tatgacaagaagggt

SEQ ID NO: 2109916 - DNA, 15 bp, Homo sapiens
atgacaagaagggtc

SEQ ID NO: 2109917 - DNA, 15 bp, Homo sapiens
tgacaagaagggtca

SEQ ID NO: 2109918 - DNA, 15 bp, Homo sapiens
gacaagaagggtcac

SEQ ID NO: 2109919 - DNA, 15 bp, Homo sapiens
acaagaagggtcaca

SEQ ID NO: 2109920 - DNA, 15 bp, Homo sapiens
caagaagggtcacac

SEQ ID NO: 2109921 - DNA, 15 bp, Homo sapiens
aagaagggtcacact

SEQ ID NO: 2109922 - DNA, 15 bp, Homo sapiens
agaagggtcacactg

SEQ ID NO: 2109923 - DNA, 15 bp, Homo sapiens
gaagggtcacactga

SEQ ID NO: 2109924 - DNA, 15 bp, Homo sapiens
aagggtcacactgat

SEQ ID NO: 2109925 - DNA, 15 bp, Homo sapiens
agggtcacactgatt

SEQ ID NO: 2109926 - DNA, 15 bp, Homo sapiens
gggtcacactgattc

SEQ ID NO: 2109927 - DNA, 15 bp, Homo sapiens
ggtcacactgattca

SEQ ID NO: 2109928 - DNA, 15 bp, Homo sapiens
gtcacactgattcac

SEQ ID NO: 2109929 - DNA, 15 bp, Homo sapiens
tcacactgattcact

SEQ ID NO: 2109930 - DNA, 15 bp, Homo sapiens
cacactgattcactt

SEQ ID NO: 2109931 - DNA, 15 bp, Homo sapiens
acactgattcactta

SEQ ID NO: 2109932 - DNA, 15 bp, Homo sapiens
cactgattcacttaa

SEQ ID NO: 2109933 - DNA, 15 bp, Homo sapiens
actgattcacttaat

SEQ ID NO: 2109934 - DNA, 15 bp, Homo sapiens
ctgattcacttaata

SEQ ID NO: 2109935 - DNA, 15 bp, Homo sapiens
tgattcacttaataa

SEQ ID NO: 2109936 - DNA, 15 bp, Homo sapiens
gattcacttaataaa

SEQ ID NO: 2109937 - DNA, 15 bp, Homo sapiens
attcacttaataaat

SEQ ID NO: 2109938 - DNA, 15 bp, Homo sapiens
ttcacttaataaatt

SEQ ID NO: 2109939 - DNA, 15 bp, Homo sapiens
tcacttaataaattc

SEQ ID NO: 2109940 - DNA, 15 bp, Homo sapiens
cacttaataaattcc

SEQ ID NO: 2109941 - DNA, 15 bp, Homo sapiens
acttaataaattcca

SEQ ID NO: 2109942 - DNA, 15 bp, Homo sapiens
cttaataaattccat

SEQ ID NO: 2109943 - DNA, 15 bp, Homo sapiens
ttaataaattccatt

SEQ ID NO: 2109944 - DNA, 15 bp, Homo sapiens
taataaattccattc

SEQ ID NO: 2109945 - DNA, 15 bp, Homo sapiens
aataaattccattct

SEQ ID NO: 2109946 - DNA, 15 bp, Homo sapiens
ataaattccattctt

SEQ ID NO: 2109947 - DNA, 15 bp, Homo sapiens
taaattccattctta

SEQ ID NO: 2109948 - DNA, 15 bp, Homo sapiens
aaattccattcttac

SEQ ID NO: 2109949 - DNA, 15 bp, Homo sapiens
aattccattcttacc

SEQ ID NO: 2109950 - DNA, 15 bp, Homo sapiens
attccattcttacct

SEQ ID NO: 2109951 - DNA, 15 bp, Homo sapiens
ttccattcttaccta

SEQ ID NO: 2109952 - DNA, 15 bp, Homo sapiens
tccattcttacctaa

SEQ ID NO: 2109953 - DNA, 15 bp, Homo sapiens
ccattcttacctaac

SEQ ID NO: 2109954 - DNA, 15 bp, Homo sapiens
cattcttacctaaca

SEQ ID NO: 2109955 - DNA, 15 bp, Homo sapiens
attcttacctaacac

SEQ ID NO: 2109956 - DNA, 15 bp, Homo sapiens
ttcttacctaacaca

SEQ ID NO: 2109957 - DNA, 15 bp, Homo sapiens
tcttacctaacacaa

SEQ ID NO: 2109958 - DNA, 15 bp, Homo sapiens
cttacctaacacaag

SEQ ID NO: 2109959 - DNA, 15 bp, Homo sapiens
ttacctaacacaagg

SEQ ID NO: 2109960 - DNA, 15 bp, Homo sapiens
tacctaacacaaggt

SEQ ID NO: 2109961 - DNA, 15 bp, Homo sapiens
acctaacacaaggtt

SEQ ID NO: 2109962 - DNA, 15 bp, Homo sapiens
cctaacacaaggttt

SEQ ID NO: 2109963 - DNA, 15 bp, Homo sapiens
ctaacacaaggttta

SEQ ID NO: 2109964 - DNA, 15 bp, Homo sapiens
taacacaaggtttag

SEQ ID NO: 2109965 - DNA, 15 bp, Homo sapiens
aacacaaggtttagt

SEQ ID NO: 2109966 - DNA, 15 bp, Homo sapiens
acacaaggtttagtt

SEQ ID NO: 2109967 - DNA, 15 bp, Homo sapiens
cacaaggtttagttg

SEQ ID NO: 2109968 - DNA, 15 bp, Homo sapiens
acaaggtttagttga

SEQ ID NO: 2109969 - DNA, 15 bp, Homo sapiens
caaggtttagttgat

SEQ ID NO: 2109970 - DNA, 15 bp, Homo sapiens
aaggtttagttgata

SEQ ID NO: 2109971 - DNA, 15 bp, Homo sapiens
aggtttagttgataa

SEQ ID NO: 2109972 - DNA, 15 bp, Homo sapiens
ggtttagttgataag

SEQ ID NO: 2109973 - DNA, 15 bp, Homo sapiens
gtttagttgataagc

SEQ ID NO: 2109974 - DNA, 15 bp, Homo sapiens
tttagttgataagca

SEQ ID NO: 2109975 - DNA, 15 bp, Homo sapiens
ttagttgataagcac

SEQ ID NO: 2109976 - DNA, 15 bp, Homo sapiens
tagttgataagcact

SEQ ID NO: 2109977 - DNA, 15 bp, Homo sapiens
agttgataagcactt

SEQ ID NO: 2109978 - DNA, 15 bp, Homo sapiens
gttgataagcacttg

SEQ ID NO: 2109979 - DNA, 15 bp, Homo sapiens
ttgataagcacttgg

SEQ ID NO: 2109980 - DNA, 15 bp, Homo sapiens
tgataagcacttgga

SEQ ID NO: 2109981 - DNA, 15 bp, Homo sapiens
gataagcacttggac

SEQ ID NO: 2109982 - DNA, 15 bp, Homo sapiens
ataagcacttggaca

SEQ ID NO: 2109983 - DNA, 15 bp, Homo sapiens
taagcacttggacaa

SEQ ID NO: 2109984 - DNA, 15 bp, Homo sapiens
aagcacttggacaaa

SEQ ID NO: 2109985 - DNA, 15 bp, Homo sapiens
agcacttggacaaaa

SEQ ID NO: 2109986 - DNA, 15 bp, Homo sapiens
gcacttggacaaaaa

SEQ ID NO: 2109987 - DNA, 15 bp, Homo sapiens
cacttggacaaaaat

SEQ ID NO: 2109988 - DNA, 15 bp, Homo sapiens
acttggacaaaaata

SEQ ID NO: 2109989 - DNA, 15 bp, Homo sapiens
cttggacaaaaataa

SEQ ID NO: 2109990 - DNA, 15 bp, Homo sapiens
ttggacaaaaataat

SEQ ID NO: 2109991 - DNA, 15 bp, Homo sapiens
tggacaaaaataata

SEQ ID NO: 2109992 - DNA, 15 bp, Homo sapiens
ggacaaaaataatac

SEQ ID NO: 2109993 - DNA, 15 bp, Homo sapiens
gacaaaaataatact

SEQ ID NO: 2109994 - DNA, 15 bp, Homo sapiens
acaaaaataatactt

SEQ ID NO: 2109995 - DNA, 15 bp, Homo sapiens
caaaaataatacttt

SEQ ID NO: 2109996 - DNA, 15 bp, Homo sapiens
aaaaataatactttt

SEQ ID NO: 2109997 - DNA, 15 bp, Homo sapiens
aaaataatacttttc

SEQ ID NO: 2109998 - DNA, 15 bp, Homo sapiens
ataatacttttcaaa

SEQ ID NO: 2109999 - DNA, 15 bp, Homo sapiens
taatacttttcaaaa

SEQ ID NO: 2110000 - DNA, 15 bp, Homo sapiens
aatacttttcaaaaa

SEQ ID NO: 2110001 - DNA, 15 bp, Homo sapiens
atacttttcaaaaat

SEQ ID NO: 2110002 - DNA, 15 bp, Homo sapiens
tacttttcaaaaatg

SEQ ID NO: 2110003 - DNA, 15 bp, Homo sapiens
acttttcaaaaatgt

SEQ ID NO: 2110004 - DNA, 15 bp, Homo sapiens
cttttcaaaaatgta

SEQ ID NO: 2110005 - DNA, 15 bp, Homo sapiens
ttttcaaaaatgtaa

SEQ ID NO: 2110006 - DNA, 15 bp, Homo sapiens
tttcaaaaatgtaaa

SEQ ID NO: 2110007 - DNA, 15 bp, Homo sapiens
ttcaaaaatgtaaag

SEQ ID NO: 2110008 - DNA, 15 bp, Homo sapiens
tcaaaaatgtaaagc

SEQ ID NO: 2110009 - DNA, 15 bp, Homo sapiens
caaaaatgtaaagca

SEQ ID NO: 2110010 - DNA, 15 bp, Homo sapiens
aaaaatgtaaagcaa

SEQ ID NO: 2110011 - DNA, 15 bp, Homo sapiens
aaaatgtaaagcaaa

SEQ ID NO: 2110012 - DNA, 15 bp, Homo sapiens
aaatgtaaagcaaac

SEQ ID NO: 2110013 - DNA, 15 bp, Homo sapiens
aatgtaaagcaaact

SEQ ID NO: 2110014 - DNA, 15 bp, Homo sapiens
atgtaaagcaaacta

SEQ ID NO: 2110015 - DNA, 15 bp, Homo sapiens
tgtaaagcaaactag

SEQ ID NO: 2110016 - DNA, 15 bp, Homo sapiens
gtaaagcaaactagt

SEQ ID NO: 2110017 - DNA, 15 bp, Homo sapiens
taaagcaaactagtg

SEQ ID NO: 2110018 - DNA, 15 bp, Homo sapiens
aaagcaaactagtga

SEQ ID NO: 2110019 - DNA, 15 bp, Homo sapiens
aagcaaactagtgag

SEQ ID NO: 2110020 - DNA, 15 bp, Homo sapiens
agcaaactagtgagg

SEQ ID NO: 2110021 - DNA, 15 bp, Homo sapiens
gcaaactagtgagga

SEQ ID NO: 2110022 - DNA, 15 bp, Homo sapiens
caaactagtgaggac

SEQ ID NO: 2110023 - DNA, 15 bp, Homo sapiens
aaactagtgaggaca

SEQ ID NO: 2110024 - DNA, 15 bp, Homo sapiens
aactagtgaggacaa

SEQ ID NO: 2110025 - DNA, 15 bp, Homo sapiens
actagtgaggacaaa

SEQ ID NO: 2110026 - DNA, 15 bp, Homo sapiens
ctagtgaggacaaag

SEQ ID NO: 2110027 - DNA, 15 bp, Homo sapiens
tagtgaggacaaagg

SEQ ID NO: 2110028 - DNA, 15 bp, Homo sapiens
agtgaggacaaagga

SEQ ID NO: 2110029 - DNA, 15 bp, Homo sapiens
gtgaggacaaaggat

SEQ ID NO: 2110030 - DNA, 15 bp, Homo sapiens
gaggacaaaggattt

SEQ ID NO: 2110031 - DNA, 15 bp, Homo sapiens
aggacaaaggatttt

SEQ ID NO: 2110032 - DNA, 15 bp, Homo sapiens
ggacaaaggattttg

SEQ ID NO: 2110033 - DNA, 15 bp, Homo sapiens
gacaaaggattttgt

SEQ ID NO: 2110034 - DNA, 15 bp, Homo sapiens
acaaaggattttgtc

SEQ ID NO: 2110035 - DNA, 15 bp, Homo sapiens
caaaggattttgtcc

SEQ ID NO: 2110036 - DNA, 15 bp, Homo sapiens
aaaggattttgtcct

SEQ ID NO: 2110037 - DNA, 15 bp, Homo sapiens
aaggattttgtcctc

SEQ ID NO: 2110038 - DNA, 15 bp, Homo sapiens
aggattttgtcctca

SEQ ID NO: 2110039 - DNA, 15 bp, Homo sapiens
ggattttgtcctcat

SEQ ID NO: 2110040 - DNA, 15 bp, Homo sapiens
gattttgtcctcatc

SEQ ID NO: 2110041 - DNA, 15 bp, Homo sapiens
attttgtcctcatct

SEQ ID NO: 2110042 - DNA, 15 bp, Homo sapiens
ttttgtcctcatctc

SEQ ID NO: 2110043 - DNA, 15 bp, Homo sapiens
tttgtcctcatctca

SEQ ID NO: 2110044 - DNA, 15 bp, Homo sapiens
ttgtcctcatctcaa

SEQ ID NO: 2110045 - DNA, 15 bp, Homo sapiens
tgtcctcatctcaac

SEQ ID NO: 2110046 - DNA, 15 bp, Homo sapiens
gtcctcatctcaaca

SEQ ID NO: 2110047 - DNA, 15 bp, Homo sapiens
tcctcatctcaacaa

SEQ ID NO: 2110048 - DNA, 15 bp, Homo sapiens
cctcatctcaacaat

SEQ ID NO: 2110049 - DNA, 15 bp, Homo sapiens
ctcatctcaacaatg

SEQ ID NO: 2110050 - DNA, 15 bp, Homo sapiens
tcatctcaacaatga

SEQ ID NO: 2110051 - DNA, 15 bp, Homo sapiens
catctcaacaatgat

SEQ ID NO: 2110052 - DNA, 15 bp, Homo sapiens
atctcaacaatgatc

SEQ ID NO: 2110053 - DNA, 15 bp, Homo sapiens
tctcaacaatgatca

SEQ ID NO: 2110054 - DNA, 15 bp, Homo sapiens
ctcaacaatgatcag

SEQ ID NO: 2110055 - DNA, 15 bp, Homo sapiens
tcaacaatgatcagc

SEQ ID NO: 2110056 - DNA, 15 bp, Homo sapiens
caacaatgatcagct

SEQ ID NO: 2110057 - DNA, 15 bp, Homo sapiens
aacaatgatcagcta

SEQ ID NO: 2110058 - DNA, 15 bp, Homo sapiens
acaatgatcagctat

SEQ ID NO: 2110059 - DNA, 15 bp, Homo sapiens
caatgatcagctatt

SEQ ID NO: 2110060 - DNA, 15 bp, Homo sapiens
aatgatcagctattg

SEQ ID NO: 2110061 - DNA, 15 bp, Homo sapiens
atgatcagctattgg

SEQ ID NO: 2110062 - DNA, 15 bp, Homo sapiens
tgatcagctattgga

SEQ ID NO: 2110063 - DNA, 15 bp, Homo sapiens
gatcagctattggaa

SEQ ID NO: 2110064 - DNA, 15 bp, Homo sapiens
atcagctattggaac

SEQ ID NO: 2110065 - DNA, 15 bp, Homo sapiens
tcagctattggaact

SEQ ID NO: 2110066 - DNA, 15 bp, Homo sapiens
cagctattggaactg

SEQ ID NO: 2110067 - DNA, 15 bp, Homo sapiens
agctattggaactgc

SEQ ID NO: 2110068 - DNA, 15 bp, Homo sapiens
gctattggaactgca

SEQ ID NO: 2110069 - DNA, 15 bp, Homo sapiens
ctattggaactgcat

SEQ ID NO: 2110070 - DNA, 15 bp, Homo sapiens
tattggaactgcatg

SEQ ID NO: 2110071 - DNA, 15 bp, Homo sapiens
attggaactgcatga

SEQ ID NO: 2110072 - DNA, 15 bp, Homo sapiens
ttggaactgcatgaa

SEQ ID NO: 2110073 - DNA, 15 bp, Homo sapiens
tggaactgcatgaaa

SEQ ID NO: 2110074 - DNA, 15 bp, Homo sapiens
ggaactgcatgaaac

SEQ ID NO: 2110075 - DNA, 15 bp, Homo sapiens
gaactgcatgaaact

SEQ ID NO: 2110076 - DNA, 15 bp, Homo sapiens
aactgcatgaaactg

SEQ ID NO: 2110077 - DNA, 15 bp, Homo sapiens
actgcatgaaactga

SEQ ID NO: 2110078 - DNA, 15 bp, Homo sapiens
ctgcatgaaactgaa

SEQ ID NO: 2110079 - DNA, 15 bp, Homo sapiens
tgcatgaaactgaac

SEQ ID NO: 2110080 - DNA, 15 bp, Homo sapiens
gcatgaaactgaaca

SEQ ID NO: 2110081 - DNA, 15 bp, Homo sapiens
catgaaactgaacaa

SEQ ID NO: 2110082 - DNA, 15 bp, Homo sapiens
atgaaactgaacaat

SEQ ID NO: 2110083 - DNA, 15 bp, Homo sapiens
tgaaactgaacaatt

SEQ ID NO: 2110084 - DNA, 15 bp, Homo sapiens
gaaactgaacaattt

SEQ ID NO: 2110085 - DNA, 15 bp, Homo sapiens
aaactgaacaattta

SEQ ID NO: 2110086 - DNA, 15 bp, Homo sapiens
aactgaacaatttaa

SEQ ID NO: 2110087 - DNA, 15 bp, Homo sapiens
actgaacaatttaaa

SEQ ID NO: 2110088 - DNA, 15 bp, Homo sapiens
ctgaacaatttaaac

SEQ ID NO: 2110089 - DNA, 15 bp, Homo sapiens
tgaacaatttaaacc

SEQ ID NO: 2110090 - DNA, 15 bp, Homo sapiens
gaacaatttaaacct

SEQ ID NO: 2110091 - DNA, 15 bp, Homo sapiens
aacaatttaaacctg

SEQ ID NO: 2110092 - DNA, 15 bp, Homo sapiens
acaatttaaacctgg

SEQ ID NO: 2110093 - DNA, 15 bp, Homo sapiens
caatttaaacctgga

SEQ ID NO: 2110094 - DNA, 15 bp, Homo sapiens
aatttaaacctggag

SEQ ID NO: 2110095 - DNA, 15 bp, Homo sapiens
atttaaacctggagc

SEQ ID NO: 2110096 - DNA, 15 bp, Homo sapiens
tttaaacctggagct

SEQ ID NO: 2110097 - DNA, 15 bp, Homo sapiens
ttaaacctggagctg

SEQ ID NO: 2110098 - DNA, 15 bp, Homo sapiens
taaacctggagctgg

SEQ ID NO: 2110099 - DNA, 15 bp, Homo sapiens
aaacctggagctggt

SEQ ID NO: 2110100 - DNA, 15 bp, Homo sapiens
aacctggagctggta

SEQ ID NO: 2110101 - DNA, 15 bp, Homo sapiens
acctggagctggtaa

SEQ ID NO: 2110102 - DNA, 15 bp, Homo sapiens
cctggagctggtaat

SEQ ID NO: 2110103 - DNA, 15 bp, Homo sapiens
ctggagctggtaatg

SEQ ID NO: 2110104 - DNA, 15 bp, Homo sapiens
tggagctggtaatgt

SEQ ID NO: 2110105 - DNA, 15 bp, Homo sapiens
ggagctggtaatgtt

SEQ ID NO: 2110106 - DNA, 15 bp, Homo sapiens
gagctggtaatgttc

SEQ ID NO: 2110107 - DNA, 15 bp, Homo sapiens
agctggtaatgttct

SEQ ID NO: 2110108 - DNA, 15 bp, Homo sapiens
gctggtaatgttctt

SEQ ID NO: 2110109 - DNA, 15 bp, Homo sapiens
ctggtaatgttctta

SEQ ID NO: 2110110 - DNA, 15 bp, Homo sapiens
tggtaatgttcttaa

SEQ ID NO: 2110111 - DNA, 15 bp, Homo sapiens
ggtaatgttcttaag

SEQ ID NO: 2110112 - DNA, 15 bp, Homo sapiens
gtaatgttcttaaga

SEQ ID NO: 2110113 - DNA, 15 bp, Homo sapiens
taatgttcttaagac

SEQ ID NO: 2110114 - DNA, 15 bp, Homo sapiens
aatgttcttaagacc

SEQ ID NO: 2110115 - DNA, 15 bp, Homo sapiens
atgttcttaagacca

SEQ ID NO: 2110116 - DNA, 15 bp, Homo sapiens
tgttcttaagaccaa

SEQ ID NO: 2110117 - DNA, 15 bp, Homo sapiens
gttcttaagaccaat

SEQ ID NO: 2110118 - DNA, 15 bp, Homo sapiens
ttcttaagaccaatt

SEQ ID NO: 2110119 - DNA, 15 bp, Homo sapiens
tcttaagaccaattc

SEQ ID NO: 2110120 - DNA, 15 bp, Homo sapiens
cttaagaccaattca

SEQ ID NO: 2110121 - DNA, 15 bp, Homo sapiens
ttaagaccaattcag

SEQ ID NO: 2110122 - DNA, 15 bp, Homo sapiens
taagaccaattcaga

SEQ ID NO: 2110123 - DNA, 15 bp, Homo sapiens
aagaccaattcagaa

SEQ ID NO: 2110124 - DNA, 15 bp, Homo sapiens
agaccaattcagaac

SEQ ID NO: 2110125 - DNA, 15 bp, Homo sapiens
gaccaattcagaaca

SEQ ID NO: 2110126 - DNA, 15 bp, Homo sapiens
accaattcagaacaa

SEQ ID NO: 2110127 - DNA, 15 bp, Homo sapiens
ccaattcagaacaaa

SEQ ID NO: 2110128 - DNA, 15 bp, Homo sapiens
caattcagaacaaag

SEQ ID NO: 2110129 - DNA, 15 bp, Homo sapiens
aattcagaacaaagg

SEQ ID NO: 2110130 - DNA, 15 bp, Homo sapiens
attcagaacaaaggc

SEQ ID NO: 2110131 - DNA, 15 bp, Homo sapiens
ttcagaacaaaggca

SEQ ID NO: 2110132 - DNA, 15 bp, Homo sapiens
tcagaacaaaggcag

SEQ ID NO: 2110133 - DNA, 15 bp, Homo sapiens
cagaacaaaggcagg

SEQ ID NO: 2110134 - DNA, 15 bp, Homo sapiens
agaacaaaggcaggt

SEQ ID NO: 2110135 - DNA, 15 bp, Homo sapiens
gaacaaaggcaggtt

SEQ ID NO: 2110136 - DNA, 15 bp, Homo sapiens
aacaaaggcaggttg

SEQ ID NO: 2110137 - DNA, 15 bp, Homo sapiens
acaaaggcaggttgc

SEQ ID NO: 2110138 - DNA, 15 bp, Homo sapiens
caaaggcaggttgcc

SEQ ID NO: 2110139 - DNA, 15 bp, Homo sapiens
aaaggcaggttgccc

SEQ ID NO: 2110140 - DNA, 15 bp, Homo sapiens
aaggcaggttgccct

SEQ ID NO: 2110141 - DNA, 15 bp, Homo sapiens
aggcaggttgccctt

SEQ ID NO: 2110142 - DNA, 15 bp, Homo sapiens
ggcaggttgccctta

SEQ ID NO: 2110143 - DNA, 15 bp, Homo sapiens
gcaggttgcccttaa

SEQ ID NO: 2110144 - DNA, 15 bp, Homo sapiens
caggttgcccttaaa

SEQ ID NO: 2110145 - DNA, 15 bp, Homo sapiens
aggttgcccttaaaa

SEQ ID NO: 2110146 - DNA, 15 bp, Homo sapiens
ggttgcccttaaaac

SEQ ID NO: 2110147 - DNA, 15 bp, Homo sapiens
gttgcccttaaaaca

SEQ ID NO: 2110148 - DNA, 15 bp, Homo sapiens
ttgcccttaaaacag

SEQ ID NO: 2110149 - DNA, 15 bp, Homo sapiens
aaggtataattagag

SEQ ID NO: 2110150 - DNA, 15 bp, Homo sapiens
aggtataattagaga

SEQ ID NO: 2110151 - DNA, 15 bp, Homo sapiens
ggtataattagagaa

SEQ ID NO: 2110152 - DNA, 15 bp, Homo sapiens
gtataattagagaag

SEQ ID NO: 2110153 - DNA, 15 bp, Homo sapiens
tataattagagaagc

SEQ ID NO: 2110154 - DNA, 15 bp, Homo sapiens
ataattagagaagct

SEQ ID NO: 2110155 - DNA, 15 bp, Homo sapiens
taattagagaagctg

SEQ ID NO: 2110156 - DNA, 15 bp, Homo sapiens
aattagagaagctgt

SEQ ID NO: 2110157 - DNA, 15 bp, Homo sapiens
attagagaagctgtt

SEQ ID NO: 2110158 - DNA, 15 bp, Homo sapiens
ttagagaagctgttg

SEQ ID NO: 2110159 - DNA, 15 bp, Homo sapiens
tagagaagctgttgc

SEQ ID NO: 2110160 - DNA, 15 bp, Homo sapiens
agagaagctgttgca

SEQ ID NO: 2110161 - DNA, 15 bp, Homo sapiens
gagaagctgttgcat

SEQ ID NO: 2110162 - DNA, 15 bp, Homo sapiens
agaagctgttgcatg

SEQ ID NO: 2110163 - DNA, 15 bp, Homo sapiens
gaagctgttgcatga

SEQ ID NO: 2110164 - DNA, 15 bp, Homo sapiens
aagctgttgcatgag

SEQ ID NO: 2110165 - DNA, 15 bp, Homo sapiens
agctgttgcatgaga

SEQ ID NO: 2110166 - DNA, 15 bp, Homo sapiens
gctgttgcatgagaa

SEQ ID NO: 2110167 - DNA, 15 bp, Homo sapiens
ctgttgcatgagaaa

SEQ ID NO: 2110168 - DNA, 15 bp, Homo sapiens
tgttgcatgagaaat

SEQ ID NO: 2110169 - DNA, 15 bp, Homo sapiens
gttgcatgagaaatc

SEQ ID NO: 2110170 - DNA, 15 bp, Homo sapiens
ttgcatgagaaatca

SEQ ID NO: 2110171 - DNA, 15 bp, Homo sapiens
tgcatgagaaatcat

SEQ ID NO: 2110172 - DNA, 15 bp, Homo sapiens
gcatgagaaatcatg

SEQ ID NO: 2110173 - DNA, 15 bp, Homo sapiens
catgagaaatcatgt

SEQ ID NO: 2110174 - DNA, 15 bp, Homo sapiens
atgagaaatcatgtc

SEQ ID NO: 2110175 - DNA, 15 bp, Homo sapiens
tgagaaatcatgtct

SEQ ID NO: 2110176 - DNA, 15 bp, Homo sapiens
gagaaatcatgtctc

SEQ ID NO: 2110177 - DNA, 15 bp, Homo sapiens
agaaatcatgtctcc

SEQ ID NO: 2110178 - DNA, 15 bp, Homo sapiens
gaaatcatgtctcca

SEQ ID NO: 2110179 - DNA, 15 bp, Homo sapiens
aaatcatgtctccat

SEQ ID NO: 2110180 - DNA, 15 bp, Homo sapiens
aatcatgtctccatc

SEQ ID NO: 2110181 - DNA, 15 bp, Homo sapiens
atcatgtctccatct

SEQ ID NO: 2110182 - DNA, 15 bp, Homo sapiens
tcatgtctccatctc

SEQ ID NO: 2110183 - DNA, 15 bp, Homo sapiens
catgtctccatctcc

SEQ ID NO: 2110184 - DNA, 15 bp, Homo sapiens
atgtctccatctcca

SEQ ID NO: 2110185 - DNA, 15 bp, Homo sapiens
tgtctccatctccat

SEQ ID NO: 2110186 - DNA, 15 bp, Homo sapiens
gtctccatctccatt

SEQ ID NO: 2110187 - DNA, 15 bp, Homo sapiens
tctccatctccattt

SEQ ID NO: 2110188 - DNA, 15 bp, Homo sapiens
ctccatctccatttt

SEQ ID NO: 2110189 - DNA, 15 bp, Homo sapiens
tccatctccattttg

SEQ ID NO: 2110190 - DNA, 15 bp, Homo sapiens
ccatctccattttgc

SEQ ID NO: 2110191 - DNA, 15 bp, Homo sapiens
catctccattttgct

SEQ ID NO: 2110192 - DNA, 15 bp, Homo sapiens
atctccattttgcta

SEQ ID NO: 2110193 - DNA, 15 bp, Homo sapiens
tctccattttgctat

SEQ ID NO: 2110194 - DNA, 15 bp, Homo sapiens
ctccattttgctatg

SEQ ID NO: 2110195 - DNA, 15 bp, Homo sapiens
tccattttgctatgc

SEQ ID NO: 2110196 - DNA, 15 bp, Homo sapiens
ccattttgctatgcg

SEQ ID NO: 2110197 - DNA, 15 bp, Homo sapiens
cattttgctatgcgt

SEQ ID NO: 2110198 - DNA, 15 bp, Homo sapiens
attttgctatgcgtt

SEQ ID NO: 2110199 - DNA, 15 bp, Homo sapiens
ttttgctatgcgtta

SEQ ID NO: 2110200 - DNA, 15 bp, Homo sapiens
tttgctatgcgttat

SEQ ID NO: 2110201 - DNA, 15 bp, Homo sapiens
ttgctatgcgttatc

SEQ ID NO: 2110202 - DNA, 15 bp, Homo sapiens
tgctatgcgttatct

SEQ ID NO: 2110203 - DNA, 15 bp, Homo sapiens
gctatgcgttatctg

SEQ ID NO: 2110204 - DNA, 15 bp, Homo sapiens
ctatgcgttatctga

SEQ ID NO: 2110205 - DNA, 15 bp, Homo sapiens
tatgcgttatctgag

SEQ ID NO: 2110206 - DNA, 15 bp, Homo sapiens
atgcgttatctgagg

SEQ ID NO: 2110207 - DNA, 15 bp, Homo sapiens
tgcgttatctgagga

SEQ ID NO: 2110208 - DNA, 15 bp, Homo sapiens
gcgttatctgaggat

SEQ ID NO: 2110209 - DNA, 15 bp, Homo sapiens
cgttatctgaggatt

SEQ ID NO: 2110210 - DNA, 15 bp, Homo sapiens
gttatctgaggattg

SEQ ID NO: 2110211 - DNA, 15 bp, Homo sapiens
ttatctgaggattgt

SEQ ID NO: 2110212 - DNA, 15 bp, Homo sapiens
tatctgaggattgtt

SEQ ID NO: 2110213 - DNA, 15 bp, Homo sapiens
atctgaggattgttt

SEQ ID NO: 2110214 - DNA, 15 bp, Homo sapiens
tctgaggattgtttc

SEQ ID NO: 2110215 - DNA, 15 bp, Homo sapiens
ctgaggattgtttct

SEQ ID NO: 2110216 - DNA, 15 bp, Homo sapiens
tgaggattgtttctg

SEQ ID NO: 2110217 - DNA, 15 bp, Homo sapiens
gaggattgtttctga

SEQ ID NO: 2110218 - DNA, 15 bp, Homo sapiens
aggattgtttctgaa

SEQ ID NO: 2110219 - DNA, 15 bp, Homo sapiens
ggattgtttctgaaa

SEQ ID NO: 2110220 - DNA, 15 bp, Homo sapiens
gattgtttctgaaag

SEQ ID NO: 2110221 - DNA, 15 bp, Homo sapiens
attgtttctgaaaga

SEQ ID NO: 2110222 - DNA, 15 bp, Homo sapiens
ttgtttctgaaagag

SEQ ID NO: 2110223 - DNA, 15 bp, Homo sapiens
tgtttctgaaagaga

SEQ ID NO: 2110224 - DNA, 15 bp, Homo sapiens
gtttctgaaagagat

SEQ ID NO: 2110225 - DNA, 15 bp, Homo sapiens
tttctgaaagagatc

SEQ ID NO: 2110226 - DNA, 15 bp, Homo sapiens
ttctgaaagagatct

SEQ ID NO: 2110227 - DNA, 15 bp, Homo sapiens
tctgaaagagatcta

SEQ ID NO: 2110228 - DNA, 15 bp, Homo sapiens
ctgaaagagatctat

SEQ ID NO: 2110229 - DNA, 15 bp, Homo sapiens
tgaaagagatctatt

SEQ ID NO: 2110230 - DNA, 15 bp, Homo sapiens
gaaagagatctattt

SEQ ID NO: 2110231 - DNA, 15 bp, Homo sapiens
aaagagatctattta

SEQ ID NO: 2110232 - DNA, 15 bp, Homo sapiens
aagagatctatttag

SEQ ID NO: 2110233 - DNA, 15 bp, Homo sapiens
agagatctatttagg

SEQ ID NO: 2110234 - DNA, 15 bp, Homo sapiens
gagatctatttaggc

SEQ ID NO: 2110235 - DNA, 15 bp, Homo sapiens
agatctatttaggca

SEQ ID NO: 2110236 - DNA, 15 bp, Homo sapiens
gatctatttaggcag

SEQ ID NO: 2110237 - DNA, 15 bp, Homo sapiens
atctatttaggcagt

SEQ ID NO: 2110238 - DNA, 15 bp, Homo sapiens
tctatttaggcagtg

SEQ ID NO: 2110239 - DNA, 15 bp, Homo sapiens
ctatttaggcagtgt

SEQ ID NO: 2110240 - DNA, 15 bp, Homo sapiens
tatttaggcagtgta

SEQ ID NO: 2110241 - DNA, 15 bp, Homo sapiens
atttaggcagtgtat

SEQ ID NO: 2110242 - DNA, 15 bp, Homo sapiens
tttaggcagtgtatg

SEQ ID NO: 2110243 - DNA, 15 bp, Homo sapiens
ttaggcagtgtatgt

SEQ ID NO: 2110244 - DNA, 15 bp, Homo sapiens
taggcagtgtatgta

SEQ ID NO: 2110245 - DNA, 15 bp, Homo sapiens
aggcagtgtatgtat

SEQ ID NO: 2110246 - DNA, 15 bp, Homo sapiens
ggcagtgtatgtatg

SEQ ID NO: 2110247 - DNA, 15 bp, Homo sapiens
gcagtgtatgtatgt

SEQ ID NO: 2110248 - DNA, 15 bp, Homo sapiens
cagtgtatgtatgtg

SEQ ID NO: 2110249 - DNA, 15 bp, Homo sapiens
agtgtatgtatgtgt

SEQ ID NO: 2110250 - DNA, 15 bp, Homo sapiens
gtgtatgtatgtgtc

SEQ ID NO: 2110251 - DNA, 15 bp, Homo sapiens
tgtatgtatgtgtca

SEQ ID NO: 2110252 - DNA, 15 bp, Homo sapiens
gtatgtatgtgtcag

SEQ ID NO: 2110253 - DNA, 15 bp, Homo sapiens
tatgtatgtgtcagc

SEQ ID NO: 2110254 - DNA, 15 bp, Homo sapiens
atgtatgtgtcagca

SEQ ID NO: 2110255 - DNA, 15 bp, Homo sapiens
tgtatgtgtcagcat

SEQ ID NO: 2110256 - DNA, 15 bp, Homo sapiens
gtatgtgtcagcatg

SEQ ID NO: 2110257 - DNA, 15 bp, Homo sapiens
tatgtgtcagcatgt

SEQ ID NO: 2110258 - DNA, 15 bp, Homo sapiens
atgtgtcagcatgta

SEQ ID NO: 2110259 - DNA, 15 bp, Homo sapiens
tgtgtcagcatgtaa

SEQ ID NO: 2110260 - DNA, 15 bp, Homo sapiens
gtgtcagcatgtaaa

SEQ ID NO: 2110261 - DNA, 15 bp, Homo sapiens
tgtcagcatgtaaaa

SEQ ID NO: 2110262 - DNA, 15 bp, Homo sapiens
gtcagcatgtaaaaa

SEQ ID NO: 2110263 - DNA, 15 bp, Homo sapiens
tcagcatgtaaaaag

SEQ ID NO: 2110264 - DNA, 15 bp, Homo sapiens
cagcatgtaaaaagt

SEQ ID NO: 2110265 - DNA, 15 bp, Homo sapiens
agcatgtaaaaagta

SEQ ID NO: 2110266 - DNA, 15 bp, Homo sapiens
gcatgtaaaaagtaa

SEQ ID NO: 2110267 - DNA, 15 bp, Homo sapiens
catgtaaaaagtaaa

SEQ ID NO: 2110268 - DNA, 15 bp, Homo sapiens
atgtaaaaagtaaag

SEQ ID NO: 2110269 - DNA, 15 bp, Homo sapiens
tgtaaaaagtaaaga

SEQ ID NO: 2110270 - DNA, 15 bp, Homo sapiens
gtaaaaagtaaagaa

SEQ ID NO: 2110271 - DNA, 15 bp, Homo sapiens
taaaaagtaaagaac

SEQ ID NO: 2110272 - DNA, 15 bp, Homo sapiens
aaaaagtaaagaact

SEQ ID NO: 2110273 - DNA, 15 bp, Homo sapiens
aaaagtaaagaactg

SEQ ID NO: 2110274 - DNA, 15 bp, Homo sapiens
aaagtaaagaactga

SEQ ID NO: 2110275 - DNA, 15 bp, Homo sapiens
aagtaaagaactgaa

SEQ ID NO: 2110276 - DNA, 15 bp, Homo sapiens
agtaaagaactgaaa

SEQ ID NO: 2110277 - DNA, 15 bp, Homo sapiens
gtaaagaactgaaaa

SEQ ID NO: 2110278 - DNA, 15 bp, Homo sapiens
taaagaactgaaaat

SEQ ID NO: 2110279 - DNA, 15 bp, Homo sapiens
aaagaactgaaaata

SEQ ID NO: 2110280 - DNA, 15 bp, Homo sapiens
aagaactgaaaatag

SEQ ID NO: 2110281 - DNA, 15 bp, Homo sapiens
agaactgaaaataga

SEQ ID NO: 2110282 - DNA, 15 bp, Homo sapiens
gaactgaaaatagac

SEQ ID NO: 2110283 - DNA, 15 bp, Homo sapiens
aactgaaaatagaca

SEQ ID NO: 2110284 - DNA, 15 bp, Homo sapiens
actgaaaatagacaa

SEQ ID NO: 2110285 - DNA, 15 bp, Homo sapiens
ctgaaaatagacaaa

SEQ ID NO: 2110286 - DNA, 15 bp, Homo sapiens
tgaaaatagacaaac

SEQ ID NO: 2110287 - DNA, 15 bp, Homo sapiens
aaatagacaaacctt

SEQ ID NO: 2110288 - DNA, 15 bp, Homo sapiens
aatagacaaaccttg

SEQ ID NO: 2110289 - DNA, 15 bp, Homo sapiens
atagacaaaccttgt

SEQ ID NO: 2110290 - DNA, 15 bp, Homo sapiens
tagacaaaccttgta

SEQ ID NO: 2110291 - DNA, 15 bp, Homo sapiens
agacaaaccttgtaa

SEQ ID NO: 2110292 - DNA, 15 bp, Homo sapiens
gacaaaccttgtaaa

SEQ ID NO: 2110293 - DNA, 15 bp, Homo sapiens
acaaaccttgtaaat

SEQ ID NO: 2110294 - DNA, 15 bp, Homo sapiens
caaaccttgtaaatg

SEQ ID NO: 2110295 - DNA, 15 bp, Homo sapiens
aaaccttgtaaatgc

SEQ ID NO: 2110296 - DNA, 15 bp, Homo sapiens
aaccttgtaaatgca

SEQ ID NO: 2110297 - DNA, 15 bp, Homo sapiens
accttgtaaatgcac

SEQ ID NO: 2110298 - DNA, 15 bp, Homo sapiens
ccttgtaaatgcact

SEQ ID NO: 2110299 - DNA, 15 bp, Homo sapiens
cttgtaaatgcactt

SEQ ID NO: 2110300 - DNA, 15 bp, Homo sapiens
ttgtaaatgcacttc

SEQ ID NO: 2110301 - DNA, 15 bp, Homo sapiens
tgtaaatgcacttca

SEQ ID NO: 2110302 - DNA, 15 bp, Homo sapiens
gtaaatgcacttcaa

SEQ ID NO: 2110303 - DNA, 15 bp, Homo sapiens
taaatgcacttcaaa

SEQ ID NO: 2110304 - DNA, 15 bp, Homo sapiens
aaatgcacttcaaaa

SEQ ID NO: 2110305 - DNA, 15 bp, Homo sapiens
aatgcacttcaaaac

SEQ ID NO: 2110306 - DNA, 15 bp, Homo sapiens
atgcacttcaaaacc

SEQ ID NO: 2110307 - DNA, 15 bp, Homo sapiens
tgcacttcaaaacca

SEQ ID NO: 2110308 - DNA, 15 bp, Homo sapiens
gcacttcaaaaccaa

SEQ ID NO: 2110309 - DNA, 15 bp, Homo sapiens
cacttcaaaaccaat

SEQ ID NO: 2110310 - DNA, 15 bp, Homo sapiens
acttcaaaaccaatt

SEQ ID NO: 2110311 - DNA, 15 bp, Homo sapiens
cttcaaaaccaattg

SEQ ID NO: 2110312 - DNA, 15 bp, Homo sapiens
ttcaaaaccaattgt

SEQ ID NO: 2110313 - DNA, 15 bp, Homo sapiens
tcaaaaccaattgtg

SEQ ID NO: 2110314 - DNA, 15 bp, Homo sapiens
caaaaccaattgtgg

SEQ ID NO: 2110315 - DNA, 15 bp, Homo sapiens
aaaaccaattgtggc

SEQ ID NO: 2110316 - DNA, 15 bp, Homo sapiens
aaaccaattgtggct

SEQ ID NO: 2110317 - DNA, 15 bp, Homo sapiens
aaccaattgtggctc

SEQ ID NO: 2110318 - DNA, 15 bp, Homo sapiens
accaattgtggctca

SEQ ID NO: 2110319 - DNA, 15 bp, Homo sapiens
ccaattgtggctcaa

SEQ ID NO: 2110320 - DNA, 15 bp, Homo sapiens
caattgtggctcaag

SEQ ID NO: 2110321 - DNA, 15 bp, Homo sapiens
aattgtggctcaagt

SEQ ID NO: 2110322 - DNA, 15 bp, Homo sapiens
attgtggctcaagtg

SEQ ID NO: 2110323 - DNA, 15 bp, Homo sapiens
ttgtggctcaagtgt

SEQ ID NO: 2110324 - DNA, 15 bp, Homo sapiens
tgtggctcaagtgta

SEQ ID NO: 2110325 - DNA, 15 bp, Homo sapiens
gtggctcaagtgtag

SEQ ID NO: 2110326 - DNA, 15 bp, Homo sapiens
tggctcaagtgtagg

SEQ ID NO: 2110327 - DNA, 15 bp, Homo sapiens
ggctcaagtgtaggt

SEQ ID NO: 2110328 - DNA, 15 bp, Homo sapiens
gctcaagtgtaggtg

SEQ ID NO: 2110329 - DNA, 15 bp, Homo sapiens
ctcaagtgtaggtgg

SEQ ID NO: 2110330 - DNA, 15 bp, Homo sapiens
tcaagtgtaggtggt

SEQ ID NO: 2110331 - DNA, 15 bp, Homo sapiens
caagtgtaggtggtt

SEQ ID NO: 2110332 - DNA, 15 bp, Homo sapiens
aagtgtaggtggttc

SEQ ID NO: 2110333 - DNA, 15 bp, Homo sapiens
agtgtaggtggttcc

SEQ ID NO: 2110334 - DNA, 15 bp, Homo sapiens
gtgtaggtggttccc

SEQ ID NO: 2110335 - DNA, 15 bp, Homo sapiens
tgtaggtggttcccc

SEQ ID NO: 2110336 - DNA, 15 bp, Homo sapiens
gtaggtggttcccca

SEQ ID NO: 2110337 - DNA, 15 bp, Homo sapiens
taggtggttccccaa

SEQ ID NO: 2110338 - DNA, 15 bp, Homo sapiens
aggtggttccccaag

SEQ ID NO: 2110339 - DNA, 15 bp, Homo sapiens
ggtggttccccaagg

SEQ ID NO: 2110340 - DNA, 15 bp, Homo sapiens
gtggttccccaaggc

SEQ ID NO: 2110341 - DNA, 15 bp, Homo sapiens
tggttccccaaggct

SEQ ID NO: 2110342 - DNA, 15 bp, Homo sapiens
ggttccccaaggctg

SEQ ID NO: 2110343 - DNA, 15 bp, Homo sapiens
gttccccaaggctgg

SEQ ID NO: 2110344 - DNA, 15 bp, Homo sapiens
ttccccaaggctggt

SEQ ID NO: 2110345 - DNA, 15 bp, Homo sapiens
tccccaaggctggta

SEQ ID NO: 2110346 - DNA, 15 bp, Homo sapiens
ccccaaggctggtac

SEQ ID NO: 2110347 - DNA, 15 bp, Homo sapiens
cccaaggctggtacc

SEQ ID NO: 2110348 - DNA, 15 bp, Homo sapiens
ccaaggctggtacca

SEQ ID NO: 2110349 - DNA, 15 bp, Homo sapiens
caaggctggtaccaa

SEQ ID NO: 2110350 - DNA, 15 bp, Homo sapiens
aaggctggtaccaat

SEQ ID NO: 2110351 - DNA, 15 bp, Homo sapiens
aggctggtaccaatg

SEQ ID NO: 2110352 - DNA, 15 bp, Homo sapiens
ggctggtaccaatga

SEQ ID NO: 2110353 - DNA, 15 bp, Homo sapiens
gctggtaccaatgag

SEQ ID NO: 2110354 - DNA, 15 bp, Homo sapiens
ctggtaccaatgaga

SEQ ID NO: 2110355 - DNA, 15 bp, Homo sapiens
tggtaccaatgagac

SEQ ID NO: 2110356 - DNA, 15 bp, Homo sapiens
ggtaccaatgagact

SEQ ID NO: 2110357 - DNA, 15 bp, Homo sapiens
gtaccaatgagactg

SEQ ID NO: 2110358 - DNA, 15 bp, Homo sapiens
taccaatgagactgg

SEQ ID NO: 2110359 - DNA, 15 bp, Homo sapiens
accaatgagactggg

SEQ ID NO: 2110360 - DNA, 15 bp, Homo sapiens
ccaatgagactgggg

SEQ ID NO: 2110361 - DNA, 15 bp, Homo sapiens
caatgagactggggt

SEQ ID NO: 2110362 - DNA, 15 bp, Homo sapiens
aatgagactggggtt

SEQ ID NO: 2110363 - DNA, 15 bp, Homo sapiens
atgagactggggttt

SEQ ID NO: 2110364 - DNA, 15 bp, Homo sapiens
tgagactggggtttg

SEQ ID NO: 2110365 - DNA, 15 bp, Homo sapiens
gagactggggtttgg

SEQ ID NO: 2110366 - DNA, 15 bp, Homo sapiens
agactggggtttggg

SEQ ID NO: 2110367 - DNA, 15 bp, Homo sapiens
gactggggtttggga

SEQ ID NO: 2110368 - DNA, 15 bp, Homo sapiens
actggggtttgggaa

SEQ ID NO: 2110369 - DNA, 15 bp, Homo sapiens
ctggggtttgggaat

SEQ ID NO: 2110370 - DNA, 15 bp, Homo sapiens
tggggtttgggaatt

SEQ ID NO: 2110371 - DNA, 15 bp, Homo sapiens
ggggtttgggaatta

SEQ ID NO: 2110372 - DNA, 15 bp, Homo sapiens
gggtttgggaattag

SEQ ID NO: 2110373 - DNA, 15 bp, Homo sapiens
ggtttgggaattagt

SEQ ID NO: 2110374 - DNA, 15 bp, Homo sapiens
gtttgggaattagtt

SEQ ID NO: 2110375 - DNA, 15 bp, Homo sapiens
tttgggaattagttg

SEQ ID NO: 2110376 - DNA, 15 bp, Homo sapiens
ttgggaattagttgg

SEQ ID NO: 2110377 - DNA, 15 bp, Homo sapiens
tgggaattagttggt

SEQ ID NO: 2110378 - DNA, 15 bp, Homo sapiens
gggaattagttggtc

SEQ ID NO: 2110379 - DNA, 15 bp, Homo sapiens
ggaattagttggtca

SEQ ID NO: 2110380 - DNA, 15 bp, Homo sapiens
gaattagttggtcat

SEQ ID NO: 2110381 - DNA, 15 bp, Homo sapiens
ccagctacctgctta

SEQ ID NO: 2110382 - DNA, 15 bp, Homo sapiens
cagctacctgcttat

SEQ ID NO: 2110383 - DNA, 15 bp, Homo sapiens
agctacctgcttatc

SEQ ID NO: 2110384 - DNA, 15 bp, Homo sapiens
gctacctgcttatcg

SEQ ID NO: 2110385 - DNA, 15 bp, Homo sapiens
ctacctgcttatcgt

SEQ ID NO: 2110386 - DNA, 15 bp, Homo sapiens
tacctgcttatcgta

SEQ ID NO: 2110387 - DNA, 15 bp, Homo sapiens
acctgcttatcgtag

SEQ ID NO: 2110388 - DNA, 15 bp, Homo sapiens
cctgcttatcgtagt

SEQ ID NO: 2110389 - DNA, 15 bp, Homo sapiens
ctgcttatcgtagtg

SEQ ID NO: 2110390 - DNA, 15 bp, Homo sapiens
tgcttatcgtagtgg

SEQ ID NO: 2110391 - DNA, 15 bp, Homo sapiens
gcttatcgtagtggc

SEQ ID NO: 2110392 - DNA, 15 bp, Homo sapiens
cttatcgtagtggcc

SEQ ID NO: 2110393 - DNA, 15 bp, Homo sapiens
ttatcgtagtggcca

SEQ ID NO: 2110394 - DNA, 15 bp, Homo sapiens
tatcgtagtggccag

SEQ ID NO: 2110395 - DNA, 15 bp, Homo sapiens
atcgtagtggccaga

SEQ ID NO: 2110396 - DNA, 15 bp, Homo sapiens
tcgtagtggccagag

SEQ ID NO: 2110397 - DNA, 15 bp, Homo sapiens
cgtagtggccagagt

SEQ ID NO: 2110398 - DNA, 15 bp, Homo sapiens
gtagtggccagagtg

SEQ ID NO: 2110399 - DNA, 15 bp, Homo sapiens
tagtggccagagtgg

SEQ ID NO: 2110400 - DNA, 15 bp, Homo sapiens
agtggccagagtggt

SEQ ID NO: 2110401 - DNA, 15 bp, Homo sapiens
gtggccagagtggta

SEQ ID NO: 2110402 - DNA, 15 bp, Homo sapiens
tggccagagtggtag

SEQ ID NO: 2110403 - DNA, 15 bp, Homo sapiens
ggccagagtggtaga

SEQ ID NO: 2110404 - DNA, 15 bp, Homo sapiens
gccagagtggtagaa

SEQ ID NO: 2110405 - DNA, 15 bp, Homo sapiens
ccagagtggtagaag

SEQ ID NO: 2110406 - DNA, 15 bp, Homo sapiens
cagagtggtagaaga

SEQ ID NO: 2110407 - DNA, 15 bp, Homo sapiens
agagtggtagaagag

SEQ ID NO: 2110408 - DNA, 15 bp, Homo sapiens
gagtggtagaagaga

SEQ ID NO: 2110409 - DNA, 15 bp, Homo sapiens
agtggtagaagagat

SEQ ID NO: 2110410 - DNA, 15 bp, Homo sapiens
gtggtagaagagata

SEQ ID NO: 2110411 - DNA, 15 bp, Homo sapiens
tggtagaagagatac

SEQ ID NO: 2110412 - DNA, 15 bp, Homo sapiens
ggtagaagagatacg

SEQ ID NO: 2110413 - DNA, 15 bp, Homo sapiens
gtagaagagatacgg

SEQ ID NO: 2110414 - DNA, 15 bp, Homo sapiens
tagaagagatacgga

SEQ ID NO: 2110415 - DNA, 15 bp, Homo sapiens
agaagagatacggag

SEQ ID NO: 2110416 - DNA, 15 bp, Homo sapiens
gaagagatacggagt

SEQ ID NO: 2110417 - DNA, 15 bp, Homo sapiens
aagagatacggagta

SEQ ID NO: 2110418 - DNA, 15 bp, Homo sapiens
agagatacggagtag

SEQ ID NO: 2110419 - DNA, 15 bp, Homo sapiens
gagatacggagtagg

SEQ ID NO: 2110420 - DNA, 15 bp, Homo sapiens
agatacggagtagga

SEQ ID NO: 2110421 - DNA, 15 bp, Homo sapiens
gatacggagtaggaa

SEQ ID NO: 2110422 - DNA, 15 bp, Homo sapiens
atacggagtaggaat

SEQ ID NO: 2110423 - DNA, 15 bp, Homo sapiens
tacggagtaggaatt

SEQ ID NO: 2110424 - DNA, 15 bp, Homo sapiens
acggagtaggaatta

SEQ ID NO: 2110425 - DNA, 15 bp, Homo sapiens
cggagtaggaattaa

SEQ ID NO: 2110426 - DNA, 15 bp, Homo sapiens
ggagtaggaattaaa

SEQ ID NO: 2110427 - DNA, 15 bp, Homo sapiens
gagtaggaattaaac

SEQ ID NO: 2110428 - DNA, 15 bp, Homo sapiens
agtaggaattaaacc

SEQ ID NO: 2110429 - DNA, 15 bp, Homo sapiens
gtaggaattaaacca

SEQ ID NO: 2110430 - DNA, 15 bp, Homo sapiens
taggaattaaaccac

SEQ ID NO: 2110431 - DNA, 15 bp, Homo sapiens
aggaattaaaccaca

SEQ ID NO: 2110432 - DNA, 15 bp, Homo sapiens
ggaattaaaccacac

SEQ ID NO: 2110433 - DNA, 15 bp, Homo sapiens
gaattaaaccacaca

SEQ ID NO: 2110434 - DNA, 15 bp, Homo sapiens
aattaaaccacacaa

SEQ ID NO: 2110435 - DNA, 15 bp, Homo sapiens
attaaaccacacaat

SEQ ID NO: 2110436 - DNA, 15 bp, Homo sapiens
ttaaaccacacaatg

SEQ ID NO: 2110437 - DNA, 15 bp, Homo sapiens
taaaccacacaatgt

SEQ ID NO: 2110438 - DNA, 15 bp, Homo sapiens
aaaccacacaatgtt

SEQ ID NO: 2110439 - DNA, 15 bp, Homo sapiens
aaccacacaatgtta

SEQ ID NO: 2110440 - DNA, 15 bp, Homo sapiens
accacacaatgttat

SEQ ID NO: 2110441 - DNA, 15 bp, Homo sapiens
ccacacaatgttatt

SEQ ID NO: 2110442 - DNA, 15 bp, Homo sapiens
cacacaatgttattt

SEQ ID NO: 2110443 - DNA, 15 bp, Homo sapiens
acacaatgttattta

SEQ ID NO: 2110444 - DNA, 15 bp, Homo sapiens
cacaatgttatttag

SEQ ID NO: 2110445 - DNA, 15 bp, Homo sapiens
acaatgttatttagg

SEQ ID NO: 2110446 - DNA, 15 bp, Homo sapiens
caatgttatttaggg

SEQ ID NO: 2110447 - DNA, 15 bp, Homo sapiens
aatgttatttaggga

SEQ ID NO: 2110448 - DNA, 15 bp, Homo sapiens
atgttatttagggac

SEQ ID NO: 2110449 - DNA, 15 bp, Homo sapiens
tgttatttagggact

SEQ ID NO: 2110450 - DNA, 15 bp, Homo sapiens
gttatttagggacta

SEQ ID NO: 2110451 - DNA, 15 bp, Homo sapiens
ttatttagggactaa

SEQ ID NO: 2110452 - DNA, 15 bp, Homo sapiens
tatttagggactaag

SEQ ID NO: 2110453 - DNA, 15 bp, Homo sapiens
atttagggactaagc

SEQ ID NO: 2110454 - DNA, 15 bp, Homo sapiens
tttagggactaagcc

SEQ ID NO: 2110455 - DNA, 15 bp, Homo sapiens
ttagggactaagcca

SEQ ID NO: 2110456 - DNA, 15 bp, Homo sapiens
tagggactaagccat

SEQ ID NO: 2110457 - DNA, 15 bp, Homo sapiens
agggactaagccatg

SEQ ID NO: 2110458 - DNA, 15 bp, Homo sapiens
gggactaagccatgc

SEQ ID NO: 2110459 - DNA, 15 bp, Homo sapiens
ggactaagccatgcc

SEQ ID NO: 2110460 - DNA, 15 bp, Homo sapiens
gactaagccatgccc

SEQ ID NO: 2110461 - DNA, 15 bp, Homo sapiens
actaagccatgcccc

SEQ ID NO: 2110462 - DNA, 15 bp, Homo sapiens
ctaagccatgcccct

SEQ ID NO: 2110463 - DNA, 15 bp, Homo sapiens
taagccatgccccta

SEQ ID NO: 2110464 - DNA, 15 bp, Homo sapiens
aagccatgcccctaa

SEQ ID NO: 2110465 - DNA, 15 bp, Homo sapiens
agccatgcccctaac

SEQ ID NO: 2110466 - DNA, 15 bp, Homo sapiens
gccatgcccctaaca

SEQ ID NO: 2110467 - DNA, 15 bp, Homo sapiens
ccatgcccctaacaa

SEQ ID NO: 2110468 - DNA, 15 bp, Homo sapiens
catgcccctaacaag

SEQ ID NO: 2110469 - DNA, 15 bp, Homo sapiens
atgcccctaacaaga

SEQ ID NO: 2110470 - DNA, 15 bp, Homo sapiens
tgcccctaacaagaa

SEQ ID NO: 2110471 - DNA, 15 bp, Homo sapiens
gcccctaacaagaaa

SEQ ID NO: 2110472 - DNA, 15 bp, Homo sapiens
cccctaacaagaaaa

SEQ ID NO: 2110473 - DNA, 15 bp, Homo sapiens
ccctaacaagaaaac

SEQ ID NO: 2110474 - DNA, 15 bp, Homo sapiens
cctaacaagaaaaca

SEQ ID NO: 2110475 - DNA, 15 bp, Homo sapiens
ctaacaagaaaacaa

SEQ ID NO: 2110476 - DNA, 15 bp, Homo sapiens
taacaagaaaacaag

SEQ ID NO: 2110477 - DNA, 15 bp, Homo sapiens
aacaagaaaacaagc

SEQ ID NO: 2110478 - DNA, 15 bp, Homo sapiens
acaagaaaacaagcc

SEQ ID NO: 2110479 - DNA, 15 bp, Homo sapiens
caagaaaacaagcca

SEQ ID NO: 2110480 - DNA, 15 bp, Homo sapiens
aagaaaacaagccaa

SEQ ID NO: 2110481 - DNA, 15 bp, Homo sapiens
agaaaacaagccaaa

SEQ ID NO: 2110482 - DNA, 15 bp, Homo sapiens
gaaaacaagccaaaa

SEQ ID NO: 2110483 - DNA, 15 bp, Homo sapiens
aaaacaagccaaaag

SEQ ID NO: 2110484 - DNA, 15 bp, Homo sapiens
aaacaagccaaaagg

SEQ ID NO: 2110485 - DNA, 15 bp, Homo sapiens
aacaagccaaaagga

SEQ ID NO: 2110486 - DNA, 15 bp, Homo sapiens
acaagccaaaaggaa

SEQ ID NO: 2110487 - DNA, 15 bp, Homo sapiens
caagccaaaaggaaa

SEQ ID NO: 2110488 - DNA, 15 bp, Homo sapiens
aagccaaaaggaaag

SEQ ID NO: 2110489 - DNA, 15 bp, Homo sapiens
agccaaaaggaaagt

SEQ ID NO: 2110490 - DNA, 15 bp, Homo sapiens
gccaaaaggaaagta

SEQ ID NO: 2110491 - DNA, 15 bp, Homo sapiens
ccaaaaggaaagtat

SEQ ID NO: 2110492 - DNA, 15 bp, Homo sapiens
caaaaggaaagtatt

SEQ ID NO: 2110493 - DNA, 15 bp, Homo sapiens
aaaaggaaagtatta

SEQ ID NO: 2110494 - DNA, 15 bp, Homo sapiens
aaaggaaagtattag

SEQ ID NO: 2110495 - DNA, 15 bp, Homo sapiens
aaggaaagtattagg

SEQ ID NO: 2110496 - DNA, 15 bp, Homo sapiens
aggaaagtattaggc

SEQ ID NO: 2110497 - DNA, 15 bp, Homo sapiens
ggaaagtattaggca

SEQ ID NO: 2110498 - DNA, 15 bp, Homo sapiens
gaaagtattaggcat

SEQ ID NO: 2110499 - DNA, 15 bp, Homo sapiens
aaagtattaggcatt

SEQ ID NO: 2110500 - DNA, 15 bp, Homo sapiens
aagtattaggcattc

SEQ ID NO: 2110501 - DNA, 15 bp, Homo sapiens
agtattaggcattct

SEQ ID NO: 2110502 - DNA, 15 bp, Homo sapiens
aaaatggttgagata

SEQ ID NO: 2110503 - DNA, 15 bp, Homo sapiens
aaatggttgagataa

SEQ ID NO: 2110504 - DNA, 15 bp, Homo sapiens
aatggttgagataac

SEQ ID NO: 2110505 - DNA, 15 bp, Homo sapiens
atggttgagataaca

SEQ ID NO: 2110506 - DNA, 15 bp, Homo sapiens
tggttgagataacag

SEQ ID NO: 2110507 - DNA, 15 bp, Homo sapiens
ggttgagataacagt

SEQ ID NO: 2110508 - DNA, 15 bp, Homo sapiens
gttgagataacagtc

SEQ ID NO: 2110509 - DNA, 15 bp, Homo sapiens
ttgagataacagtca

SEQ ID NO: 2110510 - DNA, 15 bp, Homo sapiens
tgagataacagtcac

SEQ ID NO: 2110511 - DNA, 15 bp, Homo sapiens
gagataacagtcact

SEQ ID NO: 2110512 - DNA, 15 bp, Homo sapiens
agataacagtcactt

SEQ ID NO: 2110513 - DNA, 15 bp, Homo sapiens
gataacagtcacttc

SEQ ID NO: 2110514 - DNA, 15 bp, Homo sapiens
ataacagtcacttct

SEQ ID NO: 2110515 - DNA, 15 bp, Homo sapiens
taacagtcacttctg

SEQ ID NO: 2110516 - DNA, 15 bp, Homo sapiens
aacagtcacttctgt

SEQ ID NO: 2110517 - DNA, 15 bp, Homo sapiens
acagtcacttctgtt

SEQ ID NO: 2110518 - DNA, 15 bp, Homo sapiens
cagtcacttctgttt

SEQ ID NO: 2110519 - DNA, 15 bp, Homo sapiens
agtcacttctgtttg

SEQ ID NO: 2110520 - DNA, 15 bp, Homo sapiens
gtcacttctgtttga

SEQ ID NO: 2110521 - DNA, 15 bp, Homo sapiens
tcacttctgtttgat

SEQ ID NO: 2110522 - DNA, 15 bp, Homo sapiens
cacttctgtttgatg

SEQ ID NO: 2110523 - DNA, 15 bp, Homo sapiens
acttctgtttgatga

SEQ ID NO: 2110524 - DNA, 15 bp, Homo sapiens
cttctgtttgatgaa

SEQ ID NO: 2110525 - DNA, 15 bp, Homo sapiens
ttctgtttgatgaag

SEQ ID NO: 2110526 - DNA, 15 bp, Homo sapiens
tctgtttgatgaaga

SEQ ID NO: 2110527 - DNA, 15 bp, Homo sapiens
ctgtttgatgaagag

SEQ ID NO: 2110528 - DNA, 15 bp, Homo sapiens
tgtttgatgaagagt

SEQ ID NO: 2110529 - DNA, 15 bp, Homo sapiens
gtttgatgaagagta

SEQ ID NO: 2110530 - DNA, 15 bp, Homo sapiens
tttgatgaagagtat

SEQ ID NO: 2110531 - DNA, 15 bp, Homo sapiens
ttgatgaagagtatc

SEQ ID NO: 2110532 - DNA, 15 bp, Homo sapiens
tgatgaagagtatca

SEQ ID NO: 2110533 - DNA, 15 bp, Homo sapiens
gatgaagagtatcac

SEQ ID NO: 2110534 - DNA, 15 bp, Homo sapiens
atgaagagtatcact

SEQ ID NO: 2110535 - DNA, 15 bp, Homo sapiens
tgaagagtatcactt

SEQ ID NO: 2110536 - DNA, 15 bp, Homo sapiens
gaagagtatcacttc

SEQ ID NO: 2110537 - DNA, 15 bp, Homo sapiens
aagagtatcacttca

SEQ ID NO: 2110538 - DNA, 15 bp, Homo sapiens
agagtatcacttcat

SEQ ID NO: 2110539 - DNA, 15 bp, Homo sapiens
gagtatcacttcatt

SEQ ID NO: 2110540 - DNA, 15 bp, Homo sapiens
agtatcacttcattc

SEQ ID NO: 2110541 - DNA, 15 bp, Homo sapiens
gtatcacttcattcc

SEQ ID NO: 2110542 - DNA, 15 bp, Homo sapiens
tatcacttcattcca

SEQ ID NO: 2110543 - DNA, 15 bp, Homo sapiens
atcacttcattccat

SEQ ID NO: 2110544 - DNA, 15 bp, Homo sapiens
tcacttcattccatt

SEQ ID NO: 2110545 - DNA, 15 bp, Homo sapiens
cacttcattccattt

SEQ ID NO: 2110546 - DNA, 15 bp, Homo sapiens
acttcattccatttt

SEQ ID NO: 2110547 - DNA, 15 bp, Homo sapiens
cttcattccattttt

SEQ ID NO: 2110548 - DNA, 15 bp, Homo sapiens
ttcattccatttttg

SEQ ID NO: 2110549 - DNA, 15 bp, Homo sapiens
tcattccatttttgt

SEQ ID NO: 2110550 - DNA, 15 bp, Homo sapiens
cattccatttttgtg

SEQ ID NO: 2110551 - DNA, 15 bp, Homo sapiens
attccatttttgtgt

SEQ ID NO: 2110552 - DNA, 15 bp, Homo sapiens
ttccatttttgtgtt

SEQ ID NO: 2110553 - DNA, 15 bp, Homo sapiens
tccatttttgtgttt

SEQ ID NO: 2110554 - DNA, 15 bp, Homo sapiens
ttttgtgtttttgtt

SEQ ID NO: 2110555 - DNA, 15 bp, Homo sapiens
tttgtgtttttgttg

SEQ ID NO: 2110556 - DNA, 15 bp, Homo sapiens
ttgtgtttttgttgc

SEQ ID NO: 2110557 - DNA, 15 bp, Homo sapiens
tgtgtttttgttgca

SEQ ID NO: 2110558 - DNA, 15 bp, Homo sapiens
gtgtttttgttgcat

SEQ ID NO: 2110559 - DNA, 15 bp, Homo sapiens
tgtttttgttgcatc

SEQ ID NO: 2110560 - DNA, 15 bp, Homo sapiens
gtttttgttgcatct

SEQ ID NO: 2110561 - DNA, 15 bp, Homo sapiens
tttttgttgcatctc

SEQ ID NO: 2110562 - DNA, 15 bp, Homo sapiens
ttttgttgcatctcc

SEQ ID NO: 2110563 - DNA, 15 bp, Homo sapiens
tttgttgcatctcca

SEQ ID NO: 2110564 - DNA, 15 bp, Homo sapiens
ttgttgcatctccaa

SEQ ID NO: 2110565 - DNA, 15 bp, Homo sapiens
tgttgcatctccaag

SEQ ID NO: 2110566 - DNA, 15 bp, Homo sapiens
gttgcatctccaagt

SEQ ID NO: 2110567 - DNA, 15 bp, Homo sapiens
ttgcatctccaagtc

SEQ ID NO: 2110568 - DNA, 15 bp, Homo sapiens
tgcatctccaagtca

SEQ ID NO: 2110569 - DNA, 15 bp, Homo sapiens
gcatctccaagtcag

SEQ ID NO: 2110570 - DNA, 15 bp, Homo sapiens
catctccaagtcaga

SEQ ID NO: 2110571 - DNA, 15 bp, Homo sapiens
atctccaagtcagaa

SEQ ID NO: 2110572 - DNA, 15 bp, Homo sapiens
tctccaagtcagaat

SEQ ID NO: 2110573 - DNA, 15 bp, Homo sapiens
ctccaagtcagaata

SEQ ID NO: 2110574 - DNA, 15 bp, Homo sapiens
tccaagtcagaataa

SEQ ID NO: 2110575 - DNA, 15 bp, Homo sapiens
ccaagtcagaataaa

SEQ ID NO: 2110576 - DNA, 15 bp, Homo sapiens
caagtcagaataaat

SEQ ID NO: 2110577 - DNA, 15 bp, Homo sapiens
aagtcagaataaatg

SEQ ID NO: 2110578 - DNA, 15 bp, Homo sapiens
agtcagaataaatgc

SEQ ID NO: 2110579 - DNA, 15 bp, Homo sapiens
gtcagaataaatgcc

SEQ ID NO: 2110580 - DNA, 15 bp, Homo sapiens
tcagaataaatgcct

SEQ ID NO: 2110581 - DNA, 15 bp, Homo sapiens
cagaataaatgcctt

SEQ ID NO: 2110582 - DNA, 15 bp, Homo sapiens
agaataaatgccttt

SEQ ID NO: 2110583 - DNA, 15 bp, Homo sapiens
gaataaatgcctttt

SEQ ID NO: 2110584 - DNA, 15 bp, Homo sapiens
aataaatgccttttg

SEQ ID NO: 2110585 - DNA, 15 bp, Homo sapiens
ataaatgccttttgg

SEQ ID NO: 2110586 - DNA, 15 bp, Homo sapiens
taaatgccttttgga

SEQ ID NO: 2110587 - DNA, 15 bp, Homo sapiens
aaatgccttttggag

SEQ ID NO: 2110588 - DNA, 15 bp, Homo sapiens
aatgccttttggagc

SEQ ID NO: 2110589 - DNA, 15 bp, Homo sapiens
atgccttttggagca

SEQ ID NO: 2110590 - DNA, 15 bp, Homo sapiens
tgccttttggagcag

SEQ ID NO: 2110591 - DNA, 15 bp, Homo sapiens
gccttttggagcaga

SEQ ID NO: 2110592 - DNA, 15 bp, Homo sapiens
ccttttggagcagat

SEQ ID NO: 2110593 - DNA, 15 bp, Homo sapiens
cttttggagcagata

SEQ ID NO: 2110594 - DNA, 15 bp, Homo sapiens
ttttggagcagatat

SEQ ID NO: 2110595 - DNA, 15 bp, Homo sapiens
tttggagcagatata

SEQ ID NO: 2110596 - DNA, 15 bp, Homo sapiens
ttggagcagatatat

SEQ ID NO: 2110597 - DNA, 15 bp, Homo sapiens
tggagcagatatatt

SEQ ID NO: 2110598 - DNA, 15 bp, Homo sapiens
ggagcagatatattt

SEQ ID NO: 2110599 - DNA, 15 bp, Homo sapiens
gagcagatatatttc

SEQ ID NO: 2110600 - DNA, 15 bp, Homo sapiens
agcagatatatttca

SEQ ID NO: 2110601 - DNA, 15 bp, Homo sapiens
gcagatatatttcat

SEQ ID NO: 2110602 - DNA, 15 bp, Homo sapiens
cagatatatttcatt

SEQ ID NO: 2110603 - DNA, 15 bp, Homo sapiens
agatatatttcattt

SEQ ID NO: 2110604 - DNA, 15 bp, Homo sapiens
gatatatttcattta

SEQ ID NO: 2110605 - DNA, 15 bp, Homo sapiens
atatatttcatttag

SEQ ID NO: 2110606 - DNA, 15 bp, Homo sapiens
tatatttcatttagc

SEQ ID NO: 2110607 - DNA, 15 bp, Homo sapiens
atatttcatttagca

SEQ ID NO: 2110608 - DNA, 15 bp, Homo sapiens
tatttcatttagcat

SEQ ID NO: 2110609 - DNA, 15 bp, Homo sapiens
atttcatttagcatt

SEQ ID NO: 2110610 - DNA, 15 bp, Homo sapiens
tttcatttagcattt

SEQ ID NO: 2110611 - DNA, 15 bp, Homo sapiens
ttcatttagcattta

SEQ ID NO: 2110612 - DNA, 15 bp, Homo sapiens
tcatttagcatttag

SEQ ID NO: 2110613 - DNA, 15 bp, Homo sapiens
catttagcatttagt

SEQ ID NO: 2110614 - DNA, 15 bp, Homo sapiens
atttagcatttagta

SEQ ID NO: 2110615 - DNA, 15 bp, Homo sapiens
tttagcatttagtat

SEQ ID NO: 2110616 - DNA, 15 bp, Homo sapiens
ttagcatttagtatc

SEQ ID NO: 2110617 - DNA, 15 bp, Homo sapiens
tagcatttagtatca

SEQ ID NO: 2110618 - DNA, 15 bp, Homo sapiens
agcatttagtatcat

SEQ ID NO: 2110619 - DNA, 15 bp, Homo sapiens
gcatttagtatcatc

SEQ ID NO: 2110620 - DNA, 15 bp, Homo sapiens
catttagtatcatct

SEQ ID NO: 2110621 - DNA, 15 bp, Homo sapiens
atttagtatcatctt

SEQ ID NO: 2110622 - DNA, 15 bp, Homo sapiens
tttagtatcatcttc

SEQ ID NO: 2110623 - DNA, 15 bp, Homo sapiens
ttagtatcatcttca

SEQ ID NO: 2110624 - DNA, 15 bp, Homo sapiens
tagtatcatcttcat

SEQ ID NO: 2110625 - DNA, 15 bp, Homo sapiens
agtatcatcttcatc

SEQ ID NO: 2110626 - DNA, 15 bp, Homo sapiens
gtatcatcttcatca

SEQ ID NO: 2110627 - DNA, 15 bp, Homo sapiens
tatcatcttcatcaa

SEQ ID NO: 2110628 - DNA, 15 bp, Homo sapiens
atcatcttcatcaat

SEQ ID NO: 2110629 - DNA, 15 bp, Homo sapiens
tcatcttcatcaata

SEQ ID NO: 2110630 - DNA, 15 bp, Homo sapiens
catcttcatcaatac

SEQ ID NO: 2110631 - DNA, 15 bp, Homo sapiens
atcttcatcaatact

SEQ ID NO: 2110632 - DNA, 15 bp, Homo sapiens
tcttcatcaatactc

SEQ ID NO: 2110633 - DNA, 15 bp, Homo sapiens
cttcatcaatactcg

SEQ ID NO: 2110634 - DNA, 15 bp, Homo sapiens
ttcatcaatactcgt

SEQ ID NO: 2110635 - DNA, 15 bp, Homo sapiens
tcatcaatactcgta

SEQ ID NO: 2110636 - DNA, 15 bp, Homo sapiens
catcaatactcgtat

SEQ ID NO: 2110637 - DNA, 15 bp, Homo sapiens
atcaatactcgtatg

SEQ ID NO: 2110638 - DNA, 15 bp, Homo sapiens
tcaatactcgtatga

SEQ ID NO: 2110639 - DNA, 15 bp, Homo sapiens
caatactcgtatgaa

SEQ ID NO: 2110640 - DNA, 15 bp, Homo sapiens
aatactcgtatgaac

SEQ ID NO: 2110641 - DNA, 15 bp, Homo sapiens
atactcgtatgaacg

SEQ ID NO: 2110642 - DNA, 15 bp, Homo sapiens
tactcgtatgaacga

SEQ ID NO: 2110643 - DNA, 15 bp, Homo sapiens
actcgtatgaacgaa

SEQ ID NO: 2110644 - DNA, 15 bp, Homo sapiens
ctcgtatgaacgaaa

SEQ ID NO: 2110645 - DNA, 15 bp, Homo sapiens
tcgtatgaacgaaaa

SEQ ID NO: 2110646 - DNA, 15 bp, Homo sapiens
cgtatgaacgaaaaa

SEQ ID NO: 2110647 - DNA, 15 bp, Homo sapiens
gtatgaacgaaaaaa

SEQ ID NO: 2110648 - DNA, 15 bp, Homo sapiens
tatgaacgaaaaaat

SEQ ID NO: 2110649 - DNA, 15 bp, Homo sapiens
atgaacgaaaaaata

SEQ ID NO: 2110650 - DNA, 15 bp, Homo sapiens
tgaacgaaaaaataa

SEQ ID NO: 2110651 - DNA, 15 bp, Homo sapiens
gaacgaaaaaataaa

SEQ ID NO: 2110652 - DNA, 15 bp, Homo sapiens
aacgaaaaaataaaa

SEQ ID NO: 2110653 - DNA, 15 bp, Homo sapiens
acgaaaaaataaaaa

SEQ ID NO: 2110654 - DNA, 15 bp, Homo sapiens
cgaaaaaataaaaag

SEQ ID NO: 2110655 - DNA, 15 bp, Homo sapiens
gaaaaaataaaaagc

SEQ ID NO: 2110656 - DNA, 15 bp, Homo sapiens
aaaaaataaaaagcc

SEQ ID NO: 2110657 - DNA, 15 bp, Homo sapiens
aaaaataaaaagccc

SEQ ID NO: 2110658 - DNA, 15 bp, Homo sapiens
aaaataaaaagccct

SEQ ID NO: 2110659 - DNA, 15 bp, Homo sapiens
aaataaaaagccctc

SEQ ID NO: 2110660 - DNA, 15 bp, Homo sapiens
aataaaaagccctct

SEQ ID NO: 2110661 - DNA, 15 bp, Homo sapiens
ataaaaagccctctc

SEQ ID NO: 2110662 - DNA, 15 bp, Homo sapiens
taaaaagccctctct

SEQ ID NO: 2110663 - DNA, 15 bp, Homo sapiens
aaaaagccctctctt

SEQ ID NO: 2110664 - DNA, 15 bp, Homo sapiens
aaaagccctctctta

SEQ ID NO: 2110665 - DNA, 15 bp, Homo sapiens
aaagccctctcttat

SEQ ID NO: 2110666 - DNA, 15 bp, Homo sapiens
aagccctctcttatt

SEQ ID NO: 2110667 - DNA, 15 bp, Homo sapiens
agccctctcttattc

SEQ ID NO: 2110668 - DNA, 15 bp, Homo sapiens
gccctctcttattcc

SEQ ID NO: 2110669 - DNA, 15 bp, Homo sapiens
ccctctcttattccc

SEQ ID NO: 2110670 - DNA, 15 bp, Homo sapiens
cctctcttattccca

SEQ ID NO: 2110671 - DNA, 15 bp, Homo sapiens
ctctcttattcccac

SEQ ID NO: 2110672 - DNA, 15 bp, Homo sapiens
tctcttattcccact

SEQ ID NO: 2110673 - DNA, 15 bp, Homo sapiens
ctcttattcccactc

SEQ ID NO: 2110674 - DNA, 15 bp, Homo sapiens
tcttattcccactct

SEQ ID NO: 2110675 - DNA, 15 bp, Homo sapiens
cttattcccactcta

SEQ ID NO: 2110676 - DNA, 15 bp, Homo sapiens
ttattcccactctac

SEQ ID NO: 2110677 - DNA, 15 bp, Homo sapiens
tattcccactctaca

SEQ ID NO: 2110678 - DNA, 15 bp, Homo sapiens
attcccactctacaa

SEQ ID NO: 2110679 - DNA, 15 bp, Homo sapiens
ttcccactctacaac

SEQ ID NO: 2110680 - DNA, 15 bp, Homo sapiens
tcccactctacaacg

SEQ ID NO: 2110681 - DNA, 15 bp, Homo sapiens
cccactctacaacgc

SEQ ID NO: 2110682 - DNA, 15 bp, Homo sapiens
ccactctacaacgca

SEQ ID NO: 2110683 - DNA, 15 bp, Homo sapiens
cactctacaacgcat

SEQ ID NO: 2110684 - DNA, 15 bp, Homo sapiens
actctacaacgcatg

SEQ ID NO: 2110685 - DNA, 15 bp, Homo sapiens
ctctacaacgcatgt

SEQ ID NO: 2110686 - DNA, 15 bp, Homo sapiens
tctacaacgcatgtc

SEQ ID NO: 2110687 - DNA, 15 bp, Homo sapiens
ctacaacgcatgtca

SEQ ID NO: 2110688 - DNA, 15 bp, Homo sapiens
tacaacgcatgtcaa

SEQ ID NO: 2110689 - DNA, 15 bp, Homo sapiens
acaacgcatgtcaaa

SEQ ID NO: 2110690 - DNA, 15 bp, Homo sapiens
caacgcatgtcaaag

SEQ ID NO: 2110691 - DNA, 15 bp, Homo sapiens
aacgcatgtcaaagg

SEQ ID NO: 2110692 - DNA, 15 bp, Homo sapiens
gtatcgaacatatca

SEQ ID NO: 2110693 - DNA, 15 bp, Homo sapiens
tatcgaacatatcac

SEQ ID NO: 2110694 - DNA, 15 bp, Homo sapiens
atcgaacatatcaca

SEQ ID NO: 2110695 - DNA, 15 bp, Homo sapiens
tcgaacatatcacag

SEQ ID NO: 2110696 - DNA, 15 bp, Homo sapiens
cgaacatatcacagc

SEQ ID NO: 2110697 - DNA, 15 bp, Homo sapiens
gaacatatcacagct

SEQ ID NO: 2110698 - DNA, 15 bp, Homo sapiens
aacatatcacagcta

SEQ ID NO: 2110699 - DNA, 15 bp, Homo sapiens
acatatcacagctac

SEQ ID NO: 2110700 - DNA, 15 bp, Homo sapiens
catatcacagctact

SEQ ID NO: 2110701 - DNA, 15 bp, Homo sapiens
atatcacagctactc

SEQ ID NO: 2110702 - DNA, 15 bp, Homo sapiens
tatcacagctactca

SEQ ID NO: 2110703 - DNA, 15 bp, Homo sapiens
atcacagctactcaa

SEQ ID NO: 2110704 - DNA, 15 bp, Homo sapiens
tcacagctactcaat

SEQ ID NO: 2110705 - DNA, 15 bp, Homo sapiens
cacagctactcaatg

SEQ ID NO: 2110706 - DNA, 15 bp, Homo sapiens
acagctactcaatga

SEQ ID NO: 2110707 - DNA, 15 bp, Homo sapiens
cagctactcaatgaa

SEQ ID NO: 2110708 - DNA, 15 bp, Homo sapiens
agctactcaatgaag

SEQ ID NO: 2110709 - DNA, 15 bp, Homo sapiens
gctactcaatgaagt

SEQ ID NO: 2110710 - DNA, 15 bp, Homo sapiens
ctactcaatgaagtt

SEQ ID NO: 2110711 - DNA, 15 bp, Homo sapiens
tactcaatgaagttt

SEQ ID NO: 2110712 - DNA, 15 bp, Homo sapiens
actcaatgaagtttc

SEQ ID NO: 2110713 - DNA, 15 bp, Homo sapiens
ctcaatgaagtttct

SEQ ID NO: 2110714 - DNA, 15 bp, Homo sapiens
tcaatgaagtttctt

SEQ ID NO: 2110715 - DNA, 15 bp, Homo sapiens
caatgaagtttcttc

SEQ ID NO: 2110716 - DNA, 15 bp, Homo sapiens
aatgaagtttcttct

SEQ ID NO: 2110717 - DNA, 15 bp, Homo sapiens
atgaagtttcttctc

SEQ ID NO: 2110718 - DNA, 15 bp, Homo sapiens
tgaagtttcttctca

SEQ ID NO: 2110719 - DNA, 15 bp, Homo sapiens
gaagtttcttctcaa

SEQ ID NO: 2110720 - DNA, 15 bp, Homo sapiens
aagtttcttctcaac

SEQ ID NO: 2110721 - DNA, 15 bp, Homo sapiens
agtttcttctcaact

SEQ ID NO: 2110722 - DNA, 15 bp, Homo sapiens
gtttcttctcaacta

SEQ ID NO: 2110723 - DNA, 15 bp, Homo sapiens
tttcttctcaactaa

SEQ ID NO: 2110724 - DNA, 15 bp, Homo sapiens
ttcttctcaactaaa

SEQ ID NO: 2110725 - DNA, 15 bp, Homo sapiens
tcttctcaactaaag

SEQ ID NO: 2110726 - DNA, 15 bp, Homo sapiens
cttctcaactaaaga

SEQ ID NO: 2110727 - DNA, 15 bp, Homo sapiens
ttctcaactaaagaa

SEQ ID NO: 2110728 - DNA, 15 bp, Homo sapiens
tctcaactaaagaaa

SEQ ID NO: 2110729 - DNA, 15 bp, Homo sapiens
ctcaactaaagaaac

SEQ ID NO: 2110730 - DNA, 15 bp, Homo sapiens
tcaactaaagaaaca

SEQ ID NO: 2110731 - DNA, 15 bp, Homo sapiens
caactaaagaaacac

SEQ ID NO: 2110732 - DNA, 15 bp, Homo sapiens
aactaaagaaacaca

SEQ ID NO: 2110733 - DNA, 15 bp, Homo sapiens
actaaagaaacacag

SEQ ID NO: 2110734 - DNA, 15 bp, Homo sapiens
ctaaagaaacacagt

SEQ ID NO: 2110735 - DNA, 15 bp, Homo sapiens
taaagaaacacagtc

SEQ ID NO: 2110736 - DNA, 15 bp, Homo sapiens
aaagaaacacagtct

SEQ ID NO: 2110737 - DNA, 15 bp, Homo sapiens
aagaaacacagtctc

SEQ ID NO: 2110738 - DNA, 15 bp, Homo sapiens
agaaacacagtctct

SEQ ID NO: 2110739 - DNA, 15 bp, Homo sapiens
gaaacacagtctctt

SEQ ID NO: 2110740 - DNA, 15 bp, Homo sapiens
aaacacagtctctta

SEQ ID NO: 2110741 - DNA, 15 bp, Homo sapiens
aacacagtctcttag

SEQ ID NO: 2110742 - DNA, 15 bp, Homo sapiens
acacagtctcttaga

SEQ ID NO: 2110743 - DNA, 15 bp, Homo sapiens
cacagtctcttagag

SEQ ID NO: 2110744 - DNA, 15 bp, Homo sapiens
acagtctcttagaga

SEQ ID NO: 2110745 - DNA, 15 bp, Homo sapiens
cagtctcttagagaa

SEQ ID NO: 2110746 - DNA, 15 bp, Homo sapiens
agtctcttagagaat

SEQ ID NO: 2110747 - DNA, 15 bp, Homo sapiens
gtctcttagagaatt

SEQ ID NO: 2110748 - DNA, 15 bp, Homo sapiens
tctcttagagaattt

SEQ ID NO: 2110749 - DNA, 15 bp, Homo sapiens
ctcttagagaatttg

SEQ ID NO: 2110750 - DNA, 15 bp, Homo sapiens
tcttagagaatttgt

SEQ ID NO: 2110751 - DNA, 15 bp, Homo sapiens
cttagagaatttgtt

SEQ ID NO: 2110752 - DNA, 15 bp, Homo sapiens
ttagagaatttgttc

SEQ ID NO: 2110753 - DNA, 15 bp, Homo sapiens
tagagaatttgttcc

SEQ ID NO: 2110754 - DNA, 15 bp, Homo sapiens
agagaatttgttcct

SEQ ID NO: 2110755 - DNA, 15 bp, Homo sapiens
gagaatttgttcctg

SEQ ID NO: 2110756 - DNA, 15 bp, Homo sapiens
agaatttgttcctgt

SEQ ID NO: 2110757 - DNA, 15 bp, Homo sapiens
gaatttgttcctgtg

SEQ ID NO: 2110758 - DNA, 15 bp, Homo sapiens
aatttgttcctgtgt

SEQ ID NO: 2110759 - DNA, 15 bp, Homo sapiens
atttgttcctgtgtt

SEQ ID NO: 2110760 - DNA, 15 bp, Homo sapiens
tttgttcctgtgttt

SEQ ID NO: 2110761 - DNA, 15 bp, Homo sapiens
ttgttcctgtgtttc

SEQ ID NO: 2110762 - DNA, 15 bp, Homo sapiens
tgttcctgtgtttcc

SEQ ID NO: 2110763 - DNA, 15 bp, Homo sapiens
gttcctgtgtttcca

SEQ ID NO: 2110764 - DNA, 15 bp, Homo sapiens
ttcctgtgtttccac

SEQ ID NO: 2110765 - DNA, 15 bp, Homo sapiens
tcctgtgtttccacc

SEQ ID NO: 2110766 - DNA, 15 bp, Homo sapiens
cctgtgtttccacca

SEQ ID NO: 2110767 - DNA, 15 bp, Homo sapiens
ctgtgtttccaccat

SEQ ID NO: 2110768 - DNA, 15 bp, Homo sapiens
tgtgtttccaccata

SEQ ID NO: 2110769 - DNA, 15 bp, Homo sapiens
gtgtttccaccataa

SEQ ID NO: 2110770 - DNA, 15 bp, Homo sapiens
tgtttccaccataag

SEQ ID NO: 2110771 - DNA, 15 bp, Homo sapiens
gtttccaccataaga

SEQ ID NO: 2110772 - DNA, 15 bp, Homo sapiens
tttccaccataagat

SEQ ID NO: 2110773 - DNA, 15 bp, Homo sapiens
ttccaccataagata

SEQ ID NO: 2110774 - DNA, 15 bp, Homo sapiens
tccaccataagataa

SEQ ID NO: 2110775 - DNA, 15 bp, Homo sapiens
ccaccataagataaa

SEQ ID NO: 2110776 - DNA, 15 bp, Homo sapiens
caccataagataaat

SEQ ID NO: 2110777 - DNA, 15 bp, Homo sapiens
accataagataaatg

SEQ ID NO: 2110778 - DNA, 15 bp, Homo sapiens
ccataagataaatga

SEQ ID NO: 2110779 - DNA, 15 bp, Homo sapiens
cataagataaatgag

SEQ ID NO: 2110780 - DNA, 15 bp, Homo sapiens
ataagataaatgaga

SEQ ID NO: 2110781 - DNA, 15 bp, Homo sapiens
taagataaatgagat

SEQ ID NO: 2110782 - DNA, 15 bp, Homo sapiens
aagataaatgagata

SEQ ID NO: 2110783 - DNA, 15 bp, Homo sapiens
agataaatgagataa

SEQ ID NO: 2110784 - DNA, 15 bp, Homo sapiens
gataaatgagataaa

SEQ ID NO: 2110785 - DNA, 15 bp, Homo sapiens
ataaatgagataaag

SEQ ID NO: 2110786 - DNA, 15 bp, Homo sapiens
taaatgagataaagt

SEQ ID NO: 2110787 - DNA, 15 bp, Homo sapiens
aaatgagataaagtg

SEQ ID NO: 2110788 - DNA, 15 bp, Homo sapiens
aatgagataaagtgc

SEQ ID NO: 2110789 - DNA, 15 bp, Homo sapiens
atgagataaagtgca

SEQ ID NO: 2110790 - DNA, 15 bp, Homo sapiens
tgagataaagtgcac

SEQ ID NO: 2110791 - DNA, 15 bp, Homo sapiens
gagataaagtgcact

SEQ ID NO: 2110792 - DNA, 15 bp, Homo sapiens
agataaagtgcactt

SEQ ID NO: 2110793 - DNA, 15 bp, Homo sapiens
gataaagtgcacttt

SEQ ID NO: 2110794 - DNA, 15 bp, Homo sapiens
ataaagtgcactttg

SEQ ID NO: 2110795 - DNA, 15 bp, Homo sapiens
taaagtgcactttgg

SEQ ID NO: 2110796 - DNA, 15 bp, Homo sapiens
aaagtgcactttggt

SEQ ID NO: 2110797 - DNA, 15 bp, Homo sapiens
aagtgcactttggtt

SEQ ID NO: 2110798 - DNA, 15 bp, Homo sapiens
agtgcactttggttt

SEQ ID NO: 2110799 - DNA, 15 bp, Homo sapiens
gtgcactttggttta

SEQ ID NO: 2110800 - DNA, 15 bp, Homo sapiens
tgcactttggtttac

SEQ ID NO: 2110801 - DNA, 15 bp, Homo sapiens
gcactttggtttacg

SEQ ID NO: 2110802 - DNA, 15 bp, Homo sapiens
cactttggtttacgt

SEQ ID NO: 2110803 - DNA, 15 bp, Homo sapiens
actttggtttacgtc

SEQ ID NO: 2110804 - DNA, 15 bp, Homo sapiens
ctttggtttacgtct

SEQ ID NO: 2110805 - DNA, 15 bp, Homo sapiens
tttggtttacgtctt

SEQ ID NO: 2110806 - DNA, 15 bp, Homo sapiens
ttggtttacgtcttt

SEQ ID NO: 2110807 - DNA, 15 bp, Homo sapiens
tggtttacgtctttc

SEQ ID NO: 2110808 - DNA, 15 bp, Homo sapiens
ggtttacgtctttca

SEQ ID NO: 2110809 - DNA, 15 bp, Homo sapiens
gtttacgtctttcaa

SEQ ID NO: 2110810 - DNA, 15 bp, Homo sapiens
tttacgtctttcaag

SEQ ID NO: 2110811 - DNA, 15 bp, Homo sapiens
ttacgtctttcaagc

SEQ ID NO: 2110812 - DNA, 15 bp, Homo sapiens
tacgtctttcaagca

SEQ ID NO: 2110813 - DNA, 15 bp, Homo sapiens
acgtctttcaagcac

SEQ ID NO: 2110814 - DNA, 15 bp, Homo sapiens
cgtctttcaagcact

SEQ ID NO: 2110815 - DNA, 15 bp, Homo sapiens
gtctttcaagcactt

SEQ ID NO: 2110816 - DNA, 15 bp, Homo sapiens
tctttcaagcactta

SEQ ID NO: 2110817 - DNA, 15 bp, Homo sapiens
ctttcaagcacttaa

SEQ ID NO: 2110818 - DNA, 15 bp, Homo sapiens
tttcaagcacttaag

SEQ ID NO: 2110819 - DNA, 15 bp, Homo sapiens
ttcaagcacttaaga

SEQ ID NO: 2110820 - DNA, 15 bp, Homo sapiens
tcaagcacttaagaa

SEQ ID NO: 2110821 - DNA, 15 bp, Homo sapiens
caagcacttaagaac

SEQ ID NO: 2110822 - DNA, 15 bp, Homo sapiens
aagcacttaagaaca

SEQ ID NO: 2110823 - DNA, 15 bp, Homo sapiens
agcacttaagaacag

SEQ ID NO: 2110824 - DNA, 15 bp, Homo sapiens
gcacttaagaacagc

SEQ ID NO: 2110825 - DNA, 15 bp, Homo sapiens
cacttaagaacagca

SEQ ID NO: 2110826 - DNA, 15 bp, Homo sapiens
acttaagaacagcac

SEQ ID NO: 2110827 - DNA, 15 bp, Homo sapiens
cttaagaacagcact

SEQ ID NO: 2110828 - DNA, 15 bp, Homo sapiens
ttaagaacagcactt

SEQ ID NO: 2110829 - DNA, 15 bp, Homo sapiens
taagaacagcacttt

SEQ ID NO: 2110830 - DNA, 15 bp, Homo sapiens
aagaacagcacttta

SEQ ID NO: 2110831 - DNA, 15 bp, Homo sapiens
agaacagcactttat

SEQ ID NO: 2110832 - DNA, 15 bp, Homo sapiens
gaacagcactttatt

SEQ ID NO: 2110833 - DNA, 15 bp, Homo sapiens
aacagcactttattc

SEQ ID NO: 2110834 - DNA, 15 bp, Homo sapiens
acagcactttattca

SEQ ID NO: 2110835 - DNA, 15 bp, Homo sapiens
cagcactttattcag

SEQ ID NO: 2110836 - DNA, 15 bp, Homo sapiens
agcactttattcagt

SEQ ID NO: 2110837 - DNA, 15 bp, Homo sapiens
gcactttattcagtt

SEQ ID NO: 2110838 - DNA, 15 bp, Homo sapiens
cactttattcagttt

SEQ ID NO: 2110839 - DNA, 15 bp, Homo sapiens
actttattcagtttt

SEQ ID NO: 2110840 - DNA, 15 bp, Homo sapiens
ctttattcagtttta

SEQ ID NO: 2110841 - DNA, 15 bp, Homo sapiens
tttattcagttttaa

SEQ ID NO: 2110842 - DNA, 15 bp, Homo sapiens
ttattcagttttaat

SEQ ID NO: 2110843 - DNA, 15 bp, Homo sapiens
tattcagttttaata

SEQ ID NO: 2110844 - DNA, 15 bp, Homo sapiens
attcagttttaataa

SEQ ID NO: 2110845 - DNA, 15 bp, Homo sapiens
ttcagttttaataaa

SEQ ID NO: 2110846 - DNA, 15 bp, Homo sapiens
tcagttttaataaat

SEQ ID NO: 2110847 - DNA, 15 bp, Homo sapiens
cagttttaataaatt

SEQ ID NO: 2110848 - DNA, 15 bp, Homo sapiens
agttttaataaattt

SEQ ID NO: 2110849 - DNA, 15 bp, Homo sapiens
gttttaataaatttt

SEQ ID NO: 2110850 - DNA, 15 bp, Homo sapiens
ttttaataaattttt

SEQ ID NO: 2110851 - DNA, 15 bp, Homo sapiens
tttaataaattttta

SEQ ID NO: 2110852 - DNA, 15 bp, Homo sapiens
ttaataaatttttac

SEQ ID NO: 2110853 - DNA, 15 bp, Homo sapiens
taataaatttttact

SEQ ID NO: 2110854 - DNA, 15 bp, Homo sapiens
aataaatttttacta

SEQ ID NO: 2110855 - DNA, 15 bp, Homo sapiens
ataaatttttactaa

SEQ ID NO: 2110856 - DNA, 15 bp, Homo sapiens
taaatttttactaaa

SEQ ID NO: 2110857 - DNA, 15 bp, Homo sapiens
aaatttttactaaat

SEQ ID NO: 2110858 - DNA, 15 bp, Homo sapiens
aatttttactaaatt

SEQ ID NO: 2110859 - DNA, 15 bp, Homo sapiens
atttttactaaattg

SEQ ID NO: 2110860 - DNA, 15 bp, Homo sapiens
tttttactaaattgg

SEQ ID NO: 2110861 - DNA, 15 bp, Homo sapiens
ttttactaaattggt

SEQ ID NO: 2110862 - DNA, 15 bp, Homo sapiens
tttactaaattggta

SEQ ID NO: 2110863 - DNA, 15 bp, Homo sapiens
ttactaaattggtaa

SEQ ID NO: 2110864 - DNA, 15 bp, Homo sapiens
tactaaattggtaaa

SEQ ID NO: 2110865 - DNA, 15 bp, Homo sapiens
actaaattggtaaat

SEQ ID NO: 2110866 - DNA, 15 bp, Homo sapiens
ctaaattggtaaatg

SEQ ID NO: 2110867 - DNA, 15 bp, Homo sapiens
taaattggtaaatgc

SEQ ID NO: 2110868 - DNA, 15 bp, Homo sapiens
aaattggtaaatgca

SEQ ID NO: 2110869 - DNA, 15 bp, Homo sapiens
aattggtaaatgcaa

SEQ ID NO: 2110870 - DNA, 15 bp, Homo sapiens
attggtaaatgcaaa

SEQ ID NO: 2110871 - DNA, 15 bp, Homo sapiens
ttggtaaatgcaaaa

SEQ ID NO: 2110872 - DNA, 15 bp, Homo sapiens
tggtaaatgcaaaag

SEQ ID NO: 2110873 - DNA, 15 bp, Homo sapiens
ggtaaatgcaaaaga

SEQ ID NO: 2110874 - DNA, 15 bp, Homo sapiens
gtaaatgcaaaagaa

SEQ ID NO: 2110875 - DNA, 15 bp, Homo sapiens
taaatgcaaaagaat

SEQ ID NO: 2110876 - DNA, 15 bp, Homo sapiens
aaatgcaaaagaatc

SEQ ID NO: 2110877 - DNA, 15 bp, Homo sapiens
aatgcaaaagaatct

SEQ ID NO: 2110878 - DNA, 15 bp, Homo sapiens
atgcaaaagaatctt

SEQ ID NO: 2110879 - DNA, 15 bp, Homo sapiens
tgcaaaagaatcttt

SEQ ID NO: 2110880 - DNA, 15 bp, Homo sapiens
gcaaaagaatctttt

SEQ ID NO: 2110881 - DNA, 15 bp, Homo sapiens
caaaagaatcttttt

SEQ ID NO: 2110882 - DNA, 15 bp, Homo sapiens
aaaagaatctttttt

SEQ ID NO: 2110883 - DNA, 15 bp, Homo sapiens
aaagaatcttttttt

SEQ ID NO: 2110884 - DNA, 15 bp, Homo sapiens
aagaatctttttttt

SEQ ID NO: 2110885 - DNA, 15 bp, Homo sapiens
agaatctttttttta

SEQ ID NO: 2110886 - DNA, 15 bp, Homo sapiens
gaatcttttttttat

SEQ ID NO: 2110887 - DNA, 15 bp, Homo sapiens
aatcttttttttatt

SEQ ID NO: 2110888 - DNA, 15 bp, Homo sapiens
atcttttttttattg

SEQ ID NO: 2110889 - DNA, 15 bp, Homo sapiens
tcttttttttattgc

SEQ ID NO: 2110890 - DNA, 15 bp, Homo sapiens
cttttttttattgct

SEQ ID NO: 2110891 - DNA, 15 bp, Homo sapiens
ttttttttattgctc

SEQ ID NO: 2110892 - DNA, 15 bp, Homo sapiens
tttttttattgctca

SEQ ID NO: 2110893 - DNA, 15 bp, Homo sapiens
ttttttattgctcat

SEQ ID NO: 2110894 - DNA, 15 bp, Homo sapiens
tttttattgctcata

SEQ ID NO: 2110895 - DNA, 15 bp, Homo sapiens
ttttattgctcatat

SEQ ID NO: 2110896 - DNA, 15 bp, Homo sapiens
tttattgctcatatg

SEQ ID NO: 2110897 - DNA, 15 bp, Homo sapiens
ttattgctcatatgt

SEQ ID NO: 2110898 - DNA, 15 bp, Homo sapiens
tattgctcatatgtc

SEQ ID NO: 2110899 - DNA, 15 bp, Homo sapiens
attgctcatatgtct

SEQ ID NO: 2110900 - DNA, 15 bp, Homo sapiens
ttgctcatatgtctt

SEQ ID NO: 2110901 - DNA, 15 bp, Homo sapiens
tgctcatatgtcttc

SEQ ID NO: 2110902 - DNA, 15 bp, Homo sapiens
gctcatatgtcttcc

SEQ ID NO: 2110903 - DNA, 15 bp, Homo sapiens
ctcatatgtcttcct

SEQ ID NO: 2110904 - DNA, 15 bp, Homo sapiens
tcatatgtcttcctg

SEQ ID NO: 2110905 - DNA, 15 bp, Homo sapiens
catatgtcttcctgt

SEQ ID NO: 2110906 - DNA, 15 bp, Homo sapiens
atatgtcttcctgtc

SEQ ID NO: 2110907 - DNA, 15 bp, Homo sapiens
tatgtcttcctgtct

SEQ ID NO: 2110908 - DNA, 15 bp, Homo sapiens
atgtcttcctgtctc

SEQ ID NO: 2110909 - DNA, 15 bp, Homo sapiens
tgtcttcctgtctct

SEQ ID NO: 2110910 - DNA, 15 bp, Homo sapiens
gtcttcctgtctcta

SEQ ID NO: 2110911 - DNA, 15 bp, Homo sapiens
tcttcctgtctctaa

SEQ ID NO: 2110912 - DNA, 15 bp, Homo sapiens
cttcctgtctctaag

SEQ ID NO: 2110913 - DNA, 15 bp, Homo sapiens
ttcctgtctctaagc

SEQ ID NO: 2110914 - DNA, 15 bp, Homo sapiens
tcctgtctctaagcc

SEQ ID NO: 2110915 - DNA, 15 bp, Homo sapiens
cctgtctctaagcca

SEQ ID NO: 2110916 - DNA, 15 bp, Homo sapiens
ctgtctctaagccag

SEQ ID NO: 2110917 - DNA, 15 bp, Homo sapiens
tgtctctaagccaga

SEQ ID NO: 2110918 - DNA, 15 bp, Homo sapiens
gtctctaagccagac

SEQ ID NO: 2110919 - DNA, 15 bp, Homo sapiens
tctctaagccagacc

SEQ ID NO: 2110920 - DNA, 15 bp, Homo sapiens
ctctaagccagacca

SEQ ID NO: 2110921 - DNA, 15 bp, Homo sapiens
tctaagccagaccaa

SEQ ID NO: 2110922 - DNA, 15 bp, Homo sapiens
ctaagccagaccaat

SEQ ID NO: 2110923 - DNA, 15 bp, Homo sapiens
taagccagaccaatg

SEQ ID NO: 2110924 - DNA, 15 bp, Homo sapiens
aagccagaccaatga

SEQ ID NO: 2110925 - DNA, 15 bp, Homo sapiens
agccagaccaatgag

SEQ ID NO: 2110926 - DNA, 15 bp, Homo sapiens
gccagaccaatgagc

SEQ ID NO: 2110927 - DNA, 15 bp, Homo sapiens
ccagaccaatgagca

SEQ ID NO: 2110928 - DNA, 15 bp, Homo sapiens
cagaccaatgagcaa

SEQ ID NO: 2110929 - DNA, 15 bp, Homo sapiens
agaccaatgagcaaa

SEQ ID NO: 2110930 - DNA, 15 bp, Homo sapiens
gaccaatgagcaaat

SEQ ID NO: 2110931 - DNA, 15 bp, Homo sapiens
accaatgagcaaata

SEQ ID NO: 2110932 - DNA, 15 bp, Homo sapiens
ccaatgagcaaatac

SEQ ID NO: 2110933 - DNA, 15 bp, Homo sapiens
caatgagcaaatacc

SEQ ID NO: 2110934 - DNA, 15 bp, Homo sapiens
aatgagcaaatacct

SEQ ID NO: 2110935 - DNA, 15 bp, Homo sapiens
atgagcaaatacctt

SEQ ID NO: 2110936 - DNA, 15 bp, Homo sapiens
tgagcaaataccttt

SEQ ID NO: 2110937 - DNA, 15 bp, Homo sapiens
gagcaaataccttta

SEQ ID NO: 2110938 - DNA, 15 bp, Homo sapiens
agcaaatacctttaa

SEQ ID NO: 2110939 - DNA, 15 bp, Homo sapiens
gcaaatacctttaaa

SEQ ID NO: 2110940 - DNA, 15 bp, Homo sapiens
caaatacctttaaaa

SEQ ID NO: 2110941 - DNA, 15 bp, Homo sapiens
aaatacctttaaaac

SEQ ID NO: 2110942 - DNA, 15 bp, Homo sapiens
aatacctttaaaact

SEQ ID NO: 2110943 - DNA, 15 bp, Homo sapiens
atacctttaaaacta

SEQ ID NO: 2110944 - DNA, 15 bp, Homo sapiens
tacctttaaaactag

SEQ ID NO: 2110945 - DNA, 15 bp, Homo sapiens
acctttaaaactagt

SEQ ID NO: 2110946 - DNA, 15 bp, Homo sapiens
cctttaaaactagtt

SEQ ID NO: 2110947 - DNA, 15 bp, Homo sapiens
ctttaaaactagttg

SEQ ID NO: 2110948 - DNA, 15 bp, Homo sapiens
tttaaaactagttgt

SEQ ID NO: 2110949 - DNA, 15 bp, Homo sapiens
ttaaaactagttgtt

SEQ ID NO: 2110950 - DNA, 15 bp, Homo sapiens
taaaactagttgtta

SEQ ID NO: 2110951 - DNA, 15 bp, Homo sapiens
aaaactagttgttac

SEQ ID NO: 2110952 - DNA, 15 bp, Homo sapiens
aaactagttgttaca

SEQ ID NO: 2110953 - DNA, 15 bp, Homo sapiens
aactagttgttacat

SEQ ID NO: 2110954 - DNA, 15 bp, Homo sapiens
actagttgttacatc

SEQ ID NO: 2110955 - DNA, 15 bp, Homo sapiens
ctagttgttacatct

SEQ ID NO: 2110956 - DNA, 15 bp, Homo sapiens
tagttgttacatctt

SEQ ID NO: 2110957 - DNA, 15 bp, Homo sapiens
agttgttacatcttg

SEQ ID NO: 2110958 - DNA, 15 bp, Homo sapiens
gttgttacatcttga

SEQ ID NO: 2110959 - DNA, 15 bp, Homo sapiens
ttgttacatcttgaa

SEQ ID NO: 2110960 - DNA, 15 bp, Homo sapiens
tgttacatcttgaac

SEQ ID NO: 2110961 - DNA, 15 bp, Homo sapiens
gttacatcttgaacc

SEQ ID NO: 2110962 - DNA, 15 bp, Homo sapiens
ttacatcttgaacca

SEQ ID NO: 2110963 - DNA, 15 bp, Homo sapiens
tacatcttgaaccat

SEQ ID NO: 2110964 - DNA, 15 bp, Homo sapiens
acatcttgaaccatt

SEQ ID NO: 2110965 - DNA, 15 bp, Homo sapiens
catcttgaaccattt

SEQ ID NO: 2110966 - DNA, 15 bp, Homo sapiens
atcttgaaccattta

SEQ ID NO: 2110967 - DNA, 15 bp, Homo sapiens
tcttgaaccatttaa

SEQ ID NO: 2110968 - DNA, 15 bp, Homo sapiens
cttgaaccatttaac

SEQ ID NO: 2110969 - DNA, 15 bp, Homo sapiens
ttgaaccatttaact

SEQ ID NO: 2110970 - DNA, 15 bp, Homo sapiens
tgaaccatttaactg

SEQ ID NO: 2110971 - DNA, 15 bp, Homo sapiens
gaaccatttaactgt

SEQ ID NO: 2110972 - DNA, 15 bp, Homo sapiens
aaccatttaactgta

SEQ ID NO: 2110973 - DNA, 15 bp, Homo sapiens
accatttaactgtaa

SEQ ID NO: 2110974 - DNA, 15 bp, Homo sapiens
ccatttaactgtaat

SEQ ID NO: 2110975 - DNA, 15 bp, Homo sapiens
catttaactgtaata

SEQ ID NO: 2110976 - DNA, 15 bp, Homo sapiens
atttaactgtaataa

SEQ ID NO: 2110977 - DNA, 15 bp, Homo sapiens
tttaactgtaataaa

SEQ ID NO: 2110978 - DNA, 15 bp, Homo sapiens
ttaactgtaataaaa

SEQ ID NO: 2110979 - DNA, 15 bp, Homo sapiens
taactgtaataaaag

SEQ ID NO: 2110980 - DNA, 15 bp, Homo sapiens
aactgtaataaaagc

SEQ ID NO: 2110981 - DNA, 15 bp, Homo sapiens
actgtaataaaagca

SEQ ID NO: 2110982 - DNA, 15 bp, Homo sapiens
ctgtaataaaagcag

SEQ ID NO: 2110983 - DNA, 15 bp, Homo sapiens
tgtaataaaagcaga

SEQ ID NO: 2110984 - DNA, 15 bp, Homo sapiens
gtaataaaagcagaa

SEQ ID NO: 2110985 - DNA, 15 bp, Homo sapiens
taataaaagcagaat

SEQ ID NO: 2110986 - DNA, 15 bp, Homo sapiens
aataaaagcagaatg

SEQ ID NO: 2110987 - DNA, 15 bp, Homo sapiens
ataaaagcagaatgt

SEQ ID NO: 2110988 - DNA, 15 bp, Homo sapiens
taaaagcagaatgtt

SEQ ID NO: 2110989 - DNA, 15 bp, Homo sapiens
aaaagcagaatgttt

SEQ ID NO: 2110990 - DNA, 15 bp, Homo sapiens
aaagcagaatgttta

SEQ ID NO: 2110991 - DNA, 15 bp, Homo sapiens
aagcagaatgtttag

SEQ ID NO: 2110992 - DNA, 15 bp, Homo sapiens
agcagaatgtttagt

SEQ ID NO: 2110993 - DNA, 15 bp, Homo sapiens
gcagaatgtttagtt

SEQ ID NO: 2110994 - DNA, 15 bp, Homo sapiens
cagaatgtttagtta

SEQ ID NO: 2110995 - DNA, 15 bp, Homo sapiens
agaatgtttagttaa

SEQ ID NO: 2110996 - DNA, 15 bp, Homo sapiens
gaatgtttagttaat

SEQ ID NO: 2110997 - DNA, 15 bp, Homo sapiens
aatgtttagttaatg

SEQ ID NO: 2110998 - DNA, 15 bp, Homo sapiens
atgtttagttaatga

SEQ ID NO: 2110999 - DNA, 15 bp, Homo sapiens
tgtttagttaatgaa

SEQ ID NO: 2111000 - DNA, 15 bp, Homo sapiens
gtttagttaatgaat

SEQ ID NO: 2111001 - DNA, 15 bp, Homo sapiens
tttagttaatgaatt

SEQ ID NO: 2111002 - DNA, 15 bp, Homo sapiens
ttagttaatgaatta

SEQ ID NO: 2111003 - DNA, 15 bp, Homo sapiens
tagttaatgaattaa

SEQ ID NO: 2111004 - DNA, 15 bp, Homo sapiens
agttaatgaattaaa

SEQ ID NO: 2111005 - DNA, 15 bp, Homo sapiens
gttaatgaattaaag

SEQ ID NO: 2111006 - DNA, 15 bp, Homo sapiens
ttaatgaattaaaga

SEQ ID NO: 2111007 - DNA, 15 bp, Homo sapiens
taatgaattaaagaa

SEQ ID NO: 2111008 - DNA, 15 bp, Homo sapiens
aatgaattaaagaac

SEQ ID NO: 2111009 - DNA, 15 bp, Homo sapiens
atgaattaaagaaca

SEQ ID NO: 2111010 - DNA, 15 bp, Homo sapiens
tgaattaaagaacaa

SEQ ID NO: 2111011 - DNA, 15 bp, Homo sapiens
gaattaaagaacaaa

SEQ ID NO: 2111012 - DNA, 15 bp, Homo sapiens
aattaaagaacaaac

SEQ ID NO: 2111013 - DNA, 15 bp, Homo sapiens
attaaagaacaaacc

SEQ ID NO: 2111014 - DNA, 15 bp, Homo sapiens
ttaaagaacaaaccc

SEQ ID NO: 2111015 - DNA, 15 bp, Homo sapiens
taaagaacaaaccct

SEQ ID NO: 2111016 - DNA, 15 bp, Homo sapiens
aaagaacaaaccctg

SEQ ID NO: 2111017 - DNA, 15 bp, Homo sapiens
aagaacaaaccctga

SEQ ID NO: 2111018 - DNA, 15 bp, Homo sapiens
agaacaaaccctgag

SEQ ID NO: 2111019 - DNA, 15 bp, Homo sapiens
gaacaaaccctgagc

SEQ ID NO: 2111020 - DNA, 15 bp, Homo sapiens
aacaaaccctgagcc

SEQ ID NO: 2111021 - DNA, 15 bp, Homo sapiens
acaaaccctgagccc

SEQ ID NO: 2111022 - DNA, 15 bp, Homo sapiens
caaaccctgagccct

SEQ ID NO: 2111023 - DNA, 15 bp, Homo sapiens
aaaccctgagccctt

SEQ ID NO: 2111024 - DNA, 15 bp, Homo sapiens
aaccctgagcccttt

SEQ ID NO: 2111025 - DNA, 15 bp, Homo sapiens
accctgagccctttt

SEQ ID NO: 2111026 - DNA, 15 bp, Homo sapiens
ccctgagccctttta

SEQ ID NO: 2111027 - DNA, 15 bp, Homo sapiens
cctgagcccttttat

SEQ ID NO: 2111028 - DNA, 15 bp, Homo sapiens
ctgagcccttttatc

SEQ ID NO: 2111029 - DNA, 15 bp, Homo sapiens
tgagcccttttatca

SEQ ID NO: 2111030 - DNA, 15 bp, Homo sapiens
gagcccttttatcag

SEQ ID NO: 2111031 - DNA, 15 bp, Homo sapiens
agcccttttatcagt

SEQ ID NO: 2111032 - DNA, 15 bp, Homo sapiens
gcccttttatcagtc

SEQ ID NO: 2111033 - DNA, 15 bp, Homo sapiens
cccttttatcagtct

SEQ ID NO: 2111034 - DNA, 15 bp, Homo sapiens
ccttttatcagtctc

SEQ ID NO: 2111035 - DNA, 15 bp, Homo sapiens
cttttatcagtctcc

SEQ ID NO: 2111036 - DNA, 15 bp, Homo sapiens
ttttatcagtctcct

SEQ ID NO: 2111037 - DNA, 15 bp, Homo sapiens
tttatcagtctcctg

SEQ ID NO: 2111038 - DNA, 15 bp, Homo sapiens
ttatcagtctcctgg

SEQ ID NO: 2111039 - DNA, 15 bp, Homo sapiens
tatcagtctcctggc

SEQ ID NO: 2111040 - DNA, 15 bp, Homo sapiens
atcagtctcctggct

SEQ ID NO: 2111041 - DNA, 15 bp, Homo sapiens
tcagtctcctggctt

SEQ ID NO: 2111042 - DNA, 15 bp, Homo sapiens
cagtctcctggcttt

SEQ ID NO: 2111043 - DNA, 15 bp, Homo sapiens
agtctcctggcttta

SEQ ID NO: 2111044 - DNA, 15 bp, Homo sapiens
gtctcctggctttaa

SEQ ID NO: 2111045 - DNA, 15 bp, Homo sapiens
tctcctggctttaaa

SEQ ID NO: 2111046 - DNA, 15 bp, Homo sapiens
ctcctggctttaaac

SEQ ID NO: 2111047 - DNA, 15 bp, Homo sapiens
tcctggctttaaact

SEQ ID NO: 2111048 - DNA, 15 bp, Homo sapiens
cctggctttaaacta

SEQ ID NO: 2111049 - DNA, 15 bp, Homo sapiens
ctggctttaaactaa

SEQ ID NO: 2111050 - DNA, 15 bp, Homo sapiens
tggctttaaactaag

SEQ ID NO: 2111051 - DNA, 15 bp, Homo sapiens
ggctttaaactaagc

SEQ ID NO: 2111052 - DNA, 15 bp, Homo sapiens
gctttaaactaagcc

SEQ ID NO: 2111053 - DNA, 15 bp, Homo sapiens
ctttaaactaagcca

SEQ ID NO: 2111054 - DNA, 15 bp, Homo sapiens
tttaaactaagccaa

SEQ ID NO: 2111055 - DNA, 15 bp, Homo sapiens
ttaaactaagccaat

SEQ ID NO: 2111056 - DNA, 15 bp, Homo sapiens
taaactaagccaatg

SEQ ID NO: 2111057 - DNA, 15 bp, Homo sapiens
aaactaagccaatga

SEQ ID NO: 2111058 - DNA, 15 bp, Homo sapiens
aactaagccaatgag

SEQ ID NO: 2111059 - DNA, 15 bp, Homo sapiens
actaagccaatgagg

SEQ ID NO: 2111060 - DNA, 15 bp, Homo sapiens
ctaagccaatgagga

SEQ ID NO: 2111061 - DNA, 15 bp, Homo sapiens
taagccaatgaggaa

SEQ ID NO: 2111062 - DNA, 15 bp, Homo sapiens
aagccaatgaggaag

SEQ ID NO: 2111063 - DNA, 15 bp, Homo sapiens
agccaatgaggaagt

SEQ ID NO: 2111064 - DNA, 15 bp, Homo sapiens
gccaatgaggaagtg

SEQ ID NO: 2111065 - DNA, 15 bp, Homo sapiens
ccaatgaggaagtga

SEQ ID NO: 2111066 - DNA, 15 bp, Homo sapiens
caatgaggaagtgat

SEQ ID NO: 2111067 - DNA, 15 bp, Homo sapiens
aatgaggaagtgatt

SEQ ID NO: 2111068 - DNA, 15 bp, Homo sapiens
atgaggaagtgattt

SEQ ID NO: 2111069 - DNA, 15 bp, Homo sapiens
tgaggaagtgatttg

SEQ ID NO: 2111070 - DNA, 15 bp, Homo sapiens
gaggaagtgatttgg

SEQ ID NO: 2111071 - DNA, 15 bp, Homo sapiens
aggaagtgatttggg

SEQ ID NO: 2111072 - DNA, 15 bp, Homo sapiens
ggaagtgatttgggg

SEQ ID NO: 2111073 - DNA, 15 bp, Homo sapiens
gaagtgatttggggg

SEQ ID NO: 2111074 - DNA, 15 bp, Homo sapiens
aagtgatttggggga

SEQ ID NO: 2111075 - DNA, 15 bp, Homo sapiens
agtgatttgggggat

SEQ ID NO: 2111076 - DNA, 15 bp, Homo sapiens
gtgatttgggggatt

SEQ ID NO: 2111077 - DNA, 15 bp, Homo sapiens
tgatttgggggattc

SEQ ID NO: 2111078 - DNA, 15 bp, Homo sapiens
gatttgggggattcc

SEQ ID NO: 2111079 - DNA, 15 bp, Homo sapiens
atttgggggattcct

SEQ ID NO: 2111080 - DNA, 15 bp, Homo sapiens
tttgggggattcctg

SEQ ID NO: 2111081 - DNA, 15 bp, Homo sapiens
ttgggggattcctga

SEQ ID NO: 2111082 - DNA, 15 bp, Homo sapiens
tgggggattcctgaa

SEQ ID NO: 2111083 - DNA, 15 bp, Homo sapiens
gggggattcctgaaa

SEQ ID NO: 2111084 - DNA, 15 bp, Homo sapiens
ggggattcctgaaac

SEQ ID NO: 2111085 - DNA, 15 bp, Homo sapiens
gggattcctgaaact

SEQ ID NO: 2111086 - DNA, 15 bp, Homo sapiens
ggattcctgaaacta

SEQ ID NO: 2111087 - DNA, 15 bp, Homo sapiens
gattcctgaaactag

SEQ ID NO: 2111088 - DNA, 15 bp, Homo sapiens
attcctgaaactagg

SEQ ID NO: 2111089 - DNA, 15 bp, Homo sapiens
ttcctgaaactagga

SEQ ID NO: 2111090 - DNA, 15 bp, Homo sapiens
tcctgaaactaggaa

SEQ ID NO: 2111091 - DNA, 15 bp, Homo sapiens
cctgaaactaggaaa

SEQ ID NO: 2111092 - DNA, 15 bp, Homo sapiens
ctgaaactaggaaaa

SEQ ID NO: 2111093 - DNA, 15 bp, Homo sapiens
tgaaactaggaaaaa

SEQ ID NO: 2111094 - DNA, 15 bp, Homo sapiens
gaaactaggaaaaat

SEQ ID NO: 2111095 - DNA, 15 bp, Homo sapiens
aaactaggaaaaatg

SEQ ID NO: 2111096 - DNA, 15 bp, Homo sapiens
aactaggaaaaatgt

SEQ ID NO: 2111097 - DNA, 15 bp, Homo sapiens
actaggaaaaatgtc

SEQ ID NO: 2111098 - DNA, 15 bp, Homo sapiens
ctaggaaaaatgtct

SEQ ID NO: 2111099 - DNA, 15 bp, Homo sapiens
taggaaaaatgtctc

SEQ ID NO: 2111100 - DNA, 15 bp, Homo sapiens
aggaaaaatgtctct

SEQ ID NO: 2111101 - DNA, 15 bp, Homo sapiens
ggaaaaatgtctctt

SEQ ID NO: 2111102 - DNA, 15 bp, Homo sapiens
gaaaaatgtctcttt

SEQ ID NO: 2111103 - DNA, 15 bp, Homo sapiens
aaaaatgtctcttta

SEQ ID NO: 2111104 - DNA, 15 bp, Homo sapiens
aaaatgtctctttat

SEQ ID NO: 2111105 - DNA, 15 bp, Homo sapiens
aaatgtctctttatt

SEQ ID NO: 2111106 - DNA, 15 bp, Homo sapiens
aatgtctctttattt

SEQ ID NO: 2111107 - DNA, 15 bp, Homo sapiens
atgtctctttatttt

SEQ ID NO: 2111108 - DNA, 15 bp, Homo sapiens
tgtctctttattttg

SEQ ID NO: 2111109 - DNA, 15 bp, Homo sapiens
gtctctttattttga

SEQ ID NO: 2111110 - DNA, 15 bp, Homo sapiens
tctctttattttgaa

SEQ ID NO: 2111111 - DNA, 15 bp, Homo sapiens
ctctttattttgaaa

SEQ ID NO: 2111112 - DNA, 15 bp, Homo sapiens
tctttattttgaaag

SEQ ID NO: 2111113 - DNA, 15 bp, Homo sapiens
ctttattttgaaaga

SEQ ID NO: 2111114 - DNA, 15 bp, Homo sapiens
tttattttgaaagaa

SEQ ID NO: 2111115 - DNA, 15 bp, Homo sapiens
ttattttgaaagaaa

SEQ ID NO: 2111116 - DNA, 15 bp, Homo sapiens
tattttgaaagaaac

SEQ ID NO: 2111117 - DNA, 15 bp, Homo sapiens
attttgaaagaaact

SEQ ID NO: 2111118 - DNA, 15 bp, Homo sapiens
ttttgaaagaaactt

SEQ ID NO: 2111119 - DNA, 15 bp, Homo sapiens
tttgaaagaaacttg

SEQ ID NO: 2111120 - DNA, 15 bp, Homo sapiens
ttgaaagaaacttgc

SEQ ID NO: 2111121 - DNA, 15 bp, Homo sapiens
tgaaagaaacttgca

SEQ ID NO: 2111122 - DNA, 15 bp, Homo sapiens
gaaagaaacttgcat

SEQ ID NO: 2111123 - DNA, 15 bp, Homo sapiens
aaagaaacttgcatt

SEQ ID NO: 2111124 - DNA, 15 bp, Homo sapiens
aagaaacttgcattt

SEQ ID NO: 2111125 - DNA, 15 bp, Homo sapiens
agaaacttgcatttt

SEQ ID NO: 2111126 - DNA, 15 bp, Homo sapiens
gaaacttgcattttt

SEQ ID NO: 2111127 - DNA, 15 bp, Homo sapiens
aaacttgcatttttc

SEQ ID NO: 2111128 - DNA, 15 bp, Homo sapiens
aacttgcatttttct

SEQ ID NO: 2111129 - DNA, 15 bp, Homo sapiens
acttgcatttttctt

SEQ ID NO: 2111130 - DNA, 15 bp, Homo sapiens
cttgcatttttcttt

SEQ ID NO: 2111131 - DNA, 15 bp, Homo sapiens
ttgcatttttctttc

SEQ ID NO: 2111132 - DNA, 15 bp, Homo sapiens
tgcatttttctttct

SEQ ID NO: 2111133 - DNA, 15 bp, Homo sapiens
gcatttttctttctt

SEQ ID NO: 2111134 - DNA, 15 bp, Homo sapiens
catttttctttcttt

SEQ ID NO: 2111135 - DNA, 15 bp, Homo sapiens
atttttctttctttt

SEQ ID NO: 2111136 - DNA, 15 bp, Homo sapiens
tttttttttttaatc

SEQ ID NO: 2111137 - DNA, 15 bp, Homo sapiens
tttttttttaatctc

SEQ ID NO: 2111138 - DNA, 15 bp, Homo sapiens
ttttttttaatctca

SEQ ID NO: 2111139 - DNA, 15 bp, Homo sapiens
tttttttaatctcaa

SEQ ID NO: 2111140 - DNA, 15 bp, Homo sapiens
ttttttaatctcaaa

SEQ ID NO: 2111141 - DNA, 15 bp, Homo sapiens
tttttaatctcaaag

SEQ ID NO: 2111142 - DNA, 15 bp, Homo sapiens
ttttaatctcaaagg

SEQ ID NO: 2111143 - DNA, 15 bp, Homo sapiens
tttaatctcaaaggc

SEQ ID NO: 2111144 - DNA, 15 bp, Homo sapiens
ttaatctcaaaggca

SEQ ID NO: 2111145 - DNA, 15 bp, Homo sapiens
taatctcaaaggcaa

SEQ ID NO: 2111146 - DNA, 15 bp, Homo sapiens
aatctcaaaggcaat

SEQ ID NO: 2111147 - DNA, 15 bp, Homo sapiens
atctcaaaggcaatt

SEQ ID NO: 2111148 - DNA, 15 bp, Homo sapiens
tctcaaaggcaattg

SEQ ID NO: 2111149 - DNA, 15 bp, Homo sapiens
ctcaaaggcaattga

SEQ ID NO: 2111150 - DNA, 15 bp, Homo sapiens
tcaaaggcaattgag

SEQ ID NO: 2111151 - DNA, 15 bp, Homo sapiens
caaaggcaattgagt

SEQ ID NO: 2111152 - DNA, 15 bp, Homo sapiens
aaaggcaattgagtg

SEQ ID NO: 2111153 - DNA, 15 bp, Homo sapiens
aaggcaattgagtgg

SEQ ID NO: 2111154 - DNA, 15 bp, Homo sapiens
aggcaattgagtggg

SEQ ID NO: 2111155 - DNA, 15 bp, Homo sapiens
ggcaattgagtgggt

SEQ ID NO: 2111156 - DNA, 15 bp, Homo sapiens
gcaattgagtgggtc

SEQ ID NO: 2111157 - DNA, 15 bp, Homo sapiens
caattgagtgggtct

SEQ ID NO: 2111158 - DNA, 15 bp, Homo sapiens
aattgagtgggtctt

SEQ ID NO: 2111159 - DNA, 15 bp, Homo sapiens
attgagtgggtcttc

SEQ ID NO: 2111160 - DNA, 15 bp, Homo sapiens
ttgagtgggtcttct

SEQ ID NO: 2111161 - DNA, 15 bp, Homo sapiens
tgagtgggtcttctg

SEQ ID NO: 2111162 - DNA, 15 bp, Homo sapiens
gagtgggtcttctgg

SEQ ID NO: 2111163 - DNA, 15 bp, Homo sapiens
agtgggtcttctggg

SEQ ID NO: 2111164 - DNA, 15 bp, Homo sapiens
gtgggtcttctgggc

SEQ ID NO: 2111165 - DNA, 15 bp, Homo sapiens
tgggtcttctgggcc

SEQ ID NO: 2111166 - DNA, 15 bp, Homo sapiens
gggtcttctgggcca

SEQ ID NO: 2111167 - DNA, 15 bp, Homo sapiens
ggtcttctgggccag

SEQ ID NO: 2111168 - DNA, 15 bp, Homo sapiens
gtcttctgggccaga

SEQ ID NO: 2111169 - DNA, 15 bp, Homo sapiens
tcttctgggccagac

SEQ ID NO: 2111170 - DNA, 15 bp, Homo sapiens
cttctgggccagacc

SEQ ID NO: 2111171 - DNA, 15 bp, Homo sapiens
ttctgggccagacct

SEQ ID NO: 2111172 - DNA, 15 bp, Homo sapiens
tctgggccagaccta

SEQ ID NO: 2111173 - DNA, 15 bp, Homo sapiens
ctgggccagacctat

SEQ ID NO: 2111174 - DNA, 15 bp, Homo sapiens
tgggccagacctatt

SEQ ID NO: 2111175 - DNA, 15 bp, Homo sapiens
gggccagacctattt

SEQ ID NO: 2111176 - DNA, 15 bp, Homo sapiens
ggccagacctattta

SEQ ID NO: 2111177 - DNA, 15 bp, Homo sapiens
gccagacctatttaa

SEQ ID NO: 2111178 - DNA, 15 bp, Homo sapiens
ccagacctatttaat

SEQ ID NO: 2111179 - DNA, 15 bp, Homo sapiens
cagacctatttaatt

SEQ ID NO: 2111180 - DNA, 15 bp, Homo sapiens
agacctatttaattt

SEQ ID NO: 2111181 - DNA, 15 bp, Homo sapiens
gacctatttaattta

SEQ ID NO: 2111182 - DNA, 15 bp, Homo sapiens
acctatttaatttac

SEQ ID NO: 2111183 - DNA, 15 bp, Homo sapiens
cctatttaatttacg

SEQ ID NO: 2111184 - DNA, 15 bp, Homo sapiens
ctatttaatttacga

SEQ ID NO: 2111185 - DNA, 15 bp, Homo sapiens
tatttaatttacgaa

SEQ ID NO: 2111186 - DNA, 15 bp, Homo sapiens
atttaatttacgaaa

SEQ ID NO: 2111187 - DNA, 15 bp, Homo sapiens
tttaatttacgaaac

SEQ ID NO: 2111188 - DNA, 15 bp, Homo sapiens
ttaatttacgaaaca

SEQ ID NO: 2111189 - DNA, 15 bp, Homo sapiens
taatttacgaaacat

SEQ ID NO: 2111190 - DNA, 15 bp, Homo sapiens
aatttacgaaacata

SEQ ID NO: 2111191 - DNA, 15 bp, Homo sapiens
atttacgaaacatag

SEQ ID NO: 2111192 - DNA, 15 bp, Homo sapiens
tttacgaaacatagt

SEQ ID NO: 2111193 - DNA, 15 bp, Homo sapiens
ttacgaaacatagta

SEQ ID NO: 2111194 - DNA, 15 bp, Homo sapiens
tacgaaacatagtac

SEQ ID NO: 2111195 - DNA, 15 bp, Homo sapiens
acgaaacatagtacc

SEQ ID NO: 2111196 - DNA, 15 bp, Homo sapiens
cgaaacatagtacct

SEQ ID NO: 2111197 - DNA, 15 bp, Homo sapiens
gaaacatagtacctt

SEQ ID NO: 2111198 - DNA, 15 bp, Homo sapiens
aaacatagtaccttg

SEQ ID NO: 2111199 - DNA, 15 bp, Homo sapiens
aacatagtaccttgc

SEQ ID NO: 2111200 - DNA, 15 bp, Homo sapiens
acatagtaccttgca

SEQ ID NO: 2111201 - DNA, 15 bp, Homo sapiens
catagtaccttgcag

SEQ ID NO: 2111202 - DNA, 15 bp, Homo sapiens
atagtaccttgcaga

SEQ ID NO: 2111203 - DNA, 15 bp, Homo sapiens
tagtaccttgcagag

SEQ ID NO: 2111204 - DNA, 15 bp, Homo sapiens
agtaccttgcagaga

SEQ ID NO: 2111205 - DNA, 15 bp, Homo sapiens
gtaccttgcagagaa

SEQ ID NO: 2111206 - DNA, 15 bp, Homo sapiens
taccttgcagagaat

SEQ ID NO: 2111207 - DNA, 15 bp, Homo sapiens
accttgcagagaata

SEQ ID NO: 2111208 - DNA, 15 bp, Homo sapiens
ccttgcagagaatag

SEQ ID NO: 2111209 - DNA, 15 bp, Homo sapiens
cttgcagagaatagg

SEQ ID NO: 2111210 - DNA, 15 bp, Homo sapiens
ttgcagagaataggc

SEQ ID NO: 2111211 - DNA, 15 bp, Homo sapiens
tgcagagaataggca

SEQ ID NO: 2111212 - DNA, 15 bp, Homo sapiens
gcagagaataggcat

SEQ ID NO: 2111213 - DNA, 15 bp, Homo sapiens
cagagaataggcatt

SEQ ID NO: 2111214 - DNA, 15 bp, Homo sapiens
agagaataggcattg

SEQ ID NO: 2111215 - DNA, 15 bp, Homo sapiens
gagaataggcattga

SEQ ID NO: 2111216 - DNA, 15 bp, Homo sapiens
agaataggcattgaa

SEQ ID NO: 2111217 - DNA, 15 bp, Homo sapiens
gaataggcattgaaa

SEQ ID NO: 2111218 - DNA, 15 bp, Homo sapiens
aataggcattgaaat

SEQ ID NO: 2111219 - DNA, 15 bp, Homo sapiens
ataggcattgaaata

SEQ ID NO: 2111220 - DNA, 15 bp, Homo sapiens
taggcattgaaatat

SEQ ID NO: 2111221 - DNA, 15 bp, Homo sapiens
aggcattgaaatatt

SEQ ID NO: 2111222 - DNA, 15 bp, Homo sapiens
ggcattgaaatatta

SEQ ID NO: 2111223 - DNA, 15 bp, Homo sapiens
gcattgaaatattat

SEQ ID NO: 2111224 - DNA, 15 bp, Homo sapiens
cattgaaatattatt

SEQ ID NO: 2111225 - DNA, 15 bp, Homo sapiens
attgaaatattattt

SEQ ID NO: 2111226 - DNA, 15 bp, Homo sapiens
ttgaaatattattta

SEQ ID NO: 2111227 - DNA, 15 bp, Homo sapiens
tgaaatattatttaa

SEQ ID NO: 2111228 - DNA, 15 bp, Homo sapiens
gaaatattatttaaa

SEQ ID NO: 2111229 - DNA, 15 bp, Homo sapiens
aaatattatttaaac

SEQ ID NO: 2111230 - DNA, 15 bp, Homo sapiens
aatattatttaaaca

SEQ ID NO: 2111231 - DNA, 15 bp, Homo sapiens
atattatttaaacaa

SEQ ID NO: 2111232 - DNA, 15 bp, Homo sapiens
tattatttaaacaat

SEQ ID NO: 2111233 - DNA, 15 bp, Homo sapiens
attatttaaacaatc

SEQ ID NO: 2111234 - DNA, 15 bp, Homo sapiens
ttatttaaacaatca

SEQ ID NO: 2111235 - DNA, 15 bp, Homo sapiens
tatttaaacaatcaa

SEQ ID NO: 2111236 - DNA, 15 bp, Homo sapiens
atttaaacaatcaaa

SEQ ID NO: 2111237 - DNA, 15 bp, Homo sapiens
tttaaacaatcaaac

SEQ ID NO: 2111238 - DNA, 15 bp, Homo sapiens
ttaaacaatcaaacc

SEQ ID NO: 2111239 - DNA, 15 bp, Homo sapiens
taaacaatcaaacca

SEQ ID NO: 2111240 - DNA, 15 bp, Homo sapiens
aaacaatcaaaccaa

SEQ ID NO: 2111241 - DNA, 15 bp, Homo sapiens
aacaatcaaaccaaa

SEQ ID NO: 2111242 - DNA, 15 bp, Homo sapiens
acaatcaaaccaaag

SEQ ID NO: 2111243 - DNA, 15 bp, Homo sapiens
caatcaaaccaaaga

SEQ ID NO: 2111244 - DNA, 15 bp, Homo sapiens
aatcaaaccaaagat

SEQ ID NO: 2111245 - DNA, 15 bp, Homo sapiens
atcaaaccaaagatg

SEQ ID NO: 2111246 - DNA, 15 bp, Homo sapiens
tcaaaccaaagatgt

SEQ ID NO: 2111247 - DNA, 15 bp, Homo sapiens
caaaccaaagatgtt

SEQ ID NO: 2111248 - DNA, 15 bp, Homo sapiens
aaaccaaagatgttc

SEQ ID NO: 2111249 - DNA, 15 bp, Homo sapiens
aaccaaagatgttct

SEQ ID NO: 2111250 - DNA, 15 bp, Homo sapiens
accaaagatgttctt

SEQ ID NO: 2111251 - DNA, 15 bp, Homo sapiens
ccaaagatgttcttc

SEQ ID NO: 2111252 - DNA, 15 bp, Homo sapiens
caaagatgttcttct

SEQ ID NO: 2111253 - DNA, 15 bp, Homo sapiens
aaagatgttcttcta

SEQ ID NO: 2111254 - DNA, 15 bp, Homo sapiens
aagatgttcttctat

SEQ ID NO: 2111255 - DNA, 15 bp, Homo sapiens
agatgttcttctatc

SEQ ID NO: 2111256 - DNA, 15 bp, Homo sapiens
gatgttcttctatct

SEQ ID NO: 2111257 - DNA, 15 bp, Homo sapiens
atgttcttctatctt

SEQ ID NO: 2111258 - DNA, 15 bp, Homo sapiens
tgttcttctatcttc

SEQ ID NO: 2111259 - DNA, 15 bp, Homo sapiens
gttcttctatcttca

SEQ ID NO: 2111260 - DNA, 15 bp, Homo sapiens
ttcttctatcttcag

SEQ ID NO: 2111261 - DNA, 15 bp, Homo sapiens
tcttctatcttcagc

SEQ ID NO: 2111262 - DNA, 15 bp, Homo sapiens
cttctatcttcagct

SEQ ID NO: 2111263 - DNA, 15 bp, Homo sapiens
ttctatcttcagctg

SEQ ID NO: 2111264 - DNA, 15 bp, Homo sapiens
tctatcttcagctgt

SEQ ID NO: 2111265 - DNA, 15 bp, Homo sapiens
ctatcttcagctgtc

SEQ ID NO: 2111266 - DNA, 15 bp, Homo sapiens
tatcttcagctgtca

SEQ ID NO: 2111267 - DNA, 15 bp, Homo sapiens
atcttcagctgtcag

SEQ ID NO: 2111268 - DNA, 15 bp, Homo sapiens
tcttcagctgtcagt

SEQ ID NO: 2111269 - DNA, 15 bp, Homo sapiens
cttcagctgtcagtg

SEQ ID NO: 2111270 - DNA, 15 bp, Homo sapiens
ttcagctgtcagtga

SEQ ID NO: 2111271 - DNA, 15 bp, Homo sapiens
tcagctgtcagtgat

SEQ ID NO: 2111272 - DNA, 15 bp, Homo sapiens
cagctgtcagtgatc

SEQ ID NO: 2111273 - DNA, 15 bp, Homo sapiens
agctgtcagtgatct

SEQ ID NO: 2111274 - DNA, 15 bp, Homo sapiens
gctgtcagtgatcta

SEQ ID NO: 2111275 - DNA, 15 bp, Homo sapiens
ctgtcagtgatctaa

SEQ ID NO: 2111276 - DNA, 15 bp, Homo sapiens
tgtcagtgatctaat

SEQ ID NO: 2111277 - DNA, 15 bp, Homo sapiens
gtcagtgatctaatg

SEQ ID NO: 2111278 - DNA, 15 bp, Homo sapiens
tcagtgatctaatgc

SEQ ID NO: 2111279 - DNA, 15 bp, Homo sapiens
cagtgatctaatgcc

SEQ ID NO: 2111280 - DNA, 15 bp, Homo sapiens
agtgatctaatgccc

SEQ ID NO: 2111281 - DNA, 15 bp, Homo sapiens
gtgatctaatgccct

SEQ ID NO: 2111282 - DNA, 15 bp, Homo sapiens
tgatctaatgccctc

SEQ ID NO: 2111283 - DNA, 15 bp, Homo sapiens
gatctaatgccctca

SEQ ID NO: 2111284 - DNA, 15 bp, Homo sapiens
atctaatgccctcat

SEQ ID NO: 2111285 - DNA, 15 bp, Homo sapiens
tctaatgccctcatc

SEQ ID NO: 2111286 - DNA, 15 bp, Homo sapiens
ctaatgccctcatct

SEQ ID NO: 2111287 - DNA, 15 bp, Homo sapiens
taatgccctcatctc

SEQ ID NO: 2111288 - DNA, 15 bp, Homo sapiens
aatgccctcatctct

SEQ ID NO: 2111289 - DNA, 15 bp, Homo sapiens
atgccctcatctctc

SEQ ID NO: 2111290 - DNA, 15 bp, Homo sapiens
tgccctcatctctct

SEQ ID NO: 2111291 - DNA, 15 bp, Homo sapiens
gccctcatctctctt

SEQ ID NO: 2111292 - DNA, 15 bp, Homo sapiens
ccctcatctctctta

SEQ ID NO: 2111293 - DNA, 15 bp, Homo sapiens
cctcatctctcttat

SEQ ID NO: 2111294 - DNA, 15 bp, Homo sapiens
ctcatctctcttatc

SEQ ID NO: 2111295 - DNA, 15 bp, Homo sapiens
tcatctctcttatcc

SEQ ID NO: 2111296 - DNA, 15 bp, Homo sapiens
catctctcttatcct

SEQ ID NO: 2111297 - DNA, 15 bp, Homo sapiens
atctctcttatcctc

SEQ ID NO: 2111298 - DNA, 15 bp, Homo sapiens
tctctcttatcctca

SEQ ID NO: 2111299 - DNA, 15 bp, Homo sapiens
ctctcttatcctcag

SEQ ID NO: 2111300 - DNA, 15 bp, Homo sapiens
tctcttatcctcagg

SEQ ID NO: 2111301 - DNA, 15 bp, Homo sapiens
ctcttatcctcagga

SEQ ID NO: 2111302 - DNA, 15 bp, Homo sapiens
tcttatcctcaggac

SEQ ID NO: 2111303 - DNA, 15 bp, Homo sapiens
cttatcctcaggacc

SEQ ID NO: 2111304 - DNA, 15 bp, Homo sapiens
ttatcctcaggaccc

SEQ ID NO: 2111305 - DNA, 15 bp, Homo sapiens
tatcctcaggaccca

SEQ ID NO: 2111306 - DNA, 15 bp, Homo sapiens
atcctcaggacccag

SEQ ID NO: 2111307 - DNA, 15 bp, Homo sapiens
tcctcaggacccaga

SEQ ID NO: 2111308 - DNA, 15 bp, Homo sapiens
cctcaggacccagaa

SEQ ID NO: 2111309 - DNA, 15 bp, Homo sapiens
ctcaggacccagaat

SEQ ID NO: 2111310 - DNA, 15 bp, Homo sapiens
tcaggacccagaatg

SEQ ID NO: 2111311 - DNA, 15 bp, Homo sapiens
caggacccagaatgg

SEQ ID NO: 2111312 - DNA, 15 bp, Homo sapiens
aggacccagaatggt

SEQ ID NO: 2111313 - DNA, 15 bp, Homo sapiens
ggacccagaatggta

SEQ ID NO: 2111314 - DNA, 15 bp, Homo sapiens
gacccagaatggtat

SEQ ID NO: 2111315 - DNA, 15 bp, Homo sapiens
acccagaatggtata

SEQ ID NO: 2111316 - DNA, 15 bp, Homo sapiens
cccagaatggtatat

SEQ ID NO: 2111317 - DNA, 15 bp, Homo sapiens
ccagaatggtatatt

SEQ ID NO: 2111318 - DNA, 15 bp, Homo sapiens
cagaatggtatattc

SEQ ID NO: 2111319 - DNA, 15 bp, Homo sapiens
agaatggtatattcc

SEQ ID NO: 2111320 - DNA, 15 bp, Homo sapiens
gaatggtatattcca

SEQ ID NO: 2111321 - DNA, 15 bp, Homo sapiens
aatggtatattccac

SEQ ID NO: 2111322 - DNA, 15 bp, Homo sapiens
atggtatattccaca

SEQ ID NO: 2111323 - DNA, 15 bp, Homo sapiens
tggtatattccacat

SEQ ID NO: 2111324 - DNA, 15 bp, Homo sapiens
ggtatattccacata

SEQ ID NO: 2111325 - DNA, 15 bp, Homo sapiens
gtatattccacataa

SEQ ID NO: 2111326 - DNA, 15 bp, Homo sapiens
tatattccacataaa

SEQ ID NO: 2111327 - DNA, 15 bp, Homo sapiens
atattccacataaaa

SEQ ID NO: 2111328 - DNA, 15 bp, Homo sapiens
tattccacataaaag

SEQ ID NO: 2111329 - DNA, 15 bp, Homo sapiens
attccacataaaaga

SEQ ID NO: 2111330 - DNA, 15 bp, Homo sapiens
ttccacataaaagat

SEQ ID NO: 2111331 - DNA, 15 bp, Homo sapiens
tccacataaaagatg

SEQ ID NO: 2111332 - DNA, 15 bp, Homo sapiens
ccacataaaagatgc

SEQ ID NO: 2111333 - DNA, 15 bp, Homo sapiens
cacataaaagatgct

SEQ ID NO: 2111334 - DNA, 15 bp, Homo sapiens
acataaaagatgctt

SEQ ID NO: 2111335 - DNA, 15 bp, Homo sapiens
cataaaagatgcttt

SEQ ID NO: 2111336 - DNA, 15 bp, Homo sapiens
ataaaagatgctttg

SEQ ID NO: 2111337 - DNA, 15 bp, Homo sapiens
taaaagatgctttgt

SEQ ID NO: 2111338 - DNA, 15 bp, Homo sapiens
aaaagatgctttgtt

SEQ ID NO: 2111339 - DNA, 15 bp, Homo sapiens
aaagatgctttgttt

SEQ ID NO: 2111340 - DNA, 15 bp, Homo sapiens
aagatgctttgttta

SEQ ID NO: 2111341 - DNA, 15 bp, Homo sapiens
agatgctttgtttat

SEQ ID NO: 2111342 - DNA, 15 bp, Homo sapiens
gatgctttgtttatc

SEQ ID NO: 2111343 - DNA, 15 bp, Homo sapiens
atgctttgtttatca

SEQ ID NO: 2111344 - DNA, 15 bp, Homo sapiens
tgctttgtttatcaa

SEQ ID NO: 2111345 - DNA, 15 bp, Homo sapiens
gctttgtttatcaaa

SEQ ID NO: 2111346 - DNA, 15 bp, Homo sapiens
ctttgtttatcaaat

SEQ ID NO: 2111347 - DNA, 15 bp, Homo sapiens
tttgtttatcaaatg

SEQ ID NO: 2111348 - DNA, 15 bp, Homo sapiens
ttgtttatcaaatga

SEQ ID NO: 2111349 - DNA, 15 bp, Homo sapiens
tgtttatcaaatgaa

SEQ ID NO: 2111350 - DNA, 15 bp, Homo sapiens
gtttatcaaatgaat

SEQ ID NO: 2111351 - DNA, 15 bp, Homo sapiens
tttatcaaatgaatc

SEQ ID NO: 2111352 - DNA, 15 bp, Homo sapiens
ttatcaaatgaatca

SEQ ID NO: 2111353 - DNA, 15 bp, Homo sapiens
tatcaaatgaatcaa

SEQ ID NO: 2111354 - DNA, 15 bp, Homo sapiens
atcaaatgaatcaaa

SEQ ID NO: 2111355 - DNA, 15 bp, Homo sapiens
tcaaatgaatcaaaa

SEQ ID NO: 2111356 - DNA, 15 bp, Homo sapiens
caaatgaatcaaaaa

SEQ ID NO: 2111357 - DNA, 15 bp, Homo sapiens
aaatgaatcaaaaag

SEQ ID NO: 2111358 - DNA, 15 bp, Homo sapiens
aatgaatcaaaaagc

SEQ ID NO: 2111359 - DNA, 15 bp, Homo sapiens
atgaatcaaaaagca

SEQ ID NO: 2111360 - DNA, 15 bp, Homo sapiens
tgaatcaaaaagcac

SEQ ID NO: 2111361 - DNA, 15 bp, Homo sapiens
gaatcaaaaagcacg

SEQ ID NO: 2111362 - DNA, 15 bp, Homo sapiens
aatcaaaaagcacgc

SEQ ID NO: 2111363 - DNA, 15 bp, Homo sapiens
atcaaaaagcacgcc

SEQ ID NO: 2111364 - DNA, 15 bp, Homo sapiens
tcaaaaagcacgcct

SEQ ID NO: 2111365 - DNA, 15 bp, Homo sapiens
caaaaagcacgcctg

SEQ ID NO: 2111366 - DNA, 15 bp, Homo sapiens
aaaaagcacgcctga

SEQ ID NO: 2111367 - DNA, 15 bp, Homo sapiens
aaaagcacgcctgag

SEQ ID NO: 2111368 - DNA, 15 bp, Homo sapiens
aaagcacgcctgagg

SEQ ID NO: 2111369 - DNA, 15 bp, Homo sapiens
aagcacgcctgaggc

SEQ ID NO: 2111370 - DNA, 15 bp, Homo sapiens
agcacgcctgaggca

SEQ ID NO: 2111371 - DNA, 15 bp, Homo sapiens
gcacgcctgaggcat

SEQ ID NO: 2111372 - DNA, 15 bp, Homo sapiens
cacgcctgaggcatt

SEQ ID NO: 2111373 - DNA, 15 bp, Homo sapiens
acgcctgaggcattt

SEQ ID NO: 2111374 - DNA, 15 bp, Homo sapiens
cgcctgaggcattta

SEQ ID NO: 2111375 - DNA, 15 bp, Homo sapiens
gcctgaggcatttat

SEQ ID NO: 2111376 - DNA, 15 bp, Homo sapiens
cctgaggcatttatt

SEQ ID NO: 2111377 - DNA, 15 bp, Homo sapiens
ctgaggcatttattt

SEQ ID NO: 2111378 - DNA, 15 bp, Homo sapiens
tgaggcatttatttt

SEQ ID NO: 2111379 - DNA, 15 bp, Homo sapiens
gaggcatttattttt

SEQ ID NO: 2111380 - DNA, 15 bp, Homo sapiens
aggcatttattttta

SEQ ID NO: 2111381 - DNA, 15 bp, Homo sapiens
ggcatttatttttac

SEQ ID NO: 2111382 - DNA, 15 bp, Homo sapiens
gcatttatttttact

SEQ ID NO: 2111383 - DNA, 15 bp, Homo sapiens
catttatttttactc

SEQ ID NO: 2111384 - DNA, 15 bp, Homo sapiens
atttatttttactcc

SEQ ID NO: 2111385 - DNA, 15 bp, Homo sapiens
tttatttttactcct

SEQ ID NO: 2111386 - DNA, 15 bp, Homo sapiens
ttatttttactcctt

SEQ ID NO: 2111387 - DNA, 15 bp, Homo sapiens
tatttttactccttt

SEQ ID NO: 2111388 - DNA, 15 bp, Homo sapiens
tttttactcctttac

SEQ ID NO: 2111389 - DNA, 15 bp, Homo sapiens
ttttactcctttact

SEQ ID NO: 2111390 - DNA, 15 bp, Homo sapiens
tttactcctttactt

SEQ ID NO: 2111391 - DNA, 15 bp, Homo sapiens
ttactcctttacttc

SEQ ID NO: 2111392 - DNA, 15 bp, Homo sapiens
tactcctttacttct

SEQ ID NO: 2111393 - DNA, 15 bp, Homo sapiens
actcctttacttctg

SEQ ID NO: 2111394 - DNA, 15 bp, Homo sapiens
ctcctttacttctgt

SEQ ID NO: 2111395 - DNA, 15 bp, Homo sapiens
tcctttacttctgta

SEQ ID NO: 2111396 - DNA, 15 bp, Homo sapiens
cctttacttctgtag

SEQ ID NO: 2111397 - DNA, 15 bp, Homo sapiens
ctttacttctgtagg

SEQ ID NO: 2111398 - DNA, 15 bp, Homo sapiens
tttacttctgtaggc

SEQ ID NO: 2111399 - DNA, 15 bp, Homo sapiens
ttacttctgtaggcc

SEQ ID NO: 2111400 - DNA, 15 bp, Homo sapiens
tacttctgtaggcca

SEQ ID NO: 2111401 - DNA, 15 bp, Homo sapiens
acttctgtaggccag

SEQ ID NO: 2111402 - DNA, 15 bp, Homo sapiens
cttctgtaggccagg

SEQ ID NO: 2111403 - DNA, 15 bp, Homo sapiens
ttctgtaggccaggt

SEQ ID NO: 2111404 - DNA, 15 bp, Homo sapiens
tctgtaggccaggtc

SEQ ID NO: 2111405 - DNA, 15 bp, Homo sapiens
ctgtaggccaggtca

SEQ ID NO: 2111406 - DNA, 15 bp, Homo sapiens
tgtaggccaggtcaa

SEQ ID NO: 2111407 - DNA, 15 bp, Homo sapiens
gtaggccaggtcaag

SEQ ID NO: 2111408 - DNA, 15 bp, Homo sapiens
taggccaggtcaagg

SEQ ID NO: 2111409 - DNA, 15 bp, Homo sapiens
aggccaggtcaaggt

SEQ ID NO: 2111410 - DNA, 15 bp, Homo sapiens
ggccaggtcaaggtg

SEQ ID NO: 2111411 - DNA, 15 bp, Homo sapiens
gccaggtcaaggtgg

SEQ ID NO: 2111412 - DNA, 15 bp, Homo sapiens
ccaggtcaaggtggg

SEQ ID NO: 2111413 - DNA, 15 bp, Homo sapiens
caggtcaaggtgggt

SEQ ID NO: 2111414 - DNA, 15 bp, Homo sapiens
aggtcaaggtgggtc

SEQ ID NO: 2111415 - DNA, 15 bp, Homo sapiens
ggtcaaggtgggtct

SEQ ID NO: 2111416 - DNA, 15 bp, Homo sapiens
gtcaaggtgggtcta

SEQ ID NO: 2111417 - DNA, 15 bp, Homo sapiens
tcaaggtgggtctaa

SEQ ID NO: 2111418 - DNA, 15 bp, Homo sapiens
caaggtgggtctaat

SEQ ID NO: 2111419 - DNA, 15 bp, Homo sapiens
aaggtgggtctaatt

SEQ ID NO: 2111420 - DNA, 15 bp, Homo sapiens
aggtgggtctaattc

SEQ ID NO: 2111421 - DNA, 15 bp, Homo sapiens
ggtgggtctaattca

SEQ ID NO: 2111422 - DNA, 15 bp, Homo sapiens
gtgggtctaattcac

SEQ ID NO: 2111423 - DNA, 15 bp, Homo sapiens
tgggtctaattcact

SEQ ID NO: 2111424 - DNA, 15 bp, Homo sapiens
gggtctaattcactt

SEQ ID NO: 2111425 - DNA, 15 bp, Homo sapiens
ggtctaattcacttt

SEQ ID NO: 2111426 - DNA, 15 bp, Homo sapiens
gtctaattcactttt

SEQ ID NO: 2111427 - DNA, 15 bp, Homo sapiens
tctaattcactttta

SEQ ID NO: 2111428 - DNA, 15 bp, Homo sapiens
ctaattcacttttat

SEQ ID NO: 2111429 - DNA, 15 bp, Homo sapiens
taattcacttttatc

SEQ ID NO: 2111430 - DNA, 15 bp, Homo sapiens
aattcacttttatca

SEQ ID NO: 2111431 - DNA, 15 bp, Homo sapiens
attcacttttatcat

SEQ ID NO: 2111432 - DNA, 15 bp, Homo sapiens
ttcacttttatcatc

SEQ ID NO: 2111433 - DNA, 15 bp, Homo sapiens
tcacttttatcatca

SEQ ID NO: 2111434 - DNA, 15 bp, Homo sapiens
cacttttatcatcag

SEQ ID NO: 2111435 - DNA, 15 bp, Homo sapiens
acttttatcatcagc

SEQ ID NO: 2111436 - DNA, 15 bp, Homo sapiens
cttttatcatcagca

SEQ ID NO: 2111437 - DNA, 15 bp, Homo sapiens
ttttatcatcagcac

SEQ ID NO: 2111438 - DNA, 15 bp, Homo sapiens
tttatcatcagcact

SEQ ID NO: 2111439 - DNA, 15 bp, Homo sapiens
ttatcatcagcactt

SEQ ID NO: 2111440 - DNA, 15 bp, Homo sapiens
tatcatcagcactta

SEQ ID NO: 2111441 - DNA, 15 bp, Homo sapiens
atcatcagcacttaa

SEQ ID NO: 2111442 - DNA, 15 bp, Homo sapiens
tcatcagcacttaag

SEQ ID NO: 2111443 - DNA, 15 bp, Homo sapiens
catcagcacttaaga

SEQ ID NO: 2111444 - DNA, 15 bp, Homo sapiens
atcagcacttaagaa

SEQ ID NO: 2111445 - DNA, 15 bp, Homo sapiens
tcagcacttaagaaa

SEQ ID NO: 2111446 - DNA, 15 bp, Homo sapiens
cagcacttaagaaac

SEQ ID NO: 2111447 - DNA, 15 bp, Homo sapiens
agcacttaagaaact

SEQ ID NO: 2111448 - DNA, 15 bp, Homo sapiens
gcacttaagaaactg

SEQ ID NO: 2111449 - DNA, 15 bp, Homo sapiens
cacttaagaaactgg

SEQ ID NO: 2111450 - DNA, 15 bp, Homo sapiens
acttaagaaactgga

SEQ ID NO: 2111451 - DNA, 15 bp, Homo sapiens
cttaagaaactggat

SEQ ID NO: 2111452 - DNA, 15 bp, Homo sapiens
ttaagaaactggatg

SEQ ID NO: 2111453 - DNA, 15 bp, Homo sapiens
taagaaactggatgg

SEQ ID NO: 2111454 - DNA, 15 bp, Homo sapiens
aagaaactggatgga

SEQ ID NO: 2111455 - DNA, 15 bp, Homo sapiens
agaaactggatggaa

SEQ ID NO: 2111456 - DNA, 15 bp, Homo sapiens
gaaactggatggaag

SEQ ID NO: 2111457 - DNA, 15 bp, Homo sapiens
aaactggatggaaga

SEQ ID NO: 2111458 - DNA, 15 bp, Homo sapiens
aactggatggaagac

SEQ ID NO: 2111459 - DNA, 15 bp, Homo sapiens
actggatggaagacc

SEQ ID NO: 2111460 - DNA, 15 bp, Homo sapiens
ctggatggaagacca

SEQ ID NO: 2111461 - DNA, 15 bp, Homo sapiens
tggatggaagaccac

SEQ ID NO: 2111462 - DNA, 15 bp, Homo sapiens
ggatggaagaccaca

SEQ ID NO: 2111463 - DNA, 15 bp, Homo sapiens
gatggaagaccacaa

SEQ ID NO: 2111464 - DNA, 15 bp, Homo sapiens
atggaagaccacaac

SEQ ID NO: 2111465 - DNA, 15 bp, Homo sapiens
tggaagaccacaaca

SEQ ID NO: 2111466 - DNA, 15 bp, Homo sapiens
ggaagaccacaacac

SEQ ID NO: 2111467 - DNA, 15 bp, Homo sapiens
gaagaccacaacacc

SEQ ID NO: 2111468 - DNA, 15 bp, Homo sapiens
aagaccacaacacct

SEQ ID NO: 2111469 - DNA, 15 bp, Homo sapiens
agaccacaacacctt

SEQ ID NO: 2111470 - DNA, 15 bp, Homo sapiens
gaccacaacaccttg

SEQ ID NO: 2111471 - DNA, 15 bp, Homo sapiens
accacaacaccttgt

SEQ ID NO: 2111472 - DNA, 15 bp, Homo sapiens
cacaacaccttgttt

SEQ ID NO: 2111473 - DNA, 15 bp, Homo sapiens
acaacaccttgtttt

SEQ ID NO: 2111474 - DNA, 15 bp, Homo sapiens
caacaccttgttttt

SEQ ID NO: 2111475 - DNA, 15 bp, Homo sapiens
aacaccttgtttttt

SEQ ID NO: 2111476 - DNA, 15 bp, Homo sapiens
acaccttgttttttg

SEQ ID NO: 2111477 - DNA, 15 bp, Homo sapiens
caccttgttttttgc

SEQ ID NO: 2111478 - DNA, 15 bp, Homo sapiens
accttgttttttgca

SEQ ID NO: 2111479 - DNA, 15 bp, Homo sapiens
ccttgttttttgcaa

SEQ ID NO: 2111480 - DNA, 15 bp, Homo sapiens
cttgttttttgcaaa

SEQ ID NO: 2111481 - DNA, 15 bp, Homo sapiens
ttgttttttgcaaaa

SEQ ID NO: 2111482 - DNA, 15 bp, Homo sapiens
tgttttttgcaaaaa

SEQ ID NO: 2111483 - DNA, 15 bp, Homo sapiens
gttttttgcaaaaat

SEQ ID NO: 2111484 - DNA, 15 bp, Homo sapiens
ttttttgcaaaaatt

SEQ ID NO: 2111485 - DNA, 15 bp, Homo sapiens
tttttgcaaaaattt

SEQ ID NO: 2111486 - DNA, 15 bp, Homo sapiens
ttttgcaaaaatttt

SEQ ID NO: 2111487 - DNA, 15 bp, Homo sapiens
tttgcaaaaattttc

SEQ ID NO: 2111488 - DNA, 15 bp, Homo sapiens
ttgcaaaaattttcc

SEQ ID NO: 2111489 - DNA, 15 bp, Homo sapiens
tgcaaaaattttcca

SEQ ID NO: 2111490 - DNA, 15 bp, Homo sapiens
gcaaaaattttccat

SEQ ID NO: 2111491 - DNA, 15 bp, Homo sapiens
caaaaattttccatc

SEQ ID NO: 2111492 - DNA, 15 bp, Homo sapiens
aaaaattttccatct

SEQ ID NO: 2111493 - DNA, 15 bp, Homo sapiens
aaaattttccatctc

SEQ ID NO: 2111494 - DNA, 15 bp, Homo sapiens
aaattttccatctcc

SEQ ID NO: 2111495 - DNA, 15 bp, Homo sapiens
aattttccatctcct

SEQ ID NO: 2111496 - DNA, 15 bp, Homo sapiens
attttccatctcctc

SEQ ID NO: 2111497 - DNA, 15 bp, Homo sapiens
ttttccatctcctca

SEQ ID NO: 2111498 - DNA, 15 bp, Homo sapiens
tttccatctcctcaa

SEQ ID NO: 2111499 - DNA, 15 bp, Homo sapiens
ttccatctcctcaat

SEQ ID NO: 2111500 - DNA, 15 bp, Homo sapiens
tccatctcctcaatc

SEQ ID NO: 2111501 - DNA, 15 bp, Homo sapiens
ccatctcctcaatca

SEQ ID NO: 2111502 - DNA, 15 bp, Homo sapiens
catctcctcaatcag

SEQ ID NO: 2111503 - DNA, 15 bp, Homo sapiens
atctcctcaatcagg

SEQ ID NO: 2111504 - DNA, 15 bp, Homo sapiens
tctcctcaatcaggc

SEQ ID NO: 2111505 - DNA, 15 bp, Homo sapiens
ctcctcaatcaggcc

SEQ ID NO: 2111506 - DNA, 15 bp, Homo sapiens
tcctcaatcaggcca

SEQ ID NO: 2111507 - DNA, 15 bp, Homo sapiens
cctcaatcaggccag

SEQ ID NO: 2111508 - DNA, 15 bp, Homo sapiens
ctcaatcaggccagg

SEQ ID NO: 2111509 - DNA, 15 bp, Homo sapiens
tcaatcaggccagga

SEQ ID NO: 2111510 - DNA, 15 bp, Homo sapiens
caatcaggccaggaa

SEQ ID NO: 2111511 - DNA, 15 bp, Homo sapiens
aatcaggccaggaag

SEQ ID NO: 2111512 - DNA, 15 bp, Homo sapiens
atcaggccaggaagc

SEQ ID NO: 2111513 - DNA, 15 bp, Homo sapiens
tcaggccaggaagca

SEQ ID NO: 2111514 - DNA, 15 bp, Homo sapiens
caggccaggaagcat

SEQ ID NO: 2111515 - DNA, 15 bp, Homo sapiens
aggccaggaagcatg

SEQ ID NO: 2111516 - DNA, 15 bp, Homo sapiens
ggccaggaagcatgt

SEQ ID NO: 2111517 - DNA, 15 bp, Homo sapiens
gccaggaagcatgta

SEQ ID NO: 2111518 - DNA, 15 bp, Homo sapiens
ccaggaagcatgtat

SEQ ID NO: 2111519 - DNA, 15 bp, Homo sapiens
caggaagcatgtatc

SEQ ID NO: 2111520 - DNA, 15 bp, Homo sapiens
aggaagcatgtatct

SEQ ID NO: 2111521 - DNA, 15 bp, Homo sapiens
ggaagcatgtatctt

SEQ ID NO: 2111522 - DNA, 15 bp, Homo sapiens
gaagcatgtatcttc

SEQ ID NO: 2111523 - DNA, 15 bp, Homo sapiens
aagcatgtatcttct

SEQ ID NO: 2111524 - DNA, 15 bp, Homo sapiens
agcatgtatcttctg

SEQ ID NO: 2111525 - DNA, 15 bp, Homo sapiens
gcatgtatcttctgg

SEQ ID NO: 2111526 - DNA, 15 bp, Homo sapiens
catgtatcttctgga

SEQ ID NO: 2111527 - DNA, 15 bp, Homo sapiens
atgtatcttctggac

SEQ ID NO: 2111528 - DNA, 15 bp, Homo sapiens
tgtatcttctggaca

SEQ ID NO: 2111529 - DNA, 15 bp, Homo sapiens
gtatcttctggacag

SEQ ID NO: 2111530 - DNA, 15 bp, Homo sapiens
tatcttctggacagg

SEQ ID NO: 2111531 - DNA, 15 bp, Homo sapiens
atcttctggacagga

SEQ ID NO: 2111532 - DNA, 15 bp, Homo sapiens
tcttctggacaggac

SEQ ID NO: 2111533 - DNA, 15 bp, Homo sapiens
cttctggacaggact

SEQ ID NO: 2111534 - DNA, 15 bp, Homo sapiens
ttctggacaggactt

SEQ ID NO: 2111535 - DNA, 15 bp, Homo sapiens
tctggacaggacttt

SEQ ID NO: 2111536 - DNA, 15 bp, Homo sapiens
ctggacaggacttta

SEQ ID NO: 2111537 - DNA, 15 bp, Homo sapiens
tggacaggactttat

SEQ ID NO: 2111538 - DNA, 15 bp, Homo sapiens
ggacaggactttatc

SEQ ID NO: 2111539 - DNA, 15 bp, Homo sapiens
gacaggactttatct

SEQ ID NO: 2111540 - DNA, 15 bp, Homo sapiens
acaggactttatctc

SEQ ID NO: 2111541 - DNA, 15 bp, Homo sapiens
caggactttatctct

SEQ ID NO: 2111542 - DNA, 15 bp, Homo sapiens
aggactttatctctc

SEQ ID NO: 2111543 - DNA, 15 bp, Homo sapiens
ggactttatctctct

SEQ ID NO: 2111544 - DNA, 15 bp, Homo sapiens
gactttatctctcta

SEQ ID NO: 2111545 - DNA, 15 bp, Homo sapiens
actttatctctctac

SEQ ID NO: 2111546 - DNA, 15 bp, Homo sapiens
ctttatctctctact

SEQ ID NO: 2111547 - DNA, 15 bp, Homo sapiens
tttatctctctactc

SEQ ID NO: 2111548 - DNA, 15 bp, Homo sapiens
ttatctctctactca

SEQ ID NO: 2111549 - DNA, 15 bp, Homo sapiens
tatctctctactcag

SEQ ID NO: 2111550 - DNA, 15 bp, Homo sapiens
atctctctactcagc

SEQ ID NO: 2111551 - DNA, 15 bp, Homo sapiens
tctctctactcagct

SEQ ID NO: 2111552 - DNA, 15 bp, Homo sapiens
ctctctactcagctt

SEQ ID NO: 2111553 - DNA, 15 bp, Homo sapiens
tctctactcagctta

SEQ ID NO: 2111554 - DNA, 15 bp, Homo sapiens
ctctactcagcttag

SEQ ID NO: 2111555 - DNA, 15 bp, Homo sapiens
tctactcagcttagt

SEQ ID NO: 2111556 - DNA, 15 bp, Homo sapiens
ctactcagcttagta

SEQ ID NO: 2111557 - DNA, 15 bp, Homo sapiens
tactcagcttagtac

SEQ ID NO: 2111558 - DNA, 15 bp, Homo sapiens
actcagcttagtaca

SEQ ID NO: 2111559 - DNA, 15 bp, Homo sapiens
ctcagcttagtacac

SEQ ID NO: 2111560 - DNA, 15 bp, Homo sapiens
tcagcttagtacact

SEQ ID NO: 2111561 - DNA, 15 bp, Homo sapiens
cagcttagtacactg

SEQ ID NO: 2111562 - DNA, 15 bp, Homo sapiens
agcttagtacactgc

SEQ ID NO: 2111563 - DNA, 15 bp, Homo sapiens
gcttagtacactgcc

SEQ ID NO: 2111564 - DNA, 15 bp, Homo sapiens
cttagtacactgcct

SEQ ID NO: 2111565 - DNA, 15 bp, Homo sapiens
ttagtacactgcctt

SEQ ID NO: 2111566 - DNA, 15 bp, Homo sapiens
tagtacactgcctta

SEQ ID NO: 2111567 - DNA, 15 bp, Homo sapiens
agtacactgccttat

SEQ ID NO: 2111568 - DNA, 15 bp, Homo sapiens
gtacactgccttata

SEQ ID NO: 2111569 - DNA, 15 bp, Homo sapiens
tacactgccttatat

SEQ ID NO: 2111570 - DNA, 15 bp, Homo sapiens
acactgccttatatt

SEQ ID NO: 2111571 - DNA, 15 bp, Homo sapiens
cactgccttatatta

SEQ ID NO: 2111572 - DNA, 15 bp, Homo sapiens
actgccttatattag

SEQ ID NO: 2111573 - DNA, 15 bp, Homo sapiens
ctgccttatattagt

SEQ ID NO: 2111574 - DNA, 15 bp, Homo sapiens
tgccttatattagtc

SEQ ID NO: 2111575 - DNA, 15 bp, Homo sapiens
gccttatattagtcc

SEQ ID NO: 2111576 - DNA, 15 bp, Homo sapiens
ccttatattagtcca

SEQ ID NO: 2111577 - DNA, 15 bp, Homo sapiens
cttatattagtccat

SEQ ID NO: 2111578 - DNA, 15 bp, Homo sapiens
ttatattagtccatt

SEQ ID NO: 2111579 - DNA, 15 bp, Homo sapiens
tatattagtccattt

SEQ ID NO: 2111580 - DNA, 15 bp, Homo sapiens
atattagtccatttg

SEQ ID NO: 2111581 - DNA, 15 bp, Homo sapiens
tattagtccatttgt

SEQ ID NO: 2111582 - DNA, 15 bp, Homo sapiens
attagtccatttgtc

SEQ ID NO: 2111583 - DNA, 15 bp, Homo sapiens
ttagtccatttgtcc

SEQ ID NO: 2111584 - DNA, 15 bp, Homo sapiens
tagtccatttgtccc

SEQ ID NO: 2111585 - DNA, 15 bp, Homo sapiens
agtccatttgtccca

SEQ ID NO: 2111586 - DNA, 15 bp, Homo sapiens
gtccatttgtcccat

SEQ ID NO: 2111587 - DNA, 15 bp, Homo sapiens
tccatttgtcccatg

SEQ ID NO: 2111588 - DNA, 15 bp, Homo sapiens
ccatttgtcccatgt

SEQ ID NO: 2111589 - DNA, 15 bp, Homo sapiens
catttgtcccatgtt

SEQ ID NO: 2111590 - DNA, 15 bp, Homo sapiens
atttgtcccatgttt

SEQ ID NO: 2111591 - DNA, 15 bp, Homo sapiens
tttgtcccatgtttt

SEQ ID NO: 2111592 - DNA, 15 bp, Homo sapiens
ttgtcccatgttttc

SEQ ID NO: 2111593 - DNA, 15 bp, Homo sapiens
tgtcccatgttttca

SEQ ID NO: 2111594 - DNA, 15 bp, Homo sapiens
gtcccatgttttcat

SEQ ID NO: 2111595 - DNA, 15 bp, Homo sapiens
tcccatgttttcatc

SEQ ID NO: 2111596 - DNA, 15 bp, Homo sapiens
cccatgttttcatca

SEQ ID NO: 2111597 - DNA, 15 bp, Homo sapiens
ccatgttttcatcac

SEQ ID NO: 2111598 - DNA, 15 bp, Homo sapiens
catgttttcatcact

SEQ ID NO: 2111599 - DNA, 15 bp, Homo sapiens
atgttttcatcactg

SEQ ID NO: 2111600 - DNA, 15 bp, Homo sapiens
tgttttcatcactga

SEQ ID NO: 2111601 - DNA, 15 bp, Homo sapiens
gttttcatcactgaa

SEQ ID NO: 2111602 - DNA, 15 bp, Homo sapiens
ttttcatcactgaat

SEQ ID NO: 2111603 - DNA, 15 bp, Homo sapiens
tttcatcactgaata

SEQ ID NO: 2111604 - DNA, 15 bp, Homo sapiens
ttcatcactgaataa

SEQ ID NO: 2111605 - DNA, 15 bp, Homo sapiens
tcatcactgaataaa

SEQ ID NO: 2111606 - DNA, 15 bp, Homo sapiens
catcactgaataaac

SEQ ID NO: 2111607 - DNA, 15 bp, Homo sapiens
atcactgaataaact

SEQ ID NO: 2111608 - DNA, 15 bp, Homo sapiens
tcactgaataaactt

SEQ ID NO: 2111609 - DNA, 15 bp, Homo sapiens
cactgaataaacttg

SEQ ID NO: 2111610 - DNA, 15 bp, Homo sapiens
actgaataaacttgt

SEQ ID NO: 2111611 - DNA, 15 bp, Homo sapiens
ctgaataaacttgtt

SEQ ID NO: 2111612 - DNA, 15 bp, Homo sapiens
tgaataaacttgtta

SEQ ID NO: 2111613 - DNA, 15 bp, Homo sapiens
gaataaacttgttaa

SEQ ID NO: 2111614 - DNA, 15 bp, Homo sapiens
aataaacttgttaaa

SEQ ID NO: 2111615 - DNA, 15 bp, Homo sapiens
ataaacttgttaaat

SEQ ID NO: 2111616 - DNA, 15 bp, Homo sapiens
taaacttgttaaatg

SEQ ID NO: 2111617 - DNA, 15 bp, Homo sapiens
aaacttgttaaatga

SEQ ID NO: 2111618 - DNA, 15 bp, Homo sapiens
aacttgttaaatgac

SEQ ID NO: 2111619 - DNA, 15 bp, Homo sapiens
acttgttaaatgact

SEQ ID NO: 2111620 - DNA, 15 bp, Homo sapiens
cttgttaaatgactt

SEQ ID NO: 2111621 - DNA, 15 bp, Homo sapiens
ttgttaaatgacttt

SEQ ID NO: 2111622 - DNA, 15 bp, Homo sapiens
tgttaaatgactttt

SEQ ID NO: 2111623 - DNA, 15 bp, Homo sapiens
gttaaatgacttttg

SEQ ID NO: 2111624 - DNA, 15 bp, Homo sapiens
ttaaatgacttttgg

SEQ ID NO: 2111625 - DNA, 15 bp, Homo sapiens
taaatgacttttggt

SEQ ID NO: 2111626 - DNA, 15 bp, Homo sapiens
aaatgacttttggtc

SEQ ID NO: 2111627 - DNA, 15 bp, Homo sapiens
aatgacttttggtct

SEQ ID NO: 2111628 - DNA, 15 bp, Homo sapiens
atgacttttggtctg

SEQ ID NO: 2111629 - DNA, 15 bp, Homo sapiens
tgacttttggtctgg

SEQ ID NO: 2111630 - DNA, 15 bp, Homo sapiens
gacttttggtctgga

SEQ ID NO: 2111631 - DNA, 15 bp, Homo sapiens
acttttggtctggat

SEQ ID NO: 2111632 - DNA, 15 bp, Homo sapiens
cttttggtctggatc

SEQ ID NO: 2111633 - DNA, 15 bp, Homo sapiens
ttttggtctggatct

SEQ ID NO: 2111634 - DNA, 15 bp, Homo sapiens
tttggtctggatctc

SEQ ID NO: 2111635 - DNA, 15 bp, Homo sapiens
ttggtctggatctca

SEQ ID NO: 2111636 - DNA, 15 bp, Homo sapiens
tggtctggatctcac

SEQ ID NO: 2111637 - DNA, 15 bp, Homo sapiens
gtctggatctcacac

SEQ ID NO: 2111638 - DNA, 15 bp, Homo sapiens
tctggatctcacacc

SEQ ID NO: 2111639 - DNA, 15 bp, Homo sapiens
ctggatctcacacct

SEQ ID NO: 2111640 - DNA, 15 bp, Homo sapiens
tggatctcacaccta

SEQ ID NO: 2111641 - DNA, 15 bp, Homo sapiens
ggatctcacacctat

SEQ ID NO: 2111642 - DNA, 15 bp, Homo sapiens
gatctcacacctata

SEQ ID NO: 2111643 - DNA, 15 bp, Homo sapiens
atctcacacctatat

SEQ ID NO: 2111644 - DNA, 15 bp, Homo sapiens
tctcacacctatatt

SEQ ID NO: 2111645 - DNA, 15 bp, Homo sapiens
ctcacacctatatta

SEQ ID NO: 2111646 - DNA, 15 bp, Homo sapiens
tcacacctatattac

SEQ ID NO: 2111647 - DNA, 15 bp, Homo sapiens
cacacctatattact

SEQ ID NO: 2111648 - DNA, 15 bp, Homo sapiens
acacctatattactt

SEQ ID NO: 2111649 - DNA, 15 bp, Homo sapiens
cacctatattacttc

SEQ ID NO: 2111650 - DNA, 15 bp, Homo sapiens
acctatattacttca

SEQ ID NO: 2111651 - DNA, 15 bp, Homo sapiens
cctatattacttcat

SEQ ID NO: 2111652 - DNA, 15 bp, Homo sapiens
ctatattacttcatt

SEQ ID NO: 2111653 - DNA, 15 bp, Homo sapiens
tatattacttcattt

SEQ ID NO: 2111654 - DNA, 15 bp, Homo sapiens
atattacttcatttc

SEQ ID NO: 2111655 - DNA, 15 bp, Homo sapiens
ttacttcatttcctt

SEQ ID NO: 2111656 - DNA, 15 bp, Homo sapiens
tacttcatttccttc

SEQ ID NO: 2111657 - DNA, 15 bp, Homo sapiens
acttcatttccttct

SEQ ID NO: 2111658 - DNA, 15 bp, Homo sapiens
cttcatttccttctg

SEQ ID NO: 2111659 - DNA, 15 bp, Homo sapiens
ttcatttccttctgt

SEQ ID NO: 2111660 - DNA, 15 bp, Homo sapiens
tcatttccttctgtg

SEQ ID NO: 2111661 - DNA, 15 bp, Homo sapiens
catttccttctgtga

SEQ ID NO: 2111662 - DNA, 15 bp, Homo sapiens
atttccttctgtgag

SEQ ID NO: 2111663 - DNA, 15 bp, Homo sapiens
tttccttctgtgagc

SEQ ID NO: 2111664 - DNA, 15 bp, Homo sapiens
ttccttctgtgagca

SEQ ID NO: 2111665 - DNA, 15 bp, Homo sapiens
tccttctgtgagcac

SEQ ID NO: 2111666 - DNA, 15 bp, Homo sapiens
ccttctgtgagcact

SEQ ID NO: 2111667 - DNA, 15 bp, Homo sapiens
cttctgtgagcactc

SEQ ID NO: 2111668 - DNA, 15 bp, Homo sapiens
ttctgtgagcactct

SEQ ID NO: 2111669 - DNA, 15 bp, Homo sapiens
tctgtgagcactcta

SEQ ID NO: 2111670 - DNA, 15 bp, Homo sapiens
ctgtgagcactctat

SEQ ID NO: 2111671 - DNA, 15 bp, Homo sapiens
tgtgagcactctata

SEQ ID NO: 2111672 - DNA, 15 bp, Homo sapiens
gtgagcactctataa

SEQ ID NO: 2111673 - DNA, 15 bp, Homo sapiens
tgagcactctataat

SEQ ID NO: 2111674 - DNA, 15 bp, Homo sapiens
gagcactctataatg

SEQ ID NO: 2111675 - DNA, 15 bp, Homo sapiens
agcactctataatga

SEQ ID NO: 2111676 - DNA, 15 bp, Homo sapiens
gcactctataatgat

SEQ ID NO: 2111677 - DNA, 15 bp, Homo sapiens
cactctataatgata

SEQ ID NO: 2111678 - DNA, 15 bp, Homo sapiens
actctataatgataa

SEQ ID NO: 2111679 - DNA, 15 bp, Homo sapiens
ctctataatgataac

SEQ ID NO: 2111680 - DNA, 15 bp, Homo sapiens
tctataatgataaca

SEQ ID NO: 2111681 - DNA, 15 bp, Homo sapiens
ctataatgataacat

SEQ ID NO: 2111682 - DNA, 15 bp, Homo sapiens
tataatgataacatc

SEQ ID NO: 2111683 - DNA, 15 bp, Homo sapiens
ataatgataacatca

SEQ ID NO: 2111684 - DNA, 15 bp, Homo sapiens
taatgataacatcat

SEQ ID NO: 2111685 - DNA, 15 bp, Homo sapiens
aatgataacatcatt

SEQ ID NO: 2111686 - DNA, 15 bp, Homo sapiens
atgataacatcattt

SEQ ID NO: 2111687 - DNA, 15 bp, Homo sapiens
tgataacatcatttt

SEQ ID NO: 2111688 - DNA, 15 bp, Homo sapiens
gataacatcattttt

SEQ ID NO: 2111689 - DNA, 15 bp, Homo sapiens
ataacatcattttta

SEQ ID NO: 2111690 - DNA, 15 bp, Homo sapiens
taacatcatttttat

SEQ ID NO: 2111691 - DNA, 15 bp, Homo sapiens
aacatcatttttata

SEQ ID NO: 2111692 - DNA, 15 bp, Homo sapiens
acatcatttttatat

SEQ ID NO: 2111693 - DNA, 15 bp, Homo sapiens
catcatttttatatc

SEQ ID NO: 2111694 - DNA, 15 bp, Homo sapiens
atcatttttatatcc

SEQ ID NO: 2111695 - DNA, 15 bp, Homo sapiens
tcatttttatatcct

SEQ ID NO: 2111696 - DNA, 15 bp, Homo sapiens
catttttatatccta

SEQ ID NO: 2111697 - DNA, 15 bp, Homo sapiens
atttttatatcctag

SEQ ID NO: 2111698 - DNA, 15 bp, Homo sapiens
tttttatatcctagg

SEQ ID NO: 2111699 - DNA, 15 bp, Homo sapiens
ttttatatcctaggg

SEQ ID NO: 2111700 - DNA, 15 bp, Homo sapiens
tttatatcctagggc

SEQ ID NO: 2111701 - DNA, 15 bp, Homo sapiens
ttatatcctagggca

SEQ ID NO: 2111702 - DNA, 15 bp, Homo sapiens
tatatcctagggcat

SEQ ID NO: 2111703 - DNA, 15 bp, Homo sapiens
atatcctagggcatg

SEQ ID NO: 2111704 - DNA, 15 bp, Homo sapiens
tatcctagggcatgt

SEQ ID NO: 2111705 - DNA, 15 bp, Homo sapiens
atcctagggcatgta

SEQ ID NO: 2111706 - DNA, 15 bp, Homo sapiens
tcctagggcatgtag

SEQ ID NO: 2111707 - DNA, 15 bp, Homo sapiens
cctagggcatgtagt

SEQ ID NO: 2111708 - DNA, 15 bp, Homo sapiens
ctagggcatgtagtt

SEQ ID NO: 2111709 - DNA, 15 bp, Homo sapiens
tagggcatgtagttc

SEQ ID NO: 2111710 - DNA, 15 bp, Homo sapiens
agggcatgtagttcc

SEQ ID NO: 2111711 - DNA, 15 bp, Homo sapiens
gggcatgtagttccg

SEQ ID NO: 2111712 - DNA, 15 bp, Homo sapiens
ggcatgtagttccga

SEQ ID NO: 2111713 - DNA, 15 bp, Homo sapiens
gcatgtagttccgag

SEQ ID NO: 2111714 - DNA, 15 bp, Homo sapiens
catgtagttccgagc

SEQ ID NO: 2111715 - DNA, 15 bp, Homo sapiens
atgtagttccgagcc

SEQ ID NO: 2111716 - DNA, 15 bp, Homo sapiens
tgtagttccgagccc

SEQ ID NO: 2111717 - DNA, 15 bp, Homo sapiens
gtagttccgagcccc

SEQ ID NO: 2111718 - DNA, 15 bp, Homo sapiens
tagttccgagcccca

SEQ ID NO: 2111719 - DNA, 15 bp, Homo sapiens
agttccgagccccac

SEQ ID NO: 2111720 - DNA, 15 bp, Homo sapiens
gttccgagccccaca

SEQ ID NO: 2111721 - DNA, 15 bp, Homo sapiens
ttccgagccccacag

SEQ ID NO: 2111722 - DNA, 15 bp, Homo sapiens
tccgagccccacaga

SEQ ID NO: 2111723 - DNA, 15 bp, Homo sapiens
ccgagccccacagaa

SEQ ID NO: 2111724 - DNA, 15 bp, Homo sapiens
cgagccccacagaaa

SEQ ID NO: 2111725 - DNA, 15 bp, Homo sapiens
gagccccacagaaag

SEQ ID NO: 2111726 - DNA, 15 bp, Homo sapiens
agccccacagaaagt

SEQ ID NO: 2111727 - DNA, 15 bp, Homo sapiens
gccccacagaaagta

SEQ ID NO: 2111728 - DNA, 15 bp, Homo sapiens
ccccacagaaagtaa

SEQ ID NO: 2111729 - DNA, 15 bp, Homo sapiens
cccacagaaagtaat

SEQ ID NO: 2111730 - DNA, 15 bp, Homo sapiens
ccacagaaagtaatc

SEQ ID NO: 2111731 - DNA, 15 bp, Homo sapiens
cacagaaagtaatca

SEQ ID NO: 2111732 - DNA, 15 bp, Homo sapiens
acagaaagtaatcac

SEQ ID NO: 2111733 - DNA, 15 bp, Homo sapiens
cagaaagtaatcacc

SEQ ID NO: 2111734 - DNA, 15 bp, Homo sapiens
agaaagtaatcacca

SEQ ID NO: 2111735 - DNA, 15 bp, Homo sapiens
gaaagtaatcaccat

SEQ ID NO: 2111736 - DNA, 15 bp, Homo sapiens
aaagtaatcaccatt

SEQ ID NO: 2111737 - DNA, 15 bp, Homo sapiens
aagtaatcaccattc

SEQ ID NO: 2111738 - DNA, 15 bp, Homo sapiens
agtaatcaccattca

SEQ ID NO: 2111739 - DNA, 15 bp, Homo sapiens
gtaatcaccattcag

SEQ ID NO: 2111740 - DNA, 15 bp, Homo sapiens
taatcaccattcagt

SEQ ID NO: 2111741 - DNA, 15 bp, Homo sapiens
aatcaccattcagta

SEQ ID NO: 2111742 - DNA, 15 bp, Homo sapiens
atcaccattcagtaa

SEQ ID NO: 2111743 - DNA, 15 bp, Homo sapiens
tcaccattcagtaag

SEQ ID NO: 2111744 - DNA, 15 bp, Homo sapiens
caccattcagtaagc

SEQ ID NO: 2111745 - DNA, 15 bp, Homo sapiens
accattcagtaagcc

SEQ ID NO: 2111746 - DNA, 15 bp, Homo sapiens
ccattcagtaagcca

SEQ ID NO: 2111747 - DNA, 15 bp, Homo sapiens
cattcagtaagccaa

SEQ ID NO: 2111748 - DNA, 15 bp, Homo sapiens
attcagtaagccaat

SEQ ID NO: 2111749 - DNA, 15 bp, Homo sapiens
ttcagtaagccaata

SEQ ID NO: 2111750 - DNA, 15 bp, Homo sapiens
tcagtaagccaatag

SEQ ID NO: 2111751 - DNA, 15 bp, Homo sapiens
cagtaagccaatagt

SEQ ID NO: 2111752 - DNA, 15 bp, Homo sapiens
agtaagccaatagtt

SEQ ID NO: 2111753 - DNA, 15 bp, Homo sapiens
gtaagccaatagttc

SEQ ID NO: 2111754 - DNA, 15 bp, Homo sapiens
taagccaatagttca

SEQ ID NO: 2111755 - DNA, 15 bp, Homo sapiens
aagccaatagttcat

SEQ ID NO: 2111756 - DNA, 15 bp, Homo sapiens
agccaatagttcatt

SEQ ID NO: 2111757 - DNA, 15 bp, Homo sapiens
gccaatagttcattc

SEQ ID NO: 2111758 - DNA, 15 bp, Homo sapiens
ccaatagttcattcc

SEQ ID NO: 2111759 - DNA, 15 bp, Homo sapiens
caatagttcattcct

SEQ ID NO: 2111760 - DNA, 15 bp, Homo sapiens
aatagttcattccta

SEQ ID NO: 2111761 - DNA, 15 bp, Homo sapiens
atagttcattcctat

SEQ ID NO: 2111762 - DNA, 15 bp, Homo sapiens
tagttcattcctatc

SEQ ID NO: 2111763 - DNA, 15 bp, Homo sapiens
agttcattcctatct

SEQ ID NO: 2111764 - DNA, 15 bp, Homo sapiens
gttcattcctatctg

SEQ ID NO: 2111765 - DNA, 15 bp, Homo sapiens
ttcattcctatctgt

SEQ ID NO: 2111766 - DNA, 15 bp, Homo sapiens
tcattcctatctgta

SEQ ID NO: 2111767 - DNA, 15 bp, Homo sapiens
cattcctatctgtat

SEQ ID NO: 2111768 - DNA, 15 bp, Homo sapiens
attcctatctgtata

SEQ ID NO: 2111769 - DNA, 15 bp, Homo sapiens
ttcctatctgtatag

SEQ ID NO: 2111770 - DNA, 15 bp, Homo sapiens
tcctatctgtataga

SEQ ID NO: 2111771 - DNA, 15 bp, Homo sapiens
cctatctgtatagaa

SEQ ID NO: 2111772 - DNA, 15 bp, Homo sapiens
ctatctgtatagaac

SEQ ID NO: 2111773 - DNA, 15 bp, Homo sapiens
tatctgtatagaact

SEQ ID NO: 2111774 - DNA, 15 bp, Homo sapiens
atctgtatagaactg

SEQ ID NO: 2111775 - DNA, 15 bp, Homo sapiens
tctgtatagaactgt

SEQ ID NO: 2111776 - DNA, 15 bp, Homo sapiens
ctgtatagaactgta

SEQ ID NO: 2111777 - DNA, 15 bp, Homo sapiens
tgtatagaactgtag

SEQ ID NO: 2111778 - DNA, 15 bp, Homo sapiens
gtatagaactgtagg

SEQ ID NO: 2111779 - DNA, 15 bp, Homo sapiens
tatagaactgtaggc

SEQ ID NO: 2111780 - DNA, 15 bp, Homo sapiens
atagaactgtaggct

SEQ ID NO: 2111781 - DNA, 15 bp, Homo sapiens
tagaactgtaggctt

SEQ ID NO: 2111782 - DNA, 15 bp, Homo sapiens
agaactgtaggcttt

SEQ ID NO: 2111783 - DNA, 15 bp, Homo sapiens
gaactgtaggctttg

SEQ ID NO: 2111784 - DNA, 15 bp, Homo sapiens
aactgtaggctttgt

SEQ ID NO: 2111785 - DNA, 15 bp, Homo sapiens
actgtaggctttgta

SEQ ID NO: 2111786 - DNA, 15 bp, Homo sapiens
ctgtaggctttgtaa

SEQ ID NO: 2111787 - DNA, 15 bp, Homo sapiens
tgtaggctttgtaaa

SEQ ID NO: 2111788 - DNA, 15 bp, Homo sapiens
gtaggctttgtaaat

SEQ ID NO: 2111789 - DNA, 15 bp, Homo sapiens
taggctttgtaaatc

SEQ ID NO: 2111790 - DNA, 15 bp, Homo sapiens
aggctttgtaaatct

SEQ ID NO: 2111791 - DNA, 15 bp, Homo sapiens
ggctttgtaaatcta

SEQ ID NO: 2111792 - DNA, 15 bp, Homo sapiens
gctttgtaaatctac

SEQ ID NO: 2111793 - DNA, 15 bp, Homo sapiens
ctttgtaaatctaca

SEQ ID NO: 2111794 - DNA, 15 bp, Homo sapiens
tttgtaaatctacac

SEQ ID NO: 2111795 - DNA, 15 bp, Homo sapiens
ttgtaaatctacaca

SEQ ID NO: 2111796 - DNA, 15 bp, Homo sapiens
tgtaaatctacacat

SEQ ID NO: 2111797 - DNA, 15 bp, Homo sapiens
gtaaatctacacata

SEQ ID NO: 2111798 - DNA, 15 bp, Homo sapiens
taaatctacacatag

SEQ ID NO: 2111799 - DNA, 15 bp, Homo sapiens
aaatctacacataga

SEQ ID NO: 2111800 - DNA, 15 bp, Homo sapiens
aatctacacatagat

SEQ ID NO: 2111801 - DNA, 15 bp, Homo sapiens
atctacacatagatc

SEQ ID NO: 2111802 - DNA, 15 bp, Homo sapiens
tctacacatagatct

SEQ ID NO: 2111803 - DNA, 15 bp, Homo sapiens
ctacacatagatctc

SEQ ID NO: 2111804 - DNA, 15 bp, Homo sapiens
tacacatagatctct

SEQ ID NO: 2111805 - DNA, 15 bp, Homo sapiens
acacatagatctctg

SEQ ID NO: 2111806 - DNA, 15 bp, Homo sapiens
cacatagatctctgt

SEQ ID NO: 2111807 - DNA, 15 bp, Homo sapiens
acatagatctctgtt

SEQ ID NO: 2111808 - DNA, 15 bp, Homo sapiens
catagatctctgttg

SEQ ID NO: 2111809 - DNA, 15 bp, Homo sapiens
atagatctctgttgt

SEQ ID NO: 2111810 - DNA, 15 bp, Homo sapiens
tagatctctgttgta

SEQ ID NO: 2111811 - DNA, 15 bp, Homo sapiens
agatctctgttgtag

SEQ ID NO: 2111812 - DNA, 15 bp, Homo sapiens
gatctctgttgtagg

SEQ ID NO: 2111813 - DNA, 15 bp, Homo sapiens
atctctgttgtaggt

SEQ ID NO: 2111814 - DNA, 15 bp, Homo sapiens
tctctgttgtaggtt

SEQ ID NO: 2111815 - DNA, 15 bp, Homo sapiens
ctctgttgtaggttc

SEQ ID NO: 2111816 - DNA, 15 bp, Homo sapiens
tctgttgtaggttca

SEQ ID NO: 2111817 - DNA, 15 bp, Homo sapiens
ctgttgtaggttcaa

SEQ ID NO: 2111818 - DNA, 15 bp, Homo sapiens
tgttgtaggttcaat

SEQ ID NO: 2111819 - DNA, 15 bp, Homo sapiens
gttgtaggttcaata

SEQ ID NO: 2111820 - DNA, 15 bp, Homo sapiens
ttgtaggttcaataa

SEQ ID NO: 2111821 - DNA, 15 bp, Homo sapiens
tgtaggttcaataat

SEQ ID NO: 2111822 - DNA, 15 bp, Homo sapiens
gtaggttcaataatg

SEQ ID NO: 2111823 - DNA, 15 bp, Homo sapiens
taggttcaataatga

SEQ ID NO: 2111824 - DNA, 15 bp, Homo sapiens
aggttcaataatgat

SEQ ID NO: 2111825 - DNA, 15 bp, Homo sapiens
ggttcaataatgata

SEQ ID NO: 2111826 - DNA, 15 bp, Homo sapiens
gttcaataatgataa

SEQ ID NO: 2111827 - DNA, 15 bp, Homo sapiens
ttcaataatgataat

SEQ ID NO: 2111828 - DNA, 15 bp, Homo sapiens
tcaataatgataata

SEQ ID NO: 2111829 - DNA, 15 bp, Homo sapiens
caataatgataataa

SEQ ID NO: 2111830 - DNA, 15 bp, Homo sapiens
aataatgataataaa

SEQ ID NO: 2111831 - DNA, 15 bp, Homo sapiens
ataatgataataaat

SEQ ID NO: 2111832 - DNA, 15 bp, Homo sapiens
taatgataataaatg

SEQ ID NO: 2111833 - DNA, 15 bp, Homo sapiens
aatgataataaatgt

SEQ ID NO: 2111834 - DNA, 15 bp, Homo sapiens
atgataataaatgtt

SEQ ID NO: 2111835 - DNA, 15 bp, Homo sapiens
tgataataaatgttt

SEQ ID NO: 2111836 - DNA, 15 bp, Homo sapiens
gataataaatgtttg

SEQ ID NO: 2111837 - DNA, 15 bp, Homo sapiens
ataataaatgtttgt

SEQ ID NO: 2111838 - DNA, 15 bp, Homo sapiens
taataaatgtttgtg

SEQ ID NO: 2111839 - DNA, 15 bp, Homo sapiens
aataaatgtttgtgc

SEQ ID NO: 2111840 - DNA, 15 bp, Homo sapiens
ataaatgtttgtgcc

SEQ ID NO: 2111841 - DNA, 15 bp, Homo sapiens
taaatgtttgtgccc

SEQ ID NO: 2111842 - DNA, 15 bp, Homo sapiens
aaatgtttgtgcccc

SEQ ID NO: 2111843 - DNA, 15 bp, Homo sapiens
aatgtttgtgccccc

SEQ ID NO: 2111844 - DNA, 15 bp, Homo sapiens
atgtttgtgccccca

SEQ ID NO: 2111845 - DNA, 15 bp, Homo sapiens
tgtttgtgcccccag

SEQ ID NO: 2111846 - DNA, 15 bp, Homo sapiens
gtttgtgcccccagt

SEQ ID NO: 2111847 - DNA, 15 bp, Homo sapiens
tttgtgcccccagtt

SEQ ID NO: 2111848 - DNA, 15 bp, Homo sapiens
ttgtgcccccagttg

SEQ ID NO: 2111849 - DNA, 15 bp, Homo sapiens
tgtgcccccagttgt

SEQ ID NO: 2111850 - DNA, 15 bp, Homo sapiens
gtgcccccagttgtt

SEQ ID NO: 2111851 - DNA, 15 bp, Homo sapiens
tgcccccagttgtta

SEQ ID NO: 2111852 - DNA, 15 bp, Homo sapiens
gcccccagttgttat

SEQ ID NO: 2111853 - DNA, 15 bp, Homo sapiens
cccccagttgttatc

SEQ ID NO: 2111854 - DNA, 15 bp, Homo sapiens
ccccagttgttatct

SEQ ID NO: 2111855 - DNA, 15 bp, Homo sapiens
cccagttgttatctc

SEQ ID NO: 2111856 - DNA, 15 bp, Homo sapiens
ccagttgttatctct

SEQ ID NO: 2111857 - DNA, 15 bp, Homo sapiens
cagttgttatctcta

SEQ ID NO: 2111858 - DNA, 15 bp, Homo sapiens
agttgttatctctaa

SEQ ID NO: 2111859 - DNA, 15 bp, Homo sapiens
gttgttatctctaag

SEQ ID NO: 2111860 - DNA, 15 bp, Homo sapiens
ttgttatctctaagg

SEQ ID NO: 2111861 - DNA, 15 bp, Homo sapiens
tgttatctctaagga

SEQ ID NO: 2111862 - DNA, 15 bp, Homo sapiens
gttatctctaaggat

SEQ ID NO: 2111863 - DNA, 15 bp, Homo sapiens
ttatctctaaggata

SEQ ID NO: 2111864 - DNA, 15 bp, Homo sapiens
tatctctaaggataa

SEQ ID NO: 2111865 - DNA, 15 bp, Homo sapiens
atctctaaggataag

SEQ ID NO: 2111866 - DNA, 15 bp, Homo sapiens
tctctaaggataaga

SEQ ID NO: 2111867 - DNA, 15 bp, Homo sapiens
ctctaaggataagag

SEQ ID NO: 2111868 - DNA, 15 bp, Homo sapiens
tctaaggataagagt

SEQ ID NO: 2111869 - DNA, 15 bp, Homo sapiens
ctaaggataagagta

SEQ ID NO: 2111870 - DNA, 15 bp, Homo sapiens
taaggataagagtaa

SEQ ID NO: 2111871 - DNA, 15 bp, Homo sapiens
aaggataagagtaat

SEQ ID NO: 2111872 - DNA, 15 bp, Homo sapiens
aggataagagtaatc

SEQ ID NO: 2111873 - DNA, 15 bp, Homo sapiens
ggataagagtaatca

SEQ ID NO: 2111874 - DNA, 15 bp, Homo sapiens
gataagagtaatcaa

SEQ ID NO: 2111875 - DNA, 15 bp, Homo sapiens
ataagagtaatcaat

SEQ ID NO: 2111876 - DNA, 15 bp, Homo sapiens
taagagtaatcaatg

SEQ ID NO: 2111877 - DNA, 15 bp, Homo sapiens
aagagtaatcaatga

SEQ ID NO: 2111878 - DNA, 15 bp, Homo sapiens
agagtaatcaatgat

SEQ ID NO: 2111879 - DNA, 15 bp, Homo sapiens
gagtaatcaatgatc

SEQ ID NO: 2111880 - DNA, 15 bp, Homo sapiens
agtaatcaatgatca

SEQ ID NO: 2111881 - DNA, 15 bp, Homo sapiens
gtaatcaatgatcat

SEQ ID NO: 2111882 - DNA, 15 bp, Homo sapiens
taatcaatgatcatt

SEQ ID NO: 2111883 - DNA, 15 bp, Homo sapiens
aatcaatgatcattc

SEQ ID NO: 2111884 - DNA, 15 bp, Homo sapiens
atcaatgatcattca

SEQ ID NO: 2111885 - DNA, 15 bp, Homo sapiens
tcaatgatcattcag

SEQ ID NO: 2111886 - DNA, 15 bp, Homo sapiens
caatgatcattcagc

SEQ ID NO: 2111887 - DNA, 15 bp, Homo sapiens
aatgatcattcagca

SEQ ID NO: 2111888 - DNA, 15 bp, Homo sapiens
atgatcattcagcag

SEQ ID NO: 2111889 - DNA, 15 bp, Homo sapiens
tgatcattcagcaga

SEQ ID NO: 2111890 - DNA, 15 bp, Homo sapiens
gatcattcagcagat

SEQ ID NO: 2111891 - DNA, 15 bp, Homo sapiens
atcattcagcagata

SEQ ID NO: 2111892 - DNA, 15 bp, Homo sapiens
tcattcagcagatat

SEQ ID NO: 2111893 - DNA, 15 bp, Homo sapiens
cattcagcagatata

SEQ ID NO: 2111894 - DNA, 15 bp, Homo sapiens
attcagcagatatag

SEQ ID NO: 2111895 - DNA, 15 bp, Homo sapiens
ttcagcagatatagc

SEQ ID NO: 2111896 - DNA, 15 bp, Homo sapiens
tcagcagatatagct

SEQ ID NO: 2111897 - DNA, 15 bp, Homo sapiens
cagcagatatagctt

SEQ ID NO: 2111898 - DNA, 15 bp, Homo sapiens
agcagatatagctta

SEQ ID NO: 2111899 - DNA, 15 bp, Homo sapiens
gcagatatagcttat

SEQ ID NO: 2111900 - DNA, 15 bp, Homo sapiens
cagatatagcttata

SEQ ID NO: 2111901 - DNA, 15 bp, Homo sapiens
agatatagcttatat

SEQ ID NO: 2111902 - DNA, 15 bp, Homo sapiens
gatatagcttatata

SEQ ID NO: 2111903 - DNA, 15 bp, Homo sapiens
atatagcttatatat

SEQ ID NO: 2111904 - DNA, 15 bp, Homo sapiens
tatagcttatatatg

SEQ ID NO: 2111905 - DNA, 15 bp, Homo sapiens
atagcttatatatgg

SEQ ID NO: 2111906 - DNA, 15 bp, Homo sapiens
tagcttatatatggg

SEQ ID NO: 2111907 - DNA, 15 bp, Homo sapiens
agcttatatatgggt

SEQ ID NO: 2111908 - DNA, 15 bp, Homo sapiens
gcttatatatgggtg

SEQ ID NO: 2111909 - DNA, 15 bp, Homo sapiens
cttatatatgggtgg

SEQ ID NO: 2111910 - DNA, 15 bp, Homo sapiens
ttatatatgggtggc

SEQ ID NO: 2111911 - DNA, 15 bp, Homo sapiens
tatatatgggtggca

SEQ ID NO: 2111912 - DNA, 15 bp, Homo sapiens
atatatgggtggcag

SEQ ID NO: 2111913 - DNA, 15 bp, Homo sapiens
tatatgggtggcagt

SEQ ID NO: 2111914 - DNA, 15 bp, Homo sapiens
atatgggtggcagtt

SEQ ID NO: 2111915 - DNA, 15 bp, Homo sapiens
tatgggtggcagttt

SEQ ID NO: 2111916 - DNA, 15 bp, Homo sapiens
atgggtggcagttta

SEQ ID NO: 2111917 - DNA, 15 bp, Homo sapiens
tgggtggcagtttac

SEQ ID NO: 2111918 - DNA, 15 bp, Homo sapiens
gggtggcagtttaca

SEQ ID NO: 2111919 - DNA, 15 bp, Homo sapiens
ggtggcagtttacaa

SEQ ID NO: 2111920 - DNA, 15 bp, Homo sapiens
gtggcagtttacaaa

SEQ ID NO: 2111921 - DNA, 15 bp, Homo sapiens
tggcagtttacaaat

SEQ ID NO: 2111922 - DNA, 15 bp, Homo sapiens
ggcagtttacaaatt

SEQ ID NO: 2111923 - DNA, 15 bp, Homo sapiens
gcagtttacaaatta

SEQ ID NO: 2111924 - DNA, 15 bp, Homo sapiens
cagtttacaaattat

SEQ ID NO: 2111925 - DNA, 15 bp, Homo sapiens
agtttacaaattata

SEQ ID NO: 2111926 - DNA, 15 bp, Homo sapiens
gtttacaaattataa

SEQ ID NO: 2111927 - DNA, 15 bp, Homo sapiens
tttacaaattataaa

SEQ ID NO: 2111928 - DNA, 15 bp, Homo sapiens
ttacaaattataaat

SEQ ID NO: 2111929 - DNA, 15 bp, Homo sapiens
tacaaattataaatt

SEQ ID NO: 2111930 - DNA, 15 bp, Homo sapiens
acaaattataaattg

SEQ ID NO: 2111931 - DNA, 15 bp, Homo sapiens
caaattataaattga

SEQ ID NO: 2111932 - DNA, 15 bp, Homo sapiens
aaattataaattgat

SEQ ID NO: 2111933 - DNA, 15 bp, Homo sapiens
aattataaattgatt

SEQ ID NO: 2111934 - DNA, 15 bp, Homo sapiens
attataaattgattt

SEQ ID NO: 2111935 - DNA, 15 bp, Homo sapiens
ttataaattgatttt

SEQ ID NO: 2111936 - DNA, 15 bp, Homo sapiens
tataaattgatttta

SEQ ID NO: 2111937 - DNA, 15 bp, Homo sapiens
ataaattgattttac

SEQ ID NO: 2111938 - DNA, 15 bp, Homo sapiens
taaattgattttaca

SEQ ID NO: 2111939 - DNA, 15 bp, Homo sapiens
aaattgattttacac

SEQ ID NO: 2111940 - DNA, 15 bp, Homo sapiens
aattgattttacaca

SEQ ID NO: 2111941 - DNA, 15 bp, Homo sapiens
attgattttacacat

SEQ ID NO: 2111942 - DNA, 15 bp, Homo sapiens
ttgattttacacata

SEQ ID NO: 2111943 - DNA, 15 bp, Homo sapiens
tgattttacacatat

SEQ ID NO: 2111944 - DNA, 15 bp, Homo sapiens
gattttacacatatt

SEQ ID NO: 2111945 - DNA, 15 bp, Homo sapiens
attttacacatattt

SEQ ID NO: 2111946 - DNA, 15 bp, Homo sapiens
ttttacacatatttt

SEQ ID NO: 2111947 - DNA, 15 bp, Homo sapiens
tttacacatattttc

SEQ ID NO: 2111948 - DNA, 15 bp, Homo sapiens
ttacacatattttct

SEQ ID NO: 2111949 - DNA, 15 bp, Homo sapiens
ccaaaatagctggta

SEQ ID NO: 2111950 - DNA, 15 bp, Homo sapiens
caaaatagctggtat

SEQ ID NO: 2111951 - DNA, 15 bp, Homo sapiens
aaaatagctggtatg

SEQ ID NO: 2111952 - DNA, 15 bp, Homo sapiens
aaatagctggtatgt

SEQ ID NO: 2111953 - DNA, 15 bp, Homo sapiens
aatagctggtatgta

SEQ ID NO: 2111954 - DNA, 15 bp, Homo sapiens
atagctggtatgtaa

SEQ ID NO: 2111955 - DNA, 15 bp, Homo sapiens
tagctggtatgtaag

SEQ ID NO: 2111956 - DNA, 15 bp, Homo sapiens
agctggtatgtaaga

SEQ ID NO: 2111957 - DNA, 15 bp, Homo sapiens
gctggtatgtaagag

SEQ ID NO: 2111958 - DNA, 15 bp, Homo sapiens
ctggtatgtaagagg

SEQ ID NO: 2111959 - DNA, 15 bp, Homo sapiens
tggtatgtaagaggc

SEQ ID NO: 2111960 - DNA, 15 bp, Homo sapiens
ggtatgtaagaggca

SEQ ID NO: 2111961 - DNA, 15 bp, Homo sapiens
gtatgtaagaggcac

SEQ ID NO: 2111962 - DNA, 15 bp, Homo sapiens
tatgtaagaggcact

SEQ ID NO: 2111963 - DNA, 15 bp, Homo sapiens
atgtaagaggcactt

SEQ ID NO: 2111964 - DNA, 15 bp, Homo sapiens
tgtaagaggcactta

SEQ ID NO: 2111965 - DNA, 15 bp, Homo sapiens
gtaagaggcacttaa

SEQ ID NO: 2111966 - DNA, 15 bp, Homo sapiens
taagaggcacttaat

SEQ ID NO: 2111967 - DNA, 15 bp, Homo sapiens
aagaggcacttaata

SEQ ID NO: 2111968 - DNA, 15 bp, Homo sapiens
agaggcacttaatat

SEQ ID NO: 2111969 - DNA, 15 bp, Homo sapiens
gaggcacttaatatt

SEQ ID NO: 2111970 - DNA, 15 bp, Homo sapiens
aggcacttaatattc

SEQ ID NO: 2111971 - DNA, 15 bp, Homo sapiens
ggcacttaatattca

SEQ ID NO: 2111972 - DNA, 15 bp, Homo sapiens
gcacttaatattcat

SEQ ID NO: 2111973 - DNA, 15 bp, Homo sapiens
cacttaatattcatt

SEQ ID NO: 2111974 - DNA, 15 bp, Homo sapiens
acttaatattcattc

SEQ ID NO: 2111975 - DNA, 15 bp, Homo sapiens
cttaatattcattca

SEQ ID NO: 2111976 - DNA, 15 bp, Homo sapiens
ttaatattcattcat

SEQ ID NO: 2111977 - DNA, 15 bp, Homo sapiens
taatattcattcatc

SEQ ID NO: 2111978 - DNA, 15 bp, Homo sapiens
aatattcattcatcc

SEQ ID NO: 2111979 - DNA, 15 bp, Homo sapiens
atattcattcatcca

SEQ ID NO: 2111980 - DNA, 15 bp, Homo sapiens
tattcattcatccat

SEQ ID NO: 2111981 - DNA, 15 bp, Homo sapiens
attcattcatccatt

SEQ ID NO: 2111982 - DNA, 15 bp, Homo sapiens
ttcattcatccattc

SEQ ID NO: 2111983 - DNA, 15 bp, Homo sapiens
tcattcatccattca

SEQ ID NO: 2111984 - DNA, 15 bp, Homo sapiens
cattcatccattcat

SEQ ID NO: 2111985 - DNA, 15 bp, Homo sapiens
attcatccattcatt

SEQ ID NO: 2111986 - DNA, 15 bp, Homo sapiens
ttcatccattcattc

SEQ ID NO: 2111987 - DNA, 15 bp, Homo sapiens
tcatccattcattca

SEQ ID NO: 2111988 - DNA, 15 bp, Homo sapiens
catccattcattcat

SEQ ID NO: 2111989 - DNA, 15 bp, Homo sapiens
tccattcattcattc

SEQ ID NO: 2111990 - DNA, 15 bp, Homo sapiens
ccattcattcattca

SEQ ID NO: 2111991 - DNA, 15 bp, Homo sapiens
attcattcattcata

SEQ ID NO: 2111992 - DNA, 15 bp, Homo sapiens
ttcattcattcataa

SEQ ID NO: 2111993 - DNA, 15 bp, Homo sapiens
tcattcattcataaa

SEQ ID NO: 2111994 - DNA, 15 bp, Homo sapiens
cattcattcataaat

SEQ ID NO: 2111995 - DNA, 15 bp, Homo sapiens
attcattcataaata

SEQ ID NO: 2111996 - DNA, 15 bp, Homo sapiens
ttcattcataaatat

SEQ ID NO: 2111997 - DNA, 15 bp, Homo sapiens
tcattcataaatatg

SEQ ID NO: 2111998 - DNA, 15 bp, Homo sapiens
cattcataaatatgt

SEQ ID NO: 2111999 - DNA, 15 bp, Homo sapiens
attcataaatatgta

SEQ ID NO: 2112000 - DNA, 15 bp, Homo sapiens
ttcataaatatgtag

SEQ ID NO: 2112001 - DNA, 15 bp, Homo sapiens
tcataaatatgtagc

SEQ ID NO: 2112002 - DNA, 15 bp, Homo sapiens
cataaatatgtagcc

SEQ ID NO: 2112003 - DNA, 15 bp, Homo sapiens
ataaatatgtagccc

SEQ ID NO: 2112004 - DNA, 15 bp, Homo sapiens
taaatatgtagccca

SEQ ID NO: 2112005 - DNA, 15 bp, Homo sapiens
aaatatgtagcccat

SEQ ID NO: 2112006 - DNA, 15 bp, Homo sapiens
aatatgtagcccatt

SEQ ID NO: 2112007 - DNA, 15 bp, Homo sapiens
atatgtagcccattg

SEQ ID NO: 2112008 - DNA, 15 bp, Homo sapiens
tatgtagcccattga

SEQ ID NO: 2112009 - DNA, 15 bp, Homo sapiens
atgtagcccattgac

SEQ ID NO: 2112010 - DNA, 15 bp, Homo sapiens
tgtagcccattgaca

SEQ ID NO: 2112011 - DNA, 15 bp, Homo sapiens
gtagcccattgacat

SEQ ID NO: 2112012 - DNA, 15 bp, Homo sapiens
tagcccattgacatt

SEQ ID NO: 2112013 - DNA, 15 bp, Homo sapiens
agcccattgacattt

SEQ ID NO: 2112014 - DNA, 15 bp, Homo sapiens
gcccattgacatttg

SEQ ID NO: 2112015 - DNA, 15 bp, Homo sapiens
cccattgacatttgt

SEQ ID NO: 2112016 - DNA, 15 bp, Homo sapiens
ccattgacatttgta

SEQ ID NO: 2112017 - DNA, 15 bp, Homo sapiens
cattgacatttgtat

SEQ ID NO: 2112018 - DNA, 15 bp, Homo sapiens
attgacatttgtatc

SEQ ID NO: 2112019 - DNA, 15 bp, Homo sapiens
ttgacatttgtatca

SEQ ID NO: 2112020 - DNA, 15 bp, Homo sapiens
tgacatttgtatcat

SEQ ID NO: 2112021 - DNA, 15 bp, Homo sapiens
gacatttgtatcatg

SEQ ID NO: 2112022 - DNA, 15 bp, Homo sapiens
acatttgtatcatgc

SEQ ID NO: 2112023 - DNA, 15 bp, Homo sapiens
catttgtatcatgct

SEQ ID NO: 2112024 - DNA, 15 bp, Homo sapiens
atttgtatcatgctt

SEQ ID NO: 2112025 - DNA, 15 bp, Homo sapiens
tttgtatcatgcttt

SEQ ID NO: 2112026 - DNA, 15 bp, Homo sapiens
ttgtatcatgcttta

SEQ ID NO: 2112027 - DNA, 15 bp, Homo sapiens
tgtatcatgctttag

SEQ ID NO: 2112028 - DNA, 15 bp, Homo sapiens
gtatcatgctttagt

SEQ ID NO: 2112029 - DNA, 15 bp, Homo sapiens
tatcatgctttagtt

SEQ ID NO: 2112030 - DNA, 15 bp, Homo sapiens
atcatgctttagttt

SEQ ID NO: 2112031 - DNA, 15 bp, Homo sapiens
tcatgctttagttta

SEQ ID NO: 2112032 - DNA, 15 bp, Homo sapiens
catgctttagtttac

SEQ ID NO: 2112033 - DNA, 15 bp, Homo sapiens
atgctttagtttaca

SEQ ID NO: 2112034 - DNA, 15 bp, Homo sapiens
tgctttagtttacaa

SEQ ID NO: 2112035 - DNA, 15 bp, Homo sapiens
gctttagtttacaaa

SEQ ID NO: 2112036 - DNA, 15 bp, Homo sapiens
ctttagtttacaaag

SEQ ID NO: 2112037 - DNA, 15 bp, Homo sapiens
tttagtttacaaagc

SEQ ID NO: 2112038 - DNA, 15 bp, Homo sapiens
ttagtttacaaagca

SEQ ID NO: 2112039 - DNA, 15 bp, Homo sapiens
tagtttacaaagcac

SEQ ID NO: 2112040 - DNA, 15 bp, Homo sapiens
agtttacaaagcact

SEQ ID NO: 2112041 - DNA, 15 bp, Homo sapiens
gtttacaaagcactt

SEQ ID NO: 2112042 - DNA, 15 bp, Homo sapiens
tttacaaagcacttt

SEQ ID NO: 2112043 - DNA, 15 bp, Homo sapiens
ttacaaagcacttta

SEQ ID NO: 2112044 - DNA, 15 bp, Homo sapiens
tacaaagcactttaa

SEQ ID NO: 2112045 - DNA, 15 bp, Homo sapiens
acaaagcactttaat

SEQ ID NO: 2112046 - DNA, 15 bp, Homo sapiens
caaagcactttaata

SEQ ID NO: 2112047 - DNA, 15 bp, Homo sapiens
aaagcactttaatat

SEQ ID NO: 2112048 - DNA, 15 bp, Homo sapiens
aagcactttaatatg

SEQ ID NO: 2112049 - DNA, 15 bp, Homo sapiens
agcactttaatatgc

SEQ ID NO: 2112050 - DNA, 15 bp, Homo sapiens
gcactttaatatgca

SEQ ID NO: 2112051 - DNA, 15 bp, Homo sapiens
cactttaatatgcac

SEQ ID NO: 2112052 - DNA, 15 bp, Homo sapiens
actttaatatgcacc

SEQ ID NO: 2112053 - DNA, 15 bp, Homo sapiens
ctttaatatgcacct

SEQ ID NO: 2112054 - DNA, 15 bp, Homo sapiens
tttaatatgcacctt

SEQ ID NO: 2112055 - DNA, 15 bp, Homo sapiens
ttaatatgcaccttt

SEQ ID NO: 2112056 - DNA, 15 bp, Homo sapiens
taatatgcacctttc

SEQ ID NO: 2112057 - DNA, 15 bp, Homo sapiens
aatatgcacctttct

SEQ ID NO: 2112058 - DNA, 15 bp, Homo sapiens
atatgcacctttctg

SEQ ID NO: 2112059 - DNA, 15 bp, Homo sapiens
tatgcacctttctga

SEQ ID NO: 2112060 - DNA, 15 bp, Homo sapiens
atgcacctttctgaa

SEQ ID NO: 2112061 - DNA, 15 bp, Homo sapiens
tgcacctttctgaaa

SEQ ID NO: 2112062 - DNA, 15 bp, Homo sapiens
gcacctttctgaaat

SEQ ID NO: 2112063 - DNA, 15 bp, Homo sapiens
cacctttctgaaatt

SEQ ID NO: 2112064 - DNA, 15 bp, Homo sapiens
acctttctgaaattt

SEQ ID NO: 2112065 - DNA, 15 bp, Homo sapiens
cctttctgaaatttt

SEQ ID NO: 2112066 - DNA, 15 bp, Homo sapiens
ctttctgaaattttt

SEQ ID NO: 2112067 - DNA, 15 bp, Homo sapiens
tttctgaaatttttt

SEQ ID NO: 2112068 - DNA, 15 bp, Homo sapiens
ttctgaaattttttg

SEQ ID NO: 2112069 - DNA, 15 bp, Homo sapiens
tctgaaattttttgt

SEQ ID NO: 2112070 - DNA, 15 bp, Homo sapiens
ctgaaattttttgtt

SEQ ID NO: 2112071 - DNA, 15 bp, Homo sapiens
tgaaattttttgttc

SEQ ID NO: 2112072 - DNA, 15 bp, Homo sapiens
gaaattttttgttct

SEQ ID NO: 2112073 - DNA, 15 bp, Homo sapiens
aaattttttgttcta

SEQ ID NO: 2112074 - DNA, 15 bp, Homo sapiens
aattttttgttctat

SEQ ID NO: 2112075 - DNA, 15 bp, Homo sapiens
attttttgttctatg

SEQ ID NO: 2112076 - DNA, 15 bp, Homo sapiens
ttttttgttctatga

SEQ ID NO: 2112077 - DNA, 15 bp, Homo sapiens
tttttgttctatgag

SEQ ID NO: 2112078 - DNA, 15 bp, Homo sapiens
ttttgttctatgaga

SEQ ID NO: 2112079 - DNA, 15 bp, Homo sapiens
tttgttctatgagaa

SEQ ID NO: 2112080 - DNA, 15 bp, Homo sapiens
ttgttctatgagaat

SEQ ID NO: 2112081 - DNA, 15 bp, Homo sapiens
tgttctatgagaata

SEQ ID NO: 2112082 - DNA, 15 bp, Homo sapiens
gttctatgagaatac

SEQ ID NO: 2112083 - DNA, 15 bp, Homo sapiens
ttctatgagaatact

SEQ ID NO: 2112084 - DNA, 15 bp, Homo sapiens
tctatgagaatactt

SEQ ID NO: 2112085 - DNA, 15 bp, Homo sapiens
ctatgagaatacttt

SEQ ID NO: 2112086 - DNA, 15 bp, Homo sapiens
tatgagaatactttt

SEQ ID NO: 2112087 - DNA, 15 bp, Homo sapiens
atgagaatacttttc

SEQ ID NO: 2112088 - DNA, 15 bp, Homo sapiens
tgagaatacttttcc

SEQ ID NO: 2112089 - DNA, 15 bp, Homo sapiens
gagaatacttttccc

SEQ ID NO: 2112090 - DNA, 15 bp, Homo sapiens
agaatacttttcccc

SEQ ID NO: 2112091 - DNA, 15 bp, Homo sapiens
gaatacttttccccc

SEQ ID NO: 2112092 - DNA, 15 bp, Homo sapiens
aatacttttccccct

SEQ ID NO: 2112093 - DNA, 15 bp, Homo sapiens
atacttttccccctt

SEQ ID NO: 2112094 - DNA, 15 bp, Homo sapiens
tacttttcccccttt

SEQ ID NO: 2112095 - DNA, 15 bp, Homo sapiens
acttttccccctttg

SEQ ID NO: 2112096 - DNA, 15 bp, Homo sapiens
cttttccccctttgg

SEQ ID NO: 2112097 - DNA, 15 bp, Homo sapiens
ttttccccctttggt

SEQ ID NO: 2112098 - DNA, 15 bp, Homo sapiens
tttccccctttggta

SEQ ID NO: 2112099 - DNA, 15 bp, Homo sapiens
ttccccctttggtag

SEQ ID NO: 2112100 - DNA, 15 bp, Homo sapiens
tccccctttggtagc

SEQ ID NO: 2112101 - DNA, 15 bp, Homo sapiens
ccccctttggtagct

SEQ ID NO: 2112102 - DNA, 15 bp, Homo sapiens
cccctttggtagctc

SEQ ID NO: 2112103 - DNA, 15 bp, Homo sapiens
ccctttggtagctct

SEQ ID NO: 2112104 - DNA, 15 bp, Homo sapiens
cctttggtagctcta

SEQ ID NO: 2112105 - DNA, 15 bp, Homo sapiens
ctttggtagctctag

SEQ ID NO: 2112106 - DNA, 15 bp, Homo sapiens
tttggtagctctagc

SEQ ID NO: 2112107 - DNA, 15 bp, Homo sapiens
ttggtagctctagca

SEQ ID NO: 2112108 - DNA, 15 bp, Homo sapiens
tggtagctctagcac

SEQ ID NO: 2112109 - DNA, 15 bp, Homo sapiens
ggtagctctagcacc

SEQ ID NO: 2112110 - DNA, 15 bp, Homo sapiens
gtagctctagcaccc

SEQ ID NO: 2112111 - DNA, 15 bp, Homo sapiens
tagctctagcaccca

SEQ ID NO: 2112112 - DNA, 15 bp, Homo sapiens
agctctagcacccag

SEQ ID NO: 2112113 - DNA, 15 bp, Homo sapiens
gctctagcacccagc

SEQ ID NO: 2112114 - DNA, 15 bp, Homo sapiens
ctctagcacccagca

SEQ ID NO: 2112115 - DNA, 15 bp, Homo sapiens
tctagcacccagcat

SEQ ID NO: 2112116 - DNA, 15 bp, Homo sapiens
ctagcacccagcatg

SEQ ID NO: 2112117 - DNA, 15 bp, Homo sapiens
tagcacccagcatgg

SEQ ID NO: 2112118 - DNA, 15 bp, Homo sapiens
agcacccagcatggt

SEQ ID NO: 2112119 - DNA, 15 bp, Homo sapiens
gcacccagcatggta

SEQ ID NO: 2112120 - DNA, 15 bp, Homo sapiens
cacccagcatggtat

SEQ ID NO: 2112121 - DNA, 15 bp, Homo sapiens
acccagcatggtatc

SEQ ID NO: 2112122 - DNA, 15 bp, Homo sapiens
cccagcatggtatct

SEQ ID NO: 2112123 - DNA, 15 bp, Homo sapiens
ccagcatggtatctg

SEQ ID NO: 2112124 - DNA, 15 bp, Homo sapiens
cagcatggtatctgg

SEQ ID NO: 2112125 - DNA, 15 bp, Homo sapiens
agcatggtatctggc

SEQ ID NO: 2112126 - DNA, 15 bp, Homo sapiens
gcatggtatctggca

SEQ ID NO: 2112127 - DNA, 15 bp, Homo sapiens
catggtatctggcac

SEQ ID NO: 2112128 - DNA, 15 bp, Homo sapiens
atggtatctggcaca

SEQ ID NO: 2112129 - DNA, 15 bp, Homo sapiens
tggtatctggcacat

SEQ ID NO: 2112130 - DNA, 15 bp, Homo sapiens
ggtatctggcacatt

SEQ ID NO: 2112131 - DNA, 15 bp, Homo sapiens
gtatctggcacatta

SEQ ID NO: 2112132 - DNA, 15 bp, Homo sapiens
tatctggcacattat

SEQ ID NO: 2112133 - DNA, 15 bp, Homo sapiens
atctggcacattata

SEQ ID NO: 2112134 - DNA, 15 bp, Homo sapiens
tctggcacattatag

SEQ ID NO: 2112135 - DNA, 15 bp, Homo sapiens
ctggcacattatagg

SEQ ID NO: 2112136 - DNA, 15 bp, Homo sapiens
tggcacattataggt

SEQ ID NO: 2112137 - DNA, 15 bp, Homo sapiens
ggcacattataggtg

SEQ ID NO: 2112138 - DNA, 15 bp, Homo sapiens
gcacattataggtga

SEQ ID NO: 2112139 - DNA, 15 bp, Homo sapiens
cacattataggtgac

SEQ ID NO: 2112140 - DNA, 15 bp, Homo sapiens
acattataggtgacc

SEQ ID NO: 2112141 - DNA, 15 bp, Homo sapiens
cattataggtgacca

SEQ ID NO: 2112142 - DNA, 15 bp, Homo sapiens
attataggtgaccac

SEQ ID NO: 2112143 - DNA, 15 bp, Homo sapiens
ttataggtgaccaca

SEQ ID NO: 2112144 - DNA, 15 bp, Homo sapiens
tataggtgaccacaa

SEQ ID NO: 2112145 - DNA, 15 bp, Homo sapiens
ataggtgaccacaac

SEQ ID NO: 2112146 - DNA, 15 bp, Homo sapiens
taggtgaccacaaca

SEQ ID NO: 2112147 - DNA, 15 bp, Homo sapiens
aggtgaccacaacaa

SEQ ID NO: 2112148 - DNA, 15 bp, Homo sapiens
ggtgaccacaacaag

SEQ ID NO: 2112149 - DNA, 15 bp, Homo sapiens
gtgaccacaacaagc

SEQ ID NO: 2112150 - DNA, 15 bp, Homo sapiens
tgaccacaacaagct

SEQ ID NO: 2112151 - DNA, 15 bp, Homo sapiens
gaccacaacaagctt

SEQ ID NO: 2112152 - DNA, 15 bp, Homo sapiens
accacaacaagctta

SEQ ID NO: 2112153 - DNA, 15 bp, Homo sapiens
ccacaacaagcttag

SEQ ID NO: 2112154 - DNA, 15 bp, Homo sapiens
cacaacaagcttagt

SEQ ID NO: 2112155 - DNA, 15 bp, Homo sapiens
acaacaagcttagtc

SEQ ID NO: 2112156 - DNA, 15 bp, Homo sapiens
caacaagcttagtcc

SEQ ID NO: 2112157 - DNA, 15 bp, Homo sapiens
aacaagcttagtccc

SEQ ID NO: 2112158 - DNA, 15 bp, Homo sapiens
acaagcttagtccct

SEQ ID NO: 2112159 - DNA, 15 bp, Homo sapiens
caagcttagtccctt

SEQ ID NO: 2112160 - DNA, 15 bp, Homo sapiens
aagcttagtccctta

SEQ ID NO: 2112161 - DNA, 15 bp, Homo sapiens
agcttagtcccttat

SEQ ID NO: 2112162 - DNA, 15 bp, Homo sapiens
gcttagtcccttatg

SEQ ID NO: 2112163 - DNA, 15 bp, Homo sapiens
cttagtcccttatgt

SEQ ID NO: 2112164 - DNA, 15 bp, Homo sapiens
ttagtcccttatgtt

SEQ ID NO: 2112165 - DNA, 15 bp, Homo sapiens
tagtcccttatgttt

SEQ ID NO: 2112166 - DNA, 15 bp, Homo sapiens
agtcccttatgtttt

SEQ ID NO: 2112167 - DNA, 15 bp, Homo sapiens
gtcccttatgttttc

SEQ ID NO: 2112168 - DNA, 15 bp, Homo sapiens
tcccttatgttttca

SEQ ID NO: 2112169 - DNA, 15 bp, Homo sapiens
cccttatgttttcag

SEQ ID NO: 2112170 - DNA, 15 bp, Homo sapiens
ccttatgttttcagt

SEQ ID NO: 2112171 - DNA, 15 bp, Homo sapiens
cttatgttttcagta

SEQ ID NO: 2112172 - DNA, 15 bp, Homo sapiens
ttatgttttcagtat

SEQ ID NO: 2112173 - DNA, 15 bp, Homo sapiens
tatgttttcagtata

SEQ ID NO: 2112174 - DNA, 15 bp, Homo sapiens
atgttttcagtatat

SEQ ID NO: 2112175 - DNA, 15 bp, Homo sapiens
tgttttcagtatatt

SEQ ID NO: 2112176 - DNA, 15 bp, Homo sapiens
gttttcagtatattt

SEQ ID NO: 2112177 - DNA, 15 bp, Homo sapiens
ttttcagtatatttt

SEQ ID NO: 2112178 - DNA, 15 bp, Homo sapiens
tttcagtatatttta

SEQ ID NO: 2112179 - DNA, 15 bp, Homo sapiens
ttcagtatattttaa

SEQ ID NO: 2112180 - DNA, 15 bp, Homo sapiens
tcagtatattttaaa

SEQ ID NO: 2112181 - DNA, 15 bp, Homo sapiens
cagtatattttaaag

SEQ ID NO: 2112182 - DNA, 15 bp, Homo sapiens
agtatattttaaagt

SEQ ID NO: 2112183 - DNA, 15 bp, Homo sapiens
gtatattttaaagtt

SEQ ID NO: 2112184 - DNA, 15 bp, Homo sapiens
tatattttaaagttt

SEQ ID NO: 2112185 - DNA, 15 bp, Homo sapiens
atattttaaagttta

SEQ ID NO: 2112186 - DNA, 15 bp, Homo sapiens
tattttaaagtttaa

SEQ ID NO: 2112187 - DNA, 15 bp, Homo sapiens
attttaaagtttaaa

SEQ ID NO: 2112188 - DNA, 15 bp, Homo sapiens
ttttaaagtttaaaa

SEQ ID NO: 2112189 - DNA, 15 bp, Homo sapiens
tttaaagtttaaaag

SEQ ID NO: 2112190 - DNA, 15 bp, Homo sapiens
ttaaagtttaaaagc

SEQ ID NO: 2112191 - DNA, 15 bp, Homo sapiens
taaagtttaaaagca

SEQ ID NO: 2112192 - DNA, 15 bp, Homo sapiens
aaagtttaaaagcag

SEQ ID NO: 2112193 - DNA, 15 bp, Homo sapiens
aagtttaaaagcagt

SEQ ID NO: 2112194 - DNA, 15 bp, Homo sapiens
agtttaaaagcagtt

SEQ ID NO: 2112195 - DNA, 15 bp, Homo sapiens
gtttaaaagcagttt

SEQ ID NO: 2112196 - DNA, 15 bp, Homo sapiens
tttaaaagcagtttc

SEQ ID NO: 2112197 - DNA, 15 bp, Homo sapiens
ttaaaagcagtttcc

SEQ ID NO: 2112198 - DNA, 15 bp, Homo sapiens
taaaagcagtttcca

SEQ ID NO: 2112199 - DNA, 15 bp, Homo sapiens
aaaagcagtttccat

SEQ ID NO: 2112200 - DNA, 15 bp, Homo sapiens
aaagcagtttccatg

SEQ ID NO: 2112201 - DNA, 15 bp, Homo sapiens
aagcagtttccatgt

SEQ ID NO: 2112202 - DNA, 15 bp, Homo sapiens
agcagtttccatgtg

SEQ ID NO: 2112203 - DNA, 15 bp, Homo sapiens
gcagtttccatgtgt

SEQ ID NO: 2112204 - DNA, 15 bp, Homo sapiens
cagtttccatgtgtt

SEQ ID NO: 2112205 - DNA, 15 bp, Homo sapiens
agtttccatgtgttt

SEQ ID NO: 2112206 - DNA, 15 bp, Homo sapiens
gtttccatgtgtttt

SEQ ID NO: 2112207 - DNA, 15 bp, Homo sapiens
tttccatgtgttttc

SEQ ID NO: 2112208 - DNA, 15 bp, Homo sapiens
ttccatgtgttttcg

SEQ ID NO: 2112209 - DNA, 15 bp, Homo sapiens
tccatgtgttttcgt

SEQ ID NO: 2112210 - DNA, 15 bp, Homo sapiens
ccatgtgttttcgtt

SEQ ID NO: 2112211 - DNA, 15 bp, Homo sapiens
catgtgttttcgttt

SEQ ID NO: 2112212 - DNA, 15 bp, Homo sapiens
atgtgttttcgtttc

SEQ ID NO: 2112213 - DNA, 15 bp, Homo sapiens
tgtgttttcgtttct

SEQ ID NO: 2112214 - DNA, 15 bp, Homo sapiens
gtgttttcgtttctg

SEQ ID NO: 2112215 - DNA, 15 bp, Homo sapiens
tgttttcgtttctga

SEQ ID NO: 2112216 - DNA, 15 bp, Homo sapiens
gttttcgtttctgat

SEQ ID NO: 2112217 - DNA, 15 bp, Homo sapiens
ttttcgtttctgata

SEQ ID NO: 2112218 - DNA, 15 bp, Homo sapiens
tttcgtttctgatac

SEQ ID NO: 2112219 - DNA, 15 bp, Homo sapiens
ttcgtttctgatacc

SEQ ID NO: 2112220 - DNA, 15 bp, Homo sapiens
tcgtttctgatacct

SEQ ID NO: 2112221 - DNA, 15 bp, Homo sapiens
cgtttctgatacctg

SEQ ID NO: 2112222 - DNA, 15 bp, Homo sapiens
gtttctgatacctgg

SEQ ID NO: 2112223 - DNA, 15 bp, Homo sapiens
tttctgatacctgga

SEQ ID NO: 2112224 - DNA, 15 bp, Homo sapiens
ttctgatacctggaa

SEQ ID NO: 2112225 - DNA, 15 bp, Homo sapiens
tctgatacctggaat

SEQ ID NO: 2112226 - DNA, 15 bp, Homo sapiens
ctgatacctggaata

SEQ ID NO: 2112227 - DNA, 15 bp, Homo sapiens
tgatacctggaatac

SEQ ID NO: 2112228 - DNA, 15 bp, Homo sapiens
gatacctggaatact

SEQ ID NO: 2112229 - DNA, 15 bp, Homo sapiens
atacctggaatactg

SEQ ID NO: 2112230 - DNA, 15 bp, Homo sapiens
tacctggaatactgc

SEQ ID NO: 2112231 - DNA, 15 bp, Homo sapiens
acctggaatactgca

SEQ ID NO: 2112232 - DNA, 15 bp, Homo sapiens
cctggaatactgcat

SEQ ID NO: 2112233 - DNA, 15 bp, Homo sapiens
ctggaatactgcatt

SEQ ID NO: 2112234 - DNA, 15 bp, Homo sapiens
tggaatactgcattt

SEQ ID NO: 2112235 - DNA, 15 bp, Homo sapiens
ggaatactgcatttt

SEQ ID NO: 2112236 - DNA, 15 bp, Homo sapiens
gaatactgcattttt

SEQ ID NO: 2112237 - DNA, 15 bp, Homo sapiens
aatactgcattttta

SEQ ID NO: 2112238 - DNA, 15 bp, Homo sapiens
atactgcatttttac

SEQ ID NO: 2112239 - DNA, 15 bp, Homo sapiens
tactgcatttttact

SEQ ID NO: 2112240 - DNA, 15 bp, Homo sapiens
actgcatttttactc

SEQ ID NO: 2112241 - DNA, 15 bp, Homo sapiens
ctgcatttttactca

SEQ ID NO: 2112242 - DNA, 15 bp, Homo sapiens
tgcatttttactcaa

SEQ ID NO: 2112243 - DNA, 15 bp, Homo sapiens
gcatttttactcaaa

SEQ ID NO: 2112244 - DNA, 15 bp, Homo sapiens
catttttactcaaaa

SEQ ID NO: 2112245 - DNA, 15 bp, Homo sapiens
atttttactcaaaat

SEQ ID NO: 2112246 - DNA, 15 bp, Homo sapiens
tttttactcaaaatt

SEQ ID NO: 2112247 - DNA, 15 bp, Homo sapiens
ttttactcaaaatta

SEQ ID NO: 2112248 - DNA, 15 bp, Homo sapiens
tttactcaaaattac

SEQ ID NO: 2112249 - DNA, 15 bp, Homo sapiens
ttactcaaaattacc

SEQ ID NO: 2112250 - DNA, 15 bp, Homo sapiens
tactcaaaattacca

SEQ ID NO: 2112251 - DNA, 15 bp, Homo sapiens
actcaaaattaccag

SEQ ID NO: 2112252 - DNA, 15 bp, Homo sapiens
ctcaaaattaccaga

SEQ ID NO: 2112253 - DNA, 15 bp, Homo sapiens
tcaaaattaccagag

SEQ ID NO: 2112254 - DNA, 15 bp, Homo sapiens
caaaattaccagagc

SEQ ID NO: 2112255 - DNA, 15 bp, Homo sapiens
aaaattaccagagca

SEQ ID NO: 2112256 - DNA, 15 bp, Homo sapiens
aaattaccagagcag

SEQ ID NO: 2112257 - DNA, 15 bp, Homo sapiens
aattaccagagcagc

SEQ ID NO: 2112258 - DNA, 15 bp, Homo sapiens
attaccagagcagca

SEQ ID NO: 2112259 - DNA, 15 bp, Homo sapiens
ttaccagagcagcaa

SEQ ID NO: 2112260 - DNA, 15 bp, Homo sapiens
taccagagcagcaaa

SEQ ID NO: 2112261 - DNA, 15 bp, Homo sapiens
accagagcagcaaac

SEQ ID NO: 2112262 - DNA, 15 bp, Homo sapiens
ccagagcagcaaaca

SEQ ID NO: 2112263 - DNA, 15 bp, Homo sapiens
cagagcagcaaacac

SEQ ID NO: 2112264 - DNA, 15 bp, Homo sapiens
agagcagcaaacaca

SEQ ID NO: 2112265 - DNA, 15 bp, Homo sapiens
gagcagcaaacacaa

SEQ ID NO: 2112266 - DNA, 15 bp, Homo sapiens
agcagcaaacacaaa

SEQ ID NO: 2112267 - DNA, 15 bp, Homo sapiens
gcagcaaacacaaat

SEQ ID NO: 2112268 - DNA, 15 bp, Homo sapiens
cagcaaacacaaatt

SEQ ID NO: 2112269 - DNA, 15 bp, Homo sapiens
agcaaacacaaattg

SEQ ID NO: 2112270 - DNA, 15 bp, Homo sapiens
gcaaacacaaattgg

SEQ ID NO: 2112271 - DNA, 15 bp, Homo sapiens
caaacacaaattggc

SEQ ID NO: 2112272 - DNA, 15 bp, Homo sapiens
aaacacaaattggcc

SEQ ID NO: 2112273 - DNA, 15 bp, Homo sapiens
aacacaaattggcct

SEQ ID NO: 2112274 - DNA, 15 bp, Homo sapiens
acacaaattggcctc

SEQ ID NO: 2112275 - DNA, 15 bp, Homo sapiens
cacaaattggcctca

SEQ ID NO: 2112276 - DNA, 15 bp, Homo sapiens
acaaattggcctcaa

SEQ ID NO: 2112277 - DNA, 15 bp, Homo sapiens
caaattggcctcaaa

SEQ ID NO: 2112278 - DNA, 15 bp, Homo sapiens
aaattggcctcaaat

SEQ ID NO: 2112279 - DNA, 15 bp, Homo sapiens
aattggcctcaaata

SEQ ID NO: 2112280 - DNA, 15 bp, Homo sapiens
attggcctcaaatat

SEQ ID NO: 2112281 - DNA, 15 bp, Homo sapiens
ttggcctcaaatata

SEQ ID NO: 2112282 - DNA, 15 bp, Homo sapiens
tggcctcaaatatac

SEQ ID NO: 2112283 - DNA, 15 bp, Homo sapiens
ggcctcaaatataca

SEQ ID NO: 2112284 - DNA, 15 bp, Homo sapiens
gcctcaaatatacat

SEQ ID NO: 2112285 - DNA, 15 bp, Homo sapiens
cctcaaatatacata

SEQ ID NO: 2112286 - DNA, 15 bp, Homo sapiens
ctcaaatatacatat

SEQ ID NO: 2112287 - DNA, 15 bp, Homo sapiens
tcaaatatacatata

SEQ ID NO: 2112288 - DNA, 15 bp, Homo sapiens
caaatatacatataa

SEQ ID NO: 2112289 - DNA, 15 bp, Homo sapiens
aaatatacatataat

SEQ ID NO: 2112290 - DNA, 15 bp, Homo sapiens
aatatacatataatt

SEQ ID NO: 2112291 - DNA, 15 bp, Homo sapiens
atatacatataattt

SEQ ID NO: 2112292 - DNA, 15 bp, Homo sapiens
tatacatataattta

SEQ ID NO: 2112293 - DNA, 15 bp, Homo sapiens
atacatataatttat

SEQ ID NO: 2112294 - DNA, 15 bp, Homo sapiens
tacatataatttatt

SEQ ID NO: 2112295 - DNA, 15 bp, Homo sapiens
acatataatttattc

SEQ ID NO: 2112296 - DNA, 15 bp, Homo sapiens
catataatttattca

SEQ ID NO: 2112297 - DNA, 15 bp, Homo sapiens
atataatttattcat

SEQ ID NO: 2112298 - DNA, 15 bp, Homo sapiens
tataatttattcatt

SEQ ID NO: 2112299 - DNA, 15 bp, Homo sapiens
ataatttattcattt

SEQ ID NO: 2112300 - DNA, 15 bp, Homo sapiens
taatttattcattta

SEQ ID NO: 2112301 - DNA, 15 bp, Homo sapiens
aatttattcatttat

SEQ ID NO: 2112302 - DNA, 15 bp, Homo sapiens
atttattcatttatc

SEQ ID NO: 2112303 - DNA, 15 bp, Homo sapiens
tttattcatttatca

SEQ ID NO: 2112304 - DNA, 15 bp, Homo sapiens
ttattcatttatcaa

SEQ ID NO: 2112305 - DNA, 15 bp, Homo sapiens
tattcatttatcaaa

SEQ ID NO: 2112306 - DNA, 15 bp, Homo sapiens
attcatttatcaaac

SEQ ID NO: 2112307 - DNA, 15 bp, Homo sapiens
ttcatttatcaaaca

SEQ ID NO: 2112308 - DNA, 15 bp, Homo sapiens
tcatttatcaaacaa

SEQ ID NO: 2112309 - DNA, 15 bp, Homo sapiens
catttatcaaacaat

SEQ ID NO: 2112310 - DNA, 15 bp, Homo sapiens
atttatcaaacaatt

SEQ ID NO: 2112311 - DNA, 15 bp, Homo sapiens
tttatcaaacaattc

SEQ ID NO: 2112312 - DNA, 15 bp, Homo sapiens
ttatcaaacaattcc

SEQ ID NO: 2112313 - DNA, 15 bp, Homo sapiens
tatcaaacaattcct

SEQ ID NO: 2112314 - DNA, 15 bp, Homo sapiens
atcaaacaattcctt

SEQ ID NO: 2112315 - DNA, 15 bp, Homo sapiens
tcaaacaattccttg

SEQ ID NO: 2112316 - DNA, 15 bp, Homo sapiens
caaacaattccttgt

SEQ ID NO: 2112317 - DNA, 15 bp, Homo sapiens
acaattccttgtgtc

SEQ ID NO: 2112318 - DNA, 15 bp, Homo sapiens
caattccttgtgtct

SEQ ID NO: 2112319 - DNA, 15 bp, Homo sapiens
cttgtgtctgcatag

SEQ ID NO: 2112320 - DNA, 15 bp, Homo sapiens
ttgtgtctgcatagt

SEQ ID NO: 2112321 - DNA, 15 bp, Homo sapiens
tgtgtctgcatagta

SEQ ID NO: 2112322 - DNA, 15 bp, Homo sapiens
gtgtctgcatagtac

SEQ ID NO: 2112323 - DNA, 15 bp, Homo sapiens
tgtctgcatagtact

SEQ ID NO: 2112324 - DNA, 15 bp, Homo sapiens
gtctgcatagtacta

SEQ ID NO: 2112325 - DNA, 15 bp, Homo sapiens
tctgcatagtactat

SEQ ID NO: 2112326 - DNA, 15 bp, Homo sapiens
ctgcatagtactata

SEQ ID NO: 2112327 - DNA, 15 bp, Homo sapiens
tgcatagtactatat

SEQ ID NO: 2112328 - DNA, 15 bp, Homo sapiens
gcatagtactatatc

SEQ ID NO: 2112329 - DNA, 15 bp, Homo sapiens
catagtactatatcc

SEQ ID NO: 2112330 - DNA, 15 bp, Homo sapiens
atagtactatatcct

SEQ ID NO: 2112331 - DNA, 15 bp, Homo sapiens
tagtactatatcctt

SEQ ID NO: 2112332 - DNA, 15 bp, Homo sapiens
agtactatatccttt

SEQ ID NO: 2112333 - DNA, 15 bp, Homo sapiens
gtactatatcctttt

SEQ ID NO: 2112334 - DNA, 15 bp, Homo sapiens
tactatatccttttg

SEQ ID NO: 2112335 - DNA, 15 bp, Homo sapiens
actatatccttttga

SEQ ID NO: 2112336 - DNA, 15 bp, Homo sapiens
ctatatccttttgaa

SEQ ID NO: 2112337 - DNA, 15 bp, Homo sapiens
tatatccttttgaaa

SEQ ID NO: 2112338 - DNA, 15 bp, Homo sapiens
atatccttttgaaag

SEQ ID NO: 2112339 - DNA, 15 bp, Homo sapiens
tatccttttgaaaga

SEQ ID NO: 2112340 - DNA, 15 bp, Homo sapiens
atccttttgaaagag

SEQ ID NO: 2112341 - DNA, 15 bp, Homo sapiens
tccttttgaaagagc

SEQ ID NO: 2112342 - DNA, 15 bp, Homo sapiens
ccttttgaaagagca

SEQ ID NO: 2112343 - DNA, 15 bp, Homo sapiens
cttttgaaagagcac

SEQ ID NO: 2112344 - DNA, 15 bp, Homo sapiens
ttttgaaagagcact

SEQ ID NO: 2112345 - DNA, 15 bp, Homo sapiens
tttgaaagagcactt

SEQ ID NO: 2112346 - DNA, 15 bp, Homo sapiens
ttgaaagagcacttt

SEQ ID NO: 2112347 - DNA, 15 bp, Homo sapiens
tgaaagagcactttt

SEQ ID NO: 2112348 - DNA, 15 bp, Homo sapiens
gaaagagcacttttt

SEQ ID NO: 2112349 - DNA, 15 bp, Homo sapiens
aaagagcactttttt

SEQ ID NO: 2112350 - DNA, 15 bp, Homo sapiens
aagagcactttttta

SEQ ID NO: 2112351 - DNA, 15 bp, Homo sapiens
agagcacttttttat

SEQ ID NO: 2112352 - DNA, 15 bp, Homo sapiens
gagcacttttttatg

SEQ ID NO: 2112353 - DNA, 15 bp, Homo sapiens
agcacttttttatgc

SEQ ID NO: 2112354 - DNA, 15 bp, Homo sapiens
gcacttttttatgct

SEQ ID NO: 2112355 - DNA, 15 bp, Homo sapiens
cacttttttatgctt

SEQ ID NO: 2112356 - DNA, 15 bp, Homo sapiens
acttttttatgcttg

SEQ ID NO: 2112357 - DNA, 15 bp, Homo sapiens
cttttttatgcttgc

SEQ ID NO: 2112358 - DNA, 15 bp, Homo sapiens
ttttttatgcttgct

SEQ ID NO: 2112359 - DNA, 15 bp, Homo sapiens
tttttatgcttgctc

SEQ ID NO: 2112360 - DNA, 15 bp, Homo sapiens
ttttatgcttgctcc

SEQ ID NO: 2112361 - DNA, 15 bp, Homo sapiens
tttatgcttgctcct

SEQ ID NO: 2112362 - DNA, 15 bp, Homo sapiens
ttatgcttgctcctt

SEQ ID NO: 2112363 - DNA, 15 bp, Homo sapiens
tatgcttgctccttt

SEQ ID NO: 2112364 - DNA, 15 bp, Homo sapiens
atgcttgctcctttc

SEQ ID NO: 2112365 - DNA, 15 bp, Homo sapiens
tgcttgctcctttct

SEQ ID NO: 2112366 - DNA, 15 bp, Homo sapiens
gcttgctcctttctt

SEQ ID NO: 2112367 - DNA, 15 bp, Homo sapiens
cttgctcctttcttt

SEQ ID NO: 2112368 - DNA, 15 bp, Homo sapiens
ttgctcctttctttg

SEQ ID NO: 2112369 - DNA, 15 bp, Homo sapiens
tgctcctttctttgt

SEQ ID NO: 2112370 - DNA, 15 bp, Homo sapiens
gctcctttctttgta

SEQ ID NO: 2112371 - DNA, 15 bp, Homo sapiens
ctcctttctttgtat

SEQ ID NO: 2112372 - DNA, 15 bp, Homo sapiens
tcctttctttgtatc

SEQ ID NO: 2112373 - DNA, 15 bp, Homo sapiens
cctttctttgtatcc

SEQ ID NO: 2112374 - DNA, 15 bp, Homo sapiens
ctttctttgtatcca

SEQ ID NO: 2112375 - DNA, 15 bp, Homo sapiens
tttctttgtatccac

SEQ ID NO: 2112376 - DNA, 15 bp, Homo sapiens
acataatgcttcaca

SEQ ID NO: 2112377 - DNA, 15 bp, Homo sapiens
cataatgcttcacaa

SEQ ID NO: 2112378 - DNA, 15 bp, Homo sapiens
ataatgcttcacaat

SEQ ID NO: 2112379 - DNA, 15 bp, Homo sapiens
taatgcttcacaatt

SEQ ID NO: 2112380 - DNA, 15 bp, Homo sapiens
aatgcttcacaattt

SEQ ID NO: 2112381 - DNA, 15 bp, Homo sapiens
atgcttcacaattta

SEQ ID NO: 2112382 - DNA, 15 bp, Homo sapiens
tgcttcacaatttac

SEQ ID NO: 2112383 - DNA, 15 bp, Homo sapiens
gcttcacaatttaca

SEQ ID NO: 2112384 - DNA, 15 bp, Homo sapiens
cttcacaatttacac

SEQ ID NO: 2112385 - DNA, 15 bp, Homo sapiens
ttcacaatttacact

SEQ ID NO: 2112386 - DNA, 15 bp, Homo sapiens
tcacaatttacactg

SEQ ID NO: 2112387 - DNA, 15 bp, Homo sapiens
cacaatttacactgc

SEQ ID NO: 2112388 - DNA, 15 bp, Homo sapiens
acaatttacactgca

SEQ ID NO: 2112389 - DNA, 15 bp, Homo sapiens
caatttacactgcac

SEQ ID NO: 2112390 - DNA, 15 bp, Homo sapiens
aatttacactgcact

SEQ ID NO: 2112391 - DNA, 15 bp, Homo sapiens
atttacactgcactt

SEQ ID NO: 2112392 - DNA, 15 bp, Homo sapiens
tttacactgcacttt

SEQ ID NO: 2112393 - DNA, 15 bp, Homo sapiens
ttacactgcactttc

SEQ ID NO: 2112394 - DNA, 15 bp, Homo sapiens
tacactgcactttca

SEQ ID NO: 2112395 - DNA, 15 bp, Homo sapiens
acactgcactttcaa

SEQ ID NO: 2112396 - DNA, 15 bp, Homo sapiens
cactgcactttcaaa

SEQ ID NO: 2112397 - DNA, 15 bp, Homo sapiens
actgcactttcaaat

SEQ ID NO: 2112398 - DNA, 15 bp, Homo sapiens
ctgcactttcaaatg

SEQ ID NO: 2112399 - DNA, 15 bp, Homo sapiens
tgcactttcaaatgt

SEQ ID NO: 2112400 - DNA, 15 bp, Homo sapiens
gcactttcaaatgtt

SEQ ID NO: 2112401 - DNA, 15 bp, Homo sapiens
cactttcaaatgtta

SEQ ID NO: 2112402 - DNA, 15 bp, Homo sapiens
actttcaaatgttaa

SEQ ID NO: 2112403 - DNA, 15 bp, Homo sapiens
ctttcaaatgttaac

SEQ ID NO: 2112404 - DNA, 15 bp, Homo sapiens
tttcaaatgttaact

SEQ ID NO: 2112405 - DNA, 15 bp, Homo sapiens
ttcaaatgttaactg

SEQ ID NO: 2112406 - DNA, 15 bp, Homo sapiens
tcaaatgttaactgc

SEQ ID NO: 2112407 - DNA, 15 bp, Homo sapiens
caaatgttaactgca

SEQ ID NO: 2112408 - DNA, 15 bp, Homo sapiens
aaatgttaactgcat

SEQ ID NO: 2112409 - DNA, 15 bp, Homo sapiens
aatgttaactgcatg

SEQ ID NO: 2112410 - DNA, 15 bp, Homo sapiens
atgttaactgcatga

SEQ ID NO: 2112411 - DNA, 15 bp, Homo sapiens
tgttaactgcatgat

SEQ ID NO: 2112412 - DNA, 15 bp, Homo sapiens
gttaactgcatgatt

SEQ ID NO: 2112413 - DNA, 15 bp, Homo sapiens
ttaactgcatgattg

SEQ ID NO: 2112414 - DNA, 15 bp, Homo sapiens
taactgcatgattgc

SEQ ID NO: 2112415 - DNA, 15 bp, Homo sapiens
aactgcatgattgcc

SEQ ID NO: 2112416 - DNA, 15 bp, Homo sapiens
actgcatgattgcca

SEQ ID NO: 2112417 - DNA, 15 bp, Homo sapiens
ctgcatgattgccaa

SEQ ID NO: 2112418 - DNA, 15 bp, Homo sapiens
tgcatgattgccaat

SEQ ID NO: 2112419 - DNA, 15 bp, Homo sapiens
gcatgattgccaata

SEQ ID NO: 2112420 - DNA, 15 bp, Homo sapiens
catgattgccaatac

SEQ ID NO: 2112421 - DNA, 15 bp, Homo sapiens
atgattgccaataca

SEQ ID NO: 2112422 - DNA, 15 bp, Homo sapiens
tgattgccaatacac

SEQ ID NO: 2112423 - DNA, 15 bp, Homo sapiens
gattgccaatacact

SEQ ID NO: 2112424 - DNA, 15 bp, Homo sapiens
attgccaatacacta

SEQ ID NO: 2112425 - DNA, 15 bp, Homo sapiens
ttgccaatacactaa

SEQ ID NO: 2112426 - DNA, 15 bp, Homo sapiens
tgccaatacactaat

SEQ ID NO: 2112427 - DNA, 15 bp, Homo sapiens
gccaatacactaatt

SEQ ID NO: 2112428 - DNA, 15 bp, Homo sapiens
ccaatacactaattg

SEQ ID NO: 2112429 - DNA, 15 bp, Homo sapiens
caatacactaattgg

SEQ ID NO: 2112430 - DNA, 15 bp, Homo sapiens
aatacactaattggt

SEQ ID NO: 2112431 - DNA, 15 bp, Homo sapiens
atacactaattggtt

SEQ ID NO: 2112432 - DNA, 15 bp, Homo sapiens
tacactaattggttt

SEQ ID NO: 2112433 - DNA, 15 bp, Homo sapiens
acactaattggtttt

SEQ ID NO: 2112434 - DNA, 15 bp, Homo sapiens
cactaattggttttt

SEQ ID NO: 2112435 - DNA, 15 bp, Homo sapiens
actaattggtttttc

SEQ ID NO: 2112436 - DNA, 15 bp, Homo sapiens
ctaattggtttttct

SEQ ID NO: 2112437 - DNA, 15 bp, Homo sapiens
taattggtttttctc

SEQ ID NO: 2112438 - DNA, 15 bp, Homo sapiens
aattggtttttctct

SEQ ID NO: 2112439 - DNA, 15 bp, Homo sapiens
attggtttttctctt

SEQ ID NO: 2112440 - DNA, 15 bp, Homo sapiens
ttggtttttctctta

SEQ ID NO: 2112441 - DNA, 15 bp, Homo sapiens
tggtttttctcttat

SEQ ID NO: 2112442 - DNA, 15 bp, Homo sapiens
ggtttttctcttatg

SEQ ID NO: 2112443 - DNA, 15 bp, Homo sapiens
gtttttctcttatgt

SEQ ID NO: 2112444 - DNA, 15 bp, Homo sapiens
tttttctcttatgtt

SEQ ID NO: 2112445 - DNA, 15 bp, Homo sapiens
ttttctcttatgttt

SEQ ID NO: 2112446 - DNA, 15 bp, Homo sapiens
tttctcttatgtttt

SEQ ID NO: 2112447 - DNA, 15 bp, Homo sapiens
ttctcttatgtttta

SEQ ID NO: 2112448 - DNA, 15 bp, Homo sapiens
tctcttatgttttac

SEQ ID NO: 2112449 - DNA, 15 bp, Homo sapiens
ctcttatgttttaca

SEQ ID NO: 2112450 - DNA, 15 bp, Homo sapiens
tcttatgttttacag

SEQ ID NO: 2112451 - DNA, 15 bp, Homo sapiens
cttatgttttacagt

SEQ ID NO: 2112452 - DNA, 15 bp, Homo sapiens
ttatgttttacagtg

SEQ ID NO: 2112453 - DNA, 15 bp, Homo sapiens
tatgttttacagtgc

SEQ ID NO: 2112454 - DNA, 15 bp, Homo sapiens
atgttttacagtgct

SEQ ID NO: 2112455 - DNA, 15 bp, Homo sapiens
tgttttacagtgctt

SEQ ID NO: 2112456 - DNA, 15 bp, Homo sapiens
tttacagtgctttca

SEQ ID NO: 2112457 - DNA, 15 bp, Homo sapiens
ttacagtgctttcat

SEQ ID NO: 2112458 - DNA, 15 bp, Homo sapiens
tacagtgctttcata

SEQ ID NO: 2112459 - DNA, 15 bp, Homo sapiens
acagtgctttcatac

SEQ ID NO: 2112460 - DNA, 15 bp, Homo sapiens
cagtgctttcataca

SEQ ID NO: 2112461 - DNA, 15 bp, Homo sapiens
agtgctttcatacac

SEQ ID NO: 2112462 - DNA, 15 bp, Homo sapiens
gtgctttcatacaca

SEQ ID NO: 2112463 - DNA, 15 bp, Homo sapiens
tgctttcatacacat

SEQ ID NO: 2112464 - DNA, 15 bp, Homo sapiens
gctttcatacacatt

SEQ ID NO: 2112465 - DNA, 15 bp, Homo sapiens
ctttcatacacatta

SEQ ID NO: 2112466 - DNA, 15 bp, Homo sapiens
tttcatacacattat

SEQ ID NO: 2112467 - DNA, 15 bp, Homo sapiens
ttcatacacattatc

SEQ ID NO: 2112468 - DNA, 15 bp, Homo sapiens
tcatacacattatca

SEQ ID NO: 2112469 - DNA, 15 bp, Homo sapiens
catacacattatcag

SEQ ID NO: 2112470 - DNA, 15 bp, Homo sapiens
atacacattatcagt

SEQ ID NO: 2112471 - DNA, 15 bp, Homo sapiens
tacacattatcagtc

SEQ ID NO: 2112472 - DNA, 15 bp, Homo sapiens
acacattatcagtca

SEQ ID NO: 2112473 - DNA, 15 bp, Homo sapiens
cacattatcagtcat

SEQ ID NO: 2112474 - DNA, 15 bp, Homo sapiens
acattatcagtcatt

SEQ ID NO: 2112475 - DNA, 15 bp, Homo sapiens
cattatcagtcattt

SEQ ID NO: 2112476 - DNA, 15 bp, Homo sapiens
attatcagtcattta

SEQ ID NO: 2112477 - DNA, 15 bp, Homo sapiens
ttatcagtcatttaa

SEQ ID NO: 2112478 - DNA, 15 bp, Homo sapiens
tatcagtcatttaaa

SEQ ID NO: 2112479 - DNA, 15 bp, Homo sapiens
atcagtcatttaaat

SEQ ID NO: 2112480 - DNA, 15 bp, Homo sapiens
tcagtcatttaaatc

SEQ ID NO: 2112481 - DNA, 15 bp, Homo sapiens
cagtcatttaaatca

SEQ ID NO: 2112482 - DNA, 15 bp, Homo sapiens
agtcatttaaatcaa

SEQ ID NO: 2112483 - DNA, 15 bp, Homo sapiens
gtcatttaaatcaac

SEQ ID NO: 2112484 - DNA, 15 bp, Homo sapiens
tcatttaaatcaact

SEQ ID NO: 2112485 - DNA, 15 bp, Homo sapiens
catttaaatcaactt

SEQ ID NO: 2112486 - DNA, 15 bp, Homo sapiens
atttaaatcaacttc

SEQ ID NO: 2112487 - DNA, 15 bp, Homo sapiens
tttaaatcaacttcc

SEQ ID NO: 2112488 - DNA, 15 bp, Homo sapiens
ttaaatcaacttccc

SEQ ID NO: 2112489 - DNA, 15 bp, Homo sapiens
taaatcaacttccca

SEQ ID NO: 2112490 - DNA, 15 bp, Homo sapiens
aaatcaacttcccac

SEQ ID NO: 2112491 - DNA, 15 bp, Homo sapiens
aatcaacttcccaca

SEQ ID NO: 2112492 - DNA, 15 bp, Homo sapiens
atcaacttcccacat

SEQ ID NO: 2112493 - DNA, 15 bp, Homo sapiens
tcaacttcccacata

SEQ ID NO: 2112494 - DNA, 15 bp, Homo sapiens
caacttcccacataa

SEQ ID NO: 2112495 - DNA, 15 bp, Homo sapiens
aacttcccacataaa

SEQ ID NO: 2112496 - DNA, 15 bp, Homo sapiens
acttcccacataaac

SEQ ID NO: 2112497 - DNA, 15 bp, Homo sapiens
cttcccacataaaca

SEQ ID NO: 2112498 - DNA, 15 bp, Homo sapiens
ttcccacataaacag

SEQ ID NO: 2112499 - DNA, 15 bp, Homo sapiens
tcccacataaacagg

SEQ ID NO: 2112500 - DNA, 15 bp, Homo sapiens
cccacataaacagga

SEQ ID NO: 2112501 - DNA, 15 bp, Homo sapiens
ccacataaacaggaa

SEQ ID NO: 2112502 - DNA, 15 bp, Homo sapiens
cacataaacaggaag

SEQ ID NO: 2112503 - DNA, 15 bp, Homo sapiens
acataaacaggaaga

SEQ ID NO: 2112504 - DNA, 15 bp, Homo sapiens
cataaacaggaagaa

SEQ ID NO: 2112505 - DNA, 15 bp, Homo sapiens
ataaacaggaagaaa

SEQ ID NO: 2112506 - DNA, 15 bp, Homo sapiens
taaacaggaagaaaa

SEQ ID NO: 2112507 - DNA, 15 bp, Homo sapiens
aaacaggaagaaaaa

SEQ ID NO: 2112508 - DNA, 15 bp, Homo sapiens
aacaggaagaaaaaa

SEQ ID NO: 2112509 - DNA, 15 bp, Homo sapiens
acaggaagaaaaaaa

SEQ ID NO: 2112510 - DNA, 15 bp, Homo sapiens
caggaagaaaaaaat

SEQ ID NO: 2112511 - DNA, 15 bp, Homo sapiens
aggaagaaaaaaatc

SEQ ID NO: 2112512 - DNA, 15 bp, Homo sapiens
ggaagaaaaaaatca

SEQ ID NO: 2112513 - DNA, 15 bp, Homo sapiens
gaagaaaaaaatcaa

SEQ ID NO: 2112514 - DNA, 15 bp, Homo sapiens
aagaaaaaaatcaag

SEQ ID NO: 2112515 - DNA, 15 bp, Homo sapiens
agaaaaaaatcaagg

SEQ ID NO: 2112516 - DNA, 15 bp, Homo sapiens
gaaaaaaatcaagga

SEQ ID NO: 2112517 - DNA, 15 bp, Homo sapiens
aaaaaaatcaaggaa

SEQ ID NO: 2112518 - DNA, 15 bp, Homo sapiens
aaaaaatcaaggaaa

SEQ ID NO: 2112519 - DNA, 15 bp, Homo sapiens
aaaaatcaaggaaag

SEQ ID NO: 2112520 - DNA, 15 bp, Homo sapiens
aaaatcaaggaaagt

SEQ ID NO: 2112521 - DNA, 15 bp, Homo sapiens
aaatcaaggaaagta

SEQ ID NO: 2112522 - DNA, 15 bp, Homo sapiens
aatcaaggaaagtat

SEQ ID NO: 2112523 - DNA, 15 bp, Homo sapiens
atcaaggaaagtatt

SEQ ID NO: 2112524 - DNA, 15 bp, Homo sapiens
tcaaggaaagtatta

SEQ ID NO: 2112525 - DNA, 15 bp, Homo sapiens
caaggaaagtattaa

SEQ ID NO: 2112526 - DNA, 15 bp, Homo sapiens
aaggaaagtattaaa

SEQ ID NO: 2112527 - DNA, 15 bp, Homo sapiens
aggaaagtattaaac

SEQ ID NO: 2112528 - DNA, 15 bp, Homo sapiens
ggaaagtattaaaca

SEQ ID NO: 2112529 - DNA, 15 bp, Homo sapiens
gaaagtattaaacat

SEQ ID NO: 2112530 - DNA, 15 bp, Homo sapiens
aaagtattaaacatg

SEQ ID NO: 2112531 - DNA, 15 bp, Homo sapiens
aagtattaaacatgc

SEQ ID NO: 2112532 - DNA, 15 bp, Homo sapiens
agtattaaacatgct

SEQ ID NO: 2112533 - DNA, 15 bp, Homo sapiens
gtattaaacatgctc

SEQ ID NO: 2112534 - DNA, 15 bp, Homo sapiens
tattaaacatgctca

SEQ ID NO: 2112535 - DNA, 15 bp, Homo sapiens
attaaacatgctcaa

SEQ ID NO: 2112536 - DNA, 15 bp, Homo sapiens
ttaaacatgctcaac

SEQ ID NO: 2112537 - DNA, 15 bp, Homo sapiens
taaacatgctcaaca

SEQ ID NO: 2112538 - DNA, 15 bp, Homo sapiens
aaacatgctcaacag

SEQ ID NO: 2112539 - DNA, 15 bp, Homo sapiens
aacatgctcaacagt

SEQ ID NO: 2112540 - DNA, 15 bp, Homo sapiens
acatgctcaacagtc

SEQ ID NO: 2112541 - DNA, 15 bp, Homo sapiens
catgctcaacagtcc

SEQ ID NO: 2112542 - DNA, 15 bp, Homo sapiens
atgctcaacagtccc

SEQ ID NO: 2112543 - DNA, 15 bp, Homo sapiens
tgctcaacagtccca

SEQ ID NO: 2112544 - DNA, 15 bp, Homo sapiens
gctcaacagtcccag

SEQ ID NO: 2112545 - DNA, 15 bp, Homo sapiens
ctcaacagtcccagg

SEQ ID NO: 2112546 - DNA, 15 bp, Homo sapiens
tcaacagtcccaggt

SEQ ID NO: 2112547 - DNA, 15 bp, Homo sapiens
caacagtcccaggtt

SEQ ID NO: 2112548 - DNA, 15 bp, Homo sapiens
aacagtcccaggttc

SEQ ID NO: 2112549 - DNA, 15 bp, Homo sapiens
acagtcccaggttct

SEQ ID NO: 2112550 - DNA, 15 bp, Homo sapiens
cagtcccaggttctc

SEQ ID NO: 2112551 - DNA, 15 bp, Homo sapiens
agtcccaggttctct

SEQ ID NO: 2112552 - DNA, 15 bp, Homo sapiens
gtcccaggttctctc

SEQ ID NO: 2112553 - DNA, 15 bp, Homo sapiens
tcccaggttctctca

SEQ ID NO: 2112554 - DNA, 15 bp, Homo sapiens
cccaggttctctcat

SEQ ID NO: 2112555 - DNA, 15 bp, Homo sapiens
ccaggttctctcatc

SEQ ID NO: 2112556 - DNA, 15 bp, Homo sapiens
caggttctctcatct

SEQ ID NO: 2112557 - DNA, 15 bp, Homo sapiens
aggttctctcatctt

SEQ ID NO: 2112558 - DNA, 15 bp, Homo sapiens
ggttctctcatcttt

SEQ ID NO: 2112559 - DNA, 15 bp, Homo sapiens
gttctctcatcttta

SEQ ID NO: 2112560 - DNA, 15 bp, Homo sapiens
ttctctcatctttaa

SEQ ID NO: 2112561 - DNA, 15 bp, Homo sapiens
tctctcatctttaag

SEQ ID NO: 2112562 - DNA, 15 bp, Homo sapiens
ctctcatctttaagc

SEQ ID NO: 2112563 - DNA, 15 bp, Homo sapiens
tctcatctttaagcc

SEQ ID NO: 2112564 - DNA, 15 bp, Homo sapiens
ctcatctttaagcct

SEQ ID NO: 2112565 - DNA, 15 bp, Homo sapiens
tcatctttaagccta

SEQ ID NO: 2112566 - DNA, 15 bp, Homo sapiens
catctttaagcctag

SEQ ID NO: 2112567 - DNA, 15 bp, Homo sapiens
atctttaagcctaga

SEQ ID NO: 2112568 - DNA, 15 bp, Homo sapiens
tctttaagcctagag

SEQ ID NO: 2112569 - DNA, 15 bp, Homo sapiens
ctttaagcctagaga

SEQ ID NO: 2112570 - DNA, 15 bp, Homo sapiens
tttaagcctagagat

SEQ ID NO: 2112571 - DNA, 15 bp, Homo sapiens
ttaagcctagagatg

SEQ ID NO: 2112572 - DNA, 15 bp, Homo sapiens
taagcctagagatgg

SEQ ID NO: 2112573 - DNA, 15 bp, Homo sapiens
aagcctagagatggg

SEQ ID NO: 2112574 - DNA, 15 bp, Homo sapiens
agcctagagatgggt

SEQ ID NO: 2112575 - DNA, 15 bp, Homo sapiens
gcctagagatgggta

SEQ ID NO: 2112576 - DNA, 15 bp, Homo sapiens
cctagagatgggtat

SEQ ID NO: 2112577 - DNA, 15 bp, Homo sapiens
ctagagatgggtatt

SEQ ID NO: 2112578 - DNA, 15 bp, Homo sapiens
tagagatgggtatta

SEQ ID NO: 2112579 - DNA, 15 bp, Homo sapiens
agagatgggtattaa

SEQ ID NO: 2112580 - DNA, 15 bp, Homo sapiens
gagatgggtattaaa

SEQ ID NO: 2112581 - DNA, 15 bp, Homo sapiens
agatgggtattaaac

SEQ ID NO: 2112582 - DNA, 15 bp, Homo sapiens
gatgggtattaaacc

SEQ ID NO: 2112583 - DNA, 15 bp, Homo sapiens
atgggtattaaaccc

SEQ ID NO: 2112584 - DNA, 15 bp, Homo sapiens
tgggtattaaaccca

SEQ ID NO: 2112585 - DNA, 15 bp, Homo sapiens
gggtattaaacccag

SEQ ID NO: 2112586 - DNA, 15 bp, Homo sapiens
ggtattaaacccagg

SEQ ID NO: 2112587 - DNA, 15 bp, Homo sapiens
gtattaaacccagga

SEQ ID NO: 2112588 - DNA, 15 bp, Homo sapiens
tattaaacccaggag

SEQ ID NO: 2112589 - DNA, 15 bp, Homo sapiens
attaaacccaggagt

SEQ ID NO: 2112590 - DNA, 15 bp, Homo sapiens
ttaaacccaggagta

SEQ ID NO: 2112591 - DNA, 15 bp, Homo sapiens
taaacccaggagtag

SEQ ID NO: 2112592 - DNA, 15 bp, Homo sapiens
aaacccaggagtagc

SEQ ID NO: 2112593 - DNA, 15 bp, Homo sapiens
aacccaggagtagcg

SEQ ID NO: 2112594 - DNA, 15 bp, Homo sapiens
acccaggagtagcgt

SEQ ID NO: 2112595 - DNA, 15 bp, Homo sapiens
cccaggagtagcgtt

SEQ ID NO: 2112596 - DNA, 15 bp, Homo sapiens
ccaggagtagcgttg

SEQ ID NO: 2112597 - DNA, 15 bp, Homo sapiens
caggagtagcgttgg

SEQ ID NO: 2112598 - DNA, 15 bp, Homo sapiens
aggagtagcgttggc

SEQ ID NO: 2112599 - DNA, 15 bp, Homo sapiens
ggagtagcgttggca

SEQ ID NO: 2112600 - DNA, 15 bp, Homo sapiens
gagtagcgttggcac

SEQ ID NO: 2112601 - DNA, 15 bp, Homo sapiens
agtagcgttggcaca

SEQ ID NO: 2112602 - DNA, 15 bp, Homo sapiens
gtagcgttggcacag

SEQ ID NO: 2112603 - DNA, 15 bp, Homo sapiens
tagcgttggcacagt

SEQ ID NO: 2112604 - DNA, 15 bp, Homo sapiens
agcgttggcacagtc

SEQ ID NO: 2112605 - DNA, 15 bp, Homo sapiens
gcgttggcacagtcc

SEQ ID NO: 2112606 - DNA, 15 bp, Homo sapiens
cgttggcacagtcca

SEQ ID NO: 2112607 - DNA, 15 bp, Homo sapiens
gttggcacagtccac

SEQ ID NO: 2112608 - DNA, 15 bp, Homo sapiens
ttggcacagtccacc

SEQ ID NO: 2112609 - DNA, 15 bp, Homo sapiens
tggcacagtccacca

SEQ ID NO: 2112610 - DNA, 15 bp, Homo sapiens
ggcacagtccaccaa

SEQ ID NO: 2112611 - DNA, 15 bp, Homo sapiens
gcacagtccaccaaa

SEQ ID NO: 2112612 - DNA, 15 bp, Homo sapiens
cacagtccaccaaat

SEQ ID NO: 2112613 - DNA, 15 bp, Homo sapiens
acagtccaccaaatt

SEQ ID NO: 2112614 - DNA, 15 bp, Homo sapiens
cagtccaccaaatta

SEQ ID NO: 2112615 - DNA, 15 bp, Homo sapiens
agtccaccaaattat

SEQ ID NO: 2112616 - DNA, 15 bp, Homo sapiens
gtccaccaaattatt

SEQ ID NO: 2112617 - DNA, 15 bp, Homo sapiens
tccaccaaattattt

SEQ ID NO: 2112618 - DNA, 15 bp, Homo sapiens
ccaccaaattatttg

SEQ ID NO: 2112619 - DNA, 15 bp, Homo sapiens
caccaaattatttgg

SEQ ID NO: 2112620 - DNA, 15 bp, Homo sapiens
accaaattatttggc

SEQ ID NO: 2112621 - DNA, 15 bp, Homo sapiens
ccaaattatttggcc

SEQ ID NO: 2112622 - DNA, 15 bp, Homo sapiens
caaattatttggcca

SEQ ID NO: 2112623 - DNA, 15 bp, Homo sapiens
aaattatttggccac

SEQ ID NO: 2112624 - DNA, 15 bp, Homo sapiens
aattatttggccact

SEQ ID NO: 2112625 - DNA, 15 bp, Homo sapiens
attatttggccacta

SEQ ID NO: 2112626 - DNA, 15 bp, Homo sapiens
ttatttggccactac

SEQ ID NO: 2112627 - DNA, 15 bp, Homo sapiens
tatttggccactact

SEQ ID NO: 2112628 - DNA, 15 bp, Homo sapiens
atttggccactacta

SEQ ID NO: 2112629 - DNA, 15 bp, Homo sapiens
tttggccactactat

SEQ ID NO: 2112630 - DNA, 15 bp, Homo sapiens
ttggccactactatg

SEQ ID NO: 2112631 - DNA, 15 bp, Homo sapiens
tggccactactatga

SEQ ID NO: 2112632 - DNA, 15 bp, Homo sapiens
ggccactactatgag

SEQ ID NO: 2112633 - DNA, 15 bp, Homo sapiens
gccactactatgagc

SEQ ID NO: 2112634 - DNA, 15 bp, Homo sapiens
ccactactatgagca

SEQ ID NO: 2112635 - DNA, 15 bp, Homo sapiens
cactactatgagcag

SEQ ID NO: 2112636 - DNA, 15 bp, Homo sapiens
actactatgagcagg

SEQ ID NO: 2112637 - DNA, 15 bp, Homo sapiens
ctactatgagcaggg

SEQ ID NO: 2112638 - DNA, 15 bp, Homo sapiens
tactatgagcaggga

SEQ ID NO: 2112639 - DNA, 15 bp, Homo sapiens
actatgagcagggag

SEQ ID NO: 2112640 - DNA, 15 bp, Homo sapiens
ctatgagcagggagt

SEQ ID NO: 2112641 - DNA, 15 bp, Homo sapiens
tatgagcagggagtt

SEQ ID NO: 2112642 - DNA, 15 bp, Homo sapiens
atgagcagggagttc

SEQ ID NO: 2112643 - DNA, 15 bp, Homo sapiens
tgagcagggagttca

SEQ ID NO: 2112644 - DNA, 15 bp, Homo sapiens
gagcagggagttcag

SEQ ID NO: 2112645 - DNA, 15 bp, Homo sapiens
agcagggagttcagg

SEQ ID NO: 2112646 - DNA, 15 bp, Homo sapiens
gcagggagttcaggc

SEQ ID NO: 2112647 - DNA, 15 bp, Homo sapiens
cagggagttcaggct

SEQ ID NO: 2112648 - DNA, 15 bp, Homo sapiens
agggagttcaggctg

SEQ ID NO: 2112649 - DNA, 15 bp, Homo sapiens
gggagttcaggctgt

SEQ ID NO: 2112650 - DNA, 15 bp, Homo sapiens
ggagttcaggctgtc

SEQ ID NO: 2112651 - DNA, 15 bp, Homo sapiens
gagttcaggctgtcc

SEQ ID NO: 2112652 - DNA, 15 bp, Homo sapiens
agttcaggctgtccc

SEQ ID NO: 2112653 - DNA, 15 bp, Homo sapiens
gttcaggctgtcccc

SEQ ID NO: 2112654 - DNA, 15 bp, Homo sapiens
ttcaggctgtcccct

SEQ ID NO: 2112655 - DNA, 15 bp, Homo sapiens
tcaggctgtcccctt

SEQ ID NO: 2112656 - DNA, 15 bp, Homo sapiens
caggctgtccccttg

SEQ ID NO: 2112657 - DNA, 15 bp, Homo sapiens
aggctgtccccttgg

SEQ ID NO: 2112658 - DNA, 15 bp, Homo sapiens
ggctgtccccttggg

SEQ ID NO: 2112659 - DNA, 15 bp, Homo sapiens
gctgtccccttggga

SEQ ID NO: 2112660 - DNA, 15 bp, Homo sapiens
ctgtccccttgggac

SEQ ID NO: 2112661 - DNA, 15 bp, Homo sapiens
tgtccccttgggacc

SEQ ID NO: 2112662 - DNA, 15 bp, Homo sapiens
gtccccttgggacct

SEQ ID NO: 2112663 - DNA, 15 bp, Homo sapiens
tccccttgggacctc

SEQ ID NO: 2112664 - DNA, 15 bp, Homo sapiens
ccccttgggacctcg

SEQ ID NO: 2112665 - DNA, 15 bp, Homo sapiens
cccttgggacctcgc

SEQ ID NO: 2112666 - DNA, 15 bp, Homo sapiens
ccttgggacctcgct

SEQ ID NO: 2112667 - DNA, 15 bp, Homo sapiens
cttgggacctcgctt

SEQ ID NO: 2112668 - DNA, 15 bp, Homo sapiens
ttgggacctcgcttt

SEQ ID NO: 2112669 - DNA, 15 bp, Homo sapiens
tgggacctcgctttg

SEQ ID NO: 2112670 - DNA, 15 bp, Homo sapiens
gggacctcgctttgt

SEQ ID NO: 2112671 - DNA, 15 bp, Homo sapiens
ggacctcgctttgtc

SEQ ID NO: 2112672 - DNA, 15 bp, Homo sapiens
gacctcgctttgtcc

SEQ ID NO: 2112673 - DNA, 15 bp, Homo sapiens
acctcgctttgtccc

SEQ ID NO: 2112674 - DNA, 15 bp, Homo sapiens
cctcgctttgtccca

SEQ ID NO: 2112675 - DNA, 15 bp, Homo sapiens
ctcgctttgtcccag

SEQ ID NO: 2112676 - DNA, 15 bp, Homo sapiens
tcgctttgtcccagg

SEQ ID NO: 2112677 - DNA, 15 bp, Homo sapiens
cgctttgtcccaggc

SEQ ID NO: 2112678 - DNA, 15 bp, Homo sapiens
gctttgtcccaggca

SEQ ID NO: 2112679 - DNA, 15 bp, Homo sapiens
ctttgtcccaggcac

SEQ ID NO: 2112680 - DNA, 15 bp, Homo sapiens
tttgtcccaggcaca

SEQ ID NO: 2112681 - DNA, 15 bp, Homo sapiens
ttgtcccaggcacag

SEQ ID NO: 2112682 - DNA, 15 bp, Homo sapiens
tgtcccaggcacagt

SEQ ID NO: 2112683 - DNA, 15 bp, Homo sapiens
gtcccaggcacagtc

SEQ ID NO: 2112684 - DNA, 15 bp, Homo sapiens
tcccaggcacagtca

SEQ ID NO: 2112685 - DNA, 15 bp, Homo sapiens
cccaggcacagtcac

SEQ ID NO: 2112686 - DNA, 15 bp, Homo sapiens
ccaggcacagtcacc

SEQ ID NO: 2112687 - DNA, 15 bp, Homo sapiens
caggcacagtcaccc

SEQ ID NO: 2112688 - DNA, 15 bp, Homo sapiens
aggcacagtcaccct

SEQ ID NO: 2112689 - DNA, 15 bp, Homo sapiens
ggcacagtcaccctt

SEQ ID NO: 2112690 - DNA, 15 bp, Homo sapiens
gcacagtcacccttt

SEQ ID NO: 2112691 - DNA, 15 bp, Homo sapiens
cacagtcaccctttc

SEQ ID NO: 2112692 - DNA, 15 bp, Homo sapiens
acagtcaccctttcc

SEQ ID NO: 2112693 - DNA, 15 bp, Homo sapiens
cagtcaccctttcca

SEQ ID NO: 2112694 - DNA, 15 bp, Homo sapiens
agtcaccctttccat

SEQ ID NO: 2112695 - DNA, 15 bp, Homo sapiens
gtcaccctttccata

SEQ ID NO: 2112696 - DNA, 15 bp, Homo sapiens
tcaccctttccataa

SEQ ID NO: 2112697 - DNA, 15 bp, Homo sapiens
caccctttccataac

SEQ ID NO: 2112698 - DNA, 15 bp, Homo sapiens
accctttccataacc

SEQ ID NO: 2112699 - DNA, 15 bp, Homo sapiens
ccctttccataacca

SEQ ID NO: 2112700 - DNA, 15 bp, Homo sapiens
cctttccataaccat

SEQ ID NO: 2112701 - DNA, 15 bp, Homo sapiens
ctttccataaccatc

SEQ ID NO: 2112702 - DNA, 15 bp, Homo sapiens
tttccataaccatca

SEQ ID NO: 2112703 - DNA, 15 bp, Homo sapiens
ttccataaccatcac

SEQ ID NO: 2112704 - DNA, 15 bp, Homo sapiens
tccataaccatcact

SEQ ID NO: 2112705 - DNA, 15 bp, Homo sapiens
ccataaccatcacta

SEQ ID NO: 2112706 - DNA, 15 bp, Homo sapiens
cataaccatcactag

SEQ ID NO: 2112707 - DNA, 15 bp, Homo sapiens
ataaccatcactaga

SEQ ID NO: 2112708 - DNA, 15 bp, Homo sapiens
taaccatcactagaa

SEQ ID NO: 2112709 - DNA, 15 bp, Homo sapiens
aaccatcactagaaa

SEQ ID NO: 2112710 - DNA, 15 bp, Homo sapiens
accatcactagaaat

SEQ ID NO: 2112711 - DNA, 15 bp, Homo sapiens
ccatcactagaaatc

SEQ ID NO: 2112712 - DNA, 15 bp, Homo sapiens
catcactagaaatcc

SEQ ID NO: 2112713 - DNA, 15 bp, Homo sapiens
atcactagaaatccc

SEQ ID NO: 2112714 - DNA, 15 bp, Homo sapiens
tcactagaaatccca

SEQ ID NO: 2112715 - DNA, 15 bp, Homo sapiens
cactagaaatcccaa

SEQ ID NO: 2112716 - DNA, 15 bp, Homo sapiens
actagaaatcccaaa

SEQ ID NO: 2112717 - DNA, 15 bp, Homo sapiens
ctagaaatcccaaac

SEQ ID NO: 2112718 - DNA, 15 bp, Homo sapiens
tagaaatcccaaacc

SEQ ID NO: 2112719 - DNA, 15 bp, Homo sapiens
agaaatcccaaaccc

SEQ ID NO: 2112720 - DNA, 15 bp, Homo sapiens
gaaatcccaaacccc

SEQ ID NO: 2112721 - DNA, 15 bp, Homo sapiens
aaatcccaaacccca

SEQ ID NO: 2112722 - DNA, 15 bp, Homo sapiens
aatcccaaaccccag

SEQ ID NO: 2112723 - DNA, 15 bp, Homo sapiens
atcccaaaccccaga

SEQ ID NO: 2112724 - DNA, 15 bp, Homo sapiens
tcccaaaccccagaa

SEQ ID NO: 2112725 - DNA, 15 bp, Homo sapiens
cccaaaccccagaat

SEQ ID NO: 2112726 - DNA, 15 bp, Homo sapiens
ccaaaccccagaatc

SEQ ID NO: 2112727 - DNA, 15 bp, Homo sapiens
caaaccccagaatcc

SEQ ID NO: 2112728 - DNA, 15 bp, Homo sapiens
aaaccccagaatcct

SEQ ID NO: 2112729 - DNA, 15 bp, Homo sapiens
aaccccagaatcctg

SEQ ID NO: 2112730 - DNA, 15 bp, Homo sapiens
accccagaatcctgc

SEQ ID NO: 2112731 - DNA, 15 bp, Homo sapiens
ccccagaatcctgct

SEQ ID NO: 2112732 - DNA, 15 bp, Homo sapiens
cccagaatcctgctc

SEQ ID NO: 2112733 - DNA, 15 bp, Homo sapiens
ccagaatcctgctca

SEQ ID NO: 2112734 - DNA, 15 bp, Homo sapiens
cagaatcctgctcac

SEQ ID NO: 2112735 - DNA, 15 bp, Homo sapiens
agaatcctgctcacc

SEQ ID NO: 2112736 - DNA, 15 bp, Homo sapiens
gaatcctgctcacct

SEQ ID NO: 2112737 - DNA, 15 bp, Homo sapiens
aatcctgctcaccta

SEQ ID NO: 2112738 - DNA, 15 bp, Homo sapiens
atcctgctcacctaa

SEQ ID NO: 2112739 - DNA, 15 bp, Homo sapiens
tcctgctcacctaag

SEQ ID NO: 2112740 - DNA, 15 bp, Homo sapiens
cctgctcacctaagc

SEQ ID NO: 2112741 - DNA, 15 bp, Homo sapiens
ctgctcacctaagct

SEQ ID NO: 2112742 - DNA, 15 bp, Homo sapiens
tgctcacctaagctc

SEQ ID NO: 2112743 - DNA, 15 bp, Homo sapiens
gctcacctaagctca

SEQ ID NO: 2112744 - DNA, 15 bp, Homo sapiens
ctcacctaagctcaa

SEQ ID NO: 2112745 - DNA, 15 bp, Homo sapiens
tcacctaagctcaaa

SEQ ID NO: 2112746 - DNA, 15 bp, Homo sapiens
cacctaagctcaaag

SEQ ID NO: 2112747 - DNA, 15 bp, Homo sapiens
acctaagctcaaaga

SEQ ID NO: 2112748 - DNA, 15 bp, Homo sapiens
cctaagctcaaagaa

SEQ ID NO: 2112749 - DNA, 15 bp, Homo sapiens
ctaagctcaaagaag

SEQ ID NO: 2112750 - DNA, 15 bp, Homo sapiens
taagctcaaagaagg

SEQ ID NO: 2112751 - DNA, 15 bp, Homo sapiens
aagctcaaagaagga

SEQ ID NO: 2112752 - DNA, 15 bp, Homo sapiens
agctcaaagaaggaa

SEQ ID NO: 2112753 - DNA, 15 bp, Homo sapiens
gctcaaagaaggaag

SEQ ID NO: 2112754 - DNA, 15 bp, Homo sapiens
ctcaaagaaggaagc

SEQ ID NO: 2112755 - DNA, 15 bp, Homo sapiens
tcaaagaaggaagct

SEQ ID NO: 2112756 - DNA, 15 bp, Homo sapiens
caaagaaggaagctg

SEQ ID NO: 2112757 - DNA, 15 bp, Homo sapiens
aaagaaggaagctgt

SEQ ID NO: 2112758 - DNA, 15 bp, Homo sapiens
aagaaggaagctgtt

SEQ ID NO: 2112759 - DNA, 15 bp, Homo sapiens
agaaggaagctgttg

SEQ ID NO: 2112760 - DNA, 15 bp, Homo sapiens
gaaggaagctgttgc

SEQ ID NO: 2112761 - DNA, 15 bp, Homo sapiens
aaggaagctgttgct

SEQ ID NO: 2112762 - DNA, 15 bp, Homo sapiens
aggaagctgttgctg

SEQ ID NO: 2112763 - DNA, 15 bp, Homo sapiens
ggaagctgttgctgg

SEQ ID NO: 2112764 - DNA, 15 bp, Homo sapiens
gaagctgttgctggc

SEQ ID NO: 2112765 - DNA, 15 bp, Homo sapiens
aagctgttgctggca

SEQ ID NO: 2112766 - DNA, 15 bp, Homo sapiens
agctgttgctggcag

SEQ ID NO: 2112767 - DNA, 15 bp, Homo sapiens
gctgttgctggcagg

SEQ ID NO: 2112768 - DNA, 15 bp, Homo sapiens
ctgttgctggcaggt

SEQ ID NO: 2112769 - DNA, 15 bp, Homo sapiens
tgttgctggcaggtg

SEQ ID NO: 2112770 - DNA, 15 bp, Homo sapiens
gttgctggcaggtgc

SEQ ID NO: 2112771 - DNA, 15 bp, Homo sapiens
ttgctggcaggtgct

SEQ ID NO: 2112772 - DNA, 15 bp, Homo sapiens
tgctggcaggtgctt

SEQ ID NO: 2112773 - DNA, 15 bp, Homo sapiens
gctggcaggtgcttc

SEQ ID NO: 2112774 - DNA, 15 bp, Homo sapiens
ctggcaggtgcttct

SEQ ID NO: 2112775 - DNA, 15 bp, Homo sapiens
tggcaggtgcttctc

SEQ ID NO: 2112776 - DNA, 15 bp, Homo sapiens
ggcaggtgcttctca

SEQ ID NO: 2112777 - DNA, 15 bp, Homo sapiens
gcaggtgcttctcag

SEQ ID NO: 2112778 - DNA, 15 bp, Homo sapiens
caggtgcttctcaga
